United States Patent Application Publication US 2004/0241651 A1 - sequence listing, part 7

SEQ ID NO: 176781 - DNA, 13 bp, Artificial Sequence
  Oligonucleotide for detection of SNP TSC0043867
ttttttattaaty

SEQ ID NO: 176782 - DNA, 13 bp, Artificial Sequence
  Oligonucleotide for detection of SNP TSC0043867
rattaataaaaaa

SEQ ID NO: 176783 - DNA, 13 bp, Artificial Sequence
  Oligonucleotide for detection of SNP TSC0043868
gttattatagttg

SEQ ID NO: 176784 - DNA, 13 bp, Artificial Sequence
  Oligonucleotide for detection of SNP TSC0043868
caactataataac

SEQ ID NO: 176785 - DNA, 13 bp, Artificial Sequence
  Oligonucleotide for detection of SNP TSC0043868
gttattttagttg

SEQ ID NO: 176786 - DNA, 13 bp, Artificial Sequence
  Oligonucleotide for detection of SNP TSC0043868
caactaaaataac

SEQ ID NO: 176787 - DNA, 13 bp, Artificial Sequence
  Oligonucleotide for detection of SNP TSC0043868
gttattatagtcg

SEQ ID NO: 176788 - DNA, 13 bp, Artificial Sequence
  Oligonucleotide for detection of SNP TSC0043868
cgactataataac

SEQ ID NO: 176789 - DNA, 13 bp, Artificial Sequence
  Oligonucleotide for detection of SNP TSC0043868
gttattttagtcg

SEQ ID NO: 176790 - DNA, 13 bp, Artificial Sequence
  Oligonucleotide for detection of SNP TSC0043868
cgactaaaataac

SEQ ID NO: 176791 - DNA, 13 bp, Artificial Sequence
  Oligonucleotide for detection of SNP TSC0043868
tgattgtggtggy

SEQ ID NO: 176792 - DNA, 13 bp, Artificial Sequence
  Oligonucleotide for detection of SNP TSC0043868
rccaccacaatca

SEQ ID NO: 176793 - DNA, 13 bp, Artificial Sequence
  Oligonucleotide for detection of SNP TSC0043868
tgattggggtggy

SEQ ID NO: 176794 - DNA, 13 bp, Artificial Sequence
  Oligonucleotide for detection of SNP TSC0043868
rccaccccaatca

SEQ ID NO: 176795 - DNA, 13 bp, Artificial Sequence
  Oligonucleotide for detection of SNP TSC0043868
cgattgtggtggy

SEQ ID NO: 176796 - DNA, 13 bp, Artificial Sequence
  Oligonucleotide for detection of SNP TSC0043868
rccaccacaatcg

SEQ ID NO: 176797 - DNA, 13 bp, Artificial Sequence
  Oligonucleotide for detection of SNP TSC0043868
cgattggggtggy

SEQ ID NO: 176798 - DNA, 13 bp, Artificial Sequence
  Oligonucleotide for detection of SNP TSC0043868
rccaccccaatcg

SEQ ID NO: 176799 - DNA, 13 bp, Artificial Sequence
  Oligonucleotide for detection of SNP TSC0043871
atggaatattatg

SEQ ID NO: 176800 - DNA, 13 bp, Artificial Sequence
  Oligonucleotide for detection of SNP TSC0043871
cataatattccat

SEQ ID NO: 176801 - DNA, 13 bp, Artificial Sequence
  Oligonucleotide for detection of SNP TSC0043871
atggaagattatg

SEQ ID NO: 176802 - DNA, 13 bp, Artificial Sequence
  Oligonucleotide for detection of SNP TSC0043871
cataatcttccat

SEQ ID NO: 176803 - DNA, 13 bp, Artificial Sequence
  Oligonucleotide for detection of SNP TSC0043871
tatggtattttat

SEQ ID NO: 176804 - DNA, 13 bp, Artificial Sequence
  Oligonucleotide for detection of SNP TSC0043871
ataaaataccata

SEQ ID NO: 176805 - DNA, 13 bp, Artificial Sequence
  Oligonucleotide for detection of SNP TSC0043871
tatggttttttat

SEQ ID NO: 176806 - DNA, 13 bp, Artificial Sequence
  Oligonucleotide for detection of SNP TSC0043871
ataaaaaaccata

SEQ ID NO: 176807 - DNA, 13 bp, Artificial Sequence
  Oligonucleotide for detection of SNP TSC0007989
tatttaaagaaty

SEQ ID NO: 176808 - DNA, 13 bp, Artificial Sequence
  Oligonucleotide for detection of SNP TSC0007989
rattctttaaata

SEQ ID NO: 176809 - DNA, 13 bp, Artificial Sequence
  Oligonucleotide for detection of SNP TSC0007989
tatttagagaaty

SEQ ID NO: 176810 - DNA, 13 bp, Artificial Sequence
  Oligonucleotide for detection of SNP TSC0007989
rattctctaaata

SEQ ID NO: 176811 - DNA, 13 bp, Artificial Sequence
  Oligonucleotide for detection of SNP TSC0007990
attggggtataga

SEQ ID NO: 176812 - DNA, 13 bp, Artificial Sequence
  Oligonucleotide for detection of SNP TSC0007990
tctataccccaat

SEQ ID NO: 176813 - DNA, 13 bp, Artificial Sequence
  Oligonucleotide for detection of SNP TSC0007990
attgggttataga

SEQ ID NO: 176814 - DNA, 13 bp, Artificial Sequence
  Oligonucleotide for detection of SNP TSC0007990
tctataacccaat

SEQ ID NO: 176815 - DNA, 13 bp, Artificial Sequence
  Oligonucleotide for detection of SNP TSC0043876
ttaaggtgggagg

SEQ ID NO: 176816 - DNA, 13 bp, Artificial Sequence
  Oligonucleotide for detection of SNP TSC0043876
cctcccaccttaa

SEQ ID NO: 176817 - DNA, 13 bp, Artificial Sequence
  Oligonucleotide for detection of SNP TSC0043876
ttaaggcgggagg

SEQ ID NO: 176818 - DNA, 13 bp, Artificial Sequence
  Oligonucleotide for detection of SNP TSC0043876
cctcccgccttaa

SEQ ID NO: 176819 - DNA, 13 bp, Artificial Sequence
  Oligonucleotide for detection of SNP TSC0043877
ttttttataaagy

SEQ ID NO: 176820 - DNA, 13 bp, Artificial Sequence
  Oligonucleotide for detection of SNP TSC0043877
rctttataaaaaa

SEQ ID NO: 176821 - DNA, 13 bp, Artificial Sequence
  Oligonucleotide for detection of SNP TSC0010086
ataagtggttttt

SEQ ID NO: 176822 - DNA, 13 bp, Artificial Sequence
  Oligonucleotide for detection of SNP TSC0010086
aaaaaccacttat

SEQ ID NO: 176823 - DNA, 13 bp, Artificial Sequence
  Oligonucleotide for detection of SNP TSC0010086
ataagtagttttt

SEQ ID NO: 176824 - DNA, 13 bp, Artificial Sequence
  Oligonucleotide for detection of SNP TSC0010086
aaaaactacttat

SEQ ID NO: 176825 - DNA, 13 bp, Artificial Sequence
  Oligonucleotide for detection of SNP TSC0043879
ttgatatgattty

SEQ ID NO: 176826 - DNA, 13 bp, Artificial Sequence
  Oligonucleotide for detection of SNP TSC0043879
raaatcatatcaa

SEQ ID NO: 176827 - DNA, 13 bp, Artificial Sequence
  Oligonucleotide for detection of SNP TSC0043879
ttgatacgattty

SEQ ID NO: 176828 - DNA, 13 bp, Artificial Sequence
  Oligonucleotide for detection of SNP TSC0043879
raaatcgtatcaa

SEQ ID NO: 176829 - DNA, 13 bp, Artificial Sequence
  Oligonucleotide for detection of SNP TSC0043879
gaaattgtattag

SEQ ID NO: 176830 - DNA, 13 bp, Artificial Sequence
  Oligonucleotide for detection of SNP TSC0043879
ctaatacaatttc

SEQ ID NO: 176831 - DNA, 13 bp, Artificial Sequence
  Oligonucleotide for detection of SNP TSC0043879
gaaattatattag

SEQ ID NO: 176832 - DNA, 13 bp, Artificial Sequence
  Oligonucleotide for detection of SNP TSC0043879
ctaatataatttc

SEQ ID NO: 176833 - DNA, 13 bp, Artificial Sequence
  Oligonucleotide for detection of SNP TSC0043879
gaaatcgtattag

SEQ ID NO: 176834 - DNA, 13 bp, Artificial Sequence
  Oligonucleotide for detection of SNP TSC0043879
ctaatacgatttc

SEQ ID NO: 176835 - DNA, 13 bp, Artificial Sequence
  Oligonucleotide for detection of SNP TSC0043880
aatataattatga

SEQ ID NO: 176836 - DNA, 13 bp, Artificial Sequence
  Oligonucleotide for detection of SNP TSC0043880
tcataattatatt

SEQ ID NO: 176837 - DNA, 13 bp, Artificial Sequence
  Oligonucleotide for detection of SNP TSC0043880
aatatagttatga

SEQ ID NO: 176838 - DNA, 13 bp, Artificial Sequence
  Oligonucleotide for detection of SNP TSC0043880
tcataactatatt

SEQ ID NO: 176839 - DNA, 13 bp, Artificial Sequence
  Oligonucleotide for detection of SNP TSC0043884
ttgtttataaaaa

SEQ ID NO: 176840 - DNA, 13 bp, Artificial Sequence
  Oligonucleotide for detection of SNP TSC0043884
tttttataaacaa

SEQ ID NO: 176841 - DNA, 13 bp, Artificial Sequence
  Oligonucleotide for detection of SNP TSC0043884
ttgttcgtaaaaa

SEQ ID NO: 176842 - DNA, 13 bp, Artificial Sequence
  Oligonucleotide for detection of SNP TSC0043884
tttttacgaacaa

SEQ ID NO: 176843 - DNA, 13 bp, Artificial Sequence
  Oligonucleotide for detection of SNP TSC0043885
ttataggtatttg

SEQ ID NO: 176844 - DNA, 13 bp, Artificial Sequence
  Oligonucleotide for detection of SNP TSC0043885
caaatacctataa

SEQ ID NO: 176845 - DNA, 13 bp, Artificial Sequence
  Oligonucleotide for detection of SNP TSC0043885
ttatagatatttg

SEQ ID NO: 176846 - DNA, 13 bp, Artificial Sequence
  Oligonucleotide for detection of SNP TSC0043885
caaatatctataa

SEQ ID NO: 176847 - DNA, 13 bp, Artificial Sequence
  Oligonucleotide for detection of SNP TSC0043885
ttataggtattcg

SEQ ID NO: 176848 - DNA, 13 bp, Artificial Sequence
  Oligonucleotide for detection of SNP TSC0043885
cgaatacctataa

SEQ ID NO: 176849 - DNA, 13 bp, Artificial Sequence
  Oligonucleotide for detection of SNP TSC0043885
ttatagatattcg

SEQ ID NO: 176850 - DNA, 13 bp, Artificial Sequence
  Oligonucleotide for detection of SNP TSC0043885
cgaatatctataa

SEQ ID NO: 176851 - DNA, 13 bp, Artificial Sequence
  Oligonucleotide for detection of SNP TSC0043887
tgaggtgtaatta

SEQ ID NO: 176852 - DNA, 13 bp, Artificial Sequence
  Oligonucleotide for detection of SNP TSC0043887
taattacacctca

SEQ ID NO: 176853 - DNA, 13 bp, Artificial Sequence
  Oligonucleotide for detection of SNP TSC0043887
tgaggtataatta

SEQ ID NO: 176854 - DNA, 13 bp, Artificial Sequence
  Oligonucleotide for detection of SNP TSC0043887
taattatacctca

SEQ ID NO: 176855 - DNA, 13 bp, Artificial Sequence
  Oligonucleotide for detection of SNP TSC0043889
ttttaaaaaggat

SEQ ID NO: 176856 - DNA, 13 bp, Artificial Sequence
  Oligonucleotide for detection of SNP TSC0043889
atcctttttaaaa

SEQ ID NO: 176857 - DNA, 13 bp, Artificial Sequence
  Oligonucleotide for detection of SNP TSC0043889
ttttaataaggat

SEQ ID NO: 176858 - DNA, 13 bp, Artificial Sequence
  Oligonucleotide for detection of SNP TSC0043889
atccttattaaaa

SEQ ID NO: 176859 - DNA, 13 bp, Artificial Sequence
  Oligonucleotide for detection of SNP TSC0043890
gtgatttaagtty

SEQ ID NO: 176860 - DNA, 13 bp, Artificial Sequence
  Oligonucleotide for detection of SNP TSC0043890
raacttaaatcac

SEQ ID NO: 176861 - DNA, 13 bp, Artificial Sequence
  Oligonucleotide for detection of SNP TSC0043890
gtgattgaagtty

SEQ ID NO: 176862 - DNA, 13 bp, Artificial Sequence
  Oligonucleotide for detection of SNP TSC0043890
raacttcaatcac

SEQ ID NO: 176863 - DNA, 13 bp, Artificial Sequence
  Oligonucleotide for detection of SNP TSC0043890
ggatttaagttay

SEQ ID NO: 176864 - DNA, 13 bp, Artificial Sequence
  Oligonucleotide for detection of SNP TSC0043890
rtaacttaaatcc

SEQ ID NO: 176865 - DNA, 13 bp, Artificial Sequence
  Oligonucleotide for detection of SNP TSC0043891
attaaaattggty

SEQ ID NO: 176866 - DNA, 13 bp, Artificial Sequence
  Oligonucleotide for detection of SNP TSC0043891
raccaattttaat

SEQ ID NO: 176867 - DNA, 13 bp, Artificial Sequence
  Oligonucleotide for detection of SNP TSC0043891
attaaatttggty

SEQ ID NO: 176868 - DNA, 13 bp, Artificial Sequence
  Oligonucleotide for detection of SNP TSC0043891
raccaaatttaat

SEQ ID NO: 176869 - DNA, 13 bp, Artificial Sequence
  Oligonucleotide for detection of SNP TSC0043891
attaaaatcggty

SEQ ID NO: 176870 - DNA, 13 bp, Artificial Sequence
  Oligonucleotide for detection of SNP TSC0043891
raccgattttaat

SEQ ID NO: 176871 - DNA, 13 bp, Artificial Sequence
  Oligonucleotide for detection of SNP TSC0043891
attaaattcggty

SEQ ID NO: 176872 - DNA, 13 bp, Artificial Sequence
  Oligonucleotide for detection of SNP TSC0043891
raccgaatttaat

SEQ ID NO: 176873 - DNA, 13 bp, Artificial Sequence
  Oligonucleotide for detection of SNP TSC0043891
ggttgattttggt

SEQ ID NO: 176874 - DNA, 13 bp, Artificial Sequence
  Oligonucleotide for detection of SNP TSC0043891
accaaaatcaacc

SEQ ID NO: 176875 - DNA, 13 bp, Artificial Sequence
  Oligonucleotide for detection of SNP TSC0043891
ggttgagtttggt

SEQ ID NO: 176876 - DNA, 13 bp, Artificial Sequence
  Oligonucleotide for detection of SNP TSC0043891
accaaactcaacc

SEQ ID NO: 176877 - DNA, 13 bp, Artificial Sequence
  Oligonucleotide for detection of SNP TSC0043891
ggtcgattttggt

SEQ ID NO: 176878 - DNA, 13 bp, Artificial Sequence
  Oligonucleotide for detection of SNP TSC0043891
accaaaatcgacc

SEQ ID NO: 176879 - DNA, 13 bp, Artificial Sequence
  Oligonucleotide for detection of SNP TSC0043891
ggtcgagtttggt

SEQ ID NO: 176880 - DNA, 13 bp, Artificial Sequence
  Oligonucleotide for detection of SNP TSC0043891
accaaactcgacc

SEQ ID NO: 176881 - DNA, 13 bp, Artificial Sequence
  Oligonucleotide for detection of SNP TSC0005471
agatgtattattt

SEQ ID NO: 176882 - DNA, 13 bp, Artificial Sequence
  Oligonucleotide for detection of SNP TSC0005471
aaataatacatct

SEQ ID NO: 176883 - DNA, 13 bp, Artificial Sequence
  Oligonucleotide for detection of SNP TSC0005471
agatgtgttattt

SEQ ID NO: 176884 - DNA, 13 bp, Artificial Sequence
  Oligonucleotide for detection of SNP TSC0005471
aaataacacatct

SEQ ID NO: 176885 - DNA, 13 bp, Artificial Sequence
  Oligonucleotide for detection of SNP TSC0005471
agatgcgttattt

SEQ ID NO: 176886 - DNA, 13 bp, Artificial Sequence
  Oligonucleotide for detection of SNP TSC0005471
aaataacgcatct

SEQ ID NO: 176887 - DNA, 13 bp, Artificial Sequence
  Oligonucleotide for detection of SNP TSC0005471
agataatgtattt

SEQ ID NO: 176888 - DNA, 13 bp, Artificial Sequence
  Oligonucleotide for detection of SNP TSC0005471
aaatacattatct

SEQ ID NO: 176889 - DNA, 13 bp, Artificial Sequence
  Oligonucleotide for detection of SNP TSC0005471
agataacgtattt

SEQ ID NO: 176890 - DNA, 13 bp, Artificial Sequence
  Oligonucleotide for detection of SNP TSC0005471
aaatacgttatct

SEQ ID NO: 176891 - DNA, 13 bp, Artificial Sequence
  Oligonucleotide for detection of SNP TSC0043892
tgtttttgagttt

SEQ ID NO: 176892 - DNA, 13 bp, Artificial Sequence
  Oligonucleotide for detection of SNP TSC0043892
aaactcaaaaaca

SEQ ID NO: 176893 - DNA, 13 bp, Artificial Sequence
  Oligonucleotide for detection of SNP TSC0043892
tgttttcgagttt

SEQ ID NO: 176894 - DNA, 13 bp, Artificial Sequence
  Oligonucleotide for detection of SNP TSC0043892
aaactcgaaaaca

SEQ ID NO: 176895 - DNA, 13 bp, Artificial Sequence
  Oligonucleotide for detection of SNP TSC0043892
aaatttgaaaata

SEQ ID NO: 176896 - DNA, 13 bp, Artificial Sequence
  Oligonucleotide for detection of SNP TSC0043892
tattttcaaattt

SEQ ID NO: 176897 - DNA, 13 bp, Artificial Sequence
  Oligonucleotide for detection of SNP TSC0043892
aaatttaaaaata

SEQ ID NO: 176898 - DNA, 13 bp, Artificial Sequence
  Oligonucleotide for detection of SNP TSC0043892
tatttttaaattt

SEQ ID NO: 176899 - DNA, 13 bp, Artificial Sequence
  Oligonucleotide for detection of SNP TSC0043892
aaattcgaaaata

SEQ ID NO: 176900 - DNA, 13 bp, Artificial Sequence
  Oligonucleotide for detection of SNP TSC0043892
tattttcgaattt

SEQ ID NO: 176901 - DNA, 13 bp, Artificial Sequence
  Oligonucleotide for detection of SNP TSC0043893
tgtataaatttta

SEQ ID NO: 176902 - DNA, 13 bp, Artificial Sequence
  Oligonucleotide for detection of SNP TSC0043893
taaaatttataca

SEQ ID NO: 176903 - DNA, 13 bp, Artificial Sequence
  Oligonucleotide for detection of SNP TSC0043893
tgtatagatttta

SEQ ID NO: 176904 - DNA, 13 bp, Artificial Sequence
  Oligonucleotide for detection of SNP TSC0043893
taaaatctataca

SEQ ID NO: 176905 - DNA, 13 bp, Artificial Sequence
  Oligonucleotide for detection of SNP TSC0043894
tttgaagattgtt

SEQ ID NO: 176906 - DNA, 13 bp, Artificial Sequence
  Oligonucleotide for detection of SNP TSC0043894
aacaatcttcaaa

SEQ ID NO: 176907 - DNA, 13 bp, Artificial Sequence
  Oligonucleotide for detection of SNP TSC0043894
tttgaaaattgtt

SEQ ID NO: 176908 - DNA, 13 bp, Artificial Sequence
  Oligonucleotide for detection of SNP TSC0043894
aacaattttcaaa

SEQ ID NO: 176909 - DNA, 13 bp, Artificial Sequence
  Oligonucleotide for detection of SNP TSC0007291
taggatgtataty

SEQ ID NO: 176910 - DNA, 13 bp, Artificial Sequence
  Oligonucleotide for detection of SNP TSC0007291
ratatacatccta

SEQ ID NO: 176911 - DNA, 13 bp, Artificial Sequence
  Oligonucleotide for detection of SNP TSC0007291
taggatatataty

SEQ ID NO: 176912 - DNA, 13 bp, Artificial Sequence
  Oligonucleotide for detection of SNP TSC0007291
ratatatatccta

SEQ ID NO: 176913 - DNA, 13 bp, Artificial Sequence
  Oligonucleotide for detection of SNP TSC0043896
atatgaggatgag

SEQ ID NO: 176914 - DNA, 13 bp, Artificial Sequence
  Oligonucleotide for detection of SNP TSC0043896
ctcatcctcatat

SEQ ID NO: 176915 - DNA, 13 bp, Artificial Sequence
  Oligonucleotide for detection of SNP TSC0043896
atatgaagatgag

SEQ ID NO: 176916 - DNA, 13 bp, Artificial Sequence
  Oligonucleotide for detection of SNP TSC0043896
ctcatcttcatat

SEQ ID NO: 176917 - DNA, 13 bp, Artificial Sequence
  Oligonucleotide for detection of SNP TSC0043897
taattgatgttay

SEQ ID NO: 176918 - DNA, 13 bp, Artificial Sequence
  Oligonucleotide for detection of SNP TSC0043897
rtaacatcaatta

SEQ ID NO: 176919 - DNA, 13 bp, Artificial Sequence
  Oligonucleotide for detection of SNP TSC0043897
taattggtgttay

SEQ ID NO: 176920 - DNA, 13 bp, Artificial Sequence
  Oligonucleotide for detection of SNP TSC0043897
rtaacaccaatta

SEQ ID NO: 176921 - DNA, 13 bp, Artificial Sequence
  Oligonucleotide for detection of SNP TSC0043898
gaattgttttttt

SEQ ID NO: 176922 - DNA, 13 bp, Artificial Sequence
  Oligonucleotide for detection of SNP TSC0043898
aaaaaaacaattc

SEQ ID NO: 176923 - DNA, 13 bp, Artificial Sequence
  Oligonucleotide for detection of SNP TSC0043898
gaattggtttttt

SEQ ID NO: 176924 - DNA, 13 bp, Artificial Sequence
  Oligonucleotide for detection of SNP TSC0043898
aaaaaaccaattc

SEQ ID NO: 176925 - DNA, 13 bp, Artificial Sequence
  Oligonucleotide for detection of SNP TSC0043898
aaaaaaataatty

SEQ ID NO: 176926 - DNA, 13 bp, Artificial Sequence
  Oligonucleotide for detection of SNP TSC0043898
raattattttttt

SEQ ID NO: 176927 - DNA, 13 bp, Artificial Sequence
  Oligonucleotide for detection of SNP TSC0043898
aaaaaattaatty

SEQ ID NO: 176928 - DNA, 13 bp, Artificial Sequence
  Oligonucleotide for detection of SNP TSC0043898
raattaatttttt

SEQ ID NO: 176929 - DNA, 13 bp, Artificial Sequence
  Oligonucleotide for detection of SNP TSC0043901
gttgggaaagtta

SEQ ID NO: 176930 - DNA, 13 bp, Artificial Sequence
  Oligonucleotide for detection of SNP TSC0043901
taactttcccaac

SEQ ID NO: 176931 - DNA, 13 bp, Artificial Sequence
  Oligonucleotide for detection of SNP TSC0043901
gttgggtaagtta

SEQ ID NO: 176932 - DNA, 13 bp, Artificial Sequence
  Oligonucleotide for detection of SNP TSC0043901
taacttacccaac

SEQ ID NO: 176933 - DNA, 13 bp, Artificial Sequence
  Oligonucleotide for detection of SNP TSC0043901
tgatttttttaay

SEQ ID NO: 176934 - DNA, 13 bp, Artificial Sequence
  Oligonucleotide for detection of SNP TSC0043901
rttaaaaaaatca

SEQ ID NO: 176935 - DNA, 13 bp, Artificial Sequence
  Oligonucleotide for detection of SNP TSC0043901
tgatttatttaay

SEQ ID NO: 176936 - DNA, 13 bp, Artificial Sequence
  Oligonucleotide for detection of SNP TSC0043901
rttaaataaatca

SEQ ID NO: 176937 - DNA, 13 bp, Artificial Sequence
  Oligonucleotide for detection of SNP TSC0043902
tatagaaggggtg

SEQ ID NO: 176938 - DNA, 13 bp, Artificial Sequence
  Oligonucleotide for detection of SNP TSC0043902
caccccttctata

SEQ ID NO: 176939 - DNA, 13 bp, Artificial Sequence
  Oligonucleotide for detection of SNP TSC0043902
tatagagggggtg

SEQ ID NO: 176940 - DNA, 13 bp, Artificial Sequence
  Oligonucleotide for detection of SNP TSC0043902
caccccctctata

SEQ ID NO: 176941 - DNA, 13 bp, Artificial Sequence
  Oligonucleotide for detection of SNP TSC0043903
tattggtgtggty

SEQ ID NO: 176942 - DNA, 13 bp, Artificial Sequence
  Oligonucleotide for detection of SNP TSC0043903
raccacaccaata

SEQ ID NO: 176943 - DNA, 13 bp, Artificial Sequence
  Oligonucleotide for detection of SNP TSC0043903
tattggcgtggty

SEQ ID NO: 176944 - DNA, 13 bp, Artificial Sequence
  Oligonucleotide for detection of SNP TSC0043903
raccacgccaata

SEQ ID NO: 176945 - DNA, 13 bp, Artificial Sequence
  Oligonucleotide for detection of SNP TSC0043903
gattatgttagta

SEQ ID NO: 176946 - DNA, 13 bp, Artificial Sequence
  Oligonucleotide for detection of SNP TSC0043903
tactaacataatc

SEQ ID NO: 176947 - DNA, 13 bp, Artificial Sequence
  Oligonucleotide for detection of SNP TSC0043903
gattatattagta

SEQ ID NO: 176948 - DNA, 13 bp, Artificial Sequence
  Oligonucleotide for detection of SNP TSC0043903
tactaatataatc

SEQ ID NO: 176949 - DNA, 13 bp, Artificial Sequence
  Oligonucleotide for detection of SNP TSC0043903
gattacgttagta

SEQ ID NO: 176950 - DNA, 13 bp, Artificial Sequence
  Oligonucleotide for detection of SNP TSC0043903
tactaacgtaatc

SEQ ID NO: 176951 - DNA, 13 bp, Artificial Sequence
  Oligonucleotide for detection of SNP TSC0043904
ttttttaggtgtt

SEQ ID NO: 176952 - DNA, 13 bp, Artificial Sequence
  Oligonucleotide for detection of SNP TSC0043904
aacacctaaaaaa

SEQ ID NO: 176953 - DNA, 13 bp, Artificial Sequence
  Oligonucleotide for detection of SNP TSC0043904
tttttcgggtgtt

SEQ ID NO: 176954 - DNA, 13 bp, Artificial Sequence
  Oligonucleotide for detection of SNP TSC0043904
aacacccgaaaaa

SEQ ID NO: 176955 - DNA, 13 bp, Artificial Sequence
  Oligonucleotide for detection of SNP TSC0043904
aatatttgagggg

SEQ ID NO: 176956 - DNA, 13 bp, Artificial Sequence
  Oligonucleotide for detection of SNP TSC0043904
cccctcaaatatt

SEQ ID NO: 176957 - DNA, 13 bp, Artificial Sequence
  Oligonucleotide for detection of SNP TSC0043904
aatattcgagggg

SEQ ID NO: 176958 - DNA, 13 bp, Artificial Sequence
  Oligonucleotide for detection of SNP TSC0043904
cccctcgaatatt

SEQ ID NO: 176959 - DNA, 13 bp, Artificial Sequence
  Oligonucleotide for detection of SNP TSC0043905
tattttgtgatay

SEQ ID NO: 176960 - DNA, 13 bp, Artificial Sequence
  Oligonucleotide for detection of SNP TSC0043905
rtatcacaaaata

SEQ ID NO: 176961 - DNA, 13 bp, Artificial Sequence
  Oligonucleotide for detection of SNP TSC0043905
tattttatgatay

SEQ ID NO: 176962 - DNA, 13 bp, Artificial Sequence
  Oligonucleotide for detection of SNP TSC0043905
rtatcataaaata

SEQ ID NO: 176963 - DNA, 13 bp, Artificial Sequence
  Oligonucleotide for detection of SNP TSC0043906
ttaaaatgatttt

SEQ ID NO: 176964 - DNA, 13 bp, Artificial Sequence
  Oligonucleotide for detection of SNP TSC0043906
aaaatcattttaa

SEQ ID NO: 176965 - DNA, 13 bp, Artificial Sequence
  Oligonucleotide for detection of SNP TSC0043906
ttaaaaggatttt

SEQ ID NO: 176966 - DNA, 13 bp, Artificial Sequence
  Oligonucleotide for detection of SNP TSC0043906
aaaatccttttaa

SEQ ID NO: 176967 - DNA, 13 bp, Artificial Sequence
  Oligonucleotide for detection of SNP TSC0043906
aaagttattttaa

SEQ ID NO: 176968 - DNA, 13 bp, Artificial Sequence
  Oligonucleotide for detection of SNP TSC0043906
ttaaaataacttt

SEQ ID NO: 176969 - DNA, 13 bp, Artificial Sequence
  Oligonucleotide for detection of SNP TSC0043906
aaagtttttttaa

SEQ ID NO: 176970 - DNA, 13 bp, Artificial Sequence
  Oligonucleotide for detection of SNP TSC0043906
ttaaaaaaacttt

SEQ ID NO: 176971 - DNA, 13 bp, Artificial Sequence
  Oligonucleotide for detection of SNP TSC0043907
ttatttgtttgga

SEQ ID NO: 176972 - DNA, 13 bp, Artificial Sequence
  Oligonucleotide for detection of SNP TSC0043907
tccaaacaaataa

SEQ ID NO: 176973 - DNA, 13 bp, Artificial Sequence
  Oligonucleotide for detection of SNP TSC0043908
tagagaattttty

SEQ ID NO: 176974 - DNA, 13 bp, Artificial Sequence
  Oligonucleotide for detection of SNP TSC0043908
raaaaattctcta

SEQ ID NO: 176975 - DNA, 13 bp, Artificial Sequence
  Oligonucleotide for detection of SNP TSC0043908
tagagagttttty

SEQ ID NO: 176976 - DNA, 13 bp, Artificial Sequence
  Oligonucleotide for detection of SNP TSC0043908
raaaaactctcta

SEQ ID NO: 176977 - DNA, 13 bp, Artificial Sequence
  Oligonucleotide for detection of SNP TSC0043909
ttgataggtgaaa

SEQ ID NO: 176978 - DNA, 13 bp, Artificial Sequence
  Oligonucleotide for detection of SNP TSC0043909
tttcacctatcaa

SEQ ID NO: 176979 - DNA, 13 bp, Artificial Sequence
  Oligonucleotide for detection of SNP TSC0043909
ttgataagtgaaa

SEQ ID NO: 176980 - DNA, 13 bp, Artificial Sequence
  Oligonucleotide for detection of SNP TSC0043909
tttcacttatcaa

SEQ ID NO: 176981 - DNA, 13 bp, Artificial Sequence
  Oligonucleotide for detection of SNP TSC0043910
tatgaaatagtty

SEQ ID NO: 176982 - DNA, 13 bp, Artificial Sequence
  Oligonucleotide for detection of SNP TSC0043910
raactatttcata

SEQ ID NO: 176983 - DNA, 13 bp, Artificial Sequence
  Oligonucleotide for detection of SNP TSC0043910
tatgaagtagtty

SEQ ID NO: 176984 - DNA, 13 bp, Artificial Sequence
  Oligonucleotide for detection of SNP TSC0043910
raactacttcata

SEQ ID NO: 176985 - DNA, 13 bp, Artificial Sequence
  Oligonucleotide for detection of SNP TSC0043911
ataggttggatga

SEQ ID NO: 176986 - DNA, 13 bp, Artificial Sequence
  Oligonucleotide for detection of SNP TSC0043911
tcatccaacctat

SEQ ID NO: 176987 - DNA, 13 bp, Artificial Sequence
  Oligonucleotide for detection of SNP TSC0043911
ataggtcggatga

SEQ ID NO: 176988 - DNA, 13 bp, Artificial Sequence
  Oligonucleotide for detection of SNP TSC0043911
tcatccgacctat

SEQ ID NO: 176989 - DNA, 13 bp, Artificial Sequence
  Oligonucleotide for detection of SNP TSC0043912
ttgaggattttta

SEQ ID NO: 176990 - DNA, 13 bp, Artificial Sequence
  Oligonucleotide for detection of SNP TSC0043912
taaaaatcctcaa

SEQ ID NO: 176991 - DNA, 13 bp, Artificial Sequence
  Oligonucleotide for detection of SNP TSC0043912
ttgagggttttta

SEQ ID NO: 176992 - DNA, 13 bp, Artificial Sequence
  Oligonucleotide for detection of SNP TSC0043912
taaaaaccctcaa

SEQ ID NO: 176993 - DNA, 13 bp, Artificial Sequence
  Oligonucleotide for detection of SNP TSC0043912
tcgaggattttta

SEQ ID NO: 176994 - DNA, 13 bp, Artificial Sequence
  Oligonucleotide for detection of SNP TSC0043912
taaaaatcctcga

SEQ ID NO: 176995 - DNA, 13 bp, Artificial Sequence
  Oligonucleotide for detection of SNP TSC0043912
tcgagggttttta

SEQ ID NO: 176996 - DNA, 13 bp, Artificial Sequence
  Oligonucleotide for detection of SNP TSC0043912
taaaaaccctcga

SEQ ID NO: 176997 - DNA, 13 bp, Artificial Sequence
  Oligonucleotide for detection of SNP TSC0043916
aaggtaatgttay

SEQ ID NO: 176998 - DNA, 13 bp, Artificial Sequence
  Oligonucleotide for detection of SNP TSC0043916
rtaacattacctt

SEQ ID NO: 176999 - DNA, 13 bp, Artificial Sequence
  Oligonucleotide for detection of SNP TSC0043916
aaggtattgttay

SEQ ID NO: 177000 - DNA, 13 bp, Artificial Sequence
  Oligonucleotide for detection of SNP TSC0043916
rtaacaatacctt

SEQ ID NO: 177001 - DNA, 13 bp, Artificial Sequence
  Oligonucleotide for detection of SNP TSC0043916
gtgatattgtttt

SEQ ID NO: 177002 - DNA, 13 bp, Artificial Sequence
  Oligonucleotide for detection of SNP TSC0043916
aaaacaatatcac

SEQ ID NO: 177003 - DNA, 13 bp, Artificial Sequence
  Oligonucleotide for detection of SNP TSC0043916
gtgatagtgtttt

SEQ ID NO: 177004 - DNA, 13 bp, Artificial Sequence
  Oligonucleotide for detection of SNP TSC0043916
aaaacactatcac

SEQ ID NO: 177005 - DNA, 13 bp, Artificial Sequence
  Oligonucleotide for detection of SNP TSC0043917
aatgttgaaaaaa

SEQ ID NO: 177006 - DNA, 13 bp, Artificial Sequence
  Oligonucleotide for detection of SNP TSC0043917
ttttttcaacatt

SEQ ID NO: 177007 - DNA, 13 bp, Artificial Sequence
  Oligonucleotide for detection of SNP TSC0043917
aatgttaaaaaaa

SEQ ID NO: 177008 - DNA, 13 bp, Artificial Sequence
  Oligonucleotide for detection of SNP TSC0043917
tttttttaacatt

SEQ ID NO: 177009 - DNA, 13 bp, Artificial Sequence
  Oligonucleotide for detection of SNP TSC0043918
taagtttttgtgy

SEQ ID NO: 177010 - DNA, 13 bp, Artificial Sequence
  Oligonucleotide for detection of SNP TSC0043918
rcacaaaaactta

SEQ ID NO: 177011 - DNA, 13 bp, Artificial Sequence
  Oligonucleotide for detection of SNP TSC0043918
taagttgttgtgy

SEQ ID NO: 177012 - DNA, 13 bp, Artificial Sequence
  Oligonucleotide for detection of SNP TSC0043918
rcacaacaactta

SEQ ID NO: 177013 - DNA, 13 bp, Artificial Sequence
  Oligonucleotide for detection of SNP TSC0043918
taagtcgttgtgy

SEQ ID NO: 177014 - DNA, 13 bp, Artificial Sequence
  Oligonucleotide for detection of SNP TSC0043918
rcacaacgactta

SEQ ID NO: 177015 - DNA, 13 bp, Artificial Sequence
  Oligonucleotide for detection of SNP TSC0043918
gtatagaggtttg

SEQ ID NO: 177016 - DNA, 13 bp, Artificial Sequence
  Oligonucleotide for detection of SNP TSC0043918
caaacctctatac

SEQ ID NO: 177017 - DNA, 13 bp, Artificial Sequence
  Oligonucleotide for detection of SNP TSC0043918
gtatagtggtttg

SEQ ID NO: 177018 - DNA, 13 bp, Artificial Sequence
  Oligonucleotide for detection of SNP TSC0043918
caaaccactatac

SEQ ID NO: 177019 - DNA, 13 bp, Artificial Sequence
  Oligonucleotide for detection of SNP TSC0043918
gtatagcggtttg

SEQ ID NO: 177020 - DNA, 13 bp, Artificial Sequence
  Oligonucleotide for detection of SNP TSC0043918
caaaccgctatac

SEQ ID NO: 177021 - DNA, 13 bp, Artificial Sequence
  Oligonucleotide for detection of SNP TSC0043919
aaattttgttatt

SEQ ID NO: 177022 - DNA, 13 bp, Artificial Sequence
  Oligonucleotide for detection of SNP TSC0043919
aataacaaaattt

SEQ ID NO: 177023 - DNA, 13 bp, Artificial Sequence
  Oligonucleotide for detection of SNP TSC0043919
aaatttggttatt

SEQ ID NO: 177024 - DNA, 13 bp, Artificial Sequence
  Oligonucleotide for detection of SNP TSC0043919
aataaccaaattt

SEQ ID NO: 177025 - DNA, 13 bp, Artificial Sequence
  Oligonucleotide for detection of SNP TSC0043919
aaatttcgttatt

SEQ ID NO: 177026 - DNA, 13 bp, Artificial Sequence
  Oligonucleotide for detection of SNP TSC0043919
aataacgaaattt

SEQ ID NO: 177027 - DNA, 13 bp, Artificial Sequence
  Oligonucleotide for detection of SNP TSC0043919
agtggtgaggttt

SEQ ID NO: 177028 - DNA, 13 bp, Artificial Sequence
  Oligonucleotide for detection of SNP TSC0043919
aaacctcaccact

SEQ ID NO: 177029 - DNA, 13 bp, Artificial Sequence
  Oligonucleotide for detection of SNP TSC0043919
agtggttaggttt

SEQ ID NO: 177030 - DNA, 13 bp, Artificial Sequence
  Oligonucleotide for detection of SNP TSC0043919
aaacctaaccact

SEQ ID NO: 177031 - DNA, 13 bp, Artificial Sequence
  Oligonucleotide for detection of SNP TSC0043919
agtggcgaggttt

SEQ ID NO: 177032 - DNA, 13 bp, Artificial Sequence
  Oligonucleotide for detection of SNP TSC0043919
aaacctcgccact

SEQ ID NO: 177033 - DNA, 13 bp, Artificial Sequence
  Oligonucleotide for detection of SNP TSC0043920
ggatgatatatay

SEQ ID NO: 177034 - DNA, 13 bp, Artificial Sequence
  Oligonucleotide for detection of SNP TSC0043920
rtatatatcatcc

SEQ ID NO: 177035 - DNA, 13 bp, Artificial Sequence
  Oligonucleotide for detection of SNP TSC0043920
ggatgagatatay

SEQ ID NO: 177036 - DNA, 13 bp, Artificial Sequence
  Oligonucleotide for detection of SNP TSC0043920
rtatatctcatcc

SEQ ID NO: 177037 - DNA, 13 bp, Artificial Sequence
  Oligonucleotide for detection of SNP TSC0043920
ggacgatatatay

SEQ ID NO: 177038 - DNA, 13 bp, Artificial Sequence
  Oligonucleotide for detection of SNP TSC0043920
rtatatatcgtcc

SEQ ID NO: 177039 - DNA, 13 bp, Artificial Sequence
  Oligonucleotide for detection of SNP TSC0043920
ggacgagatatay

SEQ ID NO: 177040 - DNA, 13 bp, Artificial Sequence
  Oligonucleotide for detection of SNP TSC0043920
rtatatctcgtcc

SEQ ID NO: 177041 - DNA, 13 bp, Artificial Sequence
  Oligonucleotide for detection of SNP TSC0043920
gtatgtattgtty

SEQ ID NO: 177042 - DNA, 13 bp, Artificial Sequence
  Oligonucleotide for detection of SNP TSC0043920
raacaatacatac

SEQ ID NO: 177043 - DNA, 13 bp, Artificial Sequence
  Oligonucleotide for detection of SNP TSC0043920
gtatgttttgtty

SEQ ID NO: 177044 - DNA, 13 bp, Artificial Sequence
  Oligonucleotide for detection of SNP TSC0043920
raacaaaacatac

SEQ ID NO: 177045 - DNA, 13 bp, Artificial Sequence
  Oligonucleotide for detection of SNP TSC0043920
gtatgtatcgtty

SEQ ID NO: 177046 - DNA, 13 bp, Artificial Sequence
  Oligonucleotide for detection of SNP TSC0043920
raacgatacatac

SEQ ID NO: 177047 - DNA, 13 bp, Artificial Sequence
  Oligonucleotide for detection of SNP TSC0043920
gtatgtttcgtty

SEQ ID NO: 177048 - DNA, 13 bp, Artificial Sequence
  Oligonucleotide for detection of SNP TSC0043920
raacgaaacatac

SEQ ID NO: 177049 - DNA, 13 bp, Artificial Sequence
  Oligonucleotide for detection of SNP TSC0043922
taggataatttaa

SEQ ID NO: 177050 - DNA, 13 bp, Artificial Sequence
  Oligonucleotide for detection of SNP TSC0043922
ttaaattatccta

SEQ ID NO: 177051 - DNA, 13 bp, Artificial Sequence
  Oligonucleotide for detection of SNP TSC0043922
taggatgatttaa

SEQ ID NO: 177052 - DNA, 13 bp, Artificial Sequence
  Oligonucleotide for detection of SNP TSC0043922
ttaaatcatccta

SEQ ID NO: 177053 - DNA, 13 bp, Artificial Sequence
  Oligonucleotide for detection of SNP TSC0000241
ggattgtttttty

SEQ ID NO: 177054 - DNA, 13 bp, Artificial Sequence
  Oligonucleotide for detection of SNP TSC0000241
raaaaaacaatcc

SEQ ID NO: 177055 - DNA, 13 bp, Artificial Sequence
  Oligonucleotide for detection of SNP TSC0000241
ggattggttttty

SEQ ID NO: 177056 - DNA, 13 bp, Artificial Sequence
  Oligonucleotide for detection of SNP TSC0000241
raaaaaccaatcc

SEQ ID NO: 177057 - DNA, 13 bp, Artificial Sequence
  Oligonucleotide for detection of SNP TSC0000241
ggggaagtagtty

SEQ ID NO: 177058 - DNA, 13 bp, Artificial Sequence
  Oligonucleotide for detection of SNP TSC0000241
raactacttcccc

SEQ ID NO: 177059 - DNA, 13 bp, Artificial Sequence
  Oligonucleotide for detection of SNP TSC0000241
ggggaattagtty

SEQ ID NO: 177060 - DNA, 13 bp, Artificial Sequence
  Oligonucleotide for detection of SNP TSC0000241
raactaattcccc

SEQ ID NO: 177061 - DNA, 13 bp, Artificial Sequence
  Oligonucleotide for detection of SNP TSC0000242
gaattttggtagy

SEQ ID NO: 177062 - DNA, 13 bp, Artificial Sequence
  Oligonucleotide for detection of SNP TSC0000242
rctaccaaaattc

SEQ ID NO: 177063 - DNA, 13 bp, Artificial Sequence
  Oligonucleotide for detection of SNP TSC0000242
gaatttcggtagy

SEQ ID NO: 177064 - DNA, 13 bp, Artificial Sequence
  Oligonucleotide for detection of SNP TSC0000242
rctaccgaaattc

SEQ ID NO: 177065 - DNA, 13 bp, Artificial Sequence
  Oligonucleotide for detection of SNP TSC0000243
tttgttagtatgg

SEQ ID NO: 177066 - DNA, 13 bp, Artificial Sequence
  Oligonucleotide for detection of SNP TSC0000243
ccatactaacaaa

SEQ ID NO: 177067 - DNA, 13 bp, Artificial Sequence
  Oligonucleotide for detection of SNP TSC0000243
tttgttggtatgg

SEQ ID NO: 177068 - DNA, 13 bp, Artificial Sequence
  Oligonucleotide for detection of SNP TSC0000243
ccataccaacaaa

SEQ ID NO: 177069 - DNA, 13 bp, Artificial Sequence
  Oligonucleotide for detection of SNP TSC0000243
tttgtcggtatgg

SEQ ID NO: 177070 - DNA, 13 bp, Artificial Sequence
  Oligonucleotide for detection of SNP TSC0000243
ccataccgacaaa

SEQ ID NO: 177071 - DNA, 13 bp, Artificial Sequence
  Oligonucleotide for detection of SNP TSC0000243
ttatgttgatagg

SEQ ID NO: 177072 - DNA, 13 bp, Artificial Sequence
  Oligonucleotide for detection of SNP TSC0000243
cctatcaacataa

SEQ ID NO: 177073 - DNA, 13 bp, Artificial Sequence
  Oligonucleotide for detection of SNP TSC0000243
ttatgtcgatagg

SEQ ID NO: 177074 - DNA, 13 bp, Artificial Sequence
  Oligonucleotide for detection of SNP TSC0000243
cctatcgacataa

SEQ ID NO: 177075 - DNA, 13 bp, Artificial Sequence
  Oligonucleotide for detection of SNP TSC0043923
ttaagtgtggtta

SEQ ID NO: 177076 - DNA, 13 bp, Artificial Sequence
  Oligonucleotide for detection of SNP TSC0043923
taaccacacttaa

SEQ ID NO: 177077 - DNA, 13 bp, Artificial Sequence
  Oligonucleotide for detection of SNP TSC0043923
ttaagtatggtta

SEQ ID NO: 177078 - DNA, 13 bp, Artificial Sequence
  Oligonucleotide for detection of SNP TSC0043923
taaccatacttaa

SEQ ID NO: 177079 - DNA, 13 bp, Artificial Sequence
  Oligonucleotide for detection of SNP TSC0043924
ttatataaagtta

SEQ ID NO: 177080 - DNA, 13 bp, Artificial Sequence
  Oligonucleotide for detection of SNP TSC0043924
taactttatataa

SEQ ID NO: 177081 - DNA, 13 bp, Artificial Sequence
  Oligonucleotide for detection of SNP TSC0043924
ttatatgaagtta

SEQ ID NO: 177082 - DNA, 13 bp, Artificial Sequence
  Oligonucleotide for detection of SNP TSC0043924
taacttcatataa

SEQ ID NO: 177083 - DNA, 13 bp, Artificial Sequence
  Oligonucleotide for detection of SNP TSC0043924
ttatacgaagtta

SEQ ID NO: 177084 - DNA, 13 bp, Artificial Sequence
  Oligonucleotide for detection of SNP TSC0043924
taacttcgtataa

SEQ ID NO: 177085 - DNA, 13 bp, Artificial Sequence
  Oligonucleotide for detection of SNP TSC0043924
tgattttgtatga

SEQ ID NO: 177086 - DNA, 13 bp, Artificial Sequence
  Oligonucleotide for detection of SNP TSC0043924
tcatacaaaatca

SEQ ID NO: 177087 - DNA, 13 bp, Artificial Sequence
  Oligonucleotide for detection of SNP TSC0043924
tgatttcgtatga

SEQ ID NO: 177088 - DNA, 13 bp, Artificial Sequence
  Oligonucleotide for detection of SNP TSC0043924
tcatacgaaatca

SEQ ID NO: 177089 - DNA, 13 bp, Artificial Sequence
  Oligonucleotide for detection of SNP TSC0043925
gattaagagaaty

SEQ ID NO: 177090 - DNA, 13 bp, Artificial Sequence
  Oligonucleotide for detection of SNP TSC0043925
rattctcttaatc

SEQ ID NO: 177091 - DNA, 13 bp, Artificial Sequence
  Oligonucleotide for detection of SNP TSC0043925
gattaaaagaaty

SEQ ID NO: 177092 - DNA, 13 bp, Artificial Sequence
  Oligonucleotide for detection of SNP TSC0043925
rattcttttaatc

SEQ ID NO: 177093 - DNA, 13 bp, Artificial Sequence
  Oligonucleotide for detection of SNP TSC0010035
gagaagggtggag

SEQ ID NO: 177094 - DNA, 13 bp, Artificial Sequence
  Oligonucleotide for detection of SNP TSC0010035
ctccacccttctc

SEQ ID NO: 177095 - DNA, 13 bp, Artificial Sequence
  Oligonucleotide for detection of SNP TSC0010035
gagaagagtggag

SEQ ID NO: 177096 - DNA, 13 bp, Artificial Sequence
  Oligonucleotide for detection of SNP TSC0010035
ctccactcttctc

SEQ ID NO: 177097 - DNA, 13 bp, Artificial Sequence
  Oligonucleotide for detection of SNP TSC0043926
aagagtgtattty

SEQ ID NO: 177098 - DNA, 13 bp, Artificial Sequence
  Oligonucleotide for detection of SNP TSC0043926
raaatacactctt

SEQ ID NO: 177099 - DNA, 13 bp, Artificial Sequence
  Oligonucleotide for detection of SNP TSC0043926
aagagtatattty

SEQ ID NO: 177100 - DNA, 13 bp, Artificial Sequence
  Oligonucleotide for detection of SNP TSC0043926
raaatatactctt

SEQ ID NO: 177101 - DNA, 13 bp, Artificial Sequence
  Oligonucleotide for detection of SNP TSC0001259
taggatggaagga

SEQ ID NO: 177102 - DNA, 13 bp, Artificial Sequence
  Oligonucleotide for detection of SNP TSC0001259
tccttccatccta

SEQ ID NO: 177103 - DNA, 13 bp, Artificial Sequence
  Oligonucleotide for detection of SNP TSC0001259
taggattgaagga

SEQ ID NO: 177104 - DNA, 13 bp, Artificial Sequence
  Oligonucleotide for detection of SNP TSC0001259
tccttcaatccta

SEQ ID NO: 177105 - DNA, 13 bp, Artificial Sequence
  Oligonucleotide for detection of SNP TSC0001259
taggatcgaagga

SEQ ID NO: 177106 - DNA, 13 bp, Artificial Sequence
  Oligonucleotide for detection of SNP TSC0001259
tccttcgatccta

SEQ ID NO: 177107 - DNA, 13 bp, Artificial Sequence
  Oligonucleotide for detection of SNP TSC0043927
ttaaaagtaaaaa

SEQ ID NO: 177108 - DNA, 13 bp, Artificial Sequence
  Oligonucleotide for detection of SNP TSC0043927
tttttacttttaa

SEQ ID NO: 177109 - DNA, 13 bp, Artificial Sequence
  Oligonucleotide for detection of SNP TSC0000739
gggagagaatgaa

SEQ ID NO: 177110 - DNA, 13 bp, Artificial Sequence
  Oligonucleotide for detection of SNP TSC0000739
ttcattctctccc

SEQ ID NO: 177111 - DNA, 13 bp, Artificial Sequence
  Oligonucleotide for detection of SNP TSC0000739
gggagataatgaa

SEQ ID NO: 177112 - DNA, 13 bp, Artificial Sequence
  Oligonucleotide for detection of SNP TSC0000739
ttcattatctccc

SEQ ID NO: 177113 - DNA, 13 bp, Artificial Sequence
  Oligonucleotide for detection of SNP TSC0043928
gtaaaaatggata

SEQ ID NO: 177114 - DNA, 13 bp, Artificial Sequence
  Oligonucleotide for detection of SNP TSC0043928
tatccatttttac

SEQ ID NO: 177115 - DNA, 13 bp, Artificial Sequence
  Oligonucleotide for detection of SNP TSC0043928
gtaaaattggata

SEQ ID NO: 177116 - DNA, 13 bp, Artificial Sequence
  Oligonucleotide for detection of SNP TSC0043928
tatccaattttac

SEQ ID NO: 177117 - DNA, 13 bp, Artificial Sequence
  Oligonucleotide for detection of SNP TSC0043928
tatttaattttay

SEQ ID NO: 177118 - DNA, 13 bp, Artificial Sequence
  Oligonucleotide for detection of SNP TSC0043928
rtaaaattaaata

SEQ ID NO: 177119 - DNA, 13 bp, Artificial Sequence
  Oligonucleotide for detection of SNP TSC0043931
tgtttaagtttaa

SEQ ID NO: 177120 - DNA, 13 bp, Artificial Sequence
  Oligonucleotide for detection of SNP TSC0043931
ttaaacttaaaca

SEQ ID NO: 177121 - DNA, 13 bp, Artificial Sequence
  Oligonucleotide for detection of SNP TSC0043931
tgtttaggtttaa

SEQ ID NO: 177122 - DNA, 13 bp, Artificial Sequence
  Oligonucleotide for detection of SNP TSC0043931
ttaaacctaaaca

SEQ ID NO: 177123 - DNA, 13 bp, Artificial Sequence
  Oligonucleotide for detection of SNP TSC0007935
taaaatggagata

SEQ ID NO: 177124 - DNA, 13 bp, Artificial Sequence
  Oligonucleotide for detection of SNP TSC0007935
tatctccatttta

SEQ ID NO: 177125 - DNA, 13 bp, Artificial Sequence
  Oligonucleotide for detection of SNP TSC0007935
taaaatagagata

SEQ ID NO: 177126 - DNA, 13 bp, Artificial Sequence
  Oligonucleotide for detection of SNP TSC0007935
tatctctatttta

SEQ ID NO: 177127 - DNA, 13 bp, Artificial Sequence
  Oligonucleotide for detection of SNP TSC0043932
gttttaatattaa

SEQ ID NO: 177128 - DNA, 13 bp, Artificial Sequence
  Oligonucleotide for detection of SNP TSC0043932
ttaatattaaaac

SEQ ID NO: 177129 - DNA, 13 bp, Artificial Sequence
  Oligonucleotide for detection of SNP TSC0043932
gttttattattaa

SEQ ID NO: 177130 - DNA, 13 bp, Artificial Sequence
  Oligonucleotide for detection of SNP TSC0043932
ttaataataaaac

SEQ ID NO: 177131 - DNA, 13 bp, Artificial Sequence
  Oligonucleotide for detection of SNP TSC0043932
ttggtattaaaay

SEQ ID NO: 177132 - DNA, 13 bp, Artificial Sequence
  Oligonucleotide for detection of SNP TSC0043932
rttttaataccaa

SEQ ID NO: 177133 - DNA, 13 bp, Artificial Sequence
  Oligonucleotide for detection of SNP TSC0043932
ttggtagtaaaay

SEQ ID NO: 177134 - DNA, 13 bp, Artificial Sequence
  Oligonucleotide for detection of SNP TSC0043932
rttttactaccaa

SEQ ID NO: 177135 - DNA, 13 bp, Artificial Sequence
  Oligonucleotide for detection of SNP TSC0043933
tattatggaaaaa

SEQ ID NO: 177136 - DNA, 13 bp, Artificial Sequence
  Oligonucleotide for detection of SNP TSC0043933
tttttccataata

SEQ ID NO: 177137 - DNA, 13 bp, Artificial Sequence
  Oligonucleotide for detection of SNP TSC0043933
tattatagaaaaa

SEQ ID NO: 177138 - DNA, 13 bp, Artificial Sequence
  Oligonucleotide for detection of SNP TSC0043933
tttttctataata

SEQ ID NO: 177139 - DNA, 13 bp, Artificial Sequence
  Oligonucleotide for detection of SNP TSC0000734
ttttattatggta

SEQ ID NO: 177140 - DNA, 13 bp, Artificial Sequence
  Oligonucleotide for detection of SNP TSC0000734
taccataataaaa

SEQ ID NO: 177141 - DNA, 13 bp, Artificial Sequence
  Oligonucleotide for detection of SNP TSC0000734
ttttatgatggta

SEQ ID NO: 177142 - DNA, 13 bp, Artificial Sequence
  Oligonucleotide for detection of SNP TSC0000734
taccatcataaaa

SEQ ID NO: 177143 - DNA, 13 bp, Artificial Sequence
  Oligonucleotide for detection of SNP TSC0000734
tattatgatgaag

SEQ ID NO: 177144 - DNA, 13 bp, Artificial Sequence
  Oligonucleotide for detection of SNP TSC0000734
cttcatcataata

SEQ ID NO: 177145 - DNA, 13 bp, Artificial Sequence
  Oligonucleotide for detection of SNP TSC0000734
tattattatgaag

SEQ ID NO: 177146 - DNA, 13 bp, Artificial Sequence
  Oligonucleotide for detection of SNP TSC0000734
cttcataataata

SEQ ID NO: 177147 - DNA, 13 bp, Artificial Sequence
  Oligonucleotide for detection of SNP TSC0000735
aatagataagaga

SEQ ID NO: 177148 - DNA, 13 bp, Artificial Sequence
  Oligonucleotide for detection of SNP TSC0000735
tctcttatctatt

SEQ ID NO: 177149 - DNA, 13 bp, Artificial Sequence
  Oligonucleotide for detection of SNP TSC0000735
aatagagaagaga

SEQ ID NO: 177150 - DNA, 13 bp, Artificial Sequence
  Oligonucleotide for detection of SNP TSC0000735
tctcttctctatt

SEQ ID NO: 177151 - DNA, 13 bp, Artificial Sequence
  Oligonucleotide for detection of SNP TSC0006870
aaggttagtatay

SEQ ID NO: 177152 - DNA, 13 bp, Artificial Sequence
  Oligonucleotide for detection of SNP TSC0006870
rtatactaacctt

SEQ ID NO: 177153 - DNA, 13 bp, Artificial Sequence
  Oligonucleotide for detection of SNP TSC0006870
aaggtttgtatay

SEQ ID NO: 177154 - DNA, 13 bp, Artificial Sequence
  Oligonucleotide for detection of SNP TSC0006870
rtatacaaacctt

SEQ ID NO: 177155 - DNA, 13 bp, Artificial Sequence
  Oligonucleotide for detection of SNP TSC0006870
gtatattaatttt

SEQ ID NO: 177156 - DNA, 13 bp, Artificial Sequence
  Oligonucleotide for detection of SNP TSC0006870
aaaattaatatac

SEQ ID NO: 177157 - DNA, 13 bp, Artificial Sequence
  Oligonucleotide for detection of SNP TSC0006870
gtatataaatttt

SEQ ID NO: 177158 - DNA, 13 bp, Artificial Sequence
  Oligonucleotide for detection of SNP TSC0006870
aaaatttatatac

SEQ ID NO: 177159 - DNA, 13 bp, Artificial Sequence
  Oligonucleotide for detection of SNP TSC0009928
tttaatatatggy

SEQ ID NO: 177160 - DNA, 13 bp, Artificial Sequence
  Oligonucleotide for detection of SNP TSC0009928
rccatatattaaa

SEQ ID NO: 177161 - DNA, 13 bp, Artificial Sequence
  Oligonucleotide for detection of SNP TSC0009928
tttaatgtatggy

SEQ ID NO: 177162 - DNA, 13 bp, Artificial Sequence
  Oligonucleotide for detection of SNP TSC0009928
rccatacattaaa

SEQ ID NO: 177163 - DNA, 13 bp, Artificial Sequence
  Oligonucleotide for detection of SNP TSC0043934
gattgatggaaaa

SEQ ID NO: 177164 - DNA, 13 bp, Artificial Sequence
  Oligonucleotide for detection of SNP TSC0043934
ttttccatcaatc

SEQ ID NO: 177165 - DNA, 13 bp, Artificial Sequence
  Oligonucleotide for detection of SNP TSC0043934
gattgacggaaaa

SEQ ID NO: 177166 - DNA, 13 bp, Artificial Sequence
  Oligonucleotide for detection of SNP TSC0043934
ttttccgtcaatc

SEQ ID NO: 177167 - DNA, 13 bp, Artificial Sequence
  Oligonucleotide for detection of SNP TSC0043934
ttttttgttagty

SEQ ID NO: 177168 - DNA, 13 bp, Artificial Sequence
  Oligonucleotide for detection of SNP TSC0043934
ractaacaaaaaa

SEQ ID NO: 177169 - DNA, 13 bp, Artificial Sequence
  Oligonucleotide for detection of SNP TSC0043934
tttttcgttagty

SEQ ID NO: 177170 - DNA, 13 bp, Artificial Sequence
  Oligonucleotide for detection of SNP TSC0043934
ractaacgaaaaa

SEQ ID NO: 177171 - DNA, 13 bp, Artificial Sequence
  Oligonucleotide for detection of SNP TSC0043935
gatgtaggtttta

SEQ ID NO: 177172 - DNA, 13 bp, Artificial Sequence
  Oligonucleotide for detection of SNP TSC0043935
taaaacctacatc

SEQ ID NO: 177173 - DNA, 13 bp, Artificial Sequence
  Oligonucleotide for detection of SNP TSC0043935
gatgtaagtttta

SEQ ID NO: 177174 - DNA, 13 bp, Artificial Sequence
  Oligonucleotide for detection of SNP TSC0043935
taaaacttacatc

SEQ ID NO: 177175 - DNA, 13 bp, Artificial Sequence
  Oligonucleotide for detection of SNP TSC0043936
tattttaataaag

SEQ ID NO: 177176 - DNA, 13 bp, Artificial Sequence
  Oligonucleotide for detection of SNP TSC0043936
ctttattaaaata

SEQ ID NO: 177177 - DNA, 13 bp, Artificial Sequence
  Oligonucleotide for detection of SNP TSC0043936
tatttttataaag

SEQ ID NO: 177178 - DNA, 13 bp, Artificial Sequence
  Oligonucleotide for detection of SNP TSC0043936
ctttataaaaata

SEQ ID NO: 177179 - DNA, 13 bp, Artificial Sequence
  Oligonucleotide for detection of SNP TSC0043936
ttttattgagatg

SEQ ID NO: 177180 - DNA, 13 bp, Artificial Sequence
  Oligonucleotide for detection of SNP TSC0043936
catctcaataaaa

SEQ ID NO: 177181 - DNA, 13 bp, Artificial Sequence
  Oligonucleotide for detection of SNP TSC0043936
ttttatggagatg

SEQ ID NO: 177182 - DNA, 13 bp, Artificial Sequence
  Oligonucleotide for detection of SNP TSC0043936
catctccataaaa

SEQ ID NO: 177183 - DNA, 13 bp, Artificial Sequence
  Oligonucleotide for detection of SNP TSC0000978
ttttttgtgatat

SEQ ID NO: 177184 - DNA, 13 bp, Artificial Sequence
  Oligonucleotide for detection of SNP TSC0000978
atatcacaaaaaa

SEQ ID NO: 177185 - DNA, 13 bp, Artificial Sequence
  Oligonucleotide for detection of SNP TSC0000978
ttttttatgatat

SEQ ID NO: 177186 - DNA, 13 bp, Artificial Sequence
  Oligonucleotide for detection of SNP TSC0000978
atatcataaaaaa

SEQ ID NO: 177187 - DNA, 13 bp, Artificial Sequence
  Oligonucleotide for detection of SNP TSC0043938
gtgtgatgattaa

SEQ ID NO: 177188 - DNA, 13 bp, Artificial Sequence
  Oligonucleotide for detection of SNP TSC0043938
ttaatcatcacac

SEQ ID NO: 177189 - DNA, 13 bp, Artificial Sequence
  Oligonucleotide for detection of SNP TSC0043938
gcgtgatgattaa

SEQ ID NO: 177190 - DNA, 13 bp, Artificial Sequence
  Oligonucleotide for detection of SNP TSC0043938
ttaatcatcacgc

SEQ ID NO: 177191 - DNA, 13 bp, Artificial Sequence
  Oligonucleotide for detection of SNP TSC0043938
gtgtgacgattaa

SEQ ID NO: 177192 - DNA, 13 bp, Artificial Sequence
  Oligonucleotide for detection of SNP TSC0043938
ttaatcgtcacac

SEQ ID NO: 177193 - DNA, 13 bp, Artificial Sequence
  Oligonucleotide for detection of SNP TSC0043938
gcgtgacgattaa

SEQ ID NO: 177194 - DNA, 13 bp, Artificial Sequence
  Oligonucleotide for detection of SNP TSC0043938
ttaatcgtcacgc

SEQ ID NO: 177195 - DNA, 13 bp, Artificial Sequence
  Oligonucleotide for detection of SNP TSC0043938
ttagttgttatgy

SEQ ID NO: 177196 - DNA, 13 bp, Artificial Sequence
  Oligonucleotide for detection of SNP TSC0043938
rcataacaactaa

SEQ ID NO: 177197 - DNA, 13 bp, Artificial Sequence
  Oligonucleotide for detection of SNP TSC0043938
ttagtcgttatgy

SEQ ID NO: 177198 - DNA, 13 bp, Artificial Sequence
  Oligonucleotide for detection of SNP TSC0043938
rcataacgactaa

SEQ ID NO: 177199 - DNA, 13 bp, Artificial Sequence
  Oligonucleotide for detection of SNP TSC0043938
ttagttattacgy

SEQ ID NO: 177200 - DNA, 13 bp, Artificial Sequence
  Oligonucleotide for detection of SNP TSC0043938
rcgtaataactaa

SEQ ID NO: 177201 - DNA, 13 bp, Artificial Sequence
  Oligonucleotide for detection of SNP TSC0043938
ttagttgttacgy

SEQ ID NO: 177202 - DNA, 13 bp, Artificial Sequence
  Oligonucleotide for detection of SNP TSC0043938
rcgtaacaactaa

SEQ ID NO: 177203 - DNA, 13 bp, Artificial Sequence
  Oligonucleotide for detection of SNP TSC0043938
ttagtcgttacgy

SEQ ID NO: 177204 - DNA, 13 bp, Artificial Sequence
  Oligonucleotide for detection of SNP TSC0043938
rcgtaacgactaa

SEQ ID NO: 177205 - DNA, 13 bp, Artificial Sequence
  Oligonucleotide for detection of SNP TSC0043940
ggatgttggatga

SEQ ID NO: 177206 - DNA, 13 bp, Artificial Sequence
  Oligonucleotide for detection of SNP TSC0043940
tcatccaacatcc

SEQ ID NO: 177207 - DNA, 13 bp, Artificial Sequence
  Oligonucleotide for detection of SNP TSC0043940
ggatgtcggatga

SEQ ID NO: 177208 - DNA, 13 bp, Artificial Sequence
  Oligonucleotide for detection of SNP TSC0043940
tcatccgacatcc

SEQ ID NO: 177209 - DNA, 13 bp, Artificial Sequence
  Oligonucleotide for detection of SNP TSC0043940
ttatttagtatty

SEQ ID NO: 177210 - DNA, 13 bp, Artificial Sequence
  Oligonucleotide for detection of SNP TSC0043940
raatactaaataa

SEQ ID NO: 177211 - DNA, 13 bp, Artificial Sequence
  Oligonucleotide for detection of SNP TSC0043940
ttattcggtatty

SEQ ID NO: 177212 - DNA, 13 bp, Artificial Sequence
  Oligonucleotide for detection of SNP TSC0043940
raataccgaataa

SEQ ID NO: 177213 - DNA, 13 bp, Artificial Sequence
  Oligonucleotide for detection of SNP TSC0043941
tggggggttttay

SEQ ID NO: 177214 - DNA, 13 bp, Artificial Sequence
  Oligonucleotide for detection of SNP TSC0043941
rtaaaacccccca

SEQ ID NO: 177215 - DNA, 13 bp, Artificial Sequence
  Oligonucleotide for detection of SNP TSC0043941
tgggggattttay

SEQ ID NO: 177216 - DNA, 13 bp, Artificial Sequence
  Oligonucleotide for detection of SNP TSC0043941
rtaaaatccccca

SEQ ID NO: 177217 - DNA, 13 bp, Artificial Sequence
  Oligonucleotide for detection of SNP TSC0043942
tgttaaaattaag

SEQ ID NO: 177218 - DNA, 13 bp, Artificial Sequence
  Oligonucleotide for detection of SNP TSC0043942
cttaattttaaca

SEQ ID NO: 177219 - DNA, 13 bp, Artificial Sequence
  Oligonucleotide for detection of SNP TSC0043942
tgttaatattaag

SEQ ID NO: 177220 - DNA, 13 bp, Artificial Sequence
  Oligonucleotide for detection of SNP TSC0043942
cttaatattaaca

SEQ ID NO: 177221 - DNA, 13 bp, Artificial Sequence
  Oligonucleotide for detection of SNP TSC0043942
tttggttttgata

SEQ ID NO: 177222 - DNA, 13 bp, Artificial Sequence
  Oligonucleotide for detection of SNP TSC0043942
tatcaaaaccaaa

SEQ ID NO: 177223 - DNA, 13 bp, Artificial Sequence
  Oligonucleotide for detection of SNP TSC0043942
tttggtgttgata

SEQ ID NO: 177224 - DNA, 13 bp, Artificial Sequence
  Oligonucleotide for detection of SNP TSC0043942
tatcaacaccaaa

SEQ ID NO: 177225 - DNA, 13 bp, Artificial Sequence
  Oligonucleotide for detection of SNP TSC0043943
aattgtaatggty

SEQ ID NO: 177226 - DNA, 13 bp, Artificial Sequence
  Oligonucleotide for detection of SNP TSC0043943
raccattacaatt

SEQ ID NO: 177227 - DNA, 13 bp, Artificial Sequence
  Oligonucleotide for detection of SNP TSC0043943
aattgttatggty

SEQ ID NO: 177228 - DNA, 13 bp, Artificial Sequence
  Oligonucleotide for detection of SNP TSC0043943
raccataacaatt

SEQ ID NO: 177229 - DNA, 13 bp, Artificial Sequence
  Oligonucleotide for detection of SNP TSC0043943
ggttattatagtt

SEQ ID NO: 177230 - DNA, 13 bp, Artificial Sequence
  Oligonucleotide for detection of SNP TSC0043943
aactataataacc

SEQ ID NO: 177231 - DNA, 13 bp, Artificial Sequence
  Oligonucleotide for detection of SNP TSC0043943
ggttataatagtt

SEQ ID NO: 177232 - DNA, 13 bp, Artificial Sequence
  Oligonucleotide for detection of SNP TSC0043943
aactattataacc

SEQ ID NO: 177233 - DNA, 13 bp, Artificial Sequence
  Oligonucleotide for detection of SNP TSC0043944
gaagatgtaggga

SEQ ID NO: 177234 - DNA, 13 bp, Artificial Sequence
  Oligonucleotide for detection of SNP TSC0043944
tccctacatcttc

SEQ ID NO: 177235 - DNA, 13 bp, Artificial Sequence
  Oligonucleotide for detection of SNP TSC0043944
gaagatataggga

SEQ ID NO: 177236 - DNA, 13 bp, Artificial Sequence
  Oligonucleotide for detection of SNP TSC0043944
tccctatatcttc

SEQ ID NO: 177237 - DNA, 13 bp, Artificial Sequence
  Oligonucleotide for detection of SNP TSC0043944
gaagacgtaggga

SEQ ID NO: 177238 - DNA, 13 bp, Artificial Sequence
  Oligonucleotide for detection of SNP TSC0043944
tccctacgtcttc

SEQ ID NO: 177239 - DNA, 13 bp, Artificial Sequence
  Oligonucleotide for detection of SNP TSC0000165
aagaagtttttga

SEQ ID NO: 177240 - DNA, 13 bp, Artificial Sequence
  Oligonucleotide for detection of SNP TSC0000165
tcaaaaacttctt

SEQ ID NO: 177241 - DNA, 13 bp, Artificial Sequence
  Oligonucleotide for detection of SNP TSC0000165
aagaaggttttga

SEQ ID NO: 177242 - DNA, 13 bp, Artificial Sequence
  Oligonucleotide for detection of SNP TSC0000165
tcaaaaccttctt

SEQ ID NO: 177243 - DNA, 13 bp, Artificial Sequence
  Oligonucleotide for detection of SNP TSC0000165
ttaaaggtttttt

SEQ ID NO: 177244 - DNA, 13 bp, Artificial Sequence
  Oligonucleotide for detection of SNP TSC0000165
aaaaaacctttaa

SEQ ID NO: 177245 - DNA, 13 bp, Artificial Sequence
  Oligonucleotide for detection of SNP TSC0043945
agaaggatgtggt

SEQ ID NO: 177246 - DNA, 13 bp, Artificial Sequence
  Oligonucleotide for detection of SNP TSC0043945
accacatccttct

SEQ ID NO: 177247 - DNA, 13 bp, Artificial Sequence
  Oligonucleotide for detection of SNP TSC0043945
agaagggtgtggt

SEQ ID NO: 177248 - DNA, 13 bp, Artificial Sequence
  Oligonucleotide for detection of SNP TSC0043945
accacacccttct

SEQ ID NO: 177249 - DNA, 13 bp, Artificial Sequence
  Oligonucleotide for detection of SNP TSC0043946
ttttaggttaaag

SEQ ID NO: 177250 - DNA, 13 bp, Artificial Sequence
  Oligonucleotide for detection of SNP TSC0043946
ctttaacctaaaa

SEQ ID NO: 177251 - DNA, 13 bp, Artificial Sequence
  Oligonucleotide for detection of SNP TSC0043946
ttttagattaaag

SEQ ID NO: 177252 - DNA, 13 bp, Artificial Sequence
  Oligonucleotide for detection of SNP TSC0043946
ctttaatctaaaa

SEQ ID NO: 177253 - DNA, 13 bp, Artificial Sequence
  Oligonucleotide for detection of SNP TSC0043947
tatttaagaagtt

SEQ ID NO: 177254 - DNA, 13 bp, Artificial Sequence
  Oligonucleotide for detection of SNP TSC0043947
aacttcttaaata

SEQ ID NO: 177255 - DNA, 13 bp, Artificial Sequence
  Oligonucleotide for detection of SNP TSC0043947
tatttaggaagtt

SEQ ID NO: 177256 - DNA, 13 bp, Artificial Sequence
  Oligonucleotide for detection of SNP TSC0043947
aacttcctaaata

SEQ ID NO: 177257 - DNA, 13 bp, Artificial Sequence
  Oligonucleotide for detection of SNP TSC0043948
gtgaatatgattg

SEQ ID NO: 177258 - DNA, 13 bp, Artificial Sequence
  Oligonucleotide for detection of SNP TSC0043948
caatcatattcac

SEQ ID NO: 177259 - DNA, 13 bp, Artificial Sequence
  Oligonucleotide for detection of SNP TSC0043948
gtgaatgtgattg

SEQ ID NO: 177260 - DNA, 13 bp, Artificial Sequence
  Oligonucleotide for detection of SNP TSC0043948
caatcacattcac

SEQ ID NO: 177261 - DNA, 13 bp, Artificial Sequence
  Oligonucleotide for detection of SNP TSC0043948
gtgaacgtgattg

SEQ ID NO: 177262 - DNA, 13 bp, Artificial Sequence
  Oligonucleotide for detection of SNP TSC0043948
caatcacgttcac

SEQ ID NO: 177263 - DNA, 13 bp, Artificial Sequence
  Oligonucleotide for detection of SNP TSC0043948
taattatgtttay

SEQ ID NO: 177264 - DNA, 13 bp, Artificial Sequence
  Oligonucleotide for detection of SNP TSC0043948
rtaaacataatta

SEQ ID NO: 177265 - DNA, 13 bp, Artificial Sequence
  Oligonucleotide for detection of SNP TSC0043948
taattacgtttay

SEQ ID NO: 177266 - DNA, 13 bp, Artificial Sequence
  Oligonucleotide for detection of SNP TSC0043948
rtaaacgtaatta

SEQ ID NO: 177267 - DNA, 13 bp, Artificial Sequence
  Oligonucleotide for detection of SNP TSC0043949
aaatgaggtttay

SEQ ID NO: 177268 - DNA, 13 bp, Artificial Sequence
  Oligonucleotide for detection of SNP TSC0043949
rtaaacctcattt

SEQ ID NO: 177269 - DNA, 13 bp, Artificial Sequence
  Oligonucleotide for detection of SNP TSC0043949
aaatgaagtttay

SEQ ID NO: 177270 - DNA, 13 bp, Artificial Sequence
  Oligonucleotide for detection of SNP TSC0043949
rtaaacttcattt

SEQ ID NO: 177271 - DNA, 13 bp, Artificial Sequence
  Oligonucleotide for detection of SNP TSC0043950
taaataagatgat

SEQ ID NO: 177272 - DNA, 13 bp, Artificial Sequence
  Oligonucleotide for detection of SNP TSC0043950
atcatcttattta

SEQ ID NO: 177273 - DNA, 13 bp, Artificial Sequence
  Oligonucleotide for detection of SNP TSC0043950
taaataggatgat

SEQ ID NO: 177274 - DNA, 13 bp, Artificial Sequence
  Oligonucleotide for detection of SNP TSC0043950
atcatcctattta

SEQ ID NO: 177275 - DNA, 13 bp, Artificial Sequence
  Oligonucleotide for detection of SNP TSC0043951
gtttttttttgtg

SEQ ID NO: 177276 - DNA, 13 bp, Artificial Sequence
  Oligonucleotide for detection of SNP TSC0043951
cacaaaaaaaaac

SEQ ID NO: 177277 - DNA, 13 bp, Artificial Sequence
  Oligonucleotide for detection of SNP TSC0043951
tatagggaaaggy

SEQ ID NO: 177278 - DNA, 13 bp, Artificial Sequence
  Oligonucleotide for detection of SNP TSC0043951
rcctttccctata

SEQ ID NO: 177279 - DNA, 13 bp, Artificial Sequence
  Oligonucleotide for detection of SNP TSC0043951
tataggtaaaggy

SEQ ID NO: 177280 - DNA, 13 bp, Artificial Sequence
  Oligonucleotide for detection of SNP TSC0043951
rcctttacctata

SEQ ID NO: 177281 - DNA, 13 bp, Artificial Sequence
  Oligonucleotide for detection of SNP TSC0043955
aataaaattagty

SEQ ID NO: 177282 - DNA, 13 bp, Artificial Sequence
  Oligonucleotide for detection of SNP TSC0043955
ractaattttatt

SEQ ID NO: 177283 - DNA, 13 bp, Artificial Sequence
  Oligonucleotide for detection of SNP TSC0043955
aataaagttagty

SEQ ID NO: 177284 - DNA, 13 bp, Artificial Sequence
  Oligonucleotide for detection of SNP TSC0043955
ractaactttatt

SEQ ID NO: 177285 - DNA, 13 bp, Artificial Sequence
  Oligonucleotide for detection of SNP TSC0043956
tttatattttagt

SEQ ID NO: 177286 - DNA, 13 bp, Artificial Sequence
  Oligonucleotide for detection of SNP TSC0043956
actaaaatataaa

SEQ ID NO: 177287 - DNA, 13 bp, Artificial Sequence
  Oligonucleotide for detection of SNP TSC0043956
tttatagtttagt

SEQ ID NO: 177288 - DNA, 13 bp, Artificial Sequence
  Oligonucleotide for detection of SNP TSC0043956
actaaactataaa

SEQ ID NO: 177289 - DNA, 13 bp, Artificial Sequence
  Oligonucleotide for detection of SNP TSC0043956
attagagtgtgaa

SEQ ID NO: 177290 - DNA, 13 bp, Artificial Sequence
  Oligonucleotide for detection of SNP TSC0043956
ttcacactctaat

SEQ ID NO: 177291 - DNA, 13 bp, Artificial Sequence
  Oligonucleotide for detection of SNP TSC0043956
attagattgtgaa

SEQ ID NO: 177292 - DNA, 13 bp, Artificial Sequence
  Oligonucleotide for detection of SNP TSC0043956
ttcacaatctaat

SEQ ID NO: 177293 - DNA, 13 bp, Artificial Sequence
  Oligonucleotide for detection of SNP TSC0043957
aaaattatataaa

SEQ ID NO: 177294 - DNA, 13 bp, Artificial Sequence
  Oligonucleotide for detection of SNP TSC0043957
tttatataatttt

SEQ ID NO: 177295 - DNA, 13 bp, Artificial Sequence
  Oligonucleotide for detection of SNP TSC0043960
aaattaagatgta

SEQ ID NO: 177296 - DNA, 13 bp, Artificial Sequence
  Oligonucleotide for detection of SNP TSC0043960
tacatcttaattt

SEQ ID NO: 177297 - DNA, 13 bp, Artificial Sequence
  Oligonucleotide for detection of SNP TSC0043960
aaattaggatgta

SEQ ID NO: 177298 - DNA, 13 bp, Artificial Sequence
  Oligonucleotide for detection of SNP TSC0043960
tacatcctaattt

SEQ ID NO: 177299 - DNA, 13 bp, Artificial Sequence
  Oligonucleotide for detection of SNP TSC0043962
ttattaagtttaa

SEQ ID NO: 177300 - DNA, 13 bp, Artificial Sequence
  Oligonucleotide for detection of SNP TSC0043962
ttaaacttaataa

SEQ ID NO: 177301 - DNA, 13 bp, Artificial Sequence
  Oligonucleotide for detection of SNP TSC0043962
ttattatgtttaa

SEQ ID NO: 177302 - DNA, 13 bp, Artificial Sequence
  Oligonucleotide for detection of SNP TSC0043962
ttaaacataataa

SEQ ID NO: 177303 - DNA, 13 bp, Artificial Sequence
  Oligonucleotide for detection of SNP TSC0043963
agaaatattataa

SEQ ID NO: 177304 - DNA, 13 bp, Artificial Sequence
  Oligonucleotide for detection of SNP TSC0043963
ttataatatttct

SEQ ID NO: 177305 - DNA, 13 bp, Artificial Sequence
  Oligonucleotide for detection of SNP TSC0008492
aatattgaagtgt

SEQ ID NO: 177306 - DNA, 13 bp, Artificial Sequence
  Oligonucleotide for detection of SNP TSC0008492
acacttcaatatt

SEQ ID NO: 177307 - DNA, 13 bp, Artificial Sequence
  Oligonucleotide for detection of SNP TSC0008492
aatattaaagtgt

SEQ ID NO: 177308 - DNA, 13 bp, Artificial Sequence
  Oligonucleotide for detection of SNP TSC0008492
acactttaatatt

SEQ ID NO: 177309 - DNA, 13 bp, Artificial Sequence
  Oligonucleotide for detection of SNP TSC0043965
gtaaatagtgaay

SEQ ID NO: 177310 - DNA, 13 bp, Artificial Sequence
  Oligonucleotide for detection of SNP TSC0043965
rttcactatttac

SEQ ID NO: 177311 - DNA, 13 bp, Artificial Sequence
  Oligonucleotide for detection of SNP TSC0043965
gtaaatggtgaay

SEQ ID NO: 177312 - DNA, 13 bp, Artificial Sequence
  Oligonucleotide for detection of SNP TSC0043965
rttcaccatttac

SEQ ID NO: 177313 - DNA, 13 bp, Artificial Sequence
  Oligonucleotide for detection of SNP TSC0043965
gtaaatagcgaay

SEQ ID NO: 177314 - DNA, 13 bp, Artificial Sequence
  Oligonucleotide for detection of SNP TSC0043965
rttcgctatttac

SEQ ID NO: 177315 - DNA, 13 bp, Artificial Sequence
  Oligonucleotide for detection of SNP TSC0043965
gtaaacggtgaay

SEQ ID NO: 177316 - DNA, 13 bp, Artificial Sequence
  Oligonucleotide for detection of SNP TSC0043965
rttcaccgtttac

SEQ ID NO: 177317 - DNA, 13 bp, Artificial Sequence
  Oligonucleotide for detection of SNP TSC0043965
gtaaatggcgaay

SEQ ID NO: 177318 - DNA, 13 bp, Artificial Sequence
  Oligonucleotide for detection of SNP TSC0043965
rttcgccatttac

SEQ ID NO: 177319 - DNA, 13 bp, Artificial Sequence
  Oligonucleotide for detection of SNP TSC0043965
gtaaacggcgaay

SEQ ID NO: 177320 - DNA, 13 bp, Artificial Sequence
  Oligonucleotide for detection of SNP TSC0043965
rttcgccgtttac

SEQ ID NO: 177321 - DNA, 13 bp, Artificial Sequence
  Oligonucleotide for detection of SNP TSC0043965
gtttgttgtttay

SEQ ID NO: 177322 - DNA, 13 bp, Artificial Sequence
  Oligonucleotide for detection of SNP TSC0043965
rtaaacaacaaac

SEQ ID NO: 177323 - DNA, 13 bp, Artificial Sequence
  Oligonucleotide for detection of SNP TSC0043965
gttcgttgtttay

SEQ ID NO: 177324 - DNA, 13 bp, Artificial Sequence
  Oligonucleotide for detection of SNP TSC0043965
rtaaacaacgaac

SEQ ID NO: 177325 - DNA, 13 bp, Artificial Sequence
  Oligonucleotide for detection of SNP TSC0043965
gtttgtcgtttay

SEQ ID NO: 177326 - DNA, 13 bp, Artificial Sequence
  Oligonucleotide for detection of SNP TSC0043965
rtaaacgacaaac

SEQ ID NO: 177327 - DNA, 13 bp, Artificial Sequence
  Oligonucleotide for detection of SNP TSC0043965
gttcgtcgtttay

SEQ ID NO: 177328 - DNA, 13 bp, Artificial Sequence
  Oligonucleotide for detection of SNP TSC0043965
rtaaacgacgaac

SEQ ID NO: 177329 - DNA, 13 bp, Artificial Sequence
  Oligonucleotide for detection of SNP TSC0043966
tatataattgttg

SEQ ID NO: 177330 - DNA, 13 bp, Artificial Sequence
  Oligonucleotide for detection of SNP TSC0043966
caacaattatata

SEQ ID NO: 177331 - DNA, 13 bp, Artificial Sequence
  Oligonucleotide for detection of SNP TSC0043966
tatatagttgttg

SEQ ID NO: 177332 - DNA, 13 bp, Artificial Sequence
  Oligonucleotide for detection of SNP TSC0043966
caacaactatata

SEQ ID NO: 177333 - DNA, 13 bp, Artificial Sequence
  Oligonucleotide for detection of SNP TSC0043970
tgattttttttty

SEQ ID NO: 177334 - DNA, 13 bp, Artificial Sequence
  Oligonucleotide for detection of SNP TSC0043970
raaaaaaaaatca

SEQ ID NO: 177335 - DNA, 13 bp, Artificial Sequence
  Oligonucleotide for detection of SNP TSC0043970
ggagagtaggtta

SEQ ID NO: 177336 - DNA, 13 bp, Artificial Sequence
  Oligonucleotide for detection of SNP TSC0043970
taacctactctcc

SEQ ID NO: 177337 - DNA, 13 bp, Artificial Sequence
  Oligonucleotide for detection of SNP TSC0043970
ggagagaaggtta

SEQ ID NO: 177338 - DNA, 13 bp, Artificial Sequence
  Oligonucleotide for detection of SNP TSC0043970
taaccttctctcc

SEQ ID NO: 177339 - DNA, 13 bp, Artificial Sequence
  Oligonucleotide for detection of SNP TSC0006044
ttaataagagaat

SEQ ID NO: 177340 - DNA, 13 bp, Artificial Sequence
  Oligonucleotide for detection of SNP TSC0006044
attctcttattaa

SEQ ID NO: 177341 - DNA, 13 bp, Artificial Sequence
  Oligonucleotide for detection of SNP TSC0006044
ttaataggagaat

SEQ ID NO: 177342 - DNA, 13 bp, Artificial Sequence
  Oligonucleotide for detection of SNP TSC0006044
attctcctattaa

SEQ ID NO: 177343 - DNA, 13 bp, Artificial Sequence
  Oligonucleotide for detection of SNP TSC0043972
attttagtatatt

SEQ ID NO: 177344 - DNA, 13 bp, Artificial Sequence
  Oligonucleotide for detection of SNP TSC0043972
aatatactaaaat

SEQ ID NO: 177345 - DNA, 13 bp, Artificial Sequence
  Oligonucleotide for detection of SNP TSC0043972
attttaatatatt

SEQ ID NO: 177346 - DNA, 13 bp, Artificial Sequence
  Oligonucleotide for detection of SNP TSC0043972
aatatattaaaat

SEQ ID NO: 177347 - DNA, 13 bp, Artificial Sequence
  Oligonucleotide for detection of SNP TSC0043973
aaatatagattaa

SEQ ID NO: 177348 - DNA, 13 bp, Artificial Sequence
  Oligonucleotide for detection of SNP TSC0043973
ttaatctatattt

SEQ ID NO: 177349 - DNA, 13 bp, Artificial Sequence
  Oligonucleotide for detection of SNP TSC0043973
aaatattgattaa

SEQ ID NO: 177350 - DNA, 13 bp, Artificial Sequence
  Oligonucleotide for detection of SNP TSC0043973
ttaatcaatattt

SEQ ID NO: 177351 - DNA, 13 bp, Artificial Sequence
  Oligonucleotide for detection of SNP TSC0043974
taaatatgtaaaa

SEQ ID NO: 177352 - DNA, 13 bp, Artificial Sequence
  Oligonucleotide for detection of SNP TSC0043974
ttttacatattta

SEQ ID NO: 177353 - DNA, 13 bp, Artificial Sequence
  Oligonucleotide for detection of SNP TSC0043974
taaataggtaaaa

SEQ ID NO: 177354 - DNA, 13 bp, Artificial Sequence
  Oligonucleotide for detection of SNP TSC0043974
ttttacctattta

SEQ ID NO: 177355 - DNA, 13 bp, Artificial Sequence
  Oligonucleotide for detection of SNP TSC0043975
tagagagggggaa

SEQ ID NO: 177356 - DNA, 13 bp, Artificial Sequence
  Oligonucleotide for detection of SNP TSC0043975
ttccccctctcta

SEQ ID NO: 177357 - DNA, 13 bp, Artificial Sequence
  Oligonucleotide for detection of SNP TSC0043975
tagagatggggaa

SEQ ID NO: 177358 - DNA, 13 bp, Artificial Sequence
  Oligonucleotide for detection of SNP TSC0043975
ttccccatctcta

SEQ ID NO: 177359 - DNA, 13 bp, Artificial Sequence
  Oligonucleotide for detection of SNP TSC0043975
tagagacggggaa

SEQ ID NO: 177360 - DNA, 13 bp, Artificial Sequence
  Oligonucleotide for detection of SNP TSC0043975
ttccccgtctcta

SEQ ID NO: 177361 - DNA, 13 bp, Artificial Sequence
  Oligonucleotide for detection of SNP TSC0043976
ggttttatagtgy

SEQ ID NO: 177362 - DNA, 13 bp, Artificial Sequence
  Oligonucleotide for detection of SNP TSC0043976
rcactataaaacc

SEQ ID NO: 177363 - DNA, 13 bp, Artificial Sequence
  Oligonucleotide for detection of SNP TSC0043976
ggttttgtagtgy

SEQ ID NO: 177364 - DNA, 13 bp, Artificial Sequence
  Oligonucleotide for detection of SNP TSC0043976
rcactacaaaacc

SEQ ID NO: 177365 - DNA, 13 bp, Artificial Sequence
  Oligonucleotide for detection of SNP TSC0043976
ggtttcgtagtgy

SEQ ID NO: 177366 - DNA, 13 bp, Artificial Sequence
  Oligonucleotide for detection of SNP TSC0043976
rcactacgaaacc

SEQ ID NO: 177367 - DNA, 13 bp, Artificial Sequence
  Oligonucleotide for detection of SNP TSC0043976
gtattgtgaaaty

SEQ ID NO: 177368 - DNA, 13 bp, Artificial Sequence
  Oligonucleotide for detection of SNP TSC0043976
ratttcacaatac

SEQ ID NO: 177369 - DNA, 13 bp, Artificial Sequence
  Oligonucleotide for detection of SNP TSC0043976
gtattgcgaaaty

SEQ ID NO: 177370 - DNA, 13 bp, Artificial Sequence
  Oligonucleotide for detection of SNP TSC0043976
ratttcgcaatac

SEQ ID NO: 177371 - DNA, 13 bp, Artificial Sequence
  Oligonucleotide for detection of SNP TSC0043980
tttaaaataattt

SEQ ID NO: 177372 - DNA, 13 bp, Artificial Sequence
  Oligonucleotide for detection of SNP TSC0043980
aaattattttaaa

SEQ ID NO: 177373 - DNA, 13 bp, Artificial Sequence
  Oligonucleotide for detection of SNP TSC0043981
agtattcgtttta

SEQ ID NO: 177374 - DNA, 13 bp, Artificial Sequence
  Oligonucleotide for detection of SNP TSC0043981
taaaacgaatact

SEQ ID NO: 177375 - DNA, 13 bp, Artificial Sequence
  Oligonucleotide for detection of SNP TSC0043981
taaaatggatatt

SEQ ID NO: 177376 - DNA, 13 bp, Artificial Sequence
  Oligonucleotide for detection of SNP TSC0043981
aatatccatttta

SEQ ID NO: 177377 - DNA, 13 bp, Artificial Sequence
  Oligonucleotide for detection of SNP TSC0043981
taaaatagatatt

SEQ ID NO: 177378 - DNA, 13 bp, Artificial Sequence
  Oligonucleotide for detection of SNP TSC0043981
aatatctatttta

SEQ ID NO: 177379 - DNA, 13 bp, Artificial Sequence
  Oligonucleotide for detection of SNP TSC0043981
taaaacggatatt

SEQ ID NO: 177380 - DNA, 13 bp, Artificial Sequence
  Oligonucleotide for detection of SNP TSC0043981
aatatccgtttta

SEQ ID NO: 177381 - DNA, 13 bp, Artificial Sequence
  Oligonucleotide for detection of SNP TSC0043982
aaatattttagat

SEQ ID NO: 177382 - DNA, 13 bp, Artificial Sequence
  Oligonucleotide for detection of SNP TSC0043982
atctaaaatattt

SEQ ID NO: 177383 - DNA, 13 bp, Artificial Sequence
  Oligonucleotide for detection of SNP TSC0043982
aaatacgttagat

SEQ ID NO: 177384 - DNA, 13 bp, Artificial Sequence
  Oligonucleotide for detection of SNP TSC0043982
atctaacgtattt

SEQ ID NO: 177385 - DNA, 13 bp, Artificial Sequence
  Oligonucleotide for detection of SNP TSC0043982
atttgaggtattt

SEQ ID NO: 177386 - DNA, 13 bp, Artificial Sequence
  Oligonucleotide for detection of SNP TSC0043982
aaatacctcaaat

SEQ ID NO: 177387 - DNA, 13 bp, Artificial Sequence
  Oligonucleotide for detection of SNP TSC0043982
atttgatgtattt

SEQ ID NO: 177388 - DNA, 13 bp, Artificial Sequence
  Oligonucleotide for detection of SNP TSC0043982
aaatacatcaaat

SEQ ID NO: 177389 - DNA, 13 bp, Artificial Sequence
  Oligonucleotide for detection of SNP TSC0043982
atttgacgtattt

SEQ ID NO: 177390 - DNA, 13 bp, Artificial Sequence
  Oligonucleotide for detection of SNP TSC0043982
aaatacgtcaaat

SEQ ID NO: 177391 - DNA, 13 bp, Artificial Sequence
  Oligonucleotide for detection of SNP TSC0043986
aaaataagtttty

SEQ ID NO: 177392 - DNA, 13 bp, Artificial Sequence
  Oligonucleotide for detection of SNP TSC0043986
raaaacttatttt

SEQ ID NO: 177393 - DNA, 13 bp, Artificial Sequence
  Oligonucleotide for detection of SNP TSC0043986
aaaatatgtttty

SEQ ID NO: 177394 - DNA, 13 bp, Artificial Sequence
  Oligonucleotide for detection of SNP TSC0043986
raaaacatatttt

SEQ ID NO: 177395 - DNA, 13 bp, Artificial Sequence
  Oligonucleotide for detection of SNP TSC0043986
ggaagtttgtttt

SEQ ID NO: 177396 - DNA, 13 bp, Artificial Sequence
  Oligonucleotide for detection of SNP TSC0043986
aaaacaaacttcc

SEQ ID NO: 177397 - DNA, 13 bp, Artificial Sequence
  Oligonucleotide for detection of SNP TSC0043986
ggaagtatgtttt

SEQ ID NO: 177398 - DNA, 13 bp, Artificial Sequence
  Oligonucleotide for detection of SNP TSC0043986
aaaacatacttcc

SEQ ID NO: 177399 - DNA, 13 bp, Artificial Sequence
  Oligonucleotide for detection of SNP TSC0043987
ttgggggaaaaaa

SEQ ID NO: 177400 - DNA, 13 bp, Artificial Sequence
  Oligonucleotide for detection of SNP TSC0043987
ttttttcccccaa

SEQ ID NO: 177401 - DNA, 13 bp, Artificial Sequence
  Oligonucleotide for detection of SNP TSC0043987
ttggggaaaaaaa

SEQ ID NO: 177402 - DNA, 13 bp, Artificial Sequence
  Oligonucleotide for detection of SNP TSC0043987
tttttttccccaa

SEQ ID NO: 177403 - DNA, 13 bp, Artificial Sequence
  Oligonucleotide for detection of SNP TSC0043988
agaaagaaaggaa

SEQ ID NO: 177404 - DNA, 13 bp, Artificial Sequence
  Oligonucleotide for detection of SNP TSC0043988
ttcctttctttct

SEQ ID NO: 177405 - DNA, 13 bp, Artificial Sequence
  Oligonucleotide for detection of SNP TSC0043988
agaaaggaaggaa

SEQ ID NO: 177406 - DNA, 13 bp, Artificial Sequence
  Oligonucleotide for detection of SNP TSC0043988
ttccttcctttct

SEQ ID NO: 177407 - DNA, 13 bp, Artificial Sequence
  Oligonucleotide for detection of SNP TSC0043989
agtgttatagtgg

SEQ ID NO: 177408 - DNA, 13 bp, Artificial Sequence
  Oligonucleotide for detection of SNP TSC0043989
ccactataacact

SEQ ID NO: 177409 - DNA, 13 bp, Artificial Sequence
  Oligonucleotide for detection of SNP TSC0043989
agtgttttagtgg

SEQ ID NO: 177410 - DNA, 13 bp, Artificial Sequence
  Oligonucleotide for detection of SNP TSC0043989
ccactaaaacact

SEQ ID NO: 177411 - DNA, 13 bp, Artificial Sequence
  Oligonucleotide for detection of SNP TSC0043989
ttattaaaatatt

SEQ ID NO: 177412 - DNA, 13 bp, Artificial Sequence
  Oligonucleotide for detection of SNP TSC0043989
aatattttaataa

SEQ ID NO: 177413 - DNA, 13 bp, Artificial Sequence
  Oligonucleotide for detection of SNP TSC0043990
gttatattattat

SEQ ID NO: 177414 - DNA, 13 bp, Artificial Sequence
  Oligonucleotide for detection of SNP TSC0043990
ataataatataac

SEQ ID NO: 177415 - DNA, 13 bp, Artificial Sequence
  Oligonucleotide for detection of SNP TSC0043990
gttatagtattat

SEQ ID NO: 177416 - DNA, 13 bp, Artificial Sequence
  Oligonucleotide for detection of SNP TSC0043990
ataatactataac

SEQ ID NO: 177417 - DNA, 13 bp, Artificial Sequence
  Oligonucleotide for detection of SNP TSC0043990
ataatgatatgay

SEQ ID NO: 177418 - DNA, 13 bp, Artificial Sequence
  Oligonucleotide for detection of SNP TSC0043990
rtcatatcattat

SEQ ID NO: 177419 - DNA, 13 bp, Artificial Sequence
  Oligonucleotide for detection of SNP TSC0043990
ataatgttatgay

SEQ ID NO: 177420 - DNA, 13 bp, Artificial Sequence
  Oligonucleotide for detection of SNP TSC0043990
rtcataacattat

SEQ ID NO: 177421 - DNA, 13 bp, Artificial Sequence
  Oligonucleotide for detection of SNP TSC0043991
tatttgaaaaaty

SEQ ID NO: 177422 - DNA, 13 bp, Artificial Sequence
  Oligonucleotide for detection of SNP TSC0043991
ratttttcaaata

SEQ ID NO: 177423 - DNA, 13 bp, Artificial Sequence
  Oligonucleotide for detection of SNP TSC0043991
tatttggaaaaty

SEQ ID NO: 177424 - DNA, 13 bp, Artificial Sequence
  Oligonucleotide for detection of SNP TSC0043991
rattttccaaata

SEQ ID NO: 177425 - DNA, 13 bp, Artificial Sequence
  Oligonucleotide for detection of SNP TSC0043992
aaaataatttgta

SEQ ID NO: 177426 - DNA, 13 bp, Artificial Sequence
  Oligonucleotide for detection of SNP TSC0043992
tacaaattatttt

SEQ ID NO: 177427 - DNA, 13 bp, Artificial Sequence
  Oligonucleotide for detection of SNP TSC0043992
aaaatattttgta

SEQ ID NO: 177428 - DNA, 13 bp, Artificial Sequence
  Oligonucleotide for detection of SNP TSC0043992
tacaaaatatttt

SEQ ID NO: 177429 - DNA, 13 bp, Artificial Sequence
  Oligonucleotide for detection of SNP TSC0043992
tatagattatttt

SEQ ID NO: 177430 - DNA, 13 bp, Artificial Sequence
  Oligonucleotide for detection of SNP TSC0043992
aaaataatctata

SEQ ID NO: 177431 - DNA, 13 bp, Artificial Sequence
  Oligonucleotide for detection of SNP TSC0043992
tatagaatatttt

SEQ ID NO: 177432 - DNA, 13 bp, Artificial Sequence
  Oligonucleotide for detection of SNP TSC0043992
aaaatattctata

SEQ ID NO: 177433 - DNA, 13 bp, Artificial Sequence
  Oligonucleotide for detection of SNP TSC0043994
agttggaattttt

SEQ ID NO: 177434 - DNA, 13 bp, Artificial Sequence
  Oligonucleotide for detection of SNP TSC0043994
aaaaattccaact

SEQ ID NO: 177435 - DNA, 13 bp, Artificial Sequence
  Oligonucleotide for detection of SNP TSC0043994
agttgggattttt

SEQ ID NO: 177436 - DNA, 13 bp, Artificial Sequence
  Oligonucleotide for detection of SNP TSC0043994
aaaaatcccaact

SEQ ID NO: 177437 - DNA, 13 bp, Artificial Sequence
  Oligonucleotide for detection of SNP TSC0043995
atgtaggtttttt

SEQ ID NO: 177438 - DNA, 13 bp, Artificial Sequence
  Oligonucleotide for detection of SNP TSC0043995
aaaaaacctacat

SEQ ID NO: 177439 - DNA, 13 bp, Artificial Sequence
  Oligonucleotide for detection of SNP TSC0043996
aatttagtaagtt

SEQ ID NO: 177440 - DNA, 13 bp, Artificial Sequence
  Oligonucleotide for detection of SNP TSC0043996
aacttactaaatt

SEQ ID NO: 177441 - DNA, 13 bp, Artificial Sequence
  Oligonucleotide for detection of SNP TSC0043996
aatttaataagtt

SEQ ID NO: 177442 - DNA, 13 bp, Artificial Sequence
  Oligonucleotide for detection of SNP TSC0043996
aacttattaaatt

SEQ ID NO: 177443 - DNA, 13 bp, Artificial Sequence
  Oligonucleotide for detection of SNP TSC0010778
taaagaagagaga

SEQ ID NO: 177444 - DNA, 13 bp, Artificial Sequence
  Oligonucleotide for detection of SNP TSC0010778
tctctcttcttta

SEQ ID NO: 177445 - DNA, 13 bp, Artificial Sequence
  Oligonucleotide for detection of SNP TSC0010778
taaagaggagaga

SEQ ID NO: 177446 - DNA, 13 bp, Artificial Sequence
  Oligonucleotide for detection of SNP TSC0010778
tctctcctcttta

SEQ ID NO: 177447 - DNA, 13 bp, Artificial Sequence
  Oligonucleotide for detection of SNP TSC0044001
tagtatattttty

SEQ ID NO: 177448 - DNA, 13 bp, Artificial Sequence
  Oligonucleotide for detection of SNP TSC0044001
raaaaatatacta

SEQ ID NO: 177449 - DNA, 13 bp, Artificial Sequence
  Oligonucleotide for detection of SNP TSC0044001
gggagatgtattg

SEQ ID NO: 177450 - DNA, 13 bp, Artificial Sequence
  Oligonucleotide for detection of SNP TSC0044001
caatacatctccc

SEQ ID NO: 177451 - DNA, 13 bp, Artificial Sequence
  Oligonucleotide for detection of SNP TSC0044001
gggagaggtattg

SEQ ID NO: 177452 - DNA, 13 bp, Artificial Sequence
  Oligonucleotide for detection of SNP TSC0044001
caatacctctccc

SEQ ID NO: 177453 - DNA, 13 bp, Artificial Sequence
  Oligonucleotide for detection of SNP TSC0044002
agtgggatttggg

SEQ ID NO: 177454 - DNA, 13 bp, Artificial Sequence
  Oligonucleotide for detection of SNP TSC0044002
cccaaatcccact

SEQ ID NO: 177455 - DNA, 13 bp, Artificial Sequence
  Oligonucleotide for detection of SNP TSC0044002
agtggggtttggg

SEQ ID NO: 177456 - DNA, 13 bp, Artificial Sequence
  Oligonucleotide for detection of SNP TSC0044002
cccaaaccccact

SEQ ID NO: 177457 - DNA, 13 bp, Artificial Sequence
  Oligonucleotide for detection of SNP TSC0044003
ttatgattatttt

SEQ ID NO: 177458 - DNA, 13 bp, Artificial Sequence
  Oligonucleotide for detection of SNP TSC0044003
aaaataatcataa

SEQ ID NO: 177459 - DNA, 13 bp, Artificial Sequence
  Oligonucleotide for detection of SNP TSC0044003
ttatgagtatttt

SEQ ID NO: 177460 - DNA, 13 bp, Artificial Sequence
  Oligonucleotide for detection of SNP TSC0044003
aaaatactcataa

SEQ ID NO: 177461 - DNA, 13 bp, Artificial Sequence
  Oligonucleotide for detection of SNP TSC0044003
agggtggttatag

SEQ ID NO: 177462 - DNA, 13 bp, Artificial Sequence
  Oligonucleotide for detection of SNP TSC0044003
ctataaccaccct

SEQ ID NO: 177463 - DNA, 13 bp, Artificial Sequence
  Oligonucleotide for detection of SNP TSC0044003
agggtgtttatag

SEQ ID NO: 177464 - DNA, 13 bp, Artificial Sequence
  Oligonucleotide for detection of SNP TSC0044003
ctataaacaccct

SEQ ID NO: 177465 - DNA, 13 bp, Artificial Sequence
  Oligonucleotide for detection of SNP TSC0044007
agagtatgttaaa

SEQ ID NO: 177466 - DNA, 13 bp, Artificial Sequence
  Oligonucleotide for detection of SNP TSC0044007
tttaacatactct

SEQ ID NO: 177467 - DNA, 13 bp, Artificial Sequence
  Oligonucleotide for detection of SNP TSC0044007
agagtacgttaaa

SEQ ID NO: 177468 - DNA, 13 bp, Artificial Sequence
  Oligonucleotide for detection of SNP TSC0044007
tttaacgtactct

SEQ ID NO: 177469 - DNA, 13 bp, Artificial Sequence
  Oligonucleotide for detection of SNP TSC0044007
tttggtgtgtttt

SEQ ID NO: 177470 - DNA, 13 bp, Artificial Sequence
  Oligonucleotide for detection of SNP TSC0044007
aaaacacaccaaa

SEQ ID NO: 177471 - DNA, 13 bp, Artificial Sequence
  Oligonucleotide for detection of SNP TSC0044007
tttggtatgtttt

SEQ ID NO: 177472 - DNA, 13 bp, Artificial Sequence
  Oligonucleotide for detection of SNP TSC0044007
aaaacataccaaa

SEQ ID NO: 177473 - DNA, 13 bp, Artificial Sequence
  Oligonucleotide for detection of SNP TSC0044007
tttggcgtgtttt

SEQ ID NO: 177474 - DNA, 13 bp, Artificial Sequence
  Oligonucleotide for detection of SNP TSC0044007
aaaacacgccaaa

SEQ ID NO: 177475 - DNA, 13 bp, Artificial Sequence
  Oligonucleotide for detection of SNP TSC0044008
aatttttaaaaag

SEQ ID NO: 177476 - DNA, 13 bp, Artificial Sequence
  Oligonucleotide for detection of SNP TSC0044008
ctttttaaaaatt

SEQ ID NO: 177477 - DNA, 13 bp, Artificial Sequence
  Oligonucleotide for detection of SNP TSC0044008
aattttaaaaaag

SEQ ID NO: 177478 - DNA, 13 bp, Artificial Sequence
  Oligonucleotide for detection of SNP TSC0044008
cttttttaaaatt

SEQ ID NO: 177479 - DNA, 13 bp, Artificial Sequence
  Oligonucleotide for detection of SNP TSC0044009
ttgaatatgaggg

SEQ ID NO: 177480 - DNA, 13 bp, Artificial Sequence
  Oligonucleotide for detection of SNP TSC0044009
ccctcatattcaa

SEQ ID NO: 177481 - DNA, 13 bp, Artificial Sequence
  Oligonucleotide for detection of SNP TSC0044009
ttgaatgtgaggg

SEQ ID NO: 177482 - DNA, 13 bp, Artificial Sequence
  Oligonucleotide for detection of SNP TSC0044009
ccctcacattcaa

SEQ ID NO: 177483 - DNA, 13 bp, Artificial Sequence
  Oligonucleotide for detection of SNP TSC0044010
tgataagttataa

SEQ ID NO: 177484 - DNA, 13 bp, Artificial Sequence
  Oligonucleotide for detection of SNP TSC0044010
ttataacttatca

SEQ ID NO: 177485 - DNA, 13 bp, Artificial Sequence
  Oligonucleotide for detection of SNP TSC0044010
tgataaattataa

SEQ ID NO: 177486 - DNA, 13 bp, Artificial Sequence
  Oligonucleotide for detection of SNP TSC0044010
ttataatttatca

SEQ ID NO: 177487 - DNA, 13 bp, Artificial Sequence
  Oligonucleotide for detection of SNP TSC0044012
atttttatttggt

SEQ ID NO: 177488 - DNA, 13 bp, Artificial Sequence
  Oligonucleotide for detection of SNP TSC0044012
accaaataaaaat

SEQ ID NO: 177489 - DNA, 13 bp, Artificial Sequence
  Oligonucleotide for detection of SNP TSC0044012
atttttgtttggt

SEQ ID NO: 177490 - DNA, 13 bp, Artificial Sequence
  Oligonucleotide for detection of SNP TSC0044012
accaaacaaaaat

SEQ ID NO: 177491 - DNA, 13 bp, Artificial Sequence
  Oligonucleotide for detection of SNP TSC0044013
atatttttaaaga

SEQ ID NO: 177492 - DNA, 13 bp, Artificial Sequence
  Oligonucleotide for detection of SNP TSC0044013
tctttaaaaatat

SEQ ID NO: 177493 - DNA, 13 bp, Artificial Sequence
  Oligonucleotide for detection of SNP TSC0044013
atattcgtaaaga

SEQ ID NO: 177494 - DNA, 13 bp, Artificial Sequence
  Oligonucleotide for detection of SNP TSC0044013
tctttacgaatat

SEQ ID NO: 177495 - DNA, 13 bp, Artificial Sequence
  Oligonucleotide for detection of SNP TSC0044013
tttttatgagtat

SEQ ID NO: 177496 - DNA, 13 bp, Artificial Sequence
  Oligonucleotide for detection of SNP TSC0044013
atactcataaaaa

SEQ ID NO: 177497 - DNA, 13 bp, Artificial Sequence
  Oligonucleotide for detection of SNP TSC0044013
tttttacgagtat

SEQ ID NO: 177498 - DNA, 13 bp, Artificial Sequence
  Oligonucleotide for detection of SNP TSC0044013
atactcgtaaaaa

SEQ ID NO: 177499 - DNA, 13 bp, Artificial Sequence
  Oligonucleotide for detection of SNP TSC0044014
tttttaggtgttg

SEQ ID NO: 177500 - DNA, 13 bp, Artificial Sequence
  Oligonucleotide for detection of SNP TSC0044014
caacacctaaaaa

SEQ ID NO: 177501 - DNA, 13 bp, Artificial Sequence
  Oligonucleotide for detection of SNP TSC0044014
tagtatatgaggg

SEQ ID NO: 177502 - DNA, 13 bp, Artificial Sequence
  Oligonucleotide for detection of SNP TSC0044014
ccctcatatacta

SEQ ID NO: 177503 - DNA, 13 bp, Artificial Sequence
  Oligonucleotide for detection of SNP TSC0044014
tagtatttgaggg

SEQ ID NO: 177504 - DNA, 13 bp, Artificial Sequence
  Oligonucleotide for detection of SNP TSC0044014
ccctcaaatacta

SEQ ID NO: 177505 - DNA, 13 bp, Artificial Sequence
  Oligonucleotide for detection of SNP TSC0006355
tttttatagaggg

SEQ ID NO: 177506 - DNA, 13 bp, Artificial Sequence
  Oligonucleotide for detection of SNP TSC0006355
ccctctataaaaa

SEQ ID NO: 177507 - DNA, 13 bp, Artificial Sequence
  Oligonucleotide for detection of SNP TSC0006355
tttttagagaggg

SEQ ID NO: 177508 - DNA, 13 bp, Artificial Sequence
  Oligonucleotide for detection of SNP TSC0006355
ccctctctaaaaa

SEQ ID NO: 177509 - DNA, 13 bp, Artificial Sequence
  Oligonucleotide for detection of SNP TSC0006355
ttttttgtgggga

SEQ ID NO: 177510 - DNA, 13 bp, Artificial Sequence
  Oligonucleotide for detection of SNP TSC0006355
tccccacaaaaaa

SEQ ID NO: 177511 - DNA, 13 bp, Artificial Sequence
  Oligonucleotide for detection of SNP TSC0006355
ttttttttgggga

SEQ ID NO: 177512 - DNA, 13 bp, Artificial Sequence
  Oligonucleotide for detection of SNP TSC0006355
tccccaaaaaaaa

SEQ ID NO: 177513 - DNA, 13 bp, Artificial Sequence
  Oligonucleotide for detection of SNP TSC0044015
atataagatattt

SEQ ID NO: 177514 - DNA, 13 bp, Artificial Sequence
  Oligonucleotide for detection of SNP TSC0044015
aaatatcttatat

SEQ ID NO: 177515 - DNA, 13 bp, Artificial Sequence
  Oligonucleotide for detection of SNP TSC0044015
atataaaatattt

SEQ ID NO: 177516 - DNA, 13 bp, Artificial Sequence
  Oligonucleotide for detection of SNP TSC0044015
aaatattttatat

SEQ ID NO: 177517 - DNA, 13 bp, Artificial Sequence
  Oligonucleotide for detection of SNP TSC0044016
tgttatattattt

SEQ ID NO: 177518 - DNA, 13 bp, Artificial Sequence
  Oligonucleotide for detection of SNP TSC0044016
aaataatataaca

SEQ ID NO: 177519 - DNA, 13 bp, Artificial Sequence
  Oligonucleotide for detection of SNP TSC0044016
tgttatgttattt

SEQ ID NO: 177520 - DNA, 13 bp, Artificial Sequence
  Oligonucleotide for detection of SNP TSC0044016
aaataacataaca

SEQ ID NO: 177521 - DNA, 13 bp, Artificial Sequence
  Oligonucleotide for detection of SNP TSC0044016
tgttacgttattt

SEQ ID NO: 177522 - DNA, 13 bp, Artificial Sequence
  Oligonucleotide for detection of SNP TSC0044016
aaataacgtaaca

SEQ ID NO: 177523 - DNA, 13 bp, Artificial Sequence
  Oligonucleotide for detection of SNP TSC0044016
agatgatgtagta

SEQ ID NO: 177524 - DNA, 13 bp, Artificial Sequence
  Oligonucleotide for detection of SNP TSC0044016
tactacatcatct

SEQ ID NO: 177525 - DNA, 13 bp, Artificial Sequence
  Oligonucleotide for detection of SNP TSC0044016
agatgacgtagta

SEQ ID NO: 177526 - DNA, 13 bp, Artificial Sequence
  Oligonucleotide for detection of SNP TSC0044016
tactacgtcatct

SEQ ID NO: 177527 - DNA, 13 bp, Artificial Sequence
  Oligonucleotide for detection of SNP TSC0044018
tttggaaagaaaa

SEQ ID NO: 177528 - DNA, 13 bp, Artificial Sequence
  Oligonucleotide for detection of SNP TSC0044018
ttttctttccaaa

SEQ ID NO: 177529 - DNA, 13 bp, Artificial Sequence
  Oligonucleotide for detection of SNP TSC0044018
tttggagagaaaa

SEQ ID NO: 177530 - DNA, 13 bp, Artificial Sequence
  Oligonucleotide for detection of SNP TSC0044018
ttttctctccaaa

SEQ ID NO: 177531 - DNA, 13 bp, Artificial Sequence
  Oligonucleotide for detection of SNP TSC0044020
taggtatgatggy

SEQ ID NO: 177532 - DNA, 13 bp, Artificial Sequence
  Oligonucleotide for detection of SNP TSC0044020
rccatcataccta

SEQ ID NO: 177533 - DNA, 13 bp, Artificial Sequence
  Oligonucleotide for detection of SNP TSC0044020
taggtacgatggy

SEQ ID NO: 177534 - DNA, 13 bp, Artificial Sequence
  Oligonucleotide for detection of SNP TSC0044020
rccatcgtaccta

SEQ ID NO: 177535 - DNA, 13 bp, Artificial Sequence
  Oligonucleotide for detection of SNP TSC0044021
gtttataagtaay

SEQ ID NO: 177536 - DNA, 13 bp, Artificial Sequence
  Oligonucleotide for detection of SNP TSC0044021
rttacttataaac

SEQ ID NO: 177537 - DNA, 13 bp, Artificial Sequence
  Oligonucleotide for detection of SNP TSC0044021
gtttattagtaay

SEQ ID NO: 177538 - DNA, 13 bp, Artificial Sequence
  Oligonucleotide for detection of SNP TSC0044021
rttactaataaac

SEQ ID NO: 177539 - DNA, 13 bp, Artificial Sequence
  Oligonucleotide for detection of SNP TSC0044021
gttgtttgtaagy

SEQ ID NO: 177540 - DNA, 13 bp, Artificial Sequence
  Oligonucleotide for detection of SNP TSC0044021
rcttacaaacaac

SEQ ID NO: 177541 - DNA, 13 bp, Artificial Sequence
  Oligonucleotide for detection of SNP TSC0044021
gttgttagtaagy

SEQ ID NO: 177542 - DNA, 13 bp, Artificial Sequence
  Oligonucleotide for detection of SNP TSC0044021
rcttactaacaac

SEQ ID NO: 177543 - DNA, 13 bp, Artificial Sequence
  Oligonucleotide for detection of SNP TSC0044022
gaatgtattaggy

SEQ ID NO: 177544 - DNA, 13 bp, Artificial Sequence
  Oligonucleotide for detection of SNP TSC0044022
rcctaatacattc

SEQ ID NO: 177545 - DNA, 13 bp, Artificial Sequence
  Oligonucleotide for detection of SNP TSC0044022
gaatgtgttaggy

SEQ ID NO: 177546 - DNA, 13 bp, Artificial Sequence
  Oligonucleotide for detection of SNP TSC0044022
rcctaacacattc

SEQ ID NO: 177547 - DNA, 13 bp, Artificial Sequence
  Oligonucleotide for detection of SNP TSC0044024
aagtatatttgtt

SEQ ID NO: 177548 - DNA, 13 bp, Artificial Sequence
  Oligonucleotide for detection of SNP TSC0044024
aacaaatatactt

SEQ ID NO: 177549 - DNA, 13 bp, Artificial Sequence
  Oligonucleotide for detection of SNP TSC0044024
aagtatgtttgtt

SEQ ID NO: 177550 - DNA, 13 bp, Artificial Sequence
  Oligonucleotide for detection of SNP TSC0044024
aacaaacatactt

SEQ ID NO: 177551 - DNA, 13 bp, Artificial Sequence
  Oligonucleotide for detection of SNP TSC0044025
aatagatgaggaa

SEQ ID NO: 177552 - DNA, 13 bp, Artificial Sequence
  Oligonucleotide for detection of SNP TSC0044025
ttcctcatctatt

SEQ ID NO: 177553 - DNA, 13 bp, Artificial Sequence
  Oligonucleotide for detection of SNP TSC0044025
aatagaagaggaa

SEQ ID NO: 177554 - DNA, 13 bp, Artificial Sequence
  Oligonucleotide for detection of SNP TSC0044025
ttcctcttctatt

SEQ ID NO: 177555 - DNA, 13 bp, Artificial Sequence
  Oligonucleotide for detection of SNP TSC0044026
tggatttttaagt

SEQ ID NO: 177556 - DNA, 13 bp, Artificial Sequence
  Oligonucleotide for detection of SNP TSC0044026
acttaaaaatcca

SEQ ID NO: 177557 - DNA, 13 bp, Artificial Sequence
  Oligonucleotide for detection of SNP TSC0044026
tggattgttaagt

SEQ ID NO: 177558 - DNA, 13 bp, Artificial Sequence
  Oligonucleotide for detection of SNP TSC0044026
acttaacaatcca

SEQ ID NO: 177559 - DNA, 13 bp, Artificial Sequence
  Oligonucleotide for detection of SNP TSC0044026
atttgagagttta

SEQ ID NO: 177560 - DNA, 13 bp, Artificial Sequence
  Oligonucleotide for detection of SNP TSC0044026
taaactctcaaat

SEQ ID NO: 177561 - DNA, 13 bp, Artificial Sequence
  Oligonucleotide for detection of SNP TSC0044026
atttgatagttta

SEQ ID NO: 177562 - DNA, 13 bp, Artificial Sequence
  Oligonucleotide for detection of SNP TSC0044026
taaactatcaaat

SEQ ID NO: 177563 - DNA, 13 bp, Artificial Sequence
  Oligonucleotide for detection of SNP TSC0044027
aaatgtgtaataa

SEQ ID NO: 177564 - DNA, 13 bp, Artificial Sequence
  Oligonucleotide for detection of SNP TSC0044027
ttattacacattt

SEQ ID NO: 177565 - DNA, 13 bp, Artificial Sequence
  Oligonucleotide for detection of SNP TSC0044027
aaatgtataataa

SEQ ID NO: 177566 - DNA, 13 bp, Artificial Sequence
  Oligonucleotide for detection of SNP TSC0044027
ttattatacattt

SEQ ID NO: 177567 - DNA, 13 bp, Artificial Sequence
  Oligonucleotide for detection of SNP TSC0044028
ttgtagtgtatty

SEQ ID NO: 177568 - DNA, 13 bp, Artificial Sequence
  Oligonucleotide for detection of SNP TSC0044028
raatacactacaa

SEQ ID NO: 177569 - DNA, 13 bp, Artificial Sequence
  Oligonucleotide for detection of SNP TSC0044028
ttgtagcgtatty

SEQ ID NO: 177570 - DNA, 13 bp, Artificial Sequence
  Oligonucleotide for detection of SNP TSC0044028
raatacgctacaa

SEQ ID NO: 177571 - DNA, 13 bp, Artificial Sequence
  Oligonucleotide for detection of SNP TSC0044028
gggtatgttgtag

SEQ ID NO: 177572 - DNA, 13 bp, Artificial Sequence
  Oligonucleotide for detection of SNP TSC0044028
ctacaacataccc

SEQ ID NO: 177573 - DNA, 13 bp, Artificial Sequence
  Oligonucleotide for detection of SNP TSC0044028
gggtatattgtag

SEQ ID NO: 177574 - DNA, 13 bp, Artificial Sequence
  Oligonucleotide for detection of SNP TSC0044028
ctacaatataccc

SEQ ID NO: 177575 - DNA, 13 bp, Artificial Sequence
  Oligonucleotide for detection of SNP TSC0044028
gggtacgttgtag

SEQ ID NO: 177576 - DNA, 13 bp, Artificial Sequence
  Oligonucleotide for detection of SNP TSC0044028
ctacaacgtaccc

SEQ ID NO: 177577 - DNA, 13 bp, Artificial Sequence
  Oligonucleotide for detection of SNP TSC0044029
atattagaaaatt

SEQ ID NO: 177578 - DNA, 13 bp, Artificial Sequence
  Oligonucleotide for detection of SNP TSC0044029
aattttctaatat

SEQ ID NO: 177579 - DNA, 13 bp, Artificial Sequence
  Oligonucleotide for detection of SNP TSC0044030
aaaatgggttttt

SEQ ID NO: 177580 - DNA, 13 bp, Artificial Sequence
  Oligonucleotide for detection of SNP TSC0044030
aaaaacccatttt

SEQ ID NO: 177581 - DNA, 13 bp, Artificial Sequence
  Oligonucleotide for detection of SNP TSC0044030
aaaatgagttttt

SEQ ID NO: 177582 - DNA, 13 bp, Artificial Sequence
  Oligonucleotide for detection of SNP TSC0044030
aaaaactcatttt

SEQ ID NO: 177583 - DNA, 13 bp, Artificial Sequence
  Oligonucleotide for detection of SNP TSC0044031
tttaatgttatta

SEQ ID NO: 177584 - DNA, 13 bp, Artificial Sequence
  Oligonucleotide for detection of SNP TSC0044031
taataacattaaa

SEQ ID NO: 177585 - DNA, 13 bp, Artificial Sequence
  Oligonucleotide for detection of SNP TSC0044031
tttaatattatta

SEQ ID NO: 177586 - DNA, 13 bp, Artificial Sequence
  Oligonucleotide for detection of SNP TSC0044031
taataatattaaa

SEQ ID NO: 177587 - DNA, 13 bp, Artificial Sequence
  Oligonucleotide for detection of SNP TSC0044033
tgatttagaattg

SEQ ID NO: 177588 - DNA, 13 bp, Artificial Sequence
  Oligonucleotide for detection of SNP TSC0044033
caattctaaatca

SEQ ID NO: 177589 - DNA, 13 bp, Artificial Sequence
  Oligonucleotide for detection of SNP TSC0044033
tgatttggaattg

SEQ ID NO: 177590 - DNA, 13 bp, Artificial Sequence
  Oligonucleotide for detection of SNP TSC0044033
caattccaaatca

SEQ ID NO: 177591 - DNA, 13 bp, Artificial Sequence
  Oligonucleotide for detection of SNP TSC0044034
attgtatgattta

SEQ ID NO: 177592 - DNA, 13 bp, Artificial Sequence
  Oligonucleotide for detection of SNP TSC0044034
taaatcatacaat

SEQ ID NO: 177593 - DNA, 13 bp, Artificial Sequence
  Oligonucleotide for detection of SNP TSC0044034
attgtacgattta

SEQ ID NO: 177594 - DNA, 13 bp, Artificial Sequence
  Oligonucleotide for detection of SNP TSC0044034
taaatcgtacaat

SEQ ID NO: 177595 - DNA, 13 bp, Artificial Sequence
  Oligonucleotide for detection of SNP TSC0044034
taaattgtataat

SEQ ID NO: 177596 - DNA, 13 bp, Artificial Sequence
  Oligonucleotide for detection of SNP TSC0044034
attatacaattta

SEQ ID NO: 177597 - DNA, 13 bp, Artificial Sequence
  Oligonucleotide for detection of SNP TSC0044034
taaattatataat

SEQ ID NO: 177598 - DNA, 13 bp, Artificial Sequence
  Oligonucleotide for detection of SNP TSC0044034
attatataattta

SEQ ID NO: 177599 - DNA, 13 bp, Artificial Sequence
  Oligonucleotide for detection of SNP TSC0044034
taaatcgtataat

SEQ ID NO: 177600 - DNA, 13 bp, Artificial Sequence
  Oligonucleotide for detection of SNP TSC0044034
attatacgattta

SEQ ID NO: 177601 - DNA, 13 bp, Artificial Sequence
  Oligonucleotide for detection of SNP TSC0044035
tttggtgaggtat

SEQ ID NO: 177602 - DNA, 13 bp, Artificial Sequence
  Oligonucleotide for detection of SNP TSC0044035
atacctcaccaaa

SEQ ID NO: 177603 - DNA, 13 bp, Artificial Sequence
  Oligonucleotide for detection of SNP TSC0044035
tttggtaaggtat

SEQ ID NO: 177604 - DNA, 13 bp, Artificial Sequence
  Oligonucleotide for detection of SNP TSC0044035
ataccttaccaaa

SEQ ID NO: 177605 - DNA, 13 bp, Artificial Sequence
  Oligonucleotide for detection of SNP TSC0044036
gttatagaggaaa

SEQ ID NO: 177606 - DNA, 13 bp, Artificial Sequence
  Oligonucleotide for detection of SNP TSC0044036
tttcctctataac

SEQ ID NO: 177607 - DNA, 13 bp, Artificial Sequence
  Oligonucleotide for detection of SNP TSC0044036
gttataaaggaaa

SEQ ID NO: 177608 - DNA, 13 bp, Artificial Sequence
  Oligonucleotide for detection of SNP TSC0044036
tttcctttataac

SEQ ID NO: 177609 - DNA, 13 bp, Artificial Sequence
  Oligonucleotide for detection of SNP TSC0044037
tatatagttggta

SEQ ID NO: 177610 - DNA, 13 bp, Artificial Sequence
  Oligonucleotide for detection of SNP TSC0044037
taccaactatata

SEQ ID NO: 177611 - DNA, 13 bp, Artificial Sequence
  Oligonucleotide for detection of SNP TSC0044037
tatataattggta

SEQ ID NO: 177612 - DNA, 13 bp, Artificial Sequence
  Oligonucleotide for detection of SNP TSC0044037
taccaattatata

SEQ ID NO: 177613 - DNA, 13 bp, Artificial Sequence
  Oligonucleotide for detection of SNP TSC0044037
tatatagtcggta

SEQ ID NO: 177614 - DNA, 13 bp, Artificial Sequence
  Oligonucleotide for detection of SNP TSC0044037
taccgactatata

SEQ ID NO: 177615 - DNA, 13 bp, Artificial Sequence
  Oligonucleotide for detection of SNP TSC0044037
tatataatcggta

SEQ ID NO: 177616 - DNA, 13 bp, Artificial Sequence
  Oligonucleotide for detection of SNP TSC0044037
taccgattatata

SEQ ID NO: 177617 - DNA, 13 bp, Artificial Sequence
  Oligonucleotide for detection of SNP TSC0007643
tgtttatgatgtt

SEQ ID NO: 177618 - DNA, 13 bp, Artificial Sequence
  Oligonucleotide for detection of SNP TSC0007643
aacatcataaaca

SEQ ID NO: 177619 - DNA, 13 bp, Artificial Sequence
  Oligonucleotide for detection of SNP TSC0007643
tgtttacgatgtt

SEQ ID NO: 177620 - DNA, 13 bp, Artificial Sequence
  Oligonucleotide for detection of SNP TSC0007643
aacatcgtaaaca

SEQ ID NO: 177621 - DNA, 13 bp, Artificial Sequence
  Oligonucleotide for detection of SNP TSC0007643
tgtttatgacgtt

SEQ ID NO: 177622 - DNA, 13 bp, Artificial Sequence
  Oligonucleotide for detection of SNP TSC0007643
aacgtcataaaca

SEQ ID NO: 177623 - DNA, 13 bp, Artificial Sequence
  Oligonucleotide for detection of SNP TSC0007643
tgtttacgacgtt

SEQ ID NO: 177624 - DNA, 13 bp, Artificial Sequence
  Oligonucleotide for detection of SNP TSC0007643
aacgtcgtaaaca

SEQ ID NO: 177625 - DNA, 13 bp, Artificial Sequence
  Oligonucleotide for detection of SNP TSC0007643
aatgttataggta

SEQ ID NO: 177626 - DNA, 13 bp, Artificial Sequence
  Oligonucleotide for detection of SNP TSC0007643
tacctataacatt

SEQ ID NO: 177627 - DNA, 13 bp, Artificial Sequence
  Oligonucleotide for detection of SNP TSC0007643
aacgttgtaggta

SEQ ID NO: 177628 - DNA, 13 bp, Artificial Sequence
  Oligonucleotide for detection of SNP TSC0007643
tacctacaacgtt

SEQ ID NO: 177629 - DNA, 13 bp, Artificial Sequence
  Oligonucleotide for detection of SNP TSC0007643
aacgttataggta

SEQ ID NO: 177630 - DNA, 13 bp, Artificial Sequence
  Oligonucleotide for detection of SNP TSC0007643
tacctataacgtt

SEQ ID NO: 177631 - DNA, 13 bp, Artificial Sequence
  Oligonucleotide for detection of SNP TSC0007643
aatgtcgtaggta

SEQ ID NO: 177632 - DNA, 13 bp, Artificial Sequence
  Oligonucleotide for detection of SNP TSC0007643
tacctacgacatt

SEQ ID NO: 177633 - DNA, 13 bp, Artificial Sequence
  Oligonucleotide for detection of SNP TSC0007643
aacgtcgtaggta

SEQ ID NO: 177634 - DNA, 13 bp, Artificial Sequence
  Oligonucleotide for detection of SNP TSC0007643
tacctacgacgtt

SEQ ID NO: 177635 - DNA, 13 bp, Artificial Sequence
  Oligonucleotide for detection of SNP TSC0007644
gtaaaatgtgtat

SEQ ID NO: 177636 - DNA, 13 bp, Artificial Sequence
  Oligonucleotide for detection of SNP TSC0007644
atacacattttac

SEQ ID NO: 177637 - DNA, 13 bp, Artificial Sequence
  Oligonucleotide for detection of SNP TSC0007644
gtaaaacgtgtat

SEQ ID NO: 177638 - DNA, 13 bp, Artificial Sequence
  Oligonucleotide for detection of SNP TSC0007644
atacacgttttac

SEQ ID NO: 177639 - DNA, 13 bp, Artificial Sequence
  Oligonucleotide for detection of SNP TSC0007644
atatatgttttay

SEQ ID NO: 177640 - DNA, 13 bp, Artificial Sequence
  Oligonucleotide for detection of SNP TSC0007644
rtaaaacatatat

SEQ ID NO: 177641 - DNA, 13 bp, Artificial Sequence
  Oligonucleotide for detection of SNP TSC0007644
atatatattttay

SEQ ID NO: 177642 - DNA, 13 bp, Artificial Sequence
  Oligonucleotide for detection of SNP TSC0007644
rtaaaatatatat

SEQ ID NO: 177643 - DNA, 13 bp, Artificial Sequence
  Oligonucleotide for detection of SNP TSC0007644
atatacgttttay

SEQ ID NO: 177644 - DNA, 13 bp, Artificial Sequence
  Oligonucleotide for detection of SNP TSC0007644
rtaaaacgtatat

SEQ ID NO: 177645 - DNA, 13 bp, Artificial Sequence
  Oligonucleotide for detection of SNP TSC0005671
aaggtagtatgaa

SEQ ID NO: 177646 - DNA, 13 bp, Artificial Sequence
  Oligonucleotide for detection of SNP TSC0005671
ttcatactacctt

SEQ ID NO: 177647 - DNA, 13 bp, Artificial Sequence
  Oligonucleotide for detection of SNP TSC0005671
aaggtaatatgaa

SEQ ID NO: 177648 - DNA, 13 bp, Artificial Sequence
  Oligonucleotide for detection of SNP TSC0005671
ttcatattacctt

SEQ ID NO: 177649 - DNA, 13 bp, Artificial Sequence
  Oligonucleotide for detection of SNP TSC0044038
atttgaattatag

SEQ ID NO: 177650 - DNA, 13 bp, Artificial Sequence
  Oligonucleotide for detection of SNP TSC0044038
ctataattcaaat

SEQ ID NO: 177651 - DNA, 13 bp, Artificial Sequence
  Oligonucleotide for detection of SNP TSC0044038
atttgagttatag

SEQ ID NO: 177652 - DNA, 13 bp, Artificial Sequence
  Oligonucleotide for detection of SNP TSC0044038
ctataactcaaat

SEQ ID NO: 177653 - DNA, 13 bp, Artificial Sequence
  Oligonucleotide for detection of SNP TSC0044039
attttaatttagt

SEQ ID NO: 177654 - DNA, 13 bp, Artificial Sequence
  Oligonucleotide for detection of SNP TSC0044039
actaaattaaaat

SEQ ID NO: 177655 - DNA, 13 bp, Artificial Sequence
  Oligonucleotide for detection of SNP TSC0007928
ttttttataatat

SEQ ID NO: 177656 - DNA, 13 bp, Artificial Sequence
  Oligonucleotide for detection of SNP TSC0007928
atattataaaaaa

SEQ ID NO: 177657 - DNA, 13 bp, Artificial Sequence
  Oligonucleotide for detection of SNP TSC0007928
ttttttttaatat

SEQ ID NO: 177658 - DNA, 13 bp, Artificial Sequence
  Oligonucleotide for detection of SNP TSC0007928
atattaaaaaaaa

SEQ ID NO: 177659 - DNA, 13 bp, Artificial Sequence
  Oligonucleotide for detection of SNP TSC0007928
atattataagaaa

SEQ ID NO: 177660 - DNA, 13 bp, Artificial Sequence
  Oligonucleotide for detection of SNP TSC0007928
tttcttataatat

SEQ ID NO: 177661 - DNA, 13 bp, Artificial Sequence
  Oligonucleotide for detection of SNP TSC0007928
atattaaaagaaa

SEQ ID NO: 177662 - DNA, 13 bp, Artificial Sequence
  Oligonucleotide for detection of SNP TSC0007928
tttcttttaatat

SEQ ID NO: 177663 - DNA, 13 bp, Artificial Sequence
  Oligonucleotide for detection of SNP TSC0005430
agtttatagagaa

SEQ ID NO: 177664 - DNA, 13 bp, Artificial Sequence
  Oligonucleotide for detection of SNP TSC0005430
ttctctataaact

SEQ ID NO: 177665 - DNA, 13 bp, Artificial Sequence
  Oligonucleotide for detection of SNP TSC0005430
agtttagagagaa

SEQ ID NO: 177666 - DNA, 13 bp, Artificial Sequence
  Oligonucleotide for detection of SNP TSC0005430
ttctctctaaact

SEQ ID NO: 177667 - DNA, 13 bp, Artificial Sequence
  Oligonucleotide for detection of SNP TSC0005430
ttttttgtgaatt

SEQ ID NO: 177668 - DNA, 13 bp, Artificial Sequence
  Oligonucleotide for detection of SNP TSC0005430
aattcacaaaaaa

SEQ ID NO: 177669 - DNA, 13 bp, Artificial Sequence
  Oligonucleotide for detection of SNP TSC0005430
ttttttttgaatt

SEQ ID NO: 177670 - DNA, 13 bp, Artificial Sequence
  Oligonucleotide for detection of SNP TSC0005430
aattcaaaaaaaa

SEQ ID NO: 177671 - DNA, 13 bp, Artificial Sequence
  Oligonucleotide for detection of SNP TSC0005432
tattgtaattaay

SEQ ID NO: 177672 - DNA, 13 bp, Artificial Sequence
  Oligonucleotide for detection of SNP TSC0005432
rttaattacaata

SEQ ID NO: 177673 - DNA, 13 bp, Artificial Sequence
  Oligonucleotide for detection of SNP TSC0005432
tattgttattaay

SEQ ID NO: 177674 - DNA, 13 bp, Artificial Sequence
  Oligonucleotide for detection of SNP TSC0005432
rttaataacaata

SEQ ID NO: 177675 - DNA, 13 bp, Artificial Sequence
  Oligonucleotide for detection of SNP TSC0005432
gttggttatagta

SEQ ID NO: 177676 - DNA, 13 bp, Artificial Sequence
  Oligonucleotide for detection of SNP TSC0005432
tactataaccaac

SEQ ID NO: 177677 - DNA, 13 bp, Artificial Sequence
  Oligonucleotide for detection of SNP TSC0005432
gttggtaatagta

SEQ ID NO: 177678 - DNA, 13 bp, Artificial Sequence
  Oligonucleotide for detection of SNP TSC0005432
tactattaccaac

SEQ ID NO: 177679 - DNA, 13 bp, Artificial Sequence
  Oligonucleotide for detection of SNP TSC0044044
taatgagaaaatg

SEQ ID NO: 177680 - DNA, 13 bp, Artificial Sequence
  Oligonucleotide for detection of SNP TSC0044044
cattttctcatta

SEQ ID NO: 177681 - DNA, 13 bp, Artificial Sequence
  Oligonucleotide for detection of SNP TSC0044044
taatgaaaaaatg

SEQ ID NO: 177682 - DNA, 13 bp, Artificial Sequence
  Oligonucleotide for detection of SNP TSC0044044
cattttttcatta

SEQ ID NO: 177683 - DNA, 13 bp, Artificial Sequence
  Oligonucleotide for detection of SNP TSC0044044
taacgagaaaatg

SEQ ID NO: 177684 - DNA, 13 bp, Artificial Sequence
  Oligonucleotide for detection of SNP TSC0044044
cattttctcgtta

SEQ ID NO: 177685 - DNA, 13 bp, Artificial Sequence
  Oligonucleotide for detection of SNP TSC0044044
taacgaaaaaatg

SEQ ID NO: 177686 - DNA, 13 bp, Artificial Sequence
  Oligonucleotide for detection of SNP TSC0044044
cattttttcgtta

SEQ ID NO: 177687 - DNA, 13 bp, Artificial Sequence
  Oligonucleotide for detection of SNP TSC0044045
aattattgtgtty

SEQ ID NO: 177688 - DNA, 13 bp, Artificial Sequence
  Oligonucleotide for detection of SNP TSC0044045
raacacaataatt

SEQ ID NO: 177689 - DNA, 13 bp, Artificial Sequence
  Oligonucleotide for detection of SNP TSC0044045
aattattgcgtty

SEQ ID NO: 177690 - DNA, 13 bp, Artificial Sequence
  Oligonucleotide for detection of SNP TSC0044045
raacgcaataatt

SEQ ID NO: 177691 - DNA, 13 bp, Artificial Sequence
  Oligonucleotide for detection of SNP TSC0044045
aattatcgtgtty

SEQ ID NO: 177692 - DNA, 13 bp, Artificial Sequence
  Oligonucleotide for detection of SNP TSC0044045
raacacgataatt

SEQ ID NO: 177693 - DNA, 13 bp, Artificial Sequence
  Oligonucleotide for detection of SNP TSC0044045
aattatcgcgtty

SEQ ID NO: 177694 - DNA, 13 bp, Artificial Sequence
  Oligonucleotide for detection of SNP TSC0044045
raacgcgataatt

SEQ ID NO: 177695 - DNA, 13 bp, Artificial Sequence
  Oligonucleotide for detection of SNP TSC0044046
ttgggattttaag

SEQ ID NO: 177696 - DNA, 13 bp, Artificial Sequence
  Oligonucleotide for detection of SNP TSC0044046
cttaaaatcccaa

SEQ ID NO: 177697 - DNA, 13 bp, Artificial Sequence
  Oligonucleotide for detection of SNP TSC0044046
ttgggagtttaag

SEQ ID NO: 177698 - DNA, 13 bp, Artificial Sequence
  Oligonucleotide for detection of SNP TSC0044046
cttaaactcccaa

SEQ ID NO: 177699 - DNA, 13 bp, Artificial Sequence
  Oligonucleotide for detection of SNP TSC0044046
tcgggattttaag

SEQ ID NO: 177700 - DNA, 13 bp, Artificial Sequence
  Oligonucleotide for detection of SNP TSC0044046
cttaaaatcccga

SEQ ID NO: 177701 - DNA, 13 bp, Artificial Sequence
  Oligonucleotide for detection of SNP TSC0044046
tcgggagtttaag

SEQ ID NO: 177702 - DNA, 13 bp, Artificial Sequence
  Oligonucleotide for detection of SNP TSC0044046
cttaaactcccga

SEQ ID NO: 177703 - DNA, 13 bp, Artificial Sequence
  Oligonucleotide for detection of SNP TSC0044046
tttgaaattttga

SEQ ID NO: 177704 - DNA, 13 bp, Artificial Sequence
  Oligonucleotide for detection of SNP TSC0044046
tcaaaatttcaaa

SEQ ID NO: 177705 - DNA, 13 bp, Artificial Sequence
  Oligonucleotide for detection of SNP TSC0044046
tttgaatttttga

SEQ ID NO: 177706 - DNA, 13 bp, Artificial Sequence
  Oligonucleotide for detection of SNP TSC0044046
tcaaaaattcaaa

SEQ ID NO: 177707 - DNA, 13 bp, Artificial Sequence
  Oligonucleotide for detection of SNP TSC0044046
tttgaaatttcga

SEQ ID NO: 177708 - DNA, 13 bp, Artificial Sequence
  Oligonucleotide for detection of SNP TSC0044046
tcgaaatttcaaa

SEQ ID NO: 177709 - DNA, 13 bp, Artificial Sequence
  Oligonucleotide for detection of SNP TSC0044046
tttgaattttcga

SEQ ID NO: 177710 - DNA, 13 bp, Artificial Sequence
  Oligonucleotide for detection of SNP TSC0044046
tcgaaaattcaaa

SEQ ID NO: 177711 - DNA, 13 bp, Artificial Sequence
  Oligonucleotide for detection of SNP TSC0044047
taaaaagattaat

SEQ ID NO: 177712 - DNA, 13 bp, Artificial Sequence
  Oligonucleotide for detection of SNP TSC0044047
attaatcttttta

SEQ ID NO: 177713 - DNA, 13 bp, Artificial Sequence
  Oligonucleotide for detection of SNP TSC0044048
ttaaatataaaag

SEQ ID NO: 177714 - DNA, 13 bp, Artificial Sequence
  Oligonucleotide for detection of SNP TSC0044048
cttttatatttaa

SEQ ID NO: 177715 - DNA, 13 bp, Artificial Sequence
  Oligonucleotide for detection of SNP TSC0044048
ttaaatttaaaag

SEQ ID NO: 177716 - DNA, 13 bp, Artificial Sequence
  Oligonucleotide for detection of SNP TSC0044048
cttttaaatttaa

SEQ ID NO: 177717 - DNA, 13 bp, Artificial Sequence
  Oligonucleotide for detection of SNP TSC0044049
tagagaatttgty

SEQ ID NO: 177718 - DNA, 13 bp, Artificial Sequence
  Oligonucleotide for detection of SNP TSC0044049
racaaattctcta

SEQ ID NO: 177719 - DNA, 13 bp, Artificial Sequence
  Oligonucleotide for detection of SNP TSC0044049
tagagattttgty

SEQ ID NO: 177720 - DNA, 13 bp, Artificial Sequence
  Oligonucleotide for detection of SNP TSC0044049
racaaaatctcta

SEQ ID NO: 177721 - DNA, 13 bp, Artificial Sequence
  Oligonucleotide for detection of SNP TSC0044049
gataggttttttg

SEQ ID NO: 177722 - DNA, 13 bp, Artificial Sequence
  Oligonucleotide for detection of SNP TSC0044049
caaaaaacctatc

SEQ ID NO: 177723 - DNA, 13 bp, Artificial Sequence
  Oligonucleotide for detection of SNP TSC0044049
gatagggtttttg

SEQ ID NO: 177724 - DNA, 13 bp, Artificial Sequence
  Oligonucleotide for detection of SNP TSC0044049
caaaaaccctatc

SEQ ID NO: 177725 - DNA, 13 bp, Artificial Sequence
  Oligonucleotide for detection of SNP TSC0006932
aggtgggaggtaa

SEQ ID NO: 177726 - DNA, 13 bp, Artificial Sequence
  Oligonucleotide for detection of SNP TSC0006932
ttacctcccacct

SEQ ID NO: 177727 - DNA, 13 bp, Artificial Sequence
  Oligonucleotide for detection of SNP TSC0006932
aggtggaaggtaa

SEQ ID NO: 177728 - DNA, 13 bp, Artificial Sequence
  Oligonucleotide for detection of SNP TSC0006932
ttaccttccacct

SEQ ID NO: 177729 - DNA, 13 bp, Artificial Sequence
  Oligonucleotide for detection of SNP TSC0006581
gtttaaggaaaaa

SEQ ID NO: 177730 - DNA, 13 bp, Artificial Sequence
  Oligonucleotide for detection of SNP TSC0006581
tttttccttaaac

SEQ ID NO: 177731 - DNA, 13 bp, Artificial Sequence
  Oligonucleotide for detection of SNP TSC0006581
gtttaaagaaaaa

SEQ ID NO: 177732 - DNA, 13 bp, Artificial Sequence
  Oligonucleotide for detection of SNP TSC0006581
tttttctttaaac

SEQ ID NO: 177733 - DNA, 13 bp, Artificial Sequence
  Oligonucleotide for detection of SNP TSC0044059
ttatgtagtaaaa

SEQ ID NO: 177734 - DNA, 13 bp, Artificial Sequence
  Oligonucleotide for detection of SNP TSC0044059
ttttactacataa

SEQ ID NO: 177735 - DNA, 13 bp, Artificial Sequence
  Oligonucleotide for detection of SNP TSC0044059
ttatgtggtaaaa

SEQ ID NO: 177736 - DNA, 13 bp, Artificial Sequence
  Oligonucleotide for detection of SNP TSC0044059
ttttaccacataa

SEQ ID NO: 177737 - DNA, 13 bp, Artificial Sequence
  Oligonucleotide for detection of SNP TSC0044059
ttatgcggtaaaa

SEQ ID NO: 177738 - DNA, 13 bp, Artificial Sequence
  Oligonucleotide for detection of SNP TSC0044059
ttttaccgcataa

SEQ ID NO: 177739 - DNA, 13 bp, Artificial Sequence
  Oligonucleotide for detection of SNP TSC0044059
ttttgttgtatgg

SEQ ID NO: 177740 - DNA, 13 bp, Artificial Sequence
  Oligonucleotide for detection of SNP TSC0044059
ccatacaacaaaa

SEQ ID NO: 177741 - DNA, 13 bp, Artificial Sequence
  Oligonucleotide for detection of SNP TSC0044059
ttttgtcgtatgg

SEQ ID NO: 177742 - DNA, 13 bp, Artificial Sequence
  Oligonucleotide for detection of SNP TSC0044059
ccatacgacaaaa

SEQ ID NO: 177743 - DNA, 13 bp, Artificial Sequence
  Oligonucleotide for detection of SNP TSC0044060
atgttattattta

SEQ ID NO: 177744 - DNA, 13 bp, Artificial Sequence
  Oligonucleotide for detection of SNP TSC0044060
taaataataacat

SEQ ID NO: 177745 - DNA, 13 bp, Artificial Sequence
  Oligonucleotide for detection of SNP TSC0044060
atgttagtattta

SEQ ID NO: 177746 - DNA, 13 bp, Artificial Sequence
  Oligonucleotide for detection of SNP TSC0044060
taaatactaacat

SEQ ID NO: 177747 - DNA, 13 bp, Artificial Sequence
  Oligonucleotide for detection of SNP TSC0044060
taggtggtgatat

SEQ ID NO: 177748 - DNA, 13 bp, Artificial Sequence
  Oligonucleotide for detection of SNP TSC0044060
atatcaccaccta

SEQ ID NO: 177749 - DNA, 13 bp, Artificial Sequence
  Oligonucleotide for detection of SNP TSC0044060
taggtgttgatat

SEQ ID NO: 177750 - DNA, 13 bp, Artificial Sequence
  Oligonucleotide for detection of SNP TSC0044060
atatcaacaccta

SEQ ID NO: 177751 - DNA, 13 bp, Artificial Sequence
  Oligonucleotide for detection of SNP TSC0008133
ttttaggttgtaa

SEQ ID NO: 177752 - DNA, 13 bp, Artificial Sequence
  Oligonucleotide for detection of SNP TSC0008133
ttacaacctaaaa

SEQ ID NO: 177753 - DNA, 13 bp, Artificial Sequence
  Oligonucleotide for detection of SNP TSC0008133
ttttagattgtaa

SEQ ID NO: 177754 - DNA, 13 bp, Artificial Sequence
  Oligonucleotide for detection of SNP TSC0008133
ttacaatctaaaa

SEQ ID NO: 177755 - DNA, 13 bp, Artificial Sequence
  Oligonucleotide for detection of SNP TSC0044061
tttaattttgtat

SEQ ID NO: 177756 - DNA, 13 bp, Artificial Sequence
  Oligonucleotide for detection of SNP TSC0044061
atacaaaattaaa

SEQ ID NO: 177757 - DNA, 13 bp, Artificial Sequence
  Oligonucleotide for detection of SNP TSC0044061
tttaacgttgtat

SEQ ID NO: 177758 - DNA, 13 bp, Artificial Sequence
  Oligonucleotide for detection of SNP TSC0044061
atacaacgttaaa

SEQ ID NO: 177759 - DNA, 13 bp, Artificial Sequence
  Oligonucleotide for detection of SNP TSC0044061
atgtagggttaga

SEQ ID NO: 177760 - DNA, 13 bp, Artificial Sequence
  Oligonucleotide for detection of SNP TSC0044061
tctaaccctacat

SEQ ID NO: 177761 - DNA, 13 bp, Artificial Sequence
  Oligonucleotide for detection of SNP TSC0044061
atgtagtgttaga

SEQ ID NO: 177762 - DNA, 13 bp, Artificial Sequence
  Oligonucleotide for detection of SNP TSC0044061
tctaacactacat

SEQ ID NO: 177763 - DNA, 13 bp, Artificial Sequence
  Oligonucleotide for detection of SNP TSC0044061
atgtagcgttaga

SEQ ID NO: 177764 - DNA, 13 bp, Artificial Sequence
  Oligonucleotide for detection of SNP TSC0044061
tctaacgctacat

SEQ ID NO: 177765 - DNA, 13 bp, Artificial Sequence
  Oligonucleotide for detection of SNP TSC0044062
atagtatgttagt

SEQ ID NO: 177766 - DNA, 13 bp, Artificial Sequence
  Oligonucleotide for detection of SNP TSC0044062
actaacatactat

SEQ ID NO: 177767 - DNA, 13 bp, Artificial Sequence
  Oligonucleotide for detection of SNP TSC0044062
atagtacgttagt

SEQ ID NO: 177768 - DNA, 13 bp, Artificial Sequence
  Oligonucleotide for detection of SNP TSC0044062
actaacgtactat

SEQ ID NO: 177769 - DNA, 13 bp, Artificial Sequence
  Oligonucleotide for detection of SNP TSC0044062
attaatgtgttat

SEQ ID NO: 177770 - DNA, 13 bp, Artificial Sequence
  Oligonucleotide for detection of SNP TSC0044062
ataacacattaat

SEQ ID NO: 177771 - DNA, 13 bp, Artificial Sequence
  Oligonucleotide for detection of SNP TSC0044062
attaatatgttat

SEQ ID NO: 177772 - DNA, 13 bp, Artificial Sequence
  Oligonucleotide for detection of SNP TSC0044062
ataacatattaat

SEQ ID NO: 177773 - DNA, 13 bp, Artificial Sequence
  Oligonucleotide for detection of SNP TSC0044062
attaacgtgttat

SEQ ID NO: 177774 - DNA, 13 bp, Artificial Sequence
  Oligonucleotide for detection of SNP TSC0044062
ataacacgttaat

SEQ ID NO: 177775 - DNA, 13 bp, Artificial Sequence
  Oligonucleotide for detection of SNP TSC0044063
gaaaatgtttgtg

SEQ ID NO: 177776 - DNA, 13 bp, Artificial Sequence
  Oligonucleotide for detection of SNP TSC0044063
cacaaacattttc

SEQ ID NO: 177777 - DNA, 13 bp, Artificial Sequence
  Oligonucleotide for detection of SNP TSC0044063
gaaaatatttgtg

SEQ ID NO: 177778 - DNA, 13 bp, Artificial Sequence
  Oligonucleotide for detection of SNP TSC0044063
cacaaatattttc

SEQ ID NO: 177779 - DNA, 13 bp, Artificial Sequence
  Oligonucleotide for detection of SNP TSC0044064
ttgagagtataay

SEQ ID NO: 177780 - DNA, 13 bp, Artificial Sequence
  Oligonucleotide for detection of SNP TSC0044064
rttatactctcaa

SEQ ID NO: 177781 - DNA, 13 bp, Artificial Sequence
  Oligonucleotide for detection of SNP TSC0044064
ttgagaatataay

SEQ ID NO: 177782 - DNA, 13 bp, Artificial Sequence
  Oligonucleotide for detection of SNP TSC0044064
rttatattctcaa

SEQ ID NO: 177783 - DNA, 13 bp, Artificial Sequence
  Oligonucleotide for detection of SNP TSC0010456
tatattggagtag

SEQ ID NO: 177784 - DNA, 13 bp, Artificial Sequence
  Oligonucleotide for detection of SNP TSC0010456
ctactccaatata

SEQ ID NO: 177785 - DNA, 13 bp, Artificial Sequence
  Oligonucleotide for detection of SNP TSC0010456
tatattagagtag

SEQ ID NO: 177786 - DNA, 13 bp, Artificial Sequence
  Oligonucleotide for detection of SNP TSC0010456
ctactctaatata

SEQ ID NO: 177787 - DNA, 13 bp, Artificial Sequence
  Oligonucleotide for detection of SNP TSC0044065
ggttggaataaga

SEQ ID NO: 177788 - DNA, 13 bp, Artificial Sequence
  Oligonucleotide for detection of SNP TSC0044065
tcttattccaacc

SEQ ID NO: 177789 - DNA, 13 bp, Artificial Sequence
  Oligonucleotide for detection of SNP TSC0044065
ggttggtataaga

SEQ ID NO: 177790 - DNA, 13 bp, Artificial Sequence
  Oligonucleotide for detection of SNP TSC0044065
tcttataccaacc

SEQ ID NO: 177791 - DNA, 13 bp, Artificial Sequence
  Oligonucleotide for detection of SNP TSC0044070
atttattggagta

SEQ ID NO: 177792 - DNA, 13 bp, Artificial Sequence
  Oligonucleotide for detection of SNP TSC0044070
tactccaataaat

SEQ ID NO: 177793 - DNA, 13 bp, Artificial Sequence
  Oligonucleotide for detection of SNP TSC0044070
atttatcggagta

SEQ ID NO: 177794 - DNA, 13 bp, Artificial Sequence
  Oligonucleotide for detection of SNP TSC0044070
tactccgataaat

SEQ ID NO: 177795 - DNA, 13 bp, Artificial Sequence
  Oligonucleotide for detection of SNP TSC0044070
tattttaatgaat

SEQ ID NO: 177796 - DNA, 13 bp, Artificial Sequence
  Oligonucleotide for detection of SNP TSC0044070
attcattaaaata

SEQ ID NO: 177797 - DNA, 13 bp, Artificial Sequence
  Oligonucleotide for detection of SNP TSC0044070
tatttcgatgaat

SEQ ID NO: 177798 - DNA, 13 bp, Artificial Sequence
  Oligonucleotide for detection of SNP TSC0044070
attcatcgaaata

SEQ ID NO: 177799 - DNA, 13 bp, Artificial Sequence
  Oligonucleotide for detection of SNP TSC0044071
taagatattgata

SEQ ID NO: 177800 - DNA, 13 bp, Artificial Sequence
  Oligonucleotide for detection of SNP TSC0044071
tatcaatatctta

SEQ ID NO: 177801 - DNA, 13 bp, Artificial Sequence
  Oligonucleotide for detection of SNP TSC0044071
taagatgttgata

SEQ ID NO: 177802 - DNA, 13 bp, Artificial Sequence
  Oligonucleotide for detection of SNP TSC0044071
tatcaacatctta

SEQ ID NO: 177803 - DNA, 13 bp, Artificial Sequence
  Oligonucleotide for detection of SNP TSC0044074
tttattggattty

SEQ ID NO: 177804 - DNA, 13 bp, Artificial Sequence
  Oligonucleotide for detection of SNP TSC0044074
raaatccaataaa

SEQ ID NO: 177805 - DNA, 13 bp, Artificial Sequence
  Oligonucleotide for detection of SNP TSC0044074
tttattagattty

SEQ ID NO: 177806 - DNA, 13 bp, Artificial Sequence
  Oligonucleotide for detection of SNP TSC0044074
raaatctaataaa

SEQ ID NO: 177807 - DNA, 13 bp, Artificial Sequence
  Oligonucleotide for detection of SNP TSC0044075
aaattttatgtgt

SEQ ID NO: 177808 - DNA, 13 bp, Artificial Sequence
  Oligonucleotide for detection of SNP TSC0044075
acacataaaattt

SEQ ID NO: 177809 - DNA, 13 bp, Artificial Sequence
  Oligonucleotide for detection of SNP TSC0044075
aaatttgatgtgt

SEQ ID NO: 177810 - DNA, 13 bp, Artificial Sequence
  Oligonucleotide for detection of SNP TSC0044075
acacatcaaattt

SEQ ID NO: 177811 - DNA, 13 bp, Artificial Sequence
  Oligonucleotide for detection of SNP TSC0044075
aaattttacgtgt

SEQ ID NO: 177812 - DNA, 13 bp, Artificial Sequence
  Oligonucleotide for detection of SNP TSC0044075
acacgtaaaattt

SEQ ID NO: 177813 - DNA, 13 bp, Artificial Sequence
  Oligonucleotide for detection of SNP TSC0044075
aaattcgatgtgt

SEQ ID NO: 177814 - DNA, 13 bp, Artificial Sequence
  Oligonucleotide for detection of SNP TSC0044075
acacatcgaattt

SEQ ID NO: 177815 - DNA, 13 bp, Artificial Sequence
  Oligonucleotide for detection of SNP TSC0044075
aaatttgacgtgt

SEQ ID NO: 177816 - DNA, 13 bp, Artificial Sequence
  Oligonucleotide for detection of SNP TSC0044075
acacgtcaaattt

SEQ ID NO: 177817 - DNA, 13 bp, Artificial Sequence
  Oligonucleotide for detection of SNP TSC0044075
aaattcgacgtgt

SEQ ID NO: 177818 - DNA, 13 bp, Artificial Sequence
  Oligonucleotide for detection of SNP TSC0044075
acacgtcgaattt

SEQ ID NO: 177819 - DNA, 13 bp, Artificial Sequence
  Oligonucleotide for detection of SNP TSC0044075
atatgtggaattt

SEQ ID NO: 177820 - DNA, 13 bp, Artificial Sequence
  Oligonucleotide for detection of SNP TSC0044075
aaattccacatat

SEQ ID NO: 177821 - DNA, 13 bp, Artificial Sequence
  Oligonucleotide for detection of SNP TSC0044075
atatgttgaattt

SEQ ID NO: 177822 - DNA, 13 bp, Artificial Sequence
  Oligonucleotide for detection of SNP TSC0044075
aaattcaacatat

SEQ ID NO: 177823 - DNA, 13 bp, Artificial Sequence
  Oligonucleotide for detection of SNP TSC0044075
atacgtggaattt

SEQ ID NO: 177824 - DNA, 13 bp, Artificial Sequence
  Oligonucleotide for detection of SNP TSC0044075
aaattccacgtat

SEQ ID NO: 177825 - DNA, 13 bp, Artificial Sequence
  Oligonucleotide for detection of SNP TSC0044075
atacgttgaattt

SEQ ID NO: 177826 - DNA, 13 bp, Artificial Sequence
  Oligonucleotide for detection of SNP TSC0044075
aaattcaacgtat

SEQ ID NO: 177827 - DNA, 13 bp, Artificial Sequence
  Oligonucleotide for detection of SNP TSC0044075
atatgtcgaattt

SEQ ID NO: 177828 - DNA, 13 bp, Artificial Sequence
  Oligonucleotide for detection of SNP TSC0044075
aaattcgacatat

SEQ ID NO: 177829 - DNA, 13 bp, Artificial Sequence
  Oligonucleotide for detection of SNP TSC0044075
atacgtcgaattt

SEQ ID NO: 177830 - DNA, 13 bp, Artificial Sequence
  Oligonucleotide for detection of SNP TSC0044075
aaattcgacgtat

SEQ ID NO: 177831 - DNA, 13 bp, Artificial Sequence
  Oligonucleotide for detection of SNP TSC0044077
ttattttgagttg

SEQ ID NO: 177832 - DNA, 13 bp, Artificial Sequence
  Oligonucleotide for detection of SNP TSC0044077
caactcaaaataa

SEQ ID NO: 177833 - DNA, 13 bp, Artificial Sequence
  Oligonucleotide for detection of SNP TSC0044077
ttatttggagttg

SEQ ID NO: 177834 - DNA, 13 bp, Artificial Sequence
  Oligonucleotide for detection of SNP TSC0044077
caactccaaataa

SEQ ID NO: 177835 - DNA, 13 bp, Artificial Sequence
  Oligonucleotide for detection of SNP TSC0044077
ttatttcgagttg

SEQ ID NO: 177836 - DNA, 13 bp, Artificial Sequence
  Oligonucleotide for detection of SNP TSC0044077
caactcgaaataa

SEQ ID NO: 177837 - DNA, 13 bp, Artificial Sequence
  Oligonucleotide for detection of SNP TSC0044077
taatttgaggtgg

SEQ ID NO: 177838 - DNA, 13 bp, Artificial Sequence
  Oligonucleotide for detection of SNP TSC0044077
ccacctcaaatta

SEQ ID NO: 177839 - DNA, 13 bp, Artificial Sequence
  Oligonucleotide for detection of SNP TSC0044077
taattttaggtgg

SEQ ID NO: 177840 - DNA, 13 bp, Artificial Sequence
  Oligonucleotide for detection of SNP TSC0044077
ccacctaaaatta

SEQ ID NO: 177841 - DNA, 13 bp, Artificial Sequence
  Oligonucleotide for detection of SNP TSC0044077
taattcgaggtgg

SEQ ID NO: 177842 - DNA, 13 bp, Artificial Sequence
  Oligonucleotide for detection of SNP TSC0044077
ccacctcgaatta

SEQ ID NO: 177843 - DNA, 13 bp, Artificial Sequence
  Oligonucleotide for detection of SNP TSC0044079
gtgggtagtattg

SEQ ID NO: 177844 - DNA, 13 bp, Artificial Sequence
  Oligonucleotide for detection of SNP TSC0044079
caatactacccac

SEQ ID NO: 177845 - DNA, 13 bp, Artificial Sequence
  Oligonucleotide for detection of SNP TSC0044079
gtgggtggtattg

SEQ ID NO: 177846 - DNA, 13 bp, Artificial Sequence
  Oligonucleotide for detection of SNP TSC0044079
caataccacccac

SEQ ID NO: 177847 - DNA, 13 bp, Artificial Sequence
  Oligonucleotide for detection of SNP TSC0044079
gtgggcggtattg

SEQ ID NO: 177848 - DNA, 13 bp, Artificial Sequence
  Oligonucleotide for detection of SNP TSC0044079
caataccgcccac

SEQ ID NO: 177849 - DNA, 13 bp, Artificial Sequence
  Oligonucleotide for detection of SNP TSC0044079
tagtgttgtttay

SEQ ID NO: 177850 - DNA, 13 bp, Artificial Sequence
  Oligonucleotide for detection of SNP TSC0044079
rtaaacaacacta

SEQ ID NO: 177851 - DNA, 13 bp, Artificial Sequence
  Oligonucleotide for detection of SNP TSC0044079
tagtgtcgtttay

SEQ ID NO: 177852 - DNA, 13 bp, Artificial Sequence
  Oligonucleotide for detection of SNP TSC0044079
rtaaacgacacta

SEQ ID NO: 177853 - DNA, 13 bp, Artificial Sequence
  Oligonucleotide for detection of SNP TSC0044080
ttttaatatttat

SEQ ID NO: 177854 - DNA, 13 bp, Artificial Sequence
  Oligonucleotide for detection of SNP TSC0044080
ataaatattaaaa

SEQ ID NO: 177855 - DNA, 13 bp, Artificial Sequence
  Oligonucleotide for detection of SNP TSC0044080
atgaattttgggg

SEQ ID NO: 177856 - DNA, 13 bp, Artificial Sequence
  Oligonucleotide for detection of SNP TSC0044080
ccccaaaattcat

SEQ ID NO: 177857 - DNA, 13 bp, Artificial Sequence
  Oligonucleotide for detection of SNP TSC0044080
atgaatgttgggg

SEQ ID NO: 177858 - DNA, 13 bp, Artificial Sequence
  Oligonucleotide for detection of SNP TSC0044080
ccccaacattcat

SEQ ID NO: 177859 - DNA, 13 bp, Artificial Sequence
  Oligonucleotide for detection of SNP TSC0044081
ttaataggtttag

SEQ ID NO: 177860 - DNA, 13 bp, Artificial Sequence
  Oligonucleotide for detection of SNP TSC0044081
ctaaacctattaa

SEQ ID NO: 177861 - DNA, 13 bp, Artificial Sequence
  Oligonucleotide for detection of SNP TSC0008076
ataatgaaataty

SEQ ID NO: 177862 - DNA, 13 bp, Artificial Sequence
  Oligonucleotide for detection of SNP TSC0008076
ratatttcattat

SEQ ID NO: 177863 - DNA, 13 bp, Artificial Sequence
  Oligonucleotide for detection of SNP TSC0008076
ataatggaataty

SEQ ID NO: 177864 - DNA, 13 bp, Artificial Sequence
  Oligonucleotide for detection of SNP TSC0008076
ratattccattat

SEQ ID NO: 177865 - DNA, 13 bp, Artificial Sequence
  Oligonucleotide for detection of SNP TSC0044086
gtatttattgtag

SEQ ID NO: 177866 - DNA, 13 bp, Artificial Sequence
  Oligonucleotide for detection of SNP TSC0044086
ctacaataaatac

SEQ ID NO: 177867 - DNA, 13 bp, Artificial Sequence
  Oligonucleotide for detection of SNP TSC0044086
gtattttttgtag

SEQ ID NO: 177868 - DNA, 13 bp, Artificial Sequence
  Oligonucleotide for detection of SNP TSC0044086
ctacaaaaaatac

SEQ ID NO: 177869 - DNA, 13 bp, Artificial Sequence
  Oligonucleotide for detection of SNP TSC0044086
ttgtaaggagtay

SEQ ID NO: 177870 - DNA, 13 bp, Artificial Sequence
  Oligonucleotide for detection of SNP TSC0044086
rtactccttacaa

SEQ ID NO: 177871 - DNA, 13 bp, Artificial Sequence
  Oligonucleotide for detection of SNP TSC0044087
ttttagagtgttg

SEQ ID NO: 177872 - DNA, 13 bp, Artificial Sequence
  Oligonucleotide for detection of SNP TSC0044087
caacactctaaaa

SEQ ID NO: 177873 - DNA, 13 bp, Artificial Sequence
  Oligonucleotide for detection of SNP TSC0044087
ttttagtgtgttg

SEQ ID NO: 177874 - DNA, 13 bp, Artificial Sequence
  Oligonucleotide for detection of SNP TSC0044087
caacacactaaaa

SEQ ID NO: 177875 - DNA, 13 bp, Artificial Sequence
  Oligonucleotide for detection of SNP TSC0044087
tagtatattgaga

SEQ ID NO: 177876 - DNA, 13 bp, Artificial Sequence
  Oligonucleotide for detection of SNP TSC0044087
tctcaatatacta

SEQ ID NO: 177877 - DNA, 13 bp, Artificial Sequence
  Oligonucleotide for detection of SNP TSC0044090
tgtgaagtttaaa

SEQ ID NO: 177878 - DNA, 13 bp, Artificial Sequence
  Oligonucleotide for detection of SNP TSC0044090
tttaaacttcaca

SEQ ID NO: 177879 - DNA, 13 bp, Artificial Sequence
  Oligonucleotide for detection of SNP TSC0044090
tgtgaaatttaaa

SEQ ID NO: 177880 - DNA, 13 bp, Artificial Sequence
  Oligonucleotide for detection of SNP TSC0044090
tttaaatttcaca

SEQ ID NO: 177881 - DNA, 13 bp, Artificial Sequence
  Oligonucleotide for detection of SNP TSC0044093
gagttttggaaty

SEQ ID NO: 177882 - DNA, 13 bp, Artificial Sequence
  Oligonucleotide for detection of SNP TSC0044093
rattccaaaactc

SEQ ID NO: 177883 - DNA, 13 bp, Artificial Sequence
  Oligonucleotide for detection of SNP TSC0044093
gagtttcggaaty

SEQ ID NO: 177884 - DNA, 13 bp, Artificial Sequence
  Oligonucleotide for detection of SNP TSC0044093
rattccgaaactc

SEQ ID NO: 177885 - DNA, 13 bp, Artificial Sequence
  Oligonucleotide for detection of SNP TSC0044093
gattttgaaatty

SEQ ID NO: 177886 - DNA, 13 bp, Artificial Sequence
  Oligonucleotide for detection of SNP TSC0044093
raatttcaaaatc

SEQ ID NO: 177887 - DNA, 13 bp, Artificial Sequence
  Oligonucleotide for detection of SNP TSC0044093
gattttaaaatty

SEQ ID NO: 177888 - DNA, 13 bp, Artificial Sequence
  Oligonucleotide for detection of SNP TSC0044093
raattttaaaatc

SEQ ID NO: 177889 - DNA, 13 bp, Artificial Sequence
  Oligonucleotide for detection of SNP TSC0044093
gatttcgaaatty

SEQ ID NO: 177890 - DNA, 13 bp, Artificial Sequence
  Oligonucleotide for detection of SNP TSC0044093
raatttcgaaatc

SEQ ID NO: 177891 - DNA, 13 bp, Artificial Sequence
  Oligonucleotide for detection of SNP TSC0044094
ttggttaatgaat

SEQ ID NO: 177892 - DNA, 13 bp, Artificial Sequence
  Oligonucleotide for detection of SNP TSC0044094
attcattaaccaa

SEQ ID NO: 177893 - DNA, 13 bp, Artificial Sequence
  Oligonucleotide for detection of SNP TSC0044094
ttggtttatgaat

SEQ ID NO: 177894 - DNA, 13 bp, Artificial Sequence
  Oligonucleotide for detection of SNP TSC0044094
attcataaaccaa

SEQ ID NO: 177895 - DNA, 13 bp, Artificial Sequence
  Oligonucleotide for detection of SNP TSC0044094
atttattggttag

SEQ ID NO: 177896 - DNA, 13 bp, Artificial Sequence
  Oligonucleotide for detection of SNP TSC0044094
ctaaccaataaat

SEQ ID NO: 177897 - DNA, 13 bp, Artificial Sequence
  Oligonucleotide for detection of SNP TSC0044094
atttatgggttag

SEQ ID NO: 177898 - DNA, 13 bp, Artificial Sequence
  Oligonucleotide for detection of SNP TSC0044094
ctaacccataaat

SEQ ID NO: 177899 - DNA, 13 bp, Artificial Sequence
  Oligonucleotide for detection of SNP TSC0044095
ataggtatgtgty

SEQ ID NO: 177900 - DNA, 13 bp, Artificial Sequence
  Oligonucleotide for detection of SNP TSC0044095
racacatacctat

SEQ ID NO: 177901 - DNA, 13 bp, Artificial Sequence
  Oligonucleotide for detection of SNP TSC0044095
ataggtgtgtgty

SEQ ID NO: 177902 - DNA, 13 bp, Artificial Sequence
  Oligonucleotide for detection of SNP TSC0044095
racacacacctat

SEQ ID NO: 177903 - DNA, 13 bp, Artificial Sequence
  Oligonucleotide for detection of SNP TSC0044095
ataggcgtgtgty

SEQ ID NO: 177904 - DNA, 13 bp, Artificial Sequence
  Oligonucleotide for detection of SNP TSC0044095
racacacgcctat

SEQ ID NO: 177905 - DNA, 13 bp, Artificial Sequence
  Oligonucleotide for detection of SNP TSC0044095
ggtatatgtttat

SEQ ID NO: 177906 - DNA, 13 bp, Artificial Sequence
  Oligonucleotide for detection of SNP TSC0044095
ataaacatatacc

SEQ ID NO: 177907 - DNA, 13 bp, Artificial Sequence
  Oligonucleotide for detection of SNP TSC0044095
ggtatacgtttat

SEQ ID NO: 177908 - DNA, 13 bp, Artificial Sequence
  Oligonucleotide for detection of SNP TSC0044095
ataaacgtatacc

SEQ ID NO: 177909 - DNA, 13 bp, Artificial Sequence
  Oligonucleotide for detection of SNP TSC0008099
aggaaatgtataa

SEQ ID NO: 177910 - DNA, 13 bp, Artificial Sequence
  Oligonucleotide for detection of SNP TSC0008099
ttatacatttcct

SEQ ID NO: 177911 - DNA, 13 bp, Artificial Sequence
  Oligonucleotide for detection of SNP TSC0008099
aggaaacgtataa

SEQ ID NO: 177912 - DNA, 13 bp, Artificial Sequence
  Oligonucleotide for detection of SNP TSC0008099
ttatacgtttcct

SEQ ID NO: 177913 - DNA, 13 bp, Artificial Sequence
  Oligonucleotide for detection of SNP TSC0044096
gttaaatttttgg

SEQ ID NO: 177914 - DNA, 13 bp, Artificial Sequence
  Oligonucleotide for detection of SNP TSC0044096
ccaaaaatttaac

SEQ ID NO: 177915 - DNA, 13 bp, Artificial Sequence
  Oligonucleotide for detection of SNP TSC0044096
gttaaagttttgg

SEQ ID NO: 177916 - DNA, 13 bp, Artificial Sequence
  Oligonucleotide for detection of SNP TSC0044096
ccaaaactttaac

SEQ ID NO: 177917 - DNA, 13 bp, Artificial Sequence
  Oligonucleotide for detection of SNP TSC0044096
gttaaattttcgg

SEQ ID NO: 177918 - DNA, 13 bp, Artificial Sequence
  Oligonucleotide for detection of SNP TSC0044096
ccgaaaatttaac

SEQ ID NO: 177919 - DNA, 13 bp, Artificial Sequence
  Oligonucleotide for detection of SNP TSC0044096
gttaaagtttcgg

SEQ ID NO: 177920 - DNA, 13 bp, Artificial Sequence
  Oligonucleotide for detection of SNP TSC0044096
ccgaaactttaac

SEQ ID NO: 177921 - DNA, 13 bp, Artificial Sequence
  Oligonucleotide for detection of SNP TSC0044096
ttggagatttggy

SEQ ID NO: 177922 - DNA, 13 bp, Artificial Sequence
  Oligonucleotide for detection of SNP TSC0044096
rccaaatctccaa

SEQ ID NO: 177923 - DNA, 13 bp, Artificial Sequence
  Oligonucleotide for detection of SNP TSC0044096
ttggagttttggy

SEQ ID NO: 177924 - DNA, 13 bp, Artificial Sequence
  Oligonucleotide for detection of SNP TSC0044096
rccaaaactccaa

SEQ ID NO: 177925 - DNA, 13 bp, Artificial Sequence
  Oligonucleotide for detection of SNP TSC0044096
tcggagatttggy

SEQ ID NO: 177926 - DNA, 13 bp, Artificial Sequence
  Oligonucleotide for detection of SNP TSC0044096
rccaaatctccga

SEQ ID NO: 177927 - DNA, 13 bp, Artificial Sequence
  Oligonucleotide for detection of SNP TSC0044096
tcggagttttggy

SEQ ID NO: 177928 - DNA, 13 bp, Artificial Sequence
  Oligonucleotide for detection of SNP TSC0044096
rccaaaactccga

SEQ ID NO: 177929 - DNA, 13 bp, Artificial Sequence
  Oligonucleotide for detection of SNP TSC0044097
tgtttatggattg

SEQ ID NO: 177930 - DNA, 13 bp, Artificial Sequence
  Oligonucleotide for detection of SNP TSC0044097
caatccataaaca

SEQ ID NO: 177931 - DNA, 13 bp, Artificial Sequence
  Oligonucleotide for detection of SNP TSC0044097
tgtttacggattg

SEQ ID NO: 177932 - DNA, 13 bp, Artificial Sequence
  Oligonucleotide for detection of SNP TSC0044097
caatccgtaaaca

SEQ ID NO: 177933 - DNA, 13 bp, Artificial Sequence
  Oligonucleotide for detection of SNP TSC0044097
tagtttgtaagta

SEQ ID NO: 177934 - DNA, 13 bp, Artificial Sequence
  Oligonucleotide for detection of SNP TSC0044097
tacttacaaacta

SEQ ID NO: 177935 - DNA, 13 bp, Artificial Sequence
  Oligonucleotide for detection of SNP TSC0044097
tagtttataagta

SEQ ID NO: 177936 - DNA, 13 bp, Artificial Sequence
  Oligonucleotide for detection of SNP TSC0044097
tacttataaacta

SEQ ID NO: 177937 - DNA, 13 bp, Artificial Sequence
  Oligonucleotide for detection of SNP TSC0044097
tagttcgtaagta

SEQ ID NO: 177938 - DNA, 13 bp, Artificial Sequence
  Oligonucleotide for detection of SNP TSC0044097
tacttacgaacta

SEQ ID NO: 177939 - DNA, 13 bp, Artificial Sequence
  Oligonucleotide for detection of SNP TSC0044098
gtaattagtttga

SEQ ID NO: 177940 - DNA, 13 bp, Artificial Sequence
  Oligonucleotide for detection of SNP TSC0044098
tcaaactaattac

SEQ ID NO: 177941 - DNA, 13 bp, Artificial Sequence
  Oligonucleotide for detection of SNP TSC0044098
gtaattggtttga

SEQ ID NO: 177942 - DNA, 13 bp, Artificial Sequence
  Oligonucleotide for detection of SNP TSC0044098
tcaaaccaattac

SEQ ID NO: 177943 - DNA, 13 bp, Artificial Sequence
  Oligonucleotide for detection of SNP TSC0044100
gtaattatagagy

SEQ ID NO: 177944 - DNA, 13 bp, Artificial Sequence
  Oligonucleotide for detection of SNP TSC0044100
rctctataattac

SEQ ID NO: 177945 - DNA, 13 bp, Artificial Sequence
  Oligonucleotide for detection of SNP TSC0044100
gtaattgtagagy

SEQ ID NO: 177946 - DNA, 13 bp, Artificial Sequence
  Oligonucleotide for detection of SNP TSC0044100
rctctacaattac

SEQ ID NO: 177947 - DNA, 13 bp, Artificial Sequence
  Oligonucleotide for detection of SNP TSC0044100
gtaatcgtagagy

SEQ ID NO: 177948 - DNA, 13 bp, Artificial Sequence
  Oligonucleotide for detection of SNP TSC0044100
rctctacgattac

SEQ ID NO: 177949 - DNA, 13 bp, Artificial Sequence
  Oligonucleotide for detection of SNP TSC0044100
gttttgtgattgy

SEQ ID NO: 177950 - DNA, 13 bp, Artificial Sequence
  Oligonucleotide for detection of SNP TSC0044100
rcaatcacaaaac

SEQ ID NO: 177951 - DNA, 13 bp, Artificial Sequence
  Oligonucleotide for detection of SNP TSC0044100
gttttgcgattgy

SEQ ID NO: 177952 - DNA, 13 bp, Artificial Sequence
  Oligonucleotide for detection of SNP TSC0044100
rcaatcgcaaaac

SEQ ID NO: 177953 - DNA, 13 bp, Artificial Sequence
  Oligonucleotide for detection of SNP TSC0044101
ttgtatgtaattt

SEQ ID NO: 177954 - DNA, 13 bp, Artificial Sequence
  Oligonucleotide for detection of SNP TSC0044101
aaattacatacaa

SEQ ID NO: 177955 - DNA, 13 bp, Artificial Sequence
  Oligonucleotide for detection of SNP TSC0044101
ttgtatataattt

SEQ ID NO: 177956 - DNA, 13 bp, Artificial Sequence
  Oligonucleotide for detection of SNP TSC0044101
aaattatatacaa

SEQ ID NO: 177957 - DNA, 13 bp, Artificial Sequence
  Oligonucleotide for detection of SNP TSC0044102
tattgatgaaagg

SEQ ID NO: 177958 - DNA, 13 bp, Artificial Sequence
  Oligonucleotide for detection of SNP TSC0044102
cctttcatcaata

SEQ ID NO: 177959 - DNA, 13 bp, Artificial Sequence
  Oligonucleotide for detection of SNP TSC0044102
tattgaggaaagg

SEQ ID NO: 177960 - DNA, 13 bp, Artificial Sequence
  Oligonucleotide for detection of SNP TSC0044102
cctttcctcaata

SEQ ID NO: 177961 - DNA, 13 bp, Artificial Sequence
  Oligonucleotide for detection of SNP TSC0044102
tattgacgaaagg

SEQ ID NO: 177962 - DNA, 13 bp, Artificial Sequence
  Oligonucleotide for detection of SNP TSC0044102
cctttcgtcaata

SEQ ID NO: 177963 - DNA, 13 bp, Artificial Sequence
  Oligonucleotide for detection of SNP TSC0044102
ttttttgttaatg

SEQ ID NO: 177964 - DNA, 13 bp, Artificial Sequence
  Oligonucleotide for detection of SNP TSC0044102
cattaacaaaaaa

SEQ ID NO: 177965 - DNA, 13 bp, Artificial Sequence
  Oligonucleotide for detection of SNP TSC0044102
tttttcgttaatg

SEQ ID NO: 177966 - DNA, 13 bp, Artificial Sequence
  Oligonucleotide for detection of SNP TSC0044102
cattaacgaaaaa

SEQ ID NO: 177967 - DNA, 13 bp, Artificial Sequence
  Oligonucleotide for detection of SNP TSC0044105
tattttaagtaaa

SEQ ID NO: 177968 - DNA, 13 bp, Artificial Sequence
  Oligonucleotide for detection of SNP TSC0044105
tttacttaaaata

SEQ ID NO: 177969 - DNA, 13 bp, Artificial Sequence
  Oligonucleotide for detection of SNP TSC0044106
ttattaaaatgay

SEQ ID NO: 177970 - DNA, 13 bp, Artificial Sequence
  Oligonucleotide for detection of SNP TSC0044106
rtcattttaataa

SEQ ID NO: 177971 - DNA, 13 bp, Artificial Sequence
  Oligonucleotide for detection of SNP TSC0044106
ttattataatgay

SEQ ID NO: 177972 - DNA, 13 bp, Artificial Sequence
  Oligonucleotide for detection of SNP TSC0044106
rtcattataataa

SEQ ID NO: 177973 - DNA, 13 bp, Artificial Sequence
  Oligonucleotide for detection of SNP TSC0044106
gttattttaataa

SEQ ID NO: 177974 - DNA, 13 bp, Artificial Sequence
  Oligonucleotide for detection of SNP TSC0044106
ttattaaaataac

SEQ ID NO: 177975 - DNA, 13 bp, Artificial Sequence
  Oligonucleotide for detection of SNP TSC0044106
gttattataataa

SEQ ID NO: 177976 - DNA, 13 bp, Artificial Sequence
  Oligonucleotide for detection of SNP TSC0044106
ttattataataac

SEQ ID NO: 177977 - DNA, 13 bp, Artificial Sequence
  Oligonucleotide for detection of SNP TSC0010544
agtgatatatggt

SEQ ID NO: 177978 - DNA, 13 bp, Artificial Sequence
  Oligonucleotide for detection of SNP TSC0010544
accatatatcact

SEQ ID NO: 177979 - DNA, 13 bp, Artificial Sequence
  Oligonucleotide for detection of SNP TSC0010544
agtgatgtatggt

SEQ ID NO: 177980 - DNA, 13 bp, Artificial Sequence
  Oligonucleotide for detection of SNP TSC0010544
accatacatcact

SEQ ID NO: 177981 - DNA, 13 bp, Artificial Sequence
  Oligonucleotide for detection of SNP TSC0010544
agtgatatacggt

SEQ ID NO: 177982 - DNA, 13 bp, Artificial Sequence
  Oligonucleotide for detection of SNP TSC0010544
accgtatatcact

SEQ ID NO: 177983 - DNA, 13 bp, Artificial Sequence
  Oligonucleotide for detection of SNP TSC0010544
agtgacgtatggt

SEQ ID NO: 177984 - DNA, 13 bp, Artificial Sequence
  Oligonucleotide for detection of SNP TSC0010544
accatacgtcact

SEQ ID NO: 177985 - DNA, 13 bp, Artificial Sequence
  Oligonucleotide for detection of SNP TSC0010544
agtgatgtacggt

SEQ ID NO: 177986 - DNA, 13 bp, Artificial Sequence
  Oligonucleotide for detection of SNP TSC0010544
accgtacatcact

SEQ ID NO: 177987 - DNA, 13 bp, Artificial Sequence
  Oligonucleotide for detection of SNP TSC0010544
agtgacgtacggt

SEQ ID NO: 177988 - DNA, 13 bp, Artificial Sequence
  Oligonucleotide for detection of SNP TSC0010544
accgtacgtcact

SEQ ID NO: 177989 - DNA, 13 bp, Artificial Sequence
  Oligonucleotide for detection of SNP TSC0010544
attgtatgttatt

SEQ ID NO: 177990 - DNA, 13 bp, Artificial Sequence
  Oligonucleotide for detection of SNP TSC0010544
aataacatacaat

SEQ ID NO: 177991 - DNA, 13 bp, Artificial Sequence
  Oligonucleotide for detection of SNP TSC0010544
atcgtatgttatt

SEQ ID NO: 177992 - DNA, 13 bp, Artificial Sequence
  Oligonucleotide for detection of SNP TSC0010544
aataacatacgat

SEQ ID NO: 177993 - DNA, 13 bp, Artificial Sequence
  Oligonucleotide for detection of SNP TSC0010544
attgtacgttatt

SEQ ID NO: 177994 - DNA, 13 bp, Artificial Sequence
  Oligonucleotide for detection of SNP TSC0010544
aataacgtacaat

SEQ ID NO: 177995 - DNA, 13 bp, Artificial Sequence
  Oligonucleotide for detection of SNP TSC0010544
atcgtacgttatt

SEQ ID NO: 177996 - DNA, 13 bp, Artificial Sequence
  Oligonucleotide for detection of SNP TSC0010544
aataacgtacgat

SEQ ID NO: 177997 - DNA, 13 bp, Artificial Sequence
  Oligonucleotide for detection of SNP TSC0044107
tatttaaaataty

SEQ ID NO: 177998 - DNA, 13 bp, Artificial Sequence
  Oligonucleotide for detection of SNP TSC0044107
ratattttaaata

SEQ ID NO: 177999 - DNA, 13 bp, Artificial Sequence
  Oligonucleotide for detection of SNP TSC0044107
tatttagaataty

SEQ ID NO: 178000 - DNA, 13 bp, Artificial Sequence
  Oligonucleotide for detection of SNP TSC0044107
ratattctaaata

SEQ ID NO: 178001 - DNA, 13 bp, Artificial Sequence
  Oligonucleotide for detection of SNP TSC0044109
atatatatataat

SEQ ID NO: 178002 - DNA, 13 bp, Artificial Sequence
  Oligonucleotide for detection of SNP TSC0044109
attatatatatat

SEQ ID NO: 178003 - DNA, 13 bp, Artificial Sequence
  Oligonucleotide for detection of SNP TSC0044109
atatatgtataat

SEQ ID NO: 178004 - DNA, 13 bp, Artificial Sequence
  Oligonucleotide for detection of SNP TSC0044109
attatacatatat

SEQ ID NO: 178005 - DNA, 13 bp, Artificial Sequence
  Oligonucleotide for detection of SNP TSC0044109
atatacgtataat

SEQ ID NO: 178006 - DNA, 13 bp, Artificial Sequence
  Oligonucleotide for detection of SNP TSC0044109
attatacgtatat

SEQ ID NO: 178007 - DNA, 13 bp, Artificial Sequence
  Oligonucleotide for detection of SNP TSC0044109
attgtatgtatat

SEQ ID NO: 178008 - DNA, 13 bp, Artificial Sequence
  Oligonucleotide for detection of SNP TSC0044109
atatacatacaat

SEQ ID NO: 178009 - DNA, 13 bp, Artificial Sequence
  Oligonucleotide for detection of SNP TSC0044109
attgtacgtatat

SEQ ID NO: 178010 - DNA, 13 bp, Artificial Sequence
  Oligonucleotide for detection of SNP TSC0044109
atatacgtacaat

SEQ ID NO: 178011 - DNA, 13 bp, Artificial Sequence
  Oligonucleotide for detection of SNP TSC0044110
tgtgaaaaaagta

SEQ ID NO: 178012 - DNA, 13 bp, Artificial Sequence
  Oligonucleotide for detection of SNP TSC0044110
tacttttttcaca

SEQ ID NO: 178013 - DNA, 13 bp, Artificial Sequence
  Oligonucleotide for detection of SNP TSC0044110
tgtgaagaaagta

SEQ ID NO: 178014 - DNA, 13 bp, Artificial Sequence
  Oligonucleotide for detection of SNP TSC0044110
tactttcttcaca

SEQ ID NO: 178015 - DNA, 13 bp, Artificial Sequence
  Oligonucleotide for detection of SNP TSC0044111
gattgaaaaagaa

SEQ ID NO: 178016 - DNA, 13 bp, Artificial Sequence
  Oligonucleotide for detection of SNP TSC0044111
ttctttttcaatc

SEQ ID NO: 178017 - DNA, 13 bp, Artificial Sequence
  Oligonucleotide for detection of SNP TSC0044111
gattgagaaagaa

SEQ ID NO: 178018 - DNA, 13 bp, Artificial Sequence
  Oligonucleotide for detection of SNP TSC0044111
ttctttctcaatc

SEQ ID NO: 178019 - DNA, 13 bp, Artificial Sequence
  Oligonucleotide for detection of SNP TSC0044112
tttaatgtatagy

SEQ ID NO: 178020 - DNA, 13 bp, Artificial Sequence
  Oligonucleotide for detection of SNP TSC0044112
rctatacattaaa

SEQ ID NO: 178021 - DNA, 13 bp, Artificial Sequence
  Oligonucleotide for detection of SNP TSC0044112
tttaatatatagy

SEQ ID NO: 178022 - DNA, 13 bp, Artificial Sequence
  Oligonucleotide for detection of SNP TSC0044112
rctatatattaaa

SEQ ID NO: 178023 - DNA, 13 bp, Artificial Sequence
  Oligonucleotide for detection of SNP TSC0010277
ttataaatattat

SEQ ID NO: 178024 - DNA, 13 bp, Artificial Sequence
  Oligonucleotide for detection of SNP TSC0010277
ataatatttataa

SEQ ID NO: 178025 - DNA, 13 bp, Artificial Sequence
  Oligonucleotide for detection of SNP TSC0010277
ttataagtattat

SEQ ID NO: 178026 - DNA, 13 bp, Artificial Sequence
  Oligonucleotide for detection of SNP TSC0010277
ataatacttataa

SEQ ID NO: 178027 - DNA, 13 bp, Artificial Sequence
  Oligonucleotide for detection of SNP TSC0010279
cggtttatgtata

SEQ ID NO: 178028 - DNA, 13 bp, Artificial Sequence
  Oligonucleotide for detection of SNP TSC0010279
tatacataaaccg

SEQ ID NO: 178029 - DNA, 13 bp, Artificial Sequence
  Oligonucleotide for detection of SNP TSC0010279
cggtttgtgtata

SEQ ID NO: 178030 - DNA, 13 bp, Artificial Sequence
  Oligonucleotide for detection of SNP TSC0010279
tatacacaaaccg

SEQ ID NO: 178031 - DNA, 13 bp, Artificial Sequence
  Oligonucleotide for detection of SNP TSC0008558
gttagatttaaty

SEQ ID NO: 178032 - DNA, 13 bp, Artificial Sequence
  Oligonucleotide for detection of SNP TSC0008558
rattaaatctaac

SEQ ID NO: 178033 - DNA, 13 bp, Artificial Sequence
  Oligonucleotide for detection of SNP TSC0008558
gttagagttaaty

SEQ ID NO: 178034 - DNA, 13 bp, Artificial Sequence
  Oligonucleotide for detection of SNP TSC0008558
rattaactctaac

SEQ ID NO: 178035 - DNA, 13 bp, Artificial Sequence
  Oligonucleotide for detection of SNP TSC0008558
ggttagttttggy

SEQ ID NO: 178036 - DNA, 13 bp, Artificial Sequence
  Oligonucleotide for detection of SNP TSC0008558
rccaaaactaacc

SEQ ID NO: 178037 - DNA, 13 bp, Artificial Sequence
  Oligonucleotide for detection of SNP TSC0005623
tttgggatttttt

SEQ ID NO: 178038 - DNA, 13 bp, Artificial Sequence
  Oligonucleotide for detection of SNP TSC0005623
aaaaaatcccaaa

SEQ ID NO: 178039 - DNA, 13 bp, Artificial Sequence
  Oligonucleotide for detection of SNP TSC0005623
aaaggattttagg

SEQ ID NO: 178040 - DNA, 13 bp, Artificial Sequence
  Oligonucleotide for detection of SNP TSC0005623
cctaaaatccttt

SEQ ID NO: 178041 - DNA, 13 bp, Artificial Sequence
  Oligonucleotide for detection of SNP TSC0005623
aaaggagtttagg

SEQ ID NO: 178042 - DNA, 13 bp, Artificial Sequence
  Oligonucleotide for detection of SNP TSC0005623
cctaaactccttt

SEQ ID NO: 178043 - DNA, 13 bp, Artificial Sequence
  Oligonucleotide for detection of SNP TSC0044114
gttaagatgtggg

SEQ ID NO: 178044 - DNA, 13 bp, Artificial Sequence
  Oligonucleotide for detection of SNP TSC0044114
cccacatcttaac

SEQ ID NO: 178045 - DNA, 13 bp, Artificial Sequence
  Oligonucleotide for detection of SNP TSC0044114
gttaaggtgtggg

SEQ ID NO: 178046 - DNA, 13 bp, Artificial Sequence
  Oligonucleotide for detection of SNP TSC0044114
cccacaccttaac

SEQ ID NO: 178047 - DNA, 13 bp, Artificial Sequence
  Oligonucleotide for detection of SNP TSC0044115
atggaatgtaggg

SEQ ID NO: 178048 - DNA, 13 bp, Artificial Sequence
  Oligonucleotide for detection of SNP TSC0044115
ccctacattccat

SEQ ID NO: 178049 - DNA, 13 bp, Artificial Sequence
  Oligonucleotide for detection of SNP TSC0044115
atggaacgtaggg

SEQ ID NO: 178050 - DNA, 13 bp, Artificial Sequence
  Oligonucleotide for detection of SNP TSC0044115
ccctacgttccat

SEQ ID NO: 178051 - DNA, 13 bp, Artificial Sequence
  Oligonucleotide for detection of SNP TSC0005986
aatataatttgga

SEQ ID NO: 178052 - DNA, 13 bp, Artificial Sequence
  Oligonucleotide for detection of SNP TSC0005986
tccaaattatatt

SEQ ID NO: 178053 - DNA, 13 bp, Artificial Sequence
  Oligonucleotide for detection of SNP TSC0005987
ttaaataaaataa

SEQ ID NO: 178054 - DNA, 13 bp, Artificial Sequence
  Oligonucleotide for detection of SNP TSC0005987
ttattttatttaa

SEQ ID NO: 178055 - DNA, 13 bp, Artificial Sequence
  Oligonucleotide for detection of SNP TSC0005987
ttaaattaaataa

SEQ ID NO: 178056 - DNA, 13 bp, Artificial Sequence
  Oligonucleotide for detection of SNP TSC0005987
ttatttaatttaa

SEQ ID NO: 178057 - DNA, 13 bp, Artificial Sequence
  Oligonucleotide for detection of SNP TSC0005987
ttattttatttga

SEQ ID NO: 178058 - DNA, 13 bp, Artificial Sequence
  Oligonucleotide for detection of SNP TSC0005987
tcaaataaaataa

SEQ ID NO: 178059 - DNA, 13 bp, Artificial Sequence
  Oligonucleotide for detection of SNP TSC0005988
atatatatggatg

SEQ ID NO: 178060 - DNA, 13 bp, Artificial Sequence
  Oligonucleotide for detection of SNP TSC0005988
catccatatatat

SEQ ID NO: 178061 - DNA, 13 bp, Artificial Sequence
  Oligonucleotide for detection of SNP TSC0005988
atatatgtggatg

SEQ ID NO: 178062 - DNA, 13 bp, Artificial Sequence
  Oligonucleotide for detection of SNP TSC0005988
catccacatatat

SEQ ID NO: 178063 - DNA, 13 bp, Artificial Sequence
  Oligonucleotide for detection of SNP TSC0005988
atatacgtggatg

SEQ ID NO: 178064 - DNA, 13 bp, Artificial Sequence
  Oligonucleotide for detection of SNP TSC0005988
catccacgtatat

SEQ ID NO: 178065 - DNA, 13 bp, Artificial Sequence
  Oligonucleotide for detection of SNP TSC0005988
tatttatgtatat

SEQ ID NO: 178066 - DNA, 13 bp, Artificial Sequence
  Oligonucleotide for detection of SNP TSC0005988
atatacataaata

SEQ ID NO: 178067 - DNA, 13 bp, Artificial Sequence
  Oligonucleotide for detection of SNP TSC0005988
tatttacgtatat

SEQ ID NO: 178068 - DNA, 13 bp, Artificial Sequence
  Oligonucleotide for detection of SNP TSC0005988
atatacgtaaata

SEQ ID NO: 178069 - DNA, 13 bp, Artificial Sequence
  Oligonucleotide for detection of SNP TSC0009175
gattttatatggt

SEQ ID NO: 178070 - DNA, 13 bp, Artificial Sequence
  Oligonucleotide for detection of SNP TSC0009175
accatataaaatc

SEQ ID NO: 178071 - DNA, 13 bp, Artificial Sequence
  Oligonucleotide for detection of SNP TSC0009175
gattttgtatggt

SEQ ID NO: 178072 - DNA, 13 bp, Artificial Sequence
  Oligonucleotide for detection of SNP TSC0009175
accatacaaaatc

SEQ ID NO: 178073 - DNA, 13 bp, Artificial Sequence
  Oligonucleotide for detection of SNP TSC0009175
gatttcgtatggt

SEQ ID NO: 178074 - DNA, 13 bp, Artificial Sequence
  Oligonucleotide for detection of SNP TSC0009175
accatacgaaatc

SEQ ID NO: 178075 - DNA, 13 bp, Artificial Sequence
  Oligonucleotide for detection of SNP TSC0009175
attatgtgaaaty

SEQ ID NO: 178076 - DNA, 13 bp, Artificial Sequence
  Oligonucleotide for detection of SNP TSC0009175
ratttcacataat

SEQ ID NO: 178077 - DNA, 13 bp, Artificial Sequence
  Oligonucleotide for detection of SNP TSC0009175
attatgcgaaaty

SEQ ID NO: 178078 - DNA, 13 bp, Artificial Sequence
  Oligonucleotide for detection of SNP TSC0009175
ratttcgcataat

SEQ ID NO: 178079 - DNA, 13 bp, Artificial Sequence
  Oligonucleotide for detection of SNP TSC0044116
tttattatgttgy

SEQ ID NO: 178080 - DNA, 13 bp, Artificial Sequence
  Oligonucleotide for detection of SNP TSC0044116
rcaacataataaa

SEQ ID NO: 178081 - DNA, 13 bp, Artificial Sequence
  Oligonucleotide for detection of SNP TSC0044119
ggtaggagtgtgg

SEQ ID NO: 178082 - DNA, 13 bp, Artificial Sequence
  Oligonucleotide for detection of SNP TSC0044119
ccacactcctacc

SEQ ID NO: 178083 - DNA, 13 bp, Artificial Sequence
  Oligonucleotide for detection of SNP TSC0044119
ggtaggggtgtgg

SEQ ID NO: 178084 - DNA, 13 bp, Artificial Sequence
  Oligonucleotide for detection of SNP TSC0044119
ccacacccctacc

SEQ ID NO: 178085 - DNA, 13 bp, Artificial Sequence
  Oligonucleotide for detection of SNP TSC0044120
gtatatattgttt

SEQ ID NO: 178086 - DNA, 13 bp, Artificial Sequence
  Oligonucleotide for detection of SNP TSC0044120
aaacaatatatac

SEQ ID NO: 178087 - DNA, 13 bp, Artificial Sequence
  Oligonucleotide for detection of SNP TSC0044120
gtatatgttgttt

SEQ ID NO: 178088 - DNA, 13 bp, Artificial Sequence
  Oligonucleotide for detection of SNP TSC0044120
aaacaacatatac

SEQ ID NO: 178089 - DNA, 13 bp, Artificial Sequence
  Oligonucleotide for detection of SNP TSC0044121
gttattgtattgy

SEQ ID NO: 178090 - DNA, 13 bp, Artificial Sequence
  Oligonucleotide for detection of SNP TSC0044121
rcaatacaataac

SEQ ID NO: 178091 - DNA, 13 bp, Artificial Sequence
  Oligonucleotide for detection of SNP TSC0044121
gttattatattgy

SEQ ID NO: 178092 - DNA, 13 bp, Artificial Sequence
  Oligonucleotide for detection of SNP TSC0044121
rcaatataataac

SEQ ID NO: 178093 - DNA, 13 bp, Artificial Sequence
  Oligonucleotide for detection of SNP TSC0007474
atttattttggat

SEQ ID NO: 178094 - DNA, 13 bp, Artificial Sequence
  Oligonucleotide for detection of SNP TSC0007474
atccaaaataaat

SEQ ID NO: 178095 - DNA, 13 bp, Artificial Sequence
  Oligonucleotide for detection of SNP TSC0007474
atttatgttggat

SEQ ID NO: 178096 - DNA, 13 bp, Artificial Sequence
  Oligonucleotide for detection of SNP TSC0007474
atccaacataaat

SEQ ID NO: 178097 - DNA, 13 bp, Artificial Sequence
  Oligonucleotide for detection of SNP TSC0044124
tatagaggaatga

SEQ ID NO: 178098 - DNA, 13 bp, Artificial Sequence
  Oligonucleotide for detection of SNP TSC0044124
tcattcctctata

SEQ ID NO: 178099 - DNA, 13 bp, Artificial Sequence
  Oligonucleotide for detection of SNP TSC0044124
tatagaagaatga

SEQ ID NO: 178100 - DNA, 13 bp, Artificial Sequence
  Oligonucleotide for detection of SNP TSC0044124
tcattcttctata

SEQ ID NO: 178101 - DNA, 13 bp, Artificial Sequence
  Oligonucleotide for detection of SNP TSC0044125
ttttttatattga

SEQ ID NO: 178102 - DNA, 13 bp, Artificial Sequence
  Oligonucleotide for detection of SNP TSC0044125
tcaatataaaaaa

SEQ ID NO: 178103 - DNA, 13 bp, Artificial Sequence
  Oligonucleotide for detection of SNP TSC0044126
aaaataattatta

SEQ ID NO: 178104 - DNA, 13 bp, Artificial Sequence
  Oligonucleotide for detection of SNP TSC0044126
taataattatttt

SEQ ID NO: 178105 - DNA, 13 bp, Artificial Sequence
  Oligonucleotide for detection of SNP TSC0044126
aaaatagttatta

SEQ ID NO: 178106 - DNA, 13 bp, Artificial Sequence
  Oligonucleotide for detection of SNP TSC0044126
taataactatttt

SEQ ID NO: 178107 - DNA, 13 bp, Artificial Sequence
  Oligonucleotide for detection of SNP TSC0009511
tttgagaattatg

SEQ ID NO: 178108 - DNA, 13 bp, Artificial Sequence
  Oligonucleotide for detection of SNP TSC0009511
cataattctcaaa

SEQ ID NO: 178109 - DNA, 13 bp, Artificial Sequence
  Oligonucleotide for detection of SNP TSC0009511
tttgaggattatg

SEQ ID NO: 178110 - DNA, 13 bp, Artificial Sequence
  Oligonucleotide for detection of SNP TSC0009511
cataatcctcaaa

SEQ ID NO: 178111 - DNA, 13 bp, Artificial Sequence
  Oligonucleotide for detection of SNP TSC0044128
tttatatttagtt

SEQ ID NO: 178112 - DNA, 13 bp, Artificial Sequence
  Oligonucleotide for detection of SNP TSC0044128
aactaaatataaa

SEQ ID NO: 178113 - DNA, 13 bp, Artificial Sequence
  Oligonucleotide for detection of SNP TSC0044128
tttatagttagtt

SEQ ID NO: 178114 - DNA, 13 bp, Artificial Sequence
  Oligonucleotide for detection of SNP TSC0044128
aactaactataaa

SEQ ID NO: 178115 - DNA, 13 bp, Artificial Sequence
  Oligonucleotide for detection of SNP TSC0044128
agttgaatatgaa

SEQ ID NO: 178116 - DNA, 13 bp, Artificial Sequence
  Oligonucleotide for detection of SNP TSC0044128
ttcatattcaact

SEQ ID NO: 178117 - DNA, 13 bp, Artificial Sequence
  Oligonucleotide for detection of SNP TSC0044128
agttgattatgaa

SEQ ID NO: 178118 - DNA, 13 bp, Artificial Sequence
  Oligonucleotide for detection of SNP TSC0044128
ttcataatcaact

SEQ ID NO: 178119 - DNA, 13 bp, Artificial Sequence
  Oligonucleotide for detection of SNP TSC0044129
tattgtattttgg

SEQ ID NO: 178120 - DNA, 13 bp, Artificial Sequence
  Oligonucleotide for detection of SNP TSC0044129
ccaaaatacaata

SEQ ID NO: 178121 - DNA, 13 bp, Artificial Sequence
  Oligonucleotide for detection of SNP TSC0044129
tattgttttttgg

SEQ ID NO: 178122 - DNA, 13 bp, Artificial Sequence
  Oligonucleotide for detection of SNP TSC0044129
ccaaaaaacaata

SEQ ID NO: 178123 - DNA, 13 bp, Artificial Sequence
  Oligonucleotide for detection of SNP TSC0044129
tattgtatttcgg

SEQ ID NO: 178124 - DNA, 13 bp, Artificial Sequence
  Oligonucleotide for detection of SNP TSC0044129
ccgaaatacaata

SEQ ID NO: 178125 - DNA, 13 bp, Artificial Sequence
  Oligonucleotide for detection of SNP TSC0044129
tattgtttttcgg

SEQ ID NO: 178126 - DNA, 13 bp, Artificial Sequence
  Oligonucleotide for detection of SNP TSC0044129
ccgaaaaacaata

SEQ ID NO: 178127 - DNA, 13 bp, Artificial Sequence
  Oligonucleotide for detection of SNP TSC0044129
tcggagtgtagtg

SEQ ID NO: 178128 - DNA, 13 bp, Artificial Sequence
  Oligonucleotide for detection of SNP TSC0044129
cactacactccga

SEQ ID NO: 178129 - DNA, 13 bp, Artificial Sequence
  Oligonucleotide for detection of SNP TSC0044129
tcggagggtagtg

SEQ ID NO: 178130 - DNA, 13 bp, Artificial Sequence
  Oligonucleotide for detection of SNP TSC0044129
cactaccctccga

SEQ ID NO: 178131 - DNA, 13 bp, Artificial Sequence
  Oligonucleotide for detection of SNP TSC0044133
ggtttggggtaag

SEQ ID NO: 178132 - DNA, 13 bp, Artificial Sequence
  Oligonucleotide for detection of SNP TSC0044133
cttaccccaaacc

SEQ ID NO: 178133 - DNA, 13 bp, Artificial Sequence
  Oligonucleotide for detection of SNP TSC0044133
ggtttgaggtaag

SEQ ID NO: 178134 - DNA, 13 bp, Artificial Sequence
  Oligonucleotide for detection of SNP TSC0044133
cttacctcaaacc

SEQ ID NO: 178135 - DNA, 13 bp, Artificial Sequence
  Oligonucleotide for detection of SNP TSC0044134
tgttattgtttta

SEQ ID NO: 178136 - DNA, 13 bp, Artificial Sequence
  Oligonucleotide for detection of SNP TSC0044134
taaaacaataaca

SEQ ID NO: 178137 - DNA, 13 bp, Artificial Sequence
  Oligonucleotide for detection of SNP TSC0044134
tgttatcgtttta

SEQ ID NO: 178138 - DNA, 13 bp, Artificial Sequence
  Oligonucleotide for detection of SNP TSC0044134
taaaacgataaca

SEQ ID NO: 178139 - DNA, 13 bp, Artificial Sequence
  Oligonucleotide for detection of SNP TSC0044134
tagaatgatggta

SEQ ID NO: 178140 - DNA, 13 bp, Artificial Sequence
  Oligonucleotide for detection of SNP TSC0044134
taccatcattcta

SEQ ID NO: 178141 - DNA, 13 bp, Artificial Sequence
  Oligonucleotide for detection of SNP TSC0044134
tagaataatggta

SEQ ID NO: 178142 - DNA, 13 bp, Artificial Sequence
  Oligonucleotide for detection of SNP TSC0044134
taccattattcta

SEQ ID NO: 178143 - DNA, 13 bp, Artificial Sequence
  Oligonucleotide for detection of SNP TSC0044134
tagaacgatggta

SEQ ID NO: 178144 - DNA, 13 bp, Artificial Sequence
  Oligonucleotide for detection of SNP TSC0044134
taccatcgttcta

SEQ ID NO: 178145 - DNA, 13 bp, Artificial Sequence
  Oligonucleotide for detection of SNP TSC0044135
tttgtattatttt

SEQ ID NO: 178146 - DNA, 13 bp, Artificial Sequence
  Oligonucleotide for detection of SNP TSC0044135
aaaataatacaaa

SEQ ID NO: 178147 - DNA, 13 bp, Artificial Sequence
  Oligonucleotide for detection of SNP TSC0044135
tttgtagtatttt

SEQ ID NO: 178148 - DNA, 13 bp, Artificial Sequence
  Oligonucleotide for detection of SNP TSC0044135
aaaatactacaaa

SEQ ID NO: 178149 - DNA, 13 bp, Artificial Sequence
  Oligonucleotide for detection of SNP TSC0044135
aaagtaatataag

SEQ ID NO: 178150 - DNA, 13 bp, Artificial Sequence
  Oligonucleotide for detection of SNP TSC0044135
cttatattacttt

SEQ ID NO: 178151 - DNA, 13 bp, Artificial Sequence
  Oligonucleotide for detection of SNP TSC0044135
aaagtattataag

SEQ ID NO: 178152 - DNA, 13 bp, Artificial Sequence
  Oligonucleotide for detection of SNP TSC0044135
cttataatacttt

SEQ ID NO: 178153 - DNA, 13 bp, Artificial Sequence
  Oligonucleotide for detection of SNP TSC0044136
attgtgttttaaa

SEQ ID NO: 178154 - DNA, 13 bp, Artificial Sequence
  Oligonucleotide for detection of SNP TSC0044136
tttaaaacacaat

SEQ ID NO: 178155 - DNA, 13 bp, Artificial Sequence
  Oligonucleotide for detection of SNP TSC0044136
attgtggtttaaa

SEQ ID NO: 178156 - DNA, 13 bp, Artificial Sequence
  Oligonucleotide for detection of SNP TSC0044136
tttaaaccacaat

SEQ ID NO: 178157 - DNA, 13 bp, Artificial Sequence
  Oligonucleotide for detection of SNP TSC0044136
tttggaatatagt

SEQ ID NO: 178158 - DNA, 13 bp, Artificial Sequence
  Oligonucleotide for detection of SNP TSC0044136
actatattccaaa

SEQ ID NO: 178159 - DNA, 13 bp, Artificial Sequence
  Oligonucleotide for detection of SNP TSC0044136
tttggattatagt

SEQ ID NO: 178160 - DNA, 13 bp, Artificial Sequence
  Oligonucleotide for detection of SNP TSC0044136
actataatccaaa

SEQ ID NO: 178161 - DNA, 13 bp, Artificial Sequence
  Oligonucleotide for detection of SNP TSC0044138
aagggtggggatg

SEQ ID NO: 178162 - DNA, 13 bp, Artificial Sequence
  Oligonucleotide for detection of SNP TSC0044138
catccccaccctt

SEQ ID NO: 178163 - DNA, 13 bp, Artificial Sequence
  Oligonucleotide for detection of SNP TSC0044138
aagggtagggatg

SEQ ID NO: 178164 - DNA, 13 bp, Artificial Sequence
  Oligonucleotide for detection of SNP TSC0044138
catccctaccctt

SEQ ID NO: 178165 - DNA, 13 bp, Artificial Sequence
  Oligonucleotide for detection of SNP TSC0044138
aagggcggggatg

SEQ ID NO: 178166 - DNA, 13 bp, Artificial Sequence
  Oligonucleotide for detection of SNP TSC0044138
catccccgccctt

SEQ ID NO: 178167 - DNA, 13 bp, Artificial Sequence
  Oligonucleotide for detection of SNP TSC0044139
attaataaagaaa

SEQ ID NO: 178168 - DNA, 13 bp, Artificial Sequence
  Oligonucleotide for detection of SNP TSC0044139
tttctttattaat

SEQ ID NO: 178169 - DNA, 13 bp, Artificial Sequence
  Oligonucleotide for detection of SNP TSC0044139
attaattaagaaa

SEQ ID NO: 178170 - DNA, 13 bp, Artificial Sequence
  Oligonucleotide for detection of SNP TSC0044139
tttcttaattaat

SEQ ID NO: 178171 - DNA, 13 bp, Artificial Sequence
  Oligonucleotide for detection of SNP TSC0044141
tttgttaatttag

SEQ ID NO: 178172 - DNA, 13 bp, Artificial Sequence
  Oligonucleotide for detection of SNP TSC0044141
ctaaattaacaaa

SEQ ID NO: 178173 - DNA, 13 bp, Artificial Sequence
  Oligonucleotide for detection of SNP TSC0044141
tttgtttatttag

SEQ ID NO: 178174 - DNA, 13 bp, Artificial Sequence
  Oligonucleotide for detection of SNP TSC0044141
ctaaataaacaaa

SEQ ID NO: 178175 - DNA, 13 bp, Artificial Sequence
  Oligonucleotide for detection of SNP TSC0044142
ttatatatggtag

SEQ ID NO: 178176 - DNA, 13 bp, Artificial Sequence
  Oligonucleotide for detection of SNP TSC0044142
ctaccatatataa

SEQ ID NO: 178177 - DNA, 13 bp, Artificial Sequence
  Oligonucleotide for detection of SNP TSC0044142
ttatatttggtag

SEQ ID NO: 178178 - DNA, 13 bp, Artificial Sequence
  Oligonucleotide for detection of SNP TSC0044142
ctaccaaatataa

SEQ ID NO: 178179 - DNA, 13 bp, Artificial Sequence
  Oligonucleotide for detection of SNP TSC0044142
ttgttatatgtaa

SEQ ID NO: 178180 - DNA, 13 bp, Artificial Sequence
  Oligonucleotide for detection of SNP TSC0044142
ttacatataacaa

SEQ ID NO: 178181 - DNA, 13 bp, Artificial Sequence
  Oligonucleotide for detection of SNP TSC0044142
ttgttaaatgtaa

SEQ ID NO: 178182 - DNA, 13 bp, Artificial Sequence
  Oligonucleotide for detection of SNP TSC0044142
ttacatttaacaa

SEQ ID NO: 178183 - DNA, 13 bp, Artificial Sequence
  Oligonucleotide for detection of SNP TSC0044143
gtatgtggattat

SEQ ID NO: 178184 - DNA, 13 bp, Artificial Sequence
  Oligonucleotide for detection of SNP TSC0044143
ataatccacatac

SEQ ID NO: 178185 - DNA, 13 bp, Artificial Sequence
  Oligonucleotide for detection of SNP TSC0044143
gtatgtagattat

SEQ ID NO: 178186 - DNA, 13 bp, Artificial Sequence
  Oligonucleotide for detection of SNP TSC0044143
ataatctacatac

SEQ ID NO: 178187 - DNA, 13 bp, Artificial Sequence
  Oligonucleotide for detection of SNP TSC0044144
ttgggataggtgg

SEQ ID NO: 178188 - DNA, 13 bp, Artificial Sequence
  Oligonucleotide for detection of SNP TSC0044144
ccacctatcccaa

SEQ ID NO: 178189 - DNA, 13 bp, Artificial Sequence
  Oligonucleotide for detection of SNP TSC0044144
ttgggagaggtgg

SEQ ID NO: 178190 - DNA, 13 bp, Artificial Sequence
  Oligonucleotide for detection of SNP TSC0044144
ccacctctcccaa

SEQ ID NO: 178191 - DNA, 13 bp, Artificial Sequence
  Oligonucleotide for detection of SNP TSC0044145
tattttaatatty

SEQ ID NO: 178192 - DNA, 13 bp, Artificial Sequence
  Oligonucleotide for detection of SNP TSC0044145
raatattaaaata

SEQ ID NO: 178193 - DNA, 13 bp, Artificial Sequence
  Oligonucleotide for detection of SNP TSC0044145
tatttcgatatty

SEQ ID NO: 178194 - DNA, 13 bp, Artificial Sequence
  Oligonucleotide for detection of SNP TSC0044145
raatatcgaaata

SEQ ID NO: 178195 - DNA, 13 bp, Artificial Sequence
  Oligonucleotide for detection of SNP TSC0044145
gagtgttggggtg

SEQ ID NO: 178196 - DNA, 13 bp, Artificial Sequence
  Oligonucleotide for detection of SNP TSC0044145
caccccaacactc

SEQ ID NO: 178197 - DNA, 13 bp, Artificial Sequence
  Oligonucleotide for detection of SNP TSC0044145
gagtgtcggggtg

SEQ ID NO: 178198 - DNA, 13 bp, Artificial Sequence
  Oligonucleotide for detection of SNP TSC0044145
caccccgacactc

SEQ ID NO: 178199 - DNA, 13 bp, Artificial Sequence
  Oligonucleotide for detection of SNP TSC0044146
ttatttagtttty

SEQ ID NO: 178200 - DNA, 13 bp, Artificial Sequence
  Oligonucleotide for detection of SNP TSC0044146
raaaactaaataa

SEQ ID NO: 178201 - DNA, 13 bp, Artificial Sequence
  Oligonucleotide for detection of SNP TSC0044146
ggaagttggataa

SEQ ID NO: 178202 - DNA, 13 bp, Artificial Sequence
  Oligonucleotide for detection of SNP TSC0044146
ttatccaacttcc

SEQ ID NO: 178203 - DNA, 13 bp, Artificial Sequence
  Oligonucleotide for detection of SNP TSC0044146
ggaagtaggataa

SEQ ID NO: 178204 - DNA, 13 bp, Artificial Sequence
  Oligonucleotide for detection of SNP TSC0044146
ttatcctacttcc

SEQ ID NO: 178205 - DNA, 13 bp, Artificial Sequence
  Oligonucleotide for detection of SNP TSC0044147
gtagttgttagaa

SEQ ID NO: 178206 - DNA, 13 bp, Artificial Sequence
  Oligonucleotide for detection of SNP TSC0044147
ttctaacaactac

SEQ ID NO: 178207 - DNA, 13 bp, Artificial Sequence
  Oligonucleotide for detection of SNP TSC0044147
gtagttattagaa

SEQ ID NO: 178208 - DNA, 13 bp, Artificial Sequence
  Oligonucleotide for detection of SNP TSC0044147
ttctaataactac

SEQ ID NO: 178209 - DNA, 13 bp, Artificial Sequence
  Oligonucleotide for detection of SNP TSC0044148
attttttggtagy

SEQ ID NO: 178210 - DNA, 13 bp, Artificial Sequence
  Oligonucleotide for detection of SNP TSC0044148
rctaccaaaaaat

SEQ ID NO: 178211 - DNA, 13 bp, Artificial Sequence
  Oligonucleotide for detection of SNP TSC0044148
atttttcggtagy

SEQ ID NO: 178212 - DNA, 13 bp, Artificial Sequence
  Oligonucleotide for detection of SNP TSC0044148
rctaccgaaaaat

SEQ ID NO: 178213 - DNA, 13 bp, Artificial Sequence
  Oligonucleotide for detection of SNP TSC0044148
gttgttgagaagt

SEQ ID NO: 178214 - DNA, 13 bp, Artificial Sequence
  Oligonucleotide for detection of SNP TSC0044148
acttctcaacaac

SEQ ID NO: 178215 - DNA, 13 bp, Artificial Sequence
  Oligonucleotide for detection of SNP TSC0044148
gttgttaagaagt

SEQ ID NO: 178216 - DNA, 13 bp, Artificial Sequence
  Oligonucleotide for detection of SNP TSC0044148
acttcttaacaac

SEQ ID NO: 178217 - DNA, 13 bp, Artificial Sequence
  Oligonucleotide for detection of SNP TSC0044148
gttgtcgagaagt

SEQ ID NO: 178218 - DNA, 13 bp, Artificial Sequence
  Oligonucleotide for detection of SNP TSC0044148
acttctcgacaac

SEQ ID NO: 178219 - DNA, 13 bp, Artificial Sequence
  Oligonucleotide for detection of SNP TSC0044149
gtatttgtgaaat

SEQ ID NO: 178220 - DNA, 13 bp, Artificial Sequence
  Oligonucleotide for detection of SNP TSC0044149
atttcacaaatac

SEQ ID NO: 178221 - DNA, 13 bp, Artificial Sequence
  Oligonucleotide for detection of SNP TSC0044149
gtatttatgaaat

SEQ ID NO: 178222 - DNA, 13 bp, Artificial Sequence
  Oligonucleotide for detection of SNP TSC0044149
atttcataaatac

SEQ ID NO: 178223 - DNA, 13 bp, Artificial Sequence
  Oligonucleotide for detection of SNP TSC0044152
tttgagtgtgtta

SEQ ID NO: 178224 - DNA, 13 bp, Artificial Sequence
  Oligonucleotide for detection of SNP TSC0044152
taacacactcaaa

SEQ ID NO: 178225 - DNA, 13 bp, Artificial Sequence
  Oligonucleotide for detection of SNP TSC0044152
tttgagcgtgtta

SEQ ID NO: 178226 - DNA, 13 bp, Artificial Sequence
  Oligonucleotide for detection of SNP TSC0044152
taacacgctcaaa

SEQ ID NO: 178227 - DNA, 13 bp, Artificial Sequence
  Oligonucleotide for detection of SNP TSC0044152
tggtatgtttaaa

SEQ ID NO: 178228 - DNA, 13 bp, Artificial Sequence
  Oligonucleotide for detection of SNP TSC0044152
tttaaacatacca

SEQ ID NO: 178229 - DNA, 13 bp, Artificial Sequence
  Oligonucleotide for detection of SNP TSC0044152
tggtatatttaaa

SEQ ID NO: 178230 - DNA, 13 bp, Artificial Sequence
  Oligonucleotide for detection of SNP TSC0044152
tttaaatatacca

SEQ ID NO: 178231 - DNA, 13 bp, Artificial Sequence
  Oligonucleotide for detection of SNP TSC0044152
tggtacgtttaaa

SEQ ID NO: 178232 - DNA, 13 bp, Artificial Sequence
  Oligonucleotide for detection of SNP TSC0044152
tttaaacgtacca

SEQ ID NO: 178233 - DNA, 13 bp, Artificial Sequence
  Oligonucleotide for detection of SNP TSC0000921
tttaatatttaat

SEQ ID NO: 178234 - DNA, 13 bp, Artificial Sequence
  Oligonucleotide for detection of SNP TSC0000921
attaaatattaaa

SEQ ID NO: 178235 - DNA, 13 bp, Artificial Sequence
  Oligonucleotide for detection of SNP TSC0000921
tttaatgtttaat

SEQ ID NO: 178236 - DNA, 13 bp, Artificial Sequence
  Oligonucleotide for detection of SNP TSC0000921
attaaacattaaa

SEQ ID NO: 178237 - DNA, 13 bp, Artificial Sequence
  Oligonucleotide for detection of SNP TSC0000921
tttaacgtttaat

SEQ ID NO: 178238 - DNA, 13 bp, Artificial Sequence
  Oligonucleotide for detection of SNP TSC0000921
attaaacgttaaa

SEQ ID NO: 178239 - DNA, 13 bp, Artificial Sequence
  Oligonucleotide for detection of SNP TSC0000921
attaagtgttaaa

SEQ ID NO: 178240 - DNA, 13 bp, Artificial Sequence
  Oligonucleotide for detection of SNP TSC0000921
tttaacacttaat

SEQ ID NO: 178241 - DNA, 13 bp, Artificial Sequence
  Oligonucleotide for detection of SNP TSC0000921
attaagcgttaaa

SEQ ID NO: 178242 - DNA, 13 bp, Artificial Sequence
  Oligonucleotide for detection of SNP TSC0000921
tttaacgcttaat

SEQ ID NO: 178243 - DNA, 13 bp, Artificial Sequence
  Oligonucleotide for detection of SNP TSC0044153
tagtgagtaaggt

SEQ ID NO: 178244 - DNA, 13 bp, Artificial Sequence
  Oligonucleotide for detection of SNP TSC0044153
accttactcacta

SEQ ID NO: 178245 - DNA, 13 bp, Artificial Sequence
  Oligonucleotide for detection of SNP TSC0044153
tagtgattaaggt

SEQ ID NO: 178246 - DNA, 13 bp, Artificial Sequence
  Oligonucleotide for detection of SNP TSC0044153
accttaatcacta

SEQ ID NO: 178247 - DNA, 13 bp, Artificial Sequence
  Oligonucleotide for detection of SNP TSC0010627
aaataagatagag

SEQ ID NO: 178248 - DNA, 13 bp, Artificial Sequence
  Oligonucleotide for detection of SNP TSC0010627
ctctatcttattt

SEQ ID NO: 178249 - DNA, 13 bp, Artificial Sequence
  Oligonucleotide for detection of SNP TSC0010627
aaataaaatagag

SEQ ID NO: 178250 - DNA, 13 bp, Artificial Sequence
  Oligonucleotide for detection of SNP TSC0010627
ctctattttattt

SEQ ID NO: 178251 - DNA, 13 bp, Artificial Sequence
  Oligonucleotide for detection of SNP TSC0044155
tttattatgtaaa

SEQ ID NO: 178252 - DNA, 13 bp, Artificial Sequence
  Oligonucleotide for detection of SNP TSC0044155
tttacataataaa

SEQ ID NO: 178253 - DNA, 13 bp, Artificial Sequence
  Oligonucleotide for detection of SNP TSC0044155
tttattgtgtaaa

SEQ ID NO: 178254 - DNA, 13 bp, Artificial Sequence
  Oligonucleotide for detection of SNP TSC0044155
tttacacaataaa

SEQ ID NO: 178255 - DNA, 13 bp, Artificial Sequence
  Oligonucleotide for detection of SNP TSC0044156
tttgattgaaata

SEQ ID NO: 178256 - DNA, 13 bp, Artificial Sequence
  Oligonucleotide for detection of SNP TSC0044156
tatttcaatcaaa

SEQ ID NO: 178257 - DNA, 13 bp, Artificial Sequence
  Oligonucleotide for detection of SNP TSC0044156
tttgatcgaaata

SEQ ID NO: 178258 - DNA, 13 bp, Artificial Sequence
  Oligonucleotide for detection of SNP TSC0044156
tatttcgatcaaa

SEQ ID NO: 178259 - DNA, 13 bp, Artificial Sequence
  Oligonucleotide for detection of SNP TSC0044157
tattttttttaag

SEQ ID NO: 178260 - DNA, 13 bp, Artificial Sequence
  Oligonucleotide for detection of SNP TSC0044157
cttaaaaaaaata

SEQ ID NO: 178261 - DNA, 13 bp, Artificial Sequence
  Oligonucleotide for detection of SNP TSC0044157
tattttgtttaag

SEQ ID NO: 178262 - DNA, 13 bp, Artificial Sequence
  Oligonucleotide for detection of SNP TSC0044157
cttaaacaaaata

SEQ ID NO: 178263 - DNA, 13 bp, Artificial Sequence
  Oligonucleotide for detection of SNP TSC0044157
tatttcgtttaag

SEQ ID NO: 178264 - DNA, 13 bp, Artificial Sequence
  Oligonucleotide for detection of SNP TSC0044157
cttaaacgaaata

SEQ ID NO: 178265 - DNA, 13 bp, Artificial Sequence
  Oligonucleotide for detection of SNP TSC0044157
tttgaagggaatg

SEQ ID NO: 178266 - DNA, 13 bp, Artificial Sequence
  Oligonucleotide for detection of SNP TSC0044157
cattcccttcaaa

SEQ ID NO: 178267 - DNA, 13 bp, Artificial Sequence
  Oligonucleotide for detection of SNP TSC0044157
tttgaatggaatg

SEQ ID NO: 178268 - DNA, 13 bp, Artificial Sequence
  Oligonucleotide for detection of SNP TSC0044157
cattccattcaaa

SEQ ID NO: 178269 - DNA, 13 bp, Artificial Sequence
  Oligonucleotide for detection of SNP TSC0044157
tttgaacggaatg

SEQ ID NO: 178270 - DNA, 13 bp, Artificial Sequence
  Oligonucleotide for detection of SNP TSC0044157
cattccgttcaaa

SEQ ID NO: 178271 - DNA, 13 bp, Artificial Sequence
  Oligonucleotide for detection of SNP TSC0044158
atttaggagtaag

SEQ ID NO: 178272 - DNA, 13 bp, Artificial Sequence
  Oligonucleotide for detection of SNP TSC0044158
cttactcctaaat

SEQ ID NO: 178273 - DNA, 13 bp, Artificial Sequence
  Oligonucleotide for detection of SNP TSC0044158
atttagtagtaag

SEQ ID NO: 178274 - DNA, 13 bp, Artificial Sequence
  Oligonucleotide for detection of SNP TSC0044158
cttactactaaat

SEQ ID NO: 178275 - DNA, 13 bp, Artificial Sequence
  Oligonucleotide for detection of SNP TSC0044159
aagtagataaatg

SEQ ID NO: 178276 - DNA, 13 bp, Artificial Sequence
  Oligonucleotide for detection of SNP TSC0044159
catttatctactt

SEQ ID NO: 178277 - DNA, 13 bp, Artificial Sequence
  Oligonucleotide for detection of SNP TSC0044159
aagtaggtaaatg

SEQ ID NO: 178278 - DNA, 13 bp, Artificial Sequence
  Oligonucleotide for detection of SNP TSC0044159
catttacctactt

SEQ ID NO: 178279 - DNA, 13 bp, Artificial Sequence
  Oligonucleotide for detection of SNP TSC0044160
ttgttatataggg

SEQ ID NO: 178280 - DNA, 13 bp, Artificial Sequence
  Oligonucleotide for detection of SNP TSC0044160
ccctatataacaa

SEQ ID NO: 178281 - DNA, 13 bp, Artificial Sequence
  Oligonucleotide for detection of SNP TSC0044160
ttgttagataggg

SEQ ID NO: 178282 - DNA, 13 bp, Artificial Sequence
  Oligonucleotide for detection of SNP TSC0044160
ccctatctaacaa

SEQ ID NO: 178283 - DNA, 13 bp, Artificial Sequence
  Oligonucleotide for detection of SNP TSC0044160
ttttgtatgatag

SEQ ID NO: 178284 - DNA, 13 bp, Artificial Sequence
  Oligonucleotide for detection of SNP TSC0044160
ctatcatacaaaa

SEQ ID NO: 178285 - DNA, 13 bp, Artificial Sequence
  Oligonucleotide for detection of SNP TSC0044160
ttttgtttgatag

SEQ ID NO: 178286 - DNA, 13 bp, Artificial Sequence
  Oligonucleotide for detection of SNP TSC0044160
ctatcaaacaaaa

SEQ ID NO: 178287 - DNA, 13 bp, Artificial Sequence
  Oligonucleotide for detection of SNP TSC0044161
tgttggatgttty

SEQ ID NO: 178288 - DNA, 13 bp, Artificial Sequence
  Oligonucleotide for detection of SNP TSC0044161
raaacatccaaca

SEQ ID NO: 178289 - DNA, 13 bp, Artificial Sequence
  Oligonucleotide for detection of SNP TSC0044161
tgttggttgttty

SEQ ID NO: 178290 - DNA, 13 bp, Artificial Sequence
  Oligonucleotide for detection of SNP TSC0044161
raaacaaccaaca

SEQ ID NO: 178291 - DNA, 13 bp, Artificial Sequence
  Oligonucleotide for detection of SNP TSC0044161
tgttggacgttty

SEQ ID NO: 178292 - DNA, 13 bp, Artificial Sequence
  Oligonucleotide for detection of SNP TSC0044161
raaacgtccaaca

SEQ ID NO: 178293 - DNA, 13 bp, Artificial Sequence
  Oligonucleotide for detection of SNP TSC0044161
tgttggtcgttty

SEQ ID NO: 178294 - DNA, 13 bp, Artificial Sequence
  Oligonucleotide for detection of SNP TSC0044161
raaacgaccaaca

SEQ ID NO: 178295 - DNA, 13 bp, Artificial Sequence
  Oligonucleotide for detection of SNP TSC0044161
ggggtgtttaata

SEQ ID NO: 178296 - DNA, 13 bp, Artificial Sequence
  Oligonucleotide for detection of SNP TSC0044161
tattaaacacccc

SEQ ID NO: 178297 - DNA, 13 bp, Artificial Sequence
  Oligonucleotide for detection of SNP TSC0044161
ggggtggttaata

SEQ ID NO: 178298 - DNA, 13 bp, Artificial Sequence
  Oligonucleotide for detection of SNP TSC0044161
tattaaccacccc

SEQ ID NO: 178299 - DNA, 13 bp, Artificial Sequence
  Oligonucleotide for detection of SNP TSC0044161
ggggcgtttaata

SEQ ID NO: 178300 - DNA, 13 bp, Artificial Sequence
  Oligonucleotide for detection of SNP TSC0044161
tattaaacgcccc

SEQ ID NO: 178301 - DNA, 13 bp, Artificial Sequence
  Oligonucleotide for detection of SNP TSC0044161
ggggcggttaata

SEQ ID NO: 178302 - DNA, 13 bp, Artificial Sequence
  Oligonucleotide for detection of SNP TSC0044161
tattaaccgcccc

SEQ ID NO: 178303 - DNA, 13 bp, Artificial Sequence
  Oligonucleotide for detection of SNP TSC0044162
tggttaagaaagg

SEQ ID NO: 178304 - DNA, 13 bp, Artificial Sequence
  Oligonucleotide for detection of SNP TSC0044162
cctttcttaacca

SEQ ID NO: 178305 - DNA, 13 bp, Artificial Sequence
  Oligonucleotide for detection of SNP TSC0044162
tggttaggaaagg

SEQ ID NO: 178306 - DNA, 13 bp, Artificial Sequence
  Oligonucleotide for detection of SNP TSC0044162
cctttcctaacca

SEQ ID NO: 178307 - DNA, 13 bp, Artificial Sequence
  Oligonucleotide for detection of SNP TSC0044163
aattgtaagattt

SEQ ID NO: 178308 - DNA, 13 bp, Artificial Sequence
  Oligonucleotide for detection of SNP TSC0044163
aaatcttacaatt

SEQ ID NO: 178309 - DNA, 13 bp, Artificial Sequence
  Oligonucleotide for detection of SNP TSC0044163
aattgtgagattt

SEQ ID NO: 178310 - DNA, 13 bp, Artificial Sequence
  Oligonucleotide for detection of SNP TSC0044163
aaatctcacaatt

SEQ ID NO: 178311 - DNA, 13 bp, Artificial Sequence
  Oligonucleotide for detection of SNP TSC0044163
aattgcgagattt

SEQ ID NO: 178312 - DNA, 13 bp, Artificial Sequence
  Oligonucleotide for detection of SNP TSC0044163
aaatctcgcaatt

SEQ ID NO: 178313 - DNA, 13 bp, Artificial Sequence
  Oligonucleotide for detection of SNP TSC0044163
aggttttgtagtt

SEQ ID NO: 178314 - DNA, 13 bp, Artificial Sequence
  Oligonucleotide for detection of SNP TSC0044163
aactacaaaacct

SEQ ID NO: 178315 - DNA, 13 bp, Artificial Sequence
  Oligonucleotide for detection of SNP TSC0044163
aggtttcgtagtt

SEQ ID NO: 178316 - DNA, 13 bp, Artificial Sequence
  Oligonucleotide for detection of SNP TSC0044163
aactacgaaacct

SEQ ID NO: 178317 - DNA, 13 bp, Artificial Sequence
  Oligonucleotide for detection of SNP TSC0044164
taaaggattaatt

SEQ ID NO: 178318 - DNA, 13 bp, Artificial Sequence
  Oligonucleotide for detection of SNP TSC0044164
aattaatccttta

SEQ ID NO: 178319 - DNA, 13 bp, Artificial Sequence
  Oligonucleotide for detection of SNP TSC0044164
taaagggttaatt

SEQ ID NO: 178320 - DNA, 13 bp, Artificial Sequence
  Oligonucleotide for detection of SNP TSC0044164
aattaacccttta

SEQ ID NO: 178321 - DNA, 13 bp, Artificial Sequence
  Oligonucleotide for detection of SNP TSC0044165
tgttttatgtaat

SEQ ID NO: 178322 - DNA, 13 bp, Artificial Sequence
  Oligonucleotide for detection of SNP TSC0044165
attacataaaaca

SEQ ID NO: 178323 - DNA, 13 bp, Artificial Sequence
  Oligonucleotide for detection of SNP TSC0044165
tgttttgtgtaat

SEQ ID NO: 178324 - DNA, 13 bp, Artificial Sequence
  Oligonucleotide for detection of SNP TSC0044165
attacacaaaaca

SEQ ID NO: 178325 - DNA, 13 bp, Artificial Sequence
  Oligonucleotide for detection of SNP TSC0044165
tgtttcgtgtaat

SEQ ID NO: 178326 - DNA, 13 bp, Artificial Sequence
  Oligonucleotide for detection of SNP TSC0044165
attacacgaaaca

SEQ ID NO: 178327 - DNA, 13 bp, Artificial Sequence
  Oligonucleotide for detection of SNP TSC0044165
attatatgagata

SEQ ID NO: 178328 - DNA, 13 bp, Artificial Sequence
  Oligonucleotide for detection of SNP TSC0044165
tatctcatataat

SEQ ID NO: 178329 - DNA, 13 bp, Artificial Sequence
  Oligonucleotide for detection of SNP TSC0044165
attatacgagata

SEQ ID NO: 178330 - DNA, 13 bp, Artificial Sequence
  Oligonucleotide for detection of SNP TSC0044165
tatctcgtataat

SEQ ID NO: 178331 - DNA, 13 bp, Artificial Sequence
  Oligonucleotide for detection of SNP TSC0044167
aggtgggggttgy

SEQ ID NO: 178332 - DNA, 13 bp, Artificial Sequence
  Oligonucleotide for detection of SNP TSC0044167
rcaacccccacct

SEQ ID NO: 178333 - DNA, 13 bp, Artificial Sequence
  Oligonucleotide for detection of SNP TSC0044167
aggtggaggttgy

SEQ ID NO: 178334 - DNA, 13 bp, Artificial Sequence
  Oligonucleotide for detection of SNP TSC0044167
rcaacctccacct

SEQ ID NO: 178335 - DNA, 13 bp, Artificial Sequence
  Oligonucleotide for detection of SNP TSC0044168
taaaagattatty

SEQ ID NO: 178336 - DNA, 13 bp, Artificial Sequence
  Oligonucleotide for detection of SNP TSC0044168
raataatctttta

SEQ ID NO: 178337 - DNA, 13 bp, Artificial Sequence
  Oligonucleotide for detection of SNP TSC0044168
taaaaggttatty

SEQ ID NO: 178338 - DNA, 13 bp, Artificial Sequence
  Oligonucleotide for detection of SNP TSC0044168
raataacctttta

SEQ ID NO: 178339 - DNA, 13 bp, Artificial Sequence
  Oligonucleotide for detection of SNP TSC0044169
taaatggtagagg

SEQ ID NO: 178340 - DNA, 13 bp, Artificial Sequence
  Oligonucleotide for detection of SNP TSC0044169
cctctaccattta

SEQ ID NO: 178341 - DNA, 13 bp, Artificial Sequence
  Oligonucleotide for detection of SNP TSC0044169
taaatgatagagg

SEQ ID NO: 178342 - DNA, 13 bp, Artificial Sequence
  Oligonucleotide for detection of SNP TSC0044169
cctctatcattta

SEQ ID NO: 178343 - DNA, 13 bp, Artificial Sequence
  Oligonucleotide for detection of SNP TSC0044170
aaggagaatagga

SEQ ID NO: 178344 - DNA, 13 bp, Artificial Sequence
  Oligonucleotide for detection of SNP TSC0044170
tcctattctcctt

SEQ ID NO: 178345 - DNA, 13 bp, Artificial Sequence
  Oligonucleotide for detection of SNP TSC0044170
aaggaggatagga

SEQ ID NO: 178346 - DNA, 13 bp, Artificial Sequence
  Oligonucleotide for detection of SNP TSC0044170
tcctatcctcctt

SEQ ID NO: 178347 - DNA, 13 bp, Artificial Sequence
  Oligonucleotide for detection of SNP TSC0044171
aattagtgaatay

SEQ ID NO: 178348 - DNA, 13 bp, Artificial Sequence
  Oligonucleotide for detection of SNP TSC0044171
rtattcactaatt

SEQ ID NO: 178349 - DNA, 13 bp, Artificial Sequence
  Oligonucleotide for detection of SNP TSC0044171
aattagcgaatay

SEQ ID NO: 178350 - DNA, 13 bp, Artificial Sequence
  Oligonucleotide for detection of SNP TSC0044171
rtattcgctaatt

SEQ ID NO: 178351 - DNA, 13 bp, Artificial Sequence
  Oligonucleotide for detection of SNP TSC0044171
gtgtttgttagtt

SEQ ID NO: 178352 - DNA, 13 bp, Artificial Sequence
  Oligonucleotide for detection of SNP TSC0044171
aactaacaaacac

SEQ ID NO: 178353 - DNA, 13 bp, Artificial Sequence
  Oligonucleotide for detection of SNP TSC0044171
gtgtttattagtt

SEQ ID NO: 178354 - DNA, 13 bp, Artificial Sequence
  Oligonucleotide for detection of SNP TSC0044171
aactaataaacac

SEQ ID NO: 178355 - DNA, 13 bp, Artificial Sequence
  Oligonucleotide for detection of SNP TSC0044171
gtgttcgttagtt

SEQ ID NO: 178356 - DNA, 13 bp, Artificial Sequence
  Oligonucleotide for detection of SNP TSC0044171
aactaacgaacac

SEQ ID NO: 178357 - DNA, 13 bp, Artificial Sequence
  Oligonucleotide for detection of SNP TSC0044172
ttattgaatttta

SEQ ID NO: 178358 - DNA, 13 bp, Artificial Sequence
  Oligonucleotide for detection of SNP TSC0044172
taaaattcaataa

SEQ ID NO: 178359 - DNA, 13 bp, Artificial Sequence
  Oligonucleotide for detection of SNP TSC0044172
ttattggatttta

SEQ ID NO: 178360 - DNA, 13 bp, Artificial Sequence
  Oligonucleotide for detection of SNP TSC0044172
taaaatccaataa

SEQ ID NO: 178361 - DNA, 13 bp, Artificial Sequence
  Oligonucleotide for detection of SNP TSC0009983
ggttaatggatay

SEQ ID NO: 178362 - DNA, 13 bp, Artificial Sequence
  Oligonucleotide for detection of SNP TSC0009983
rtatccattaacc

SEQ ID NO: 178363 - DNA, 13 bp, Artificial Sequence
  Oligonucleotide for detection of SNP TSC0009983
ggttaacggatay

SEQ ID NO: 178364 - DNA, 13 bp, Artificial Sequence
  Oligonucleotide for detection of SNP TSC0009983
rtatccgttaacc

SEQ ID NO: 178365 - DNA, 13 bp, Artificial Sequence
  Oligonucleotide for detection of SNP TSC0009983
gtatttgttaaty

SEQ ID NO: 178366 - DNA, 13 bp, Artificial Sequence
  Oligonucleotide for detection of SNP TSC0009983
rattaacaaatac

SEQ ID NO: 178367 - DNA, 13 bp, Artificial Sequence
  Oligonucleotide for detection of SNP TSC0009983
gtatttattaaty

SEQ ID NO: 178368 - DNA, 13 bp, Artificial Sequence
  Oligonucleotide for detection of SNP TSC0009983
rattaataaatac

SEQ ID NO: 178369 - DNA, 13 bp, Artificial Sequence
  Oligonucleotide for detection of SNP TSC0009983
gtattcgttaaty

SEQ ID NO: 178370 - DNA, 13 bp, Artificial Sequence
  Oligonucleotide for detection of SNP TSC0009983
rattaacgaatac

SEQ ID NO: 178371 - DNA, 13 bp, Artificial Sequence
  Oligonucleotide for detection of SNP TSC0044173
aagtttgtggtta

SEQ ID NO: 178372 - DNA, 13 bp, Artificial Sequence
  Oligonucleotide for detection of SNP TSC0044173
taaccacaaactt

SEQ ID NO: 178373 - DNA, 13 bp, Artificial Sequence
  Oligonucleotide for detection of SNP TSC0044173
aagtttatggtta

SEQ ID NO: 178374 - DNA, 13 bp, Artificial Sequence
  Oligonucleotide for detection of SNP TSC0044173
taaccataaactt

SEQ ID NO: 178375 - DNA, 13 bp, Artificial Sequence
  Oligonucleotide for detection of SNP TSC0009992
tgaagtataagta

SEQ ID NO: 178376 - DNA, 13 bp, Artificial Sequence
  Oligonucleotide for detection of SNP TSC0009992
tacttatacttca

SEQ ID NO: 178377 - DNA, 13 bp, Artificial Sequence
  Oligonucleotide for detection of SNP TSC0009992
tgaagtgtaagta

SEQ ID NO: 178378 - DNA, 13 bp, Artificial Sequence
  Oligonucleotide for detection of SNP TSC0009992
tacttacacttca

SEQ ID NO: 178379 - DNA, 13 bp, Artificial Sequence
  Oligonucleotide for detection of SNP TSC0009992
tgaagcgtaagta

SEQ ID NO: 178380 - DNA, 13 bp, Artificial Sequence
  Oligonucleotide for detection of SNP TSC0009992
tacttacgcttca

SEQ ID NO: 178381 - DNA, 13 bp, Artificial Sequence
  Oligonucleotide for detection of SNP TSC0009992
tgtttgtgtttta

SEQ ID NO: 178382 - DNA, 13 bp, Artificial Sequence
  Oligonucleotide for detection of SNP TSC0009992
taaaacacaaaca

SEQ ID NO: 178383 - DNA, 13 bp, Artificial Sequence
  Oligonucleotide for detection of SNP TSC0009992
tgtttgcgtttta

SEQ ID NO: 178384 - DNA, 13 bp, Artificial Sequence
  Oligonucleotide for detection of SNP TSC0009992
taaaacgcaaaca

SEQ ID NO: 178385 - DNA, 13 bp, Artificial Sequence
  Oligonucleotide for detection of SNP TSC0044174
aaagtaagatagt

SEQ ID NO: 178386 - DNA, 13 bp, Artificial Sequence
  Oligonucleotide for detection of SNP TSC0044174
actatcttacttt

SEQ ID NO: 178387 - DNA, 13 bp, Artificial Sequence
  Oligonucleotide for detection of SNP TSC0044174
aaagtaggatagt

SEQ ID NO: 178388 - DNA, 13 bp, Artificial Sequence
  Oligonucleotide for detection of SNP TSC0044174
actatcctacttt

SEQ ID NO: 178389 - DNA, 13 bp, Artificial Sequence
  Oligonucleotide for detection of SNP TSC0010074
tttaatgggggag

SEQ ID NO: 178390 - DNA, 13 bp, Artificial Sequence
  Oligonucleotide for detection of SNP TSC0010074
ctcccccattaaa

SEQ ID NO: 178391 - DNA, 13 bp, Artificial Sequence
  Oligonucleotide for detection of SNP TSC0010074
tttaataggggag

SEQ ID NO: 178392 - DNA, 13 bp, Artificial Sequence
  Oligonucleotide for detection of SNP TSC0010074
ctcccctattaaa

SEQ ID NO: 178393 - DNA, 13 bp, Artificial Sequence
  Oligonucleotide for detection of SNP TSC0044176
ataaatgattttt

SEQ ID NO: 178394 - DNA, 13 bp, Artificial Sequence
  Oligonucleotide for detection of SNP TSC0044176
aaaaatcatttat

SEQ ID NO: 178395 - DNA, 13 bp, Artificial Sequence
  Oligonucleotide for detection of SNP TSC0044176
ataaacgattttt

SEQ ID NO: 178396 - DNA, 13 bp, Artificial Sequence
  Oligonucleotide for detection of SNP TSC0044176
aaaaatcgtttat

SEQ ID NO: 178397 - DNA, 13 bp, Artificial Sequence
  Oligonucleotide for detection of SNP TSC0044176
aaaagttgtttat

SEQ ID NO: 178398 - DNA, 13 bp, Artificial Sequence
  Oligonucleotide for detection of SNP TSC0044176
ataaacaactttt

SEQ ID NO: 178399 - DNA, 13 bp, Artificial Sequence
  Oligonucleotide for detection of SNP TSC0044176
aaaagtcgtttat

SEQ ID NO: 178400 - DNA, 13 bp, Artificial Sequence
  Oligonucleotide for detection of SNP TSC0044176
ataaacgactttt

SEQ ID NO: 178401 - DNA, 13 bp, Artificial Sequence
  Oligonucleotide for detection of SNP TSC0009730
taagagatttata

SEQ ID NO: 178402 - DNA, 13 bp, Artificial Sequence
  Oligonucleotide for detection of SNP TSC0009730
tataaatctctta

SEQ ID NO: 178403 - DNA, 13 bp, Artificial Sequence
  Oligonucleotide for detection of SNP TSC0009730
taagaggtttata

SEQ ID NO: 178404 - DNA, 13 bp, Artificial Sequence
  Oligonucleotide for detection of SNP TSC0009730
tataaacctctta

SEQ ID NO: 178405 - DNA, 13 bp, Artificial Sequence
  Oligonucleotide for detection of SNP TSC0010362
tgttttataatay

SEQ ID NO: 178406 - DNA, 13 bp, Artificial Sequence
  Oligonucleotide for detection of SNP TSC0010362
rtattataaaaca

SEQ ID NO: 178407 - DNA, 13 bp, Artificial Sequence
  Oligonucleotide for detection of SNP TSC0010362
tgttttgtaatay

SEQ ID NO: 178408 - DNA, 13 bp, Artificial Sequence
  Oligonucleotide for detection of SNP TSC0010362
rtattacaaaaca

SEQ ID NO: 178409 - DNA, 13 bp, Artificial Sequence
  Oligonucleotide for detection of SNP TSC0010362
tgtttcgtaatay

SEQ ID NO: 178410 - DNA, 13 bp, Artificial Sequence
  Oligonucleotide for detection of SNP TSC0010362
rtattacgaaaca

SEQ ID NO: 178411 - DNA, 13 bp, Artificial Sequence
  Oligonucleotide for detection of SNP TSC0010362
gtgttgtggggta

SEQ ID NO: 178412 - DNA, 13 bp, Artificial Sequence
  Oligonucleotide for detection of SNP TSC0010362
taccccacaacac

SEQ ID NO: 178413 - DNA, 13 bp, Artificial Sequence
  Oligonucleotide for detection of SNP TSC0010362
gtgttgcggggta

SEQ ID NO: 178414 - DNA, 13 bp, Artificial Sequence
  Oligonucleotide for detection of SNP TSC0010362
taccccgcaacac

SEQ ID NO: 178415 - DNA, 13 bp, Artificial Sequence
  Oligonucleotide for detection of SNP TSC0044180
agaagtggagata

SEQ ID NO: 178416 - DNA, 13 bp, Artificial Sequence
  Oligonucleotide for detection of SNP TSC0044180
tatctccacttct

SEQ ID NO: 178417 - DNA, 13 bp, Artificial Sequence
  Oligonucleotide for detection of SNP TSC0044180
agaagtagagata

SEQ ID NO: 178418 - DNA, 13 bp, Artificial Sequence
  Oligonucleotide for detection of SNP TSC0044180
tatctctacttct

SEQ ID NO: 178419 - DNA, 13 bp, Artificial Sequence
  Oligonucleotide for detection of SNP TSC0044180
agaagcggagata

SEQ ID NO: 178420 - DNA, 13 bp, Artificial Sequence
  Oligonucleotide for detection of SNP TSC0044180
tatctccgcttct

SEQ ID NO: 178421 - DNA, 13 bp, Artificial Sequence
  Oligonucleotide for detection of SNP TSC0044183
tttagaagttaag

SEQ ID NO: 178422 - DNA, 13 bp, Artificial Sequence
  Oligonucleotide for detection of SNP TSC0044183
cttaacttctaaa

SEQ ID NO: 178423 - DNA, 13 bp, Artificial Sequence
  Oligonucleotide for detection of SNP TSC0044183
tttagaggttaag

SEQ ID NO: 178424 - DNA, 13 bp, Artificial Sequence
  Oligonucleotide for detection of SNP TSC0044183
cttaacctctaaa

SEQ ID NO: 178425 - DNA, 13 bp, Artificial Sequence
  Oligonucleotide for detection of SNP TSC0044184
aggtgtgggtaaa

SEQ ID NO: 178426 - DNA, 13 bp, Artificial Sequence
  Oligonucleotide for detection of SNP TSC0044184
tttacccacacct

SEQ ID NO: 178427 - DNA, 13 bp, Artificial Sequence
  Oligonucleotide for detection of SNP TSC0044184
aggtgtaggtaaa

SEQ ID NO: 178428 - DNA, 13 bp, Artificial Sequence
  Oligonucleotide for detection of SNP TSC0044184
tttacctacacct

SEQ ID NO: 178429 - DNA, 13 bp, Artificial Sequence
  Oligonucleotide for detection of SNP TSC0044184
aggtgcgggtaaa

SEQ ID NO: 178430 - DNA, 13 bp, Artificial Sequence
  Oligonucleotide for detection of SNP TSC0044184
tttacccgcacct

SEQ ID NO: 178431 - DNA, 13 bp, Artificial Sequence
  Oligonucleotide for detection of SNP TSC0044185
aggtaggtttttg

SEQ ID NO: 178432 - DNA, 13 bp, Artificial Sequence
  Oligonucleotide for detection of SNP TSC0044185
caaaaacctacct

SEQ ID NO: 178433 - DNA, 13 bp, Artificial Sequence
  Oligonucleotide for detection of SNP TSC0044186
gtggatagatggt

SEQ ID NO: 178434 - DNA, 13 bp, Artificial Sequence
  Oligonucleotide for detection of SNP TSC0044186
accatctatccac

SEQ ID NO: 178435 - DNA, 13 bp, Artificial Sequence
  Oligonucleotide for detection of SNP TSC0044186
gtggattgatggt

SEQ ID NO: 178436 - DNA, 13 bp, Artificial Sequence
  Oligonucleotide for detection of SNP TSC0044186
accatcaatccac

SEQ ID NO: 178437 - DNA, 13 bp, Artificial Sequence
  Oligonucleotide for detection of SNP TSC0044186
attattagtttay

SEQ ID NO: 178438 - DNA, 13 bp, Artificial Sequence
  Oligonucleotide for detection of SNP TSC0044186
rtaaactaataat

SEQ ID NO: 178439 - DNA, 13 bp, Artificial Sequence
  Oligonucleotide for detection of SNP TSC0044190
tagttggtgtgta

SEQ ID NO: 178440 - DNA, 13 bp, Artificial Sequence
  Oligonucleotide for detection of SNP TSC0044190
tacacaccaacta

SEQ ID NO: 178441 - DNA, 13 bp, Artificial Sequence
  Oligonucleotide for detection of SNP TSC0044190
tagttgatgtgta

SEQ ID NO: 178442 - DNA, 13 bp, Artificial Sequence
  Oligonucleotide for detection of SNP TSC0044190
tacacatcaacta

SEQ ID NO: 178443 - DNA, 13 bp, Artificial Sequence
  Oligonucleotide for detection of SNP TSC0044190
tagttggcgtgta

SEQ ID NO: 178444 - DNA, 13 bp, Artificial Sequence
  Oligonucleotide for detection of SNP TSC0044190
tacacgccaacta

SEQ ID NO: 178445 - DNA, 13 bp, Artificial Sequence
  Oligonucleotide for detection of SNP TSC0044190
tagttgacgtgta

SEQ ID NO: 178446 - DNA, 13 bp, Artificial Sequence
  Oligonucleotide for detection of SNP TSC0044190
tacacgtcaacta

SEQ ID NO: 178447 - DNA, 13 bp, Artificial Sequence
  Oligonucleotide for detection of SNP TSC0044190
tagttggtgcgta

SEQ ID NO: 178448 - DNA, 13 bp, Artificial Sequence
  Oligonucleotide for detection of SNP TSC0044190
tacgcaccaacta

SEQ ID NO: 178449 - DNA, 13 bp, Artificial Sequence
  Oligonucleotide for detection of SNP TSC0044190
tagttgatgcgta

SEQ ID NO: 178450 - DNA, 13 bp, Artificial Sequence
  Oligonucleotide for detection of SNP TSC0044190
tacgcatcaacta

SEQ ID NO: 178451 - DNA, 13 bp, Artificial Sequence
  Oligonucleotide for detection of SNP TSC0044190
tagttggcgcgta

SEQ ID NO: 178452 - DNA, 13 bp, Artificial Sequence
  Oligonucleotide for detection of SNP TSC0044190
tacgcgccaacta

SEQ ID NO: 178453 - DNA, 13 bp, Artificial Sequence
  Oligonucleotide for detection of SNP TSC0044190
tagttgacgcgta

SEQ ID NO: 178454 - DNA, 13 bp, Artificial Sequence
  Oligonucleotide for detection of SNP TSC0044190
tacgcgtcaacta

SEQ ID NO: 178455 - DNA, 13 bp, Artificial Sequence
  Oligonucleotide for detection of SNP TSC0044193
agagtaaaagtta

SEQ ID NO: 178456 - DNA, 13 bp, Artificial Sequence
  Oligonucleotide for detection of SNP TSC0044193
taacttttactct

SEQ ID NO: 178457 - DNA, 13 bp, Artificial Sequence
  Oligonucleotide for detection of SNP TSC0044193
agagtagaagtta

SEQ ID NO: 178458 - DNA, 13 bp, Artificial Sequence
  Oligonucleotide for detection of SNP TSC0044193
taacttctactct

SEQ ID NO: 178459 - DNA, 13 bp, Artificial Sequence
  Oligonucleotide for detection of SNP TSC0044194
tttattttttgay

SEQ ID NO: 178460 - DNA, 13 bp, Artificial Sequence
  Oligonucleotide for detection of SNP TSC0044194
rtcaaaaaataaa

SEQ ID NO: 178461 - DNA, 13 bp, Artificial Sequence
  Oligonucleotide for detection of SNP TSC0044194
tttattgtttgay

SEQ ID NO: 178462 - DNA, 13 bp, Artificial Sequence
  Oligonucleotide for detection of SNP TSC0044194
rtcaaacaataaa

SEQ ID NO: 178463 - DNA, 13 bp, Artificial Sequence
  Oligonucleotide for detection of SNP TSC0044194
gttagagagtaaa

SEQ ID NO: 178464 - DNA, 13 bp, Artificial Sequence
  Oligonucleotide for detection of SNP TSC0044194
tttactctctaac

SEQ ID NO: 178465 - DNA, 13 bp, Artificial Sequence
  Oligonucleotide for detection of SNP TSC0044194
gttagatagtaaa

SEQ ID NO: 178466 - DNA, 13 bp, Artificial Sequence
  Oligonucleotide for detection of SNP TSC0044194
tttactatctaac

SEQ ID NO: 178467 - DNA, 13 bp, Artificial Sequence
  Oligonucleotide for detection of SNP TSC0044195
aattttagttttt

SEQ ID NO: 178468 - DNA, 13 bp, Artificial Sequence
  Oligonucleotide for detection of SNP TSC0044195
aaaaactaaaatt

SEQ ID NO: 178469 - DNA, 13 bp, Artificial Sequence
  Oligonucleotide for detection of SNP TSC0044195
aattttggttttt

SEQ ID NO: 178470 - DNA, 13 bp, Artificial Sequence
  Oligonucleotide for detection of SNP TSC0044195
aaaaaccaaaatt

SEQ ID NO: 178471 - DNA, 13 bp, Artificial Sequence
  Oligonucleotide for detection of SNP TSC0044195
aatttcggttttt

SEQ ID NO: 178472 - DNA, 13 bp, Artificial Sequence
  Oligonucleotide for detection of SNP TSC0044195
aaaaaccgaaatt

SEQ ID NO: 178473 - DNA, 13 bp, Artificial Sequence
  Oligonucleotide for detection of SNP TSC0044195
aaaaattggaatt

SEQ ID NO: 178474 - DNA, 13 bp, Artificial Sequence
  Oligonucleotide for detection of SNP TSC0044195
aattccaattttt

SEQ ID NO: 178475 - DNA, 13 bp, Artificial Sequence
  Oligonucleotide for detection of SNP TSC0044195
aaaaatcggaatt

SEQ ID NO: 178476 - DNA, 13 bp, Artificial Sequence
  Oligonucleotide for detection of SNP TSC0044195
aattccgattttt

SEQ ID NO: 178477 - DNA, 13 bp, Artificial Sequence
  Oligonucleotide for detection of SNP TSC0044196
ttgtttgttgtat

SEQ ID NO: 178478 - DNA, 13 bp, Artificial Sequence
  Oligonucleotide for detection of SNP TSC0044196
atacaacaaacaa

SEQ ID NO: 178479 - DNA, 13 bp, Artificial Sequence
  Oligonucleotide for detection of SNP TSC0044196
ttgtttattgtat

SEQ ID NO: 178480 - DNA, 13 bp, Artificial Sequence
  Oligonucleotide for detection of SNP TSC0044196
atacaataaacaa

SEQ ID NO: 178481 - DNA, 13 bp, Artificial Sequence
  Oligonucleotide for detection of SNP TSC0044198
tttttagaagtat

SEQ ID NO: 178482 - DNA, 13 bp, Artificial Sequence
  Oligonucleotide for detection of SNP TSC0044198
atacttctaaaaa

SEQ ID NO: 178483 - DNA, 13 bp, Artificial Sequence
  Oligonucleotide for detection of SNP TSC0044198
tttttaaaagtat

SEQ ID NO: 178484 - DNA, 13 bp, Artificial Sequence
  Oligonucleotide for detection of SNP TSC0044198
atacttttaaaaa

SEQ ID NO: 178485 - DNA, 13 bp, Artificial Sequence
  Oligonucleotide for detection of SNP TSC0044200
gtaagtaatttga

SEQ ID NO: 178486 - DNA, 13 bp, Artificial Sequence
  Oligonucleotide for detection of SNP TSC0044200
tcaaattacttac

SEQ ID NO: 178487 - DNA, 13 bp, Artificial Sequence
  Oligonucleotide for detection of SNP TSC0044200
gtaagtgatttga

SEQ ID NO: 178488 - DNA, 13 bp, Artificial Sequence
  Oligonucleotide for detection of SNP TSC0044200
tcaaatcacttac

SEQ ID NO: 178489 - DNA, 13 bp, Artificial Sequence
  Oligonucleotide for detection of SNP TSC0044201
ttatagaaagagg

SEQ ID NO: 178490 - DNA, 13 bp, Artificial Sequence
  Oligonucleotide for detection of SNP TSC0044201
cctctttctataa

SEQ ID NO: 178491 - DNA, 13 bp, Artificial Sequence
  Oligonucleotide for detection of SNP TSC0044201
ttataggaagagg

SEQ ID NO: 178492 - DNA, 13 bp, Artificial Sequence
  Oligonucleotide for detection of SNP TSC0044201
cctcttcctataa

SEQ ID NO: 178493 - DNA, 13 bp, Artificial Sequence
  Oligonucleotide for detection of SNP TSC0044203
attagagtattty

SEQ ID NO: 178494 - DNA, 13 bp, Artificial Sequence
  Oligonucleotide for detection of SNP TSC0044203
raaatactctaat

SEQ ID NO: 178495 - DNA, 13 bp, Artificial Sequence
  Oligonucleotide for detection of SNP TSC0044205
gatttaagtatga

SEQ ID NO: 178496 - DNA, 13 bp, Artificial Sequence
  Oligonucleotide for detection of SNP TSC0044205
tcatacttaaatc

SEQ ID NO: 178497 - DNA, 13 bp, Artificial Sequence
  Oligonucleotide for detection of SNP TSC0044205
gatttaggtatga

SEQ ID NO: 178498 - DNA, 13 bp, Artificial Sequence
  Oligonucleotide for detection of SNP TSC0044205
tcatacctaaatc

SEQ ID NO: 178499 - DNA, 13 bp, Artificial Sequence
  Oligonucleotide for detection of SNP TSC0044208
gtatattagaagy

SEQ ID NO: 178500 - DNA, 13 bp, Artificial Sequence
  Oligonucleotide for detection of SNP TSC0044208
rcttctaatatac

SEQ ID NO: 178501 - DNA, 13 bp, Artificial Sequence
  Oligonucleotide for detection of SNP TSC0044208
gtatatgagaagy

SEQ ID NO: 178502 - DNA, 13 bp, Artificial Sequence
  Oligonucleotide for detection of SNP TSC0044208
rcttctcatatac

SEQ ID NO: 178503 - DNA, 13 bp, Artificial Sequence
  Oligonucleotide for detection of SNP TSC0044208
gtttttgatatay

SEQ ID NO: 178504 - DNA, 13 bp, Artificial Sequence
  Oligonucleotide for detection of SNP TSC0044208
rtatatcaaaaac

SEQ ID NO: 178505 - DNA, 13 bp, Artificial Sequence
  Oligonucleotide for detection of SNP TSC0044208
gttttttatatay

SEQ ID NO: 178506 - DNA, 13 bp, Artificial Sequence
  Oligonucleotide for detection of SNP TSC0044208
rtatataaaaaac

SEQ ID NO: 178507 - DNA, 13 bp, Artificial Sequence
  Oligonucleotide for detection of SNP TSC0044210
ttttttagtaatt

SEQ ID NO: 178508 - DNA, 13 bp, Artificial Sequence
  Oligonucleotide for detection of SNP TSC0044210
aattactaaaaaa

SEQ ID NO: 178509 - DNA, 13 bp, Artificial Sequence
  Oligonucleotide for detection of SNP TSC0044210
tttttttgtaatt

SEQ ID NO: 178510 - DNA, 13 bp, Artificial Sequence
  Oligonucleotide for detection of SNP TSC0044210
aattacaaaaaaa

SEQ ID NO: 178511 - DNA, 13 bp, Artificial Sequence
  Oligonucleotide for detection of SNP TSC0044210
ttttttcgtaatt

SEQ ID NO: 178512 - DNA, 13 bp, Artificial Sequence
  Oligonucleotide for detection of SNP TSC0044210
aattacgaaaaaa

SEQ ID NO: 178513 - DNA, 13 bp, Artificial Sequence
  Oligonucleotide for detection of SNP TSC0044210
agttgttggggag

SEQ ID NO: 178514 - DNA, 13 bp, Artificial Sequence
  Oligonucleotide for detection of SNP TSC0044210
ctccccaacaact

SEQ ID NO: 178515 - DNA, 13 bp, Artificial Sequence
  Oligonucleotide for detection of SNP TSC0044210
agttgtgggggag

SEQ ID NO: 178516 - DNA, 13 bp, Artificial Sequence
  Oligonucleotide for detection of SNP TSC0044210
ctcccccacaact

SEQ ID NO: 178517 - DNA, 13 bp, Artificial Sequence
  Oligonucleotide for detection of SNP TSC0044210
agttgcgggggag

SEQ ID NO: 178518 - DNA, 13 bp, Artificial Sequence
  Oligonucleotide for detection of SNP TSC0044210
ctcccccgcaact

SEQ ID NO: 178519 - DNA, 13 bp, Artificial Sequence
  Oligonucleotide for detection of SNP TSC0044211
tatgaatataaat

SEQ ID NO: 178520 - DNA, 13 bp, Artificial Sequence
  Oligonucleotide for detection of SNP TSC0044211
atttatattcata

SEQ ID NO: 178521 - DNA, 13 bp, Artificial Sequence
  Oligonucleotide for detection of SNP TSC0044211
tatgaagataaat

SEQ ID NO: 178522 - DNA, 13 bp, Artificial Sequence
  Oligonucleotide for detection of SNP TSC0044211
atttatcttcata

SEQ ID NO: 178523 - DNA, 13 bp, Artificial Sequence
  Oligonucleotide for detection of SNP TSC0044211
atttatgtttata

SEQ ID NO: 178524 - DNA, 13 bp, Artificial Sequence
  Oligonucleotide for detection of SNP TSC0044211
tataaacataaat

SEQ ID NO: 178525 - DNA, 13 bp, Artificial Sequence
  Oligonucleotide for detection of SNP TSC0044211
atttatttttata

SEQ ID NO: 178526 - DNA, 13 bp, Artificial Sequence
  Oligonucleotide for detection of SNP TSC0044211
tataaaaataaat

SEQ ID NO: 178527 - DNA, 13 bp, Artificial Sequence
  Oligonucleotide for detection of SNP TSC0044216
tgtataattttgt

SEQ ID NO: 178528 - DNA, 13 bp, Artificial Sequence
  Oligonucleotide for detection of SNP TSC0044216
acaaaattataca

SEQ ID NO: 178529 - DNA, 13 bp, Artificial Sequence
  Oligonucleotide for detection of SNP TSC0044216
tgtatagttttgt

SEQ ID NO: 178530 - DNA, 13 bp, Artificial Sequence
  Oligonucleotide for detection of SNP TSC0044216
acaaaactataca

SEQ ID NO: 178531 - DNA, 13 bp, Artificial Sequence
  Oligonucleotide for detection of SNP TSC0044217
tatgttatttgtt

SEQ ID NO: 178532 - DNA, 13 bp, Artificial Sequence
  Oligonucleotide for detection of SNP TSC0044217
aacaaataacata

SEQ ID NO: 178533 - DNA, 13 bp, Artificial Sequence
  Oligonucleotide for detection of SNP TSC0044217
tatgttgtttgtt

SEQ ID NO: 178534 - DNA, 13 bp, Artificial Sequence
  Oligonucleotide for detection of SNP TSC0044217
aacaaacaacata

SEQ ID NO: 178535 - DNA, 13 bp, Artificial Sequence
  Oligonucleotide for detection of SNP TSC0044225
gatattatatatg

SEQ ID NO: 178536 - DNA, 13 bp, Artificial Sequence
  Oligonucleotide for detection of SNP TSC0044225
catatataatatc

SEQ ID NO: 178537 - DNA, 13 bp, Artificial Sequence
  Oligonucleotide for detection of SNP TSC0044225
gatattgtatatg

SEQ ID NO: 178538 - DNA, 13 bp, Artificial Sequence
  Oligonucleotide for detection of SNP TSC0044225
catatacaatatc

SEQ ID NO: 178539 - DNA, 13 bp, Artificial Sequence
  Oligonucleotide for detection of SNP TSC0044226
atattatggaaay

SEQ ID NO: 178540 - DNA, 13 bp, Artificial Sequence
  Oligonucleotide for detection of SNP TSC0044226
rtttccataatat

SEQ ID NO: 178541 - DNA, 13 bp, Artificial Sequence
  Oligonucleotide for detection of SNP TSC0044226
atattacggaaay

SEQ ID NO: 178542 - DNA, 13 bp, Artificial Sequence
  Oligonucleotide for detection of SNP TSC0044226
rtttccgtaatat

SEQ ID NO: 178543 - DNA, 13 bp, Artificial Sequence
  Oligonucleotide for detection of SNP TSC0044226
gtttttgtggtgt

SEQ ID NO: 178544 - DNA, 13 bp, Artificial Sequence
  Oligonucleotide for detection of SNP TSC0044226
acaccacaaaaac

SEQ ID NO: 178545 - DNA, 13 bp, Artificial Sequence
  Oligonucleotide for detection of SNP TSC0044226
gtttttatggtgt

SEQ ID NO: 178546 - DNA, 13 bp, Artificial Sequence
  Oligonucleotide for detection of SNP TSC0044226
acaccataaaaac

SEQ ID NO: 178547 - DNA, 13 bp, Artificial Sequence
  Oligonucleotide for detection of SNP TSC0044226
gttttcgtggtgt

SEQ ID NO: 178548 - DNA, 13 bp, Artificial Sequence
  Oligonucleotide for detection of SNP TSC0044226
acaccacgaaaac

SEQ ID NO: 178549 - DNA, 13 bp, Artificial Sequence
  Oligonucleotide for detection of SNP TSC0044228
gatagtggtggtt

SEQ ID NO: 178550 - DNA, 13 bp, Artificial Sequence
  Oligonucleotide for detection of SNP TSC0044228
aaccaccactatc

SEQ ID NO: 178551 - DNA, 13 bp, Artificial Sequence
  Oligonucleotide for detection of SNP TSC0044228
gatagtagtggtt

SEQ ID NO: 178552 - DNA, 13 bp, Artificial Sequence
  Oligonucleotide for detection of SNP TSC0044228
aaccactactatc

SEQ ID NO: 178553 - DNA, 13 bp, Artificial Sequence
  Oligonucleotide for detection of SNP TSC0044230
ttatttttataga

SEQ ID NO: 178554 - DNA, 13 bp, Artificial Sequence
  Oligonucleotide for detection of SNP TSC0044230
tctataaaaataa

SEQ ID NO: 178555 - DNA, 13 bp, Artificial Sequence
  Oligonucleotide for detection of SNP TSC0044230
ttatttgtataga

SEQ ID NO: 178556 - DNA, 13 bp, Artificial Sequence
  Oligonucleotide for detection of SNP TSC0044230
tctatacaaataa

SEQ ID NO: 178557 - DNA, 13 bp, Artificial Sequence
  Oligonucleotide for detection of SNP TSC0044230
tttgtggagataa

SEQ ID NO: 178558 - DNA, 13 bp, Artificial Sequence
  Oligonucleotide for detection of SNP TSC0044230
ttatctccacaaa

SEQ ID NO: 178559 - DNA, 13 bp, Artificial Sequence
  Oligonucleotide for detection of SNP TSC0044230
tttgtgtagataa

SEQ ID NO: 178560 - DNA, 13 bp, Artificial Sequence
  Oligonucleotide for detection of SNP TSC0044230
ttatctacacaaa

SEQ ID NO: 178561 - DNA, 13 bp, Artificial Sequence
  Oligonucleotide for detection of SNP TSC0010768
tgtataagtaaga

SEQ ID NO: 178562 - DNA, 13 bp, Artificial Sequence
  Oligonucleotide for detection of SNP TSC0010768
tcttacttataca

SEQ ID NO: 178563 - DNA, 13 bp, Artificial Sequence
  Oligonucleotide for detection of SNP TSC0010768
tgtataggtaaga

SEQ ID NO: 178564 - DNA, 13 bp, Artificial Sequence
  Oligonucleotide for detection of SNP TSC0010768
tcttacctataca

SEQ ID NO: 178565 - DNA, 13 bp, Artificial Sequence
  Oligonucleotide for detection of SNP TSC0044231
aaagtaatatttt

SEQ ID NO: 178566 - DNA, 13 bp, Artificial Sequence
  Oligonucleotide for detection of SNP TSC0044231
aaaatattacttt

SEQ ID NO: 178567 - DNA, 13 bp, Artificial Sequence
  Oligonucleotide for detection of SNP TSC0044232
gttggtagttgta

SEQ ID NO: 178568 - DNA, 13 bp, Artificial Sequence
  Oligonucleotide for detection of SNP TSC0044232
tacaactaccaac

SEQ ID NO: 178569 - DNA, 13 bp, Artificial Sequence
  Oligonucleotide for detection of SNP TSC0044232
gttggttgttgta

SEQ ID NO: 178570 - DNA, 13 bp, Artificial Sequence
  Oligonucleotide for detection of SNP TSC0044232
tacaacaaccaac

SEQ ID NO: 178571 - DNA, 13 bp, Artificial Sequence
  Oligonucleotide for detection of SNP TSC0044232
gttggtcgttgta

SEQ ID NO: 178572 - DNA, 13 bp, Artificial Sequence
  Oligonucleotide for detection of SNP TSC0044232
tacaacgaccaac

SEQ ID NO: 178573 - DNA, 13 bp, Artificial Sequence
  Oligonucleotide for detection of SNP TSC0044232
tatagttattagy

SEQ ID NO: 178574 - DNA, 13 bp, Artificial Sequence
  Oligonucleotide for detection of SNP TSC0044232
rctaataactata

SEQ ID NO: 178575 - DNA, 13 bp, Artificial Sequence
  Oligonucleotide for detection of SNP TSC0044232
tatagtgattagy

SEQ ID NO: 178576 - DNA, 13 bp, Artificial Sequence
  Oligonucleotide for detection of SNP TSC0044232
rctaatcactata

SEQ ID NO: 178577 - DNA, 13 bp, Artificial Sequence
  Oligonucleotide for detection of SNP TSC0044232
tatagcgattagy

SEQ ID NO: 178578 - DNA, 13 bp, Artificial Sequence
  Oligonucleotide for detection of SNP TSC0044232
rctaatcgctata

SEQ ID NO: 178579 - DNA, 13 bp, Artificial Sequence
  Oligonucleotide for detection of SNP TSC0044233
gagggagtaggta

SEQ ID NO: 178580 - DNA, 13 bp, Artificial Sequence
  Oligonucleotide for detection of SNP TSC0044233
tacctactccctc

SEQ ID NO: 178581 - DNA, 13 bp, Artificial Sequence
  Oligonucleotide for detection of SNP TSC0044233
gagggaataggta

SEQ ID NO: 178582 - DNA, 13 bp, Artificial Sequence
  Oligonucleotide for detection of SNP TSC0044233
tacctattccctc

SEQ ID NO: 178583 - DNA, 13 bp, Artificial Sequence
  Oligonucleotide for detection of SNP TSC0044234
gttttttggggtg

SEQ ID NO: 178584 - DNA, 13 bp, Artificial Sequence
  Oligonucleotide for detection of SNP TSC0044234
caccccaaaaaac

SEQ ID NO: 178585 - DNA, 13 bp, Artificial Sequence
  Oligonucleotide for detection of SNP TSC0044234
gtttttgggggtg

SEQ ID NO: 178586 - DNA, 13 bp, Artificial Sequence
  Oligonucleotide for detection of SNP TSC0044234
cacccccaaaaac

SEQ ID NO: 178587 - DNA, 13 bp, Artificial Sequence
  Oligonucleotide for detection of SNP TSC0044235
tgggtttgtaaay

SEQ ID NO: 178588 - DNA, 13 bp, Artificial Sequence
  Oligonucleotide for detection of SNP TSC0044235
rtttacaaaccca

SEQ ID NO: 178589 - DNA, 13 bp, Artificial Sequence
  Oligonucleotide for detection of SNP TSC0044235
tgggttcgtaaay

SEQ ID NO: 178590 - DNA, 13 bp, Artificial Sequence
  Oligonucleotide for detection of SNP TSC0044235
rtttacgaaccca

SEQ ID NO: 178591 - DNA, 13 bp, Artificial Sequence
  Oligonucleotide for detection of SNP TSC0044235
gtttatggattta

SEQ ID NO: 178592 - DNA, 13 bp, Artificial Sequence
  Oligonucleotide for detection of SNP TSC0044235
taaatccataaac

SEQ ID NO: 178593 - DNA, 13 bp, Artificial Sequence
  Oligonucleotide for detection of SNP TSC0044235
gtttatagattta

SEQ ID NO: 178594 - DNA, 13 bp, Artificial Sequence
  Oligonucleotide for detection of SNP TSC0044235
taaatctataaac

SEQ ID NO: 178595 - DNA, 13 bp, Artificial Sequence
  Oligonucleotide for detection of SNP TSC0044235
gtttacggattta

SEQ ID NO: 178596 - DNA, 13 bp, Artificial Sequence
  Oligonucleotide for detection of SNP TSC0044235
taaatccgtaaac

SEQ ID NO: 178597 - DNA, 13 bp, Artificial Sequence
  Oligonucleotide for detection of SNP TSC0044236
gttaaaattttay

SEQ ID NO: 178598 - DNA, 13 bp, Artificial Sequence
  Oligonucleotide for detection of SNP TSC0044236
rtaaaattttaac

SEQ ID NO: 178599 - DNA, 13 bp, Artificial Sequence
  Oligonucleotide for detection of SNP TSC0044236
gttaaatttttay

SEQ ID NO: 178600 - DNA, 13 bp, Artificial Sequence
  Oligonucleotide for detection of SNP TSC0044236
rtaaaaatttaac

SEQ ID NO: 178601 - DNA, 13 bp, Artificial Sequence
  Oligonucleotide for detection of SNP TSC0044236
gtgggattttaay

SEQ ID NO: 178602 - DNA, 13 bp, Artificial Sequence
  Oligonucleotide for detection of SNP TSC0044236
rttaaaatcccac

SEQ ID NO: 178603 - DNA, 13 bp, Artificial Sequence
  Oligonucleotide for detection of SNP TSC0044236
gtgggaatttaay

SEQ ID NO: 178604 - DNA, 13 bp, Artificial Sequence
  Oligonucleotide for detection of SNP TSC0044236
rttaaattcccac

SEQ ID NO: 178605 - DNA, 13 bp, Artificial Sequence
  Oligonucleotide for detection of SNP TSC0044237
tgttaatagagtg

SEQ ID NO: 178606 - DNA, 13 bp, Artificial Sequence
  Oligonucleotide for detection of SNP TSC0044237
cactctattaaca

SEQ ID NO: 178607 - DNA, 13 bp, Artificial Sequence
  Oligonucleotide for detection of SNP TSC0044237
tgttaagagagtg

SEQ ID NO: 178608 - DNA, 13 bp, Artificial Sequence
  Oligonucleotide for detection of SNP TSC0044237
cactctcttaaca

SEQ ID NO: 178609 - DNA, 13 bp, Artificial Sequence
  Oligonucleotide for detection of SNP TSC0044237
tattttgttaata

SEQ ID NO: 178610 - DNA, 13 bp, Artificial Sequence
  Oligonucleotide for detection of SNP TSC0044237
tattaacaaaata

SEQ ID NO: 178611 - DNA, 13 bp, Artificial Sequence
  Oligonucleotide for detection of SNP TSC0044238
attttaagtagtg

SEQ ID NO: 178612 - DNA, 13 bp, Artificial Sequence
  Oligonucleotide for detection of SNP TSC0044238
cactacttaaaat

SEQ ID NO: 178613 - DNA, 13 bp, Artificial Sequence
  Oligonucleotide for detection of SNP TSC0044238
attttaggtagtg

SEQ ID NO: 178614 - DNA, 13 bp, Artificial Sequence
  Oligonucleotide for detection of SNP TSC0044238
cactacctaaaat

SEQ ID NO: 178615 - DNA, 13 bp, Artificial Sequence
  Oligonucleotide for detection of SNP TSC0044239
aattttaaaataa

SEQ ID NO: 178616 - DNA, 13 bp, Artificial Sequence
  Oligonucleotide for detection of SNP TSC0044239
ttattttaaaatt

SEQ ID NO: 178617 - DNA, 13 bp, Artificial Sequence
  Oligonucleotide for detection of SNP TSC0044239
ttgttttggaatt

SEQ ID NO: 178618 - DNA, 13 bp, Artificial Sequence
  Oligonucleotide for detection of SNP TSC0044239
aattccaaaacaa

SEQ ID NO: 178619 - DNA, 13 bp, Artificial Sequence
  Oligonucleotide for detection of SNP TSC0044239
ttgtttaggaatt

SEQ ID NO: 178620 - DNA, 13 bp, Artificial Sequence
  Oligonucleotide for detection of SNP TSC0044239
aattcctaaacaa

SEQ ID NO: 178621 - DNA, 13 bp, Artificial Sequence
  Oligonucleotide for detection of SNP TSC0044245
tataattatttaa

SEQ ID NO: 178622 - DNA, 13 bp, Artificial Sequence
  Oligonucleotide for detection of SNP TSC0044245
ttaaataattata

SEQ ID NO: 178623 - DNA, 13 bp, Artificial Sequence
  Oligonucleotide for detection of SNP TSC0044245
tataatgatttaa

SEQ ID NO: 178624 - DNA, 13 bp, Artificial Sequence
  Oligonucleotide for detection of SNP TSC0044245
ttaaatcattata

SEQ ID NO: 178625 - DNA, 13 bp, Artificial Sequence
  Oligonucleotide for detection of SNP TSC0044245
tataacgatttaa

SEQ ID NO: 178626 - DNA, 13 bp, Artificial Sequence
  Oligonucleotide for detection of SNP TSC0044245
ttaaatcgttata

SEQ ID NO: 178627 - DNA, 13 bp, Artificial Sequence
  Oligonucleotide for detection of SNP TSC0044245
ttgaatggttata

SEQ ID NO: 178628 - DNA, 13 bp, Artificial Sequence
  Oligonucleotide for detection of SNP TSC0044245
tataaccattcaa

SEQ ID NO: 178629 - DNA, 13 bp, Artificial Sequence
  Oligonucleotide for detection of SNP TSC0044245
ttgaattgttata

SEQ ID NO: 178630 - DNA, 13 bp, Artificial Sequence
  Oligonucleotide for detection of SNP TSC0044245
tataacaattcaa

SEQ ID NO: 178631 - DNA, 13 bp, Artificial Sequence
  Oligonucleotide for detection of SNP TSC0044245
ttgaatcgttata

SEQ ID NO: 178632 - DNA, 13 bp, Artificial Sequence
  Oligonucleotide for detection of SNP TSC0044245
tataacgattcaa

SEQ ID NO: 178633 - DNA, 13 bp, Artificial Sequence
  Oligonucleotide for detection of SNP TSC0044247
ggttttttgtgaa

SEQ ID NO: 178634 - DNA, 13 bp, Artificial Sequence
  Oligonucleotide for detection of SNP TSC0044247
ttcacaaaaaacc

SEQ ID NO: 178635 - DNA, 13 bp, Artificial Sequence
  Oligonucleotide for detection of SNP TSC0044247
ggttttgtgtgaa

SEQ ID NO: 178636 - DNA, 13 bp, Artificial Sequence
  Oligonucleotide for detection of SNP TSC0044247
ttcacacaaaacc

SEQ ID NO: 178637 - DNA, 13 bp, Artificial Sequence
  Oligonucleotide for detection of SNP TSC0044247
tttatagagagty

SEQ ID NO: 178638 - DNA, 13 bp, Artificial Sequence
  Oligonucleotide for detection of SNP TSC0044247
ractctctataaa

SEQ ID NO: 178639 - DNA, 13 bp, Artificial Sequence
  Oligonucleotide for detection of SNP TSC0044247
tttatatagagty

SEQ ID NO: 178640 - DNA, 13 bp, Artificial Sequence
  Oligonucleotide for detection of SNP TSC0044247
ractctatataaa

SEQ ID NO: 178641 - DNA, 13 bp, Artificial Sequence
  Oligonucleotide for detection of SNP TSC0044252
ggtaaatggatag

SEQ ID NO: 178642 - DNA, 13 bp, Artificial Sequence
  Oligonucleotide for detection of SNP TSC0044252
ctatccatttacc

SEQ ID NO: 178643 - DNA, 13 bp, Artificial Sequence
  Oligonucleotide for detection of SNP TSC0044252
ggtaaagggatag

SEQ ID NO: 178644 - DNA, 13 bp, Artificial Sequence
  Oligonucleotide for detection of SNP TSC0044252
ctatccctttacc

SEQ ID NO: 178645 - DNA, 13 bp, Artificial Sequence
  Oligonucleotide for detection of SNP TSC0044252
ttatttttttaty

SEQ ID NO: 178646 - DNA, 13 bp, Artificial Sequence
  Oligonucleotide for detection of SNP TSC0044252
rataaaaaaataa

SEQ ID NO: 178647 - DNA, 13 bp, Artificial Sequence
  Oligonucleotide for detection of SNP TSC0044254
tgtaggtgtggga

SEQ ID NO: 178648 - DNA, 13 bp, Artificial Sequence
  Oligonucleotide for detection of SNP TSC0044254
tcccacacctaca

SEQ ID NO: 178649 - DNA, 13 bp, Artificial Sequence
  Oligonucleotide for detection of SNP TSC0044254
tgtaggggtggga

SEQ ID NO: 178650 - DNA, 13 bp, Artificial Sequence
  Oligonucleotide for detection of SNP TSC0044254
tcccacccctaca

SEQ ID NO: 178651 - DNA, 13 bp, Artificial Sequence
  Oligonucleotide for detection of SNP TSC0044255
aggtggaatattt

SEQ ID NO: 178652 - DNA, 13 bp, Artificial Sequence
  Oligonucleotide for detection of SNP TSC0044255
aaatattccacct

SEQ ID NO: 178653 - DNA, 13 bp, Artificial Sequence
  Oligonucleotide for detection of SNP TSC0044255
aggtggtatattt

SEQ ID NO: 178654 - DNA, 13 bp, Artificial Sequence
  Oligonucleotide for detection of SNP TSC0044255
aaatataccacct

SEQ ID NO: 178655 - DNA, 13 bp, Artificial Sequence
  Oligonucleotide for detection of SNP TSC0044255
aaatgttttattt

SEQ ID NO: 178656 - DNA, 13 bp, Artificial Sequence
  Oligonucleotide for detection of SNP TSC0044255
aaataaaacattt

SEQ ID NO: 178657 - DNA, 13 bp, Artificial Sequence
  Oligonucleotide for detection of SNP TSC0044255
aaatgtgttattt

SEQ ID NO: 178658 - DNA, 13 bp, Artificial Sequence
  Oligonucleotide for detection of SNP TSC0044255
aaataacacattt

SEQ ID NO: 178659 - DNA, 13 bp, Artificial Sequence
  Oligonucleotide for detection of SNP TSC0044256
gttttaagtagat

SEQ ID NO: 178660 - DNA, 13 bp, Artificial Sequence
  Oligonucleotide for detection of SNP TSC0044256
atctacttaaaac

SEQ ID NO: 178661 - DNA, 13 bp, Artificial Sequence
  Oligonucleotide for detection of SNP TSC0044256
gttttaggtagat

SEQ ID NO: 178662 - DNA, 13 bp, Artificial Sequence
  Oligonucleotide for detection of SNP TSC0044256
atctacctaaaac

SEQ ID NO: 178663 - DNA, 13 bp, Artificial Sequence
  Oligonucleotide for detection of SNP TSC0044257
tttttaatagtat

SEQ ID NO: 178664 - DNA, 13 bp, Artificial Sequence
  Oligonucleotide for detection of SNP TSC0044257
atactattaaaaa

SEQ ID NO: 178665 - DNA, 13 bp, Artificial Sequence
  Oligonucleotide for detection of SNP TSC0044257
tttttattagtat

SEQ ID NO: 178666 - DNA, 13 bp, Artificial Sequence
  Oligonucleotide for detection of SNP TSC0044257
atactaataaaaa

SEQ ID NO: 178667 - DNA, 13 bp, Artificial Sequence
  Oligonucleotide for detection of SNP TSC0044257
atgttgttggagg

SEQ ID NO: 178668 - DNA, 13 bp, Artificial Sequence
  Oligonucleotide for detection of SNP TSC0044257
cctccaacaacat

SEQ ID NO: 178669 - DNA, 13 bp, Artificial Sequence
  Oligonucleotide for detection of SNP TSC0044257
atgttggtggagg

SEQ ID NO: 178670 - DNA, 13 bp, Artificial Sequence
  Oligonucleotide for detection of SNP TSC0044257
cctccaccaacat

SEQ ID NO: 178671 - DNA, 13 bp, Artificial Sequence
  Oligonucleotide for detection of SNP TSC0006105
tgtattttatgty

SEQ ID NO: 178672 - DNA, 13 bp, Artificial Sequence
  Oligonucleotide for detection of SNP TSC0006105
racataaaataca

SEQ ID NO: 178673 - DNA, 13 bp, Artificial Sequence
  Oligonucleotide for detection of SNP TSC0006105
tgtattgtatgty

SEQ ID NO: 178674 - DNA, 13 bp, Artificial Sequence
  Oligonucleotide for detection of SNP TSC0006105
racatacaataca

SEQ ID NO: 178675 - DNA, 13 bp, Artificial Sequence
  Oligonucleotide for detection of SNP TSC0006105
cgtattttatgty

SEQ ID NO: 178676 - DNA, 13 bp, Artificial Sequence
  Oligonucleotide for detection of SNP TSC0006105
racataaaatacg

SEQ ID NO: 178677 - DNA, 13 bp, Artificial Sequence
  Oligonucleotide for detection of SNP TSC0006105
cgtattgtatgty

SEQ ID NO: 178678 - DNA, 13 bp, Artificial Sequence
  Oligonucleotide for detection of SNP TSC0006105
racatacaatacg

SEQ ID NO: 178679 - DNA, 13 bp, Artificial Sequence
  Oligonucleotide for detection of SNP TSC0006105
gatatgaagtatg

SEQ ID NO: 178680 - DNA, 13 bp, Artificial Sequence
  Oligonucleotide for detection of SNP TSC0006105
catacttcatatc

SEQ ID NO: 178681 - DNA, 13 bp, Artificial Sequence
  Oligonucleotide for detection of SNP TSC0006105
gatatgtagtatg

SEQ ID NO: 178682 - DNA, 13 bp, Artificial Sequence
  Oligonucleotide for detection of SNP TSC0006105
catactacatatc

SEQ ID NO: 178683 - DNA, 13 bp, Artificial Sequence
  Oligonucleotide for detection of SNP TSC0006105
gatatgaagtacg

SEQ ID NO: 178684 - DNA, 13 bp, Artificial Sequence
  Oligonucleotide for detection of SNP TSC0006105
cgtacttcatatc

SEQ ID NO: 178685 - DNA, 13 bp, Artificial Sequence
  Oligonucleotide for detection of SNP TSC0006105
gatatgtagtacg

SEQ ID NO: 178686 - DNA, 13 bp, Artificial Sequence
  Oligonucleotide for detection of SNP TSC0006105
cgtactacatatc

SEQ ID NO: 178687 - DNA, 13 bp, Artificial Sequence
  Oligonucleotide for detection of SNP TSC0044261
tttaaggagaagg

SEQ ID NO: 178688 - DNA, 13 bp, Artificial Sequence
  Oligonucleotide for detection of SNP TSC0044261
ccttctccttaaa

SEQ ID NO: 178689 - DNA, 13 bp, Artificial Sequence
  Oligonucleotide for detection of SNP TSC0044261
tttaagtagaagg

SEQ ID NO: 178690 - DNA, 13 bp, Artificial Sequence
  Oligonucleotide for detection of SNP TSC0044261
ccttctacttaaa

SEQ ID NO: 178691 - DNA, 13 bp, Artificial Sequence
  Oligonucleotide for detection of SNP TSC0044262
aggtttagttaty

SEQ ID NO: 178692 - DNA, 13 bp, Artificial Sequence
  Oligonucleotide for detection of SNP TSC0044262
rataactaaacct

SEQ ID NO: 178693 - DNA, 13 bp, Artificial Sequence
  Oligonucleotide for detection of SNP TSC0044262
aggttttgttaty

SEQ ID NO: 178694 - DNA, 13 bp, Artificial Sequence
  Oligonucleotide for detection of SNP TSC0044262
rataacaaaacct

SEQ ID NO: 178695 - DNA, 13 bp, Artificial Sequence
  Oligonucleotide for detection of SNP TSC0044262
aggtttcgttaty

SEQ ID NO: 178696 - DNA, 13 bp, Artificial Sequence
  Oligonucleotide for detection of SNP TSC0044262
rataacgaaacct

SEQ ID NO: 178697 - DNA, 13 bp, Artificial Sequence
  Oligonucleotide for detection of SNP TSC0044262
ggtggttgggttt

SEQ ID NO: 178698 - DNA, 13 bp, Artificial Sequence
  Oligonucleotide for detection of SNP TSC0044262
aaacccaaccacc

SEQ ID NO: 178699 - DNA, 13 bp, Artificial Sequence
  Oligonucleotide for detection of SNP TSC0044262
ggtggtggggttt

SEQ ID NO: 178700 - DNA, 13 bp, Artificial Sequence
  Oligonucleotide for detection of SNP TSC0044262
aaaccccaccacc

SEQ ID NO: 178701 - DNA, 13 bp, Artificial Sequence
  Oligonucleotide for detection of SNP TSC0044262
ggtggcggggttt

SEQ ID NO: 178702 - DNA, 13 bp, Artificial Sequence
  Oligonucleotide for detection of SNP TSC0044262
aaaccccgccacc

SEQ ID NO: 178703 - DNA, 13 bp, Artificial Sequence
  Oligonucleotide for detection of SNP TSC0044263
tatagagtaatag

SEQ ID NO: 178704 - DNA, 13 bp, Artificial Sequence
  Oligonucleotide for detection of SNP TSC0044263
ctattactctata

SEQ ID NO: 178705 - DNA, 13 bp, Artificial Sequence
  Oligonucleotide for detection of SNP TSC0044263
tatagaataatag

SEQ ID NO: 178706 - DNA, 13 bp, Artificial Sequence
  Oligonucleotide for detection of SNP TSC0044263
ctattattctata

SEQ ID NO: 178707 - DNA, 13 bp, Artificial Sequence
  Oligonucleotide for detection of SNP TSC0006477
ttttgtgggaagy

SEQ ID NO: 178708 - DNA, 13 bp, Artificial Sequence
  Oligonucleotide for detection of SNP TSC0006477
rcttcccacaaaa

SEQ ID NO: 178709 - DNA, 13 bp, Artificial Sequence
  Oligonucleotide for detection of SNP TSC0006477
ttttgtaggaagy

SEQ ID NO: 178710 - DNA, 13 bp, Artificial Sequence
  Oligonucleotide for detection of SNP TSC0006477
rcttcctacaaaa

SEQ ID NO: 178711 - DNA, 13 bp, Artificial Sequence
  Oligonucleotide for detection of SNP TSC0044268
tgtaatagttatg

SEQ ID NO: 178712 - DNA, 13 bp, Artificial Sequence
  Oligonucleotide for detection of SNP TSC0044268
cataactattaca

SEQ ID NO: 178713 - DNA, 13 bp, Artificial Sequence
  Oligonucleotide for detection of SNP TSC0044268
tgtaattgttatg

SEQ ID NO: 178714 - DNA, 13 bp, Artificial Sequence
  Oligonucleotide for detection of SNP TSC0044268
cataacaattaca

SEQ ID NO: 178715 - DNA, 13 bp, Artificial Sequence
  Oligonucleotide for detection of SNP TSC0044268
tatagttattgta

SEQ ID NO: 178716 - DNA, 13 bp, Artificial Sequence
  Oligonucleotide for detection of SNP TSC0044268
tacaataactata

SEQ ID NO: 178717 - DNA, 13 bp, Artificial Sequence
  Oligonucleotide for detection of SNP TSC0044268
tatagtaattgta

SEQ ID NO: 178718 - DNA, 13 bp, Artificial Sequence
  Oligonucleotide for detection of SNP TSC0044268
tacaattactata

SEQ ID NO: 178719 - DNA, 13 bp, Artificial Sequence
  Oligonucleotide for detection of SNP TSC0044269
taattgatatgag

SEQ ID NO: 178720 - DNA, 13 bp, Artificial Sequence
  Oligonucleotide for detection of SNP TSC0044269
ctcatatcaatta

SEQ ID NO: 178721 - DNA, 13 bp, Artificial Sequence
  Oligonucleotide for detection of SNP TSC0044269
taattgttatgag

SEQ ID NO: 178722 - DNA, 13 bp, Artificial Sequence
  Oligonucleotide for detection of SNP TSC0044269
ctcataacaatta

SEQ ID NO: 178723 - DNA, 13 bp, Artificial Sequence
  Oligonucleotide for detection of SNP TSC0044269
tttatattaattg

SEQ ID NO: 178724 - DNA, 13 bp, Artificial Sequence
  Oligonucleotide for detection of SNP TSC0044269
caattaatataaa

SEQ ID NO: 178725 - DNA, 13 bp, Artificial Sequence
  Oligonucleotide for detection of SNP TSC0044269
tttatagtaattg

SEQ ID NO: 178726 - DNA, 13 bp, Artificial Sequence
  Oligonucleotide for detection of SNP TSC0044269
caattactataaa

SEQ ID NO: 178727 - DNA, 13 bp, Artificial Sequence
  Oligonucleotide for detection of SNP TSC0044270
gatttaattttgy

SEQ ID NO: 178728 - DNA, 13 bp, Artificial Sequence
  Oligonucleotide for detection of SNP TSC0044270
rcaaaattaaatc

SEQ ID NO: 178729 - DNA, 13 bp, Artificial Sequence
  Oligonucleotide for detection of SNP TSC0044270
gatttatttttgy

SEQ ID NO: 178730 - DNA, 13 bp, Artificial Sequence
  Oligonucleotide for detection of SNP TSC0044270
rcaaaaataaatc

SEQ ID NO: 178731 - DNA, 13 bp, Artificial Sequence
  Oligonucleotide for detection of SNP TSC0044270
gtagagttgagty

SEQ ID NO: 178732 - DNA, 13 bp, Artificial Sequence
  Oligonucleotide for detection of SNP TSC0044270
ractcaactctac

SEQ ID NO: 178733 - DNA, 13 bp, Artificial Sequence
  Oligonucleotide for detection of SNP TSC0044270
gtagagatgagty

SEQ ID NO: 178734 - DNA, 13 bp, Artificial Sequence
  Oligonucleotide for detection of SNP TSC0044270
ractcatctctac

SEQ ID NO: 178735 - DNA, 13 bp, Artificial Sequence
  Oligonucleotide for detection of SNP TSC0044271
gttgagttagaat

SEQ ID NO: 178736 - DNA, 13 bp, Artificial Sequence
  Oligonucleotide for detection of SNP TSC0044271
attctaactcaac

SEQ ID NO: 178737 - DNA, 13 bp, Artificial Sequence
  Oligonucleotide for detection of SNP TSC0044271
gttgaggtagaat

SEQ ID NO: 178738 - DNA, 13 bp, Artificial Sequence
  Oligonucleotide for detection of SNP TSC0044271
attctacctcaac

SEQ ID NO: 178739 - DNA, 13 bp, Artificial Sequence
  Oligonucleotide for detection of SNP TSC0044271
attttattttaay

SEQ ID NO: 178740 - DNA, 13 bp, Artificial Sequence
  Oligonucleotide for detection of SNP TSC0044271
rttaaaataaaat

SEQ ID NO: 178741 - DNA, 13 bp, Artificial Sequence
  Oligonucleotide for detection of SNP TSC0005646
agaaaaatttaty

SEQ ID NO: 178742 - DNA, 13 bp, Artificial Sequence
  Oligonucleotide for detection of SNP TSC0005646
rataaatttttct

SEQ ID NO: 178743 - DNA, 13 bp, Artificial Sequence
  Oligonucleotide for detection of SNP TSC0005646
agaaaattttaty

SEQ ID NO: 178744 - DNA, 13 bp, Artificial Sequence
  Oligonucleotide for detection of SNP TSC0005646
rataaaattttct

SEQ ID NO: 178745 - DNA, 13 bp, Artificial Sequence
  Oligonucleotide for detection of SNP TSC0005646
agaaaagtttaty

SEQ ID NO: 178746 - DNA, 13 bp, Artificial Sequence
  Oligonucleotide for detection of SNP TSC0005646
rataaacttttct

SEQ ID NO: 178747 - DNA, 13 bp, Artificial Sequence
  Oligonucleotide for detection of SNP TSC0005646
ggtagaatttttt

SEQ ID NO: 178748 - DNA, 13 bp, Artificial Sequence
  Oligonucleotide for detection of SNP TSC0005646
aaaaaattctacc

SEQ ID NO: 178749 - DNA, 13 bp, Artificial Sequence
  Oligonucleotide for detection of SNP TSC0005647
aaataaagtgaga

SEQ ID NO: 178750 - DNA, 13 bp, Artificial Sequence
  Oligonucleotide for detection of SNP TSC0005647
tctcactttattt

SEQ ID NO: 178751 - DNA, 13 bp, Artificial Sequence
  Oligonucleotide for detection of SNP TSC0005647
aaataatgtgaga

SEQ ID NO: 178752 - DNA, 13 bp, Artificial Sequence
  Oligonucleotide for detection of SNP TSC0005647
tctcacattattt

SEQ ID NO: 178753 - DNA, 13 bp, Artificial Sequence
  Oligonucleotide for detection of SNP TSC0005647
aaataaggtgaga

SEQ ID NO: 178754 - DNA, 13 bp, Artificial Sequence
  Oligonucleotide for detection of SNP TSC0005647
tctcaccttattt

SEQ ID NO: 178755 - DNA, 13 bp, Artificial Sequence
  Oligonucleotide for detection of SNP TSC0005647
aaataacgtgaga

SEQ ID NO: 178756 - DNA, 13 bp, Artificial Sequence
  Oligonucleotide for detection of SNP TSC0005647
tctcacgttattt

SEQ ID NO: 178757 - DNA, 13 bp, Artificial Sequence
  Oligonucleotide for detection of SNP TSC0005647
ttttattttattt

SEQ ID NO: 178758 - DNA, 13 bp, Artificial Sequence
  Oligonucleotide for detection of SNP TSC0005647
aaataaaataaaa

SEQ ID NO: 178759 - DNA, 13 bp, Artificial Sequence
  Oligonucleotide for detection of SNP TSC0005647
ttttacgttattt

SEQ ID NO: 178760 - DNA, 13 bp, Artificial Sequence
  Oligonucleotide for detection of SNP TSC0005647
aaataacgtaaaa

SEQ ID NO: 178761 - DNA, 13 bp, Artificial Sequence
  Oligonucleotide for detection of SNP TSC0044272
ttataggtttagy

SEQ ID NO: 178762 - DNA, 13 bp, Artificial Sequence
  Oligonucleotide for detection of SNP TSC0044272
rctaaacctataa

SEQ ID NO: 178763 - DNA, 13 bp, Artificial Sequence
  Oligonucleotide for detection of SNP TSC0044272
ttatagatttagy

SEQ ID NO: 178764 - DNA, 13 bp, Artificial Sequence
  Oligonucleotide for detection of SNP TSC0044272
rctaaatctataa

SEQ ID NO: 178765 - DNA, 13 bp, Artificial Sequence
  Oligonucleotide for detection of SNP TSC0044274
ttggtgagatgat

SEQ ID NO: 178766 - DNA, 13 bp, Artificial Sequence
  Oligonucleotide for detection of SNP TSC0044274
atcatctcaccaa

SEQ ID NO: 178767 - DNA, 13 bp, Artificial Sequence
  Oligonucleotide for detection of SNP TSC0044274
ttggtgtgatgat

SEQ ID NO: 178768 - DNA, 13 bp, Artificial Sequence
  Oligonucleotide for detection of SNP TSC0044274
atcatcacaccaa

SEQ ID NO: 178769 - DNA, 13 bp, Artificial Sequence
  Oligonucleotide for detection of SNP TSC0044274
attattttattaa

SEQ ID NO: 178770 - DNA, 13 bp, Artificial Sequence
  Oligonucleotide for detection of SNP TSC0044274
ttaataaaataat

SEQ ID NO: 178771 - DNA, 13 bp, Artificial Sequence
  Oligonucleotide for detection of SNP TSC0044274
attattatattaa

SEQ ID NO: 178772 - DNA, 13 bp, Artificial Sequence
  Oligonucleotide for detection of SNP TSC0044274
ttaatataataat

SEQ ID NO: 178773 - DNA, 13 bp, Artificial Sequence
  Oligonucleotide for detection of SNP TSC0007795
aaaatagttaaaa

SEQ ID NO: 178774 - DNA, 13 bp, Artificial Sequence
  Oligonucleotide for detection of SNP TSC0007795
ttttaactatttt

SEQ ID NO: 178775 - DNA, 13 bp, Artificial Sequence
  Oligonucleotide for detection of SNP TSC0007796
aagtttatagaat

SEQ ID NO: 178776 - DNA, 13 bp, Artificial Sequence
  Oligonucleotide for detection of SNP TSC0007796
attctataaactt

SEQ ID NO: 178777 - DNA, 13 bp, Artificial Sequence
  Oligonucleotide for detection of SNP TSC0007796
aagtttttagaat

SEQ ID NO: 178778 - DNA, 13 bp, Artificial Sequence
  Oligonucleotide for detection of SNP TSC0007796
attctaaaaactt

SEQ ID NO: 178779 - DNA, 13 bp, Artificial Sequence
  Oligonucleotide for detection of SNP TSC0007796
attttgtggattt

SEQ ID NO: 178780 - DNA, 13 bp, Artificial Sequence
  Oligonucleotide for detection of SNP TSC0007796
aaatccacaaaat

SEQ ID NO: 178781 - DNA, 13 bp, Artificial Sequence
  Oligonucleotide for detection of SNP TSC0007796
attttggggattt

SEQ ID NO: 178782 - DNA, 13 bp, Artificial Sequence
  Oligonucleotide for detection of SNP TSC0007796
aaatccccaaaat

SEQ ID NO: 178783 - DNA, 13 bp, Artificial Sequence
  Oligonucleotide for detection of SNP TSC0007797
gaggggataaaaa

SEQ ID NO: 178784 - DNA, 13 bp, Artificial Sequence
  Oligonucleotide for detection of SNP TSC0007797
tttttatcccctc

SEQ ID NO: 178785 - DNA, 13 bp, Artificial Sequence
  Oligonucleotide for detection of SNP TSC0007797
gagggggtaaaaa

SEQ ID NO: 178786 - DNA, 13 bp, Artificial Sequence
  Oligonucleotide for detection of SNP TSC0007797
tttttaccccctc

SEQ ID NO: 178787 - DNA, 13 bp, Artificial Sequence
  Oligonucleotide for detection of SNP TSC0044278
tgatatatttatt

SEQ ID NO: 178788 - DNA, 13 bp, Artificial Sequence
  Oligonucleotide for detection of SNP TSC0044278
aataaatatatca

SEQ ID NO: 178789 - DNA, 13 bp, Artificial Sequence
  Oligonucleotide for detection of SNP TSC0005078
tagattgttttty

SEQ ID NO: 178790 - DNA, 13 bp, Artificial Sequence
  Oligonucleotide for detection of SNP TSC0005078
raaaaacaatcta

SEQ ID NO: 178791 - DNA, 13 bp, Artificial Sequence
  Oligonucleotide for detection of SNP TSC0005078
tagattattttty

SEQ ID NO: 178792 - DNA, 13 bp, Artificial Sequence
  Oligonucleotide for detection of SNP TSC0005078
raaaaataatcta

SEQ ID NO: 178793 - DNA, 13 bp, Artificial Sequence
  Oligonucleotide for detection of SNP TSC0044285
gttgtgaatttgt

SEQ ID NO: 178794 - DNA, 13 bp, Artificial Sequence
  Oligonucleotide for detection of SNP TSC0044285
acaaattcacaac

SEQ ID NO: 178795 - DNA, 13 bp, Artificial Sequence
  Oligonucleotide for detection of SNP TSC0044285
gttgtgtatttgt

SEQ ID NO: 178796 - DNA, 13 bp, Artificial Sequence
  Oligonucleotide for detection of SNP TSC0044285
acaaatacacaac

SEQ ID NO: 178797 - DNA, 13 bp, Artificial Sequence
  Oligonucleotide for detection of SNP TSC0044285
ataggtttatagy

SEQ ID NO: 178798 - DNA, 13 bp, Artificial Sequence
  Oligonucleotide for detection of SNP TSC0044285
rctataaacctat

SEQ ID NO: 178799 - DNA, 13 bp, Artificial Sequence
  Oligonucleotide for detection of SNP TSC0044286
tataatagttttt

SEQ ID NO: 178800 - DNA, 13 bp, Artificial Sequence
  Oligonucleotide for detection of SNP TSC0044286
aaaaactattata

SEQ ID NO: 178801 - DNA, 13 bp, Artificial Sequence
  Oligonucleotide for detection of SNP TSC0044286
agagattgttatg

SEQ ID NO: 178802 - DNA, 13 bp, Artificial Sequence
  Oligonucleotide for detection of SNP TSC0044286
cataacaatctct

SEQ ID NO: 178803 - DNA, 13 bp, Artificial Sequence
  Oligonucleotide for detection of SNP TSC0044286
agagatagttatg

SEQ ID NO: 178804 - DNA, 13 bp, Artificial Sequence
  Oligonucleotide for detection of SNP TSC0044286
cataactatctct

SEQ ID NO: 178805 - DNA, 13 bp, Artificial Sequence
  Oligonucleotide for detection of SNP TSC0044287
atattagttagtg

SEQ ID NO: 178806 - DNA, 13 bp, Artificial Sequence
  Oligonucleotide for detection of SNP TSC0044287
cactaactaatat

SEQ ID NO: 178807 - DNA, 13 bp, Artificial Sequence
  Oligonucleotide for detection of SNP TSC0044287
atattaattagtg

SEQ ID NO: 178808 - DNA, 13 bp, Artificial Sequence
  Oligonucleotide for detection of SNP TSC0044287
cactaattaatat

SEQ ID NO: 178809 - DNA, 13 bp, Artificial Sequence
  Oligonucleotide for detection of SNP TSC0044288
ggaaagaaatgtt

SEQ ID NO: 178810 - DNA, 13 bp, Artificial Sequence
  Oligonucleotide for detection of SNP TSC0044288
aacatttctttcc

SEQ ID NO: 178811 - DNA, 13 bp, Artificial Sequence
  Oligonucleotide for detection of SNP TSC0044288
ggaaaggaatgtt

SEQ ID NO: 178812 - DNA, 13 bp, Artificial Sequence
  Oligonucleotide for detection of SNP TSC0044288
aacattcctttcc

SEQ ID NO: 178813 - DNA, 13 bp, Artificial Sequence
  Oligonucleotide for detection of SNP TSC0044289
gaatattgaataa

SEQ ID NO: 178814 - DNA, 13 bp, Artificial Sequence
  Oligonucleotide for detection of SNP TSC0044289
ttattcaatattc

SEQ ID NO: 178815 - DNA, 13 bp, Artificial Sequence
  Oligonucleotide for detection of SNP TSC0044289
gaatatcgaataa

SEQ ID NO: 178816 - DNA, 13 bp, Artificial Sequence
  Oligonucleotide for detection of SNP TSC0044289
ttattcgatattc

SEQ ID NO: 178817 - DNA, 13 bp, Artificial Sequence
  Oligonucleotide for detection of SNP TSC0044289
ttatttgatatty

SEQ ID NO: 178818 - DNA, 13 bp, Artificial Sequence
  Oligonucleotide for detection of SNP TSC0044289
raatatcaaataa

SEQ ID NO: 178819 - DNA, 13 bp, Artificial Sequence
  Oligonucleotide for detection of SNP TSC0044289
ttatttaatatty

SEQ ID NO: 178820 - DNA, 13 bp, Artificial Sequence
  Oligonucleotide for detection of SNP TSC0044289
raatattaaataa

SEQ ID NO: 178821 - DNA, 13 bp, Artificial Sequence
  Oligonucleotide for detection of SNP TSC0044289
ttattcgatatty

SEQ ID NO: 178822 - DNA, 13 bp, Artificial Sequence
  Oligonucleotide for detection of SNP TSC0044289
raatatcgaataa

SEQ ID NO: 178823 - DNA, 13 bp, Artificial Sequence
  Oligonucleotide for detection of SNP TSC0044290
tagggaatagaat

SEQ ID NO: 178824 - DNA, 13 bp, Artificial Sequence
  Oligonucleotide for detection of SNP TSC0044290
attctattcccta

SEQ ID NO: 178825 - DNA, 13 bp, Artificial Sequence
  Oligonucleotide for detection of SNP TSC0044290
tagggagtagaat

SEQ ID NO: 178826 - DNA, 13 bp, Artificial Sequence
  Oligonucleotide for detection of SNP TSC0044290
attctactcccta

SEQ ID NO: 178827 - DNA, 13 bp, Artificial Sequence
  Oligonucleotide for detection of SNP TSC0044291
tttattaaataaa

SEQ ID NO: 178828 - DNA, 13 bp, Artificial Sequence
  Oligonucleotide for detection of SNP TSC0044291
tttatttaataaa

SEQ ID NO: 178829 - DNA, 13 bp, Artificial Sequence
  Oligonucleotide for detection of SNP TSC0044291
tttattgaataaa

SEQ ID NO: 178830 - DNA, 13 bp, Artificial Sequence
  Oligonucleotide for detection of SNP TSC0044291
tttattcaataaa

SEQ ID NO: 178831 - DNA, 13 bp, Artificial Sequence
  Oligonucleotide for detection of SNP TSC0044292
gttttattattat

SEQ ID NO: 178832 - DNA, 13 bp, Artificial Sequence
  Oligonucleotide for detection of SNP TSC0044292
ataataataaaac

SEQ ID NO: 178833 - DNA, 13 bp, Artificial Sequence
  Oligonucleotide for detection of SNP TSC0044292
gttttagtattat

SEQ ID NO: 178834 - DNA, 13 bp, Artificial Sequence
  Oligonucleotide for detection of SNP TSC0044292
ataatactaaaac

SEQ ID NO: 178835 - DNA, 13 bp, Artificial Sequence
  Oligonucleotide for detection of SNP TSC0044292
atggtgatggagy

SEQ ID NO: 178836 - DNA, 13 bp, Artificial Sequence
  Oligonucleotide for detection of SNP TSC0044292
rctccatcaccat

SEQ ID NO: 178837 - DNA, 13 bp, Artificial Sequence
  Oligonucleotide for detection of SNP TSC0044292
atggtgttggagy

SEQ ID NO: 178838 - DNA, 13 bp, Artificial Sequence
  Oligonucleotide for detection of SNP TSC0044292
rctccaacaccat

SEQ ID NO: 178839 - DNA, 13 bp, Artificial Sequence
  Oligonucleotide for detection of SNP TSC0044293
gtaaaagaaatty

SEQ ID NO: 178840 - DNA, 13 bp, Artificial Sequence
  Oligonucleotide for detection of SNP TSC0044293
raatttcttttac

SEQ ID NO: 178841 - DNA, 13 bp, Artificial Sequence
  Oligonucleotide for detection of SNP TSC0044293
gtaaaaaaaatty

SEQ ID NO: 178842 - DNA, 13 bp, Artificial Sequence
  Oligonucleotide for detection of SNP TSC0044293
raattttttttac

SEQ ID NO: 178843 - DNA, 13 bp, Artificial Sequence
  Oligonucleotide for detection of SNP TSC0044294
aaaatggtagtty

SEQ ID NO: 178844 - DNA, 13 bp, Artificial Sequence
  Oligonucleotide for detection of SNP TSC0044294
raactaccatttt

SEQ ID NO: 178845 - DNA, 13 bp, Artificial Sequence
  Oligonucleotide for detection of SNP TSC0044294
aaaatgatagtty

SEQ ID NO: 178846 - DNA, 13 bp, Artificial Sequence
  Oligonucleotide for detection of SNP TSC0044294
raactatcatttt

SEQ ID NO: 178847 - DNA, 13 bp, Artificial Sequence
  Oligonucleotide for detection of SNP TSC0044295
aagttaattatgt

SEQ ID NO: 178848 - DNA, 13 bp, Artificial Sequence
  Oligonucleotide for detection of SNP TSC0044295
acataattaactt

SEQ ID NO: 178849 - DNA, 13 bp, Artificial Sequence
  Oligonucleotide for detection of SNP TSC0044295
aagttagttatgt

SEQ ID NO: 178850 - DNA, 13 bp, Artificial Sequence
  Oligonucleotide for detection of SNP TSC0044295
acataactaactt

SEQ ID NO: 178851 - DNA, 13 bp, Artificial Sequence
  Oligonucleotide for detection of SNP TSC0044296
aaggagggtttty

SEQ ID NO: 178852 - DNA, 13 bp, Artificial Sequence
  Oligonucleotide for detection of SNP TSC0044296
raaaaccctcctt

SEQ ID NO: 178853 - DNA, 13 bp, Artificial Sequence
  Oligonucleotide for detection of SNP TSC0044296
aaggagagtttty

SEQ ID NO: 178854 - DNA, 13 bp, Artificial Sequence
  Oligonucleotide for detection of SNP TSC0044296
raaaactctcctt

SEQ ID NO: 178855 - DNA, 13 bp, Artificial Sequence
  Oligonucleotide for detection of SNP TSC0008209
tatttgatttaty

SEQ ID NO: 178856 - DNA, 13 bp, Artificial Sequence
  Oligonucleotide for detection of SNP TSC0008209
rataaatcaaata

SEQ ID NO: 178857 - DNA, 13 bp, Artificial Sequence
  Oligonucleotide for detection of SNP TSC0008209
tatttggtttaty

SEQ ID NO: 178858 - DNA, 13 bp, Artificial Sequence
  Oligonucleotide for detection of SNP TSC0008209
rataaaccaaata

SEQ ID NO: 178859 - DNA, 13 bp, Artificial Sequence
  Oligonucleotide for detection of SNP TSC0008980
atatgttagagtt

SEQ ID NO: 178860 - DNA, 13 bp, Artificial Sequence
  Oligonucleotide for detection of SNP TSC0008980
aactctaacatat

SEQ ID NO: 178861 - DNA, 13 bp, Artificial Sequence
  Oligonucleotide for detection of SNP TSC0008980
atatgtgagagtt

SEQ ID NO: 178862 - DNA, 13 bp, Artificial Sequence
  Oligonucleotide for detection of SNP TSC0008980
aactctcacatat

SEQ ID NO: 178863 - DNA, 13 bp, Artificial Sequence
  Oligonucleotide for detection of SNP TSC0008980
agtttttatatat

SEQ ID NO: 178864 - DNA, 13 bp, Artificial Sequence
  Oligonucleotide for detection of SNP TSC0008980
atatataaaaact

SEQ ID NO: 178865 - DNA, 13 bp, Artificial Sequence
  Oligonucleotide for detection of SNP TSC0044298
tatttaaaagaty

SEQ ID NO: 178866 - DNA, 13 bp, Artificial Sequence
  Oligonucleotide for detection of SNP TSC0044298
ratcttttaaata

SEQ ID NO: 178867 - DNA, 13 bp, Artificial Sequence
  Oligonucleotide for detection of SNP TSC0044298
tatttataagaty

SEQ ID NO: 178868 - DNA, 13 bp, Artificial Sequence
  Oligonucleotide for detection of SNP TSC0044298
ratcttataaata

SEQ ID NO: 178869 - DNA, 13 bp, Artificial Sequence
  Oligonucleotide for detection of SNP TSC0044298
gattttttagatg

SEQ ID NO: 178870 - DNA, 13 bp, Artificial Sequence
  Oligonucleotide for detection of SNP TSC0044298
catctaaaaaatc

SEQ ID NO: 178871 - DNA, 13 bp, Artificial Sequence
  Oligonucleotide for detection of SNP TSC0044298
gattttgtagatg

SEQ ID NO: 178872 - DNA, 13 bp, Artificial Sequence
  Oligonucleotide for detection of SNP TSC0044298
catctacaaaatc

SEQ ID NO: 178873 - DNA, 13 bp, Artificial Sequence
  Oligonucleotide for detection of SNP TSC0044300
tataaaaatagtg

SEQ ID NO: 178874 - DNA, 13 bp, Artificial Sequence
  Oligonucleotide for detection of SNP TSC0044300
cactatttttata

SEQ ID NO: 178875 - DNA, 13 bp, Artificial Sequence
  Oligonucleotide for detection of SNP TSC0044300
tataaagatagtg

SEQ ID NO: 178876 - DNA, 13 bp, Artificial Sequence
  Oligonucleotide for detection of SNP TSC0044300
cactatctttata

SEQ ID NO: 178877 - DNA, 13 bp, Artificial Sequence
  Oligonucleotide for detection of SNP TSC0044301
gagttgagtgaga

SEQ ID NO: 178878 - DNA, 13 bp, Artificial Sequence
  Oligonucleotide for detection of SNP TSC0044301
tctcactcaactc

SEQ ID NO: 178879 - DNA, 13 bp, Artificial Sequence
  Oligonucleotide for detection of SNP TSC0044301
gagttgtgtgaga

SEQ ID NO: 178880 - DNA, 13 bp, Artificial Sequence
  Oligonucleotide for detection of SNP TSC0044301
tctcacacaactc

SEQ ID NO: 178881 - DNA, 13 bp, Artificial Sequence
  Oligonucleotide for detection of SNP TSC0044301
gagttgcgtgaga

SEQ ID NO: 178882 - DNA, 13 bp, Artificial Sequence
  Oligonucleotide for detection of SNP TSC0044301
tctcacgcaactc

SEQ ID NO: 178883 - DNA, 13 bp, Artificial Sequence
  Oligonucleotide for detection of SNP TSC0044301
ttttacgtagtty

SEQ ID NO: 178884 - DNA, 13 bp, Artificial Sequence
  Oligonucleotide for detection of SNP TSC0044301
raactacgtaaaa

SEQ ID NO: 178885 - DNA, 13 bp, Artificial Sequence
  Oligonucleotide for detection of SNP TSC0044302
tggtttgttgtag

SEQ ID NO: 178886 - DNA, 13 bp, Artificial Sequence
  Oligonucleotide for detection of SNP TSC0044302
ctacaacaaacca

SEQ ID NO: 178887 - DNA, 13 bp, Artificial Sequence
  Oligonucleotide for detection of SNP TSC0044302
tggtttattgtag

SEQ ID NO: 178888 - DNA, 13 bp, Artificial Sequence
  Oligonucleotide for detection of SNP TSC0044302
ctacaataaacca

SEQ ID NO: 178889 - DNA, 13 bp, Artificial Sequence
  Oligonucleotide for detection of SNP TSC0044302
tggttcgttgtag

SEQ ID NO: 178890 - DNA, 13 bp, Artificial Sequence
  Oligonucleotide for detection of SNP TSC0044302
ctacaacgaacca

SEQ ID NO: 178891 - DNA, 13 bp, Artificial Sequence
  Oligonucleotide for detection of SNP TSC0044305
gatataaatttay

SEQ ID NO: 178892 - DNA, 13 bp, Artificial Sequence
  Oligonucleotide for detection of SNP TSC0044305
rtaaatttatatc

SEQ ID NO: 178893 - DNA, 13 bp, Artificial Sequence
  Oligonucleotide for detection of SNP TSC0044305
gatatatatttay

SEQ ID NO: 178894 - DNA, 13 bp, Artificial Sequence
  Oligonucleotide for detection of SNP TSC0044305
rtaaatatatatc

SEQ ID NO: 178895 - DNA, 13 bp, Artificial Sequence
  Oligonucleotide for detection of SNP TSC0044305
gtgagtttataty

SEQ ID NO: 178896 - DNA, 13 bp, Artificial Sequence
  Oligonucleotide for detection of SNP TSC0044305
ratataaactcac

SEQ ID NO: 178897 - DNA, 13 bp, Artificial Sequence
  Oligonucleotide for detection of SNP TSC0044305
gtgagtgtataty

SEQ ID NO: 178898 - DNA, 13 bp, Artificial Sequence
  Oligonucleotide for detection of SNP TSC0044305
ratatacactcac

SEQ ID NO: 178899 - DNA, 13 bp, Artificial Sequence
  Oligonucleotide for detection of SNP TSC0005939
atttaaaaattty

SEQ ID NO: 178900 - DNA, 13 bp, Artificial Sequence
  Oligonucleotide for detection of SNP TSC0005939
raaatttttaaat

SEQ ID NO: 178901 - DNA, 13 bp, Artificial Sequence
  Oligonucleotide for detection of SNP TSC0005939
atttaataattty

SEQ ID NO: 178902 - DNA, 13 bp, Artificial Sequence
  Oligonucleotide for detection of SNP TSC0005939
raaattattaaat

SEQ ID NO: 178903 - DNA, 13 bp, Artificial Sequence
  Oligonucleotide for detection of SNP TSC0005939
ggagtttttgaat

SEQ ID NO: 178904 - DNA, 13 bp, Artificial Sequence
  Oligonucleotide for detection of SNP TSC0005939
attcaaaaactcc

SEQ ID NO: 178905 - DNA, 13 bp, Artificial Sequence
  Oligonucleotide for detection of SNP TSC0005939
ggagttgttgaat

SEQ ID NO: 178906 - DNA, 13 bp, Artificial Sequence
  Oligonucleotide for detection of SNP TSC0005939
attcaacaactcc

SEQ ID NO: 178907 - DNA, 13 bp, Artificial Sequence
  Oligonucleotide for detection of SNP TSC0005940
tttagggttaggt

SEQ ID NO: 178908 - DNA, 13 bp, Artificial Sequence
  Oligonucleotide for detection of SNP TSC0005940
acctaaccctaaa

SEQ ID NO: 178909 - DNA, 13 bp, Artificial Sequence
  Oligonucleotide for detection of SNP TSC0005940
tttaggattaggt

SEQ ID NO: 178910 - DNA, 13 bp, Artificial Sequence
  Oligonucleotide for detection of SNP TSC0005940
acctaatcctaaa

SEQ ID NO: 178911 - DNA, 13 bp, Artificial Sequence
  Oligonucleotide for detection of SNP TSC0044308
aaattaatgattt

SEQ ID NO: 178912 - DNA, 13 bp, Artificial Sequence
  Oligonucleotide for detection of SNP TSC0044308
aaatcattaattt

SEQ ID NO: 178913 - DNA, 13 bp, Artificial Sequence
  Oligonucleotide for detection of SNP TSC0044308
aaattagtgattt

SEQ ID NO: 178914 - DNA, 13 bp, Artificial Sequence
  Oligonucleotide for detection of SNP TSC0044308
aaatcactaattt

SEQ ID NO: 178915 - DNA, 13 bp, Artificial Sequence
  Oligonucleotide for detection of SNP TSC0044309
tggtttggttaay

SEQ ID NO: 178916 - DNA, 13 bp, Artificial Sequence
  Oligonucleotide for detection of SNP TSC0044309
rttaaccaaacca

SEQ ID NO: 178917 - DNA, 13 bp, Artificial Sequence
  Oligonucleotide for detection of SNP TSC0044309
tggttcggttaay

SEQ ID NO: 178918 - DNA, 13 bp, Artificial Sequence
  Oligonucleotide for detection of SNP TSC0044309
rttaaccgaacca

SEQ ID NO: 178919 - DNA, 13 bp, Artificial Sequence
  Oligonucleotide for detection of SNP TSC0044309
gttgatggggtta

SEQ ID NO: 178920 - DNA, 13 bp, Artificial Sequence
  Oligonucleotide for detection of SNP TSC0044309
taaccccatcaac

SEQ ID NO: 178921 - DNA, 13 bp, Artificial Sequence
  Oligonucleotide for detection of SNP TSC0044309
gttgattgggtta

SEQ ID NO: 178922 - DNA, 13 bp, Artificial Sequence
  Oligonucleotide for detection of SNP TSC0044309
taacccaatcaac

SEQ ID NO: 178923 - DNA, 13 bp, Artificial Sequence
  Oligonucleotide for detection of SNP TSC0044309
gttgacggggtta

SEQ ID NO: 178924 - DNA, 13 bp, Artificial Sequence
  Oligonucleotide for detection of SNP TSC0044309
taaccccgtcaac

SEQ ID NO: 178925 - DNA, 13 bp, Artificial Sequence
  Oligonucleotide for detection of SNP TSC0044309
gttgatcgggtta

SEQ ID NO: 178926 - DNA, 13 bp, Artificial Sequence
  Oligonucleotide for detection of SNP TSC0044309
taacccgatcaac

SEQ ID NO: 178927 - DNA, 13 bp, Artificial Sequence
  Oligonucleotide for detection of SNP TSC0044310
ttggttagagaty

SEQ ID NO: 178928 - DNA, 13 bp, Artificial Sequence
  Oligonucleotide for detection of SNP TSC0044310
ratctctaaccaa

SEQ ID NO: 178929 - DNA, 13 bp, Artificial Sequence
  Oligonucleotide for detection of SNP TSC0044310
ttggttggagaty

SEQ ID NO: 178930 - DNA, 13 bp, Artificial Sequence
  Oligonucleotide for detection of SNP TSC0044310
ratctccaaccaa

SEQ ID NO: 178931 - DNA, 13 bp, Artificial Sequence
  Oligonucleotide for detection of SNP TSC0006301
ggagtagtaggat

SEQ ID NO: 178932 - DNA, 13 bp, Artificial Sequence
  Oligonucleotide for detection of SNP TSC0006301
atcctactactcc

SEQ ID NO: 178933 - DNA, 13 bp, Artificial Sequence
  Oligonucleotide for detection of SNP TSC0006301
ggagtaataggat

SEQ ID NO: 178934 - DNA, 13 bp, Artificial Sequence
  Oligonucleotide for detection of SNP TSC0006301
atcctattactcc

SEQ ID NO: 178935 - DNA, 13 bp, Artificial Sequence
  Oligonucleotide for detection of SNP TSC0006302
tttgtgattttat

SEQ ID NO: 178936 - DNA, 13 bp, Artificial Sequence
  Oligonucleotide for detection of SNP TSC0006302
ataaaatcacaaa

SEQ ID NO: 178937 - DNA, 13 bp, Artificial Sequence
  Oligonucleotide for detection of SNP TSC0006302
tttgtgtttttat

SEQ ID NO: 178938 - DNA, 13 bp, Artificial Sequence
  Oligonucleotide for detection of SNP TSC0006302
ataaaaacacaaa

SEQ ID NO: 178939 - DNA, 13 bp, Artificial Sequence
  Oligonucleotide for detection of SNP TSC0006302
atgaagttataga

SEQ ID NO: 178940 - DNA, 13 bp, Artificial Sequence
  Oligonucleotide for detection of SNP TSC0006302
tctataacttcat

SEQ ID NO: 178941 - DNA, 13 bp, Artificial Sequence
  Oligonucleotide for detection of SNP TSC0006302
atgaagatataga

SEQ ID NO: 178942 - DNA, 13 bp, Artificial Sequence
  Oligonucleotide for detection of SNP TSC0006302
tctatatcttcat

SEQ ID NO: 178943 - DNA, 13 bp, Artificial Sequence
  Oligonucleotide for detection of SNP TSC0044311
attttaattaaat

SEQ ID NO: 178944 - DNA, 13 bp, Artificial Sequence
  Oligonucleotide for detection of SNP TSC0044311
atttaattaaaat

SEQ ID NO: 178945 - DNA, 13 bp, Artificial Sequence
  Oligonucleotide for detection of SNP TSC0044311
attttagttaaat

SEQ ID NO: 178946 - DNA, 13 bp, Artificial Sequence
  Oligonucleotide for detection of SNP TSC0044311
atttaactaaaat

SEQ ID NO: 178947 - DNA, 13 bp, Artificial Sequence
  Oligonucleotide for detection of SNP TSC0044312
gagttttaaaatt

SEQ ID NO: 178948 - DNA, 13 bp, Artificial Sequence
  Oligonucleotide for detection of SNP TSC0044312
aattttaaaactc

SEQ ID NO: 178949 - DNA, 13 bp, Artificial Sequence
  Oligonucleotide for detection of SNP TSC0044312
gagtttgaaaatt

SEQ ID NO: 178950 - DNA, 13 bp, Artificial Sequence
  Oligonucleotide for detection of SNP TSC0044312
aattttcaaactc

SEQ ID NO: 178951 - DNA, 13 bp, Artificial Sequence
  Oligonucleotide for detection of SNP TSC0044312
agttttgagatty

SEQ ID NO: 178952 - DNA, 13 bp, Artificial Sequence
  Oligonucleotide for detection of SNP TSC0044312
raatctcaaaact

SEQ ID NO: 178953 - DNA, 13 bp, Artificial Sequence
  Oligonucleotide for detection of SNP TSC0044312
agtttttagatty

SEQ ID NO: 178954 - DNA, 13 bp, Artificial Sequence
  Oligonucleotide for detection of SNP TSC0044312
raatctaaaaact

SEQ ID NO: 178955 - DNA, 13 bp, Artificial Sequence
  Oligonucleotide for detection of SNP TSC0044313
tttttaggtggtg

SEQ ID NO: 178956 - DNA, 13 bp, Artificial Sequence
  Oligonucleotide for detection of SNP TSC0044313
caccacctaaaaa

SEQ ID NO: 178957 - DNA, 13 bp, Artificial Sequence
  Oligonucleotide for detection of SNP TSC0044313
tttttaggcggtg

SEQ ID NO: 178958 - DNA, 13 bp, Artificial Sequence
  Oligonucleotide for detection of SNP TSC0044313
caccgcctaaaaa

SEQ ID NO: 178959 - DNA, 13 bp, Artificial Sequence
  Oligonucleotide for detection of SNP TSC0044314
tgtattaaagttt

SEQ ID NO: 178960 - DNA, 13 bp, Artificial Sequence
  Oligonucleotide for detection of SNP TSC0044314
aaactttaataca

SEQ ID NO: 178961 - DNA, 13 bp, Artificial Sequence
  Oligonucleotide for detection of SNP TSC0044314
tgtatttaagttt

SEQ ID NO: 178962 - DNA, 13 bp, Artificial Sequence
  Oligonucleotide for detection of SNP TSC0044314
aaacttaaataca

SEQ ID NO: 178963 - DNA, 13 bp, Artificial Sequence
  Oligonucleotide for detection of SNP TSC0044314
aggttttagtata

SEQ ID NO: 178964 - DNA, 13 bp, Artificial Sequence
  Oligonucleotide for detection of SNP TSC0044314
tatactaaaacct

SEQ ID NO: 178965 - DNA, 13 bp, Artificial Sequence
  Oligonucleotide for detection of SNP TSC0044314
aggtttgagtata

SEQ ID NO: 178966 - DNA, 13 bp, Artificial Sequence
  Oligonucleotide for detection of SNP TSC0044314
tatactcaaacct

SEQ ID NO: 178967 - DNA, 13 bp, Artificial Sequence
  Oligonucleotide for detection of SNP TSC0044316
aataataaatgta

SEQ ID NO: 178968 - DNA, 13 bp, Artificial Sequence
  Oligonucleotide for detection of SNP TSC0044316
tacatttattatt

SEQ ID NO: 178969 - DNA, 13 bp, Artificial Sequence
  Oligonucleotide for detection of SNP TSC0044316
aataattaatgta

SEQ ID NO: 178970 - DNA, 13 bp, Artificial Sequence
  Oligonucleotide for detection of SNP TSC0044316
tacattaattatt

SEQ ID NO: 178971 - DNA, 13 bp, Artificial Sequence
  Oligonucleotide for detection of SNP TSC0044316
aataataaacgta

SEQ ID NO: 178972 - DNA, 13 bp, Artificial Sequence
  Oligonucleotide for detection of SNP TSC0044316
tacgtttattatt

SEQ ID NO: 178973 - DNA, 13 bp, Artificial Sequence
  Oligonucleotide for detection of SNP TSC0044316
aataattaacgta

SEQ ID NO: 178974 - DNA, 13 bp, Artificial Sequence
  Oligonucleotide for detection of SNP TSC0044316
tacgttaattatt

SEQ ID NO: 178975 - DNA, 13 bp, Artificial Sequence
  Oligonucleotide for detection of SNP TSC0044316
tgtgtttgttgtt

SEQ ID NO: 178976 - DNA, 13 bp, Artificial Sequence
  Oligonucleotide for detection of SNP TSC0044316
aacaacaaacaca

SEQ ID NO: 178977 - DNA, 13 bp, Artificial Sequence
  Oligonucleotide for detection of SNP TSC0044316
tgtgttggttgtt

SEQ ID NO: 178978 - DNA, 13 bp, Artificial Sequence
  Oligonucleotide for detection of SNP TSC0044316
aacaaccaacaca

SEQ ID NO: 178979 - DNA, 13 bp, Artificial Sequence
  Oligonucleotide for detection of SNP TSC0044316
tgcgtttgttgtt

SEQ ID NO: 178980 - DNA, 13 bp, Artificial Sequence
  Oligonucleotide for detection of SNP TSC0044316
aacaacaaacgca

SEQ ID NO: 178981 - DNA, 13 bp, Artificial Sequence
  Oligonucleotide for detection of SNP TSC0044316
tgcgttggttgtt

SEQ ID NO: 178982 - DNA, 13 bp, Artificial Sequence
  Oligonucleotide for detection of SNP TSC0044316
aacaaccaacgca

SEQ ID NO: 178983 - DNA, 13 bp, Artificial Sequence
  Oligonucleotide for detection of SNP TSC0044317
gtttttattggaa

SEQ ID NO: 178984 - DNA, 13 bp, Artificial Sequence
  Oligonucleotide for detection of SNP TSC0044317
ttccaataaaaac

SEQ ID NO: 178985 - DNA, 13 bp, Artificial Sequence
  Oligonucleotide for detection of SNP TSC0044317
gttttttttggaa

SEQ ID NO: 178986 - DNA, 13 bp, Artificial Sequence
  Oligonucleotide for detection of SNP TSC0044317
ttccaaaaaaaac

SEQ ID NO: 178987 - DNA, 13 bp, Artificial Sequence
  Oligonucleotide for detection of SNP TSC0044317
gtttttatcggaa

SEQ ID NO: 178988 - DNA, 13 bp, Artificial Sequence
  Oligonucleotide for detection of SNP TSC0044317
ttccgataaaaac

SEQ ID NO: 178989 - DNA, 13 bp, Artificial Sequence
  Oligonucleotide for detection of SNP TSC0044317
gtttttttcggaa

SEQ ID NO: 178990 - DNA, 13 bp, Artificial Sequence
  Oligonucleotide for detection of SNP TSC0044317
ttccgaaaaaaac

SEQ ID NO: 178991 - DNA, 13 bp, Artificial Sequence
  Oligonucleotide for detection of SNP TSC0044317
ttttggtaagaay

SEQ ID NO: 178992 - DNA, 13 bp, Artificial Sequence
  Oligonucleotide for detection of SNP TSC0044317
rttcttaccaaaa

SEQ ID NO: 178993 - DNA, 13 bp, Artificial Sequence
  Oligonucleotide for detection of SNP TSC0044317
ttttgggaagaay

SEQ ID NO: 178994 - DNA, 13 bp, Artificial Sequence
  Oligonucleotide for detection of SNP TSC0044317
rttcttcccaaaa

SEQ ID NO: 178995 - DNA, 13 bp, Artificial Sequence
  Oligonucleotide for detection of SNP TSC0044317
tttcggtaagaay

SEQ ID NO: 178996 - DNA, 13 bp, Artificial Sequence
  Oligonucleotide for detection of SNP TSC0044317
rttcttaccgaaa

SEQ ID NO: 178997 - DNA, 13 bp, Artificial Sequence
  Oligonucleotide for detection of SNP TSC0044317
tttcgggaagaay

SEQ ID NO: 178998 - DNA, 13 bp, Artificial Sequence
  Oligonucleotide for detection of SNP TSC0044317
rttcttcccgaaa

SEQ ID NO: 178999 - DNA, 13 bp, Artificial Sequence
  Oligonucleotide for detection of SNP TSC0044322
tttattttttgty

SEQ ID NO: 179000 - DNA, 13 bp, Artificial Sequence
  Oligonucleotide for detection of SNP TSC0044322
racaaaaaataaa

SEQ ID NO: 179001 - DNA, 13 bp, Artificial Sequence
  Oligonucleotide for detection of SNP TSC0044322
ggtagaggatagg

SEQ ID NO: 179002 - DNA, 13 bp, Artificial Sequence
  Oligonucleotide for detection of SNP TSC0044322
cctatcctctacc

SEQ ID NO: 179003 - DNA, 13 bp, Artificial Sequence
  Oligonucleotide for detection of SNP TSC0044322
ggtagatgatagg

SEQ ID NO: 179004 - DNA, 13 bp, Artificial Sequence
  Oligonucleotide for detection of SNP TSC0044322
cctatcatctacc

SEQ ID NO: 179005 - DNA, 13 bp, Artificial Sequence
  Oligonucleotide for detection of SNP TSC0044322
ggtagacgatagg

SEQ ID NO: 179006 - DNA, 13 bp, Artificial Sequence
  Oligonucleotide for detection of SNP TSC0044322
cctatcgtctacc

SEQ ID NO: 179007 - DNA, 13 bp, Artificial Sequence
  Oligonucleotide for detection of SNP TSC0044323
ttatagaaaatty

SEQ ID NO: 179008 - DNA, 13 bp, Artificial Sequence
  Oligonucleotide for detection of SNP TSC0044323
raattttctataa

SEQ ID NO: 179009 - DNA, 13 bp, Artificial Sequence
  Oligonucleotide for detection of SNP TSC0044323
ttatagtaaatty

SEQ ID NO: 179010 - DNA, 13 bp, Artificial Sequence
  Oligonucleotide for detection of SNP TSC0044323
raatttactataa

SEQ ID NO: 179011 - DNA, 13 bp, Artificial Sequence
  Oligonucleotide for detection of SNP TSC0044323
ggattttttatga

SEQ ID NO: 179012 - DNA, 13 bp, Artificial Sequence
  Oligonucleotide for detection of SNP TSC0044323
tcataaaaaatcc

SEQ ID NO: 179013 - DNA, 13 bp, Artificial Sequence
  Oligonucleotide for detection of SNP TSC0044323
ggatttgttatga

SEQ ID NO: 179014 - DNA, 13 bp, Artificial Sequence
  Oligonucleotide for detection of SNP TSC0044323
tcataacaaatcc

SEQ ID NO: 179015 - DNA, 13 bp, Artificial Sequence
  Oligonucleotide for detection of SNP TSC0044326
tttttggaattaa

SEQ ID NO: 179016 - DNA, 13 bp, Artificial Sequence
  Oligonucleotide for detection of SNP TSC0044326
ttaattccaaaaa

SEQ ID NO: 179017 - DNA, 13 bp, Artificial Sequence
  Oligonucleotide for detection of SNP TSC0044326
tttttgaaattaa

SEQ ID NO: 179018 - DNA, 13 bp, Artificial Sequence
  Oligonucleotide for detection of SNP TSC0044326
ttaatttcaaaaa

SEQ ID NO: 179019 - DNA, 13 bp, Artificial Sequence
  Oligonucleotide for detection of SNP TSC0044331
ggtaaggaaaaaa

SEQ ID NO: 179020 - DNA, 13 bp, Artificial Sequence
  Oligonucleotide for detection of SNP TSC0044331
ttttttccttacc

SEQ ID NO: 179021 - DNA, 13 bp, Artificial Sequence
  Oligonucleotide for detection of SNP TSC0044331
ggtaagaaaaaaa

SEQ ID NO: 179022 - DNA, 13 bp, Artificial Sequence
  Oligonucleotide for detection of SNP TSC0044331
tttttttcttacc

SEQ ID NO: 179023 - DNA, 13 bp, Artificial Sequence
  Oligonucleotide for detection of SNP TSC0044332
tggagttgataat

SEQ ID NO: 179024 - DNA, 13 bp, Artificial Sequence
  Oligonucleotide for detection of SNP TSC0044332
attatcaactcca

SEQ ID NO: 179025 - DNA, 13 bp, Artificial Sequence
  Oligonucleotide for detection of SNP TSC0044332
tggagtcgataat

SEQ ID NO: 179026 - DNA, 13 bp, Artificial Sequence
  Oligonucleotide for detection of SNP TSC0044332
attatcgactcca

SEQ ID NO: 179027 - DNA, 13 bp, Artificial Sequence
  Oligonucleotide for detection of SNP TSC0044333
taaattagttaag

SEQ ID NO: 179028 - DNA, 13 bp, Artificial Sequence
  Oligonucleotide for detection of SNP TSC0044333
cttaactaattta

SEQ ID NO: 179029 - DNA, 13 bp, Artificial Sequence
  Oligonucleotide for detection of SNP TSC0044333
taaattggttaag

SEQ ID NO: 179030 - DNA, 13 bp, Artificial Sequence
  Oligonucleotide for detection of SNP TSC0044333
cttaaccaattta

SEQ ID NO: 179031 - DNA, 13 bp, Artificial Sequence
  Oligonucleotide for detection of SNP TSC0044334
ttttttatagaat

SEQ ID NO: 179032 - DNA, 13 bp, Artificial Sequence
  Oligonucleotide for detection of SNP TSC0044334
attctataaaaaa

SEQ ID NO: 179033 - DNA, 13 bp, Artificial Sequence
  Oligonucleotide for detection of SNP TSC0044334
ttttttgtagaat

SEQ ID NO: 179034 - DNA, 13 bp, Artificial Sequence
  Oligonucleotide for detection of SNP TSC0044334
attctacaaaaaa

SEQ ID NO: 179035 - DNA, 13 bp, Artificial Sequence
  Oligonucleotide for detection of SNP TSC0009762
ataggtaagaata

SEQ ID NO: 179036 - DNA, 13 bp, Artificial Sequence
  Oligonucleotide for detection of SNP TSC0009762
tattcttacctat

SEQ ID NO: 179037 - DNA, 13 bp, Artificial Sequence
  Oligonucleotide for detection of SNP TSC0009762
ataggtgagaata

SEQ ID NO: 179038 - DNA, 13 bp, Artificial Sequence
  Oligonucleotide for detection of SNP TSC0009762
tattctcacctat

SEQ ID NO: 179039 - DNA, 13 bp, Artificial Sequence
  Oligonucleotide for detection of SNP TSC0044335
agaggtataatta

SEQ ID NO: 179040 - DNA, 13 bp, Artificial Sequence
  Oligonucleotide for detection of SNP TSC0044335
taattatacctct

SEQ ID NO: 179041 - DNA, 13 bp, Artificial Sequence
  Oligonucleotide for detection of SNP TSC0044336
atagaagttttgy

SEQ ID NO: 179042 - DNA, 13 bp, Artificial Sequence
  Oligonucleotide for detection of SNP TSC0044336
rcaaaacttctat

SEQ ID NO: 179043 - DNA, 13 bp, Artificial Sequence
  Oligonucleotide for detection of SNP TSC0044336
atagaaattttgy

SEQ ID NO: 179044 - DNA, 13 bp, Artificial Sequence
  Oligonucleotide for detection of SNP TSC0044336
rcaaaatttctat

SEQ ID NO: 179045 - DNA, 13 bp, Artificial Sequence
  Oligonucleotide for detection of SNP TSC0044337
ggttttattttgt

SEQ ID NO: 179046 - DNA, 13 bp, Artificial Sequence
  Oligonucleotide for detection of SNP TSC0044337
acaaaataaaacc

SEQ ID NO: 179047 - DNA, 13 bp, Artificial Sequence
  Oligonucleotide for detection of SNP TSC0044337
ggttttgttttgt

SEQ ID NO: 179048 - DNA, 13 bp, Artificial Sequence
  Oligonucleotide for detection of SNP TSC0044337
acaaaacaaaacc

SEQ ID NO: 179049 - DNA, 13 bp, Artificial Sequence
  Oligonucleotide for detection of SNP TSC0044337
ggtttcgttttgt

SEQ ID NO: 179050 - DNA, 13 bp, Artificial Sequence
  Oligonucleotide for detection of SNP TSC0044337
acaaaacgaaacc

SEQ ID NO: 179051 - DNA, 13 bp, Artificial Sequence
  Oligonucleotide for detection of SNP TSC0044337
atagagtgagaty

SEQ ID NO: 179052 - DNA, 13 bp, Artificial Sequence
  Oligonucleotide for detection of SNP TSC0044337
ratctcactctat

SEQ ID NO: 179053 - DNA, 13 bp, Artificial Sequence
  Oligonucleotide for detection of SNP TSC0044337
atagagcgagaty

SEQ ID NO: 179054 - DNA, 13 bp, Artificial Sequence
  Oligonucleotide for detection of SNP TSC0044337
ratctcgctctat

SEQ ID NO: 179055 - DNA, 13 bp, Artificial Sequence
  Oligonucleotide for detection of SNP TSC0044338
ataataaattttg

SEQ ID NO: 179056 - DNA, 13 bp, Artificial Sequence
  Oligonucleotide for detection of SNP TSC0044338
caaaatttattat

SEQ ID NO: 179057 - DNA, 13 bp, Artificial Sequence
  Oligonucleotide for detection of SNP TSC0044338
ataatatattttg

SEQ ID NO: 179058 - DNA, 13 bp, Artificial Sequence
  Oligonucleotide for detection of SNP TSC0044338
caaaatatattat

SEQ ID NO: 179059 - DNA, 13 bp, Artificial Sequence
  Oligonucleotide for detection of SNP TSC0044338
tagaatttgttgt

SEQ ID NO: 179060 - DNA, 13 bp, Artificial Sequence
  Oligonucleotide for detection of SNP TSC0044338
acaacaaattcta

SEQ ID NO: 179061 - DNA, 13 bp, Artificial Sequence
  Oligonucleotide for detection of SNP TSC0044338
tagaatatgttgt

SEQ ID NO: 179062 - DNA, 13 bp, Artificial Sequence
  Oligonucleotide for detection of SNP TSC0044338
acaacatattcta

SEQ ID NO: 179063 - DNA, 13 bp, Artificial Sequence
  Oligonucleotide for detection of SNP TSC0044339
gaatgaagtgttt

SEQ ID NO: 179064 - DNA, 13 bp, Artificial Sequence
  Oligonucleotide for detection of SNP TSC0044339
aaacacttcattc

SEQ ID NO: 179065 - DNA, 13 bp, Artificial Sequence
  Oligonucleotide for detection of SNP TSC0044339
gaatgatgtgttt

SEQ ID NO: 179066 - DNA, 13 bp, Artificial Sequence
  Oligonucleotide for detection of SNP TSC0044339
aaacacatcattc

SEQ ID NO: 179067 - DNA, 13 bp, Artificial Sequence
  Oligonucleotide for detection of SNP TSC0044339
aggtatattatty

SEQ ID NO: 179068 - DNA, 13 bp, Artificial Sequence
  Oligonucleotide for detection of SNP TSC0044339
raataatatacct

SEQ ID NO: 179069 - DNA, 13 bp, Artificial Sequence
  Oligonucleotide for detection of SNP TSC0000136
ttaggtagaagtt

SEQ ID NO: 179070 - DNA, 13 bp, Artificial Sequence
  Oligonucleotide for detection of SNP TSC0000136
aacttctacctaa

SEQ ID NO: 179071 - DNA, 13 bp, Artificial Sequence
  Oligonucleotide for detection of SNP TSC0000136
ttaggtggaagtt

SEQ ID NO: 179072 - DNA, 13 bp, Artificial Sequence
  Oligonucleotide for detection of SNP TSC0000136
aacttccacctaa

SEQ ID NO: 179073 - DNA, 13 bp, Artificial Sequence
  Oligonucleotide for detection of SNP TSC0000136
ttaggcggaagtt

SEQ ID NO: 179074 - DNA, 13 bp, Artificial Sequence
  Oligonucleotide for detection of SNP TSC0000136
aacttccgcctaa

SEQ ID NO: 179075 - DNA, 13 bp, Artificial Sequence
  Oligonucleotide for detection of SNP TSC0000136
agtttttgtttga

SEQ ID NO: 179076 - DNA, 13 bp, Artificial Sequence
  Oligonucleotide for detection of SNP TSC0000136
tcaaacaaaaact

SEQ ID NO: 179077 - DNA, 13 bp, Artificial Sequence
  Oligonucleotide for detection of SNP TSC0000136
agttttcgtttga

SEQ ID NO: 179078 - DNA, 13 bp, Artificial Sequence
  Oligonucleotide for detection of SNP TSC0000136
tcaaacgaaaact

SEQ ID NO: 179079 - DNA, 13 bp, Artificial Sequence
  Oligonucleotide for detection of SNP TSC0000137
gtaagttggagaa

SEQ ID NO: 179080 - DNA, 13 bp, Artificial Sequence
  Oligonucleotide for detection of SNP TSC0000137
ttctccaacttac

SEQ ID NO: 179081 - DNA, 13 bp, Artificial Sequence
  Oligonucleotide for detection of SNP TSC0000137
gtaagtcggagaa

SEQ ID NO: 179082 - DNA, 13 bp, Artificial Sequence
  Oligonucleotide for detection of SNP TSC0000137
ttctccgacttac

SEQ ID NO: 179083 - DNA, 13 bp, Artificial Sequence
  Oligonucleotide for detection of SNP TSC0000137
ttttttgatttgy

SEQ ID NO: 179084 - DNA, 13 bp, Artificial Sequence
  Oligonucleotide for detection of SNP TSC0000137
rcaaatcaaaaaa

SEQ ID NO: 179085 - DNA, 13 bp, Artificial Sequence
  Oligonucleotide for detection of SNP TSC0000137
ttttttaatttgy

SEQ ID NO: 179086 - DNA, 13 bp, Artificial Sequence
  Oligonucleotide for detection of SNP TSC0000137
rcaaattaaaaaa

SEQ ID NO: 179087 - DNA, 13 bp, Artificial Sequence
  Oligonucleotide for detection of SNP TSC0000137
tttttcgatttgy

SEQ ID NO: 179088 - DNA, 13 bp, Artificial Sequence
  Oligonucleotide for detection of SNP TSC0000137
rcaaatcgaaaaa

SEQ ID NO: 179089 - DNA, 13 bp, Artificial Sequence
  Oligonucleotide for detection of SNP TSC0001389
aaataaattgtty

SEQ ID NO: 179090 - DNA, 13 bp, Artificial Sequence
  Oligonucleotide for detection of SNP TSC0001389
raacaatttattt

SEQ ID NO: 179091 - DNA, 13 bp, Artificial Sequence
  Oligonucleotide for detection of SNP TSC0001389
aaataatttgtty

SEQ ID NO: 179092 - DNA, 13 bp, Artificial Sequence
  Oligonucleotide for detection of SNP TSC0001389
raacaaattattt

SEQ ID NO: 179093 - DNA, 13 bp, Artificial Sequence
  Oligonucleotide for detection of SNP TSC0001389
ggatagtttgttt

SEQ ID NO: 179094 - DNA, 13 bp, Artificial Sequence
  Oligonucleotide for detection of SNP TSC0001389
aaacaaactatcc

SEQ ID NO: 179095 - DNA, 13 bp, Artificial Sequence
  Oligonucleotide for detection of SNP TSC0001389
ggatagattgttt

SEQ ID NO: 179096 - DNA, 13 bp, Artificial Sequence
  Oligonucleotide for detection of SNP TSC0001389
aaacaatctatcc

SEQ ID NO: 179097 - DNA, 13 bp, Artificial Sequence
  Oligonucleotide for detection of SNP TSC0044341
taatgtaggtatt

SEQ ID NO: 179098 - DNA, 13 bp, Artificial Sequence
  Oligonucleotide for detection of SNP TSC0044341
aatacctacatta

SEQ ID NO: 179099 - DNA, 13 bp, Artificial Sequence
  Oligonucleotide for detection of SNP TSC0044341
taatgttggtatt

SEQ ID NO: 179100 - DNA, 13 bp, Artificial Sequence
  Oligonucleotide for detection of SNP TSC0044341
aataccaacatta

SEQ ID NO: 179101 - DNA, 13 bp, Artificial Sequence
  Oligonucleotide for detection of SNP TSC0044341
taatgtcggtatt

SEQ ID NO: 179102 - DNA, 13 bp, Artificial Sequence
  Oligonucleotide for detection of SNP TSC0044341
aataccgacatta

SEQ ID NO: 179103 - DNA, 13 bp, Artificial Sequence
  Oligonucleotide for detection of SNP TSC0044341
aatgtttatatta

SEQ ID NO: 179104 - DNA, 13 bp, Artificial Sequence
  Oligonucleotide for detection of SNP TSC0044341
taatataaacatt

SEQ ID NO: 179105 - DNA, 13 bp, Artificial Sequence
  Oligonucleotide for detection of SNP TSC0044341
aatgttgatatta

SEQ ID NO: 179106 - DNA, 13 bp, Artificial Sequence
  Oligonucleotide for detection of SNP TSC0044341
taatatcaacatt

SEQ ID NO: 179107 - DNA, 13 bp, Artificial Sequence
  Oligonucleotide for detection of SNP TSC0044341
aatgtcgatatta

SEQ ID NO: 179108 - DNA, 13 bp, Artificial Sequence
  Oligonucleotide for detection of SNP TSC0044341
taatatcgacatt

SEQ ID NO: 179109 - DNA, 13 bp, Artificial Sequence
  Oligonucleotide for detection of SNP TSC0044342
gatgagatttatg

SEQ ID NO: 179110 - DNA, 13 bp, Artificial Sequence
  Oligonucleotide for detection of SNP TSC0044342
cataaatctcatc

SEQ ID NO: 179111 - DNA, 13 bp, Artificial Sequence
  Oligonucleotide for detection of SNP TSC0044342
gatgagttttatg

SEQ ID NO: 179112 - DNA, 13 bp, Artificial Sequence
  Oligonucleotide for detection of SNP TSC0044342
cataaaactcatc

SEQ ID NO: 179113 - DNA, 13 bp, Artificial Sequence
  Oligonucleotide for detection of SNP TSC0044342
tatggattttaty

SEQ ID NO: 179114 - DNA, 13 bp, Artificial Sequence
  Oligonucleotide for detection of SNP TSC0044342
rataaaatccata

SEQ ID NO: 179115 - DNA, 13 bp, Artificial Sequence
  Oligonucleotide for detection of SNP TSC0044342
tatggaatttaty

SEQ ID NO: 179116 - DNA, 13 bp, Artificial Sequence
  Oligonucleotide for detection of SNP TSC0044342
rataaattccata

SEQ ID NO: 179117 - DNA, 13 bp, Artificial Sequence
  Oligonucleotide for detection of SNP TSC0044343
taaagtaaataat

SEQ ID NO: 179118 - DNA, 13 bp, Artificial Sequence
  Oligonucleotide for detection of SNP TSC0044343
attatttacttta

SEQ ID NO: 179119 - DNA, 13 bp, Artificial Sequence
  Oligonucleotide for detection of SNP TSC0044343
taaagtgaataat

SEQ ID NO: 179120 - DNA, 13 bp, Artificial Sequence
  Oligonucleotide for detection of SNP TSC0044343
attattcacttta

SEQ ID NO: 179121 - DNA, 13 bp, Artificial Sequence
  Oligonucleotide for detection of SNP TSC0044343
taaagcgaataat

SEQ ID NO: 179122 - DNA, 13 bp, Artificial Sequence
  Oligonucleotide for detection of SNP TSC0044343
attattcgcttta

SEQ ID NO: 179123 - DNA, 13 bp, Artificial Sequence
  Oligonucleotide for detection of SNP TSC0044343
attatttgttttg

SEQ ID NO: 179124 - DNA, 13 bp, Artificial Sequence
  Oligonucleotide for detection of SNP TSC0044343
caaaacaaataat

SEQ ID NO: 179125 - DNA, 13 bp, Artificial Sequence
  Oligonucleotide for detection of SNP TSC0044343
attattcgttttg

SEQ ID NO: 179126 - DNA, 13 bp, Artificial Sequence
  Oligonucleotide for detection of SNP TSC0044343
caaaacgaataat

SEQ ID NO: 179127 - DNA, 13 bp, Artificial Sequence
  Oligonucleotide for detection of SNP TSC0044344
tagtgtattttgt

SEQ ID NO: 179128 - DNA, 13 bp, Artificial Sequence
  Oligonucleotide for detection of SNP TSC0044344
acaaaatacacta

SEQ ID NO: 179129 - DNA, 13 bp, Artificial Sequence
  Oligonucleotide for detection of SNP TSC0044345
atagttagtagag

SEQ ID NO: 179130 - DNA, 13 bp, Artificial Sequence
  Oligonucleotide for detection of SNP TSC0044345
ctctactaactat

SEQ ID NO: 179131 - DNA, 13 bp, Artificial Sequence
  Oligonucleotide for detection of SNP TSC0044345
atagttggtagag

SEQ ID NO: 179132 - DNA, 13 bp, Artificial Sequence
  Oligonucleotide for detection of SNP TSC0044345
ctctaccaactat

SEQ ID NO: 179133 - DNA, 13 bp, Artificial Sequence
  Oligonucleotide for detection of SNP TSC0009728
agataggaaaatg

SEQ ID NO: 179134 - DNA, 13 bp, Artificial Sequence
  Oligonucleotide for detection of SNP TSC0009728
cattttcctatct

SEQ ID NO: 179135 - DNA, 13 bp, Artificial Sequence
  Oligonucleotide for detection of SNP TSC0009728
agatagaaaaatg

SEQ ID NO: 179136 - DNA, 13 bp, Artificial Sequence
  Oligonucleotide for detection of SNP TSC0009728
catttttctatct

SEQ ID NO: 179137 - DNA, 13 bp, Artificial Sequence
  Oligonucleotide for detection of SNP TSC0044346
atggttagaaggy

SEQ ID NO: 179138 - DNA, 13 bp, Artificial Sequence
  Oligonucleotide for detection of SNP TSC0044346
rccttctaaccat

SEQ ID NO: 179139 - DNA, 13 bp, Artificial Sequence
  Oligonucleotide for detection of SNP TSC0044346
atggttggaaggy

SEQ ID NO: 179140 - DNA, 13 bp, Artificial Sequence
  Oligonucleotide for detection of SNP TSC0044346
rccttccaaccat

SEQ ID NO: 179141 - DNA, 13 bp, Artificial Sequence
  Oligonucleotide for detection of SNP TSC0044346
atggtcggaaggy

SEQ ID NO: 179142 - DNA, 13 bp, Artificial Sequence
  Oligonucleotide for detection of SNP TSC0044346
rccttccgaccat

SEQ ID NO: 179143 - DNA, 13 bp, Artificial Sequence
  Oligonucleotide for detection of SNP TSC0044346
gttttttggttat

SEQ ID NO: 179144 - DNA, 13 bp, Artificial Sequence
  Oligonucleotide for detection of SNP TSC0044346
ataaccaaaaaac

SEQ ID NO: 179145 - DNA, 13 bp, Artificial Sequence
  Oligonucleotide for detection of SNP TSC0044346
gtttttcggttat

SEQ ID NO: 179146 - DNA, 13 bp, Artificial Sequence
  Oligonucleotide for detection of SNP TSC0044346
ataaccgaaaaac

SEQ ID NO: 179147 - DNA, 13 bp, Artificial Sequence
  Oligonucleotide for detection of SNP TSC0000289
tttaggatataat

SEQ ID NO: 179148 - DNA, 13 bp, Artificial Sequence
  Oligonucleotide for detection of SNP TSC0000289
attatatcctaaa

SEQ ID NO: 179149 - DNA, 13 bp, Artificial Sequence
  Oligonucleotide for detection of SNP TSC0000289
tttaggttataat

SEQ ID NO: 179150 - DNA, 13 bp, Artificial Sequence
  Oligonucleotide for detection of SNP TSC0000289
attataacctaaa

SEQ ID NO: 179151 - DNA, 13 bp, Artificial Sequence
  Oligonucleotide for detection of SNP TSC0000289
attgtattttaaa

SEQ ID NO: 179152 - DNA, 13 bp, Artificial Sequence
  Oligonucleotide for detection of SNP TSC0000289
tttaaaatacaat

SEQ ID NO: 179153 - DNA, 13 bp, Artificial Sequence
  Oligonucleotide for detection of SNP TSC0000289
attgtaatttaaa

SEQ ID NO: 179154 - DNA, 13 bp, Artificial Sequence
  Oligonucleotide for detection of SNP TSC0000289
tttaaattacaat

SEQ ID NO: 179155 - DNA, 13 bp, Artificial Sequence
  Oligonucleotide for detection of SNP TSC0044349
aaatggggttaat

SEQ ID NO: 179156 - DNA, 13 bp, Artificial Sequence
  Oligonucleotide for detection of SNP TSC0044349
attaaccccattt

SEQ ID NO: 179157 - DNA, 13 bp, Artificial Sequence
  Oligonucleotide for detection of SNP TSC0044349
aaatggagttaat

SEQ ID NO: 179158 - DNA, 13 bp, Artificial Sequence
  Oligonucleotide for detection of SNP TSC0044349
attaactccattt

SEQ ID NO: 179159 - DNA, 13 bp, Artificial Sequence
  Oligonucleotide for detection of SNP TSC0044352
agtttatgtaata

SEQ ID NO: 179160 - DNA, 13 bp, Artificial Sequence
  Oligonucleotide for detection of SNP TSC0044352
tattacataaact

SEQ ID NO: 179161 - DNA, 13 bp, Artificial Sequence
  Oligonucleotide for detection of SNP TSC0044352
agtttacgtaata

SEQ ID NO: 179162 - DNA, 13 bp, Artificial Sequence
  Oligonucleotide for detection of SNP TSC0044352
tattacgtaaact

SEQ ID NO: 179163 - DNA, 13 bp, Artificial Sequence
  Oligonucleotide for detection of SNP TSC0044354
tatattatgtaat

SEQ ID NO: 179164 - DNA, 13 bp, Artificial Sequence
  Oligonucleotide for detection of SNP TSC0044354
attacataatata

SEQ ID NO: 179165 - DNA, 13 bp, Artificial Sequence
  Oligonucleotide for detection of SNP TSC0044354
attatagaatata

SEQ ID NO: 179166 - DNA, 13 bp, Artificial Sequence
  Oligonucleotide for detection of SNP TSC0044354
tatattctataat

SEQ ID NO: 179167 - DNA, 13 bp, Artificial Sequence
  Oligonucleotide for detection of SNP TSC0044355
tagaagaagtttg

SEQ ID NO: 179168 - DNA, 13 bp, Artificial Sequence
  Oligonucleotide for detection of SNP TSC0044355
caaacttcttcta

SEQ ID NO: 179169 - DNA, 13 bp, Artificial Sequence
  Oligonucleotide for detection of SNP TSC0044355
tagaagtagtttg

SEQ ID NO: 179170 - DNA, 13 bp, Artificial Sequence
  Oligonucleotide for detection of SNP TSC0044355
caaactacttcta

SEQ ID NO: 179171 - DNA, 13 bp, Artificial Sequence
  Oligonucleotide for detection of SNP TSC0044358
tatttgatgttgt

SEQ ID NO: 179172 - DNA, 13 bp, Artificial Sequence
  Oligonucleotide for detection of SNP TSC0044358
acaacatcaaata

SEQ ID NO: 179173 - DNA, 13 bp, Artificial Sequence
  Oligonucleotide for detection of SNP TSC0044358
tatttggtgttgt

SEQ ID NO: 179174 - DNA, 13 bp, Artificial Sequence
  Oligonucleotide for detection of SNP TSC0044358
acaacaccaaata

SEQ ID NO: 179175 - DNA, 13 bp, Artificial Sequence
  Oligonucleotide for detection of SNP TSC0044363
aatgaataattta

SEQ ID NO: 179176 - DNA, 13 bp, Artificial Sequence
  Oligonucleotide for detection of SNP TSC0044363
taaattattcatt

SEQ ID NO: 179177 - DNA, 13 bp, Artificial Sequence
  Oligonucleotide for detection of SNP TSC0044363
aatgaagaattta

SEQ ID NO: 179178 - DNA, 13 bp, Artificial Sequence
  Oligonucleotide for detection of SNP TSC0044363
taaattcttcatt

SEQ ID NO: 179179 - DNA, 13 bp, Artificial Sequence
  Oligonucleotide for detection of SNP TSC0044363
taaattatttatt

SEQ ID NO: 179180 - DNA, 13 bp, Artificial Sequence
  Oligonucleotide for detection of SNP TSC0044363
aataaataattta

SEQ ID NO: 179181 - DNA, 13 bp, Artificial Sequence
  Oligonucleotide for detection of SNP TSC0044363
taaattttttatt

SEQ ID NO: 179182 - DNA, 13 bp, Artificial Sequence
  Oligonucleotide for detection of SNP TSC0044363
aataaaaaattta

SEQ ID NO: 179183 - DNA, 13 bp, Artificial Sequence
  Oligonucleotide for detection of SNP TSC0044364
gaatgagagaacg

SEQ ID NO: 179184 - DNA, 13 bp, Artificial Sequence
  Oligonucleotide for detection of SNP TSC0044364
cgttctctcattc

SEQ ID NO: 179185 - DNA, 13 bp, Artificial Sequence
  Oligonucleotide for detection of SNP TSC0044364
gaatgaaagaacg

SEQ ID NO: 179186 - DNA, 13 bp, Artificial Sequence
  Oligonucleotide for detection of SNP TSC0044364
cgttctttcattc

SEQ ID NO: 179187 - DNA, 13 bp, Artificial Sequence
  Oligonucleotide for detection of SNP TSC0044370
ttattaattataa

SEQ ID NO: 179188 - DNA, 13 bp, Artificial Sequence
  Oligonucleotide for detection of SNP TSC0044370
ttataattaataa

SEQ ID NO: 179189 - DNA, 13 bp, Artificial Sequence
  Oligonucleotide for detection of SNP TSC0044370
ttattagttataa

SEQ ID NO: 179190 - DNA, 13 bp, Artificial Sequence
  Oligonucleotide for detection of SNP TSC0044370
ttataactaataa

SEQ ID NO: 179191 - DNA, 13 bp, Artificial Sequence
  Oligonucleotide for detection of SNP TSC0044371
tgtataggagtga

SEQ ID NO: 179192 - DNA, 13 bp, Artificial Sequence
  Oligonucleotide for detection of SNP TSC0044371
tcactcctataca

SEQ ID NO: 179193 - DNA, 13 bp, Artificial Sequence
  Oligonucleotide for detection of SNP TSC0044371
tgtataagagtga

SEQ ID NO: 179194 - DNA, 13 bp, Artificial Sequence
  Oligonucleotide for detection of SNP TSC0044371
tcactcttataca

SEQ ID NO: 179195 - DNA, 13 bp, Artificial Sequence
  Oligonucleotide for detection of SNP TSC0044372
attgttatataag

SEQ ID NO: 179196 - DNA, 13 bp, Artificial Sequence
  Oligonucleotide for detection of SNP TSC0044372
cttatataacaat

SEQ ID NO: 179197 - DNA, 13 bp, Artificial Sequence
  Oligonucleotide for detection of SNP TSC0044372
attgttttataag

SEQ ID NO: 179198 - DNA, 13 bp, Artificial Sequence
  Oligonucleotide for detection of SNP TSC0044372
cttataaaacaat

SEQ ID NO: 179199 - DNA, 13 bp, Artificial Sequence
  Oligonucleotide for detection of SNP TSC0044372
atcgttatataag

SEQ ID NO: 179200 - DNA, 13 bp, Artificial Sequence
  Oligonucleotide for detection of SNP TSC0044372
cttatataacgat

SEQ ID NO: 179201 - DNA, 13 bp, Artificial Sequence
  Oligonucleotide for detection of SNP TSC0044372
atcgttttataag

SEQ ID NO: 179202 - DNA, 13 bp, Artificial Sequence
  Oligonucleotide for detection of SNP TSC0044372
cttataaaacgat

SEQ ID NO: 179203 - DNA, 13 bp, Artificial Sequence
  Oligonucleotide for detection of SNP TSC0044372
tttgtatagtgat

SEQ ID NO: 179204 - DNA, 13 bp, Artificial Sequence
  Oligonucleotide for detection of SNP TSC0044372
atcactatacaaa

SEQ ID NO: 179205 - DNA, 13 bp, Artificial Sequence
  Oligonucleotide for detection of SNP TSC0044372
tttgtagagtgat

SEQ ID NO: 179206 - DNA, 13 bp, Artificial Sequence
  Oligonucleotide for detection of SNP TSC0044372
atcactctacaaa

SEQ ID NO: 179207 - DNA, 13 bp, Artificial Sequence
  Oligonucleotide for detection of SNP TSC0044372
tttgtatagcgat

SEQ ID NO: 179208 - DNA, 13 bp, Artificial Sequence
  Oligonucleotide for detection of SNP TSC0044372
atcgctatacaaa

SEQ ID NO: 179209 - DNA, 13 bp, Artificial Sequence
  Oligonucleotide for detection of SNP TSC0044372
tttgtagagcgat

SEQ ID NO: 179210 - DNA, 13 bp, Artificial Sequence
  Oligonucleotide for detection of SNP TSC0044372
atcgctctacaaa

SEQ ID NO: 179211 - DNA, 13 bp, Artificial Sequence
  Oligonucleotide for detection of SNP TSC0044376
gttttatgtagtt

SEQ ID NO: 179212 - DNA, 13 bp, Artificial Sequence
  Oligonucleotide for detection of SNP TSC0044376
aactacataaaac

SEQ ID NO: 179213 - DNA, 13 bp, Artificial Sequence
  Oligonucleotide for detection of SNP TSC0044376
gttttacgtagtt

SEQ ID NO: 179214 - DNA, 13 bp, Artificial Sequence
  Oligonucleotide for detection of SNP TSC0044376
aactacgtaaaac

SEQ ID NO: 179215 - DNA, 13 bp, Artificial Sequence
  Oligonucleotide for detection of SNP TSC0044376
aattatgtgaggy

SEQ ID NO: 179216 - DNA, 13 bp, Artificial Sequence
  Oligonucleotide for detection of SNP TSC0044376
rcctcacataatt

SEQ ID NO: 179217 - DNA, 13 bp, Artificial Sequence
  Oligonucleotide for detection of SNP TSC0044376
aattatatgaggy

SEQ ID NO: 179218 - DNA, 13 bp, Artificial Sequence
  Oligonucleotide for detection of SNP TSC0044376
rcctcatataatt

SEQ ID NO: 179219 - DNA, 13 bp, Artificial Sequence
  Oligonucleotide for detection of SNP TSC0044376
aattacgtgaggy

SEQ ID NO: 179220 - DNA, 13 bp, Artificial Sequence
  Oligonucleotide for detection of SNP TSC0044376
rcctcacgtaatt

SEQ ID NO: 179221 - DNA, 13 bp, Artificial Sequence
  Oligonucleotide for detection of SNP TSC0006214
atgaaatggtggg

SEQ ID NO: 179222 - DNA, 13 bp, Artificial Sequence
  Oligonucleotide for detection of SNP TSC0006214
cccaccatttcat

SEQ ID NO: 179223 - DNA, 13 bp, Artificial Sequence
  Oligonucleotide for detection of SNP TSC0006214
atgaaagggtggg

SEQ ID NO: 179224 - DNA, 13 bp, Artificial Sequence
  Oligonucleotide for detection of SNP TSC0006214
cccaccctttcat

SEQ ID NO: 179225 - DNA, 13 bp, Artificial Sequence
  Oligonucleotide for detection of SNP TSC0006214
atgaaacggtggg

SEQ ID NO: 179226 - DNA, 13 bp, Artificial Sequence
  Oligonucleotide for detection of SNP TSC0006214
cccaccgtttcat

SEQ ID NO: 179227 - DNA, 13 bp, Artificial Sequence
  Oligonucleotide for detection of SNP TSC0044378
tataaaataaata

SEQ ID NO: 179228 - DNA, 13 bp, Artificial Sequence
  Oligonucleotide for detection of SNP TSC0044378
tatttattttata

SEQ ID NO: 179229 - DNA, 13 bp, Artificial Sequence
  Oligonucleotide for detection of SNP TSC0044378
tataaagtaaata

SEQ ID NO: 179230 - DNA, 13 bp, Artificial Sequence
  Oligonucleotide for detection of SNP TSC0044378
tatttactttata

SEQ ID NO: 179231 - DNA, 13 bp, Artificial Sequence
  Oligonucleotide for detection of SNP TSC0044379
atagttagtatag

SEQ ID NO: 179232 - DNA, 13 bp, Artificial Sequence
  Oligonucleotide for detection of SNP TSC0044379
ctatactaactat

SEQ ID NO: 179233 - DNA, 13 bp, Artificial Sequence
  Oligonucleotide for detection of SNP TSC0044379
atagtttgtatag

SEQ ID NO: 179234 - DNA, 13 bp, Artificial Sequence
  Oligonucleotide for detection of SNP TSC0044379
ctatacaaactat

SEQ ID NO: 179235 - DNA, 13 bp, Artificial Sequence
  Oligonucleotide for detection of SNP TSC0044379
atagttggtatag

SEQ ID NO: 179236 - DNA, 13 bp, Artificial Sequence
  Oligonucleotide for detection of SNP TSC0044379
ctataccaactat

SEQ ID NO: 179237 - DNA, 13 bp, Artificial Sequence
  Oligonucleotide for detection of SNP TSC0044379
atagttcgtatag

SEQ ID NO: 179238 - DNA, 13 bp, Artificial Sequence
  Oligonucleotide for detection of SNP TSC0044379
ctatacgaactat

SEQ ID NO: 179239 - DNA, 13 bp, Artificial Sequence
  Oligonucleotide for detection of SNP TSC0044379
atagtcggtatag

SEQ ID NO: 179240 - DNA, 13 bp, Artificial Sequence
  Oligonucleotide for detection of SNP TSC0044379
ctataccgactat

SEQ ID NO: 179241 - DNA, 13 bp, Artificial Sequence
  Oligonucleotide for detection of SNP TSC0044379
ttgtgttggttgt

SEQ ID NO: 179242 - DNA, 13 bp, Artificial Sequence
  Oligonucleotide for detection of SNP TSC0044379
acaaccaacacaa

SEQ ID NO: 179243 - DNA, 13 bp, Artificial Sequence
  Oligonucleotide for detection of SNP TSC0044379
ttgtgtgggttgt

SEQ ID NO: 179244 - DNA, 13 bp, Artificial Sequence
  Oligonucleotide for detection of SNP TSC0044379
acaacccacacaa

SEQ ID NO: 179245 - DNA, 13 bp, Artificial Sequence
  Oligonucleotide for detection of SNP TSC0044379
ttgtgtaggttgt

SEQ ID NO: 179246 - DNA, 13 bp, Artificial Sequence
  Oligonucleotide for detection of SNP TSC0044379
acaacctacacaa

SEQ ID NO: 179247 - DNA, 13 bp, Artificial Sequence
  Oligonucleotide for detection of SNP TSC0044379
ttgtgcgggttgt

SEQ ID NO: 179248 - DNA, 13 bp, Artificial Sequence
  Oligonucleotide for detection of SNP TSC0044379
acaacccgcacaa

SEQ ID NO: 179249 - DNA, 13 bp, Artificial Sequence
  Oligonucleotide for detection of SNP TSC0044379
ttgtgtcggttgt

SEQ ID NO: 179250 - DNA, 13 bp, Artificial Sequence
  Oligonucleotide for detection of SNP TSC0044379
acaaccgacacaa

SEQ ID NO: 179251 - DNA, 13 bp, Artificial Sequence
  Oligonucleotide for detection of SNP TSC0044380
aaggtaagaatta

SEQ ID NO: 179252 - DNA, 13 bp, Artificial Sequence
  Oligonucleotide for detection of SNP TSC0044380
taattcttacctt

SEQ ID NO: 179253 - DNA, 13 bp, Artificial Sequence
  Oligonucleotide for detection of SNP TSC0044380
aaggtatgaatta

SEQ ID NO: 179254 - DNA, 13 bp, Artificial Sequence
  Oligonucleotide for detection of SNP TSC0044380
taattcatacctt

SEQ ID NO: 179255 - DNA, 13 bp, Artificial Sequence
  Oligonucleotide for detection of SNP TSC0044380
tgatttttgtttt

SEQ ID NO: 179256 - DNA, 13 bp, Artificial Sequence
  Oligonucleotide for detection of SNP TSC0044380
aaaacaaaaatca

SEQ ID NO: 179257 - DNA, 13 bp, Artificial Sequence
  Oligonucleotide for detection of SNP TSC0044380
tgatttatgtttt

SEQ ID NO: 179258 - DNA, 13 bp, Artificial Sequence
  Oligonucleotide for detection of SNP TSC0044380
aaaacataaatca

SEQ ID NO: 179259 - DNA, 13 bp, Artificial Sequence
  Oligonucleotide for detection of SNP TSC0044381
atgattggtttag

SEQ ID NO: 179260 - DNA, 13 bp, Artificial Sequence
  Oligonucleotide for detection of SNP TSC0044381
ctaaaccaatcat

SEQ ID NO: 179261 - DNA, 13 bp, Artificial Sequence
  Oligonucleotide for detection of SNP TSC0044381
atgattagtttag

SEQ ID NO: 179262 - DNA, 13 bp, Artificial Sequence
  Oligonucleotide for detection of SNP TSC0044381
ctaaactaatcat

SEQ ID NO: 179263 - DNA, 13 bp, Artificial Sequence
  Oligonucleotide for detection of SNP TSC0044384
aggttagtattgt

SEQ ID NO: 179264 - DNA, 13 bp, Artificial Sequence
  Oligonucleotide for detection of SNP TSC0044384
acaatactaacct

SEQ ID NO: 179265 - DNA, 13 bp, Artificial Sequence
  Oligonucleotide for detection of SNP TSC0044384
aggttaatattgt

SEQ ID NO: 179266 - DNA, 13 bp, Artificial Sequence
  Oligonucleotide for detection of SNP TSC0044384
acaatattaacct

SEQ ID NO: 179267 - DNA, 13 bp, Artificial Sequence
  Oligonucleotide for detection of SNP TSC0044385
tttttaattgagg

SEQ ID NO: 179268 - DNA, 13 bp, Artificial Sequence
  Oligonucleotide for detection of SNP TSC0044385
cctcaattaaaaa

SEQ ID NO: 179269 - DNA, 13 bp, Artificial Sequence
  Oligonucleotide for detection of SNP TSC0044385
tttttagttgagg

SEQ ID NO: 179270 - DNA, 13 bp, Artificial Sequence
  Oligonucleotide for detection of SNP TSC0044385
cctcaactaaaaa

SEQ ID NO: 179271 - DNA, 13 bp, Artificial Sequence
  Oligonucleotide for detection of SNP TSC0044386
atttatattaata

SEQ ID NO: 179272 - DNA, 13 bp, Artificial Sequence
  Oligonucleotide for detection of SNP TSC0044386
tattaatataaat

SEQ ID NO: 179273 - DNA, 13 bp, Artificial Sequence
  Oligonucleotide for detection of SNP TSC0044386
atttattttaata

SEQ ID NO: 179274 - DNA, 13 bp, Artificial Sequence
  Oligonucleotide for detection of SNP TSC0044386
tattaaaataaat

SEQ ID NO: 179275 - DNA, 13 bp, Artificial Sequence
  Oligonucleotide for detection of SNP TSC0044386
tattgatataggt

SEQ ID NO: 179276 - DNA, 13 bp, Artificial Sequence
  Oligonucleotide for detection of SNP TSC0044386
acctatatcaata

SEQ ID NO: 179277 - DNA, 13 bp, Artificial Sequence
  Oligonucleotide for detection of SNP TSC0044386
tattgagataggt

SEQ ID NO: 179278 - DNA, 13 bp, Artificial Sequence
  Oligonucleotide for detection of SNP TSC0044386
acctatctcaata

SEQ ID NO: 179279 - DNA, 13 bp, Artificial Sequence
  Oligonucleotide for detection of SNP TSC0044387
ttgtgggaagtag

SEQ ID NO: 179280 - DNA, 13 bp, Artificial Sequence
  Oligonucleotide for detection of SNP TSC0044387
ctacttcccacaa

SEQ ID NO: 179281 - DNA, 13 bp, Artificial Sequence
  Oligonucleotide for detection of SNP TSC0044387
ttgtggaaagtag

SEQ ID NO: 179282 - DNA, 13 bp, Artificial Sequence
  Oligonucleotide for detection of SNP TSC0044387
ctactttccacaa

SEQ ID NO: 179283 - DNA, 13 bp, Artificial Sequence
  Oligonucleotide for detection of SNP TSC0044387
ttgcgggaagtag

SEQ ID NO: 179284 - DNA, 13 bp, Artificial Sequence
  Oligonucleotide for detection of SNP TSC0044387
ctacttcccgcaa

SEQ ID NO: 179285 - DNA, 13 bp, Artificial Sequence
  Oligonucleotide for detection of SNP TSC0044387
ttgcggaaagtag

SEQ ID NO: 179286 - DNA, 13 bp, Artificial Sequence
  Oligonucleotide for detection of SNP TSC0044387
ctactttccgcaa

SEQ ID NO: 179287 - DNA, 13 bp, Artificial Sequence
  Oligonucleotide for detection of SNP TSC0044389
aaatgatttttag

SEQ ID NO: 179288 - DNA, 13 bp, Artificial Sequence
  Oligonucleotide for detection of SNP TSC0044389
ctaaaaatcattt

SEQ ID NO: 179289 - DNA, 13 bp, Artificial Sequence
  Oligonucleotide for detection of SNP TSC0044389
aaatgagttttag

SEQ ID NO: 179290 - DNA, 13 bp, Artificial Sequence
  Oligonucleotide for detection of SNP TSC0044389
ctaaaactcattt

SEQ ID NO: 179291 - DNA, 13 bp, Artificial Sequence
  Oligonucleotide for detection of SNP TSC0044389
ttgagggttattt

SEQ ID NO: 179292 - DNA, 13 bp, Artificial Sequence
  Oligonucleotide for detection of SNP TSC0044389
aaataaccctcaa

SEQ ID NO: 179293 - DNA, 13 bp, Artificial Sequence
  Oligonucleotide for detection of SNP TSC0044389
ttgaggtttattt

SEQ ID NO: 179294 - DNA, 13 bp, Artificial Sequence
  Oligonucleotide for detection of SNP TSC0044389
aaataaacctcaa

SEQ ID NO: 179295 - DNA, 13 bp, Artificial Sequence
  Oligonucleotide for detection of SNP TSC0044391
aaagtattaataa

SEQ ID NO: 179296 - DNA, 13 bp, Artificial Sequence
  Oligonucleotide for detection of SNP TSC0044391
ttattaatacttt

SEQ ID NO: 179297 - DNA, 13 bp, Artificial Sequence
  Oligonucleotide for detection of SNP TSC0044391
aaagtagtaataa

SEQ ID NO: 179298 - DNA, 13 bp, Artificial Sequence
  Oligonucleotide for detection of SNP TSC0044391
ttattactacttt

SEQ ID NO: 179299 - DNA, 13 bp, Artificial Sequence
  Oligonucleotide for detection of SNP TSC0044391
ttattgatgtttt

SEQ ID NO: 179300 - DNA, 13 bp, Artificial Sequence
  Oligonucleotide for detection of SNP TSC0044391
aaaacatcaataa

SEQ ID NO: 179301 - DNA, 13 bp, Artificial Sequence
  Oligonucleotide for detection of SNP TSC0044391
ttattgttgtttt

SEQ ID NO: 179302 - DNA, 13 bp, Artificial Sequence
  Oligonucleotide for detection of SNP TSC0044391
aaaacaacaataa

SEQ ID NO: 179303 - DNA, 13 bp, Artificial Sequence
  Oligonucleotide for detection of SNP TSC0044392
tgtatgttaatty

SEQ ID NO: 179304 - DNA, 13 bp, Artificial Sequence
  Oligonucleotide for detection of SNP TSC0044392
raattaacataca

SEQ ID NO: 179305 - DNA, 13 bp, Artificial Sequence
  Oligonucleotide for detection of SNP TSC0044392
tgtatggtaatty

SEQ ID NO: 179306 - DNA, 13 bp, Artificial Sequence
  Oligonucleotide for detection of SNP TSC0044392
raattaccataca

SEQ ID NO: 179307 - DNA, 13 bp, Artificial Sequence
  Oligonucleotide for detection of SNP TSC0044392
tgtacgttaatty

SEQ ID NO: 179308 - DNA, 13 bp, Artificial Sequence
  Oligonucleotide for detection of SNP TSC0044392
raattaacgtaca

SEQ ID NO: 179309 - DNA, 13 bp, Artificial Sequence
  Oligonucleotide for detection of SNP TSC0044392
tgtacggtaatty

SEQ ID NO: 179310 - DNA, 13 bp, Artificial Sequence
  Oligonucleotide for detection of SNP TSC0044392
raattaccgtaca

SEQ ID NO: 179311 - DNA, 13 bp, Artificial Sequence
  Oligonucleotide for detection of SNP TSC0044392
gagttagtgtgta

SEQ ID NO: 179312 - DNA, 13 bp, Artificial Sequence
  Oligonucleotide for detection of SNP TSC0044392
tacacactaactc

SEQ ID NO: 179313 - DNA, 13 bp, Artificial Sequence
  Oligonucleotide for detection of SNP TSC0044392
gagttattgtgta

SEQ ID NO: 179314 - DNA, 13 bp, Artificial Sequence
  Oligonucleotide for detection of SNP TSC0044392
tacacaataactc

SEQ ID NO: 179315 - DNA, 13 bp, Artificial Sequence
  Oligonucleotide for detection of SNP TSC0044392
gagttagcgtgta

SEQ ID NO: 179316 - DNA, 13 bp, Artificial Sequence
  Oligonucleotide for detection of SNP TSC0044392
tacacgctaactc

SEQ ID NO: 179317 - DNA, 13 bp, Artificial Sequence
  Oligonucleotide for detection of SNP TSC0044392
gagttatcgtgta

SEQ ID NO: 179318 - DNA, 13 bp, Artificial Sequence
  Oligonucleotide for detection of SNP TSC0044392
tacacgataactc

SEQ ID NO: 179319 - DNA, 13 bp, Artificial Sequence
  Oligonucleotide for detection of SNP TSC0044393
tagaggaaaagta

SEQ ID NO: 179320 - DNA, 13 bp, Artificial Sequence
  Oligonucleotide for detection of SNP TSC0044393
tacttttcctcta

SEQ ID NO: 179321 - DNA, 13 bp, Artificial Sequence
  Oligonucleotide for detection of SNP TSC0044393
tagagggaaagta

SEQ ID NO: 179322 - DNA, 13 bp, Artificial Sequence
  Oligonucleotide for detection of SNP TSC0044393
tactttccctcta

SEQ ID NO: 179323 - DNA, 13 bp, Artificial Sequence
  Oligonucleotide for detection of SNP TSC0044394
tatggaattaggt

SEQ ID NO: 179324 - DNA, 13 bp, Artificial Sequence
  Oligonucleotide for detection of SNP TSC0044394
acctaattccata

SEQ ID NO: 179325 - DNA, 13 bp, Artificial Sequence
  Oligonucleotide for detection of SNP TSC0044394
tatggagttaggt

SEQ ID NO: 179326 - DNA, 13 bp, Artificial Sequence
  Oligonucleotide for detection of SNP TSC0044394
acctaactccata

SEQ ID NO: 179327 - DNA, 13 bp, Artificial Sequence
  Oligonucleotide for detection of SNP TSC0044399
taagaggatttgt

SEQ ID NO: 179328 - DNA, 13 bp, Artificial Sequence
  Oligonucleotide for detection of SNP TSC0044399
acaaatcctctta

SEQ ID NO: 179329 - DNA, 13 bp, Artificial Sequence
  Oligonucleotide for detection of SNP TSC0044399
taagagaatttgt

SEQ ID NO: 179330 - DNA, 13 bp, Artificial Sequence
  Oligonucleotide for detection of SNP TSC0044399
acaaattctctta

SEQ ID NO: 179331 - DNA, 13 bp, Artificial Sequence
  Oligonucleotide for detection of SNP TSC0044400
ggttttagtatgt

SEQ ID NO: 179332 - DNA, 13 bp, Artificial Sequence
  Oligonucleotide for detection of SNP TSC0044400
acatactaaaacc

SEQ ID NO: 179333 - DNA, 13 bp, Artificial Sequence
  Oligonucleotide for detection of SNP TSC0044400
ggttttggtatgt

SEQ ID NO: 179334 - DNA, 13 bp, Artificial Sequence
  Oligonucleotide for detection of SNP TSC0044400
acataccaaaacc

SEQ ID NO: 179335 - DNA, 13 bp, Artificial Sequence
  Oligonucleotide for detection of SNP TSC0044401
atgatgattttta

SEQ ID NO: 179336 - DNA, 13 bp, Artificial Sequence
  Oligonucleotide for detection of SNP TSC0044401
taaaaatcatcat

SEQ ID NO: 179337 - DNA, 13 bp, Artificial Sequence
  Oligonucleotide for detection of SNP TSC0044401
atgatggttttta

SEQ ID NO: 179338 - DNA, 13 bp, Artificial Sequence
  Oligonucleotide for detection of SNP TSC0044401
taaaaaccatcat

SEQ ID NO: 179339 - DNA, 13 bp, Artificial Sequence
  Oligonucleotide for detection of SNP TSC0005893
aaatttgaaatat

SEQ ID NO: 179340 - DNA, 13 bp, Artificial Sequence
  Oligonucleotide for detection of SNP TSC0005893
atatttcaaattt

SEQ ID NO: 179341 - DNA, 13 bp, Artificial Sequence
  Oligonucleotide for detection of SNP TSC0044406
gaaagtattattt

SEQ ID NO: 179342 - DNA, 13 bp, Artificial Sequence
  Oligonucleotide for detection of SNP TSC0044406
aaataatactttc

SEQ ID NO: 179343 - DNA, 13 bp, Artificial Sequence
  Oligonucleotide for detection of SNP TSC0044406
gaaagtgttattt

SEQ ID NO: 179344 - DNA, 13 bp, Artificial Sequence
  Oligonucleotide for detection of SNP TSC0044406
aaataacactttc

SEQ ID NO: 179345 - DNA, 13 bp, Artificial Sequence
  Oligonucleotide for detection of SNP TSC0044406
gaaagcgttattt

SEQ ID NO: 179346 - DNA, 13 bp, Artificial Sequence
  Oligonucleotide for detection of SNP TSC0044406
aaataacgctttc

SEQ ID NO: 179347 - DNA, 13 bp, Artificial Sequence
  Oligonucleotide for detection of SNP TSC0044406
aaatggtgtttty

SEQ ID NO: 179348 - DNA, 13 bp, Artificial Sequence
  Oligonucleotide for detection of SNP TSC0044406
raaaacaccattt

SEQ ID NO: 179349 - DNA, 13 bp, Artificial Sequence
  Oligonucleotide for detection of SNP TSC0044406
aaatggcgtttty

SEQ ID NO: 179350 - DNA, 13 bp, Artificial Sequence
  Oligonucleotide for detection of SNP TSC0044406
raaaacgccattt

SEQ ID NO: 179351 - DNA, 13 bp, Artificial Sequence
  Oligonucleotide for detection of SNP TSC0044407
atataaagattga

SEQ ID NO: 179352 - DNA, 13 bp, Artificial Sequence
  Oligonucleotide for detection of SNP TSC0044407
tcaatctttatat

SEQ ID NO: 179353 - DNA, 13 bp, Artificial Sequence
  Oligonucleotide for detection of SNP TSC0044407
atataatgattga

SEQ ID NO: 179354 - DNA, 13 bp, Artificial Sequence
  Oligonucleotide for detection of SNP TSC0044407
tcaatcattatat

SEQ ID NO: 179355 - DNA, 13 bp, Artificial Sequence
  Oligonucleotide for detection of SNP TSC0044407
atataacgattga

SEQ ID NO: 179356 - DNA, 13 bp, Artificial Sequence
  Oligonucleotide for detection of SNP TSC0044407
tcaatcgttatat

SEQ ID NO: 179357 - DNA, 13 bp, Artificial Sequence
  Oligonucleotide for detection of SNP TSC0044407
ttagtttttatgt

SEQ ID NO: 179358 - DNA, 13 bp, Artificial Sequence
  Oligonucleotide for detection of SNP TSC0044407
acataaaaactaa

SEQ ID NO: 179359 - DNA, 13 bp, Artificial Sequence
  Oligonucleotide for detection of SNP TSC0044407
ttagttgttatgt

SEQ ID NO: 179360 - DNA, 13 bp, Artificial Sequence
  Oligonucleotide for detection of SNP TSC0044407
acataacaactaa

SEQ ID NO: 179361 - DNA, 13 bp, Artificial Sequence
  Oligonucleotide for detection of SNP TSC0044407
ttagtcgttatgt

SEQ ID NO: 179362 - DNA, 13 bp, Artificial Sequence
  Oligonucleotide for detection of SNP TSC0044407
acataacgactaa

SEQ ID NO: 179363 - DNA, 13 bp, Artificial Sequence
  Oligonucleotide for detection of SNP TSC0044408
aatgaggaattta

SEQ ID NO: 179364 - DNA, 13 bp, Artificial Sequence
  Oligonucleotide for detection of SNP TSC0044408
taaattcctcatt

SEQ ID NO: 179365 - DNA, 13 bp, Artificial Sequence
  Oligonucleotide for detection of SNP TSC0044408
aatgagaaattta

SEQ ID NO: 179366 - DNA, 13 bp, Artificial Sequence
  Oligonucleotide for detection of SNP TSC0044408
taaatttctcatt

SEQ ID NO: 179367 - DNA, 13 bp, Artificial Sequence
  Oligonucleotide for detection of SNP TSC0044409
gaagtgaatgtty

SEQ ID NO: 179368 - DNA, 13 bp, Artificial Sequence
  Oligonucleotide for detection of SNP TSC0044409
raacattcacttc

SEQ ID NO: 179369 - DNA, 13 bp, Artificial Sequence
  Oligonucleotide for detection of SNP TSC0044409
gaagtggatgtty

SEQ ID NO: 179370 - DNA, 13 bp, Artificial Sequence
  Oligonucleotide for detection of SNP TSC0044409
raacatccacttc

SEQ ID NO: 179371 - DNA, 13 bp, Artificial Sequence
  Oligonucleotide for detection of SNP TSC0044411
tagttggaaggga

SEQ ID NO: 179372 - DNA, 13 bp, Artificial Sequence
  Oligonucleotide for detection of SNP TSC0044411
tcccttccaacta

SEQ ID NO: 179373 - DNA, 13 bp, Artificial Sequence
  Oligonucleotide for detection of SNP TSC0044411
tagttgaaaggga

SEQ ID NO: 179374 - DNA, 13 bp, Artificial Sequence
  Oligonucleotide for detection of SNP TSC0044411
tccctttcaacta

SEQ ID NO: 179375 - DNA, 13 bp, Artificial Sequence
  Oligonucleotide for detection of SNP TSC0007586
taatataattgga

SEQ ID NO: 179376 - DNA, 13 bp, Artificial Sequence
  Oligonucleotide for detection of SNP TSC0007586
tccaattatatta

SEQ ID NO: 179377 - DNA, 13 bp, Artificial Sequence
  Oligonucleotide for detection of SNP TSC0007586
taatatgattgga

SEQ ID NO: 179378 - DNA, 13 bp, Artificial Sequence
  Oligonucleotide for detection of SNP TSC0007586
tccaatcatatta

SEQ ID NO: 179379 - DNA, 13 bp, Artificial Sequence
  Oligonucleotide for detection of SNP TSC0044412
tagtaaattattt

SEQ ID NO: 179380 - DNA, 13 bp, Artificial Sequence
  Oligonucleotide for detection of SNP TSC0044412
aaataatttacta

SEQ ID NO: 179381 - DNA, 13 bp, Artificial Sequence
  Oligonucleotide for detection of SNP TSC0044412
tagtaagttattt

SEQ ID NO: 179382 - DNA, 13 bp, Artificial Sequence
  Oligonucleotide for detection of SNP TSC0044412
aaataacttacta

SEQ ID NO: 179383 - DNA, 13 bp, Artificial Sequence
  Oligonucleotide for detection of SNP TSC0044413
agtagttgggaga

SEQ ID NO: 179384 - DNA, 13 bp, Artificial Sequence
  Oligonucleotide for detection of SNP TSC0044413
tctcccaactact

SEQ ID NO: 179385 - DNA, 13 bp, Artificial Sequence
  Oligonucleotide for detection of SNP TSC0044413
agtagtcgggaga

SEQ ID NO: 179386 - DNA, 13 bp, Artificial Sequence
  Oligonucleotide for detection of SNP TSC0044413
tctcccgactact

SEQ ID NO: 179387 - DNA, 13 bp, Artificial Sequence
  Oligonucleotide for detection of SNP TSC0044414
tattttaatatgy

SEQ ID NO: 179388 - DNA, 13 bp, Artificial Sequence
  Oligonucleotide for detection of SNP TSC0044414
rcatattaaaata

SEQ ID NO: 179389 - DNA, 13 bp, Artificial Sequence
  Oligonucleotide for detection of SNP TSC0044414
tatttttatatgy

SEQ ID NO: 179390 - DNA, 13 bp, Artificial Sequence
  Oligonucleotide for detection of SNP TSC0044414
rcatataaaaata

SEQ ID NO: 179391 - DNA, 13 bp, Artificial Sequence
  Oligonucleotide for detection of SNP TSC0044414
gtatgttggagta

SEQ ID NO: 179392 - DNA, 13 bp, Artificial Sequence
  Oligonucleotide for detection of SNP TSC0044414
tactccaacatac

SEQ ID NO: 179393 - DNA, 13 bp, Artificial Sequence
  Oligonucleotide for detection of SNP TSC0044414
gtatgtgggagta

SEQ ID NO: 179394 - DNA, 13 bp, Artificial Sequence
  Oligonucleotide for detection of SNP TSC0044414
tactcccacatac

SEQ ID NO: 179395 - DNA, 13 bp, Artificial Sequence
  Oligonucleotide for detection of SNP TSC0044415
tatttatttttgt

SEQ ID NO: 179396 - DNA, 13 bp, Artificial Sequence
  Oligonucleotide for detection of SNP TSC0044415
acaaaaataaata

SEQ ID NO: 179397 - DNA, 13 bp, Artificial Sequence
  Oligonucleotide for detection of SNP TSC0044415
tatttagttttgt

SEQ ID NO: 179398 - DNA, 13 bp, Artificial Sequence
  Oligonucleotide for detection of SNP TSC0044415
acaaaactaaata

SEQ ID NO: 179399 - DNA, 13 bp, Artificial Sequence
  Oligonucleotide for detection of SNP TSC0044415
atagaaatagata

SEQ ID NO: 179400 - DNA, 13 bp, Artificial Sequence
  Oligonucleotide for detection of SNP TSC0044415
tatctatttctat

SEQ ID NO: 179401 - DNA, 13 bp, Artificial Sequence
  Oligonucleotide for detection of SNP TSC0044415
atagaattagata

SEQ ID NO: 179402 - DNA, 13 bp, Artificial Sequence
  Oligonucleotide for detection of SNP TSC0044415
tatctaattctat

SEQ ID NO: 179403 - DNA, 13 bp, Artificial Sequence
  Oligonucleotide for detection of SNP TSC0044416
ttgggatatttaa

SEQ ID NO: 179404 - DNA, 13 bp, Artificial Sequence
  Oligonucleotide for detection of SNP TSC0044416
ttaaatatcccaa

SEQ ID NO: 179405 - DNA, 13 bp, Artificial Sequence
  Oligonucleotide for detection of SNP TSC0044416
ttgggagatttaa

SEQ ID NO: 179406 - DNA, 13 bp, Artificial Sequence
  Oligonucleotide for detection of SNP TSC0044416
ttaaatctcccaa

SEQ ID NO: 179407 - DNA, 13 bp, Artificial Sequence
  Oligonucleotide for detection of SNP TSC0044416
ttgggtattttag

SEQ ID NO: 179408 - DNA, 13 bp, Artificial Sequence
  Oligonucleotide for detection of SNP TSC0044416
ctaaaatacccaa

SEQ ID NO: 179409 - DNA, 13 bp, Artificial Sequence
  Oligonucleotide for detection of SNP TSC0044416
ttgggttttttag

SEQ ID NO: 179410 - DNA, 13 bp, Artificial Sequence
  Oligonucleotide for detection of SNP TSC0044416
ctaaaaaacccaa

SEQ ID NO: 179411 - DNA, 13 bp, Artificial Sequence
  Oligonucleotide for detection of SNP TSC0044417
agataaagtgtta

SEQ ID NO: 179412 - DNA, 13 bp, Artificial Sequence
  Oligonucleotide for detection of SNP TSC0044417
taacactttatct

SEQ ID NO: 179413 - DNA, 13 bp, Artificial Sequence
  Oligonucleotide for detection of SNP TSC0044417
agataatgtgtta

SEQ ID NO: 179414 - DNA, 13 bp, Artificial Sequence
  Oligonucleotide for detection of SNP TSC0044417
taacacattatct

SEQ ID NO: 179415 - DNA, 13 bp, Artificial Sequence
  Oligonucleotide for detection of SNP TSC0044417
agataacgtgtta

SEQ ID NO: 179416 - DNA, 13 bp, Artificial Sequence
  Oligonucleotide for detection of SNP TSC0044417
taacacgttatct

SEQ ID NO: 179417 - DNA, 13 bp, Artificial Sequence
  Oligonucleotide for detection of SNP TSC0044417
tagtattttgttt

SEQ ID NO: 179418 - DNA, 13 bp, Artificial Sequence
  Oligonucleotide for detection of SNP TSC0044417
aaacaaaatacta

SEQ ID NO: 179419 - DNA, 13 bp, Artificial Sequence
  Oligonucleotide for detection of SNP TSC0044417
tagtatgttgttt

SEQ ID NO: 179420 - DNA, 13 bp, Artificial Sequence
  Oligonucleotide for detection of SNP TSC0044417
aaacaacatacta

SEQ ID NO: 179421 - DNA, 13 bp, Artificial Sequence
  Oligonucleotide for detection of SNP TSC0044417
tagtacgttgttt

SEQ ID NO: 179422 - DNA, 13 bp, Artificial Sequence
  Oligonucleotide for detection of SNP TSC0044417
aaacaacgtacta

SEQ ID NO: 179423 - DNA, 13 bp, Artificial Sequence
  Oligonucleotide for detection of SNP TSC0044418
tggggtaatataa

SEQ ID NO: 179424 - DNA, 13 bp, Artificial Sequence
  Oligonucleotide for detection of SNP TSC0044418
ttatattacccca

SEQ ID NO: 179425 - DNA, 13 bp, Artificial Sequence
  Oligonucleotide for detection of SNP TSC0044418
tggggtgatataa

SEQ ID NO: 179426 - DNA, 13 bp, Artificial Sequence
  Oligonucleotide for detection of SNP TSC0044418
ttatatcacccca

SEQ ID NO: 179427 - DNA, 13 bp, Artificial Sequence
  Oligonucleotide for detection of SNP TSC0044419
gaagtaaaaaagg

SEQ ID NO: 179428 - DNA, 13 bp, Artificial Sequence
  Oligonucleotide for detection of SNP TSC0044419
ccttttttacttc

SEQ ID NO: 179429 - DNA, 13 bp, Artificial Sequence
  Oligonucleotide for detection of SNP TSC0044419
gaagtataaaagg

SEQ ID NO: 179430 - DNA, 13 bp, Artificial Sequence
  Oligonucleotide for detection of SNP TSC0044419
ccttttatacttc

SEQ ID NO: 179431 - DNA, 13 bp, Artificial Sequence
  Oligonucleotide for detection of SNP TSC0044422
agatttagagatg

SEQ ID NO: 179432 - DNA, 13 bp, Artificial Sequence
  Oligonucleotide for detection of SNP TSC0044422
catctctaaatct

SEQ ID NO: 179433 - DNA, 13 bp, Artificial Sequence
  Oligonucleotide for detection of SNP TSC0044422
agatttggagatg

SEQ ID NO: 179434 - DNA, 13 bp, Artificial Sequence
  Oligonucleotide for detection of SNP TSC0044422
catctccaaatct

SEQ ID NO: 179435 - DNA, 13 bp, Artificial Sequence
  Oligonucleotide for detection of SNP TSC0044422
agattcggagatg

SEQ ID NO: 179436 - DNA, 13 bp, Artificial Sequence
  Oligonucleotide for detection of SNP TSC0044422
catctccgaatct

SEQ ID NO: 179437 - DNA, 13 bp, Artificial Sequence
  Oligonucleotide for detection of SNP TSC0044422
tatttttggattt

SEQ ID NO: 179438 - DNA, 13 bp, Artificial Sequence
  Oligonucleotide for detection of SNP TSC0044422
aaatccaaaaata

SEQ ID NO: 179439 - DNA, 13 bp, Artificial Sequence
  Oligonucleotide for detection of SNP TSC0044422
tattttcggattt

SEQ ID NO: 179440 - DNA, 13 bp, Artificial Sequence
  Oligonucleotide for detection of SNP TSC0044422
aaatccgaaaata

SEQ ID NO: 179441 - DNA, 13 bp, Artificial Sequence
  Oligonucleotide for detection of SNP TSC0044425
aatgaagattaay

SEQ ID NO: 179442 - DNA, 13 bp, Artificial Sequence
  Oligonucleotide for detection of SNP TSC0044425
rttaatcttcatt

SEQ ID NO: 179443 - DNA, 13 bp, Artificial Sequence
  Oligonucleotide for detection of SNP TSC0044425
aatgaaaattaay

SEQ ID NO: 179444 - DNA, 13 bp, Artificial Sequence
  Oligonucleotide for detection of SNP TSC0044425
rttaattttcatt

SEQ ID NO: 179445 - DNA, 13 bp, Artificial Sequence
  Oligonucleotide for detection of SNP TSC0044426
tgtgtaagtattg

SEQ ID NO: 179446 - DNA, 13 bp, Artificial Sequence
  Oligonucleotide for detection of SNP TSC0044426
caatacttacaca

SEQ ID NO: 179447 - DNA, 13 bp, Artificial Sequence
  Oligonucleotide for detection of SNP TSC0044426
tgtgtaggtattg

SEQ ID NO: 179448 - DNA, 13 bp, Artificial Sequence
  Oligonucleotide for detection of SNP TSC0044426
caatacctacaca

SEQ ID NO: 179449 - DNA, 13 bp, Artificial Sequence
  Oligonucleotide for detection of SNP TSC0044427
tataaatgaggag

SEQ ID NO: 179450 - DNA, 13 bp, Artificial Sequence
  Oligonucleotide for detection of SNP TSC0044427
ctcctcatttata

SEQ ID NO: 179451 - DNA, 13 bp, Artificial Sequence
  Oligonucleotide for detection of SNP TSC0044427
tataaacgaggag

SEQ ID NO: 179452 - DNA, 13 bp, Artificial Sequence
  Oligonucleotide for detection of SNP TSC0044427
ctcctcgtttata

SEQ ID NO: 179453 - DNA, 13 bp, Artificial Sequence
  Oligonucleotide for detection of SNP TSC0044432
gagatttggtttg

SEQ ID NO: 179454 - DNA, 13 bp, Artificial Sequence
  Oligonucleotide for detection of SNP TSC0044432
caaaccaaatctc

SEQ ID NO: 179455 - DNA, 13 bp, Artificial Sequence
  Oligonucleotide for detection of SNP TSC0044432
gagattcggtttg

SEQ ID NO: 179456 - DNA, 13 bp, Artificial Sequence
  Oligonucleotide for detection of SNP TSC0044432
caaaccgaatctc

SEQ ID NO: 179457 - DNA, 13 bp, Artificial Sequence
  Oligonucleotide for detection of SNP TSC0044432
taagttgaattty

SEQ ID NO: 179458 - DNA, 13 bp, Artificial Sequence
  Oligonucleotide for detection of SNP TSC0044432
raaattcaactta

SEQ ID NO: 179459 - DNA, 13 bp, Artificial Sequence
  Oligonucleotide for detection of SNP TSC0044432
taagttaaattty

SEQ ID NO: 179460 - DNA, 13 bp, Artificial Sequence
  Oligonucleotide for detection of SNP TSC0044432
raaatttaactta

SEQ ID NO: 179461 - DNA, 13 bp, Artificial Sequence
  Oligonucleotide for detection of SNP TSC0044432
taagtcgaattty

SEQ ID NO: 179462 - DNA, 13 bp, Artificial Sequence
  Oligonucleotide for detection of SNP TSC0044432
raaattcgactta

SEQ ID NO: 179463 - DNA, 13 bp, Artificial Sequence
  Oligonucleotide for detection of SNP TSC0044434
gaaaaaagttaaa

SEQ ID NO: 179464 - DNA, 13 bp, Artificial Sequence
  Oligonucleotide for detection of SNP TSC0044434
tttaacttttttc

SEQ ID NO: 179465 - DNA, 13 bp, Artificial Sequence
  Oligonucleotide for detection of SNP TSC0044434
gaaaaaggttaaa

SEQ ID NO: 179466 - DNA, 13 bp, Artificial Sequence
  Oligonucleotide for detection of SNP TSC0044434
tttaacctttttc

SEQ ID NO: 179467 - DNA, 13 bp, Artificial Sequence
  Oligonucleotide for detection of SNP TSC0044435
gtgatttgggtgt

SEQ ID NO: 179468 - DNA, 13 bp, Artificial Sequence
  Oligonucleotide for detection of SNP TSC0044435
acacccaaatcac

SEQ ID NO: 179469 - DNA, 13 bp, Artificial Sequence
  Oligonucleotide for detection of SNP TSC0044435
gtgattcgggtgt

SEQ ID NO: 179470 - DNA, 13 bp, Artificial Sequence
  Oligonucleotide for detection of SNP TSC0044435
acacccgaatcac

SEQ ID NO: 179471 - DNA, 13 bp, Artificial Sequence
  Oligonucleotide for detection of SNP TSC0044435
atatttgagttay

SEQ ID NO: 179472 - DNA, 13 bp, Artificial Sequence
  Oligonucleotide for detection of SNP TSC0044435
rtaactcaaatat

SEQ ID NO: 179473 - DNA, 13 bp, Artificial Sequence
  Oligonucleotide for detection of SNP TSC0044435
atatttaagttay

SEQ ID NO: 179474 - DNA, 13 bp, Artificial Sequence
  Oligonucleotide for detection of SNP TSC0044435
rtaacttaaatat

SEQ ID NO: 179475 - DNA, 13 bp, Artificial Sequence
  Oligonucleotide for detection of SNP TSC0044435
atattcgagttay

SEQ ID NO: 179476 - DNA, 13 bp, Artificial Sequence
  Oligonucleotide for detection of SNP TSC0044435
rtaactcgaatat

SEQ ID NO: 179477 - DNA, 13 bp, Artificial Sequence
  Oligonucleotide for detection of SNP TSC0044439
tgtatttgtattt

SEQ ID NO: 179478 - DNA, 13 bp, Artificial Sequence
  Oligonucleotide for detection of SNP TSC0044439
aaatacaaataca

SEQ ID NO: 179479 - DNA, 13 bp, Artificial Sequence
  Oligonucleotide for detection of SNP TSC0044439
tgtattcgtattt

SEQ ID NO: 179480 - DNA, 13 bp, Artificial Sequence
  Oligonucleotide for detection of SNP TSC0044439
aaatacgaataca

SEQ ID NO: 179481 - DNA, 13 bp, Artificial Sequence
  Oligonucleotide for detection of SNP TSC0044439
aaatgtgaatgta

SEQ ID NO: 179482 - DNA, 13 bp, Artificial Sequence
  Oligonucleotide for detection of SNP TSC0044439
tacattcacattt

SEQ ID NO: 179483 - DNA, 13 bp, Artificial Sequence
  Oligonucleotide for detection of SNP TSC0044439
aaatgtaaatgta

SEQ ID NO: 179484 - DNA, 13 bp, Artificial Sequence
  Oligonucleotide for detection of SNP TSC0044439
tacatttacattt

SEQ ID NO: 179485 - DNA, 13 bp, Artificial Sequence
  Oligonucleotide for detection of SNP TSC0044439
aaatgcgaatgta

SEQ ID NO: 179486 - DNA, 13 bp, Artificial Sequence
  Oligonucleotide for detection of SNP TSC0044439
tacattcgcattt

SEQ ID NO: 179487 - DNA, 13 bp, Artificial Sequence
  Oligonucleotide for detection of SNP TSC0044440
aatattatagaay

SEQ ID NO: 179488 - DNA, 13 bp, Artificial Sequence
  Oligonucleotide for detection of SNP TSC0044440
rttctataatatt

SEQ ID NO: 179489 - DNA, 13 bp, Artificial Sequence
  Oligonucleotide for detection of SNP TSC0044440
aatattgtagaay

SEQ ID NO: 179490 - DNA, 13 bp, Artificial Sequence
  Oligonucleotide for detection of SNP TSC0044440
rttctacaatatt

SEQ ID NO: 179491 - DNA, 13 bp, Artificial Sequence
  Oligonucleotide for detection of SNP TSC0044440
aatatcgtagaay

SEQ ID NO: 179492 - DNA, 13 bp, Artificial Sequence
  Oligonucleotide for detection of SNP TSC0044440
rttctacgatatt

SEQ ID NO: 179493 - DNA, 13 bp, Artificial Sequence
  Oligonucleotide for detection of SNP TSC0044440
gttttatgatatt

SEQ ID NO: 179494 - DNA, 13 bp, Artificial Sequence
  Oligonucleotide for detection of SNP TSC0044440
aatatcataaaac

SEQ ID NO: 179495 - DNA, 13 bp, Artificial Sequence
  Oligonucleotide for detection of SNP TSC0044440
gttttacgatatt

SEQ ID NO: 179496 - DNA, 13 bp, Artificial Sequence
  Oligonucleotide for detection of SNP TSC0044440
aatatcgtaaaac

SEQ ID NO: 179497 - DNA, 13 bp, Artificial Sequence
  Oligonucleotide for detection of SNP TSC0044441
gttgggaagttat

SEQ ID NO: 179498 - DNA, 13 bp, Artificial Sequence
  Oligonucleotide for detection of SNP TSC0044441
ataacttcccaac

SEQ ID NO: 179499 - DNA, 13 bp, Artificial Sequence
  Oligonucleotide for detection of SNP TSC0044441
gttggggagttat

SEQ ID NO: 179500 - DNA, 13 bp, Artificial Sequence
  Oligonucleotide for detection of SNP TSC0044441
ataactccccaac

SEQ ID NO: 179501 - DNA, 13 bp, Artificial Sequence
  Oligonucleotide for detection of SNP TSC0044441
gtcgggaagttat

SEQ ID NO: 179502 - DNA, 13 bp, Artificial Sequence
  Oligonucleotide for detection of SNP TSC0044441
ataacttcccgac

SEQ ID NO: 179503 - DNA, 13 bp, Artificial Sequence
  Oligonucleotide for detection of SNP TSC0044441
gtcggggagttat

SEQ ID NO: 179504 - DNA, 13 bp, Artificial Sequence
  Oligonucleotide for detection of SNP TSC0044441
ataactccccgac

SEQ ID NO: 179505 - DNA, 13 bp, Artificial Sequence
  Oligonucleotide for detection of SNP TSC0044442
ttaattaatgttt

SEQ ID NO: 179506 - DNA, 13 bp, Artificial Sequence
  Oligonucleotide for detection of SNP TSC0044442
aaacattaattaa

SEQ ID NO: 179507 - DNA, 13 bp, Artificial Sequence
  Oligonucleotide for detection of SNP TSC0044442
ttaattgatgttt

SEQ ID NO: 179508 - DNA, 13 bp, Artificial Sequence
  Oligonucleotide for detection of SNP TSC0044442
aaacatcaattaa

SEQ ID NO: 179509 - DNA, 13 bp, Artificial Sequence
  Oligonucleotide for detection of SNP TSC0044442
ttaatcgatgttt

SEQ ID NO: 179510 - DNA, 13 bp, Artificial Sequence
  Oligonucleotide for detection of SNP TSC0044442
aaacatcgattaa

SEQ ID NO: 179511 - DNA, 13 bp, Artificial Sequence
  Oligonucleotide for detection of SNP TSC0044442
aagtattggttgg

SEQ ID NO: 179512 - DNA, 13 bp, Artificial Sequence
  Oligonucleotide for detection of SNP TSC0044442
ccaaccaatactt

SEQ ID NO: 179513 - DNA, 13 bp, Artificial Sequence
  Oligonucleotide for detection of SNP TSC0044442
aagtatcggttgg

SEQ ID NO: 179514 - DNA, 13 bp, Artificial Sequence
  Oligonucleotide for detection of SNP TSC0044442
ccaaccgatactt

SEQ ID NO: 179515 - DNA, 13 bp, Artificial Sequence
  Oligonucleotide for detection of SNP TSC0007253
aatataataatat

SEQ ID NO: 179516 - DNA, 13 bp, Artificial Sequence
  Oligonucleotide for detection of SNP TSC0007253
atattattatatt

SEQ ID NO: 179517 - DNA, 13 bp, Artificial Sequence
  Oligonucleotide for detection of SNP TSC0007253
aatatattaatat

SEQ ID NO: 179518 - DNA, 13 bp, Artificial Sequence
  Oligonucleotide for detection of SNP TSC0007253
atattaatatatt

SEQ ID NO: 179519 - DNA, 13 bp, Artificial Sequence
  Oligonucleotide for detection of SNP TSC0007253
atattagtatatt

SEQ ID NO: 179520 - DNA, 13 bp, Artificial Sequence
  Oligonucleotide for detection of SNP TSC0007253
aatatactaatat

SEQ ID NO: 179521 - DNA, 13 bp, Artificial Sequence
  Oligonucleotide for detection of SNP TSC0007254
agaaggattttty

SEQ ID NO: 179522 - DNA, 13 bp, Artificial Sequence
  Oligonucleotide for detection of SNP TSC0007254
raaaaatccttct

SEQ ID NO: 179523 - DNA, 13 bp, Artificial Sequence
  Oligonucleotide for detection of SNP TSC0007254
agaagggttttty

SEQ ID NO: 179524 - DNA, 13 bp, Artificial Sequence
  Oligonucleotide for detection of SNP TSC0007254
raaaaacccttct

SEQ ID NO: 179525 - DNA, 13 bp, Artificial Sequence
  Oligonucleotide for detection of SNP TSC0007255
tagggtagtagga

SEQ ID NO: 179526 - DNA, 13 bp, Artificial Sequence
  Oligonucleotide for detection of SNP TSC0007255
tcctactacccta

SEQ ID NO: 179527 - DNA, 13 bp, Artificial Sequence
  Oligonucleotide for detection of SNP TSC0007255
tagggtggtagga

SEQ ID NO: 179528 - DNA, 13 bp, Artificial Sequence
  Oligonucleotide for detection of SNP TSC0007255
tcctaccacccta

SEQ ID NO: 179529 - DNA, 13 bp, Artificial Sequence
  Oligonucleotide for detection of SNP TSC0044443
gttattgttgatt

SEQ ID NO: 179530 - DNA, 13 bp, Artificial Sequence
  Oligonucleotide for detection of SNP TSC0044443
aatcaacaataac

SEQ ID NO: 179531 - DNA, 13 bp, Artificial Sequence
  Oligonucleotide for detection of SNP TSC0044443
gttattattgatt

SEQ ID NO: 179532 - DNA, 13 bp, Artificial Sequence
  Oligonucleotide for detection of SNP TSC0044443
aatcaataataac

SEQ ID NO: 179533 - DNA, 13 bp, Artificial Sequence
  Oligonucleotide for detection of SNP TSC0044444
tagtttaagtaat

SEQ ID NO: 179534 - DNA, 13 bp, Artificial Sequence
  Oligonucleotide for detection of SNP TSC0044444
attacttaaacta

SEQ ID NO: 179535 - DNA, 13 bp, Artificial Sequence
  Oligonucleotide for detection of SNP TSC0044444
tagtttgagtaat

SEQ ID NO: 179536 - DNA, 13 bp, Artificial Sequence
  Oligonucleotide for detection of SNP TSC0044444
attactcaaacta

SEQ ID NO: 179537 - DNA, 13 bp, Artificial Sequence
  Oligonucleotide for detection of SNP TSC0044444
tagttcgagtaat

SEQ ID NO: 179538 - DNA, 13 bp, Artificial Sequence
  Oligonucleotide for detection of SNP TSC0044444
attactcgaacta

SEQ ID NO: 179539 - DNA, 13 bp, Artificial Sequence
  Oligonucleotide for detection of SNP TSC0044444
attgtttgaattg

SEQ ID NO: 179540 - DNA, 13 bp, Artificial Sequence
  Oligonucleotide for detection of SNP TSC0044444
caattcaaacaat

SEQ ID NO: 179541 - DNA, 13 bp, Artificial Sequence
  Oligonucleotide for detection of SNP TSC0044444
attgttcgaattg

SEQ ID NO: 179542 - DNA, 13 bp, Artificial Sequence
  Oligonucleotide for detection of SNP TSC0044444
caattcgaacaat

SEQ ID NO: 179543 - DNA, 13 bp, Artificial Sequence
  Oligonucleotide for detection of SNP TSC0044445
aaattagggttty

SEQ ID NO: 179544 - DNA, 13 bp, Artificial Sequence
  Oligonucleotide for detection of SNP TSC0044445
raaaccctaattt

SEQ ID NO: 179545 - DNA, 13 bp, Artificial Sequence
  Oligonucleotide for detection of SNP TSC0044446
ggtgaaatgtatg

SEQ ID NO: 179546 - DNA, 13 bp, Artificial Sequence
  Oligonucleotide for detection of SNP TSC0044446
catacatttcacc

SEQ ID NO: 179547 - DNA, 13 bp, Artificial Sequence
  Oligonucleotide for detection of SNP TSC0044446
ggtgaagtgtatg

SEQ ID NO: 179548 - DNA, 13 bp, Artificial Sequence
  Oligonucleotide for detection of SNP TSC0044446
catacacttcacc

SEQ ID NO: 179549 - DNA, 13 bp, Artificial Sequence
  Oligonucleotide for detection of SNP TSC0044449
tttatttgttgtt

SEQ ID NO: 179550 - DNA, 13 bp, Artificial Sequence
  Oligonucleotide for detection of SNP TSC0044449
aacaacaaataaa

SEQ ID NO: 179551 - DNA, 13 bp, Artificial Sequence
  Oligonucleotide for detection of SNP TSC0044449
tttattcgttgtt

SEQ ID NO: 179552 - DNA, 13 bp, Artificial Sequence
  Oligonucleotide for detection of SNP TSC0044449
aacaacgaataaa

SEQ ID NO: 179553 - DNA, 13 bp, Artificial Sequence
  Oligonucleotide for detection of SNP TSC0044449
agtagtgaataaa

SEQ ID NO: 179554 - DNA, 13 bp, Artificial Sequence
  Oligonucleotide for detection of SNP TSC0044449
tttattcactact

SEQ ID NO: 179555 - DNA, 13 bp, Artificial Sequence
  Oligonucleotide for detection of SNP TSC0044449
agtagtaaataaa

SEQ ID NO: 179556 - DNA, 13 bp, Artificial Sequence
  Oligonucleotide for detection of SNP TSC0044449
tttatttactact

SEQ ID NO: 179557 - DNA, 13 bp, Artificial Sequence
  Oligonucleotide for detection of SNP TSC0044449
agtagcgaataaa

SEQ ID NO: 179558 - DNA, 13 bp, Artificial Sequence
  Oligonucleotide for detection of SNP TSC0044449
tttattcgctact

SEQ ID NO: 179559 - DNA, 13 bp, Artificial Sequence
  Oligonucleotide for detection of SNP TSC0044450
aaaagagttttta

SEQ ID NO: 179560 - DNA, 13 bp, Artificial Sequence
  Oligonucleotide for detection of SNP TSC0044450
taaaaactctttt

SEQ ID NO: 179561 - DNA, 13 bp, Artificial Sequence
  Oligonucleotide for detection of SNP TSC0044450
aaaagaattttta

SEQ ID NO: 179562 - DNA, 13 bp, Artificial Sequence
  Oligonucleotide for detection of SNP TSC0044450
taaaaattctttt

SEQ ID NO: 179563 - DNA, 13 bp, Artificial Sequence
  Oligonucleotide for detection of SNP TSC0044451
tgtaagtggatgy

SEQ ID NO: 179564 - DNA, 13 bp, Artificial Sequence
  Oligonucleotide for detection of SNP TSC0044451
rcatccacttaca

SEQ ID NO: 179565 - DNA, 13 bp, Artificial Sequence
  Oligonucleotide for detection of SNP TSC0044451
cgtaagtggatgy

SEQ ID NO: 179566 - DNA, 13 bp, Artificial Sequence
  Oligonucleotide for detection of SNP TSC0044451
rcatccacttacg

SEQ ID NO: 179567 - DNA, 13 bp, Artificial Sequence
  Oligonucleotide for detection of SNP TSC0044451
tgtaagcggatgy

SEQ ID NO: 179568 - DNA, 13 bp, Artificial Sequence
  Oligonucleotide for detection of SNP TSC0044451
rcatccgcttaca

SEQ ID NO: 179569 - DNA, 13 bp, Artificial Sequence
  Oligonucleotide for detection of SNP TSC0044451
cgtaagcggatgy

SEQ ID NO: 179570 - DNA, 13 bp, Artificial Sequence
  Oligonucleotide for detection of SNP TSC0044451
rcatccgcttacg

SEQ ID NO: 179571 - DNA, 13 bp, Artificial Sequence
  Oligonucleotide for detection of SNP TSC0044452
ttaaaaatttttg

SEQ ID NO: 179572 - DNA, 13 bp, Artificial Sequence
  Oligonucleotide for detection of SNP TSC0044452
caaaaatttttaa

SEQ ID NO: 179573 - DNA, 13 bp, Artificial Sequence
  Oligonucleotide for detection of SNP TSC0044452
ttaaaattttttg

SEQ ID NO: 179574 - DNA, 13 bp, Artificial Sequence
  Oligonucleotide for detection of SNP TSC0044452
caaaaaattttaa

SEQ ID NO: 179575 - DNA, 13 bp, Artificial Sequence
  Oligonucleotide for detection of SNP TSC0044452
taggaatttttga

SEQ ID NO: 179576 - DNA, 13 bp, Artificial Sequence
  Oligonucleotide for detection of SNP TSC0044452
tcaaaaattccta

SEQ ID NO: 179577 - DNA, 13 bp, Artificial Sequence
  Oligonucleotide for detection of SNP TSC0044452
taggaagttttga

SEQ ID NO: 179578 - DNA, 13 bp, Artificial Sequence
  Oligonucleotide for detection of SNP TSC0044452
tcaaaacttccta

SEQ ID NO: 179579 - DNA, 13 bp, Artificial Sequence
  Oligonucleotide for detection of SNP TSC0009634
tttatgttgttta

SEQ ID NO: 179580 - DNA, 13 bp, Artificial Sequence
  Oligonucleotide for detection of SNP TSC0009634
taaacaacataaa

SEQ ID NO: 179581 - DNA, 13 bp, Artificial Sequence
  Oligonucleotide for detection of SNP TSC0009634
tttatggtgttta

SEQ ID NO: 179582 - DNA, 13 bp, Artificial Sequence
  Oligonucleotide for detection of SNP TSC0009634
taaacaccataaa

SEQ ID NO: 179583 - DNA, 13 bp, Artificial Sequence
  Oligonucleotide for detection of SNP TSC0009634
tgagtagtatgag

SEQ ID NO: 179584 - DNA, 13 bp, Artificial Sequence
  Oligonucleotide for detection of SNP TSC0009634
ctcatactactca

SEQ ID NO: 179585 - DNA, 13 bp, Artificial Sequence
  Oligonucleotide for detection of SNP TSC0009634
tgagtaatatgag

SEQ ID NO: 179586 - DNA, 13 bp, Artificial Sequence
  Oligonucleotide for detection of SNP TSC0009634
ctcatattactca

SEQ ID NO: 179587 - DNA, 13 bp, Artificial Sequence
  Oligonucleotide for detection of SNP TSC0009634
tgagtattatgag

SEQ ID NO: 179588 - DNA, 13 bp, Artificial Sequence
  Oligonucleotide for detection of SNP TSC0009634
ctcataatactca

SEQ ID NO: 179589 - DNA, 13 bp, Artificial Sequence
  Oligonucleotide for detection of SNP TSC0009635
ttgtttatgtaay

SEQ ID NO: 179590 - DNA, 13 bp, Artificial Sequence
  Oligonucleotide for detection of SNP TSC0009635
rttacataaacaa

SEQ ID NO: 179591 - DNA, 13 bp, Artificial Sequence
  Oligonucleotide for detection of SNP TSC0009635
ttgtttttgtaay

SEQ ID NO: 179592 - DNA, 13 bp, Artificial Sequence
  Oligonucleotide for detection of SNP TSC0009635
rttacaaaaacaa

SEQ ID NO: 179593 - DNA, 13 bp, Artificial Sequence
  Oligonucleotide for detection of SNP TSC0009635
gttatatgggtaa

SEQ ID NO: 179594 - DNA, 13 bp, Artificial Sequence
  Oligonucleotide for detection of SNP TSC0009635
ttacccatataac

SEQ ID NO: 179595 - DNA, 13 bp, Artificial Sequence
  Oligonucleotide for detection of SNP TSC0009635
gttataagggtaa

SEQ ID NO: 179596 - DNA, 13 bp, Artificial Sequence
  Oligonucleotide for detection of SNP TSC0009635
ttacccttataac

SEQ ID NO: 179597 - DNA, 13 bp, Artificial Sequence
  Oligonucleotide for detection of SNP TSC0044461
attgttataattt

SEQ ID NO: 179598 - DNA, 13 bp, Artificial Sequence
  Oligonucleotide for detection of SNP TSC0044461
aaattataacaat

SEQ ID NO: 179599 - DNA, 13 bp, Artificial Sequence
  Oligonucleotide for detection of SNP TSC0044461
attgttgtaattt

SEQ ID NO: 179600 - DNA, 13 bp, Artificial Sequence
  Oligonucleotide for detection of SNP TSC0044461
aaattacaacaat

SEQ ID NO: 179601 - DNA, 13 bp, Artificial Sequence
  Oligonucleotide for detection of SNP TSC0044462
gagggtatatgtt

SEQ ID NO: 179602 - DNA, 13 bp, Artificial Sequence
  Oligonucleotide for detection of SNP TSC0044462
aacatataccctc

SEQ ID NO: 179603 - DNA, 13 bp, Artificial Sequence
  Oligonucleotide for detection of SNP TSC0044462
gagggtgtatgtt

SEQ ID NO: 179604 - DNA, 13 bp, Artificial Sequence
  Oligonucleotide for detection of SNP TSC0044462
aacatacaccctc

SEQ ID NO: 179605 - DNA, 13 bp, Artificial Sequence
  Oligonucleotide for detection of SNP TSC0044463
ttagtagtttatt

SEQ ID NO: 179606 - DNA, 13 bp, Artificial Sequence
  Oligonucleotide for detection of SNP TSC0044463
aataaactactaa

SEQ ID NO: 179607 - DNA, 13 bp, Artificial Sequence
  Oligonucleotide for detection of SNP TSC0005202
aataaaatttttt

SEQ ID NO: 179608 - DNA, 13 bp, Artificial Sequence
  Oligonucleotide for detection of SNP TSC0005202
aaaaaattttatt

SEQ ID NO: 179609 - DNA, 13 bp, Artificial Sequence
  Oligonucleotide for detection of SNP TSC0005202
agggggttttatt

SEQ ID NO: 179610 - DNA, 13 bp, Artificial Sequence
  Oligonucleotide for detection of SNP TSC0005202
aataaaaccccct

SEQ ID NO: 179611 - DNA, 13 bp, Artificial Sequence
  Oligonucleotide for detection of SNP TSC0005202
aggggggtttatt

SEQ ID NO: 179612 - DNA, 13 bp, Artificial Sequence
  Oligonucleotide for detection of SNP TSC0005202
aataaacccccct

SEQ ID NO: 179613 - DNA, 13 bp, Artificial Sequence
  Oligonucleotide for detection of SNP TSC0044465
tttatttggtttt

SEQ ID NO: 179614 - DNA, 13 bp, Artificial Sequence
  Oligonucleotide for detection of SNP TSC0044465
aaaaccaaataaa

SEQ ID NO: 179615 - DNA, 13 bp, Artificial Sequence
  Oligonucleotide for detection of SNP TSC0044465
tttattcggtttt

SEQ ID NO: 179616 - DNA, 13 bp, Artificial Sequence
  Oligonucleotide for detection of SNP TSC0044465
aaaaccgaataaa

SEQ ID NO: 179617 - DNA, 13 bp, Artificial Sequence
  Oligonucleotide for detection of SNP TSC0044465
agaattggatgag

SEQ ID NO: 179618 - DNA, 13 bp, Artificial Sequence
  Oligonucleotide for detection of SNP TSC0044465
ctcatccaattct

SEQ ID NO: 179619 - DNA, 13 bp, Artificial Sequence
  Oligonucleotide for detection of SNP TSC0044465
agaattagatgag

SEQ ID NO: 179620 - DNA, 13 bp, Artificial Sequence
  Oligonucleotide for detection of SNP TSC0044465
ctcatctaattct

SEQ ID NO: 179621 - DNA, 13 bp, Artificial Sequence
  Oligonucleotide for detection of SNP TSC0044465
agaatcggatgag

SEQ ID NO: 179622 - DNA, 13 bp, Artificial Sequence
  Oligonucleotide for detection of SNP TSC0044465
ctcatccgattct

SEQ ID NO: 179623 - DNA, 13 bp, Artificial Sequence
  Oligonucleotide for detection of SNP TSC0007148
ttgaggttttaty

SEQ ID NO: 179624 - DNA, 13 bp, Artificial Sequence
  Oligonucleotide for detection of SNP TSC0007148
rataaaacctcaa

SEQ ID NO: 179625 - DNA, 13 bp, Artificial Sequence
  Oligonucleotide for detection of SNP TSC0007148
ttgagggtttaty

SEQ ID NO: 179626 - DNA, 13 bp, Artificial Sequence
  Oligonucleotide for detection of SNP TSC0007148
rataaaccctcaa

SEQ ID NO: 179627 - DNA, 13 bp, Artificial Sequence
  Oligonucleotide for detection of SNP TSC0007148
gatgaggttttag

SEQ ID NO: 179628 - DNA, 13 bp, Artificial Sequence
  Oligonucleotide for detection of SNP TSC0007148
ctaaaacctcatc

SEQ ID NO: 179629 - DNA, 13 bp, Artificial Sequence
  Oligonucleotide for detection of SNP TSC0007148
gatgagtttttag

SEQ ID NO: 179630 - DNA, 13 bp, Artificial Sequence
  Oligonucleotide for detection of SNP TSC0007148
ctaaaaactcatc

SEQ ID NO: 179631 - DNA, 13 bp, Artificial Sequence
  Oligonucleotide for detection of SNP TSC0044467
gtgtaaatataga

SEQ ID NO: 179632 - DNA, 13 bp, Artificial Sequence
  Oligonucleotide for detection of SNP TSC0044467
tctatatttacac

SEQ ID NO: 179633 - DNA, 13 bp, Artificial Sequence
  Oligonucleotide for detection of SNP TSC0044467
gtgtaattataga

SEQ ID NO: 179634 - DNA, 13 bp, Artificial Sequence
  Oligonucleotide for detection of SNP TSC0044467
tctataattacac

SEQ ID NO: 179635 - DNA, 13 bp, Artificial Sequence
  Oligonucleotide for detection of SNP TSC0044467
tttgtgtttatay

SEQ ID NO: 179636 - DNA, 13 bp, Artificial Sequence
  Oligonucleotide for detection of SNP TSC0044467
rtataaacacaaa

SEQ ID NO: 179637 - DNA, 13 bp, Artificial Sequence
  Oligonucleotide for detection of SNP TSC0044467
tttgtggttatay

SEQ ID NO: 179638 - DNA, 13 bp, Artificial Sequence
  Oligonucleotide for detection of SNP TSC0044467
rtataaccacaaa

SEQ ID NO: 179639 - DNA, 13 bp, Artificial Sequence
  Oligonucleotide for detection of SNP TSC0044471
ttatagttatata

SEQ ID NO: 179640 - DNA, 13 bp, Artificial Sequence
  Oligonucleotide for detection of SNP TSC0044471
tatataactataa

SEQ ID NO: 179641 - DNA, 13 bp, Artificial Sequence
  Oligonucleotide for detection of SNP TSC0044471
ttataggtatata

SEQ ID NO: 179642 - DNA, 13 bp, Artificial Sequence
  Oligonucleotide for detection of SNP TSC0044471
tatatacctataa

SEQ ID NO: 179643 - DNA, 13 bp, Artificial Sequence
  Oligonucleotide for detection of SNP TSC0044471
tatgtgattgtga

SEQ ID NO: 179644 - DNA, 13 bp, Artificial Sequence
  Oligonucleotide for detection of SNP TSC0044471
tcacaatcacata

SEQ ID NO: 179645 - DNA, 13 bp, Artificial Sequence
  Oligonucleotide for detection of SNP TSC0044471
tatgtgtttgtga

SEQ ID NO: 179646 - DNA, 13 bp, Artificial Sequence
  Oligonucleotide for detection of SNP TSC0044471
tcacaaacacata

SEQ ID NO: 179647 - DNA, 13 bp, Artificial Sequence
  Oligonucleotide for detection of SNP TSC0044473
ttatgtaggttag

SEQ ID NO: 179648 - DNA, 13 bp, Artificial Sequence
  Oligonucleotide for detection of SNP TSC0044473
ctaacctacataa

SEQ ID NO: 179649 - DNA, 13 bp, Artificial Sequence
  Oligonucleotide for detection of SNP TSC0044480
attatagattaaa

SEQ ID NO: 179650 - DNA, 13 bp, Artificial Sequence
  Oligonucleotide for detection of SNP TSC0044480
tttaatctataat

SEQ ID NO: 179651 - DNA, 13 bp, Artificial Sequence
  Oligonucleotide for detection of SNP TSC0044481
atatattgatata

SEQ ID NO: 179652 - DNA, 13 bp, Artificial Sequence
  Oligonucleotide for detection of SNP TSC0044481
tatatcaatatat

SEQ ID NO: 179653 - DNA, 13 bp, Artificial Sequence
  Oligonucleotide for detection of SNP TSC0044481
tgtatttgtgtgt

SEQ ID NO: 179654 - DNA, 13 bp, Artificial Sequence
  Oligonucleotide for detection of SNP TSC0044481
acacacaaataca

SEQ ID NO: 179655 - DNA, 13 bp, Artificial Sequence
  Oligonucleotide for detection of SNP TSC0044481
tgtattagtgtgt

SEQ ID NO: 179656 - DNA, 13 bp, Artificial Sequence
  Oligonucleotide for detection of SNP TSC0044481
acacactaataca

SEQ ID NO: 179657 - DNA, 13 bp, Artificial Sequence
  Oligonucleotide for detection of SNP TSC0044482
attatgagttttt

SEQ ID NO: 179658 - DNA, 13 bp, Artificial Sequence
  Oligonucleotide for detection of SNP TSC0044482
aaaaactcataat

SEQ ID NO: 179659 - DNA, 13 bp, Artificial Sequence
  Oligonucleotide for detection of SNP TSC0044482
attatgggttttt

SEQ ID NO: 179660 - DNA, 13 bp, Artificial Sequence
  Oligonucleotide for detection of SNP TSC0044482
aaaaacccataat

SEQ ID NO: 179661 - DNA, 13 bp, Artificial Sequence
  Oligonucleotide for detection of SNP TSC0044483
tagtagaggtagt

SEQ ID NO: 179662 - DNA, 13 bp, Artificial Sequence
  Oligonucleotide for detection of SNP TSC0044483
actacctctacta

SEQ ID NO: 179663 - DNA, 13 bp, Artificial Sequence
  Oligonucleotide for detection of SNP TSC0044483
tagtaggggtagt

SEQ ID NO: 179664 - DNA, 13 bp, Artificial Sequence
  Oligonucleotide for detection of SNP TSC0044483
actacccctacta

SEQ ID NO: 179665 - DNA, 13 bp, Artificial Sequence
  Oligonucleotide for detection of SNP TSC0044491
ttaattatgttgt

SEQ ID NO: 179666 - DNA, 13 bp, Artificial Sequence
  Oligonucleotide for detection of SNP TSC0044491
acaacataattaa

SEQ ID NO: 179667 - DNA, 13 bp, Artificial Sequence
  Oligonucleotide for detection of SNP TSC0044491
ttaattgtgttgt

SEQ ID NO: 179668 - DNA, 13 bp, Artificial Sequence
  Oligonucleotide for detection of SNP TSC0044491
acaacacaattaa

SEQ ID NO: 179669 - DNA, 13 bp, Artificial Sequence
  Oligonucleotide for detection of SNP TSC0044491
ttaatcgtgttgt

SEQ ID NO: 179670 - DNA, 13 bp, Artificial Sequence
  Oligonucleotide for detection of SNP TSC0044491
acaacacgattaa

SEQ ID NO: 179671 - DNA, 13 bp, Artificial Sequence
  Oligonucleotide for detection of SNP TSC0044491
atagtatgattga

SEQ ID NO: 179672 - DNA, 13 bp, Artificial Sequence
  Oligonucleotide for detection of SNP TSC0044491
tcaatcatactat

SEQ ID NO: 179673 - DNA, 13 bp, Artificial Sequence
  Oligonucleotide for detection of SNP TSC0044491
atagtacgattga

SEQ ID NO: 179674 - DNA, 13 bp, Artificial Sequence
  Oligonucleotide for detection of SNP TSC0044491
tcaatcgtactat

SEQ ID NO: 179675 - DNA, 13 bp, Artificial Sequence
  Oligonucleotide for detection of SNP TSC0044492
aaagaagggaaag

SEQ ID NO: 179676 - DNA, 13 bp, Artificial Sequence
  Oligonucleotide for detection of SNP TSC0044492
ctttcccttcttt

SEQ ID NO: 179677 - DNA, 13 bp, Artificial Sequence
  Oligonucleotide for detection of SNP TSC0044492
aaagaaaggaaag

SEQ ID NO: 179678 - DNA, 13 bp, Artificial Sequence
  Oligonucleotide for detection of SNP TSC0044492
ctttcctttcttt

SEQ ID NO: 179679 - DNA, 13 bp, Artificial Sequence
  Oligonucleotide for detection of SNP TSC0044493
ggtaattgtagtg

SEQ ID NO: 179680 - DNA, 13 bp, Artificial Sequence
  Oligonucleotide for detection of SNP TSC0044493
cactacaattacc

SEQ ID NO: 179681 - DNA, 13 bp, Artificial Sequence
  Oligonucleotide for detection of SNP TSC0044493
ggtaatggtagtg

SEQ ID NO: 179682 - DNA, 13 bp, Artificial Sequence
  Oligonucleotide for detection of SNP TSC0044493
cactaccattacc

SEQ ID NO: 179683 - DNA, 13 bp, Artificial Sequence
  Oligonucleotide for detection of SNP TSC0044493
ggtaatcgtagtg

SEQ ID NO: 179684 - DNA, 13 bp, Artificial Sequence
  Oligonucleotide for detection of SNP TSC0044493
cactacgattacc

SEQ ID NO: 179685 - DNA, 13 bp, Artificial Sequence
  Oligonucleotide for detection of SNP TSC0044493
ggtaacggtagtg

SEQ ID NO: 179686 - DNA, 13 bp, Artificial Sequence
  Oligonucleotide for detection of SNP TSC0044493
cactaccgttacc

SEQ ID NO: 179687 - DNA, 13 bp, Artificial Sequence
  Oligonucleotide for detection of SNP TSC0044493
tattgtggttaty

SEQ ID NO: 179688 - DNA, 13 bp, Artificial Sequence
  Oligonucleotide for detection of SNP TSC0044493
rataaccacaata

SEQ ID NO: 179689 - DNA, 13 bp, Artificial Sequence
  Oligonucleotide for detection of SNP TSC0044493
tattgcggttaty

SEQ ID NO: 179690 - DNA, 13 bp, Artificial Sequence
  Oligonucleotide for detection of SNP TSC0044493
rataaccgcaata

SEQ ID NO: 179691 - DNA, 13 bp, Artificial Sequence
  Oligonucleotide for detection of SNP TSC0044494
gattaaggagtty

SEQ ID NO: 179692 - DNA, 13 bp, Artificial Sequence
  Oligonucleotide for detection of SNP TSC0044494
raactccttaatc

SEQ ID NO: 179693 - DNA, 13 bp, Artificial Sequence
  Oligonucleotide for detection of SNP TSC0044494
gattaaagagtty

SEQ ID NO: 179694 - DNA, 13 bp, Artificial Sequence
  Oligonucleotide for detection of SNP TSC0044494
raactctttaatc

SEQ ID NO: 179695 - DNA, 13 bp, Artificial Sequence
  Oligonucleotide for detection of SNP TSC0044495
gaataagagaata

SEQ ID NO: 179696 - DNA, 13 bp, Artificial Sequence
  Oligonucleotide for detection of SNP TSC0044495
tattctcttattc

SEQ ID NO: 179697 - DNA, 13 bp, Artificial Sequence
  Oligonucleotide for detection of SNP TSC0044495
gaataaaagaata

SEQ ID NO: 179698 - DNA, 13 bp, Artificial Sequence
  Oligonucleotide for detection of SNP TSC0044495
tattcttttattc

SEQ ID NO: 179699 - DNA, 13 bp, Artificial Sequence
  Oligonucleotide for detection of SNP TSC0044497
taagaatggttta

SEQ ID NO: 179700 - DNA, 13 bp, Artificial Sequence
  Oligonucleotide for detection of SNP TSC0044497
taaaccattctta

SEQ ID NO: 179701 - DNA, 13 bp, Artificial Sequence
  Oligonucleotide for detection of SNP TSC0044497
taagaacggttta

SEQ ID NO: 179702 - DNA, 13 bp, Artificial Sequence
  Oligonucleotide for detection of SNP TSC0044497
taaaccgttctta

SEQ ID NO: 179703 - DNA, 13 bp, Artificial Sequence
  Oligonucleotide for detection of SNP TSC0044497
taggttgtttttg

SEQ ID NO: 179704 - DNA, 13 bp, Artificial Sequence
  Oligonucleotide for detection of SNP TSC0044497
caaaaacaaccta

SEQ ID NO: 179705 - DNA, 13 bp, Artificial Sequence
  Oligonucleotide for detection of SNP TSC0044497
taggttatttttg

SEQ ID NO: 179706 - DNA, 13 bp, Artificial Sequence
  Oligonucleotide for detection of SNP TSC0044497
caaaaataaccta

SEQ ID NO: 179707 - DNA, 13 bp, Artificial Sequence
  Oligonucleotide for detection of SNP TSC0044497
taggtcgtttttg

SEQ ID NO: 179708 - DNA, 13 bp, Artificial Sequence
  Oligonucleotide for detection of SNP TSC0044497
caaaaacgaccta

SEQ ID NO: 179709 - DNA, 13 bp, Artificial Sequence
  Oligonucleotide for detection of SNP TSC0044499
tttagtaagataa

SEQ ID NO: 179710 - DNA, 13 bp, Artificial Sequence
  Oligonucleotide for detection of SNP TSC0044499
ttatcttactaaa

SEQ ID NO: 179711 - DNA, 13 bp, Artificial Sequence
  Oligonucleotide for detection of SNP TSC0044499
tttagtgagataa

SEQ ID NO: 179712 - DNA, 13 bp, Artificial Sequence
  Oligonucleotide for detection of SNP TSC0044499
ttatctcactaaa

SEQ ID NO: 179713 - DNA, 13 bp, Artificial Sequence
  Oligonucleotide for detection of SNP TSC0044500
attgatgttttty

SEQ ID NO: 179714 - DNA, 13 bp, Artificial Sequence
  Oligonucleotide for detection of SNP TSC0044500
raaaaacatcaat

SEQ ID NO: 179715 - DNA, 13 bp, Artificial Sequence
  Oligonucleotide for detection of SNP TSC0044500
attgatattttty

SEQ ID NO: 179716 - DNA, 13 bp, Artificial Sequence
  Oligonucleotide for detection of SNP TSC0044500
raaaaatatcaat

SEQ ID NO: 179717 - DNA, 13 bp, Artificial Sequence
  Oligonucleotide for detection of SNP TSC0044501
tattgatttttty

SEQ ID NO: 179718 - DNA, 13 bp, Artificial Sequence
  Oligonucleotide for detection of SNP TSC0044501
raaaaaatcaata

SEQ ID NO: 179719 - DNA, 13 bp, Artificial Sequence
  Oligonucleotide for detection of SNP TSC0044501
tattgagttttty

SEQ ID NO: 179720 - DNA, 13 bp, Artificial Sequence
  Oligonucleotide for detection of SNP TSC0044501
raaaaactcaata

SEQ ID NO: 179721 - DNA, 13 bp, Artificial Sequence
  Oligonucleotide for detection of SNP TSC0044501
gagagagttagtg

SEQ ID NO: 179722 - DNA, 13 bp, Artificial Sequence
  Oligonucleotide for detection of SNP TSC0044501
cactaactctctc

SEQ ID NO: 179723 - DNA, 13 bp, Artificial Sequence
  Oligonucleotide for detection of SNP TSC0044501
gagagatttagtg

SEQ ID NO: 179724 - DNA, 13 bp, Artificial Sequence
  Oligonucleotide for detection of SNP TSC0044501
cactaaatctctc

SEQ ID NO: 179725 - DNA, 13 bp, Artificial Sequence
  Oligonucleotide for detection of SNP TSC0044502
tggattgtggggg

SEQ ID NO: 179726 - DNA, 13 bp, Artificial Sequence
  Oligonucleotide for detection of SNP TSC0044502
cccccacaatcca

SEQ ID NO: 179727 - DNA, 13 bp, Artificial Sequence
  Oligonucleotide for detection of SNP TSC0044502
tggattatggggg

SEQ ID NO: 179728 - DNA, 13 bp, Artificial Sequence
  Oligonucleotide for detection of SNP TSC0044502
cccccataatcca

SEQ ID NO: 179729 - DNA, 13 bp, Artificial Sequence
  Oligonucleotide for detection of SNP TSC0044502
tggatcgtggggg

SEQ ID NO: 179730 - DNA, 13 bp, Artificial Sequence
  Oligonucleotide for detection of SNP TSC0044502
cccccacgatcca

SEQ ID NO: 179731 - DNA, 13 bp, Artificial Sequence
  Oligonucleotide for detection of SNP TSC0044503
ggaagtaaggtat

SEQ ID NO: 179732 - DNA, 13 bp, Artificial Sequence
  Oligonucleotide for detection of SNP TSC0044503
ataccttacttcc

SEQ ID NO: 179733 - DNA, 13 bp, Artificial Sequence
  Oligonucleotide for detection of SNP TSC0044503
ggaagttaggtat

SEQ ID NO: 179734 - DNA, 13 bp, Artificial Sequence
  Oligonucleotide for detection of SNP TSC0044503
atacctaacttcc

SEQ ID NO: 179735 - DNA, 13 bp, Artificial Sequence
  Oligonucleotide for detection of SNP TSC0044506
tttgggtatgatt

SEQ ID NO: 179736 - DNA, 13 bp, Artificial Sequence
  Oligonucleotide for detection of SNP TSC0044506
aatcatacccaaa

SEQ ID NO: 179737 - DNA, 13 bp, Artificial Sequence
  Oligonucleotide for detection of SNP TSC0044506
tttggggatgatt

SEQ ID NO: 179738 - DNA, 13 bp, Artificial Sequence
  Oligonucleotide for detection of SNP TSC0044506
aatcatccccaaa

SEQ ID NO: 179739 - DNA, 13 bp, Artificial Sequence
  Oligonucleotide for detection of SNP TSC0044506
aattatatttaaa

SEQ ID NO: 179740 - DNA, 13 bp, Artificial Sequence
  Oligonucleotide for detection of SNP TSC0044506
tttaaatataatt

SEQ ID NO: 179741 - DNA, 13 bp, Artificial Sequence
  Oligonucleotide for detection of SNP TSC0044509
taatgtattttaa

SEQ ID NO: 179742 - DNA, 13 bp, Artificial Sequence
  Oligonucleotide for detection of SNP TSC0044509
ttaaaatacatta

SEQ ID NO: 179743 - DNA, 13 bp, Artificial Sequence
  Oligonucleotide for detection of SNP TSC0044509
taatgtgttttaa

SEQ ID NO: 179744 - DNA, 13 bp, Artificial Sequence
  Oligonucleotide for detection of SNP TSC0044509
ttaaaacacatta

SEQ ID NO: 179745 - DNA, 13 bp, Artificial Sequence
  Oligonucleotide for detection of SNP TSC0044510
gatgaagggaagg

SEQ ID NO: 179746 - DNA, 13 bp, Artificial Sequence
  Oligonucleotide for detection of SNP TSC0044510
ccttcccttcatc

SEQ ID NO: 179747 - DNA, 13 bp, Artificial Sequence
  Oligonucleotide for detection of SNP TSC0044510
gatgaatggaagg

SEQ ID NO: 179748 - DNA, 13 bp, Artificial Sequence
  Oligonucleotide for detection of SNP TSC0044510
ccttccattcatc

SEQ ID NO: 179749 - DNA, 13 bp, Artificial Sequence
  Oligonucleotide for detection of SNP TSC0044510
gatgaacggaagg

SEQ ID NO: 179750 - DNA, 13 bp, Artificial Sequence
  Oligonucleotide for detection of SNP TSC0044510
ccttccgttcatc

SEQ ID NO: 179751 - DNA, 13 bp, Artificial Sequence
  Oligonucleotide for detection of SNP TSC0044514
ttagtttgagttt

SEQ ID NO: 179752 - DNA, 13 bp, Artificial Sequence
  Oligonucleotide for detection of SNP TSC0044514
aaactcaaactaa

SEQ ID NO: 179753 - DNA, 13 bp, Artificial Sequence
  Oligonucleotide for detection of SNP TSC0044514
ttagttcgagttt

SEQ ID NO: 179754 - DNA, 13 bp, Artificial Sequence
  Oligonucleotide for detection of SNP TSC0044514
aaactcgaactaa

SEQ ID NO: 179755 - DNA, 13 bp, Artificial Sequence
  Oligonucleotide for detection of SNP TSC0044514
aaatttgagttga

SEQ ID NO: 179756 - DNA, 13 bp, Artificial Sequence
  Oligonucleotide for detection of SNP TSC0044514
tcaactcaaattt

SEQ ID NO: 179757 - DNA, 13 bp, Artificial Sequence
  Oligonucleotide for detection of SNP TSC0044514
aaatttaagttga

SEQ ID NO: 179758 - DNA, 13 bp, Artificial Sequence
  Oligonucleotide for detection of SNP TSC0044514
tcaacttaaattt

SEQ ID NO: 179759 - DNA, 13 bp, Artificial Sequence
  Oligonucleotide for detection of SNP TSC0044514
aaattcgagttga

SEQ ID NO: 179760 - DNA, 13 bp, Artificial Sequence
  Oligonucleotide for detection of SNP TSC0044514
tcaactcgaattt

SEQ ID NO: 179761 - DNA, 13 bp, Artificial Sequence
  Oligonucleotide for detection of SNP TSC0044515
atttatcgtttaa

SEQ ID NO: 179762 - DNA, 13 bp, Artificial Sequence
  Oligonucleotide for detection of SNP TSC0044515
ttaaacgataaat

SEQ ID NO: 179763 - DNA, 13 bp, Artificial Sequence
  Oligonucleotide for detection of SNP TSC0044515
ttaggtgatgagt

SEQ ID NO: 179764 - DNA, 13 bp, Artificial Sequence
  Oligonucleotide for detection of SNP TSC0044515
actcatcacctaa

SEQ ID NO: 179765 - DNA, 13 bp, Artificial Sequence
  Oligonucleotide for detection of SNP TSC0044515
ttaggtaatgagt

SEQ ID NO: 179766 - DNA, 13 bp, Artificial Sequence
  Oligonucleotide for detection of SNP TSC0044515
actcattacctaa

SEQ ID NO: 179767 - DNA, 13 bp, Artificial Sequence
  Oligonucleotide for detection of SNP TSC0044515
ttaggcgatgagt

SEQ ID NO: 179768 - DNA, 13 bp, Artificial Sequence
  Oligonucleotide for detection of SNP TSC0044515
actcatcgcctaa

SEQ ID NO: 179769 - DNA, 13 bp, Artificial Sequence
  Oligonucleotide for detection of SNP TSC0044516
atattagtgtagy

SEQ ID NO: 179770 - DNA, 13 bp, Artificial Sequence
  Oligonucleotide for detection of SNP TSC0044516
rctacactaatat

SEQ ID NO: 179771 - DNA, 13 bp, Artificial Sequence
  Oligonucleotide for detection of SNP TSC0044516
atattaatgtagy

SEQ ID NO: 179772 - DNA, 13 bp, Artificial Sequence
  Oligonucleotide for detection of SNP TSC0044516
rctacattaatat

SEQ ID NO: 179773 - DNA, 13 bp, Artificial Sequence
  Oligonucleotide for detection of SNP TSC0044517
taataaatatggy

SEQ ID NO: 179774 - DNA, 13 bp, Artificial Sequence
  Oligonucleotide for detection of SNP TSC0044517
rccatatttatta

SEQ ID NO: 179775 - DNA, 13 bp, Artificial Sequence
  Oligonucleotide for detection of SNP TSC0044517
taataagtatggy

SEQ ID NO: 179776 - DNA, 13 bp, Artificial Sequence
  Oligonucleotide for detection of SNP TSC0044517
rccatacttatta

SEQ ID NO: 179777 - DNA, 13 bp, Artificial Sequence
  Oligonucleotide for detection of SNP TSC0044519
tttattaagtgty

SEQ ID NO: 179778 - DNA, 13 bp, Artificial Sequence
  Oligonucleotide for detection of SNP TSC0044519
racacttaataaa

SEQ ID NO: 179779 - DNA, 13 bp, Artificial Sequence
  Oligonucleotide for detection of SNP TSC0044519
tttattgagtgty

SEQ ID NO: 179780 - DNA, 13 bp, Artificial Sequence
  Oligonucleotide for detection of SNP TSC0044519
racactcaataaa

SEQ ID NO: 179781 - DNA, 13 bp, Artificial Sequence
  Oligonucleotide for detection of SNP TSC0044519
tttatcgagtgty

SEQ ID NO: 179782 - DNA, 13 bp, Artificial Sequence
  Oligonucleotide for detection of SNP TSC0044519
racactcgataaa

SEQ ID NO: 179783 - DNA, 13 bp, Artificial Sequence
  Oligonucleotide for detection of SNP TSC0044519
gatatttggtgaa

SEQ ID NO: 179784 - DNA, 13 bp, Artificial Sequence
  Oligonucleotide for detection of SNP TSC0044519
ttcaccaaatatc

SEQ ID NO: 179785 - DNA, 13 bp, Artificial Sequence
  Oligonucleotide for detection of SNP TSC0044519
gatattcggtgaa

SEQ ID NO: 179786 - DNA, 13 bp, Artificial Sequence
  Oligonucleotide for detection of SNP TSC0044519
ttcaccgaatatc

SEQ ID NO: 179787 - DNA, 13 bp, Artificial Sequence
  Oligonucleotide for detection of SNP TSC0044520
ttttgtatttatg

SEQ ID NO: 179788 - DNA, 13 bp, Artificial Sequence
  Oligonucleotide for detection of SNP TSC0044520
cataaatacaaaa

SEQ ID NO: 179789 - DNA, 13 bp, Artificial Sequence
  Oligonucleotide for detection of SNP TSC0044520
ttttgtttttatg

SEQ ID NO: 179790 - DNA, 13 bp, Artificial Sequence
  Oligonucleotide for detection of SNP TSC0044520
cataaaaacaaaa

SEQ ID NO: 179791 - DNA, 13 bp, Artificial Sequence
  Oligonucleotide for detection of SNP TSC0044520
tataaatatagag

SEQ ID NO: 179792 - DNA, 13 bp, Artificial Sequence
  Oligonucleotide for detection of SNP TSC0044520
ctctatatttata

SEQ ID NO: 179793 - DNA, 13 bp, Artificial Sequence
  Oligonucleotide for detection of SNP TSC0044520
tataaaaatagag

SEQ ID NO: 179794 - DNA, 13 bp, Artificial Sequence
  Oligonucleotide for detection of SNP TSC0044520
ctctatttttata

SEQ ID NO: 179795 - DNA, 13 bp, Artificial Sequence
  Oligonucleotide for detection of SNP TSC0044523
agtagtaaataat

SEQ ID NO: 179796 - DNA, 13 bp, Artificial Sequence
  Oligonucleotide for detection of SNP TSC0044523
attatttactact

SEQ ID NO: 179797 - DNA, 13 bp, Artificial Sequence
  Oligonucleotide for detection of SNP TSC0044523
agtagtgaataat

SEQ ID NO: 179798 - DNA, 13 bp, Artificial Sequence
  Oligonucleotide for detection of SNP TSC0044523
attattcactact

SEQ ID NO: 179799 - DNA, 13 bp, Artificial Sequence
  Oligonucleotide for detection of SNP TSC0044523
agtagcgaataat

SEQ ID NO: 179800 - DNA, 13 bp, Artificial Sequence
  Oligonucleotide for detection of SNP TSC0044523
attattcgctact

SEQ ID NO: 179801 - DNA, 13 bp, Artificial Sequence
  Oligonucleotide for detection of SNP TSC0044525
attaaagtaagag

SEQ ID NO: 179802 - DNA, 13 bp, Artificial Sequence
  Oligonucleotide for detection of SNP TSC0044525
ctcttactttaat

SEQ ID NO: 179803 - DNA, 13 bp, Artificial Sequence
  Oligonucleotide for detection of SNP TSC0044525
attaaaataagag

SEQ ID NO: 179804 - DNA, 13 bp, Artificial Sequence
  Oligonucleotide for detection of SNP TSC0044525
ctcttattttaat

SEQ ID NO: 179805 - DNA, 13 bp, Artificial Sequence
  Oligonucleotide for detection of SNP TSC0044526
ttttaagaaaatg

SEQ ID NO: 179806 - DNA, 13 bp, Artificial Sequence
  Oligonucleotide for detection of SNP TSC0044526
cattttcttaaaa

SEQ ID NO: 179807 - DNA, 13 bp, Artificial Sequence
  Oligonucleotide for detection of SNP TSC0044526
ttttaaaaaaatg

SEQ ID NO: 179808 - DNA, 13 bp, Artificial Sequence
  Oligonucleotide for detection of SNP TSC0044526
catttttttaaaa

SEQ ID NO: 179809 - DNA, 13 bp, Artificial Sequence
  Oligonucleotide for detection of SNP TSC0044527
gtttatatataty

SEQ ID NO: 179810 - DNA, 13 bp, Artificial Sequence
  Oligonucleotide for detection of SNP TSC0044527
ratatatataaac

SEQ ID NO: 179811 - DNA, 13 bp, Artificial Sequence
  Oligonucleotide for detection of SNP TSC0044527
gtttatgtataty

SEQ ID NO: 179812 - DNA, 13 bp, Artificial Sequence
  Oligonucleotide for detection of SNP TSC0044527
ratatacataaac

SEQ ID NO: 179813 - DNA, 13 bp, Artificial Sequence
  Oligonucleotide for detection of SNP TSC0044527
gtttacgtataty

SEQ ID NO: 179814 - DNA, 13 bp, Artificial Sequence
  Oligonucleotide for detection of SNP TSC0044527
ratatacgtaaac

SEQ ID NO: 179815 - DNA, 13 bp, Artificial Sequence
  Oligonucleotide for detection of SNP TSC0044527
ggtatacgtgggy

SEQ ID NO: 179816 - DNA, 13 bp, Artificial Sequence
  Oligonucleotide for detection of SNP TSC0044527
rcccacgtatacc

SEQ ID NO: 179817 - DNA, 13 bp, Artificial Sequence
  Oligonucleotide for detection of SNP TSC0044528
tgaaaaatgatay

SEQ ID NO: 179818 - DNA, 13 bp, Artificial Sequence
  Oligonucleotide for detection of SNP TSC0044528
rtatcatttttca

SEQ ID NO: 179819 - DNA, 13 bp, Artificial Sequence
  Oligonucleotide for detection of SNP TSC0044528
tgaaaagtgatay

SEQ ID NO: 179820 - DNA, 13 bp, Artificial Sequence
  Oligonucleotide for detection of SNP TSC0044528
rtatcacttttca

SEQ ID NO: 179821 - DNA, 13 bp, Artificial Sequence
  Oligonucleotide for detection of SNP TSC0044528
tgaaaaacgatay

SEQ ID NO: 179822 - DNA, 13 bp, Artificial Sequence
  Oligonucleotide for detection of SNP TSC0044528
rtatcgtttttca

SEQ ID NO: 179823 - DNA, 13 bp, Artificial Sequence
  Oligonucleotide for detection of SNP TSC0044528
tgaaaagcgatay

SEQ ID NO: 179824 - DNA, 13 bp, Artificial Sequence
  Oligonucleotide for detection of SNP TSC0044528
rtatcgcttttca

SEQ ID NO: 179825 - DNA, 13 bp, Artificial Sequence
  Oligonucleotide for detection of SNP TSC0044531
ggtttttgaaatt

SEQ ID NO: 179826 - DNA, 13 bp, Artificial Sequence
  Oligonucleotide for detection of SNP TSC0044531
aatttcaaaaacc

SEQ ID NO: 179827 - DNA, 13 bp, Artificial Sequence
  Oligonucleotide for detection of SNP TSC0044531
ggttttggaaatt

SEQ ID NO: 179828 - DNA, 13 bp, Artificial Sequence
  Oligonucleotide for detection of SNP TSC0044531
aatttccaaaacc

SEQ ID NO: 179829 - DNA, 13 bp, Artificial Sequence
  Oligonucleotide for detection of SNP TSC0044531
agttttaaggaty

SEQ ID NO: 179830 - DNA, 13 bp, Artificial Sequence
  Oligonucleotide for detection of SNP TSC0044531
ratccttaaaact

SEQ ID NO: 179831 - DNA, 13 bp, Artificial Sequence
  Oligonucleotide for detection of SNP TSC0044531
agtttttaggaty

SEQ ID NO: 179832 - DNA, 13 bp, Artificial Sequence
  Oligonucleotide for detection of SNP TSC0044531
ratcctaaaaact

SEQ ID NO: 179833 - DNA, 13 bp, Artificial Sequence
  Oligonucleotide for detection of SNP TSC0044532
tgtagtgttagty

SEQ ID NO: 179834 - DNA, 13 bp, Artificial Sequence
  Oligonucleotide for detection of SNP TSC0044532
ractaacactaca

SEQ ID NO: 179835 - DNA, 13 bp, Artificial Sequence
  Oligonucleotide for detection of SNP TSC0044532
tgtagtattagty

SEQ ID NO: 179836 - DNA, 13 bp, Artificial Sequence
  Oligonucleotide for detection of SNP TSC0044532
ractaatactaca

SEQ ID NO: 179837 - DNA, 13 bp, Artificial Sequence
  Oligonucleotide for detection of SNP TSC0044532
cgtagtgttagty

SEQ ID NO: 179838 - DNA, 13 bp, Artificial Sequence
  Oligonucleotide for detection of SNP TSC0044532
ractaacactacg

SEQ ID NO: 179839 - DNA, 13 bp, Artificial Sequence
  Oligonucleotide for detection of SNP TSC0044532
cgtagtattagty

SEQ ID NO: 179840 - DNA, 13 bp, Artificial Sequence
  Oligonucleotide for detection of SNP TSC0044532
ractaatactacg

SEQ ID NO: 179841 - DNA, 13 bp, Artificial Sequence
  Oligonucleotide for detection of SNP TSC0044533
aaaaaaatgattg

SEQ ID NO: 179842 - DNA, 13 bp, Artificial Sequence
  Oligonucleotide for detection of SNP TSC0044533
caatcattttttt

SEQ ID NO: 179843 - DNA, 13 bp, Artificial Sequence
  Oligonucleotide for detection of SNP TSC0044533
aaaaaagtgattg

SEQ ID NO: 179844 - DNA, 13 bp, Artificial Sequence
  Oligonucleotide for detection of SNP TSC0044533
caatcactttttt

SEQ ID NO: 179845 - DNA, 13 bp, Artificial Sequence
  Oligonucleotide for detection of SNP TSC0004994
ttgtgaattaagt

SEQ ID NO: 179846 - DNA, 13 bp, Artificial Sequence
  Oligonucleotide for detection of SNP TSC0004994
acttaattcacaa

SEQ ID NO: 179847 - DNA, 13 bp, Artificial Sequence
  Oligonucleotide for detection of SNP TSC0004994
ttgtgagttaagt

SEQ ID NO: 179848 - DNA, 13 bp, Artificial Sequence
  Oligonucleotide for detection of SNP TSC0004994
acttaactcacaa

SEQ ID NO: 179849 - DNA, 13 bp, Artificial Sequence
  Oligonucleotide for detection of SNP TSC0044535
gtggtgggggggg

SEQ ID NO: 179850 - DNA, 13 bp, Artificial Sequence
  Oligonucleotide for detection of SNP TSC0044535
ccccccccaccac

SEQ ID NO: 179851 - DNA, 13 bp, Artificial Sequence
  Oligonucleotide for detection of SNP TSC0044535
gtggtgagggggg

SEQ ID NO: 179852 - DNA, 13 bp, Artificial Sequence
  Oligonucleotide for detection of SNP TSC0044535
cccccctcaccac

SEQ ID NO: 179853 - DNA, 13 bp, Artificial Sequence
  Oligonucleotide for detection of SNP TSC0044535
gtggcgggggggg

SEQ ID NO: 179854 - DNA, 13 bp, Artificial Sequence
  Oligonucleotide for detection of SNP TSC0044535
ccccccccgccac

SEQ ID NO: 179855 - DNA, 13 bp, Artificial Sequence
  Oligonucleotide for detection of SNP TSC0044535
gtggcgagggggg

SEQ ID NO: 179856 - DNA, 13 bp, Artificial Sequence
  Oligonucleotide for detection of SNP TSC0044535
cccccctcgccac

SEQ ID NO: 179857 - DNA, 13 bp, Artificial Sequence
  Oligonucleotide for detection of SNP TSC0044536
agtaagagaatay

SEQ ID NO: 179858 - DNA, 13 bp, Artificial Sequence
  Oligonucleotide for detection of SNP TSC0044536
rtattctcttact

SEQ ID NO: 179859 - DNA, 13 bp, Artificial Sequence
  Oligonucleotide for detection of SNP TSC0044536
agtaagtgaatay

SEQ ID NO: 179860 - DNA, 13 bp, Artificial Sequence
  Oligonucleotide for detection of SNP TSC0044536
rtattcacttact

SEQ ID NO: 179861 - DNA, 13 bp, Artificial Sequence
  Oligonucleotide for detection of SNP TSC0044536
gtgtttttttgtt

SEQ ID NO: 179862 - DNA, 13 bp, Artificial Sequence
  Oligonucleotide for detection of SNP TSC0044536
aacaaaaaaacac

SEQ ID NO: 179863 - DNA, 13 bp, Artificial Sequence
  Oligonucleotide for detection of SNP TSC0044536
gtgtttatttgtt

SEQ ID NO: 179864 - DNA, 13 bp, Artificial Sequence
  Oligonucleotide for detection of SNP TSC0044536
aacaaataaacac

SEQ ID NO: 179865 - DNA, 13 bp, Artificial Sequence
  Oligonucleotide for detection of SNP TSC0044537
ttgttagatagtg

SEQ ID NO: 179866 - DNA, 13 bp, Artificial Sequence
  Oligonucleotide for detection of SNP TSC0044537
cactatctaacaa

SEQ ID NO: 179867 - DNA, 13 bp, Artificial Sequence
  Oligonucleotide for detection of SNP TSC0044537
ttgttaaatagtg

SEQ ID NO: 179868 - DNA, 13 bp, Artificial Sequence
  Oligonucleotide for detection of SNP TSC0044537
cactatttaacaa

SEQ ID NO: 179869 - DNA, 13 bp, Artificial Sequence
  Oligonucleotide for detection of SNP TSC0044538
gatgataagtaty

SEQ ID NO: 179870 - DNA, 13 bp, Artificial Sequence
  Oligonucleotide for detection of SNP TSC0044538
ratacttatcatc

SEQ ID NO: 179871 - DNA, 13 bp, Artificial Sequence
  Oligonucleotide for detection of SNP TSC0044538
gatgatgagtaty

SEQ ID NO: 179872 - DNA, 13 bp, Artificial Sequence
  Oligonucleotide for detection of SNP TSC0044538
ratactcatcatc

SEQ ID NO: 179873 - DNA, 13 bp, Artificial Sequence
  Oligonucleotide for detection of SNP TSC0044539
tagtatattatat

SEQ ID NO: 179874 - DNA, 13 bp, Artificial Sequence
  Oligonucleotide for detection of SNP TSC0044539
atataatatacta

SEQ ID NO: 179875 - DNA, 13 bp, Artificial Sequence
  Oligonucleotide for detection of SNP TSC0044539
tagtatgttatat

SEQ ID NO: 179876 - DNA, 13 bp, Artificial Sequence
  Oligonucleotide for detection of SNP TSC0044539
atataacatacta

SEQ ID NO: 179877 - DNA, 13 bp, Artificial Sequence
  Oligonucleotide for detection of SNP TSC0044540
agataaaatagtt

SEQ ID NO: 179878 - DNA, 13 bp, Artificial Sequence
  Oligonucleotide for detection of SNP TSC0044540
aactattttatct

SEQ ID NO: 179879 - DNA, 13 bp, Artificial Sequence
  Oligonucleotide for detection of SNP TSC0044540
agataatatagtt

SEQ ID NO: 179880 - DNA, 13 bp, Artificial Sequence
  Oligonucleotide for detection of SNP TSC0044540
aactatattatct

SEQ ID NO: 179881 - DNA, 13 bp, Artificial Sequence
  Oligonucleotide for detection of SNP TSC0044540
aattattttgttt

SEQ ID NO: 179882 - DNA, 13 bp, Artificial Sequence
  Oligonucleotide for detection of SNP TSC0044540
aaacaaaataatt

SEQ ID NO: 179883 - DNA, 13 bp, Artificial Sequence
  Oligonucleotide for detection of SNP TSC0044540
aattatgttgttt

SEQ ID NO: 179884 - DNA, 13 bp, Artificial Sequence
  Oligonucleotide for detection of SNP TSC0044540
aaacaacataatt

SEQ ID NO: 179885 - DNA, 13 bp, Artificial Sequence
  Oligonucleotide for detection of SNP TSC0044545
tgttatataaaga

SEQ ID NO: 179886 - DNA, 13 bp, Artificial Sequence
  Oligonucleotide for detection of SNP TSC0044545
tctttatataaca

SEQ ID NO: 179887 - DNA, 13 bp, Artificial Sequence
  Oligonucleotide for detection of SNP TSC0044545
tgttatgtaaaga

SEQ ID NO: 179888 - DNA, 13 bp, Artificial Sequence
  Oligonucleotide for detection of SNP TSC0044545
tctttacataaca

SEQ ID NO: 179889 - DNA, 13 bp, Artificial Sequence
  Oligonucleotide for detection of SNP TSC0044545
tgttacgtaaaga

SEQ ID NO: 179890 - DNA, 13 bp, Artificial Sequence
  Oligonucleotide for detection of SNP TSC0044545
tctttacgtaaca

SEQ ID NO: 179891 - DNA, 13 bp, Artificial Sequence
  Oligonucleotide for detection of SNP TSC0044545
tttttgtgtggta

SEQ ID NO: 179892 - DNA, 13 bp, Artificial Sequence
  Oligonucleotide for detection of SNP TSC0044545
taccacacaaaaa

SEQ ID NO: 179893 - DNA, 13 bp, Artificial Sequence
  Oligonucleotide for detection of SNP TSC0044545
tttttgcgtggta

SEQ ID NO: 179894 - DNA, 13 bp, Artificial Sequence
  Oligonucleotide for detection of SNP TSC0044545
taccacgcaaaaa

SEQ ID NO: 179895 - DNA, 13 bp, Artificial Sequence
  Oligonucleotide for detection of SNP TSC0044546
ggtttagattatt

SEQ ID NO: 179896 - DNA, 13 bp, Artificial Sequence
  Oligonucleotide for detection of SNP TSC0044546
aataatctaaacc

SEQ ID NO: 179897 - DNA, 13 bp, Artificial Sequence
  Oligonucleotide for detection of SNP TSC0044546
ggtttaaattatt

SEQ ID NO: 179898 - DNA, 13 bp, Artificial Sequence
  Oligonucleotide for detection of SNP TSC0044546
aataatttaaacc

SEQ ID NO: 179899 - DNA, 13 bp, Artificial Sequence
  Oligonucleotide for detection of SNP TSC0044549
tattagtgttgag

SEQ ID NO: 179900 - DNA, 13 bp, Artificial Sequence
  Oligonucleotide for detection of SNP TSC0044549
ctcaacactaata

SEQ ID NO: 179901 - DNA, 13 bp, Artificial Sequence
  Oligonucleotide for detection of SNP TSC0044549
tattagggttgag

SEQ ID NO: 179902 - DNA, 13 bp, Artificial Sequence
  Oligonucleotide for detection of SNP TSC0044549
ctcaaccctaata

SEQ ID NO: 179903 - DNA, 13 bp, Artificial Sequence
  Oligonucleotide for detection of SNP TSC0044549
tttagtattggta

SEQ ID NO: 179904 - DNA, 13 bp, Artificial Sequence
  Oligonucleotide for detection of SNP TSC0044549
taccaatactaaa

SEQ ID NO: 179905 - DNA, 13 bp, Artificial Sequence
  Oligonucleotide for detection of SNP TSC0044549
tttagttttggta

SEQ ID NO: 179906 - DNA, 13 bp, Artificial Sequence
  Oligonucleotide for detection of SNP TSC0044549
taccaaaactaaa

SEQ ID NO: 179907 - DNA, 13 bp, Artificial Sequence
  Oligonucleotide for detection of SNP TSC0044550
tttatagttgatt

SEQ ID NO: 179908 - DNA, 13 bp, Artificial Sequence
  Oligonucleotide for detection of SNP TSC0044550
aatcaactataaa

SEQ ID NO: 179909 - DNA, 13 bp, Artificial Sequence
  Oligonucleotide for detection of SNP TSC0044550
tttataattgatt

SEQ ID NO: 179910 - DNA, 13 bp, Artificial Sequence
  Oligonucleotide for detection of SNP TSC0044550
aatcaattataaa

SEQ ID NO: 179911 - DNA, 13 bp, Artificial Sequence
  Oligonucleotide for detection of SNP TSC0044551
agttataaaattg

SEQ ID NO: 179912 - DNA, 13 bp, Artificial Sequence
  Oligonucleotide for detection of SNP TSC0044551
caattttataact

SEQ ID NO: 179913 - DNA, 13 bp, Artificial Sequence
  Oligonucleotide for detection of SNP TSC0044551
agttatgaaattg

SEQ ID NO: 179914 - DNA, 13 bp, Artificial Sequence
  Oligonucleotide for detection of SNP TSC0044551
caatttcataact

SEQ ID NO: 179915 - DNA, 13 bp, Artificial Sequence
  Oligonucleotide for detection of SNP TSC0044552
gtagtatagagat

SEQ ID NO: 179916 - DNA, 13 bp, Artificial Sequence
  Oligonucleotide for detection of SNP TSC0044552
atctctatactac

SEQ ID NO: 179917 - DNA, 13 bp, Artificial Sequence
  Oligonucleotide for detection of SNP TSC0044552
gtagtagagagat

SEQ ID NO: 179918 - DNA, 13 bp, Artificial Sequence
  Oligonucleotide for detection of SNP TSC0044552
atctctctactac

SEQ ID NO: 179919 - DNA, 13 bp, Artificial Sequence
  Oligonucleotide for detection of SNP TSC0044552
atttttttattay

SEQ ID NO: 179920 - DNA, 13 bp, Artificial Sequence
  Oligonucleotide for detection of SNP TSC0044552
rtaataaaaaaat

SEQ ID NO: 179921 - DNA, 13 bp, Artificial Sequence
  Oligonucleotide for detection of SNP TSC0044557
aaagaaaaaatag

SEQ ID NO: 179922 - DNA, 13 bp, Artificial Sequence
  Oligonucleotide for detection of SNP TSC0044557
ctattttttcttt

SEQ ID NO: 179923 - DNA, 13 bp, Artificial Sequence
  Oligonucleotide for detection of SNP TSC0044557
aaagaagaaatag

SEQ ID NO: 179924 - DNA, 13 bp, Artificial Sequence
  Oligonucleotide for detection of SNP TSC0044557
ctatttcttcttt

SEQ ID NO: 179925 - DNA, 13 bp, Artificial Sequence
  Oligonucleotide for detection of SNP TSC0044558
atattatttgtta

SEQ ID NO: 179926 - DNA, 13 bp, Artificial Sequence
  Oligonucleotide for detection of SNP TSC0044558
taacaaataatat

SEQ ID NO: 179927 - DNA, 13 bp, Artificial Sequence
  Oligonucleotide for detection of SNP TSC0044558
atattagttgtta

SEQ ID NO: 179928 - DNA, 13 bp, Artificial Sequence
  Oligonucleotide for detection of SNP TSC0044558
taacaactaatat

SEQ ID NO: 179929 - DNA, 13 bp, Artificial Sequence
  Oligonucleotide for detection of SNP TSC0044558
tggtaggtagtgt

SEQ ID NO: 179930 - DNA, 13 bp, Artificial Sequence
  Oligonucleotide for detection of SNP TSC0044558
acactacctacca

SEQ ID NO: 179931 - DNA, 13 bp, Artificial Sequence
  Oligonucleotide for detection of SNP TSC0044558
tggtagttagtgt

SEQ ID NO: 179932 - DNA, 13 bp, Artificial Sequence
  Oligonucleotide for detection of SNP TSC0044558
acactaactacca

SEQ ID NO: 179933 - DNA, 13 bp, Artificial Sequence
  Oligonucleotide for detection of SNP TSC0044559
tataagtttgttt

SEQ ID NO: 179934 - DNA, 13 bp, Artificial Sequence
  Oligonucleotide for detection of SNP TSC0044559
aaacaaacttata

SEQ ID NO: 179935 - DNA, 13 bp, Artificial Sequence
  Oligonucleotide for detection of SNP TSC0044559
tataaggttgttt

SEQ ID NO: 179936 - DNA, 13 bp, Artificial Sequence
  Oligonucleotide for detection of SNP TSC0044559
aaacaaccttata

SEQ ID NO: 179937 - DNA, 13 bp, Artificial Sequence
  Oligonucleotide for detection of SNP TSC0044559
aagtagatttata

SEQ ID NO: 179938 - DNA, 13 bp, Artificial Sequence
  Oligonucleotide for detection of SNP TSC0044559
tataaatctactt

SEQ ID NO: 179939 - DNA, 13 bp, Artificial Sequence
  Oligonucleotide for detection of SNP TSC0044559
aagtagttttata

SEQ ID NO: 179940 - DNA, 13 bp, Artificial Sequence
  Oligonucleotide for detection of SNP TSC0044559
tataaaactactt

SEQ ID NO: 179941 - DNA, 13 bp, Artificial Sequence
  Oligonucleotide for detection of SNP TSC0044560
taatagtatatag

SEQ ID NO: 179942 - DNA, 13 bp, Artificial Sequence
  Oligonucleotide for detection of SNP TSC0044560
ctatatactatta

SEQ ID NO: 179943 - DNA, 13 bp, Artificial Sequence
  Oligonucleotide for detection of SNP TSC0044560
taataggatatag

SEQ ID NO: 179944 - DNA, 13 bp, Artificial Sequence
  Oligonucleotide for detection of SNP TSC0044560
ctatatcctatta

SEQ ID NO: 179945 - DNA, 13 bp, Artificial Sequence
  Oligonucleotide for detection of SNP TSC0044560
ttatgtgttgtta

SEQ ID NO: 179946 - DNA, 13 bp, Artificial Sequence
  Oligonucleotide for detection of SNP TSC0044560
taacaacacataa

SEQ ID NO: 179947 - DNA, 13 bp, Artificial Sequence
  Oligonucleotide for detection of SNP TSC0044560
ttatgttttgtta

SEQ ID NO: 179948 - DNA, 13 bp, Artificial Sequence
  Oligonucleotide for detection of SNP TSC0044560
taacaaaacataa

SEQ ID NO: 179949 - DNA, 13 bp, Artificial Sequence
  Oligonucleotide for detection of SNP TSC0044561
taagtttgatgtg

SEQ ID NO: 179950 - DNA, 13 bp, Artificial Sequence
  Oligonucleotide for detection of SNP TSC0044561
cacatcaaactta

SEQ ID NO: 179951 - DNA, 13 bp, Artificial Sequence
  Oligonucleotide for detection of SNP TSC0044561
taagttggatgtg

SEQ ID NO: 179952 - DNA, 13 bp, Artificial Sequence
  Oligonucleotide for detection of SNP TSC0044561
cacatccaactta

SEQ ID NO: 179953 - DNA, 13 bp, Artificial Sequence
  Oligonucleotide for detection of SNP TSC0044561
taagttcgatgtg

SEQ ID NO: 179954 - DNA, 13 bp, Artificial Sequence
  Oligonucleotide for detection of SNP TSC0044561
cacatcgaactta

SEQ ID NO: 179955 - DNA, 13 bp, Artificial Sequence
  Oligonucleotide for detection of SNP TSC0044561
tatattgagttta

SEQ ID NO: 179956 - DNA, 13 bp, Artificial Sequence
  Oligonucleotide for detection of SNP TSC0044561
taaactcaatata

SEQ ID NO: 179957 - DNA, 13 bp, Artificial Sequence
  Oligonucleotide for detection of SNP TSC0044561
tatatttagttta

SEQ ID NO: 179958 - DNA, 13 bp, Artificial Sequence
  Oligonucleotide for detection of SNP TSC0044561
taaactaaatata

SEQ ID NO: 179959 - DNA, 13 bp, Artificial Sequence
  Oligonucleotide for detection of SNP TSC0044561
tatatcgagttta

SEQ ID NO: 179960 - DNA, 13 bp, Artificial Sequence
  Oligonucleotide for detection of SNP TSC0044561
taaactcgatata

SEQ ID NO: 179961 - DNA, 13 bp, Artificial Sequence
  Oligonucleotide for detection of SNP TSC0044563
ataggttgtggtg

SEQ ID NO: 179962 - DNA, 13 bp, Artificial Sequence
  Oligonucleotide for detection of SNP TSC0044563
caccacaacctat

SEQ ID NO: 179963 - DNA, 13 bp, Artificial Sequence
  Oligonucleotide for detection of SNP TSC0044563
ataggtggtggtg

SEQ ID NO: 179964 - DNA, 13 bp, Artificial Sequence
  Oligonucleotide for detection of SNP TSC0044563
caccaccacctat

SEQ ID NO: 179965 - DNA, 13 bp, Artificial Sequence
  Oligonucleotide for detection of SNP TSC0044563
ataggcggtggtg

SEQ ID NO: 179966 - DNA, 13 bp, Artificial Sequence
  Oligonucleotide for detection of SNP TSC0044563
caccaccgcctat

SEQ ID NO: 179967 - DNA, 13 bp, Artificial Sequence
  Oligonucleotide for detection of SNP TSC0044563
tattatagtttgt

SEQ ID NO: 179968 - DNA, 13 bp, Artificial Sequence
  Oligonucleotide for detection of SNP TSC0044563
acaaactataata

SEQ ID NO: 179969 - DNA, 13 bp, Artificial Sequence
  Oligonucleotide for detection of SNP TSC0044563
tattattgtttgt

SEQ ID NO: 179970 - DNA, 13 bp, Artificial Sequence
  Oligonucleotide for detection of SNP TSC0044563
acaaacaataata

SEQ ID NO: 179971 - DNA, 13 bp, Artificial Sequence
  Oligonucleotide for detection of SNP TSC0044563
tattatcgtttgt

SEQ ID NO: 179972 - DNA, 13 bp, Artificial Sequence
  Oligonucleotide for detection of SNP TSC0044563
acaaacgataata

SEQ ID NO: 179973 - DNA, 13 bp, Artificial Sequence
  Oligonucleotide for detection of SNP TSC0044564
ttttgtggagatg

SEQ ID NO: 179974 - DNA, 13 bp, Artificial Sequence
  Oligonucleotide for detection of SNP TSC0044564
catctccacaaaa

SEQ ID NO: 179975 - DNA, 13 bp, Artificial Sequence
  Oligonucleotide for detection of SNP TSC0044565
tgtttataggatg

SEQ ID NO: 179976 - DNA, 13 bp, Artificial Sequence
  Oligonucleotide for detection of SNP TSC0044565
catcctataaaca

SEQ ID NO: 179977 - DNA, 13 bp, Artificial Sequence
  Oligonucleotide for detection of SNP TSC0044565
tgtttagaggatg

SEQ ID NO: 179978 - DNA, 13 bp, Artificial Sequence
  Oligonucleotide for detection of SNP TSC0044565
catcctctaaaca

SEQ ID NO: 179979 - DNA, 13 bp, Artificial Sequence
  Oligonucleotide for detection of SNP TSC0044566
aaagaatgagtaa

SEQ ID NO: 179980 - DNA, 13 bp, Artificial Sequence
  Oligonucleotide for detection of SNP TSC0044566
ttactcattcttt

SEQ ID NO: 179981 - DNA, 13 bp, Artificial Sequence
  Oligonucleotide for detection of SNP TSC0044566
aaagaacgagtaa

SEQ ID NO: 179982 - DNA, 13 bp, Artificial Sequence
  Oligonucleotide for detection of SNP TSC0044566
ttactcgttcttt

SEQ ID NO: 179983 - DNA, 13 bp, Artificial Sequence
  Oligonucleotide for detection of SNP TSC0044567
agaaagaagagag

SEQ ID NO: 179984 - DNA, 13 bp, Artificial Sequence
  Oligonucleotide for detection of SNP TSC0044567
ctctcttctttct

SEQ ID NO: 179985 - DNA, 13 bp, Artificial Sequence
  Oligonucleotide for detection of SNP TSC0044567
agaaagtagagag

SEQ ID NO: 179986 - DNA, 13 bp, Artificial Sequence
  Oligonucleotide for detection of SNP TSC0044567
ctctctactttct

SEQ ID NO: 179987 - DNA, 13 bp, Artificial Sequence
  Oligonucleotide for detection of SNP TSC0044568
agtgttgatgagg

SEQ ID NO: 179988 - DNA, 13 bp, Artificial Sequence
  Oligonucleotide for detection of SNP TSC0044568
cctcatcaacact

SEQ ID NO: 179989 - DNA, 13 bp, Artificial Sequence
  Oligonucleotide for detection of SNP TSC0044568
agtgttaatgagg

SEQ ID NO: 179990 - DNA, 13 bp, Artificial Sequence
  Oligonucleotide for detection of SNP TSC0044568
cctcattaacact

SEQ ID NO: 179991 - DNA, 13 bp, Artificial Sequence
  Oligonucleotide for detection of SNP TSC0044569
tgtggagtaaatg

SEQ ID NO: 179992 - DNA, 13 bp, Artificial Sequence
  Oligonucleotide for detection of SNP TSC0044569
catttactccaca

SEQ ID NO: 179993 - DNA, 13 bp, Artificial Sequence
  Oligonucleotide for detection of SNP TSC0044569
tgtggattaaatg

SEQ ID NO: 179994 - DNA, 13 bp, Artificial Sequence
  Oligonucleotide for detection of SNP TSC0044569
catttaatccaca

SEQ ID NO: 179995 - DNA, 13 bp, Artificial Sequence
  Oligonucleotide for detection of SNP TSC0044571
ggtttttaagttg

SEQ ID NO: 179996 - DNA, 13 bp, Artificial Sequence
  Oligonucleotide for detection of SNP TSC0044571
caacttaaaaacc

SEQ ID NO: 179997 - DNA, 13 bp, Artificial Sequence
  Oligonucleotide for detection of SNP TSC0044571
ggttttgaagttg

SEQ ID NO: 179998 - DNA, 13 bp, Artificial Sequence
  Oligonucleotide for detection of SNP TSC0044571
caacttcaaaacc

SEQ ID NO: 179999 - DNA, 13 bp, Artificial Sequence
  Oligonucleotide for detection of SNP TSC0044571
tagtttaagaaty

SEQ ID NO: 180000 - DNA, 13 bp, Artificial Sequence
  Oligonucleotide for detection of SNP TSC0044571
rattcttaaacta

SEQ ID NO: 180001 - DNA, 13 bp, Artificial Sequence
  Oligonucleotide for detection of SNP TSC0044571
tagttttagaaty

SEQ ID NO: 180002 - DNA, 13 bp, Artificial Sequence
  Oligonucleotide for detection of SNP TSC0044571
rattctaaaacta

SEQ ID NO: 180003 - DNA, 13 bp, Artificial Sequence
  Oligonucleotide for detection of SNP TSC0044572
atattaatttagt

SEQ ID NO: 180004 - DNA, 13 bp, Artificial Sequence
  Oligonucleotide for detection of SNP TSC0044572
actaaattaatat

SEQ ID NO: 180005 - DNA, 13 bp, Artificial Sequence
  Oligonucleotide for detection of SNP TSC0044572
atattagtttagt

SEQ ID NO: 180006 - DNA, 13 bp, Artificial Sequence
  Oligonucleotide for detection of SNP TSC0044572
actaaactaatat

SEQ ID NO: 180007 - DNA, 13 bp, Artificial Sequence
  Oligonucleotide for detection of SNP TSC0044575
ggtaggaaaaata

SEQ ID NO: 180008 - DNA, 13 bp, Artificial Sequence
  Oligonucleotide for detection of SNP TSC0044575
tatttttcctacc

SEQ ID NO: 180009 - DNA, 13 bp, Artificial Sequence
  Oligonucleotide for detection of SNP TSC0044575
ggtaggtaaaata

SEQ ID NO: 180010 - DNA, 13 bp, Artificial Sequence
  Oligonucleotide for detection of SNP TSC0044575
tattttacctacc

SEQ ID NO: 180011 - DNA, 13 bp, Artificial Sequence
  Oligonucleotide for detection of SNP TSC0044576
atttaagggtgaa

SEQ ID NO: 180012 - DNA, 13 bp, Artificial Sequence
  Oligonucleotide for detection of SNP TSC0044576
ttcacccttaaat

SEQ ID NO: 180013 - DNA, 13 bp, Artificial Sequence
  Oligonucleotide for detection of SNP TSC0044576
atttaaaggtgaa

SEQ ID NO: 180014 - DNA, 13 bp, Artificial Sequence
  Oligonucleotide for detection of SNP TSC0044576
ttcacctttaaat

SEQ ID NO: 180015 - DNA, 13 bp, Artificial Sequence
  Oligonucleotide for detection of SNP TSC0044577
ataaataaatgaa

SEQ ID NO: 180016 - DNA, 13 bp, Artificial Sequence
  Oligonucleotide for detection of SNP TSC0044577
ttcatttatttat

SEQ ID NO: 180017 - DNA, 13 bp, Artificial Sequence
  Oligonucleotide for detection of SNP TSC0044577
ataaatgaatgaa

SEQ ID NO: 180018 - DNA, 13 bp, Artificial Sequence
  Oligonucleotide for detection of SNP TSC0044577
ttcattcatttat

SEQ ID NO: 180019 - DNA, 13 bp, Artificial Sequence
  Oligonucleotide for detection of SNP TSC0044578
ataaataaatgta

SEQ ID NO: 180020 - DNA, 13 bp, Artificial Sequence
  Oligonucleotide for detection of SNP TSC0044578
tacatttatttat

SEQ ID NO: 180021 - DNA, 13 bp, Artificial Sequence
  Oligonucleotide for detection of SNP TSC0044578
ataaatgaatgta

SEQ ID NO: 180022 - DNA, 13 bp, Artificial Sequence
  Oligonucleotide for detection of SNP TSC0044578
tacattcatttat

SEQ ID NO: 180023 - DNA, 13 bp, Artificial Sequence
  Oligonucleotide for detection of SNP TSC0044579
aatttaggtttay

SEQ ID NO: 180024 - DNA, 13 bp, Artificial Sequence
  Oligonucleotide for detection of SNP TSC0044579
rtaaacctaaatt

SEQ ID NO: 180025 - DNA, 13 bp, Artificial Sequence
  Oligonucleotide for detection of SNP TSC0044579
aatttaagtttay

SEQ ID NO: 180026 - DNA, 13 bp, Artificial Sequence
  Oligonucleotide for detection of SNP TSC0044579
rtaaacttaaatt

SEQ ID NO: 180027 - DNA, 13 bp, Artificial Sequence
  Oligonucleotide for detection of SNP TSC0044580
aattaaggtataa

SEQ ID NO: 180028 - DNA, 13 bp, Artificial Sequence
  Oligonucleotide for detection of SNP TSC0044580
ttataccttaatt

SEQ ID NO: 180029 - DNA, 13 bp, Artificial Sequence
  Oligonucleotide for detection of SNP TSC0044580
aattaaagtataa

SEQ ID NO: 180030 - DNA, 13 bp, Artificial Sequence
  Oligonucleotide for detection of SNP TSC0044580
ttatactttaatt

SEQ ID NO: 180031 - DNA, 13 bp, Artificial Sequence
  Oligonucleotide for detection of SNP TSC0044581
gtgtatgttattg

SEQ ID NO: 180032 - DNA, 13 bp, Artificial Sequence
  Oligonucleotide for detection of SNP TSC0044581
caataacatacac

SEQ ID NO: 180033 - DNA, 13 bp, Artificial Sequence
  Oligonucleotide for detection of SNP TSC0044581
gtgtatattattg

SEQ ID NO: 180034 - DNA, 13 bp, Artificial Sequence
  Oligonucleotide for detection of SNP TSC0044581
caataatatacac

SEQ ID NO: 180035 - DNA, 13 bp, Artificial Sequence
  Oligonucleotide for detection of SNP TSC0044583
tgttgatgtgtay

SEQ ID NO: 180036 - DNA, 13 bp, Artificial Sequence
  Oligonucleotide for detection of SNP TSC0044583
rtacacatcaaca

SEQ ID NO: 180037 - DNA, 13 bp, Artificial Sequence
  Oligonucleotide for detection of SNP TSC0044583
cgttgatgtgtay

SEQ ID NO: 180038 - DNA, 13 bp, Artificial Sequence
  Oligonucleotide for detection of SNP TSC0044583
rtacacatcaacg

SEQ ID NO: 180039 - DNA, 13 bp, Artificial Sequence
  Oligonucleotide for detection of SNP TSC0044583
tgttgacgtgtay

SEQ ID NO: 180040 - DNA, 13 bp, Artificial Sequence
  Oligonucleotide for detection of SNP TSC0044583
rtacacgtcaaca

SEQ ID NO: 180041 - DNA, 13 bp, Artificial Sequence
  Oligonucleotide for detection of SNP TSC0044583
cgttgacgtgtay

SEQ ID NO: 180042 - DNA, 13 bp, Artificial Sequence
  Oligonucleotide for detection of SNP TSC0044583
rtacacgtcaacg

SEQ ID NO: 180043 - DNA, 13 bp, Artificial Sequence
  Oligonucleotide for detection of SNP TSC0044583
gtgtatgttagtg

SEQ ID NO: 180044 - DNA, 13 bp, Artificial Sequence
  Oligonucleotide for detection of SNP TSC0044583
cactaacatacac

SEQ ID NO: 180045 - DNA, 13 bp, Artificial Sequence
  Oligonucleotide for detection of SNP TSC0044583
gtgtatattagtg

SEQ ID NO: 180046 - DNA, 13 bp, Artificial Sequence
  Oligonucleotide for detection of SNP TSC0044583
cactaatatacac

SEQ ID NO: 180047 - DNA, 13 bp, Artificial Sequence
  Oligonucleotide for detection of SNP TSC0044583
gtgtacgttagtg

SEQ ID NO: 180048 - DNA, 13 bp, Artificial Sequence
  Oligonucleotide for detection of SNP TSC0044583
cactaacgtacac

SEQ ID NO: 180049 - DNA, 13 bp, Artificial Sequence
  Oligonucleotide for detection of SNP TSC0044583
gtgtatattagcg

SEQ ID NO: 180050 - DNA, 13 bp, Artificial Sequence
  Oligonucleotide for detection of SNP TSC0044583
cgctaatatacac

SEQ ID NO: 180051 - DNA, 13 bp, Artificial Sequence
  Oligonucleotide for detection of SNP TSC0044583
gtgtatgttagcg

SEQ ID NO: 180052 - DNA, 13 bp, Artificial Sequence
  Oligonucleotide for detection of SNP TSC0044583
cgctaacatacac

SEQ ID NO: 180053 - DNA, 13 bp, Artificial Sequence
  Oligonucleotide for detection of SNP TSC0044583
gtgtacgttagcg

SEQ ID NO: 180054 - DNA, 13 bp, Artificial Sequence
  Oligonucleotide for detection of SNP TSC0044583
cgctaacgtacac

SEQ ID NO: 180055 - DNA, 13 bp, Artificial Sequence
  Oligonucleotide for detection of SNP TSC0044584
ggatagagtgtta

SEQ ID NO: 180056 - DNA, 13 bp, Artificial Sequence
  Oligonucleotide for detection of SNP TSC0044584
taacactctatcc

SEQ ID NO: 180057 - DNA, 13 bp, Artificial Sequence
  Oligonucleotide for detection of SNP TSC0044584
ggatagtgtgtta

SEQ ID NO: 180058 - DNA, 13 bp, Artificial Sequence
  Oligonucleotide for detection of SNP TSC0044584
taacacactatcc

SEQ ID NO: 180059 - DNA, 13 bp, Artificial Sequence
  Oligonucleotide for detection of SNP TSC0044584
ggatagagcgtta

SEQ ID NO: 180060 - DNA, 13 bp, Artificial Sequence
  Oligonucleotide for detection of SNP TSC0044584
taacgctctatcc

SEQ ID NO: 180061 - DNA, 13 bp, Artificial Sequence
  Oligonucleotide for detection of SNP TSC0044584
ggatagcgtgtta

SEQ ID NO: 180062 - DNA, 13 bp, Artificial Sequence
  Oligonucleotide for detection of SNP TSC0044584
taacacgctatcc

SEQ ID NO: 180063 - DNA, 13 bp, Artificial Sequence
  Oligonucleotide for detection of SNP TSC0044584
ggatagtgcgtta

SEQ ID NO: 180064 - DNA, 13 bp, Artificial Sequence
  Oligonucleotide for detection of SNP TSC0044584
taacgcactatcc

SEQ ID NO: 180065 - DNA, 13 bp, Artificial Sequence
  Oligonucleotide for detection of SNP TSC0044584
ggatagcgcgtta

SEQ ID NO: 180066 - DNA, 13 bp, Artificial Sequence
  Oligonucleotide for detection of SNP TSC0044584
taacgcgctatcc

SEQ ID NO: 180067 - DNA, 13 bp, Artificial Sequence
  Oligonucleotide for detection of SNP TSC0044584
tggtgttttgtty

SEQ ID NO: 180068 - DNA, 13 bp, Artificial Sequence
  Oligonucleotide for detection of SNP TSC0044584
raacaaaacacca

SEQ ID NO: 180069 - DNA, 13 bp, Artificial Sequence
  Oligonucleotide for detection of SNP TSC0044584
tggtgtgttgtty

SEQ ID NO: 180070 - DNA, 13 bp, Artificial Sequence
  Oligonucleotide for detection of SNP TSC0044584
raacaacacacca

SEQ ID NO: 180071 - DNA, 13 bp, Artificial Sequence
  Oligonucleotide for detection of SNP TSC0044584
tggcgttttgtty

SEQ ID NO: 180072 - DNA, 13 bp, Artificial Sequence
  Oligonucleotide for detection of SNP TSC0044584
raacaaaacgcca

SEQ ID NO: 180073 - DNA, 13 bp, Artificial Sequence
  Oligonucleotide for detection of SNP TSC0044584
tggcgtgttgtty

SEQ ID NO: 180074 - DNA, 13 bp, Artificial Sequence
  Oligonucleotide for detection of SNP TSC0044584
raacaacacgcca

SEQ ID NO: 180075 - DNA, 13 bp, Artificial Sequence
  Oligonucleotide for detection of SNP TSC0044584
tggtgcgttgtty

SEQ ID NO: 180076 - DNA, 13 bp, Artificial Sequence
  Oligonucleotide for detection of SNP TSC0044584
raacaacgcacca

SEQ ID NO: 180077 - DNA, 13 bp, Artificial Sequence
  Oligonucleotide for detection of SNP TSC0044584
tggcgcgttgtty

SEQ ID NO: 180078 - DNA, 13 bp, Artificial Sequence
  Oligonucleotide for detection of SNP TSC0044584
raacaacgcgcca

SEQ ID NO: 180079 - DNA, 13 bp, Artificial Sequence
  Oligonucleotide for detection of SNP TSC0044585
tgtttatttatta

SEQ ID NO: 180080 - DNA, 13 bp, Artificial Sequence
  Oligonucleotide for detection of SNP TSC0044585
taataaataaaca

SEQ ID NO: 180081 - DNA, 13 bp, Artificial Sequence
  Oligonucleotide for detection of SNP TSC0044585
tggtgagtaagta

SEQ ID NO: 180082 - DNA, 13 bp, Artificial Sequence
  Oligonucleotide for detection of SNP TSC0044585
tacttactcacca

SEQ ID NO: 180083 - DNA, 13 bp, Artificial Sequence
  Oligonucleotide for detection of SNP TSC0044585
tggtgattaagta

SEQ ID NO: 180084 - DNA, 13 bp, Artificial Sequence
  Oligonucleotide for detection of SNP TSC0044585
tacttaatcacca

SEQ ID NO: 180085 - DNA, 13 bp, Artificial Sequence
  Oligonucleotide for detection of SNP TSC0044586
gatttttgaatay

SEQ ID NO: 180086 - DNA, 13 bp, Artificial Sequence
  Oligonucleotide for detection of SNP TSC0044586
rtattcaaaaatc

SEQ ID NO: 180087 - DNA, 13 bp, Artificial Sequence
  Oligonucleotide for detection of SNP TSC0044586
gattttcgaatay

SEQ ID NO: 180088 - DNA, 13 bp, Artificial Sequence
  Oligonucleotide for detection of SNP TSC0044586
rtattcgaaaatc

SEQ ID NO: 180089 - DNA, 13 bp, Artificial Sequence
  Oligonucleotide for detection of SNP TSC0044586
gtgtttgaggaty

SEQ ID NO: 180090 - DNA, 13 bp, Artificial Sequence
  Oligonucleotide for detection of SNP TSC0044586
ratcctcaaacac

SEQ ID NO: 180091 - DNA, 13 bp, Artificial Sequence
  Oligonucleotide for detection of SNP TSC0044586
gtgtttaaggaty

SEQ ID NO: 180092 - DNA, 13 bp, Artificial Sequence
  Oligonucleotide for detection of SNP TSC0044586
ratccttaaacac

SEQ ID NO: 180093 - DNA, 13 bp, Artificial Sequence
  Oligonucleotide for detection of SNP TSC0044586
gtgttcgaggaty

SEQ ID NO: 180094 - DNA, 13 bp, Artificial Sequence
  Oligonucleotide for detection of SNP TSC0044586
ratcctcgaacac

SEQ ID NO: 180095 - DNA, 13 bp, Artificial Sequence
  Oligonucleotide for detection of SNP TSC0044587
tataaaaatgaag

SEQ ID NO: 180096 - DNA, 13 bp, Artificial Sequence
  Oligonucleotide for detection of SNP TSC0044587
cttcatttttata

SEQ ID NO: 180097 - DNA, 13 bp, Artificial Sequence
  Oligonucleotide for detection of SNP TSC0044587
tataaagatgaag

SEQ ID NO: 180098 - DNA, 13 bp, Artificial Sequence
  Oligonucleotide for detection of SNP TSC0044587
cttcatctttata

SEQ ID NO: 180099 - DNA, 13 bp, Artificial Sequence
  Oligonucleotide for detection of SNP TSC0044588
tttaaaagtataa

SEQ ID NO: 180100 - DNA, 13 bp, Artificial Sequence
  Oligonucleotide for detection of SNP TSC0044588
ttatacttttaaa

SEQ ID NO: 180101 - DNA, 13 bp, Artificial Sequence
  Oligonucleotide for detection of SNP TSC0044588
tttaaaggtataa

SEQ ID NO: 180102 - DNA, 13 bp, Artificial Sequence
  Oligonucleotide for detection of SNP TSC0044588
ttatacctttaaa

SEQ ID NO: 180103 - DNA, 13 bp, Artificial Sequence
  Oligonucleotide for detection of SNP TSC0044589
tattatatggatt

SEQ ID NO: 180104 - DNA, 13 bp, Artificial Sequence
  Oligonucleotide for detection of SNP TSC0044589
aatccatataata

SEQ ID NO: 180105 - DNA, 13 bp, Artificial Sequence
  Oligonucleotide for detection of SNP TSC0044589
tattatgtggatt

SEQ ID NO: 180106 - DNA, 13 bp, Artificial Sequence
  Oligonucleotide for detection of SNP TSC0044589
aatccacataata

SEQ ID NO: 180107 - DNA, 13 bp, Artificial Sequence
  Oligonucleotide for detection of SNP TSC0044590
gtagttcgtttay

SEQ ID NO: 180108 - DNA, 13 bp, Artificial Sequence
  Oligonucleotide for detection of SNP TSC0044590
rtaaacgaactac

SEQ ID NO: 180109 - DNA, 13 bp, Artificial Sequence
  Oligonucleotide for detection of SNP TSC0044591
gattatgatattg

SEQ ID NO: 180110 - DNA, 13 bp, Artificial Sequence
  Oligonucleotide for detection of SNP TSC0044591
caatatcataatc

SEQ ID NO: 180111 - DNA, 13 bp, Artificial Sequence
  Oligonucleotide for detection of SNP TSC0044591
gattataatattg

SEQ ID NO: 180112 - DNA, 13 bp, Artificial Sequence
  Oligonucleotide for detection of SNP TSC0044591
caatattataatc

SEQ ID NO: 180113 - DNA, 13 bp, Artificial Sequence
  Oligonucleotide for detection of SNP TSC0009459
gttgttgtatggg

SEQ ID NO: 180114 - DNA, 13 bp, Artificial Sequence
  Oligonucleotide for detection of SNP TSC0009459
cccatacaacaac

SEQ ID NO: 180115 - DNA, 13 bp, Artificial Sequence
  Oligonucleotide for detection of SNP TSC0009459
gttgttatatggg

SEQ ID NO: 180116 - DNA, 13 bp, Artificial Sequence
  Oligonucleotide for detection of SNP TSC0009459
cccatataacaac

SEQ ID NO: 180117 - DNA, 13 bp, Artificial Sequence
  Oligonucleotide for detection of SNP TSC0044592
tataattggttta

SEQ ID NO: 180118 - DNA, 13 bp, Artificial Sequence
  Oligonucleotide for detection of SNP TSC0044592
taaaccaattata

SEQ ID NO: 180119 - DNA, 13 bp, Artificial Sequence
  Oligonucleotide for detection of SNP TSC0044592
tataatcggttta

SEQ ID NO: 180120 - DNA, 13 bp, Artificial Sequence
  Oligonucleotide for detection of SNP TSC0044592
taaaccgattata

SEQ ID NO: 180121 - DNA, 13 bp, Artificial Sequence
  Oligonucleotide for detection of SNP TSC0044592
taagttggttatg

SEQ ID NO: 180122 - DNA, 13 bp, Artificial Sequence
  Oligonucleotide for detection of SNP TSC0044592
cataaccaactta

SEQ ID NO: 180123 - DNA, 13 bp, Artificial Sequence
  Oligonucleotide for detection of SNP TSC0044592
taagttagttatg

SEQ ID NO: 180124 - DNA, 13 bp, Artificial Sequence
  Oligonucleotide for detection of SNP TSC0044592
cataactaactta

SEQ ID NO: 180125 - DNA, 13 bp, Artificial Sequence
  Oligonucleotide for detection of SNP TSC0044592
taagtcggttatg

SEQ ID NO: 180126 - DNA, 13 bp, Artificial Sequence
  Oligonucleotide for detection of SNP TSC0044592
cataaccgactta

SEQ ID NO: 180127 - DNA, 13 bp, Artificial Sequence
  Oligonucleotide for detection of SNP TSC0044593
ttttggatattaa

SEQ ID NO: 180128 - DNA, 13 bp, Artificial Sequence
  Oligonucleotide for detection of SNP TSC0044593
ttaatatccaaaa

SEQ ID NO: 180129 - DNA, 13 bp, Artificial Sequence
  Oligonucleotide for detection of SNP TSC0044593
ttttgggtattaa

SEQ ID NO: 180130 - DNA, 13 bp, Artificial Sequence
  Oligonucleotide for detection of SNP TSC0044593
ttaatacccaaaa

SEQ ID NO: 180131 - DNA, 13 bp, Artificial Sequence
  Oligonucleotide for detection of SNP TSC0044594
tttagaatgttty

SEQ ID NO: 180132 - DNA, 13 bp, Artificial Sequence
  Oligonucleotide for detection of SNP TSC0044594
raaacattctaaa

SEQ ID NO: 180133 - DNA, 13 bp, Artificial Sequence
  Oligonucleotide for detection of SNP TSC0044594
tttagagtgttty

SEQ ID NO: 180134 - DNA, 13 bp, Artificial Sequence
  Oligonucleotide for detection of SNP TSC0044594
raaacactctaaa

SEQ ID NO: 180135 - DNA, 13 bp, Artificial Sequence
  Oligonucleotide for detection of SNP TSC0044595
atgttggttttta

SEQ ID NO: 180136 - DNA, 13 bp, Artificial Sequence
  Oligonucleotide for detection of SNP TSC0044595
taaaaaccaacat

SEQ ID NO: 180137 - DNA, 13 bp, Artificial Sequence
  Oligonucleotide for detection of SNP TSC0044595
atgttgattttta

SEQ ID NO: 180138 - DNA, 13 bp, Artificial Sequence
  Oligonucleotide for detection of SNP TSC0044595
taaaaatcaacat

SEQ ID NO: 180139 - DNA, 13 bp, Artificial Sequence
  Oligonucleotide for detection of SNP TSC0044597
taagtgaaagttt

SEQ ID NO: 180140 - DNA, 13 bp, Artificial Sequence
  Oligonucleotide for detection of SNP TSC0044597
aaactttcactta

SEQ ID NO: 180141 - DNA, 13 bp, Artificial Sequence
  Oligonucleotide for detection of SNP TSC0044597
taagtggaagttt

SEQ ID NO: 180142 - DNA, 13 bp, Artificial Sequence
  Oligonucleotide for detection of SNP TSC0044597
aaacttccactta

SEQ ID NO: 180143 - DNA, 13 bp, Artificial Sequence
  Oligonucleotide for detection of SNP TSC0044599
tgatgtggggtta

SEQ ID NO: 180144 - DNA, 13 bp, Artificial Sequence
  Oligonucleotide for detection of SNP TSC0044599
taaccccacatca

SEQ ID NO: 180145 - DNA, 13 bp, Artificial Sequence
  Oligonucleotide for detection of SNP TSC0044599
tgatgtagggtta

SEQ ID NO: 180146 - DNA, 13 bp, Artificial Sequence
  Oligonucleotide for detection of SNP TSC0044599
taaccctacatca

SEQ ID NO: 180147 - DNA, 13 bp, Artificial Sequence
  Oligonucleotide for detection of SNP TSC0044601
aaaaaagaaatga

SEQ ID NO: 180148 - DNA, 13 bp, Artificial Sequence
  Oligonucleotide for detection of SNP TSC0044601
tcatttctttttt

SEQ ID NO: 180149 - DNA, 13 bp, Artificial Sequence
  Oligonucleotide for detection of SNP TSC0044601
aaaaaaaaaatga

SEQ ID NO: 180150 - DNA, 13 bp, Artificial Sequence
  Oligonucleotide for detection of SNP TSC0044601
tcatttttttttt

SEQ ID NO: 180151 - DNA, 13 bp, Artificial Sequence
  Oligonucleotide for detection of SNP TSC0044602
tgagggtagatgt

SEQ ID NO: 180152 - DNA, 13 bp, Artificial Sequence
  Oligonucleotide for detection of SNP TSC0044602
acatctaccctca

SEQ ID NO: 180153 - DNA, 13 bp, Artificial Sequence
  Oligonucleotide for detection of SNP TSC0044602
tgaggggagatgt

SEQ ID NO: 180154 - DNA, 13 bp, Artificial Sequence
  Oligonucleotide for detection of SNP TSC0044602
acatctcccctca

SEQ ID NO: 180155 - DNA, 13 bp, Artificial Sequence
  Oligonucleotide for detection of SNP TSC0044602
atattttttttta

SEQ ID NO: 180156 - DNA, 13 bp, Artificial Sequence
  Oligonucleotide for detection of SNP TSC0044602
taaaaaaaaatat

SEQ ID NO: 180157 - DNA, 13 bp, Artificial Sequence
  Oligonucleotide for detection of SNP TSC0044603
tagggtaggttag

SEQ ID NO: 180158 - DNA, 13 bp, Artificial Sequence
  Oligonucleotide for detection of SNP TSC0044603
ctaacctacccta

SEQ ID NO: 180159 - DNA, 13 bp, Artificial Sequence
  Oligonucleotide for detection of SNP TSC0044603
tagggttggttag

SEQ ID NO: 180160 - DNA, 13 bp, Artificial Sequence
  Oligonucleotide for detection of SNP TSC0044603
ctaaccaacccta

SEQ ID NO: 180161 - DNA, 13 bp, Artificial Sequence
  Oligonucleotide for detection of SNP TSC0044603
tagggtcggttag

SEQ ID NO: 180162 - DNA, 13 bp, Artificial Sequence
  Oligonucleotide for detection of SNP TSC0044603
ctaaccgacccta

SEQ ID NO: 180163 - DNA, 13 bp, Artificial Sequence
  Oligonucleotide for detection of SNP TSC0044603
ttggtttattttg

SEQ ID NO: 180164 - DNA, 13 bp, Artificial Sequence
  Oligonucleotide for detection of SNP TSC0044603
caaaataaaccaa

SEQ ID NO: 180165 - DNA, 13 bp, Artificial Sequence
  Oligonucleotide for detection of SNP TSC0044603
ttggttgattttg

SEQ ID NO: 180166 - DNA, 13 bp, Artificial Sequence
  Oligonucleotide for detection of SNP TSC0044603
caaaatcaaccaa

SEQ ID NO: 180167 - DNA, 13 bp, Artificial Sequence
  Oligonucleotide for detection of SNP TSC0044603
ttggtcgattttg

SEQ ID NO: 180168 - DNA, 13 bp, Artificial Sequence
  Oligonucleotide for detection of SNP TSC0044603
caaaatcgaccaa

SEQ ID NO: 180169 - DNA, 13 bp, Artificial Sequence
  Oligonucleotide for detection of SNP TSC0044604
tggaagtttaagg

SEQ ID NO: 180170 - DNA, 13 bp, Artificial Sequence
  Oligonucleotide for detection of SNP TSC0044604
ccttaaacttcca

SEQ ID NO: 180171 - DNA, 13 bp, Artificial Sequence
  Oligonucleotide for detection of SNP TSC0044604
tggaaggttaagg

SEQ ID NO: 180172 - DNA, 13 bp, Artificial Sequence
  Oligonucleotide for detection of SNP TSC0044604
ccttaaccttcca

SEQ ID NO: 180173 - DNA, 13 bp, Artificial Sequence
  Oligonucleotide for detection of SNP TSC0044605
atatttgtaagag

SEQ ID NO: 180174 - DNA, 13 bp, Artificial Sequence
  Oligonucleotide for detection of SNP TSC0044605
ctcttacaaatat

SEQ ID NO: 180175 - DNA, 13 bp, Artificial Sequence
  Oligonucleotide for detection of SNP TSC0044605
atatttataagag

SEQ ID NO: 180176 - DNA, 13 bp, Artificial Sequence
  Oligonucleotide for detection of SNP TSC0044605
ctcttataaatat

SEQ ID NO: 180177 - DNA, 13 bp, Artificial Sequence
  Oligonucleotide for detection of SNP TSC0044606
atttagtgtaatg

SEQ ID NO: 180178 - DNA, 13 bp, Artificial Sequence
  Oligonucleotide for detection of SNP TSC0044606
cattacactaaat

SEQ ID NO: 180179 - DNA, 13 bp, Artificial Sequence
  Oligonucleotide for detection of SNP TSC0044606
atttagcgtaatg

SEQ ID NO: 180180 - DNA, 13 bp, Artificial Sequence
  Oligonucleotide for detection of SNP TSC0044606
cattacgctaaat

SEQ ID NO: 180181 - DNA, 13 bp, Artificial Sequence
  Oligonucleotide for detection of SNP TSC0044607
attggatgatgay

SEQ ID NO: 180182 - DNA, 13 bp, Artificial Sequence
  Oligonucleotide for detection of SNP TSC0044607
rtcatcatccaat

SEQ ID NO: 180183 - DNA, 13 bp, Artificial Sequence
  Oligonucleotide for detection of SNP TSC0044607
attggaggatgay

SEQ ID NO: 180184 - DNA, 13 bp, Artificial Sequence
  Oligonucleotide for detection of SNP TSC0044607
rtcatcctccaat

SEQ ID NO: 180185 - DNA, 13 bp, Artificial Sequence
  Oligonucleotide for detection of SNP TSC0044608
tattattaatttt

SEQ ID NO: 180186 - DNA, 13 bp, Artificial Sequence
  Oligonucleotide for detection of SNP TSC0044608
aaaattaataata

SEQ ID NO: 180187 - DNA, 13 bp, Artificial Sequence
  Oligonucleotide for detection of SNP TSC0044608
aagatttatagta

SEQ ID NO: 180188 - DNA, 13 bp, Artificial Sequence
  Oligonucleotide for detection of SNP TSC0044608
tactataaatctt

SEQ ID NO: 180189 - DNA, 13 bp, Artificial Sequence
  Oligonucleotide for detection of SNP TSC0044608
aagattgatagta

SEQ ID NO: 180190 - DNA, 13 bp, Artificial Sequence
  Oligonucleotide for detection of SNP TSC0044608
tactatcaatctt

SEQ ID NO: 180191 - DNA, 13 bp, Artificial Sequence
  Oligonucleotide for detection of SNP TSC0044609
atttatgtatttt

SEQ ID NO: 180192 - DNA, 13 bp, Artificial Sequence
  Oligonucleotide for detection of SNP TSC0044609
aaaatacataaat

SEQ ID NO: 180193 - DNA, 13 bp, Artificial Sequence
  Oligonucleotide for detection of SNP TSC0044609
atttacgtatttt

SEQ ID NO: 180194 - DNA, 13 bp, Artificial Sequence
  Oligonucleotide for detection of SNP TSC0044609
aaaatacgtaaat

SEQ ID NO: 180195 - DNA, 13 bp, Artificial Sequence
  Oligonucleotide for detection of SNP TSC0044609
aaggtatgtggat

SEQ ID NO: 180196 - DNA, 13 bp, Artificial Sequence
  Oligonucleotide for detection of SNP TSC0044609
atccacatacctt

SEQ ID NO: 180197 - DNA, 13 bp, Artificial Sequence
  Oligonucleotide for detection of SNP TSC0044609
aaggtacgtggat

SEQ ID NO: 180198 - DNA, 13 bp, Artificial Sequence
  Oligonucleotide for detection of SNP TSC0044609
atccacgtacctt

SEQ ID NO: 180199 - DNA, 13 bp, Artificial Sequence
  Oligonucleotide for detection of SNP TSC0044610
ggagttagtgtta

SEQ ID NO: 180200 - DNA, 13 bp, Artificial Sequence
  Oligonucleotide for detection of SNP TSC0044610
taacactaactcc

SEQ ID NO: 180201 - DNA, 13 bp, Artificial Sequence
  Oligonucleotide for detection of SNP TSC0044610
ggagttggtgtta

SEQ ID NO: 180202 - DNA, 13 bp, Artificial Sequence
  Oligonucleotide for detection of SNP TSC0044610
taacaccaactcc

SEQ ID NO: 180203 - DNA, 13 bp, Artificial Sequence
  Oligonucleotide for detection of SNP TSC0044611
tatatagaatgtg

SEQ ID NO: 180204 - DNA, 13 bp, Artificial Sequence
  Oligonucleotide for detection of SNP TSC0044611
cacattctatata

SEQ ID NO: 180205 - DNA, 13 bp, Artificial Sequence
  Oligonucleotide for detection of SNP TSC0044611
tatataaaatgtg

SEQ ID NO: 180206 - DNA, 13 bp, Artificial Sequence
  Oligonucleotide for detection of SNP TSC0044611
cacattttatata

SEQ ID NO: 180207 - DNA, 13 bp, Artificial Sequence
  Oligonucleotide for detection of SNP TSC0044611
tatatagaatgcg

SEQ ID NO: 180208 - DNA, 13 bp, Artificial Sequence
  Oligonucleotide for detection of SNP TSC0044611
cgcattctatata

SEQ ID NO: 180209 - DNA, 13 bp, Artificial Sequence
  Oligonucleotide for detection of SNP TSC0044611
tatataaaatgcg

SEQ ID NO: 180210 - DNA, 13 bp, Artificial Sequence
  Oligonucleotide for detection of SNP TSC0044611
cgcattttatata

SEQ ID NO: 180211 - DNA, 13 bp, Artificial Sequence
  Oligonucleotide for detection of SNP TSC0044612
taggaataatgga

SEQ ID NO: 180212 - DNA, 13 bp, Artificial Sequence
  Oligonucleotide for detection of SNP TSC0044612
tccattattccta

SEQ ID NO: 180213 - DNA, 13 bp, Artificial Sequence
  Oligonucleotide for detection of SNP TSC0044612
taggaagaatgga

SEQ ID NO: 180214 - DNA, 13 bp, Artificial Sequence
  Oligonucleotide for detection of SNP TSC0044612
tccattcttccta

SEQ ID NO: 180215 - DNA, 13 bp, Artificial Sequence
  Oligonucleotide for detection of SNP TSC0044613
tttttgtatattt

SEQ ID NO: 180216 - DNA, 13 bp, Artificial Sequence
  Oligonucleotide for detection of SNP TSC0044613
aaatatacaaaaa

SEQ ID NO: 180217 - DNA, 13 bp, Artificial Sequence
  Oligonucleotide for detection of SNP TSC0044613
tttttggatattt

SEQ ID NO: 180218 - DNA, 13 bp, Artificial Sequence
  Oligonucleotide for detection of SNP TSC0044613
aaatatccaaaaa

SEQ ID NO: 180219 - DNA, 13 bp, Artificial Sequence
  Oligonucleotide for detection of SNP TSC0044613
aaatatgtaagaa

SEQ ID NO: 180220 - DNA, 13 bp, Artificial Sequence
  Oligonucleotide for detection of SNP TSC0044613
ttcttacatattt

SEQ ID NO: 180221 - DNA, 13 bp, Artificial Sequence
  Oligonucleotide for detection of SNP TSC0044613
aaatatttaagaa

SEQ ID NO: 180222 - DNA, 13 bp, Artificial Sequence
  Oligonucleotide for detection of SNP TSC0044613
ttcttaaatattt

SEQ ID NO: 180223 - DNA, 13 bp, Artificial Sequence
  Oligonucleotide for detection of SNP TSC0044614
ttttggattattg

SEQ ID NO: 180224 - DNA, 13 bp, Artificial Sequence
  Oligonucleotide for detection of SNP TSC0044614
caataatccaaaa

SEQ ID NO: 180225 - DNA, 13 bp, Artificial Sequence
  Oligonucleotide for detection of SNP TSC0044614
tttcggattattg

SEQ ID NO: 180226 - DNA, 13 bp, Artificial Sequence
  Oligonucleotide for detection of SNP TSC0044614
caataatccgaaa

SEQ ID NO: 180227 - DNA, 13 bp, Artificial Sequence
  Oligonucleotide for detection of SNP TSC0044614
tttcggtttattg

SEQ ID NO: 180228 - DNA, 13 bp, Artificial Sequence
  Oligonucleotide for detection of SNP TSC0044614
caataaaccgaaa

SEQ ID NO: 180229 - DNA, 13 bp, Artificial Sequence
  Oligonucleotide for detection of SNP TSC0044614
tagtgatttgaga

SEQ ID NO: 180230 - DNA, 13 bp, Artificial Sequence
  Oligonucleotide for detection of SNP TSC0044614
tctcaaatcacta

SEQ ID NO: 180231 - DNA, 13 bp, Artificial Sequence
  Oligonucleotide for detection of SNP TSC0044614
tagtgattcgaga

SEQ ID NO: 180232 - DNA, 13 bp, Artificial Sequence
  Oligonucleotide for detection of SNP TSC0044614
tctcgaatcacta

SEQ ID NO: 180233 - DNA, 13 bp, Artificial Sequence
  Oligonucleotide for detection of SNP TSC0044618
tattgtaatataa

SEQ ID NO: 180234 - DNA, 13 bp, Artificial Sequence
  Oligonucleotide for detection of SNP TSC0044618
ttatattacaata

SEQ ID NO: 180235 - DNA, 13 bp, Artificial Sequence
  Oligonucleotide for detection of SNP TSC0044618
tattgtgatataa

SEQ ID NO: 180236 - DNA, 13 bp, Artificial Sequence
  Oligonucleotide for detection of SNP TSC0044618
ttatatcacaata

SEQ ID NO: 180237 - DNA, 13 bp, Artificial Sequence
  Oligonucleotide for detection of SNP TSC0044618
tatcgtaatataa

SEQ ID NO: 180238 - DNA, 13 bp, Artificial Sequence
  Oligonucleotide for detection of SNP TSC0044618
ttatattacgata

SEQ ID NO: 180239 - DNA, 13 bp, Artificial Sequence
  Oligonucleotide for detection of SNP TSC0044618
tatcgtgatataa

SEQ ID NO: 180240 - DNA, 13 bp, Artificial Sequence
  Oligonucleotide for detection of SNP TSC0044618
ttatatcacgata

SEQ ID NO: 180241 - DNA, 13 bp, Artificial Sequence
  Oligonucleotide for detection of SNP TSC0044618
tattgcgatataa

SEQ ID NO: 180242 - DNA, 13 bp, Artificial Sequence
  Oligonucleotide for detection of SNP TSC0044618
ttatatcgcaata

SEQ ID NO: 180243 - DNA, 13 bp, Artificial Sequence
  Oligonucleotide for detection of SNP TSC0044618
tatcgcgatataa

SEQ ID NO: 180244 - DNA, 13 bp, Artificial Sequence
  Oligonucleotide for detection of SNP TSC0044618
ttatatcgcgata

SEQ ID NO: 180245 - DNA, 13 bp, Artificial Sequence
  Oligonucleotide for detection of SNP TSC0044618
ttatattgtggtg

SEQ ID NO: 180246 - DNA, 13 bp, Artificial Sequence
  Oligonucleotide for detection of SNP TSC0044618
caccacaatataa

SEQ ID NO: 180247 - DNA, 13 bp, Artificial Sequence
  Oligonucleotide for detection of SNP TSC0044618
ttatattgcggtg

SEQ ID NO: 180248 - DNA, 13 bp, Artificial Sequence
  Oligonucleotide for detection of SNP TSC0044618
caccgcaatataa

SEQ ID NO: 180249 - DNA, 13 bp, Artificial Sequence
  Oligonucleotide for detection of SNP TSC0044618
ttatatcgtggtg

SEQ ID NO: 180250 - DNA, 13 bp, Artificial Sequence
  Oligonucleotide for detection of SNP TSC0044618
caccacgatataa

SEQ ID NO: 180251 - DNA, 13 bp, Artificial Sequence
  Oligonucleotide for detection of SNP TSC0044618
ttatatcgcggtg

SEQ ID NO: 180252 - DNA, 13 bp, Artificial Sequence
  Oligonucleotide for detection of SNP TSC0044618
caccgcgatataa

SEQ ID NO: 180253 - DNA, 13 bp, Artificial Sequence
  Oligonucleotide for detection of SNP TSC0044621
ttttttatcgtga

SEQ ID NO: 180254 - DNA, 13 bp, Artificial Sequence
  Oligonucleotide for detection of SNP TSC0044621
tcacgataaaaaa

SEQ ID NO: 180255 - DNA, 13 bp, Artificial Sequence
  Oligonucleotide for detection of SNP TSC0044621
ttttttattgcga

SEQ ID NO: 180256 - DNA, 13 bp, Artificial Sequence
  Oligonucleotide for detection of SNP TSC0044621
tcgcaataaaaaa

SEQ ID NO: 180257 - DNA, 13 bp, Artificial Sequence
  Oligonucleotide for detection of SNP TSC0044621
ttttttatcgcga

SEQ ID NO: 180258 - DNA, 13 bp, Artificial Sequence
  Oligonucleotide for detection of SNP TSC0044621
tcgcgataaaaaa

SEQ ID NO: 180259 - DNA, 13 bp, Artificial Sequence
  Oligonucleotide for detection of SNP TSC0044621
ttgtggtgaaaaa

SEQ ID NO: 180260 - DNA, 13 bp, Artificial Sequence
  Oligonucleotide for detection of SNP TSC0044621
tttttcaccacaa

SEQ ID NO: 180261 - DNA, 13 bp, Artificial Sequence
  Oligonucleotide for detection of SNP TSC0044621
ttgtggagaaaaa

SEQ ID NO: 180262 - DNA, 13 bp, Artificial Sequence
  Oligonucleotide for detection of SNP TSC0044621
tttttctccacaa

SEQ ID NO: 180263 - DNA, 13 bp, Artificial Sequence
  Oligonucleotide for detection of SNP TSC0044621
tcgtggtgaaaaa

SEQ ID NO: 180264 - DNA, 13 bp, Artificial Sequence
  Oligonucleotide for detection of SNP TSC0044621
tttttcaccacga

SEQ ID NO: 180265 - DNA, 13 bp, Artificial Sequence
  Oligonucleotide for detection of SNP TSC0044621
tcgtggagaaaaa

SEQ ID NO: 180266 - DNA, 13 bp, Artificial Sequence
  Oligonucleotide for detection of SNP TSC0044621
tttttctccacga

SEQ ID NO: 180267 - DNA, 13 bp, Artificial Sequence
  Oligonucleotide for detection of SNP TSC0044621
ttgcggtgaaaaa

SEQ ID NO: 180268 - DNA, 13 bp, Artificial Sequence
  Oligonucleotide for detection of SNP TSC0044621
tttttcaccgcaa

SEQ ID NO: 180269 - DNA, 13 bp, Artificial Sequence
  Oligonucleotide for detection of SNP TSC0044621
ttgcggagaaaaa

SEQ ID NO: 180270 - DNA, 13 bp, Artificial Sequence
  Oligonucleotide for detection of SNP TSC0044621
tttttctccgcaa

SEQ ID NO: 180271 - DNA, 13 bp, Artificial Sequence
  Oligonucleotide for detection of SNP TSC0044621
tcgcggtgaaaaa

SEQ ID NO: 180272 - DNA, 13 bp, Artificial Sequence
  Oligonucleotide for detection of SNP TSC0044621
tttttcaccgcga

SEQ ID NO: 180273 - DNA, 13 bp, Artificial Sequence
  Oligonucleotide for detection of SNP TSC0044621
tcgcggagaaaaa

SEQ ID NO: 180274 - DNA, 13 bp, Artificial Sequence
  Oligonucleotide for detection of SNP TSC0044621
tttttctccgcga

SEQ ID NO: 180275 - DNA, 13 bp, Artificial Sequence
  Oligonucleotide for detection of SNP TSC0044622
aaaaataagttta

SEQ ID NO: 180276 - DNA, 13 bp, Artificial Sequence
  Oligonucleotide for detection of SNP TSC0044622
taaacttattttt

SEQ ID NO: 180277 - DNA, 13 bp, Artificial Sequence
  Oligonucleotide for detection of SNP TSC0044622
aaaaatgagttta

SEQ ID NO: 180278 - DNA, 13 bp, Artificial Sequence
  Oligonucleotide for detection of SNP TSC0044622
taaactcattttt

SEQ ID NO: 180279 - DNA, 13 bp, Artificial Sequence
  Oligonucleotide for detection of SNP TSC0044623
taaaaattattgg

SEQ ID NO: 180280 - DNA, 13 bp, Artificial Sequence
  Oligonucleotide for detection of SNP TSC0044623
ccaataattttta

SEQ ID NO: 180281 - DNA, 13 bp, Artificial Sequence
  Oligonucleotide for detection of SNP TSC0044623
taaaaagtattgg

SEQ ID NO: 180282 - DNA, 13 bp, Artificial Sequence
  Oligonucleotide for detection of SNP TSC0044623
ccaatacttttta

SEQ ID NO: 180283 - DNA, 13 bp, Artificial Sequence
  Oligonucleotide for detection of SNP TSC0044623
ttaatgattttta

SEQ ID NO: 180284 - DNA, 13 bp, Artificial Sequence
  Oligonucleotide for detection of SNP TSC0044623
taaaaatcattaa

SEQ ID NO: 180285 - DNA, 13 bp, Artificial Sequence
  Oligonucleotide for detection of SNP TSC0044623
ttaatgtttttta

SEQ ID NO: 180286 - DNA, 13 bp, Artificial Sequence
  Oligonucleotide for detection of SNP TSC0044623
taaaaaacattaa

SEQ ID NO: 180287 - DNA, 13 bp, Artificial Sequence
  Oligonucleotide for detection of SNP TSC0044624
ttttttattggaa

SEQ ID NO: 180288 - DNA, 13 bp, Artificial Sequence
  Oligonucleotide for detection of SNP TSC0044624
ttccaataaaaaa

SEQ ID NO: 180289 - DNA, 13 bp, Artificial Sequence
  Oligonucleotide for detection of SNP TSC0044624
tttttttttggaa

SEQ ID NO: 180290 - DNA, 13 bp, Artificial Sequence
  Oligonucleotide for detection of SNP TSC0044624
ttccaaaaaaaaa

SEQ ID NO: 180291 - DNA, 13 bp, Artificial Sequence
  Oligonucleotide for detection of SNP TSC0044624
ttttaataagaaa

SEQ ID NO: 180292 - DNA, 13 bp, Artificial Sequence
  Oligonucleotide for detection of SNP TSC0044624
tttcttattaaaa

SEQ ID NO: 180293 - DNA, 13 bp, Artificial Sequence
  Oligonucleotide for detection of SNP TSC0044624
ttttaagaagaaa

SEQ ID NO: 180294 - DNA, 13 bp, Artificial Sequence
  Oligonucleotide for detection of SNP TSC0044624
tttcttcttaaaa

SEQ ID NO: 180295 - DNA, 13 bp, Artificial Sequence
  Oligonucleotide for detection of SNP TSC0044625
tatttagataaaa

SEQ ID NO: 180296 - DNA, 13 bp, Artificial Sequence
  Oligonucleotide for detection of SNP TSC0044625
ttttatctaaata

SEQ ID NO: 180297 - DNA, 13 bp, Artificial Sequence
  Oligonucleotide for detection of SNP TSC0044625
ttttgtgtgaatg

SEQ ID NO: 180298 - DNA, 13 bp, Artificial Sequence
  Oligonucleotide for detection of SNP TSC0044625
cattcacacaaaa

SEQ ID NO: 180299 - DNA, 13 bp, Artificial Sequence
  Oligonucleotide for detection of SNP TSC0044625
ttttgtttgaatg

SEQ ID NO: 180300 - DNA, 13 bp, Artificial Sequence
  Oligonucleotide for detection of SNP TSC0044625
cattcaaacaaaa

SEQ ID NO: 180301 - DNA, 13 bp, Artificial Sequence
  Oligonucleotide for detection of SNP TSC0006465
ttatttttaagaa

SEQ ID NO: 180302 - DNA, 13 bp, Artificial Sequence
  Oligonucleotide for detection of SNP TSC0006465
ttcttaaaaataa

SEQ ID NO: 180303 - DNA, 13 bp, Artificial Sequence
  Oligonucleotide for detection of SNP TSC0006465
ttatttgtaagaa

SEQ ID NO: 180304 - DNA, 13 bp, Artificial Sequence
  Oligonucleotide for detection of SNP TSC0006465
ttcttacaaataa

SEQ ID NO: 180305 - DNA, 13 bp, Artificial Sequence
  Oligonucleotide for detection of SNP TSC0006465
tttttagaagtga

SEQ ID NO: 180306 - DNA, 13 bp, Artificial Sequence
  Oligonucleotide for detection of SNP TSC0006465
tcacttctaaaaa

SEQ ID NO: 180307 - DNA, 13 bp, Artificial Sequence
  Oligonucleotide for detection of SNP TSC0006465
tttttataagtga

SEQ ID NO: 180308 - DNA, 13 bp, Artificial Sequence
  Oligonucleotide for detection of SNP TSC0006465
tcacttataaaaa

SEQ ID NO: 180309 - DNA, 13 bp, Artificial Sequence
  Oligonucleotide for detection of SNP TSC0044628
tatataatatggy

SEQ ID NO: 180310 - DNA, 13 bp, Artificial Sequence
  Oligonucleotide for detection of SNP TSC0044628
rccatattatata

SEQ ID NO: 180311 - DNA, 13 bp, Artificial Sequence
  Oligonucleotide for detection of SNP TSC0044628
tatatagtatggy

SEQ ID NO: 180312 - DNA, 13 bp, Artificial Sequence
  Oligonucleotide for detection of SNP TSC0044628
rccatactatata

SEQ ID NO: 180313 - DNA, 13 bp, Artificial Sequence
  Oligonucleotide for detection of SNP TSC0044636
tttgaggtgagty

SEQ ID NO: 180314 - DNA, 13 bp, Artificial Sequence
  Oligonucleotide for detection of SNP TSC0044636
ractcacctcaaa

SEQ ID NO: 180315 - DNA, 13 bp, Artificial Sequence
  Oligonucleotide for detection of SNP TSC0044636
tttgagatgagty

SEQ ID NO: 180316 - DNA, 13 bp, Artificial Sequence
  Oligonucleotide for detection of SNP TSC0044636
ractcatctcaaa

SEQ ID NO: 180317 - DNA, 13 bp, Artificial Sequence
  Oligonucleotide for detection of SNP TSC0044638
gtattatttagty

SEQ ID NO: 180318 - DNA, 13 bp, Artificial Sequence
  Oligonucleotide for detection of SNP TSC0044638
ractaaataatac

SEQ ID NO: 180319 - DNA, 13 bp, Artificial Sequence
  Oligonucleotide for detection of SNP TSC0044638
gtattagttagty

SEQ ID NO: 180320 - DNA, 13 bp, Artificial Sequence
  Oligonucleotide for detection of SNP TSC0044638
ractaactaatac

SEQ ID NO: 180321 - DNA, 13 bp, Artificial Sequence
  Oligonucleotide for detection of SNP TSC0044638
ggttagatggtgy

SEQ ID NO: 180322 - DNA, 13 bp, Artificial Sequence
  Oligonucleotide for detection of SNP TSC0044638
rcaccatctaacc

SEQ ID NO: 180323 - DNA, 13 bp, Artificial Sequence
  Oligonucleotide for detection of SNP TSC0044638
ggttagttggtgy

SEQ ID NO: 180324 - DNA, 13 bp, Artificial Sequence
  Oligonucleotide for detection of SNP TSC0044638
rcaccaactaacc

SEQ ID NO: 180325 - DNA, 13 bp, Artificial Sequence
  Oligonucleotide for detection of SNP TSC0044640
gtggttatttgtt

SEQ ID NO: 180326 - DNA, 13 bp, Artificial Sequence
  Oligonucleotide for detection of SNP TSC0044640
aacaaataaccac

SEQ ID NO: 180327 - DNA, 13 bp, Artificial Sequence
  Oligonucleotide for detection of SNP TSC0044640
gtggttgtttgtt

SEQ ID NO: 180328 - DNA, 13 bp, Artificial Sequence
  Oligonucleotide for detection of SNP TSC0044640
aacaaacaaccac

SEQ ID NO: 180329 - DNA, 13 bp, Artificial Sequence
  Oligonucleotide for detection of SNP TSC0044640
gtggtcgtttgtt

SEQ ID NO: 180330 - DNA, 13 bp, Artificial Sequence
  Oligonucleotide for detection of SNP TSC0044640
aacaaacgaccac

SEQ ID NO: 180331 - DNA, 13 bp, Artificial Sequence
  Oligonucleotide for detection of SNP TSC0044640
agtagatgattay

SEQ ID NO: 180332 - DNA, 13 bp, Artificial Sequence
  Oligonucleotide for detection of SNP TSC0044640
rtaatcatctact

SEQ ID NO: 180333 - DNA, 13 bp, Artificial Sequence
  Oligonucleotide for detection of SNP TSC0044640
agtagacgattay

SEQ ID NO: 180334 - DNA, 13 bp, Artificial Sequence
  Oligonucleotide for detection of SNP TSC0044640
rtaatcgtctact

SEQ ID NO: 180335 - DNA, 13 bp, Artificial Sequence
  Oligonucleotide for detection of SNP TSC0044643
tttgtatgtaaay

SEQ ID NO: 180336 - DNA, 13 bp, Artificial Sequence
  Oligonucleotide for detection of SNP TSC0044643
rtttacatacaaa

SEQ ID NO: 180337 - DNA, 13 bp, Artificial Sequence
  Oligonucleotide for detection of SNP TSC0044643
tttgtacgtaaay

SEQ ID NO: 180338 - DNA, 13 bp, Artificial Sequence
  Oligonucleotide for detection of SNP TSC0044643
rtttacgtacaaa

SEQ ID NO: 180339 - DNA, 13 bp, Artificial Sequence
  Oligonucleotide for detection of SNP TSC0044643
gtttatgtgtaaa

SEQ ID NO: 180340 - DNA, 13 bp, Artificial Sequence
  Oligonucleotide for detection of SNP TSC0044643
tttacacataaac

SEQ ID NO: 180341 - DNA, 13 bp, Artificial Sequence
  Oligonucleotide for detection of SNP TSC0044643
gtttatatgtaaa

SEQ ID NO: 180342 - DNA, 13 bp, Artificial Sequence
  Oligonucleotide for detection of SNP TSC0044643
tttacatataaac

SEQ ID NO: 180343 - DNA, 13 bp, Artificial Sequence
  Oligonucleotide for detection of SNP TSC0044643
gtttacgtgtaaa

SEQ ID NO: 180344 - DNA, 13 bp, Artificial Sequence
  Oligonucleotide for detection of SNP TSC0044643
tttacacgtaaac

SEQ ID NO: 180345 - DNA, 13 bp, Artificial Sequence
  Oligonucleotide for detection of SNP TSC0044644
agtagggaagaag

SEQ ID NO: 180346 - DNA, 13 bp, Artificial Sequence
  Oligonucleotide for detection of SNP TSC0044644
cttcttccctact

SEQ ID NO: 180347 - DNA, 13 bp, Artificial Sequence
  Oligonucleotide for detection of SNP TSC0044644
agtaggaaagaag

SEQ ID NO: 180348 - DNA, 13 bp, Artificial Sequence
  Oligonucleotide for detection of SNP TSC0044644
cttctttcctact

SEQ ID NO: 180349 - DNA, 13 bp, Artificial Sequence
  Oligonucleotide for detection of SNP TSC0044645
ttgtatttgtaga

SEQ ID NO: 180350 - DNA, 13 bp, Artificial Sequence
  Oligonucleotide for detection of SNP TSC0044645
tctacaaatacaa

SEQ ID NO: 180351 - DNA, 13 bp, Artificial Sequence
  Oligonucleotide for detection of SNP TSC0044645
ttgtatgtgtaga

SEQ ID NO: 180352 - DNA, 13 bp, Artificial Sequence
  Oligonucleotide for detection of SNP TSC0044645
tctacacatacaa

SEQ ID NO: 180353 - DNA, 13 bp, Artificial Sequence
  Oligonucleotide for detection of SNP TSC0044645
tttgtagatgtaa

SEQ ID NO: 180354 - DNA, 13 bp, Artificial Sequence
  Oligonucleotide for detection of SNP TSC0044645
ttacatctacaaa

SEQ ID NO: 180355 - DNA, 13 bp, Artificial Sequence
  Oligonucleotide for detection of SNP TSC0044645
tttgtatatgtaa

SEQ ID NO: 180356 - DNA, 13 bp, Artificial Sequence
  Oligonucleotide for detection of SNP TSC0044645
ttacatatacaaa

SEQ ID NO: 180357 - DNA, 13 bp, Artificial Sequence
  Oligonucleotide for detection of SNP TSC0044648
gaatagtgagtag

SEQ ID NO: 180358 - DNA, 13 bp, Artificial Sequence
  Oligonucleotide for detection of SNP TSC0044648
ctactcactattc

SEQ ID NO: 180359 - DNA, 13 bp, Artificial Sequence
  Oligonucleotide for detection of SNP TSC0044648
gaatagcgagtag

SEQ ID NO: 180360 - DNA, 13 bp, Artificial Sequence
  Oligonucleotide for detection of SNP TSC0044648
ctactcgctattc

SEQ ID NO: 180361 - DNA, 13 bp, Artificial Sequence
  Oligonucleotide for detection of SNP TSC0044648
ttgttcgttatty

SEQ ID NO: 180362 - DNA, 13 bp, Artificial Sequence
  Oligonucleotide for detection of SNP TSC0044648
raataacgaacaa

SEQ ID NO: 180363 - DNA, 13 bp, Artificial Sequence
  Oligonucleotide for detection of SNP TSC0044650
ataaattataaaa

SEQ ID NO: 180364 - DNA, 13 bp, Artificial Sequence
  Oligonucleotide for detection of SNP TSC0044650
ttttataatttat

SEQ ID NO: 180365 - DNA, 13 bp, Artificial Sequence
  Oligonucleotide for detection of SNP TSC0044650
ataaatgataaaa

SEQ ID NO: 180366 - DNA, 13 bp, Artificial Sequence
  Oligonucleotide for detection of SNP TSC0044650
ttttatcatttat

SEQ ID NO: 180367 - DNA, 13 bp, Artificial Sequence
  Oligonucleotide for detection of SNP TSC0044650
ttttatgatttat

SEQ ID NO: 180368 - DNA, 13 bp, Artificial Sequence
  Oligonucleotide for detection of SNP TSC0044650
ataaatcataaaa

SEQ ID NO: 180369 - DNA, 13 bp, Artificial Sequence
  Oligonucleotide for detection of SNP TSC0044650
ttttattatttat

SEQ ID NO: 180370 - DNA, 13 bp, Artificial Sequence
  Oligonucleotide for detection of SNP TSC0044650
ataaataataaaa

SEQ ID NO: 180371 - DNA, 13 bp, Artificial Sequence
  Oligonucleotide for detection of SNP TSC0044651
tattggaagtttt

SEQ ID NO: 180372 - DNA, 13 bp, Artificial Sequence
  Oligonucleotide for detection of SNP TSC0044651
aaaacttccaata

SEQ ID NO: 180373 - DNA, 13 bp, Artificial Sequence
  Oligonucleotide for detection of SNP TSC0044651
tattgggagtttt

SEQ ID NO: 180374 - DNA, 13 bp, Artificial Sequence
  Oligonucleotide for detection of SNP TSC0044651
aaaactcccaata

SEQ ID NO: 180375 - DNA, 13 bp, Artificial Sequence
  Oligonucleotide for detection of SNP TSC0007719
ataagtaaattgy

SEQ ID NO: 180376 - DNA, 13 bp, Artificial Sequence
  Oligonucleotide for detection of SNP TSC0007719
rcaatttacttat

SEQ ID NO: 180377 - DNA, 13 bp, Artificial Sequence
  Oligonucleotide for detection of SNP TSC0007719
ataagtgaattgy

SEQ ID NO: 180378 - DNA, 13 bp, Artificial Sequence
  Oligonucleotide for detection of SNP TSC0007719
rcaattcacttat

SEQ ID NO: 180379 - DNA, 13 bp, Artificial Sequence
  Oligonucleotide for detection of SNP TSC0006700
taggggtttgggg

SEQ ID NO: 180380 - DNA, 13 bp, Artificial Sequence
  Oligonucleotide for detection of SNP TSC0006700
ccccaaaccccta

SEQ ID NO: 180381 - DNA, 13 bp, Artificial Sequence
  Oligonucleotide for detection of SNP TSC0006700
tagggggttgggg

SEQ ID NO: 180382 - DNA, 13 bp, Artificial Sequence
  Oligonucleotide for detection of SNP TSC0006700
ccccaacccccta

SEQ ID NO: 180383 - DNA, 13 bp, Artificial Sequence
  Oligonucleotide for detection of SNP TSC0044653
gagtagaaagtat

SEQ ID NO: 180384 - DNA, 13 bp, Artificial Sequence
  Oligonucleotide for detection of SNP TSC0044653
atactttctactc

SEQ ID NO: 180385 - DNA, 13 bp, Artificial Sequence
  Oligonucleotide for detection of SNP TSC0044653
gagtaggaagtat

SEQ ID NO: 180386 - DNA, 13 bp, Artificial Sequence
  Oligonucleotide for detection of SNP TSC0044653
atacttcctactc

SEQ ID NO: 180387 - DNA, 13 bp, Artificial Sequence
  Oligonucleotide for detection of SNP TSC0044654
tttgtgtgtgttt

SEQ ID NO: 180388 - DNA, 13 bp, Artificial Sequence
  Oligonucleotide for detection of SNP TSC0044654
aaacacacacaaa

SEQ ID NO: 180389 - DNA, 13 bp, Artificial Sequence
  Oligonucleotide for detection of SNP TSC0044654
tttgtgggtgttt

SEQ ID NO: 180390 - DNA, 13 bp, Artificial Sequence
  Oligonucleotide for detection of SNP TSC0044654
aaacacccacaaa

SEQ ID NO: 180391 - DNA, 13 bp, Artificial Sequence
  Oligonucleotide for detection of SNP TSC0044654
aaatatttataaa

SEQ ID NO: 180392 - DNA, 13 bp, Artificial Sequence
  Oligonucleotide for detection of SNP TSC0044654
tttataaatattt

SEQ ID NO: 180393 - DNA, 13 bp, Artificial Sequence
  Oligonucleotide for detection of SNP TSC0044657
taaatttggtaag

SEQ ID NO: 180394 - DNA, 13 bp, Artificial Sequence
  Oligonucleotide for detection of SNP TSC0044657
cttaccaaattta

SEQ ID NO: 180395 - DNA, 13 bp, Artificial Sequence
  Oligonucleotide for detection of SNP TSC0044657
taaattcggtaag

SEQ ID NO: 180396 - DNA, 13 bp, Artificial Sequence
  Oligonucleotide for detection of SNP TSC0044657
cttaccgaattta

SEQ ID NO: 180397 - DNA, 13 bp, Artificial Sequence
  Oligonucleotide for detection of SNP TSC0044657
tttattgggttta

SEQ ID NO: 180398 - DNA, 13 bp, Artificial Sequence
  Oligonucleotide for detection of SNP TSC0044657
taaacccaataaa

SEQ ID NO: 180399 - DNA, 13 bp, Artificial Sequence
  Oligonucleotide for detection of SNP TSC0044657
tttattaggttta

SEQ ID NO: 180400 - DNA, 13 bp, Artificial Sequence
  Oligonucleotide for detection of SNP TSC0044657
taaacctaataaa

SEQ ID NO: 180401 - DNA, 13 bp, Artificial Sequence
  Oligonucleotide for detection of SNP TSC0044657
tttatcgggttta

SEQ ID NO: 180402 - DNA, 13 bp, Artificial Sequence
  Oligonucleotide for detection of SNP TSC0044657
taaacccgataaa

SEQ ID NO: 180403 - DNA, 13 bp, Artificial Sequence
  Oligonucleotide for detection of SNP TSC0044658
ggtttttgttgga

SEQ ID NO: 180404 - DNA, 13 bp, Artificial Sequence
  Oligonucleotide for detection of SNP TSC0044658
tccaacaaaaacc

SEQ ID NO: 180405 - DNA, 13 bp, Artificial Sequence
  Oligonucleotide for detection of SNP TSC0044658
ggttttcgttgga

SEQ ID NO: 180406 - DNA, 13 bp, Artificial Sequence
  Oligonucleotide for detection of SNP TSC0044658
tccaacgaaaacc

SEQ ID NO: 180407 - DNA, 13 bp, Artificial Sequence
  Oligonucleotide for detection of SNP TSC0044658
tttaataagaaty

SEQ ID NO: 180408 - DNA, 13 bp, Artificial Sequence
  Oligonucleotide for detection of SNP TSC0044658
rattcttattaaa

SEQ ID NO: 180409 - DNA, 13 bp, Artificial Sequence
  Oligonucleotide for detection of SNP TSC0044660
gtaaggattttgg

SEQ ID NO: 180410 - DNA, 13 bp, Artificial Sequence
  Oligonucleotide for detection of SNP TSC0044660
ccaaaatccttac

SEQ ID NO: 180411 - DNA, 13 bp, Artificial Sequence
  Oligonucleotide for detection of SNP TSC0044660
gtaagggttttgg

SEQ ID NO: 180412 - DNA, 13 bp, Artificial Sequence
  Oligonucleotide for detection of SNP TSC0044660
ccaaaacccttac

SEQ ID NO: 180413 - DNA, 13 bp, Artificial Sequence
  Oligonucleotide for detection of SNP TSC0044661
tgatggtgaaggg

SEQ ID NO: 180414 - DNA, 13 bp, Artificial Sequence
  Oligonucleotide for detection of SNP TSC0044661
cccttcaccatca

SEQ ID NO: 180415 - DNA, 13 bp, Artificial Sequence
  Oligonucleotide for detection of SNP TSC0044661
tgatggcgaaggg

SEQ ID NO: 180416 - DNA, 13 bp, Artificial Sequence
  Oligonucleotide for detection of SNP TSC0044661
cccttcgccatca

SEQ ID NO: 180417 - DNA, 13 bp, Artificial Sequence
  Oligonucleotide for detection of SNP TSC0007140
tttaatgtatgtg

SEQ ID NO: 180418 - DNA, 13 bp, Artificial Sequence
  Oligonucleotide for detection of SNP TSC0007140
cacatacattaaa

SEQ ID NO: 180419 - DNA, 13 bp, Artificial Sequence
  Oligonucleotide for detection of SNP TSC0007140
tttaatatatgtg

SEQ ID NO: 180420 - DNA, 13 bp, Artificial Sequence
  Oligonucleotide for detection of SNP TSC0007140
cacatatattaaa

SEQ ID NO: 180421 - DNA, 13 bp, Artificial Sequence
  Oligonucleotide for detection of SNP TSC0044666
tgttttatgttta

SEQ ID NO: 180422 - DNA, 13 bp, Artificial Sequence
  Oligonucleotide for detection of SNP TSC0044666
taaacataaaaca

SEQ ID NO: 180423 - DNA, 13 bp, Artificial Sequence
  Oligonucleotide for detection of SNP TSC0044666
tgttttgtgttta

SEQ ID NO: 180424 - DNA, 13 bp, Artificial Sequence
  Oligonucleotide for detection of SNP TSC0044666
taaacacaaaaca

SEQ ID NO: 180425 - DNA, 13 bp, Artificial Sequence
  Oligonucleotide for detection of SNP TSC0044666
tgtttcgtgttta

SEQ ID NO: 180426 - DNA, 13 bp, Artificial Sequence
  Oligonucleotide for detection of SNP TSC0044666
taaacacgaaaca

SEQ ID NO: 180427 - DNA, 13 bp, Artificial Sequence
  Oligonucleotide for detection of SNP TSC0044666
taggtatggggta

SEQ ID NO: 180428 - DNA, 13 bp, Artificial Sequence
  Oligonucleotide for detection of SNP TSC0044666
taccccataccta

SEQ ID NO: 180429 - DNA, 13 bp, Artificial Sequence
  Oligonucleotide for detection of SNP TSC0044666
taggtacggggta

SEQ ID NO: 180430 - DNA, 13 bp, Artificial Sequence
  Oligonucleotide for detection of SNP TSC0044666
taccccgtaccta

SEQ ID NO: 180431 - DNA, 13 bp, Artificial Sequence
  Oligonucleotide for detection of SNP TSC0044667
aaaagggtttaaa

SEQ ID NO: 180432 - DNA, 13 bp, Artificial Sequence
  Oligonucleotide for detection of SNP TSC0044667
tttaaaccctttt

SEQ ID NO: 180433 - DNA, 13 bp, Artificial Sequence
  Oligonucleotide for detection of SNP TSC0044667
aaaaggatttaaa

SEQ ID NO: 180434 - DNA, 13 bp, Artificial Sequence
  Oligonucleotide for detection of SNP TSC0044667
tttaaatcctttt

SEQ ID NO: 180435 - DNA, 13 bp, Artificial Sequence
  Oligonucleotide for detection of SNP TSC0044669
ataaaagagaaty

SEQ ID NO: 180436 - DNA, 13 bp, Artificial Sequence
  Oligonucleotide for detection of SNP TSC0044669
rattctcttttat

SEQ ID NO: 180437 - DNA, 13 bp, Artificial Sequence
  Oligonucleotide for detection of SNP TSC0044669
ataaaatagaaty

SEQ ID NO: 180438 - DNA, 13 bp, Artificial Sequence
  Oligonucleotide for detection of SNP TSC0044669
rattctattttat

SEQ ID NO: 180439 - DNA, 13 bp, Artificial Sequence
  Oligonucleotide for detection of SNP TSC0044671
taaatatgaaagt

SEQ ID NO: 180440 - DNA, 13 bp, Artificial Sequence
  Oligonucleotide for detection of SNP TSC0044671
actttcatattta

SEQ ID NO: 180441 - DNA, 13 bp, Artificial Sequence
  Oligonucleotide for detection of SNP TSC0044671
taaatacgaaagt

SEQ ID NO: 180442 - DNA, 13 bp, Artificial Sequence
  Oligonucleotide for detection of SNP TSC0044671
actttcgtattta

SEQ ID NO: 180443 - DNA, 13 bp, Artificial Sequence
  Oligonucleotide for detection of SNP TSC0044671
atttttatgttta

SEQ ID NO: 180444 - DNA, 13 bp, Artificial Sequence
  Oligonucleotide for detection of SNP TSC0044671
taaacataaaaat

SEQ ID NO: 180445 - DNA, 13 bp, Artificial Sequence
  Oligonucleotide for detection of SNP TSC0044671
attttcgtgttta

SEQ ID NO: 180446 - DNA, 13 bp, Artificial Sequence
  Oligonucleotide for detection of SNP TSC0044671
taaacacgaaaat

SEQ ID NO: 180447 - DNA, 13 bp, Artificial Sequence
  Oligonucleotide for detection of SNP TSC0044673
ttatatgtttaaa

SEQ ID NO: 180448 - DNA, 13 bp, Artificial Sequence
  Oligonucleotide for detection of SNP TSC0044673
tttaaacatataa

SEQ ID NO: 180449 - DNA, 13 bp, Artificial Sequence
  Oligonucleotide for detection of SNP TSC0044673
ttatatatttaaa

SEQ ID NO: 180450 - DNA, 13 bp, Artificial Sequence
  Oligonucleotide for detection of SNP TSC0044673
tttaaatatataa

SEQ ID NO: 180451 - DNA, 13 bp, Artificial Sequence
  Oligonucleotide for detection of SNP TSC0044674
tatgaatgtggag

SEQ ID NO: 180452 - DNA, 13 bp, Artificial Sequence
  Oligonucleotide for detection of SNP TSC0044674
ctccacattcata

SEQ ID NO: 180453 - DNA, 13 bp, Artificial Sequence
  Oligonucleotide for detection of SNP TSC0044674
tatgaacgtggag

SEQ ID NO: 180454 - DNA, 13 bp, Artificial Sequence
  Oligonucleotide for detection of SNP TSC0044674
ctccacgttcata

SEQ ID NO: 180455 - DNA, 13 bp, Artificial Sequence
  Oligonucleotide for detection of SNP TSC0044675
ttgattatatttt

SEQ ID NO: 180456 - DNA, 13 bp, Artificial Sequence
  Oligonucleotide for detection of SNP TSC0044675
aaaatataatcaa

SEQ ID NO: 180457 - DNA, 13 bp, Artificial Sequence
  Oligonucleotide for detection of SNP TSC0044675
ttgattgtatttt

SEQ ID NO: 180458 - DNA, 13 bp, Artificial Sequence
  Oligonucleotide for detection of SNP TSC0044675
aaaatacaatcaa

SEQ ID NO: 180459 - DNA, 13 bp, Artificial Sequence
  Oligonucleotide for detection of SNP TSC0006396
taaaaatgtttta

SEQ ID NO: 180460 - DNA, 13 bp, Artificial Sequence
  Oligonucleotide for detection of SNP TSC0006396
taaaacattttta

SEQ ID NO: 180461 - DNA, 13 bp, Artificial Sequence
  Oligonucleotide for detection of SNP TSC0044676
tgtttatatatat

SEQ ID NO: 180462 - DNA, 13 bp, Artificial Sequence
  Oligonucleotide for detection of SNP TSC0044676
atatatataaaca

SEQ ID NO: 180463 - DNA, 13 bp, Artificial Sequence
  Oligonucleotide for detection of SNP TSC0044676
tgtttagatatat

SEQ ID NO: 180464 - DNA, 13 bp, Artificial Sequence
  Oligonucleotide for detection of SNP TSC0044676
atatatctaaaca

SEQ ID NO: 180465 - DNA, 13 bp, Artificial Sequence
  Oligonucleotide for detection of SNP TSC0044676
atgtatgtaggta

SEQ ID NO: 180466 - DNA, 13 bp, Artificial Sequence
  Oligonucleotide for detection of SNP TSC0044676
tacctacatacat

SEQ ID NO: 180467 - DNA, 13 bp, Artificial Sequence
  Oligonucleotide for detection of SNP TSC0044676
atgtatttaggta

SEQ ID NO: 180468 - DNA, 13 bp, Artificial Sequence
  Oligonucleotide for detection of SNP TSC0044676
tacctaaatacat

SEQ ID NO: 180469 - DNA, 13 bp, Artificial Sequence
  Oligonucleotide for detection of SNP TSC0044677
taaaaaagtttta

SEQ ID NO: 180470 - DNA, 13 bp, Artificial Sequence
  Oligonucleotide for detection of SNP TSC0044677
taaaactttttta

SEQ ID NO: 180471 - DNA, 13 bp, Artificial Sequence
  Oligonucleotide for detection of SNP TSC0044677
taaaaaggtttta

SEQ ID NO: 180472 - DNA, 13 bp, Artificial Sequence
  Oligonucleotide for detection of SNP TSC0044677
taaaaccttttta

SEQ ID NO: 180473 - DNA, 13 bp, Artificial Sequence
  Oligonucleotide for detection of SNP TSC0044678
ataaaatggtata

SEQ ID NO: 180474 - DNA, 13 bp, Artificial Sequence
  Oligonucleotide for detection of SNP TSC0044678
tataccattttat

SEQ ID NO: 180475 - DNA, 13 bp, Artificial Sequence
  Oligonucleotide for detection of SNP TSC0044678
ataaaacggtata

SEQ ID NO: 180476 - DNA, 13 bp, Artificial Sequence
  Oligonucleotide for detection of SNP TSC0044678
tataccgttttat

SEQ ID NO: 180477 - DNA, 13 bp, Artificial Sequence
  Oligonucleotide for detection of SNP TSC0044679
gtaagatttgttt

SEQ ID NO: 180478 - DNA, 13 bp, Artificial Sequence
  Oligonucleotide for detection of SNP TSC0044679
aaacaaatcttac

SEQ ID NO: 180479 - DNA, 13 bp, Artificial Sequence
  Oligonucleotide for detection of SNP TSC0044679
gtaagagttgttt

SEQ ID NO: 180480 - DNA, 13 bp, Artificial Sequence
  Oligonucleotide for detection of SNP TSC0044679
aaacaactcttac

SEQ ID NO: 180481 - DNA, 13 bp, Artificial Sequence
  Oligonucleotide for detection of SNP TSC0044679
aggtaaattttay

SEQ ID NO: 180482 - DNA, 13 bp, Artificial Sequence
  Oligonucleotide for detection of SNP TSC0044679
rtaaaatttacct

SEQ ID NO: 180483 - DNA, 13 bp, Artificial Sequence
  Oligonucleotide for detection of SNP TSC0044679
aggtaatttttay

SEQ ID NO: 180484 - DNA, 13 bp, Artificial Sequence
  Oligonucleotide for detection of SNP TSC0044679
rtaaaaattacct

SEQ ID NO: 180485 - DNA, 13 bp, Artificial Sequence
  Oligonucleotide for detection of SNP TSC0044680
taagaggtgtttt

SEQ ID NO: 180486 - DNA, 13 bp, Artificial Sequence
  Oligonucleotide for detection of SNP TSC0044680
aaaacacctctta

SEQ ID NO: 180487 - DNA, 13 bp, Artificial Sequence
  Oligonucleotide for detection of SNP TSC0044680
aaggtaattttta

SEQ ID NO: 180488 - DNA, 13 bp, Artificial Sequence
  Oligonucleotide for detection of SNP TSC0044680
taaaaattacctt

SEQ ID NO: 180489 - DNA, 13 bp, Artificial Sequence
  Oligonucleotide for detection of SNP TSC0044680
aaggtatttttta

SEQ ID NO: 180490 - DNA, 13 bp, Artificial Sequence
  Oligonucleotide for detection of SNP TSC0044680
taaaaaatacctt

SEQ ID NO: 180491 - DNA, 13 bp, Artificial Sequence
  Oligonucleotide for detection of SNP TSC0044681
attgattttatay

SEQ ID NO: 180492 - DNA, 13 bp, Artificial Sequence
  Oligonucleotide for detection of SNP TSC0044681
rtataaaatcaat

SEQ ID NO: 180493 - DNA, 13 bp, Artificial Sequence
  Oligonucleotide for detection of SNP TSC0044681
attgatgttatay

SEQ ID NO: 180494 - DNA, 13 bp, Artificial Sequence
  Oligonucleotide for detection of SNP TSC0044681
rtataacatcaat

SEQ ID NO: 180495 - DNA, 13 bp, Artificial Sequence
  Oligonucleotide for detection of SNP TSC0044681
gtgtggaattaat

SEQ ID NO: 180496 - DNA, 13 bp, Artificial Sequence
  Oligonucleotide for detection of SNP TSC0044681
attaattccacac

SEQ ID NO: 180497 - DNA, 13 bp, Artificial Sequence
  Oligonucleotide for detection of SNP TSC0044681
gtgtggtattaat

SEQ ID NO: 180498 - DNA, 13 bp, Artificial Sequence
  Oligonucleotide for detection of SNP TSC0044681
attaataccacac

SEQ ID NO: 180499 - DNA, 13 bp, Artificial Sequence
  Oligonucleotide for detection of SNP TSC0006822
atttataattaay

SEQ ID NO: 180500 - DNA, 13 bp, Artificial Sequence
  Oligonucleotide for detection of SNP TSC0006822
rttaattataaat

SEQ ID NO: 180501 - DNA, 13 bp, Artificial Sequence
  Oligonucleotide for detection of SNP TSC0006822
atttattattaay

SEQ ID NO: 180502 - DNA, 13 bp, Artificial Sequence
  Oligonucleotide for detection of SNP TSC0006822
rttaataataaat

SEQ ID NO: 180503 - DNA, 13 bp, Artificial Sequence
  Oligonucleotide for detection of SNP TSC0006822
gttagttatagat

SEQ ID NO: 180504 - DNA, 13 bp, Artificial Sequence
  Oligonucleotide for detection of SNP TSC0006822
atctataactaac

SEQ ID NO: 180505 - DNA, 13 bp, Artificial Sequence
  Oligonucleotide for detection of SNP TSC0006822
gttagtgatagat

SEQ ID NO: 180506 - DNA, 13 bp, Artificial Sequence
  Oligonucleotide for detection of SNP TSC0006822
atctatcactaac

SEQ ID NO: 180507 - DNA, 13 bp, Artificial Sequence
  Oligonucleotide for detection of SNP TSC0007729
tttgagttagaat

SEQ ID NO: 180508 - DNA, 13 bp, Artificial Sequence
  Oligonucleotide for detection of SNP TSC0007729
attctaactcaaa

SEQ ID NO: 180509 - DNA, 13 bp, Artificial Sequence
  Oligonucleotide for detection of SNP TSC0007729
tttgagatagaat

SEQ ID NO: 180510 - DNA, 13 bp, Artificial Sequence
  Oligonucleotide for detection of SNP TSC0007729
attctatctcaaa

SEQ ID NO: 180511 - DNA, 13 bp, Artificial Sequence
  Oligonucleotide for detection of SNP TSC0044682
agtagggtagtgt

SEQ ID NO: 180512 - DNA, 13 bp, Artificial Sequence
  Oligonucleotide for detection of SNP TSC0044682
acactaccctact

SEQ ID NO: 180513 - DNA, 13 bp, Artificial Sequence
  Oligonucleotide for detection of SNP TSC0044682
agtaggatagtgt

SEQ ID NO: 180514 - DNA, 13 bp, Artificial Sequence
  Oligonucleotide for detection of SNP TSC0044682
acactatcctact

SEQ ID NO: 180515 - DNA, 13 bp, Artificial Sequence
  Oligonucleotide for detection of SNP TSC0044683
taatttttaggta

SEQ ID NO: 180516 - DNA, 13 bp, Artificial Sequence
  Oligonucleotide for detection of SNP TSC0044683
tacctaaaaatta

SEQ ID NO: 180517 - DNA, 13 bp, Artificial Sequence
  Oligonucleotide for detection of SNP TSC0044683
taatttgtaggta

SEQ ID NO: 180518 - DNA, 13 bp, Artificial Sequence
  Oligonucleotide for detection of SNP TSC0044683
tacctacaaatta

SEQ ID NO: 180519 - DNA, 13 bp, Artificial Sequence
  Oligonucleotide for detection of SNP TSC0044683
tgtttgaaggttg

SEQ ID NO: 180520 - DNA, 13 bp, Artificial Sequence
  Oligonucleotide for detection of SNP TSC0044683
caaccttcaaaca

SEQ ID NO: 180521 - DNA, 13 bp, Artificial Sequence
  Oligonucleotide for detection of SNP TSC0044683
tgtttgtaggttg

SEQ ID NO: 180522 - DNA, 13 bp, Artificial Sequence
  Oligonucleotide for detection of SNP TSC0044683
caacctacaaaca

SEQ ID NO: 180523 - DNA, 13 bp, Artificial Sequence
  Oligonucleotide for detection of SNP TSC0044685
tagagggagataa

SEQ ID NO: 180524 - DNA, 13 bp, Artificial Sequence
  Oligonucleotide for detection of SNP TSC0044685
ttatctccctcta

SEQ ID NO: 180525 - DNA, 13 bp, Artificial Sequence
  Oligonucleotide for detection of SNP TSC0044685
tagaggaagataa

SEQ ID NO: 180526 - DNA, 13 bp, Artificial Sequence
  Oligonucleotide for detection of SNP TSC0044685
ttatcttcctcta

SEQ ID NO: 180527 - DNA, 13 bp, Artificial Sequence
  Oligonucleotide for detection of SNP TSC0044686
aaattaagagagy

SEQ ID NO: 180528 - DNA, 13 bp, Artificial Sequence
  Oligonucleotide for detection of SNP TSC0044686
rctctcttaattt

SEQ ID NO: 180529 - DNA, 13 bp, Artificial Sequence
  Oligonucleotide for detection of SNP TSC0044686
aaattaggagagy

SEQ ID NO: 180530 - DNA, 13 bp, Artificial Sequence
  Oligonucleotide for detection of SNP TSC0044686
rctctcctaattt

SEQ ID NO: 180531 - DNA, 13 bp, Artificial Sequence
  Oligonucleotide for detection of SNP TSC0044687
tagtaatgaaaga

SEQ ID NO: 180532 - DNA, 13 bp, Artificial Sequence
  Oligonucleotide for detection of SNP TSC0044687
tctttcattacta

SEQ ID NO: 180533 - DNA, 13 bp, Artificial Sequence
  Oligonucleotide for detection of SNP TSC0044687
tagtaacgaaaga

SEQ ID NO: 180534 - DNA, 13 bp, Artificial Sequence
  Oligonucleotide for detection of SNP TSC0044687
tctttcgttacta

SEQ ID NO: 180535 - DNA, 13 bp, Artificial Sequence
  Oligonucleotide for detection of SNP TSC0044688
atagtaaaattaa

SEQ ID NO: 180536 - DNA, 13 bp, Artificial Sequence
  Oligonucleotide for detection of SNP TSC0044688
ttaattttactat

SEQ ID NO: 180537 - DNA, 13 bp, Artificial Sequence
  Oligonucleotide for detection of SNP TSC0044688
atagtataattaa

SEQ ID NO: 180538 - DNA, 13 bp, Artificial Sequence
  Oligonucleotide for detection of SNP TSC0044688
ttaattatactat

SEQ ID NO: 180539 - DNA, 13 bp, Artificial Sequence
  Oligonucleotide for detection of SNP TSC0044688
ttgattttattat

SEQ ID NO: 180540 - DNA, 13 bp, Artificial Sequence
  Oligonucleotide for detection of SNP TSC0044688
ataataaaatcaa

SEQ ID NO: 180541 - DNA, 13 bp, Artificial Sequence
  Oligonucleotide for detection of SNP TSC0044688
ttgattgtattat

SEQ ID NO: 180542 - DNA, 13 bp, Artificial Sequence
  Oligonucleotide for detection of SNP TSC0044688
ataatacaatcaa

SEQ ID NO: 180543 - DNA, 13 bp, Artificial Sequence
  Oligonucleotide for detection of SNP TSC0005493
gaggagaagtggg

SEQ ID NO: 180544 - DNA, 13 bp, Artificial Sequence
  Oligonucleotide for detection of SNP TSC0005493
cccacttctcctc

SEQ ID NO: 180545 - DNA, 13 bp, Artificial Sequence
  Oligonucleotide for detection of SNP TSC0005493
gaggaggagtggg

SEQ ID NO: 180546 - DNA, 13 bp, Artificial Sequence
  Oligonucleotide for detection of SNP TSC0005493
cccactcctcctc

SEQ ID NO: 180547 - DNA, 13 bp, Artificial Sequence
  Oligonucleotide for detection of SNP TSC0044689
taatttatatata

SEQ ID NO: 180548 - DNA, 13 bp, Artificial Sequence
  Oligonucleotide for detection of SNP TSC0044689
tatatataaatta

SEQ ID NO: 180549 - DNA, 13 bp, Artificial Sequence
  Oligonucleotide for detection of SNP TSC0044689
taatttgtatata

SEQ ID NO: 180550 - DNA, 13 bp, Artificial Sequence
  Oligonucleotide for detection of SNP TSC0044689
tatatacaaatta

SEQ ID NO: 180551 - DNA, 13 bp, Artificial Sequence
  Oligonucleotide for detection of SNP TSC0044690
gggtttaagaaga

SEQ ID NO: 180552 - DNA, 13 bp, Artificial Sequence
  Oligonucleotide for detection of SNP TSC0044690
tcttcttaaaccc

SEQ ID NO: 180553 - DNA, 13 bp, Artificial Sequence
  Oligonucleotide for detection of SNP TSC0044690
gggtttgagaaga

SEQ ID NO: 180554 - DNA, 13 bp, Artificial Sequence
  Oligonucleotide for detection of SNP TSC0044690
tcttctcaaaccc

SEQ ID NO: 180555 - DNA, 13 bp, Artificial Sequence
  Oligonucleotide for detection of SNP TSC0044691
agataatgggttt

SEQ ID NO: 180556 - DNA, 13 bp, Artificial Sequence
  Oligonucleotide for detection of SNP TSC0044691
aaacccattatct

SEQ ID NO: 180557 - DNA, 13 bp, Artificial Sequence
  Oligonucleotide for detection of SNP TSC0044691
agataacgggttt

SEQ ID NO: 180558 - DNA, 13 bp, Artificial Sequence
  Oligonucleotide for detection of SNP TSC0044691
aaacccgttatct

SEQ ID NO: 180559 - DNA, 13 bp, Artificial Sequence
  Oligonucleotide for detection of SNP TSC0044693
ttttagttagggg

SEQ ID NO: 180560 - DNA, 13 bp, Artificial Sequence
  Oligonucleotide for detection of SNP TSC0044693
cccctaactaaaa

SEQ ID NO: 180561 - DNA, 13 bp, Artificial Sequence
  Oligonucleotide for detection of SNP TSC0044693
ttttaggtagggg

SEQ ID NO: 180562 - DNA, 13 bp, Artificial Sequence
  Oligonucleotide for detection of SNP TSC0044693
cccctacctaaaa

SEQ ID NO: 180563 - DNA, 13 bp, Artificial Sequence
  Oligonucleotide for detection of SNP TSC0044693
tttttgattggaa

SEQ ID NO: 180564 - DNA, 13 bp, Artificial Sequence
  Oligonucleotide for detection of SNP TSC0044693
ttccaatcaaaaa

SEQ ID NO: 180565 - DNA, 13 bp, Artificial Sequence
  Oligonucleotide for detection of SNP TSC0044693
tttttgtttggaa

SEQ ID NO: 180566 - DNA, 13 bp, Artificial Sequence
  Oligonucleotide for detection of SNP TSC0044693
ttccaaacaaaaa

SEQ ID NO: 180567 - DNA, 13 bp, Artificial Sequence
  Oligonucleotide for detection of SNP TSC0044694
aatagaattgaaa

SEQ ID NO: 180568 - DNA, 13 bp, Artificial Sequence
  Oligonucleotide for detection of SNP TSC0044694
tttcaattctatt

SEQ ID NO: 180569 - DNA, 13 bp, Artificial Sequence
  Oligonucleotide for detection of SNP TSC0044694
aatagagttgaaa

SEQ ID NO: 180570 - DNA, 13 bp, Artificial Sequence
  Oligonucleotide for detection of SNP TSC0044694
tttcaactctatt

SEQ ID NO: 180571 - DNA, 13 bp, Artificial Sequence
  Oligonucleotide for detection of SNP TSC0044695
gagggaattttat

SEQ ID NO: 180572 - DNA, 13 bp, Artificial Sequence
  Oligonucleotide for detection of SNP TSC0044695
ataaaattccctc

SEQ ID NO: 180573 - DNA, 13 bp, Artificial Sequence
  Oligonucleotide for detection of SNP TSC0044695
gagggagttttat

SEQ ID NO: 180574 - DNA, 13 bp, Artificial Sequence
  Oligonucleotide for detection of SNP TSC0044695
ataaaactccctc

SEQ ID NO: 180575 - DNA, 13 bp, Artificial Sequence
  Oligonucleotide for detection of SNP TSC0044696
ttttatttgatat

SEQ ID NO: 180576 - DNA, 13 bp, Artificial Sequence
  Oligonucleotide for detection of SNP TSC0044696
atatcaaataaaa

SEQ ID NO: 180577 - DNA, 13 bp, Artificial Sequence
  Oligonucleotide for detection of SNP TSC0044696
ttttatgtgatat

SEQ ID NO: 180578 - DNA, 13 bp, Artificial Sequence
  Oligonucleotide for detection of SNP TSC0044696
atatcacataaaa

SEQ ID NO: 180579 - DNA, 13 bp, Artificial Sequence
  Oligonucleotide for detection of SNP TSC0044696
atattaaatgaag

SEQ ID NO: 180580 - DNA, 13 bp, Artificial Sequence
  Oligonucleotide for detection of SNP TSC0044696
cttcatttaatat

SEQ ID NO: 180581 - DNA, 13 bp, Artificial Sequence
  Oligonucleotide for detection of SNP TSC0044696
atattatatgaag

SEQ ID NO: 180582 - DNA, 13 bp, Artificial Sequence
  Oligonucleotide for detection of SNP TSC0044696
cttcatataatat

SEQ ID NO: 180583 - DNA, 13 bp, Artificial Sequence
  Oligonucleotide for detection of SNP TSC0044697
ggagtagaattat

SEQ ID NO: 180584 - DNA, 13 bp, Artificial Sequence
  Oligonucleotide for detection of SNP TSC0044697
ataattctactcc

SEQ ID NO: 180585 - DNA, 13 bp, Artificial Sequence
  Oligonucleotide for detection of SNP TSC0044697
ggagtaaaattat

SEQ ID NO: 180586 - DNA, 13 bp, Artificial Sequence
  Oligonucleotide for detection of SNP TSC0044697
ataattttactcc

SEQ ID NO: 180587 - DNA, 13 bp, Artificial Sequence
  Oligonucleotide for detection of SNP TSC0044698
ttatgttgagtaa

SEQ ID NO: 180588 - DNA, 13 bp, Artificial Sequence
  Oligonucleotide for detection of SNP TSC0044698
ttactcaacataa

SEQ ID NO: 180589 - DNA, 13 bp, Artificial Sequence
  Oligonucleotide for detection of SNP TSC0044698
ttatgtggagtaa

SEQ ID NO: 180590 - DNA, 13 bp, Artificial Sequence
  Oligonucleotide for detection of SNP TSC0044698
ttactccacataa

SEQ ID NO: 180591 - DNA, 13 bp, Artificial Sequence
  Oligonucleotide for detection of SNP TSC0044698
ttatttaatatag

SEQ ID NO: 180592 - DNA, 13 bp, Artificial Sequence
  Oligonucleotide for detection of SNP TSC0044698
ctatattaaataa

SEQ ID NO: 180593 - DNA, 13 bp, Artificial Sequence
  Oligonucleotide for detection of SNP TSC0044698
ttattttatatag

SEQ ID NO: 180594 - DNA, 13 bp, Artificial Sequence
  Oligonucleotide for detection of SNP TSC0044698
ctatataaaataa

SEQ ID NO: 180595 - DNA, 13 bp, Artificial Sequence
  Oligonucleotide for detection of SNP TSC0044699
tttttatagttaa

SEQ ID NO: 180596 - DNA, 13 bp, Artificial Sequence
  Oligonucleotide for detection of SNP TSC0044699
ttaactataaaaa

SEQ ID NO: 180597 - DNA, 13 bp, Artificial Sequence
  Oligonucleotide for detection of SNP TSC0044699
tttttagagttaa

SEQ ID NO: 180598 - DNA, 13 bp, Artificial Sequence
  Oligonucleotide for detection of SNP TSC0044699
ttaactctaaaaa

SEQ ID NO: 180599 - DNA, 13 bp, Artificial Sequence
  Oligonucleotide for detection of SNP TSC0044699
ttagttatggaaa

SEQ ID NO: 180600 - DNA, 13 bp, Artificial Sequence
  Oligonucleotide for detection of SNP TSC0044699
tttccataactaa

SEQ ID NO: 180601 - DNA, 13 bp, Artificial Sequence
  Oligonucleotide for detection of SNP TSC0044699
ttagttttggaaa

SEQ ID NO: 180602 - DNA, 13 bp, Artificial Sequence
  Oligonucleotide for detection of SNP TSC0044699
tttccaaaactaa

SEQ ID NO: 180603 - DNA, 13 bp, Artificial Sequence
  Oligonucleotide for detection of SNP TSC0044700
aagatatgaagag

SEQ ID NO: 180604 - DNA, 13 bp, Artificial Sequence
  Oligonucleotide for detection of SNP TSC0044700
ctcttcatatctt

SEQ ID NO: 180605 - DNA, 13 bp, Artificial Sequence
  Oligonucleotide for detection of SNP TSC0044700
aagatacgaagag

SEQ ID NO: 180606 - DNA, 13 bp, Artificial Sequence
  Oligonucleotide for detection of SNP TSC0044700
ctcttcgtatctt

SEQ ID NO: 180607 - DNA, 13 bp, Artificial Sequence
  Oligonucleotide for detection of SNP TSC0044701
agttttgtgggaa

SEQ ID NO: 180608 - DNA, 13 bp, Artificial Sequence
  Oligonucleotide for detection of SNP TSC0044701
ttcccacaaaact

SEQ ID NO: 180609 - DNA, 13 bp, Artificial Sequence
  Oligonucleotide for detection of SNP TSC0044701
agttttatgggaa

SEQ ID NO: 180610 - DNA, 13 bp, Artificial Sequence
  Oligonucleotide for detection of SNP TSC0044701
ttcccataaaact

SEQ ID NO: 180611 - DNA, 13 bp, Artificial Sequence
  Oligonucleotide for detection of SNP TSC0006727
aagaagaaggtgt

SEQ ID NO: 180612 - DNA, 13 bp, Artificial Sequence
  Oligonucleotide for detection of SNP TSC0006727
acaccttcttctt

SEQ ID NO: 180613 - DNA, 13 bp, Artificial Sequence
  Oligonucleotide for detection of SNP TSC0006727
aagaagtaggtgt

SEQ ID NO: 180614 - DNA, 13 bp, Artificial Sequence
  Oligonucleotide for detection of SNP TSC0006727
acacctacttctt

SEQ ID NO: 180615 - DNA, 13 bp, Artificial Sequence
  Oligonucleotide for detection of SNP TSC0044704
tgttaattaaaga

SEQ ID NO: 180616 - DNA, 13 bp, Artificial Sequence
  Oligonucleotide for detection of SNP TSC0044704
tctttaattaaca

SEQ ID NO: 180617 - DNA, 13 bp, Artificial Sequence
  Oligonucleotide for detection of SNP TSC0044704
tgttaagtaaaga

SEQ ID NO: 180618 - DNA, 13 bp, Artificial Sequence
  Oligonucleotide for detection of SNP TSC0044704
tctttacttaaca

SEQ ID NO: 180619 - DNA, 13 bp, Artificial Sequence
  Oligonucleotide for detection of SNP TSC0044704
tttttagttgata

SEQ ID NO: 180620 - DNA, 13 bp, Artificial Sequence
  Oligonucleotide for detection of SNP TSC0044704
tatcaactaaaaa

SEQ ID NO: 180621 - DNA, 13 bp, Artificial Sequence
  Oligonucleotide for detection of SNP TSC0044705
gtttataattaty

SEQ ID NO: 180622 - DNA, 13 bp, Artificial Sequence
  Oligonucleotide for detection of SNP TSC0044705
rataattataaac

SEQ ID NO: 180623 - DNA, 13 bp, Artificial Sequence
  Oligonucleotide for detection of SNP TSC0044705
gataattataagy

SEQ ID NO: 180624 - DNA, 13 bp, Artificial Sequence
  Oligonucleotide for detection of SNP TSC0044705
rcttataattatc

SEQ ID NO: 180625 - DNA, 13 bp, Artificial Sequence
  Oligonucleotide for detection of SNP TSC0044705
gataataataagy

SEQ ID NO: 180626 - DNA, 13 bp, Artificial Sequence
  Oligonucleotide for detection of SNP TSC0044705
rcttattattatc

SEQ ID NO: 180627 - DNA, 13 bp, Artificial Sequence
  Oligonucleotide for detection of SNP TSC0044706
atatggttttttt

SEQ ID NO: 180628 - DNA, 13 bp, Artificial Sequence
  Oligonucleotide for detection of SNP TSC0044706
aaaaaaaccatat

SEQ ID NO: 180629 - DNA, 13 bp, Artificial Sequence
  Oligonucleotide for detection of SNP TSC0044706
atacggttttttt

SEQ ID NO: 180630 - DNA, 13 bp, Artificial Sequence
  Oligonucleotide for detection of SNP TSC0044706
aaaaaaaccgtat

SEQ ID NO: 180631 - DNA, 13 bp, Artificial Sequence
  Oligonucleotide for detection of SNP TSC0044706
atacgggtttttt

SEQ ID NO: 180632 - DNA, 13 bp, Artificial Sequence
  Oligonucleotide for detection of SNP TSC0044706
aaaaaacccgtat

SEQ ID NO: 180633 - DNA, 13 bp, Artificial Sequence
  Oligonucleotide for detection of SNP TSC0044706
aagaaagttgtgt

SEQ ID NO: 180634 - DNA, 13 bp, Artificial Sequence
  Oligonucleotide for detection of SNP TSC0044706
acacaactttctt

SEQ ID NO: 180635 - DNA, 13 bp, Artificial Sequence
  Oligonucleotide for detection of SNP TSC0044706
aagaaatttgtgt

SEQ ID NO: 180636 - DNA, 13 bp, Artificial Sequence
  Oligonucleotide for detection of SNP TSC0044706
acacaaatttctt

SEQ ID NO: 180637 - DNA, 13 bp, Artificial Sequence
  Oligonucleotide for detection of SNP TSC0044706
aagaaagtcgtgt

SEQ ID NO: 180638 - DNA, 13 bp, Artificial Sequence
  Oligonucleotide for detection of SNP TSC0044706
acacgactttctt

SEQ ID NO: 180639 - DNA, 13 bp, Artificial Sequence
  Oligonucleotide for detection of SNP TSC0044706
aagaaattcgtgt

SEQ ID NO: 180640 - DNA, 13 bp, Artificial Sequence
  Oligonucleotide for detection of SNP TSC0044706
acacgaatttctt

SEQ ID NO: 180641 - DNA, 13 bp, Artificial Sequence
  Oligonucleotide for detection of SNP TSC0008112
atataaagaaaaa

SEQ ID NO: 180642 - DNA, 13 bp, Artificial Sequence
  Oligonucleotide for detection of SNP TSC0008112
tttttctttatat

SEQ ID NO: 180643 - DNA, 13 bp, Artificial Sequence
  Oligonucleotide for detection of SNP TSC0008112
atataaggaaaaa

SEQ ID NO: 180644 - DNA, 13 bp, Artificial Sequence
  Oligonucleotide for detection of SNP TSC0008112
tttttccttatat

SEQ ID NO: 180645 - DNA, 13 bp, Artificial Sequence
  Oligonucleotide for detection of SNP TSC0044707
agttagatgtggt

SEQ ID NO: 180646 - DNA, 13 bp, Artificial Sequence
  Oligonucleotide for detection of SNP TSC0044707
accacatctaact

SEQ ID NO: 180647 - DNA, 13 bp, Artificial Sequence
  Oligonucleotide for detection of SNP TSC0044707
agttaggtgtggt

SEQ ID NO: 180648 - DNA, 13 bp, Artificial Sequence
  Oligonucleotide for detection of SNP TSC0044707
accacacctaact

SEQ ID NO: 180649 - DNA, 13 bp, Artificial Sequence
  Oligonucleotide for detection of SNP TSC0044708
ttttttggaatta

SEQ ID NO: 180650 - DNA, 13 bp, Artificial Sequence
  Oligonucleotide for detection of SNP TSC0044708
taattccaaaaaa

SEQ ID NO: 180651 - DNA, 13 bp, Artificial Sequence
  Oligonucleotide for detection of SNP TSC0044708
ttttttagaatta

SEQ ID NO: 180652 - DNA, 13 bp, Artificial Sequence
  Oligonucleotide for detection of SNP TSC0044708
taattctaaaaaa

SEQ ID NO: 180653 - DNA, 13 bp, Artificial Sequence
  Oligonucleotide for detection of SNP TSC0044713
ataaatatttaga

SEQ ID NO: 180654 - DNA, 13 bp, Artificial Sequence
  Oligonucleotide for detection of SNP TSC0044713
tctaaatatttat

SEQ ID NO: 180655 - DNA, 13 bp, Artificial Sequence
  Oligonucleotide for detection of SNP TSC0044713
tttgagtgtttgt

SEQ ID NO: 180656 - DNA, 13 bp, Artificial Sequence
  Oligonucleotide for detection of SNP TSC0044713
acaaacactcaaa

SEQ ID NO: 180657 - DNA, 13 bp, Artificial Sequence
  Oligonucleotide for detection of SNP TSC0044713
tttgagagtttgt

SEQ ID NO: 180658 - DNA, 13 bp, Artificial Sequence
  Oligonucleotide for detection of SNP TSC0044713
acaaactctcaaa

SEQ ID NO: 180659 - DNA, 13 bp, Artificial Sequence
  Oligonucleotide for detection of SNP TSC0044714
ttggagttaatta

SEQ ID NO: 180660 - DNA, 13 bp, Artificial Sequence
  Oligonucleotide for detection of SNP TSC0044714
taattaactccaa

SEQ ID NO: 180661 - DNA, 13 bp, Artificial Sequence
  Oligonucleotide for detection of SNP TSC0044714
ttggagataatta

SEQ ID NO: 180662 - DNA, 13 bp, Artificial Sequence
  Oligonucleotide for detection of SNP TSC0044714
taattatctccaa

SEQ ID NO: 180663 - DNA, 13 bp, Artificial Sequence
  Oligonucleotide for detection of SNP TSC0044715
aagtgtatttttg

SEQ ID NO: 180664 - DNA, 13 bp, Artificial Sequence
  Oligonucleotide for detection of SNP TSC0044715
caaaaatacactt

SEQ ID NO: 180665 - DNA, 13 bp, Artificial Sequence
  Oligonucleotide for detection of SNP TSC0044715
aagtgtgtttttg

SEQ ID NO: 180666 - DNA, 13 bp, Artificial Sequence
  Oligonucleotide for detection of SNP TSC0044715
caaaaacacactt

SEQ ID NO: 180667 - DNA, 13 bp, Artificial Sequence
  Oligonucleotide for detection of SNP TSC0044715
aagtgcgtttttg

SEQ ID NO: 180668 - DNA, 13 bp, Artificial Sequence
  Oligonucleotide for detection of SNP TSC0044715
caaaaacgcactt

SEQ ID NO: 180669 - DNA, 13 bp, Artificial Sequence
  Oligonucleotide for detection of SNP TSC0044715
taggggtgtattt

SEQ ID NO: 180670 - DNA, 13 bp, Artificial Sequence
  Oligonucleotide for detection of SNP TSC0044715
aaatacaccccta

SEQ ID NO: 180671 - DNA, 13 bp, Artificial Sequence
  Oligonucleotide for detection of SNP TSC0044715
taggggcgtattt

SEQ ID NO: 180672 - DNA, 13 bp, Artificial Sequence
  Oligonucleotide for detection of SNP TSC0044715
aaatacgccccta

SEQ ID NO: 180673 - DNA, 13 bp, Artificial Sequence
  Oligonucleotide for detection of SNP TSC0044716
ttaggagaagtag

SEQ ID NO: 180674 - DNA, 13 bp, Artificial Sequence
  Oligonucleotide for detection of SNP TSC0044716
ctacttctcctaa

SEQ ID NO: 180675 - DNA, 13 bp, Artificial Sequence
  Oligonucleotide for detection of SNP TSC0044716
ttaggaaaagtag

SEQ ID NO: 180676 - DNA, 13 bp, Artificial Sequence
  Oligonucleotide for detection of SNP TSC0044716
ctacttttcctaa

SEQ ID NO: 180677 - DNA, 13 bp, Artificial Sequence
  Oligonucleotide for detection of SNP TSC0044717
gggttaaatatta

SEQ ID NO: 180678 - DNA, 13 bp, Artificial Sequence
  Oligonucleotide for detection of SNP TSC0044717
taatatttaaccc

SEQ ID NO: 180679 - DNA, 13 bp, Artificial Sequence
  Oligonucleotide for detection of SNP TSC0044717
gggttatatatta

SEQ ID NO: 180680 - DNA, 13 bp, Artificial Sequence
  Oligonucleotide for detection of SNP TSC0044717
taatatataaccc

SEQ ID NO: 180681 - DNA, 13 bp, Artificial Sequence
  Oligonucleotide for detection of SNP TSC0044717
tggtgtttggtty

SEQ ID NO: 180682 - DNA, 13 bp, Artificial Sequence
  Oligonucleotide for detection of SNP TSC0044717
raaccaaacacca

SEQ ID NO: 180683 - DNA, 13 bp, Artificial Sequence
  Oligonucleotide for detection of SNP TSC0044717
tggtgtatggtty

SEQ ID NO: 180684 - DNA, 13 bp, Artificial Sequence
  Oligonucleotide for detection of SNP TSC0044717
raaccatacacca

SEQ ID NO: 180685 - DNA, 13 bp, Artificial Sequence
  Oligonucleotide for detection of SNP TSC0044718
tatgtcgtttttg

SEQ ID NO: 180686 - DNA, 13 bp, Artificial Sequence
  Oligonucleotide for detection of SNP TSC0044718
caaaaacgacata

SEQ ID NO: 180687 - DNA, 13 bp, Artificial Sequence
  Oligonucleotide for detection of SNP TSC0044718
tagagaggatatg

SEQ ID NO: 180688 - DNA, 13 bp, Artificial Sequence
  Oligonucleotide for detection of SNP TSC0044718
catatcctctcta

SEQ ID NO: 180689 - DNA, 13 bp, Artificial Sequence
  Oligonucleotide for detection of SNP TSC0044718
tagagatgatatg

SEQ ID NO: 180690 - DNA, 13 bp, Artificial Sequence
  Oligonucleotide for detection of SNP TSC0044718
catatcatctcta

SEQ ID NO: 180691 - DNA, 13 bp, Artificial Sequence
  Oligonucleotide for detection of SNP TSC0044718
tagagacgatatg

SEQ ID NO: 180692 - DNA, 13 bp, Artificial Sequence
  Oligonucleotide for detection of SNP TSC0044718
catatcgtctcta

SEQ ID NO: 180693 - DNA, 13 bp, Artificial Sequence
  Oligonucleotide for detection of SNP TSC0044719
tagttagaagtgt

SEQ ID NO: 180694 - DNA, 13 bp, Artificial Sequence
  Oligonucleotide for detection of SNP TSC0044719
acacttctaacta

SEQ ID NO: 180695 - DNA, 13 bp, Artificial Sequence
  Oligonucleotide for detection of SNP TSC0044719
tagttaaaagtgt

SEQ ID NO: 180696 - DNA, 13 bp, Artificial Sequence
  Oligonucleotide for detection of SNP TSC0044719
acacttttaacta

SEQ ID NO: 180697 - DNA, 13 bp, Artificial Sequence
  Oligonucleotide for detection of SNP TSC0044724
tatagtgaatttt

SEQ ID NO: 180698 - DNA, 13 bp, Artificial Sequence
  Oligonucleotide for detection of SNP TSC0044724
aaaattcactata

SEQ ID NO: 180699 - DNA, 13 bp, Artificial Sequence
  Oligonucleotide for detection of SNP TSC0044724
tatagtaaatttt

SEQ ID NO: 180700 - DNA, 13 bp, Artificial Sequence
  Oligonucleotide for detection of SNP TSC0044724
aaaatttactata

SEQ ID NO: 180701 - DNA, 13 bp, Artificial Sequence
  Oligonucleotide for detection of SNP TSC0044725
aatgtgggatgay

SEQ ID NO: 180702 - DNA, 13 bp, Artificial Sequence
  Oligonucleotide for detection of SNP TSC0044725
rtcatcccacatt

SEQ ID NO: 180703 - DNA, 13 bp, Artificial Sequence
  Oligonucleotide for detection of SNP TSC0044725
aatgtgagatgay

SEQ ID NO: 180704 - DNA, 13 bp, Artificial Sequence
  Oligonucleotide for detection of SNP TSC0044725
rtcatctcacatt

SEQ ID NO: 180705 - DNA, 13 bp, Artificial Sequence
  Oligonucleotide for detection of SNP TSC0044726
ttagttttgattt

SEQ ID NO: 180706 - DNA, 13 bp, Artificial Sequence
  Oligonucleotide for detection of SNP TSC0044726
aaatcaaaactaa

SEQ ID NO: 180707 - DNA, 13 bp, Artificial Sequence
  Oligonucleotide for detection of SNP TSC0044726
ttagttgtgattt

SEQ ID NO: 180708 - DNA, 13 bp, Artificial Sequence
  Oligonucleotide for detection of SNP TSC0044726
aaatcacaactaa

SEQ ID NO: 180709 - DNA, 13 bp, Artificial Sequence
  Oligonucleotide for detection of SNP TSC0044726
aaattagaattga

SEQ ID NO: 180710 - DNA, 13 bp, Artificial Sequence
  Oligonucleotide for detection of SNP TSC0044726
tcaattctaattt

SEQ ID NO: 180711 - DNA, 13 bp, Artificial Sequence
  Oligonucleotide for detection of SNP TSC0044726
aaattataattga

SEQ ID NO: 180712 - DNA, 13 bp, Artificial Sequence
  Oligonucleotide for detection of SNP TSC0044726
tcaattataattt

SEQ ID NO: 180713 - DNA, 13 bp, Artificial Sequence
  Oligonucleotide for detection of SNP TSC0044729
gtattttggaggy

SEQ ID NO: 180714 - DNA, 13 bp, Artificial Sequence
  Oligonucleotide for detection of SNP TSC0044729
rcctccaaaatac

SEQ ID NO: 180715 - DNA, 13 bp, Artificial Sequence
  Oligonucleotide for detection of SNP TSC0044729
gtttttaaagtgy

SEQ ID NO: 180716 - DNA, 13 bp, Artificial Sequence
  Oligonucleotide for detection of SNP TSC0044729
rcactttaaaaac

SEQ ID NO: 180717 - DNA, 13 bp, Artificial Sequence
  Oligonucleotide for detection of SNP TSC0044729
gttttttaagtgy

SEQ ID NO: 180718 - DNA, 13 bp, Artificial Sequence
  Oligonucleotide for detection of SNP TSC0044729
rcacttaaaaaac

SEQ ID NO: 180719 - DNA, 13 bp, Artificial Sequence
  Oligonucleotide for detection of SNP TSC0044730
ttatttgtagaaa

SEQ ID NO: 180720 - DNA, 13 bp, Artificial Sequence
  Oligonucleotide for detection of SNP TSC0044730
tttctacaaataa

SEQ ID NO: 180721 - DNA, 13 bp, Artificial Sequence
  Oligonucleotide for detection of SNP TSC0044730
ttattcgtagaaa

SEQ ID NO: 180722 - DNA, 13 bp, Artificial Sequence
  Oligonucleotide for detection of SNP TSC0044730
tttctacgaataa

SEQ ID NO: 180723 - DNA, 13 bp, Artificial Sequence
  Oligonucleotide for detection of SNP TSC0044730
tttttatgagtag

SEQ ID NO: 180724 - DNA, 13 bp, Artificial Sequence
  Oligonucleotide for detection of SNP TSC0044730
ctactcataaaaa

SEQ ID NO: 180725 - DNA, 13 bp, Artificial Sequence
  Oligonucleotide for detection of SNP TSC0044730
tttttacgagtag

SEQ ID NO: 180726 - DNA, 13 bp, Artificial Sequence
  Oligonucleotide for detection of SNP TSC0044730
ctactcgtaaaaa

SEQ ID NO: 180727 - DNA, 13 bp, Artificial Sequence
  Oligonucleotide for detection of SNP TSC0044731
ttttaatgatgtt

SEQ ID NO: 180728 - DNA, 13 bp, Artificial Sequence
  Oligonucleotide for detection of SNP TSC0044731
aacatcattaaaa

SEQ ID NO: 180729 - DNA, 13 bp, Artificial Sequence
  Oligonucleotide for detection of SNP TSC0044731
ttttaacgatgtt

SEQ ID NO: 180730 - DNA, 13 bp, Artificial Sequence
  Oligonucleotide for detection of SNP TSC0044731
aacatcgttaaaa

SEQ ID NO: 180731 - DNA, 13 bp, Artificial Sequence
  Oligonucleotide for detection of SNP TSC0044731
aatattgttagaa

SEQ ID NO: 180732 - DNA, 13 bp, Artificial Sequence
  Oligonucleotide for detection of SNP TSC0044731
ttctaacaatatt

SEQ ID NO: 180733 - DNA, 13 bp, Artificial Sequence
  Oligonucleotide for detection of SNP TSC0044731
aatattattagaa

SEQ ID NO: 180734 - DNA, 13 bp, Artificial Sequence
  Oligonucleotide for detection of SNP TSC0044731
ttctaataatatt

SEQ ID NO: 180735 - DNA, 13 bp, Artificial Sequence
  Oligonucleotide for detection of SNP TSC0044731
aatatcgttagaa

SEQ ID NO: 180736 - DNA, 13 bp, Artificial Sequence
  Oligonucleotide for detection of SNP TSC0044731
ttctaacgatatt

SEQ ID NO: 180737 - DNA, 13 bp, Artificial Sequence
  Oligonucleotide for detection of SNP TSC0044732
atttggaattttg

SEQ ID NO: 180738 - DNA, 13 bp, Artificial Sequence
  Oligonucleotide for detection of SNP TSC0044732
caaaattccaaat

SEQ ID NO: 180739 - DNA, 13 bp, Artificial Sequence
  Oligonucleotide for detection of SNP TSC0044734
gttttaggatgta

SEQ ID NO: 180740 - DNA, 13 bp, Artificial Sequence
  Oligonucleotide for detection of SNP TSC0044734
tacatcctaaaac

SEQ ID NO: 180741 - DNA, 13 bp, Artificial Sequence
  Oligonucleotide for detection of SNP TSC0044734
gttttaagatgta

SEQ ID NO: 180742 - DNA, 13 bp, Artificial Sequence
  Oligonucleotide for detection of SNP TSC0044734
tacatcttaaaac

SEQ ID NO: 180743 - DNA, 13 bp, Artificial Sequence
  Oligonucleotide for detection of SNP TSC0044737
attttaataaaay

SEQ ID NO: 180744 - DNA, 13 bp, Artificial Sequence
  Oligonucleotide for detection of SNP TSC0044737
rttttattaaaat

SEQ ID NO: 180745 - DNA, 13 bp, Artificial Sequence
  Oligonucleotide for detection of SNP TSC0044737
attttagtaaaay

SEQ ID NO: 180746 - DNA, 13 bp, Artificial Sequence
  Oligonucleotide for detection of SNP TSC0044737
rttttactaaaat

SEQ ID NO: 180747 - DNA, 13 bp, Artificial Sequence
  Oligonucleotide for detection of SNP TSC0044738
aataaagatattt

SEQ ID NO: 180748 - DNA, 13 bp, Artificial Sequence
  Oligonucleotide for detection of SNP TSC0044738
aaatatctttatt

SEQ ID NO: 180749 - DNA, 13 bp, Artificial Sequence
  Oligonucleotide for detection of SNP TSC0044739
tattgtaaaatay

SEQ ID NO: 180750 - DNA, 13 bp, Artificial Sequence
  Oligonucleotide for detection of SNP TSC0044739
rtattttacaata

SEQ ID NO: 180751 - DNA, 13 bp, Artificial Sequence
  Oligonucleotide for detection of SNP TSC0044739
tattgtgaaatay

SEQ ID NO: 180752 - DNA, 13 bp, Artificial Sequence
  Oligonucleotide for detection of SNP TSC0044739
rtatttcacaata

SEQ ID NO: 180753 - DNA, 13 bp, Artificial Sequence
  Oligonucleotide for detection of SNP TSC0044740
tttagatgggaag

SEQ ID NO: 180754 - DNA, 13 bp, Artificial Sequence
  Oligonucleotide for detection of SNP TSC0044740
cttcccatctaaa

SEQ ID NO: 180755 - DNA, 13 bp, Artificial Sequence
  Oligonucleotide for detection of SNP TSC0044740
tttagacgggaag

SEQ ID NO: 180756 - DNA, 13 bp, Artificial Sequence
  Oligonucleotide for detection of SNP TSC0044740
cttcccgtctaaa

SEQ ID NO: 180757 - DNA, 13 bp, Artificial Sequence
  Oligonucleotide for detection of SNP TSC0044741
tgaaatttgttag

SEQ ID NO: 180758 - DNA, 13 bp, Artificial Sequence
  Oligonucleotide for detection of SNP TSC0044741
ctaacaaatttca

SEQ ID NO: 180759 - DNA, 13 bp, Artificial Sequence
  Oligonucleotide for detection of SNP TSC0044741
tgaaatgtgttag

SEQ ID NO: 180760 - DNA, 13 bp, Artificial Sequence
  Oligonucleotide for detection of SNP TSC0044741
ctaacacatttca

SEQ ID NO: 180761 - DNA, 13 bp, Artificial Sequence
  Oligonucleotide for detection of SNP TSC0044741
tgaaacgtgttag

SEQ ID NO: 180762 - DNA, 13 bp, Artificial Sequence
  Oligonucleotide for detection of SNP TSC0044741
ctaacacgtttca

SEQ ID NO: 180763 - DNA, 13 bp, Artificial Sequence
  Oligonucleotide for detection of SNP TSC0044742
attttaatttggg

SEQ ID NO: 180764 - DNA, 13 bp, Artificial Sequence
  Oligonucleotide for detection of SNP TSC0044742
cccaaattaaaat

SEQ ID NO: 180765 - DNA, 13 bp, Artificial Sequence
  Oligonucleotide for detection of SNP TSC0044743
gtgtggtggtgtg

SEQ ID NO: 180766 - DNA, 13 bp, Artificial Sequence
  Oligonucleotide for detection of SNP TSC0044743
cacaccaccacac

SEQ ID NO: 180767 - DNA, 13 bp, Artificial Sequence
  Oligonucleotide for detection of SNP TSC0044743
gtgtgggggtgtg

SEQ ID NO: 180768 - DNA, 13 bp, Artificial Sequence
  Oligonucleotide for detection of SNP TSC0044743
cacacccccacac

SEQ ID NO: 180769 - DNA, 13 bp, Artificial Sequence
  Oligonucleotide for detection of SNP TSC0044743
gtgcggtggtgtg

SEQ ID NO: 180770 - DNA, 13 bp, Artificial Sequence
  Oligonucleotide for detection of SNP TSC0044743
cacaccaccgcac

SEQ ID NO: 180771 - DNA, 13 bp, Artificial Sequence
  Oligonucleotide for detection of SNP TSC0044743
gtgcgggggtgtg

SEQ ID NO: 180772 - DNA, 13 bp, Artificial Sequence
  Oligonucleotide for detection of SNP TSC0044743
cacacccccgcac

SEQ ID NO: 180773 - DNA, 13 bp, Artificial Sequence
  Oligonucleotide for detection of SNP TSC0044743
gtgtggtggcgtg

SEQ ID NO: 180774 - DNA, 13 bp, Artificial Sequence
  Oligonucleotide for detection of SNP TSC0044743
cacgccaccacac

SEQ ID NO: 180775 - DNA, 13 bp, Artificial Sequence
  Oligonucleotide for detection of SNP TSC0044743
gtgtgggggcgtg

SEQ ID NO: 180776 - DNA, 13 bp, Artificial Sequence
  Oligonucleotide for detection of SNP TSC0044743
cacgcccccacac

SEQ ID NO: 180777 - DNA, 13 bp, Artificial Sequence
  Oligonucleotide for detection of SNP TSC0044743
gtgtggtggtgcg

SEQ ID NO: 180778 - DNA, 13 bp, Artificial Sequence
  Oligonucleotide for detection of SNP TSC0044743
cgcaccaccacac

SEQ ID NO: 180779 - DNA, 13 bp, Artificial Sequence
  Oligonucleotide for detection of SNP TSC0044743
gtgtgggggtgcg

SEQ ID NO: 180780 - DNA, 13 bp, Artificial Sequence
  Oligonucleotide for detection of SNP TSC0044743
cgcacccccacac

SEQ ID NO: 180781 - DNA, 13 bp, Artificial Sequence
  Oligonucleotide for detection of SNP TSC0044743
gtgcggtggcgtg

SEQ ID NO: 180782 - DNA, 13 bp, Artificial Sequence
  Oligonucleotide for detection of SNP TSC0044743
cacgccaccgcac

SEQ ID NO: 180783 - DNA, 13 bp, Artificial Sequence
  Oligonucleotide for detection of SNP TSC0044743
gtgcgggggcgtg

SEQ ID NO: 180784 - DNA, 13 bp, Artificial Sequence
  Oligonucleotide for detection of SNP TSC0044743
cacgcccccgcac

SEQ ID NO: 180785 - DNA, 13 bp, Artificial Sequence
  Oligonucleotide for detection of SNP TSC0044743
gtgcggtggtgcg

SEQ ID NO: 180786 - DNA, 13 bp, Artificial Sequence
  Oligonucleotide for detection of SNP TSC0044743
cgcaccaccgcac

SEQ ID NO: 180787 - DNA, 13 bp, Artificial Sequence
  Oligonucleotide for detection of SNP TSC0044743
gtgcgggggtgcg

SEQ ID NO: 180788 - DNA, 13 bp, Artificial Sequence
  Oligonucleotide for detection of SNP TSC0044743
cgcacccccgcac

SEQ ID NO: 180789 - DNA, 13 bp, Artificial Sequence
  Oligonucleotide for detection of SNP TSC0044743
gtgtggtggcgcg

SEQ ID NO: 180790 - DNA, 13 bp, Artificial Sequence
  Oligonucleotide for detection of SNP TSC0044743
cgcgccaccacac

SEQ ID NO: 180791 - DNA, 13 bp, Artificial Sequence
  Oligonucleotide for detection of SNP TSC0044743
gtgtgggggcgcg

SEQ ID NO: 180792 - DNA, 13 bp, Artificial Sequence
  Oligonucleotide for detection of SNP TSC0044743
cgcgcccccacac

SEQ ID NO: 180793 - DNA, 13 bp, Artificial Sequence
  Oligonucleotide for detection of SNP TSC0044743
gtgcggtggcgcg

SEQ ID NO: 180794 - DNA, 13 bp, Artificial Sequence
  Oligonucleotide for detection of SNP TSC0044743
cgcgccaccgcac

SEQ ID NO: 180795 - DNA, 13 bp, Artificial Sequence
  Oligonucleotide for detection of SNP TSC0044743
gtgcgggggcgcg

SEQ ID NO: 180796 - DNA, 13 bp, Artificial Sequence
  Oligonucleotide for detection of SNP TSC0044743
cgcgcccccgcac

SEQ ID NO: 180797 - DNA, 13 bp, Artificial Sequence
  Oligonucleotide for detection of SNP TSC0044743
cgtgttattgtay

SEQ ID NO: 180798 - DNA, 13 bp, Artificial Sequence
  Oligonucleotide for detection of SNP TSC0044743
rtacaataacacg

SEQ ID NO: 180799 - DNA, 13 bp, Artificial Sequence
  Oligonucleotide for detection of SNP TSC0044743
cgtgtttttgtay

SEQ ID NO: 180800 - DNA, 13 bp, Artificial Sequence
  Oligonucleotide for detection of SNP TSC0044743
rtacaaaaacacg

SEQ ID NO: 180801 - DNA, 13 bp, Artificial Sequence
  Oligonucleotide for detection of SNP TSC0044743
tgcgttattgtay

SEQ ID NO: 180802 - DNA, 13 bp, Artificial Sequence
  Oligonucleotide for detection of SNP TSC0044743
rtacaataacgca

SEQ ID NO: 180803 - DNA, 13 bp, Artificial Sequence
  Oligonucleotide for detection of SNP TSC0044743
tgcgtttttgtay

SEQ ID NO: 180804 - DNA, 13 bp, Artificial Sequence
  Oligonucleotide for detection of SNP TSC0044743
rtacaaaaacgca

SEQ ID NO: 180805 - DNA, 13 bp, Artificial Sequence
  Oligonucleotide for detection of SNP TSC0044743
tgtgttatcgtay

SEQ ID NO: 180806 - DNA, 13 bp, Artificial Sequence
  Oligonucleotide for detection of SNP TSC0044743
rtacgataacaca

SEQ ID NO: 180807 - DNA, 13 bp, Artificial Sequence
  Oligonucleotide for detection of SNP TSC0044743
tgtgttttcgtay

SEQ ID NO: 180808 - DNA, 13 bp, Artificial Sequence
  Oligonucleotide for detection of SNP TSC0044743
rtacgaaaacaca

SEQ ID NO: 180809 - DNA, 13 bp, Artificial Sequence
  Oligonucleotide for detection of SNP TSC0044743
cgcgttattgtay

SEQ ID NO: 180810 - DNA, 13 bp, Artificial Sequence
  Oligonucleotide for detection of SNP TSC0044743
rtacaataacgcg

SEQ ID NO: 180811 - DNA, 13 bp, Artificial Sequence
  Oligonucleotide for detection of SNP TSC0044743
cgcgtttttgtay

SEQ ID NO: 180812 - DNA, 13 bp, Artificial Sequence
  Oligonucleotide for detection of SNP TSC0044743
rtacaaaaacgcg

SEQ ID NO: 180813 - DNA, 13 bp, Artificial Sequence
  Oligonucleotide for detection of SNP TSC0044743
cgtgttatcgtay

SEQ ID NO: 180814 - DNA, 13 bp, Artificial Sequence
  Oligonucleotide for detection of SNP TSC0044743
rtacgataacacg

SEQ ID NO: 180815 - DNA, 13 bp, Artificial Sequence
  Oligonucleotide for detection of SNP TSC0044743
cgtgttttcgtay

SEQ ID NO: 180816 - DNA, 13 bp, Artificial Sequence
  Oligonucleotide for detection of SNP TSC0044743
rtacgaaaacacg

SEQ ID NO: 180817 - DNA, 13 bp, Artificial Sequence
  Oligonucleotide for detection of SNP TSC0044743
tgcgttatcgtay

SEQ ID NO: 180818 - DNA, 13 bp, Artificial Sequence
  Oligonucleotide for detection of SNP TSC0044743
rtacgataacgca

SEQ ID NO: 180819 - DNA, 13 bp, Artificial Sequence
  Oligonucleotide for detection of SNP TSC0044743
tgcgttttcgtay

SEQ ID NO: 180820 - DNA, 13 bp, Artificial Sequence
  Oligonucleotide for detection of SNP TSC0044743
rtacgaaaacgca

SEQ ID NO: 180821 - DNA, 13 bp, Artificial Sequence
  Oligonucleotide for detection of SNP TSC0044743
cgcgttatcgtay

SEQ ID NO: 180822 - DNA, 13 bp, Artificial Sequence
  Oligonucleotide for detection of SNP TSC0044743
rtacgataacgcg

SEQ ID NO: 180823 - DNA, 13 bp, Artificial Sequence
  Oligonucleotide for detection of SNP TSC0044743
cgcgttttcgtay

SEQ ID NO: 180824 - DNA, 13 bp, Artificial Sequence
  Oligonucleotide for detection of SNP TSC0044743
rtacgaaaacgcg

SEQ ID NO: 180825 - DNA, 13 bp, Artificial Sequence
  Oligonucleotide for detection of SNP TSC0044744
aggtttgatttaa

SEQ ID NO: 180826 - DNA, 13 bp, Artificial Sequence
  Oligonucleotide for detection of SNP TSC0044744
ttaaatcaaacct

SEQ ID NO: 180827 - DNA, 13 bp, Artificial Sequence
  Oligonucleotide for detection of SNP TSC0044744
aggtttaatttaa

SEQ ID NO: 180828 - DNA, 13 bp, Artificial Sequence
  Oligonucleotide for detection of SNP TSC0044744
ttaaattaaacct

SEQ ID NO: 180829 - DNA, 13 bp, Artificial Sequence
  Oligonucleotide for detection of SNP TSC0044745
gttatgatgttag

SEQ ID NO: 180830 - DNA, 13 bp, Artificial Sequence
  Oligonucleotide for detection of SNP TSC0044745
ctaacatcataac

SEQ ID NO: 180831 - DNA, 13 bp, Artificial Sequence
  Oligonucleotide for detection of SNP TSC0044745
gttatggtgttag

SEQ ID NO: 180832 - DNA, 13 bp, Artificial Sequence
  Oligonucleotide for detection of SNP TSC0044745
ctaacaccataac

SEQ ID NO: 180833 - DNA, 13 bp, Artificial Sequence
  Oligonucleotide for detection of SNP TSC0044745
gttatgacgttag

SEQ ID NO: 180834 - DNA, 13 bp, Artificial Sequence
  Oligonucleotide for detection of SNP TSC0044745
ctaacgtcataac

SEQ ID NO: 180835 - DNA, 13 bp, Artificial Sequence
  Oligonucleotide for detection of SNP TSC0044745
gttatggcgttag

SEQ ID NO: 180836 - DNA, 13 bp, Artificial Sequence
  Oligonucleotide for detection of SNP TSC0044745
ctaacgccataac

SEQ ID NO: 180837 - DNA, 13 bp, Artificial Sequence
  Oligonucleotide for detection of SNP TSC0044749
gaattttgtaggt

SEQ ID NO: 180838 - DNA, 13 bp, Artificial Sequence
  Oligonucleotide for detection of SNP TSC0044749
acctacaaaattc

SEQ ID NO: 180839 - DNA, 13 bp, Artificial Sequence
  Oligonucleotide for detection of SNP TSC0044749
gaatttggtaggt

SEQ ID NO: 180840 - DNA, 13 bp, Artificial Sequence
  Oligonucleotide for detection of SNP TSC0044749
acctaccaaattc

SEQ ID NO: 180841 - DNA, 13 bp, Artificial Sequence
  Oligonucleotide for detection of SNP TSC0044749
gaattcggtaggt

SEQ ID NO: 180842 - DNA, 13 bp, Artificial Sequence
  Oligonucleotide for detection of SNP TSC0044749
acctaccgaattc

SEQ ID NO: 180843 - DNA, 13 bp, Artificial Sequence
  Oligonucleotide for detection of SNP TSC0044749
atttatagggtty

SEQ ID NO: 180844 - DNA, 13 bp, Artificial Sequence
  Oligonucleotide for detection of SNP TSC0044749
raaccctataaat

SEQ ID NO: 180845 - DNA, 13 bp, Artificial Sequence
  Oligonucleotide for detection of SNP TSC0044749
atttatcgggtty

SEQ ID NO: 180846 - DNA, 13 bp, Artificial Sequence
  Oligonucleotide for detection of SNP TSC0044749
raacccgataaat

SEQ ID NO: 180847 - DNA, 13 bp, Artificial Sequence
  Oligonucleotide for detection of SNP TSC0044750
gttaagtgattat

SEQ ID NO: 180848 - DNA, 13 bp, Artificial Sequence
  Oligonucleotide for detection of SNP TSC0044750
ataatcacttaac

SEQ ID NO: 180849 - DNA, 13 bp, Artificial Sequence
  Oligonucleotide for detection of SNP TSC0044750
gttaagcgattat

SEQ ID NO: 180850 - DNA, 13 bp, Artificial Sequence
  Oligonucleotide for detection of SNP TSC0044750
ataatcgcttaac

SEQ ID NO: 180851 - DNA, 13 bp, Artificial Sequence
  Oligonucleotide for detection of SNP TSC0044750
ataattgtttaay

SEQ ID NO: 180852 - DNA, 13 bp, Artificial Sequence
  Oligonucleotide for detection of SNP TSC0044750
rttaaacaattat

SEQ ID NO: 180853 - DNA, 13 bp, Artificial Sequence
  Oligonucleotide for detection of SNP TSC0044750
ataattatttaay

SEQ ID NO: 180854 - DNA, 13 bp, Artificial Sequence
  Oligonucleotide for detection of SNP TSC0044750
rttaaataattat

SEQ ID NO: 180855 - DNA, 13 bp, Artificial Sequence
  Oligonucleotide for detection of SNP TSC0044750
ataatcgtttaay

SEQ ID NO: 180856 - DNA, 13 bp, Artificial Sequence
  Oligonucleotide for detection of SNP TSC0044750
rttaaacgattat

SEQ ID NO: 180857 - DNA, 13 bp, Artificial Sequence
  Oligonucleotide for detection of SNP TSC0044751
tgtgatttgatta

SEQ ID NO: 180858 - DNA, 13 bp, Artificial Sequence
  Oligonucleotide for detection of SNP TSC0044751
taatcaaatcaca

SEQ ID NO: 180859 - DNA, 13 bp, Artificial Sequence
  Oligonucleotide for detection of SNP TSC0044751
tgtgatgtgatta

SEQ ID NO: 180860 - DNA, 13 bp, Artificial Sequence
  Oligonucleotide for detection of SNP TSC0044751
taatcacatcaca

SEQ ID NO: 180861 - DNA, 13 bp, Artificial Sequence
  Oligonucleotide for detection of SNP TSC0044751
tagttaaattata

SEQ ID NO: 180862 - DNA, 13 bp, Artificial Sequence
  Oligonucleotide for detection of SNP TSC0044751
tataatttaacta

SEQ ID NO: 180863 - DNA, 13 bp, Artificial Sequence
  Oligonucleotide for detection of SNP TSC0044751
tagttatattata

SEQ ID NO: 180864 - DNA, 13 bp, Artificial Sequence
  Oligonucleotide for detection of SNP TSC0044751
tataatataacta

SEQ ID NO: 180865 - DNA, 13 bp, Artificial Sequence
  Oligonucleotide for detection of SNP TSC0044753
tagatttgaagaa

SEQ ID NO: 180866 - DNA, 13 bp, Artificial Sequence
  Oligonucleotide for detection of SNP TSC0044753
ttcttcaaatcta

SEQ ID NO: 180867 - DNA, 13 bp, Artificial Sequence
  Oligonucleotide for detection of SNP TSC0044753
tagattcgaagaa

SEQ ID NO: 180868 - DNA, 13 bp, Artificial Sequence
  Oligonucleotide for detection of SNP TSC0044753
ttcttcgaatcta

SEQ ID NO: 180869 - DNA, 13 bp, Artificial Sequence
  Oligonucleotide for detection of SNP TSC0044753
ttttttgagtttg

SEQ ID NO: 180870 - DNA, 13 bp, Artificial Sequence
  Oligonucleotide for detection of SNP TSC0044753
caaactcaaaaaa

SEQ ID NO: 180871 - DNA, 13 bp, Artificial Sequence
  Oligonucleotide for detection of SNP TSC0044753
ttttttaagtttg

SEQ ID NO: 180872 - DNA, 13 bp, Artificial Sequence
  Oligonucleotide for detection of SNP TSC0044753
caaacttaaaaaa

SEQ ID NO: 180873 - DNA, 13 bp, Artificial Sequence
  Oligonucleotide for detection of SNP TSC0044753
tttttcgagtttg

SEQ ID NO: 180874 - DNA, 13 bp, Artificial Sequence
  Oligonucleotide for detection of SNP TSC0044753
caaactcgaaaaa

SEQ ID NO: 180875 - DNA, 13 bp, Artificial Sequence
  Oligonucleotide for detection of SNP TSC0044754
aataataaagtta

SEQ ID NO: 180876 - DNA, 13 bp, Artificial Sequence
  Oligonucleotide for detection of SNP TSC0044754
taactttattatt

SEQ ID NO: 180877 - DNA, 13 bp, Artificial Sequence
  Oligonucleotide for detection of SNP TSC0044754
aataattaagtta

SEQ ID NO: 180878 - DNA, 13 bp, Artificial Sequence
  Oligonucleotide for detection of SNP TSC0044754
taacttaattatt

SEQ ID NO: 180879 - DNA, 13 bp, Artificial Sequence
  Oligonucleotide for detection of SNP TSC0044754
tgattttattatt

SEQ ID NO: 180880 - DNA, 13 bp, Artificial Sequence
  Oligonucleotide for detection of SNP TSC0044754
aataataaaatca

SEQ ID NO: 180881 - DNA, 13 bp, Artificial Sequence
  Oligonucleotide for detection of SNP TSC0044754
tgatttgattatt

SEQ ID NO: 180882 - DNA, 13 bp, Artificial Sequence
  Oligonucleotide for detection of SNP TSC0044754
aataatcaaatca

SEQ ID NO: 180883 - DNA, 13 bp, Artificial Sequence
  Oligonucleotide for detection of SNP TSC0044755
ttgtatagagatt

SEQ ID NO: 180884 - DNA, 13 bp, Artificial Sequence
  Oligonucleotide for detection of SNP TSC0044755
aatctctatacaa

SEQ ID NO: 180885 - DNA, 13 bp, Artificial Sequence
  Oligonucleotide for detection of SNP TSC0044755
ttgtatggagatt

SEQ ID NO: 180886 - DNA, 13 bp, Artificial Sequence
  Oligonucleotide for detection of SNP TSC0044755
aatctccatacaa

SEQ ID NO: 180887 - DNA, 13 bp, Artificial Sequence
  Oligonucleotide for detection of SNP TSC0044757
agtgggggtagty

SEQ ID NO: 180888 - DNA, 13 bp, Artificial Sequence
  Oligonucleotide for detection of SNP TSC0044757
ractacccccact

SEQ ID NO: 180889 - DNA, 13 bp, Artificial Sequence
  Oligonucleotide for detection of SNP TSC0044757
agtgggagtagty

SEQ ID NO: 180890 - DNA, 13 bp, Artificial Sequence
  Oligonucleotide for detection of SNP TSC0044757
ractactcccact

SEQ ID NO: 180891 - DNA, 13 bp, Artificial Sequence
  Oligonucleotide for detection of SNP TSC0044758
tgttatattttgy

SEQ ID NO: 180892 - DNA, 13 bp, Artificial Sequence
  Oligonucleotide for detection of SNP TSC0044758
rcaaaatataaca

SEQ ID NO: 180893 - DNA, 13 bp, Artificial Sequence
  Oligonucleotide for detection of SNP TSC0044758
tgttatgttttgy

SEQ ID NO: 180894 - DNA, 13 bp, Artificial Sequence
  Oligonucleotide for detection of SNP TSC0044758
rcaaaacataaca

SEQ ID NO: 180895 - DNA, 13 bp, Artificial Sequence
  Oligonucleotide for detection of SNP TSC0044758
tgttatatttcgy

SEQ ID NO: 180896 - DNA, 13 bp, Artificial Sequence
  Oligonucleotide for detection of SNP TSC0044758
rcgaaatataaca

SEQ ID NO: 180897 - DNA, 13 bp, Artificial Sequence
  Oligonucleotide for detection of SNP TSC0044758
tgttatgtttcgy

SEQ ID NO: 180898 - DNA, 13 bp, Artificial Sequence
  Oligonucleotide for detection of SNP TSC0044758
rcgaaacataaca

SEQ ID NO: 180899 - DNA, 13 bp, Artificial Sequence
  Oligonucleotide for detection of SNP TSC0044760
tggggtgagtttg

SEQ ID NO: 180900 - DNA, 13 bp, Artificial Sequence
  Oligonucleotide for detection of SNP TSC0044760
caaactcacccca

SEQ ID NO: 180901 - DNA, 13 bp, Artificial Sequence
  Oligonucleotide for detection of SNP TSC0044760
tggggtaagtttg

SEQ ID NO: 180902 - DNA, 13 bp, Artificial Sequence
  Oligonucleotide for detection of SNP TSC0044760
caaacttacccca

SEQ ID NO: 180903 - DNA, 13 bp, Artificial Sequence
  Oligonucleotide for detection of SNP TSC0044761
gattttggaggtt

SEQ ID NO: 180904 - DNA, 13 bp, Artificial Sequence
  Oligonucleotide for detection of SNP TSC0044761
aacctccaaaatc

SEQ ID NO: 180905 - DNA, 13 bp, Artificial Sequence
  Oligonucleotide for detection of SNP TSC0044761
gattttagaggtt

SEQ ID NO: 180906 - DNA, 13 bp, Artificial Sequence
  Oligonucleotide for detection of SNP TSC0044761
aacctctaaaatc

SEQ ID NO: 180907 - DNA, 13 bp, Artificial Sequence
  Oligonucleotide for detection of SNP TSC0044762
attttaagatttt

SEQ ID NO: 180908 - DNA, 13 bp, Artificial Sequence
  Oligonucleotide for detection of SNP TSC0044762
aaaatcttaaaat

SEQ ID NO: 180909 - DNA, 13 bp, Artificial Sequence
  Oligonucleotide for detection of SNP TSC0044762
attttaggatttt

SEQ ID NO: 180910 - DNA, 13 bp, Artificial Sequence
  Oligonucleotide for detection of SNP TSC0044762
aaaatcctaaaat

SEQ ID NO: 180911 - DNA, 13 bp, Artificial Sequence
  Oligonucleotide for detection of SNP TSC0044763
tatgtgttatgtg

SEQ ID NO: 180912 - DNA, 13 bp, Artificial Sequence
  Oligonucleotide for detection of SNP TSC0044763
cacataacacata

SEQ ID NO: 180913 - DNA, 13 bp, Artificial Sequence
  Oligonucleotide for detection of SNP TSC0044763
tatgtggtatgtg

SEQ ID NO: 180914 - DNA, 13 bp, Artificial Sequence
  Oligonucleotide for detection of SNP TSC0044763
cacataccacata

SEQ ID NO: 180915 - DNA, 13 bp, Artificial Sequence
  Oligonucleotide for detection of SNP TSC0044763
tatatagtatata

SEQ ID NO: 180916 - DNA, 13 bp, Artificial Sequence
  Oligonucleotide for detection of SNP TSC0044763
tatatactatata

SEQ ID NO: 180917 - DNA, 13 bp, Artificial Sequence
  Oligonucleotide for detection of SNP TSC0044764
taagtagaaaaat

SEQ ID NO: 180918 - DNA, 13 bp, Artificial Sequence
  Oligonucleotide for detection of SNP TSC0044764
atttttctactta

SEQ ID NO: 180919 - DNA, 13 bp, Artificial Sequence
  Oligonucleotide for detection of SNP TSC0044764
taagtaaaaaaat

SEQ ID NO: 180920 - DNA, 13 bp, Artificial Sequence
  Oligonucleotide for detection of SNP TSC0044764
atttttttactta

SEQ ID NO: 180921 - DNA, 13 bp, Artificial Sequence
  Oligonucleotide for detection of SNP TSC0044767
attttagaaaaat

SEQ ID NO: 180922 - DNA, 13 bp, Artificial Sequence
  Oligonucleotide for detection of SNP TSC0044767
atttttctaaaat

SEQ ID NO: 180923 - DNA, 13 bp, Artificial Sequence
  Oligonucleotide for detection of SNP TSC0044767
attttaaaaaaat

SEQ ID NO: 180924 - DNA, 13 bp, Artificial Sequence
  Oligonucleotide for detection of SNP TSC0044767
atttttttaaaat

SEQ ID NO: 180925 - DNA, 13 bp, Artificial Sequence
  Oligonucleotide for detection of SNP TSC0044768
ttaatgggaataa

SEQ ID NO: 180926 - DNA, 13 bp, Artificial Sequence
  Oligonucleotide for detection of SNP TSC0044768
ttattcccattaa

SEQ ID NO: 180927 - DNA, 13 bp, Artificial Sequence
  Oligonucleotide for detection of SNP TSC0044768
ttaatgagaataa

SEQ ID NO: 180928 - DNA, 13 bp, Artificial Sequence
  Oligonucleotide for detection of SNP TSC0044768
ttattctcattaa

SEQ ID NO: 180929 - DNA, 13 bp, Artificial Sequence
  Oligonucleotide for detection of SNP TSC0044770
agataaatttaty

SEQ ID NO: 180930 - DNA, 13 bp, Artificial Sequence
  Oligonucleotide for detection of SNP TSC0044770
rataaatttatct

SEQ ID NO: 180931 - DNA, 13 bp, Artificial Sequence
  Oligonucleotide for detection of SNP TSC0044770
agataagtttaty

SEQ ID NO: 180932 - DNA, 13 bp, Artificial Sequence
  Oligonucleotide for detection of SNP TSC0044770
rataaacttatct

SEQ ID NO: 180933 - DNA, 13 bp, Artificial Sequence
  Oligonucleotide for detection of SNP TSC0044773
tttggagattttg

SEQ ID NO: 180934 - DNA, 13 bp, Artificial Sequence
  Oligonucleotide for detection of SNP TSC0044773
caaaatctccaaa

SEQ ID NO: 180935 - DNA, 13 bp, Artificial Sequence
  Oligonucleotide for detection of SNP TSC0044773
tttggaaattttg

SEQ ID NO: 180936 - DNA, 13 bp, Artificial Sequence
  Oligonucleotide for detection of SNP TSC0044773
caaaatttccaaa

SEQ ID NO: 180937 - DNA, 13 bp, Artificial Sequence
  Oligonucleotide for detection of SNP TSC0044776
attttaagttatt

SEQ ID NO: 180938 - DNA, 13 bp, Artificial Sequence
  Oligonucleotide for detection of SNP TSC0044776
aataacttaaaat

SEQ ID NO: 180939 - DNA, 13 bp, Artificial Sequence
  Oligonucleotide for detection of SNP TSC0044776
attttaggttatt

SEQ ID NO: 180940 - DNA, 13 bp, Artificial Sequence
  Oligonucleotide for detection of SNP TSC0044776
aataacctaaaat

SEQ ID NO: 180941 - DNA, 13 bp, Artificial Sequence
  Oligonucleotide for detection of SNP TSC0044777
gtaggagggatat

SEQ ID NO: 180942 - DNA, 13 bp, Artificial Sequence
  Oligonucleotide for detection of SNP TSC0044777
atatccctcctac

SEQ ID NO: 180943 - DNA, 13 bp, Artificial Sequence
  Oligonucleotide for detection of SNP TSC0044777
gtaggaaggatat

SEQ ID NO: 180944 - DNA, 13 bp, Artificial Sequence
  Oligonucleotide for detection of SNP TSC0044777
atatccttcctac

SEQ ID NO: 180945 - DNA, 13 bp, Artificial Sequence
  Oligonucleotide for detection of SNP TSC0044778
aaatgagtgttaa

SEQ ID NO: 180946 - DNA, 13 bp, Artificial Sequence
  Oligonucleotide for detection of SNP TSC0044778
ttaacactcattt

SEQ ID NO: 180947 - DNA, 13 bp, Artificial Sequence
  Oligonucleotide for detection of SNP TSC0044779
agttagaaatttt

SEQ ID NO: 180948 - DNA, 13 bp, Artificial Sequence
  Oligonucleotide for detection of SNP TSC0044779
aaaatttctaact

SEQ ID NO: 180949 - DNA, 13 bp, Artificial Sequence
  Oligonucleotide for detection of SNP TSC0044779
agttagtaatttt

SEQ ID NO: 180950 - DNA, 13 bp, Artificial Sequence
  Oligonucleotide for detection of SNP TSC0044779
aaaattactaact

SEQ ID NO: 180951 - DNA, 13 bp, Artificial Sequence
  Oligonucleotide for detection of SNP TSC0044779
aagatttttaatt

SEQ ID NO: 180952 - DNA, 13 bp, Artificial Sequence
  Oligonucleotide for detection of SNP TSC0044779
aattaaaaatctt

SEQ ID NO: 180953 - DNA, 13 bp, Artificial Sequence
  Oligonucleotide for detection of SNP TSC0044779
aagattgttaatt

SEQ ID NO: 180954 - DNA, 13 bp, Artificial Sequence
  Oligonucleotide for detection of SNP TSC0044779
aattaacaatctt

SEQ ID NO: 180955 - DNA, 13 bp, Artificial Sequence
  Oligonucleotide for detection of SNP TSC0044780
taaaatattaagt

SEQ ID NO: 180956 - DNA, 13 bp, Artificial Sequence
  Oligonucleotide for detection of SNP TSC0044780
acttaatatttta

SEQ ID NO: 180957 - DNA, 13 bp, Artificial Sequence
  Oligonucleotide for detection of SNP TSC0044780
taaaatgttaagt

SEQ ID NO: 180958 - DNA, 13 bp, Artificial Sequence
  Oligonucleotide for detection of SNP TSC0044780
acttaacatttta

SEQ ID NO: 180959 - DNA, 13 bp, Artificial Sequence
  Oligonucleotide for detection of SNP TSC0044780
taaaacgttaagt

SEQ ID NO: 180960 - DNA, 13 bp, Artificial Sequence
  Oligonucleotide for detection of SNP TSC0044780
acttaacgtttta

SEQ ID NO: 180961 - DNA, 13 bp, Artificial Sequence
  Oligonucleotide for detection of SNP TSC0044780
atttggtgtttta

SEQ ID NO: 180962 - DNA, 13 bp, Artificial Sequence
  Oligonucleotide for detection of SNP TSC0044780
taaaacaccaaat

SEQ ID NO: 180963 - DNA, 13 bp, Artificial Sequence
  Oligonucleotide for detection of SNP TSC0044780
atttggcgtttta

SEQ ID NO: 180964 - DNA, 13 bp, Artificial Sequence
  Oligonucleotide for detection of SNP TSC0044780
taaaacgccaaat

SEQ ID NO: 180965 - DNA, 13 bp, Artificial Sequence
  Oligonucleotide for detection of SNP TSC0044781
gtggagaaattga

SEQ ID NO: 180966 - DNA, 13 bp, Artificial Sequence
  Oligonucleotide for detection of SNP TSC0044781
tcaatttctccac

SEQ ID NO: 180967 - DNA, 13 bp, Artificial Sequence
  Oligonucleotide for detection of SNP TSC0044781
gtggaggaattga

SEQ ID NO: 180968 - DNA, 13 bp, Artificial Sequence
  Oligonucleotide for detection of SNP TSC0044781
tcaattcctccac

SEQ ID NO: 180969 - DNA, 13 bp, Artificial Sequence
  Oligonucleotide for detection of SNP TSC0044782
gagtttgttatgg

SEQ ID NO: 180970 - DNA, 13 bp, Artificial Sequence
  Oligonucleotide for detection of SNP TSC0044782
ccataacaaactc

SEQ ID NO: 180971 - DNA, 13 bp, Artificial Sequence
  Oligonucleotide for detection of SNP TSC0044782
gagtttattatgg

SEQ ID NO: 180972 - DNA, 13 bp, Artificial Sequence
  Oligonucleotide for detection of SNP TSC0044782
ccataataaactc

SEQ ID NO: 180973 - DNA, 13 bp, Artificial Sequence
  Oligonucleotide for detection of SNP TSC0044783
aatttaattaaaa

SEQ ID NO: 180974 - DNA, 13 bp, Artificial Sequence
  Oligonucleotide for detection of SNP TSC0044783
ttttaattaaatt

SEQ ID NO: 180975 - DNA, 13 bp, Artificial Sequence
  Oligonucleotide for detection of SNP TSC0044783
aatttagttaaaa

SEQ ID NO: 180976 - DNA, 13 bp, Artificial Sequence
  Oligonucleotide for detection of SNP TSC0044783
ttttaactaaatt

SEQ ID NO: 180977 - DNA, 13 bp, Artificial Sequence
  Oligonucleotide for detection of SNP TSC0044784
gaaatttaagaty

SEQ ID NO: 180978 - DNA, 13 bp, Artificial Sequence
  Oligonucleotide for detection of SNP TSC0044784
ratcttaaatttc

SEQ ID NO: 180979 - DNA, 13 bp, Artificial Sequence
  Oligonucleotide for detection of SNP TSC0044784
gaaattgaagaty

SEQ ID NO: 180980 - DNA, 13 bp, Artificial Sequence
  Oligonucleotide for detection of SNP TSC0044784
ratcttcaatttc

SEQ ID NO: 180981 - DNA, 13 bp, Artificial Sequence
  Oligonucleotide for detection of SNP TSC0044784
gatttttaattty

SEQ ID NO: 180982 - DNA, 13 bp, Artificial Sequence
  Oligonucleotide for detection of SNP TSC0044784
raaattaaaaatc

SEQ ID NO: 180983 - DNA, 13 bp, Artificial Sequence
  Oligonucleotide for detection of SNP TSC0044785
ggaaaaataggta

SEQ ID NO: 180984 - DNA, 13 bp, Artificial Sequence
  Oligonucleotide for detection of SNP TSC0044785
tacctatttttcc

SEQ ID NO: 180985 - DNA, 13 bp, Artificial Sequence
  Oligonucleotide for detection of SNP TSC0044785
ggaaaattaggta

SEQ ID NO: 180986 - DNA, 13 bp, Artificial Sequence
  Oligonucleotide for detection of SNP TSC0044785
tacctaattttcc

SEQ ID NO: 180987 - DNA, 13 bp, Artificial Sequence
  Oligonucleotide for detection of SNP TSC0044786
taattagtaaata

SEQ ID NO: 180988 - DNA, 13 bp, Artificial Sequence
  Oligonucleotide for detection of SNP TSC0044786
tatttactaatta

SEQ ID NO: 180989 - DNA, 13 bp, Artificial Sequence
  Oligonucleotide for detection of SNP TSC0044786
tgtttggtaatta

SEQ ID NO: 180990 - DNA, 13 bp, Artificial Sequence
  Oligonucleotide for detection of SNP TSC0044786
taattaccaaaca

SEQ ID NO: 180991 - DNA, 13 bp, Artificial Sequence
  Oligonucleotide for detection of SNP TSC0044786
tgtttgttaatta

SEQ ID NO: 180992 - DNA, 13 bp, Artificial Sequence
  Oligonucleotide for detection of SNP TSC0044786
taattaacaaaca

SEQ ID NO: 180993 - DNA, 13 bp, Artificial Sequence
  Oligonucleotide for detection of SNP TSC0044787
atagaagttaaaa

SEQ ID NO: 180994 - DNA, 13 bp, Artificial Sequence
  Oligonucleotide for detection of SNP TSC0044787
ttttaacttctat

SEQ ID NO: 180995 - DNA, 13 bp, Artificial Sequence
  Oligonucleotide for detection of SNP TSC0044787
atagaaattaaaa

SEQ ID NO: 180996 - DNA, 13 bp, Artificial Sequence
  Oligonucleotide for detection of SNP TSC0044787
ttttaatttctat

SEQ ID NO: 180997 - DNA, 13 bp, Artificial Sequence
  Oligonucleotide for detection of SNP TSC0044788
tgtgattttttty

SEQ ID NO: 180998 - DNA, 13 bp, Artificial Sequence
  Oligonucleotide for detection of SNP TSC0044788
raaaaaaatcaca

SEQ ID NO: 180999 - DNA, 13 bp, Artificial Sequence
  Oligonucleotide for detection of SNP TSC0044788
tgtgatgttttty

SEQ ID NO: 181000 - DNA, 13 bp, Artificial Sequence
  Oligonucleotide for detection of SNP TSC0044788
raaaaacatcaca

SEQ ID NO: 181001 - DNA, 13 bp, Artificial Sequence
  Oligonucleotide for detection of SNP TSC0044788
gggggggattata

SEQ ID NO: 181002 - DNA, 13 bp, Artificial Sequence
  Oligonucleotide for detection of SNP TSC0044788
tataatccccccc

SEQ ID NO: 181003 - DNA, 13 bp, Artificial Sequence
  Oligonucleotide for detection of SNP TSC0044788
ggggggtattata

SEQ ID NO: 181004 - DNA, 13 bp, Artificial Sequence
  Oligonucleotide for detection of SNP TSC0044788
tataatacccccc

SEQ ID NO: 181005 - DNA, 13 bp, Artificial Sequence
  Oligonucleotide for detection of SNP TSC0044789
tatgagtgtaagy

SEQ ID NO: 181006 - DNA, 13 bp, Artificial Sequence
  Oligonucleotide for detection of SNP TSC0044789
rcttacactcata

SEQ ID NO: 181007 - DNA, 13 bp, Artificial Sequence
  Oligonucleotide for detection of SNP TSC0044789
tatgagggtaagy

SEQ ID NO: 181008 - DNA, 13 bp, Artificial Sequence
  Oligonucleotide for detection of SNP TSC0044789
rcttaccctcata

SEQ ID NO: 181009 - DNA, 13 bp, Artificial Sequence
  Oligonucleotide for detection of SNP TSC0044789
gtttgtatttatg

SEQ ID NO: 181010 - DNA, 13 bp, Artificial Sequence
  Oligonucleotide for detection of SNP TSC0044789
cataaatacaaac

SEQ ID NO: 181011 - DNA, 13 bp, Artificial Sequence
  Oligonucleotide for detection of SNP TSC0044789
gtttgtttttatg

SEQ ID NO: 181012 - DNA, 13 bp, Artificial Sequence
  Oligonucleotide for detection of SNP TSC0044789
cataaaaacaaac

SEQ ID NO: 181013 - DNA, 13 bp, Artificial Sequence
  Oligonucleotide for detection of SNP TSC0044790
atagaaggtattt

SEQ ID NO: 181014 - DNA, 13 bp, Artificial Sequence
  Oligonucleotide for detection of SNP TSC0044790
aaataccttctat

SEQ ID NO: 181015 - DNA, 13 bp, Artificial Sequence
  Oligonucleotide for detection of SNP TSC0044790
atagaaagtattt

SEQ ID NO: 181016 - DNA, 13 bp, Artificial Sequence
  Oligonucleotide for detection of SNP TSC0044790
aaatactttctat

SEQ ID NO: 181017 - DNA, 13 bp, Artificial Sequence
  Oligonucleotide for detection of SNP TSC0044791
atatagtgtttty

SEQ ID NO: 181018 - DNA, 13 bp, Artificial Sequence
  Oligonucleotide for detection of SNP TSC0044791
raaaacactatat

SEQ ID NO: 181019 - DNA, 13 bp, Artificial Sequence
  Oligonucleotide for detection of SNP TSC0044791
atatagcgtttty

SEQ ID NO: 181020 - DNA, 13 bp, Artificial Sequence
  Oligonucleotide for detection of SNP TSC0044791
raaaacgctatat

SEQ ID NO: 181021 - DNA, 13 bp, Artificial Sequence
  Oligonucleotide for detection of SNP TSC0044791
gaaaatgttgtat

SEQ ID NO: 181022 - DNA, 13 bp, Artificial Sequence
  Oligonucleotide for detection of SNP TSC0044791
atacaacattttc

SEQ ID NO: 181023 - DNA, 13 bp, Artificial Sequence
  Oligonucleotide for detection of SNP TSC0044791
gaaaatattgtat

SEQ ID NO: 181024 - DNA, 13 bp, Artificial Sequence
  Oligonucleotide for detection of SNP TSC0044791
atacaatattttc

SEQ ID NO: 181025 - DNA, 13 bp, Artificial Sequence
  Oligonucleotide for detection of SNP TSC0044791
gaaaacgttgtat

SEQ ID NO: 181026 - DNA, 13 bp, Artificial Sequence
  Oligonucleotide for detection of SNP TSC0044791
atacaacgttttc

SEQ ID NO: 181027 - DNA, 13 bp, Artificial Sequence
  Oligonucleotide for detection of SNP TSC0044792
ggggaaagtttta

SEQ ID NO: 181028 - DNA, 13 bp, Artificial Sequence
  Oligonucleotide for detection of SNP TSC0044792
taaaactttcccc

SEQ ID NO: 181029 - DNA, 13 bp, Artificial Sequence
  Oligonucleotide for detection of SNP TSC0044792
ggggaatgtttta

SEQ ID NO: 181030 - DNA, 13 bp, Artificial Sequence
  Oligonucleotide for detection of SNP TSC0044792
taaaacattcccc

SEQ ID NO: 181031 - DNA, 13 bp, Artificial Sequence
  Oligonucleotide for detection of SNP TSC0044792
ggggaacgtttta

SEQ ID NO: 181032 - DNA, 13 bp, Artificial Sequence
  Oligonucleotide for detection of SNP TSC0044792
taaaacgttcccc

SEQ ID NO: 181033 - DNA, 13 bp, Artificial Sequence
  Oligonucleotide for detection of SNP TSC0044792
taggattttttty

SEQ ID NO: 181034 - DNA, 13 bp, Artificial Sequence
  Oligonucleotide for detection of SNP TSC0044792
raaaaaaatccta

SEQ ID NO: 181035 - DNA, 13 bp, Artificial Sequence
  Oligonucleotide for detection of SNP TSC0044792
taggatgttttty

SEQ ID NO: 181036 - DNA, 13 bp, Artificial Sequence
  Oligonucleotide for detection of SNP TSC0044792
raaaaacatccta

SEQ ID NO: 181037 - DNA, 13 bp, Artificial Sequence
  Oligonucleotide for detection of SNP TSC0044792
taggacgttttty

SEQ ID NO: 181038 - DNA, 13 bp, Artificial Sequence
  Oligonucleotide for detection of SNP TSC0044792
raaaaacgtccta

SEQ ID NO: 181039 - DNA, 13 bp, Artificial Sequence
  Oligonucleotide for detection of SNP TSC0044793
aagtaagagaaat

SEQ ID NO: 181040 - DNA, 13 bp, Artificial Sequence
  Oligonucleotide for detection of SNP TSC0044793
atttctcttactt

SEQ ID NO: 181041 - DNA, 13 bp, Artificial Sequence
  Oligonucleotide for detection of SNP TSC0044793
aagtaaaagaaat

SEQ ID NO: 181042 - DNA, 13 bp, Artificial Sequence
  Oligonucleotide for detection of SNP TSC0044793
atttcttttactt

SEQ ID NO: 181043 - DNA, 13 bp, Artificial Sequence
  Oligonucleotide for detection of SNP TSC0044794
tttatggaaataa

SEQ ID NO: 181044 - DNA, 13 bp, Artificial Sequence
  Oligonucleotide for detection of SNP TSC0044794
ttatttccataaa

SEQ ID NO: 181045 - DNA, 13 bp, Artificial Sequence
  Oligonucleotide for detection of SNP TSC0044794
tttatgaaaataa

SEQ ID NO: 181046 - DNA, 13 bp, Artificial Sequence
  Oligonucleotide for detection of SNP TSC0044794
ttattttcataaa

SEQ ID NO: 181047 - DNA, 13 bp, Artificial Sequence
  Oligonucleotide for detection of SNP TSC0044794
tttacggaaataa

SEQ ID NO: 181048 - DNA, 13 bp, Artificial Sequence
  Oligonucleotide for detection of SNP TSC0044794
ttatttccgtaaa

SEQ ID NO: 181049 - DNA, 13 bp, Artificial Sequence
  Oligonucleotide for detection of SNP TSC0044794
tttacgaaaataa

SEQ ID NO: 181050 - DNA, 13 bp, Artificial Sequence
  Oligonucleotide for detection of SNP TSC0044794
ttattttcgtaaa

SEQ ID NO: 181051 - DNA, 13 bp, Artificial Sequence
  Oligonucleotide for detection of SNP TSC0044796
tatagaaaagtty

SEQ ID NO: 181052 - DNA, 13 bp, Artificial Sequence
  Oligonucleotide for detection of SNP TSC0044796
raacttttctata

SEQ ID NO: 181053 - DNA, 13 bp, Artificial Sequence
  Oligonucleotide for detection of SNP TSC0044796
tatagagaagtty

SEQ ID NO: 181054 - DNA, 13 bp, Artificial Sequence
  Oligonucleotide for detection of SNP TSC0044796
raacttctctata

SEQ ID NO: 181055 - DNA, 13 bp, Artificial Sequence
  Oligonucleotide for detection of SNP TSC0044797
ttgttagaataag

SEQ ID NO: 181056 - DNA, 13 bp, Artificial Sequence
  Oligonucleotide for detection of SNP TSC0044797
cttattctaacaa

SEQ ID NO: 181057 - DNA, 13 bp, Artificial Sequence
  Oligonucleotide for detection of SNP TSC0044797
ttgttaaaataag

SEQ ID NO: 181058 - DNA, 13 bp, Artificial Sequence
  Oligonucleotide for detection of SNP TSC0044797
cttattttaacaa

SEQ ID NO: 181059 - DNA, 13 bp, Artificial Sequence
  Oligonucleotide for detection of SNP TSC0044799
ttttatatgtggg

SEQ ID NO: 181060 - DNA, 13 bp, Artificial Sequence
  Oligonucleotide for detection of SNP TSC0044799
cccacatataaaa

SEQ ID NO: 181061 - DNA, 13 bp, Artificial Sequence
  Oligonucleotide for detection of SNP TSC0044799
ttttatttgtggg

SEQ ID NO: 181062 - DNA, 13 bp, Artificial Sequence
  Oligonucleotide for detection of SNP TSC0044799
cccacaaataaaa

SEQ ID NO: 181063 - DNA, 13 bp, Artificial Sequence
  Oligonucleotide for detection of SNP TSC0044799
tttatatatagga

SEQ ID NO: 181064 - DNA, 13 bp, Artificial Sequence
  Oligonucleotide for detection of SNP TSC0044799
tcctatatataaa

SEQ ID NO: 181065 - DNA, 13 bp, Artificial Sequence
  Oligonucleotide for detection of SNP TSC0044799
tttataaatagga

SEQ ID NO: 181066 - DNA, 13 bp, Artificial Sequence
  Oligonucleotide for detection of SNP TSC0044799
tcctatttataaa

SEQ ID NO: 181067 - DNA, 13 bp, Artificial Sequence
  Oligonucleotide for detection of SNP TSC0044800
tttttaattagtt

SEQ ID NO: 181068 - DNA, 13 bp, Artificial Sequence
  Oligonucleotide for detection of SNP TSC0044800
aactaattaaaaa

SEQ ID NO: 181069 - DNA, 13 bp, Artificial Sequence
  Oligonucleotide for detection of SNP TSC0044803
agtgatagtagat

SEQ ID NO: 181070 - DNA, 13 bp, Artificial Sequence
  Oligonucleotide for detection of SNP TSC0044803
atctactatcact

SEQ ID NO: 181071 - DNA, 13 bp, Artificial Sequence
  Oligonucleotide for detection of SNP TSC0044803
agtgatggtagat

SEQ ID NO: 181072 - DNA, 13 bp, Artificial Sequence
  Oligonucleotide for detection of SNP TSC0044803
atctaccatcact

SEQ ID NO: 181073 - DNA, 13 bp, Artificial Sequence
  Oligonucleotide for detection of SNP TSC0044803
agtgacggtagat

SEQ ID NO: 181074 - DNA, 13 bp, Artificial Sequence
  Oligonucleotide for detection of SNP TSC0044803
atctaccgtcact

SEQ ID NO: 181075 - DNA, 13 bp, Artificial Sequence
  Oligonucleotide for detection of SNP TSC0044803
atttattgttatt

SEQ ID NO: 181076 - DNA, 13 bp, Artificial Sequence
  Oligonucleotide for detection of SNP TSC0044803
aataacaataaat

SEQ ID NO: 181077 - DNA, 13 bp, Artificial Sequence
  Oligonucleotide for detection of SNP TSC0044803
atttatcgttatt

SEQ ID NO: 181078 - DNA, 13 bp, Artificial Sequence
  Oligonucleotide for detection of SNP TSC0044803
aataacgataaat

SEQ ID NO: 181079 - DNA, 13 bp, Artificial Sequence
  Oligonucleotide for detection of SNP TSC0044804
gaaagaaattggy

SEQ ID NO: 181080 - DNA, 13 bp, Artificial Sequence
  Oligonucleotide for detection of SNP TSC0044804
rccaatttctttc

SEQ ID NO: 181081 - DNA, 13 bp, Artificial Sequence
  Oligonucleotide for detection of SNP TSC0044804
gaaagagattggy

SEQ ID NO: 181082 - DNA, 13 bp, Artificial Sequence
  Oligonucleotide for detection of SNP TSC0044804
rccaatctctttc

SEQ ID NO: 181083 - DNA, 13 bp, Artificial Sequence
  Oligonucleotide for detection of SNP TSC0044805
tatttatggaaat

SEQ ID NO: 181084 - DNA, 13 bp, Artificial Sequence
  Oligonucleotide for detection of SNP TSC0044805
atttccataaata

SEQ ID NO: 181085 - DNA, 13 bp, Artificial Sequence
  Oligonucleotide for detection of SNP TSC0044805
tatttacggaaat

SEQ ID NO: 181086 - DNA, 13 bp, Artificial Sequence
  Oligonucleotide for detection of SNP TSC0044805
atttccgtaaata

SEQ ID NO: 181087 - DNA, 13 bp, Artificial Sequence
  Oligonucleotide for detection of SNP TSC0044808
gtatttttttttt

SEQ ID NO: 181088 - DNA, 13 bp, Artificial Sequence
  Oligonucleotide for detection of SNP TSC0044808
aaaaaaaaaatac

SEQ ID NO: 181089 - DNA, 13 bp, Artificial Sequence
  Oligonucleotide for detection of SNP TSC0044808
aagaggtaggtgy

SEQ ID NO: 181090 - DNA, 13 bp, Artificial Sequence
  Oligonucleotide for detection of SNP TSC0044808
rcacctacctctt

SEQ ID NO: 181091 - DNA, 13 bp, Artificial Sequence
  Oligonucleotide for detection of SNP TSC0044808
aagagggaggtgy

SEQ ID NO: 181092 - DNA, 13 bp, Artificial Sequence
  Oligonucleotide for detection of SNP TSC0044808
rcacctccctctt

SEQ ID NO: 181093 - DNA, 13 bp, Artificial Sequence
  Oligonucleotide for detection of SNP TSC0044809
gggtaggttagag

SEQ ID NO: 181094 - DNA, 13 bp, Artificial Sequence
  Oligonucleotide for detection of SNP TSC0044809
ctctaacctaccc

SEQ ID NO: 181095 - DNA, 13 bp, Artificial Sequence
  Oligonucleotide for detection of SNP TSC0044809
gggtagattagag

SEQ ID NO: 181096 - DNA, 13 bp, Artificial Sequence
  Oligonucleotide for detection of SNP TSC0044809
ctctaatctaccc

SEQ ID NO: 181097 - DNA, 13 bp, Artificial Sequence
  Oligonucleotide for detection of SNP TSC0007673
tgtatagtttggg

SEQ ID NO: 181098 - DNA, 13 bp, Artificial Sequence
  Oligonucleotide for detection of SNP TSC0007673
cccaaactataca

SEQ ID NO: 181099 - DNA, 13 bp, Artificial Sequence
  Oligonucleotide for detection of SNP TSC0007673
tgtataatttggg

SEQ ID NO: 181100 - DNA, 13 bp, Artificial Sequence
  Oligonucleotide for detection of SNP TSC0007673
cccaaattataca

SEQ ID NO: 181101 - DNA, 13 bp, Artificial Sequence
  Oligonucleotide for detection of SNP TSC0007674
aaaattaggtaat

SEQ ID NO: 181102 - DNA, 13 bp, Artificial Sequence
  Oligonucleotide for detection of SNP TSC0007674
attacctaatttt

SEQ ID NO: 181103 - DNA, 13 bp, Artificial Sequence
  Oligonucleotide for detection of SNP TSC0007674
aaaattgggtaat

SEQ ID NO: 181104 - DNA, 13 bp, Artificial Sequence
  Oligonucleotide for detection of SNP TSC0007674
attacccaatttt

SEQ ID NO: 181105 - DNA, 13 bp, Artificial Sequence
  Oligonucleotide for detection of SNP TSC0044814
aggttaaagtggt

SEQ ID NO: 181106 - DNA, 13 bp, Artificial Sequence
  Oligonucleotide for detection of SNP TSC0044814
accactttaacct

SEQ ID NO: 181107 - DNA, 13 bp, Artificial Sequence
  Oligonucleotide for detection of SNP TSC0044814
aggttagagtggt

SEQ ID NO: 181108 - DNA, 13 bp, Artificial Sequence
  Oligonucleotide for detection of SNP TSC0044814
accactctaacct

SEQ ID NO: 181109 - DNA, 13 bp, Artificial Sequence
  Oligonucleotide for detection of SNP TSC0044815
ttttgaagatggg

SEQ ID NO: 181110 - DNA, 13 bp, Artificial Sequence
  Oligonucleotide for detection of SNP TSC0044815
cccatcttcaaaa

SEQ ID NO: 181111 - DNA, 13 bp, Artificial Sequence
  Oligonucleotide for detection of SNP TSC0044815
ttttgaggatggg

SEQ ID NO: 181112 - DNA, 13 bp, Artificial Sequence
  Oligonucleotide for detection of SNP TSC0044815
cccatcctcaaaa

SEQ ID NO: 181113 - DNA, 13 bp, Artificial Sequence
  Oligonucleotide for detection of SNP TSC0044818
ggtgtttaaatta

SEQ ID NO: 181114 - DNA, 13 bp, Artificial Sequence
  Oligonucleotide for detection of SNP TSC0044818
taatttaaacacc

SEQ ID NO: 181115 - DNA, 13 bp, Artificial Sequence
  Oligonucleotide for detection of SNP TSC0044818
ggtgttgaaatta

SEQ ID NO: 181116 - DNA, 13 bp, Artificial Sequence
  Oligonucleotide for detection of SNP TSC0044818
taatttcaacacc

SEQ ID NO: 181117 - DNA, 13 bp, Artificial Sequence
  Oligonucleotide for detection of SNP TSC0044818
taatttaagtaty

SEQ ID NO: 181118 - DNA, 13 bp, Artificial Sequence
  Oligonucleotide for detection of SNP TSC0044818
ratacttaaatta

SEQ ID NO: 181119 - DNA, 13 bp, Artificial Sequence
  Oligonucleotide for detection of SNP TSC0044818
taattttagtaty

SEQ ID NO: 181120 - DNA, 13 bp, Artificial Sequence
  Oligonucleotide for detection of SNP TSC0044818
ratactaaaatta

SEQ ID NO: 181121 - DNA, 13 bp, Artificial Sequence
  Oligonucleotide for detection of SNP TSC0044819
gttattataatty

SEQ ID NO: 181122 - DNA, 13 bp, Artificial Sequence
  Oligonucleotide for detection of SNP TSC0044819
raattataataac

SEQ ID NO: 181123 - DNA, 13 bp, Artificial Sequence
  Oligonucleotide for detection of SNP TSC0044819
gttattttaatty

SEQ ID NO: 181124 - DNA, 13 bp, Artificial Sequence
  Oligonucleotide for detection of SNP TSC0044819
raattaaaataac

SEQ ID NO: 181125 - DNA, 13 bp, Artificial Sequence
  Oligonucleotide for detection of SNP TSC0044819
gggttgtggtggy

SEQ ID NO: 181126 - DNA, 13 bp, Artificial Sequence
  Oligonucleotide for detection of SNP TSC0044819
rccaccacaaccc

SEQ ID NO: 181127 - DNA, 13 bp, Artificial Sequence
  Oligonucleotide for detection of SNP TSC0044819
gggttgaggtggy

SEQ ID NO: 181128 - DNA, 13 bp, Artificial Sequence
  Oligonucleotide for detection of SNP TSC0044819
rccacctcaaccc

SEQ ID NO: 181129 - DNA, 13 bp, Artificial Sequence
  Oligonucleotide for detection of SNP TSC0044821
gagtttatagtat

SEQ ID NO: 181130 - DNA, 13 bp, Artificial Sequence
  Oligonucleotide for detection of SNP TSC0044821
atactataaactc

SEQ ID NO: 181131 - DNA, 13 bp, Artificial Sequence
  Oligonucleotide for detection of SNP TSC0044821
gagtttttagtat

SEQ ID NO: 181132 - DNA, 13 bp, Artificial Sequence
  Oligonucleotide for detection of SNP TSC0044821
atactaaaaactc

SEQ ID NO: 181133 - DNA, 13 bp, Artificial Sequence
  Oligonucleotide for detection of SNP TSC0044821
atgttgtagatty

SEQ ID NO: 181134 - DNA, 13 bp, Artificial Sequence
  Oligonucleotide for detection of SNP TSC0044821
raatctacaacat

SEQ ID NO: 181135 - DNA, 13 bp, Artificial Sequence
  Oligonucleotide for detection of SNP TSC0044821
atgttggagatty

SEQ ID NO: 181136 - DNA, 13 bp, Artificial Sequence
  Oligonucleotide for detection of SNP TSC0044821
raatctccaacat

SEQ ID NO: 181137 - DNA, 13 bp, Artificial Sequence
  Oligonucleotide for detection of SNP TSC0004965
ttaatatgtatgg

SEQ ID NO: 181138 - DNA, 13 bp, Artificial Sequence
  Oligonucleotide for detection of SNP TSC0004965
ccatacatattaa

SEQ ID NO: 181139 - DNA, 13 bp, Artificial Sequence
  Oligonucleotide for detection of SNP TSC0004965
ttaataggtatgg

SEQ ID NO: 181140 - DNA, 13 bp, Artificial Sequence
  Oligonucleotide for detection of SNP TSC0004965
ccatacctattaa

SEQ ID NO: 181141 - DNA, 13 bp, Artificial Sequence
  Oligonucleotide for detection of SNP TSC0004965
ttaatacgtatgg

SEQ ID NO: 181142 - DNA, 13 bp, Artificial Sequence
  Oligonucleotide for detection of SNP TSC0004965
ccatacgtattaa

SEQ ID NO: 181143 - DNA, 13 bp, Artificial Sequence
  Oligonucleotide for detection of SNP TSC0004965
ttatatttattag

SEQ ID NO: 181144 - DNA, 13 bp, Artificial Sequence
  Oligonucleotide for detection of SNP TSC0004965
ctaataaatataa

SEQ ID NO: 181145 - DNA, 13 bp, Artificial Sequence
  Oligonucleotide for detection of SNP TSC0004966
ggaatatggtatt

SEQ ID NO: 181146 - DNA, 13 bp, Artificial Sequence
  Oligonucleotide for detection of SNP TSC0004966
aataccatattcc

SEQ ID NO: 181147 - DNA, 13 bp, Artificial Sequence
  Oligonucleotide for detection of SNP TSC0004966
ggaatacggtatt

SEQ ID NO: 181148 - DNA, 13 bp, Artificial Sequence
  Oligonucleotide for detection of SNP TSC0004966
aataccgtattcc

SEQ ID NO: 181149 - DNA, 13 bp, Artificial Sequence
  Oligonucleotide for detection of SNP TSC0004966
aatgttgtgttty

SEQ ID NO: 181150 - DNA, 13 bp, Artificial Sequence
  Oligonucleotide for detection of SNP TSC0004966
raaacacaacatt

SEQ ID NO: 181151 - DNA, 13 bp, Artificial Sequence
  Oligonucleotide for detection of SNP TSC0004966
aatgttatgttty

SEQ ID NO: 181152 - DNA, 13 bp, Artificial Sequence
  Oligonucleotide for detection of SNP TSC0004966
raaacataacatt

SEQ ID NO: 181153 - DNA, 13 bp, Artificial Sequence
  Oligonucleotide for detection of SNP TSC0004966
aatgtcgtgttty

SEQ ID NO: 181154 - DNA, 13 bp, Artificial Sequence
  Oligonucleotide for detection of SNP TSC0004966
raaacacgacatt

SEQ ID NO: 181155 - DNA, 13 bp, Artificial Sequence
  Oligonucleotide for detection of SNP TSC0004967
aatagaattttaa

SEQ ID NO: 181156 - DNA, 13 bp, Artificial Sequence
  Oligonucleotide for detection of SNP TSC0004967
ttaaaattctatt

SEQ ID NO: 181157 - DNA, 13 bp, Artificial Sequence
  Oligonucleotide for detection of SNP TSC0004967
aatagatttttaa

SEQ ID NO: 181158 - DNA, 13 bp, Artificial Sequence
  Oligonucleotide for detection of SNP TSC0004967
ttaaaaatctatt

SEQ ID NO: 181159 - DNA, 13 bp, Artificial Sequence
  Oligonucleotide for detection of SNP TSC0004967
ttagggttttgtt

SEQ ID NO: 181160 - DNA, 13 bp, Artificial Sequence
  Oligonucleotide for detection of SNP TSC0004967
aacaaaaccctaa

SEQ ID NO: 181161 - DNA, 13 bp, Artificial Sequence
  Oligonucleotide for detection of SNP TSC0044822
gtgatatatattg

SEQ ID NO: 181162 - DNA, 13 bp, Artificial Sequence
  Oligonucleotide for detection of SNP TSC0044822
caatatatatcac

SEQ ID NO: 181163 - DNA, 13 bp, Artificial Sequence
  Oligonucleotide for detection of SNP TSC0044822
gtgatagatattg

SEQ ID NO: 181164 - DNA, 13 bp, Artificial Sequence
  Oligonucleotide for detection of SNP TSC0044822
caatatctatcac

SEQ ID NO: 181165 - DNA, 13 bp, Artificial Sequence
  Oligonucleotide for detection of SNP TSC0044822
tagtgtatgttay

SEQ ID NO: 181166 - DNA, 13 bp, Artificial Sequence
  Oligonucleotide for detection of SNP TSC0044822
rtaacatacacta

SEQ ID NO: 181167 - DNA, 13 bp, Artificial Sequence
  Oligonucleotide for detection of SNP TSC0044822
tagtgtttgttay

SEQ ID NO: 181168 - DNA, 13 bp, Artificial Sequence
  Oligonucleotide for detection of SNP TSC0044822
rtaacaaacacta

SEQ ID NO: 181169 - DNA, 13 bp, Artificial Sequence
  Oligonucleotide for detection of SNP TSC0044823
ggttaggttttat

SEQ ID NO: 181170 - DNA, 13 bp, Artificial Sequence
  Oligonucleotide for detection of SNP TSC0044823
ataaaacctaacc

SEQ ID NO: 181171 - DNA, 13 bp, Artificial Sequence
  Oligonucleotide for detection of SNP TSC0044823
ggttagattttat

SEQ ID NO: 181172 - DNA, 13 bp, Artificial Sequence
  Oligonucleotide for detection of SNP TSC0044823
ataaaatctaacc

SEQ ID NO: 181173 - DNA, 13 bp, Artificial Sequence
  Oligonucleotide for detection of SNP TSC0044824
ttgtgtattatat

SEQ ID NO: 181174 - DNA, 13 bp, Artificial Sequence
  Oligonucleotide for detection of SNP TSC0044824
atataatacacaa

SEQ ID NO: 181175 - DNA, 13 bp, Artificial Sequence
  Oligonucleotide for detection of SNP TSC0044824
ttgtgtgttatat

SEQ ID NO: 181176 - DNA, 13 bp, Artificial Sequence
  Oligonucleotide for detection of SNP TSC0044824
atataacacacaa

SEQ ID NO: 181177 - DNA, 13 bp, Artificial Sequence
  Oligonucleotide for detection of SNP TSC0044826
taataataaatta

SEQ ID NO: 181178 - DNA, 13 bp, Artificial Sequence
  Oligonucleotide for detection of SNP TSC0044826
taatttattatta

SEQ ID NO: 181179 - DNA, 13 bp, Artificial Sequence
  Oligonucleotide for detection of SNP TSC0044826
taataagaaatta

SEQ ID NO: 181180 - DNA, 13 bp, Artificial Sequence
  Oligonucleotide for detection of SNP TSC0044826
taatttcttatta

SEQ ID NO: 181181 - DNA, 13 bp, Artificial Sequence
  Oligonucleotide for detection of SNP TSC0044826
tggttttttatta

SEQ ID NO: 181182 - DNA, 13 bp, Artificial Sequence
  Oligonucleotide for detection of SNP TSC0044826
taataaaaaacca

SEQ ID NO: 181183 - DNA, 13 bp, Artificial Sequence
  Oligonucleotide for detection of SNP TSC0044827
gttttttggagaa

SEQ ID NO: 181184 - DNA, 13 bp, Artificial Sequence
  Oligonucleotide for detection of SNP TSC0044827
ttctccaaaaaac

SEQ ID NO: 181185 - DNA, 13 bp, Artificial Sequence
  Oligonucleotide for detection of SNP TSC0044827
gtttttcggagaa

SEQ ID NO: 181186 - DNA, 13 bp, Artificial Sequence
  Oligonucleotide for detection of SNP TSC0044827
ttctccgaaaaac

SEQ ID NO: 181187 - DNA, 13 bp, Artificial Sequence
  Oligonucleotide for detection of SNP TSC0044827
ttttttgagagay

SEQ ID NO: 181188 - DNA, 13 bp, Artificial Sequence
  Oligonucleotide for detection of SNP TSC0044827
rtctctcaaaaaa

SEQ ID NO: 181189 - DNA, 13 bp, Artificial Sequence
  Oligonucleotide for detection of SNP TSC0044827
ttttttaagagay

SEQ ID NO: 181190 - DNA, 13 bp, Artificial Sequence
  Oligonucleotide for detection of SNP TSC0044827
rtctcttaaaaaa

SEQ ID NO: 181191 - DNA, 13 bp, Artificial Sequence
  Oligonucleotide for detection of SNP TSC0044827
tttttcgagagay

SEQ ID NO: 181192 - DNA, 13 bp, Artificial Sequence
  Oligonucleotide for detection of SNP TSC0044827
rtctctcgaaaaa

SEQ ID NO: 181193 - DNA, 13 bp, Artificial Sequence
  Oligonucleotide for detection of SNP TSC0044828
ggttttttagtgy

SEQ ID NO: 181194 - DNA, 13 bp, Artificial Sequence
  Oligonucleotide for detection of SNP TSC0044828
rcactaaaaaacc

SEQ ID NO: 181195 - DNA, 13 bp, Artificial Sequence
  Oligonucleotide for detection of SNP TSC0044828
gtattgtggggty

SEQ ID NO: 181196 - DNA, 13 bp, Artificial Sequence
  Oligonucleotide for detection of SNP TSC0044828
raccccacaatac

SEQ ID NO: 181197 - DNA, 13 bp, Artificial Sequence
  Oligonucleotide for detection of SNP TSC0044828
gtattggggggty

SEQ ID NO: 181198 - DNA, 13 bp, Artificial Sequence
  Oligonucleotide for detection of SNP TSC0044828
raccccccaatac

SEQ ID NO: 181199 - DNA, 13 bp, Artificial Sequence
  Oligonucleotide for detection of SNP TSC0044829
ttagtagtatagt

SEQ ID NO: 181200 - DNA, 13 bp, Artificial Sequence
  Oligonucleotide for detection of SNP TSC0044829
actatactactaa

SEQ ID NO: 181201 - DNA, 13 bp, Artificial Sequence
  Oligonucleotide for detection of SNP TSC0044829
ttagtaatatagt

SEQ ID NO: 181202 - DNA, 13 bp, Artificial Sequence
  Oligonucleotide for detection of SNP TSC0044829
actatattactaa

SEQ ID NO: 181203 - DNA, 13 bp, Artificial Sequence
  Oligonucleotide for detection of SNP TSC0044830
aagagaatgttgg

SEQ ID NO: 181204 - DNA, 13 bp, Artificial Sequence
  Oligonucleotide for detection of SNP TSC0044830
ccaacattctctt

SEQ ID NO: 181205 - DNA, 13 bp, Artificial Sequence
  Oligonucleotide for detection of SNP TSC0044830
aagagattgttgg

SEQ ID NO: 181206 - DNA, 13 bp, Artificial Sequence
  Oligonucleotide for detection of SNP TSC0044830
ccaacaatctctt

SEQ ID NO: 181207 - DNA, 13 bp, Artificial Sequence
  Oligonucleotide for detection of SNP TSC0044830
ttaataatttttt

SEQ ID NO: 181208 - DNA, 13 bp, Artificial Sequence
  Oligonucleotide for detection of SNP TSC0044830
aaaaaattattaa

SEQ ID NO: 181209 - DNA, 13 bp, Artificial Sequence
  Oligonucleotide for detection of SNP TSC0044831
aagtttgtatata

SEQ ID NO: 181210 - DNA, 13 bp, Artificial Sequence
  Oligonucleotide for detection of SNP TSC0044831
tatatacaaactt

SEQ ID NO: 181211 - DNA, 13 bp, Artificial Sequence
  Oligonucleotide for detection of SNP TSC0044831
aagtttatatata

SEQ ID NO: 181212 - DNA, 13 bp, Artificial Sequence
  Oligonucleotide for detection of SNP TSC0044831
tatatataaactt

SEQ ID NO: 181213 - DNA, 13 bp, Artificial Sequence
  Oligonucleotide for detection of SNP TSC0044835
atatttgtttatg

SEQ ID NO: 181214 - DNA, 13 bp, Artificial Sequence
  Oligonucleotide for detection of SNP TSC0044835
cataaacaaatat

SEQ ID NO: 181215 - DNA, 13 bp, Artificial Sequence
  Oligonucleotide for detection of SNP TSC0044835
atattcgtttatg

SEQ ID NO: 181216 - DNA, 13 bp, Artificial Sequence
  Oligonucleotide for detection of SNP TSC0044835
cataaacgaatat

SEQ ID NO: 181217 - DNA, 13 bp, Artificial Sequence
  Oligonucleotide for detection of SNP TSC0044835
tatggatggatat

SEQ ID NO: 181218 - DNA, 13 bp, Artificial Sequence
  Oligonucleotide for detection of SNP TSC0044835
atatccatccata

SEQ ID NO: 181219 - DNA, 13 bp, Artificial Sequence
  Oligonucleotide for detection of SNP TSC0044835
tatggacggatat

SEQ ID NO: 181220 - DNA, 13 bp, Artificial Sequence
  Oligonucleotide for detection of SNP TSC0044835
atatccgtccata

SEQ ID NO: 181221 - DNA, 13 bp, Artificial Sequence
  Oligonucleotide for detection of SNP TSC0044837
aaatgtatattta

SEQ ID NO: 181222 - DNA, 13 bp, Artificial Sequence
  Oligonucleotide for detection of SNP TSC0044837
taaatatacattt

SEQ ID NO: 181223 - DNA, 13 bp, Artificial Sequence
  Oligonucleotide for detection of SNP TSC0044837
aaatgtttattta

SEQ ID NO: 181224 - DNA, 13 bp, Artificial Sequence
  Oligonucleotide for detection of SNP TSC0044837
taaataaacattt

SEQ ID NO: 181225 - DNA, 13 bp, Artificial Sequence
  Oligonucleotide for detection of SNP TSC0044837
taaatgtgtattt

SEQ ID NO: 181226 - DNA, 13 bp, Artificial Sequence
  Oligonucleotide for detection of SNP TSC0044837
aaatacacattta

SEQ ID NO: 181227 - DNA, 13 bp, Artificial Sequence
  Oligonucleotide for detection of SNP TSC0044837
taaatgagtattt

SEQ ID NO: 181228 - DNA, 13 bp, Artificial Sequence
  Oligonucleotide for detection of SNP TSC0044837
aaatactcattta

SEQ ID NO: 181229 - DNA, 13 bp, Artificial Sequence
  Oligonucleotide for detection of SNP TSC0044838
gattagatgttty

SEQ ID NO: 181230 - DNA, 13 bp, Artificial Sequence
  Oligonucleotide for detection of SNP TSC0044838
raaacatctaatc

SEQ ID NO: 181231 - DNA, 13 bp, Artificial Sequence
  Oligonucleotide for detection of SNP TSC0044838
gattagttgttty

SEQ ID NO: 181232 - DNA, 13 bp, Artificial Sequence
  Oligonucleotide for detection of SNP TSC0044838
raaacaactaatc

SEQ ID NO: 181233 - DNA, 13 bp, Artificial Sequence
  Oligonucleotide for detection of SNP TSC0044838
gaagtatttggty

SEQ ID NO: 181234 - DNA, 13 bp, Artificial Sequence
  Oligonucleotide for detection of SNP TSC0044838
raccaaatacttc

SEQ ID NO: 181235 - DNA, 13 bp, Artificial Sequence
  Oligonucleotide for detection of SNP TSC0044838
gaagtagttggty

SEQ ID NO: 181236 - DNA, 13 bp, Artificial Sequence
  Oligonucleotide for detection of SNP TSC0044838
raccaactacttc

SEQ ID NO: 181237 - DNA, 13 bp, Artificial Sequence
  Oligonucleotide for detection of SNP TSC0044839
tttatttgtttgy

SEQ ID NO: 181238 - DNA, 13 bp, Artificial Sequence
  Oligonucleotide for detection of SNP TSC0044839
rcaaacaaataaa

SEQ ID NO: 181239 - DNA, 13 bp, Artificial Sequence
  Oligonucleotide for detection of SNP TSC0044839
tttattcgtttgy

SEQ ID NO: 181240 - DNA, 13 bp, Artificial Sequence
  Oligonucleotide for detection of SNP TSC0044839
rcaaacgaataaa

SEQ ID NO: 181241 - DNA, 13 bp, Artificial Sequence
  Oligonucleotide for detection of SNP TSC0044839
tttatttgttcgy

SEQ ID NO: 181242 - DNA, 13 bp, Artificial Sequence
  Oligonucleotide for detection of SNP TSC0044839
rcgaacaaataaa

SEQ ID NO: 181243 - DNA, 13 bp, Artificial Sequence
  Oligonucleotide for detection of SNP TSC0044839
tttattcgttcgy

SEQ ID NO: 181244 - DNA, 13 bp, Artificial Sequence
  Oligonucleotide for detection of SNP TSC0044839
rcgaacgaataaa

SEQ ID NO: 181245 - DNA, 13 bp, Artificial Sequence
  Oligonucleotide for detection of SNP TSC0044839
gtgggtgggtgga

SEQ ID NO: 181246 - DNA, 13 bp, Artificial Sequence
  Oligonucleotide for detection of SNP TSC0044839
tccacccacccac

SEQ ID NO: 181247 - DNA, 13 bp, Artificial Sequence
  Oligonucleotide for detection of SNP TSC0044839
gtgggtaggtgga

SEQ ID NO: 181248 - DNA, 13 bp, Artificial Sequence
  Oligonucleotide for detection of SNP TSC0044839
tccacctacccac

SEQ ID NO: 181249 - DNA, 13 bp, Artificial Sequence
  Oligonucleotide for detection of SNP TSC0044839
gcgggtgggtgga

SEQ ID NO: 181250 - DNA, 13 bp, Artificial Sequence
  Oligonucleotide for detection of SNP TSC0044839
tccacccacccgc

SEQ ID NO: 181251 - DNA, 13 bp, Artificial Sequence
  Oligonucleotide for detection of SNP TSC0044839
gcgggtaggtgga

SEQ ID NO: 181252 - DNA, 13 bp, Artificial Sequence
  Oligonucleotide for detection of SNP TSC0044839
tccacctacccgc

SEQ ID NO: 181253 - DNA, 13 bp, Artificial Sequence
  Oligonucleotide for detection of SNP TSC0044839
gtgggcgggtgga

SEQ ID NO: 181254 - DNA, 13 bp, Artificial Sequence
  Oligonucleotide for detection of SNP TSC0044839
tccacccgcccac

SEQ ID NO: 181255 - DNA, 13 bp, Artificial Sequence
  Oligonucleotide for detection of SNP TSC0044839
gcgggcgggtgga

SEQ ID NO: 181256 - DNA, 13 bp, Artificial Sequence
  Oligonucleotide for detection of SNP TSC0044839
tccacccgcccgc

SEQ ID NO: 181257 - DNA, 13 bp, Artificial Sequence
  Oligonucleotide for detection of SNP TSC0044843
tggtattttattt

SEQ ID NO: 181258 - DNA, 13 bp, Artificial Sequence
  Oligonucleotide for detection of SNP TSC0044843
aaataaaatacca

SEQ ID NO: 181259 - DNA, 13 bp, Artificial Sequence
  Oligonucleotide for detection of SNP TSC0044843
tggtatgttattt

SEQ ID NO: 181260 - DNA, 13 bp, Artificial Sequence
  Oligonucleotide for detection of SNP TSC0044843
aaataacatacca

SEQ ID NO: 181261 - DNA, 13 bp, Artificial Sequence
  Oligonucleotide for detection of SNP TSC0044843
tggtacgttattt

SEQ ID NO: 181262 - DNA, 13 bp, Artificial Sequence
  Oligonucleotide for detection of SNP TSC0044843
aaataacgtacca

SEQ ID NO: 181263 - DNA, 13 bp, Artificial Sequence
  Oligonucleotide for detection of SNP TSC0044843
aaatggagtatta

SEQ ID NO: 181264 - DNA, 13 bp, Artificial Sequence
  Oligonucleotide for detection of SNP TSC0044843
taatactccattt

SEQ ID NO: 181265 - DNA, 13 bp, Artificial Sequence
  Oligonucleotide for detection of SNP TSC0044843
aaatggtgtatta

SEQ ID NO: 181266 - DNA, 13 bp, Artificial Sequence
  Oligonucleotide for detection of SNP TSC0044843
taatacaccattt

SEQ ID NO: 181267 - DNA, 13 bp, Artificial Sequence
  Oligonucleotide for detection of SNP TSC0044843
aaatggcgtatta

SEQ ID NO: 181268 - DNA, 13 bp, Artificial Sequence
  Oligonucleotide for detection of SNP TSC0044843
taatacgccattt

SEQ ID NO: 181269 - DNA, 13 bp, Artificial Sequence
  Oligonucleotide for detection of SNP TSC0044844
ggtggtatttggy

SEQ ID NO: 181270 - DNA, 13 bp, Artificial Sequence
  Oligonucleotide for detection of SNP TSC0044844
rccaaataccacc

SEQ ID NO: 181271 - DNA, 13 bp, Artificial Sequence
  Oligonucleotide for detection of SNP TSC0044844
ggtggtgtttggy

SEQ ID NO: 181272 - DNA, 13 bp, Artificial Sequence
  Oligonucleotide for detection of SNP TSC0044844
rccaaacaccacc

SEQ ID NO: 181273 - DNA, 13 bp, Artificial Sequence
  Oligonucleotide for detection of SNP TSC0044844
ggtggcgtttggy

SEQ ID NO: 181274 - DNA, 13 bp, Artificial Sequence
  Oligonucleotide for detection of SNP TSC0044844
rccaaacgccacc

SEQ ID NO: 181275 - DNA, 13 bp, Artificial Sequence
  Oligonucleotide for detection of SNP TSC0044844
gttaagtgttaty

SEQ ID NO: 181276 - DNA, 13 bp, Artificial Sequence
  Oligonucleotide for detection of SNP TSC0044844
rataacacttaac

SEQ ID NO: 181277 - DNA, 13 bp, Artificial Sequence
  Oligonucleotide for detection of SNP TSC0044844
gttaagcgttaty

SEQ ID NO: 181278 - DNA, 13 bp, Artificial Sequence
  Oligonucleotide for detection of SNP TSC0044844
rataacgcttaac

SEQ ID NO: 181279 - DNA, 13 bp, Artificial Sequence
  Oligonucleotide for detection of SNP TSC0008647
ttttaatgttgga

SEQ ID NO: 181280 - DNA, 13 bp, Artificial Sequence
  Oligonucleotide for detection of SNP TSC0008647
tccaacattaaaa

SEQ ID NO: 181281 - DNA, 13 bp, Artificial Sequence
  Oligonucleotide for detection of SNP TSC0008647
ttttaacgttgga

SEQ ID NO: 181282 - DNA, 13 bp, Artificial Sequence
  Oligonucleotide for detection of SNP TSC0008647
tccaacgttaaaa

SEQ ID NO: 181283 - DNA, 13 bp, Artificial Sequence
  Oligonucleotide for detection of SNP TSC0008647
tttaatgttgggg

SEQ ID NO: 181284 - DNA, 13 bp, Artificial Sequence
  Oligonucleotide for detection of SNP TSC0008647
ccccaacattaaa

SEQ ID NO: 181285 - DNA, 13 bp, Artificial Sequence
  Oligonucleotide for detection of SNP TSC0008647
tttaacgttgggg

SEQ ID NO: 181286 - DNA, 13 bp, Artificial Sequence
  Oligonucleotide for detection of SNP TSC0008647
ccccaacgttaaa

SEQ ID NO: 181287 - DNA, 13 bp, Artificial Sequence
  Oligonucleotide for detection of SNP TSC0044848
ttattagaaaaaa

SEQ ID NO: 181288 - DNA, 13 bp, Artificial Sequence
  Oligonucleotide for detection of SNP TSC0044848
ttttttctaataa

SEQ ID NO: 181289 - DNA, 13 bp, Artificial Sequence
  Oligonucleotide for detection of SNP TSC0004937
tgtaaatggaagy

SEQ ID NO: 181290 - DNA, 13 bp, Artificial Sequence
  Oligonucleotide for detection of SNP TSC0004937
rcttccatttaca

SEQ ID NO: 181291 - DNA, 13 bp, Artificial Sequence
  Oligonucleotide for detection of SNP TSC0004937
tgtaaacggaagy

SEQ ID NO: 181292 - DNA, 13 bp, Artificial Sequence
  Oligonucleotide for detection of SNP TSC0004937
rcttccgtttaca

SEQ ID NO: 181293 - DNA, 13 bp, Artificial Sequence
  Oligonucleotide for detection of SNP TSC0044851
gaaaggtgtgatg

SEQ ID NO: 181294 - DNA, 13 bp, Artificial Sequence
  Oligonucleotide for detection of SNP TSC0044851
catcacacctttc

SEQ ID NO: 181295 - DNA, 13 bp, Artificial Sequence
  Oligonucleotide for detection of SNP TSC0044851
gaaaggagtgatg

SEQ ID NO: 181296 - DNA, 13 bp, Artificial Sequence
  Oligonucleotide for detection of SNP TSC0044851
catcactcctttc

SEQ ID NO: 181297 - DNA, 13 bp, Artificial Sequence
  Oligonucleotide for detection of SNP TSC0044852
tttgtttttagtg

SEQ ID NO: 181298 - DNA, 13 bp, Artificial Sequence
  Oligonucleotide for detection of SNP TSC0044852
cactaaaaacaaa

SEQ ID NO: 181299 - DNA, 13 bp, Artificial Sequence
  Oligonucleotide for detection of SNP TSC0044852
tttgttgttagtg

SEQ ID NO: 181300 - DNA, 13 bp, Artificial Sequence
  Oligonucleotide for detection of SNP TSC0044852
cactaacaacaaa

SEQ ID NO: 181301 - DNA, 13 bp, Artificial Sequence
  Oligonucleotide for detection of SNP TSC0044852
tattgaaagtaag

SEQ ID NO: 181302 - DNA, 13 bp, Artificial Sequence
  Oligonucleotide for detection of SNP TSC0044852
cttactttcaata

SEQ ID NO: 181303 - DNA, 13 bp, Artificial Sequence
  Oligonucleotide for detection of SNP TSC0044852
tattgatagtaag

SEQ ID NO: 181304 - DNA, 13 bp, Artificial Sequence
  Oligonucleotide for detection of SNP TSC0044852
cttactatcaata

SEQ ID NO: 181305 - DNA, 13 bp, Artificial Sequence
  Oligonucleotide for detection of SNP TSC0044853
gaaagtggggtaa

SEQ ID NO: 181306 - DNA, 13 bp, Artificial Sequence
  Oligonucleotide for detection of SNP TSC0044853
ttaccccactttc

SEQ ID NO: 181307 - DNA, 13 bp, Artificial Sequence
  Oligonucleotide for detection of SNP TSC0044853
gaaagtagggtaa

SEQ ID NO: 181308 - DNA, 13 bp, Artificial Sequence
  Oligonucleotide for detection of SNP TSC0044853
ttaccctactttc

SEQ ID NO: 181309 - DNA, 13 bp, Artificial Sequence
  Oligonucleotide for detection of SNP TSC0044853
gaaagcggggtaa

SEQ ID NO: 181310 - DNA, 13 bp, Artificial Sequence
  Oligonucleotide for detection of SNP TSC0044853
ttaccccgctttc

SEQ ID NO: 181311 - DNA, 13 bp, Artificial Sequence
  Oligonucleotide for detection of SNP TSC0044856
tgaatttttttat

SEQ ID NO: 181312 - DNA, 13 bp, Artificial Sequence
  Oligonucleotide for detection of SNP TSC0044856
ataaaaaaattca

SEQ ID NO: 181313 - DNA, 13 bp, Artificial Sequence
  Oligonucleotide for detection of SNP TSC0044856
tgaattgttttat

SEQ ID NO: 181314 - DNA, 13 bp, Artificial Sequence
  Oligonucleotide for detection of SNP TSC0044856
ataaaacaattca

SEQ ID NO: 181315 - DNA, 13 bp, Artificial Sequence
  Oligonucleotide for detection of SNP TSC0044856
tgaatcgttttat

SEQ ID NO: 181316 - DNA, 13 bp, Artificial Sequence
  Oligonucleotide for detection of SNP TSC0044856
ataaaacgattca

SEQ ID NO: 181317 - DNA, 13 bp, Artificial Sequence
  Oligonucleotide for detection of SNP TSC0044856
atgaaaagattta

SEQ ID NO: 181318 - DNA, 13 bp, Artificial Sequence
  Oligonucleotide for detection of SNP TSC0044856
taaatcttttcat

SEQ ID NO: 181319 - DNA, 13 bp, Artificial Sequence
  Oligonucleotide for detection of SNP TSC0044856
atgaaatgattta

SEQ ID NO: 181320 - DNA, 13 bp, Artificial Sequence
  Oligonucleotide for detection of SNP TSC0044856
taaatcatttcat

SEQ ID NO: 181321 - DNA, 13 bp, Artificial Sequence
  Oligonucleotide for detection of SNP TSC0044856
atgaaacgattta

SEQ ID NO: 181322 - DNA, 13 bp, Artificial Sequence
  Oligonucleotide for detection of SNP TSC0044856
taaatcgtttcat

SEQ ID NO: 181323 - DNA, 13 bp, Artificial Sequence
  Oligonucleotide for detection of SNP TSC0044858
agtaaatgtgagy

SEQ ID NO: 181324 - DNA, 13 bp, Artificial Sequence
  Oligonucleotide for detection of SNP TSC0044858
rctcacatttact

SEQ ID NO: 181325 - DNA, 13 bp, Artificial Sequence
  Oligonucleotide for detection of SNP TSC0044858
agtaaacgtgagy

SEQ ID NO: 181326 - DNA, 13 bp, Artificial Sequence
  Oligonucleotide for detection of SNP TSC0044858
rctcacgtttact

SEQ ID NO: 181327 - DNA, 13 bp, Artificial Sequence
  Oligonucleotide for detection of SNP TSC0044858
agtaaatgcgagy

SEQ ID NO: 181328 - DNA, 13 bp, Artificial Sequence
  Oligonucleotide for detection of SNP TSC0044858
rctcgcatttact

SEQ ID NO: 181329 - DNA, 13 bp, Artificial Sequence
  Oligonucleotide for detection of SNP TSC0044858
agtaaacgcgagy

SEQ ID NO: 181330 - DNA, 13 bp, Artificial Sequence
  Oligonucleotide for detection of SNP TSC0044858
rctcgcgtttact

SEQ ID NO: 181331 - DNA, 13 bp, Artificial Sequence
  Oligonucleotide for detection of SNP TSC0044858
gtttgtgtttgtt

SEQ ID NO: 181332 - DNA, 13 bp, Artificial Sequence
  Oligonucleotide for detection of SNP TSC0044858
aacaaacacaaac

SEQ ID NO: 181333 - DNA, 13 bp, Artificial Sequence
  Oligonucleotide for detection of SNP TSC0044858
gtttgtatttgtt

SEQ ID NO: 181334 - DNA, 13 bp, Artificial Sequence
  Oligonucleotide for detection of SNP TSC0044858
aacaaatacaaac

SEQ ID NO: 181335 - DNA, 13 bp, Artificial Sequence
  Oligonucleotide for detection of SNP TSC0044858
gttcgtgtttgtt

SEQ ID NO: 181336 - DNA, 13 bp, Artificial Sequence
  Oligonucleotide for detection of SNP TSC0044858
aacaaacacgaac

SEQ ID NO: 181337 - DNA, 13 bp, Artificial Sequence
  Oligonucleotide for detection of SNP TSC0044858
gttcgtatttgtt

SEQ ID NO: 181338 - DNA, 13 bp, Artificial Sequence
  Oligonucleotide for detection of SNP TSC0044858
aacaaatacgaac

SEQ ID NO: 181339 - DNA, 13 bp, Artificial Sequence
  Oligonucleotide for detection of SNP TSC0044858
gtttgcgtttgtt

SEQ ID NO: 181340 - DNA, 13 bp, Artificial Sequence
  Oligonucleotide for detection of SNP TSC0044858
aacaaacgcaaac

SEQ ID NO: 181341 - DNA, 13 bp, Artificial Sequence
  Oligonucleotide for detection of SNP TSC0044858
gttcgcgtttgtt

SEQ ID NO: 181342 - DNA, 13 bp, Artificial Sequence
  Oligonucleotide for detection of SNP TSC0044858
aacaaacgcgaac

SEQ ID NO: 181343 - DNA, 13 bp, Artificial Sequence
  Oligonucleotide for detection of SNP TSC0007707
tttttaagggaaa

SEQ ID NO: 181344 - DNA, 13 bp, Artificial Sequence
  Oligonucleotide for detection of SNP TSC0007707
tttcccttaaaaa

SEQ ID NO: 181345 - DNA, 13 bp, Artificial Sequence
  Oligonucleotide for detection of SNP TSC0007707
tttttaggggaaa

SEQ ID NO: 181346 - DNA, 13 bp, Artificial Sequence
  Oligonucleotide for detection of SNP TSC0007707
tttcccctaaaaa

SEQ ID NO: 181347 - DNA, 13 bp, Artificial Sequence
  Oligonucleotide for detection of SNP TSC0044860
tagttgaggtttt

SEQ ID NO: 181348 - DNA, 13 bp, Artificial Sequence
  Oligonucleotide for detection of SNP TSC0044860
aaaacctcaacta

SEQ ID NO: 181349 - DNA, 13 bp, Artificial Sequence
  Oligonucleotide for detection of SNP TSC0044860
aaagttttaattg

SEQ ID NO: 181350 - DNA, 13 bp, Artificial Sequence
  Oligonucleotide for detection of SNP TSC0044860
caattaaaacttt

SEQ ID NO: 181351 - DNA, 13 bp, Artificial Sequence
  Oligonucleotide for detection of SNP TSC0044861
tgtaaaatataaa

SEQ ID NO: 181352 - DNA, 13 bp, Artificial Sequence
  Oligonucleotide for detection of SNP TSC0044861
tttatattttaca

SEQ ID NO: 181353 - DNA, 13 bp, Artificial Sequence
  Oligonucleotide for detection of SNP TSC0044861
tgtaaagtataaa

SEQ ID NO: 181354 - DNA, 13 bp, Artificial Sequence
  Oligonucleotide for detection of SNP TSC0044861
tttatactttaca

SEQ ID NO: 181355 - DNA, 13 bp, Artificial Sequence
  Oligonucleotide for detection of SNP TSC0044862
atagtttttttty

SEQ ID NO: 181356 - DNA, 13 bp, Artificial Sequence
  Oligonucleotide for detection of SNP TSC0044862
raaaaaaaactat

SEQ ID NO: 181357 - DNA, 13 bp, Artificial Sequence
  Oligonucleotide for detection of SNP TSC0044862
atagttgttttty

SEQ ID NO: 181358 - DNA, 13 bp, Artificial Sequence
  Oligonucleotide for detection of SNP TSC0044862
raaaaacaactat

SEQ ID NO: 181359 - DNA, 13 bp, Artificial Sequence
  Oligonucleotide for detection of SNP TSC0044862
atagtcgttttty

SEQ ID NO: 181360 - DNA, 13 bp, Artificial Sequence
  Oligonucleotide for detection of SNP TSC0044862
raaaaacgactat

SEQ ID NO: 181361 - DNA, 13 bp, Artificial Sequence
  Oligonucleotide for detection of SNP TSC0044862
gaggagagattat

SEQ ID NO: 181362 - DNA, 13 bp, Artificial Sequence
  Oligonucleotide for detection of SNP TSC0044862
ataatctctcctc

SEQ ID NO: 181363 - DNA, 13 bp, Artificial Sequence
  Oligonucleotide for detection of SNP TSC0044862
gaggagtgattat

SEQ ID NO: 181364 - DNA, 13 bp, Artificial Sequence
  Oligonucleotide for detection of SNP TSC0044862
ataatcactcctc

SEQ ID NO: 181365 - DNA, 13 bp, Artificial Sequence
  Oligonucleotide for detection of SNP TSC0044862
gaggagcgattat

SEQ ID NO: 181366 - DNA, 13 bp, Artificial Sequence
  Oligonucleotide for detection of SNP TSC0044862
ataatcgctcctc

SEQ ID NO: 181367 - DNA, 13 bp, Artificial Sequence
  Oligonucleotide for detection of SNP TSC0005687
aagggaatttttt

SEQ ID NO: 181368 - DNA, 13 bp, Artificial Sequence
  Oligonucleotide for detection of SNP TSC0005687
aaaaaattccctt

SEQ ID NO: 181369 - DNA, 13 bp, Artificial Sequence
  Oligonucleotide for detection of SNP TSC0005687
aagggagtttttt

SEQ ID NO: 181370 - DNA, 13 bp, Artificial Sequence
  Oligonucleotide for detection of SNP TSC0005687
aaaaaactccctt

SEQ ID NO: 181371 - DNA, 13 bp, Artificial Sequence
  Oligonucleotide for detection of SNP TSC0044863
ggtgggttttgtt

SEQ ID NO: 181372 - DNA, 13 bp, Artificial Sequence
  Oligonucleotide for detection of SNP TSC0044863
aacaaaacccacc

SEQ ID NO: 181373 - DNA, 13 bp, Artificial Sequence
  Oligonucleotide for detection of SNP TSC0044863
ggtggggtttgtt

SEQ ID NO: 181374 - DNA, 13 bp, Artificial Sequence
  Oligonucleotide for detection of SNP TSC0044863
aacaaaccccacc

SEQ ID NO: 181375 - DNA, 13 bp, Artificial Sequence
  Oligonucleotide for detection of SNP TSC0044863
agtagaatttaty

SEQ ID NO: 181376 - DNA, 13 bp, Artificial Sequence
  Oligonucleotide for detection of SNP TSC0044863
rataaattctact

SEQ ID NO: 181377 - DNA, 13 bp, Artificial Sequence
  Oligonucleotide for detection of SNP TSC0044863
agtagattttaty

SEQ ID NO: 181378 - DNA, 13 bp, Artificial Sequence
  Oligonucleotide for detection of SNP TSC0044863
rataaaatctact

SEQ ID NO: 181379 - DNA, 13 bp, Artificial Sequence
  Oligonucleotide for detection of SNP TSC0001469
gttatttttggaa

SEQ ID NO: 181380 - DNA, 13 bp, Artificial Sequence
  Oligonucleotide for detection of SNP TSC0001469
ttccaaaaataac

SEQ ID NO: 181381 - DNA, 13 bp, Artificial Sequence
  Oligonucleotide for detection of SNP TSC0001469
gttattgttggaa

SEQ ID NO: 181382 - DNA, 13 bp, Artificial Sequence
  Oligonucleotide for detection of SNP TSC0001469
ttccaacaataac

SEQ ID NO: 181383 - DNA, 13 bp, Artificial Sequence
  Oligonucleotide for detection of SNP TSC0001469
gttatcgttggaa

SEQ ID NO: 181384 - DNA, 13 bp, Artificial Sequence
  Oligonucleotide for detection of SNP TSC0001469
ttccaacgataac

SEQ ID NO: 181385 - DNA, 13 bp, Artificial Sequence
  Oligonucleotide for detection of SNP TSC0001469
ttttagagatgay

SEQ ID NO: 181386 - DNA, 13 bp, Artificial Sequence
  Oligonucleotide for detection of SNP TSC0001469
rtcatctctaaaa

SEQ ID NO: 181387 - DNA, 13 bp, Artificial Sequence
  Oligonucleotide for detection of SNP TSC0001469
ttttagtgatgay

SEQ ID NO: 181388 - DNA, 13 bp, Artificial Sequence
  Oligonucleotide for detection of SNP TSC0001469
rtcatcactaaaa

SEQ ID NO: 181389 - DNA, 13 bp, Artificial Sequence
  Oligonucleotide for detection of SNP TSC0001469
ttttagcgatgay

SEQ ID NO: 181390 - DNA, 13 bp, Artificial Sequence
  Oligonucleotide for detection of SNP TSC0001469
rtcatcgctaaaa

SEQ ID NO: 181391 - DNA, 13 bp, Artificial Sequence
  Oligonucleotide for detection of SNP TSC0001470
aagaatatgagtt

SEQ ID NO: 181392 - DNA, 13 bp, Artificial Sequence
  Oligonucleotide for detection of SNP TSC0001470
aactcatattctt

SEQ ID NO: 181393 - DNA, 13 bp, Artificial Sequence
  Oligonucleotide for detection of SNP TSC0001470
aagaatttgagtt

SEQ ID NO: 181394 - DNA, 13 bp, Artificial Sequence
  Oligonucleotide for detection of SNP TSC0001470
aactcaaattctt

SEQ ID NO: 181395 - DNA, 13 bp, Artificial Sequence
  Oligonucleotide for detection of SNP TSC0001470
agtttatattttt

SEQ ID NO: 181396 - DNA, 13 bp, Artificial Sequence
  Oligonucleotide for detection of SNP TSC0001470
aaaaatataaact

SEQ ID NO: 181397 - DNA, 13 bp, Artificial Sequence
  Oligonucleotide for detection of SNP TSC0001470
agtttagattttt

SEQ ID NO: 181398 - DNA, 13 bp, Artificial Sequence
  Oligonucleotide for detection of SNP TSC0001470
aaaaatctaaact

SEQ ID NO: 181399 - DNA, 13 bp, Artificial Sequence
  Oligonucleotide for detection of SNP TSC0044864
atgaaataaaaaa

SEQ ID NO: 181400 - DNA, 13 bp, Artificial Sequence
  Oligonucleotide for detection of SNP TSC0044864
ttttttatttcat

SEQ ID NO: 181401 - DNA, 13 bp, Artificial Sequence
  Oligonucleotide for detection of SNP TSC0044864
atgaaaaaaaaaa

SEQ ID NO: 181402 - DNA, 13 bp, Artificial Sequence
  Oligonucleotide for detection of SNP TSC0044864
ttttttttttcat

SEQ ID NO: 181403 - DNA, 13 bp, Artificial Sequence
  Oligonucleotide for detection of SNP TSC0044865
gtatgtaaggaaa

SEQ ID NO: 181404 - DNA, 13 bp, Artificial Sequence
  Oligonucleotide for detection of SNP TSC0044865
tttccttacatac

SEQ ID NO: 181405 - DNA, 13 bp, Artificial Sequence
  Oligonucleotide for detection of SNP TSC0044865
gtatgtgaggaaa

SEQ ID NO: 181406 - DNA, 13 bp, Artificial Sequence
  Oligonucleotide for detection of SNP TSC0044865
tttcctcacatac

SEQ ID NO: 181407 - DNA, 13 bp, Artificial Sequence
  Oligonucleotide for detection of SNP TSC0044865
gtatgcgaggaaa

SEQ ID NO: 181408 - DNA, 13 bp, Artificial Sequence
  Oligonucleotide for detection of SNP TSC0044865
tttcctcgcatac

SEQ ID NO: 181409 - DNA, 13 bp, Artificial Sequence
  Oligonucleotide for detection of SNP TSC0044865
tttttttgtatay

SEQ ID NO: 181410 - DNA, 13 bp, Artificial Sequence
  Oligonucleotide for detection of SNP TSC0044865
rtatacaaaaaaa

SEQ ID NO: 181411 - DNA, 13 bp, Artificial Sequence
  Oligonucleotide for detection of SNP TSC0044865
ttttttcgtatay

SEQ ID NO: 181412 - DNA, 13 bp, Artificial Sequence
  Oligonucleotide for detection of SNP TSC0044865
rtatacgaaaaaa

SEQ ID NO: 181413 - DNA, 13 bp, Artificial Sequence
  Oligonucleotide for detection of SNP TSC0044866
aaaattaaattag

SEQ ID NO: 181414 - DNA, 13 bp, Artificial Sequence
  Oligonucleotide for detection of SNP TSC0044866
ctaatttaatttt

SEQ ID NO: 181415 - DNA, 13 bp, Artificial Sequence
  Oligonucleotide for detection of SNP TSC0044866
aaaatttaattag

SEQ ID NO: 181416 - DNA, 13 bp, Artificial Sequence
  Oligonucleotide for detection of SNP TSC0044866
ctaattaaatttt

SEQ ID NO: 181417 - DNA, 13 bp, Artificial Sequence
  Oligonucleotide for detection of SNP TSC0044867
gtatgagtaaatg

SEQ ID NO: 181418 - DNA, 13 bp, Artificial Sequence
  Oligonucleotide for detection of SNP TSC0044867
catttactcatac

SEQ ID NO: 181419 - DNA, 13 bp, Artificial Sequence
  Oligonucleotide for detection of SNP TSC0044867
gtatgaataaatg

SEQ ID NO: 181420 - DNA, 13 bp, Artificial Sequence
  Oligonucleotide for detection of SNP TSC0044867
catttattcatac

SEQ ID NO: 181421 - DNA, 13 bp, Artificial Sequence
  Oligonucleotide for detection of SNP TSC0008421
tagtattattttt

SEQ ID NO: 181422 - DNA, 13 bp, Artificial Sequence
  Oligonucleotide for detection of SNP TSC0008421
aaaaataatacta

SEQ ID NO: 181423 - DNA, 13 bp, Artificial Sequence
  Oligonucleotide for detection of SNP TSC0008421
tagtatgattttt

SEQ ID NO: 181424 - DNA, 13 bp, Artificial Sequence
  Oligonucleotide for detection of SNP TSC0008421
aaaaatcatacta

SEQ ID NO: 181425 - DNA, 13 bp, Artificial Sequence
  Oligonucleotide for detection of SNP TSC0008421
tagtacgattttt

SEQ ID NO: 181426 - DNA, 13 bp, Artificial Sequence
  Oligonucleotide for detection of SNP TSC0008421
aaaaatcgtacta

SEQ ID NO: 181427 - DNA, 13 bp, Artificial Sequence
  Oligonucleotide for detection of SNP TSC0008421
aggggtagtgttg

SEQ ID NO: 181428 - DNA, 13 bp, Artificial Sequence
  Oligonucleotide for detection of SNP TSC0008421
caacactacccct

SEQ ID NO: 181429 - DNA, 13 bp, Artificial Sequence
  Oligonucleotide for detection of SNP TSC0008421
aggggttgtgttg

SEQ ID NO: 181430 - DNA, 13 bp, Artificial Sequence
  Oligonucleotide for detection of SNP TSC0008421
caacacaacccct

SEQ ID NO: 181431 - DNA, 13 bp, Artificial Sequence
  Oligonucleotide for detection of SNP TSC0008421
aggggtcgtgttg

SEQ ID NO: 181432 - DNA, 13 bp, Artificial Sequence
  Oligonucleotide for detection of SNP TSC0008421
caacacgacccct

SEQ ID NO: 181433 - DNA, 13 bp, Artificial Sequence
  Oligonucleotide for detection of SNP TSC0008422
atttgttgttgty

SEQ ID NO: 181434 - DNA, 13 bp, Artificial Sequence
  Oligonucleotide for detection of SNP TSC0008422
racaacaacaaat

SEQ ID NO: 181435 - DNA, 13 bp, Artificial Sequence
  Oligonucleotide for detection of SNP TSC0008422
atttgtcgttgty

SEQ ID NO: 181436 - DNA, 13 bp, Artificial Sequence
  Oligonucleotide for detection of SNP TSC0008422
racaacgacaaat

SEQ ID NO: 181437 - DNA, 13 bp, Artificial Sequence
  Oligonucleotide for detection of SNP TSC0008422
gatagtggtaggt

SEQ ID NO: 181438 - DNA, 13 bp, Artificial Sequence
  Oligonucleotide for detection of SNP TSC0008422
acctaccactatc

SEQ ID NO: 181439 - DNA, 13 bp, Artificial Sequence
  Oligonucleotide for detection of SNP TSC0008422
gatagtagtaggt

SEQ ID NO: 181440 - DNA, 13 bp, Artificial Sequence
  Oligonucleotide for detection of SNP TSC0008422
acctactactatc

SEQ ID NO: 181441 - DNA, 13 bp, Artificial Sequence
  Oligonucleotide for detection of SNP TSC0008422
gatagcggtaggt

SEQ ID NO: 181442 - DNA, 13 bp, Artificial Sequence
  Oligonucleotide for detection of SNP TSC0008422
acctaccgctatc

SEQ ID NO: 181443 - DNA, 13 bp, Artificial Sequence
  Oligonucleotide for detection of SNP TSC0044873
aaaaaaagttttt

SEQ ID NO: 181444 - DNA, 13 bp, Artificial Sequence
  Oligonucleotide for detection of SNP TSC0044873
aaaaacttttttt

SEQ ID NO: 181445 - DNA, 13 bp, Artificial Sequence
  Oligonucleotide for detection of SNP TSC0044873
aaaaaatgttttt

SEQ ID NO: 181446 - DNA, 13 bp, Artificial Sequence
  Oligonucleotide for detection of SNP TSC0044873
aaaaacatttttt

SEQ ID NO: 181447 - DNA, 13 bp, Artificial Sequence
  Oligonucleotide for detection of SNP TSC0044873
agaggtttttttt

SEQ ID NO: 181448 - DNA, 13 bp, Artificial Sequence
  Oligonucleotide for detection of SNP TSC0044873
aaaaaaaacctct

SEQ ID NO: 181449 - DNA, 13 bp, Artificial Sequence
  Oligonucleotide for detection of SNP TSC0044873
agaggtatttttt

SEQ ID NO: 181450 - DNA, 13 bp, Artificial Sequence
  Oligonucleotide for detection of SNP TSC0044873
aaaaaatacctct

SEQ ID NO: 181451 - DNA, 13 bp, Artificial Sequence
  Oligonucleotide for detection of SNP TSC0044874
ataatttatgttg

SEQ ID NO: 181452 - DNA, 13 bp, Artificial Sequence
  Oligonucleotide for detection of SNP TSC0044874
caacataaattat

SEQ ID NO: 181453 - DNA, 13 bp, Artificial Sequence
  Oligonucleotide for detection of SNP TSC0044874
ataattgatgttg

SEQ ID NO: 181454 - DNA, 13 bp, Artificial Sequence
  Oligonucleotide for detection of SNP TSC0044874
caacatcaattat

SEQ ID NO: 181455 - DNA, 13 bp, Artificial Sequence
  Oligonucleotide for detection of SNP TSC0044874
tagtatgagttat

SEQ ID NO: 181456 - DNA, 13 bp, Artificial Sequence
  Oligonucleotide for detection of SNP TSC0044874
ataactcatacta

SEQ ID NO: 181457 - DNA, 13 bp, Artificial Sequence
  Oligonucleotide for detection of SNP TSC0044874
tagtattagttat

SEQ ID NO: 181458 - DNA, 13 bp, Artificial Sequence
  Oligonucleotide for detection of SNP TSC0044874
ataactaatacta

SEQ ID NO: 181459 - DNA, 13 bp, Artificial Sequence
  Oligonucleotide for detection of SNP TSC0000875
tttttagtgataa

SEQ ID NO: 181460 - DNA, 13 bp, Artificial Sequence
  Oligonucleotide for detection of SNP TSC0000875
ttatcactaaaaa

SEQ ID NO: 181461 - DNA, 13 bp, Artificial Sequence
  Oligonucleotide for detection of SNP TSC0000875
tttttaatgataa

SEQ ID NO: 181462 - DNA, 13 bp, Artificial Sequence
  Oligonucleotide for detection of SNP TSC0000875
ttatcattaaaaa

SEQ ID NO: 181463 - DNA, 13 bp, Artificial Sequence
  Oligonucleotide for detection of SNP TSC0001703
ttgattatggtaa

SEQ ID NO: 181464 - DNA, 13 bp, Artificial Sequence
  Oligonucleotide for detection of SNP TSC0001703
ttaccataatcaa

SEQ ID NO: 181465 - DNA, 13 bp, Artificial Sequence
  Oligonucleotide for detection of SNP TSC0001703
ttgattgtggtaa

SEQ ID NO: 181466 - DNA, 13 bp, Artificial Sequence
  Oligonucleotide for detection of SNP TSC0001703
ttaccacaatcaa

SEQ ID NO: 181467 - DNA, 13 bp, Artificial Sequence
  Oligonucleotide for detection of SNP TSC0001703
ttgatcgtggtaa

SEQ ID NO: 181468 - DNA, 13 bp, Artificial Sequence
  Oligonucleotide for detection of SNP TSC0001703
ttaccacgatcaa

SEQ ID NO: 181469 - DNA, 13 bp, Artificial Sequence
  Oligonucleotide for detection of SNP TSC0001703
ttattatggttaa

SEQ ID NO: 181470 - DNA, 13 bp, Artificial Sequence
  Oligonucleotide for detection of SNP TSC0001703
ttaaccataataa

SEQ ID NO: 181471 - DNA, 13 bp, Artificial Sequence
  Oligonucleotide for detection of SNP TSC0001703
ttattacggttaa

SEQ ID NO: 181472 - DNA, 13 bp, Artificial Sequence
  Oligonucleotide for detection of SNP TSC0001703
ttaaccgtaataa

SEQ ID NO: 181473 - DNA, 13 bp, Artificial Sequence
  Oligonucleotide for detection of SNP TSC0044879
taggtgtggtttt

SEQ ID NO: 181474 - DNA, 13 bp, Artificial Sequence
  Oligonucleotide for detection of SNP TSC0044879
aaaaccacaccta

SEQ ID NO: 181475 - DNA, 13 bp, Artificial Sequence
  Oligonucleotide for detection of SNP TSC0044879
taggtgcggtttt

SEQ ID NO: 181476 - DNA, 13 bp, Artificial Sequence
  Oligonucleotide for detection of SNP TSC0044879
aaaaccgcaccta

SEQ ID NO: 181477 - DNA, 13 bp, Artificial Sequence
  Oligonucleotide for detection of SNP TSC0001424
tggtgatgtggaa

SEQ ID NO: 181478 - DNA, 13 bp, Artificial Sequence
  Oligonucleotide for detection of SNP TSC0001424
ttccacatcacca

SEQ ID NO: 181479 - DNA, 13 bp, Artificial Sequence
  Oligonucleotide for detection of SNP TSC0001424
tggtgacgtggaa

SEQ ID NO: 181480 - DNA, 13 bp, Artificial Sequence
  Oligonucleotide for detection of SNP TSC0001424
ttccacgtcacca

SEQ ID NO: 181481 - DNA, 13 bp, Artificial Sequence
  Oligonucleotide for detection of SNP TSC0001425
atgtgatttttga

SEQ ID NO: 181482 - DNA, 13 bp, Artificial Sequence
  Oligonucleotide for detection of SNP TSC0001425
tcaaaaatcacat

SEQ ID NO: 181483 - DNA, 13 bp, Artificial Sequence
  Oligonucleotide for detection of SNP TSC0001425
atgtgagttttga

SEQ ID NO: 181484 - DNA, 13 bp, Artificial Sequence
  Oligonucleotide for detection of SNP TSC0001425
tcaaaactcacat

SEQ ID NO: 181485 - DNA, 13 bp, Artificial Sequence
  Oligonucleotide for detection of SNP TSC0001425
atgcgatttttga

SEQ ID NO: 181486 - DNA, 13 bp, Artificial Sequence
  Oligonucleotide for detection of SNP TSC0001425
tcaaaaatcgcat

SEQ ID NO: 181487 - DNA, 13 bp, Artificial Sequence
  Oligonucleotide for detection of SNP TSC0001425
atgcgagttttga

SEQ ID NO: 181488 - DNA, 13 bp, Artificial Sequence
  Oligonucleotide for detection of SNP TSC0001425
tcaaaactcgcat

SEQ ID NO: 181489 - DNA, 13 bp, Artificial Sequence
  Oligonucleotide for detection of SNP TSC0001425
ttagggattgtat

SEQ ID NO: 181490 - DNA, 13 bp, Artificial Sequence
  Oligonucleotide for detection of SNP TSC0001425
atacaatccctaa

SEQ ID NO: 181491 - DNA, 13 bp, Artificial Sequence
  Oligonucleotide for detection of SNP TSC0001425
ttagggtttgtat

SEQ ID NO: 181492 - DNA, 13 bp, Artificial Sequence
  Oligonucleotide for detection of SNP TSC0001425
atacaaaccctaa

SEQ ID NO: 181493 - DNA, 13 bp, Artificial Sequence
  Oligonucleotide for detection of SNP TSC0001425
ttagggatcgtat

SEQ ID NO: 181494 - DNA, 13 bp, Artificial Sequence
  Oligonucleotide for detection of SNP TSC0001425
atacgatccctaa

SEQ ID NO: 181495 - DNA, 13 bp, Artificial Sequence
  Oligonucleotide for detection of SNP TSC0001425
ttagggttcgtat

SEQ ID NO: 181496 - DNA, 13 bp, Artificial Sequence
  Oligonucleotide for detection of SNP TSC0001425
atacgaaccctaa

SEQ ID NO: 181497 - DNA, 13 bp, Artificial Sequence
  Oligonucleotide for detection of SNP TSC0044881
tgtaattataagt

SEQ ID NO: 181498 - DNA, 13 bp, Artificial Sequence
  Oligonucleotide for detection of SNP TSC0044881
acttataattaca

SEQ ID NO: 181499 - DNA, 13 bp, Artificial Sequence
  Oligonucleotide for detection of SNP TSC0044881
tgtaatgataagt

SEQ ID NO: 181500 - DNA, 13 bp, Artificial Sequence
  Oligonucleotide for detection of SNP TSC0044881
acttatcattaca

SEQ ID NO: 181501 - DNA, 13 bp, Artificial Sequence
  Oligonucleotide for detection of SNP TSC0044881
atttataattgta

SEQ ID NO: 181502 - DNA, 13 bp, Artificial Sequence
  Oligonucleotide for detection of SNP TSC0044881
tacaattataaat

SEQ ID NO: 181503 - DNA, 13 bp, Artificial Sequence
  Oligonucleotide for detection of SNP TSC0044881
atttattattgta

SEQ ID NO: 181504 - DNA, 13 bp, Artificial Sequence
  Oligonucleotide for detection of SNP TSC0044881
tacaataataaat

SEQ ID NO: 181505 - DNA, 13 bp, Artificial Sequence
  Oligonucleotide for detection of SNP TSC0044883
gaattaattgagg

SEQ ID NO: 181506 - DNA, 13 bp, Artificial Sequence
  Oligonucleotide for detection of SNP TSC0044883
cctcaattaattc

SEQ ID NO: 181507 - DNA, 13 bp, Artificial Sequence
  Oligonucleotide for detection of SNP TSC0044883
gaattatttgagg

SEQ ID NO: 181508 - DNA, 13 bp, Artificial Sequence
  Oligonucleotide for detection of SNP TSC0044883
cctcaaataattc

SEQ ID NO: 181509 - DNA, 13 bp, Artificial Sequence
  Oligonucleotide for detection of SNP TSC0044883
ttttaattggtty

SEQ ID NO: 181510 - DNA, 13 bp, Artificial Sequence
  Oligonucleotide for detection of SNP TSC0044883
raaccaattaaaa

SEQ ID NO: 181511 - DNA, 13 bp, Artificial Sequence
  Oligonucleotide for detection of SNP TSC0044883
ttttaaatggtty

SEQ ID NO: 181512 - DNA, 13 bp, Artificial Sequence
  Oligonucleotide for detection of SNP TSC0044883
raaccatttaaaa

SEQ ID NO: 181513 - DNA, 13 bp, Artificial Sequence
  Oligonucleotide for detection of SNP TSC0044885
aggggtatgtata

SEQ ID NO: 181514 - DNA, 13 bp, Artificial Sequence
  Oligonucleotide for detection of SNP TSC0044885
tatacatacccct

SEQ ID NO: 181515 - DNA, 13 bp, Artificial Sequence
  Oligonucleotide for detection of SNP TSC0044885
aggggtgtgtata

SEQ ID NO: 181516 - DNA, 13 bp, Artificial Sequence
  Oligonucleotide for detection of SNP TSC0044885
tatacacacccct

SEQ ID NO: 181517 - DNA, 13 bp, Artificial Sequence
  Oligonucleotide for detection of SNP TSC0044885
aggggcgtgtata

SEQ ID NO: 181518 - DNA, 13 bp, Artificial Sequence
  Oligonucleotide for detection of SNP TSC0044885
tatacacgcccct

SEQ ID NO: 181519 - DNA, 13 bp, Artificial Sequence
  Oligonucleotide for detection of SNP TSC0044886
tattatgtttaat

SEQ ID NO: 181520 - DNA, 13 bp, Artificial Sequence
  Oligonucleotide for detection of SNP TSC0044886
attaaacataata

SEQ ID NO: 181521 - DNA, 13 bp, Artificial Sequence
  Oligonucleotide for detection of SNP TSC0044887
atattaagaagtg

SEQ ID NO: 181522 - DNA, 13 bp, Artificial Sequence
  Oligonucleotide for detection of SNP TSC0044887
cacttcttaatat

SEQ ID NO: 181523 - DNA, 13 bp, Artificial Sequence
  Oligonucleotide for detection of SNP TSC0044887
atattaggaagtg

SEQ ID NO: 181524 - DNA, 13 bp, Artificial Sequence
  Oligonucleotide for detection of SNP TSC0044887
cacttcctaatat

SEQ ID NO: 181525 - DNA, 13 bp, Artificial Sequence
  Oligonucleotide for detection of SNP TSC0009851
ggtgttaaggtag

SEQ ID NO: 181526 - DNA, 13 bp, Artificial Sequence
  Oligonucleotide for detection of SNP TSC0009851
ctaccttaacacc

SEQ ID NO: 181527 - DNA, 13 bp, Artificial Sequence
  Oligonucleotide for detection of SNP TSC0009851
ggtgttgaggtag

SEQ ID NO: 181528 - DNA, 13 bp, Artificial Sequence
  Oligonucleotide for detection of SNP TSC0009851
ctacctcaacacc

SEQ ID NO: 181529 - DNA, 13 bp, Artificial Sequence
  Oligonucleotide for detection of SNP TSC0009851
ggtgtcgaggtag

SEQ ID NO: 181530 - DNA, 13 bp, Artificial Sequence
  Oligonucleotide for detection of SNP TSC0009851
ctacctcgacacc

SEQ ID NO: 181531 - DNA, 13 bp, Artificial Sequence
  Oligonucleotide for detection of SNP TSC0009851
ttattttgataty

SEQ ID NO: 181532 - DNA, 13 bp, Artificial Sequence
  Oligonucleotide for detection of SNP TSC0009851
ratatcaaaataa

SEQ ID NO: 181533 - DNA, 13 bp, Artificial Sequence
  Oligonucleotide for detection of SNP TSC0009851
ttatttcgataty

SEQ ID NO: 181534 - DNA, 13 bp, Artificial Sequence
  Oligonucleotide for detection of SNP TSC0009851
ratatcgaaataa

SEQ ID NO: 181535 - DNA, 13 bp, Artificial Sequence
  Oligonucleotide for detection of SNP TSC0000213
ggtattatttgta

SEQ ID NO: 181536 - DNA, 13 bp, Artificial Sequence
  Oligonucleotide for detection of SNP TSC0000213
tacaaataatacc

SEQ ID NO: 181537 - DNA, 13 bp, Artificial Sequence
  Oligonucleotide for detection of SNP TSC0000213
ggtattttttgta

SEQ ID NO: 181538 - DNA, 13 bp, Artificial Sequence
  Oligonucleotide for detection of SNP TSC0000213
tacaaaaaatacc

SEQ ID NO: 181539 - DNA, 13 bp, Artificial Sequence
  Oligonucleotide for detection of SNP TSC0000213
tataggtagtaty

SEQ ID NO: 181540 - DNA, 13 bp, Artificial Sequence
  Oligonucleotide for detection of SNP TSC0000213
ratactacctata

SEQ ID NO: 181541 - DNA, 13 bp, Artificial Sequence
  Oligonucleotide for detection of SNP TSC0000213
tatagggagtaty

SEQ ID NO: 181542 - DNA, 13 bp, Artificial Sequence
  Oligonucleotide for detection of SNP TSC0000213
ratactccctata

SEQ ID NO: 181543 - DNA, 13 bp, Artificial Sequence
  Oligonucleotide for detection of SNP TSC0044896
ttgttgttaagtt

SEQ ID NO: 181544 - DNA, 13 bp, Artificial Sequence
  Oligonucleotide for detection of SNP TSC0044896
aacttaacaacaa

SEQ ID NO: 181545 - DNA, 13 bp, Artificial Sequence
  Oligonucleotide for detection of SNP TSC0044896
ttgttggtaagtt

SEQ ID NO: 181546 - DNA, 13 bp, Artificial Sequence
  Oligonucleotide for detection of SNP TSC0044896
aacttaccaacaa

SEQ ID NO: 181547 - DNA, 13 bp, Artificial Sequence
  Oligonucleotide for detection of SNP TSC0044896
ttgtcgttaagtt

SEQ ID NO: 181548 - DNA, 13 bp, Artificial Sequence
  Oligonucleotide for detection of SNP TSC0044896
aacttaacgacaa

SEQ ID NO: 181549 - DNA, 13 bp, Artificial Sequence
  Oligonucleotide for detection of SNP TSC0044896
ttgtcggtaagtt

SEQ ID NO: 181550 - DNA, 13 bp, Artificial Sequence
  Oligonucleotide for detection of SNP TSC0044896
aacttaccgacaa

SEQ ID NO: 181551 - DNA, 13 bp, Artificial Sequence
  Oligonucleotide for detection of SNP TSC0044896
agtttaatgatag

SEQ ID NO: 181552 - DNA, 13 bp, Artificial Sequence
  Oligonucleotide for detection of SNP TSC0044896
ctatcattaaact

SEQ ID NO: 181553 - DNA, 13 bp, Artificial Sequence
  Oligonucleotide for detection of SNP TSC0044896
agtttattgatag

SEQ ID NO: 181554 - DNA, 13 bp, Artificial Sequence
  Oligonucleotide for detection of SNP TSC0044896
ctatcaataaact

SEQ ID NO: 181555 - DNA, 13 bp, Artificial Sequence
  Oligonucleotide for detection of SNP TSC0044896
agtttaacgatag

SEQ ID NO: 181556 - DNA, 13 bp, Artificial Sequence
  Oligonucleotide for detection of SNP TSC0044896
ctatcgttaaact

SEQ ID NO: 181557 - DNA, 13 bp, Artificial Sequence
  Oligonucleotide for detection of SNP TSC0044896
agtttatcgatag

SEQ ID NO: 181558 - DNA, 13 bp, Artificial Sequence
  Oligonucleotide for detection of SNP TSC0044896
ctatcgataaact

SEQ ID NO: 181559 - DNA, 13 bp, Artificial Sequence
  Oligonucleotide for detection of SNP TSC0044897
tttagtattttay

SEQ ID NO: 181560 - DNA, 13 bp, Artificial Sequence
  Oligonucleotide for detection of SNP TSC0044897
rtaaaatactaaa

SEQ ID NO: 181561 - DNA, 13 bp, Artificial Sequence
  Oligonucleotide for detection of SNP TSC0044897
tttagttttttay

SEQ ID NO: 181562 - DNA, 13 bp, Artificial Sequence
  Oligonucleotide for detection of SNP TSC0044897
rtaaaaaactaaa

SEQ ID NO: 181563 - DNA, 13 bp, Artificial Sequence
  Oligonucleotide for detection of SNP TSC0044897
gtaagatgttgaa

SEQ ID NO: 181564 - DNA, 13 bp, Artificial Sequence
  Oligonucleotide for detection of SNP TSC0044897
ttcaacatcttac

SEQ ID NO: 181565 - DNA, 13 bp, Artificial Sequence
  Oligonucleotide for detection of SNP TSC0044897
gtaagaggttgaa

SEQ ID NO: 181566 - DNA, 13 bp, Artificial Sequence
  Oligonucleotide for detection of SNP TSC0044897
ttcaacctcttac

SEQ ID NO: 181567 - DNA, 13 bp, Artificial Sequence
  Oligonucleotide for detection of SNP TSC0044898
aatttattttgta

SEQ ID NO: 181568 - DNA, 13 bp, Artificial Sequence
  Oligonucleotide for detection of SNP TSC0044898
tacaaaataaatt

SEQ ID NO: 181569 - DNA, 13 bp, Artificial Sequence
  Oligonucleotide for detection of SNP TSC0044898
tatagagtaagtt

SEQ ID NO: 181570 - DNA, 13 bp, Artificial Sequence
  Oligonucleotide for detection of SNP TSC0044898
aacttactctata

SEQ ID NO: 181571 - DNA, 13 bp, Artificial Sequence
  Oligonucleotide for detection of SNP TSC0044898
tatagattaagtt

SEQ ID NO: 181572 - DNA, 13 bp, Artificial Sequence
  Oligonucleotide for detection of SNP TSC0044898
aacttaatctata

SEQ ID NO: 181573 - DNA, 13 bp, Artificial Sequence
  Oligonucleotide for detection of SNP TSC0044900
agtgataaatata

SEQ ID NO: 181574 - DNA, 13 bp, Artificial Sequence
  Oligonucleotide for detection of SNP TSC0044900
tatatttatcact

SEQ ID NO: 181575 - DNA, 13 bp, Artificial Sequence
  Oligonucleotide for detection of SNP TSC0044900
agtgattaatata

SEQ ID NO: 181576 - DNA, 13 bp, Artificial Sequence
  Oligonucleotide for detection of SNP TSC0044900
tatattaatcact

SEQ ID NO: 181577 - DNA, 13 bp, Artificial Sequence
  Oligonucleotide for detection of SNP TSC0044900
tatattagttatt

SEQ ID NO: 181578 - DNA, 13 bp, Artificial Sequence
  Oligonucleotide for detection of SNP TSC0044900
aataactaatata

SEQ ID NO: 181579 - DNA, 13 bp, Artificial Sequence
  Oligonucleotide for detection of SNP TSC0044903
gattggttaatty

SEQ ID NO: 181580 - DNA, 13 bp, Artificial Sequence
  Oligonucleotide for detection of SNP TSC0044903
raattaaccaatc

SEQ ID NO: 181581 - DNA, 13 bp, Artificial Sequence
  Oligonucleotide for detection of SNP TSC0044903
gattgggtaatty

SEQ ID NO: 181582 - DNA, 13 bp, Artificial Sequence
  Oligonucleotide for detection of SNP TSC0044903
raattacccaatc

SEQ ID NO: 181583 - DNA, 13 bp, Artificial Sequence
  Oligonucleotide for detection of SNP TSC0044903
gaattagttagty

SEQ ID NO: 181584 - DNA, 13 bp, Artificial Sequence
  Oligonucleotide for detection of SNP TSC0044903
ractaactaattc

SEQ ID NO: 181585 - DNA, 13 bp, Artificial Sequence
  Oligonucleotide for detection of SNP TSC0044903
gaattatttagty

SEQ ID NO: 181586 - DNA, 13 bp, Artificial Sequence
  Oligonucleotide for detection of SNP TSC0044903
ractaaataattc

SEQ ID NO: 181587 - DNA, 13 bp, Artificial Sequence
  Oligonucleotide for detection of SNP TSC0000892
gaagataatgaty

SEQ ID NO: 181588 - DNA, 13 bp, Artificial Sequence
  Oligonucleotide for detection of SNP TSC0000892
ratcattatcttc

SEQ ID NO: 181589 - DNA, 13 bp, Artificial Sequence
  Oligonucleotide for detection of SNP TSC0000892
gaagattatgaty

SEQ ID NO: 181590 - DNA, 13 bp, Artificial Sequence
  Oligonucleotide for detection of SNP TSC0000892
ratcataatcttc

SEQ ID NO: 181591 - DNA, 13 bp, Artificial Sequence
  Oligonucleotide for detection of SNP TSC0000892
gattattgtttty

SEQ ID NO: 181592 - DNA, 13 bp, Artificial Sequence
  Oligonucleotide for detection of SNP TSC0000892
raaaacaataatc

SEQ ID NO: 181593 - DNA, 13 bp, Artificial Sequence
  Oligonucleotide for detection of SNP TSC0000892
gattatagtttty

SEQ ID NO: 181594 - DNA, 13 bp, Artificial Sequence
  Oligonucleotide for detection of SNP TSC0000892
raaaactataatc

SEQ ID NO: 181595 - DNA, 13 bp, Artificial Sequence
  Oligonucleotide for detection of SNP TSC0044907
attttaaagtaga

SEQ ID NO: 181596 - DNA, 13 bp, Artificial Sequence
  Oligonucleotide for detection of SNP TSC0044907
tctactttaaaat

SEQ ID NO: 181597 - DNA, 13 bp, Artificial Sequence
  Oligonucleotide for detection of SNP TSC0044907
attttagagtaga

SEQ ID NO: 181598 - DNA, 13 bp, Artificial Sequence
  Oligonucleotide for detection of SNP TSC0044907
tctactctaaaat

SEQ ID NO: 181599 - DNA, 13 bp, Artificial Sequence
  Oligonucleotide for detection of SNP TSC0000580
taatttgttgagy

SEQ ID NO: 181600 - DNA, 13 bp, Artificial Sequence
  Oligonucleotide for detection of SNP TSC0000580
rctcaacaaatta

SEQ ID NO: 181601 - DNA, 13 bp, Artificial Sequence
  Oligonucleotide for detection of SNP TSC0000580
taatttattgagy

SEQ ID NO: 181602 - DNA, 13 bp, Artificial Sequence
  Oligonucleotide for detection of SNP TSC0000580
rctcaataaatta

SEQ ID NO: 181603 - DNA, 13 bp, Artificial Sequence
  Oligonucleotide for detection of SNP TSC0009899
ggaattttagagt

SEQ ID NO: 181604 - DNA, 13 bp, Artificial Sequence
  Oligonucleotide for detection of SNP TSC0009899
actctaaaattcc

SEQ ID NO: 181605 - DNA, 13 bp, Artificial Sequence
  Oligonucleotide for detection of SNP TSC0009899
ggaattgtagagt

SEQ ID NO: 181606 - DNA, 13 bp, Artificial Sequence
  Oligonucleotide for detection of SNP TSC0009899
actctacaattcc

SEQ ID NO: 181607 - DNA, 13 bp, Artificial Sequence
  Oligonucleotide for detection of SNP TSC0009899
attttggaattty

SEQ ID NO: 181608 - DNA, 13 bp, Artificial Sequence
  Oligonucleotide for detection of SNP TSC0009899
raaattccaaaat

SEQ ID NO: 181609 - DNA, 13 bp, Artificial Sequence
  Oligonucleotide for detection of SNP TSC0009899
attttgtaattty

SEQ ID NO: 181610 - DNA, 13 bp, Artificial Sequence
  Oligonucleotide for detection of SNP TSC0009899
raaattacaaaat

SEQ ID NO: 181611 - DNA, 13 bp, Artificial Sequence
  Oligonucleotide for detection of SNP TSC0009900
gttttgatattat

SEQ ID NO: 181612 - DNA, 13 bp, Artificial Sequence
  Oligonucleotide for detection of SNP TSC0009900
ataatatcaaaac

SEQ ID NO: 181613 - DNA, 13 bp, Artificial Sequence
  Oligonucleotide for detection of SNP TSC0009900
gttttggtattat

SEQ ID NO: 181614 - DNA, 13 bp, Artificial Sequence
  Oligonucleotide for detection of SNP TSC0009900
ataataccaaaac

SEQ ID NO: 181615 - DNA, 13 bp, Artificial Sequence
  Oligonucleotide for detection of SNP TSC0005462
tttaagtgtatta

SEQ ID NO: 181616 - DNA, 13 bp, Artificial Sequence
  Oligonucleotide for detection of SNP TSC0005462
taatacacttaaa

SEQ ID NO: 181617 - DNA, 13 bp, Artificial Sequence
  Oligonucleotide for detection of SNP TSC0005462
tttaagcgtatta

SEQ ID NO: 181618 - DNA, 13 bp, Artificial Sequence
  Oligonucleotide for detection of SNP TSC0005462
taatacgcttaaa

SEQ ID NO: 181619 - DNA, 13 bp, Artificial Sequence
  Oligonucleotide for detection of SNP TSC0005462
tgatatgtttaga

SEQ ID NO: 181620 - DNA, 13 bp, Artificial Sequence
  Oligonucleotide for detection of SNP TSC0005462
tctaaacatatca

SEQ ID NO: 181621 - DNA, 13 bp, Artificial Sequence
  Oligonucleotide for detection of SNP TSC0005462
tgatatatttaga

SEQ ID NO: 181622 - DNA, 13 bp, Artificial Sequence
  Oligonucleotide for detection of SNP TSC0005462
tctaaatatatca

SEQ ID NO: 181623 - DNA, 13 bp, Artificial Sequence
  Oligonucleotide for detection of SNP TSC0005462
tgatacgtttaga

SEQ ID NO: 181624 - DNA, 13 bp, Artificial Sequence
  Oligonucleotide for detection of SNP TSC0005462
tctaaacgtatca

SEQ ID NO: 181625 - DNA, 13 bp, Artificial Sequence
  Oligonucleotide for detection of SNP TSC0044909
tttgggagtgtga

SEQ ID NO: 181626 - DNA, 13 bp, Artificial Sequence
  Oligonucleotide for detection of SNP TSC0044909
tcacactcccaaa

SEQ ID NO: 181627 - DNA, 13 bp, Artificial Sequence
  Oligonucleotide for detection of SNP TSC0044909
tttgggggtgtga

SEQ ID NO: 181628 - DNA, 13 bp, Artificial Sequence
  Oligonucleotide for detection of SNP TSC0044909
tcacacccccaaa

SEQ ID NO: 181629 - DNA, 13 bp, Artificial Sequence
  Oligonucleotide for detection of SNP TSC0044910
gaagttatttttt

SEQ ID NO: 181630 - DNA, 13 bp, Artificial Sequence
  Oligonucleotide for detection of SNP TSC0044910
aaaaaataacttc

SEQ ID NO: 181631 - DNA, 13 bp, Artificial Sequence
  Oligonucleotide for detection of SNP TSC0044911
ttaaaaaagaatt

SEQ ID NO: 181632 - DNA, 13 bp, Artificial Sequence
  Oligonucleotide for detection of SNP TSC0044911
aattcttttttaa

SEQ ID NO: 181633 - DNA, 13 bp, Artificial Sequence
  Oligonucleotide for detection of SNP TSC0044911
ttaaaatagaatt

SEQ ID NO: 181634 - DNA, 13 bp, Artificial Sequence
  Oligonucleotide for detection of SNP TSC0044911
aattctattttaa

SEQ ID NO: 181635 - DNA, 13 bp, Artificial Sequence
  Oligonucleotide for detection of SNP TSC0044912
ttataagaagtta

SEQ ID NO: 181636 - DNA, 13 bp, Artificial Sequence
  Oligonucleotide for detection of SNP TSC0044912
taacttcttataa

SEQ ID NO: 181637 - DNA, 13 bp, Artificial Sequence
  Oligonucleotide for detection of SNP TSC0044912
ttataaaaagtta

SEQ ID NO: 181638 - DNA, 13 bp, Artificial Sequence
  Oligonucleotide for detection of SNP TSC0044912
taactttttataa

SEQ ID NO: 181639 - DNA, 13 bp, Artificial Sequence
  Oligonucleotide for detection of SNP TSC0044913
agtgttgtaaatt

SEQ ID NO: 181640 - DNA, 13 bp, Artificial Sequence
  Oligonucleotide for detection of SNP TSC0044913
aatttacaacact

SEQ ID NO: 181641 - DNA, 13 bp, Artificial Sequence
  Oligonucleotide for detection of SNP TSC0044913
agtgttataaatt

SEQ ID NO: 181642 - DNA, 13 bp, Artificial Sequence
  Oligonucleotide for detection of SNP TSC0044913
aatttataacact

SEQ ID NO: 181643 - DNA, 13 bp, Artificial Sequence
  Oligonucleotide for detection of SNP TSC0008990
gatttaagtgggg

SEQ ID NO: 181644 - DNA, 13 bp, Artificial Sequence
  Oligonucleotide for detection of SNP TSC0008990
ccccacttaaatc

SEQ ID NO: 181645 - DNA, 13 bp, Artificial Sequence
  Oligonucleotide for detection of SNP TSC0044915
gagaaagaagaaa

SEQ ID NO: 181646 - DNA, 13 bp, Artificial Sequence
  Oligonucleotide for detection of SNP TSC0044915
tttcttctttctc

SEQ ID NO: 181647 - DNA, 13 bp, Artificial Sequence
  Oligonucleotide for detection of SNP TSC0044915
gagaaaaaagaaa

SEQ ID NO: 181648 - DNA, 13 bp, Artificial Sequence
  Oligonucleotide for detection of SNP TSC0044915
tttcttttttctc

SEQ ID NO: 181649 - DNA, 13 bp, Artificial Sequence
  Oligonucleotide for detection of SNP TSC0044916
aaatttgggtaag

SEQ ID NO: 181650 - DNA, 13 bp, Artificial Sequence
  Oligonucleotide for detection of SNP TSC0044916
cttacccaaattt

SEQ ID NO: 181651 - DNA, 13 bp, Artificial Sequence
  Oligonucleotide for detection of SNP TSC0044916
aaatttaggtaag

SEQ ID NO: 181652 - DNA, 13 bp, Artificial Sequence
  Oligonucleotide for detection of SNP TSC0044916
cttacctaaattt

SEQ ID NO: 181653 - DNA, 13 bp, Artificial Sequence
  Oligonucleotide for detection of SNP TSC0044916
aaattcgggtaag

SEQ ID NO: 181654 - DNA, 13 bp, Artificial Sequence
  Oligonucleotide for detection of SNP TSC0044916
cttacccgaattt

SEQ ID NO: 181655 - DNA, 13 bp, Artificial Sequence
  Oligonucleotide for detection of SNP TSC0044917
tattaatggagtt

SEQ ID NO: 181656 - DNA, 13 bp, Artificial Sequence
  Oligonucleotide for detection of SNP TSC0044917
aactccattaata

SEQ ID NO: 181657 - DNA, 13 bp, Artificial Sequence
  Oligonucleotide for detection of SNP TSC0044917
tattaagggagtt

SEQ ID NO: 181658 - DNA, 13 bp, Artificial Sequence
  Oligonucleotide for detection of SNP TSC0044917
aactcccttaata

SEQ ID NO: 181659 - DNA, 13 bp, Artificial Sequence
  Oligonucleotide for detection of SNP TSC0044917
agttttattaata

SEQ ID NO: 181660 - DNA, 13 bp, Artificial Sequence
  Oligonucleotide for detection of SNP TSC0044917
tattaataaaact

SEQ ID NO: 181661 - DNA, 13 bp, Artificial Sequence
  Oligonucleotide for detection of SNP TSC0044919
aattttgatgttt

SEQ ID NO: 181662 - DNA, 13 bp, Artificial Sequence
  Oligonucleotide for detection of SNP TSC0044919
aaacatcaaaatt

SEQ ID NO: 181663 - DNA, 13 bp, Artificial Sequence
  Oligonucleotide for detection of SNP TSC0044919
aattttaatgttt

SEQ ID NO: 181664 - DNA, 13 bp, Artificial Sequence
  Oligonucleotide for detection of SNP TSC0044919
aaacattaaaatt

SEQ ID NO: 181665 - DNA, 13 bp, Artificial Sequence
  Oligonucleotide for detection of SNP TSC0044920
tttagagatttag

SEQ ID NO: 181666 - DNA, 13 bp, Artificial Sequence
  Oligonucleotide for detection of SNP TSC0044920
ctaaatctctaaa

SEQ ID NO: 181667 - DNA, 13 bp, Artificial Sequence
  Oligonucleotide for detection of SNP TSC0044920
tttagaaatttag

SEQ ID NO: 181668 - DNA, 13 bp, Artificial Sequence
  Oligonucleotide for detection of SNP TSC0044920
ctaaatttctaaa

SEQ ID NO: 181669 - DNA, 13 bp, Artificial Sequence
  Oligonucleotide for detection of SNP TSC0044921
tatattatttcgt

SEQ ID NO: 181670 - DNA, 13 bp, Artificial Sequence
  Oligonucleotide for detection of SNP TSC0044921
acgaaataatata

SEQ ID NO: 181671 - DNA, 13 bp, Artificial Sequence
  Oligonucleotide for detection of SNP TSC0044921
tatattgtttcgt

SEQ ID NO: 181672 - DNA, 13 bp, Artificial Sequence
  Oligonucleotide for detection of SNP TSC0044921
acgaaacaatata

SEQ ID NO: 181673 - DNA, 13 bp, Artificial Sequence
  Oligonucleotide for detection of SNP TSC0044921
tatatcgtttcgt

SEQ ID NO: 181674 - DNA, 13 bp, Artificial Sequence
  Oligonucleotide for detection of SNP TSC0044921
acgaaacgatata

SEQ ID NO: 181675 - DNA, 13 bp, Artificial Sequence
  Oligonucleotide for detection of SNP TSC0044921
atgaaatgatgta

SEQ ID NO: 181676 - DNA, 13 bp, Artificial Sequence
  Oligonucleotide for detection of SNP TSC0044921
tacatcatttcat

SEQ ID NO: 181677 - DNA, 13 bp, Artificial Sequence
  Oligonucleotide for detection of SNP TSC0044921
acgaaatgatgta

SEQ ID NO: 181678 - DNA, 13 bp, Artificial Sequence
  Oligonucleotide for detection of SNP TSC0044921
tacatcatttcgt

SEQ ID NO: 181679 - DNA, 13 bp, Artificial Sequence
  Oligonucleotide for detection of SNP TSC0044921
atgaaacgatgta

SEQ ID NO: 181680 - DNA, 13 bp, Artificial Sequence
  Oligonucleotide for detection of SNP TSC0044921
tacatcgtttcat

SEQ ID NO: 181681 - DNA, 13 bp, Artificial Sequence
  Oligonucleotide for detection of SNP TSC0044921
acgaaacgatgta

SEQ ID NO: 181682 - DNA, 13 bp, Artificial Sequence
  Oligonucleotide for detection of SNP TSC0044921
tacatcgtttcgt

SEQ ID NO: 181683 - DNA, 13 bp, Artificial Sequence
  Oligonucleotide for detection of SNP TSC0044924
aagaaagaagaaa

SEQ ID NO: 181684 - DNA, 13 bp, Artificial Sequence
  Oligonucleotide for detection of SNP TSC0044924
tttcttctttctt

SEQ ID NO: 181685 - DNA, 13 bp, Artificial Sequence
  Oligonucleotide for detection of SNP TSC0044924
aagaaaaaagaaa

SEQ ID NO: 181686 - DNA, 13 bp, Artificial Sequence
  Oligonucleotide for detection of SNP TSC0044924
tttcttttttctt

SEQ ID NO: 181687 - DNA, 13 bp, Artificial Sequence
  Oligonucleotide for detection of SNP TSC0044925
atgaaatagtttt

SEQ ID NO: 181688 - DNA, 13 bp, Artificial Sequence
  Oligonucleotide for detection of SNP TSC0044925
aaaactatttcat

SEQ ID NO: 181689 - DNA, 13 bp, Artificial Sequence
  Oligonucleotide for detection of SNP TSC0044925
atgaaagagtttt

SEQ ID NO: 181690 - DNA, 13 bp, Artificial Sequence
  Oligonucleotide for detection of SNP TSC0044925
aaaactctttcat

SEQ ID NO: 181691 - DNA, 13 bp, Artificial Sequence
  Oligonucleotide for detection of SNP TSC0044925
agagttgttttat

SEQ ID NO: 181692 - DNA, 13 bp, Artificial Sequence
  Oligonucleotide for detection of SNP TSC0044925
ataaaacaactct

SEQ ID NO: 181693 - DNA, 13 bp, Artificial Sequence
  Oligonucleotide for detection of SNP TSC0044925
agagtttttttat

SEQ ID NO: 181694 - DNA, 13 bp, Artificial Sequence
  Oligonucleotide for detection of SNP TSC0044925
ataaaaaaactct

SEQ ID NO: 181695 - DNA, 13 bp, Artificial Sequence
  Oligonucleotide for detection of SNP TSC0044926
atttatgttgatt

SEQ ID NO: 181696 - DNA, 13 bp, Artificial Sequence
  Oligonucleotide for detection of SNP TSC0044926
aatcaacataaat

SEQ ID NO: 181697 - DNA, 13 bp, Artificial Sequence
  Oligonucleotide for detection of SNP TSC0044926
atttatattgatt

SEQ ID NO: 181698 - DNA, 13 bp, Artificial Sequence
  Oligonucleotide for detection of SNP TSC0044926
aatcaatataaat

SEQ ID NO: 181699 - DNA, 13 bp, Artificial Sequence
  Oligonucleotide for detection of SNP TSC0044926
atttatgtcgatt

SEQ ID NO: 181700 - DNA, 13 bp, Artificial Sequence
  Oligonucleotide for detection of SNP TSC0044926
aatcgacataaat

SEQ ID NO: 181701 - DNA, 13 bp, Artificial Sequence
  Oligonucleotide for detection of SNP TSC0044926
atttatatcgatt

SEQ ID NO: 181702 - DNA, 13 bp, Artificial Sequence
  Oligonucleotide for detection of SNP TSC0044926
aatcgatataaat

SEQ ID NO: 181703 - DNA, 13 bp, Artificial Sequence
  Oligonucleotide for detection of SNP TSC0044927
aaatttatttaag

SEQ ID NO: 181704 - DNA, 13 bp, Artificial Sequence
  Oligonucleotide for detection of SNP TSC0044927
cttaaataaattt

SEQ ID NO: 181705 - DNA, 13 bp, Artificial Sequence
  Oligonucleotide for detection of SNP TSC0044928
aatttatttgaaa

SEQ ID NO: 181706 - DNA, 13 bp, Artificial Sequence
  Oligonucleotide for detection of SNP TSC0044928
tttcaaataaatt

SEQ ID NO: 181707 - DNA, 13 bp, Artificial Sequence
  Oligonucleotide for detection of SNP TSC0044928
aatttagttgaaa

SEQ ID NO: 181708 - DNA, 13 bp, Artificial Sequence
  Oligonucleotide for detection of SNP TSC0044928
tttcaactaaatt

SEQ ID NO: 181709 - DNA, 13 bp, Artificial Sequence
  Oligonucleotide for detection of SNP TSC0044928
ttttaggtaggtt

SEQ ID NO: 181710 - DNA, 13 bp, Artificial Sequence
  Oligonucleotide for detection of SNP TSC0044928
aacctacctaaaa

SEQ ID NO: 181711 - DNA, 13 bp, Artificial Sequence
  Oligonucleotide for detection of SNP TSC0044928
ttttagttaggtt

SEQ ID NO: 181712 - DNA, 13 bp, Artificial Sequence
  Oligonucleotide for detection of SNP TSC0044928
aacctaactaaaa

SEQ ID NO: 181713 - DNA, 13 bp, Artificial Sequence
  Oligonucleotide for detection of SNP TSC0000270
aaaagtataatat

SEQ ID NO: 181714 - DNA, 13 bp, Artificial Sequence
  Oligonucleotide for detection of SNP TSC0000270
atattatactttt

SEQ ID NO: 181715 - DNA, 13 bp, Artificial Sequence
  Oligonucleotide for detection of SNP TSC0000270
aaaagtgtaatat

SEQ ID NO: 181716 - DNA, 13 bp, Artificial Sequence
  Oligonucleotide for detection of SNP TSC0000270
atattacactttt

SEQ ID NO: 181717 - DNA, 13 bp, Artificial Sequence
  Oligonucleotide for detection of SNP TSC0006451
tattatttattaa

SEQ ID NO: 181718 - DNA, 13 bp, Artificial Sequence
  Oligonucleotide for detection of SNP TSC0006451
ttaataaataata

SEQ ID NO: 181719 - DNA, 13 bp, Artificial Sequence
  Oligonucleotide for detection of SNP TSC0006451
tattatgtattaa

SEQ ID NO: 181720 - DNA, 13 bp, Artificial Sequence
  Oligonucleotide for detection of SNP TSC0006451
ttaatacataata

SEQ ID NO: 181721 - DNA, 13 bp, Artificial Sequence
  Oligonucleotide for detection of SNP TSC0006451
ttgataaataata

SEQ ID NO: 181722 - DNA, 13 bp, Artificial Sequence
  Oligonucleotide for detection of SNP TSC0006451
tattatttatcaa

SEQ ID NO: 181723 - DNA, 13 bp, Artificial Sequence
  Oligonucleotide for detection of SNP TSC0006451
ttgatatataata

SEQ ID NO: 181724 - DNA, 13 bp, Artificial Sequence
  Oligonucleotide for detection of SNP TSC0006451
tattatatatcaa

SEQ ID NO: 181725 - DNA, 13 bp, Artificial Sequence
  Oligonucleotide for detection of SNP TSC0006452
aaaaatttttaaa

SEQ ID NO: 181726 - DNA, 13 bp, Artificial Sequence
  Oligonucleotide for detection of SNP TSC0006452
tttaaaaattttt

SEQ ID NO: 181727 - DNA, 13 bp, Artificial Sequence
  Oligonucleotide for detection of SNP TSC0006452
aaaaatgtttaaa

SEQ ID NO: 181728 - DNA, 13 bp, Artificial Sequence
  Oligonucleotide for detection of SNP TSC0006452
tttaaacattttt

SEQ ID NO: 181729 - DNA, 13 bp, Artificial Sequence
  Oligonucleotide for detection of SNP TSC0006452
tttaaatattttt

SEQ ID NO: 181730 - DNA, 13 bp, Artificial Sequence
  Oligonucleotide for detection of SNP TSC0006452
aaaaatatttaaa

SEQ ID NO: 181731 - DNA, 13 bp, Artificial Sequence
  Oligonucleotide for detection of SNP TSC0000694
tttttttgaatag

SEQ ID NO: 181732 - DNA, 13 bp, Artificial Sequence
  Oligonucleotide for detection of SNP TSC0000694
ctattcaaaaaaa

SEQ ID NO: 181733 - DNA, 13 bp, Artificial Sequence
  Oligonucleotide for detection of SNP TSC0000694
ttttttggaatag

SEQ ID NO: 181734 - DNA, 13 bp, Artificial Sequence
  Oligonucleotide for detection of SNP TSC0000694
ctattccaaaaaa

SEQ ID NO: 181735 - DNA, 13 bp, Artificial Sequence
  Oligonucleotide for detection of SNP TSC0001015
atttatattttty

SEQ ID NO: 181736 - DNA, 13 bp, Artificial Sequence
  Oligonucleotide for detection of SNP TSC0001015
raaaaatataaat

SEQ ID NO: 181737 - DNA, 13 bp, Artificial Sequence
  Oligonucleotide for detection of SNP TSC0001015
ggaaaatgtggat

SEQ ID NO: 181738 - DNA, 13 bp, Artificial Sequence
  Oligonucleotide for detection of SNP TSC0001015
atccacattttcc

SEQ ID NO: 181739 - DNA, 13 bp, Artificial Sequence
  Oligonucleotide for detection of SNP TSC0001015
ggaaaaggtggat

SEQ ID NO: 181740 - DNA, 13 bp, Artificial Sequence
  Oligonucleotide for detection of SNP TSC0001015
atccaccttttcc

SEQ ID NO: 181741 - DNA, 13 bp, Artificial Sequence
  Oligonucleotide for detection of SNP TSC0000586
tgatttaattatt

SEQ ID NO: 181742 - DNA, 13 bp, Artificial Sequence
  Oligonucleotide for detection of SNP TSC0000586
aataattaaatca

SEQ ID NO: 181743 - DNA, 13 bp, Artificial Sequence
  Oligonucleotide for detection of SNP TSC0000586
agtaattgaatta

SEQ ID NO: 181744 - DNA, 13 bp, Artificial Sequence
  Oligonucleotide for detection of SNP TSC0000586
taattcaattact

SEQ ID NO: 181745 - DNA, 13 bp, Artificial Sequence
  Oligonucleotide for detection of SNP TSC0000586
agtaatagaatta

SEQ ID NO: 181746 - DNA, 13 bp, Artificial Sequence
  Oligonucleotide for detection of SNP TSC0000586
taattctattact

SEQ ID NO: 181747 - DNA, 13 bp, Artificial Sequence
  Oligonucleotide for detection of SNP TSC0000587
tttggtgggaagt

SEQ ID NO: 181748 - DNA, 13 bp, Artificial Sequence
  Oligonucleotide for detection of SNP TSC0000587
acttcccaccaaa

SEQ ID NO: 181749 - DNA, 13 bp, Artificial Sequence
  Oligonucleotide for detection of SNP TSC0000587
tttggtaggaagt

SEQ ID NO: 181750 - DNA, 13 bp, Artificial Sequence
  Oligonucleotide for detection of SNP TSC0000587
acttcctaccaaa

SEQ ID NO: 181751 - DNA, 13 bp, Artificial Sequence
  Oligonucleotide for detection of SNP TSC0044936
gggatgaagggta

SEQ ID NO: 181752 - DNA, 13 bp, Artificial Sequence
  Oligonucleotide for detection of SNP TSC0044936
tacccttcatccc

SEQ ID NO: 181753 - DNA, 13 bp, Artificial Sequence
  Oligonucleotide for detection of SNP TSC0044936
gggatgtagggta

SEQ ID NO: 181754 - DNA, 13 bp, Artificial Sequence
  Oligonucleotide for detection of SNP TSC0044936
taccctacatccc

SEQ ID NO: 181755 - DNA, 13 bp, Artificial Sequence
  Oligonucleotide for detection of SNP TSC0044937
ttagttattatta

SEQ ID NO: 181756 - DNA, 13 bp, Artificial Sequence
  Oligonucleotide for detection of SNP TSC0044937
taataataactaa

SEQ ID NO: 181757 - DNA, 13 bp, Artificial Sequence
  Oligonucleotide for detection of SNP TSC0044937
ttagttgttatta

SEQ ID NO: 181758 - DNA, 13 bp, Artificial Sequence
  Oligonucleotide for detection of SNP TSC0044937
taataacaactaa

SEQ ID NO: 181759 - DNA, 13 bp, Artificial Sequence
  Oligonucleotide for detection of SNP TSC0044937
ttagtcgttatta

SEQ ID NO: 181760 - DNA, 13 bp, Artificial Sequence
  Oligonucleotide for detection of SNP TSC0044937
taataacgactaa

SEQ ID NO: 181761 - DNA, 13 bp, Artificial Sequence
  Oligonucleotide for detection of SNP TSC0044937
tggtaatggttgg

SEQ ID NO: 181762 - DNA, 13 bp, Artificial Sequence
  Oligonucleotide for detection of SNP TSC0044937
ccaaccattacca

SEQ ID NO: 181763 - DNA, 13 bp, Artificial Sequence
  Oligonucleotide for detection of SNP TSC0044937
tggtaacggttgg

SEQ ID NO: 181764 - DNA, 13 bp, Artificial Sequence
  Oligonucleotide for detection of SNP TSC0044937
ccaaccgttacca

SEQ ID NO: 181765 - DNA, 13 bp, Artificial Sequence
  Oligonucleotide for detection of SNP TSC0044938
ttttatatggtgt

SEQ ID NO: 181766 - DNA, 13 bp, Artificial Sequence
  Oligonucleotide for detection of SNP TSC0044938
acaccatataaaa

SEQ ID NO: 181767 - DNA, 13 bp, Artificial Sequence
  Oligonucleotide for detection of SNP TSC0044938
ttttatgtggtgt

SEQ ID NO: 181768 - DNA, 13 bp, Artificial Sequence
  Oligonucleotide for detection of SNP TSC0044938
acaccacataaaa

SEQ ID NO: 181769 - DNA, 13 bp, Artificial Sequence
  Oligonucleotide for detection of SNP TSC0044938
ttttacgtggtgt

SEQ ID NO: 181770 - DNA, 13 bp, Artificial Sequence
  Oligonucleotide for detection of SNP TSC0044938
acaccacgtaaaa

SEQ ID NO: 181771 - DNA, 13 bp, Artificial Sequence
  Oligonucleotide for detection of SNP TSC0044938
atattatgtggaa

SEQ ID NO: 181772 - DNA, 13 bp, Artificial Sequence
  Oligonucleotide for detection of SNP TSC0044938
ttccacataatat

SEQ ID NO: 181773 - DNA, 13 bp, Artificial Sequence
  Oligonucleotide for detection of SNP TSC0044938
atattacgtggaa

SEQ ID NO: 181774 - DNA, 13 bp, Artificial Sequence
  Oligonucleotide for detection of SNP TSC0044938
ttccacgtaatat

SEQ ID NO: 181775 - DNA, 13 bp, Artificial Sequence
  Oligonucleotide for detection of SNP TSC0044940
aagaaatgggtta

SEQ ID NO: 181776 - DNA, 13 bp, Artificial Sequence
  Oligonucleotide for detection of SNP TSC0044940
taacccatttctt

SEQ ID NO: 181777 - DNA, 13 bp, Artificial Sequence
  Oligonucleotide for detection of SNP TSC0044940
aagaaacgggtta

SEQ ID NO: 181778 - DNA, 13 bp, Artificial Sequence
  Oligonucleotide for detection of SNP TSC0044940
taacccgtttctt

SEQ ID NO: 181779 - DNA, 13 bp, Artificial Sequence
  Oligonucleotide for detection of SNP TSC0044941
aattaagatgttg

SEQ ID NO: 181780 - DNA, 13 bp, Artificial Sequence
  Oligonucleotide for detection of SNP TSC0044941
caacatcttaatt

SEQ ID NO: 181781 - DNA, 13 bp, Artificial Sequence
  Oligonucleotide for detection of SNP TSC0044941
aattaaaatgttg

SEQ ID NO: 181782 - DNA, 13 bp, Artificial Sequence
  Oligonucleotide for detection of SNP TSC0044941
caacattttaatt

SEQ ID NO: 181783 - DNA, 13 bp, Artificial Sequence
  Oligonucleotide for detection of SNP TSC0044942
gataaatggtaag

SEQ ID NO: 181784 - DNA, 13 bp, Artificial Sequence
  Oligonucleotide for detection of SNP TSC0044942
cttaccatttatc

SEQ ID NO: 181785 - DNA, 13 bp, Artificial Sequence
  Oligonucleotide for detection of SNP TSC0044942
gataaacggtaag

SEQ ID NO: 181786 - DNA, 13 bp, Artificial Sequence
  Oligonucleotide for detection of SNP TSC0044942
cttaccgtttatc

SEQ ID NO: 181787 - DNA, 13 bp, Artificial Sequence
  Oligonucleotide for detection of SNP TSC0044943
tgtttagggaatt

SEQ ID NO: 181788 - DNA, 13 bp, Artificial Sequence
  Oligonucleotide for detection of SNP TSC0044943
aattccctaaaca

SEQ ID NO: 181789 - DNA, 13 bp, Artificial Sequence
  Oligonucleotide for detection of SNP TSC0044943
tgtttaaggaatt

SEQ ID NO: 181790 - DNA, 13 bp, Artificial Sequence
  Oligonucleotide for detection of SNP TSC0044943
aattccttaaaca

SEQ ID NO: 181791 - DNA, 13 bp, Artificial Sequence
  Oligonucleotide for detection of SNP TSC0044944
gggatatagttaa

SEQ ID NO: 181792 - DNA, 13 bp, Artificial Sequence
  Oligonucleotide for detection of SNP TSC0044944
ttaactatatccc

SEQ ID NO: 181793 - DNA, 13 bp, Artificial Sequence
  Oligonucleotide for detection of SNP TSC0044944
gggatagagttaa

SEQ ID NO: 181794 - DNA, 13 bp, Artificial Sequence
  Oligonucleotide for detection of SNP TSC0044944
ttaactctatccc

SEQ ID NO: 181795 - DNA, 13 bp, Artificial Sequence
  Oligonucleotide for detection of SNP TSC0044945
tatttaatggtag

SEQ ID NO: 181796 - DNA, 13 bp, Artificial Sequence
  Oligonucleotide for detection of SNP TSC0044945
ctaccattaaata

SEQ ID NO: 181797 - DNA, 13 bp, Artificial Sequence
  Oligonucleotide for detection of SNP TSC0044945
tatttagtggtag

SEQ ID NO: 181798 - DNA, 13 bp, Artificial Sequence
  Oligonucleotide for detection of SNP TSC0044945
ctaccactaaata

SEQ ID NO: 181799 - DNA, 13 bp, Artificial Sequence
  Oligonucleotide for detection of SNP TSC0044947
taggtaaatgtty

SEQ ID NO: 181800 - DNA, 13 bp, Artificial Sequence
  Oligonucleotide for detection of SNP TSC0044947
raacatttaccta

SEQ ID NO: 181801 - DNA, 13 bp, Artificial Sequence
  Oligonucleotide for detection of SNP TSC0044947
taggtagatgtty

SEQ ID NO: 181802 - DNA, 13 bp, Artificial Sequence
  Oligonucleotide for detection of SNP TSC0044947
raacatctaccta

SEQ ID NO: 181803 - DNA, 13 bp, Artificial Sequence
  Oligonucleotide for detection of SNP TSC0008130
taatataatgtgy

SEQ ID NO: 181804 - DNA, 13 bp, Artificial Sequence
  Oligonucleotide for detection of SNP TSC0008130
rcacattatatta

SEQ ID NO: 181805 - DNA, 13 bp, Artificial Sequence
  Oligonucleotide for detection of SNP TSC0008130
taatattatgtgy

SEQ ID NO: 181806 - DNA, 13 bp, Artificial Sequence
  Oligonucleotide for detection of SNP TSC0008130
rcacataatatta

SEQ ID NO: 181807 - DNA, 13 bp, Artificial Sequence
  Oligonucleotide for detection of SNP TSC0008130
gtatattgtgtta

SEQ ID NO: 181808 - DNA, 13 bp, Artificial Sequence
  Oligonucleotide for detection of SNP TSC0008130
taacacaatatac

SEQ ID NO: 181809 - DNA, 13 bp, Artificial Sequence
  Oligonucleotide for detection of SNP TSC0008130
gtatatagtgtta

SEQ ID NO: 181810 - DNA, 13 bp, Artificial Sequence
  Oligonucleotide for detection of SNP TSC0008130
taacactatatac

SEQ ID NO: 181811 - DNA, 13 bp, Artificial Sequence
  Oligonucleotide for detection of SNP TSC0008959
tttgttatattta

SEQ ID NO: 181812 - DNA, 13 bp, Artificial Sequence
  Oligonucleotide for detection of SNP TSC0008959
taaatataacaaa

SEQ ID NO: 181813 - DNA, 13 bp, Artificial Sequence
  Oligonucleotide for detection of SNP TSC0000286
ataaaagttatgt

SEQ ID NO: 181814 - DNA, 13 bp, Artificial Sequence
  Oligonucleotide for detection of SNP TSC0000286
acataacttttat

SEQ ID NO: 181815 - DNA, 13 bp, Artificial Sequence
  Oligonucleotide for detection of SNP TSC0000286
ataaaaattatgt

SEQ ID NO: 181816 - DNA, 13 bp, Artificial Sequence
  Oligonucleotide for detection of SNP TSC0000286
acataatttttat

SEQ ID NO: 181817 - DNA, 13 bp, Artificial Sequence
  Oligonucleotide for detection of SNP TSC0000287
ttgagtgtaagag

SEQ ID NO: 181818 - DNA, 13 bp, Artificial Sequence
  Oligonucleotide for detection of SNP TSC0000287
ctcttacactcaa

SEQ ID NO: 181819 - DNA, 13 bp, Artificial Sequence
  Oligonucleotide for detection of SNP TSC0000287
ttgagtataagag

SEQ ID NO: 181820 - DNA, 13 bp, Artificial Sequence
  Oligonucleotide for detection of SNP TSC0000287
ctcttatactcaa

SEQ ID NO: 181821 - DNA, 13 bp, Artificial Sequence
  Oligonucleotide for detection of SNP TSC0001649
gatattaaatggy

SEQ ID NO: 181822 - DNA, 13 bp, Artificial Sequence
  Oligonucleotide for detection of SNP TSC0001649
rccatttaatatc

SEQ ID NO: 181823 - DNA, 13 bp, Artificial Sequence
  Oligonucleotide for detection of SNP TSC0001649
gatattgaatggy

SEQ ID NO: 181824 - DNA, 13 bp, Artificial Sequence
  Oligonucleotide for detection of SNP TSC0001649
rccattcaatatc

SEQ ID NO: 181825 - DNA, 13 bp, Artificial Sequence
  Oligonucleotide for detection of SNP TSC0001649
gatattaaacggy

SEQ ID NO: 181826 - DNA, 13 bp, Artificial Sequence
  Oligonucleotide for detection of SNP TSC0001649
rccgtttaatatc

SEQ ID NO: 181827 - DNA, 13 bp, Artificial Sequence
  Oligonucleotide for detection of SNP TSC0001649
gatatcgaatggy

SEQ ID NO: 181828 - DNA, 13 bp, Artificial Sequence
  Oligonucleotide for detection of SNP TSC0001649
rccattcgatatc

SEQ ID NO: 181829 - DNA, 13 bp, Artificial Sequence
  Oligonucleotide for detection of SNP TSC0001649
gatattgaacggy

SEQ ID NO: 181830 - DNA, 13 bp, Artificial Sequence
  Oligonucleotide for detection of SNP TSC0001649
rccgttcaatatc

SEQ ID NO: 181831 - DNA, 13 bp, Artificial Sequence
  Oligonucleotide for detection of SNP TSC0001649
gatatcgaacggy

SEQ ID NO: 181832 - DNA, 13 bp, Artificial Sequence
  Oligonucleotide for detection of SNP TSC0001649
rccgttcgatatc

SEQ ID NO: 181833 - DNA, 13 bp, Artificial Sequence
  Oligonucleotide for detection of SNP TSC0001649
gttgtttgatgty

SEQ ID NO: 181834 - DNA, 13 bp, Artificial Sequence
  Oligonucleotide for detection of SNP TSC0001649
racatcaaacaac

SEQ ID NO: 181835 - DNA, 13 bp, Artificial Sequence
  Oligonucleotide for detection of SNP TSC0001649
gtcgtttgatgty

SEQ ID NO: 181836 - DNA, 13 bp, Artificial Sequence
  Oligonucleotide for detection of SNP TSC0001649
racatcaaacgac

SEQ ID NO: 181837 - DNA, 13 bp, Artificial Sequence
  Oligonucleotide for detection of SNP TSC0001649
gttgttcgatgty

SEQ ID NO: 181838 - DNA, 13 bp, Artificial Sequence
  Oligonucleotide for detection of SNP TSC0001649
racatcgaacaac

SEQ ID NO: 181839 - DNA, 13 bp, Artificial Sequence
  Oligonucleotide for detection of SNP TSC0001649
gtcgttcgatgty

SEQ ID NO: 181840 - DNA, 13 bp, Artificial Sequence
  Oligonucleotide for detection of SNP TSC0001649
racatcgaacgac

SEQ ID NO: 181841 - DNA, 13 bp, Artificial Sequence
  Oligonucleotide for detection of SNP TSC0000296
aaagtaatgatat

SEQ ID NO: 181842 - DNA, 13 bp, Artificial Sequence
  Oligonucleotide for detection of SNP TSC0000296
atatcattacttt

SEQ ID NO: 181843 - DNA, 13 bp, Artificial Sequence
  Oligonucleotide for detection of SNP TSC0000296
aaagtagtgatat

SEQ ID NO: 181844 - DNA, 13 bp, Artificial Sequence
  Oligonucleotide for detection of SNP TSC0000296
atatcactacttt

SEQ ID NO: 181845 - DNA, 13 bp, Artificial Sequence
  Oligonucleotide for detection of SNP TSC0001352
gttttgatttttg

SEQ ID NO: 181846 - DNA, 13 bp, Artificial Sequence
  Oligonucleotide for detection of SNP TSC0001352
caaaaatcaaaac

SEQ ID NO: 181847 - DNA, 13 bp, Artificial Sequence
  Oligonucleotide for detection of SNP TSC0001352
gttttgttttttg

SEQ ID NO: 181848 - DNA, 13 bp, Artificial Sequence
  Oligonucleotide for detection of SNP TSC0001352
caaaaaacaaaac

SEQ ID NO: 181849 - DNA, 13 bp, Artificial Sequence
  Oligonucleotide for detection of SNP TSC0001352
taaaaattaaaay

SEQ ID NO: 181850 - DNA, 13 bp, Artificial Sequence
  Oligonucleotide for detection of SNP TSC0001352
rttttaattttta

SEQ ID NO: 181851 - DNA, 13 bp, Artificial Sequence
  Oligonucleotide for detection of SNP TSC0001352
taaaaaataaaay

SEQ ID NO: 181852 - DNA, 13 bp, Artificial Sequence
  Oligonucleotide for detection of SNP TSC0001352
rttttatttttta

SEQ ID NO: 181853 - DNA, 13 bp, Artificial Sequence
  Oligonucleotide for detection of SNP TSC0001353
tatgtaatttaaa

SEQ ID NO: 181854 - DNA, 13 bp, Artificial Sequence
  Oligonucleotide for detection of SNP TSC0001353
tttaaattacata

SEQ ID NO: 181855 - DNA, 13 bp, Artificial Sequence
  Oligonucleotide for detection of SNP TSC0001353
tatgtagtttaaa

SEQ ID NO: 181856 - DNA, 13 bp, Artificial Sequence
  Oligonucleotide for detection of SNP TSC0001353
tttaaactacata

SEQ ID NO: 181857 - DNA, 13 bp, Artificial Sequence
  Oligonucleotide for detection of SNP TSC0001354
tagttagttttaa

SEQ ID NO: 181858 - DNA, 13 bp, Artificial Sequence
  Oligonucleotide for detection of SNP TSC0001354
ttaaaactaacta

SEQ ID NO: 181859 - DNA, 13 bp, Artificial Sequence
  Oligonucleotide for detection of SNP TSC0001354
ttgggaatgatta

SEQ ID NO: 181860 - DNA, 13 bp, Artificial Sequence
  Oligonucleotide for detection of SNP TSC0001354
taatcattcccaa

SEQ ID NO: 181861 - DNA, 13 bp, Artificial Sequence
  Oligonucleotide for detection of SNP TSC0001354
ttgggattgatta

SEQ ID NO: 181862 - DNA, 13 bp, Artificial Sequence
  Oligonucleotide for detection of SNP TSC0001354
taatcaatcccaa

SEQ ID NO: 181863 - DNA, 13 bp, Artificial Sequence
  Oligonucleotide for detection of SNP TSC0000525
ttttaatatattt

SEQ ID NO: 181864 - DNA, 13 bp, Artificial Sequence
  Oligonucleotide for detection of SNP TSC0000525
aaatatattaaaa

SEQ ID NO: 181865 - DNA, 13 bp, Artificial Sequence
  Oligonucleotide for detection of SNP TSC0000525
ttttaagatattt

SEQ ID NO: 181866 - DNA, 13 bp, Artificial Sequence
  Oligonucleotide for detection of SNP TSC0000525
aaatatcttaaaa

SEQ ID NO: 181867 - DNA, 13 bp, Artificial Sequence
  Oligonucleotide for detection of SNP TSC0000525
aaatatattgaag

SEQ ID NO: 181868 - DNA, 13 bp, Artificial Sequence
  Oligonucleotide for detection of SNP TSC0000525
cttcaatatattt

SEQ ID NO: 181869 - DNA, 13 bp, Artificial Sequence
  Oligonucleotide for detection of SNP TSC0000525
aaatattttgaag

SEQ ID NO: 181870 - DNA, 13 bp, Artificial Sequence
  Oligonucleotide for detection of SNP TSC0000525
cttcaaaatattt

SEQ ID NO: 181871 - DNA, 13 bp, Artificial Sequence
  Oligonucleotide for detection of SNP TSC0000526
taattttaaagga

SEQ ID NO: 181872 - DNA, 13 bp, Artificial Sequence
  Oligonucleotide for detection of SNP TSC0000526
tcctttaaaatta

SEQ ID NO: 181873 - DNA, 13 bp, Artificial Sequence
  Oligonucleotide for detection of SNP TSC0000526
taatttgaaagga

SEQ ID NO: 181874 - DNA, 13 bp, Artificial Sequence
  Oligonucleotide for detection of SNP TSC0000526
tcctttcaaatta

SEQ ID NO: 181875 - DNA, 13 bp, Artificial Sequence
  Oligonucleotide for detection of SNP TSC0044955
gtattagttttta

SEQ ID NO: 181876 - DNA, 13 bp, Artificial Sequence
  Oligonucleotide for detection of SNP TSC0044955
taaaaactaatac

SEQ ID NO: 181877 - DNA, 13 bp, Artificial Sequence
  Oligonucleotide for detection of SNP TSC0044955
taagaagtgatay

SEQ ID NO: 181878 - DNA, 13 bp, Artificial Sequence
  Oligonucleotide for detection of SNP TSC0044955
rtatcacttctta

SEQ ID NO: 181879 - DNA, 13 bp, Artificial Sequence
  Oligonucleotide for detection of SNP TSC0044955
taagaattgatay

SEQ ID NO: 181880 - DNA, 13 bp, Artificial Sequence
  Oligonucleotide for detection of SNP TSC0044955
rtatcaattctta

SEQ ID NO: 181881 - DNA, 13 bp, Artificial Sequence
  Oligonucleotide for detection of SNP TSC0044958
ttttttatggttt

SEQ ID NO: 181882 - DNA, 13 bp, Artificial Sequence
  Oligonucleotide for detection of SNP TSC0044958
aaaccataaaaaa

SEQ ID NO: 181883 - DNA, 13 bp, Artificial Sequence
  Oligonucleotide for detection of SNP TSC0044958
ttttttttggttt

SEQ ID NO: 181884 - DNA, 13 bp, Artificial Sequence
  Oligonucleotide for detection of SNP TSC0044958
aaaccaaaaaaaa

SEQ ID NO: 181885 - DNA, 13 bp, Artificial Sequence
  Oligonucleotide for detection of SNP TSC0044958
aggttatagaaag

SEQ ID NO: 181886 - DNA, 13 bp, Artificial Sequence
  Oligonucleotide for detection of SNP TSC0044958
ctttctataacct

SEQ ID NO: 181887 - DNA, 13 bp, Artificial Sequence
  Oligonucleotide for detection of SNP TSC0044958
aggttaaagaaag

SEQ ID NO: 181888 - DNA, 13 bp, Artificial Sequence
  Oligonucleotide for detection of SNP TSC0044958
ctttctttaacct

SEQ ID NO: 181889 - DNA, 13 bp, Artificial Sequence
  Oligonucleotide for detection of SNP TSC0044959
tatataagatagy

SEQ ID NO: 181890 - DNA, 13 bp, Artificial Sequence
  Oligonucleotide for detection of SNP TSC0044959
rctatcttatata

SEQ ID NO: 181891 - DNA, 13 bp, Artificial Sequence
  Oligonucleotide for detection of SNP TSC0044959
tatatatgatagy

SEQ ID NO: 181892 - DNA, 13 bp, Artificial Sequence
  Oligonucleotide for detection of SNP TSC0044959
rctatcatatata

SEQ ID NO: 181893 - DNA, 13 bp, Artificial Sequence
  Oligonucleotide for detection of SNP TSC0044959
tatatacgatagy

SEQ ID NO: 181894 - DNA, 13 bp, Artificial Sequence
  Oligonucleotide for detection of SNP TSC0044959
rctatcgtatata

SEQ ID NO: 181895 - DNA, 13 bp, Artificial Sequence
  Oligonucleotide for detection of SNP TSC0044959
gttattttatata

SEQ ID NO: 181896 - DNA, 13 bp, Artificial Sequence
  Oligonucleotide for detection of SNP TSC0044959
tatataaaataac

SEQ ID NO: 181897 - DNA, 13 bp, Artificial Sequence
  Oligonucleotide for detection of SNP TSC0044959
gttatcgtatata

SEQ ID NO: 181898 - DNA, 13 bp, Artificial Sequence
  Oligonucleotide for detection of SNP TSC0044959
tatatacgataac

SEQ ID NO: 181899 - DNA, 13 bp, Artificial Sequence
  Oligonucleotide for detection of SNP TSC0044960
tagttaatatagy

SEQ ID NO: 181900 - DNA, 13 bp, Artificial Sequence
  Oligonucleotide for detection of SNP TSC0044960
rctatattaacta

SEQ ID NO: 181901 - DNA, 13 bp, Artificial Sequence
  Oligonucleotide for detection of SNP TSC0044960
tagttattatagy

SEQ ID NO: 181902 - DNA, 13 bp, Artificial Sequence
  Oligonucleotide for detection of SNP TSC0044960
rctataataacta

SEQ ID NO: 181903 - DNA, 13 bp, Artificial Sequence
  Oligonucleotide for detection of SNP TSC0044960
gttatattaattg

SEQ ID NO: 181904 - DNA, 13 bp, Artificial Sequence
  Oligonucleotide for detection of SNP TSC0044960
caattaatataac

SEQ ID NO: 181905 - DNA, 13 bp, Artificial Sequence
  Oligonucleotide for detection of SNP TSC0044960
gttatagtaattg

SEQ ID NO: 181906 - DNA, 13 bp, Artificial Sequence
  Oligonucleotide for detection of SNP TSC0044960
caattactataac

SEQ ID NO: 181907 - DNA, 13 bp, Artificial Sequence
  Oligonucleotide for detection of SNP TSC0044960
gttataataattg

SEQ ID NO: 181908 - DNA, 13 bp, Artificial Sequence
  Oligonucleotide for detection of SNP TSC0044960
caattattataac

SEQ ID NO: 181909 - DNA, 13 bp, Artificial Sequence
  Oligonucleotide for detection of SNP TSC0044961
attaaaataaata

SEQ ID NO: 181910 - DNA, 13 bp, Artificial Sequence
  Oligonucleotide for detection of SNP TSC0044961
tatttattttaat

SEQ ID NO: 181911 - DNA, 13 bp, Artificial Sequence
  Oligonucleotide for detection of SNP TSC0044961
attaaagtaaata

SEQ ID NO: 181912 - DNA, 13 bp, Artificial Sequence
  Oligonucleotide for detection of SNP TSC0044961
tatttactttaat

SEQ ID NO: 181913 - DNA, 13 bp, Artificial Sequence
  Oligonucleotide for detection of SNP TSC0044961
tgtttattttagt

SEQ ID NO: 181914 - DNA, 13 bp, Artificial Sequence
  Oligonucleotide for detection of SNP TSC0044961
actaaaataaaca

SEQ ID NO: 181915 - DNA, 13 bp, Artificial Sequence
  Oligonucleotide for detection of SNP TSC0044961
tgtttaatttagt

SEQ ID NO: 181916 - DNA, 13 bp, Artificial Sequence
  Oligonucleotide for detection of SNP TSC0044961
actaaattaaaca

SEQ ID NO: 181917 - DNA, 13 bp, Artificial Sequence
  Oligonucleotide for detection of SNP TSC0044962
tttgtagtgattt

SEQ ID NO: 181918 - DNA, 13 bp, Artificial Sequence
  Oligonucleotide for detection of SNP TSC0044962
aaatcactacaaa

SEQ ID NO: 181919 - DNA, 13 bp, Artificial Sequence
  Oligonucleotide for detection of SNP TSC0044962
tttgtaatgattt

SEQ ID NO: 181920 - DNA, 13 bp, Artificial Sequence
  Oligonucleotide for detection of SNP TSC0044962
aaatcattacaaa

SEQ ID NO: 181921 - DNA, 13 bp, Artificial Sequence
  Oligonucleotide for detection of SNP TSC0044966
tttttagttgtgy

SEQ ID NO: 181922 - DNA, 13 bp, Artificial Sequence
  Oligonucleotide for detection of SNP TSC0044966
rcacaactaaaaa

SEQ ID NO: 181923 - DNA, 13 bp, Artificial Sequence
  Oligonucleotide for detection of SNP TSC0044970
tttgtattttttt

SEQ ID NO: 181924 - DNA, 13 bp, Artificial Sequence
  Oligonucleotide for detection of SNP TSC0044970
aaaaaaatacaaa

SEQ ID NO: 181925 - DNA, 13 bp, Artificial Sequence
  Oligonucleotide for detection of SNP TSC0044970
aggaaattgtaaa

SEQ ID NO: 181926 - DNA, 13 bp, Artificial Sequence
  Oligonucleotide for detection of SNP TSC0044970
tttacaatttcct

SEQ ID NO: 181927 - DNA, 13 bp, Artificial Sequence
  Oligonucleotide for detection of SNP TSC0044970
aggaaaatgtaaa

SEQ ID NO: 181928 - DNA, 13 bp, Artificial Sequence
  Oligonucleotide for detection of SNP TSC0044970
tttacattttcct

SEQ ID NO: 181929 - DNA, 13 bp, Artificial Sequence
  Oligonucleotide for detection of SNP TSC0044971
agttggatatgtt

SEQ ID NO: 181930 - DNA, 13 bp, Artificial Sequence
  Oligonucleotide for detection of SNP TSC0044971
aacatatccaact

SEQ ID NO: 181931 - DNA, 13 bp, Artificial Sequence
  Oligonucleotide for detection of SNP TSC0044971
agttgggtatgtt

SEQ ID NO: 181932 - DNA, 13 bp, Artificial Sequence
  Oligonucleotide for detection of SNP TSC0044971
aacatacccaact

SEQ ID NO: 181933 - DNA, 13 bp, Artificial Sequence
  Oligonucleotide for detection of SNP TSC0044972
taagagaggttaa

SEQ ID NO: 181934 - DNA, 13 bp, Artificial Sequence
  Oligonucleotide for detection of SNP TSC0044972
ttaacctctctta

SEQ ID NO: 181935 - DNA, 13 bp, Artificial Sequence
  Oligonucleotide for detection of SNP TSC0044972
taagaggggttaa

SEQ ID NO: 181936 - DNA, 13 bp, Artificial Sequence
  Oligonucleotide for detection of SNP TSC0044972
ttaacccctctta

SEQ ID NO: 181937 - DNA, 13 bp, Artificial Sequence
  Oligonucleotide for detection of SNP TSC0044973
gtatgtttttgtt

SEQ ID NO: 181938 - DNA, 13 bp, Artificial Sequence
  Oligonucleotide for detection of SNP TSC0044973
aacaaaaacatac

SEQ ID NO: 181939 - DNA, 13 bp, Artificial Sequence
  Oligonucleotide for detection of SNP TSC0044973
gtatgtgtttgtt

SEQ ID NO: 181940 - DNA, 13 bp, Artificial Sequence
  Oligonucleotide for detection of SNP TSC0044973
aacaaacacatac

SEQ ID NO: 181941 - DNA, 13 bp, Artificial Sequence
  Oligonucleotide for detection of SNP TSC0044973
agtaggaatatay

SEQ ID NO: 181942 - DNA, 13 bp, Artificial Sequence
  Oligonucleotide for detection of SNP TSC0044973
rtatattcctact

SEQ ID NO: 181943 - DNA, 13 bp, Artificial Sequence
  Oligonucleotide for detection of SNP TSC0044973
agtaggtatatay

SEQ ID NO: 181944 - DNA, 13 bp, Artificial Sequence
  Oligonucleotide for detection of SNP TSC0044973
rtatatacctact

SEQ ID NO: 181945 - DNA, 13 bp, Artificial Sequence
  Oligonucleotide for detection of SNP TSC0044974
ggatggtggttgt

SEQ ID NO: 181946 - DNA, 13 bp, Artificial Sequence
  Oligonucleotide for detection of SNP TSC0044974
acaaccaccatcc

SEQ ID NO: 181947 - DNA, 13 bp, Artificial Sequence
  Oligonucleotide for detection of SNP TSC0044974
ggacggtggttgt

SEQ ID NO: 181948 - DNA, 13 bp, Artificial Sequence
  Oligonucleotide for detection of SNP TSC0044974
acaaccaccgtcc

SEQ ID NO: 181949 - DNA, 13 bp, Artificial Sequence
  Oligonucleotide for detection of SNP TSC0044974
ggatggcggttgt

SEQ ID NO: 181950 - DNA, 13 bp, Artificial Sequence
  Oligonucleotide for detection of SNP TSC0044974
acaaccgccatcc

SEQ ID NO: 181951 - DNA, 13 bp, Artificial Sequence
  Oligonucleotide for detection of SNP TSC0044974
ggacggcggttgt

SEQ ID NO: 181952 - DNA, 13 bp, Artificial Sequence
  Oligonucleotide for detection of SNP TSC0044974
acaaccgccgtcc

SEQ ID NO: 181953 - DNA, 13 bp, Artificial Sequence
  Oligonucleotide for detection of SNP TSC0044974
atagttgttgtty

SEQ ID NO: 181954 - DNA, 13 bp, Artificial Sequence
  Oligonucleotide for detection of SNP TSC0044974
raacaacaactat

SEQ ID NO: 181955 - DNA, 13 bp, Artificial Sequence
  Oligonucleotide for detection of SNP TSC0044974
atagttattgtty

SEQ ID NO: 181956 - DNA, 13 bp, Artificial Sequence
  Oligonucleotide for detection of SNP TSC0044974
raacaataactat

SEQ ID NO: 181957 - DNA, 13 bp, Artificial Sequence
  Oligonucleotide for detection of SNP TSC0044974
atagtcgttgtty

SEQ ID NO: 181958 - DNA, 13 bp, Artificial Sequence
  Oligonucleotide for detection of SNP TSC0044974
raacaacgactat

SEQ ID NO: 181959 - DNA, 13 bp, Artificial Sequence
  Oligonucleotide for detection of SNP TSC0044974
atagttatcgtty

SEQ ID NO: 181960 - DNA, 13 bp, Artificial Sequence
  Oligonucleotide for detection of SNP TSC0044974
raacgataactat

SEQ ID NO: 181961 - DNA, 13 bp, Artificial Sequence
  Oligonucleotide for detection of SNP TSC0044974
atagttgtcgtty

SEQ ID NO: 181962 - DNA, 13 bp, Artificial Sequence
  Oligonucleotide for detection of SNP TSC0044974
raacgacaactat

SEQ ID NO: 181963 - DNA, 13 bp, Artificial Sequence
  Oligonucleotide for detection of SNP TSC0044974
atagtcgtcgtty

SEQ ID NO: 181964 - DNA, 13 bp, Artificial Sequence
  Oligonucleotide for detection of SNP TSC0044974
raacgacgactat

SEQ ID NO: 181965 - DNA, 13 bp, Artificial Sequence
  Oligonucleotide for detection of SNP TSC0044975
taggaatgagttg

SEQ ID NO: 181966 - DNA, 13 bp, Artificial Sequence
  Oligonucleotide for detection of SNP TSC0044975
caactcattccta

SEQ ID NO: 181967 - DNA, 13 bp, Artificial Sequence
  Oligonucleotide for detection of SNP TSC0044975
taggaacgagttg

SEQ ID NO: 181968 - DNA, 13 bp, Artificial Sequence
  Oligonucleotide for detection of SNP TSC0044975
caactcgttccta

SEQ ID NO: 181969 - DNA, 13 bp, Artificial Sequence
  Oligonucleotide for detection of SNP TSC0044976
ataaagtaaaata

SEQ ID NO: 181970 - DNA, 13 bp, Artificial Sequence
  Oligonucleotide for detection of SNP TSC0044976
tattttactttat

SEQ ID NO: 181971 - DNA, 13 bp, Artificial Sequence
  Oligonucleotide for detection of SNP TSC0044976
ataaaggaaaata

SEQ ID NO: 181972 - DNA, 13 bp, Artificial Sequence
  Oligonucleotide for detection of SNP TSC0044976
tattttcctttat

SEQ ID NO: 181973 - DNA, 13 bp, Artificial Sequence
  Oligonucleotide for detection of SNP TSC0044977
aatatagaaatat

SEQ ID NO: 181974 - DNA, 13 bp, Artificial Sequence
  Oligonucleotide for detection of SNP TSC0044977
atatttctatatt

SEQ ID NO: 181975 - DNA, 13 bp, Artificial Sequence
  Oligonucleotide for detection of SNP TSC0044978
taattaattagtt

SEQ ID NO: 181976 - DNA, 13 bp, Artificial Sequence
  Oligonucleotide for detection of SNP TSC0044978
aactaattaatta

SEQ ID NO: 181977 - DNA, 13 bp, Artificial Sequence
  Oligonucleotide for detection of SNP TSC0044978
taattatttagtt

SEQ ID NO: 181978 - DNA, 13 bp, Artificial Sequence
  Oligonucleotide for detection of SNP TSC0044978
aactaaataatta

SEQ ID NO: 181979 - DNA, 13 bp, Artificial Sequence
  Oligonucleotide for detection of SNP TSC0044978
aattaattagtta

SEQ ID NO: 181980 - DNA, 13 bp, Artificial Sequence
  Oligonucleotide for detection of SNP TSC0044978
taactaattaatt

SEQ ID NO: 181981 - DNA, 13 bp, Artificial Sequence
  Oligonucleotide for detection of SNP TSC0044978
aattaagtagtta

SEQ ID NO: 181982 - DNA, 13 bp, Artificial Sequence
  Oligonucleotide for detection of SNP TSC0044978
taactacttaatt

SEQ ID NO: 181983 - DNA, 13 bp, Artificial Sequence
  Oligonucleotide for detection of SNP TSC0044981
gagtatgtttatt

SEQ ID NO: 181984 - DNA, 13 bp, Artificial Sequence
  Oligonucleotide for detection of SNP TSC0044981
aataaacatactc

SEQ ID NO: 181985 - DNA, 13 bp, Artificial Sequence
  Oligonucleotide for detection of SNP TSC0044981
gagtatatttatt

SEQ ID NO: 181986 - DNA, 13 bp, Artificial Sequence
  Oligonucleotide for detection of SNP TSC0044981
aataaatatactc

SEQ ID NO: 181987 - DNA, 13 bp, Artificial Sequence
  Oligonucleotide for detection of SNP TSC0044982
gaaattagtggaa

SEQ ID NO: 181988 - DNA, 13 bp, Artificial Sequence
  Oligonucleotide for detection of SNP TSC0044982
ttccactaatttc

SEQ ID NO: 181989 - DNA, 13 bp, Artificial Sequence
  Oligonucleotide for detection of SNP TSC0044982
gaaatttgtggaa

SEQ ID NO: 181990 - DNA, 13 bp, Artificial Sequence
  Oligonucleotide for detection of SNP TSC0044982
ttccacaaatttc

SEQ ID NO: 181991 - DNA, 13 bp, Artificial Sequence
  Oligonucleotide for detection of SNP TSC0044982
gaaattcgtggaa

SEQ ID NO: 181992 - DNA, 13 bp, Artificial Sequence
  Oligonucleotide for detection of SNP TSC0044982
ttccacgaatttc

SEQ ID NO: 181993 - DNA, 13 bp, Artificial Sequence
  Oligonucleotide for detection of SNP TSC0044983
tttatggggaaaa

SEQ ID NO: 181994 - DNA, 13 bp, Artificial Sequence
  Oligonucleotide for detection of SNP TSC0044983
ttttccccataaa

SEQ ID NO: 181995 - DNA, 13 bp, Artificial Sequence
  Oligonucleotide for detection of SNP TSC0044983
tttatgaggaaaa

SEQ ID NO: 181996 - DNA, 13 bp, Artificial Sequence
  Oligonucleotide for detection of SNP TSC0044983
ttttcctcataaa

SEQ ID NO: 181997 - DNA, 13 bp, Artificial Sequence
  Oligonucleotide for detection of SNP TSC0044987
atgagaggtaaat

SEQ ID NO: 181998 - DNA, 13 bp, Artificial Sequence
  Oligonucleotide for detection of SNP TSC0044987
atttacctctcat

SEQ ID NO: 181999 - DNA, 13 bp, Artificial Sequence
  Oligonucleotide for detection of SNP TSC0044987
atgagaagtaaat

SEQ ID NO: 182000 - DNA, 13 bp, Artificial Sequence
  Oligonucleotide for detection of SNP TSC0044987
atttacttctcat

SEQ ID NO: 182001 - DNA, 13 bp, Artificial Sequence
  Oligonucleotide for detection of SNP TSC0044987
acgagaggtaaat

SEQ ID NO: 182002 - DNA, 13 bp, Artificial Sequence
  Oligonucleotide for detection of SNP TSC0044987
atttacctctcgt

SEQ ID NO: 182003 - DNA, 13 bp, Artificial Sequence
  Oligonucleotide for detection of SNP TSC0044987
acgagaagtaaat

SEQ ID NO: 182004 - DNA, 13 bp, Artificial Sequence
  Oligonucleotide for detection of SNP TSC0044987
atttacttctcgt

SEQ ID NO: 182005 - DNA, 13 bp, Artificial Sequence
  Oligonucleotide for detection of SNP TSC0044991
gttggagtttttt

SEQ ID NO: 182006 - DNA, 13 bp, Artificial Sequence
  Oligonucleotide for detection of SNP TSC0044991
aaaaaactccaac

SEQ ID NO: 182007 - DNA, 13 bp, Artificial Sequence
  Oligonucleotide for detection of SNP TSC0044992
attgtagttgtty

SEQ ID NO: 182008 - DNA, 13 bp, Artificial Sequence
  Oligonucleotide for detection of SNP TSC0044992
raacaactacaat

SEQ ID NO: 182009 - DNA, 13 bp, Artificial Sequence
  Oligonucleotide for detection of SNP TSC0044992
attgtaattgtty

SEQ ID NO: 182010 - DNA, 13 bp, Artificial Sequence
  Oligonucleotide for detection of SNP TSC0044992
raacaattacaat

SEQ ID NO: 182011 - DNA, 13 bp, Artificial Sequence
  Oligonucleotide for detection of SNP TSC0044995
gtgtgtggttttt

SEQ ID NO: 182012 - DNA, 13 bp, Artificial Sequence
  Oligonucleotide for detection of SNP TSC0044995
aaaaaccacacac

SEQ ID NO: 182013 - DNA, 13 bp, Artificial Sequence
  Oligonucleotide for detection of SNP TSC0044995
gtgtgtagttttt

SEQ ID NO: 182014 - DNA, 13 bp, Artificial Sequence
  Oligonucleotide for detection of SNP TSC0044995
aaaaactacacac

SEQ ID NO: 182015 - DNA, 13 bp, Artificial Sequence
  Oligonucleotide for detection of SNP TSC0045000
ttgtgagttgtta

SEQ ID NO: 182016 - DNA, 13 bp, Artificial Sequence
  Oligonucleotide for detection of SNP TSC0045000
taacaactcacaa

SEQ ID NO: 182017 - DNA, 13 bp, Artificial Sequence
  Oligonucleotide for detection of SNP TSC0045000
ttgtgaattgtta

SEQ ID NO: 182018 - DNA, 13 bp, Artificial Sequence
  Oligonucleotide for detection of SNP TSC0045000
taacaattcacaa

SEQ ID NO: 182019 - DNA, 13 bp, Artificial Sequence
  Oligonucleotide for detection of SNP TSC0045000
ttgcgagttgtta

SEQ ID NO: 182020 - DNA, 13 bp, Artificial Sequence
  Oligonucleotide for detection of SNP TSC0045000
taacaactcgcaa

SEQ ID NO: 182021 - DNA, 13 bp, Artificial Sequence
  Oligonucleotide for detection of SNP TSC0045000
ttgcgaattgtta

SEQ ID NO: 182022 - DNA, 13 bp, Artificial Sequence
  Oligonucleotide for detection of SNP TSC0045000
taacaattcgcaa

SEQ ID NO: 182023 - DNA, 13 bp, Artificial Sequence
  Oligonucleotide for detection of SNP TSC0045000
ttgtgagtcgtta

SEQ ID NO: 182024 - DNA, 13 bp, Artificial Sequence
  Oligonucleotide for detection of SNP TSC0045000
taacgactcacaa

SEQ ID NO: 182025 - DNA, 13 bp, Artificial Sequence
  Oligonucleotide for detection of SNP TSC0045000
ttgtgaatcgtta

SEQ ID NO: 182026 - DNA, 13 bp, Artificial Sequence
  Oligonucleotide for detection of SNP TSC0045000
taacgattcacaa

SEQ ID NO: 182027 - DNA, 13 bp, Artificial Sequence
  Oligonucleotide for detection of SNP TSC0045000
ttgcgagtcgtta

SEQ ID NO: 182028 - DNA, 13 bp, Artificial Sequence
  Oligonucleotide for detection of SNP TSC0045000
taacgactcgcaa

SEQ ID NO: 182029 - DNA, 13 bp, Artificial Sequence
  Oligonucleotide for detection of SNP TSC0045000
ttgcgaatcgtta

SEQ ID NO: 182030 - DNA, 13 bp, Artificial Sequence
  Oligonucleotide for detection of SNP TSC0045000
taacgattcgcaa

SEQ ID NO: 182031 - DNA, 13 bp, Artificial Sequence
  Oligonucleotide for detection of SNP TSC0045001
ttattaatggagg

SEQ ID NO: 182032 - DNA, 13 bp, Artificial Sequence
  Oligonucleotide for detection of SNP TSC0045001
cctccattaataa

SEQ ID NO: 182033 - DNA, 13 bp, Artificial Sequence
  Oligonucleotide for detection of SNP TSC0045001
ttattagtggagg

SEQ ID NO: 182034 - DNA, 13 bp, Artificial Sequence
  Oligonucleotide for detection of SNP TSC0045001
cctccactaataa

SEQ ID NO: 182035 - DNA, 13 bp, Artificial Sequence
  Oligonucleotide for detection of SNP TSC0045003
aatttagttttty

SEQ ID NO: 182036 - DNA, 13 bp, Artificial Sequence
  Oligonucleotide for detection of SNP TSC0045003
raaaaactaaatt

SEQ ID NO: 182037 - DNA, 13 bp, Artificial Sequence
  Oligonucleotide for detection of SNP TSC0045003
aatttaattttty

SEQ ID NO: 182038 - DNA, 13 bp, Artificial Sequence
  Oligonucleotide for detection of SNP TSC0045003
raaaaattaaatt

SEQ ID NO: 182039 - DNA, 13 bp, Artificial Sequence
  Oligonucleotide for detection of SNP TSC0045005
aattttagtgaaa

SEQ ID NO: 182040 - DNA, 13 bp, Artificial Sequence
  Oligonucleotide for detection of SNP TSC0045005
tttcactaaaatt

SEQ ID NO: 182041 - DNA, 13 bp, Artificial Sequence
  Oligonucleotide for detection of SNP TSC0045005
aatttttgtgaaa

SEQ ID NO: 182042 - DNA, 13 bp, Artificial Sequence
  Oligonucleotide for detection of SNP TSC0045005
tttcacaaaaatt

SEQ ID NO: 182043 - DNA, 13 bp, Artificial Sequence
  Oligonucleotide for detection of SNP TSC0045005
aattttcgtgaaa

SEQ ID NO: 182044 - DNA, 13 bp, Artificial Sequence
  Oligonucleotide for detection of SNP TSC0045005
tttcacgaaaatt

SEQ ID NO: 182045 - DNA, 13 bp, Artificial Sequence
  Oligonucleotide for detection of SNP TSC0045005
ttttattaaaatt

SEQ ID NO: 182046 - DNA, 13 bp, Artificial Sequence
  Oligonucleotide for detection of SNP TSC0045005
aattttaataaaa

SEQ ID NO: 182047 - DNA, 13 bp, Artificial Sequence
  Oligonucleotide for detection of SNP TSC0045005
ttttatgaaaatt

SEQ ID NO: 182048 - DNA, 13 bp, Artificial Sequence
  Oligonucleotide for detection of SNP TSC0045005
aattttcataaaa

SEQ ID NO: 182049 - DNA, 13 bp, Artificial Sequence
  Oligonucleotide for detection of SNP TSC0045005
ttttacgaaaatt

SEQ ID NO: 182050 - DNA, 13 bp, Artificial Sequence
  Oligonucleotide for detection of SNP TSC0045005
aattttcgtaaaa

SEQ ID NO: 182051 - DNA, 13 bp, Artificial Sequence
  Oligonucleotide for detection of SNP TSC0045007
aatttttggttgg

SEQ ID NO: 182052 - DNA, 13 bp, Artificial Sequence
  Oligonucleotide for detection of SNP TSC0045007
ccaaccaaaaatt

SEQ ID NO: 182053 - DNA, 13 bp, Artificial Sequence
  Oligonucleotide for detection of SNP TSC0045007
aattttgggttgg

SEQ ID NO: 182054 - DNA, 13 bp, Artificial Sequence
  Oligonucleotide for detection of SNP TSC0045007
ccaacccaaaatt

SEQ ID NO: 182055 - DNA, 13 bp, Artificial Sequence
  Oligonucleotide for detection of SNP TSC0045007
aatttttggtcgg

SEQ ID NO: 182056 - DNA, 13 bp, Artificial Sequence
  Oligonucleotide for detection of SNP TSC0045007
ccgaccaaaaatt

SEQ ID NO: 182057 - DNA, 13 bp, Artificial Sequence
  Oligonucleotide for detection of SNP TSC0045007
aattttgggtcgg

SEQ ID NO: 182058 - DNA, 13 bp, Artificial Sequence
  Oligonucleotide for detection of SNP TSC0045007
ccgacccaaaatt

SEQ ID NO: 182059 - DNA, 13 bp, Artificial Sequence
  Oligonucleotide for detection of SNP TSC0045007
ttgattaaaggtt

SEQ ID NO: 182060 - DNA, 13 bp, Artificial Sequence
  Oligonucleotide for detection of SNP TSC0045007
aacctttaatcaa

SEQ ID NO: 182061 - DNA, 13 bp, Artificial Sequence
  Oligonucleotide for detection of SNP TSC0045007
ttgatttaaggtt

SEQ ID NO: 182062 - DNA, 13 bp, Artificial Sequence
  Oligonucleotide for detection of SNP TSC0045007
aaccttaaatcaa

SEQ ID NO: 182063 - DNA, 13 bp, Artificial Sequence
  Oligonucleotide for detection of SNP TSC0045007
tcgattaaaggtt

SEQ ID NO: 182064 - DNA, 13 bp, Artificial Sequence
  Oligonucleotide for detection of SNP TSC0045007
aacctttaatcga

SEQ ID NO: 182065 - DNA, 13 bp, Artificial Sequence
  Oligonucleotide for detection of SNP TSC0045007
tcgatttaaggtt

SEQ ID NO: 182066 - DNA, 13 bp, Artificial Sequence
  Oligonucleotide for detection of SNP TSC0045007
aaccttaaatcga

SEQ ID NO: 182067 - DNA, 13 bp, Artificial Sequence
  Oligonucleotide for detection of SNP TSC0045008
aagttttttagty

SEQ ID NO: 182068 - DNA, 13 bp, Artificial Sequence
  Oligonucleotide for detection of SNP TSC0045008
ractaaaaaactt

SEQ ID NO: 182069 - DNA, 13 bp, Artificial Sequence
  Oligonucleotide for detection of SNP TSC0045008
aagtttgttagty

SEQ ID NO: 182070 - DNA, 13 bp, Artificial Sequence
  Oligonucleotide for detection of SNP TSC0045008
ractaacaaactt

SEQ ID NO: 182071 - DNA, 13 bp, Artificial Sequence
  Oligonucleotide for detection of SNP TSC0045008
aagttcgttagty

SEQ ID NO: 182072 - DNA, 13 bp, Artificial Sequence
  Oligonucleotide for detection of SNP TSC0045008
ractaacgaactt

SEQ ID NO: 182073 - DNA, 13 bp, Artificial Sequence
  Oligonucleotide for detection of SNP TSC0045008
ggttgggggattt

SEQ ID NO: 182074 - DNA, 13 bp, Artificial Sequence
  Oligonucleotide for detection of SNP TSC0045008
aaatcccccaacc

SEQ ID NO: 182075 - DNA, 13 bp, Artificial Sequence
  Oligonucleotide for detection of SNP TSC0045009
ttatgtaagtaay

SEQ ID NO: 182076 - DNA, 13 bp, Artificial Sequence
  Oligonucleotide for detection of SNP TSC0045009
rttacttacataa

SEQ ID NO: 182077 - DNA, 13 bp, Artificial Sequence
  Oligonucleotide for detection of SNP TSC0045009
ttatgtgagtaay

SEQ ID NO: 182078 - DNA, 13 bp, Artificial Sequence
  Oligonucleotide for detection of SNP TSC0045009
rttactcacataa

SEQ ID NO: 182079 - DNA, 13 bp, Artificial Sequence
  Oligonucleotide for detection of SNP TSC0045009
ttatgcgagtaay

SEQ ID NO: 182080 - DNA, 13 bp, Artificial Sequence
  Oligonucleotide for detection of SNP TSC0045009
rttactcgcataa

SEQ ID NO: 182081 - DNA, 13 bp, Artificial Sequence
  Oligonucleotide for detection of SNP TSC0045009
gttatttgtataa

SEQ ID NO: 182082 - DNA, 13 bp, Artificial Sequence
  Oligonucleotide for detection of SNP TSC0045009
ttatacaaataac

SEQ ID NO: 182083 - DNA, 13 bp, Artificial Sequence
  Oligonucleotide for detection of SNP TSC0045009
gttattcgtataa

SEQ ID NO: 182084 - DNA, 13 bp, Artificial Sequence
  Oligonucleotide for detection of SNP TSC0045009
ttatacgaataac

SEQ ID NO: 182085 - DNA, 13 bp, Artificial Sequence
  Oligonucleotide for detection of SNP TSC0045010
gttttgtgatatt

SEQ ID NO: 182086 - DNA, 13 bp, Artificial Sequence
  Oligonucleotide for detection of SNP TSC0045010
aatatcacaaaac

SEQ ID NO: 182087 - DNA, 13 bp, Artificial Sequence
  Oligonucleotide for detection of SNP TSC0045010
gttttgggatatt

SEQ ID NO: 182088 - DNA, 13 bp, Artificial Sequence
  Oligonucleotide for detection of SNP TSC0045010
aatatcccaaaac

SEQ ID NO: 182089 - DNA, 13 bp, Artificial Sequence
  Oligonucleotide for detection of SNP TSC0045010
aatgttatagggy

SEQ ID NO: 182090 - DNA, 13 bp, Artificial Sequence
  Oligonucleotide for detection of SNP TSC0045010
rccctataacatt

SEQ ID NO: 182091 - DNA, 13 bp, Artificial Sequence
  Oligonucleotide for detection of SNP TSC0045010
aatgttttagggy

SEQ ID NO: 182092 - DNA, 13 bp, Artificial Sequence
  Oligonucleotide for detection of SNP TSC0045010
rccctaaaacatt

SEQ ID NO: 182093 - DNA, 13 bp, Artificial Sequence
  Oligonucleotide for detection of SNP TSC0045011
ataagagagttat

SEQ ID NO: 182094 - DNA, 13 bp, Artificial Sequence
  Oligonucleotide for detection of SNP TSC0045011
ataactctcttat

SEQ ID NO: 182095 - DNA, 13 bp, Artificial Sequence
  Oligonucleotide for detection of SNP TSC0045011
ataagaaagttat

SEQ ID NO: 182096 - DNA, 13 bp, Artificial Sequence
  Oligonucleotide for detection of SNP TSC0045011
ataactttcttat

SEQ ID NO: 182097 - DNA, 13 bp, Artificial Sequence
  Oligonucleotide for detection of SNP TSC0045012
ttaaagatatttt

SEQ ID NO: 182098 - DNA, 13 bp, Artificial Sequence
  Oligonucleotide for detection of SNP TSC0045012
aaaatatctttaa

SEQ ID NO: 182099 - DNA, 13 bp, Artificial Sequence
  Oligonucleotide for detection of SNP TSC0045012
ttaaaggtatttt

SEQ ID NO: 182100 - DNA, 13 bp, Artificial Sequence
  Oligonucleotide for detection of SNP TSC0045012
aaaatacctttaa

SEQ ID NO: 182101 - DNA, 13 bp, Artificial Sequence
  Oligonucleotide for detection of SNP TSC0045014
agataggggttta

SEQ ID NO: 182102 - DNA, 13 bp, Artificial Sequence
  Oligonucleotide for detection of SNP TSC0045014
taaacccctatct

SEQ ID NO: 182103 - DNA, 13 bp, Artificial Sequence
  Oligonucleotide for detection of SNP TSC0045014
agatagaggttta

SEQ ID NO: 182104 - DNA, 13 bp, Artificial Sequence
  Oligonucleotide for detection of SNP TSC0045014
taaacctctatct

SEQ ID NO: 182105 - DNA, 13 bp, Artificial Sequence
  Oligonucleotide for detection of SNP TSC0045015
aattgtagggttt

SEQ ID NO: 182106 - DNA, 13 bp, Artificial Sequence
  Oligonucleotide for detection of SNP TSC0045015
aaaccctacaatt

SEQ ID NO: 182107 - DNA, 13 bp, Artificial Sequence
  Oligonucleotide for detection of SNP TSC0045015
aattgtggggttt

SEQ ID NO: 182108 - DNA, 13 bp, Artificial Sequence
  Oligonucleotide for detection of SNP TSC0045015
aaaccccacaatt

SEQ ID NO: 182109 - DNA, 13 bp, Artificial Sequence
  Oligonucleotide for detection of SNP TSC0045016
agtggggagagtt

SEQ ID NO: 182110 - DNA, 13 bp, Artificial Sequence
  Oligonucleotide for detection of SNP TSC0045016
aactctccccact

SEQ ID NO: 182111 - DNA, 13 bp, Artificial Sequence
  Oligonucleotide for detection of SNP TSC0045016
agtgggaagagtt

SEQ ID NO: 182112 - DNA, 13 bp, Artificial Sequence
  Oligonucleotide for detection of SNP TSC0045016
aactcttcccact

SEQ ID NO: 182113 - DNA, 13 bp, Artificial Sequence
  Oligonucleotide for detection of SNP TSC0045017
ttttagattgata

SEQ ID NO: 182114 - DNA, 13 bp, Artificial Sequence
  Oligonucleotide for detection of SNP TSC0045017
tatcaatctaaaa

SEQ ID NO: 182115 - DNA, 13 bp, Artificial Sequence
  Oligonucleotide for detection of SNP TSC0045017
ttttaggttgata

SEQ ID NO: 182116 - DNA, 13 bp, Artificial Sequence
  Oligonucleotide for detection of SNP TSC0045017
tatcaacctaaaa

SEQ ID NO: 182117 - DNA, 13 bp, Artificial Sequence
  Oligonucleotide for detection of SNP TSC0045020
tttttagttttgy

SEQ ID NO: 182118 - DNA, 13 bp, Artificial Sequence
  Oligonucleotide for detection of SNP TSC0045020
rcaaaactaaaaa

SEQ ID NO: 182119 - DNA, 13 bp, Artificial Sequence
  Oligonucleotide for detection of SNP TSC0045020
gtaaggataggga

SEQ ID NO: 182120 - DNA, 13 bp, Artificial Sequence
  Oligonucleotide for detection of SNP TSC0045020
tccctatccttac

SEQ ID NO: 182121 - DNA, 13 bp, Artificial Sequence
  Oligonucleotide for detection of SNP TSC0045020
gtaaggttaggga

SEQ ID NO: 182122 - DNA, 13 bp, Artificial Sequence
  Oligonucleotide for detection of SNP TSC0045020
tccctaaccttac

SEQ ID NO: 182123 - DNA, 13 bp, Artificial Sequence
  Oligonucleotide for detection of SNP TSC0045022
ttaagaaatttat

SEQ ID NO: 182124 - DNA, 13 bp, Artificial Sequence
  Oligonucleotide for detection of SNP TSC0045022
ataaatttcttaa

SEQ ID NO: 182125 - DNA, 13 bp, Artificial Sequence
  Oligonucleotide for detection of SNP TSC0045022
ttaagatatttat

SEQ ID NO: 182126 - DNA, 13 bp, Artificial Sequence
  Oligonucleotide for detection of SNP TSC0045022
ataaatatcttaa

SEQ ID NO: 182127 - DNA, 13 bp, Artificial Sequence
  Oligonucleotide for detection of SNP TSC0045022
ataggttttttaa

SEQ ID NO: 182128 - DNA, 13 bp, Artificial Sequence
  Oligonucleotide for detection of SNP TSC0045022
ttaaaaaacctat

SEQ ID NO: 182129 - DNA, 13 bp, Artificial Sequence
  Oligonucleotide for detection of SNP TSC0045022
ataggtgttttaa

SEQ ID NO: 182130 - DNA, 13 bp, Artificial Sequence
  Oligonucleotide for detection of SNP TSC0045022
ttaaaacacctat

SEQ ID NO: 182131 - DNA, 13 bp, Artificial Sequence
  Oligonucleotide for detection of SNP TSC0045024
atgaataaaattt

SEQ ID NO: 182132 - DNA, 13 bp, Artificial Sequence
  Oligonucleotide for detection of SNP TSC0045024
aaattttattcat

SEQ ID NO: 182133 - DNA, 13 bp, Artificial Sequence
  Oligonucleotide for detection of SNP TSC0045024
atgaatgaaattt

SEQ ID NO: 182134 - DNA, 13 bp, Artificial Sequence
  Oligonucleotide for detection of SNP TSC0045024
aaatttcattcat

SEQ ID NO: 182135 - DNA, 13 bp, Artificial Sequence
  Oligonucleotide for detection of SNP TSC0045025
gtgtattaaatgt

SEQ ID NO: 182136 - DNA, 13 bp, Artificial Sequence
  Oligonucleotide for detection of SNP TSC0045025
acatttaatacac

SEQ ID NO: 182137 - DNA, 13 bp, Artificial Sequence
  Oligonucleotide for detection of SNP TSC0045025
gtgtatgaaatgt

SEQ ID NO: 182138 - DNA, 13 bp, Artificial Sequence
  Oligonucleotide for detection of SNP TSC0045025
acatttcatacac

SEQ ID NO: 182139 - DNA, 13 bp, Artificial Sequence
  Oligonucleotide for detection of SNP TSC0045025
atatttaatgtay

SEQ ID NO: 182140 - DNA, 13 bp, Artificial Sequence
  Oligonucleotide for detection of SNP TSC0045025
rtacattaaatat

SEQ ID NO: 182141 - DNA, 13 bp, Artificial Sequence
  Oligonucleotide for detection of SNP TSC0045025
atattttatgtay

SEQ ID NO: 182142 - DNA, 13 bp, Artificial Sequence
  Oligonucleotide for detection of SNP TSC0045025
rtacataaaatat

SEQ ID NO: 182143 - DNA, 13 bp, Artificial Sequence
  Oligonucleotide for detection of SNP TSC0045026
tttagttatattg

SEQ ID NO: 182144 - DNA, 13 bp, Artificial Sequence
  Oligonucleotide for detection of SNP TSC0045026
caatataactaaa

SEQ ID NO: 182145 - DNA, 13 bp, Artificial Sequence
  Oligonucleotide for detection of SNP TSC0045026
taatattattaaa

SEQ ID NO: 182146 - DNA, 13 bp, Artificial Sequence
  Oligonucleotide for detection of SNP TSC0045026
tttaataatatta

SEQ ID NO: 182147 - DNA, 13 bp, Artificial Sequence
  Oligonucleotide for detection of SNP TSC0045026
taatataattaaa

SEQ ID NO: 182148 - DNA, 13 bp, Artificial Sequence
  Oligonucleotide for detection of SNP TSC0045026
tttaattatatta

SEQ ID NO: 182149 - DNA, 13 bp, Artificial Sequence
  Oligonucleotide for detection of SNP TSC0045027
atgttttgttgaa

SEQ ID NO: 182150 - DNA, 13 bp, Artificial Sequence
  Oligonucleotide for detection of SNP TSC0045027
ttcaacaaaacat

SEQ ID NO: 182151 - DNA, 13 bp, Artificial Sequence
  Oligonucleotide for detection of SNP TSC0045027
atgtttggttgaa

SEQ ID NO: 182152 - DNA, 13 bp, Artificial Sequence
  Oligonucleotide for detection of SNP TSC0045027
ttcaaccaaacat

SEQ ID NO: 182153 - DNA, 13 bp, Artificial Sequence
  Oligonucleotide for detection of SNP TSC0045027
atgtttcgttgaa

SEQ ID NO: 182154 - DNA, 13 bp, Artificial Sequence
  Oligonucleotide for detection of SNP TSC0045027
ttcaacgaaacat

SEQ ID NO: 182155 - DNA, 13 bp, Artificial Sequence
  Oligonucleotide for detection of SNP TSC0045027
tttaatgaagtat

SEQ ID NO: 182156 - DNA, 13 bp, Artificial Sequence
  Oligonucleotide for detection of SNP TSC0045027
atacttcattaaa

SEQ ID NO: 182157 - DNA, 13 bp, Artificial Sequence
  Oligonucleotide for detection of SNP TSC0045027
tttaattaagtat

SEQ ID NO: 182158 - DNA, 13 bp, Artificial Sequence
  Oligonucleotide for detection of SNP TSC0045027
atacttaattaaa

SEQ ID NO: 182159 - DNA, 13 bp, Artificial Sequence
  Oligonucleotide for detection of SNP TSC0045027
tttaacgaagtat

SEQ ID NO: 182160 - DNA, 13 bp, Artificial Sequence
  Oligonucleotide for detection of SNP TSC0045027
atacttcgttaaa

SEQ ID NO: 182161 - DNA, 13 bp, Artificial Sequence
  Oligonucleotide for detection of SNP TSC0045028
atttaaagttgay

SEQ ID NO: 182162 - DNA, 13 bp, Artificial Sequence
  Oligonucleotide for detection of SNP TSC0045028
rtcaactttaaat

SEQ ID NO: 182163 - DNA, 13 bp, Artificial Sequence
  Oligonucleotide for detection of SNP TSC0045028
atttaatgttgay

SEQ ID NO: 182164 - DNA, 13 bp, Artificial Sequence
  Oligonucleotide for detection of SNP TSC0045028
rtcaacattaaat

SEQ ID NO: 182165 - DNA, 13 bp, Artificial Sequence
  Oligonucleotide for detection of SNP TSC0045028
gttagttttagat

SEQ ID NO: 182166 - DNA, 13 bp, Artificial Sequence
  Oligonucleotide for detection of SNP TSC0045028
atctaaaactaac

SEQ ID NO: 182167 - DNA, 13 bp, Artificial Sequence
  Oligonucleotide for detection of SNP TSC0045028
gttagtattagat

SEQ ID NO: 182168 - DNA, 13 bp, Artificial Sequence
  Oligonucleotide for detection of SNP TSC0045028
atctaatactaac

SEQ ID NO: 182169 - DNA, 13 bp, Artificial Sequence
  Oligonucleotide for detection of SNP TSC0045029
aagttaatagggg

SEQ ID NO: 182170 - DNA, 13 bp, Artificial Sequence
  Oligonucleotide for detection of SNP TSC0045029
cccctattaactt

SEQ ID NO: 182171 - DNA, 13 bp, Artificial Sequence
  Oligonucleotide for detection of SNP TSC0006394
gttgggtgtagtt

SEQ ID NO: 182172 - DNA, 13 bp, Artificial Sequence
  Oligonucleotide for detection of SNP TSC0006394
aactacacccaac

SEQ ID NO: 182173 - DNA, 13 bp, Artificial Sequence
  Oligonucleotide for detection of SNP TSC0006394
gttgggcgtagtt

SEQ ID NO: 182174 - DNA, 13 bp, Artificial Sequence
  Oligonucleotide for detection of SNP TSC0006394
aactacgcccaac

SEQ ID NO: 182175 - DNA, 13 bp, Artificial Sequence
  Oligonucleotide for detection of SNP TSC0006394
aattatgtttaay

SEQ ID NO: 182176 - DNA, 13 bp, Artificial Sequence
  Oligonucleotide for detection of SNP TSC0006394
rttaaacataatt

SEQ ID NO: 182177 - DNA, 13 bp, Artificial Sequence
  Oligonucleotide for detection of SNP TSC0006394
aattatatttaay

SEQ ID NO: 182178 - DNA, 13 bp, Artificial Sequence
  Oligonucleotide for detection of SNP TSC0006394
rttaaatataatt

SEQ ID NO: 182179 - DNA, 13 bp, Artificial Sequence
  Oligonucleotide for detection of SNP TSC0006394
aattacgtttaay

SEQ ID NO: 182180 - DNA, 13 bp, Artificial Sequence
  Oligonucleotide for detection of SNP TSC0006394
rttaaacgtaatt

SEQ ID NO: 182181 - DNA, 13 bp, Artificial Sequence
  Oligonucleotide for detection of SNP TSC0045032
aaaaggaaaaaat

SEQ ID NO: 182182 - DNA, 13 bp, Artificial Sequence
  Oligonucleotide for detection of SNP TSC0045032
attttttcctttt

SEQ ID NO: 182183 - DNA, 13 bp, Artificial Sequence
  Oligonucleotide for detection of SNP TSC0045032
aaaaggtaaaaat

SEQ ID NO: 182184 - DNA, 13 bp, Artificial Sequence
  Oligonucleotide for detection of SNP TSC0045032
atttttacctttt

SEQ ID NO: 182185 - DNA, 13 bp, Artificial Sequence
  Oligonucleotide for detection of SNP TSC0045033
gatttaagaagaa

SEQ ID NO: 182186 - DNA, 13 bp, Artificial Sequence
  Oligonucleotide for detection of SNP TSC0045033
ttcttcttaaatc

SEQ ID NO: 182187 - DNA, 13 bp, Artificial Sequence
  Oligonucleotide for detection of SNP TSC0045033
gatttaggaagaa

SEQ ID NO: 182188 - DNA, 13 bp, Artificial Sequence
  Oligonucleotide for detection of SNP TSC0045033
ttcttcctaaatc

SEQ ID NO: 182189 - DNA, 13 bp, Artificial Sequence
  Oligonucleotide for detection of SNP TSC0045034
tttgatatattta

SEQ ID NO: 182190 - DNA, 13 bp, Artificial Sequence
  Oligonucleotide for detection of SNP TSC0045034
taaatatatcaaa

SEQ ID NO: 182191 - DNA, 13 bp, Artificial Sequence
  Oligonucleotide for detection of SNP TSC0045034
tttgatgtattta

SEQ ID NO: 182192 - DNA, 13 bp, Artificial Sequence
  Oligonucleotide for detection of SNP TSC0045034
taaatacatcaaa

SEQ ID NO: 182193 - DNA, 13 bp, Artificial Sequence
  Oligonucleotide for detection of SNP TSC0045035
ttttttgatatta

SEQ ID NO: 182194 - DNA, 13 bp, Artificial Sequence
  Oligonucleotide for detection of SNP TSC0045035
taatatcaaaaaa

SEQ ID NO: 182195 - DNA, 13 bp, Artificial Sequence
  Oligonucleotide for detection of SNP TSC0045038
tttaatgatatta

SEQ ID NO: 182196 - DNA, 13 bp, Artificial Sequence
  Oligonucleotide for detection of SNP TSC0045038
taatatcattaaa

SEQ ID NO: 182197 - DNA, 13 bp, Artificial Sequence
  Oligonucleotide for detection of SNP TSC0045039
ataaaatatgtaa

SEQ ID NO: 182198 - DNA, 13 bp, Artificial Sequence
  Oligonucleotide for detection of SNP TSC0045039
ttacatattttat

SEQ ID NO: 182199 - DNA, 13 bp, Artificial Sequence
  Oligonucleotide for detection of SNP TSC0045039
ataaaagatgtaa

SEQ ID NO: 182200 - DNA, 13 bp, Artificial Sequence
  Oligonucleotide for detection of SNP TSC0045039
ttacatcttttat

SEQ ID NO: 182201 - DNA, 13 bp, Artificial Sequence
  Oligonucleotide for detection of SNP TSC0045040
gtttattgagaty

SEQ ID NO: 182202 - DNA, 13 bp, Artificial Sequence
  Oligonucleotide for detection of SNP TSC0045040
ratctcaataaac

SEQ ID NO: 182203 - DNA, 13 bp, Artificial Sequence
  Oligonucleotide for detection of SNP TSC0045040
gtttatggagaty

SEQ ID NO: 182204 - DNA, 13 bp, Artificial Sequence
  Oligonucleotide for detection of SNP TSC0045040
ratctccataaac

SEQ ID NO: 182205 - DNA, 13 bp, Artificial Sequence
  Oligonucleotide for detection of SNP TSC0045040
gtttatcgagaty

SEQ ID NO: 182206 - DNA, 13 bp, Artificial Sequence
  Oligonucleotide for detection of SNP TSC0045040
ratctcgataaac

SEQ ID NO: 182207 - DNA, 13 bp, Artificial Sequence
  Oligonucleotide for detection of SNP TSC0045040
gtttacggagaty

SEQ ID NO: 182208 - DNA, 13 bp, Artificial Sequence
  Oligonucleotide for detection of SNP TSC0045040
ratctccgtaaac

SEQ ID NO: 182209 - DNA, 13 bp, Artificial Sequence
  Oligonucleotide for detection of SNP TSC0045040
ggttttggtgagy

SEQ ID NO: 182210 - DNA, 13 bp, Artificial Sequence
  Oligonucleotide for detection of SNP TSC0045040
rctcaccaaaacc

SEQ ID NO: 182211 - DNA, 13 bp, Artificial Sequence
  Oligonucleotide for detection of SNP TSC0045040
ggtttttgtgagy

SEQ ID NO: 182212 - DNA, 13 bp, Artificial Sequence
  Oligonucleotide for detection of SNP TSC0045040
rctcacaaaaacc

SEQ ID NO: 182213 - DNA, 13 bp, Artificial Sequence
  Oligonucleotide for detection of SNP TSC0045040
ggtttcggtgagy

SEQ ID NO: 182214 - DNA, 13 bp, Artificial Sequence
  Oligonucleotide for detection of SNP TSC0045040
rctcaccgaaacc

SEQ ID NO: 182215 - DNA, 13 bp, Artificial Sequence
  Oligonucleotide for detection of SNP TSC0045040
ggttttcgtgagy

SEQ ID NO: 182216 - DNA, 13 bp, Artificial Sequence
  Oligonucleotide for detection of SNP TSC0045040
rctcacgaaaacc

SEQ ID NO: 182217 - DNA, 13 bp, Artificial Sequence
  Oligonucleotide for detection of SNP TSC0045041
attgttatagggt

SEQ ID NO: 182218 - DNA, 13 bp, Artificial Sequence
  Oligonucleotide for detection of SNP TSC0045041
accctataacaat

SEQ ID NO: 182219 - DNA, 13 bp, Artificial Sequence
  Oligonucleotide for detection of SNP TSC0045041
attgttttagggt

SEQ ID NO: 182220 - DNA, 13 bp, Artificial Sequence
  Oligonucleotide for detection of SNP TSC0045041
accctaaaacaat

SEQ ID NO: 182221 - DNA, 13 bp, Artificial Sequence
  Oligonucleotide for detection of SNP TSC0045041
attttatagtaat

SEQ ID NO: 182222 - DNA, 13 bp, Artificial Sequence
  Oligonucleotide for detection of SNP TSC0045041
attactataaaat

SEQ ID NO: 182223 - DNA, 13 bp, Artificial Sequence
  Oligonucleotide for detection of SNP TSC0045041
attttagagtaat

SEQ ID NO: 182224 - DNA, 13 bp, Artificial Sequence
  Oligonucleotide for detection of SNP TSC0045041
attactctaaaat

SEQ ID NO: 182225 - DNA, 13 bp, Artificial Sequence
  Oligonucleotide for detection of SNP TSC0045042
aaaaaaatgtagy

SEQ ID NO: 182226 - DNA, 13 bp, Artificial Sequence
  Oligonucleotide for detection of SNP TSC0045042
rctacattttttt

SEQ ID NO: 182227 - DNA, 13 bp, Artificial Sequence
  Oligonucleotide for detection of SNP TSC0045042
aaaaaagtgtagy

SEQ ID NO: 182228 - DNA, 13 bp, Artificial Sequence
  Oligonucleotide for detection of SNP TSC0045042
rctacactttttt

SEQ ID NO: 182229 - DNA, 13 bp, Artificial Sequence
  Oligonucleotide for detection of SNP TSC0045043
aaaaaaaaagtgy

SEQ ID NO: 182230 - DNA, 13 bp, Artificial Sequence
  Oligonucleotide for detection of SNP TSC0045043
rcacttttttttt

SEQ ID NO: 182231 - DNA, 13 bp, Artificial Sequence
  Oligonucleotide for detection of SNP TSC0045043
aaaaaagaagtgy

SEQ ID NO: 182232 - DNA, 13 bp, Artificial Sequence
  Oligonucleotide for detection of SNP TSC0045043
rcacttctttttt

SEQ ID NO: 182233 - DNA, 13 bp, Artificial Sequence
  Oligonucleotide for detection of SNP TSC0045044
tttgaggaaggag

SEQ ID NO: 182234 - DNA, 13 bp, Artificial Sequence
  Oligonucleotide for detection of SNP TSC0045044
ctccttcctcaaa

SEQ ID NO: 182235 - DNA, 13 bp, Artificial Sequence
  Oligonucleotide for detection of SNP TSC0045044
tttgagaaaggag

SEQ ID NO: 182236 - DNA, 13 bp, Artificial Sequence
  Oligonucleotide for detection of SNP TSC0045044
ctcctttctcaaa

SEQ ID NO: 182237 - DNA, 13 bp, Artificial Sequence
  Oligonucleotide for detection of SNP TSC0045044
ttcgaggaaggag

SEQ ID NO: 182238 - DNA, 13 bp, Artificial Sequence
  Oligonucleotide for detection of SNP TSC0045044
ctccttcctcgaa

SEQ ID NO: 182239 - DNA, 13 bp, Artificial Sequence
  Oligonucleotide for detection of SNP TSC0045044
ttcgagaaaggag

SEQ ID NO: 182240 - DNA, 13 bp, Artificial Sequence
  Oligonucleotide for detection of SNP TSC0045044
ctcctttctcgaa

SEQ ID NO: 182241 - DNA, 13 bp, Artificial Sequence
  Oligonucleotide for detection of SNP TSC0045045
gtagatatgtgga

SEQ ID NO: 182242 - DNA, 13 bp, Artificial Sequence
  Oligonucleotide for detection of SNP TSC0045045
tccacatatctac

SEQ ID NO: 182243 - DNA, 13 bp, Artificial Sequence
  Oligonucleotide for detection of SNP TSC0045045
gtagatgtgtgga

SEQ ID NO: 182244 - DNA, 13 bp, Artificial Sequence
  Oligonucleotide for detection of SNP TSC0045045
tccacacatctac

SEQ ID NO: 182245 - DNA, 13 bp, Artificial Sequence
  Oligonucleotide for detection of SNP TSC0045045
gtagacgtgtgga

SEQ ID NO: 182246 - DNA, 13 bp, Artificial Sequence
  Oligonucleotide for detection of SNP TSC0045045
tccacacgtctac

SEQ ID NO: 182247 - DNA, 13 bp, Artificial Sequence
  Oligonucleotide for detection of SNP TSC0045045
tttatatgtttgy

SEQ ID NO: 182248 - DNA, 13 bp, Artificial Sequence
  Oligonucleotide for detection of SNP TSC0045045
rcaaacatataaa

SEQ ID NO: 182249 - DNA, 13 bp, Artificial Sequence
  Oligonucleotide for detection of SNP TSC0045045
tttatacgtttgy

SEQ ID NO: 182250 - DNA, 13 bp, Artificial Sequence
  Oligonucleotide for detection of SNP TSC0045045
rcaaacgtataaa

SEQ ID NO: 182251 - DNA, 13 bp, Artificial Sequence
  Oligonucleotide for detection of SNP TSC0045047
agagggggtgatg

SEQ ID NO: 182252 - DNA, 13 bp, Artificial Sequence
  Oligonucleotide for detection of SNP TSC0045047
catcaccccctct

SEQ ID NO: 182253 - DNA, 13 bp, Artificial Sequence
  Oligonucleotide for detection of SNP TSC0045047
agagggagtgatg

SEQ ID NO: 182254 - DNA, 13 bp, Artificial Sequence
  Oligonucleotide for detection of SNP TSC0045047
catcactccctct

SEQ ID NO: 182255 - DNA, 13 bp, Artificial Sequence
  Oligonucleotide for detection of SNP TSC0045047
agagggggcgatg

SEQ ID NO: 182256 - DNA, 13 bp, Artificial Sequence
  Oligonucleotide for detection of SNP TSC0045047
catcgccccctct

SEQ ID NO: 182257 - DNA, 13 bp, Artificial Sequence
  Oligonucleotide for detection of SNP TSC0045047
agagggagcgatg

SEQ ID NO: 182258 - DNA, 13 bp, Artificial Sequence
  Oligonucleotide for detection of SNP TSC0045047
catcgctccctct

SEQ ID NO: 182259 - DNA, 13 bp, Artificial Sequence
  Oligonucleotide for detection of SNP TSC0045048
aataagttattag

SEQ ID NO: 182260 - DNA, 13 bp, Artificial Sequence
  Oligonucleotide for detection of SNP TSC0045048
ctaataacttatt

SEQ ID NO: 182261 - DNA, 13 bp, Artificial Sequence
  Oligonucleotide for detection of SNP TSC0045048
aataaggtattag

SEQ ID NO: 182262 - DNA, 13 bp, Artificial Sequence
  Oligonucleotide for detection of SNP TSC0045048
ctaataccttatt

SEQ ID NO: 182263 - DNA, 13 bp, Artificial Sequence
  Oligonucleotide for detection of SNP TSC0045048
ttgatggtttatt

SEQ ID NO: 182264 - DNA, 13 bp, Artificial Sequence
  Oligonucleotide for detection of SNP TSC0045048
aataaaccatcaa

SEQ ID NO: 182265 - DNA, 13 bp, Artificial Sequence
  Oligonucleotide for detection of SNP TSC0045048
ttgatgttttatt

SEQ ID NO: 182266 - DNA, 13 bp, Artificial Sequence
  Oligonucleotide for detection of SNP TSC0045048
aataaaacatcaa

SEQ ID NO: 182267 - DNA, 13 bp, Artificial Sequence
  Oligonucleotide for detection of SNP TSC0045049
tagttgaatattt

SEQ ID NO: 182268 - DNA, 13 bp, Artificial Sequence
  Oligonucleotide for detection of SNP TSC0045049
aaatattcaacta

SEQ ID NO: 182269 - DNA, 13 bp, Artificial Sequence
  Oligonucleotide for detection of SNP TSC0045049
tagttggatattt

SEQ ID NO: 182270 - DNA, 13 bp, Artificial Sequence
  Oligonucleotide for detection of SNP TSC0045049
aaatatccaacta

SEQ ID NO: 182271 - DNA, 13 bp, Artificial Sequence
  Oligonucleotide for detection of SNP TSC0045050
tagtattgtttta

SEQ ID NO: 182272 - DNA, 13 bp, Artificial Sequence
  Oligonucleotide for detection of SNP TSC0045050
taaaacaatacta

SEQ ID NO: 182273 - DNA, 13 bp, Artificial Sequence
  Oligonucleotide for detection of SNP TSC0045050
tagtatggtttta

SEQ ID NO: 182274 - DNA, 13 bp, Artificial Sequence
  Oligonucleotide for detection of SNP TSC0045050
taaaaccatacta

SEQ ID NO: 182275 - DNA, 13 bp, Artificial Sequence
  Oligonucleotide for detection of SNP TSC0045050
tagtatcgtttta

SEQ ID NO: 182276 - DNA, 13 bp, Artificial Sequence
  Oligonucleotide for detection of SNP TSC0045050
taaaacgatacta

SEQ ID NO: 182277 - DNA, 13 bp, Artificial Sequence
  Oligonucleotide for detection of SNP TSC0045050
taaagtgatgtta

SEQ ID NO: 182278 - DNA, 13 bp, Artificial Sequence
  Oligonucleotide for detection of SNP TSC0045050
taacatcacttta

SEQ ID NO: 182279 - DNA, 13 bp, Artificial Sequence
  Oligonucleotide for detection of SNP TSC0045050
taaagttatgtta

SEQ ID NO: 182280 - DNA, 13 bp, Artificial Sequence
  Oligonucleotide for detection of SNP TSC0045050
taacataacttta

SEQ ID NO: 182281 - DNA, 13 bp, Artificial Sequence
  Oligonucleotide for detection of SNP TSC0045050
taaagcgatgtta

SEQ ID NO: 182282 - DNA, 13 bp, Artificial Sequence
  Oligonucleotide for detection of SNP TSC0045050
taacatcgcttta

SEQ ID NO: 182283 - DNA, 13 bp, Artificial Sequence
  Oligonucleotide for detection of SNP TSC0045051
tattttgaaataa

SEQ ID NO: 182284 - DNA, 13 bp, Artificial Sequence
  Oligonucleotide for detection of SNP TSC0045051
ttatttcaaaata

SEQ ID NO: 182285 - DNA, 13 bp, Artificial Sequence
  Oligonucleotide for detection of SNP TSC0045051
tatttcgaaataa

SEQ ID NO: 182286 - DNA, 13 bp, Artificial Sequence
  Oligonucleotide for detection of SNP TSC0045051
ttatttcgaaata

SEQ ID NO: 182287 - DNA, 13 bp, Artificial Sequence
  Oligonucleotide for detection of SNP TSC0045051
ttattttgaggta

SEQ ID NO: 182288 - DNA, 13 bp, Artificial Sequence
  Oligonucleotide for detection of SNP TSC0045051
tacctcaaaataa

SEQ ID NO: 182289 - DNA, 13 bp, Artificial Sequence
  Oligonucleotide for detection of SNP TSC0045051
ttatttcgaggta

SEQ ID NO: 182290 - DNA, 13 bp, Artificial Sequence
  Oligonucleotide for detection of SNP TSC0045051
tacctcgaaataa

SEQ ID NO: 182291 - DNA, 13 bp, Artificial Sequence
  Oligonucleotide for detection of SNP TSC0045054
ttttttgataaay

SEQ ID NO: 182292 - DNA, 13 bp, Artificial Sequence
  Oligonucleotide for detection of SNP TSC0045054
rtttatcaaaaaa

SEQ ID NO: 182293 - DNA, 13 bp, Artificial Sequence
  Oligonucleotide for detection of SNP TSC0045054
gtttgtgaaaaga

SEQ ID NO: 182294 - DNA, 13 bp, Artificial Sequence
  Oligonucleotide for detection of SNP TSC0045054
tcttttcacaaac

SEQ ID NO: 182295 - DNA, 13 bp, Artificial Sequence
  Oligonucleotide for detection of SNP TSC0045054
gtttgttaaaaga

SEQ ID NO: 182296 - DNA, 13 bp, Artificial Sequence
  Oligonucleotide for detection of SNP TSC0045054
tcttttaacaaac

SEQ ID NO: 182297 - DNA, 13 bp, Artificial Sequence
  Oligonucleotide for detection of SNP TSC0045055
tagggtagtattg

SEQ ID NO: 182298 - DNA, 13 bp, Artificial Sequence
  Oligonucleotide for detection of SNP TSC0045055
caatactacccta

SEQ ID NO: 182299 - DNA, 13 bp, Artificial Sequence
  Oligonucleotide for detection of SNP TSC0045055
tagggtggtattg

SEQ ID NO: 182300 - DNA, 13 bp, Artificial Sequence
  Oligonucleotide for detection of SNP TSC0045055
caataccacccta

SEQ ID NO: 182301 - DNA, 13 bp, Artificial Sequence
  Oligonucleotide for detection of SNP TSC0045056
ttaattttagtgy

SEQ ID NO: 182302 - DNA, 13 bp, Artificial Sequence
  Oligonucleotide for detection of SNP TSC0045056
rcactaaaattaa

SEQ ID NO: 182303 - DNA, 13 bp, Artificial Sequence
  Oligonucleotide for detection of SNP TSC0045056
ttaattgtagtgy

SEQ ID NO: 182304 - DNA, 13 bp, Artificial Sequence
  Oligonucleotide for detection of SNP TSC0045056
rcactacaattaa

SEQ ID NO: 182305 - DNA, 13 bp, Artificial Sequence
  Oligonucleotide for detection of SNP TSC0045056
gtattggaattaa

SEQ ID NO: 182306 - DNA, 13 bp, Artificial Sequence
  Oligonucleotide for detection of SNP TSC0045056
ttaattccaatac

SEQ ID NO: 182307 - DNA, 13 bp, Artificial Sequence
  Oligonucleotide for detection of SNP TSC0045056
gtattgtaattaa

SEQ ID NO: 182308 - DNA, 13 bp, Artificial Sequence
  Oligonucleotide for detection of SNP TSC0045056
ttaattacaatac

SEQ ID NO: 182309 - DNA, 13 bp, Artificial Sequence
  Oligonucleotide for detection of SNP TSC0045057
agtaataatttta

SEQ ID NO: 182310 - DNA, 13 bp, Artificial Sequence
  Oligonucleotide for detection of SNP TSC0045057
taaaattattact

SEQ ID NO: 182311 - DNA, 13 bp, Artificial Sequence
  Oligonucleotide for detection of SNP TSC0045057
agtaattatttta

SEQ ID NO: 182312 - DNA, 13 bp, Artificial Sequence
  Oligonucleotide for detection of SNP TSC0045057
taaaataattact

SEQ ID NO: 182313 - DNA, 13 bp, Artificial Sequence
  Oligonucleotide for detection of SNP TSC0045057
tgaagttattgtt

SEQ ID NO: 182314 - DNA, 13 bp, Artificial Sequence
  Oligonucleotide for detection of SNP TSC0045057
aacaataacttca

SEQ ID NO: 182315 - DNA, 13 bp, Artificial Sequence
  Oligonucleotide for detection of SNP TSC0045057
tgaagtaattgtt

SEQ ID NO: 182316 - DNA, 13 bp, Artificial Sequence
  Oligonucleotide for detection of SNP TSC0045057
aacaattacttca

SEQ ID NO: 182317 - DNA, 13 bp, Artificial Sequence
  Oligonucleotide for detection of SNP TSC0045058
tttatttgtgtaa

SEQ ID NO: 182318 - DNA, 13 bp, Artificial Sequence
  Oligonucleotide for detection of SNP TSC0045058
ttacacaaataaa

SEQ ID NO: 182319 - DNA, 13 bp, Artificial Sequence
  Oligonucleotide for detection of SNP TSC0045058
tttattggtgtaa

SEQ ID NO: 182320 - DNA, 13 bp, Artificial Sequence
  Oligonucleotide for detection of SNP TSC0045058
ttacaccaataaa

SEQ ID NO: 182321 - DNA, 13 bp, Artificial Sequence
  Oligonucleotide for detection of SNP TSC0045058
tttattcgtgtaa

SEQ ID NO: 182322 - DNA, 13 bp, Artificial Sequence
  Oligonucleotide for detection of SNP TSC0045058
ttacacgaataaa

SEQ ID NO: 182323 - DNA, 13 bp, Artificial Sequence
  Oligonucleotide for detection of SNP TSC0045058
ttgtatgaatgag

SEQ ID NO: 182324 - DNA, 13 bp, Artificial Sequence
  Oligonucleotide for detection of SNP TSC0045058
ctcattcatacaa

SEQ ID NO: 182325 - DNA, 13 bp, Artificial Sequence
  Oligonucleotide for detection of SNP TSC0045058
ttgtattaatgag

SEQ ID NO: 182326 - DNA, 13 bp, Artificial Sequence
  Oligonucleotide for detection of SNP TSC0045058
ctcattaatacaa

SEQ ID NO: 182327 - DNA, 13 bp, Artificial Sequence
  Oligonucleotide for detection of SNP TSC0045058
ttgtacgaatgag

SEQ ID NO: 182328 - DNA, 13 bp, Artificial Sequence
  Oligonucleotide for detection of SNP TSC0045058
ctcattcgtacaa

SEQ ID NO: 182329 - DNA, 13 bp, Artificial Sequence
  Oligonucleotide for detection of SNP TSC0045062
aattgtatgttty

SEQ ID NO: 182330 - DNA, 13 bp, Artificial Sequence
  Oligonucleotide for detection of SNP TSC0045062
raaacatacaatt

SEQ ID NO: 182331 - DNA, 13 bp, Artificial Sequence
  Oligonucleotide for detection of SNP TSC0045062
aattgtgtgttty

SEQ ID NO: 182332 - DNA, 13 bp, Artificial Sequence
  Oligonucleotide for detection of SNP TSC0045062
raaacacacaatt

SEQ ID NO: 182333 - DNA, 13 bp, Artificial Sequence
  Oligonucleotide for detection of SNP TSC0045063
ttatgaatttttt

SEQ ID NO: 182334 - DNA, 13 bp, Artificial Sequence
  Oligonucleotide for detection of SNP TSC0045063
aaaaaattcataa

SEQ ID NO: 182335 - DNA, 13 bp, Artificial Sequence
  Oligonucleotide for detection of SNP TSC0045063
ttatgattttttt

SEQ ID NO: 182336 - DNA, 13 bp, Artificial Sequence
  Oligonucleotide for detection of SNP TSC0045063
aaaaaaatcataa

SEQ ID NO: 182337 - DNA, 13 bp, Artificial Sequence
  Oligonucleotide for detection of SNP TSC0045063
ttacgaatttttt

SEQ ID NO: 182338 - DNA, 13 bp, Artificial Sequence
  Oligonucleotide for detection of SNP TSC0045063
aaaaaattcgtaa

SEQ ID NO: 182339 - DNA, 13 bp, Artificial Sequence
  Oligonucleotide for detection of SNP TSC0045063
ttacgattttttt

SEQ ID NO: 182340 - DNA, 13 bp, Artificial Sequence
  Oligonucleotide for detection of SNP TSC0045063
aaaaaaatcgtaa

SEQ ID NO: 182341 - DNA, 13 bp, Artificial Sequence
  Oligonucleotide for detection of SNP TSC0045063
aaagagtttgtaa

SEQ ID NO: 182342 - DNA, 13 bp, Artificial Sequence
  Oligonucleotide for detection of SNP TSC0045063
ttacaaactcttt

SEQ ID NO: 182343 - DNA, 13 bp, Artificial Sequence
  Oligonucleotide for detection of SNP TSC0045063
aaagaggttgtaa

SEQ ID NO: 182344 - DNA, 13 bp, Artificial Sequence
  Oligonucleotide for detection of SNP TSC0045063
ttacaacctcttt

SEQ ID NO: 182345 - DNA, 13 bp, Artificial Sequence
  Oligonucleotide for detection of SNP TSC0045063
aaagagttcgtaa

SEQ ID NO: 182346 - DNA, 13 bp, Artificial Sequence
  Oligonucleotide for detection of SNP TSC0045063
ttacgaactcttt

SEQ ID NO: 182347 - DNA, 13 bp, Artificial Sequence
  Oligonucleotide for detection of SNP TSC0045063
aaagaggtcgtaa

SEQ ID NO: 182348 - DNA, 13 bp, Artificial Sequence
  Oligonucleotide for detection of SNP TSC0045063
ttacgacctcttt

SEQ ID NO: 182349 - DNA, 13 bp, Artificial Sequence
  Oligonucleotide for detection of SNP TSC0045067
tttattagtagag

SEQ ID NO: 182350 - DNA, 13 bp, Artificial Sequence
  Oligonucleotide for detection of SNP TSC0045067
ctctactaataaa

SEQ ID NO: 182351 - DNA, 13 bp, Artificial Sequence
  Oligonucleotide for detection of SNP TSC0045067
tttatttgtagag

SEQ ID NO: 182352 - DNA, 13 bp, Artificial Sequence
  Oligonucleotide for detection of SNP TSC0045067
ctctacaaataaa

SEQ ID NO: 182353 - DNA, 13 bp, Artificial Sequence
  Oligonucleotide for detection of SNP TSC0045067
tttattcgtagag

SEQ ID NO: 182354 - DNA, 13 bp, Artificial Sequence
  Oligonucleotide for detection of SNP TSC0045067
ctctacgaataaa

SEQ ID NO: 182355 - DNA, 13 bp, Artificial Sequence
  Oligonucleotide for detection of SNP TSC0045067
ttttgttgatgag

SEQ ID NO: 182356 - DNA, 13 bp, Artificial Sequence
  Oligonucleotide for detection of SNP TSC0045067
ctcatcaacaaaa

SEQ ID NO: 182357 - DNA, 13 bp, Artificial Sequence
  Oligonucleotide for detection of SNP TSC0045067
ttttgtggatgag

SEQ ID NO: 182358 - DNA, 13 bp, Artificial Sequence
  Oligonucleotide for detection of SNP TSC0045067
ctcatccacaaaa

SEQ ID NO: 182359 - DNA, 13 bp, Artificial Sequence
  Oligonucleotide for detection of SNP TSC0045067
ttttgcggatgag

SEQ ID NO: 182360 - DNA, 13 bp, Artificial Sequence
  Oligonucleotide for detection of SNP TSC0045067
ctcatccgcaaaa

SEQ ID NO: 182361 - DNA, 13 bp, Artificial Sequence
  Oligonucleotide for detection of SNP TSC0045068
attataaagtaag

SEQ ID NO: 182362 - DNA, 13 bp, Artificial Sequence
  Oligonucleotide for detection of SNP TSC0045068
cttactttataat

SEQ ID NO: 182363 - DNA, 13 bp, Artificial Sequence
  Oligonucleotide for detection of SNP TSC0045068
attatagagtaag

SEQ ID NO: 182364 - DNA, 13 bp, Artificial Sequence
  Oligonucleotide for detection of SNP TSC0045068
cttactctataat

SEQ ID NO: 182365 - DNA, 13 bp, Artificial Sequence
  Oligonucleotide for detection of SNP TSC0045069
ttgttttgtttaa

SEQ ID NO: 182366 - DNA, 13 bp, Artificial Sequence
  Oligonucleotide for detection of SNP TSC0045069
ttaaacaaaacaa

SEQ ID NO: 182367 - DNA, 13 bp, Artificial Sequence
  Oligonucleotide for detection of SNP TSC0045069
tcgttttgtttaa

SEQ ID NO: 182368 - DNA, 13 bp, Artificial Sequence
  Oligonucleotide for detection of SNP TSC0045069
ttaaacaaaacga

SEQ ID NO: 182369 - DNA, 13 bp, Artificial Sequence
  Oligonucleotide for detection of SNP TSC0045069
ttgtttcgtttaa

SEQ ID NO: 182370 - DNA, 13 bp, Artificial Sequence
  Oligonucleotide for detection of SNP TSC0045069
ttaaacgaaacaa

SEQ ID NO: 182371 - DNA, 13 bp, Artificial Sequence
  Oligonucleotide for detection of SNP TSC0045069
tcgtttcgtttaa

SEQ ID NO: 182372 - DNA, 13 bp, Artificial Sequence
  Oligonucleotide for detection of SNP TSC0045069
ttaaacgaaacga

SEQ ID NO: 182373 - DNA, 13 bp, Artificial Sequence
  Oligonucleotide for detection of SNP TSC0045069
ttgaatgaagtga

SEQ ID NO: 182374 - DNA, 13 bp, Artificial Sequence
  Oligonucleotide for detection of SNP TSC0045069
tcacttcattcaa

SEQ ID NO: 182375 - DNA, 13 bp, Artificial Sequence
  Oligonucleotide for detection of SNP TSC0045069
ttgaataaagtga

SEQ ID NO: 182376 - DNA, 13 bp, Artificial Sequence
  Oligonucleotide for detection of SNP TSC0045069
tcactttattcaa

SEQ ID NO: 182377 - DNA, 13 bp, Artificial Sequence
  Oligonucleotide for detection of SNP TSC0045069
ttgaacgaagtga

SEQ ID NO: 182378 - DNA, 13 bp, Artificial Sequence
  Oligonucleotide for detection of SNP TSC0045069
tcacttcgttcaa

SEQ ID NO: 182379 - DNA, 13 bp, Artificial Sequence
  Oligonucleotide for detection of SNP TSC0045069
ttgaataaagcga

SEQ ID NO: 182380 - DNA, 13 bp, Artificial Sequence
  Oligonucleotide for detection of SNP TSC0045069
tcgctttattcaa

SEQ ID NO: 182381 - DNA, 13 bp, Artificial Sequence
  Oligonucleotide for detection of SNP TSC0045069
ttgaatgaagcga

SEQ ID NO: 182382 - DNA, 13 bp, Artificial Sequence
  Oligonucleotide for detection of SNP TSC0045069
tcgcttcattcaa

SEQ ID NO: 182383 - DNA, 13 bp, Artificial Sequence
  Oligonucleotide for detection of SNP TSC0045069
ttgaacgaagcga

SEQ ID NO: 182384 - DNA, 13 bp, Artificial Sequence
  Oligonucleotide for detection of SNP TSC0045069
tcgcttcgttcaa

SEQ ID NO: 182385 - DNA, 13 bp, Artificial Sequence
  Oligonucleotide for detection of SNP TSC0045072
ggttatagttttt

SEQ ID NO: 182386 - DNA, 13 bp, Artificial Sequence
  Oligonucleotide for detection of SNP TSC0045072
aaaaactataacc

SEQ ID NO: 182387 - DNA, 13 bp, Artificial Sequence
  Oligonucleotide for detection of SNP TSC0045072
ggttatggttttt

SEQ ID NO: 182388 - DNA, 13 bp, Artificial Sequence
  Oligonucleotide for detection of SNP TSC0045072
aaaaaccataacc

SEQ ID NO: 182389 - DNA, 13 bp, Artificial Sequence
  Oligonucleotide for detection of SNP TSC0045072
ggttacggttttt

SEQ ID NO: 182390 - DNA, 13 bp, Artificial Sequence
  Oligonucleotide for detection of SNP TSC0045072
aaaaaccgtaacc

SEQ ID NO: 182391 - DNA, 13 bp, Artificial Sequence
  Oligonucleotide for detection of SNP TSC0045072
aagggttgtgaty

SEQ ID NO: 182392 - DNA, 13 bp, Artificial Sequence
  Oligonucleotide for detection of SNP TSC0045072
ratcacaaccctt

SEQ ID NO: 182393 - DNA, 13 bp, Artificial Sequence
  Oligonucleotide for detection of SNP TSC0045072
aagggtcgtgaty

SEQ ID NO: 182394 - DNA, 13 bp, Artificial Sequence
  Oligonucleotide for detection of SNP TSC0045072
ratcacgaccctt

SEQ ID NO: 182395 - DNA, 13 bp, Artificial Sequence
  Oligonucleotide for detection of SNP TSC0006880
tgagtaatttttt

SEQ ID NO: 182396 - DNA, 13 bp, Artificial Sequence
  Oligonucleotide for detection of SNP TSC0006880
aaaaaattactca

SEQ ID NO: 182397 - DNA, 13 bp, Artificial Sequence
  Oligonucleotide for detection of SNP TSC0006880
tgagtagtttttt

SEQ ID NO: 182398 - DNA, 13 bp, Artificial Sequence
  Oligonucleotide for detection of SNP TSC0006880
aaaaaactactca

SEQ ID NO: 182399 - DNA, 13 bp, Artificial Sequence
  Oligonucleotide for detection of SNP TSC0006880
cgagtaatttttt

SEQ ID NO: 182400 - DNA, 13 bp, Artificial Sequence
  Oligonucleotide for detection of SNP TSC0006880
aaaaaattactcg

SEQ ID NO: 182401 - DNA, 13 bp, Artificial Sequence
  Oligonucleotide for detection of SNP TSC0006880
cgagtagtttttt

SEQ ID NO: 182402 - DNA, 13 bp, Artificial Sequence
  Oligonucleotide for detection of SNP TSC0006880
aaaaaactactcg

SEQ ID NO: 182403 - DNA, 13 bp, Artificial Sequence
  Oligonucleotide for detection of SNP TSC0045077
atttgaaagtatt

SEQ ID NO: 182404 - DNA, 13 bp, Artificial Sequence
  Oligonucleotide for detection of SNP TSC0045077
aatactttcaaat

SEQ ID NO: 182405 - DNA, 13 bp, Artificial Sequence
  Oligonucleotide for detection of SNP TSC0045077
atttgagagtatt

SEQ ID NO: 182406 - DNA, 13 bp, Artificial Sequence
  Oligonucleotide for detection of SNP TSC0045077
aatactctcaaat

SEQ ID NO: 182407 - DNA, 13 bp, Artificial Sequence
  Oligonucleotide for detection of SNP TSC0045078
tggtgtatttgta

SEQ ID NO: 182408 - DNA, 13 bp, Artificial Sequence
  Oligonucleotide for detection of SNP TSC0045078
tacaaatacacca

SEQ ID NO: 182409 - DNA, 13 bp, Artificial Sequence
  Oligonucleotide for detection of SNP TSC0045078
tggtgtttttgta

SEQ ID NO: 182410 - DNA, 13 bp, Artificial Sequence
  Oligonucleotide for detection of SNP TSC0045078
tacaaaaacacca

SEQ ID NO: 182411 - DNA, 13 bp, Artificial Sequence
  Oligonucleotide for detection of SNP TSC0045078
tataggtgtatta

SEQ ID NO: 182412 - DNA, 13 bp, Artificial Sequence
  Oligonucleotide for detection of SNP TSC0045078
taatacacctata

SEQ ID NO: 182413 - DNA, 13 bp, Artificial Sequence
  Oligonucleotide for detection of SNP TSC0045078
tataggggtatta

SEQ ID NO: 182414 - DNA, 13 bp, Artificial Sequence
  Oligonucleotide for detection of SNP TSC0045078
taatacccctata

SEQ ID NO: 182415 - DNA, 13 bp, Artificial Sequence
  Oligonucleotide for detection of SNP TSC0045079
ttttagagttata

SEQ ID NO: 182416 - DNA, 13 bp, Artificial Sequence
  Oligonucleotide for detection of SNP TSC0045079
tataactctaaaa

SEQ ID NO: 182417 - DNA, 13 bp, Artificial Sequence
  Oligonucleotide for detection of SNP TSC0045079
ttttagggttata

SEQ ID NO: 182418 - DNA, 13 bp, Artificial Sequence
  Oligonucleotide for detection of SNP TSC0045079
tataaccctaaaa

SEQ ID NO: 182419 - DNA, 13 bp, Artificial Sequence
  Oligonucleotide for detection of SNP TSC0045080
agtggagtaataa

SEQ ID NO: 182420 - DNA, 13 bp, Artificial Sequence
  Oligonucleotide for detection of SNP TSC0045080
ttattactccact

SEQ ID NO: 182421 - DNA, 13 bp, Artificial Sequence
  Oligonucleotide for detection of SNP TSC0045080
agtggaataataa

SEQ ID NO: 182422 - DNA, 13 bp, Artificial Sequence
  Oligonucleotide for detection of SNP TSC0045080
ttattattccact

SEQ ID NO: 182423 - DNA, 13 bp, Artificial Sequence
  Oligonucleotide for detection of SNP TSC0045081
ggggagtttgaga

SEQ ID NO: 182424 - DNA, 13 bp, Artificial Sequence
  Oligonucleotide for detection of SNP TSC0045081
tctcaaactcccc

SEQ ID NO: 182425 - DNA, 13 bp, Artificial Sequence
  Oligonucleotide for detection of SNP TSC0045081
ggggaggttgaga

SEQ ID NO: 182426 - DNA, 13 bp, Artificial Sequence
  Oligonucleotide for detection of SNP TSC0045081
tctcaacctcccc

SEQ ID NO: 182427 - DNA, 13 bp, Artificial Sequence
  Oligonucleotide for detection of SNP TSC0045081
ttttagattttty

SEQ ID NO: 182428 - DNA, 13 bp, Artificial Sequence
  Oligonucleotide for detection of SNP TSC0045081
raaaaatctaaaa

SEQ ID NO: 182429 - DNA, 13 bp, Artificial Sequence
  Oligonucleotide for detection of SNP TSC0045082
atttgggatagtt

SEQ ID NO: 182430 - DNA, 13 bp, Artificial Sequence
  Oligonucleotide for detection of SNP TSC0045082
aactatcccaaat

SEQ ID NO: 182431 - DNA, 13 bp, Artificial Sequence
  Oligonucleotide for detection of SNP TSC0045082
atttggaatagtt

SEQ ID NO: 182432 - DNA, 13 bp, Artificial Sequence
  Oligonucleotide for detection of SNP TSC0045082
aactattccaaat

SEQ ID NO: 182433 - DNA, 13 bp, Artificial Sequence
  Oligonucleotide for detection of SNP TSC0045088
ggtaaagttagtg

SEQ ID NO: 182434 - DNA, 13 bp, Artificial Sequence
  Oligonucleotide for detection of SNP TSC0045088
cactaactttacc

SEQ ID NO: 182435 - DNA, 13 bp, Artificial Sequence
  Oligonucleotide for detection of SNP TSC0045088
ggtaaaattagtg

SEQ ID NO: 182436 - DNA, 13 bp, Artificial Sequence
  Oligonucleotide for detection of SNP TSC0045088
cactaattttacc

SEQ ID NO: 182437 - DNA, 13 bp, Artificial Sequence
  Oligonucleotide for detection of SNP TSC0045089
atttgtttatgtt

SEQ ID NO: 182438 - DNA, 13 bp, Artificial Sequence
  Oligonucleotide for detection of SNP TSC0045089
aacataaacaaat

SEQ ID NO: 182439 - DNA, 13 bp, Artificial Sequence
  Oligonucleotide for detection of SNP TSC0045089
aatatgtatagat

SEQ ID NO: 182440 - DNA, 13 bp, Artificial Sequence
  Oligonucleotide for detection of SNP TSC0045089
atctatacatatt

SEQ ID NO: 182441 - DNA, 13 bp, Artificial Sequence
  Oligonucleotide for detection of SNP TSC0045089
aatatgaatagat

SEQ ID NO: 182442 - DNA, 13 bp, Artificial Sequence
  Oligonucleotide for detection of SNP TSC0045089
atctattcatatt

SEQ ID NO: 182443 - DNA, 13 bp, Artificial Sequence
  Oligonucleotide for detection of SNP TSC0045090
tgaaaaggttagt

SEQ ID NO: 182444 - DNA, 13 bp, Artificial Sequence
  Oligonucleotide for detection of SNP TSC0045090
actaaccttttca

SEQ ID NO: 182445 - DNA, 13 bp, Artificial Sequence
  Oligonucleotide for detection of SNP TSC0045090
tgaaaaagttagt

SEQ ID NO: 182446 - DNA, 13 bp, Artificial Sequence
  Oligonucleotide for detection of SNP TSC0045090
actaactttttca

SEQ ID NO: 182447 - DNA, 13 bp, Artificial Sequence
  Oligonucleotide for detection of SNP TSC0045092
ggaaagtggttta

SEQ ID NO: 182448 - DNA, 13 bp, Artificial Sequence
  Oligonucleotide for detection of SNP TSC0045092
taaaccactttcc

SEQ ID NO: 182449 - DNA, 13 bp, Artificial Sequence
  Oligonucleotide for detection of SNP TSC0045092
ggaaagaggttta

SEQ ID NO: 182450 - DNA, 13 bp, Artificial Sequence
  Oligonucleotide for detection of SNP TSC0045092
taaacctctttcc

SEQ ID NO: 182451 - DNA, 13 bp, Artificial Sequence
  Oligonucleotide for detection of SNP TSC0045093
tgtattaattaag

SEQ ID NO: 182452 - DNA, 13 bp, Artificial Sequence
  Oligonucleotide for detection of SNP TSC0045093
cttaattaataca

SEQ ID NO: 182453 - DNA, 13 bp, Artificial Sequence
  Oligonucleotide for detection of SNP TSC0045093
tgtatttattaag

SEQ ID NO: 182454 - DNA, 13 bp, Artificial Sequence
  Oligonucleotide for detection of SNP TSC0045093
cttaataaataca

SEQ ID NO: 182455 - DNA, 13 bp, Artificial Sequence
  Oligonucleotide for detection of SNP TSC0045093
tttggttgatata

SEQ ID NO: 182456 - DNA, 13 bp, Artificial Sequence
  Oligonucleotide for detection of SNP TSC0045093
tatatcaaccaaa

SEQ ID NO: 182457 - DNA, 13 bp, Artificial Sequence
  Oligonucleotide for detection of SNP TSC0045093
tttggtggatata

SEQ ID NO: 182458 - DNA, 13 bp, Artificial Sequence
  Oligonucleotide for detection of SNP TSC0045093
tatatccaccaaa

SEQ ID NO: 182459 - DNA, 13 bp, Artificial Sequence
  Oligonucleotide for detection of SNP TSC0004528
gtttttataaggy

SEQ ID NO: 182460 - DNA, 13 bp, Artificial Sequence
  Oligonucleotide for detection of SNP TSC0004528
rccttataaaaac

SEQ ID NO: 182461 - DNA, 13 bp, Artificial Sequence
  Oligonucleotide for detection of SNP TSC0004528
gtttttttaaggy

SEQ ID NO: 182462 - DNA, 13 bp, Artificial Sequence
  Oligonucleotide for detection of SNP TSC0004528
rccttaaaaaaac

SEQ ID NO: 182463 - DNA, 13 bp, Artificial Sequence
  Oligonucleotide for detection of SNP TSC0004528
gttttatggaaay

SEQ ID NO: 182464 - DNA, 13 bp, Artificial Sequence
  Oligonucleotide for detection of SNP TSC0004528
rtttccataaaac

SEQ ID NO: 182465 - DNA, 13 bp, Artificial Sequence
  Oligonucleotide for detection of SNP TSC0004529
ttgtgtgtttatt

SEQ ID NO: 182466 - DNA, 13 bp, Artificial Sequence
  Oligonucleotide for detection of SNP TSC0004529
aataaacacacaa

SEQ ID NO: 182467 - DNA, 13 bp, Artificial Sequence
  Oligonucleotide for detection of SNP TSC0004529
ttgtgtatttatt

SEQ ID NO: 182468 - DNA, 13 bp, Artificial Sequence
  Oligonucleotide for detection of SNP TSC0004529
aataaatacacaa

SEQ ID NO: 182469 - DNA, 13 bp, Artificial Sequence
  Oligonucleotide for detection of SNP TSC0045098
tttaatgttgtaa

SEQ ID NO: 182470 - DNA, 13 bp, Artificial Sequence
  Oligonucleotide for detection of SNP TSC0045098
ttacaacattaaa

SEQ ID NO: 182471 - DNA, 13 bp, Artificial Sequence
  Oligonucleotide for detection of SNP TSC0045098
tttaatattgtaa

SEQ ID NO: 182472 - DNA, 13 bp, Artificial Sequence
  Oligonucleotide for detection of SNP TSC0045098
ttacaatattaaa

SEQ ID NO: 182473 - DNA, 13 bp, Artificial Sequence
  Oligonucleotide for detection of SNP TSC0008758
gatataattaaga

SEQ ID NO: 182474 - DNA, 13 bp, Artificial Sequence
  Oligonucleotide for detection of SNP TSC0008758
tcttaattatatc

SEQ ID NO: 182475 - DNA, 13 bp, Artificial Sequence
  Oligonucleotide for detection of SNP TSC0008758
gatatatttaaga

SEQ ID NO: 182476 - DNA, 13 bp, Artificial Sequence
  Oligonucleotide for detection of SNP TSC0008758
tcttaaatatatc

SEQ ID NO: 182477 - DNA, 13 bp, Artificial Sequence
  Oligonucleotide for detection of SNP TSC0045101
taggagagatttt

SEQ ID NO: 182478 - DNA, 13 bp, Artificial Sequence
  Oligonucleotide for detection of SNP TSC0045101
aaaatctctccta

SEQ ID NO: 182479 - DNA, 13 bp, Artificial Sequence
  Oligonucleotide for detection of SNP TSC0045101
taggagtgatttt

SEQ ID NO: 182480 - DNA, 13 bp, Artificial Sequence
  Oligonucleotide for detection of SNP TSC0045101
aaaatcactccta

SEQ ID NO: 182481 - DNA, 13 bp, Artificial Sequence
  Oligonucleotide for detection of SNP TSC0045101
agggttttttttg

SEQ ID NO: 182482 - DNA, 13 bp, Artificial Sequence
  Oligonucleotide for detection of SNP TSC0045101
caaaaaaaaccct

SEQ ID NO: 182483 - DNA, 13 bp, Artificial Sequence
  Oligonucleotide for detection of SNP TSC0045101
agggttatttttg

SEQ ID NO: 182484 - DNA, 13 bp, Artificial Sequence
  Oligonucleotide for detection of SNP TSC0045101
caaaaataaccct

SEQ ID NO: 182485 - DNA, 13 bp, Artificial Sequence
  Oligonucleotide for detection of SNP TSC0045104
gggattgttgtta

SEQ ID NO: 182486 - DNA, 13 bp, Artificial Sequence
  Oligonucleotide for detection of SNP TSC0045104
taacaacaatccc

SEQ ID NO: 182487 - DNA, 13 bp, Artificial Sequence
  Oligonucleotide for detection of SNP TSC0045104
gggattattgtta

SEQ ID NO: 182488 - DNA, 13 bp, Artificial Sequence
  Oligonucleotide for detection of SNP TSC0045104
taacaataatccc

SEQ ID NO: 182489 - DNA, 13 bp, Artificial Sequence
  Oligonucleotide for detection of SNP TSC0045105
tatgttgtgaaat

SEQ ID NO: 182490 - DNA, 13 bp, Artificial Sequence
  Oligonucleotide for detection of SNP TSC0045105
atttcacaacata

SEQ ID NO: 182491 - DNA, 13 bp, Artificial Sequence
  Oligonucleotide for detection of SNP TSC0045105
tatgttatgaaat

SEQ ID NO: 182492 - DNA, 13 bp, Artificial Sequence
  Oligonucleotide for detection of SNP TSC0045105
atttcataacata

SEQ ID NO: 182493 - DNA, 13 bp, Artificial Sequence
  Oligonucleotide for detection of SNP TSC0005092
tttgggtgtgata

SEQ ID NO: 182494 - DNA, 13 bp, Artificial Sequence
  Oligonucleotide for detection of SNP TSC0005092
tatcacacccaaa

SEQ ID NO: 182495 - DNA, 13 bp, Artificial Sequence
  Oligonucleotide for detection of SNP TSC0005092
tttgggcgtgata

SEQ ID NO: 182496 - DNA, 13 bp, Artificial Sequence
  Oligonucleotide for detection of SNP TSC0005092
tatcacgcccaaa

SEQ ID NO: 182497 - DNA, 13 bp, Artificial Sequence
  Oligonucleotide for detection of SNP TSC0007903
ggtagagtataaa

SEQ ID NO: 182498 - DNA, 13 bp, Artificial Sequence
  Oligonucleotide for detection of SNP TSC0007903
tttatactctacc

SEQ ID NO: 182499 - DNA, 13 bp, Artificial Sequence
  Oligonucleotide for detection of SNP TSC0007903
ggtagaatataaa

SEQ ID NO: 182500 - DNA, 13 bp, Artificial Sequence
  Oligonucleotide for detection of SNP TSC0007903
tttatattctacc

SEQ ID NO: 182501 - DNA, 13 bp, Artificial Sequence
  Oligonucleotide for detection of SNP TSC0045110
atagtaaaagaaa

SEQ ID NO: 182502 - DNA, 13 bp, Artificial Sequence
  Oligonucleotide for detection of SNP TSC0045110
tttcttttactat

SEQ ID NO: 182503 - DNA, 13 bp, Artificial Sequence
  Oligonucleotide for detection of SNP TSC0045110
atagtataagaaa

SEQ ID NO: 182504 - DNA, 13 bp, Artificial Sequence
  Oligonucleotide for detection of SNP TSC0045110
tttcttatactat

SEQ ID NO: 182505 - DNA, 13 bp, Artificial Sequence
  Oligonucleotide for detection of SNP TSC0045110
ttttttttattgt

SEQ ID NO: 182506 - DNA, 13 bp, Artificial Sequence
  Oligonucleotide for detection of SNP TSC0045110
acaataaaaaaaa

SEQ ID NO: 182507 - DNA, 13 bp, Artificial Sequence
  Oligonucleotide for detection of SNP TSC0045112
ttagggtgatata

SEQ ID NO: 182508 - DNA, 13 bp, Artificial Sequence
  Oligonucleotide for detection of SNP TSC0045112
tatatcaccctaa

SEQ ID NO: 182509 - DNA, 13 bp, Artificial Sequence
  Oligonucleotide for detection of SNP TSC0045112
ttagggcgatata

SEQ ID NO: 182510 - DNA, 13 bp, Artificial Sequence
  Oligonucleotide for detection of SNP TSC0045112
tatatcgccctaa

SEQ ID NO: 182511 - DNA, 13 bp, Artificial Sequence
  Oligonucleotide for detection of SNP TSC0045112
tgtatcgttttaa

SEQ ID NO: 182512 - DNA, 13 bp, Artificial Sequence
  Oligonucleotide for detection of SNP TSC0045112
ttaaaacgataca

SEQ ID NO: 182513 - DNA, 13 bp, Artificial Sequence
  Oligonucleotide for detection of SNP TSC0045113
tgtttagttaatt

SEQ ID NO: 182514 - DNA, 13 bp, Artificial Sequence
  Oligonucleotide for detection of SNP TSC0045113
aattaactaaaca

SEQ ID NO: 182515 - DNA, 13 bp, Artificial Sequence
  Oligonucleotide for detection of SNP TSC0045113
tgtttaattaatt

SEQ ID NO: 182516 - DNA, 13 bp, Artificial Sequence
  Oligonucleotide for detection of SNP TSC0045113
aattaattaaaca

SEQ ID NO: 182517 - DNA, 13 bp, Artificial Sequence
  Oligonucleotide for detection of SNP TSC0045114
atgtatggttaaa

SEQ ID NO: 182518 - DNA, 13 bp, Artificial Sequence
  Oligonucleotide for detection of SNP TSC0045114
tttaaccatacat

SEQ ID NO: 182519 - DNA, 13 bp, Artificial Sequence
  Oligonucleotide for detection of SNP TSC0045114
atgtatagttaaa

SEQ ID NO: 182520 - DNA, 13 bp, Artificial Sequence
  Oligonucleotide for detection of SNP TSC0045114
tttaactatacat

SEQ ID NO: 182521 - DNA, 13 bp, Artificial Sequence
  Oligonucleotide for detection of SNP TSC0045116
aagttaattttty

SEQ ID NO: 182522 - DNA, 13 bp, Artificial Sequence
  Oligonucleotide for detection of SNP TSC0045116
raaaaattaactt

SEQ ID NO: 182523 - DNA, 13 bp, Artificial Sequence
  Oligonucleotide for detection of SNP TSC0045116
gaggggttggttt

SEQ ID NO: 182524 - DNA, 13 bp, Artificial Sequence
  Oligonucleotide for detection of SNP TSC0045116
aaaccaacccctc

SEQ ID NO: 182525 - DNA, 13 bp, Artificial Sequence
  Oligonucleotide for detection of SNP TSC0045116
gagggggtggttt

SEQ ID NO: 182526 - DNA, 13 bp, Artificial Sequence
  Oligonucleotide for detection of SNP TSC0045116
aaaccaccccctc

SEQ ID NO: 182527 - DNA, 13 bp, Artificial Sequence
  Oligonucleotide for detection of SNP TSC0004958
atgtataattttt

SEQ ID NO: 182528 - DNA, 13 bp, Artificial Sequence
  Oligonucleotide for detection of SNP TSC0004958
aaaaattatacat

SEQ ID NO: 182529 - DNA, 13 bp, Artificial Sequence
  Oligonucleotide for detection of SNP TSC0004958
atgtattattttt

SEQ ID NO: 182530 - DNA, 13 bp, Artificial Sequence
  Oligonucleotide for detection of SNP TSC0004958
aaaaataatacat

SEQ ID NO: 182531 - DNA, 13 bp, Artificial Sequence
  Oligonucleotide for detection of SNP TSC0004958
aaagattatatat

SEQ ID NO: 182532 - DNA, 13 bp, Artificial Sequence
  Oligonucleotide for detection of SNP TSC0004958
atatataatcttt

SEQ ID NO: 182533 - DNA, 13 bp, Artificial Sequence
  Oligonucleotide for detection of SNP TSC0004958
aaagatgatatat

SEQ ID NO: 182534 - DNA, 13 bp, Artificial Sequence
  Oligonucleotide for detection of SNP TSC0004958
atatatcatcttt

SEQ ID NO: 182535 - DNA, 13 bp, Artificial Sequence
  Oligonucleotide for detection of SNP TSC0005030
ataaggataggaa

SEQ ID NO: 182536 - DNA, 13 bp, Artificial Sequence
  Oligonucleotide for detection of SNP TSC0005030
ttcctatccttat

SEQ ID NO: 182537 - DNA, 13 bp, Artificial Sequence
  Oligonucleotide for detection of SNP TSC0005030
ataaggttaggaa

SEQ ID NO: 182538 - DNA, 13 bp, Artificial Sequence
  Oligonucleotide for detection of SNP TSC0005030
ttcctaaccttat

SEQ ID NO: 182539 - DNA, 13 bp, Artificial Sequence
  Oligonucleotide for detection of SNP TSC0005030
tttttgtttttat

SEQ ID NO: 182540 - DNA, 13 bp, Artificial Sequence
  Oligonucleotide for detection of SNP TSC0005030
ataaaaacaaaaa

SEQ ID NO: 182541 - DNA, 13 bp, Artificial Sequence
  Oligonucleotide for detection of SNP TSC0045120
ttttttgtatata

SEQ ID NO: 182542 - DNA, 13 bp, Artificial Sequence
  Oligonucleotide for detection of SNP TSC0045120
tatatacaaaaaa

SEQ ID NO: 182543 - DNA, 13 bp, Artificial Sequence
  Oligonucleotide for detection of SNP TSC0045120
tttttcgtatata

SEQ ID NO: 182544 - DNA, 13 bp, Artificial Sequence
  Oligonucleotide for detection of SNP TSC0045120
tatatacgaaaaa

SEQ ID NO: 182545 - DNA, 13 bp, Artificial Sequence
  Oligonucleotide for detection of SNP TSC0045120
tatgtgtgaaaaa

SEQ ID NO: 182546 - DNA, 13 bp, Artificial Sequence
  Oligonucleotide for detection of SNP TSC0045120
tttttcacacata

SEQ ID NO: 182547 - DNA, 13 bp, Artificial Sequence
  Oligonucleotide for detection of SNP TSC0045120
tatgtgcgaaaaa

SEQ ID NO: 182548 - DNA, 13 bp, Artificial Sequence
  Oligonucleotide for detection of SNP TSC0045120
tttttcgcacata

SEQ ID NO: 182549 - DNA, 13 bp, Artificial Sequence
  Oligonucleotide for detection of SNP TSC0045123
tggtaatgatttt

SEQ ID NO: 182550 - DNA, 13 bp, Artificial Sequence
  Oligonucleotide for detection of SNP TSC0045123
aaaatcattacca

SEQ ID NO: 182551 - DNA, 13 bp, Artificial Sequence
  Oligonucleotide for detection of SNP TSC0045123
tggtaacgatttt

SEQ ID NO: 182552 - DNA, 13 bp, Artificial Sequence
  Oligonucleotide for detection of SNP TSC0045123
aaaatcgttacca

SEQ ID NO: 182553 - DNA, 13 bp, Artificial Sequence
  Oligonucleotide for detection of SNP TSC0045123
agggttgttgtta

SEQ ID NO: 182554 - DNA, 13 bp, Artificial Sequence
  Oligonucleotide for detection of SNP TSC0045123
taacaacaaccct

SEQ ID NO: 182555 - DNA, 13 bp, Artificial Sequence
  Oligonucleotide for detection of SNP TSC0045123
agggttattgtta

SEQ ID NO: 182556 - DNA, 13 bp, Artificial Sequence
  Oligonucleotide for detection of SNP TSC0045123
taacaataaccct

SEQ ID NO: 182557 - DNA, 13 bp, Artificial Sequence
  Oligonucleotide for detection of SNP TSC0045123
agggtcgttgtta

SEQ ID NO: 182558 - DNA, 13 bp, Artificial Sequence
  Oligonucleotide for detection of SNP TSC0045123
taacaacgaccct

SEQ ID NO: 182559 - DNA, 13 bp, Artificial Sequence
  Oligonucleotide for detection of SNP TSC0045124
taatggaatgatt

SEQ ID NO: 182560 - DNA, 13 bp, Artificial Sequence
  Oligonucleotide for detection of SNP TSC0045124
aatcattccatta

SEQ ID NO: 182561 - DNA, 13 bp, Artificial Sequence
  Oligonucleotide for detection of SNP TSC0045124
taatgggatgatt

SEQ ID NO: 182562 - DNA, 13 bp, Artificial Sequence
  Oligonucleotide for detection of SNP TSC0045124
aatcatcccatta

SEQ ID NO: 182563 - DNA, 13 bp, Artificial Sequence
  Oligonucleotide for detection of SNP TSC0045129
gtagtttttttta

SEQ ID NO: 182564 - DNA, 13 bp, Artificial Sequence
  Oligonucleotide for detection of SNP TSC0045129
taaaaaaaactac

SEQ ID NO: 182565 - DNA, 13 bp, Artificial Sequence
  Oligonucleotide for detection of SNP TSC0045129
tagaagaaattgy

SEQ ID NO: 182566 - DNA, 13 bp, Artificial Sequence
  Oligonucleotide for detection of SNP TSC0045129
rcaatttcttcta

SEQ ID NO: 182567 - DNA, 13 bp, Artificial Sequence
  Oligonucleotide for detection of SNP TSC0045129
tagaagtaattgy

SEQ ID NO: 182568 - DNA, 13 bp, Artificial Sequence
  Oligonucleotide for detection of SNP TSC0045129
rcaattacttcta

SEQ ID NO: 182569 - DNA, 13 bp, Artificial Sequence
  Oligonucleotide for detection of SNP TSC0045130
ggtttttggaatg

SEQ ID NO: 182570 - DNA, 13 bp, Artificial Sequence
  Oligonucleotide for detection of SNP TSC0045130
cattccaaaaacc

SEQ ID NO: 182571 - DNA, 13 bp, Artificial Sequence
  Oligonucleotide for detection of SNP TSC0045130
ggttttgggaatg

SEQ ID NO: 182572 - DNA, 13 bp, Artificial Sequence
  Oligonucleotide for detection of SNP TSC0045130
cattcccaaaacc

SEQ ID NO: 182573 - DNA, 13 bp, Artificial Sequence
  Oligonucleotide for detection of SNP TSC0045130
tattttaagaaty

SEQ ID NO: 182574 - DNA, 13 bp, Artificial Sequence
  Oligonucleotide for detection of SNP TSC0045130
rattcttaaaata

SEQ ID NO: 182575 - DNA, 13 bp, Artificial Sequence
  Oligonucleotide for detection of SNP TSC0045130
tatttttagaaty

SEQ ID NO: 182576 - DNA, 13 bp, Artificial Sequence
  Oligonucleotide for detection of SNP TSC0045130
rattctaaaaata

SEQ ID NO: 182577 - DNA, 13 bp, Artificial Sequence
  Oligonucleotide for detection of SNP TSC0045131
ttttagtggaggt

SEQ ID NO: 182578 - DNA, 13 bp, Artificial Sequence
  Oligonucleotide for detection of SNP TSC0045131
acctccactaaaa

SEQ ID NO: 182579 - DNA, 13 bp, Artificial Sequence
  Oligonucleotide for detection of SNP TSC0045131
ttttagcggaggt

SEQ ID NO: 182580 - DNA, 13 bp, Artificial Sequence
  Oligonucleotide for detection of SNP TSC0045131
acctccgctaaaa

SEQ ID NO: 182581 - DNA, 13 bp, Artificial Sequence
  Oligonucleotide for detection of SNP TSC0045131
atttttgttggag

SEQ ID NO: 182582 - DNA, 13 bp, Artificial Sequence
  Oligonucleotide for detection of SNP TSC0045131
ctccaacaaaaat

SEQ ID NO: 182583 - DNA, 13 bp, Artificial Sequence
  Oligonucleotide for detection of SNP TSC0045131
atttttattggag

SEQ ID NO: 182584 - DNA, 13 bp, Artificial Sequence
  Oligonucleotide for detection of SNP TSC0045131
ctccaataaaaat

SEQ ID NO: 182585 - DNA, 13 bp, Artificial Sequence
  Oligonucleotide for detection of SNP TSC0045131
attttcgttggag

SEQ ID NO: 182586 - DNA, 13 bp, Artificial Sequence
  Oligonucleotide for detection of SNP TSC0045131
ctccaacgaaaat

SEQ ID NO: 182587 - DNA, 13 bp, Artificial Sequence
  Oligonucleotide for detection of SNP TSC0000952
agtcgtattttta

SEQ ID NO: 182588 - DNA, 13 bp, Artificial Sequence
  Oligonucleotide for detection of SNP TSC0000952
taaaaatacgact

SEQ ID NO: 182589 - DNA, 13 bp, Artificial Sequence
  Oligonucleotide for detection of SNP TSC0000952
agtcgttttttta

SEQ ID NO: 182590 - DNA, 13 bp, Artificial Sequence
  Oligonucleotide for detection of SNP TSC0000952
taaaaaaacgact

SEQ ID NO: 182591 - DNA, 13 bp, Artificial Sequence
  Oligonucleotide for detection of SNP TSC0000952
taagggtatgatt

SEQ ID NO: 182592 - DNA, 13 bp, Artificial Sequence
  Oligonucleotide for detection of SNP TSC0000952
aatcataccctta

SEQ ID NO: 182593 - DNA, 13 bp, Artificial Sequence
  Oligonucleotide for detection of SNP TSC0000952
taaggggatgatt

SEQ ID NO: 182594 - DNA, 13 bp, Artificial Sequence
  Oligonucleotide for detection of SNP TSC0000952
aatcatcccctta

SEQ ID NO: 182595 - DNA, 13 bp, Artificial Sequence
  Oligonucleotide for detection of SNP TSC0000952
taagggtacgatt

SEQ ID NO: 182596 - DNA, 13 bp, Artificial Sequence
  Oligonucleotide for detection of SNP TSC0000952
aatcgtaccctta

SEQ ID NO: 182597 - DNA, 13 bp, Artificial Sequence
  Oligonucleotide for detection of SNP TSC0000952
taaggggacgatt

SEQ ID NO: 182598 - DNA, 13 bp, Artificial Sequence
  Oligonucleotide for detection of SNP TSC0000952
aatcgtcccctta

SEQ ID NO: 182599 - DNA, 13 bp, Artificial Sequence
  Oligonucleotide for detection of SNP TSC0045134
aagtatatatatg

SEQ ID NO: 182600 - DNA, 13 bp, Artificial Sequence
  Oligonucleotide for detection of SNP TSC0045134
catatatatactt

SEQ ID NO: 182601 - DNA, 13 bp, Artificial Sequence
  Oligonucleotide for detection of SNP TSC0045134
aagtatgtatatg

SEQ ID NO: 182602 - DNA, 13 bp, Artificial Sequence
  Oligonucleotide for detection of SNP TSC0045134
catatacatactt

SEQ ID NO: 182603 - DNA, 13 bp, Artificial Sequence
  Oligonucleotide for detection of SNP TSC0045135
tgatttaaaaaaa

SEQ ID NO: 182604 - DNA, 13 bp, Artificial Sequence
  Oligonucleotide for detection of SNP TSC0045135
tttttttaaatca

SEQ ID NO: 182605 - DNA, 13 bp, Artificial Sequence
  Oligonucleotide for detection of SNP TSC0045135
tgatttgaaaaaa

SEQ ID NO: 182606 - DNA, 13 bp, Artificial Sequence
  Oligonucleotide for detection of SNP TSC0045135
ttttttcaaatca

SEQ ID NO: 182607 - DNA, 13 bp, Artificial Sequence
  Oligonucleotide for detection of SNP TSC0045137
gggaggtgggagg

SEQ ID NO: 182608 - DNA, 13 bp, Artificial Sequence
  Oligonucleotide for detection of SNP TSC0045137
cctcccacctccc

SEQ ID NO: 182609 - DNA, 13 bp, Artificial Sequence
  Oligonucleotide for detection of SNP TSC0045137
gggaggggggagg

SEQ ID NO: 182610 - DNA, 13 bp, Artificial Sequence
  Oligonucleotide for detection of SNP TSC0045137
cctcccccctccc

SEQ ID NO: 182611 - DNA, 13 bp, Artificial Sequence
  Oligonucleotide for detection of SNP TSC0045138
atagaattggtaa

SEQ ID NO: 182612 - DNA, 13 bp, Artificial Sequence
  Oligonucleotide for detection of SNP TSC0045138
ttaccaattctat

SEQ ID NO: 182613 - DNA, 13 bp, Artificial Sequence
  Oligonucleotide for detection of SNP TSC0045138
atagaagtggtaa

SEQ ID NO: 182614 - DNA, 13 bp, Artificial Sequence
  Oligonucleotide for detection of SNP TSC0045138
ttaccacttctat

SEQ ID NO: 182615 - DNA, 13 bp, Artificial Sequence
  Oligonucleotide for detection of SNP TSC0045138
ttattagttttgt

SEQ ID NO: 182616 - DNA, 13 bp, Artificial Sequence
  Oligonucleotide for detection of SNP TSC0045138
acaaaactaataa

SEQ ID NO: 182617 - DNA, 13 bp, Artificial Sequence
  Oligonucleotide for detection of SNP TSC0045138
ttattatttttgt

SEQ ID NO: 182618 - DNA, 13 bp, Artificial Sequence
  Oligonucleotide for detection of SNP TSC0045138
acaaaaataataa

SEQ ID NO: 182619 - DNA, 13 bp, Artificial Sequence
  Oligonucleotide for detection of SNP TSC0000628
attagtattatga

SEQ ID NO: 182620 - DNA, 13 bp, Artificial Sequence
  Oligonucleotide for detection of SNP TSC0000628
tcataatactaat

SEQ ID NO: 182621 - DNA, 13 bp, Artificial Sequence
  Oligonucleotide for detection of SNP TSC0000628
attagtgttatga

SEQ ID NO: 182622 - DNA, 13 bp, Artificial Sequence
  Oligonucleotide for detection of SNP TSC0000628
tcataacactaat

SEQ ID NO: 182623 - DNA, 13 bp, Artificial Sequence
  Oligonucleotide for detection of SNP TSC0000628
attagcgttatga

SEQ ID NO: 182624 - DNA, 13 bp, Artificial Sequence
  Oligonucleotide for detection of SNP TSC0000628
tcataacgctaat

SEQ ID NO: 182625 - DNA, 13 bp, Artificial Sequence
  Oligonucleotide for detection of SNP TSC0000628
ttatagtgttagt

SEQ ID NO: 182626 - DNA, 13 bp, Artificial Sequence
  Oligonucleotide for detection of SNP TSC0000628
actaacactataa

SEQ ID NO: 182627 - DNA, 13 bp, Artificial Sequence
  Oligonucleotide for detection of SNP TSC0000628
ttatagcgttagt

SEQ ID NO: 182628 - DNA, 13 bp, Artificial Sequence
  Oligonucleotide for detection of SNP TSC0000628
actaacgctataa

SEQ ID NO: 182629 - DNA, 13 bp, Artificial Sequence
  Oligonucleotide for detection of SNP TSC0045140
tgggatgagggtt

SEQ ID NO: 182630 - DNA, 13 bp, Artificial Sequence
  Oligonucleotide for detection of SNP TSC0045140
aaccctcatccca

SEQ ID NO: 182631 - DNA, 13 bp, Artificial Sequence
  Oligonucleotide for detection of SNP TSC0045140
tgggataagggtt

SEQ ID NO: 182632 - DNA, 13 bp, Artificial Sequence
  Oligonucleotide for detection of SNP TSC0045140
aacccttatccca

SEQ ID NO: 182633 - DNA, 13 bp, Artificial Sequence
  Oligonucleotide for detection of SNP TSC0045140
tgggacgagggtt

SEQ ID NO: 182634 - DNA, 13 bp, Artificial Sequence
  Oligonucleotide for detection of SNP TSC0045140
aaccctcgtccca

SEQ ID NO: 182635 - DNA, 13 bp, Artificial Sequence
  Oligonucleotide for detection of SNP TSC0045141
tattataataatt

SEQ ID NO: 182636 - DNA, 13 bp, Artificial Sequence
  Oligonucleotide for detection of SNP TSC0045141
aattattataata

SEQ ID NO: 182637 - DNA, 13 bp, Artificial Sequence
  Oligonucleotide for detection of SNP TSC0045141
tattatgataatt

SEQ ID NO: 182638 - DNA, 13 bp, Artificial Sequence
  Oligonucleotide for detection of SNP TSC0045141
aattatcataata

SEQ ID NO: 182639 - DNA, 13 bp, Artificial Sequence
  Oligonucleotide for detection of SNP TSC0000663
ttatgtgtagaat

SEQ ID NO: 182640 - DNA, 13 bp, Artificial Sequence
  Oligonucleotide for detection of SNP TSC0000663
attctacacataa

SEQ ID NO: 182641 - DNA, 13 bp, Artificial Sequence
  Oligonucleotide for detection of SNP TSC0045143
gtaaataatttty

SEQ ID NO: 182642 - DNA, 13 bp, Artificial Sequence
  Oligonucleotide for detection of SNP TSC0045143
raaaattatttac

SEQ ID NO: 182643 - DNA, 13 bp, Artificial Sequence
  Oligonucleotide for detection of SNP TSC0045143
gtaaatgatttty

SEQ ID NO: 182644 - DNA, 13 bp, Artificial Sequence
  Oligonucleotide for detection of SNP TSC0045143
raaaatcatttac

SEQ ID NO: 182645 - DNA, 13 bp, Artificial Sequence
  Oligonucleotide for detection of SNP TSC0045144
ataggtgataagt

SEQ ID NO: 182646 - DNA, 13 bp, Artificial Sequence
  Oligonucleotide for detection of SNP TSC0045144
acttatcacctat

SEQ ID NO: 182647 - DNA, 13 bp, Artificial Sequence
  Oligonucleotide for detection of SNP TSC0045144
ataggtaataagt

SEQ ID NO: 182648 - DNA, 13 bp, Artificial Sequence
  Oligonucleotide for detection of SNP TSC0045144
acttattacctat

SEQ ID NO: 182649 - DNA, 13 bp, Artificial Sequence
  Oligonucleotide for detection of SNP TSC0045145
ggattgttttttg

SEQ ID NO: 182650 - DNA, 13 bp, Artificial Sequence
  Oligonucleotide for detection of SNP TSC0045145
caaaaaacaatcc

SEQ ID NO: 182651 - DNA, 13 bp, Artificial Sequence
  Oligonucleotide for detection of SNP TSC0045145
ggatcgttttttg

SEQ ID NO: 182652 - DNA, 13 bp, Artificial Sequence
  Oligonucleotide for detection of SNP TSC0045145
caaaaaacgatcc

SEQ ID NO: 182653 - DNA, 13 bp, Artificial Sequence
  Oligonucleotide for detection of SNP TSC0045145
ggatcggtttttg

SEQ ID NO: 182654 - DNA, 13 bp, Artificial Sequence
  Oligonucleotide for detection of SNP TSC0045145
caaaaaccgatcc

SEQ ID NO: 182655 - DNA, 13 bp, Artificial Sequence
  Oligonucleotide for detection of SNP TSC0045145
taggggatgatty

SEQ ID NO: 182656 - DNA, 13 bp, Artificial Sequence
  Oligonucleotide for detection of SNP TSC0045145
raatcatccccta

SEQ ID NO: 182657 - DNA, 13 bp, Artificial Sequence
  Oligonucleotide for detection of SNP TSC0045145
taggggttgatty

SEQ ID NO: 182658 - DNA, 13 bp, Artificial Sequence
  Oligonucleotide for detection of SNP TSC0045145
raatcaaccccta

SEQ ID NO: 182659 - DNA, 13 bp, Artificial Sequence
  Oligonucleotide for detection of SNP TSC0045145
taggggacgatty

SEQ ID NO: 182660 - DNA, 13 bp, Artificial Sequence
  Oligonucleotide for detection of SNP TSC0045145
raatcgtccccta

SEQ ID NO: 182661 - DNA, 13 bp, Artificial Sequence
  Oligonucleotide for detection of SNP TSC0045145
taggggtcgatty

SEQ ID NO: 182662 - DNA, 13 bp, Artificial Sequence
  Oligonucleotide for detection of SNP TSC0045145
raatcgaccccta

SEQ ID NO: 182663 - DNA, 13 bp, Artificial Sequence
  Oligonucleotide for detection of SNP TSC0045146
tagttatgaaata

SEQ ID NO: 182664 - DNA, 13 bp, Artificial Sequence
  Oligonucleotide for detection of SNP TSC0045146
tatttcataacta

SEQ ID NO: 182665 - DNA, 13 bp, Artificial Sequence
  Oligonucleotide for detection of SNP TSC0045146
tagttaggaaata

SEQ ID NO: 182666 - DNA, 13 bp, Artificial Sequence
  Oligonucleotide for detection of SNP TSC0045146
tatttcctaacta

SEQ ID NO: 182667 - DNA, 13 bp, Artificial Sequence
  Oligonucleotide for detection of SNP TSC0045146
tattttttgattg

SEQ ID NO: 182668 - DNA, 13 bp, Artificial Sequence
  Oligonucleotide for detection of SNP TSC0045146
caatcaaaaaata

SEQ ID NO: 182669 - DNA, 13 bp, Artificial Sequence
  Oligonucleotide for detection of SNP TSC0045147
ggttttatgtttt

SEQ ID NO: 182670 - DNA, 13 bp, Artificial Sequence
  Oligonucleotide for detection of SNP TSC0045147
aaaacataaaacc

SEQ ID NO: 182671 - DNA, 13 bp, Artificial Sequence
  Oligonucleotide for detection of SNP TSC0045147
ggttttgtgtttt

SEQ ID NO: 182672 - DNA, 13 bp, Artificial Sequence
  Oligonucleotide for detection of SNP TSC0045147
aaaacacaaaacc

SEQ ID NO: 182673 - DNA, 13 bp, Artificial Sequence
  Oligonucleotide for detection of SNP TSC0045148
agaaagttattag

SEQ ID NO: 182674 - DNA, 13 bp, Artificial Sequence
  Oligonucleotide for detection of SNP TSC0045148
ctaataactttct

SEQ ID NO: 182675 - DNA, 13 bp, Artificial Sequence
  Oligonucleotide for detection of SNP TSC0045148
agaaaggtattag

SEQ ID NO: 182676 - DNA, 13 bp, Artificial Sequence
  Oligonucleotide for detection of SNP TSC0045148
ctaatacctttct

SEQ ID NO: 182677 - DNA, 13 bp, Artificial Sequence
  Oligonucleotide for detection of SNP TSC0045149
gggagaaaatata

SEQ ID NO: 182678 - DNA, 13 bp, Artificial Sequence
  Oligonucleotide for detection of SNP TSC0045149
tatattttctccc

SEQ ID NO: 182679 - DNA, 13 bp, Artificial Sequence
  Oligonucleotide for detection of SNP TSC0045149
gggagataatata

SEQ ID NO: 182680 - DNA, 13 bp, Artificial Sequence
  Oligonucleotide for detection of SNP TSC0045149
tatattatctccc

SEQ ID NO: 182681 - DNA, 13 bp, Artificial Sequence
  Oligonucleotide for detection of SNP TSC0045150
atatatagtaaat

SEQ ID NO: 182682 - DNA, 13 bp, Artificial Sequence
  Oligonucleotide for detection of SNP TSC0045150
atttactatatat

SEQ ID NO: 182683 - DNA, 13 bp, Artificial Sequence
  Oligonucleotide for detection of SNP TSC0045150
atatatggtaaat

SEQ ID NO: 182684 - DNA, 13 bp, Artificial Sequence
  Oligonucleotide for detection of SNP TSC0045150
atttaccatatat

SEQ ID NO: 182685 - DNA, 13 bp, Artificial Sequence
  Oligonucleotide for detection of SNP TSC0045150
atatacggtaaat

SEQ ID NO: 182686 - DNA, 13 bp, Artificial Sequence
  Oligonucleotide for detection of SNP TSC0045150
atttaccgtatat

SEQ ID NO: 182687 - DNA, 13 bp, Artificial Sequence
  Oligonucleotide for detection of SNP TSC0045150
atttgttgtatgt

SEQ ID NO: 182688 - DNA, 13 bp, Artificial Sequence
  Oligonucleotide for detection of SNP TSC0045150
acatacaacaaat

SEQ ID NO: 182689 - DNA, 13 bp, Artificial Sequence
  Oligonucleotide for detection of SNP TSC0045150
atttgtcgtatgt

SEQ ID NO: 182690 - DNA, 13 bp, Artificial Sequence
  Oligonucleotide for detection of SNP TSC0045150
acatacgacaaat

SEQ ID NO: 182691 - DNA, 13 bp, Artificial Sequence
  Oligonucleotide for detection of SNP TSC0045151
ttgtatattgtay

SEQ ID NO: 182692 - DNA, 13 bp, Artificial Sequence
  Oligonucleotide for detection of SNP TSC0045151
rtacaatatacaa

SEQ ID NO: 182693 - DNA, 13 bp, Artificial Sequence
  Oligonucleotide for detection of SNP TSC0045151
ttgtatgttgtay

SEQ ID NO: 182694 - DNA, 13 bp, Artificial Sequence
  Oligonucleotide for detection of SNP TSC0045151
rtacaacatacaa

SEQ ID NO: 182695 - DNA, 13 bp, Artificial Sequence
  Oligonucleotide for detection of SNP TSC0045151
ttgtacgttgtay

SEQ ID NO: 182696 - DNA, 13 bp, Artificial Sequence
  Oligonucleotide for detection of SNP TSC0045151
rtacaacgtacaa

SEQ ID NO: 182697 - DNA, 13 bp, Artificial Sequence
  Oligonucleotide for detection of SNP TSC0045151
gtgtaatgtatag

SEQ ID NO: 182698 - DNA, 13 bp, Artificial Sequence
  Oligonucleotide for detection of SNP TSC0045151
ctatacattacac

SEQ ID NO: 182699 - DNA, 13 bp, Artificial Sequence
  Oligonucleotide for detection of SNP TSC0045151
gtgtaacgtatag

SEQ ID NO: 182700 - DNA, 13 bp, Artificial Sequence
  Oligonucleotide for detection of SNP TSC0045151
ctatacgttacac

SEQ ID NO: 182701 - DNA, 13 bp, Artificial Sequence
  Oligonucleotide for detection of SNP TSC0045152
ttgttagtgaagt

SEQ ID NO: 182702 - DNA, 13 bp, Artificial Sequence
  Oligonucleotide for detection of SNP TSC0045152
acttcactaacaa

SEQ ID NO: 182703 - DNA, 13 bp, Artificial Sequence
  Oligonucleotide for detection of SNP TSC0045152
ttgttaatgaagt

SEQ ID NO: 182704 - DNA, 13 bp, Artificial Sequence
  Oligonucleotide for detection of SNP TSC0045152
acttcattaacaa

SEQ ID NO: 182705 - DNA, 13 bp, Artificial Sequence
  Oligonucleotide for detection of SNP TSC0045153
gaaaattagatgy

SEQ ID NO: 182706 - DNA, 13 bp, Artificial Sequence
  Oligonucleotide for detection of SNP TSC0045153
rcatctaattttc

SEQ ID NO: 182707 - DNA, 13 bp, Artificial Sequence
  Oligonucleotide for detection of SNP TSC0045153
gaaaatgagatgy

SEQ ID NO: 182708 - DNA, 13 bp, Artificial Sequence
  Oligonucleotide for detection of SNP TSC0045153
rcatctcattttc

SEQ ID NO: 182709 - DNA, 13 bp, Artificial Sequence
  Oligonucleotide for detection of SNP TSC0045153
gaaaacgagatgy

SEQ ID NO: 182710 - DNA, 13 bp, Artificial Sequence
  Oligonucleotide for detection of SNP TSC0045153
rcatctcgttttc

SEQ ID NO: 182711 - DNA, 13 bp, Artificial Sequence
  Oligonucleotide for detection of SNP TSC0045154
aattttaaaaaay

SEQ ID NO: 182712 - DNA, 13 bp, Artificial Sequence
  Oligonucleotide for detection of SNP TSC0045154
rttttttaaaatt

SEQ ID NO: 182713 - DNA, 13 bp, Artificial Sequence
  Oligonucleotide for detection of SNP TSC0045154
aatttttaaaaay

SEQ ID NO: 182714 - DNA, 13 bp, Artificial Sequence
  Oligonucleotide for detection of SNP TSC0045154
rtttttaaaaatt

SEQ ID NO: 182715 - DNA, 13 bp, Artificial Sequence
  Oligonucleotide for detection of SNP TSC0045154
gttttttaaaatt

SEQ ID NO: 182716 - DNA, 13 bp, Artificial Sequence
  Oligonucleotide for detection of SNP TSC0045154
aattttaaaaaac

SEQ ID NO: 182717 - DNA, 13 bp, Artificial Sequence
  Oligonucleotide for detection of SNP TSC0045154
gtttttaaaaatt

SEQ ID NO: 182718 - DNA, 13 bp, Artificial Sequence
  Oligonucleotide for detection of SNP TSC0045154
aatttttaaaaac

SEQ ID NO: 182719 - DNA, 13 bp, Artificial Sequence
  Oligonucleotide for detection of SNP TSC0045155
agttataatattt

SEQ ID NO: 182720 - DNA, 13 bp, Artificial Sequence
  Oligonucleotide for detection of SNP TSC0045155
aaatattataact

SEQ ID NO: 182721 - DNA, 13 bp, Artificial Sequence
  Oligonucleotide for detection of SNP TSC0045155
agttattatattt

SEQ ID NO: 182722 - DNA, 13 bp, Artificial Sequence
  Oligonucleotide for detection of SNP TSC0045155
aaatataataact

SEQ ID NO: 182723 - DNA, 13 bp, Artificial Sequence
  Oligonucleotide for detection of SNP TSC0045155
aagtattatgatt

SEQ ID NO: 182724 - DNA, 13 bp, Artificial Sequence
  Oligonucleotide for detection of SNP TSC0045155
aatcataatactt

SEQ ID NO: 182725 - DNA, 13 bp, Artificial Sequence
  Oligonucleotide for detection of SNP TSC0045155
aagtataatgatt

SEQ ID NO: 182726 - DNA, 13 bp, Artificial Sequence
  Oligonucleotide for detection of SNP TSC0045155
aatcattatactt

SEQ ID NO: 182727 - DNA, 13 bp, Artificial Sequence
  Oligonucleotide for detection of SNP TSC0045156
aaaaaaaaagaga

SEQ ID NO: 182728 - DNA, 13 bp, Artificial Sequence
  Oligonucleotide for detection of SNP TSC0045156
tctcttttttttt

SEQ ID NO: 182729 - DNA, 13 bp, Artificial Sequence
  Oligonucleotide for detection of SNP TSC0045156
aaaaaataagaga

SEQ ID NO: 182730 - DNA, 13 bp, Artificial Sequence
  Oligonucleotide for detection of SNP TSC0045156
tctcttatttttt

SEQ ID NO: 182731 - DNA, 13 bp, Artificial Sequence
  Oligonucleotide for detection of SNP TSC0045157
aataagaataatt

SEQ ID NO: 182732 - DNA, 13 bp, Artificial Sequence
  Oligonucleotide for detection of SNP TSC0045157
aattattcttatt

SEQ ID NO: 182733 - DNA, 13 bp, Artificial Sequence
  Oligonucleotide for detection of SNP TSC0045157
aataagtataatt

SEQ ID NO: 182734 - DNA, 13 bp, Artificial Sequence
  Oligonucleotide for detection of SNP TSC0045157
aattatacttatt

SEQ ID NO: 182735 - DNA, 13 bp, Artificial Sequence
  Oligonucleotide for detection of SNP TSC0000374
tgtagataattta

SEQ ID NO: 182736 - DNA, 13 bp, Artificial Sequence
  Oligonucleotide for detection of SNP TSC0000374
taaattatctaca

SEQ ID NO: 182737 - DNA, 13 bp, Artificial Sequence
  Oligonucleotide for detection of SNP TSC0000374
tgtagagaattta

SEQ ID NO: 182738 - DNA, 13 bp, Artificial Sequence
  Oligonucleotide for detection of SNP TSC0000374
taaattctctaca

SEQ ID NO: 182739 - DNA, 13 bp, Artificial Sequence
  Oligonucleotide for detection of SNP TSC0000374
taggttttttata

SEQ ID NO: 182740 - DNA, 13 bp, Artificial Sequence
  Oligonucleotide for detection of SNP TSC0000374
tataaaaaaccta

SEQ ID NO: 182741 - DNA, 13 bp, Artificial Sequence
  Oligonucleotide for detection of SNP TSC0045159
tttattgtgatty

SEQ ID NO: 182742 - DNA, 13 bp, Artificial Sequence
  Oligonucleotide for detection of SNP TSC0045159
raatcacaataaa

SEQ ID NO: 182743 - DNA, 13 bp, Artificial Sequence
  Oligonucleotide for detection of SNP TSC0045159
tttatcgtgatty

SEQ ID NO: 182744 - DNA, 13 bp, Artificial Sequence
  Oligonucleotide for detection of SNP TSC0045159
raatcacgataaa

SEQ ID NO: 182745 - DNA, 13 bp, Artificial Sequence
  Oligonucleotide for detection of SNP TSC0045159
gaattatggtggg

SEQ ID NO: 182746 - DNA, 13 bp, Artificial Sequence
  Oligonucleotide for detection of SNP TSC0045159
cccaccataattc

SEQ ID NO: 182747 - DNA, 13 bp, Artificial Sequence
  Oligonucleotide for detection of SNP TSC0045159
gaattacggtggg

SEQ ID NO: 182748 - DNA, 13 bp, Artificial Sequence
  Oligonucleotide for detection of SNP TSC0045159
cccaccgtaattc

SEQ ID NO: 182749 - DNA, 13 bp, Artificial Sequence
  Oligonucleotide for detection of SNP TSC0045160
ttttaaaatattt

SEQ ID NO: 182750 - DNA, 13 bp, Artificial Sequence
  Oligonucleotide for detection of SNP TSC0045160
aaatattttaaaa

SEQ ID NO: 182751 - DNA, 13 bp, Artificial Sequence
  Oligonucleotide for detection of SNP TSC0045160
aagtgttttaaga

SEQ ID NO: 182752 - DNA, 13 bp, Artificial Sequence
  Oligonucleotide for detection of SNP TSC0045160
tcttaaaacactt

SEQ ID NO: 182753 - DNA, 13 bp, Artificial Sequence
  Oligonucleotide for detection of SNP TSC0045160
aagtgtgttaaga

SEQ ID NO: 182754 - DNA, 13 bp, Artificial Sequence
  Oligonucleotide for detection of SNP TSC0045160
tcttaacacactt

SEQ ID NO: 182755 - DNA, 13 bp, Artificial Sequence
  Oligonucleotide for detection of SNP TSC0045161
ggtttagttaaat

SEQ ID NO: 182756 - DNA, 13 bp, Artificial Sequence
  Oligonucleotide for detection of SNP TSC0045161
atttaactaaacc

SEQ ID NO: 182757 - DNA, 13 bp, Artificial Sequence
  Oligonucleotide for detection of SNP TSC0045161
ggtttaattaaat

SEQ ID NO: 182758 - DNA, 13 bp, Artificial Sequence
  Oligonucleotide for detection of SNP TSC0045161
atttaattaaacc

SEQ ID NO: 182759 - DNA, 13 bp, Artificial Sequence
  Oligonucleotide for detection of SNP TSC0045162
agaaaaaaaaaay

SEQ ID NO: 182760 - DNA, 13 bp, Artificial Sequence
  Oligonucleotide for detection of SNP TSC0045162
rttttttttttct

SEQ ID NO: 182761 - DNA, 13 bp, Artificial Sequence
  Oligonucleotide for detection of SNP TSC0045162
agaaaataaaaay

SEQ ID NO: 182762 - DNA, 13 bp, Artificial Sequence
  Oligonucleotide for detection of SNP TSC0045162
rtttttattttct

SEQ ID NO: 182763 - DNA, 13 bp, Artificial Sequence
  Oligonucleotide for detection of SNP TSC0045163
taagataatggtt

SEQ ID NO: 182764 - DNA, 13 bp, Artificial Sequence
  Oligonucleotide for detection of SNP TSC0045163
aaccattatctta

SEQ ID NO: 182765 - DNA, 13 bp, Artificial Sequence
  Oligonucleotide for detection of SNP TSC0045163
taagatgatggtt

SEQ ID NO: 182766 - DNA, 13 bp, Artificial Sequence
  Oligonucleotide for detection of SNP TSC0045163
aaccatcatctta

SEQ ID NO: 182767 - DNA, 13 bp, Artificial Sequence
  Oligonucleotide for detection of SNP TSC0045163
taagacgatggtt

SEQ ID NO: 182768 - DNA, 13 bp, Artificial Sequence
  Oligonucleotide for detection of SNP TSC0045163
aaccatcgtctta

SEQ ID NO: 182769 - DNA, 13 bp, Artificial Sequence
  Oligonucleotide for detection of SNP TSC0045163
agttatcgttttg

SEQ ID NO: 182770 - DNA, 13 bp, Artificial Sequence
  Oligonucleotide for detection of SNP TSC0045163
caaaacgataact

SEQ ID NO: 182771 - DNA, 13 bp, Artificial Sequence
  Oligonucleotide for detection of SNP TSC0045164
tttaggtttttty

SEQ ID NO: 182772 - DNA, 13 bp, Artificial Sequence
  Oligonucleotide for detection of SNP TSC0045164
raaaaaacctaaa

SEQ ID NO: 182773 - DNA, 13 bp, Artificial Sequence
  Oligonucleotide for detection of SNP TSC0045164
gaaggattttagg

SEQ ID NO: 182774 - DNA, 13 bp, Artificial Sequence
  Oligonucleotide for detection of SNP TSC0045164
cctaaaatccttc

SEQ ID NO: 182775 - DNA, 13 bp, Artificial Sequence
  Oligonucleotide for detection of SNP TSC0045164
gaaggaatttagg

SEQ ID NO: 182776 - DNA, 13 bp, Artificial Sequence
  Oligonucleotide for detection of SNP TSC0045164
cctaaattccttc

SEQ ID NO: 182777 - DNA, 13 bp, Artificial Sequence
  Oligonucleotide for detection of SNP TSC0045165
gtggagggagaat

SEQ ID NO: 182778 - DNA, 13 bp, Artificial Sequence
  Oligonucleotide for detection of SNP TSC0045165
attctccctccac

SEQ ID NO: 182779 - DNA, 13 bp, Artificial Sequence
  Oligonucleotide for detection of SNP TSC0045165
gtggagagagaat

SEQ ID NO: 182780 - DNA, 13 bp, Artificial Sequence
  Oligonucleotide for detection of SNP TSC0045165
attctctctccac

SEQ ID NO: 182781 - DNA, 13 bp, Artificial Sequence
  Oligonucleotide for detection of SNP TSC0045166
gtagagtgtagat

SEQ ID NO: 182782 - DNA, 13 bp, Artificial Sequence
  Oligonucleotide for detection of SNP TSC0045166
atctacactctac

SEQ ID NO: 182783 - DNA, 13 bp, Artificial Sequence
  Oligonucleotide for detection of SNP TSC0045166
gtagagcgtagat

SEQ ID NO: 182784 - DNA, 13 bp, Artificial Sequence
  Oligonucleotide for detection of SNP TSC0045166
atctacgctctac

SEQ ID NO: 182785 - DNA, 13 bp, Artificial Sequence
  Oligonucleotide for detection of SNP TSC0045166
atttgtattttay

SEQ ID NO: 182786 - DNA, 13 bp, Artificial Sequence
  Oligonucleotide for detection of SNP TSC0045166
rtaaaatacaaat

SEQ ID NO: 182787 - DNA, 13 bp, Artificial Sequence
  Oligonucleotide for detection of SNP TSC0045166
atttgcgttttay

SEQ ID NO: 182788 - DNA, 13 bp, Artificial Sequence
  Oligonucleotide for detection of SNP TSC0045166
rtaaaacgcaaat

SEQ ID NO: 182789 - DNA, 13 bp, Artificial Sequence
  Oligonucleotide for detection of SNP TSC0009311
gattataaagtgy

SEQ ID NO: 182790 - DNA, 13 bp, Artificial Sequence
  Oligonucleotide for detection of SNP TSC0009311
rcactttataatc

SEQ ID NO: 182791 - DNA, 13 bp, Artificial Sequence
  Oligonucleotide for detection of SNP TSC0009311
gattattaagtgy

SEQ ID NO: 182792 - DNA, 13 bp, Artificial Sequence
  Oligonucleotide for detection of SNP TSC0009311
rcacttaataatc

SEQ ID NO: 182793 - DNA, 13 bp, Artificial Sequence
  Oligonucleotide for detection of SNP TSC0009311
gtattttatgaty

SEQ ID NO: 182794 - DNA, 13 bp, Artificial Sequence
  Oligonucleotide for detection of SNP TSC0009311
ratcataaaatac

SEQ ID NO: 182795 - DNA, 13 bp, Artificial Sequence
  Oligonucleotide for detection of SNP TSC0009311
gtatttgatgaty

SEQ ID NO: 182796 - DNA, 13 bp, Artificial Sequence
  Oligonucleotide for detection of SNP TSC0009311
ratcatcaaatac

SEQ ID NO: 182797 - DNA, 13 bp, Artificial Sequence
  Oligonucleotide for detection of SNP TSC0008038
attaatatatgaa

SEQ ID NO: 182798 - DNA, 13 bp, Artificial Sequence
  Oligonucleotide for detection of SNP TSC0008038
ttcatatattaat

SEQ ID NO: 182799 - DNA, 13 bp, Artificial Sequence
  Oligonucleotide for detection of SNP TSC0008038
attaatgtatgaa

SEQ ID NO: 182800 - DNA, 13 bp, Artificial Sequence
  Oligonucleotide for detection of SNP TSC0008038
ttcatacattaat

SEQ ID NO: 182801 - DNA, 13 bp, Artificial Sequence
  Oligonucleotide for detection of SNP TSC0007960
ggggaatgagttg

SEQ ID NO: 182802 - DNA, 13 bp, Artificial Sequence
  Oligonucleotide for detection of SNP TSC0007960
caactcattcccc

SEQ ID NO: 182803 - DNA, 13 bp, Artificial Sequence
  Oligonucleotide for detection of SNP TSC0007960
ggggaacgagttg

SEQ ID NO: 182804 - DNA, 13 bp, Artificial Sequence
  Oligonucleotide for detection of SNP TSC0007960
caactcgttcccc

SEQ ID NO: 182805 - DNA, 13 bp, Artificial Sequence
  Oligonucleotide for detection of SNP TSC0007615
ggttttaatgtgt

SEQ ID NO: 182806 - DNA, 13 bp, Artificial Sequence
  Oligonucleotide for detection of SNP TSC0007615
acacattaaaacc

SEQ ID NO: 182807 - DNA, 13 bp, Artificial Sequence
  Oligonucleotide for detection of SNP TSC0007615
ggttttgatgtgt

SEQ ID NO: 182808 - DNA, 13 bp, Artificial Sequence
  Oligonucleotide for detection of SNP TSC0007615
acacatcaaaacc

SEQ ID NO: 182809 - DNA, 13 bp, Artificial Sequence
  Oligonucleotide for detection of SNP TSC0007615
ggtttcgatgtgt

SEQ ID NO: 182810 - DNA, 13 bp, Artificial Sequence
  Oligonucleotide for detection of SNP TSC0007615
acacatcgaaacc

SEQ ID NO: 182811 - DNA, 13 bp, Artificial Sequence
  Oligonucleotide for detection of SNP TSC0007615
atatattgagaty

SEQ ID NO: 182812 - DNA, 13 bp, Artificial Sequence
  Oligonucleotide for detection of SNP TSC0007615
ratctcaatatat

SEQ ID NO: 182813 - DNA, 13 bp, Artificial Sequence
  Oligonucleotide for detection of SNP TSC0007615
atatatcgagaty

SEQ ID NO: 182814 - DNA, 13 bp, Artificial Sequence
  Oligonucleotide for detection of SNP TSC0007615
ratctcgatatat

SEQ ID NO: 182815 - DNA, 13 bp, Artificial Sequence
  Oligonucleotide for detection of SNP TSC0045171
aatttatgggtty

SEQ ID NO: 182816 - DNA, 13 bp, Artificial Sequence
  Oligonucleotide for detection of SNP TSC0045171
raacccataaatt

SEQ ID NO: 182817 - DNA, 13 bp, Artificial Sequence
  Oligonucleotide for detection of SNP TSC0045171
aatttacgggtty

SEQ ID NO: 182818 - DNA, 13 bp, Artificial Sequence
  Oligonucleotide for detection of SNP TSC0045171
raacccgtaaatt

SEQ ID NO: 182819 - DNA, 13 bp, Artificial Sequence
  Oligonucleotide for detection of SNP TSC0045171
gagtttgtgagtt

SEQ ID NO: 182820 - DNA, 13 bp, Artificial Sequence
  Oligonucleotide for detection of SNP TSC0045171
aactcacaaactc

SEQ ID NO: 182821 - DNA, 13 bp, Artificial Sequence
  Oligonucleotide for detection of SNP TSC0045171
gagtttatgagtt

SEQ ID NO: 182822 - DNA, 13 bp, Artificial Sequence
  Oligonucleotide for detection of SNP TSC0045171
aactcataaactc

SEQ ID NO: 182823 - DNA, 13 bp, Artificial Sequence
  Oligonucleotide for detection of SNP TSC0045171
gagttcgtgagtt

SEQ ID NO: 182824 - DNA, 13 bp, Artificial Sequence
  Oligonucleotide for detection of SNP TSC0045171
aactcacgaactc

SEQ ID NO: 182825 - DNA, 13 bp, Artificial Sequence
  Oligonucleotide for detection of SNP TSC0045172
tttttataaaaat

SEQ ID NO: 182826 - DNA, 13 bp, Artificial Sequence
  Oligonucleotide for detection of SNP TSC0045172
atttttataaaaa

SEQ ID NO: 182827 - DNA, 13 bp, Artificial Sequence
  Oligonucleotide for detection of SNP TSC0045172
atttttttagaga

SEQ ID NO: 182828 - DNA, 13 bp, Artificial Sequence
  Oligonucleotide for detection of SNP TSC0045172
tctctaaaaaaat

SEQ ID NO: 182829 - DNA, 13 bp, Artificial Sequence
  Oligonucleotide for detection of SNP TSC0045175
attgttgatgtta

SEQ ID NO: 182830 - DNA, 13 bp, Artificial Sequence
  Oligonucleotide for detection of SNP TSC0045175
taacatcaacaat

SEQ ID NO: 182831 - DNA, 13 bp, Artificial Sequence
  Oligonucleotide for detection of SNP TSC0045175
attgttaatgtta

SEQ ID NO: 182832 - DNA, 13 bp, Artificial Sequence
  Oligonucleotide for detection of SNP TSC0045175
taacattaacaat

SEQ ID NO: 182833 - DNA, 13 bp, Artificial Sequence
  Oligonucleotide for detection of SNP TSC0045177
ggggatgtttgag

SEQ ID NO: 182834 - DNA, 13 bp, Artificial Sequence
  Oligonucleotide for detection of SNP TSC0045177
ctcaaacatcccc

SEQ ID NO: 182835 - DNA, 13 bp, Artificial Sequence
  Oligonucleotide for detection of SNP TSC0045177
ggggatatttgag

SEQ ID NO: 182836 - DNA, 13 bp, Artificial Sequence
  Oligonucleotide for detection of SNP TSC0045177
ctcaaatatcccc

SEQ ID NO: 182837 - DNA, 13 bp, Artificial Sequence
  Oligonucleotide for detection of SNP TSC0045179
ttttgtagttaaa

SEQ ID NO: 182838 - DNA, 13 bp, Artificial Sequence
  Oligonucleotide for detection of SNP TSC0045179
tttaactacaaaa

SEQ ID NO: 182839 - DNA, 13 bp, Artificial Sequence
  Oligonucleotide for detection of SNP TSC0045179
ttttgttgttaaa

SEQ ID NO: 182840 - DNA, 13 bp, Artificial Sequence
  Oligonucleotide for detection of SNP TSC0045179
tttaacaacaaaa

SEQ ID NO: 182841 - DNA, 13 bp, Artificial Sequence
  Oligonucleotide for detection of SNP TSC0045179
ttttgtcgttaaa

SEQ ID NO: 182842 - DNA, 13 bp, Artificial Sequence
  Oligonucleotide for detection of SNP TSC0045179
tttaacgacaaaa

SEQ ID NO: 182843 - DNA, 13 bp, Artificial Sequence
  Oligonucleotide for detection of SNP TSC0045179
tttaatgataaaa

SEQ ID NO: 182844 - DNA, 13 bp, Artificial Sequence
  Oligonucleotide for detection of SNP TSC0045179
ttttatcattaaa

SEQ ID NO: 182845 - DNA, 13 bp, Artificial Sequence
  Oligonucleotide for detection of SNP TSC0045179
tttaacgataaaa

SEQ ID NO: 182846 - DNA, 13 bp, Artificial Sequence
  Oligonucleotide for detection of SNP TSC0045179
ttttatcgttaaa

SEQ ID NO: 182847 - DNA, 13 bp, Artificial Sequence
  Oligonucleotide for detection of SNP TSC0045180
atttgaaatatag

SEQ ID NO: 182848 - DNA, 13 bp, Artificial Sequence
  Oligonucleotide for detection of SNP TSC0045180
ctatatttcaaat

SEQ ID NO: 182849 - DNA, 13 bp, Artificial Sequence
  Oligonucleotide for detection of SNP TSC0045180
atttgagatatag

SEQ ID NO: 182850 - DNA, 13 bp, Artificial Sequence
  Oligonucleotide for detection of SNP TSC0045180
ctatatctcaaat

SEQ ID NO: 182851 - DNA, 13 bp, Artificial Sequence
  Oligonucleotide for detection of SNP TSC0045181
taatacgattttt

SEQ ID NO: 182852 - DNA, 13 bp, Artificial Sequence
  Oligonucleotide for detection of SNP TSC0045181
aaaaatcgtatta

SEQ ID NO: 182853 - DNA, 13 bp, Artificial Sequence
  Oligonucleotide for detection of SNP TSC0045181
aagaattgtgttg

SEQ ID NO: 182854 - DNA, 13 bp, Artificial Sequence
  Oligonucleotide for detection of SNP TSC0045181
caacacaattctt

SEQ ID NO: 182855 - DNA, 13 bp, Artificial Sequence
  Oligonucleotide for detection of SNP TSC0045181
aagaatcgtgttg

SEQ ID NO: 182856 - DNA, 13 bp, Artificial Sequence
  Oligonucleotide for detection of SNP TSC0045181
caacacgattctt

SEQ ID NO: 182857 - DNA, 13 bp, Artificial Sequence
  Oligonucleotide for detection of SNP TSC0045187
ttatgtagttaty

SEQ ID NO: 182858 - DNA, 13 bp, Artificial Sequence
  Oligonucleotide for detection of SNP TSC0045187
rataactacataa

SEQ ID NO: 182859 - DNA, 13 bp, Artificial Sequence
  Oligonucleotide for detection of SNP TSC0045187
gatgattgtatga

SEQ ID NO: 182860 - DNA, 13 bp, Artificial Sequence
  Oligonucleotide for detection of SNP TSC0045187
tcatacaatcatc

SEQ ID NO: 182861 - DNA, 13 bp, Artificial Sequence
  Oligonucleotide for detection of SNP TSC0045187
gatgatagtatga

SEQ ID NO: 182862 - DNA, 13 bp, Artificial Sequence
  Oligonucleotide for detection of SNP TSC0045187
tcatactatcatc

SEQ ID NO: 182863 - DNA, 13 bp, Artificial Sequence
  Oligonucleotide for detection of SNP TSC0045188
tatattttatgat

SEQ ID NO: 182864 - DNA, 13 bp, Artificial Sequence
  Oligonucleotide for detection of SNP TSC0045188
atcataaaatata

SEQ ID NO: 182865 - DNA, 13 bp, Artificial Sequence
  Oligonucleotide for detection of SNP TSC0045188
tatattgtatgat

SEQ ID NO: 182866 - DNA, 13 bp, Artificial Sequence
  Oligonucleotide for detection of SNP TSC0045188
atcatacaatata

SEQ ID NO: 182867 - DNA, 13 bp, Artificial Sequence
  Oligonucleotide for detection of SNP TSC0045188
tatatcgtatgat

SEQ ID NO: 182868 - DNA, 13 bp, Artificial Sequence
  Oligonucleotide for detection of SNP TSC0045188
atcatacgatata

SEQ ID NO: 182869 - DNA, 13 bp, Artificial Sequence
  Oligonucleotide for detection of SNP TSC0045188
attatgagatata

SEQ ID NO: 182870 - DNA, 13 bp, Artificial Sequence
  Oligonucleotide for detection of SNP TSC0045188
tatatctcataat

SEQ ID NO: 182871 - DNA, 13 bp, Artificial Sequence
  Oligonucleotide for detection of SNP TSC0045188
attatgtgatata

SEQ ID NO: 182872 - DNA, 13 bp, Artificial Sequence
  Oligonucleotide for detection of SNP TSC0045188
tatatcacataat

SEQ ID NO: 182873 - DNA, 13 bp, Artificial Sequence
  Oligonucleotide for detection of SNP TSC0045188
attatgcgatata

SEQ ID NO: 182874 - DNA, 13 bp, Artificial Sequence
  Oligonucleotide for detection of SNP TSC0045188
tatatcgcataat

SEQ ID NO: 182875 - DNA, 13 bp, Artificial Sequence
  Oligonucleotide for detection of SNP TSC0045189
ggtggaaaatgag

SEQ ID NO: 182876 - DNA, 13 bp, Artificial Sequence
  Oligonucleotide for detection of SNP TSC0045189
ctcattttccacc

SEQ ID NO: 182877 - DNA, 13 bp, Artificial Sequence
  Oligonucleotide for detection of SNP TSC0045189
ggtggataatgag

SEQ ID NO: 182878 - DNA, 13 bp, Artificial Sequence
  Oligonucleotide for detection of SNP TSC0045189
ctcattatccacc

SEQ ID NO: 182879 - DNA, 13 bp, Artificial Sequence
  Oligonucleotide for detection of SNP TSC0045190
agtgattgggttg

SEQ ID NO: 182880 - DNA, 13 bp, Artificial Sequence
  Oligonucleotide for detection of SNP TSC0045190
caacccaatcact

SEQ ID NO: 182881 - DNA, 13 bp, Artificial Sequence
  Oligonucleotide for detection of SNP TSC0045190
agtgatggggttg

SEQ ID NO: 182882 - DNA, 13 bp, Artificial Sequence
  Oligonucleotide for detection of SNP TSC0045190
caaccccatcact

SEQ ID NO: 182883 - DNA, 13 bp, Artificial Sequence
  Oligonucleotide for detection of SNP TSC0045190
agtgatcgggttg

SEQ ID NO: 182884 - DNA, 13 bp, Artificial Sequence
  Oligonucleotide for detection of SNP TSC0045190
caacccgatcact

SEQ ID NO: 182885 - DNA, 13 bp, Artificial Sequence
  Oligonucleotide for detection of SNP TSC0045190
agtgacggggttg

SEQ ID NO: 182886 - DNA, 13 bp, Artificial Sequence
  Oligonucleotide for detection of SNP TSC0045190
caaccccgtcact

SEQ ID NO: 182887 - DNA, 13 bp, Artificial Sequence
  Oligonucleotide for detection of SNP TSC0045191
tttatatggtaty

SEQ ID NO: 182888 - DNA, 13 bp, Artificial Sequence
  Oligonucleotide for detection of SNP TSC0045191
rataccatataaa

SEQ ID NO: 182889 - DNA, 13 bp, Artificial Sequence
  Oligonucleotide for detection of SNP TSC0045191
tttatagggtaty

SEQ ID NO: 182890 - DNA, 13 bp, Artificial Sequence
  Oligonucleotide for detection of SNP TSC0045191
rataccctataaa

SEQ ID NO: 182891 - DNA, 13 bp, Artificial Sequence
  Oligonucleotide for detection of SNP TSC0045191
gatgttatgtgga

SEQ ID NO: 182892 - DNA, 13 bp, Artificial Sequence
  Oligonucleotide for detection of SNP TSC0045191
tccacataacatc

SEQ ID NO: 182893 - DNA, 13 bp, Artificial Sequence
  Oligonucleotide for detection of SNP TSC0045191
gatgttttgtgga

SEQ ID NO: 182894 - DNA, 13 bp, Artificial Sequence
  Oligonucleotide for detection of SNP TSC0045191
tccacaaaacatc

SEQ ID NO: 182895 - DNA, 13 bp, Artificial Sequence
  Oligonucleotide for detection of SNP TSC0000547
tggtttttgggta

SEQ ID NO: 182896 - DNA, 13 bp, Artificial Sequence
  Oligonucleotide for detection of SNP TSC0000547
tacccaaaaacca

SEQ ID NO: 182897 - DNA, 13 bp, Artificial Sequence
  Oligonucleotide for detection of SNP TSC0000547
tggtttgtgggta

SEQ ID NO: 182898 - DNA, 13 bp, Artificial Sequence
  Oligonucleotide for detection of SNP TSC0000547
tacccacaaacca

SEQ ID NO: 182899 - DNA, 13 bp, Artificial Sequence
  Oligonucleotide for detection of SNP TSC0000547
tatttaaaaatta

SEQ ID NO: 182900 - DNA, 13 bp, Artificial Sequence
  Oligonucleotide for detection of SNP TSC0000547
taatttttaaata

SEQ ID NO: 182901 - DNA, 13 bp, Artificial Sequence
  Oligonucleotide for detection of SNP TSC0000547
tatttataaatta

SEQ ID NO: 182902 - DNA, 13 bp, Artificial Sequence
  Oligonucleotide for detection of SNP TSC0000547
taatttataaata

SEQ ID NO: 182903 - DNA, 13 bp, Artificial Sequence
  Oligonucleotide for detection of SNP TSC0000548
tggaagtttatag

SEQ ID NO: 182904 - DNA, 13 bp, Artificial Sequence
  Oligonucleotide for detection of SNP TSC0000548
ctataaacttcca

SEQ ID NO: 182905 - DNA, 13 bp, Artificial Sequence
  Oligonucleotide for detection of SNP TSC0000548
tggaaggttatag

SEQ ID NO: 182906 - DNA, 13 bp, Artificial Sequence
  Oligonucleotide for detection of SNP TSC0000548
ctataaccttcca

SEQ ID NO: 182907 - DNA, 13 bp, Artificial Sequence
  Oligonucleotide for detection of SNP TSC0000548
ttgtaggttttta

SEQ ID NO: 182908 - DNA, 13 bp, Artificial Sequence
  Oligonucleotide for detection of SNP TSC0000548
taaaaacctacaa

SEQ ID NO: 182909 - DNA, 13 bp, Artificial Sequence
  Oligonucleotide for detection of SNP TSC0000548
ttgtagtttttta

SEQ ID NO: 182910 - DNA, 13 bp, Artificial Sequence
  Oligonucleotide for detection of SNP TSC0000548
taaaaaactacaa

SEQ ID NO: 182911 - DNA, 13 bp, Artificial Sequence
  Oligonucleotide for detection of SNP TSC0045192
ataagtagtaaay

SEQ ID NO: 182912 - DNA, 13 bp, Artificial Sequence
  Oligonucleotide for detection of SNP TSC0045192
rtttactacttat

SEQ ID NO: 182913 - DNA, 13 bp, Artificial Sequence
  Oligonucleotide for detection of SNP TSC0045192
ataagtggtaaay

SEQ ID NO: 182914 - DNA, 13 bp, Artificial Sequence
  Oligonucleotide for detection of SNP TSC0045192
rtttaccacttat

SEQ ID NO: 182915 - DNA, 13 bp, Artificial Sequence
  Oligonucleotide for detection of SNP TSC0045193
ttgtatatgtagg

SEQ ID NO: 182916 - DNA, 13 bp, Artificial Sequence
  Oligonucleotide for detection of SNP TSC0045193
cctacatatacaa

SEQ ID NO: 182917 - DNA, 13 bp, Artificial Sequence
  Oligonucleotide for detection of SNP TSC0045193
ttgtatttgtagg

SEQ ID NO: 182918 - DNA, 13 bp, Artificial Sequence
  Oligonucleotide for detection of SNP TSC0045193
cctacaaatacaa

SEQ ID NO: 182919 - DNA, 13 bp, Artificial Sequence
  Oligonucleotide for detection of SNP TSC0045193
tttataggtatag

SEQ ID NO: 182920 - DNA, 13 bp, Artificial Sequence
  Oligonucleotide for detection of SNP TSC0045193
ctatacctataaa

SEQ ID NO: 182921 - DNA, 13 bp, Artificial Sequence
  Oligonucleotide for detection of SNP TSC0045194
ttagttggagtta

SEQ ID NO: 182922 - DNA, 13 bp, Artificial Sequence
  Oligonucleotide for detection of SNP TSC0045194
taactccaactaa

SEQ ID NO: 182923 - DNA, 13 bp, Artificial Sequence
  Oligonucleotide for detection of SNP TSC0045194
ttagttagagtta

SEQ ID NO: 182924 - DNA, 13 bp, Artificial Sequence
  Oligonucleotide for detection of SNP TSC0045194
taactctaactaa

SEQ ID NO: 182925 - DNA, 13 bp, Artificial Sequence
  Oligonucleotide for detection of SNP TSC0045195
tatatgataaaay

SEQ ID NO: 182926 - DNA, 13 bp, Artificial Sequence
  Oligonucleotide for detection of SNP TSC0045195
rttttatcatata

SEQ ID NO: 182927 - DNA, 13 bp, Artificial Sequence
  Oligonucleotide for detection of SNP TSC0045195
tatatggtaaaay

SEQ ID NO: 182928 - DNA, 13 bp, Artificial Sequence
  Oligonucleotide for detection of SNP TSC0045195
rttttaccatata

SEQ ID NO: 182929 - DNA, 13 bp, Artificial Sequence
  Oligonucleotide for detection of SNP TSC0045196
ttttttatggagg

SEQ ID NO: 182930 - DNA, 13 bp, Artificial Sequence
  Oligonucleotide for detection of SNP TSC0045196
cctccataaaaaa

SEQ ID NO: 182931 - DNA, 13 bp, Artificial Sequence
  Oligonucleotide for detection of SNP TSC0045196
ttttttgtggagg

SEQ ID NO: 182932 - DNA, 13 bp, Artificial Sequence
  Oligonucleotide for detection of SNP TSC0045196
cctccacaaaaaa

SEQ ID NO: 182933 - DNA, 13 bp, Artificial Sequence
  Oligonucleotide for detection of SNP TSC0045196
tttttcgtggagg

SEQ ID NO: 182934 - DNA, 13 bp, Artificial Sequence
  Oligonucleotide for detection of SNP TSC0045196
cctccacgaaaaa

SEQ ID NO: 182935 - DNA, 13 bp, Artificial Sequence
  Oligonucleotide for detection of SNP TSC0045196
tttttatgggaag

SEQ ID NO: 182936 - DNA, 13 bp, Artificial Sequence
  Oligonucleotide for detection of SNP TSC0045196
cttcccataaaaa

SEQ ID NO: 182937 - DNA, 13 bp, Artificial Sequence
  Oligonucleotide for detection of SNP TSC0045196
tttttacgggaag

SEQ ID NO: 182938 - DNA, 13 bp, Artificial Sequence
  Oligonucleotide for detection of SNP TSC0045196
cttcccgtaaaaa

SEQ ID NO: 182939 - DNA, 13 bp, Artificial Sequence
  Oligonucleotide for detection of SNP TSC0045197
gggatttgaggga

SEQ ID NO: 182940 - DNA, 13 bp, Artificial Sequence
  Oligonucleotide for detection of SNP TSC0045197
tccctcaaatccc

SEQ ID NO: 182941 - DNA, 13 bp, Artificial Sequence
  Oligonucleotide for detection of SNP TSC0045197
gggattcgaggga

SEQ ID NO: 182942 - DNA, 13 bp, Artificial Sequence
  Oligonucleotide for detection of SNP TSC0045197
tccctcgaatccc

SEQ ID NO: 182943 - DNA, 13 bp, Artificial Sequence
  Oligonucleotide for detection of SNP TSC0045197
tttttcgagttty

SEQ ID NO: 182944 - DNA, 13 bp, Artificial Sequence
  Oligonucleotide for detection of SNP TSC0045197
raaactcgaaaaa

SEQ ID NO: 182945 - DNA, 13 bp, Artificial Sequence
  Oligonucleotide for detection of SNP TSC0045198
tgttaatgtttta

SEQ ID NO: 182946 - DNA, 13 bp, Artificial Sequence
  Oligonucleotide for detection of SNP TSC0045198
taaaacattaaca

SEQ ID NO: 182947 - DNA, 13 bp, Artificial Sequence
  Oligonucleotide for detection of SNP TSC0045198
tgttaaggtttta

SEQ ID NO: 182948 - DNA, 13 bp, Artificial Sequence
  Oligonucleotide for detection of SNP TSC0045198
taaaaccttaaca

SEQ ID NO: 182949 - DNA, 13 bp, Artificial Sequence
  Oligonucleotide for detection of SNP TSC0045198
tggaatattggta

SEQ ID NO: 182950 - DNA, 13 bp, Artificial Sequence
  Oligonucleotide for detection of SNP TSC0045198
taccaatattcca

SEQ ID NO: 182951 - DNA, 13 bp, Artificial Sequence
  Oligonucleotide for detection of SNP TSC0045198
tggaattttggta

SEQ ID NO: 182952 - DNA, 13 bp, Artificial Sequence
  Oligonucleotide for detection of SNP TSC0045198
taccaaaattcca

SEQ ID NO: 182953 - DNA, 13 bp, Artificial Sequence
  Oligonucleotide for detection of SNP TSC0045199
aggtatattgtty

SEQ ID NO: 182954 - DNA, 13 bp, Artificial Sequence
  Oligonucleotide for detection of SNP TSC0045199
raacaatatacct

SEQ ID NO: 182955 - DNA, 13 bp, Artificial Sequence
  Oligonucleotide for detection of SNP TSC0045199
aggtatgttgtty

SEQ ID NO: 182956 - DNA, 13 bp, Artificial Sequence
  Oligonucleotide for detection of SNP TSC0045199
raacaacatacct

SEQ ID NO: 182957 - DNA, 13 bp, Artificial Sequence
  Oligonucleotide for detection of SNP TSC0045200
tttgggatttgat

SEQ ID NO: 182958 - DNA, 13 bp, Artificial Sequence
  Oligonucleotide for detection of SNP TSC0045200
atcaaatcccaaa

SEQ ID NO: 182959 - DNA, 13 bp, Artificial Sequence
  Oligonucleotide for detection of SNP TSC0045200
tttgggttttgat

SEQ ID NO: 182960 - DNA, 13 bp, Artificial Sequence
  Oligonucleotide for detection of SNP TSC0045200
atcaaaacccaaa

SEQ ID NO: 182961 - DNA, 13 bp, Artificial Sequence
  Oligonucleotide for detection of SNP TSC0045200
attaggttttagg

SEQ ID NO: 182962 - DNA, 13 bp, Artificial Sequence
  Oligonucleotide for detection of SNP TSC0045200
cctaaaacctaat

SEQ ID NO: 182963 - DNA, 13 bp, Artificial Sequence
  Oligonucleotide for detection of SNP TSC0045200
attaggatttagg

SEQ ID NO: 182964 - DNA, 13 bp, Artificial Sequence
  Oligonucleotide for detection of SNP TSC0045200
cctaaatcctaat

SEQ ID NO: 182965 - DNA, 13 bp, Artificial Sequence
  Oligonucleotide for detection of SNP TSC0010372
tgttaaatttttt

SEQ ID NO: 182966 - DNA, 13 bp, Artificial Sequence
  Oligonucleotide for detection of SNP TSC0010372
aaaaaatttaaca

SEQ ID NO: 182967 - DNA, 13 bp, Artificial Sequence
  Oligonucleotide for detection of SNP TSC0010372
tgttaattttttt

SEQ ID NO: 182968 - DNA, 13 bp, Artificial Sequence
  Oligonucleotide for detection of SNP TSC0010372
aaaaaaattaaca

SEQ ID NO: 182969 - DNA, 13 bp, Artificial Sequence
  Oligonucleotide for detection of SNP TSC0010372
aaaaagtttggta

SEQ ID NO: 182970 - DNA, 13 bp, Artificial Sequence
  Oligonucleotide for detection of SNP TSC0010372
taccaaacttttt

SEQ ID NO: 182971 - DNA, 13 bp, Artificial Sequence
  Oligonucleotide for detection of SNP TSC0010372
aaaaaggttggta

SEQ ID NO: 182972 - DNA, 13 bp, Artificial Sequence
  Oligonucleotide for detection of SNP TSC0010372
taccaaccttttt

SEQ ID NO: 182973 - DNA, 13 bp, Artificial Sequence
  Oligonucleotide for detection of SNP TSC0045203
ttattaagtattt

SEQ ID NO: 182974 - DNA, 13 bp, Artificial Sequence
  Oligonucleotide for detection of SNP TSC0045203
aaatacttaataa

SEQ ID NO: 182975 - DNA, 13 bp, Artificial Sequence
  Oligonucleotide for detection of SNP TSC0045203
ttattaggtattt

SEQ ID NO: 182976 - DNA, 13 bp, Artificial Sequence
  Oligonucleotide for detection of SNP TSC0045203
aaatacctaataa

SEQ ID NO: 182977 - DNA, 13 bp, Artificial Sequence
  Oligonucleotide for detection of SNP TSC0000505
aggtgtggtggta

SEQ ID NO: 182978 - DNA, 13 bp, Artificial Sequence
  Oligonucleotide for detection of SNP TSC0000505
taccaccacacct

SEQ ID NO: 182979 - DNA, 13 bp, Artificial Sequence
  Oligonucleotide for detection of SNP TSC0000505
aggtgtagtggta

SEQ ID NO: 182980 - DNA, 13 bp, Artificial Sequence
  Oligonucleotide for detection of SNP TSC0000505
taccactacacct

SEQ ID NO: 182981 - DNA, 13 bp, Artificial Sequence
  Oligonucleotide for detection of SNP TSC0000505
aggcgtggtggta

SEQ ID NO: 182982 - DNA, 13 bp, Artificial Sequence
  Oligonucleotide for detection of SNP TSC0000505
taccaccacgcct

SEQ ID NO: 182983 - DNA, 13 bp, Artificial Sequence
  Oligonucleotide for detection of SNP TSC0000505
aggcgtagtggta

SEQ ID NO: 182984 - DNA, 13 bp, Artificial Sequence
  Oligonucleotide for detection of SNP TSC0000505
taccactacgcct

SEQ ID NO: 182985 - DNA, 13 bp, Artificial Sequence
  Oligonucleotide for detection of SNP TSC0045204
tttataggttaty

SEQ ID NO: 182986 - DNA, 13 bp, Artificial Sequence
  Oligonucleotide for detection of SNP TSC0045204
rataacctataaa

SEQ ID NO: 182987 - DNA, 13 bp, Artificial Sequence
  Oligonucleotide for detection of SNP TSC0045204
tttataagttaty

SEQ ID NO: 182988 - DNA, 13 bp, Artificial Sequence
  Oligonucleotide for detection of SNP TSC0045204
rataacttataaa

SEQ ID NO: 182989 - DNA, 13 bp, Artificial Sequence
  Oligonucleotide for detection of SNP TSC0045205
gttcgtatgatty

SEQ ID NO: 182990 - DNA, 13 bp, Artificial Sequence
  Oligonucleotide for detection of SNP TSC0045205
raatcatacgaac

SEQ ID NO: 182991 - DNA, 13 bp, Artificial Sequence
  Oligonucleotide for detection of SNP TSC0045205
gttcgtgtgatty

SEQ ID NO: 182992 - DNA, 13 bp, Artificial Sequence
  Oligonucleotide for detection of SNP TSC0045205
raatcacacgaac

SEQ ID NO: 182993 - DNA, 13 bp, Artificial Sequence
  Oligonucleotide for detection of SNP TSC0045205
gttcgcgtgatty

SEQ ID NO: 182994 - DNA, 13 bp, Artificial Sequence
  Oligonucleotide for detection of SNP TSC0045205
raatcacgcgaac

SEQ ID NO: 182995 - DNA, 13 bp, Artificial Sequence
  Oligonucleotide for detection of SNP TSC0045205
ggattatgtgggy

SEQ ID NO: 182996 - DNA, 13 bp, Artificial Sequence
  Oligonucleotide for detection of SNP TSC0045205
rcccacataatcc

SEQ ID NO: 182997 - DNA, 13 bp, Artificial Sequence
  Oligonucleotide for detection of SNP TSC0045205
ggattatgcgggy

SEQ ID NO: 182998 - DNA, 13 bp, Artificial Sequence
  Oligonucleotide for detection of SNP TSC0045205
rcccgcataatcc

SEQ ID NO: 182999 - DNA, 13 bp, Artificial Sequence
  Oligonucleotide for detection of SNP TSC0045205
ggattacgtgggy

SEQ ID NO: 183000 - DNA, 13 bp, Artificial Sequence
  Oligonucleotide for detection of SNP TSC0045205
rcccacgtaatcc

SEQ ID NO: 183001 - DNA, 13 bp, Artificial Sequence
  Oligonucleotide for detection of SNP TSC0045205
ggattacgcgggy

SEQ ID NO: 183002 - DNA, 13 bp, Artificial Sequence
  Oligonucleotide for detection of SNP TSC0045205
rcccgcgtaatcc

SEQ ID NO: 183003 - DNA, 13 bp, Artificial Sequence
  Oligonucleotide for detection of SNP TSC0045206
atttggataggaa

SEQ ID NO: 183004 - DNA, 13 bp, Artificial Sequence
  Oligonucleotide for detection of SNP TSC0045206
ttcctatccaaat

SEQ ID NO: 183005 - DNA, 13 bp, Artificial Sequence
  Oligonucleotide for detection of SNP TSC0045206
atttgggtaggaa

SEQ ID NO: 183006 - DNA, 13 bp, Artificial Sequence
  Oligonucleotide for detection of SNP TSC0045206
ttcctacccaaat

SEQ ID NO: 183007 - DNA, 13 bp, Artificial Sequence
  Oligonucleotide for detection of SNP TSC0045207
gttttattattta

SEQ ID NO: 183008 - DNA, 13 bp, Artificial Sequence
  Oligonucleotide for detection of SNP TSC0045207
taaataataaaac

SEQ ID NO: 183009 - DNA, 13 bp, Artificial Sequence
  Oligonucleotide for detection of SNP TSC0045207
taagtagtggagy

SEQ ID NO: 183010 - DNA, 13 bp, Artificial Sequence
  Oligonucleotide for detection of SNP TSC0045207
rctccactactta

SEQ ID NO: 183011 - DNA, 13 bp, Artificial Sequence
  Oligonucleotide for detection of SNP TSC0045207
taagtattggagy

SEQ ID NO: 183012 - DNA, 13 bp, Artificial Sequence
  Oligonucleotide for detection of SNP TSC0045207
rctccaatactta

SEQ ID NO: 183013 - DNA, 13 bp, Artificial Sequence
  Oligonucleotide for detection of SNP TSC0045208
tagttagtaagta

SEQ ID NO: 183014 - DNA, 13 bp, Artificial Sequence
  Oligonucleotide for detection of SNP TSC0045208
tacttactaacta

SEQ ID NO: 183015 - DNA, 13 bp, Artificial Sequence
  Oligonucleotide for detection of SNP TSC0045208
tagttaataagta

SEQ ID NO: 183016 - DNA, 13 bp, Artificial Sequence
  Oligonucleotide for detection of SNP TSC0045208
tacttattaacta

SEQ ID NO: 183017 - DNA, 13 bp, Artificial Sequence
  Oligonucleotide for detection of SNP TSC0045209
ttaatatgtgata

SEQ ID NO: 183018 - DNA, 13 bp, Artificial Sequence
  Oligonucleotide for detection of SNP TSC0045209
tatcacatattaa

SEQ ID NO: 183019 - DNA, 13 bp, Artificial Sequence
  Oligonucleotide for detection of SNP TSC0045209
ttaatacgtgata

SEQ ID NO: 183020 - DNA, 13 bp, Artificial Sequence
  Oligonucleotide for detection of SNP TSC0045209
tatcacgtattaa

SEQ ID NO: 183021 - DNA, 13 bp, Artificial Sequence
  Oligonucleotide for detection of SNP TSC0045209
tgttatgtattaa

SEQ ID NO: 183022 - DNA, 13 bp, Artificial Sequence
  Oligonucleotide for detection of SNP TSC0045209
ttaatacataaca

SEQ ID NO: 183023 - DNA, 13 bp, Artificial Sequence
  Oligonucleotide for detection of SNP TSC0045209
tgttatatattaa

SEQ ID NO: 183024 - DNA, 13 bp, Artificial Sequence
  Oligonucleotide for detection of SNP TSC0045209
ttaatatataaca

SEQ ID NO: 183025 - DNA, 13 bp, Artificial Sequence
  Oligonucleotide for detection of SNP TSC0045209
tgttacgtattaa

SEQ ID NO: 183026 - DNA, 13 bp, Artificial Sequence
  Oligonucleotide for detection of SNP TSC0045209
ttaatacgtaaca

SEQ ID NO: 183027 - DNA, 13 bp, Artificial Sequence
  Oligonucleotide for detection of SNP TSC0045210
aaaaaatgggtaa

SEQ ID NO: 183028 - DNA, 13 bp, Artificial Sequence
  Oligonucleotide for detection of SNP TSC0045210
ttacccatttttt

SEQ ID NO: 183029 - DNA, 13 bp, Artificial Sequence
  Oligonucleotide for detection of SNP TSC0045210
aaaaaacgggtaa

SEQ ID NO: 183030 - DNA, 13 bp, Artificial Sequence
  Oligonucleotide for detection of SNP TSC0045210
ttacccgtttttt

SEQ ID NO: 183031 - DNA, 13 bp, Artificial Sequence
  Oligonucleotide for detection of SNP TSC0045211
gatattaatttta

SEQ ID NO: 183032 - DNA, 13 bp, Artificial Sequence
  Oligonucleotide for detection of SNP TSC0045211
taaaattaatatc

SEQ ID NO: 183033 - DNA, 13 bp, Artificial Sequence
  Oligonucleotide for detection of SNP TSC0045211
gatattgatttta

SEQ ID NO: 183034 - DNA, 13 bp, Artificial Sequence
  Oligonucleotide for detection of SNP TSC0045211
taaaatcaatatc

SEQ ID NO: 183035 - DNA, 13 bp, Artificial Sequence
  Oligonucleotide for detection of SNP TSC0000630
agaagtatttaga

SEQ ID NO: 183036 - DNA, 13 bp, Artificial Sequence
  Oligonucleotide for detection of SNP TSC0000630
tctaaatacttct

SEQ ID NO: 183037 - DNA, 13 bp, Artificial Sequence
  Oligonucleotide for detection of SNP TSC0000630
agaagtgtttaga

SEQ ID NO: 183038 - DNA, 13 bp, Artificial Sequence
  Oligonucleotide for detection of SNP TSC0000630
tctaaacacttct

SEQ ID NO: 183039 - DNA, 13 bp, Artificial Sequence
  Oligonucleotide for detection of SNP TSC0000630
agaagcgtttaga

SEQ ID NO: 183040 - DNA, 13 bp, Artificial Sequence
  Oligonucleotide for detection of SNP TSC0000630
tctaaacgcttct

SEQ ID NO: 183041 - DNA, 13 bp, Artificial Sequence
  Oligonucleotide for detection of SNP TSC0000630
tttgaatgttttt

SEQ ID NO: 183042 - DNA, 13 bp, Artificial Sequence
  Oligonucleotide for detection of SNP TSC0000630
aaaaacattcaaa

SEQ ID NO: 183043 - DNA, 13 bp, Artificial Sequence
  Oligonucleotide for detection of SNP TSC0000630
tttgaacgttttt

SEQ ID NO: 183044 - DNA, 13 bp, Artificial Sequence
  Oligonucleotide for detection of SNP TSC0000630
aaaaacgttcaaa

SEQ ID NO: 183045 - DNA, 13 bp, Artificial Sequence
  Oligonucleotide for detection of SNP TSC0000631
gattataataagg

SEQ ID NO: 183046 - DNA, 13 bp, Artificial Sequence
  Oligonucleotide for detection of SNP TSC0000631
ccttattataatc

SEQ ID NO: 183047 - DNA, 13 bp, Artificial Sequence
  Oligonucleotide for detection of SNP TSC0000631
gattatgataagg

SEQ ID NO: 183048 - DNA, 13 bp, Artificial Sequence
  Oligonucleotide for detection of SNP TSC0000631
ccttatcataatc

SEQ ID NO: 183049 - DNA, 13 bp, Artificial Sequence
  Oligonucleotide for detection of SNP TSC0000631
gattacgataagg

SEQ ID NO: 183050 - DNA, 13 bp, Artificial Sequence
  Oligonucleotide for detection of SNP TSC0000631
ccttatcgtaatc

SEQ ID NO: 183051 - DNA, 13 bp, Artificial Sequence
  Oligonucleotide for detection of SNP TSC0000631
ttttgttgtggty

SEQ ID NO: 183052 - DNA, 13 bp, Artificial Sequence
  Oligonucleotide for detection of SNP TSC0000631
raccacaacaaaa

SEQ ID NO: 183053 - DNA, 13 bp, Artificial Sequence
  Oligonucleotide for detection of SNP TSC0000631
ttttgtcgtggty

SEQ ID NO: 183054 - DNA, 13 bp, Artificial Sequence
  Oligonucleotide for detection of SNP TSC0000631
raccacgacaaaa

SEQ ID NO: 183055 - DNA, 13 bp, Artificial Sequence
  Oligonucleotide for detection of SNP TSC0045213
ttttgtaaagttt

SEQ ID NO: 183056 - DNA, 13 bp, Artificial Sequence
  Oligonucleotide for detection of SNP TSC0045213
aaactttacaaaa

SEQ ID NO: 183057 - DNA, 13 bp, Artificial Sequence
  Oligonucleotide for detection of SNP TSC0045213
ttttgtgaagttt

SEQ ID NO: 183058 - DNA, 13 bp, Artificial Sequence
  Oligonucleotide for detection of SNP TSC0045213
aaacttcacaaaa

SEQ ID NO: 183059 - DNA, 13 bp, Artificial Sequence
  Oligonucleotide for detection of SNP TSC0045213
ttttgcgaagttt

SEQ ID NO: 183060 - DNA, 13 bp, Artificial Sequence
  Oligonucleotide for detection of SNP TSC0045213
aaacttcgcaaaa

SEQ ID NO: 183061 - DNA, 13 bp, Artificial Sequence
  Oligonucleotide for detection of SNP TSC0045213
aggttttgtagaa

SEQ ID NO: 183062 - DNA, 13 bp, Artificial Sequence
  Oligonucleotide for detection of SNP TSC0045213
ttctacaaaacct

SEQ ID NO: 183063 - DNA, 13 bp, Artificial Sequence
  Oligonucleotide for detection of SNP TSC0045213
aggtttcgtagaa

SEQ ID NO: 183064 - DNA, 13 bp, Artificial Sequence
  Oligonucleotide for detection of SNP TSC0045213
ttctacgaaacct

SEQ ID NO: 183065 - DNA, 13 bp, Artificial Sequence
  Oligonucleotide for detection of SNP TSC0045214
tttagaagagata

SEQ ID NO: 183066 - DNA, 13 bp, Artificial Sequence
  Oligonucleotide for detection of SNP TSC0045214
tatctcttctaaa

SEQ ID NO: 183067 - DNA, 13 bp, Artificial Sequence
  Oligonucleotide for detection of SNP TSC0045214
tttagatgagata

SEQ ID NO: 183068 - DNA, 13 bp, Artificial Sequence
  Oligonucleotide for detection of SNP TSC0045214
tatctcatctaaa

SEQ ID NO: 183069 - DNA, 13 bp, Artificial Sequence
  Oligonucleotide for detection of SNP TSC0045214
tattttatttaag

SEQ ID NO: 183070 - DNA, 13 bp, Artificial Sequence
  Oligonucleotide for detection of SNP TSC0045214
cttaaataaaata

SEQ ID NO: 183071 - DNA, 13 bp, Artificial Sequence
  Oligonucleotide for detection of SNP TSC0045215
aatatttaataag

SEQ ID NO: 183072 - DNA, 13 bp, Artificial Sequence
  Oligonucleotide for detection of SNP TSC0045215
cttattaaatatt

SEQ ID NO: 183073 - DNA, 13 bp, Artificial Sequence
  Oligonucleotide for detection of SNP TSC0045215
aatattgaataag

SEQ ID NO: 183074 - DNA, 13 bp, Artificial Sequence
  Oligonucleotide for detection of SNP TSC0045215
cttattcaatatt

SEQ ID NO: 183075 - DNA, 13 bp, Artificial Sequence
  Oligonucleotide for detection of SNP TSC0045215
aatatcgaataag

SEQ ID NO: 183076 - DNA, 13 bp, Artificial Sequence
  Oligonucleotide for detection of SNP TSC0045215
cttattcgatatt

SEQ ID NO: 183077 - DNA, 13 bp, Artificial Sequence
  Oligonucleotide for detection of SNP TSC0045215
tttattagatgtt

SEQ ID NO: 183078 - DNA, 13 bp, Artificial Sequence
  Oligonucleotide for detection of SNP TSC0045215
aacatctaataaa

SEQ ID NO: 183079 - DNA, 13 bp, Artificial Sequence
  Oligonucleotide for detection of SNP TSC0045215
tttatttgatgtt

SEQ ID NO: 183080 - DNA, 13 bp, Artificial Sequence
  Oligonucleotide for detection of SNP TSC0045215
aacatcaaataaa

SEQ ID NO: 183081 - DNA, 13 bp, Artificial Sequence
  Oligonucleotide for detection of SNP TSC0045215
tttattcgatgtt

SEQ ID NO: 183082 - DNA, 13 bp, Artificial Sequence
  Oligonucleotide for detection of SNP TSC0045215
aacatcgaataaa

SEQ ID NO: 183083 - DNA, 13 bp, Artificial Sequence
  Oligonucleotide for detection of SNP TSC0045216
ttataaagggtty

SEQ ID NO: 183084 - DNA, 13 bp, Artificial Sequence
  Oligonucleotide for detection of SNP TSC0045216
raaccctttataa

SEQ ID NO: 183085 - DNA, 13 bp, Artificial Sequence
  Oligonucleotide for detection of SNP TSC0045216
ttataaggggtty

SEQ ID NO: 183086 - DNA, 13 bp, Artificial Sequence
  Oligonucleotide for detection of SNP TSC0045216
raaccccttataa

SEQ ID NO: 183087 - DNA, 13 bp, Artificial Sequence
  Oligonucleotide for detection of SNP TSC0045217
ttaaacgttttat

SEQ ID NO: 183088 - DNA, 13 bp, Artificial Sequence
  Oligonucleotide for detection of SNP TSC0045217
ataaaacgtttaa

SEQ ID NO: 183089 - DNA, 13 bp, Artificial Sequence
  Oligonucleotide for detection of SNP TSC0045217
ataaaatgtttga

SEQ ID NO: 183090 - DNA, 13 bp, Artificial Sequence
  Oligonucleotide for detection of SNP TSC0045217
tcaaacattttat

SEQ ID NO: 183091 - DNA, 13 bp, Artificial Sequence
  Oligonucleotide for detection of SNP TSC0045217
ataaaacgtttga

SEQ ID NO: 183092 - DNA, 13 bp, Artificial Sequence
  Oligonucleotide for detection of SNP TSC0045217
tcaaacgttttat

SEQ ID NO: 183093 - DNA, 13 bp, Artificial Sequence
  Oligonucleotide for detection of SNP TSC0045218
gtgtgttagggat

SEQ ID NO: 183094 - DNA, 13 bp, Artificial Sequence
  Oligonucleotide for detection of SNP TSC0045218
atccctaacacac

SEQ ID NO: 183095 - DNA, 13 bp, Artificial Sequence
  Oligonucleotide for detection of SNP TSC0045218
gtgtgtgagggat

SEQ ID NO: 183096 - DNA, 13 bp, Artificial Sequence
  Oligonucleotide for detection of SNP TSC0045218
atccctcacacac

SEQ ID NO: 183097 - DNA, 13 bp, Artificial Sequence
  Oligonucleotide for detection of SNP TSC0045218
attttttatatay

SEQ ID NO: 183098 - DNA, 13 bp, Artificial Sequence
  Oligonucleotide for detection of SNP TSC0045218
rtatataaaaaat

SEQ ID NO: 183099 - DNA, 13 bp, Artificial Sequence
  Oligonucleotide for detection of SNP TSC0010528
tatttagtgtagg

SEQ ID NO: 183100 - DNA, 13 bp, Artificial Sequence
  Oligonucleotide for detection of SNP TSC0010528
cctacactaaata

SEQ ID NO: 183101 - DNA, 13 bp, Artificial Sequence
  Oligonucleotide for detection of SNP TSC0010528
tatttaatgtagg

SEQ ID NO: 183102 - DNA, 13 bp, Artificial Sequence
  Oligonucleotide for detection of SNP TSC0010528
cctacattaaata

SEQ ID NO: 183103 - DNA, 13 bp, Artificial Sequence
  Oligonucleotide for detection of SNP TSC0000833
tttgaaagtaagt

SEQ ID NO: 183104 - DNA, 13 bp, Artificial Sequence
  Oligonucleotide for detection of SNP TSC0000833
acttactttcaaa

SEQ ID NO: 183105 - DNA, 13 bp, Artificial Sequence
  Oligonucleotide for detection of SNP TSC0000833
tttgaaggtaagt

SEQ ID NO: 183106 - DNA, 13 bp, Artificial Sequence
  Oligonucleotide for detection of SNP TSC0000833
acttaccttcaaa

SEQ ID NO: 183107 - DNA, 13 bp, Artificial Sequence
  Oligonucleotide for detection of SNP TSC0000589
aagagaggaggga

SEQ ID NO: 183108 - DNA, 13 bp, Artificial Sequence
  Oligonucleotide for detection of SNP TSC0000589
tccctcctctctt

SEQ ID NO: 183109 - DNA, 13 bp, Artificial Sequence
  Oligonucleotide for detection of SNP TSC0000589
aagagatgaggga

SEQ ID NO: 183110 - DNA, 13 bp, Artificial Sequence
  Oligonucleotide for detection of SNP TSC0000589
tccctcatctctt

SEQ ID NO: 183111 - DNA, 13 bp, Artificial Sequence
  Oligonucleotide for detection of SNP TSC0000589
aagagacgaggga

SEQ ID NO: 183112 - DNA, 13 bp, Artificial Sequence
  Oligonucleotide for detection of SNP TSC0000589
tccctcgtctctt

SEQ ID NO: 183113 - DNA, 13 bp, Artificial Sequence
  Oligonucleotide for detection of SNP TSC0000216
ttgatgatatggg

SEQ ID NO: 183114 - DNA, 13 bp, Artificial Sequence
  Oligonucleotide for detection of SNP TSC0000216
cccatatcatcaa

SEQ ID NO: 183115 - DNA, 13 bp, Artificial Sequence
  Oligonucleotide for detection of SNP TSC0000216
ttgatggtatggg

SEQ ID NO: 183116 - DNA, 13 bp, Artificial Sequence
  Oligonucleotide for detection of SNP TSC0000216
cccataccatcaa

SEQ ID NO: 183117 - DNA, 13 bp, Artificial Sequence
  Oligonucleotide for detection of SNP TSC0045224
gtgaggtaggaga

SEQ ID NO: 183118 - DNA, 13 bp, Artificial Sequence
  Oligonucleotide for detection of SNP TSC0045224
tctcctacctcac

SEQ ID NO: 183119 - DNA, 13 bp, Artificial Sequence
  Oligonucleotide for detection of SNP TSC0045224
gtgagggaggaga

SEQ ID NO: 183120 - DNA, 13 bp, Artificial Sequence
  Oligonucleotide for detection of SNP TSC0045224
tctcctccctcac

SEQ ID NO: 183121 - DNA, 13 bp, Artificial Sequence
  Oligonucleotide for detection of SNP TSC0000824
ttgtggtgtatgg

SEQ ID NO: 183122 - DNA, 13 bp, Artificial Sequence
  Oligonucleotide for detection of SNP TSC0000824
ccatacaccacaa

SEQ ID NO: 183123 - DNA, 13 bp, Artificial Sequence
  Oligonucleotide for detection of SNP TSC0000824
ttgtggcgtatgg

SEQ ID NO: 183124 - DNA, 13 bp, Artificial Sequence
  Oligonucleotide for detection of SNP TSC0000824
ccatacgccacaa

SEQ ID NO: 183125 - DNA, 13 bp, Artificial Sequence
  Oligonucleotide for detection of SNP TSC0000824
ttatgtgttatag

SEQ ID NO: 183126 - DNA, 13 bp, Artificial Sequence
  Oligonucleotide for detection of SNP TSC0000824
ctataacacataa

SEQ ID NO: 183127 - DNA, 13 bp, Artificial Sequence
  Oligonucleotide for detection of SNP TSC0000824
ttatgtattatag

SEQ ID NO: 183128 - DNA, 13 bp, Artificial Sequence
  Oligonucleotide for detection of SNP TSC0000824
ctataatacataa

SEQ ID NO: 183129 - DNA, 13 bp, Artificial Sequence
  Oligonucleotide for detection of SNP TSC0000824
ttatgcgttatag

SEQ ID NO: 183130 - DNA, 13 bp, Artificial Sequence
  Oligonucleotide for detection of SNP TSC0000824
ctataacgcataa

SEQ ID NO: 183131 - DNA, 13 bp, Artificial Sequence
  Oligonucleotide for detection of SNP TSC0001149
agtaagattttay

SEQ ID NO: 183132 - DNA, 13 bp, Artificial Sequence
  Oligonucleotide for detection of SNP TSC0001149
rtaaaatcttact

SEQ ID NO: 183133 - DNA, 13 bp, Artificial Sequence
  Oligonucleotide for detection of SNP TSC0001149
agtaagtttttay

SEQ ID NO: 183134 - DNA, 13 bp, Artificial Sequence
  Oligonucleotide for detection of SNP TSC0001149
rtaaaaacttact

SEQ ID NO: 183135 - DNA, 13 bp, Artificial Sequence
  Oligonucleotide for detection of SNP TSC0001149
gtaaggttttatt

SEQ ID NO: 183136 - DNA, 13 bp, Artificial Sequence
  Oligonucleotide for detection of SNP TSC0001149
aataaaaccttac

SEQ ID NO: 183137 - DNA, 13 bp, Artificial Sequence
  Oligonucleotide for detection of SNP TSC0001149
gtaagggtttatt

SEQ ID NO: 183138 - DNA, 13 bp, Artificial Sequence
  Oligonucleotide for detection of SNP TSC0001149
aataaacccttac

SEQ ID NO: 183139 - DNA, 13 bp, Artificial Sequence
  Oligonucleotide for detection of SNP TSC0001150
tatatatataggy

SEQ ID NO: 183140 - DNA, 13 bp, Artificial Sequence
  Oligonucleotide for detection of SNP TSC0001150
rcctatatatata

SEQ ID NO: 183141 - DNA, 13 bp, Artificial Sequence
  Oligonucleotide for detection of SNP TSC0001150
tatatagataggy

SEQ ID NO: 183142 - DNA, 13 bp, Artificial Sequence
  Oligonucleotide for detection of SNP TSC0001150
rcctatctatata

SEQ ID NO: 183143 - DNA, 13 bp, Artificial Sequence
  Oligonucleotide for detection of SNP TSC0001150
gtttgtgtgtgta

SEQ ID NO: 183144 - DNA, 13 bp, Artificial Sequence
  Oligonucleotide for detection of SNP TSC0001150
tacacacacaaac

SEQ ID NO: 183145 - DNA, 13 bp, Artificial Sequence
  Oligonucleotide for detection of SNP TSC0001150
gtttgtttgtgta

SEQ ID NO: 183146 - DNA, 13 bp, Artificial Sequence
  Oligonucleotide for detection of SNP TSC0001150
tacacaaacaaac

SEQ ID NO: 183147 - DNA, 13 bp, Artificial Sequence
  Oligonucleotide for detection of SNP TSC0009759
attttagtaaaaa

SEQ ID NO: 183148 - DNA, 13 bp, Artificial Sequence
  Oligonucleotide for detection of SNP TSC0009759
tttttactaaaat

SEQ ID NO: 183149 - DNA, 13 bp, Artificial Sequence
  Oligonucleotide for detection of SNP TSC0045227
gtatattgaagta

SEQ ID NO: 183150 - DNA, 13 bp, Artificial Sequence
  Oligonucleotide for detection of SNP TSC0045227
tacttcaatatac

SEQ ID NO: 183151 - DNA, 13 bp, Artificial Sequence
  Oligonucleotide for detection of SNP TSC0045227
gtatatcgaagta

SEQ ID NO: 183152 - DNA, 13 bp, Artificial Sequence
  Oligonucleotide for detection of SNP TSC0045227
tacttcgatatac

SEQ ID NO: 183153 - DNA, 13 bp, Artificial Sequence
  Oligonucleotide for detection of SNP TSC0045227
tattttggtatgy

SEQ ID NO: 183154 - DNA, 13 bp, Artificial Sequence
  Oligonucleotide for detection of SNP TSC0045227
rcataccaaaata

SEQ ID NO: 183155 - DNA, 13 bp, Artificial Sequence
  Oligonucleotide for detection of SNP TSC0045227
tattttagtatgy

SEQ ID NO: 183156 - DNA, 13 bp, Artificial Sequence
  Oligonucleotide for detection of SNP TSC0045227
rcatactaaaata

SEQ ID NO: 183157 - DNA, 13 bp, Artificial Sequence
  Oligonucleotide for detection of SNP TSC0045227
tatttcggtatgy

SEQ ID NO: 183158 - DNA, 13 bp, Artificial Sequence
  Oligonucleotide for detection of SNP TSC0045227
rcataccgaaata

SEQ ID NO: 183159 - DNA, 13 bp, Artificial Sequence
  Oligonucleotide for detection of SNP TSC0000272
agagatgttggtt

SEQ ID NO: 183160 - DNA, 13 bp, Artificial Sequence
  Oligonucleotide for detection of SNP TSC0000272
aaccaacatctct

SEQ ID NO: 183161 - DNA, 13 bp, Artificial Sequence
  Oligonucleotide for detection of SNP TSC0000272
agagatattggtt

SEQ ID NO: 183162 - DNA, 13 bp, Artificial Sequence
  Oligonucleotide for detection of SNP TSC0000272
aaccaatatctct

SEQ ID NO: 183163 - DNA, 13 bp, Artificial Sequence
  Oligonucleotide for detection of SNP TSC0045230
atattttggttta

SEQ ID NO: 183164 - DNA, 13 bp, Artificial Sequence
  Oligonucleotide for detection of SNP TSC0045230
taaaccaaaatat

SEQ ID NO: 183165 - DNA, 13 bp, Artificial Sequence
  Oligonucleotide for detection of SNP TSC0045230
atatttcggttta

SEQ ID NO: 183166 - DNA, 13 bp, Artificial Sequence
  Oligonucleotide for detection of SNP TSC0045230
taaaccgaaatat

SEQ ID NO: 183167 - DNA, 13 bp, Artificial Sequence
  Oligonucleotide for detection of SNP TSC0045230
taaattgaaatat

SEQ ID NO: 183168 - DNA, 13 bp, Artificial Sequence
  Oligonucleotide for detection of SNP TSC0045230
atatttcaattta

SEQ ID NO: 183169 - DNA, 13 bp, Artificial Sequence
  Oligonucleotide for detection of SNP TSC0045230
taaattaaaatat

SEQ ID NO: 183170 - DNA, 13 bp, Artificial Sequence
  Oligonucleotide for detection of SNP TSC0045230
atattttaattta

SEQ ID NO: 183171 - DNA, 13 bp, Artificial Sequence
  Oligonucleotide for detection of SNP TSC0045230
taaatcgaaatat

SEQ ID NO: 183172 - DNA, 13 bp, Artificial Sequence
  Oligonucleotide for detection of SNP TSC0045230
atatttcgattta

SEQ ID NO: 183173 - DNA, 13 bp, Artificial Sequence
  Oligonucleotide for detection of SNP TSC0001563
attttatggagta

SEQ ID NO: 183174 - DNA, 13 bp, Artificial Sequence
  Oligonucleotide for detection of SNP TSC0001563
tactccataaaat

SEQ ID NO: 183175 - DNA, 13 bp, Artificial Sequence
  Oligonucleotide for detection of SNP TSC0001563
attttacggagta

SEQ ID NO: 183176 - DNA, 13 bp, Artificial Sequence
  Oligonucleotide for detection of SNP TSC0001563
tactccgtaaaat

SEQ ID NO: 183177 - DNA, 13 bp, Artificial Sequence
  Oligonucleotide for detection of SNP TSC0001563
tgttttgtaaggt

SEQ ID NO: 183178 - DNA, 13 bp, Artificial Sequence
  Oligonucleotide for detection of SNP TSC0001563
accttacaaaaca

SEQ ID NO: 183179 - DNA, 13 bp, Artificial Sequence
  Oligonucleotide for detection of SNP TSC0001563
tgttttataaggt

SEQ ID NO: 183180 - DNA, 13 bp, Artificial Sequence
  Oligonucleotide for detection of SNP TSC0001563
accttataaaaca

SEQ ID NO: 183181 - DNA, 13 bp, Artificial Sequence
  Oligonucleotide for detection of SNP TSC0001563
tgtttcgtaaggt

SEQ ID NO: 183182 - DNA, 13 bp, Artificial Sequence
  Oligonucleotide for detection of SNP TSC0001563
accttacgaaaca

SEQ ID NO: 183183 - DNA, 13 bp, Artificial Sequence
  Oligonucleotide for detection of SNP TSC0045235
ttatgtcggttag

SEQ ID NO: 183184 - DNA, 13 bp, Artificial Sequence
  Oligonucleotide for detection of SNP TSC0045235
ctaaccgacataa

SEQ ID NO: 183185 - DNA, 13 bp, Artificial Sequence
  Oligonucleotide for detection of SNP TSC0045235
ttggttgatatgg

SEQ ID NO: 183186 - DNA, 13 bp, Artificial Sequence
  Oligonucleotide for detection of SNP TSC0045235
ccatatcaaccaa

SEQ ID NO: 183187 - DNA, 13 bp, Artificial Sequence
  Oligonucleotide for detection of SNP TSC0045235
ttggtcgatatgg

SEQ ID NO: 183188 - DNA, 13 bp, Artificial Sequence
  Oligonucleotide for detection of SNP TSC0045235
ccatatcgaccaa

SEQ ID NO: 183189 - DNA, 13 bp, Artificial Sequence
  Oligonucleotide for detection of SNP TSC0000269
ttatatggttaty

SEQ ID NO: 183190 - DNA, 13 bp, Artificial Sequence
  Oligonucleotide for detection of SNP TSC0000269
rataaccatataa

SEQ ID NO: 183191 - DNA, 13 bp, Artificial Sequence
  Oligonucleotide for detection of SNP TSC0000269
ttatatagttaty

SEQ ID NO: 183192 - DNA, 13 bp, Artificial Sequence
  Oligonucleotide for detection of SNP TSC0000269
rataactatataa

SEQ ID NO: 183193 - DNA, 13 bp, Artificial Sequence
  Oligonucleotide for detection of SNP TSC0000364
atgggttggaaga

SEQ ID NO: 183194 - DNA, 13 bp, Artificial Sequence
  Oligonucleotide for detection of SNP TSC0000364
tcttccaacccat

SEQ ID NO: 183195 - DNA, 13 bp, Artificial Sequence
  Oligonucleotide for detection of SNP TSC0000364
atgggtcggaaga

SEQ ID NO: 183196 - DNA, 13 bp, Artificial Sequence
  Oligonucleotide for detection of SNP TSC0000364
tcttccgacccat

SEQ ID NO: 183197 - DNA, 13 bp, Artificial Sequence
  Oligonucleotide for detection of SNP TSC0045236
tgtatacggtttt

SEQ ID NO: 183198 - DNA, 13 bp, Artificial Sequence
  Oligonucleotide for detection of SNP TSC0045236
aaaaccgtataca

SEQ ID NO: 183199 - DNA, 13 bp, Artificial Sequence
  Oligonucleotide for detection of SNP TSC0045236
aaaattgtatata

SEQ ID NO: 183200 - DNA, 13 bp, Artificial Sequence
  Oligonucleotide for detection of SNP TSC0045236
tatatacaatttt

SEQ ID NO: 183201 - DNA, 13 bp, Artificial Sequence
  Oligonucleotide for detection of SNP TSC0045236
aaaattatatata

SEQ ID NO: 183202 - DNA, 13 bp, Artificial Sequence
  Oligonucleotide for detection of SNP TSC0045236
tatatataatttt

SEQ ID NO: 183203 - DNA, 13 bp, Artificial Sequence
  Oligonucleotide for detection of SNP TSC0045236
aaaatcgtatata

SEQ ID NO: 183204 - DNA, 13 bp, Artificial Sequence
  Oligonucleotide for detection of SNP TSC0045236
tatatacgatttt

SEQ ID NO: 183205 - DNA, 13 bp, Artificial Sequence
  Oligonucleotide for detection of SNP TSC0045237
gaaatagaatagg

SEQ ID NO: 183206 - DNA, 13 bp, Artificial Sequence
  Oligonucleotide for detection of SNP TSC0045237
cctattctatttc

SEQ ID NO: 183207 - DNA, 13 bp, Artificial Sequence
  Oligonucleotide for detection of SNP TSC0045237
gaaatataatagg

SEQ ID NO: 183208 - DNA, 13 bp, Artificial Sequence
  Oligonucleotide for detection of SNP TSC0045237
cctattatatttc

SEQ ID NO: 183209 - DNA, 13 bp, Artificial Sequence
  Oligonucleotide for detection of SNP TSC0045238
aagaagatatttg

SEQ ID NO: 183210 - DNA, 13 bp, Artificial Sequence
  Oligonucleotide for detection of SNP TSC0045238
caaatatcttctt

SEQ ID NO: 183211 - DNA, 13 bp, Artificial Sequence
  Oligonucleotide for detection of SNP TSC0045238
aagaaggtatttg

SEQ ID NO: 183212 - DNA, 13 bp, Artificial Sequence
  Oligonucleotide for detection of SNP TSC0045238
caaataccttctt

SEQ ID NO: 183213 - DNA, 13 bp, Artificial Sequence
  Oligonucleotide for detection of SNP TSC0045239
gaatagttgattt

SEQ ID NO: 183214 - DNA, 13 bp, Artificial Sequence
  Oligonucleotide for detection of SNP TSC0045239
aaatcaactattc

SEQ ID NO: 183215 - DNA, 13 bp, Artificial Sequence
  Oligonucleotide for detection of SNP TSC0045239
gaataggtgattt

SEQ ID NO: 183216 - DNA, 13 bp, Artificial Sequence
  Oligonucleotide for detection of SNP TSC0045239
aaatcacctattc

SEQ ID NO: 183217 - DNA, 13 bp, Artificial Sequence
  Oligonucleotide for detection of SNP TSC0045239
aagttaattatty

SEQ ID NO: 183218 - DNA, 13 bp, Artificial Sequence
  Oligonucleotide for detection of SNP TSC0045239
raataattaactt

SEQ ID NO: 183219 - DNA, 13 bp, Artificial Sequence
  Oligonucleotide for detection of SNP TSC0045239
aagttatttatty

SEQ ID NO: 183220 - DNA, 13 bp, Artificial Sequence
  Oligonucleotide for detection of SNP TSC0045239
raataaataactt

SEQ ID NO: 183221 - DNA, 13 bp, Artificial Sequence
  Oligonucleotide for detection of SNP TSC0045240
aattgaagagttt

SEQ ID NO: 183222 - DNA, 13 bp, Artificial Sequence
  Oligonucleotide for detection of SNP TSC0045240
aaactcttcaatt

SEQ ID NO: 183223 - DNA, 13 bp, Artificial Sequence
  Oligonucleotide for detection of SNP TSC0045240
aattgaggagttt

SEQ ID NO: 183224 - DNA, 13 bp, Artificial Sequence
  Oligonucleotide for detection of SNP TSC0045240
aaactcctcaatt

SEQ ID NO: 183225 - DNA, 13 bp, Artificial Sequence
  Oligonucleotide for detection of SNP TSC0045241
ggtatataaattt

SEQ ID NO: 183226 - DNA, 13 bp, Artificial Sequence
  Oligonucleotide for detection of SNP TSC0045241
aaatttatatacc

SEQ ID NO: 183227 - DNA, 13 bp, Artificial Sequence
  Oligonucleotide for detection of SNP TSC0045241
ggtatagaaattt

SEQ ID NO: 183228 - DNA, 13 bp, Artificial Sequence
  Oligonucleotide for detection of SNP TSC0045241
aaatttctatacc

SEQ ID NO: 183229 - DNA, 13 bp, Artificial Sequence
  Oligonucleotide for detection of SNP TSC0045241
aggtttttgtgty

SEQ ID NO: 183230 - DNA, 13 bp, Artificial Sequence
  Oligonucleotide for detection of SNP TSC0045241
racacaaaaacct

SEQ ID NO: 183231 - DNA, 13 bp, Artificial Sequence
  Oligonucleotide for detection of SNP TSC0045242
atttagtgaatgg

SEQ ID NO: 183232 - DNA, 13 bp, Artificial Sequence
  Oligonucleotide for detection of SNP TSC0045242
ccattcactaaat

SEQ ID NO: 183233 - DNA, 13 bp, Artificial Sequence
  Oligonucleotide for detection of SNP TSC0045242
atttagcgaatgg

SEQ ID NO: 183234 - DNA, 13 bp, Artificial Sequence
  Oligonucleotide for detection of SNP TSC0045242
ccattcgctaaat

SEQ ID NO: 183235 - DNA, 13 bp, Artificial Sequence
  Oligonucleotide for detection of SNP TSC0045243
aaggaagtagttt

SEQ ID NO: 183236 - DNA, 13 bp, Artificial Sequence
  Oligonucleotide for detection of SNP TSC0045243
aaactacttcctt

SEQ ID NO: 183237 - DNA, 13 bp, Artificial Sequence
  Oligonucleotide for detection of SNP TSC0045243
aaggaaatagttt

SEQ ID NO: 183238 - DNA, 13 bp, Artificial Sequence
  Oligonucleotide for detection of SNP TSC0045243
aaactatttcctt

SEQ ID NO: 183239 - DNA, 13 bp, Artificial Sequence
  Oligonucleotide for detection of SNP TSC0045244
agtttagggtttg

SEQ ID NO: 183240 - DNA, 13 bp, Artificial Sequence
  Oligonucleotide for detection of SNP TSC0045244
caaaccctaaact

SEQ ID NO: 183241 - DNA, 13 bp, Artificial Sequence
  Oligonucleotide for detection of SNP TSC0045244
taagttatgagtt

SEQ ID NO: 183242 - DNA, 13 bp, Artificial Sequence
  Oligonucleotide for detection of SNP TSC0045244
aactcataactta

SEQ ID NO: 183243 - DNA, 13 bp, Artificial Sequence
  Oligonucleotide for detection of SNP TSC0045244
taagttttgagtt

SEQ ID NO: 183244 - DNA, 13 bp, Artificial Sequence
  Oligonucleotide for detection of SNP TSC0045244
aactcaaaactta

SEQ ID NO: 183245 - DNA, 13 bp, Artificial Sequence
  Oligonucleotide for detection of SNP TSC0045245
taataaattttga

SEQ ID NO: 183246 - DNA, 13 bp, Artificial Sequence
  Oligonucleotide for detection of SNP TSC0045245
tcaaaatttatta

SEQ ID NO: 183247 - DNA, 13 bp, Artificial Sequence
  Oligonucleotide for detection of SNP TSC0045245
taataatttttga

SEQ ID NO: 183248 - DNA, 13 bp, Artificial Sequence
  Oligonucleotide for detection of SNP TSC0045245
tcaaaaattatta

SEQ ID NO: 183249 - DNA, 13 bp, Artificial Sequence
  Oligonucleotide for detection of SNP TSC0045245
ttagagtttatta

SEQ ID NO: 183250 - DNA, 13 bp, Artificial Sequence
  Oligonucleotide for detection of SNP TSC0045245
taataaactctaa

SEQ ID NO: 183251 - DNA, 13 bp, Artificial Sequence
  Oligonucleotide for detection of SNP TSC0045245
ttagagattatta

SEQ ID NO: 183252 - DNA, 13 bp, Artificial Sequence
  Oligonucleotide for detection of SNP TSC0045245
taataatctctaa

SEQ ID NO: 183253 - DNA, 13 bp, Artificial Sequence
  Oligonucleotide for detection of SNP TSC0045246
aataatatttgaa

SEQ ID NO: 183254 - DNA, 13 bp, Artificial Sequence
  Oligonucleotide for detection of SNP TSC0045246
ttcaaatattatt

SEQ ID NO: 183255 - DNA, 13 bp, Artificial Sequence
  Oligonucleotide for detection of SNP TSC0045246
aataatttttgaa

SEQ ID NO: 183256 - DNA, 13 bp, Artificial Sequence
  Oligonucleotide for detection of SNP TSC0045246
ttcaaaaattatt

SEQ ID NO: 183257 - DNA, 13 bp, Artificial Sequence
  Oligonucleotide for detection of SNP TSC0045246
tttagatattatt

SEQ ID NO: 183258 - DNA, 13 bp, Artificial Sequence
  Oligonucleotide for detection of SNP TSC0045246
aataatatctaaa

SEQ ID NO: 183259 - DNA, 13 bp, Artificial Sequence
  Oligonucleotide for detection of SNP TSC0045246
tttagagattatt

SEQ ID NO: 183260 - DNA, 13 bp, Artificial Sequence
  Oligonucleotide for detection of SNP TSC0045246
aataatctctaaa

SEQ ID NO: 183261 - DNA, 13 bp, Artificial Sequence
  Oligonucleotide for detection of SNP TSC0045248
ttataaattttgt

SEQ ID NO: 183262 - DNA, 13 bp, Artificial Sequence
  Oligonucleotide for detection of SNP TSC0045248
acaaaatttataa

SEQ ID NO: 183263 - DNA, 13 bp, Artificial Sequence
  Oligonucleotide for detection of SNP TSC0045248
atagaatttgtga

SEQ ID NO: 183264 - DNA, 13 bp, Artificial Sequence
  Oligonucleotide for detection of SNP TSC0045248
tcacaaattctat

SEQ ID NO: 183265 - DNA, 13 bp, Artificial Sequence
  Oligonucleotide for detection of SNP TSC0045248
atagaaattgtga

SEQ ID NO: 183266 - DNA, 13 bp, Artificial Sequence
  Oligonucleotide for detection of SNP TSC0045248
tcacaatttctat

SEQ ID NO: 183267 - DNA, 13 bp, Artificial Sequence
  Oligonucleotide for detection of SNP TSC0045249
ttattaataatay

SEQ ID NO: 183268 - DNA, 13 bp, Artificial Sequence
  Oligonucleotide for detection of SNP TSC0045249
rtattattaataa

SEQ ID NO: 183269 - DNA, 13 bp, Artificial Sequence
  Oligonucleotide for detection of SNP TSC0045249
ttattattaatay

SEQ ID NO: 183270 - DNA, 13 bp, Artificial Sequence
  Oligonucleotide for detection of SNP TSC0045249
rtattaataataa

SEQ ID NO: 183271 - DNA, 13 bp, Artificial Sequence
  Oligonucleotide for detection of SNP TSC0045249
gtattattagtga

SEQ ID NO: 183272 - DNA, 13 bp, Artificial Sequence
  Oligonucleotide for detection of SNP TSC0045249
tcactaataatac

SEQ ID NO: 183273 - DNA, 13 bp, Artificial Sequence
  Oligonucleotide for detection of SNP TSC0045249
gtattaatagtga

SEQ ID NO: 183274 - DNA, 13 bp, Artificial Sequence
  Oligonucleotide for detection of SNP TSC0045249
tcactattaatac

SEQ ID NO: 183275 - DNA, 13 bp, Artificial Sequence
  Oligonucleotide for detection of SNP TSC0045250
aaaaaaaggaaat

SEQ ID NO: 183276 - DNA, 13 bp, Artificial Sequence
  Oligonucleotide for detection of SNP TSC0045250
atttccttttttt

SEQ ID NO: 183277 - DNA, 13 bp, Artificial Sequence
  Oligonucleotide for detection of SNP TSC0045250
aaaaaagggaaat

SEQ ID NO: 183278 - DNA, 13 bp, Artificial Sequence
  Oligonucleotide for detection of SNP TSC0045250
atttccctttttt

SEQ ID NO: 183279 - DNA, 13 bp, Artificial Sequence
  Oligonucleotide for detection of SNP TSC0045251
gtgattatggtgy

SEQ ID NO: 183280 - DNA, 13 bp, Artificial Sequence
  Oligonucleotide for detection of SNP TSC0045251
rcaccataatcac

SEQ ID NO: 183281 - DNA, 13 bp, Artificial Sequence
  Oligonucleotide for detection of SNP TSC0045251
gtgattgtggtgy

SEQ ID NO: 183282 - DNA, 13 bp, Artificial Sequence
  Oligonucleotide for detection of SNP TSC0045251
rcaccacaatcac

SEQ ID NO: 183283 - DNA, 13 bp, Artificial Sequence
  Oligonucleotide for detection of SNP TSC0045252
gatggtagttatg

SEQ ID NO: 183284 - DNA, 13 bp, Artificial Sequence
  Oligonucleotide for detection of SNP TSC0045252
cataactaccatc

SEQ ID NO: 183285 - DNA, 13 bp, Artificial Sequence
  Oligonucleotide for detection of SNP TSC0045252
gatggtggttatg

SEQ ID NO: 183286 - DNA, 13 bp, Artificial Sequence
  Oligonucleotide for detection of SNP TSC0045252
cataaccaccatc

SEQ ID NO: 183287 - DNA, 13 bp, Artificial Sequence
  Oligonucleotide for detection of SNP TSC0045252
gatggtagttacg

SEQ ID NO: 183288 - DNA, 13 bp, Artificial Sequence
  Oligonucleotide for detection of SNP TSC0045252
cgtaactaccatc

SEQ ID NO: 183289 - DNA, 13 bp, Artificial Sequence
  Oligonucleotide for detection of SNP TSC0045252
gatggtggttacg

SEQ ID NO: 183290 - DNA, 13 bp, Artificial Sequence
  Oligonucleotide for detection of SNP TSC0045252
cgtaaccaccatc

SEQ ID NO: 183291 - DNA, 13 bp, Artificial Sequence
  Oligonucleotide for detection of SNP TSC0045255
gtattatgtaata

SEQ ID NO: 183292 - DNA, 13 bp, Artificial Sequence
  Oligonucleotide for detection of SNP TSC0045255
tattacataatac

SEQ ID NO: 183293 - DNA, 13 bp, Artificial Sequence
  Oligonucleotide for detection of SNP TSC0045255
gtattacgtaata

SEQ ID NO: 183294 - DNA, 13 bp, Artificial Sequence
  Oligonucleotide for detection of SNP TSC0045255
tattacgtaatac

SEQ ID NO: 183295 - DNA, 13 bp, Artificial Sequence
  Oligonucleotide for detection of SNP TSC0045255
tgttatgtaatgy

SEQ ID NO: 183296 - DNA, 13 bp, Artificial Sequence
  Oligonucleotide for detection of SNP TSC0045255
rcattacataaca

SEQ ID NO: 183297 - DNA, 13 bp, Artificial Sequence
  Oligonucleotide for detection of SNP TSC0045255
tgttatataatgy

SEQ ID NO: 183298 - DNA, 13 bp, Artificial Sequence
  Oligonucleotide for detection of SNP TSC0045255
rcattatataaca

SEQ ID NO: 183299 - DNA, 13 bp, Artificial Sequence
  Oligonucleotide for detection of SNP TSC0045255
tgttacgtaatgy

SEQ ID NO: 183300 - DNA, 13 bp, Artificial Sequence
  Oligonucleotide for detection of SNP TSC0045255
rcattacgtaaca

SEQ ID NO: 183301 - DNA, 13 bp, Artificial Sequence
  Oligonucleotide for detection of SNP TSC0045257
aaaattataggaa

SEQ ID NO: 183302 - DNA, 13 bp, Artificial Sequence
  Oligonucleotide for detection of SNP TSC0045257
ttcctataatttt

SEQ ID NO: 183303 - DNA, 13 bp, Artificial Sequence
  Oligonucleotide for detection of SNP TSC0045258
tgttataattaat

SEQ ID NO: 183304 - DNA, 13 bp, Artificial Sequence
  Oligonucleotide for detection of SNP TSC0045258
attaattataaca

SEQ ID NO: 183305 - DNA, 13 bp, Artificial Sequence
  Oligonucleotide for detection of SNP TSC0045258
tgttattattaat

SEQ ID NO: 183306 - DNA, 13 bp, Artificial Sequence
  Oligonucleotide for detection of SNP TSC0045258
attaataataaca

SEQ ID NO: 183307 - DNA, 13 bp, Artificial Sequence
  Oligonucleotide for detection of SNP TSC0045258
attaatgatgata

SEQ ID NO: 183308 - DNA, 13 bp, Artificial Sequence
  Oligonucleotide for detection of SNP TSC0045258
tatcatcattaat

SEQ ID NO: 183309 - DNA, 13 bp, Artificial Sequence
  Oligonucleotide for detection of SNP TSC0045259
tttttttggttag

SEQ ID NO: 183310 - DNA, 13 bp, Artificial Sequence
  Oligonucleotide for detection of SNP TSC0045259
ctaaccaaaaaaa

SEQ ID NO: 183311 - DNA, 13 bp, Artificial Sequence
  Oligonucleotide for detection of SNP TSC0045259
ttttttgggttag

SEQ ID NO: 183312 - DNA, 13 bp, Artificial Sequence
  Oligonucleotide for detection of SNP TSC0045259
ctaacccaaaaaa

SEQ ID NO: 183313 - DNA, 13 bp, Artificial Sequence
  Oligonucleotide for detection of SNP TSC0045259
ttggttaaaaaaa

SEQ ID NO: 183314 - DNA, 13 bp, Artificial Sequence
  Oligonucleotide for detection of SNP TSC0045259
tttttttaaccaa

SEQ ID NO: 183315 - DNA, 13 bp, Artificial Sequence
  Oligonucleotide for detection of SNP TSC0045259
ttggtttaaaaaa

SEQ ID NO: 183316 - DNA, 13 bp, Artificial Sequence
  Oligonucleotide for detection of SNP TSC0045259
ttttttaaaccaa

SEQ ID NO: 183317 - DNA, 13 bp, Artificial Sequence
  Oligonucleotide for detection of SNP TSC0045260
aatatagaaaagg

SEQ ID NO: 183318 - DNA, 13 bp, Artificial Sequence
  Oligonucleotide for detection of SNP TSC0045260
ccttttctatatt

SEQ ID NO: 183319 - DNA, 13 bp, Artificial Sequence
  Oligonucleotide for detection of SNP TSC0045260
aatataaaaaagg

SEQ ID NO: 183320 - DNA, 13 bp, Artificial Sequence
  Oligonucleotide for detection of SNP TSC0045260
ccttttttatatt

SEQ ID NO: 183321 - DNA, 13 bp, Artificial Sequence
  Oligonucleotide for detection of SNP TSC0045261
ggatttgtattgy

SEQ ID NO: 183322 - DNA, 13 bp, Artificial Sequence
  Oligonucleotide for detection of SNP TSC0045261
rcaatacaaatcc

SEQ ID NO: 183323 - DNA, 13 bp, Artificial Sequence
  Oligonucleotide for detection of SNP TSC0045261
ggatttatattgy

SEQ ID NO: 183324 - DNA, 13 bp, Artificial Sequence
  Oligonucleotide for detection of SNP TSC0045261
rcaatataaatcc

SEQ ID NO: 183325 - DNA, 13 bp, Artificial Sequence
  Oligonucleotide for detection of SNP TSC0045262
aggaataattttt

SEQ ID NO: 183326 - DNA, 13 bp, Artificial Sequence
  Oligonucleotide for detection of SNP TSC0045262
aaaaattattcct

SEQ ID NO: 183327 - DNA, 13 bp, Artificial Sequence
  Oligonucleotide for detection of SNP TSC0045262
aggaatgattttt

SEQ ID NO: 183328 - DNA, 13 bp, Artificial Sequence
  Oligonucleotide for detection of SNP TSC0045262
aaaaatcattcct

SEQ ID NO: 183329 - DNA, 13 bp, Artificial Sequence
  Oligonucleotide for detection of SNP TSC0045263
gtgtgggggtatg

SEQ ID NO: 183330 - DNA, 13 bp, Artificial Sequence
  Oligonucleotide for detection of SNP TSC0045263
catacccccacac

SEQ ID NO: 183331 - DNA, 13 bp, Artificial Sequence
  Oligonucleotide for detection of SNP TSC0045264
ttttgtgtataag

SEQ ID NO: 183332 - DNA, 13 bp, Artificial Sequence
  Oligonucleotide for detection of SNP TSC0045264
cttatacacaaaa

SEQ ID NO: 183333 - DNA, 13 bp, Artificial Sequence
  Oligonucleotide for detection of SNP TSC0045264
ttttgtatataag

SEQ ID NO: 183334 - DNA, 13 bp, Artificial Sequence
  Oligonucleotide for detection of SNP TSC0045264
cttatatacaaaa

SEQ ID NO: 183335 - DNA, 13 bp, Artificial Sequence
  Oligonucleotide for detection of SNP TSC0045265
ttggttaaaagtg

SEQ ID NO: 183336 - DNA, 13 bp, Artificial Sequence
  Oligonucleotide for detection of SNP TSC0045265
cacttttaaccaa

SEQ ID NO: 183337 - DNA, 13 bp, Artificial Sequence
  Oligonucleotide for detection of SNP TSC0045265
ttggttgaaagtg

SEQ ID NO: 183338 - DNA, 13 bp, Artificial Sequence
  Oligonucleotide for detection of SNP TSC0045265
cactttcaaccaa

SEQ ID NO: 183339 - DNA, 13 bp, Artificial Sequence
  Oligonucleotide for detection of SNP TSC0045266
gtaggtatagagt

SEQ ID NO: 183340 - DNA, 13 bp, Artificial Sequence
  Oligonucleotide for detection of SNP TSC0045266
actctatacctac

SEQ ID NO: 183341 - DNA, 13 bp, Artificial Sequence
  Oligonucleotide for detection of SNP TSC0045266
gtaggtgtagagt

SEQ ID NO: 183342 - DNA, 13 bp, Artificial Sequence
  Oligonucleotide for detection of SNP TSC0045266
actctacacctac

SEQ ID NO: 183343 - DNA, 13 bp, Artificial Sequence
  Oligonucleotide for detection of SNP TSC0045268
ttgggtgattttt

SEQ ID NO: 183344 - DNA, 13 bp, Artificial Sequence
  Oligonucleotide for detection of SNP TSC0045268
aaaaatcacccaa

SEQ ID NO: 183345 - DNA, 13 bp, Artificial Sequence
  Oligonucleotide for detection of SNP TSC0045268
ttgggtaattttt

SEQ ID NO: 183346 - DNA, 13 bp, Artificial Sequence
  Oligonucleotide for detection of SNP TSC0045268
aaaaattacccaa

SEQ ID NO: 183347 - DNA, 13 bp, Artificial Sequence
  Oligonucleotide for detection of SNP TSC0045269
ttaggtgaagtaa

SEQ ID NO: 183348 - DNA, 13 bp, Artificial Sequence
  Oligonucleotide for detection of SNP TSC0045269
ttacttcacctaa

SEQ ID NO: 183349 - DNA, 13 bp, Artificial Sequence
  Oligonucleotide for detection of SNP TSC0045269
ttaggtaaagtaa

SEQ ID NO: 183350 - DNA, 13 bp, Artificial Sequence
  Oligonucleotide for detection of SNP TSC0045269
ttactttacctaa

SEQ ID NO: 183351 - DNA, 13 bp, Artificial Sequence
  Oligonucleotide for detection of SNP TSC0045272
attttaagaaaag

SEQ ID NO: 183352 - DNA, 13 bp, Artificial Sequence
  Oligonucleotide for detection of SNP TSC0045272
cttttcttaaaat

SEQ ID NO: 183353 - DNA, 13 bp, Artificial Sequence
  Oligonucleotide for detection of SNP TSC0045272
attttaggaaaag

SEQ ID NO: 183354 - DNA, 13 bp, Artificial Sequence
  Oligonucleotide for detection of SNP TSC0045272
cttttcctaaaat

SEQ ID NO: 183355 - DNA, 13 bp, Artificial Sequence
  Oligonucleotide for detection of SNP TSC0045273
ttagttgatagta

SEQ ID NO: 183356 - DNA, 13 bp, Artificial Sequence
  Oligonucleotide for detection of SNP TSC0045273
tactatcaactaa

SEQ ID NO: 183357 - DNA, 13 bp, Artificial Sequence
  Oligonucleotide for detection of SNP TSC0045273
ttagttaatagta

SEQ ID NO: 183358 - DNA, 13 bp, Artificial Sequence
  Oligonucleotide for detection of SNP TSC0045273
tactattaactaa

SEQ ID NO: 183359 - DNA, 13 bp, Artificial Sequence
  Oligonucleotide for detection of SNP TSC0045274
aatgttatgaggg

SEQ ID NO: 183360 - DNA, 13 bp, Artificial Sequence
  Oligonucleotide for detection of SNP TSC0045274
ccctcataacatt

SEQ ID NO: 183361 - DNA, 13 bp, Artificial Sequence
  Oligonucleotide for detection of SNP TSC0045274
aatgttttgaggg

SEQ ID NO: 183362 - DNA, 13 bp, Artificial Sequence
  Oligonucleotide for detection of SNP TSC0045274
ccctcaaaacatt

SEQ ID NO: 183363 - DNA, 13 bp, Artificial Sequence
  Oligonucleotide for detection of SNP TSC0045278
gtgatttgtttgg

SEQ ID NO: 183364 - DNA, 13 bp, Artificial Sequence
  Oligonucleotide for detection of SNP TSC0045278
ccaaacaaatcac

SEQ ID NO: 183365 - DNA, 13 bp, Artificial Sequence
  Oligonucleotide for detection of SNP TSC0045278
gtgattcgtttgg

SEQ ID NO: 183366 - DNA, 13 bp, Artificial Sequence
  Oligonucleotide for detection of SNP TSC0045278
ccaaacgaatcac

SEQ ID NO: 183367 - DNA, 13 bp, Artificial Sequence
  Oligonucleotide for detection of SNP TSC0045278
ttaagtggattay

SEQ ID NO: 183368 - DNA, 13 bp, Artificial Sequence
  Oligonucleotide for detection of SNP TSC0045278
rtaatccacttaa

SEQ ID NO: 183369 - DNA, 13 bp, Artificial Sequence
  Oligonucleotide for detection of SNP TSC0045278
ttaagtagattay

SEQ ID NO: 183370 - DNA, 13 bp, Artificial Sequence
  Oligonucleotide for detection of SNP TSC0045278
rtaatctacttaa

SEQ ID NO: 183371 - DNA, 13 bp, Artificial Sequence
  Oligonucleotide for detection of SNP TSC0045278
ttaagcggattay

SEQ ID NO: 183372 - DNA, 13 bp, Artificial Sequence
  Oligonucleotide for detection of SNP TSC0045278
rtaatccgcttaa

SEQ ID NO: 183373 - DNA, 13 bp, Artificial Sequence
  Oligonucleotide for detection of SNP TSC0045279
gttagagttaaga

SEQ ID NO: 183374 - DNA, 13 bp, Artificial Sequence
  Oligonucleotide for detection of SNP TSC0045279
tcttaactctaac

SEQ ID NO: 183375 - DNA, 13 bp, Artificial Sequence
  Oligonucleotide for detection of SNP TSC0045279
gttagaattaaga

SEQ ID NO: 183376 - DNA, 13 bp, Artificial Sequence
  Oligonucleotide for detection of SNP TSC0045279
tcttaattctaac

SEQ ID NO: 183377 - DNA, 13 bp, Artificial Sequence
  Oligonucleotide for detection of SNP TSC0045280
gtttatatgattt

SEQ ID NO: 183378 - DNA, 13 bp, Artificial Sequence
  Oligonucleotide for detection of SNP TSC0045280
aaatcatataaac

SEQ ID NO: 183379 - DNA, 13 bp, Artificial Sequence
  Oligonucleotide for detection of SNP TSC0045280
gtttatgtgattt

SEQ ID NO: 183380 - DNA, 13 bp, Artificial Sequence
  Oligonucleotide for detection of SNP TSC0045280
aaatcacataaac

SEQ ID NO: 183381 - DNA, 13 bp, Artificial Sequence
  Oligonucleotide for detection of SNP TSC0045280
gtttacgtgattt

SEQ ID NO: 183382 - DNA, 13 bp, Artificial Sequence
  Oligonucleotide for detection of SNP TSC0045280
aaatcacgtaaac

SEQ ID NO: 183383 - DNA, 13 bp, Artificial Sequence
  Oligonucleotide for detection of SNP TSC0045280
aggttatgtgagy

SEQ ID NO: 183384 - DNA, 13 bp, Artificial Sequence
  Oligonucleotide for detection of SNP TSC0045280
rctcacataacct

SEQ ID NO: 183385 - DNA, 13 bp, Artificial Sequence
  Oligonucleotide for detection of SNP TSC0045280
aggttacgtgagy

SEQ ID NO: 183386 - DNA, 13 bp, Artificial Sequence
  Oligonucleotide for detection of SNP TSC0045280
rctcacgtaacct

SEQ ID NO: 183387 - DNA, 13 bp, Artificial Sequence
  Oligonucleotide for detection of SNP TSC0045281
tataatgtttgaa

SEQ ID NO: 183388 - DNA, 13 bp, Artificial Sequence
  Oligonucleotide for detection of SNP TSC0045281
ttcaaacattata

SEQ ID NO: 183389 - DNA, 13 bp, Artificial Sequence
  Oligonucleotide for detection of SNP TSC0045281
tataatatttgaa

SEQ ID NO: 183390 - DNA, 13 bp, Artificial Sequence
  Oligonucleotide for detection of SNP TSC0045281
ttcaaatattata

SEQ ID NO: 183391 - DNA, 13 bp, Artificial Sequence
  Oligonucleotide for detection of SNP TSC0045282
agtggaaaggggt

SEQ ID NO: 183392 - DNA, 13 bp, Artificial Sequence
  Oligonucleotide for detection of SNP TSC0045282
acccctttccact

SEQ ID NO: 183393 - DNA, 13 bp, Artificial Sequence
  Oligonucleotide for detection of SNP TSC0045282
agtggagaggggt

SEQ ID NO: 183394 - DNA, 13 bp, Artificial Sequence
  Oligonucleotide for detection of SNP TSC0045282
acccctctccact

SEQ ID NO: 183395 - DNA, 13 bp, Artificial Sequence
  Oligonucleotide for detection of SNP TSC0045282
agcggaaaggggt

SEQ ID NO: 183396 - DNA, 13 bp, Artificial Sequence
  Oligonucleotide for detection of SNP TSC0045282
acccctttccgct

SEQ ID NO: 183397 - DNA, 13 bp, Artificial Sequence
  Oligonucleotide for detection of SNP TSC0045282
agcggagaggggt

SEQ ID NO: 183398 - DNA, 13 bp, Artificial Sequence
  Oligonucleotide for detection of SNP TSC0045282
acccctctccgct

SEQ ID NO: 183399 - DNA, 13 bp, Artificial Sequence
  Oligonucleotide for detection of SNP TSC0045283
agatgaaggtttt

SEQ ID NO: 183400 - DNA, 13 bp, Artificial Sequence
  Oligonucleotide for detection of SNP TSC0045283
aaaaccttcatct

SEQ ID NO: 183401 - DNA, 13 bp, Artificial Sequence
  Oligonucleotide for detection of SNP TSC0045283
agatgagggtttt

SEQ ID NO: 183402 - DNA, 13 bp, Artificial Sequence
  Oligonucleotide for detection of SNP TSC0045283
aaaaccctcatct

SEQ ID NO: 183403 - DNA, 13 bp, Artificial Sequence
  Oligonucleotide for detection of SNP TSC0045284
gttaggatataay

SEQ ID NO: 183404 - DNA, 13 bp, Artificial Sequence
  Oligonucleotide for detection of SNP TSC0045284
rttatatcctaac

SEQ ID NO: 183405 - DNA, 13 bp, Artificial Sequence
  Oligonucleotide for detection of SNP TSC0045284
gttagggtataay

SEQ ID NO: 183406 - DNA, 13 bp, Artificial Sequence
  Oligonucleotide for detection of SNP TSC0045284
rttataccctaac

SEQ ID NO: 183407 - DNA, 13 bp, Artificial Sequence
  Oligonucleotide for detection of SNP TSC0045285
tttgtaattatta

SEQ ID NO: 183408 - DNA, 13 bp, Artificial Sequence
  Oligonucleotide for detection of SNP TSC0045285
taataattacaaa

SEQ ID NO: 183409 - DNA, 13 bp, Artificial Sequence
  Oligonucleotide for detection of SNP TSC0045285
tttgtatttatta

SEQ ID NO: 183410 - DNA, 13 bp, Artificial Sequence
  Oligonucleotide for detection of SNP TSC0045285
taataaatacaaa

SEQ ID NO: 183411 - DNA, 13 bp, Artificial Sequence
  Oligonucleotide for detection of SNP TSC0045285
tggtgattgtaaa

SEQ ID NO: 183412 - DNA, 13 bp, Artificial Sequence
  Oligonucleotide for detection of SNP TSC0045285
tttacaatcacca

SEQ ID NO: 183413 - DNA, 13 bp, Artificial Sequence
  Oligonucleotide for detection of SNP TSC0045285
tggtgagtgtaaa

SEQ ID NO: 183414 - DNA, 13 bp, Artificial Sequence
  Oligonucleotide for detection of SNP TSC0045285
tttacactcacca

SEQ ID NO: 183415 - DNA, 13 bp, Artificial Sequence
  Oligonucleotide for detection of SNP TSC0045288
aaaaataagattt

SEQ ID NO: 183416 - DNA, 13 bp, Artificial Sequence
  Oligonucleotide for detection of SNP TSC0045288
aaatcttattttt

SEQ ID NO: 183417 - DNA, 13 bp, Artificial Sequence
  Oligonucleotide for detection of SNP TSC0045288
aaaaattagattt

SEQ ID NO: 183418 - DNA, 13 bp, Artificial Sequence
  Oligonucleotide for detection of SNP TSC0045288
aaatctaattttt

SEQ ID NO: 183419 - DNA, 13 bp, Artificial Sequence
  Oligonucleotide for detection of SNP TSC0045288
aggttttattttt

SEQ ID NO: 183420 - DNA, 13 bp, Artificial Sequence
  Oligonucleotide for detection of SNP TSC0045288
aaaaataaaacct

SEQ ID NO: 183421 - DNA, 13 bp, Artificial Sequence
  Oligonucleotide for detection of SNP TSC0045288
aggtttgattttt

SEQ ID NO: 183422 - DNA, 13 bp, Artificial Sequence
  Oligonucleotide for detection of SNP TSC0045288
aaaaatcaaacct

SEQ ID NO: 183423 - DNA, 13 bp, Artificial Sequence
  Oligonucleotide for detection of SNP TSC0045289
ttagtaattaaat

SEQ ID NO: 183424 - DNA, 13 bp, Artificial Sequence
  Oligonucleotide for detection of SNP TSC0045289
atttaattactaa

SEQ ID NO: 183425 - DNA, 13 bp, Artificial Sequence
  Oligonucleotide for detection of SNP TSC0045289
ttagtatttaaat

SEQ ID NO: 183426 - DNA, 13 bp, Artificial Sequence
  Oligonucleotide for detection of SNP TSC0045289
atttaaatactaa

SEQ ID NO: 183427 - DNA, 13 bp, Artificial Sequence
  Oligonucleotide for detection of SNP TSC0045289
atttagttattga

SEQ ID NO: 183428 - DNA, 13 bp, Artificial Sequence
  Oligonucleotide for detection of SNP TSC0045289
tcaataactaaat

SEQ ID NO: 183429 - DNA, 13 bp, Artificial Sequence
  Oligonucleotide for detection of SNP TSC0045289
atttagatattga

SEQ ID NO: 183430 - DNA, 13 bp, Artificial Sequence
  Oligonucleotide for detection of SNP TSC0045289
tcaatatctaaat

SEQ ID NO: 183431 - DNA, 13 bp, Artificial Sequence
  Oligonucleotide for detection of SNP TSC0045290
aaattcgaattag

SEQ ID NO: 183432 - DNA, 13 bp, Artificial Sequence
  Oligonucleotide for detection of SNP TSC0045290
ctaattcgaattt

SEQ ID NO: 183433 - DNA, 13 bp, Artificial Sequence
  Oligonucleotide for detection of SNP TSC0045290
ttaatttgagttt

SEQ ID NO: 183434 - DNA, 13 bp, Artificial Sequence
  Oligonucleotide for detection of SNP TSC0045290
aaactcaaattaa

SEQ ID NO: 183435 - DNA, 13 bp, Artificial Sequence
  Oligonucleotide for detection of SNP TSC0045290
ttaattcgagttt

SEQ ID NO: 183436 - DNA, 13 bp, Artificial Sequence
  Oligonucleotide for detection of SNP TSC0045290
aaactcgaattaa

SEQ ID NO: 183437 - DNA, 13 bp, Artificial Sequence
  Oligonucleotide for detection of SNP TSC0045291
ttatatattttta

SEQ ID NO: 183438 - DNA, 13 bp, Artificial Sequence
  Oligonucleotide for detection of SNP TSC0045291
taaaaatatataa

SEQ ID NO: 183439 - DNA, 13 bp, Artificial Sequence
  Oligonucleotide for detection of SNP TSC0045291
ttatattttttta

SEQ ID NO: 183440 - DNA, 13 bp, Artificial Sequence
  Oligonucleotide for detection of SNP TSC0045291
taaaaaaatataa

SEQ ID NO: 183441 - DNA, 13 bp, Artificial Sequence
  Oligonucleotide for detection of SNP TSC0045291
tgggggtatgtga

SEQ ID NO: 183442 - DNA, 13 bp, Artificial Sequence
  Oligonucleotide for detection of SNP TSC0045291
tcacataccccca

SEQ ID NO: 183443 - DNA, 13 bp, Artificial Sequence
  Oligonucleotide for detection of SNP TSC0045291
tggggggatgtga

SEQ ID NO: 183444 - DNA, 13 bp, Artificial Sequence
  Oligonucleotide for detection of SNP TSC0045291
tcacatcccccca

SEQ ID NO: 183445 - DNA, 13 bp, Artificial Sequence
  Oligonucleotide for detection of SNP TSC0045292
aatatggagtaga

SEQ ID NO: 183446 - DNA, 13 bp, Artificial Sequence
  Oligonucleotide for detection of SNP TSC0045292
tctactccatatt

SEQ ID NO: 183447 - DNA, 13 bp, Artificial Sequence
  Oligonucleotide for detection of SNP TSC0045292
aatatgaagtaga

SEQ ID NO: 183448 - DNA, 13 bp, Artificial Sequence
  Oligonucleotide for detection of SNP TSC0045292
tctacttcatatt

SEQ ID NO: 183449 - DNA, 13 bp, Artificial Sequence
  Oligonucleotide for detection of SNP TSC0045295
atgttaaatttaa

SEQ ID NO: 183450 - DNA, 13 bp, Artificial Sequence
  Oligonucleotide for detection of SNP TSC0045295
ttaaatttaacat

SEQ ID NO: 183451 - DNA, 13 bp, Artificial Sequence
  Oligonucleotide for detection of SNP TSC0045295
atgttatatttaa

SEQ ID NO: 183452 - DNA, 13 bp, Artificial Sequence
  Oligonucleotide for detection of SNP TSC0045295
ttaaatataacat

SEQ ID NO: 183453 - DNA, 13 bp, Artificial Sequence
  Oligonucleotide for detection of SNP TSC0045295
ttggatttgatat

SEQ ID NO: 183454 - DNA, 13 bp, Artificial Sequence
  Oligonucleotide for detection of SNP TSC0045295
atatcaaatccaa

SEQ ID NO: 183455 - DNA, 13 bp, Artificial Sequence
  Oligonucleotide for detection of SNP TSC0045295
ttggatgtgatat

SEQ ID NO: 183456 - DNA, 13 bp, Artificial Sequence
  Oligonucleotide for detection of SNP TSC0045295
atatcacatccaa

SEQ ID NO: 183457 - DNA, 13 bp, Artificial Sequence
  Oligonucleotide for detection of SNP TSC0045296
tagaatgtttgga

SEQ ID NO: 183458 - DNA, 13 bp, Artificial Sequence
  Oligonucleotide for detection of SNP TSC0045296
tccaaacattcta

SEQ ID NO: 183459 - DNA, 13 bp, Artificial Sequence
  Oligonucleotide for detection of SNP TSC0045298
gtggtattatttt

SEQ ID NO: 183460 - DNA, 13 bp, Artificial Sequence
  Oligonucleotide for detection of SNP TSC0045298
aaaataataccac

SEQ ID NO: 183461 - DNA, 13 bp, Artificial Sequence
  Oligonucleotide for detection of SNP TSC0045298
gtggtagtatttt

SEQ ID NO: 183462 - DNA, 13 bp, Artificial Sequence
  Oligonucleotide for detection of SNP TSC0045298
aaaatactaccac

SEQ ID NO: 183463 - DNA, 13 bp, Artificial Sequence
  Oligonucleotide for detection of SNP TSC0045298
aagatggtgttay

SEQ ID NO: 183464 - DNA, 13 bp, Artificial Sequence
  Oligonucleotide for detection of SNP TSC0045298
rtaacaccatctt

SEQ ID NO: 183465 - DNA, 13 bp, Artificial Sequence
  Oligonucleotide for detection of SNP TSC0045298
aagatgttgttay

SEQ ID NO: 183466 - DNA, 13 bp, Artificial Sequence
  Oligonucleotide for detection of SNP TSC0045298
rtaacaacatctt

SEQ ID NO: 183467 - DNA, 13 bp, Artificial Sequence
  Oligonucleotide for detection of SNP TSC0045299
aaaaaaataatta

SEQ ID NO: 183468 - DNA, 13 bp, Artificial Sequence
  Oligonucleotide for detection of SNP TSC0045299
taattattttttt

SEQ ID NO: 183469 - DNA, 13 bp, Artificial Sequence
  Oligonucleotide for detection of SNP TSC0045299
aaaaaagtaatta

SEQ ID NO: 183470 - DNA, 13 bp, Artificial Sequence
  Oligonucleotide for detection of SNP TSC0045299
taattactttttt

SEQ ID NO: 183471 - DNA, 13 bp, Artificial Sequence
  Oligonucleotide for detection of SNP TSC0045305
aaaataatgtggt

SEQ ID NO: 183472 - DNA, 13 bp, Artificial Sequence
  Oligonucleotide for detection of SNP TSC0045305
accacattatttt

SEQ ID NO: 183473 - DNA, 13 bp, Artificial Sequence
  Oligonucleotide for detection of SNP TSC0045305
aaaatattgtggt

SEQ ID NO: 183474 - DNA, 13 bp, Artificial Sequence
  Oligonucleotide for detection of SNP TSC0045305
accacaatatttt

SEQ ID NO: 183475 - DNA, 13 bp, Artificial Sequence
  Oligonucleotide for detection of SNP TSC0045307
ttattttgataaa

SEQ ID NO: 183476 - DNA, 13 bp, Artificial Sequence
  Oligonucleotide for detection of SNP TSC0045307
tttatcaaaataa

SEQ ID NO: 183477 - DNA, 13 bp, Artificial Sequence
  Oligonucleotide for detection of SNP TSC0045307
ttatttggataaa

SEQ ID NO: 183478 - DNA, 13 bp, Artificial Sequence
  Oligonucleotide for detection of SNP TSC0045307
tttatccaaataa

SEQ ID NO: 183479 - DNA, 13 bp, Artificial Sequence
  Oligonucleotide for detection of SNP TSC0045307
tttgttaagatgg

SEQ ID NO: 183480 - DNA, 13 bp, Artificial Sequence
  Oligonucleotide for detection of SNP TSC0045307
ccatcttaacaaa

SEQ ID NO: 183481 - DNA, 13 bp, Artificial Sequence
  Oligonucleotide for detection of SNP TSC0045307
tttgtttagatgg

SEQ ID NO: 183482 - DNA, 13 bp, Artificial Sequence
  Oligonucleotide for detection of SNP TSC0045307
ccatctaaacaaa

SEQ ID NO: 183483 - DNA, 13 bp, Artificial Sequence
  Oligonucleotide for detection of SNP TSC0045308
gtataagatagat

SEQ ID NO: 183484 - DNA, 13 bp, Artificial Sequence
  Oligonucleotide for detection of SNP TSC0045308
atctatcttatac

SEQ ID NO: 183485 - DNA, 13 bp, Artificial Sequence
  Oligonucleotide for detection of SNP TSC0045308
gtataaaatagat

SEQ ID NO: 183486 - DNA, 13 bp, Artificial Sequence
  Oligonucleotide for detection of SNP TSC0045308
atctattttatac

SEQ ID NO: 183487 - DNA, 13 bp, Artificial Sequence
  Oligonucleotide for detection of SNP TSC0045309
atttgagaagtty

SEQ ID NO: 183488 - DNA, 13 bp, Artificial Sequence
  Oligonucleotide for detection of SNP TSC0045309
raacttctcaaat

SEQ ID NO: 183489 - DNA, 13 bp, Artificial Sequence
  Oligonucleotide for detection of SNP TSC0045309
atttgaaaagtty

SEQ ID NO: 183490 - DNA, 13 bp, Artificial Sequence
  Oligonucleotide for detection of SNP TSC0045309
raacttttcaaat

SEQ ID NO: 183491 - DNA, 13 bp, Artificial Sequence
  Oligonucleotide for detection of SNP TSC0045313
tttaagtatttta

SEQ ID NO: 183492 - DNA, 13 bp, Artificial Sequence
  Oligonucleotide for detection of SNP TSC0045313
taaaatacttaaa

SEQ ID NO: 183493 - DNA, 13 bp, Artificial Sequence
  Oligonucleotide for detection of SNP TSC0045313
taagatttttaag

SEQ ID NO: 183494 - DNA, 13 bp, Artificial Sequence
  Oligonucleotide for detection of SNP TSC0045313
cttaaaaatctta

SEQ ID NO: 183495 - DNA, 13 bp, Artificial Sequence
  Oligonucleotide for detection of SNP TSC0045313
taagatatttaag

SEQ ID NO: 183496 - DNA, 13 bp, Artificial Sequence
  Oligonucleotide for detection of SNP TSC0045313
cttaaatatctta

SEQ ID NO: 183497 - DNA, 13 bp, Artificial Sequence
  Oligonucleotide for detection of SNP TSC0045314
agaggaagagaag

SEQ ID NO: 183498 - DNA, 13 bp, Artificial Sequence
  Oligonucleotide for detection of SNP TSC0045314
cttctcttcctct

SEQ ID NO: 183499 - DNA, 13 bp, Artificial Sequence
  Oligonucleotide for detection of SNP TSC0045314
agaggaggagaag

SEQ ID NO: 183500 - DNA, 13 bp, Artificial Sequence
  Oligonucleotide for detection of SNP TSC0045314
cttctcctcctct

SEQ ID NO: 183501 - DNA, 13 bp, Artificial Sequence
  Oligonucleotide for detection of SNP TSC0045315
gtatgaaatagty

SEQ ID NO: 183502 - DNA, 13 bp, Artificial Sequence
  Oligonucleotide for detection of SNP TSC0045315
ractatttcatac

SEQ ID NO: 183503 - DNA, 13 bp, Artificial Sequence
  Oligonucleotide for detection of SNP TSC0045315
gtatgagatagty

SEQ ID NO: 183504 - DNA, 13 bp, Artificial Sequence
  Oligonucleotide for detection of SNP TSC0045315
ractatctcatac

SEQ ID NO: 183505 - DNA, 13 bp, Artificial Sequence
  Oligonucleotide for detection of SNP TSC0045316
aatgggttgaagg

SEQ ID NO: 183506 - DNA, 13 bp, Artificial Sequence
  Oligonucleotide for detection of SNP TSC0045316
ccttcaacccatt

SEQ ID NO: 183507 - DNA, 13 bp, Artificial Sequence
  Oligonucleotide for detection of SNP TSC0045316
aatgggatgaagg

SEQ ID NO: 183508 - DNA, 13 bp, Artificial Sequence
  Oligonucleotide for detection of SNP TSC0045316
ccttcatcccatt

SEQ ID NO: 183509 - DNA, 13 bp, Artificial Sequence
  Oligonucleotide for detection of SNP TSC0045318
gaggattgaaggy

SEQ ID NO: 183510 - DNA, 13 bp, Artificial Sequence
  Oligonucleotide for detection of SNP TSC0045318
rccttcaatcctc

SEQ ID NO: 183511 - DNA, 13 bp, Artificial Sequence
  Oligonucleotide for detection of SNP TSC0045318
gaggatcgaaggy

SEQ ID NO: 183512 - DNA, 13 bp, Artificial Sequence
  Oligonucleotide for detection of SNP TSC0045318
rccttcgatcctc

SEQ ID NO: 183513 - DNA, 13 bp, Artificial Sequence
  Oligonucleotide for detection of SNP TSC0045321
atataagggatta

SEQ ID NO: 183514 - DNA, 13 bp, Artificial Sequence
  Oligonucleotide for detection of SNP TSC0045321
taatcccttatat

SEQ ID NO: 183515 - DNA, 13 bp, Artificial Sequence
  Oligonucleotide for detection of SNP TSC0045322
attgattgaatgg

SEQ ID NO: 183516 - DNA, 13 bp, Artificial Sequence
  Oligonucleotide for detection of SNP TSC0045322
ccattcaatcaat

SEQ ID NO: 183517 - DNA, 13 bp, Artificial Sequence
  Oligonucleotide for detection of SNP TSC0045322
attgatcgaatgg

SEQ ID NO: 183518 - DNA, 13 bp, Artificial Sequence
  Oligonucleotide for detection of SNP TSC0045322
ccattcgatcaat

SEQ ID NO: 183519 - DNA, 13 bp, Artificial Sequence
  Oligonucleotide for detection of SNP TSC0045322
ttatttgattagt

SEQ ID NO: 183520 - DNA, 13 bp, Artificial Sequence
  Oligonucleotide for detection of SNP TSC0045322
actaatcaaataa

SEQ ID NO: 183521 - DNA, 13 bp, Artificial Sequence
  Oligonucleotide for detection of SNP TSC0045322
ttatttaattagt

SEQ ID NO: 183522 - DNA, 13 bp, Artificial Sequence
  Oligonucleotide for detection of SNP TSC0045322
actaattaaataa

SEQ ID NO: 183523 - DNA, 13 bp, Artificial Sequence
  Oligonucleotide for detection of SNP TSC0045322
ttattcgattagt

SEQ ID NO: 183524 - DNA, 13 bp, Artificial Sequence
  Oligonucleotide for detection of SNP TSC0045322
actaatcgaataa

SEQ ID NO: 183525 - DNA, 13 bp, Artificial Sequence
  Oligonucleotide for detection of SNP TSC0045323
gaagatatatagg

SEQ ID NO: 183526 - DNA, 13 bp, Artificial Sequence
  Oligonucleotide for detection of SNP TSC0045323
cctatatatcttc

SEQ ID NO: 183527 - DNA, 13 bp, Artificial Sequence
  Oligonucleotide for detection of SNP TSC0045323
gaagatttatagg

SEQ ID NO: 183528 - DNA, 13 bp, Artificial Sequence
  Oligonucleotide for detection of SNP TSC0045323
cctataaatcttc

SEQ ID NO: 183529 - DNA, 13 bp, Artificial Sequence
  Oligonucleotide for detection of SNP TSC0045324
taaaatggattta

SEQ ID NO: 183530 - DNA, 13 bp, Artificial Sequence
  Oligonucleotide for detection of SNP TSC0045324
taaatccatttta

SEQ ID NO: 183531 - DNA, 13 bp, Artificial Sequence
  Oligonucleotide for detection of SNP TSC0045325
gtgtaatagattt

SEQ ID NO: 183532 - DNA, 13 bp, Artificial Sequence
  Oligonucleotide for detection of SNP TSC0045325
aaatctattacac

SEQ ID NO: 183533 - DNA, 13 bp, Artificial Sequence
  Oligonucleotide for detection of SNP TSC0045325
gtgtaagagattt

SEQ ID NO: 183534 - DNA, 13 bp, Artificial Sequence
  Oligonucleotide for detection of SNP TSC0045325
aaatctcttacac

SEQ ID NO: 183535 - DNA, 13 bp, Artificial Sequence
  Oligonucleotide for detection of SNP TSC0045325
aaatttgttgtay

SEQ ID NO: 183536 - DNA, 13 bp, Artificial Sequence
  Oligonucleotide for detection of SNP TSC0045325
rtacaacaaattt

SEQ ID NO: 183537 - DNA, 13 bp, Artificial Sequence
  Oligonucleotide for detection of SNP TSC0045325
aaattttttgtay

SEQ ID NO: 183538 - DNA, 13 bp, Artificial Sequence
  Oligonucleotide for detection of SNP TSC0045325
rtacaaaaaattt

SEQ ID NO: 183539 - DNA, 13 bp, Artificial Sequence
  Oligonucleotide for detection of SNP TSC0045326
ggtgtatgtttgt

SEQ ID NO: 183540 - DNA, 13 bp, Artificial Sequence
  Oligonucleotide for detection of SNP TSC0045326
acaaacatacacc

SEQ ID NO: 183541 - DNA, 13 bp, Artificial Sequence
  Oligonucleotide for detection of SNP TSC0045326
ggtgtacgtttgt

SEQ ID NO: 183542 - DNA, 13 bp, Artificial Sequence
  Oligonucleotide for detection of SNP TSC0045326
acaaacgtacacc

SEQ ID NO: 183543 - DNA, 13 bp, Artificial Sequence
  Oligonucleotide for detection of SNP TSC0045328
aaaaatataatag

SEQ ID NO: 183544 - DNA, 13 bp, Artificial Sequence
  Oligonucleotide for detection of SNP TSC0045328
ctattatattttt

SEQ ID NO: 183545 - DNA, 13 bp, Artificial Sequence
  Oligonucleotide for detection of SNP TSC0045328
aaaaatttaatag

SEQ ID NO: 183546 - DNA, 13 bp, Artificial Sequence
  Oligonucleotide for detection of SNP TSC0045328
ctattaaattttt

SEQ ID NO: 183547 - DNA, 13 bp, Artificial Sequence
  Oligonucleotide for detection of SNP TSC0045329
ttaagtatattgg

SEQ ID NO: 183548 - DNA, 13 bp, Artificial Sequence
  Oligonucleotide for detection of SNP TSC0045329
ccaatatacttaa

SEQ ID NO: 183549 - DNA, 13 bp, Artificial Sequence
  Oligonucleotide for detection of SNP TSC0045329
ttaagtgtattgg

SEQ ID NO: 183550 - DNA, 13 bp, Artificial Sequence
  Oligonucleotide for detection of SNP TSC0045329
ccaatacacttaa

SEQ ID NO: 183551 - DNA, 13 bp, Artificial Sequence
  Oligonucleotide for detection of SNP TSC0045329
ttaagcgtattgg

SEQ ID NO: 183552 - DNA, 13 bp, Artificial Sequence
  Oligonucleotide for detection of SNP TSC0045329
ccaatacgcttaa

SEQ ID NO: 183553 - DNA, 13 bp, Artificial Sequence
  Oligonucleotide for detection of SNP TSC0045329
ttaatatgtttaa

SEQ ID NO: 183554 - DNA, 13 bp, Artificial Sequence
  Oligonucleotide for detection of SNP TSC0045329
ttaaacatattaa

SEQ ID NO: 183555 - DNA, 13 bp, Artificial Sequence
  Oligonucleotide for detection of SNP TSC0045333
ggatatgtgtata

SEQ ID NO: 183556 - DNA, 13 bp, Artificial Sequence
  Oligonucleotide for detection of SNP TSC0045333
tatacacatatcc

SEQ ID NO: 183557 - DNA, 13 bp, Artificial Sequence
  Oligonucleotide for detection of SNP TSC0045333
ggatatatgtata

SEQ ID NO: 183558 - DNA, 13 bp, Artificial Sequence
  Oligonucleotide for detection of SNP TSC0045333
tatacatatatcc

SEQ ID NO: 183559 - DNA, 13 bp, Artificial Sequence
  Oligonucleotide for detection of SNP TSC0045334
tgtttatatttat

SEQ ID NO: 183560 - DNA, 13 bp, Artificial Sequence
  Oligonucleotide for detection of SNP TSC0045334
ataaatataaaca

SEQ ID NO: 183561 - DNA, 13 bp, Artificial Sequence
  Oligonucleotide for detection of SNP TSC0045334
atgaatttggata

SEQ ID NO: 183562 - DNA, 13 bp, Artificial Sequence
  Oligonucleotide for detection of SNP TSC0045334
tatccaaattcat

SEQ ID NO: 183563 - DNA, 13 bp, Artificial Sequence
  Oligonucleotide for detection of SNP TSC0045334
atgaatatggata

SEQ ID NO: 183564 - DNA, 13 bp, Artificial Sequence
  Oligonucleotide for detection of SNP TSC0045334
tatccatattcat

SEQ ID NO: 183565 - DNA, 13 bp, Artificial Sequence
  Oligonucleotide for detection of SNP TSC0045335
tatatagtgtgat

SEQ ID NO: 183566 - DNA, 13 bp, Artificial Sequence
  Oligonucleotide for detection of SNP TSC0045335
atcacactatata

SEQ ID NO: 183567 - DNA, 13 bp, Artificial Sequence
  Oligonucleotide for detection of SNP TSC0045335
tatataatgtgat

SEQ ID NO: 183568 - DNA, 13 bp, Artificial Sequence
  Oligonucleotide for detection of SNP TSC0045335
atcacattatata

SEQ ID NO: 183569 - DNA, 13 bp, Artificial Sequence
  Oligonucleotide for detection of SNP TSC0045336
gaggtttaggagg

SEQ ID NO: 183570 - DNA, 13 bp, Artificial Sequence
  Oligonucleotide for detection of SNP TSC0045336
cctcctaaacctc

SEQ ID NO: 183571 - DNA, 13 bp, Artificial Sequence
  Oligonucleotide for detection of SNP TSC0045336
gaggttgaggagg

SEQ ID NO: 183572 - DNA, 13 bp, Artificial Sequence
  Oligonucleotide for detection of SNP TSC0045336
cctcctcaacctc

SEQ ID NO: 183573 - DNA, 13 bp, Artificial Sequence
  Oligonucleotide for detection of SNP TSC0045336
gaggttaaggagg

SEQ ID NO: 183574 - DNA, 13 bp, Artificial Sequence
  Oligonucleotide for detection of SNP TSC0045336
cctccttaacctc

SEQ ID NO: 183575 - DNA, 13 bp, Artificial Sequence
  Oligonucleotide for detection of SNP TSC0045337
tggttaaattata

SEQ ID NO: 183576 - DNA, 13 bp, Artificial Sequence
  Oligonucleotide for detection of SNP TSC0045337
tataatttaacca

SEQ ID NO: 183577 - DNA, 13 bp, Artificial Sequence
  Oligonucleotide for detection of SNP TSC0045337
tggttatattata

SEQ ID NO: 183578 - DNA, 13 bp, Artificial Sequence
  Oligonucleotide for detection of SNP TSC0045337
tataatataacca

SEQ ID NO: 183579 - DNA, 13 bp, Artificial Sequence
  Oligonucleotide for detection of SNP TSC0045337
tggttagattata

SEQ ID NO: 183580 - DNA, 13 bp, Artificial Sequence
  Oligonucleotide for detection of SNP TSC0045337
tataatctaacca

SEQ ID NO: 183581 - DNA, 13 bp, Artificial Sequence
  Oligonucleotide for detection of SNP TSC0045337
tgtaatttgatta

SEQ ID NO: 183582 - DNA, 13 bp, Artificial Sequence
  Oligonucleotide for detection of SNP TSC0045337
taatcaaattaca

SEQ ID NO: 183583 - DNA, 13 bp, Artificial Sequence
  Oligonucleotide for detection of SNP TSC0045337
tgtaatgtgatta

SEQ ID NO: 183584 - DNA, 13 bp, Artificial Sequence
  Oligonucleotide for detection of SNP TSC0045337
taatcacattaca

SEQ ID NO: 183585 - DNA, 13 bp, Artificial Sequence
  Oligonucleotide for detection of SNP TSC0045339
ataaatgggaaaa

SEQ ID NO: 183586 - DNA, 13 bp, Artificial Sequence
  Oligonucleotide for detection of SNP TSC0045339
ttttcccatttat

SEQ ID NO: 183587 - DNA, 13 bp, Artificial Sequence
  Oligonucleotide for detection of SNP TSC0045339
ataaataggaaaa

SEQ ID NO: 183588 - DNA, 13 bp, Artificial Sequence
  Oligonucleotide for detection of SNP TSC0045339
ttttcctatttat

SEQ ID NO: 183589 - DNA, 13 bp, Artificial Sequence
  Oligonucleotide for detection of SNP TSC0045340
aattgtatagtaa

SEQ ID NO: 183590 - DNA, 13 bp, Artificial Sequence
  Oligonucleotide for detection of SNP TSC0045340
ttactatacaatt

SEQ ID NO: 183591 - DNA, 13 bp, Artificial Sequence
  Oligonucleotide for detection of SNP TSC0045340
aattgtgtagtaa

SEQ ID NO: 183592 - DNA, 13 bp, Artificial Sequence
  Oligonucleotide for detection of SNP TSC0045340
ttactacacaatt

SEQ ID NO: 183593 - DNA, 13 bp, Artificial Sequence
  Oligonucleotide for detection of SNP TSC0045340
aattgcgtagtaa

SEQ ID NO: 183594 - DNA, 13 bp, Artificial Sequence
  Oligonucleotide for detection of SNP TSC0045340
ttactacgcaatt

SEQ ID NO: 183595 - DNA, 13 bp, Artificial Sequence
  Oligonucleotide for detection of SNP TSC0045340
ttattatgtaatt

SEQ ID NO: 183596 - DNA, 13 bp, Artificial Sequence
  Oligonucleotide for detection of SNP TSC0045340
aattacataataa

SEQ ID NO: 183597 - DNA, 13 bp, Artificial Sequence
  Oligonucleotide for detection of SNP TSC0045340
ttattacgtaatt

SEQ ID NO: 183598 - DNA, 13 bp, Artificial Sequence
  Oligonucleotide for detection of SNP TSC0045340
aattacgtaataa

SEQ ID NO: 183599 - DNA, 13 bp, Artificial Sequence
  Oligonucleotide for detection of SNP TSC0045341
gagttaagtgttt

SEQ ID NO: 183600 - DNA, 13 bp, Artificial Sequence
  Oligonucleotide for detection of SNP TSC0045341
aaacacttaactc

SEQ ID NO: 183601 - DNA, 13 bp, Artificial Sequence
  Oligonucleotide for detection of SNP TSC0045341
agatatttaatty

SEQ ID NO: 183602 - DNA, 13 bp, Artificial Sequence
  Oligonucleotide for detection of SNP TSC0045341
raattaaatatct

SEQ ID NO: 183603 - DNA, 13 bp, Artificial Sequence
  Oligonucleotide for detection of SNP TSC0045341
agatatataatty

SEQ ID NO: 183604 - DNA, 13 bp, Artificial Sequence
  Oligonucleotide for detection of SNP TSC0045341
raattatatatct

SEQ ID NO: 183605 - DNA, 13 bp, Artificial Sequence
  Oligonucleotide for detection of SNP TSC0045343
aagttgagttttg

SEQ ID NO: 183606 - DNA, 13 bp, Artificial Sequence
  Oligonucleotide for detection of SNP TSC0045343
caaaactcaactt

SEQ ID NO: 183607 - DNA, 13 bp, Artificial Sequence
  Oligonucleotide for detection of SNP TSC0045343
aagttgtgttttg

SEQ ID NO: 183608 - DNA, 13 bp, Artificial Sequence
  Oligonucleotide for detection of SNP TSC0045343
caaaacacaactt

SEQ ID NO: 183609 - DNA, 13 bp, Artificial Sequence
  Oligonucleotide for detection of SNP TSC0045343
aagttgcgttttg

SEQ ID NO: 183610 - DNA, 13 bp, Artificial Sequence
  Oligonucleotide for detection of SNP TSC0045343
caaaacgcaactt

SEQ ID NO: 183611 - DNA, 13 bp, Artificial Sequence
  Oligonucleotide for detection of SNP TSC0045343
taaaatttaattt

SEQ ID NO: 183612 - DNA, 13 bp, Artificial Sequence
  Oligonucleotide for detection of SNP TSC0045343
aaattaaatttta

SEQ ID NO: 183613 - DNA, 13 bp, Artificial Sequence
  Oligonucleotide for detection of SNP TSC0045343
taaaatgtaattt

SEQ ID NO: 183614 - DNA, 13 bp, Artificial Sequence
  Oligonucleotide for detection of SNP TSC0045343
aaattacatttta

SEQ ID NO: 183615 - DNA, 13 bp, Artificial Sequence
  Oligonucleotide for detection of SNP TSC0045347
gttttagaatttt

SEQ ID NO: 183616 - DNA, 13 bp, Artificial Sequence
  Oligonucleotide for detection of SNP TSC0045347
aaaattctaaaac

SEQ ID NO: 183617 - DNA, 13 bp, Artificial Sequence
  Oligonucleotide for detection of SNP TSC0045347
aaaattatagggy

SEQ ID NO: 183618 - DNA, 13 bp, Artificial Sequence
  Oligonucleotide for detection of SNP TSC0045347
rccctataatttt

SEQ ID NO: 183619 - DNA, 13 bp, Artificial Sequence
  Oligonucleotide for detection of SNP TSC0045347
aaaattttagggy

SEQ ID NO: 183620 - DNA, 13 bp, Artificial Sequence
  Oligonucleotide for detection of SNP TSC0045347
rccctaaaatttt

SEQ ID NO: 183621 - DNA, 13 bp, Artificial Sequence
  Oligonucleotide for detection of SNP TSC0045352
gtttttgtaatty

SEQ ID NO: 183622 - DNA, 13 bp, Artificial Sequence
  Oligonucleotide for detection of SNP TSC0045352
raattacaaaaac

SEQ ID NO: 183623 - DNA, 13 bp, Artificial Sequence
  Oligonucleotide for detection of SNP TSC0045352
gttttcgtaatty

SEQ ID NO: 183624 - DNA, 13 bp, Artificial Sequence
  Oligonucleotide for detection of SNP TSC0045352
raattacgaaaac

SEQ ID NO: 183625 - DNA, 13 bp, Artificial Sequence
  Oligonucleotide for detection of SNP TSC0045352
ggattatgggaay

SEQ ID NO: 183626 - DNA, 13 bp, Artificial Sequence
  Oligonucleotide for detection of SNP TSC0045352
rttcccataatcc

SEQ ID NO: 183627 - DNA, 13 bp, Artificial Sequence
  Oligonucleotide for detection of SNP TSC0045352
ggattacgggaay

SEQ ID NO: 183628 - DNA, 13 bp, Artificial Sequence
  Oligonucleotide for detection of SNP TSC0045352
rttcccgtaatcc

SEQ ID NO: 183629 - DNA, 13 bp, Artificial Sequence
  Oligonucleotide for detection of SNP TSC0005955
ggtgttatttagg

SEQ ID NO: 183630 - DNA, 13 bp, Artificial Sequence
  Oligonucleotide for detection of SNP TSC0005955
cctaaataacacc

SEQ ID NO: 183631 - DNA, 13 bp, Artificial Sequence
  Oligonucleotide for detection of SNP TSC0005955
ggtgttgtttagg

SEQ ID NO: 183632 - DNA, 13 bp, Artificial Sequence
  Oligonucleotide for detection of SNP TSC0005955
cctaaacaacacc

SEQ ID NO: 183633 - DNA, 13 bp, Artificial Sequence
  Oligonucleotide for detection of SNP TSC0005956
gggatcgtaggta

SEQ ID NO: 183634 - DNA, 13 bp, Artificial Sequence
  Oligonucleotide for detection of SNP TSC0005956
tacctacgatccc

SEQ ID NO: 183635 - DNA, 13 bp, Artificial Sequence
  Oligonucleotide for detection of SNP TSC0005956
tgtttgtgattty

SEQ ID NO: 183636 - DNA, 13 bp, Artificial Sequence
  Oligonucleotide for detection of SNP TSC0005956
raaatcacaaaca

SEQ ID NO: 183637 - DNA, 13 bp, Artificial Sequence
  Oligonucleotide for detection of SNP TSC0005956
tgtttgcgattty

SEQ ID NO: 183638 - DNA, 13 bp, Artificial Sequence
  Oligonucleotide for detection of SNP TSC0005956
raaatcgcaaaca

SEQ ID NO: 183639 - DNA, 13 bp, Artificial Sequence
  Oligonucleotide for detection of SNP TSC0045355
taaatagtttgat

SEQ ID NO: 183640 - DNA, 13 bp, Artificial Sequence
  Oligonucleotide for detection of SNP TSC0045355
atcaaactattta

SEQ ID NO: 183641 - DNA, 13 bp, Artificial Sequence
  Oligonucleotide for detection of SNP TSC0045356
tattgtaaaaata

SEQ ID NO: 183642 - DNA, 13 bp, Artificial Sequence
  Oligonucleotide for detection of SNP TSC0045356
tatttttacaata

SEQ ID NO: 183643 - DNA, 13 bp, Artificial Sequence
  Oligonucleotide for detection of SNP TSC0045356
tattgtgaaaata

SEQ ID NO: 183644 - DNA, 13 bp, Artificial Sequence
  Oligonucleotide for detection of SNP TSC0045356
tattttcacaata

SEQ ID NO: 183645 - DNA, 13 bp, Artificial Sequence
  Oligonucleotide for detection of SNP TSC0045357
gaaaatggagtat

SEQ ID NO: 183646 - DNA, 13 bp, Artificial Sequence
  Oligonucleotide for detection of SNP TSC0045357
atactccattttc

SEQ ID NO: 183647 - DNA, 13 bp, Artificial Sequence
  Oligonucleotide for detection of SNP TSC0045357
gaaaatagagtat

SEQ ID NO: 183648 - DNA, 13 bp, Artificial Sequence
  Oligonucleotide for detection of SNP TSC0045357
atactctattttc

SEQ ID NO: 183649 - DNA, 13 bp, Artificial Sequence
  Oligonucleotide for detection of SNP TSC0045359
atggttgatttty

SEQ ID NO: 183650 - DNA, 13 bp, Artificial Sequence
  Oligonucleotide for detection of SNP TSC0045359
raaaatcaaccat

SEQ ID NO: 183651 - DNA, 13 bp, Artificial Sequence
  Oligonucleotide for detection of SNP TSC0045359
atggttaatttty

SEQ ID NO: 183652 - DNA, 13 bp, Artificial Sequence
  Oligonucleotide for detection of SNP TSC0045359
raaaattaaccat

SEQ ID NO: 183653 - DNA, 13 bp, Artificial Sequence
  Oligonucleotide for detection of SNP TSC0045360
atatttttgttgt

SEQ ID NO: 183654 - DNA, 13 bp, Artificial Sequence
  Oligonucleotide for detection of SNP TSC0045360
acaacaaaaatat

SEQ ID NO: 183655 - DNA, 13 bp, Artificial Sequence
  Oligonucleotide for detection of SNP TSC0045360
atagtagaaatgt

SEQ ID NO: 183656 - DNA, 13 bp, Artificial Sequence
  Oligonucleotide for detection of SNP TSC0045360
acatttctactat

SEQ ID NO: 183657 - DNA, 13 bp, Artificial Sequence
  Oligonucleotide for detection of SNP TSC0045360
atagtataaatgt

SEQ ID NO: 183658 - DNA, 13 bp, Artificial Sequence
  Oligonucleotide for detection of SNP TSC0045360
acatttatactat

SEQ ID NO: 183659 - DNA, 13 bp, Artificial Sequence
  Oligonucleotide for detection of SNP TSC0045361
attattatgattt

SEQ ID NO: 183660 - DNA, 13 bp, Artificial Sequence
  Oligonucleotide for detection of SNP TSC0045361
aaatcataataat

SEQ ID NO: 183661 - DNA, 13 bp, Artificial Sequence
  Oligonucleotide for detection of SNP TSC0045361
attattgtgattt

SEQ ID NO: 183662 - DNA, 13 bp, Artificial Sequence
  Oligonucleotide for detection of SNP TSC0045361
aaatcacaataat

SEQ ID NO: 183663 - DNA, 13 bp, Artificial Sequence
  Oligonucleotide for detection of SNP TSC0045362
gattttaggtgay

SEQ ID NO: 183664 - DNA, 13 bp, Artificial Sequence
  Oligonucleotide for detection of SNP TSC0045362
rtcacctaaaatc

SEQ ID NO: 183665 - DNA, 13 bp, Artificial Sequence
  Oligonucleotide for detection of SNP TSC0045362
gatttttggtgay

SEQ ID NO: 183666 - DNA, 13 bp, Artificial Sequence
  Oligonucleotide for detection of SNP TSC0045362
rtcaccaaaaatc

SEQ ID NO: 183667 - DNA, 13 bp, Artificial Sequence
  Oligonucleotide for detection of SNP TSC0045362
gttatttgaggty

SEQ ID NO: 183668 - DNA, 13 bp, Artificial Sequence
  Oligonucleotide for detection of SNP TSC0045362
racctcaaataac

SEQ ID NO: 183669 - DNA, 13 bp, Artificial Sequence
  Oligonucleotide for detection of SNP TSC0045362
gttattagaggty

SEQ ID NO: 183670 - DNA, 13 bp, Artificial Sequence
  Oligonucleotide for detection of SNP TSC0045362
racctctaataac

SEQ ID NO: 183671 - DNA, 13 bp, Artificial Sequence
  Oligonucleotide for detection of SNP TSC0045363
ttttgaggggggt

SEQ ID NO: 183672 - DNA, 13 bp, Artificial Sequence
  Oligonucleotide for detection of SNP TSC0045363
acccccctcaaaa

SEQ ID NO: 183673 - DNA, 13 bp, Artificial Sequence
  Oligonucleotide for detection of SNP TSC0045363
ttttgaagggggt

SEQ ID NO: 183674 - DNA, 13 bp, Artificial Sequence
  Oligonucleotide for detection of SNP TSC0045363
acccccttcaaaa

SEQ ID NO: 183675 - DNA, 13 bp, Artificial Sequence
  Oligonucleotide for detection of SNP TSC0045364
aatattgagtata

SEQ ID NO: 183676 - DNA, 13 bp, Artificial Sequence
  Oligonucleotide for detection of SNP TSC0045364
tatactcaatatt

SEQ ID NO: 183677 - DNA, 13 bp, Artificial Sequence
  Oligonucleotide for detection of SNP TSC0045364
aatatcgagtata

SEQ ID NO: 183678 - DNA, 13 bp, Artificial Sequence
  Oligonucleotide for detection of SNP TSC0045364
tatactcgatatt

SEQ ID NO: 183679 - DNA, 13 bp, Artificial Sequence
  Oligonucleotide for detection of SNP TSC0045364
tatgtttggtatt

SEQ ID NO: 183680 - DNA, 13 bp, Artificial Sequence
  Oligonucleotide for detection of SNP TSC0045364
aataccaaacata

SEQ ID NO: 183681 - DNA, 13 bp, Artificial Sequence
  Oligonucleotide for detection of SNP TSC0045364
tatgttcggtatt

SEQ ID NO: 183682 - DNA, 13 bp, Artificial Sequence
  Oligonucleotide for detection of SNP TSC0045364
aataccgaacata

SEQ ID NO: 183683 - DNA, 13 bp, Artificial Sequence
  Oligonucleotide for detection of SNP TSC0045365
ttaaggggtttaa

SEQ ID NO: 183684 - DNA, 13 bp, Artificial Sequence
  Oligonucleotide for detection of SNP TSC0045365
ttaaaccccttaa

SEQ ID NO: 183685 - DNA, 13 bp, Artificial Sequence
  Oligonucleotide for detection of SNP TSC0045365
ttaaggagtttaa

SEQ ID NO: 183686 - DNA, 13 bp, Artificial Sequence
  Oligonucleotide for detection of SNP TSC0045365
ttaaactccttaa

SEQ ID NO: 183687 - DNA, 13 bp, Artificial Sequence
  Oligonucleotide for detection of SNP TSC0045367
attttataatatt

SEQ ID NO: 183688 - DNA, 13 bp, Artificial Sequence
  Oligonucleotide for detection of SNP TSC0045367
aatattataaaat

SEQ ID NO: 183689 - DNA, 13 bp, Artificial Sequence
  Oligonucleotide for detection of SNP TSC0045367
agtattatagggt

SEQ ID NO: 183690 - DNA, 13 bp, Artificial Sequence
  Oligonucleotide for detection of SNP TSC0045367
accctataatact

SEQ ID NO: 183691 - DNA, 13 bp, Artificial Sequence
  Oligonucleotide for detection of SNP TSC0045367
agtattttagggt

SEQ ID NO: 183692 - DNA, 13 bp, Artificial Sequence
  Oligonucleotide for detection of SNP TSC0045367
accctaaaatact

SEQ ID NO: 183693 - DNA, 13 bp, Artificial Sequence
  Oligonucleotide for detection of SNP TSC0045368
aaaagtgagttag

SEQ ID NO: 183694 - DNA, 13 bp, Artificial Sequence
  Oligonucleotide for detection of SNP TSC0045368
ctaactcactttt

SEQ ID NO: 183695 - DNA, 13 bp, Artificial Sequence
  Oligonucleotide for detection of SNP TSC0045368
aaaagtaagttag

SEQ ID NO: 183696 - DNA, 13 bp, Artificial Sequence
  Oligonucleotide for detection of SNP TSC0045368
ctaacttactttt

SEQ ID NO: 183697 - DNA, 13 bp, Artificial Sequence
  Oligonucleotide for detection of SNP TSC0045378
tttagtggtgatt

SEQ ID NO: 183698 - DNA, 13 bp, Artificial Sequence
  Oligonucleotide for detection of SNP TSC0045378
aatcaccactaaa

SEQ ID NO: 183699 - DNA, 13 bp, Artificial Sequence
  Oligonucleotide for detection of SNP TSC0045378
tttagtagtgatt

SEQ ID NO: 183700 - DNA, 13 bp, Artificial Sequence
  Oligonucleotide for detection of SNP TSC0045378
aatcactactaaa

SEQ ID NO: 183701 - DNA, 13 bp, Artificial Sequence
  Oligonucleotide for detection of SNP TSC0045379
tggatgagtttag

SEQ ID NO: 183702 - DNA, 13 bp, Artificial Sequence
  Oligonucleotide for detection of SNP TSC0045379
ctaaactcatcca

SEQ ID NO: 183703 - DNA, 13 bp, Artificial Sequence
  Oligonucleotide for detection of SNP TSC0045379
tggatgggtttag

SEQ ID NO: 183704 - DNA, 13 bp, Artificial Sequence
  Oligonucleotide for detection of SNP TSC0045379
ctaaacccatcca

SEQ ID NO: 183705 - DNA, 13 bp, Artificial Sequence
  Oligonucleotide for detection of SNP TSC0005176
agaataaaggaaa

SEQ ID NO: 183706 - DNA, 13 bp, Artificial Sequence
  Oligonucleotide for detection of SNP TSC0005176
tttcctttattct

SEQ ID NO: 183707 - DNA, 13 bp, Artificial Sequence
  Oligonucleotide for detection of SNP TSC0005176
agaatataggaaa

SEQ ID NO: 183708 - DNA, 13 bp, Artificial Sequence
  Oligonucleotide for detection of SNP TSC0005176
tttcctatattct

SEQ ID NO: 183709 - DNA, 13 bp, Artificial Sequence
  Oligonucleotide for detection of SNP TSC0045380
ttgtaggtaattt

SEQ ID NO: 183710 - DNA, 13 bp, Artificial Sequence
  Oligonucleotide for detection of SNP TSC0045380
aaattacctacaa

SEQ ID NO: 183711 - DNA, 13 bp, Artificial Sequence
  Oligonucleotide for detection of SNP TSC0045380
ttgtagataattt

SEQ ID NO: 183712 - DNA, 13 bp, Artificial Sequence
  Oligonucleotide for detection of SNP TSC0045380
aaattatctacaa

SEQ ID NO: 183713 - DNA, 13 bp, Artificial Sequence
  Oligonucleotide for detection of SNP TSC0045381
tattttttgttat

SEQ ID NO: 183714 - DNA, 13 bp, Artificial Sequence
  Oligonucleotide for detection of SNP TSC0045381
ataacaaaaaata

SEQ ID NO: 183715 - DNA, 13 bp, Artificial Sequence
  Oligonucleotide for detection of SNP TSC0045381
atggtatgaagta

SEQ ID NO: 183716 - DNA, 13 bp, Artificial Sequence
  Oligonucleotide for detection of SNP TSC0045381
tacttcataccat

SEQ ID NO: 183717 - DNA, 13 bp, Artificial Sequence
  Oligonucleotide for detection of SNP TSC0045381
atggtaggaagta

SEQ ID NO: 183718 - DNA, 13 bp, Artificial Sequence
  Oligonucleotide for detection of SNP TSC0045381
tacttcctaccat

SEQ ID NO: 183719 - DNA, 13 bp, Artificial Sequence
  Oligonucleotide for detection of SNP TSC0045382
tatataaagttta

SEQ ID NO: 183720 - DNA, 13 bp, Artificial Sequence
  Oligonucleotide for detection of SNP TSC0045382
taaactttatata

SEQ ID NO: 183721 - DNA, 13 bp, Artificial Sequence
  Oligonucleotide for detection of SNP TSC0045382
tatatatagttta

SEQ ID NO: 183722 - DNA, 13 bp, Artificial Sequence
  Oligonucleotide for detection of SNP TSC0045382
taaactatatata

SEQ ID NO: 183723 - DNA, 13 bp, Artificial Sequence
  Oligonucleotide for detection of SNP TSC0045382
tgggttttgtgtg

SEQ ID NO: 183724 - DNA, 13 bp, Artificial Sequence
  Oligonucleotide for detection of SNP TSC0045382
cacacaaaaccca

SEQ ID NO: 183725 - DNA, 13 bp, Artificial Sequence
  Oligonucleotide for detection of SNP TSC0045382
tgggttgtgtgtg

SEQ ID NO: 183726 - DNA, 13 bp, Artificial Sequence
  Oligonucleotide for detection of SNP TSC0045382
cacacacaaccca

SEQ ID NO: 183727 - DNA, 13 bp, Artificial Sequence
  Oligonucleotide for detection of SNP TSC0006577
aaattttggaaaa

SEQ ID NO: 183728 - DNA, 13 bp, Artificial Sequence
  Oligonucleotide for detection of SNP TSC0006577
ttttccaaaattt

SEQ ID NO: 183729 - DNA, 13 bp, Artificial Sequence
  Oligonucleotide for detection of SNP TSC0006577
aaatttcggaaaa

SEQ ID NO: 183730 - DNA, 13 bp, Artificial Sequence
  Oligonucleotide for detection of SNP TSC0006577
ttttccgaaattt

SEQ ID NO: 183731 - DNA, 13 bp, Artificial Sequence
  Oligonucleotide for detection of SNP TSC0006577
ttttttagggttt

SEQ ID NO: 183732 - DNA, 13 bp, Artificial Sequence
  Oligonucleotide for detection of SNP TSC0006577
aaaccctaaaaaa

SEQ ID NO: 183733 - DNA, 13 bp, Artificial Sequence
  Oligonucleotide for detection of SNP TSC0006577
tttttcggggttt

SEQ ID NO: 183734 - DNA, 13 bp, Artificial Sequence
  Oligonucleotide for detection of SNP TSC0006577
aaaccccgaaaaa

SEQ ID NO: 183735 - DNA, 13 bp, Artificial Sequence
  Oligonucleotide for detection of SNP TSC0045384
ttttttgttgtgg

SEQ ID NO: 183736 - DNA, 13 bp, Artificial Sequence
  Oligonucleotide for detection of SNP TSC0045384
ccacaacaaaaaa

SEQ ID NO: 183737 - DNA, 13 bp, Artificial Sequence
  Oligonucleotide for detection of SNP TSC0045384
tttttcgttgtgg

SEQ ID NO: 183738 - DNA, 13 bp, Artificial Sequence
  Oligonucleotide for detection of SNP TSC0045384
ccacaacgaaaaa

SEQ ID NO: 183739 - DNA, 13 bp, Artificial Sequence
  Oligonucleotide for detection of SNP TSC0045384
ttataaggaaaaa

SEQ ID NO: 183740 - DNA, 13 bp, Artificial Sequence
  Oligonucleotide for detection of SNP TSC0045384
tttttccttataa

SEQ ID NO: 183741 - DNA, 13 bp, Artificial Sequence
  Oligonucleotide for detection of SNP TSC0045384
ttataatgaaaaa

SEQ ID NO: 183742 - DNA, 13 bp, Artificial Sequence
  Oligonucleotide for detection of SNP TSC0045384
tttttcattataa

SEQ ID NO: 183743 - DNA, 13 bp, Artificial Sequence
  Oligonucleotide for detection of SNP TSC0045385
ttggaatgttttg

SEQ ID NO: 183744 - DNA, 13 bp, Artificial Sequence
  Oligonucleotide for detection of SNP TSC0045385
caaaacattccaa

SEQ ID NO: 183745 - DNA, 13 bp, Artificial Sequence
  Oligonucleotide for detection of SNP TSC0045385
ttggaacgttttg

SEQ ID NO: 183746 - DNA, 13 bp, Artificial Sequence
  Oligonucleotide for detection of SNP TSC0045385
caaaacgttccaa

SEQ ID NO: 183747 - DNA, 13 bp, Artificial Sequence
  Oligonucleotide for detection of SNP TSC0045385
taagacgttttag

SEQ ID NO: 183748 - DNA, 13 bp, Artificial Sequence
  Oligonucleotide for detection of SNP TSC0045385
ctaaaacgtctta

SEQ ID NO: 183749 - DNA, 13 bp, Artificial Sequence
  Oligonucleotide for detection of SNP TSC0008913
tttgttatgggay

SEQ ID NO: 183750 - DNA, 13 bp, Artificial Sequence
  Oligonucleotide for detection of SNP TSC0008913
rtcccataacaaa

SEQ ID NO: 183751 - DNA, 13 bp, Artificial Sequence
  Oligonucleotide for detection of SNP TSC0008913
tttgttgtgggay

SEQ ID NO: 183752 - DNA, 13 bp, Artificial Sequence
  Oligonucleotide for detection of SNP TSC0008913
rtcccacaacaaa

SEQ ID NO: 183753 - DNA, 13 bp, Artificial Sequence
  Oligonucleotide for detection of SNP TSC0008913
tttgtcgtgggay

SEQ ID NO: 183754 - DNA, 13 bp, Artificial Sequence
  Oligonucleotide for detection of SNP TSC0008913
rtcccacgacaaa

SEQ ID NO: 183755 - DNA, 13 bp, Artificial Sequence
  Oligonucleotide for detection of SNP TSC0008913
gttttatgatagg

SEQ ID NO: 183756 - DNA, 13 bp, Artificial Sequence
  Oligonucleotide for detection of SNP TSC0008913
cctatcataaaac

SEQ ID NO: 183757 - DNA, 13 bp, Artificial Sequence
  Oligonucleotide for detection of SNP TSC0008913
gttttacgatagg

SEQ ID NO: 183758 - DNA, 13 bp, Artificial Sequence
  Oligonucleotide for detection of SNP TSC0008913
cctatcgtaaaac

SEQ ID NO: 183759 - DNA, 13 bp, Artificial Sequence
  Oligonucleotide for detection of SNP TSC0045386
ttaagatgtttta

SEQ ID NO: 183760 - DNA, 13 bp, Artificial Sequence
  Oligonucleotide for detection of SNP TSC0045386
taaaacatcttaa

SEQ ID NO: 183761 - DNA, 13 bp, Artificial Sequence
  Oligonucleotide for detection of SNP TSC0045386
taaagtattttaa

SEQ ID NO: 183762 - DNA, 13 bp, Artificial Sequence
  Oligonucleotide for detection of SNP TSC0045386
ttaaaatacttta

SEQ ID NO: 183763 - DNA, 13 bp, Artificial Sequence
  Oligonucleotide for detection of SNP TSC0045386
taaagttttttaa

SEQ ID NO: 183764 - DNA, 13 bp, Artificial Sequence
  Oligonucleotide for detection of SNP TSC0045386
ttaaaaaacttta

SEQ ID NO: 183765 - DNA, 13 bp, Artificial Sequence
  Oligonucleotide for detection of SNP TSC0045387
gaaataaatggta

SEQ ID NO: 183766 - DNA, 13 bp, Artificial Sequence
  Oligonucleotide for detection of SNP TSC0045387
taccatttatttc

SEQ ID NO: 183767 - DNA, 13 bp, Artificial Sequence
  Oligonucleotide for detection of SNP TSC0045387
gaaatagatggta

SEQ ID NO: 183768 - DNA, 13 bp, Artificial Sequence
  Oligonucleotide for detection of SNP TSC0045387
taccatctatttc

SEQ ID NO: 183769 - DNA, 13 bp, Artificial Sequence
  Oligonucleotide for detection of SNP TSC0045388
aatagatgtagaa

SEQ ID NO: 183770 - DNA, 13 bp, Artificial Sequence
  Oligonucleotide for detection of SNP TSC0045388
ttctacatctatt

SEQ ID NO: 183771 - DNA, 13 bp, Artificial Sequence
  Oligonucleotide for detection of SNP TSC0045388
aatagacgtagaa

SEQ ID NO: 183772 - DNA, 13 bp, Artificial Sequence
  Oligonucleotide for detection of SNP TSC0045388
ttctacgtctatt

SEQ ID NO: 183773 - DNA, 13 bp, Artificial Sequence
  Oligonucleotide for detection of SNP TSC0045389
atgttgataataa

SEQ ID NO: 183774 - DNA, 13 bp, Artificial Sequence
  Oligonucleotide for detection of SNP TSC0045389
ttattatcaacat

SEQ ID NO: 183775 - DNA, 13 bp, Artificial Sequence
  Oligonucleotide for detection of SNP TSC0045389
atgttgttaataa

SEQ ID NO: 183776 - DNA, 13 bp, Artificial Sequence
  Oligonucleotide for detection of SNP TSC0045389
ttattaacaacat

SEQ ID NO: 183777 - DNA, 13 bp, Artificial Sequence
  Oligonucleotide for detection of SNP TSC0045389
ttgttattagtat

SEQ ID NO: 183778 - DNA, 13 bp, Artificial Sequence
  Oligonucleotide for detection of SNP TSC0045389
atactaataacaa

SEQ ID NO: 183779 - DNA, 13 bp, Artificial Sequence
  Oligonucleotide for detection of SNP TSC0045389
ttgttaatagtat

SEQ ID NO: 183780 - DNA, 13 bp, Artificial Sequence
  Oligonucleotide for detection of SNP TSC0045389
atactattaacaa

SEQ ID NO: 183781 - DNA, 13 bp, Artificial Sequence
  Oligonucleotide for detection of SNP TSC0045390
atttagatttaat

SEQ ID NO: 183782 - DNA, 13 bp, Artificial Sequence
  Oligonucleotide for detection of SNP TSC0045390
attaaatctaaat

SEQ ID NO: 183783 - DNA, 13 bp, Artificial Sequence
  Oligonucleotide for detection of SNP TSC0045390
atttagttttaat

SEQ ID NO: 183784 - DNA, 13 bp, Artificial Sequence
  Oligonucleotide for detection of SNP TSC0045390
attaaaactaaat

SEQ ID NO: 183785 - DNA, 13 bp, Artificial Sequence
  Oligonucleotide for detection of SNP TSC0045390
attgggtttgagt

SEQ ID NO: 183786 - DNA, 13 bp, Artificial Sequence
  Oligonucleotide for detection of SNP TSC0045390
actcaaacccaat

SEQ ID NO: 183787 - DNA, 13 bp, Artificial Sequence
  Oligonucleotide for detection of SNP TSC0045390
attggggttgagt

SEQ ID NO: 183788 - DNA, 13 bp, Artificial Sequence
  Oligonucleotide for detection of SNP TSC0045390
actcaaccccaat

SEQ ID NO: 183789 - DNA, 13 bp, Artificial Sequence
  Oligonucleotide for detection of SNP TSC0045391
gtgttaattaggg

SEQ ID NO: 183790 - DNA, 13 bp, Artificial Sequence
  Oligonucleotide for detection of SNP TSC0045391
ccctaattaacac

SEQ ID NO: 183791 - DNA, 13 bp, Artificial Sequence
  Oligonucleotide for detection of SNP TSC0045391
gtgttagttaggg

SEQ ID NO: 183792 - DNA, 13 bp, Artificial Sequence
  Oligonucleotide for detection of SNP TSC0045391
ccctaactaacac

SEQ ID NO: 183793 - DNA, 13 bp, Artificial Sequence
  Oligonucleotide for detection of SNP TSC0045394
gtaattgataatg

SEQ ID NO: 183794 - DNA, 13 bp, Artificial Sequence
  Oligonucleotide for detection of SNP TSC0045394
cattatcaattac

SEQ ID NO: 183795 - DNA, 13 bp, Artificial Sequence
  Oligonucleotide for detection of SNP TSC0045394
gtaattaataatg

SEQ ID NO: 183796 - DNA, 13 bp, Artificial Sequence
  Oligonucleotide for detection of SNP TSC0045394
cattattaattac

SEQ ID NO: 183797 - DNA, 13 bp, Artificial Sequence
  Oligonucleotide for detection of SNP TSC0010521
tgaatgtgtaaag

SEQ ID NO: 183798 - DNA, 13 bp, Artificial Sequence
  Oligonucleotide for detection of SNP TSC0010521
ctttacacattca

SEQ ID NO: 183799 - DNA, 13 bp, Artificial Sequence
  Oligonucleotide for detection of SNP TSC0010521
tgaatgcgtaaag

SEQ ID NO: 183800 - DNA, 13 bp, Artificial Sequence
  Oligonucleotide for detection of SNP TSC0010521
ctttacgcattca

SEQ ID NO: 183801 - DNA, 13 bp, Artificial Sequence
  Oligonucleotide for detection of SNP TSC0010522
gttaaagtataaa

SEQ ID NO: 183802 - DNA, 13 bp, Artificial Sequence
  Oligonucleotide for detection of SNP TSC0010522
tttatactttaac

SEQ ID NO: 183803 - DNA, 13 bp, Artificial Sequence
  Oligonucleotide for detection of SNP TSC0010522
gttaaaatataaa

SEQ ID NO: 183804 - DNA, 13 bp, Artificial Sequence
  Oligonucleotide for detection of SNP TSC0010522
tttatattttaac

SEQ ID NO: 183805 - DNA, 13 bp, Artificial Sequence
  Oligonucleotide for detection of SNP TSC0045397
gttgaggtaataa

SEQ ID NO: 183806 - DNA, 13 bp, Artificial Sequence
  Oligonucleotide for detection of SNP TSC0045397
ttattacctcaac

SEQ ID NO: 183807 - DNA, 13 bp, Artificial Sequence
  Oligonucleotide for detection of SNP TSC0045397
gttgagataataa

SEQ ID NO: 183808 - DNA, 13 bp, Artificial Sequence
  Oligonucleotide for detection of SNP TSC0045397
ttattatctcaac

SEQ ID NO: 183809 - DNA, 13 bp, Artificial Sequence
  Oligonucleotide for detection of SNP TSC0009208
atttatgtttgga

SEQ ID NO: 183810 - DNA, 13 bp, Artificial Sequence
  Oligonucleotide for detection of SNP TSC0009208
tccaaacataaat

SEQ ID NO: 183811 - DNA, 13 bp, Artificial Sequence
  Oligonucleotide for detection of SNP TSC0009208
atttatatttgga

SEQ ID NO: 183812 - DNA, 13 bp, Artificial Sequence
  Oligonucleotide for detection of SNP TSC0009208
tccaaatataaat

SEQ ID NO: 183813 - DNA, 13 bp, Artificial Sequence
  Oligonucleotide for detection of SNP TSC0045398
gttgatattaatt

SEQ ID NO: 183814 - DNA, 13 bp, Artificial Sequence
  Oligonucleotide for detection of SNP TSC0045398
aattaatatcaac

SEQ ID NO: 183815 - DNA, 13 bp, Artificial Sequence
  Oligonucleotide for detection of SNP TSC0045398
gttgatgttaatt

SEQ ID NO: 183816 - DNA, 13 bp, Artificial Sequence
  Oligonucleotide for detection of SNP TSC0045398
aattaacatcaac

SEQ ID NO: 183817 - DNA, 13 bp, Artificial Sequence
  Oligonucleotide for detection of SNP TSC0045398
gttgacgttaatt

SEQ ID NO: 183818 - DNA, 13 bp, Artificial Sequence
  Oligonucleotide for detection of SNP TSC0045398
aattaacgtcaac

SEQ ID NO: 183819 - DNA, 13 bp, Artificial Sequence
  Oligonucleotide for detection of SNP TSC0045398
aattaatgttaay

SEQ ID NO: 183820 - DNA, 13 bp, Artificial Sequence
  Oligonucleotide for detection of SNP TSC0045398
rttaacattaatt

SEQ ID NO: 183821 - DNA, 13 bp, Artificial Sequence
  Oligonucleotide for detection of SNP TSC0045398
aattaacgttaay

SEQ ID NO: 183822 - DNA, 13 bp, Artificial Sequence
  Oligonucleotide for detection of SNP TSC0045398
rttaacgttaatt

SEQ ID NO: 183823 - DNA, 13 bp, Artificial Sequence
  Oligonucleotide for detection of SNP TSC0005319
ttgggagtgtttt

SEQ ID NO: 183824 - DNA, 13 bp, Artificial Sequence
  Oligonucleotide for detection of SNP TSC0005319
aaaacactcccaa

SEQ ID NO: 183825 - DNA, 13 bp, Artificial Sequence
  Oligonucleotide for detection of SNP TSC0005319
ttgggaatgtttt

SEQ ID NO: 183826 - DNA, 13 bp, Artificial Sequence
  Oligonucleotide for detection of SNP TSC0005319
aaaacattcccaa

SEQ ID NO: 183827 - DNA, 13 bp, Artificial Sequence
  Oligonucleotide for detection of SNP TSC0005319
tcgggagtgtttt

SEQ ID NO: 183828 - DNA, 13 bp, Artificial Sequence
  Oligonucleotide for detection of SNP TSC0005319
aaaacactcccga

SEQ ID NO: 183829 - DNA, 13 bp, Artificial Sequence
  Oligonucleotide for detection of SNP TSC0005319
tcgggaatgtttt

SEQ ID NO: 183830 - DNA, 13 bp, Artificial Sequence
  Oligonucleotide for detection of SNP TSC0005319
aaaacattcccga

SEQ ID NO: 183831 - DNA, 13 bp, Artificial Sequence
  Oligonucleotide for detection of SNP TSC0005320
aagaggattggtt

SEQ ID NO: 183832 - DNA, 13 bp, Artificial Sequence
  Oligonucleotide for detection of SNP TSC0005320
aaccaatcctctt

SEQ ID NO: 183833 - DNA, 13 bp, Artificial Sequence
  Oligonucleotide for detection of SNP TSC0005320
aagaggtttggtt

SEQ ID NO: 183834 - DNA, 13 bp, Artificial Sequence
  Oligonucleotide for detection of SNP TSC0005320
aaccaaacctctt

SEQ ID NO: 183835 - DNA, 13 bp, Artificial Sequence
  Oligonucleotide for detection of SNP TSC0045399
ttattagatgata

SEQ ID NO: 183836 - DNA, 13 bp, Artificial Sequence
  Oligonucleotide for detection of SNP TSC0045399
tatcatctaataa

SEQ ID NO: 183837 - DNA, 13 bp, Artificial Sequence
  Oligonucleotide for detection of SNP TSC0045399
ttattaaatgata

SEQ ID NO: 183838 - DNA, 13 bp, Artificial Sequence
  Oligonucleotide for detection of SNP TSC0045399
tatcatttaataa

SEQ ID NO: 183839 - DNA, 13 bp, Artificial Sequence
  Oligonucleotide for detection of SNP TSC0045400
gcgtttattttty

SEQ ID NO: 183840 - DNA, 13 bp, Artificial Sequence
  Oligonucleotide for detection of SNP TSC0045400
raaaaataaacgc

SEQ ID NO: 183841 - DNA, 13 bp, Artificial Sequence
  Oligonucleotide for detection of SNP TSC0045400
gcgtttgttttty

SEQ ID NO: 183842 - DNA, 13 bp, Artificial Sequence
  Oligonucleotide for detection of SNP TSC0045400
raaaaacaaacgc

SEQ ID NO: 183843 - DNA, 13 bp, Artificial Sequence
  Oligonucleotide for detection of SNP TSC0045401
aattgaatggatt

SEQ ID NO: 183844 - DNA, 13 bp, Artificial Sequence
  Oligonucleotide for detection of SNP TSC0045401
aatccattcaatt

SEQ ID NO: 183845 - DNA, 13 bp, Artificial Sequence
  Oligonucleotide for detection of SNP TSC0045401
aattgagtggatt

SEQ ID NO: 183846 - DNA, 13 bp, Artificial Sequence
  Oligonucleotide for detection of SNP TSC0045401
aatccactcaatt

SEQ ID NO: 183847 - DNA, 13 bp, Artificial Sequence
  Oligonucleotide for detection of SNP TSC0004919
tttatatttgtga

SEQ ID NO: 183848 - DNA, 13 bp, Artificial Sequence
  Oligonucleotide for detection of SNP TSC0004919
tcacaaatataaa

SEQ ID NO: 183849 - DNA, 13 bp, Artificial Sequence
  Oligonucleotide for detection of SNP TSC0004919
tttatagttgtga

SEQ ID NO: 183850 - DNA, 13 bp, Artificial Sequence
  Oligonucleotide for detection of SNP TSC0004919
tcacaactataaa

SEQ ID NO: 183851 - DNA, 13 bp, Artificial Sequence
  Oligonucleotide for detection of SNP TSC0004919
ttataggtatgga

SEQ ID NO: 183852 - DNA, 13 bp, Artificial Sequence
  Oligonucleotide for detection of SNP TSC0004919
tccatacctataa

SEQ ID NO: 183853 - DNA, 13 bp, Artificial Sequence
  Oligonucleotide for detection of SNP TSC0004919
ttatagttatgga

SEQ ID NO: 183854 - DNA, 13 bp, Artificial Sequence
  Oligonucleotide for detection of SNP TSC0004919
tccataactataa

SEQ ID NO: 183855 - DNA, 13 bp, Artificial Sequence
  Oligonucleotide for detection of SNP TSC0004920
tattagtttatat

SEQ ID NO: 183856 - DNA, 13 bp, Artificial Sequence
  Oligonucleotide for detection of SNP TSC0004920
atataaactaata

SEQ ID NO: 183857 - DNA, 13 bp, Artificial Sequence
  Oligonucleotide for detection of SNP TSC0004920
tattaggttatat

SEQ ID NO: 183858 - DNA, 13 bp, Artificial Sequence
  Oligonucleotide for detection of SNP TSC0004920
atataacctaata

SEQ ID NO: 183859 - DNA, 13 bp, Artificial Sequence
  Oligonucleotide for detection of SNP TSC0004920
atgtaagttaata

SEQ ID NO: 183860 - DNA, 13 bp, Artificial Sequence
  Oligonucleotide for detection of SNP TSC0004920
tattaacttacat

SEQ ID NO: 183861 - DNA, 13 bp, Artificial Sequence
  Oligonucleotide for detection of SNP TSC0004920
atgtaatttaata

SEQ ID NO: 183862 - DNA, 13 bp, Artificial Sequence
  Oligonucleotide for detection of SNP TSC0004920
tattaaattacat

SEQ ID NO: 183863 - DNA, 13 bp, Artificial Sequence
  Oligonucleotide for detection of SNP TSC0045403
tgtaattatttag

SEQ ID NO: 183864 - DNA, 13 bp, Artificial Sequence
  Oligonucleotide for detection of SNP TSC0045403
ctaaataattaca

SEQ ID NO: 183865 - DNA, 13 bp, Artificial Sequence
  Oligonucleotide for detection of SNP TSC0045403
tgtaatgatttag

SEQ ID NO: 183866 - DNA, 13 bp, Artificial Sequence
  Oligonucleotide for detection of SNP TSC0045403
ctaaatcattaca

SEQ ID NO: 183867 - DNA, 13 bp, Artificial Sequence
  Oligonucleotide for detection of SNP TSC0045403
ttaaattattata

SEQ ID NO: 183868 - DNA, 13 bp, Artificial Sequence
  Oligonucleotide for detection of SNP TSC0045403
tataataatttaa

SEQ ID NO: 183869 - DNA, 13 bp, Artificial Sequence
  Oligonucleotide for detection of SNP TSC0045404
tttttatgagtaa

SEQ ID NO: 183870 - DNA, 13 bp, Artificial Sequence
  Oligonucleotide for detection of SNP TSC0045404
ttactcataaaaa

SEQ ID NO: 183871 - DNA, 13 bp, Artificial Sequence
  Oligonucleotide for detection of SNP TSC0045404
tttttacgagtaa

SEQ ID NO: 183872 - DNA, 13 bp, Artificial Sequence
  Oligonucleotide for detection of SNP TSC0045404
ttactcgtaaaaa

SEQ ID NO: 183873 - DNA, 13 bp, Artificial Sequence
  Oligonucleotide for detection of SNP TSC0045404
ttgttcgtaagag

SEQ ID NO: 183874 - DNA, 13 bp, Artificial Sequence
  Oligonucleotide for detection of SNP TSC0045404
ctcttacgaacaa

SEQ ID NO: 183875 - DNA, 13 bp, Artificial Sequence
  Oligonucleotide for detection of SNP TSC0045406
tgtttttgagtgt

SEQ ID NO: 183876 - DNA, 13 bp, Artificial Sequence
  Oligonucleotide for detection of SNP TSC0045406
acactcaaaaaca

SEQ ID NO: 183877 - DNA, 13 bp, Artificial Sequence
  Oligonucleotide for detection of SNP TSC0045406
tgttttcgagtgt

SEQ ID NO: 183878 - DNA, 13 bp, Artificial Sequence
  Oligonucleotide for detection of SNP TSC0045406
acactcgaaaaca

SEQ ID NO: 183879 - DNA, 13 bp, Artificial Sequence
  Oligonucleotide for detection of SNP TSC0045406
atatttgggggta

SEQ ID NO: 183880 - DNA, 13 bp, Artificial Sequence
  Oligonucleotide for detection of SNP TSC0045406
tacccccaaatat

SEQ ID NO: 183881 - DNA, 13 bp, Artificial Sequence
  Oligonucleotide for detection of SNP TSC0045406
atattcgggggta

SEQ ID NO: 183882 - DNA, 13 bp, Artificial Sequence
  Oligonucleotide for detection of SNP TSC0045406
tacccccgaatat

SEQ ID NO: 183883 - DNA, 13 bp, Artificial Sequence
  Oligonucleotide for detection of SNP TSC0045408
ggagtggttggtt

SEQ ID NO: 183884 - DNA, 13 bp, Artificial Sequence
  Oligonucleotide for detection of SNP TSC0045408
aaccaaccactcc

SEQ ID NO: 183885 - DNA, 13 bp, Artificial Sequence
  Oligonucleotide for detection of SNP TSC0045408
ggagtgattggtt

SEQ ID NO: 183886 - DNA, 13 bp, Artificial Sequence
  Oligonucleotide for detection of SNP TSC0045408
aaccaatcactcc

SEQ ID NO: 183887 - DNA, 13 bp, Artificial Sequence
  Oligonucleotide for detection of SNP TSC0045408
ggagcggttggtt

SEQ ID NO: 183888 - DNA, 13 bp, Artificial Sequence
  Oligonucleotide for detection of SNP TSC0045408
aaccaaccgctcc

SEQ ID NO: 183889 - DNA, 13 bp, Artificial Sequence
  Oligonucleotide for detection of SNP TSC0045408
ggagcgattggtt

SEQ ID NO: 183890 - DNA, 13 bp, Artificial Sequence
  Oligonucleotide for detection of SNP TSC0045408
aaccaatcgctcc

SEQ ID NO: 183891 - DNA, 13 bp, Artificial Sequence
  Oligonucleotide for detection of SNP TSC0045409
taattatggagtt

SEQ ID NO: 183892 - DNA, 13 bp, Artificial Sequence
  Oligonucleotide for detection of SNP TSC0045409
aactccataatta

SEQ ID NO: 183893 - DNA, 13 bp, Artificial Sequence
  Oligonucleotide for detection of SNP TSC0045409
taattagggagtt

SEQ ID NO: 183894 - DNA, 13 bp, Artificial Sequence
  Oligonucleotide for detection of SNP TSC0045409
aactccctaatta

SEQ ID NO: 183895 - DNA, 13 bp, Artificial Sequence
  Oligonucleotide for detection of SNP TSC0045409
agttttatagttg

SEQ ID NO: 183896 - DNA, 13 bp, Artificial Sequence
  Oligonucleotide for detection of SNP TSC0045409
caactataaaact

SEQ ID NO: 183897 - DNA, 13 bp, Artificial Sequence
  Oligonucleotide for detection of SNP TSC0045409
agttttttagttg

SEQ ID NO: 183898 - DNA, 13 bp, Artificial Sequence
  Oligonucleotide for detection of SNP TSC0045409
caactaaaaaact

SEQ ID NO: 183899 - DNA, 13 bp, Artificial Sequence
  Oligonucleotide for detection of SNP TSC0004785
ttttttgtagatt

SEQ ID NO: 183900 - DNA, 13 bp, Artificial Sequence
  Oligonucleotide for detection of SNP TSC0004785
aatctacaaaaaa

SEQ ID NO: 183901 - DNA, 13 bp, Artificial Sequence
  Oligonucleotide for detection of SNP TSC0045411
gagttaaaagatt

SEQ ID NO: 183902 - DNA, 13 bp, Artificial Sequence
  Oligonucleotide for detection of SNP TSC0045411
aatcttttaactc

SEQ ID NO: 183903 - DNA, 13 bp, Artificial Sequence
  Oligonucleotide for detection of SNP TSC0045411
gagttataagatt

SEQ ID NO: 183904 - DNA, 13 bp, Artificial Sequence
  Oligonucleotide for detection of SNP TSC0045411
aatcttataactc

SEQ ID NO: 183905 - DNA, 13 bp, Artificial Sequence
  Oligonucleotide for detection of SNP TSC0045411
agttttttaatty

SEQ ID NO: 183906 - DNA, 13 bp, Artificial Sequence
  Oligonucleotide for detection of SNP TSC0045411
raattaaaaaact

SEQ ID NO: 183907 - DNA, 13 bp, Artificial Sequence
  Oligonucleotide for detection of SNP TSC0045411
agttttgtaatty

SEQ ID NO: 183908 - DNA, 13 bp, Artificial Sequence
  Oligonucleotide for detection of SNP TSC0045411
raattacaaaact

SEQ ID NO: 183909 - DNA, 13 bp, Artificial Sequence
  Oligonucleotide for detection of SNP TSC0045412
aattatagggaat

SEQ ID NO: 183910 - DNA, 13 bp, Artificial Sequence
  Oligonucleotide for detection of SNP TSC0045412
attccctataatt

SEQ ID NO: 183911 - DNA, 13 bp, Artificial Sequence
  Oligonucleotide for detection of SNP TSC0045412
aattatggggaat

SEQ ID NO: 183912 - DNA, 13 bp, Artificial Sequence
  Oligonucleotide for detection of SNP TSC0045412
attccccataatt

SEQ ID NO: 183913 - DNA, 13 bp, Artificial Sequence
  Oligonucleotide for detection of SNP TSC0045412
aattacggggaat

SEQ ID NO: 183914 - DNA, 13 bp, Artificial Sequence
  Oligonucleotide for detection of SNP TSC0045412
attccccgtaatt

SEQ ID NO: 183915 - DNA, 13 bp, Artificial Sequence
  Oligonucleotide for detection of SNP TSC0045412
attttttgtagtt

SEQ ID NO: 183916 - DNA, 13 bp, Artificial Sequence
  Oligonucleotide for detection of SNP TSC0045412
aactacaaaaaat

SEQ ID NO: 183917 - DNA, 13 bp, Artificial Sequence
  Oligonucleotide for detection of SNP TSC0045412
atttttcgtagtt

SEQ ID NO: 183918 - DNA, 13 bp, Artificial Sequence
  Oligonucleotide for detection of SNP TSC0045412
aactacgaaaaat

SEQ ID NO: 183919 - DNA, 13 bp, Artificial Sequence
  Oligonucleotide for detection of SNP TSC0045413
ataagagtggtay

SEQ ID NO: 183920 - DNA, 13 bp, Artificial Sequence
  Oligonucleotide for detection of SNP TSC0045413
rtaccactcttat

SEQ ID NO: 183921 - DNA, 13 bp, Artificial Sequence
  Oligonucleotide for detection of SNP TSC0045413
ataagaatggtay

SEQ ID NO: 183922 - DNA, 13 bp, Artificial Sequence
  Oligonucleotide for detection of SNP TSC0045413
rtaccattcttat

SEQ ID NO: 183923 - DNA, 13 bp, Artificial Sequence
  Oligonucleotide for detection of SNP TSC0045414
tagagggtgtagt

SEQ ID NO: 183924 - DNA, 13 bp, Artificial Sequence
  Oligonucleotide for detection of SNP TSC0045414
actacaccctcta

SEQ ID NO: 183925 - DNA, 13 bp, Artificial Sequence
  Oligonucleotide for detection of SNP TSC0045415
aattttaaagtay

SEQ ID NO: 183926 - DNA, 13 bp, Artificial Sequence
  Oligonucleotide for detection of SNP TSC0045415
rtactttaaaatt

SEQ ID NO: 183927 - DNA, 13 bp, Artificial Sequence
  Oligonucleotide for detection of SNP TSC0045415
aattttgaagtay

SEQ ID NO: 183928 - DNA, 13 bp, Artificial Sequence
  Oligonucleotide for detection of SNP TSC0045415
rtacttcaaaatt

SEQ ID NO: 183929 - DNA, 13 bp, Artificial Sequence
  Oligonucleotide for detection of SNP TSC0045416
ttattaaatttag

SEQ ID NO: 183930 - DNA, 13 bp, Artificial Sequence
  Oligonucleotide for detection of SNP TSC0045416
ctaaatttaataa

SEQ ID NO: 183931 - DNA, 13 bp, Artificial Sequence
  Oligonucleotide for detection of SNP TSC0045416
ttattatatttag

SEQ ID NO: 183932 - DNA, 13 bp, Artificial Sequence
  Oligonucleotide for detection of SNP TSC0045416
ctaaatataataa

SEQ ID NO: 183933 - DNA, 13 bp, Artificial Sequence
  Oligonucleotide for detection of SNP TSC0010461
aatttaatattaa

SEQ ID NO: 183934 - DNA, 13 bp, Artificial Sequence
  Oligonucleotide for detection of SNP TSC0010461
ttaatattaaatt

SEQ ID NO: 183935 - DNA, 13 bp, Artificial Sequence
  Oligonucleotide for detection of SNP TSC0010461
aatttagtattaa

SEQ ID NO: 183936 - DNA, 13 bp, Artificial Sequence
  Oligonucleotide for detection of SNP TSC0010461
ttaatactaaatt

SEQ ID NO: 183937 - DNA, 13 bp, Artificial Sequence
  Oligonucleotide for detection of SNP TSC0010462
ttatagttagtat

SEQ ID NO: 183938 - DNA, 13 bp, Artificial Sequence
  Oligonucleotide for detection of SNP TSC0010462
atactaactataa

SEQ ID NO: 183939 - DNA, 13 bp, Artificial Sequence
  Oligonucleotide for detection of SNP TSC0010462
ttataggtagtat

SEQ ID NO: 183940 - DNA, 13 bp, Artificial Sequence
  Oligonucleotide for detection of SNP TSC0010462
atactacctataa

SEQ ID NO: 183941 - DNA, 13 bp, Artificial Sequence
  Oligonucleotide for detection of SNP TSC0010462
atgttggttgtgg

SEQ ID NO: 183942 - DNA, 13 bp, Artificial Sequence
  Oligonucleotide for detection of SNP TSC0010462
ccacaaccaacat

SEQ ID NO: 183943 - DNA, 13 bp, Artificial Sequence
  Oligonucleotide for detection of SNP TSC0010462
atgttgtttgtgg

SEQ ID NO: 183944 - DNA, 13 bp, Artificial Sequence
  Oligonucleotide for detection of SNP TSC0010462
ccacaaacaacat

SEQ ID NO: 183945 - DNA, 13 bp, Artificial Sequence
  Oligonucleotide for detection of SNP TSC0045417
atattatggatty

SEQ ID NO: 183946 - DNA, 13 bp, Artificial Sequence
  Oligonucleotide for detection of SNP TSC0045417
raatccataatat

SEQ ID NO: 183947 - DNA, 13 bp, Artificial Sequence
  Oligonucleotide for detection of SNP TSC0045417
atattacggatty

SEQ ID NO: 183948 - DNA, 13 bp, Artificial Sequence
  Oligonucleotide for detection of SNP TSC0045417
raatccgtaatat

SEQ ID NO: 183949 - DNA, 13 bp, Artificial Sequence
  Oligonucleotide for detection of SNP TSC0045417
ggatttgtgatgt

SEQ ID NO: 183950 - DNA, 13 bp, Artificial Sequence
  Oligonucleotide for detection of SNP TSC0045417
acatcacaaatcc

SEQ ID NO: 183951 - DNA, 13 bp, Artificial Sequence
  Oligonucleotide for detection of SNP TSC0045417
ggatttatgatgt

SEQ ID NO: 183952 - DNA, 13 bp, Artificial Sequence
  Oligonucleotide for detection of SNP TSC0045417
acatcataaatcc

SEQ ID NO: 183953 - DNA, 13 bp, Artificial Sequence
  Oligonucleotide for detection of SNP TSC0045417
ggattcgtgatgt

SEQ ID NO: 183954 - DNA, 13 bp, Artificial Sequence
  Oligonucleotide for detection of SNP TSC0045417
acatcacgaatcc

SEQ ID NO: 183955 - DNA, 13 bp, Artificial Sequence
  Oligonucleotide for detection of SNP TSC0008628
gatagagaggttt

SEQ ID NO: 183956 - DNA, 13 bp, Artificial Sequence
  Oligonucleotide for detection of SNP TSC0008628
aaacctctctatc

SEQ ID NO: 183957 - DNA, 13 bp, Artificial Sequence
  Oligonucleotide for detection of SNP TSC0008628
gatagaaaggttt

SEQ ID NO: 183958 - DNA, 13 bp, Artificial Sequence
  Oligonucleotide for detection of SNP TSC0008628
aaacctttctatc

SEQ ID NO: 183959 - DNA, 13 bp, Artificial Sequence
  Oligonucleotide for detection of SNP TSC0005321
aaaattatgatay

SEQ ID NO: 183960 - DNA, 13 bp, Artificial Sequence
  Oligonucleotide for detection of SNP TSC0005321
rtatcataatttt

SEQ ID NO: 183961 - DNA, 13 bp, Artificial Sequence
  Oligonucleotide for detection of SNP TSC0005321
aaaattgtgatay

SEQ ID NO: 183962 - DNA, 13 bp, Artificial Sequence
  Oligonucleotide for detection of SNP TSC0005321
rtatcacaatttt

SEQ ID NO: 183963 - DNA, 13 bp, Artificial Sequence
  Oligonucleotide for detection of SNP TSC0005321
aaaatcgtgatay

SEQ ID NO: 183964 - DNA, 13 bp, Artificial Sequence
  Oligonucleotide for detection of SNP TSC0005321
rtatcacgatttt

SEQ ID NO: 183965 - DNA, 13 bp, Artificial Sequence
  Oligonucleotide for detection of SNP TSC0005321
gtattatgatttt

SEQ ID NO: 183966 - DNA, 13 bp, Artificial Sequence
  Oligonucleotide for detection of SNP TSC0005321
aaaatcataatac

SEQ ID NO: 183967 - DNA, 13 bp, Artificial Sequence
  Oligonucleotide for detection of SNP TSC0005321
gtattacgatttt

SEQ ID NO: 183968 - DNA, 13 bp, Artificial Sequence
  Oligonucleotide for detection of SNP TSC0005321
aaaatcgtaatac

SEQ ID NO: 183969 - DNA, 13 bp, Artificial Sequence
  Oligonucleotide for detection of SNP TSC0005322
ggattaatgaata

SEQ ID NO: 183970 - DNA, 13 bp, Artificial Sequence
  Oligonucleotide for detection of SNP TSC0005322
tattcattaatcc

SEQ ID NO: 183971 - DNA, 13 bp, Artificial Sequence
  Oligonucleotide for detection of SNP TSC0005322
ggattagtgaata

SEQ ID NO: 183972 - DNA, 13 bp, Artificial Sequence
  Oligonucleotide for detection of SNP TSC0005322
tattcactaatcc

SEQ ID NO: 183973 - DNA, 13 bp, Artificial Sequence
  Oligonucleotide for detection of SNP TSC0010192
aggagataagatt

SEQ ID NO: 183974 - DNA, 13 bp, Artificial Sequence
  Oligonucleotide for detection of SNP TSC0010192
aatcttatctcct

SEQ ID NO: 183975 - DNA, 13 bp, Artificial Sequence
  Oligonucleotide for detection of SNP TSC0010192
aggagagaagatt

SEQ ID NO: 183976 - DNA, 13 bp, Artificial Sequence
  Oligonucleotide for detection of SNP TSC0010192
aatcttctctcct

SEQ ID NO: 183977 - DNA, 13 bp, Artificial Sequence
  Oligonucleotide for detection of SNP TSC0045420
ggaatgtggtagg

SEQ ID NO: 183978 - DNA, 13 bp, Artificial Sequence
  Oligonucleotide for detection of SNP TSC0045420
cctaccacattcc

SEQ ID NO: 183979 - DNA, 13 bp, Artificial Sequence
  Oligonucleotide for detection of SNP TSC0045420
ggaatggggtagg

SEQ ID NO: 183980 - DNA, 13 bp, Artificial Sequence
  Oligonucleotide for detection of SNP TSC0045420
cctaccccattcc

SEQ ID NO: 183981 - DNA, 13 bp, Artificial Sequence
  Oligonucleotide for detection of SNP TSC0045420
ggaatgcggtagg

SEQ ID NO: 183982 - DNA, 13 bp, Artificial Sequence
  Oligonucleotide for detection of SNP TSC0045420
cctaccgcattcc

SEQ ID NO: 183983 - DNA, 13 bp, Artificial Sequence
  Oligonucleotide for detection of SNP TSC0045421
aagataatagtaa

SEQ ID NO: 183984 - DNA, 13 bp, Artificial Sequence
  Oligonucleotide for detection of SNP TSC0045421
ttactattatctt

SEQ ID NO: 183985 - DNA, 13 bp, Artificial Sequence
  Oligonucleotide for detection of SNP TSC0045421
aagatagtagtaa

SEQ ID NO: 183986 - DNA, 13 bp, Artificial Sequence
  Oligonucleotide for detection of SNP TSC0045421
ttactactatctt

SEQ ID NO: 183987 - DNA, 13 bp, Artificial Sequence
  Oligonucleotide for detection of SNP TSC0045422
ataaaagtaggta

SEQ ID NO: 183988 - DNA, 13 bp, Artificial Sequence
  Oligonucleotide for detection of SNP TSC0045422
tacctacttttat

SEQ ID NO: 183989 - DNA, 13 bp, Artificial Sequence
  Oligonucleotide for detection of SNP TSC0045422
ataaaaataggta

SEQ ID NO: 183990 - DNA, 13 bp, Artificial Sequence
  Oligonucleotide for detection of SNP TSC0045422
tacctatttttat

SEQ ID NO: 183991 - DNA, 13 bp, Artificial Sequence
  Oligonucleotide for detection of SNP TSC0000876
agaatattttgtt

SEQ ID NO: 183992 - DNA, 13 bp, Artificial Sequence
  Oligonucleotide for detection of SNP TSC0000876
aacaaaatattct

SEQ ID NO: 183993 - DNA, 13 bp, Artificial Sequence
  Oligonucleotide for detection of SNP TSC0000876
agaatagtttgtt

SEQ ID NO: 183994 - DNA, 13 bp, Artificial Sequence
  Oligonucleotide for detection of SNP TSC0000876
aacaaactattct

SEQ ID NO: 183995 - DNA, 13 bp, Artificial Sequence
  Oligonucleotide for detection of SNP TSC0000876
aataaaatatttt

SEQ ID NO: 183996 - DNA, 13 bp, Artificial Sequence
  Oligonucleotide for detection of SNP TSC0000876
aaaatattttatt

SEQ ID NO: 183997 - DNA, 13 bp, Artificial Sequence
  Oligonucleotide for detection of SNP TSC0000876
aataaattatttt

SEQ ID NO: 183998 - DNA, 13 bp, Artificial Sequence
  Oligonucleotide for detection of SNP TSC0000876
aaaataatttatt

SEQ ID NO: 183999 - DNA, 13 bp, Artificial Sequence
  Oligonucleotide for detection of SNP TSC0045423
gatgatatgagta

SEQ ID NO: 184000 - DNA, 13 bp, Artificial Sequence
  Oligonucleotide for detection of SNP TSC0045423
tactcatatcatc

SEQ ID NO: 184001 - DNA, 13 bp, Artificial Sequence
  Oligonucleotide for detection of SNP TSC0045423
gatgatgtgagta

SEQ ID NO: 184002 - DNA, 13 bp, Artificial Sequence
  Oligonucleotide for detection of SNP TSC0045423
tactcacatcatc

SEQ ID NO: 184003 - DNA, 13 bp, Artificial Sequence
  Oligonucleotide for detection of SNP TSC0045424
taaagtaaaaata

SEQ ID NO: 184004 - DNA, 13 bp, Artificial Sequence
  Oligonucleotide for detection of SNP TSC0045424
tatttttacttta

SEQ ID NO: 184005 - DNA, 13 bp, Artificial Sequence
  Oligonucleotide for detection of SNP TSC0045424
taaagtgaaaata

SEQ ID NO: 184006 - DNA, 13 bp, Artificial Sequence
  Oligonucleotide for detection of SNP TSC0045424
tattttcacttta

SEQ ID NO: 184007 - DNA, 13 bp, Artificial Sequence
  Oligonucleotide for detection of SNP TSC0045424
taaagcgaaaata

SEQ ID NO: 184008 - DNA, 13 bp, Artificial Sequence
  Oligonucleotide for detection of SNP TSC0045424
tattttcgcttta

SEQ ID NO: 184009 - DNA, 13 bp, Artificial Sequence
  Oligonucleotide for detection of SNP TSC0000201
atgaaagaagagg

SEQ ID NO: 184010 - DNA, 13 bp, Artificial Sequence
  Oligonucleotide for detection of SNP TSC0000201
cctcttctttcat

SEQ ID NO: 184011 - DNA, 13 bp, Artificial Sequence
  Oligonucleotide for detection of SNP TSC0000201
atgaaaaaagagg

SEQ ID NO: 184012 - DNA, 13 bp, Artificial Sequence
  Oligonucleotide for detection of SNP TSC0000201
cctcttttttcat

SEQ ID NO: 184013 - DNA, 13 bp, Artificial Sequence
  Oligonucleotide for detection of SNP TSC0045426
taaataaaatgat

SEQ ID NO: 184014 - DNA, 13 bp, Artificial Sequence
  Oligonucleotide for detection of SNP TSC0045426
atcattttattta

SEQ ID NO: 184015 - DNA, 13 bp, Artificial Sequence
  Oligonucleotide for detection of SNP TSC0045426
taaatagaatgat

SEQ ID NO: 184016 - DNA, 13 bp, Artificial Sequence
  Oligonucleotide for detection of SNP TSC0045426
atcattctattta

SEQ ID NO: 184017 - DNA, 13 bp, Artificial Sequence
  Oligonucleotide for detection of SNP TSC0045431
ttattggtattag

SEQ ID NO: 184018 - DNA, 13 bp, Artificial Sequence
  Oligonucleotide for detection of SNP TSC0045431
ctaataccaataa

SEQ ID NO: 184019 - DNA, 13 bp, Artificial Sequence
  Oligonucleotide for detection of SNP TSC0045431
ttattgatattag

SEQ ID NO: 184020 - DNA, 13 bp, Artificial Sequence
  Oligonucleotide for detection of SNP TSC0045431
ctaatatcaataa

SEQ ID NO: 184021 - DNA, 13 bp, Artificial Sequence
  Oligonucleotide for detection of SNP TSC0000612
taatatatgagta

SEQ ID NO: 184022 - DNA, 13 bp, Artificial Sequence
  Oligonucleotide for detection of SNP TSC0000612
tactcatatatta

SEQ ID NO: 184023 - DNA, 13 bp, Artificial Sequence
  Oligonucleotide for detection of SNP TSC0000612
taatatttgagta

SEQ ID NO: 184024 - DNA, 13 bp, Artificial Sequence
  Oligonucleotide for detection of SNP TSC0000612
tactcaaatatta

SEQ ID NO: 184025 - DNA, 13 bp, Artificial Sequence
  Oligonucleotide for detection of SNP TSC0000612
tatttatgtatta

SEQ ID NO: 184026 - DNA, 13 bp, Artificial Sequence
  Oligonucleotide for detection of SNP TSC0000612
taatacataaata

SEQ ID NO: 184027 - DNA, 13 bp, Artificial Sequence
  Oligonucleotide for detection of SNP TSC0000613
aaaagtataagtg

SEQ ID NO: 184028 - DNA, 13 bp, Artificial Sequence
  Oligonucleotide for detection of SNP TSC0000613
cacttatactttt

SEQ ID NO: 184029 - DNA, 13 bp, Artificial Sequence
  Oligonucleotide for detection of SNP TSC0000613
aaaagtgtaagtg

SEQ ID NO: 184030 - DNA, 13 bp, Artificial Sequence
  Oligonucleotide for detection of SNP TSC0000613
cacttacactttt

SEQ ID NO: 184031 - DNA, 13 bp, Artificial Sequence
  Oligonucleotide for detection of SNP TSC0000613
aaaagcgtaagtg

SEQ ID NO: 184032 - DNA, 13 bp, Artificial Sequence
  Oligonucleotide for detection of SNP TSC0000613
cacttacgctttt

SEQ ID NO: 184033 - DNA, 13 bp, Artificial Sequence
  Oligonucleotide for detection of SNP TSC0000614
aattaaaagtgtg

SEQ ID NO: 184034 - DNA, 13 bp, Artificial Sequence
  Oligonucleotide for detection of SNP TSC0000614
cacacttttaatt

SEQ ID NO: 184035 - DNA, 13 bp, Artificial Sequence
  Oligonucleotide for detection of SNP TSC0000614
aattaatagtgtg

SEQ ID NO: 184036 - DNA, 13 bp, Artificial Sequence
  Oligonucleotide for detection of SNP TSC0000614
cacactattaatt

SEQ ID NO: 184037 - DNA, 13 bp, Artificial Sequence
  Oligonucleotide for detection of SNP TSC0000614
tatatttttaatt

SEQ ID NO: 184038 - DNA, 13 bp, Artificial Sequence
  Oligonucleotide for detection of SNP TSC0000614
aattaaaaatata

SEQ ID NO: 184039 - DNA, 13 bp, Artificial Sequence
  Oligonucleotide for detection of SNP TSC0000614
tatattgttaatt

SEQ ID NO: 184040 - DNA, 13 bp, Artificial Sequence
  Oligonucleotide for detection of SNP TSC0000614
aattaacaatata

SEQ ID NO: 184041 - DNA, 13 bp, Artificial Sequence
  Oligonucleotide for detection of SNP TSC0045434
tgtagtaagtcga

SEQ ID NO: 184042 - DNA, 13 bp, Artificial Sequence
  Oligonucleotide for detection of SNP TSC0045434
tcgacttactaca

SEQ ID NO: 184043 - DNA, 13 bp, Artificial Sequence
  Oligonucleotide for detection of SNP TSC0045437
aaggttggatatt

SEQ ID NO: 184044 - DNA, 13 bp, Artificial Sequence
  Oligonucleotide for detection of SNP TSC0045437
aatatccaacctt

SEQ ID NO: 184045 - DNA, 13 bp, Artificial Sequence
  Oligonucleotide for detection of SNP TSC0045437
aaggttagatatt

SEQ ID NO: 184046 - DNA, 13 bp, Artificial Sequence
  Oligonucleotide for detection of SNP TSC0045437
aatatctaacctt

SEQ ID NO: 184047 - DNA, 13 bp, Artificial Sequence
  Oligonucleotide for detection of SNP TSC0045438
gtagtttgaataa

SEQ ID NO: 184048 - DNA, 13 bp, Artificial Sequence
  Oligonucleotide for detection of SNP TSC0045438
ttattcaaactac

SEQ ID NO: 184049 - DNA, 13 bp, Artificial Sequence
  Oligonucleotide for detection of SNP TSC0045438
gtagttcgaataa

SEQ ID NO: 184050 - DNA, 13 bp, Artificial Sequence
  Oligonucleotide for detection of SNP TSC0045438
ttattcgaactac

SEQ ID NO: 184051 - DNA, 13 bp, Artificial Sequence
  Oligonucleotide for detection of SNP TSC0045440
gggagagaaagtt

SEQ ID NO: 184052 - DNA, 13 bp, Artificial Sequence
  Oligonucleotide for detection of SNP TSC0045440
aactttctctccc

SEQ ID NO: 184053 - DNA, 13 bp, Artificial Sequence
  Oligonucleotide for detection of SNP TSC0045440
gggagataaagtt

SEQ ID NO: 184054 - DNA, 13 bp, Artificial Sequence
  Oligonucleotide for detection of SNP TSC0045440
aactttatctccc

SEQ ID NO: 184055 - DNA, 13 bp, Artificial Sequence
  Oligonucleotide for detection of SNP TSC0045441
gattttatttaaa

SEQ ID NO: 184056 - DNA, 13 bp, Artificial Sequence
  Oligonucleotide for detection of SNP TSC0045441
tttaaataaaatc

SEQ ID NO: 184057 - DNA, 13 bp, Artificial Sequence
  Oligonucleotide for detection of SNP TSC0045441
gattttgtttaaa

SEQ ID NO: 184058 - DNA, 13 bp, Artificial Sequence
  Oligonucleotide for detection of SNP TSC0045441
tttaaacaaaatc

SEQ ID NO: 184059 - DNA, 13 bp, Artificial Sequence
  Oligonucleotide for detection of SNP TSC0045441
gatttcgtttaaa

SEQ ID NO: 184060 - DNA, 13 bp, Artificial Sequence
  Oligonucleotide for detection of SNP TSC0045441
tttaaacgaaatc

SEQ ID NO: 184061 - DNA, 13 bp, Artificial Sequence
  Oligonucleotide for detection of SNP TSC0045443
tggatggttaggt

SEQ ID NO: 184062 - DNA, 13 bp, Artificial Sequence
  Oligonucleotide for detection of SNP TSC0045443
acctaaccatcca

SEQ ID NO: 184063 - DNA, 13 bp, Artificial Sequence
  Oligonucleotide for detection of SNP TSC0045443
tggatgattaggt

SEQ ID NO: 184064 - DNA, 13 bp, Artificial Sequence
  Oligonucleotide for detection of SNP TSC0045443
acctaatcatcca

SEQ ID NO: 184065 - DNA, 13 bp, Artificial Sequence
  Oligonucleotide for detection of SNP TSC0045447
gatatataagatt

SEQ ID NO: 184066 - DNA, 13 bp, Artificial Sequence
  Oligonucleotide for detection of SNP TSC0045447
aatcttatatatc

SEQ ID NO: 184067 - DNA, 13 bp, Artificial Sequence
  Oligonucleotide for detection of SNP TSC0045447
aattttttgtgty

SEQ ID NO: 184068 - DNA, 13 bp, Artificial Sequence
  Oligonucleotide for detection of SNP TSC0045447
racacaaaaaatt

SEQ ID NO: 184069 - DNA, 13 bp, Artificial Sequence
  Oligonucleotide for detection of SNP TSC0001163
aattatgtagttg

SEQ ID NO: 184070 - DNA, 13 bp, Artificial Sequence
  Oligonucleotide for detection of SNP TSC0001163
caactacataatt

SEQ ID NO: 184071 - DNA, 13 bp, Artificial Sequence
  Oligonucleotide for detection of SNP TSC0001163
aattatatagttg

SEQ ID NO: 184072 - DNA, 13 bp, Artificial Sequence
  Oligonucleotide for detection of SNP TSC0001163
caactatataatt

SEQ ID NO: 184073 - DNA, 13 bp, Artificial Sequence
  Oligonucleotide for detection of SNP TSC0045455
tggaatgaaggty

SEQ ID NO: 184074 - DNA, 13 bp, Artificial Sequence
  Oligonucleotide for detection of SNP TSC0045455
raccttcattcca

SEQ ID NO: 184075 - DNA, 13 bp, Artificial Sequence
  Oligonucleotide for detection of SNP TSC0045455
tggaataaaggty

SEQ ID NO: 184076 - DNA, 13 bp, Artificial Sequence
  Oligonucleotide for detection of SNP TSC0045455
racctttattcca

SEQ ID NO: 184077 - DNA, 13 bp, Artificial Sequence
  Oligonucleotide for detection of SNP TSC0045457
agaatgaatgagy

SEQ ID NO: 184078 - DNA, 13 bp, Artificial Sequence
  Oligonucleotide for detection of SNP TSC0045457
rctcattcattct

SEQ ID NO: 184079 - DNA, 13 bp, Artificial Sequence
  Oligonucleotide for detection of SNP TSC0045457
agaatgtatgagy

SEQ ID NO: 184080 - DNA, 13 bp, Artificial Sequence
  Oligonucleotide for detection of SNP TSC0045457
rctcatacattct

SEQ ID NO: 184081 - DNA, 13 bp, Artificial Sequence
  Oligonucleotide for detection of SNP TSC0045457
agaacgaatgagy

SEQ ID NO: 184082 - DNA, 13 bp, Artificial Sequence
  Oligonucleotide for detection of SNP TSC0045457
rctcattcgttct

SEQ ID NO: 184083 - DNA, 13 bp, Artificial Sequence
  Oligonucleotide for detection of SNP TSC0045457
agaacgtatgagy

SEQ ID NO: 184084 - DNA, 13 bp, Artificial Sequence
  Oligonucleotide for detection of SNP TSC0045457
rctcatacgttct

SEQ ID NO: 184085 - DNA, 13 bp, Artificial Sequence
  Oligonucleotide for detection of SNP TSC0045457
gtttatttgtttt

SEQ ID NO: 184086 - DNA, 13 bp, Artificial Sequence
  Oligonucleotide for detection of SNP TSC0045457
aaaacaaataaac

SEQ ID NO: 184087 - DNA, 13 bp, Artificial Sequence
  Oligonucleotide for detection of SNP TSC0045457
gtttatgtgtttt

SEQ ID NO: 184088 - DNA, 13 bp, Artificial Sequence
  Oligonucleotide for detection of SNP TSC0045457
aaaacacataaac

SEQ ID NO: 184089 - DNA, 13 bp, Artificial Sequence
  Oligonucleotide for detection of SNP TSC0045457
gtttattcgtttt

SEQ ID NO: 184090 - DNA, 13 bp, Artificial Sequence
  Oligonucleotide for detection of SNP TSC0045457
aaaacgaataaac

SEQ ID NO: 184091 - DNA, 13 bp, Artificial Sequence
  Oligonucleotide for detection of SNP TSC0045457
gtttatgcgtttt

SEQ ID NO: 184092 - DNA, 13 bp, Artificial Sequence
  Oligonucleotide for detection of SNP TSC0045457
aaaacgcataaac

SEQ ID NO: 184093 - DNA, 13 bp, Artificial Sequence
  Oligonucleotide for detection of SNP TSC0045458
tgtataaatatag

SEQ ID NO: 184094 - DNA, 13 bp, Artificial Sequence
  Oligonucleotide for detection of SNP TSC0045458
ctatatttataca

SEQ ID NO: 184095 - DNA, 13 bp, Artificial Sequence
  Oligonucleotide for detection of SNP TSC0045458
tgtatagatatag

SEQ ID NO: 184096 - DNA, 13 bp, Artificial Sequence
  Oligonucleotide for detection of SNP TSC0045458
ctatatctataca

SEQ ID NO: 184097 - DNA, 13 bp, Artificial Sequence
  Oligonucleotide for detection of SNP TSC0045459
atttagtggaaty

SEQ ID NO: 184098 - DNA, 13 bp, Artificial Sequence
  Oligonucleotide for detection of SNP TSC0045459
rattccactaaat

SEQ ID NO: 184099 - DNA, 13 bp, Artificial Sequence
  Oligonucleotide for detection of SNP TSC0045459
atttagcggaaty

SEQ ID NO: 184100 - DNA, 13 bp, Artificial Sequence
  Oligonucleotide for detection of SNP TSC0045459
rattccgctaaat

SEQ ID NO: 184101 - DNA, 13 bp, Artificial Sequence
  Oligonucleotide for detection of SNP TSC0005249
ttaggatgtttty

SEQ ID NO: 184102 - DNA, 13 bp, Artificial Sequence
  Oligonucleotide for detection of SNP TSC0005249
raaaacatcctaa

SEQ ID NO: 184103 - DNA, 13 bp, Artificial Sequence
  Oligonucleotide for detection of SNP TSC0005249
ttaggacgtttty

SEQ ID NO: 184104 - DNA, 13 bp, Artificial Sequence
  Oligonucleotide for detection of SNP TSC0005249
raaaacgtcctaa

SEQ ID NO: 184105 - DNA, 13 bp, Artificial Sequence
  Oligonucleotide for detection of SNP TSC0005249
gaaagtgttttaa

SEQ ID NO: 184106 - DNA, 13 bp, Artificial Sequence
  Oligonucleotide for detection of SNP TSC0005249
ttaaaacactttc

SEQ ID NO: 184107 - DNA, 13 bp, Artificial Sequence
  Oligonucleotide for detection of SNP TSC0005249
gaaagtattttaa

SEQ ID NO: 184108 - DNA, 13 bp, Artificial Sequence
  Oligonucleotide for detection of SNP TSC0005249
ttaaaatactttc

SEQ ID NO: 184109 - DNA, 13 bp, Artificial Sequence
  Oligonucleotide for detection of SNP TSC0005249
gaaagcgttttaa

SEQ ID NO: 184110 - DNA, 13 bp, Artificial Sequence
  Oligonucleotide for detection of SNP TSC0005249
ttaaaacgctttc

SEQ ID NO: 184111 - DNA, 13 bp, Artificial Sequence
  Oligonucleotide for detection of SNP TSC0004860
ttgttaggtaggt

SEQ ID NO: 184112 - DNA, 13 bp, Artificial Sequence
  Oligonucleotide for detection of SNP TSC0004860
acctacctaacaa

SEQ ID NO: 184113 - DNA, 13 bp, Artificial Sequence
  Oligonucleotide for detection of SNP TSC0004860
ttgttaagtaggt

SEQ ID NO: 184114 - DNA, 13 bp, Artificial Sequence
  Oligonucleotide for detection of SNP TSC0004860
acctacttaacaa

SEQ ID NO: 184115 - DNA, 13 bp, Artificial Sequence
  Oligonucleotide for detection of SNP TSC0000197
gtttttgattata

SEQ ID NO: 184116 - DNA, 13 bp, Artificial Sequence
  Oligonucleotide for detection of SNP TSC0000197
tataatcaaaaac

SEQ ID NO: 184117 - DNA, 13 bp, Artificial Sequence
  Oligonucleotide for detection of SNP TSC0000197
gtttttaattata

SEQ ID NO: 184118 - DNA, 13 bp, Artificial Sequence
  Oligonucleotide for detection of SNP TSC0000197
tataattaaaaac

SEQ ID NO: 184119 - DNA, 13 bp, Artificial Sequence
  Oligonucleotide for detection of SNP TSC0045462
gattttgttttty

SEQ ID NO: 184120 - DNA, 13 bp, Artificial Sequence
  Oligonucleotide for detection of SNP TSC0045462
raaaaacaaaatc

SEQ ID NO: 184121 - DNA, 13 bp, Artificial Sequence
  Oligonucleotide for detection of SNP TSC0045462
gatttcgttttty

SEQ ID NO: 184122 - DNA, 13 bp, Artificial Sequence
  Oligonucleotide for detection of SNP TSC0045462
raaaaacgaaatc

SEQ ID NO: 184123 - DNA, 13 bp, Artificial Sequence
  Oligonucleotide for detection of SNP TSC0045462
gggaggtgaagty

SEQ ID NO: 184124 - DNA, 13 bp, Artificial Sequence
  Oligonucleotide for detection of SNP TSC0045462
racttcacctccc

SEQ ID NO: 184125 - DNA, 13 bp, Artificial Sequence
  Oligonucleotide for detection of SNP TSC0045462
gggaggcgaagty

SEQ ID NO: 184126 - DNA, 13 bp, Artificial Sequence
  Oligonucleotide for detection of SNP TSC0045462
racttcgcctccc

SEQ ID NO: 184127 - DNA, 13 bp, Artificial Sequence
  Oligonucleotide for detection of SNP TSC0045463
tatttttggaggt

SEQ ID NO: 184128 - DNA, 13 bp, Artificial Sequence
  Oligonucleotide for detection of SNP TSC0045463
acctccaaaaata

SEQ ID NO: 184129 - DNA, 13 bp, Artificial Sequence
  Oligonucleotide for detection of SNP TSC0045463
tattttgggaggt

SEQ ID NO: 184130 - DNA, 13 bp, Artificial Sequence
  Oligonucleotide for detection of SNP TSC0045463
acctcccaaaata

SEQ ID NO: 184131 - DNA, 13 bp, Artificial Sequence
  Oligonucleotide for detection of SNP TSC0045464
gaaattagtgaty

SEQ ID NO: 184132 - DNA, 13 bp, Artificial Sequence
  Oligonucleotide for detection of SNP TSC0045464
ratcactaatttc

SEQ ID NO: 184133 - DNA, 13 bp, Artificial Sequence
  Oligonucleotide for detection of SNP TSC0045464
gaaattggtgaty

SEQ ID NO: 184134 - DNA, 13 bp, Artificial Sequence
  Oligonucleotide for detection of SNP TSC0045464
ratcaccaatttc

SEQ ID NO: 184135 - DNA, 13 bp, Artificial Sequence
  Oligonucleotide for detection of SNP TSC0045464
gaaatcggtgaty

SEQ ID NO: 184136 - DNA, 13 bp, Artificial Sequence
  Oligonucleotide for detection of SNP TSC0045464
ratcaccgatttc

SEQ ID NO: 184137 - DNA, 13 bp, Artificial Sequence
  Oligonucleotide for detection of SNP TSC0045464
gattattgattty

SEQ ID NO: 184138 - DNA, 13 bp, Artificial Sequence
  Oligonucleotide for detection of SNP TSC0045464
raaatcaataatc

SEQ ID NO: 184139 - DNA, 13 bp, Artificial Sequence
  Oligonucleotide for detection of SNP TSC0045464
gattatcgattty

SEQ ID NO: 184140 - DNA, 13 bp, Artificial Sequence
  Oligonucleotide for detection of SNP TSC0045464
raaatcgataatc

SEQ ID NO: 184141 - DNA, 13 bp, Artificial Sequence
  Oligonucleotide for detection of SNP TSC0045465
tttataagggaaa

SEQ ID NO: 184142 - DNA, 13 bp, Artificial Sequence
  Oligonucleotide for detection of SNP TSC0045465
tttcccttataaa

SEQ ID NO: 184143 - DNA, 13 bp, Artificial Sequence
  Oligonucleotide for detection of SNP TSC0045465
tttataggggaaa

SEQ ID NO: 184144 - DNA, 13 bp, Artificial Sequence
  Oligonucleotide for detection of SNP TSC0045465
tttcccctataaa

SEQ ID NO: 184145 - DNA, 13 bp, Artificial Sequence
  Oligonucleotide for detection of SNP TSC0045466
ggaggagttatag

SEQ ID NO: 184146 - DNA, 13 bp, Artificial Sequence
  Oligonucleotide for detection of SNP TSC0045466
ctataactcctcc

SEQ ID NO: 184147 - DNA, 13 bp, Artificial Sequence
  Oligonucleotide for detection of SNP TSC0045466
ggaggaattatag

SEQ ID NO: 184148 - DNA, 13 bp, Artificial Sequence
  Oligonucleotide for detection of SNP TSC0045466
ctataattcctcc

SEQ ID NO: 184149 - DNA, 13 bp, Artificial Sequence
  Oligonucleotide for detection of SNP TSC0006670
aagaggtgagttt

SEQ ID NO: 184150 - DNA, 13 bp, Artificial Sequence
  Oligonucleotide for detection of SNP TSC0006670
aaactcacctctt

SEQ ID NO: 184151 - DNA, 13 bp, Artificial Sequence
  Oligonucleotide for detection of SNP TSC0006670
aagaggggagttt

SEQ ID NO: 184152 - DNA, 13 bp, Artificial Sequence
  Oligonucleotide for detection of SNP TSC0006670
aaactcccctctt

SEQ ID NO: 184153 - DNA, 13 bp, Artificial Sequence
  Oligonucleotide for detection of SNP TSC0006670
aagaggcgagttt

SEQ ID NO: 184154 - DNA, 13 bp, Artificial Sequence
  Oligonucleotide for detection of SNP TSC0006670
aaactcgcctctt

SEQ ID NO: 184155 - DNA, 13 bp, Artificial Sequence
  Oligonucleotide for detection of SNP TSC0006670
aaatttttttttt

SEQ ID NO: 184156 - DNA, 13 bp, Artificial Sequence
  Oligonucleotide for detection of SNP TSC0006670
aaaaaaaaaattt

SEQ ID NO: 184157 - DNA, 13 bp, Artificial Sequence
  Oligonucleotide for detection of SNP TSC0006671
atagggaaagtgg

SEQ ID NO: 184158 - DNA, 13 bp, Artificial Sequence
  Oligonucleotide for detection of SNP TSC0006671
ccactttccctat

SEQ ID NO: 184159 - DNA, 13 bp, Artificial Sequence
  Oligonucleotide for detection of SNP TSC0006671
atagggtaagtgg

SEQ ID NO: 184160 - DNA, 13 bp, Artificial Sequence
  Oligonucleotide for detection of SNP TSC0006671
ccacttaccctat

SEQ ID NO: 184161 - DNA, 13 bp, Artificial Sequence
  Oligonucleotide for detection of SNP TSC0045467
atggagagtttgt

SEQ ID NO: 184162 - DNA, 13 bp, Artificial Sequence
  Oligonucleotide for detection of SNP TSC0045467
acaaactctccat

SEQ ID NO: 184163 - DNA, 13 bp, Artificial Sequence
  Oligonucleotide for detection of SNP TSC0045467
atggagggtttgt

SEQ ID NO: 184164 - DNA, 13 bp, Artificial Sequence
  Oligonucleotide for detection of SNP TSC0045467
acaaaccctccat

SEQ ID NO: 184165 - DNA, 13 bp, Artificial Sequence
  Oligonucleotide for detection of SNP TSC0045467
atggagagttcgt

SEQ ID NO: 184166 - DNA, 13 bp, Artificial Sequence
  Oligonucleotide for detection of SNP TSC0045467
acgaactctccat

SEQ ID NO: 184167 - DNA, 13 bp, Artificial Sequence
  Oligonucleotide for detection of SNP TSC0045467
atggagggttcgt

SEQ ID NO: 184168 - DNA, 13 bp, Artificial Sequence
  Oligonucleotide for detection of SNP TSC0045467
acgaaccctccat

SEQ ID NO: 184169 - DNA, 13 bp, Artificial Sequence
  Oligonucleotide for detection of SNP TSC0045468
gggagtatagatg

SEQ ID NO: 184170 - DNA, 13 bp, Artificial Sequence
  Oligonucleotide for detection of SNP TSC0045468
catctatactccc

SEQ ID NO: 184171 - DNA, 13 bp, Artificial Sequence
  Oligonucleotide for detection of SNP TSC0045468
gggagtgtagatg

SEQ ID NO: 184172 - DNA, 13 bp, Artificial Sequence
  Oligonucleotide for detection of SNP TSC0045468
catctacactccc

SEQ ID NO: 184173 - DNA, 13 bp, Artificial Sequence
  Oligonucleotide for detection of SNP TSC0045468
gggagcgtagatg

SEQ ID NO: 184174 - DNA, 13 bp, Artificial Sequence
  Oligonucleotide for detection of SNP TSC0045468
catctacgctccc

SEQ ID NO: 184175 - DNA, 13 bp, Artificial Sequence
  Oligonucleotide for detection of SNP TSC0009637
tttttagttatty

SEQ ID NO: 184176 - DNA, 13 bp, Artificial Sequence
  Oligonucleotide for detection of SNP TSC0009637
raataactaaaaa

SEQ ID NO: 184177 - DNA, 13 bp, Artificial Sequence
  Oligonucleotide for detection of SNP TSC0045469
ggtatttaaattg

SEQ ID NO: 184178 - DNA, 13 bp, Artificial Sequence
  Oligonucleotide for detection of SNP TSC0045469
caatttaaatacc

SEQ ID NO: 184179 - DNA, 13 bp, Artificial Sequence
  Oligonucleotide for detection of SNP TSC0045469
ggtattgaaattg

SEQ ID NO: 184180 - DNA, 13 bp, Artificial Sequence
  Oligonucleotide for detection of SNP TSC0045469
caatttcaatacc

SEQ ID NO: 184181 - DNA, 13 bp, Artificial Sequence
  Oligonucleotide for detection of SNP TSC0045469
ggtatttaaatcg

SEQ ID NO: 184182 - DNA, 13 bp, Artificial Sequence
  Oligonucleotide for detection of SNP TSC0045469
cgatttaaatacc

SEQ ID NO: 184183 - DNA, 13 bp, Artificial Sequence
  Oligonucleotide for detection of SNP TSC0045469
ggtattgaaatcg

SEQ ID NO: 184184 - DNA, 13 bp, Artificial Sequence
  Oligonucleotide for detection of SNP TSC0045469
cgatttcaatacc

SEQ ID NO: 184185 - DNA, 13 bp, Artificial Sequence
  Oligonucleotide for detection of SNP TSC0045469
tggtttgaataty

SEQ ID NO: 184186 - DNA, 13 bp, Artificial Sequence
  Oligonucleotide for detection of SNP TSC0045469
ratattcaaacca

SEQ ID NO: 184187 - DNA, 13 bp, Artificial Sequence
  Oligonucleotide for detection of SNP TSC0045469
tggttttaataty

SEQ ID NO: 184188 - DNA, 13 bp, Artificial Sequence
  Oligonucleotide for detection of SNP TSC0045469
ratattaaaacca

SEQ ID NO: 184189 - DNA, 13 bp, Artificial Sequence
  Oligonucleotide for detection of SNP TSC0045469
cggtttgaataty

SEQ ID NO: 184190 - DNA, 13 bp, Artificial Sequence
  Oligonucleotide for detection of SNP TSC0045469
ratattcaaaccg

SEQ ID NO: 184191 - DNA, 13 bp, Artificial Sequence
  Oligonucleotide for detection of SNP TSC0045469
cggttttaataty

SEQ ID NO: 184192 - DNA, 13 bp, Artificial Sequence
  Oligonucleotide for detection of SNP TSC0045469
ratattaaaaccg

SEQ ID NO: 184193 - DNA, 13 bp, Artificial Sequence
  Oligonucleotide for detection of SNP TSC0000104
agataggaagatg

SEQ ID NO: 184194 - DNA, 13 bp, Artificial Sequence
  Oligonucleotide for detection of SNP TSC0000104
catcttcctatct

SEQ ID NO: 184195 - DNA, 13 bp, Artificial Sequence
  Oligonucleotide for detection of SNP TSC0000104
agatagaaagatg

SEQ ID NO: 184196 - DNA, 13 bp, Artificial Sequence
  Oligonucleotide for detection of SNP TSC0000104
catctttctatct

SEQ ID NO: 184197 - DNA, 13 bp, Artificial Sequence
  Oligonucleotide for detection of SNP TSC0045470
gttggaaatttat

SEQ ID NO: 184198 - DNA, 13 bp, Artificial Sequence
  Oligonucleotide for detection of SNP TSC0045470
ataaatttccaac

SEQ ID NO: 184199 - DNA, 13 bp, Artificial Sequence
  Oligonucleotide for detection of SNP TSC0045470
gttggatatttat

SEQ ID NO: 184200 - DNA, 13 bp, Artificial Sequence
  Oligonucleotide for detection of SNP TSC0045470
ataaatatccaac

SEQ ID NO: 184201 - DNA, 13 bp, Artificial Sequence
  Oligonucleotide for detection of SNP TSC0045470
ataagtttttagy

SEQ ID NO: 184202 - DNA, 13 bp, Artificial Sequence
  Oligonucleotide for detection of SNP TSC0045470
rctaaaaacttat

SEQ ID NO: 184203 - DNA, 13 bp, Artificial Sequence
  Oligonucleotide for detection of SNP TSC0045470
ataagtgtttagy

SEQ ID NO: 184204 - DNA, 13 bp, Artificial Sequence
  Oligonucleotide for detection of SNP TSC0045470
rctaaacacttat

SEQ ID NO: 184205 - DNA, 13 bp, Artificial Sequence
  Oligonucleotide for detection of SNP TSC0045471
gaaggataggtgy

SEQ ID NO: 184206 - DNA, 13 bp, Artificial Sequence
  Oligonucleotide for detection of SNP TSC0045471
rcacctatccttc

SEQ ID NO: 184207 - DNA, 13 bp, Artificial Sequence
  Oligonucleotide for detection of SNP TSC0045471
gaaggagaggtgy

SEQ ID NO: 184208 - DNA, 13 bp, Artificial Sequence
  Oligonucleotide for detection of SNP TSC0045471
rcacctctccttc

SEQ ID NO: 184209 - DNA, 13 bp, Artificial Sequence
  Oligonucleotide for detection of SNP TSC0045471
gaaggataggcgy

SEQ ID NO: 184210 - DNA, 13 bp, Artificial Sequence
  Oligonucleotide for detection of SNP TSC0045471
rcgcctatccttc

SEQ ID NO: 184211 - DNA, 13 bp, Artificial Sequence
  Oligonucleotide for detection of SNP TSC0045471
gaaggagaggcgy

SEQ ID NO: 184212 - DNA, 13 bp, Artificial Sequence
  Oligonucleotide for detection of SNP TSC0045471
rcgcctctccttc

SEQ ID NO: 184213 - DNA, 13 bp, Artificial Sequence
  Oligonucleotide for detection of SNP TSC0045471
gtgttttttttty

SEQ ID NO: 184214 - DNA, 13 bp, Artificial Sequence
  Oligonucleotide for detection of SNP TSC0045471
raaaaaaaaacac

SEQ ID NO: 184215 - DNA, 13 bp, Artificial Sequence
  Oligonucleotide for detection of SNP TSC0045471
gcgttttttttty

SEQ ID NO: 184216 - DNA, 13 bp, Artificial Sequence
  Oligonucleotide for detection of SNP TSC0045471
raaaaaaaaacgc

SEQ ID NO: 184217 - DNA, 13 bp, Artificial Sequence
  Oligonucleotide for detection of SNP TSC0045472
gtttttatagatg

SEQ ID NO: 184218 - DNA, 13 bp, Artificial Sequence
  Oligonucleotide for detection of SNP TSC0045472
catctataaaaac

SEQ ID NO: 184219 - DNA, 13 bp, Artificial Sequence
  Oligonucleotide for detection of SNP TSC0045472
gtttttgtagatg

SEQ ID NO: 184220 - DNA, 13 bp, Artificial Sequence
  Oligonucleotide for detection of SNP TSC0045472
catctacaaaaac

SEQ ID NO: 184221 - DNA, 13 bp, Artificial Sequence
  Oligonucleotide for detection of SNP TSC0045472
gttttcgtagatg

SEQ ID NO: 184222 - DNA, 13 bp, Artificial Sequence
  Oligonucleotide for detection of SNP TSC0045472
catctacgaaaac

SEQ ID NO: 184223 - DNA, 13 bp, Artificial Sequence
  Oligonucleotide for detection of SNP TSC0045472
tatttatgggagy

SEQ ID NO: 184224 - DNA, 13 bp, Artificial Sequence
  Oligonucleotide for detection of SNP TSC0045472
rctcccataaata

SEQ ID NO: 184225 - DNA, 13 bp, Artificial Sequence
  Oligonucleotide for detection of SNP TSC0045472
tatttacgggagy

SEQ ID NO: 184226 - DNA, 13 bp, Artificial Sequence
  Oligonucleotide for detection of SNP TSC0045472
rctcccgtaaata

SEQ ID NO: 184227 - DNA, 13 bp, Artificial Sequence
  Oligonucleotide for detection of SNP TSC0004776
ttaattatggtat

SEQ ID NO: 184228 - DNA, 13 bp, Artificial Sequence
  Oligonucleotide for detection of SNP TSC0004776
ataccataattaa

SEQ ID NO: 184229 - DNA, 13 bp, Artificial Sequence
  Oligonucleotide for detection of SNP TSC0004776
ttaattgtggtat

SEQ ID NO: 184230 - DNA, 13 bp, Artificial Sequence
  Oligonucleotide for detection of SNP TSC0004776
ataccacaattaa

SEQ ID NO: 184231 - DNA, 13 bp, Artificial Sequence
  Oligonucleotide for detection of SNP TSC0004776
ttaatcgtggtat

SEQ ID NO: 184232 - DNA, 13 bp, Artificial Sequence
  Oligonucleotide for detection of SNP TSC0004776
ataccacgattaa

SEQ ID NO: 184233 - DNA, 13 bp, Artificial Sequence
  Oligonucleotide for detection of SNP TSC0004776
atgttatggttga

SEQ ID NO: 184234 - DNA, 13 bp, Artificial Sequence
  Oligonucleotide for detection of SNP TSC0004776
tcaaccataacat

SEQ ID NO: 184235 - DNA, 13 bp, Artificial Sequence
  Oligonucleotide for detection of SNP TSC0004776
atgttacggttga

SEQ ID NO: 184236 - DNA, 13 bp, Artificial Sequence
  Oligonucleotide for detection of SNP TSC0004776
tcaaccgtaacat

SEQ ID NO: 184237 - DNA, 13 bp, Artificial Sequence
  Oligonucleotide for detection of SNP TSC0001046
ttatttattttaa

SEQ ID NO: 184238 - DNA, 13 bp, Artificial Sequence
  Oligonucleotide for detection of SNP TSC0001046
ttaaaataaataa

SEQ ID NO: 184239 - DNA, 13 bp, Artificial Sequence
  Oligonucleotide for detection of SNP TSC0001046
ttagagtggatag

SEQ ID NO: 184240 - DNA, 13 bp, Artificial Sequence
  Oligonucleotide for detection of SNP TSC0001046
ctatccactctaa

SEQ ID NO: 184241 - DNA, 13 bp, Artificial Sequence
  Oligonucleotide for detection of SNP TSC0001046
ttagagcggatag

SEQ ID NO: 184242 - DNA, 13 bp, Artificial Sequence
  Oligonucleotide for detection of SNP TSC0001046
ctatccgctctaa

SEQ ID NO: 184243 - DNA, 13 bp, Artificial Sequence
  Oligonucleotide for detection of SNP TSC0004790
ttattttagttty

SEQ ID NO: 184244 - DNA, 13 bp, Artificial Sequence
  Oligonucleotide for detection of SNP TSC0004790
raaactaaaataa

SEQ ID NO: 184245 - DNA, 13 bp, Artificial Sequence
  Oligonucleotide for detection of SNP TSC0004790
ttatttgagttty

SEQ ID NO: 184246 - DNA, 13 bp, Artificial Sequence
  Oligonucleotide for detection of SNP TSC0004790
raaactcaaataa

SEQ ID NO: 184247 - DNA, 13 bp, Artificial Sequence
  Oligonucleotide for detection of SNP TSC0004790
gaggtttaggtaa

SEQ ID NO: 184248 - DNA, 13 bp, Artificial Sequence
  Oligonucleotide for detection of SNP TSC0004790
ttacctaaacctc

SEQ ID NO: 184249 - DNA, 13 bp, Artificial Sequence
  Oligonucleotide for detection of SNP TSC0045476
ggttgttttttty

SEQ ID NO: 184250 - DNA, 13 bp, Artificial Sequence
  Oligonucleotide for detection of SNP TSC0045476
raaaaaaacaacc

SEQ ID NO: 184251 - DNA, 13 bp, Artificial Sequence
  Oligonucleotide for detection of SNP TSC0045476
ggttgtgttttty

SEQ ID NO: 184252 - DNA, 13 bp, Artificial Sequence
  Oligonucleotide for detection of SNP TSC0045476
raaaaacacaacc

SEQ ID NO: 184253 - DNA, 13 bp, Artificial Sequence
  Oligonucleotide for detection of SNP TSC0045476
gggggaaataaty

SEQ ID NO: 184254 - DNA, 13 bp, Artificial Sequence
  Oligonucleotide for detection of SNP TSC0045476
rattatttccccc

SEQ ID NO: 184255 - DNA, 13 bp, Artificial Sequence
  Oligonucleotide for detection of SNP TSC0045476
gggggatataaty

SEQ ID NO: 184256 - DNA, 13 bp, Artificial Sequence
  Oligonucleotide for detection of SNP TSC0045476
rattatatccccc

SEQ ID NO: 184257 - DNA, 13 bp, Artificial Sequence
  Oligonucleotide for detection of SNP TSC0045477
tttatgatgtttt

SEQ ID NO: 184258 - DNA, 13 bp, Artificial Sequence
  Oligonucleotide for detection of SNP TSC0045477
aaaacatcataaa

SEQ ID NO: 184259 - DNA, 13 bp, Artificial Sequence
  Oligonucleotide for detection of SNP TSC0045477
aaaatattatggg

SEQ ID NO: 184260 - DNA, 13 bp, Artificial Sequence
  Oligonucleotide for detection of SNP TSC0045477
cccataatatttt

SEQ ID NO: 184261 - DNA, 13 bp, Artificial Sequence
  Oligonucleotide for detection of SNP TSC0045477
aaaatagtatggg

SEQ ID NO: 184262 - DNA, 13 bp, Artificial Sequence
  Oligonucleotide for detection of SNP TSC0045477
cccatactatttt

SEQ ID NO: 184263 - DNA, 13 bp, Artificial Sequence
  Oligonucleotide for detection of SNP TSC0006682
aatttttgtttat

SEQ ID NO: 184264 - DNA, 13 bp, Artificial Sequence
  Oligonucleotide for detection of SNP TSC0006682
ataaacaaaaatt

SEQ ID NO: 184265 - DNA, 13 bp, Artificial Sequence
  Oligonucleotide for detection of SNP TSC0006682
aattttcgtttat

SEQ ID NO: 184266 - DNA, 13 bp, Artificial Sequence
  Oligonucleotide for detection of SNP TSC0006682
ataaacgaaaatt

SEQ ID NO: 184267 - DNA, 13 bp, Artificial Sequence
  Oligonucleotide for detection of SNP TSC0006682
atagatggagatt

SEQ ID NO: 184268 - DNA, 13 bp, Artificial Sequence
  Oligonucleotide for detection of SNP TSC0006682
aatctccatctat

SEQ ID NO: 184269 - DNA, 13 bp, Artificial Sequence
  Oligonucleotide for detection of SNP TSC0006682
atagatagagatt

SEQ ID NO: 184270 - DNA, 13 bp, Artificial Sequence
  Oligonucleotide for detection of SNP TSC0006682
aatctctatctat

SEQ ID NO: 184271 - DNA, 13 bp, Artificial Sequence
  Oligonucleotide for detection of SNP TSC0006682
atagacggagatt

SEQ ID NO: 184272 - DNA, 13 bp, Artificial Sequence
  Oligonucleotide for detection of SNP TSC0006682
aatctccgtctat

SEQ ID NO: 184273 - DNA, 13 bp, Artificial Sequence
  Oligonucleotide for detection of SNP TSC0045478
agaaatagtggta

SEQ ID NO: 184274 - DNA, 13 bp, Artificial Sequence
  Oligonucleotide for detection of SNP TSC0045478
taccactatttct

SEQ ID NO: 184275 - DNA, 13 bp, Artificial Sequence
  Oligonucleotide for detection of SNP TSC0045478
agaaattgtggta

SEQ ID NO: 184276 - DNA, 13 bp, Artificial Sequence
  Oligonucleotide for detection of SNP TSC0045478
taccacaatttct

SEQ ID NO: 184277 - DNA, 13 bp, Artificial Sequence
  Oligonucleotide for detection of SNP TSC0045479
tttttggataaaa

SEQ ID NO: 184278 - DNA, 13 bp, Artificial Sequence
  Oligonucleotide for detection of SNP TSC0045479
ttttatccaaaaa

SEQ ID NO: 184279 - DNA, 13 bp, Artificial Sequence
  Oligonucleotide for detection of SNP TSC0045479
tttttgaataaaa

SEQ ID NO: 184280 - DNA, 13 bp, Artificial Sequence
  Oligonucleotide for detection of SNP TSC0045479
ttttattcaaaaa

SEQ ID NO: 184281 - DNA, 13 bp, Artificial Sequence
  Oligonucleotide for detection of SNP TSC0045483
gattaagtaagta

SEQ ID NO: 184282 - DNA, 13 bp, Artificial Sequence
  Oligonucleotide for detection of SNP TSC0045483
tacttacttaatc

SEQ ID NO: 184283 - DNA, 13 bp, Artificial Sequence
  Oligonucleotide for detection of SNP TSC0045483
gattaaataagta

SEQ ID NO: 184284 - DNA, 13 bp, Artificial Sequence
  Oligonucleotide for detection of SNP TSC0045483
tacttatttaatc

SEQ ID NO: 184285 - DNA, 13 bp, Artificial Sequence
  Oligonucleotide for detection of SNP TSC0001346
gtggaatgaaggg

SEQ ID NO: 184286 - DNA, 13 bp, Artificial Sequence
  Oligonucleotide for detection of SNP TSC0001346
cccttcattccac

SEQ ID NO: 184287 - DNA, 13 bp, Artificial Sequence
  Oligonucleotide for detection of SNP TSC0001346
gtggaacgaaggg

SEQ ID NO: 184288 - DNA, 13 bp, Artificial Sequence
  Oligonucleotide for detection of SNP TSC0001346
cccttcgttccac

SEQ ID NO: 184289 - DNA, 13 bp, Artificial Sequence
  Oligonucleotide for detection of SNP TSC0001347
tttatgattattg

SEQ ID NO: 184290 - DNA, 13 bp, Artificial Sequence
  Oligonucleotide for detection of SNP TSC0001347
caataatcataaa

SEQ ID NO: 184291 - DNA, 13 bp, Artificial Sequence
  Oligonucleotide for detection of SNP TSC0001348
tgtgtagagttty

SEQ ID NO: 184292 - DNA, 13 bp, Artificial Sequence
  Oligonucleotide for detection of SNP TSC0001348
raaactctacaca

SEQ ID NO: 184293 - DNA, 13 bp, Artificial Sequence
  Oligonucleotide for detection of SNP TSC0001348
tgtgtaaagttty

SEQ ID NO: 184294 - DNA, 13 bp, Artificial Sequence
  Oligonucleotide for detection of SNP TSC0001348
raaactttacaca

SEQ ID NO: 184295 - DNA, 13 bp, Artificial Sequence
  Oligonucleotide for detection of SNP TSC0001349
attggttagatgg

SEQ ID NO: 184296 - DNA, 13 bp, Artificial Sequence
  Oligonucleotide for detection of SNP TSC0001349
ccatctaaccaat

SEQ ID NO: 184297 - DNA, 13 bp, Artificial Sequence
  Oligonucleotide for detection of SNP TSC0001349
attggtgagatgg

SEQ ID NO: 184298 - DNA, 13 bp, Artificial Sequence
  Oligonucleotide for detection of SNP TSC0001349
ccatctcaccaat

SEQ ID NO: 184299 - DNA, 13 bp, Artificial Sequence
  Oligonucleotide for detection of SNP TSC0001349
attggttagacgg

SEQ ID NO: 184300 - DNA, 13 bp, Artificial Sequence
  Oligonucleotide for detection of SNP TSC0001349
ccgtctaaccaat

SEQ ID NO: 184301 - DNA, 13 bp, Artificial Sequence
  Oligonucleotide for detection of SNP TSC0001349
attggtgagacgg

SEQ ID NO: 184302 - DNA, 13 bp, Artificial Sequence
  Oligonucleotide for detection of SNP TSC0001349
ccgtctcaccaat

SEQ ID NO: 184303 - DNA, 13 bp, Artificial Sequence
  Oligonucleotide for detection of SNP TSC0001349
tcgtttaattagt

SEQ ID NO: 184304 - DNA, 13 bp, Artificial Sequence
  Oligonucleotide for detection of SNP TSC0001349
actaattaaacga

SEQ ID NO: 184305 - DNA, 13 bp, Artificial Sequence
  Oligonucleotide for detection of SNP TSC0001349
tcgttttattagt

SEQ ID NO: 184306 - DNA, 13 bp, Artificial Sequence
  Oligonucleotide for detection of SNP TSC0001349
actaataaaacga

SEQ ID NO: 184307 - DNA, 13 bp, Artificial Sequence
  Oligonucleotide for detection of SNP TSC0045487
attgagatgggag

SEQ ID NO: 184308 - DNA, 13 bp, Artificial Sequence
  Oligonucleotide for detection of SNP TSC0045487
ctcccatctcaat

SEQ ID NO: 184309 - DNA, 13 bp, Artificial Sequence
  Oligonucleotide for detection of SNP TSC0045487
attgaggtgggag

SEQ ID NO: 184310 - DNA, 13 bp, Artificial Sequence
  Oligonucleotide for detection of SNP TSC0045487
ctcccacctcaat

SEQ ID NO: 184311 - DNA, 13 bp, Artificial Sequence
  Oligonucleotide for detection of SNP TSC0045488
tttaaaagaggty

SEQ ID NO: 184312 - DNA, 13 bp, Artificial Sequence
  Oligonucleotide for detection of SNP TSC0045488
racctcttttaaa

SEQ ID NO: 184313 - DNA, 13 bp, Artificial Sequence
  Oligonucleotide for detection of SNP TSC0045488
tttaaatgaggty

SEQ ID NO: 184314 - DNA, 13 bp, Artificial Sequence
  Oligonucleotide for detection of SNP TSC0045488
racctcatttaaa

SEQ ID NO: 184315 - DNA, 13 bp, Artificial Sequence
  Oligonucleotide for detection of SNP TSC0045488
tttaaacgaggty

SEQ ID NO: 184316 - DNA, 13 bp, Artificial Sequence
  Oligonucleotide for detection of SNP TSC0045488
racctcgtttaaa

SEQ ID NO: 184317 - DNA, 13 bp, Artificial Sequence
  Oligonucleotide for detection of SNP TSC0045488
gattttttttgaa

SEQ ID NO: 184318 - DNA, 13 bp, Artificial Sequence
  Oligonucleotide for detection of SNP TSC0045488
ttcaaaaaaaatc

SEQ ID NO: 184319 - DNA, 13 bp, Artificial Sequence
  Oligonucleotide for detection of SNP TSC0045488
gattttgtttgaa

SEQ ID NO: 184320 - DNA, 13 bp, Artificial Sequence
  Oligonucleotide for detection of SNP TSC0045488
ttcaaacaaaatc

SEQ ID NO: 184321 - DNA, 13 bp, Artificial Sequence
  Oligonucleotide for detection of SNP TSC0045488
gatttcgtttgaa

SEQ ID NO: 184322 - DNA, 13 bp, Artificial Sequence
  Oligonucleotide for detection of SNP TSC0045488
ttcaaacgaaatc

SEQ ID NO: 184323 - DNA, 13 bp, Artificial Sequence
  Oligonucleotide for detection of SNP TSC0045489
tggaatatagggy

SEQ ID NO: 184324 - DNA, 13 bp, Artificial Sequence
  Oligonucleotide for detection of SNP TSC0045489
rccctatattcca

SEQ ID NO: 184325 - DNA, 13 bp, Artificial Sequence
  Oligonucleotide for detection of SNP TSC0045489
tggaatgtagggy

SEQ ID NO: 184326 - DNA, 13 bp, Artificial Sequence
  Oligonucleotide for detection of SNP TSC0045489
rccctacattcca

SEQ ID NO: 184327 - DNA, 13 bp, Artificial Sequence
  Oligonucleotide for detection of SNP TSC0045489
tggaacgtagggy

SEQ ID NO: 184328 - DNA, 13 bp, Artificial Sequence
  Oligonucleotide for detection of SNP TSC0045489
rccctacgttcca

SEQ ID NO: 184329 - DNA, 13 bp, Artificial Sequence
  Oligonucleotide for detection of SNP TSC0045489
gttttgtgtttta

SEQ ID NO: 184330 - DNA, 13 bp, Artificial Sequence
  Oligonucleotide for detection of SNP TSC0045489
taaaacacaaaac

SEQ ID NO: 184331 - DNA, 13 bp, Artificial Sequence
  Oligonucleotide for detection of SNP TSC0045489
gttttgcgtttta

SEQ ID NO: 184332 - DNA, 13 bp, Artificial Sequence
  Oligonucleotide for detection of SNP TSC0045489
taaaacgcaaaac

SEQ ID NO: 184333 - DNA, 13 bp, Artificial Sequence
  Oligonucleotide for detection of SNP TSC0045490
aaaatagttttgt

SEQ ID NO: 184334 - DNA, 13 bp, Artificial Sequence
  Oligonucleotide for detection of SNP TSC0045490
acaaaactatttt

SEQ ID NO: 184335 - DNA, 13 bp, Artificial Sequence
  Oligonucleotide for detection of SNP TSC0045490
aaaataattttgt

SEQ ID NO: 184336 - DNA, 13 bp, Artificial Sequence
  Oligonucleotide for detection of SNP TSC0045490
acaaaattatttt

SEQ ID NO: 184337 - DNA, 13 bp, Artificial Sequence
  Oligonucleotide for detection of SNP TSC0045491
atatttgttgtga

SEQ ID NO: 184338 - DNA, 13 bp, Artificial Sequence
  Oligonucleotide for detection of SNP TSC0045491
tcacaacaaatat

SEQ ID NO: 184339 - DNA, 13 bp, Artificial Sequence
  Oligonucleotide for detection of SNP TSC0045494
taatatatgggta

SEQ ID NO: 184340 - DNA, 13 bp, Artificial Sequence
  Oligonucleotide for detection of SNP TSC0045494
tacccatatatta

SEQ ID NO: 184341 - DNA, 13 bp, Artificial Sequence
  Oligonucleotide for detection of SNP TSC0045494
taatatgtgggta

SEQ ID NO: 184342 - DNA, 13 bp, Artificial Sequence
  Oligonucleotide for detection of SNP TSC0045494
tacccacatatta

SEQ ID NO: 184343 - DNA, 13 bp, Artificial Sequence
  Oligonucleotide for detection of SNP TSC0045495
atttgtagttagy

SEQ ID NO: 184344 - DNA, 13 bp, Artificial Sequence
  Oligonucleotide for detection of SNP TSC0045495
rctaactacaaat

SEQ ID NO: 184345 - DNA, 13 bp, Artificial Sequence
  Oligonucleotide for detection of SNP TSC0045495
atttgtggttagy

SEQ ID NO: 184346 - DNA, 13 bp, Artificial Sequence
  Oligonucleotide for detection of SNP TSC0045495
rctaaccacaaat

SEQ ID NO: 184347 - DNA, 13 bp, Artificial Sequence
  Oligonucleotide for detection of SNP TSC0045495
atttgcggttagy

SEQ ID NO: 184348 - DNA, 13 bp, Artificial Sequence
  Oligonucleotide for detection of SNP TSC0045495
rctaaccgcaaat

SEQ ID NO: 184349 - DNA, 13 bp, Artificial Sequence
  Oligonucleotide for detection of SNP TSC0045495
gttaattgtagat

SEQ ID NO: 184350 - DNA, 13 bp, Artificial Sequence
  Oligonucleotide for detection of SNP TSC0045495
atctacaattaac

SEQ ID NO: 184351 - DNA, 13 bp, Artificial Sequence
  Oligonucleotide for detection of SNP TSC0045495
gttaatcgtagat

SEQ ID NO: 184352 - DNA, 13 bp, Artificial Sequence
  Oligonucleotide for detection of SNP TSC0045495
atctacgattaac

SEQ ID NO: 184353 - DNA, 13 bp, Artificial Sequence
  Oligonucleotide for detection of SNP TSC0045497
gaagataggataa

SEQ ID NO: 184354 - DNA, 13 bp, Artificial Sequence
  Oligonucleotide for detection of SNP TSC0045497
ttatcctatcttc

SEQ ID NO: 184355 - DNA, 13 bp, Artificial Sequence
  Oligonucleotide for detection of SNP TSC0045497
gaagatgggataa

SEQ ID NO: 184356 - DNA, 13 bp, Artificial Sequence
  Oligonucleotide for detection of SNP TSC0045497
ttatcccatcttc

SEQ ID NO: 184357 - DNA, 13 bp, Artificial Sequence
  Oligonucleotide for detection of SNP TSC0045498
tagagggttaggg

SEQ ID NO: 184358 - DNA, 13 bp, Artificial Sequence
  Oligonucleotide for detection of SNP TSC0045498
ccctaaccctcta

SEQ ID NO: 184359 - DNA, 13 bp, Artificial Sequence
  Oligonucleotide for detection of SNP TSC0045498
tagaggattaggg

SEQ ID NO: 184360 - DNA, 13 bp, Artificial Sequence
  Oligonucleotide for detection of SNP TSC0045498
ccctaatcctcta

SEQ ID NO: 184361 - DNA, 13 bp, Artificial Sequence
  Oligonucleotide for detection of SNP TSC0045499
aagtatgttatgt

SEQ ID NO: 184362 - DNA, 13 bp, Artificial Sequence
  Oligonucleotide for detection of SNP TSC0045499
acataacatactt

SEQ ID NO: 184363 - DNA, 13 bp, Artificial Sequence
  Oligonucleotide for detection of SNP TSC0045499
aagtatattatgt

SEQ ID NO: 184364 - DNA, 13 bp, Artificial Sequence
  Oligonucleotide for detection of SNP TSC0045499
acataatatactt

SEQ ID NO: 184365 - DNA, 13 bp, Artificial Sequence
  Oligonucleotide for detection of SNP TSC0045500
gtttttgtgtagy

SEQ ID NO: 184366 - DNA, 13 bp, Artificial Sequence
  Oligonucleotide for detection of SNP TSC0045500
rctacacaaaaac

SEQ ID NO: 184367 - DNA, 13 bp, Artificial Sequence
  Oligonucleotide for detection of SNP TSC0045500
gttttcgtgtagy

SEQ ID NO: 184368 - DNA, 13 bp, Artificial Sequence
  Oligonucleotide for detection of SNP TSC0045500
rctacacgaaaac

SEQ ID NO: 184369 - DNA, 13 bp, Artificial Sequence
  Oligonucleotide for detection of SNP TSC0045500
gttgtatgggaay

SEQ ID NO: 184370 - DNA, 13 bp, Artificial Sequence
  Oligonucleotide for detection of SNP TSC0045500
rttcccatacaac

SEQ ID NO: 184371 - DNA, 13 bp, Artificial Sequence
  Oligonucleotide for detection of SNP TSC0045500
gttgtacgggaay

SEQ ID NO: 184372 - DNA, 13 bp, Artificial Sequence
  Oligonucleotide for detection of SNP TSC0045500
rttcccgtacaac

SEQ ID NO: 184373 - DNA, 13 bp, Artificial Sequence
  Oligonucleotide for detection of SNP TSC0045502
ttaatggttgtgt

SEQ ID NO: 184374 - DNA, 13 bp, Artificial Sequence
  Oligonucleotide for detection of SNP TSC0045502
acacaaccattaa

SEQ ID NO: 184375 - DNA, 13 bp, Artificial Sequence
  Oligonucleotide for detection of SNP TSC0045502
ttaatgattgtgt

SEQ ID NO: 184376 - DNA, 13 bp, Artificial Sequence
  Oligonucleotide for detection of SNP TSC0045502
acacaatcattaa

SEQ ID NO: 184377 - DNA, 13 bp, Artificial Sequence
  Oligonucleotide for detection of SNP TSC0045503
tttttaatgaaga

SEQ ID NO: 184378 - DNA, 13 bp, Artificial Sequence
  Oligonucleotide for detection of SNP TSC0045503
tcttcattaaaaa

SEQ ID NO: 184379 - DNA, 13 bp, Artificial Sequence
  Oligonucleotide for detection of SNP TSC0045503
tttttattgaaga

SEQ ID NO: 184380 - DNA, 13 bp, Artificial Sequence
  Oligonucleotide for detection of SNP TSC0045503
tcttcaataaaaa

SEQ ID NO: 184381 - DNA, 13 bp, Artificial Sequence
  Oligonucleotide for detection of SNP TSC0045503
tttttattgaagg

SEQ ID NO: 184382 - DNA, 13 bp, Artificial Sequence
  Oligonucleotide for detection of SNP TSC0045503
ccttcaataaaaa

SEQ ID NO: 184383 - DNA, 13 bp, Artificial Sequence
  Oligonucleotide for detection of SNP TSC0045503
tttttaatgaagg

SEQ ID NO: 184384 - DNA, 13 bp, Artificial Sequence
  Oligonucleotide for detection of SNP TSC0045503
ccttcattaaaaa

SEQ ID NO: 184385 - DNA, 13 bp, Artificial Sequence
  Oligonucleotide for detection of SNP TSC0045505
ataattattagtt

SEQ ID NO: 184386 - DNA, 13 bp, Artificial Sequence
  Oligonucleotide for detection of SNP TSC0045505
aactaataattat

SEQ ID NO: 184387 - DNA, 13 bp, Artificial Sequence
  Oligonucleotide for detection of SNP TSC0045505
ataattgttagtt

SEQ ID NO: 184388 - DNA, 13 bp, Artificial Sequence
  Oligonucleotide for detection of SNP TSC0045505
aactaacaattat

SEQ ID NO: 184389 - DNA, 13 bp, Artificial Sequence
  Oligonucleotide for detection of SNP TSC0045505
ataatcgttagtt

SEQ ID NO: 184390 - DNA, 13 bp, Artificial Sequence
  Oligonucleotide for detection of SNP TSC0045505
aactaacgattat

SEQ ID NO: 184391 - DNA, 13 bp, Artificial Sequence
  Oligonucleotide for detection of SNP TSC0045505
aattaatggttgt

SEQ ID NO: 184392 - DNA, 13 bp, Artificial Sequence
  Oligonucleotide for detection of SNP TSC0045505
acaaccattaatt

SEQ ID NO: 184393 - DNA, 13 bp, Artificial Sequence
  Oligonucleotide for detection of SNP TSC0045505
aattaacggttgt

SEQ ID NO: 184394 - DNA, 13 bp, Artificial Sequence
  Oligonucleotide for detection of SNP TSC0045505
acaaccgttaatt

SEQ ID NO: 184395 - DNA, 13 bp, Artificial Sequence
  Oligonucleotide for detection of SNP TSC0045506
atataggtagtaa

SEQ ID NO: 184396 - DNA, 13 bp, Artificial Sequence
  Oligonucleotide for detection of SNP TSC0045506
ttactacctatat

SEQ ID NO: 184397 - DNA, 13 bp, Artificial Sequence
  Oligonucleotide for detection of SNP TSC0045506
atatagatagtaa

SEQ ID NO: 184398 - DNA, 13 bp, Artificial Sequence
  Oligonucleotide for detection of SNP TSC0045506
ttactatctatat

SEQ ID NO: 184399 - DNA, 13 bp, Artificial Sequence
  Oligonucleotide for detection of SNP TSC0045507
tttattgtgtgta

SEQ ID NO: 184400 - DNA, 13 bp, Artificial Sequence
  Oligonucleotide for detection of SNP TSC0045507
tacacacaataaa

SEQ ID NO: 184401 - DNA, 13 bp, Artificial Sequence
  Oligonucleotide for detection of SNP TSC0045507
tttattatgtgta

SEQ ID NO: 184402 - DNA, 13 bp, Artificial Sequence
  Oligonucleotide for detection of SNP TSC0045507
tacacataataaa

SEQ ID NO: 184403 - DNA, 13 bp, Artificial Sequence
  Oligonucleotide for detection of SNP TSC0045508
agattaatatttt

SEQ ID NO: 184404 - DNA, 13 bp, Artificial Sequence
  Oligonucleotide for detection of SNP TSC0045508
aaaatattaatct

SEQ ID NO: 184405 - DNA, 13 bp, Artificial Sequence
  Oligonucleotide for detection of SNP TSC0045508
agattagtatttt

SEQ ID NO: 184406 - DNA, 13 bp, Artificial Sequence
  Oligonucleotide for detection of SNP TSC0045508
aaaatactaatct

SEQ ID NO: 184407 - DNA, 13 bp, Artificial Sequence
  Oligonucleotide for detection of SNP TSC0045509
ttgtttattaaat

SEQ ID NO: 184408 - DNA, 13 bp, Artificial Sequence
  Oligonucleotide for detection of SNP TSC0045509
atttaataaacaa

SEQ ID NO: 184409 - DNA, 13 bp, Artificial Sequence
  Oligonucleotide for detection of SNP TSC0045509
ttgtttgttaaat

SEQ ID NO: 184410 - DNA, 13 bp, Artificial Sequence
  Oligonucleotide for detection of SNP TSC0045509
atttaacaaacaa

SEQ ID NO: 184411 - DNA, 13 bp, Artificial Sequence
  Oligonucleotide for detection of SNP TSC0045513
ttataatgtatta

SEQ ID NO: 184412 - DNA, 13 bp, Artificial Sequence
  Oligonucleotide for detection of SNP TSC0045513
taatacattataa

SEQ ID NO: 184413 - DNA, 13 bp, Artificial Sequence
  Oligonucleotide for detection of SNP TSC0045513
ttataacgtatta

SEQ ID NO: 184414 - DNA, 13 bp, Artificial Sequence
  Oligonucleotide for detection of SNP TSC0045513
taatacgttataa

SEQ ID NO: 184415 - DNA, 13 bp, Artificial Sequence
  Oligonucleotide for detection of SNP TSC0045513
taatatgttataa

SEQ ID NO: 184416 - DNA, 13 bp, Artificial Sequence
  Oligonucleotide for detection of SNP TSC0045513
ttataacatatta

SEQ ID NO: 184417 - DNA, 13 bp, Artificial Sequence
  Oligonucleotide for detection of SNP TSC0045513
taatatattataa

SEQ ID NO: 184418 - DNA, 13 bp, Artificial Sequence
  Oligonucleotide for detection of SNP TSC0045513
ttataatatatta

SEQ ID NO: 184419 - DNA, 13 bp, Artificial Sequence
  Oligonucleotide for detection of SNP TSC0045514
atataatggtaaa

SEQ ID NO: 184420 - DNA, 13 bp, Artificial Sequence
  Oligonucleotide for detection of SNP TSC0045514
tttaccattatat

SEQ ID NO: 184421 - DNA, 13 bp, Artificial Sequence
  Oligonucleotide for detection of SNP TSC0045514
atataacggtaaa

SEQ ID NO: 184422 - DNA, 13 bp, Artificial Sequence
  Oligonucleotide for detection of SNP TSC0045514
tttaccgttatat

SEQ ID NO: 184423 - DNA, 13 bp, Artificial Sequence
  Oligonucleotide for detection of SNP TSC0045514
tttattgttatat

SEQ ID NO: 184424 - DNA, 13 bp, Artificial Sequence
  Oligonucleotide for detection of SNP TSC0045514
atataacaataaa

SEQ ID NO: 184425 - DNA, 13 bp, Artificial Sequence
  Oligonucleotide for detection of SNP TSC0045514
tttattattatat

SEQ ID NO: 184426 - DNA, 13 bp, Artificial Sequence
  Oligonucleotide for detection of SNP TSC0045514
atataataataaa

SEQ ID NO: 184427 - DNA, 13 bp, Artificial Sequence
  Oligonucleotide for detection of SNP TSC0045514
tttatcgttatat

SEQ ID NO: 184428 - DNA, 13 bp, Artificial Sequence
  Oligonucleotide for detection of SNP TSC0045514
atataacgataaa

SEQ ID NO: 184429 - DNA, 13 bp, Artificial Sequence
  Oligonucleotide for detection of SNP TSC0045515
taatattggtttt

SEQ ID NO: 184430 - DNA, 13 bp, Artificial Sequence
  Oligonucleotide for detection of SNP TSC0045515
aaaaccaatatta

SEQ ID NO: 184431 - DNA, 13 bp, Artificial Sequence
  Oligonucleotide for detection of SNP TSC0045515
taatatcggtttt

SEQ ID NO: 184432 - DNA, 13 bp, Artificial Sequence
  Oligonucleotide for detection of SNP TSC0045515
aaaaccgatatta

SEQ ID NO: 184433 - DNA, 13 bp, Artificial Sequence
  Oligonucleotide for detection of SNP TSC0045515
agaattgatatta

SEQ ID NO: 184434 - DNA, 13 bp, Artificial Sequence
  Oligonucleotide for detection of SNP TSC0045515
taatatcaattct

SEQ ID NO: 184435 - DNA, 13 bp, Artificial Sequence
  Oligonucleotide for detection of SNP TSC0045515
agaattaatatta

SEQ ID NO: 184436 - DNA, 13 bp, Artificial Sequence
  Oligonucleotide for detection of SNP TSC0045515
taatattaattct

SEQ ID NO: 184437 - DNA, 13 bp, Artificial Sequence
  Oligonucleotide for detection of SNP TSC0045515
agaatcgatatta

SEQ ID NO: 184438 - DNA, 13 bp, Artificial Sequence
  Oligonucleotide for detection of SNP TSC0045515
taatatcgattct

SEQ ID NO: 184439 - DNA, 13 bp, Artificial Sequence
  Oligonucleotide for detection of SNP TSC0045516
tgagatataaaga

SEQ ID NO: 184440 - DNA, 13 bp, Artificial Sequence
  Oligonucleotide for detection of SNP TSC0045516
tctttatatctca

SEQ ID NO: 184441 - DNA, 13 bp, Artificial Sequence
  Oligonucleotide for detection of SNP TSC0045516
tgagatgtaaaga

SEQ ID NO: 184442 - DNA, 13 bp, Artificial Sequence
  Oligonucleotide for detection of SNP TSC0045516
tctttacatctca

SEQ ID NO: 184443 - DNA, 13 bp, Artificial Sequence
  Oligonucleotide for detection of SNP TSC0045517
gtttattggttty

SEQ ID NO: 184444 - DNA, 13 bp, Artificial Sequence
  Oligonucleotide for detection of SNP TSC0045517
raaaccaataaac

SEQ ID NO: 184445 - DNA, 13 bp, Artificial Sequence
  Oligonucleotide for detection of SNP TSC0045517
gtttatcggttty

SEQ ID NO: 184446 - DNA, 13 bp, Artificial Sequence
  Oligonucleotide for detection of SNP TSC0045517
raaaccgataaac

SEQ ID NO: 184447 - DNA, 13 bp, Artificial Sequence
  Oligonucleotide for detection of SNP TSC0045517
gagattgatagay

SEQ ID NO: 184448 - DNA, 13 bp, Artificial Sequence
  Oligonucleotide for detection of SNP TSC0045517
rtctatcaatctc

SEQ ID NO: 184449 - DNA, 13 bp, Artificial Sequence
  Oligonucleotide for detection of SNP TSC0045517
gagatttatagay

SEQ ID NO: 184450 - DNA, 13 bp, Artificial Sequence
  Oligonucleotide for detection of SNP TSC0045517
rtctataaatctc

SEQ ID NO: 184451 - DNA, 13 bp, Artificial Sequence
  Oligonucleotide for detection of SNP TSC0045517
gagatcgatagay

SEQ ID NO: 184452 - DNA, 13 bp, Artificial Sequence
  Oligonucleotide for detection of SNP TSC0045517
rtctatcgatctc

SEQ ID NO: 184453 - DNA, 13 bp, Artificial Sequence
  Oligonucleotide for detection of SNP TSC0045518
gttataaaattgt

SEQ ID NO: 184454 - DNA, 13 bp, Artificial Sequence
  Oligonucleotide for detection of SNP TSC0045518
acaattttataac

SEQ ID NO: 184455 - DNA, 13 bp, Artificial Sequence
  Oligonucleotide for detection of SNP TSC0045518
gttatagaattgt

SEQ ID NO: 184456 - DNA, 13 bp, Artificial Sequence
  Oligonucleotide for detection of SNP TSC0045518
acaattctataac

SEQ ID NO: 184457 - DNA, 13 bp, Artificial Sequence
  Oligonucleotide for detection of SNP TSC0045520
ttatgtatattat

SEQ ID NO: 184458 - DNA, 13 bp, Artificial Sequence
  Oligonucleotide for detection of SNP TSC0045520
ataatatacataa

SEQ ID NO: 184459 - DNA, 13 bp, Artificial Sequence
  Oligonucleotide for detection of SNP TSC0045520
ttatgtgtattat

SEQ ID NO: 184460 - DNA, 13 bp, Artificial Sequence
  Oligonucleotide for detection of SNP TSC0045520
ataatacacataa

SEQ ID NO: 184461 - DNA, 13 bp, Artificial Sequence
  Oligonucleotide for detection of SNP TSC0045523
atagaagggagty

SEQ ID NO: 184462 - DNA, 13 bp, Artificial Sequence
  Oligonucleotide for detection of SNP TSC0045523
ractcccttctat

SEQ ID NO: 184463 - DNA, 13 bp, Artificial Sequence
  Oligonucleotide for detection of SNP TSC0045523
atagaaaggagty

SEQ ID NO: 184464 - DNA, 13 bp, Artificial Sequence
  Oligonucleotide for detection of SNP TSC0045523
ractcctttctat

SEQ ID NO: 184465 - DNA, 13 bp, Artificial Sequence
  Oligonucleotide for detection of SNP TSC0045525
taaataaaatata

SEQ ID NO: 184466 - DNA, 13 bp, Artificial Sequence
  Oligonucleotide for detection of SNP TSC0045525
tatattttattta

SEQ ID NO: 184467 - DNA, 13 bp, Artificial Sequence
  Oligonucleotide for detection of SNP TSC0045525
taaatataatata

SEQ ID NO: 184468 - DNA, 13 bp, Artificial Sequence
  Oligonucleotide for detection of SNP TSC0045525
tatattatattta

SEQ ID NO: 184469 - DNA, 13 bp, Artificial Sequence
  Oligonucleotide for detection of SNP TSC0045525
tatattgtgtttg

SEQ ID NO: 184470 - DNA, 13 bp, Artificial Sequence
  Oligonucleotide for detection of SNP TSC0045525
caaacacaatata

SEQ ID NO: 184471 - DNA, 13 bp, Artificial Sequence
  Oligonucleotide for detection of SNP TSC0045526
gaagtaataaaaa

SEQ ID NO: 184472 - DNA, 13 bp, Artificial Sequence
  Oligonucleotide for detection of SNP TSC0045526
tttttattacttc

SEQ ID NO: 184473 - DNA, 13 bp, Artificial Sequence
  Oligonucleotide for detection of SNP TSC0045526
gaagtattaaaaa

SEQ ID NO: 184474 - DNA, 13 bp, Artificial Sequence
  Oligonucleotide for detection of SNP TSC0045526
tttttaatacttc

SEQ ID NO: 184475 - DNA, 13 bp, Artificial Sequence
  Oligonucleotide for detection of SNP TSC0045526
tttttattgttty

SEQ ID NO: 184476 - DNA, 13 bp, Artificial Sequence
  Oligonucleotide for detection of SNP TSC0045526
raaacaataaaaa

SEQ ID NO: 184477 - DNA, 13 bp, Artificial Sequence
  Oligonucleotide for detection of SNP TSC0045526
tttttagtgttty

SEQ ID NO: 184478 - DNA, 13 bp, Artificial Sequence
  Oligonucleotide for detection of SNP TSC0045526
raaacactaaaaa

SEQ ID NO: 184479 - DNA, 13 bp, Artificial Sequence
  Oligonucleotide for detection of SNP TSC0045527
ggtattgttttaa

SEQ ID NO: 184480 - DNA, 13 bp, Artificial Sequence
  Oligonucleotide for detection of SNP TSC0045527
ttaaaacaatacc

SEQ ID NO: 184481 - DNA, 13 bp, Artificial Sequence
  Oligonucleotide for detection of SNP TSC0045527
ggtattattttaa

SEQ ID NO: 184482 - DNA, 13 bp, Artificial Sequence
  Oligonucleotide for detection of SNP TSC0045527
ttaaaataatacc

SEQ ID NO: 184483 - DNA, 13 bp, Artificial Sequence
  Oligonucleotide for detection of SNP TSC0045528
ttaagagaaatat

SEQ ID NO: 184484 - DNA, 13 bp, Artificial Sequence
  Oligonucleotide for detection of SNP TSC0045528
atatttctcttaa

SEQ ID NO: 184485 - DNA, 13 bp, Artificial Sequence
  Oligonucleotide for detection of SNP TSC0045528
ttaagaaaaatat

SEQ ID NO: 184486 - DNA, 13 bp, Artificial Sequence
  Oligonucleotide for detection of SNP TSC0045528
atatttttcttaa

SEQ ID NO: 184487 - DNA, 13 bp, Artificial Sequence
  Oligonucleotide for detection of SNP TSC0045529
tattagggtggta

SEQ ID NO: 184488 - DNA, 13 bp, Artificial Sequence
  Oligonucleotide for detection of SNP TSC0045529
taccaccctaata

SEQ ID NO: 184489 - DNA, 13 bp, Artificial Sequence
  Oligonucleotide for detection of SNP TSC0045529
tattagagtggta

SEQ ID NO: 184490 - DNA, 13 bp, Artificial Sequence
  Oligonucleotide for detection of SNP TSC0045529
taccactctaata

SEQ ID NO: 184491 - DNA, 13 bp, Artificial Sequence
  Oligonucleotide for detection of SNP TSC0045530
atggtttgatata

SEQ ID NO: 184492 - DNA, 13 bp, Artificial Sequence
  Oligonucleotide for detection of SNP TSC0045530
tatatcaaaccat

SEQ ID NO: 184493 - DNA, 13 bp, Artificial Sequence
  Oligonucleotide for detection of SNP TSC0045530
atggttcgatata

SEQ ID NO: 184494 - DNA, 13 bp, Artificial Sequence
  Oligonucleotide for detection of SNP TSC0045530
tatatcgaaccat

SEQ ID NO: 184495 - DNA, 13 bp, Artificial Sequence
  Oligonucleotide for detection of SNP TSC0045530
tgtattgaattat

SEQ ID NO: 184496 - DNA, 13 bp, Artificial Sequence
  Oligonucleotide for detection of SNP TSC0045530
ataattcaataca

SEQ ID NO: 184497 - DNA, 13 bp, Artificial Sequence
  Oligonucleotide for detection of SNP TSC0045530
tgtattaaattat

SEQ ID NO: 184498 - DNA, 13 bp, Artificial Sequence
  Oligonucleotide for detection of SNP TSC0045530
ataatttaataca

SEQ ID NO: 184499 - DNA, 13 bp, Artificial Sequence
  Oligonucleotide for detection of SNP TSC0045530
tgtatcgaattat

SEQ ID NO: 184500 - DNA, 13 bp, Artificial Sequence
  Oligonucleotide for detection of SNP TSC0045530
ataattcgataca

SEQ ID NO: 184501 - DNA, 13 bp, Artificial Sequence
  Oligonucleotide for detection of SNP TSC0045531
tggtattggtttg

SEQ ID NO: 184502 - DNA, 13 bp, Artificial Sequence
  Oligonucleotide for detection of SNP TSC0045531
caaaccaatacca

SEQ ID NO: 184503 - DNA, 13 bp, Artificial Sequence
  Oligonucleotide for detection of SNP TSC0045531
tggtatgggtttg

SEQ ID NO: 184504 - DNA, 13 bp, Artificial Sequence
  Oligonucleotide for detection of SNP TSC0045531
caaacccatacca

SEQ ID NO: 184505 - DNA, 13 bp, Artificial Sequence
  Oligonucleotide for detection of SNP TSC0045531
tggtatcggtttg

SEQ ID NO: 184506 - DNA, 13 bp, Artificial Sequence
  Oligonucleotide for detection of SNP TSC0045531
caaaccgatacca

SEQ ID NO: 184507 - DNA, 13 bp, Artificial Sequence
  Oligonucleotide for detection of SNP TSC0045531
tggtacgggtttg

SEQ ID NO: 184508 - DNA, 13 bp, Artificial Sequence
  Oligonucleotide for detection of SNP TSC0045531
caaacccgtacca

SEQ ID NO: 184509 - DNA, 13 bp, Artificial Sequence
  Oligonucleotide for detection of SNP TSC0045531
tggtattggttcg

SEQ ID NO: 184510 - DNA, 13 bp, Artificial Sequence
  Oligonucleotide for detection of SNP TSC0045531
cgaaccaatacca

SEQ ID NO: 184511 - DNA, 13 bp, Artificial Sequence
  Oligonucleotide for detection of SNP TSC0045531
tggtatgggttcg

SEQ ID NO: 184512 - DNA, 13 bp, Artificial Sequence
  Oligonucleotide for detection of SNP TSC0045531
cgaacccatacca

SEQ ID NO: 184513 - DNA, 13 bp, Artificial Sequence
  Oligonucleotide for detection of SNP TSC0045531
tggtatcggttcg

SEQ ID NO: 184514 - DNA, 13 bp, Artificial Sequence
  Oligonucleotide for detection of SNP TSC0045531
cgaaccgatacca

SEQ ID NO: 184515 - DNA, 13 bp, Artificial Sequence
  Oligonucleotide for detection of SNP TSC0045531
tggtacgggttcg

SEQ ID NO: 184516 - DNA, 13 bp, Artificial Sequence
  Oligonucleotide for detection of SNP TSC0045531
cgaacccgtacca

SEQ ID NO: 184517 - DNA, 13 bp, Artificial Sequence
  Oligonucleotide for detection of SNP TSC0045531
tgaattggtatta

SEQ ID NO: 184518 - DNA, 13 bp, Artificial Sequence
  Oligonucleotide for detection of SNP TSC0045531
taataccaattca

SEQ ID NO: 184519 - DNA, 13 bp, Artificial Sequence
  Oligonucleotide for detection of SNP TSC0045531
tgaatttgtatta

SEQ ID NO: 184520 - DNA, 13 bp, Artificial Sequence
  Oligonucleotide for detection of SNP TSC0045531
taatacaaattca

SEQ ID NO: 184521 - DNA, 13 bp, Artificial Sequence
  Oligonucleotide for detection of SNP TSC0045531
cgaattggtatta

SEQ ID NO: 184522 - DNA, 13 bp, Artificial Sequence
  Oligonucleotide for detection of SNP TSC0045531
taataccaattcg

SEQ ID NO: 184523 - DNA, 13 bp, Artificial Sequence
  Oligonucleotide for detection of SNP TSC0045531
cgaatttgtatta

SEQ ID NO: 184524 - DNA, 13 bp, Artificial Sequence
  Oligonucleotide for detection of SNP TSC0045531
taatacaaattcg

SEQ ID NO: 184525 - DNA, 13 bp, Artificial Sequence
  Oligonucleotide for detection of SNP TSC0045531
tgaatcggtatta

SEQ ID NO: 184526 - DNA, 13 bp, Artificial Sequence
  Oligonucleotide for detection of SNP TSC0045531
taataccgattca

SEQ ID NO: 184527 - DNA, 13 bp, Artificial Sequence
  Oligonucleotide for detection of SNP TSC0045531
tgaattcgtatta

SEQ ID NO: 184528 - DNA, 13 bp, Artificial Sequence
  Oligonucleotide for detection of SNP TSC0045531
taatacgaattca

SEQ ID NO: 184529 - DNA, 13 bp, Artificial Sequence
  Oligonucleotide for detection of SNP TSC0045531
cgaatcggtatta

SEQ ID NO: 184530 - DNA, 13 bp, Artificial Sequence
  Oligonucleotide for detection of SNP TSC0045531
taataccgattcg

SEQ ID NO: 184531 - DNA, 13 bp, Artificial Sequence
  Oligonucleotide for detection of SNP TSC0045531
cgaattcgtatta

SEQ ID NO: 184532 - DNA, 13 bp, Artificial Sequence
  Oligonucleotide for detection of SNP TSC0045531
taatacgaattcg

SEQ ID NO: 184533 - DNA, 13 bp, Artificial Sequence
  Oligonucleotide for detection of SNP TSC0045532
gaaagaataggta

SEQ ID NO: 184534 - DNA, 13 bp, Artificial Sequence
  Oligonucleotide for detection of SNP TSC0045532
tacctattctttc

SEQ ID NO: 184535 - DNA, 13 bp, Artificial Sequence
  Oligonucleotide for detection of SNP TSC0045532
gaaagagtaggta

SEQ ID NO: 184536 - DNA, 13 bp, Artificial Sequence
  Oligonucleotide for detection of SNP TSC0045532
tacctactctttc

SEQ ID NO: 184537 - DNA, 13 bp, Artificial Sequence
  Oligonucleotide for detection of SNP TSC0045533
ggttagataataa

SEQ ID NO: 184538 - DNA, 13 bp, Artificial Sequence
  Oligonucleotide for detection of SNP TSC0045533
ttattatctaacc

SEQ ID NO: 184539 - DNA, 13 bp, Artificial Sequence
  Oligonucleotide for detection of SNP TSC0045533
ggttaggtaataa

SEQ ID NO: 184540 - DNA, 13 bp, Artificial Sequence
  Oligonucleotide for detection of SNP TSC0045533
ttattacctaacc

SEQ ID NO: 184541 - DNA, 13 bp, Artificial Sequence
  Oligonucleotide for detection of SNP TSC0045536
tgagtattgttaa

SEQ ID NO: 184542 - DNA, 13 bp, Artificial Sequence
  Oligonucleotide for detection of SNP TSC0045536
ttaacaatactca

SEQ ID NO: 184543 - DNA, 13 bp, Artificial Sequence
  Oligonucleotide for detection of SNP TSC0045536
tgagtagtgttaa

SEQ ID NO: 184544 - DNA, 13 bp, Artificial Sequence
  Oligonucleotide for detection of SNP TSC0045536
ttaacactactca

SEQ ID NO: 184545 - DNA, 13 bp, Artificial Sequence
  Oligonucleotide for detection of SNP TSC0045536
ttggtagtgttta

SEQ ID NO: 184546 - DNA, 13 bp, Artificial Sequence
  Oligonucleotide for detection of SNP TSC0045536
taaacactaccaa

SEQ ID NO: 184547 - DNA, 13 bp, Artificial Sequence
  Oligonucleotide for detection of SNP TSC0045536
ttggtattgttta

SEQ ID NO: 184548 - DNA, 13 bp, Artificial Sequence
  Oligonucleotide for detection of SNP TSC0045536
taaacaataccaa

SEQ ID NO: 184549 - DNA, 13 bp, Artificial Sequence
  Oligonucleotide for detection of SNP TSC0045537
tttatattgtggt

SEQ ID NO: 184550 - DNA, 13 bp, Artificial Sequence
  Oligonucleotide for detection of SNP TSC0045537
accacaatataaa

SEQ ID NO: 184551 - DNA, 13 bp, Artificial Sequence
  Oligonucleotide for detection of SNP TSC0045537
tttatagtgtggt

SEQ ID NO: 184552 - DNA, 13 bp, Artificial Sequence
  Oligonucleotide for detection of SNP TSC0045537
accacactataaa

SEQ ID NO: 184553 - DNA, 13 bp, Artificial Sequence
  Oligonucleotide for detection of SNP TSC0045537
attataatgtgaa

SEQ ID NO: 184554 - DNA, 13 bp, Artificial Sequence
  Oligonucleotide for detection of SNP TSC0045537
ttcacattataat

SEQ ID NO: 184555 - DNA, 13 bp, Artificial Sequence
  Oligonucleotide for detection of SNP TSC0045537
attatattgtgaa

SEQ ID NO: 184556 - DNA, 13 bp, Artificial Sequence
  Oligonucleotide for detection of SNP TSC0045537
ttcacaatataat

SEQ ID NO: 184557 - DNA, 13 bp, Artificial Sequence
  Oligonucleotide for detection of SNP TSC0045538
tgttgtagggaaa

SEQ ID NO: 184558 - DNA, 13 bp, Artificial Sequence
  Oligonucleotide for detection of SNP TSC0045538
tttccctacaaca

SEQ ID NO: 184559 - DNA, 13 bp, Artificial Sequence
  Oligonucleotide for detection of SNP TSC0045538
tgttgttgggaaa

SEQ ID NO: 184560 - DNA, 13 bp, Artificial Sequence
  Oligonucleotide for detection of SNP TSC0045538
tttcccaacaaca

SEQ ID NO: 184561 - DNA, 13 bp, Artificial Sequence
  Oligonucleotide for detection of SNP TSC0045538
tgttgtcgggaaa

SEQ ID NO: 184562 - DNA, 13 bp, Artificial Sequence
  Oligonucleotide for detection of SNP TSC0045538
tttcccgacaaca

SEQ ID NO: 184563 - DNA, 13 bp, Artificial Sequence
  Oligonucleotide for detection of SNP TSC0045538
ttttttgatagta

SEQ ID NO: 184564 - DNA, 13 bp, Artificial Sequence
  Oligonucleotide for detection of SNP TSC0045538
tactatcaaaaaa

SEQ ID NO: 184565 - DNA, 13 bp, Artificial Sequence
  Oligonucleotide for detection of SNP TSC0045538
tttttcgatagta

SEQ ID NO: 184566 - DNA, 13 bp, Artificial Sequence
  Oligonucleotide for detection of SNP TSC0045538
tactatcgaaaaa

SEQ ID NO: 184567 - DNA, 13 bp, Artificial Sequence
  Oligonucleotide for detection of SNP TSC0045539
taatgtattgaag

SEQ ID NO: 184568 - DNA, 13 bp, Artificial Sequence
  Oligonucleotide for detection of SNP TSC0045539
cttcaatacatta

SEQ ID NO: 184569 - DNA, 13 bp, Artificial Sequence
  Oligonucleotide for detection of SNP TSC0045539
taatgtgttgaag

SEQ ID NO: 184570 - DNA, 13 bp, Artificial Sequence
  Oligonucleotide for detection of SNP TSC0045539
cttcaacacatta

SEQ ID NO: 184571 - DNA, 13 bp, Artificial Sequence
  Oligonucleotide for detection of SNP TSC0045539
taatgcgttgaag

SEQ ID NO: 184572 - DNA, 13 bp, Artificial Sequence
  Oligonucleotide for detection of SNP TSC0045539
cttcaacgcatta

SEQ ID NO: 184573 - DNA, 13 bp, Artificial Sequence
  Oligonucleotide for detection of SNP TSC0045540
gttatagagatga

SEQ ID NO: 184574 - DNA, 13 bp, Artificial Sequence
  Oligonucleotide for detection of SNP TSC0045540
tcatctctataac

SEQ ID NO: 184575 - DNA, 13 bp, Artificial Sequence
  Oligonucleotide for detection of SNP TSC0045540
gttataaagatga

SEQ ID NO: 184576 - DNA, 13 bp, Artificial Sequence
  Oligonucleotide for detection of SNP TSC0045540
tcatctttataac

SEQ ID NO: 184577 - DNA, 13 bp, Artificial Sequence
  Oligonucleotide for detection of SNP TSC0045545
gttaattgagaay

SEQ ID NO: 184578 - DNA, 13 bp, Artificial Sequence
  Oligonucleotide for detection of SNP TSC0045545
rttctcaattaac

SEQ ID NO: 184579 - DNA, 13 bp, Artificial Sequence
  Oligonucleotide for detection of SNP TSC0045545
gttaatcgagaay

SEQ ID NO: 184580 - DNA, 13 bp, Artificial Sequence
  Oligonucleotide for detection of SNP TSC0045545
rttctcgattaac

SEQ ID NO: 184581 - DNA, 13 bp, Artificial Sequence
  Oligonucleotide for detection of SNP TSC0045545
gtttttgattagy

SEQ ID NO: 184582 - DNA, 13 bp, Artificial Sequence
  Oligonucleotide for detection of SNP TSC0045545
rctaatcaaaaac

SEQ ID NO: 184583 - DNA, 13 bp, Artificial Sequence
  Oligonucleotide for detection of SNP TSC0045545
gtttttaattagy

SEQ ID NO: 184584 - DNA, 13 bp, Artificial Sequence
  Oligonucleotide for detection of SNP TSC0045545
rctaattaaaaac

SEQ ID NO: 184585 - DNA, 13 bp, Artificial Sequence
  Oligonucleotide for detection of SNP TSC0045545
gttttcgattagy

SEQ ID NO: 184586 - DNA, 13 bp, Artificial Sequence
  Oligonucleotide for detection of SNP TSC0045545
rctaatcgaaaac

SEQ ID NO: 184587 - DNA, 13 bp, Artificial Sequence
  Oligonucleotide for detection of SNP TSC0045546
gaatgtagaatay

SEQ ID NO: 184588 - DNA, 13 bp, Artificial Sequence
  Oligonucleotide for detection of SNP TSC0045546
rtattctacattc

SEQ ID NO: 184589 - DNA, 13 bp, Artificial Sequence
  Oligonucleotide for detection of SNP TSC0045546
gaatgtggaatay

SEQ ID NO: 184590 - DNA, 13 bp, Artificial Sequence
  Oligonucleotide for detection of SNP TSC0045546
rtattccacattc

SEQ ID NO: 184591 - DNA, 13 bp, Artificial Sequence
  Oligonucleotide for detection of SNP TSC0045546
gaacgtagaatay

SEQ ID NO: 184592 - DNA, 13 bp, Artificial Sequence
  Oligonucleotide for detection of SNP TSC0045546
rtattctacgttc

SEQ ID NO: 184593 - DNA, 13 bp, Artificial Sequence
  Oligonucleotide for detection of SNP TSC0045546
gaacgtggaatay

SEQ ID NO: 184594 - DNA, 13 bp, Artificial Sequence
  Oligonucleotide for detection of SNP TSC0045546
rtattccacgttc

SEQ ID NO: 184595 - DNA, 13 bp, Artificial Sequence
  Oligonucleotide for detection of SNP TSC0045546
gaatgcggaatay

SEQ ID NO: 184596 - DNA, 13 bp, Artificial Sequence
  Oligonucleotide for detection of SNP TSC0045546
rtattccgcattc

SEQ ID NO: 184597 - DNA, 13 bp, Artificial Sequence
  Oligonucleotide for detection of SNP TSC0045546
gaacgcggaatay

SEQ ID NO: 184598 - DNA, 13 bp, Artificial Sequence
  Oligonucleotide for detection of SNP TSC0045546
rtattccgcgttc

SEQ ID NO: 184599 - DNA, 13 bp, Artificial Sequence
  Oligonucleotide for detection of SNP TSC0045546
gtgttttgtgtty

SEQ ID NO: 184600 - DNA, 13 bp, Artificial Sequence
  Oligonucleotide for detection of SNP TSC0045546
raacacaaaacac

SEQ ID NO: 184601 - DNA, 13 bp, Artificial Sequence
  Oligonucleotide for detection of SNP TSC0045546
gtgttttgcgtty

SEQ ID NO: 184602 - DNA, 13 bp, Artificial Sequence
  Oligonucleotide for detection of SNP TSC0045546
raacgcaaaacac

SEQ ID NO: 184603 - DNA, 13 bp, Artificial Sequence
  Oligonucleotide for detection of SNP TSC0045546
gtgtttcgtgtty

SEQ ID NO: 184604 - DNA, 13 bp, Artificial Sequence
  Oligonucleotide for detection of SNP TSC0045546
raacacgaaacac

SEQ ID NO: 184605 - DNA, 13 bp, Artificial Sequence
  Oligonucleotide for detection of SNP TSC0045546
gtgtttcgcgtty

SEQ ID NO: 184606 - DNA, 13 bp, Artificial Sequence
  Oligonucleotide for detection of SNP TSC0045546
raacgcgaaacac

SEQ ID NO: 184607 - DNA, 13 bp, Artificial Sequence
  Oligonucleotide for detection of SNP TSC0045550
tatgttattgtaa

SEQ ID NO: 184608 - DNA, 13 bp, Artificial Sequence
  Oligonucleotide for detection of SNP TSC0045550
ttacaataacata

SEQ ID NO: 184609 - DNA, 13 bp, Artificial Sequence
  Oligonucleotide for detection of SNP TSC0009879
aggaattggaggg

SEQ ID NO: 184610 - DNA, 13 bp, Artificial Sequence
  Oligonucleotide for detection of SNP TSC0009879
ccctccaattcct

SEQ ID NO: 184611 - DNA, 13 bp, Artificial Sequence
  Oligonucleotide for detection of SNP TSC0009879
aggaatcggaggg

SEQ ID NO: 184612 - DNA, 13 bp, Artificial Sequence
  Oligonucleotide for detection of SNP TSC0009879
ccctccgattcct

SEQ ID NO: 184613 - DNA, 13 bp, Artificial Sequence
  Oligonucleotide for detection of SNP TSC0008611
ataaagaaaatat

SEQ ID NO: 184614 - DNA, 13 bp, Artificial Sequence
  Oligonucleotide for detection of SNP TSC0008611
atattttctttat

SEQ ID NO: 184615 - DNA, 13 bp, Artificial Sequence
  Oligonucleotide for detection of SNP TSC0008611
ataaagtaaatat

SEQ ID NO: 184616 - DNA, 13 bp, Artificial Sequence
  Oligonucleotide for detection of SNP TSC0008611
atatttactttat

SEQ ID NO: 184617 - DNA, 13 bp, Artificial Sequence
  Oligonucleotide for detection of SNP TSC0008611
atgtttgttttgt

SEQ ID NO: 184618 - DNA, 13 bp, Artificial Sequence
  Oligonucleotide for detection of SNP TSC0008611
acaaaacaaacat

SEQ ID NO: 184619 - DNA, 13 bp, Artificial Sequence
  Oligonucleotide for detection of SNP TSC0045553
ggtgtatagaagt

SEQ ID NO: 184620 - DNA, 13 bp, Artificial Sequence
  Oligonucleotide for detection of SNP TSC0045553
acttctatacacc

SEQ ID NO: 184621 - DNA, 13 bp, Artificial Sequence
  Oligonucleotide for detection of SNP TSC0045553
ggtgtagagaagt

SEQ ID NO: 184622 - DNA, 13 bp, Artificial Sequence
  Oligonucleotide for detection of SNP TSC0045553
acttctctacacc

SEQ ID NO: 184623 - DNA, 13 bp, Artificial Sequence
  Oligonucleotide for detection of SNP TSC0008454
tgagaggggatgg

SEQ ID NO: 184624 - DNA, 13 bp, Artificial Sequence
  Oligonucleotide for detection of SNP TSC0008454
ccatcccctctca

SEQ ID NO: 184625 - DNA, 13 bp, Artificial Sequence
  Oligonucleotide for detection of SNP TSC0008454
tgagagaggatgg

SEQ ID NO: 184626 - DNA, 13 bp, Artificial Sequence
  Oligonucleotide for detection of SNP TSC0008454
ccatcctctctca

SEQ ID NO: 184627 - DNA, 13 bp, Artificial Sequence
  Oligonucleotide for detection of SNP TSC0008455
gtatggtatggta

SEQ ID NO: 184628 - DNA, 13 bp, Artificial Sequence
  Oligonucleotide for detection of SNP TSC0008455
taccataccatac

SEQ ID NO: 184629 - DNA, 13 bp, Artificial Sequence
  Oligonucleotide for detection of SNP TSC0008455
gtatgggatggta

SEQ ID NO: 184630 - DNA, 13 bp, Artificial Sequence
  Oligonucleotide for detection of SNP TSC0008455
taccatcccatac

SEQ ID NO: 184631 - DNA, 13 bp, Artificial Sequence
  Oligonucleotide for detection of SNP TSC0008455
tgttatgttatgy

SEQ ID NO: 184632 - DNA, 13 bp, Artificial Sequence
  Oligonucleotide for detection of SNP TSC0008455
rcataacataaca

SEQ ID NO: 184633 - DNA, 13 bp, Artificial Sequence
  Oligonucleotide for detection of SNP TSC0008455
tgttattttatgy

SEQ ID NO: 184634 - DNA, 13 bp, Artificial Sequence
  Oligonucleotide for detection of SNP TSC0008455
rcataaaataaca

SEQ ID NO: 184635 - DNA, 13 bp, Artificial Sequence
  Oligonucleotide for detection of SNP TSC0045554
gaagtattgttga

SEQ ID NO: 184636 - DNA, 13 bp, Artificial Sequence
  Oligonucleotide for detection of SNP TSC0045554
tcaacaatacttc

SEQ ID NO: 184637 - DNA, 13 bp, Artificial Sequence
  Oligonucleotide for detection of SNP TSC0045554
gaagtagtgttga

SEQ ID NO: 184638 - DNA, 13 bp, Artificial Sequence
  Oligonucleotide for detection of SNP TSC0045554
tcaacactacttc

SEQ ID NO: 184639 - DNA, 13 bp, Artificial Sequence
  Oligonucleotide for detection of SNP TSC0045554
ttagtaatattty

SEQ ID NO: 184640 - DNA, 13 bp, Artificial Sequence
  Oligonucleotide for detection of SNP TSC0045554
raaatattactaa

SEQ ID NO: 184641 - DNA, 13 bp, Artificial Sequence
  Oligonucleotide for detection of SNP TSC0045554
ttagtattattty

SEQ ID NO: 184642 - DNA, 13 bp, Artificial Sequence
  Oligonucleotide for detection of SNP TSC0045554
raaataatactaa

SEQ ID NO: 184643 - DNA, 13 bp, Artificial Sequence
  Oligonucleotide for detection of SNP TSC0045555
aaaattttgatta

SEQ ID NO: 184644 - DNA, 13 bp, Artificial Sequence
  Oligonucleotide for detection of SNP TSC0045555
taatcaaaatttt

SEQ ID NO: 184645 - DNA, 13 bp, Artificial Sequence
  Oligonucleotide for detection of SNP TSC0045555
tgattaggatttt

SEQ ID NO: 184646 - DNA, 13 bp, Artificial Sequence
  Oligonucleotide for detection of SNP TSC0045555
aaaatcctaatca

SEQ ID NO: 184647 - DNA, 13 bp, Artificial Sequence
  Oligonucleotide for detection of SNP TSC0045556
aaaaataaaaaag

SEQ ID NO: 184648 - DNA, 13 bp, Artificial Sequence
  Oligonucleotide for detection of SNP TSC0045556
cttttttattttt

SEQ ID NO: 184649 - DNA, 13 bp, Artificial Sequence
  Oligonucleotide for detection of SNP TSC0045556
aaaaatgaaaaag

SEQ ID NO: 184650 - DNA, 13 bp, Artificial Sequence
  Oligonucleotide for detection of SNP TSC0045556
ctttttcattttt

SEQ ID NO: 184651 - DNA, 13 bp, Artificial Sequence
  Oligonucleotide for detection of SNP TSC0045556
aaaaacgaaaaag

SEQ ID NO: 184652 - DNA, 13 bp, Artificial Sequence
  Oligonucleotide for detection of SNP TSC0045556
ctttttcgttttt

SEQ ID NO: 184653 - DNA, 13 bp, Artificial Sequence
  Oligonucleotide for detection of SNP TSC0045557
tattatgtaataa

SEQ ID NO: 184654 - DNA, 13 bp, Artificial Sequence
  Oligonucleotide for detection of SNP TSC0045557
ttattacataata

SEQ ID NO: 184655 - DNA, 13 bp, Artificial Sequence
  Oligonucleotide for detection of SNP TSC0045557
tattatataataa

SEQ ID NO: 184656 - DNA, 13 bp, Artificial Sequence
  Oligonucleotide for detection of SNP TSC0045557
ttattatataata

SEQ ID NO: 184657 - DNA, 13 bp, Artificial Sequence
  Oligonucleotide for detection of SNP TSC0045558
ggaggaaggtgat

SEQ ID NO: 184658 - DNA, 13 bp, Artificial Sequence
  Oligonucleotide for detection of SNP TSC0045558
atcaccttcctcc

SEQ ID NO: 184659 - DNA, 13 bp, Artificial Sequence
  Oligonucleotide for detection of SNP TSC0045558
ggaggatggtgat

SEQ ID NO: 184660 - DNA, 13 bp, Artificial Sequence
  Oligonucleotide for detection of SNP TSC0045558
atcaccatcctcc

SEQ ID NO: 184661 - DNA, 13 bp, Artificial Sequence
  Oligonucleotide for detection of SNP TSC0045558
ggaggacggtgat

SEQ ID NO: 184662 - DNA, 13 bp, Artificial Sequence
  Oligonucleotide for detection of SNP TSC0045558
atcaccgtcctcc

SEQ ID NO: 184663 - DNA, 13 bp, Artificial Sequence
  Oligonucleotide for detection of SNP TSC0045558
attatcgttttty

SEQ ID NO: 184664 - DNA, 13 bp, Artificial Sequence
  Oligonucleotide for detection of SNP TSC0045558
raaaaacgataat

SEQ ID NO: 184665 - DNA, 13 bp, Artificial Sequence
  Oligonucleotide for detection of SNP TSC0045559
agagaagaagaga

SEQ ID NO: 184666 - DNA, 13 bp, Artificial Sequence
  Oligonucleotide for detection of SNP TSC0045559
tctcttcttctct

SEQ ID NO: 184667 - DNA, 13 bp, Artificial Sequence
  Oligonucleotide for detection of SNP TSC0045559
agagaataagaga

SEQ ID NO: 184668 - DNA, 13 bp, Artificial Sequence
  Oligonucleotide for detection of SNP TSC0045559
tctcttattctct

SEQ ID NO: 184669 - DNA, 13 bp, Artificial Sequence
  Oligonucleotide for detection of SNP TSC0045560
ttggttaggtata

SEQ ID NO: 184670 - DNA, 13 bp, Artificial Sequence
  Oligonucleotide for detection of SNP TSC0045560
tatacctaaccaa

SEQ ID NO: 184671 - DNA, 13 bp, Artificial Sequence
  Oligonucleotide for detection of SNP TSC0045560
ttggttgggtata

SEQ ID NO: 184672 - DNA, 13 bp, Artificial Sequence
  Oligonucleotide for detection of SNP TSC0045560
tatacccaaccaa

SEQ ID NO: 184673 - DNA, 13 bp, Artificial Sequence
  Oligonucleotide for detection of SNP TSC0045560
ttggtcgggtata

SEQ ID NO: 184674 - DNA, 13 bp, Artificial Sequence
  Oligonucleotide for detection of SNP TSC0045560
tatacccgaccaa

SEQ ID NO: 184675 - DNA, 13 bp, Artificial Sequence
  Oligonucleotide for detection of SNP TSC0045561
aatagatggtttt

SEQ ID NO: 184676 - DNA, 13 bp, Artificial Sequence
  Oligonucleotide for detection of SNP TSC0045561
aaaaccatctatt

SEQ ID NO: 184677 - DNA, 13 bp, Artificial Sequence
  Oligonucleotide for detection of SNP TSC0045561
aatagagggtttt

SEQ ID NO: 184678 - DNA, 13 bp, Artificial Sequence
  Oligonucleotide for detection of SNP TSC0045561
aaaaccctctatt

SEQ ID NO: 184679 - DNA, 13 bp, Artificial Sequence
  Oligonucleotide for detection of SNP TSC0045561
aaagttttttgtt

SEQ ID NO: 184680 - DNA, 13 bp, Artificial Sequence
  Oligonucleotide for detection of SNP TSC0045561
aacaaaaaacttt

SEQ ID NO: 184681 - DNA, 13 bp, Artificial Sequence
  Oligonucleotide for detection of SNP TSC0045564
aatagttgagggy

SEQ ID NO: 184682 - DNA, 13 bp, Artificial Sequence
  Oligonucleotide for detection of SNP TSC0045564
rccctcaactatt

SEQ ID NO: 184683 - DNA, 13 bp, Artificial Sequence
  Oligonucleotide for detection of SNP TSC0045564
aatagtcgagggy

SEQ ID NO: 184684 - DNA, 13 bp, Artificial Sequence
  Oligonucleotide for detection of SNP TSC0045564
rccctcgactatt

SEQ ID NO: 184685 - DNA, 13 bp, Artificial Sequence
  Oligonucleotide for detection of SNP TSC0045565
ataaagtggtgta

SEQ ID NO: 184686 - DNA, 13 bp, Artificial Sequence
  Oligonucleotide for detection of SNP TSC0045565
tacaccactttat

SEQ ID NO: 184687 - DNA, 13 bp, Artificial Sequence
  Oligonucleotide for detection of SNP TSC0045565
ataaaggggtgta

SEQ ID NO: 184688 - DNA, 13 bp, Artificial Sequence
  Oligonucleotide for detection of SNP TSC0045565
tacacccctttat

SEQ ID NO: 184689 - DNA, 13 bp, Artificial Sequence
  Oligonucleotide for detection of SNP TSC0045565
tatattattttat

SEQ ID NO: 184690 - DNA, 13 bp, Artificial Sequence
  Oligonucleotide for detection of SNP TSC0045565
ataaaataatata

SEQ ID NO: 184691 - DNA, 13 bp, Artificial Sequence
  Oligonucleotide for detection of SNP TSC0045565
tatatttttttat

SEQ ID NO: 184692 - DNA, 13 bp, Artificial Sequence
  Oligonucleotide for detection of SNP TSC0045565
ataaaaaaatata

SEQ ID NO: 184693 - DNA, 13 bp, Artificial Sequence
  Oligonucleotide for detection of SNP TSC0045566
attagttatttaa

SEQ ID NO: 184694 - DNA, 13 bp, Artificial Sequence
  Oligonucleotide for detection of SNP TSC0045566
ttaaataactaat

SEQ ID NO: 184695 - DNA, 13 bp, Artificial Sequence
  Oligonucleotide for detection of SNP TSC0045566
attagtgatttaa

SEQ ID NO: 184696 - DNA, 13 bp, Artificial Sequence
  Oligonucleotide for detection of SNP TSC0045566
ttaaatcactaat

SEQ ID NO: 184697 - DNA, 13 bp, Artificial Sequence
  Oligonucleotide for detection of SNP TSC0045567
attaagatattaa

SEQ ID NO: 184698 - DNA, 13 bp, Artificial Sequence
  Oligonucleotide for detection of SNP TSC0045567
ttaatatcttaat

SEQ ID NO: 184699 - DNA, 13 bp, Artificial Sequence
  Oligonucleotide for detection of SNP TSC0045567
attaaggtattaa

SEQ ID NO: 184700 - DNA, 13 bp, Artificial Sequence
  Oligonucleotide for detection of SNP TSC0045567
ttaataccttaat

SEQ ID NO: 184701 - DNA, 13 bp, Artificial Sequence
  Oligonucleotide for detection of SNP TSC0045568
ttgttaattataa

SEQ ID NO: 184702 - DNA, 13 bp, Artificial Sequence
  Oligonucleotide for detection of SNP TSC0045568
ttataattaacaa

SEQ ID NO: 184703 - DNA, 13 bp, Artificial Sequence
  Oligonucleotide for detection of SNP TSC0045568
ttgttagttataa

SEQ ID NO: 184704 - DNA, 13 bp, Artificial Sequence
  Oligonucleotide for detection of SNP TSC0045568
ttataactaacaa

SEQ ID NO: 184705 - DNA, 13 bp, Artificial Sequence
  Oligonucleotide for detection of SNP TSC0045569
ggaggttgagatg

SEQ ID NO: 184706 - DNA, 13 bp, Artificial Sequence
  Oligonucleotide for detection of SNP TSC0045569
catctcaacctcc

SEQ ID NO: 184707 - DNA, 13 bp, Artificial Sequence
  Oligonucleotide for detection of SNP TSC0045569
ggaggtcgagatg

SEQ ID NO: 184708 - DNA, 13 bp, Artificial Sequence
  Oligonucleotide for detection of SNP TSC0045569
catctcgacctcc

SEQ ID NO: 184709 - DNA, 13 bp, Artificial Sequence
  Oligonucleotide for detection of SNP TSC0045569
ggaggttgagacg

SEQ ID NO: 184710 - DNA, 13 bp, Artificial Sequence
  Oligonucleotide for detection of SNP TSC0045569
cgtctcaacctcc

SEQ ID NO: 184711 - DNA, 13 bp, Artificial Sequence
  Oligonucleotide for detection of SNP TSC0045569
ggaggtcgagacg

SEQ ID NO: 184712 - DNA, 13 bp, Artificial Sequence
  Oligonucleotide for detection of SNP TSC0045569
cgtctcgacctcc

SEQ ID NO: 184713 - DNA, 13 bp, Artificial Sequence
  Oligonucleotide for detection of SNP TSC0045571
attaaaaggaagy

SEQ ID NO: 184714 - DNA, 13 bp, Artificial Sequence
  Oligonucleotide for detection of SNP TSC0045571
rcttccttttaat

SEQ ID NO: 184715 - DNA, 13 bp, Artificial Sequence
  Oligonucleotide for detection of SNP TSC0045571
attaaatggaagy

SEQ ID NO: 184716 - DNA, 13 bp, Artificial Sequence
  Oligonucleotide for detection of SNP TSC0045571
rcttccatttaat

SEQ ID NO: 184717 - DNA, 13 bp, Artificial Sequence
  Oligonucleotide for detection of SNP TSC0045571
attaaacggaagy

SEQ ID NO: 184718 - DNA, 13 bp, Artificial Sequence
  Oligonucleotide for detection of SNP TSC0045571
rcttccgtttaat

SEQ ID NO: 184719 - DNA, 13 bp, Artificial Sequence
  Oligonucleotide for detection of SNP TSC0045571
gtttttttttagt

SEQ ID NO: 184720 - DNA, 13 bp, Artificial Sequence
  Oligonucleotide for detection of SNP TSC0045571
actaaaaaaaaac

SEQ ID NO: 184721 - DNA, 13 bp, Artificial Sequence
  Oligonucleotide for detection of SNP TSC0045571
gtttttgtttagt

SEQ ID NO: 184722 - DNA, 13 bp, Artificial Sequence
  Oligonucleotide for detection of SNP TSC0045571
actaaacaaaaac

SEQ ID NO: 184723 - DNA, 13 bp, Artificial Sequence
  Oligonucleotide for detection of SNP TSC0045571
gttttcgtttagt

SEQ ID NO: 184724 - DNA, 13 bp, Artificial Sequence
  Oligonucleotide for detection of SNP TSC0045571
actaaacgaaaac

SEQ ID NO: 184725 - DNA, 13 bp, Artificial Sequence
  Oligonucleotide for detection of SNP TSC0045572
ggggtgataatgy

SEQ ID NO: 184726 - DNA, 13 bp, Artificial Sequence
  Oligonucleotide for detection of SNP TSC0045572
rcattatcacccc

SEQ ID NO: 184727 - DNA, 13 bp, Artificial Sequence
  Oligonucleotide for detection of SNP TSC0045572
ggggtgttaatgy

SEQ ID NO: 184728 - DNA, 13 bp, Artificial Sequence
  Oligonucleotide for detection of SNP TSC0045572
rcattaacacccc

SEQ ID NO: 184729 - DNA, 13 bp, Artificial Sequence
  Oligonucleotide for detection of SNP TSC0045572
gtattattattty

SEQ ID NO: 184730 - DNA, 13 bp, Artificial Sequence
  Oligonucleotide for detection of SNP TSC0045572
raaataataatac

SEQ ID NO: 184731 - DNA, 13 bp, Artificial Sequence
  Oligonucleotide for detection of SNP TSC0045572
gtattaatattty

SEQ ID NO: 184732 - DNA, 13 bp, Artificial Sequence
  Oligonucleotide for detection of SNP TSC0045572
raaatattaatac

SEQ ID NO: 184733 - DNA, 13 bp, Artificial Sequence
  Oligonucleotide for detection of SNP TSC0045573
gatttaagtttta

SEQ ID NO: 184734 - DNA, 13 bp, Artificial Sequence
  Oligonucleotide for detection of SNP TSC0045573
taaaacttaaatc

SEQ ID NO: 184735 - DNA, 13 bp, Artificial Sequence
  Oligonucleotide for detection of SNP TSC0045573
gatttaggtttta

SEQ ID NO: 184736 - DNA, 13 bp, Artificial Sequence
  Oligonucleotide for detection of SNP TSC0045573
taaaacctaaatc

SEQ ID NO: 184737 - DNA, 13 bp, Artificial Sequence
  Oligonucleotide for detection of SNP TSC0045576
taattaatttaga

SEQ ID NO: 184738 - DNA, 13 bp, Artificial Sequence
  Oligonucleotide for detection of SNP TSC0045576
tctaaattaatta

SEQ ID NO: 184739 - DNA, 13 bp, Artificial Sequence
  Oligonucleotide for detection of SNP TSC0045576
taattagtttaga

SEQ ID NO: 184740 - DNA, 13 bp, Artificial Sequence
  Oligonucleotide for detection of SNP TSC0045576
tctaaactaatta

SEQ ID NO: 184741 - DNA, 13 bp, Artificial Sequence
  Oligonucleotide for detection of SNP TSC0045579
ttgtggtgggtgg

SEQ ID NO: 184742 - DNA, 13 bp, Artificial Sequence
  Oligonucleotide for detection of SNP TSC0045579
ccacccaccacaa

SEQ ID NO: 184743 - DNA, 13 bp, Artificial Sequence
  Oligonucleotide for detection of SNP TSC0045579
ttgtggcgggtgg

SEQ ID NO: 184744 - DNA, 13 bp, Artificial Sequence
  Oligonucleotide for detection of SNP TSC0045579
ccacccgccacaa

SEQ ID NO: 184745 - DNA, 13 bp, Artificial Sequence
  Oligonucleotide for detection of SNP TSC0045579
ttatttgttataa

SEQ ID NO: 184746 - DNA, 13 bp, Artificial Sequence
  Oligonucleotide for detection of SNP TSC0045579
ttataacaaataa

SEQ ID NO: 184747 - DNA, 13 bp, Artificial Sequence
  Oligonucleotide for detection of SNP TSC0045579
ttatttattataa

SEQ ID NO: 184748 - DNA, 13 bp, Artificial Sequence
  Oligonucleotide for detection of SNP TSC0045579
ttataataaataa

SEQ ID NO: 184749 - DNA, 13 bp, Artificial Sequence
  Oligonucleotide for detection of SNP TSC0045579
ttattcgttataa

SEQ ID NO: 184750 - DNA, 13 bp, Artificial Sequence
  Oligonucleotide for detection of SNP TSC0045579
ttataacgaataa

SEQ ID NO: 184751 - DNA, 13 bp, Artificial Sequence
  Oligonucleotide for detection of SNP TSC0045580
agtaagagtttty

SEQ ID NO: 184752 - DNA, 13 bp, Artificial Sequence
  Oligonucleotide for detection of SNP TSC0045580
raaaactcttact

SEQ ID NO: 184753 - DNA, 13 bp, Artificial Sequence
  Oligonucleotide for detection of SNP TSC0045580
agtaagggtttty

SEQ ID NO: 184754 - DNA, 13 bp, Artificial Sequence
  Oligonucleotide for detection of SNP TSC0045580
raaaacccttact

SEQ ID NO: 184755 - DNA, 13 bp, Artificial Sequence
  Oligonucleotide for detection of SNP TSC0045582
tattgatggtgtt

SEQ ID NO: 184756 - DNA, 13 bp, Artificial Sequence
  Oligonucleotide for detection of SNP TSC0045582
aacaccatcaata

SEQ ID NO: 184757 - DNA, 13 bp, Artificial Sequence
  Oligonucleotide for detection of SNP TSC0045582
tattgacggtgtt

SEQ ID NO: 184758 - DNA, 13 bp, Artificial Sequence
  Oligonucleotide for detection of SNP TSC0045582
aacaccgtcaata

SEQ ID NO: 184759 - DNA, 13 bp, Artificial Sequence
  Oligonucleotide for detection of SNP TSC0045582
tattgatggcgtt

SEQ ID NO: 184760 - DNA, 13 bp, Artificial Sequence
  Oligonucleotide for detection of SNP TSC0045582
aacgccatcaata

SEQ ID NO: 184761 - DNA, 13 bp, Artificial Sequence
  Oligonucleotide for detection of SNP TSC0045582
tattgacggcgtt

SEQ ID NO: 184762 - DNA, 13 bp, Artificial Sequence
  Oligonucleotide for detection of SNP TSC0045582
aacgccgtcaata

SEQ ID NO: 184763 - DNA, 13 bp, Artificial Sequence
  Oligonucleotide for detection of SNP TSC0045582
agtgttgttagta

SEQ ID NO: 184764 - DNA, 13 bp, Artificial Sequence
  Oligonucleotide for detection of SNP TSC0045582
tactaacaacact

SEQ ID NO: 184765 - DNA, 13 bp, Artificial Sequence
  Oligonucleotide for detection of SNP TSC0045582
agtgttattagta

SEQ ID NO: 184766 - DNA, 13 bp, Artificial Sequence
  Oligonucleotide for detection of SNP TSC0045582
tactaataacact

SEQ ID NO: 184767 - DNA, 13 bp, Artificial Sequence
  Oligonucleotide for detection of SNP TSC0045582
agcgttgttagta

SEQ ID NO: 184768 - DNA, 13 bp, Artificial Sequence
  Oligonucleotide for detection of SNP TSC0045582
tactaacaacgct

SEQ ID NO: 184769 - DNA, 13 bp, Artificial Sequence
  Oligonucleotide for detection of SNP TSC0045582
agcgttattagta

SEQ ID NO: 184770 - DNA, 13 bp, Artificial Sequence
  Oligonucleotide for detection of SNP TSC0045582
tactaataacgct

SEQ ID NO: 184771 - DNA, 13 bp, Artificial Sequence
  Oligonucleotide for detection of SNP TSC0045582
agtgtcgttagta

SEQ ID NO: 184772 - DNA, 13 bp, Artificial Sequence
  Oligonucleotide for detection of SNP TSC0045582
tactaacgacact

SEQ ID NO: 184773 - DNA, 13 bp, Artificial Sequence
  Oligonucleotide for detection of SNP TSC0045582
agcgtcgttagta

SEQ ID NO: 184774 - DNA, 13 bp, Artificial Sequence
  Oligonucleotide for detection of SNP TSC0045582
tactaacgacgct

SEQ ID NO: 184775 - DNA, 13 bp, Artificial Sequence
  Oligonucleotide for detection of SNP TSC0045583
tatatagtaaagt

SEQ ID NO: 184776 - DNA, 13 bp, Artificial Sequence
  Oligonucleotide for detection of SNP TSC0045583
actttactatata

SEQ ID NO: 184777 - DNA, 13 bp, Artificial Sequence
  Oligonucleotide for detection of SNP TSC0045583
tatataataaagt

SEQ ID NO: 184778 - DNA, 13 bp, Artificial Sequence
  Oligonucleotide for detection of SNP TSC0045583
actttattatata

SEQ ID NO: 184779 - DNA, 13 bp, Artificial Sequence
  Oligonucleotide for detection of SNP TSC0045584
tatttagttaatt

SEQ ID NO: 184780 - DNA, 13 bp, Artificial Sequence
  Oligonucleotide for detection of SNP TSC0045584
aattaactaaata

SEQ ID NO: 184781 - DNA, 13 bp, Artificial Sequence
  Oligonucleotide for detection of SNP TSC0008648
aaaatcgtttttt

SEQ ID NO: 184782 - DNA, 13 bp, Artificial Sequence
  Oligonucleotide for detection of SNP TSC0008648
aaaaaacgatttt

SEQ ID NO: 184783 - DNA, 13 bp, Artificial Sequence
  Oligonucleotide for detection of SNP TSC0008648
aaagaatggtttt

SEQ ID NO: 184784 - DNA, 13 bp, Artificial Sequence
  Oligonucleotide for detection of SNP TSC0008648
aaaaccattcttt

SEQ ID NO: 184785 - DNA, 13 bp, Artificial Sequence
  Oligonucleotide for detection of SNP TSC0008648
aaagaacggtttt

SEQ ID NO: 184786 - DNA, 13 bp, Artificial Sequence
  Oligonucleotide for detection of SNP TSC0008648
aaaaccgttcttt

SEQ ID NO: 184787 - DNA, 13 bp, Artificial Sequence
  Oligonucleotide for detection of SNP TSC0045585
aatgtagaaataa

SEQ ID NO: 184788 - DNA, 13 bp, Artificial Sequence
  Oligonucleotide for detection of SNP TSC0045585
ttatttctacatt

SEQ ID NO: 184789 - DNA, 13 bp, Artificial Sequence
  Oligonucleotide for detection of SNP TSC0045585
aatgtaaaaataa

SEQ ID NO: 184790 - DNA, 13 bp, Artificial Sequence
  Oligonucleotide for detection of SNP TSC0045585
ttatttttacatt

SEQ ID NO: 184791 - DNA, 13 bp, Artificial Sequence
  Oligonucleotide for detection of SNP TSC0045586
tgaaagttttttt

SEQ ID NO: 184792 - DNA, 13 bp, Artificial Sequence
  Oligonucleotide for detection of SNP TSC0045586
aaaaaaactttca

SEQ ID NO: 184793 - DNA, 13 bp, Artificial Sequence
  Oligonucleotide for detection of SNP TSC0045586
tgaaaggtttttt

SEQ ID NO: 184794 - DNA, 13 bp, Artificial Sequence
  Oligonucleotide for detection of SNP TSC0045586
aaaaaacctttca

SEQ ID NO: 184795 - DNA, 13 bp, Artificial Sequence
  Oligonucleotide for detection of SNP TSC0045589
gtatattttaagy

SEQ ID NO: 184796 - DNA, 13 bp, Artificial Sequence
  Oligonucleotide for detection of SNP TSC0045589
rcttaaaatatac

SEQ ID NO: 184797 - DNA, 13 bp, Artificial Sequence
  Oligonucleotide for detection of SNP TSC0045589
gtatatgttaagy

SEQ ID NO: 184798 - DNA, 13 bp, Artificial Sequence
  Oligonucleotide for detection of SNP TSC0045589
rcttaacatatac

SEQ ID NO: 184799 - DNA, 13 bp, Artificial Sequence
  Oligonucleotide for detection of SNP TSC0045589
gtatacgttaagy

SEQ ID NO: 184800 - DNA, 13 bp, Artificial Sequence
  Oligonucleotide for detection of SNP TSC0045589
rcttaacgtatac

SEQ ID NO: 184801 - DNA, 13 bp, Artificial Sequence
  Oligonucleotide for detection of SNP TSC0045589
gtttaaagtatgy

SEQ ID NO: 184802 - DNA, 13 bp, Artificial Sequence
  Oligonucleotide for detection of SNP TSC0045589
rcatactttaaac

SEQ ID NO: 184803 - DNA, 13 bp, Artificial Sequence
  Oligonucleotide for detection of SNP TSC0045589
gtttaatgtatgy

SEQ ID NO: 184804 - DNA, 13 bp, Artificial Sequence
  Oligonucleotide for detection of SNP TSC0045589
rcatacattaaac

SEQ ID NO: 184805 - DNA, 13 bp, Artificial Sequence
  Oligonucleotide for detection of SNP TSC0045589
gtttaacgtatgy

SEQ ID NO: 184806 - DNA, 13 bp, Artificial Sequence
  Oligonucleotide for detection of SNP TSC0045589
rcatacgttaaac

SEQ ID NO: 184807 - DNA, 13 bp, Artificial Sequence
  Oligonucleotide for detection of SNP TSC0045590
tgaaaagtataat

SEQ ID NO: 184808 - DNA, 13 bp, Artificial Sequence
  Oligonucleotide for detection of SNP TSC0045590
attatacttttca

SEQ ID NO: 184809 - DNA, 13 bp, Artificial Sequence
  Oligonucleotide for detection of SNP TSC0045590
tgaaaattataat

SEQ ID NO: 184810 - DNA, 13 bp, Artificial Sequence
  Oligonucleotide for detection of SNP TSC0045590
attataattttca

SEQ ID NO: 184811 - DNA, 13 bp, Artificial Sequence
  Oligonucleotide for detection of SNP TSC0008364
gagtttattaatt

SEQ ID NO: 184812 - DNA, 13 bp, Artificial Sequence
  Oligonucleotide for detection of SNP TSC0008364
aattaataaactc

SEQ ID NO: 184813 - DNA, 13 bp, Artificial Sequence
  Oligonucleotide for detection of SNP TSC0008364
gagttttttaatt

SEQ ID NO: 184814 - DNA, 13 bp, Artificial Sequence
  Oligonucleotide for detection of SNP TSC0008364
aattaaaaaactc

SEQ ID NO: 184815 - DNA, 13 bp, Artificial Sequence
  Oligonucleotide for detection of SNP TSC0008364
aattagtgaatty

SEQ ID NO: 184816 - DNA, 13 bp, Artificial Sequence
  Oligonucleotide for detection of SNP TSC0008364
raattcactaatt

SEQ ID NO: 184817 - DNA, 13 bp, Artificial Sequence
  Oligonucleotide for detection of SNP TSC0008364
aattagagaatty

SEQ ID NO: 184818 - DNA, 13 bp, Artificial Sequence
  Oligonucleotide for detection of SNP TSC0008364
raattctctaatt

SEQ ID NO: 184819 - DNA, 13 bp, Artificial Sequence
  Oligonucleotide for detection of SNP TSC0045592
agagagtagtaay

SEQ ID NO: 184820 - DNA, 13 bp, Artificial Sequence
  Oligonucleotide for detection of SNP TSC0045592
rttactactctct

SEQ ID NO: 184821 - DNA, 13 bp, Artificial Sequence
  Oligonucleotide for detection of SNP TSC0045592
agagagaagtaay

SEQ ID NO: 184822 - DNA, 13 bp, Artificial Sequence
  Oligonucleotide for detection of SNP TSC0045592
rttacttctctct

SEQ ID NO: 184823 - DNA, 13 bp, Artificial Sequence
  Oligonucleotide for detection of SNP TSC0045593
aataatgtttaaa

SEQ ID NO: 184824 - DNA, 13 bp, Artificial Sequence
  Oligonucleotide for detection of SNP TSC0045593
tttaaacattatt

SEQ ID NO: 184825 - DNA, 13 bp, Artificial Sequence
  Oligonucleotide for detection of SNP TSC0045593
aataatatttaaa

SEQ ID NO: 184826 - DNA, 13 bp, Artificial Sequence
  Oligonucleotide for detection of SNP TSC0045593
tttaaatattatt

SEQ ID NO: 184827 - DNA, 13 bp, Artificial Sequence
  Oligonucleotide for detection of SNP TSC0004995
ttgggaagttgtg

SEQ ID NO: 184828 - DNA, 13 bp, Artificial Sequence
  Oligonucleotide for detection of SNP TSC0004995
cacaacttcccaa

SEQ ID NO: 184829 - DNA, 13 bp, Artificial Sequence
  Oligonucleotide for detection of SNP TSC0004995
ttgggaggttgtg

SEQ ID NO: 184830 - DNA, 13 bp, Artificial Sequence
  Oligonucleotide for detection of SNP TSC0004995
cacaacctcccaa

SEQ ID NO: 184831 - DNA, 13 bp, Artificial Sequence
  Oligonucleotide for detection of SNP TSC0009670
atagataataaaa

SEQ ID NO: 184832 - DNA, 13 bp, Artificial Sequence
  Oligonucleotide for detection of SNP TSC0009670
ttttattatctat

SEQ ID NO: 184833 - DNA, 13 bp, Artificial Sequence
  Oligonucleotide for detection of SNP TSC0009670
atagatgataaaa

SEQ ID NO: 184834 - DNA, 13 bp, Artificial Sequence
  Oligonucleotide for detection of SNP TSC0009670
ttttatcatctat

SEQ ID NO: 184835 - DNA, 13 bp, Artificial Sequence
  Oligonucleotide for detection of SNP TSC0045594
attattggtgtgg

SEQ ID NO: 184836 - DNA, 13 bp, Artificial Sequence
  Oligonucleotide for detection of SNP TSC0045594
ccacaccaataat

SEQ ID NO: 184837 - DNA, 13 bp, Artificial Sequence
  Oligonucleotide for detection of SNP TSC0045594
attattggcgtgg

SEQ ID NO: 184838 - DNA, 13 bp, Artificial Sequence
  Oligonucleotide for detection of SNP TSC0045594
ccacgccaataat

SEQ ID NO: 184839 - DNA, 13 bp, Artificial Sequence
  Oligonucleotide for detection of SNP TSC0045594
ttatgtaagtaat

SEQ ID NO: 184840 - DNA, 13 bp, Artificial Sequence
  Oligonucleotide for detection of SNP TSC0045594
attacttacataa

SEQ ID NO: 184841 - DNA, 13 bp, Artificial Sequence
  Oligonucleotide for detection of SNP TSC0045594
ttatgttagtaat

SEQ ID NO: 184842 - DNA, 13 bp, Artificial Sequence
  Oligonucleotide for detection of SNP TSC0045594
attactaacataa

SEQ ID NO: 184843 - DNA, 13 bp, Artificial Sequence
  Oligonucleotide for detection of SNP TSC0045594
ttacgtaagtaat

SEQ ID NO: 184844 - DNA, 13 bp, Artificial Sequence
  Oligonucleotide for detection of SNP TSC0045594
attacttacgtaa

SEQ ID NO: 184845 - DNA, 13 bp, Artificial Sequence
  Oligonucleotide for detection of SNP TSC0045594
ttacgttagtaat

SEQ ID NO: 184846 - DNA, 13 bp, Artificial Sequence
  Oligonucleotide for detection of SNP TSC0045594
attactaacgtaa

SEQ ID NO: 184847 - DNA, 13 bp, Artificial Sequence
  Oligonucleotide for detection of SNP TSC0045595
ttggtaattatga

SEQ ID NO: 184848 - DNA, 13 bp, Artificial Sequence
  Oligonucleotide for detection of SNP TSC0045595
tcataattaccaa

SEQ ID NO: 184849 - DNA, 13 bp, Artificial Sequence
  Oligonucleotide for detection of SNP TSC0045595
ttggtagttatga

SEQ ID NO: 184850 - DNA, 13 bp, Artificial Sequence
  Oligonucleotide for detection of SNP TSC0045595
tcataactaccaa

SEQ ID NO: 184851 - DNA, 13 bp, Artificial Sequence
  Oligonucleotide for detection of SNP TSC0045596
ttttcgtgtttty

SEQ ID NO: 184852 - DNA, 13 bp, Artificial Sequence
  Oligonucleotide for detection of SNP TSC0045596
raaaacacgaaaa

SEQ ID NO: 184853 - DNA, 13 bp, Artificial Sequence
  Oligonucleotide for detection of SNP TSC0045596
ttttcgcgtttty

SEQ ID NO: 184854 - DNA, 13 bp, Artificial Sequence
  Oligonucleotide for detection of SNP TSC0045596
raaaacgcgaaaa

SEQ ID NO: 184855 - DNA, 13 bp, Artificial Sequence
  Oligonucleotide for detection of SNP TSC0045596
ggagatgtgagaa

SEQ ID NO: 184856 - DNA, 13 bp, Artificial Sequence
  Oligonucleotide for detection of SNP TSC0045596
ttctcacatctcc

SEQ ID NO: 184857 - DNA, 13 bp, Artificial Sequence
  Oligonucleotide for detection of SNP TSC0045596
ggagatttgagaa

SEQ ID NO: 184858 - DNA, 13 bp, Artificial Sequence
  Oligonucleotide for detection of SNP TSC0045596
ttctcaaatctcc

SEQ ID NO: 184859 - DNA, 13 bp, Artificial Sequence
  Oligonucleotide for detection of SNP TSC0045596
ggagacgtgagaa

SEQ ID NO: 184860 - DNA, 13 bp, Artificial Sequence
  Oligonucleotide for detection of SNP TSC0045596
ttctcacgtctcc

SEQ ID NO: 184861 - DNA, 13 bp, Artificial Sequence
  Oligonucleotide for detection of SNP TSC0045596
ggagattcgagaa

SEQ ID NO: 184862 - DNA, 13 bp, Artificial Sequence
  Oligonucleotide for detection of SNP TSC0045596
ttctcgaatctcc

SEQ ID NO: 184863 - DNA, 13 bp, Artificial Sequence
  Oligonucleotide for detection of SNP TSC0045596
ggagatgcgagaa

SEQ ID NO: 184864 - DNA, 13 bp, Artificial Sequence
  Oligonucleotide for detection of SNP TSC0045596
ttctcgcatctcc

SEQ ID NO: 184865 - DNA, 13 bp, Artificial Sequence
  Oligonucleotide for detection of SNP TSC0045596
ggagacgcgagaa

SEQ ID NO: 184866 - DNA, 13 bp, Artificial Sequence
  Oligonucleotide for detection of SNP TSC0045596
ttctcgcgtctcc

SEQ ID NO: 184867 - DNA, 13 bp, Artificial Sequence
  Oligonucleotide for detection of SNP TSC0045599
tttgggaatgggg

SEQ ID NO: 184868 - DNA, 13 bp, Artificial Sequence
  Oligonucleotide for detection of SNP TSC0045599
ccccattcccaaa

SEQ ID NO: 184869 - DNA, 13 bp, Artificial Sequence
  Oligonucleotide for detection of SNP TSC0045599
tttggggatgggg

SEQ ID NO: 184870 - DNA, 13 bp, Artificial Sequence
  Oligonucleotide for detection of SNP TSC0045599
ccccatccccaaa

SEQ ID NO: 184871 - DNA, 13 bp, Artificial Sequence
  Oligonucleotide for detection of SNP TSC0045600
gtatttaatattg

SEQ ID NO: 184872 - DNA, 13 bp, Artificial Sequence
  Oligonucleotide for detection of SNP TSC0045600
caatattaaatac

SEQ ID NO: 184873 - DNA, 13 bp, Artificial Sequence
  Oligonucleotide for detection of SNP TSC0045600
gtatttgatattg

SEQ ID NO: 184874 - DNA, 13 bp, Artificial Sequence
  Oligonucleotide for detection of SNP TSC0045600
caatatcaaatac

SEQ ID NO: 184875 - DNA, 13 bp, Artificial Sequence
  Oligonucleotide for detection of SNP TSC0045601
tatataaataaty

SEQ ID NO: 184876 - DNA, 13 bp, Artificial Sequence
  Oligonucleotide for detection of SNP TSC0045601
rattatttatata

SEQ ID NO: 184877 - DNA, 13 bp, Artificial Sequence
  Oligonucleotide for detection of SNP TSC0045601
tatatatataaty

SEQ ID NO: 184878 - DNA, 13 bp, Artificial Sequence
  Oligonucleotide for detection of SNP TSC0045601
rattatatatata

SEQ ID NO: 184879 - DNA, 13 bp, Artificial Sequence
  Oligonucleotide for detection of SNP TSC0045601
ggttgtttgtgta

SEQ ID NO: 184880 - DNA, 13 bp, Artificial Sequence
  Oligonucleotide for detection of SNP TSC0045601
tacacaaacaacc

SEQ ID NO: 184881 - DNA, 13 bp, Artificial Sequence
  Oligonucleotide for detection of SNP TSC0045601
ggttgtatgtgta

SEQ ID NO: 184882 - DNA, 13 bp, Artificial Sequence
  Oligonucleotide for detection of SNP TSC0045601
tacacatacaacc

SEQ ID NO: 184883 - DNA, 13 bp, Artificial Sequence
  Oligonucleotide for detection of SNP TSC0045602
attaatatggaat

SEQ ID NO: 184884 - DNA, 13 bp, Artificial Sequence
  Oligonucleotide for detection of SNP TSC0045602
attccatattaat

SEQ ID NO: 184885 - DNA, 13 bp, Artificial Sequence
  Oligonucleotide for detection of SNP TSC0045602
attaatgtggaat

SEQ ID NO: 184886 - DNA, 13 bp, Artificial Sequence
  Oligonucleotide for detection of SNP TSC0045602
attccacattaat

SEQ ID NO: 184887 - DNA, 13 bp, Artificial Sequence
  Oligonucleotide for detection of SNP TSC0045602
attaacgtggaat

SEQ ID NO: 184888 - DNA, 13 bp, Artificial Sequence
  Oligonucleotide for detection of SNP TSC0045602
attccacgttaat

SEQ ID NO: 184889 - DNA, 13 bp, Artificial Sequence
  Oligonucleotide for detection of SNP TSC0045602
attttatgttggt

SEQ ID NO: 184890 - DNA, 13 bp, Artificial Sequence
  Oligonucleotide for detection of SNP TSC0045602
accaacataaaat

SEQ ID NO: 184891 - DNA, 13 bp, Artificial Sequence
  Oligonucleotide for detection of SNP TSC0045602
attttacgttggt

SEQ ID NO: 184892 - DNA, 13 bp, Artificial Sequence
  Oligonucleotide for detection of SNP TSC0045602
accaacgtaaaat

SEQ ID NO: 184893 - DNA, 13 bp, Artificial Sequence
  Oligonucleotide for detection of SNP TSC0045603
tttttttggaaay

SEQ ID NO: 184894 - DNA, 13 bp, Artificial Sequence
  Oligonucleotide for detection of SNP TSC0045603
rtttccaaaaaaa

SEQ ID NO: 184895 - DNA, 13 bp, Artificial Sequence
  Oligonucleotide for detection of SNP TSC0045603
gttttttgagagg

SEQ ID NO: 184896 - DNA, 13 bp, Artificial Sequence
  Oligonucleotide for detection of SNP TSC0045603
cctctcaaaaaac

SEQ ID NO: 184897 - DNA, 13 bp, Artificial Sequence
  Oligonucleotide for detection of SNP TSC0045603
gtttttagagagg

SEQ ID NO: 184898 - DNA, 13 bp, Artificial Sequence
  Oligonucleotide for detection of SNP TSC0045603
cctctctaaaaac

SEQ ID NO: 184899 - DNA, 13 bp, Artificial Sequence
  Oligonucleotide for detection of SNP TSC0045604
taaagatggatta

SEQ ID NO: 184900 - DNA, 13 bp, Artificial Sequence
  Oligonucleotide for detection of SNP TSC0045604
taatccatcttta

SEQ ID NO: 184901 - DNA, 13 bp, Artificial Sequence
  Oligonucleotide for detection of SNP TSC0045604
taaagacggatta

SEQ ID NO: 184902 - DNA, 13 bp, Artificial Sequence
  Oligonucleotide for detection of SNP TSC0045604
taatccgtcttta

SEQ ID NO: 184903 - DNA, 13 bp, Artificial Sequence
  Oligonucleotide for detection of SNP TSC0045604
taattcgtttttg

SEQ ID NO: 184904 - DNA, 13 bp, Artificial Sequence
  Oligonucleotide for detection of SNP TSC0045604
caaaaacgaatta

SEQ ID NO: 184905 - DNA, 13 bp, Artificial Sequence
  Oligonucleotide for detection of SNP TSC0045605
atataggaagaty

SEQ ID NO: 184906 - DNA, 13 bp, Artificial Sequence
  Oligonucleotide for detection of SNP TSC0045605
ratcttcctatat

SEQ ID NO: 184907 - DNA, 13 bp, Artificial Sequence
  Oligonucleotide for detection of SNP TSC0005283
ttttttgaatagg

SEQ ID NO: 184908 - DNA, 13 bp, Artificial Sequence
  Oligonucleotide for detection of SNP TSC0005283
cctattcaaaaaa

SEQ ID NO: 184909 - DNA, 13 bp, Artificial Sequence
  Oligonucleotide for detection of SNP TSC0005283
tttttcgaatagg

SEQ ID NO: 184910 - DNA, 13 bp, Artificial Sequence
  Oligonucleotide for detection of SNP TSC0005283
cctattcgaaaaa

SEQ ID NO: 184911 - DNA, 13 bp, Artificial Sequence
  Oligonucleotide for detection of SNP TSC0005283
tttatttggaaag

SEQ ID NO: 184912 - DNA, 13 bp, Artificial Sequence
  Oligonucleotide for detection of SNP TSC0005283
ctttccaaataaa

SEQ ID NO: 184913 - DNA, 13 bp, Artificial Sequence
  Oligonucleotide for detection of SNP TSC0005283
tttattcggaaag

SEQ ID NO: 184914 - DNA, 13 bp, Artificial Sequence
  Oligonucleotide for detection of SNP TSC0005283
ctttccgaataaa

SEQ ID NO: 184915 - DNA, 13 bp, Artificial Sequence
  Oligonucleotide for detection of SNP TSC0045609
aaagggttttgtt

SEQ ID NO: 184916 - DNA, 13 bp, Artificial Sequence
  Oligonucleotide for detection of SNP TSC0045609
aacaaaacccttt

SEQ ID NO: 184917 - DNA, 13 bp, Artificial Sequence
  Oligonucleotide for detection of SNP TSC0045609
aaaggggtttgtt

SEQ ID NO: 184918 - DNA, 13 bp, Artificial Sequence
  Oligonucleotide for detection of SNP TSC0045609
aacaaaccccttt

SEQ ID NO: 184919 - DNA, 13 bp, Artificial Sequence
  Oligonucleotide for detection of SNP TSC0045609
aataagatttttt

SEQ ID NO: 184920 - DNA, 13 bp, Artificial Sequence
  Oligonucleotide for detection of SNP TSC0045609
aaaaaatcttatt

SEQ ID NO: 184921 - DNA, 13 bp, Artificial Sequence
  Oligonucleotide for detection of SNP TSC0045609
aataagttttttt

SEQ ID NO: 184922 - DNA, 13 bp, Artificial Sequence
  Oligonucleotide for detection of SNP TSC0045609
aaaaaaacttatt

SEQ ID NO: 184923 - DNA, 13 bp, Artificial Sequence
  Oligonucleotide for detection of SNP TSC0004661
aagggaaatattt

SEQ ID NO: 184924 - DNA, 13 bp, Artificial Sequence
  Oligonucleotide for detection of SNP TSC0004661
aaatatttccctt

SEQ ID NO: 184925 - DNA, 13 bp, Artificial Sequence
  Oligonucleotide for detection of SNP TSC0004661
aagggagatattt

SEQ ID NO: 184926 - DNA, 13 bp, Artificial Sequence
  Oligonucleotide for detection of SNP TSC0004661
aaatatctccctt

SEQ ID NO: 184927 - DNA, 13 bp, Artificial Sequence
  Oligonucleotide for detection of SNP TSC0045610
aaatgtgtattta

SEQ ID NO: 184928 - DNA, 13 bp, Artificial Sequence
  Oligonucleotide for detection of SNP TSC0045610
taaatacacattt

SEQ ID NO: 184929 - DNA, 13 bp, Artificial Sequence
  Oligonucleotide for detection of SNP TSC0045610
aaatgcgtattta

SEQ ID NO: 184930 - DNA, 13 bp, Artificial Sequence
  Oligonucleotide for detection of SNP TSC0045610
taaatacgcattt

SEQ ID NO: 184931 - DNA, 13 bp, Artificial Sequence
  Oligonucleotide for detection of SNP TSC0045610
taaataagtattt

SEQ ID NO: 184932 - DNA, 13 bp, Artificial Sequence
  Oligonucleotide for detection of SNP TSC0045610
aaatacttattta

SEQ ID NO: 184933 - DNA, 13 bp, Artificial Sequence
  Oligonucleotide for detection of SNP TSC0045612
gagataaagaatg

SEQ ID NO: 184934 - DNA, 13 bp, Artificial Sequence
  Oligonucleotide for detection of SNP TSC0045612
cattctttatctc

SEQ ID NO: 184935 - DNA, 13 bp, Artificial Sequence
  Oligonucleotide for detection of SNP TSC0045612
gagatagagaatg

SEQ ID NO: 184936 - DNA, 13 bp, Artificial Sequence
  Oligonucleotide for detection of SNP TSC0045612
cattctctatctc

SEQ ID NO: 184937 - DNA, 13 bp, Artificial Sequence
  Oligonucleotide for detection of SNP TSC0045613
gtttacgtaaaat

SEQ ID NO: 184938 - DNA, 13 bp, Artificial Sequence
  Oligonucleotide for detection of SNP TSC0045613
attttacgtaaac

SEQ ID NO: 184939 - DNA, 13 bp, Artificial Sequence
  Oligonucleotide for detection of SNP TSC0045613
attttgggtgaay

SEQ ID NO: 184940 - DNA, 13 bp, Artificial Sequence
  Oligonucleotide for detection of SNP TSC0045613
rttcacccaaaat

SEQ ID NO: 184941 - DNA, 13 bp, Artificial Sequence
  Oligonucleotide for detection of SNP TSC0045613
attttgtgtgaay

SEQ ID NO: 184942 - DNA, 13 bp, Artificial Sequence
  Oligonucleotide for detection of SNP TSC0045613
rttcacacaaaat

SEQ ID NO: 184943 - DNA, 13 bp, Artificial Sequence
  Oligonucleotide for detection of SNP TSC0045613
attttgcgtgaay

SEQ ID NO: 184944 - DNA, 13 bp, Artificial Sequence
  Oligonucleotide for detection of SNP TSC0045613
rttcacgcaaaat

SEQ ID NO: 184945 - DNA, 13 bp, Artificial Sequence
  Oligonucleotide for detection of SNP TSC0045615
aaaagaaaaaagg

SEQ ID NO: 184946 - DNA, 13 bp, Artificial Sequence
  Oligonucleotide for detection of SNP TSC0045615
ccttttttctttt

SEQ ID NO: 184947 - DNA, 13 bp, Artificial Sequence
  Oligonucleotide for detection of SNP TSC0045615
aaaagagaaaagg

SEQ ID NO: 184948 - DNA, 13 bp, Artificial Sequence
  Oligonucleotide for detection of SNP TSC0045615
ccttttctctttt

SEQ ID NO: 184949 - DNA, 13 bp, Artificial Sequence
  Oligonucleotide for detection of SNP TSC0045616
ttaagaaagtaat

SEQ ID NO: 184950 - DNA, 13 bp, Artificial Sequence
  Oligonucleotide for detection of SNP TSC0045616
attactttcttaa

SEQ ID NO: 184951 - DNA, 13 bp, Artificial Sequence
  Oligonucleotide for detection of SNP TSC0045616
ttaagatagtaat

SEQ ID NO: 184952 - DNA, 13 bp, Artificial Sequence
  Oligonucleotide for detection of SNP TSC0045616
attactatcttaa

SEQ ID NO: 184953 - DNA, 13 bp, Artificial Sequence
  Oligonucleotide for detection of SNP TSC0045619
ttgttgatttggt

SEQ ID NO: 184954 - DNA, 13 bp, Artificial Sequence
  Oligonucleotide for detection of SNP TSC0045619
accaaatcaacaa

SEQ ID NO: 184955 - DNA, 13 bp, Artificial Sequence
  Oligonucleotide for detection of SNP TSC0045619
ttgttggtttggt

SEQ ID NO: 184956 - DNA, 13 bp, Artificial Sequence
  Oligonucleotide for detection of SNP TSC0045619
accaaaccaacaa

SEQ ID NO: 184957 - DNA, 13 bp, Artificial Sequence
  Oligonucleotide for detection of SNP TSC0045620
tatttatgaattt

SEQ ID NO: 184958 - DNA, 13 bp, Artificial Sequence
  Oligonucleotide for detection of SNP TSC0045620
aaattcataaata

SEQ ID NO: 184959 - DNA, 13 bp, Artificial Sequence
  Oligonucleotide for detection of SNP TSC0045620
tatttaggaattt

SEQ ID NO: 184960 - DNA, 13 bp, Artificial Sequence
  Oligonucleotide for detection of SNP TSC0045620
aaattcctaaata

SEQ ID NO: 184961 - DNA, 13 bp, Artificial Sequence
  Oligonucleotide for detection of SNP TSC0045620
aaatttataagtg

SEQ ID NO: 184962 - DNA, 13 bp, Artificial Sequence
  Oligonucleotide for detection of SNP TSC0045620
cacttataaattt

SEQ ID NO: 184963 - DNA, 13 bp, Artificial Sequence
  Oligonucleotide for detection of SNP TSC0045620
aaatttttaagtg

SEQ ID NO: 184964 - DNA, 13 bp, Artificial Sequence
  Oligonucleotide for detection of SNP TSC0045620
cacttaaaaattt

SEQ ID NO: 184965 - DNA, 13 bp, Artificial Sequence
  Oligonucleotide for detection of SNP TSC0045621
ggtattttggtty

SEQ ID NO: 184966 - DNA, 13 bp, Artificial Sequence
  Oligonucleotide for detection of SNP TSC0045621
raaccaaaatacc

SEQ ID NO: 184967 - DNA, 13 bp, Artificial Sequence
  Oligonucleotide for detection of SNP TSC0045621
ggtattgtggtty

SEQ ID NO: 184968 - DNA, 13 bp, Artificial Sequence
  Oligonucleotide for detection of SNP TSC0045621
raaccacaatacc

SEQ ID NO: 184969 - DNA, 13 bp, Artificial Sequence
  Oligonucleotide for detection of SNP TSC0045621
ggtatcgtggtty

SEQ ID NO: 184970 - DNA, 13 bp, Artificial Sequence
  Oligonucleotide for detection of SNP TSC0045621
raaccacgatacc

SEQ ID NO: 184971 - DNA, 13 bp, Artificial Sequence
  Oligonucleotide for detection of SNP TSC0045621
gagttaaggtgty

SEQ ID NO: 184972 - DNA, 13 bp, Artificial Sequence
  Oligonucleotide for detection of SNP TSC0045621
racaccttaactc

SEQ ID NO: 184973 - DNA, 13 bp, Artificial Sequence
  Oligonucleotide for detection of SNP TSC0045621
gagttatggtgty

SEQ ID NO: 184974 - DNA, 13 bp, Artificial Sequence
  Oligonucleotide for detection of SNP TSC0045621
racaccataactc

SEQ ID NO: 184975 - DNA, 13 bp, Artificial Sequence
  Oligonucleotide for detection of SNP TSC0045621
gagttacggtgty

SEQ ID NO: 184976 - DNA, 13 bp, Artificial Sequence
  Oligonucleotide for detection of SNP TSC0045621
racaccgtaactc

SEQ ID NO: 184977 - DNA, 13 bp, Artificial Sequence
  Oligonucleotide for detection of SNP TSC0045622
atgttgagtattg

SEQ ID NO: 184978 - DNA, 13 bp, Artificial Sequence
  Oligonucleotide for detection of SNP TSC0045622
caatactcaacat

SEQ ID NO: 184979 - DNA, 13 bp, Artificial Sequence
  Oligonucleotide for detection of SNP TSC0045622
atgttgggtattg

SEQ ID NO: 184980 - DNA, 13 bp, Artificial Sequence
  Oligonucleotide for detection of SNP TSC0045622
caatacccaacat

SEQ ID NO: 184981 - DNA, 13 bp, Artificial Sequence
  Oligonucleotide for detection of SNP TSC0045624
tattaagttatty

SEQ ID NO: 184982 - DNA, 13 bp, Artificial Sequence
  Oligonucleotide for detection of SNP TSC0045624
raataacttaata

SEQ ID NO: 184983 - DNA, 13 bp, Artificial Sequence
  Oligonucleotide for detection of SNP TSC0045624
tattaaattatty

SEQ ID NO: 184984 - DNA, 13 bp, Artificial Sequence
  Oligonucleotide for detection of SNP TSC0045624
raataatttaata

SEQ ID NO: 184985 - DNA, 13 bp, Artificial Sequence
  Oligonucleotide for detection of SNP TSC0045627
tattatgattaag

SEQ ID NO: 184986 - DNA, 13 bp, Artificial Sequence
  Oligonucleotide for detection of SNP TSC0045627
cttaatcataata

SEQ ID NO: 184987 - DNA, 13 bp, Artificial Sequence
  Oligonucleotide for detection of SNP TSC0045627
tattataattaag

SEQ ID NO: 184988 - DNA, 13 bp, Artificial Sequence
  Oligonucleotide for detection of SNP TSC0045627
cttaattataata

SEQ ID NO: 184989 - DNA, 13 bp, Artificial Sequence
  Oligonucleotide for detection of SNP TSC0045627
tattacgattaag

SEQ ID NO: 184990 - DNA, 13 bp, Artificial Sequence
  Oligonucleotide for detection of SNP TSC0045627
cttaatcgtaata

SEQ ID NO: 184991 - DNA, 13 bp, Artificial Sequence
  Oligonucleotide for detection of SNP TSC0045628
tgtattattttty

SEQ ID NO: 184992 - DNA, 13 bp, Artificial Sequence
  Oligonucleotide for detection of SNP TSC0045628
raaaaataataca

SEQ ID NO: 184993 - DNA, 13 bp, Artificial Sequence
  Oligonucleotide for detection of SNP TSC0045629
atttatggtatgg

SEQ ID NO: 184994 - DNA, 13 bp, Artificial Sequence
  Oligonucleotide for detection of SNP TSC0045629
ccataccataaat

SEQ ID NO: 184995 - DNA, 13 bp, Artificial Sequence
  Oligonucleotide for detection of SNP TSC0045629
atttatagtatgg

SEQ ID NO: 184996 - DNA, 13 bp, Artificial Sequence
  Oligonucleotide for detection of SNP TSC0045629
ccatactataaat

SEQ ID NO: 184997 - DNA, 13 bp, Artificial Sequence
  Oligonucleotide for detection of SNP TSC0045629
atttatggtacgg

SEQ ID NO: 184998 - DNA, 13 bp, Artificial Sequence
  Oligonucleotide for detection of SNP TSC0045629
ccgtaccataaat

SEQ ID NO: 184999 - DNA, 13 bp, Artificial Sequence
  Oligonucleotide for detection of SNP TSC0045629
atttatagtacgg

SEQ ID NO: 185000 - DNA, 13 bp, Artificial Sequence
  Oligonucleotide for detection of SNP TSC0045629
ccgtactataaat

SEQ ID NO: 185001 - DNA, 13 bp, Artificial Sequence
  Oligonucleotide for detection of SNP TSC0045630
gttggttttgaay

SEQ ID NO: 185002 - DNA, 13 bp, Artificial Sequence
  Oligonucleotide for detection of SNP TSC0045630
rttcaaaaccaac

SEQ ID NO: 185003 - DNA, 13 bp, Artificial Sequence
  Oligonucleotide for detection of SNP TSC0045630
gttggtttcgaay

SEQ ID NO: 185004 - DNA, 13 bp, Artificial Sequence
  Oligonucleotide for detection of SNP TSC0045630
rttcgaaaccaac

SEQ ID NO: 185005 - DNA, 13 bp, Artificial Sequence
  Oligonucleotide for detection of SNP TSC0045631
taatttaagatta

SEQ ID NO: 185006 - DNA, 13 bp, Artificial Sequence
  Oligonucleotide for detection of SNP TSC0045631
taatcttaaatta

SEQ ID NO: 185007 - DNA, 13 bp, Artificial Sequence
  Oligonucleotide for detection of SNP TSC0045631
taatttgagatta

SEQ ID NO: 185008 - DNA, 13 bp, Artificial Sequence
  Oligonucleotide for detection of SNP TSC0045631
taatctcaaatta

SEQ ID NO: 185009 - DNA, 13 bp, Artificial Sequence
  Oligonucleotide for detection of SNP TSC0045631
taattcgagatta

SEQ ID NO: 185010 - DNA, 13 bp, Artificial Sequence
  Oligonucleotide for detection of SNP TSC0045631
taatctcgaatta

SEQ ID NO: 185011 - DNA, 13 bp, Artificial Sequence
  Oligonucleotide for detection of SNP TSC0045631
taattttgaatta

SEQ ID NO: 185012 - DNA, 13 bp, Artificial Sequence
  Oligonucleotide for detection of SNP TSC0045631
taattcaaaatta

SEQ ID NO: 185013 - DNA, 13 bp, Artificial Sequence
  Oligonucleotide for detection of SNP TSC0045631
taatttcgaatta

SEQ ID NO: 185014 - DNA, 13 bp, Artificial Sequence
  Oligonucleotide for detection of SNP TSC0045631
taattcgaaatta

SEQ ID NO: 185015 - DNA, 13 bp, Artificial Sequence
  Oligonucleotide for detection of SNP TSC0045632
tgttaaattttta

SEQ ID NO: 185016 - DNA, 13 bp, Artificial Sequence
  Oligonucleotide for detection of SNP TSC0045632
taaaaatttaaca

SEQ ID NO: 185017 - DNA, 13 bp, Artificial Sequence
  Oligonucleotide for detection of SNP TSC0045632
tgttaatttttta

SEQ ID NO: 185018 - DNA, 13 bp, Artificial Sequence
  Oligonucleotide for detection of SNP TSC0045632
taaaaaattaaca

SEQ ID NO: 185019 - DNA, 13 bp, Artificial Sequence
  Oligonucleotide for detection of SNP TSC0045632
taaaaaattaata

SEQ ID NO: 185020 - DNA, 13 bp, Artificial Sequence
  Oligonucleotide for detection of SNP TSC0045632
tattaatttttta

SEQ ID NO: 185021 - DNA, 13 bp, Artificial Sequence
  Oligonucleotide for detection of SNP TSC0045633
agagattataagy

SEQ ID NO: 185022 - DNA, 13 bp, Artificial Sequence
  Oligonucleotide for detection of SNP TSC0045633
rcttataatctct

SEQ ID NO: 185023 - DNA, 13 bp, Artificial Sequence
  Oligonucleotide for detection of SNP TSC0045633
agagatgataagy

SEQ ID NO: 185024 - DNA, 13 bp, Artificial Sequence
  Oligonucleotide for detection of SNP TSC0045633
rcttatcatctct

SEQ ID NO: 185025 - DNA, 13 bp, Artificial Sequence
  Oligonucleotide for detection of SNP TSC0045633
agagacgataagy

SEQ ID NO: 185026 - DNA, 13 bp, Artificial Sequence
  Oligonucleotide for detection of SNP TSC0045633
rcttatcgtctct

SEQ ID NO: 185027 - DNA, 13 bp, Artificial Sequence
  Oligonucleotide for detection of SNP TSC0045634
tatattaaggaga

SEQ ID NO: 185028 - DNA, 13 bp, Artificial Sequence
  Oligonucleotide for detection of SNP TSC0045634
tctccttaatata

SEQ ID NO: 185029 - DNA, 13 bp, Artificial Sequence
  Oligonucleotide for detection of SNP TSC0045634
tatattgaggaga

SEQ ID NO: 185030 - DNA, 13 bp, Artificial Sequence
  Oligonucleotide for detection of SNP TSC0045634
tctcctcaatata

SEQ ID NO: 185031 - DNA, 13 bp, Artificial Sequence
  Oligonucleotide for detection of SNP TSC0045634
tatatcgaggaga

SEQ ID NO: 185032 - DNA, 13 bp, Artificial Sequence
  Oligonucleotide for detection of SNP TSC0045634
tctcctcgatata

SEQ ID NO: 185033 - DNA, 13 bp, Artificial Sequence
  Oligonucleotide for detection of SNP TSC0045634
tttttttgatgta

SEQ ID NO: 185034 - DNA, 13 bp, Artificial Sequence
  Oligonucleotide for detection of SNP TSC0045634
tacatcaaaaaaa

SEQ ID NO: 185035 - DNA, 13 bp, Artificial Sequence
  Oligonucleotide for detection of SNP TSC0045634
ttttttcgatgta

SEQ ID NO: 185036 - DNA, 13 bp, Artificial Sequence
  Oligonucleotide for detection of SNP TSC0045634
tacatcgaaaaaa

SEQ ID NO: 185037 - DNA, 13 bp, Artificial Sequence
  Oligonucleotide for detection of SNP TSC0045635
gtagaaagtagta

SEQ ID NO: 185038 - DNA, 13 bp, Artificial Sequence
  Oligonucleotide for detection of SNP TSC0045635
tactactttctac

SEQ ID NO: 185039 - DNA, 13 bp, Artificial Sequence
  Oligonucleotide for detection of SNP TSC0045635
gtagaaggtagta

SEQ ID NO: 185040 - DNA, 13 bp, Artificial Sequence
  Oligonucleotide for detection of SNP TSC0045635
tactaccttctac

SEQ ID NO: 185041 - DNA, 13 bp, Artificial Sequence
  Oligonucleotide for detection of SNP TSC0045636
tagttaaaattat

SEQ ID NO: 185042 - DNA, 13 bp, Artificial Sequence
  Oligonucleotide for detection of SNP TSC0045636
ataattttaacta

SEQ ID NO: 185043 - DNA, 13 bp, Artificial Sequence
  Oligonucleotide for detection of SNP TSC0045636
tagttagaattat

SEQ ID NO: 185044 - DNA, 13 bp, Artificial Sequence
  Oligonucleotide for detection of SNP TSC0045636
ataattctaacta

SEQ ID NO: 185045 - DNA, 13 bp, Artificial Sequence
  Oligonucleotide for detection of SNP TSC0045637
tgggtggaaatta

SEQ ID NO: 185046 - DNA, 13 bp, Artificial Sequence
  Oligonucleotide for detection of SNP TSC0045637
taatttccaccca

SEQ ID NO: 185047 - DNA, 13 bp, Artificial Sequence
  Oligonucleotide for detection of SNP TSC0045637
tgggtgaaaatta

SEQ ID NO: 185048 - DNA, 13 bp, Artificial Sequence
  Oligonucleotide for detection of SNP TSC0045637
taattttcaccca

SEQ ID NO: 185049 - DNA, 13 bp, Artificial Sequence
  Oligonucleotide for detection of SNP TSC0045638
gtatataaagtga

SEQ ID NO: 185050 - DNA, 13 bp, Artificial Sequence
  Oligonucleotide for detection of SNP TSC0045638
tcactttatatac

SEQ ID NO: 185051 - DNA, 13 bp, Artificial Sequence
  Oligonucleotide for detection of SNP TSC0045638
gtatatgaagtga

SEQ ID NO: 185052 - DNA, 13 bp, Artificial Sequence
  Oligonucleotide for detection of SNP TSC0045638
tcacttcatatac

SEQ ID NO: 185053 - DNA, 13 bp, Artificial Sequence
  Oligonucleotide for detection of SNP TSC0045641
agtagaattttty

SEQ ID NO: 185054 - DNA, 13 bp, Artificial Sequence
  Oligonucleotide for detection of SNP TSC0045641
raaaaattctact

SEQ ID NO: 185055 - DNA, 13 bp, Artificial Sequence
  Oligonucleotide for detection of SNP TSC0045641
agtagagttttty

SEQ ID NO: 185056 - DNA, 13 bp, Artificial Sequence
  Oligonucleotide for detection of SNP TSC0045641
raaaaactctact

SEQ ID NO: 185057 - DNA, 13 bp, Artificial Sequence
  Oligonucleotide for detection of SNP TSC0045643
ggggggtggttty

SEQ ID NO: 185058 - DNA, 13 bp, Artificial Sequence
  Oligonucleotide for detection of SNP TSC0045643
raaaccacccccc

SEQ ID NO: 185059 - DNA, 13 bp, Artificial Sequence
  Oligonucleotide for detection of SNP TSC0045643
gggggggggttty

SEQ ID NO: 185060 - DNA, 13 bp, Artificial Sequence
  Oligonucleotide for detection of SNP TSC0045643
raaaccccccccc

SEQ ID NO: 185061 - DNA, 13 bp, Artificial Sequence
  Oligonucleotide for detection of SNP TSC0006990
aaattggaattty

SEQ ID NO: 185062 - DNA, 13 bp, Artificial Sequence
  Oligonucleotide for detection of SNP TSC0006990
raaattccaattt

SEQ ID NO: 185063 - DNA, 13 bp, Artificial Sequence
  Oligonucleotide for detection of SNP TSC0006990
aaattgaaattty

SEQ ID NO: 185064 - DNA, 13 bp, Artificial Sequence
  Oligonucleotide for detection of SNP TSC0006990
raaatttcaattt

SEQ ID NO: 185065 - DNA, 13 bp, Artificial Sequence
  Oligonucleotide for detection of SNP TSC0006991
aaattaattaaat

SEQ ID NO: 185066 - DNA, 13 bp, Artificial Sequence
  Oligonucleotide for detection of SNP TSC0006991
atttaattaattt

SEQ ID NO: 185067 - DNA, 13 bp, Artificial Sequence
  Oligonucleotide for detection of SNP TSC0006992
gatggatggagaa

SEQ ID NO: 185068 - DNA, 13 bp, Artificial Sequence
  Oligonucleotide for detection of SNP TSC0006992
ttctccatccatc

SEQ ID NO: 185069 - DNA, 13 bp, Artificial Sequence
  Oligonucleotide for detection of SNP TSC0006992
gatggacggagaa

SEQ ID NO: 185070 - DNA, 13 bp, Artificial Sequence
  Oligonucleotide for detection of SNP TSC0006992
ttctccgtccatc

SEQ ID NO: 185071 - DNA, 13 bp, Artificial Sequence
  Oligonucleotide for detection of SNP TSC0045644
aagaatgtgtgtt

SEQ ID NO: 185072 - DNA, 13 bp, Artificial Sequence
  Oligonucleotide for detection of SNP TSC0045644
aacacacattctt

SEQ ID NO: 185073 - DNA, 13 bp, Artificial Sequence
  Oligonucleotide for detection of SNP TSC0045644
aagaatatgtgtt

SEQ ID NO: 185074 - DNA, 13 bp, Artificial Sequence
  Oligonucleotide for detection of SNP TSC0045644
aacacatattctt

SEQ ID NO: 185075 - DNA, 13 bp, Artificial Sequence
  Oligonucleotide for detection of SNP TSC0010668
ttataaaattttt

SEQ ID NO: 185076 - DNA, 13 bp, Artificial Sequence
  Oligonucleotide for detection of SNP TSC0010668
aaaaattttataa

SEQ ID NO: 185077 - DNA, 13 bp, Artificial Sequence
  Oligonucleotide for detection of SNP TSC0010668
ttataatattttt

SEQ ID NO: 185078 - DNA, 13 bp, Artificial Sequence
  Oligonucleotide for detection of SNP TSC0010668
aaaaatattataa

SEQ ID NO: 185079 - DNA, 13 bp, Artificial Sequence
  Oligonucleotide for detection of SNP TSC0010668
aaaagtgttatag

SEQ ID NO: 185080 - DNA, 13 bp, Artificial Sequence
  Oligonucleotide for detection of SNP TSC0010668
ctataacactttt

SEQ ID NO: 185081 - DNA, 13 bp, Artificial Sequence
  Oligonucleotide for detection of SNP TSC0045646
aatttagatattt

SEQ ID NO: 185082 - DNA, 13 bp, Artificial Sequence
  Oligonucleotide for detection of SNP TSC0045646
aaatatctaaatt

SEQ ID NO: 185083 - DNA, 13 bp, Artificial Sequence
  Oligonucleotide for detection of SNP TSC0045647
gttaatatttgga

SEQ ID NO: 185084 - DNA, 13 bp, Artificial Sequence
  Oligonucleotide for detection of SNP TSC0045647
tccaaatattaac

SEQ ID NO: 185085 - DNA, 13 bp, Artificial Sequence
  Oligonucleotide for detection of SNP TSC0045647
gttaatttttgga

SEQ ID NO: 185086 - DNA, 13 bp, Artificial Sequence
  Oligonucleotide for detection of SNP TSC0045647
tccaaaaattaac

SEQ ID NO: 185087 - DNA, 13 bp, Artificial Sequence
  Oligonucleotide for detection of SNP TSC0045647
tttaggtgttggy

SEQ ID NO: 185088 - DNA, 13 bp, Artificial Sequence
  Oligonucleotide for detection of SNP TSC0045647
rccaacacctaaa

SEQ ID NO: 185089 - DNA, 13 bp, Artificial Sequence
  Oligonucleotide for detection of SNP TSC0045647
tttaggggttggy

SEQ ID NO: 185090 - DNA, 13 bp, Artificial Sequence
  Oligonucleotide for detection of SNP TSC0045647
rccaacccctaaa

SEQ ID NO: 185091 - DNA, 13 bp, Artificial Sequence
  Oligonucleotide for detection of SNP TSC0010289
aaataggaattaa

SEQ ID NO: 185092 - DNA, 13 bp, Artificial Sequence
  Oligonucleotide for detection of SNP TSC0010289
ttaattcctattt

SEQ ID NO: 185093 - DNA, 13 bp, Artificial Sequence
  Oligonucleotide for detection of SNP TSC0010289
aaatagaaattaa

SEQ ID NO: 185094 - DNA, 13 bp, Artificial Sequence
  Oligonucleotide for detection of SNP TSC0010289
ttaatttctattt

SEQ ID NO: 185095 - DNA, 13 bp, Artificial Sequence
  Oligonucleotide for detection of SNP TSC0045650
atagggatattag

SEQ ID NO: 185096 - DNA, 13 bp, Artificial Sequence
  Oligonucleotide for detection of SNP TSC0045650
ctaatatccctat

SEQ ID NO: 185097 - DNA, 13 bp, Artificial Sequence
  Oligonucleotide for detection of SNP TSC0045650
ataggggtattag

SEQ ID NO: 185098 - DNA, 13 bp, Artificial Sequence
  Oligonucleotide for detection of SNP TSC0045650
ctaatacccctat

SEQ ID NO: 185099 - DNA, 13 bp, Artificial Sequence
  Oligonucleotide for detection of SNP TSC0045651
ttttttaggatty

SEQ ID NO: 185100 - DNA, 13 bp, Artificial Sequence
  Oligonucleotide for detection of SNP TSC0045651
raatcctaaaaaa

SEQ ID NO: 185101 - DNA, 13 bp, Artificial Sequence
  Oligonucleotide for detection of SNP TSC0045651
ttttttgggatty

SEQ ID NO: 185102 - DNA, 13 bp, Artificial Sequence
  Oligonucleotide for detection of SNP TSC0045651
raatcccaaaaaa

SEQ ID NO: 185103 - DNA, 13 bp, Artificial Sequence
  Oligonucleotide for detection of SNP TSC0045651
tttttcgggatty

SEQ ID NO: 185104 - DNA, 13 bp, Artificial Sequence
  Oligonucleotide for detection of SNP TSC0045651
raatcccgaaaaa

SEQ ID NO: 185105 - DNA, 13 bp, Artificial Sequence
  Oligonucleotide for detection of SNP TSC0045651
ggattttggagga

SEQ ID NO: 185106 - DNA, 13 bp, Artificial Sequence
  Oligonucleotide for detection of SNP TSC0045651
tcctccaaaatcc

SEQ ID NO: 185107 - DNA, 13 bp, Artificial Sequence
  Oligonucleotide for detection of SNP TSC0045651
ggatttcggagga

SEQ ID NO: 185108 - DNA, 13 bp, Artificial Sequence
  Oligonucleotide for detection of SNP TSC0045651
tcctccgaaatcc

SEQ ID NO: 185109 - DNA, 13 bp, Artificial Sequence
  Oligonucleotide for detection of SNP TSC0045652
atttagttattta

SEQ ID NO: 185110 - DNA, 13 bp, Artificial Sequence
  Oligonucleotide for detection of SNP TSC0045652
taaataactaaat

SEQ ID NO: 185111 - DNA, 13 bp, Artificial Sequence
  Oligonucleotide for detection of SNP TSC0045652
atttaggtattta

SEQ ID NO: 185112 - DNA, 13 bp, Artificial Sequence
  Oligonucleotide for detection of SNP TSC0045652
taaatacctaaat

SEQ ID NO: 185113 - DNA, 13 bp, Artificial Sequence
  Oligonucleotide for detection of SNP TSC0045652
tagataattgaat

SEQ ID NO: 185114 - DNA, 13 bp, Artificial Sequence
  Oligonucleotide for detection of SNP TSC0045652
attcaattatcta

SEQ ID NO: 185115 - DNA, 13 bp, Artificial Sequence
  Oligonucleotide for detection of SNP TSC0045652
tagatatttgaat

SEQ ID NO: 185116 - DNA, 13 bp, Artificial Sequence
  Oligonucleotide for detection of SNP TSC0045652
attcaaatatcta

SEQ ID NO: 185117 - DNA, 13 bp, Artificial Sequence
  Oligonucleotide for detection of SNP TSC0045653
taggttgtttttt

SEQ ID NO: 185118 - DNA, 13 bp, Artificial Sequence
  Oligonucleotide for detection of SNP TSC0045653
aaaaaacaaccta

SEQ ID NO: 185119 - DNA, 13 bp, Artificial Sequence
  Oligonucleotide for detection of SNP TSC0045653
taggttatttttt

SEQ ID NO: 185120 - DNA, 13 bp, Artificial Sequence
  Oligonucleotide for detection of SNP TSC0045653
aaaaaataaccta

SEQ ID NO: 185121 - DNA, 13 bp, Artificial Sequence
  Oligonucleotide for detection of SNP TSC0045655
tgattttggtgtt

SEQ ID NO: 185122 - DNA, 13 bp, Artificial Sequence
  Oligonucleotide for detection of SNP TSC0045655
aacaccaaaatca

SEQ ID NO: 185123 - DNA, 13 bp, Artificial Sequence
  Oligonucleotide for detection of SNP TSC0045655
tgatttcggtgtt

SEQ ID NO: 185124 - DNA, 13 bp, Artificial Sequence
  Oligonucleotide for detection of SNP TSC0045655
aacaccgaaatca

SEQ ID NO: 185125 - DNA, 13 bp, Artificial Sequence
  Oligonucleotide for detection of SNP TSC0045655
aatattgaagtta

SEQ ID NO: 185126 - DNA, 13 bp, Artificial Sequence
  Oligonucleotide for detection of SNP TSC0045655
taacttcaatatt

SEQ ID NO: 185127 - DNA, 13 bp, Artificial Sequence
  Oligonucleotide for detection of SNP TSC0045655
aatattaaagtta

SEQ ID NO: 185128 - DNA, 13 bp, Artificial Sequence
  Oligonucleotide for detection of SNP TSC0045655
taactttaatatt

SEQ ID NO: 185129 - DNA, 13 bp, Artificial Sequence
  Oligonucleotide for detection of SNP TSC0045655
aatatcgaagtta

SEQ ID NO: 185130 - DNA, 13 bp, Artificial Sequence
  Oligonucleotide for detection of SNP TSC0045655
taacttcgatatt

SEQ ID NO: 185131 - DNA, 13 bp, Artificial Sequence
  Oligonucleotide for detection of SNP TSC0045656
ggtttaggtagay

SEQ ID NO: 185132 - DNA, 13 bp, Artificial Sequence
  Oligonucleotide for detection of SNP TSC0045656
rtctacctaaacc

SEQ ID NO: 185133 - DNA, 13 bp, Artificial Sequence
  Oligonucleotide for detection of SNP TSC0045656
ggtttaagtagay

SEQ ID NO: 185134 - DNA, 13 bp, Artificial Sequence
  Oligonucleotide for detection of SNP TSC0045656
rtctacttaaacc

SEQ ID NO: 185135 - DNA, 13 bp, Artificial Sequence
  Oligonucleotide for detection of SNP TSC0045657
gggttaggaaatg

SEQ ID NO: 185136 - DNA, 13 bp, Artificial Sequence
  Oligonucleotide for detection of SNP TSC0045657
catttcctaaccc

SEQ ID NO: 185137 - DNA, 13 bp, Artificial Sequence
  Oligonucleotide for detection of SNP TSC0045657
gggttaagaaatg

SEQ ID NO: 185138 - DNA, 13 bp, Artificial Sequence
  Oligonucleotide for detection of SNP TSC0045657
catttcttaaccc

SEQ ID NO: 185139 - DNA, 13 bp, Artificial Sequence
  Oligonucleotide for detection of SNP TSC0045658
tgtaagtatttgt

SEQ ID NO: 185140 - DNA, 13 bp, Artificial Sequence
  Oligonucleotide for detection of SNP TSC0045658
acaaatacttaca

SEQ ID NO: 185141 - DNA, 13 bp, Artificial Sequence
  Oligonucleotide for detection of SNP TSC0045658
tgtaaggatttgt

SEQ ID NO: 185142 - DNA, 13 bp, Artificial Sequence
  Oligonucleotide for detection of SNP TSC0045658
acaaatccttaca

SEQ ID NO: 185143 - DNA, 13 bp, Artificial Sequence
  Oligonucleotide for detection of SNP TSC0045658
atagatgtttata

SEQ ID NO: 185144 - DNA, 13 bp, Artificial Sequence
  Oligonucleotide for detection of SNP TSC0045658
tataaacatctat

SEQ ID NO: 185145 - DNA, 13 bp, Artificial Sequence
  Oligonucleotide for detection of SNP TSC0045658
atagatttttata

SEQ ID NO: 185146 - DNA, 13 bp, Artificial Sequence
  Oligonucleotide for detection of SNP TSC0045658
tataaaaatctat

SEQ ID NO: 185147 - DNA, 13 bp, Artificial Sequence
  Oligonucleotide for detection of SNP TSC0045659
ttgtgtagtgatg

SEQ ID NO: 185148 - DNA, 13 bp, Artificial Sequence
  Oligonucleotide for detection of SNP TSC0045659
catcactacacaa

SEQ ID NO: 185149 - DNA, 13 bp, Artificial Sequence
  Oligonucleotide for detection of SNP TSC0045659
ttgtgtggtgatg

SEQ ID NO: 185150 - DNA, 13 bp, Artificial Sequence
  Oligonucleotide for detection of SNP TSC0045659
catcaccacacaa

SEQ ID NO: 185151 - DNA, 13 bp, Artificial Sequence
  Oligonucleotide for detection of SNP TSC0045659
ttgtgtagtgacg

SEQ ID NO: 185152 - DNA, 13 bp, Artificial Sequence
  Oligonucleotide for detection of SNP TSC0045659
cgtcactacacaa

SEQ ID NO: 185153 - DNA, 13 bp, Artificial Sequence
  Oligonucleotide for detection of SNP TSC0045659
ttgtgcggtgatg

SEQ ID NO: 185154 - DNA, 13 bp, Artificial Sequence
  Oligonucleotide for detection of SNP TSC0045659
catcaccgcacaa

SEQ ID NO: 185155 - DNA, 13 bp, Artificial Sequence
  Oligonucleotide for detection of SNP TSC0045659
ttgtgtggtgacg

SEQ ID NO: 185156 - DNA, 13 bp, Artificial Sequence
  Oligonucleotide for detection of SNP TSC0045659
cgtcaccacacaa

SEQ ID NO: 185157 - DNA, 13 bp, Artificial Sequence
  Oligonucleotide for detection of SNP TSC0045659
ttgtgcggtgacg

SEQ ID NO: 185158 - DNA, 13 bp, Artificial Sequence
  Oligonucleotide for detection of SNP TSC0045659
cgtcaccgcacaa

SEQ ID NO: 185159 - DNA, 13 bp, Artificial Sequence
  Oligonucleotide for detection of SNP TSC0045659
tgttattgtataa

SEQ ID NO: 185160 - DNA, 13 bp, Artificial Sequence
  Oligonucleotide for detection of SNP TSC0045659
ttatacaataaca

SEQ ID NO: 185161 - DNA, 13 bp, Artificial Sequence
  Oligonucleotide for detection of SNP TSC0045659
cgttattgtataa

SEQ ID NO: 185162 - DNA, 13 bp, Artificial Sequence
  Oligonucleotide for detection of SNP TSC0045659
ttatacaataacg

SEQ ID NO: 185163 - DNA, 13 bp, Artificial Sequence
  Oligonucleotide for detection of SNP TSC0045659
tgttatcgtataa

SEQ ID NO: 185164 - DNA, 13 bp, Artificial Sequence
  Oligonucleotide for detection of SNP TSC0045659
ttatacgataaca

SEQ ID NO: 185165 - DNA, 13 bp, Artificial Sequence
  Oligonucleotide for detection of SNP TSC0045659
cgttatcgtataa

SEQ ID NO: 185166 - DNA, 13 bp, Artificial Sequence
  Oligonucleotide for detection of SNP TSC0045659
ttatacgataacg

SEQ ID NO: 185167 - DNA, 13 bp, Artificial Sequence
  Oligonucleotide for detection of SNP TSC0045660
taatttatttgag

SEQ ID NO: 185168 - DNA, 13 bp, Artificial Sequence
  Oligonucleotide for detection of SNP TSC0045660
ctcaaataaatta

SEQ ID NO: 185169 - DNA, 13 bp, Artificial Sequence
  Oligonucleotide for detection of SNP TSC0045660
taatttttttgag

SEQ ID NO: 185170 - DNA, 13 bp, Artificial Sequence
  Oligonucleotide for detection of SNP TSC0045660
ctcaaaaaaatta

SEQ ID NO: 185171 - DNA, 13 bp, Artificial Sequence
  Oligonucleotide for detection of SNP TSC0045660
tttaaataaatta

SEQ ID NO: 185172 - DNA, 13 bp, Artificial Sequence
  Oligonucleotide for detection of SNP TSC0045660
taatttatttaaa

SEQ ID NO: 185173 - DNA, 13 bp, Artificial Sequence
  Oligonucleotide for detection of SNP TSC0045660
tttaaagaaatta

SEQ ID NO: 185174 - DNA, 13 bp, Artificial Sequence
  Oligonucleotide for detection of SNP TSC0045660
taatttctttaaa

SEQ ID NO: 185175 - DNA, 13 bp, Artificial Sequence
  Oligonucleotide for detection of SNP TSC0045661
agtttatgttaag

SEQ ID NO: 185176 - DNA, 13 bp, Artificial Sequence
  Oligonucleotide for detection of SNP TSC0045661
cttaacataaact

SEQ ID NO: 185177 - DNA, 13 bp, Artificial Sequence
  Oligonucleotide for detection of SNP TSC0045661
agtttacgttaag

SEQ ID NO: 185178 - DNA, 13 bp, Artificial Sequence
  Oligonucleotide for detection of SNP TSC0045661
cttaacgtaaact

SEQ ID NO: 185179 - DNA, 13 bp, Artificial Sequence
  Oligonucleotide for detection of SNP TSC0045662
gaaatttgtttty

SEQ ID NO: 185180 - DNA, 13 bp, Artificial Sequence
  Oligonucleotide for detection of SNP TSC0045662
raaaacaaatttc

SEQ ID NO: 185181 - DNA, 13 bp, Artificial Sequence
  Oligonucleotide for detection of SNP TSC0045662
gaaattcgtttty

SEQ ID NO: 185182 - DNA, 13 bp, Artificial Sequence
  Oligonucleotide for detection of SNP TSC0045662
raaaacgaatttc

SEQ ID NO: 185183 - DNA, 13 bp, Artificial Sequence
  Oligonucleotide for detection of SNP TSC0045662
ggggatggattty

SEQ ID NO: 185184 - DNA, 13 bp, Artificial Sequence
  Oligonucleotide for detection of SNP TSC0045662
raaatccatcccc

SEQ ID NO: 185185 - DNA, 13 bp, Artificial Sequence
  Oligonucleotide for detection of SNP TSC0045662
ggggatagattty

SEQ ID NO: 185186 - DNA, 13 bp, Artificial Sequence
  Oligonucleotide for detection of SNP TSC0045662
raaatctatcccc

SEQ ID NO: 185187 - DNA, 13 bp, Artificial Sequence
  Oligonucleotide for detection of SNP TSC0045662
ggggacggattty

SEQ ID NO: 185188 - DNA, 13 bp, Artificial Sequence
  Oligonucleotide for detection of SNP TSC0045662
raaatccgtcccc

SEQ ID NO: 185189 - DNA, 13 bp, Artificial Sequence
  Oligonucleotide for detection of SNP TSC0045663
tggagtagtggty

SEQ ID NO: 185190 - DNA, 13 bp, Artificial Sequence
  Oligonucleotide for detection of SNP TSC0045663
raccactactcca

SEQ ID NO: 185191 - DNA, 13 bp, Artificial Sequence
  Oligonucleotide for detection of SNP TSC0045663
tggagttgtggty

SEQ ID NO: 185192 - DNA, 13 bp, Artificial Sequence
  Oligonucleotide for detection of SNP TSC0045663
raccacaactcca

SEQ ID NO: 185193 - DNA, 13 bp, Artificial Sequence
  Oligonucleotide for detection of SNP TSC0045663
gattattgtttta

SEQ ID NO: 185194 - DNA, 13 bp, Artificial Sequence
  Oligonucleotide for detection of SNP TSC0045663
taaaacaataatc

SEQ ID NO: 185195 - DNA, 13 bp, Artificial Sequence
  Oligonucleotide for detection of SNP TSC0045664
tattttgttattt

SEQ ID NO: 185196 - DNA, 13 bp, Artificial Sequence
  Oligonucleotide for detection of SNP TSC0045664
aaataacaaaata

SEQ ID NO: 185197 - DNA, 13 bp, Artificial Sequence
  Oligonucleotide for detection of SNP TSC0045666
tgtattgtttata

SEQ ID NO: 185198 - DNA, 13 bp, Artificial Sequence
  Oligonucleotide for detection of SNP TSC0045666
tataaacaataca

SEQ ID NO: 185199 - DNA, 13 bp, Artificial Sequence
  Oligonucleotide for detection of SNP TSC0045666
tgtattatttata

SEQ ID NO: 185200 - DNA, 13 bp, Artificial Sequence
  Oligonucleotide for detection of SNP TSC0045666
tataaataataca

SEQ ID NO: 185201 - DNA, 13 bp, Artificial Sequence
  Oligonucleotide for detection of SNP TSC0045668
tcgtttaaattta

SEQ ID NO: 185202 - DNA, 13 bp, Artificial Sequence
  Oligonucleotide for detection of SNP TSC0045668
taaatttaaacga

SEQ ID NO: 185203 - DNA, 13 bp, Artificial Sequence
  Oligonucleotide for detection of SNP TSC0045668
tcgtttgaattta

SEQ ID NO: 185204 - DNA, 13 bp, Artificial Sequence
  Oligonucleotide for detection of SNP TSC0045668
taaattcaaacga

SEQ ID NO: 185205 - DNA, 13 bp, Artificial Sequence
  Oligonucleotide for detection of SNP TSC0006026
tgtttttgtttaa

SEQ ID NO: 185206 - DNA, 13 bp, Artificial Sequence
  Oligonucleotide for detection of SNP TSC0006026
ttaaacaaaaaca

SEQ ID NO: 185207 - DNA, 13 bp, Artificial Sequence
  Oligonucleotide for detection of SNP TSC0006026
tgttttggtttaa

SEQ ID NO: 185208 - DNA, 13 bp, Artificial Sequence
  Oligonucleotide for detection of SNP TSC0006026
ttaaaccaaaaca

SEQ ID NO: 185209 - DNA, 13 bp, Artificial Sequence
  Oligonucleotide for detection of SNP TSC0006026
tgttttcgtttaa

SEQ ID NO: 185210 - DNA, 13 bp, Artificial Sequence
  Oligonucleotide for detection of SNP TSC0006026
ttaaacgaaaaca

SEQ ID NO: 185211 - DNA, 13 bp, Artificial Sequence
  Oligonucleotide for detection of SNP TSC0006026
ttagatgagagta

SEQ ID NO: 185212 - DNA, 13 bp, Artificial Sequence
  Oligonucleotide for detection of SNP TSC0006026
tactctcatctaa

SEQ ID NO: 185213 - DNA, 13 bp, Artificial Sequence
  Oligonucleotide for detection of SNP TSC0006026
ttagattagagta

SEQ ID NO: 185214 - DNA, 13 bp, Artificial Sequence
  Oligonucleotide for detection of SNP TSC0006026
tactctaatctaa

SEQ ID NO: 185215 - DNA, 13 bp, Artificial Sequence
  Oligonucleotide for detection of SNP TSC0006026
ttagacgagagta

SEQ ID NO: 185216 - DNA, 13 bp, Artificial Sequence
  Oligonucleotide for detection of SNP TSC0006026
tactctcgtctaa

SEQ ID NO: 185217 - DNA, 13 bp, Artificial Sequence
  Oligonucleotide for detection of SNP TSC0045670
ggaaagcggttta

SEQ ID NO: 185218 - DNA, 13 bp, Artificial Sequence
  Oligonucleotide for detection of SNP TSC0045670
taaaccgctttcc

SEQ ID NO: 185219 - DNA, 13 bp, Artificial Sequence
  Oligonucleotide for detection of SNP TSC0045671
gatttaggaatty

SEQ ID NO: 185220 - DNA, 13 bp, Artificial Sequence
  Oligonucleotide for detection of SNP TSC0045671
raattcctaaatc

SEQ ID NO: 185221 - DNA, 13 bp, Artificial Sequence
  Oligonucleotide for detection of SNP TSC0045671
gatttaagaatty

SEQ ID NO: 185222 - DNA, 13 bp, Artificial Sequence
  Oligonucleotide for detection of SNP TSC0045671
raattcttaaatc

SEQ ID NO: 185223 - DNA, 13 bp, Artificial Sequence
  Oligonucleotide for detection of SNP TSC0045672
tggaattggttag

SEQ ID NO: 185224 - DNA, 13 bp, Artificial Sequence
  Oligonucleotide for detection of SNP TSC0045672
ctaaccaattcca

SEQ ID NO: 185225 - DNA, 13 bp, Artificial Sequence
  Oligonucleotide for detection of SNP TSC0045672
tggaatcggttag

SEQ ID NO: 185226 - DNA, 13 bp, Artificial Sequence
  Oligonucleotide for detection of SNP TSC0045672
ctaaccgattcca

SEQ ID NO: 185227 - DNA, 13 bp, Artificial Sequence
  Oligonucleotide for detection of SNP TSC0045672
ttggttggtttta

SEQ ID NO: 185228 - DNA, 13 bp, Artificial Sequence
  Oligonucleotide for detection of SNP TSC0045672
taaaaccaaccaa

SEQ ID NO: 185229 - DNA, 13 bp, Artificial Sequence
  Oligonucleotide for detection of SNP TSC0045672
ttggttagtttta

SEQ ID NO: 185230 - DNA, 13 bp, Artificial Sequence
  Oligonucleotide for detection of SNP TSC0045672
taaaactaaccaa

SEQ ID NO: 185231 - DNA, 13 bp, Artificial Sequence
  Oligonucleotide for detection of SNP TSC0045672
ttggtcggtttta

SEQ ID NO: 185232 - DNA, 13 bp, Artificial Sequence
  Oligonucleotide for detection of SNP TSC0045672
taaaaccgaccaa

SEQ ID NO: 185233 - DNA, 13 bp, Artificial Sequence
  Oligonucleotide for detection of SNP TSC0045676
atgtatattgtta

SEQ ID NO: 185234 - DNA, 13 bp, Artificial Sequence
  Oligonucleotide for detection of SNP TSC0045676
taacaatatacat

SEQ ID NO: 185235 - DNA, 13 bp, Artificial Sequence
  Oligonucleotide for detection of SNP TSC0045676
atgtatgttgtta

SEQ ID NO: 185236 - DNA, 13 bp, Artificial Sequence
  Oligonucleotide for detection of SNP TSC0045676
taacaacatacat

SEQ ID NO: 185237 - DNA, 13 bp, Artificial Sequence
  Oligonucleotide for detection of SNP TSC0045676
atgtacgttgtta

SEQ ID NO: 185238 - DNA, 13 bp, Artificial Sequence
  Oligonucleotide for detection of SNP TSC0045676
taacaacgtacat

SEQ ID NO: 185239 - DNA, 13 bp, Artificial Sequence
  Oligonucleotide for detection of SNP TSC0045676
tgataatgtatat

SEQ ID NO: 185240 - DNA, 13 bp, Artificial Sequence
  Oligonucleotide for detection of SNP TSC0045676
atatacattatca

SEQ ID NO: 185241 - DNA, 13 bp, Artificial Sequence
  Oligonucleotide for detection of SNP TSC0045676
tgataacgtatat

SEQ ID NO: 185242 - DNA, 13 bp, Artificial Sequence
  Oligonucleotide for detection of SNP TSC0045676
atatacgttatca

SEQ ID NO: 185243 - DNA, 13 bp, Artificial Sequence
  Oligonucleotide for detection of SNP TSC0045677
ttatattttgttt

SEQ ID NO: 185244 - DNA, 13 bp, Artificial Sequence
  Oligonucleotide for detection of SNP TSC0045677
aaacaaaatataa

SEQ ID NO: 185245 - DNA, 13 bp, Artificial Sequence
  Oligonucleotide for detection of SNP TSC0045677
aggtaaaatatgg

SEQ ID NO: 185246 - DNA, 13 bp, Artificial Sequence
  Oligonucleotide for detection of SNP TSC0045677
ccatattttacct

SEQ ID NO: 185247 - DNA, 13 bp, Artificial Sequence
  Oligonucleotide for detection of SNP TSC0045677
aggtaatatatgg

SEQ ID NO: 185248 - DNA, 13 bp, Artificial Sequence
  Oligonucleotide for detection of SNP TSC0045677
ccatatattacct

SEQ ID NO: 185249 - DNA, 13 bp, Artificial Sequence
  Oligonucleotide for detection of SNP TSC0045678
tagtagattgtgy

SEQ ID NO: 185250 - DNA, 13 bp, Artificial Sequence
  Oligonucleotide for detection of SNP TSC0045678
rcacaatctacta

SEQ ID NO: 185251 - DNA, 13 bp, Artificial Sequence
  Oligonucleotide for detection of SNP TSC0045679
ttaaattgttgtg

SEQ ID NO: 185252 - DNA, 13 bp, Artificial Sequence
  Oligonucleotide for detection of SNP TSC0045679
cacaacaatttaa

SEQ ID NO: 185253 - DNA, 13 bp, Artificial Sequence
  Oligonucleotide for detection of SNP TSC0045679
ttaaatggttgtg

SEQ ID NO: 185254 - DNA, 13 bp, Artificial Sequence
  Oligonucleotide for detection of SNP TSC0045679
cacaaccatttaa

SEQ ID NO: 185255 - DNA, 13 bp, Artificial Sequence
  Oligonucleotide for detection of SNP TSC0045683
tagggaaattgta

SEQ ID NO: 185256 - DNA, 13 bp, Artificial Sequence
  Oligonucleotide for detection of SNP TSC0045683
tacaatttcccta

SEQ ID NO: 185257 - DNA, 13 bp, Artificial Sequence
  Oligonucleotide for detection of SNP TSC0045683
tagggatattgta

SEQ ID NO: 185258 - DNA, 13 bp, Artificial Sequence
  Oligonucleotide for detection of SNP TSC0045683
tacaatatcccta

SEQ ID NO: 185259 - DNA, 13 bp, Artificial Sequence
  Oligonucleotide for detection of SNP TSC0045683
tgtagttttttta

SEQ ID NO: 185260 - DNA, 13 bp, Artificial Sequence
  Oligonucleotide for detection of SNP TSC0045683
taaaaaaactaca

SEQ ID NO: 185261 - DNA, 13 bp, Artificial Sequence
  Oligonucleotide for detection of SNP TSC0045683
tgtagtgttttta

SEQ ID NO: 185262 - DNA, 13 bp, Artificial Sequence
  Oligonucleotide for detection of SNP TSC0045683
taaaaacactaca

SEQ ID NO: 185263 - DNA, 13 bp, Artificial Sequence
  Oligonucleotide for detection of SNP TSC0001012
tgaaagttgaatg

SEQ ID NO: 185264 - DNA, 13 bp, Artificial Sequence
  Oligonucleotide for detection of SNP TSC0001012
cattcaactttca

SEQ ID NO: 185265 - DNA, 13 bp, Artificial Sequence
  Oligonucleotide for detection of SNP TSC0001012
tgaaaggtgaatg

SEQ ID NO: 185266 - DNA, 13 bp, Artificial Sequence
  Oligonucleotide for detection of SNP TSC0001012
cattcacctttca

SEQ ID NO: 185267 - DNA, 13 bp, Artificial Sequence
  Oligonucleotide for detection of SNP TSC0045687
gagttttatgttt

SEQ ID NO: 185268 - DNA, 13 bp, Artificial Sequence
  Oligonucleotide for detection of SNP TSC0045687
aaacataaaactc

SEQ ID NO: 185269 - DNA, 13 bp, Artificial Sequence
  Oligonucleotide for detection of SNP TSC0045687
gagtttgatgttt

SEQ ID NO: 185270 - DNA, 13 bp, Artificial Sequence
  Oligonucleotide for detection of SNP TSC0045687
aaacatcaaactc

SEQ ID NO: 185271 - DNA, 13 bp, Artificial Sequence
  Oligonucleotide for detection of SNP TSC0045687
aaatataagatty

SEQ ID NO: 185272 - DNA, 13 bp, Artificial Sequence
  Oligonucleotide for detection of SNP TSC0045687
raatcttatattt

SEQ ID NO: 185273 - DNA, 13 bp, Artificial Sequence
  Oligonucleotide for detection of SNP TSC0045687
aaatattagatty

SEQ ID NO: 185274 - DNA, 13 bp, Artificial Sequence
  Oligonucleotide for detection of SNP TSC0045687
raatctaatattt

SEQ ID NO: 185275 - DNA, 13 bp, Artificial Sequence
  Oligonucleotide for detection of SNP TSC0045688
tgatttatttagt

SEQ ID NO: 185276 - DNA, 13 bp, Artificial Sequence
  Oligonucleotide for detection of SNP TSC0045688
actaaataaatca

SEQ ID NO: 185277 - DNA, 13 bp, Artificial Sequence
  Oligonucleotide for detection of SNP TSC0045688
tgatttttttagt

SEQ ID NO: 185278 - DNA, 13 bp, Artificial Sequence
  Oligonucleotide for detection of SNP TSC0045688
actaaaaaaatca

SEQ ID NO: 185279 - DNA, 13 bp, Artificial Sequence
  Oligonucleotide for detection of SNP TSC0045688
attaaataaatta

SEQ ID NO: 185280 - DNA, 13 bp, Artificial Sequence
  Oligonucleotide for detection of SNP TSC0045688
taatttatttaat

SEQ ID NO: 185281 - DNA, 13 bp, Artificial Sequence
  Oligonucleotide for detection of SNP TSC0045688
attaaagaaatta

SEQ ID NO: 185282 - DNA, 13 bp, Artificial Sequence
  Oligonucleotide for detection of SNP TSC0045688
taatttctttaat

SEQ ID NO: 185283 - DNA, 13 bp, Artificial Sequence
  Oligonucleotide for detection of SNP TSC0045689
tatgtttgttaat

SEQ ID NO: 185284 - DNA, 13 bp, Artificial Sequence
  Oligonucleotide for detection of SNP TSC0045689
attaacaaacata

SEQ ID NO: 185285 - DNA, 13 bp, Artificial Sequence
  Oligonucleotide for detection of SNP TSC0045689
tatgttggttaat

SEQ ID NO: 185286 - DNA, 13 bp, Artificial Sequence
  Oligonucleotide for detection of SNP TSC0045689
attaaccaacata

SEQ ID NO: 185287 - DNA, 13 bp, Artificial Sequence
  Oligonucleotide for detection of SNP TSC0045689
attggtaaatatg

SEQ ID NO: 185288 - DNA, 13 bp, Artificial Sequence
  Oligonucleotide for detection of SNP TSC0045689
catatttaccaat

SEQ ID NO: 185289 - DNA, 13 bp, Artificial Sequence
  Oligonucleotide for detection of SNP TSC0045689
attggttaatatg

SEQ ID NO: 185290 - DNA, 13 bp, Artificial Sequence
  Oligonucleotide for detection of SNP TSC0045689
catattaaccaat

SEQ ID NO: 185291 - DNA, 13 bp, Artificial Sequence
  Oligonucleotide for detection of SNP TSC0045690
tttttaagtgtaa

SEQ ID NO: 185292 - DNA, 13 bp, Artificial Sequence
  Oligonucleotide for detection of SNP TSC0045690
ttacacttaaaaa

SEQ ID NO: 185293 - DNA, 13 bp, Artificial Sequence
  Oligonucleotide for detection of SNP TSC0045690
tttttaggtgtaa

SEQ ID NO: 185294 - DNA, 13 bp, Artificial Sequence
  Oligonucleotide for detection of SNP TSC0045690
ttacacctaaaaa

SEQ ID NO: 185295 - DNA, 13 bp, Artificial Sequence
  Oligonucleotide for detection of SNP TSC0045691
ttaggagtttgag

SEQ ID NO: 185296 - DNA, 13 bp, Artificial Sequence
  Oligonucleotide for detection of SNP TSC0045691
ctcaaactcctaa

SEQ ID NO: 185297 - DNA, 13 bp, Artificial Sequence
  Oligonucleotide for detection of SNP TSC0045691
ttaggattttgag

SEQ ID NO: 185298 - DNA, 13 bp, Artificial Sequence
  Oligonucleotide for detection of SNP TSC0045691
ctcaaaatcctaa

SEQ ID NO: 185299 - DNA, 13 bp, Artificial Sequence
  Oligonucleotide for detection of SNP TSC0001215
aatataaaagaga

SEQ ID NO: 185300 - DNA, 13 bp, Artificial Sequence
  Oligonucleotide for detection of SNP TSC0001215
tctcttttatatt

SEQ ID NO: 185301 - DNA, 13 bp, Artificial Sequence
  Oligonucleotide for detection of SNP TSC0001215
aatatataagaga

SEQ ID NO: 185302 - DNA, 13 bp, Artificial Sequence
  Oligonucleotide for detection of SNP TSC0001215
tctcttatatatt

SEQ ID NO: 185303 - DNA, 13 bp, Artificial Sequence
  Oligonucleotide for detection of SNP TSC0001216
aaaatttggtaay

SEQ ID NO: 185304 - DNA, 13 bp, Artificial Sequence
  Oligonucleotide for detection of SNP TSC0001216
rttaccaaatttt

SEQ ID NO: 185305 - DNA, 13 bp, Artificial Sequence
  Oligonucleotide for detection of SNP TSC0001216
aaaattcggtaay

SEQ ID NO: 185306 - DNA, 13 bp, Artificial Sequence
  Oligonucleotide for detection of SNP TSC0001216
rttaccgaatttt

SEQ ID NO: 185307 - DNA, 13 bp, Artificial Sequence
  Oligonucleotide for detection of SNP TSC0001216
gttgttggatttt

SEQ ID NO: 185308 - DNA, 13 bp, Artificial Sequence
  Oligonucleotide for detection of SNP TSC0001216
aaaatccaacaac

SEQ ID NO: 185309 - DNA, 13 bp, Artificial Sequence
  Oligonucleotide for detection of SNP TSC0001216
gttgttagatttt

SEQ ID NO: 185310 - DNA, 13 bp, Artificial Sequence
  Oligonucleotide for detection of SNP TSC0001216
aaaatctaacaac

SEQ ID NO: 185311 - DNA, 13 bp, Artificial Sequence
  Oligonucleotide for detection of SNP TSC0001216
gttgtcggatttt

SEQ ID NO: 185312 - DNA, 13 bp, Artificial Sequence
  Oligonucleotide for detection of SNP TSC0001216
aaaatccgacaac

SEQ ID NO: 185313 - DNA, 13 bp, Artificial Sequence
  Oligonucleotide for detection of SNP TSC0045693
ataataattattg

SEQ ID NO: 185314 - DNA, 13 bp, Artificial Sequence
  Oligonucleotide for detection of SNP TSC0045693
caataattattat

SEQ ID NO: 185315 - DNA, 13 bp, Artificial Sequence
  Oligonucleotide for detection of SNP TSC0045693
ataatagttattg

SEQ ID NO: 185316 - DNA, 13 bp, Artificial Sequence
  Oligonucleotide for detection of SNP TSC0045693
caataactattat

SEQ ID NO: 185317 - DNA, 13 bp, Artificial Sequence
  Oligonucleotide for detection of SNP TSC0045694
ttagggatttagg

SEQ ID NO: 185318 - DNA, 13 bp, Artificial Sequence
  Oligonucleotide for detection of SNP TSC0045694
cctaaatccctaa

SEQ ID NO: 185319 - DNA, 13 bp, Artificial Sequence
  Oligonucleotide for detection of SNP TSC0045694
ttagggttttagg

SEQ ID NO: 185320 - DNA, 13 bp, Artificial Sequence
  Oligonucleotide for detection of SNP TSC0045694
cctaaaaccctaa

SEQ ID NO: 185321 - DNA, 13 bp, Artificial Sequence
  Oligonucleotide for detection of SNP TSC0006996
agtataatattaa

SEQ ID NO: 185322 - DNA, 13 bp, Artificial Sequence
  Oligonucleotide for detection of SNP TSC0006996
ttaatattatact

SEQ ID NO: 185323 - DNA, 13 bp, Artificial Sequence
  Oligonucleotide for detection of SNP TSC0006996
agtatagtattaa

SEQ ID NO: 185324 - DNA, 13 bp, Artificial Sequence
  Oligonucleotide for detection of SNP TSC0006996
ttaatactatact

SEQ ID NO: 185325 - DNA, 13 bp, Artificial Sequence
  Oligonucleotide for detection of SNP TSC0006997
tagggagtaagtt

SEQ ID NO: 185326 - DNA, 13 bp, Artificial Sequence
  Oligonucleotide for detection of SNP TSC0006997
aacttactcccta

SEQ ID NO: 185327 - DNA, 13 bp, Artificial Sequence
  Oligonucleotide for detection of SNP TSC0006997
tagggaataagtt

SEQ ID NO: 185328 - DNA, 13 bp, Artificial Sequence
  Oligonucleotide for detection of SNP TSC0006997
aacttattcccta

SEQ ID NO: 185329 - DNA, 13 bp, Artificial Sequence
  Oligonucleotide for detection of SNP TSC0045696
tttgttatgagta

SEQ ID NO: 185330 - DNA, 13 bp, Artificial Sequence
  Oligonucleotide for detection of SNP TSC0045696
tactcataacaaa

SEQ ID NO: 185331 - DNA, 13 bp, Artificial Sequence
  Oligonucleotide for detection of SNP TSC0045696
tttgttgtgagta

SEQ ID NO: 185332 - DNA, 13 bp, Artificial Sequence
  Oligonucleotide for detection of SNP TSC0045696
tactcacaacaaa

SEQ ID NO: 185333 - DNA, 13 bp, Artificial Sequence
  Oligonucleotide for detection of SNP TSC0045696
tttgtcgtgagta

SEQ ID NO: 185334 - DNA, 13 bp, Artificial Sequence
  Oligonucleotide for detection of SNP TSC0045696
tactcacgacaaa

SEQ ID NO: 185335 - DNA, 13 bp, Artificial Sequence
  Oligonucleotide for detection of SNP TSC0045696
tatttatggtaga

SEQ ID NO: 185336 - DNA, 13 bp, Artificial Sequence
  Oligonucleotide for detection of SNP TSC0045696
tctaccataaata

SEQ ID NO: 185337 - DNA, 13 bp, Artificial Sequence
  Oligonucleotide for detection of SNP TSC0045696
tatttacggtaga

SEQ ID NO: 185338 - DNA, 13 bp, Artificial Sequence
  Oligonucleotide for detection of SNP TSC0045696
tctaccgtaaata

SEQ ID NO: 185339 - DNA, 13 bp, Artificial Sequence
  Oligonucleotide for detection of SNP TSC0045697
gtagatatttttg

SEQ ID NO: 185340 - DNA, 13 bp, Artificial Sequence
  Oligonucleotide for detection of SNP TSC0045697
caaaaatatctac

SEQ ID NO: 185341 - DNA, 13 bp, Artificial Sequence
  Oligonucleotide for detection of SNP TSC0045697
gtagatgtttttg

SEQ ID NO: 185342 - DNA, 13 bp, Artificial Sequence
  Oligonucleotide for detection of SNP TSC0045697
caaaaacatctac

SEQ ID NO: 185343 - DNA, 13 bp, Artificial Sequence
  Oligonucleotide for detection of SNP TSC0045698
gtgaagtttgtag

SEQ ID NO: 185344 - DNA, 13 bp, Artificial Sequence
  Oligonucleotide for detection of SNP TSC0045698
ctacaaacttcac

SEQ ID NO: 185345 - DNA, 13 bp, Artificial Sequence
  Oligonucleotide for detection of SNP TSC0045698
gtgaaggttgtag

SEQ ID NO: 185346 - DNA, 13 bp, Artificial Sequence
  Oligonucleotide for detection of SNP TSC0045698
ctacaaccttcac

SEQ ID NO: 185347 - DNA, 13 bp, Artificial Sequence
  Oligonucleotide for detection of SNP TSC0045698
gcgaagtttgtag

SEQ ID NO: 185348 - DNA, 13 bp, Artificial Sequence
  Oligonucleotide for detection of SNP TSC0045698
ctacaaacttcgc

SEQ ID NO: 185349 - DNA, 13 bp, Artificial Sequence
  Oligonucleotide for detection of SNP TSC0045698
gcgaaggttgtag

SEQ ID NO: 185350 - DNA, 13 bp, Artificial Sequence
  Oligonucleotide for detection of SNP TSC0045698
ctacaaccttcgc

SEQ ID NO: 185351 - DNA, 13 bp, Artificial Sequence
  Oligonucleotide for detection of SNP TSC0045699
ttatttatgtata

SEQ ID NO: 185352 - DNA, 13 bp, Artificial Sequence
  Oligonucleotide for detection of SNP TSC0045699
tatacataaataa

SEQ ID NO: 185353 - DNA, 13 bp, Artificial Sequence
  Oligonucleotide for detection of SNP TSC0045699
ttatttgtgtata

SEQ ID NO: 185354 - DNA, 13 bp, Artificial Sequence
  Oligonucleotide for detection of SNP TSC0045699
tatacacaaataa

SEQ ID NO: 185355 - DNA, 13 bp, Artificial Sequence
  Oligonucleotide for detection of SNP TSC0045699
ttattcgtgtata

SEQ ID NO: 185356 - DNA, 13 bp, Artificial Sequence
  Oligonucleotide for detection of SNP TSC0045699
tatacacgaataa

SEQ ID NO: 185357 - DNA, 13 bp, Artificial Sequence
  Oligonucleotide for detection of SNP TSC0045699
tatgtatgagtag

SEQ ID NO: 185358 - DNA, 13 bp, Artificial Sequence
  Oligonucleotide for detection of SNP TSC0045699
ctactcatacata

SEQ ID NO: 185359 - DNA, 13 bp, Artificial Sequence
  Oligonucleotide for detection of SNP TSC0045699
tatgtacgagtag

SEQ ID NO: 185360 - DNA, 13 bp, Artificial Sequence
  Oligonucleotide for detection of SNP TSC0045699
ctactcgtacata

SEQ ID NO: 185361 - DNA, 13 bp, Artificial Sequence
  Oligonucleotide for detection of SNP TSC0045700
gaagggggtattt

SEQ ID NO: 185362 - DNA, 13 bp, Artificial Sequence
  Oligonucleotide for detection of SNP TSC0045700
aaatacccccttc

SEQ ID NO: 185363 - DNA, 13 bp, Artificial Sequence
  Oligonucleotide for detection of SNP TSC0045700
gaagggagtattt

SEQ ID NO: 185364 - DNA, 13 bp, Artificial Sequence
  Oligonucleotide for detection of SNP TSC0045700
aaatactcccttc

SEQ ID NO: 185365 - DNA, 13 bp, Artificial Sequence
  Oligonucleotide for detection of SNP TSC0000619
gaagatatgattg

SEQ ID NO: 185366 - DNA, 13 bp, Artificial Sequence
  Oligonucleotide for detection of SNP TSC0000619
caatcatatcttc

SEQ ID NO: 185367 - DNA, 13 bp, Artificial Sequence
  Oligonucleotide for detection of SNP TSC0000619
gaagatgtgattg

SEQ ID NO: 185368 - DNA, 13 bp, Artificial Sequence
  Oligonucleotide for detection of SNP TSC0000619
caatcacatcttc

SEQ ID NO: 185369 - DNA, 13 bp, Artificial Sequence
  Oligonucleotide for detection of SNP TSC0000619
gaagacgtgattg

SEQ ID NO: 185370 - DNA, 13 bp, Artificial Sequence
  Oligonucleotide for detection of SNP TSC0000619
caatcacgtcttc

SEQ ID NO: 185371 - DNA, 13 bp, Artificial Sequence
  Oligonucleotide for detection of SNP TSC0000619
tagttatgtttty

SEQ ID NO: 185372 - DNA, 13 bp, Artificial Sequence
  Oligonucleotide for detection of SNP TSC0000619
raaaacataacta

SEQ ID NO: 185373 - DNA, 13 bp, Artificial Sequence
  Oligonucleotide for detection of SNP TSC0000619
tagttacgtttty

SEQ ID NO: 185374 - DNA, 13 bp, Artificial Sequence
  Oligonucleotide for detection of SNP TSC0000619
raaaacgtaacta

SEQ ID NO: 185375 - DNA, 13 bp, Artificial Sequence
  Oligonucleotide for detection of SNP TSC0045701
tgtgtgattttgg

SEQ ID NO: 185376 - DNA, 13 bp, Artificial Sequence
  Oligonucleotide for detection of SNP TSC0045701
ccaaaatcacaca

SEQ ID NO: 185377 - DNA, 13 bp, Artificial Sequence
  Oligonucleotide for detection of SNP TSC0045701
tgtgtgtttttgg

SEQ ID NO: 185378 - DNA, 13 bp, Artificial Sequence
  Oligonucleotide for detection of SNP TSC0045701
ccaaaaacacaca

SEQ ID NO: 185379 - DNA, 13 bp, Artificial Sequence
  Oligonucleotide for detection of SNP TSC0045701
ttaaggttatata

SEQ ID NO: 185380 - DNA, 13 bp, Artificial Sequence
  Oligonucleotide for detection of SNP TSC0045701
tatataaccttaa

SEQ ID NO: 185381 - DNA, 13 bp, Artificial Sequence
  Oligonucleotide for detection of SNP TSC0045701
ttaaggatatata

SEQ ID NO: 185382 - DNA, 13 bp, Artificial Sequence
  Oligonucleotide for detection of SNP TSC0045701
tatatatccttaa

SEQ ID NO: 185383 - DNA, 13 bp, Artificial Sequence
  Oligonucleotide for detection of SNP TSC0000232
aaataagaagtay

SEQ ID NO: 185384 - DNA, 13 bp, Artificial Sequence
  Oligonucleotide for detection of SNP TSC0000232
rtacttcttattt

SEQ ID NO: 185385 - DNA, 13 bp, Artificial Sequence
  Oligonucleotide for detection of SNP TSC0000232
aaataaaaagtay

SEQ ID NO: 185386 - DNA, 13 bp, Artificial Sequence
  Oligonucleotide for detection of SNP TSC0000232
rtactttttattt

SEQ ID NO: 185387 - DNA, 13 bp, Artificial Sequence
  Oligonucleotide for detection of SNP TSC0045703
aaaatagaaagta

SEQ ID NO: 185388 - DNA, 13 bp, Artificial Sequence
  Oligonucleotide for detection of SNP TSC0045703
tactttctatttt

SEQ ID NO: 185389 - DNA, 13 bp, Artificial Sequence
  Oligonucleotide for detection of SNP TSC0045703
aaaataaaaagta

SEQ ID NO: 185390 - DNA, 13 bp, Artificial Sequence
  Oligonucleotide for detection of SNP TSC0045703
tactttttatttt

SEQ ID NO: 185391 - DNA, 13 bp, Artificial Sequence
  Oligonucleotide for detection of SNP TSC0045704
gtttgtagtttgy

SEQ ID NO: 185392 - DNA, 13 bp, Artificial Sequence
  Oligonucleotide for detection of SNP TSC0045704
rcaaactacaaac

SEQ ID NO: 185393 - DNA, 13 bp, Artificial Sequence
  Oligonucleotide for detection of SNP TSC0045704
gtttgttgtttgy

SEQ ID NO: 185394 - DNA, 13 bp, Artificial Sequence
  Oligonucleotide for detection of SNP TSC0045704
rcaaacaacaaac

SEQ ID NO: 185395 - DNA, 13 bp, Artificial Sequence
  Oligonucleotide for detection of SNP TSC0045704
gtttgtcgtttgy

SEQ ID NO: 185396 - DNA, 13 bp, Artificial Sequence
  Oligonucleotide for detection of SNP TSC0045704
rcaaacgacaaac

SEQ ID NO: 185397 - DNA, 13 bp, Artificial Sequence
  Oligonucleotide for detection of SNP TSC0045704
gtaaattgtaaay

SEQ ID NO: 185398 - DNA, 13 bp, Artificial Sequence
  Oligonucleotide for detection of SNP TSC0045704
rtttacaatttac

SEQ ID NO: 185399 - DNA, 13 bp, Artificial Sequence
  Oligonucleotide for detection of SNP TSC0045704
gtaaacggtaaay

SEQ ID NO: 185400 - DNA, 13 bp, Artificial Sequence
  Oligonucleotide for detection of SNP TSC0045704
rtttaccgtttac

SEQ ID NO: 185401 - DNA, 13 bp, Artificial Sequence
  Oligonucleotide for detection of SNP TSC0045705
ttgttaagttttt

SEQ ID NO: 185402 - DNA, 13 bp, Artificial Sequence
  Oligonucleotide for detection of SNP TSC0045705
aaaaacttaacaa

SEQ ID NO: 185403 - DNA, 13 bp, Artificial Sequence
  Oligonucleotide for detection of SNP TSC0006695
aatttatttttga

SEQ ID NO: 185404 - DNA, 13 bp, Artificial Sequence
  Oligonucleotide for detection of SNP TSC0006695
tcaaaaataaatt

SEQ ID NO: 185405 - DNA, 13 bp, Artificial Sequence
  Oligonucleotide for detection of SNP TSC0006695
aatttagttttga

SEQ ID NO: 185406 - DNA, 13 bp, Artificial Sequence
  Oligonucleotide for detection of SNP TSC0006695
tcaaaactaaatt

SEQ ID NO: 185407 - DNA, 13 bp, Artificial Sequence
  Oligonucleotide for detection of SNP TSC0006695
ttaaggataggtt

SEQ ID NO: 185408 - DNA, 13 bp, Artificial Sequence
  Oligonucleotide for detection of SNP TSC0006695
aacctatccttaa

SEQ ID NO: 185409 - DNA, 13 bp, Artificial Sequence
  Oligonucleotide for detection of SNP TSC0006695
ttaaggttaggtt

SEQ ID NO: 185410 - DNA, 13 bp, Artificial Sequence
  Oligonucleotide for detection of SNP TSC0006695
aacctaaccttaa

SEQ ID NO: 185411 - DNA, 13 bp, Artificial Sequence
  Oligonucleotide for detection of SNP TSC0006696
agaaataatttta

SEQ ID NO: 185412 - DNA, 13 bp, Artificial Sequence
  Oligonucleotide for detection of SNP TSC0006696
taaaattatttct

SEQ ID NO: 185413 - DNA, 13 bp, Artificial Sequence
  Oligonucleotide for detection of SNP TSC0006696
agaaattatttta

SEQ ID NO: 185414 - DNA, 13 bp, Artificial Sequence
  Oligonucleotide for detection of SNP TSC0006696
taaaataatttct

SEQ ID NO: 185415 - DNA, 13 bp, Artificial Sequence
  Oligonucleotide for detection of SNP TSC0006696
tgaaattgttttt

SEQ ID NO: 185416 - DNA, 13 bp, Artificial Sequence
  Oligonucleotide for detection of SNP TSC0006696
aaaaacaatttca

SEQ ID NO: 185417 - DNA, 13 bp, Artificial Sequence
  Oligonucleotide for detection of SNP TSC0000920
gtagataatgtgy

SEQ ID NO: 185418 - DNA, 13 bp, Artificial Sequence
  Oligonucleotide for detection of SNP TSC0000920
rcacattatctac

SEQ ID NO: 185419 - DNA, 13 bp, Artificial Sequence
  Oligonucleotide for detection of SNP TSC0000920
gtagatgatgtgy

SEQ ID NO: 185420 - DNA, 13 bp, Artificial Sequence
  Oligonucleotide for detection of SNP TSC0000920
rcacatcatctac

SEQ ID NO: 185421 - DNA, 13 bp, Artificial Sequence
  Oligonucleotide for detection of SNP TSC0000920
gtagacgatgtgy

SEQ ID NO: 185422 - DNA, 13 bp, Artificial Sequence
  Oligonucleotide for detection of SNP TSC0000920
rcacatcgtctac

SEQ ID NO: 185423 - DNA, 13 bp, Artificial Sequence
  Oligonucleotide for detection of SNP TSC0000920
gtatattgtttgy

SEQ ID NO: 185424 - DNA, 13 bp, Artificial Sequence
  Oligonucleotide for detection of SNP TSC0000920
rcaaacaatatac

SEQ ID NO: 185425 - DNA, 13 bp, Artificial Sequence
  Oligonucleotide for detection of SNP TSC0000920
gtatatcgtttgy

SEQ ID NO: 185426 - DNA, 13 bp, Artificial Sequence
  Oligonucleotide for detection of SNP TSC0000920
rcaaacgatatac

SEQ ID NO: 185427 - DNA, 13 bp, Artificial Sequence
  Oligonucleotide for detection of SNP TSC0045708
atggggttagtgy

SEQ ID NO: 185428 - DNA, 13 bp, Artificial Sequence
  Oligonucleotide for detection of SNP TSC0045708
rcactaaccccat

SEQ ID NO: 185429 - DNA, 13 bp, Artificial Sequence
  Oligonucleotide for detection of SNP TSC0045708
atgggggtagtgy

SEQ ID NO: 185430 - DNA, 13 bp, Artificial Sequence
  Oligonucleotide for detection of SNP TSC0045708
rcactacccccat

SEQ ID NO: 185431 - DNA, 13 bp, Artificial Sequence
  Oligonucleotide for detection of SNP TSC0045709
atatgtagttttt

SEQ ID NO: 185432 - DNA, 13 bp, Artificial Sequence
  Oligonucleotide for detection of SNP TSC0045709
aaaaactacatat

SEQ ID NO: 185433 - DNA, 13 bp, Artificial Sequence
  Oligonucleotide for detection of SNP TSC0045709
atatgtggttttt

SEQ ID NO: 185434 - DNA, 13 bp, Artificial Sequence
  Oligonucleotide for detection of SNP TSC0045709
aaaaaccacatat

SEQ ID NO: 185435 - DNA, 13 bp, Artificial Sequence
  Oligonucleotide for detection of SNP TSC0045710
gatggaaataaat

SEQ ID NO: 185436 - DNA, 13 bp, Artificial Sequence
  Oligonucleotide for detection of SNP TSC0045710
atttatttccatc

SEQ ID NO: 185437 - DNA, 13 bp, Artificial Sequence
  Oligonucleotide for detection of SNP TSC0045710
gatggatataaat

SEQ ID NO: 185438 - DNA, 13 bp, Artificial Sequence
  Oligonucleotide for detection of SNP TSC0045710
atttatatccatc

SEQ ID NO: 185439 - DNA, 13 bp, Artificial Sequence
  Oligonucleotide for detection of SNP TSC0000193
ggtggggttatag

SEQ ID NO: 185440 - DNA, 13 bp, Artificial Sequence
  Oligonucleotide for detection of SNP TSC0000193
ctataaccccacc

SEQ ID NO: 185441 - DNA, 13 bp, Artificial Sequence
  Oligonucleotide for detection of SNP TSC0000193
ggtgggattatag

SEQ ID NO: 185442 - DNA, 13 bp, Artificial Sequence
  Oligonucleotide for detection of SNP TSC0000193
ctataatcccacc

SEQ ID NO: 185443 - DNA, 13 bp, Artificial Sequence
  Oligonucleotide for detection of SNP TSC0045714
gtgagataagtat

SEQ ID NO: 185444 - DNA, 13 bp, Artificial Sequence
  Oligonucleotide for detection of SNP TSC0045714
atacttatctcac

SEQ ID NO: 185445 - DNA, 13 bp, Artificial Sequence
  Oligonucleotide for detection of SNP TSC0045714
gtgagagaagtat

SEQ ID NO: 185446 - DNA, 13 bp, Artificial Sequence
  Oligonucleotide for detection of SNP TSC0045714
atacttctctcac

SEQ ID NO: 185447 - DNA, 13 bp, Artificial Sequence
  Oligonucleotide for detection of SNP TSC0045714
atgttttttttay

SEQ ID NO: 185448 - DNA, 13 bp, Artificial Sequence
  Oligonucleotide for detection of SNP TSC0045714
rtaaaaaaaacat

SEQ ID NO: 185449 - DNA, 13 bp, Artificial Sequence
  Oligonucleotide for detection of SNP TSC0045715
gtgagtagatttg

SEQ ID NO: 185450 - DNA, 13 bp, Artificial Sequence
  Oligonucleotide for detection of SNP TSC0045715
caaatctactcac

SEQ ID NO: 185451 - DNA, 13 bp, Artificial Sequence
  Oligonucleotide for detection of SNP TSC0045715
gtgagttgatttg

SEQ ID NO: 185452 - DNA, 13 bp, Artificial Sequence
  Oligonucleotide for detection of SNP TSC0045715
caaatcaactcac

SEQ ID NO: 185453 - DNA, 13 bp, Artificial Sequence
  Oligonucleotide for detection of SNP TSC0045715
gtgagtcgatttg

SEQ ID NO: 185454 - DNA, 13 bp, Artificial Sequence
  Oligonucleotide for detection of SNP TSC0045715
caaatcgactcac

SEQ ID NO: 185455 - DNA, 13 bp, Artificial Sequence
  Oligonucleotide for detection of SNP TSC0045715
taaatttatttay

SEQ ID NO: 185456 - DNA, 13 bp, Artificial Sequence
  Oligonucleotide for detection of SNP TSC0045715
rtaaataaattta

SEQ ID NO: 185457 - DNA, 13 bp, Artificial Sequence
  Oligonucleotide for detection of SNP TSC0045715
taaattgatttay

SEQ ID NO: 185458 - DNA, 13 bp, Artificial Sequence
  Oligonucleotide for detection of SNP TSC0045715
rtaaatcaattta

SEQ ID NO: 185459 - DNA, 13 bp, Artificial Sequence
  Oligonucleotide for detection of SNP TSC0045715
taaatcgatttay

SEQ ID NO: 185460 - DNA, 13 bp, Artificial Sequence
  Oligonucleotide for detection of SNP TSC0045715
rtaaatcgattta

SEQ ID NO: 185461 - DNA, 13 bp, Artificial Sequence
  Oligonucleotide for detection of SNP TSC0045716
tgataaagatata

SEQ ID NO: 185462 - DNA, 13 bp, Artificial Sequence
  Oligonucleotide for detection of SNP TSC0045716
tatatctttatca

SEQ ID NO: 185463 - DNA, 13 bp, Artificial Sequence
  Oligonucleotide for detection of SNP TSC0045716
tgataaggatata

SEQ ID NO: 185464 - DNA, 13 bp, Artificial Sequence
  Oligonucleotide for detection of SNP TSC0045716
tatatccttatca

SEQ ID NO: 185465 - DNA, 13 bp, Artificial Sequence
  Oligonucleotide for detection of SNP TSC0045717
atggatagtagta

SEQ ID NO: 185466 - DNA, 13 bp, Artificial Sequence
  Oligonucleotide for detection of SNP TSC0045717
tactactatccat

SEQ ID NO: 185467 - DNA, 13 bp, Artificial Sequence
  Oligonucleotide for detection of SNP TSC0045717
atggatggtagta

SEQ ID NO: 185468 - DNA, 13 bp, Artificial Sequence
  Oligonucleotide for detection of SNP TSC0045717
tactaccatccat

SEQ ID NO: 185469 - DNA, 13 bp, Artificial Sequence
  Oligonucleotide for detection of SNP TSC0045718
gatatagagagag

SEQ ID NO: 185470 - DNA, 13 bp, Artificial Sequence
  Oligonucleotide for detection of SNP TSC0045718
ctctctctatatc

SEQ ID NO: 185471 - DNA, 13 bp, Artificial Sequence
  Oligonucleotide for detection of SNP TSC0045718
gatatatagagag

SEQ ID NO: 185472 - DNA, 13 bp, Artificial Sequence
  Oligonucleotide for detection of SNP TSC0045718
ctctctatatatc

SEQ ID NO: 185473 - DNA, 13 bp, Artificial Sequence
  Oligonucleotide for detection of SNP TSC0001626
tggttttgttggt

SEQ ID NO: 185474 - DNA, 13 bp, Artificial Sequence
  Oligonucleotide for detection of SNP TSC0001626
accaacaaaacca

SEQ ID NO: 185475 - DNA, 13 bp, Artificial Sequence
  Oligonucleotide for detection of SNP TSC0001626
tggtttcgttggt

SEQ ID NO: 185476 - DNA, 13 bp, Artificial Sequence
  Oligonucleotide for detection of SNP TSC0001626
accaacgaaacca

SEQ ID NO: 185477 - DNA, 13 bp, Artificial Sequence
  Oligonucleotide for detection of SNP TSC0001626
attaatgaaatta

SEQ ID NO: 185478 - DNA, 13 bp, Artificial Sequence
  Oligonucleotide for detection of SNP TSC0001626
taatttcattaat

SEQ ID NO: 185479 - DNA, 13 bp, Artificial Sequence
  Oligonucleotide for detection of SNP TSC0001626
attaacgaaatta

SEQ ID NO: 185480 - DNA, 13 bp, Artificial Sequence
  Oligonucleotide for detection of SNP TSC0001626
taatttcgttaat

SEQ ID NO: 185481 - DNA, 13 bp, Artificial Sequence
  Oligonucleotide for detection of SNP TSC0001628
tgtatttaatttg

SEQ ID NO: 185482 - DNA, 13 bp, Artificial Sequence
  Oligonucleotide for detection of SNP TSC0001628
caaattaaataca

SEQ ID NO: 185483 - DNA, 13 bp, Artificial Sequence
  Oligonucleotide for detection of SNP TSC0001628
tgtattgaatttg

SEQ ID NO: 185484 - DNA, 13 bp, Artificial Sequence
  Oligonucleotide for detection of SNP TSC0001628
caaattcaataca

SEQ ID NO: 185485 - DNA, 13 bp, Artificial Sequence
  Oligonucleotide for detection of SNP TSC0001628
taggttgaatata

SEQ ID NO: 185486 - DNA, 13 bp, Artificial Sequence
  Oligonucleotide for detection of SNP TSC0001628
tatattcaaccta

SEQ ID NO: 185487 - DNA, 13 bp, Artificial Sequence
  Oligonucleotide for detection of SNP TSC0001628
taggtttaatata

SEQ ID NO: 185488 - DNA, 13 bp, Artificial Sequence
  Oligonucleotide for detection of SNP TSC0001628
tatattaaaccta

SEQ ID NO: 185489 - DNA, 13 bp, Artificial Sequence
  Oligonucleotide for detection of SNP TSC0001629
tattatgaaaatt

SEQ ID NO: 185490 - DNA, 13 bp, Artificial Sequence
  Oligonucleotide for detection of SNP TSC0001629
aattttcataata

SEQ ID NO: 185491 - DNA, 13 bp, Artificial Sequence
  Oligonucleotide for detection of SNP TSC0001629
tattataaaaatt

SEQ ID NO: 185492 - DNA, 13 bp, Artificial Sequence
  Oligonucleotide for detection of SNP TSC0001629
aatttttataata

SEQ ID NO: 185493 - DNA, 13 bp, Artificial Sequence
  Oligonucleotide for detection of SNP TSC0045719
ggggtaaaagtgy

SEQ ID NO: 185494 - DNA, 13 bp, Artificial Sequence
  Oligonucleotide for detection of SNP TSC0045719
rcacttttacccc

SEQ ID NO: 185495 - DNA, 13 bp, Artificial Sequence
  Oligonucleotide for detection of SNP TSC0045719
ggggtataagtgy

SEQ ID NO: 185496 - DNA, 13 bp, Artificial Sequence
  Oligonucleotide for detection of SNP TSC0045719
rcacttatacccc

SEQ ID NO: 185497 - DNA, 13 bp, Artificial Sequence
  Oligonucleotide for detection of SNP TSC0045719
gtatttttattty

SEQ ID NO: 185498 - DNA, 13 bp, Artificial Sequence
  Oligonucleotide for detection of SNP TSC0045719
raaataaaaatac

SEQ ID NO: 185499 - DNA, 13 bp, Artificial Sequence
  Oligonucleotide for detection of SNP TSC0001079
atttaggtatata

SEQ ID NO: 185500 - DNA, 13 bp, Artificial Sequence
  Oligonucleotide for detection of SNP TSC0001079
tatatacctaaat

SEQ ID NO: 185501 - DNA, 13 bp, Artificial Sequence
  Oligonucleotide for detection of SNP TSC0001079
atttagatatata

SEQ ID NO: 185502 - DNA, 13 bp, Artificial Sequence
  Oligonucleotide for detection of SNP TSC0001079
tatatatctaaat

SEQ ID NO: 185503 - DNA, 13 bp, Artificial Sequence
  Oligonucleotide for detection of SNP TSC0045720
gaaagtatgaaay

SEQ ID NO: 185504 - DNA, 13 bp, Artificial Sequence
  Oligonucleotide for detection of SNP TSC0045720
rtttcatactttc

SEQ ID NO: 185505 - DNA, 13 bp, Artificial Sequence
  Oligonucleotide for detection of SNP TSC0045720
gaaagtgtgaaay

SEQ ID NO: 185506 - DNA, 13 bp, Artificial Sequence
  Oligonucleotide for detection of SNP TSC0045720
rtttcacactttc

SEQ ID NO: 185507 - DNA, 13 bp, Artificial Sequence
  Oligonucleotide for detection of SNP TSC0045720
gaaagcgtgaaay

SEQ ID NO: 185508 - DNA, 13 bp, Artificial Sequence
  Oligonucleotide for detection of SNP TSC0045720
rtttcacgctttc

SEQ ID NO: 185509 - DNA, 13 bp, Artificial Sequence
  Oligonucleotide for detection of SNP TSC0045721
ttaaaagttttta

SEQ ID NO: 185510 - DNA, 13 bp, Artificial Sequence
  Oligonucleotide for detection of SNP TSC0045721
taaaaacttttaa

SEQ ID NO: 185511 - DNA, 13 bp, Artificial Sequence
  Oligonucleotide for detection of SNP TSC0045721
taaaaagttttga

SEQ ID NO: 185512 - DNA, 13 bp, Artificial Sequence
  Oligonucleotide for detection of SNP TSC0045721
tcaaaacttttta

SEQ ID NO: 185513 - DNA, 13 bp, Artificial Sequence
  Oligonucleotide for detection of SNP TSC0045721
taaaaatttttga

SEQ ID NO: 185514 - DNA, 13 bp, Artificial Sequence
  Oligonucleotide for detection of SNP TSC0045721
tcaaaaattttta

SEQ ID NO: 185515 - DNA, 13 bp, Artificial Sequence
  Oligonucleotide for detection of SNP TSC0045722
atattttgtgggg

SEQ ID NO: 185516 - DNA, 13 bp, Artificial Sequence
  Oligonucleotide for detection of SNP TSC0045722
ccccacaaaatat

SEQ ID NO: 185517 - DNA, 13 bp, Artificial Sequence
  Oligonucleotide for detection of SNP TSC0045722
atatttcgtgggg

SEQ ID NO: 185518 - DNA, 13 bp, Artificial Sequence
  Oligonucleotide for detection of SNP TSC0045722
ccccacgaaatat

SEQ ID NO: 185519 - DNA, 13 bp, Artificial Sequence
  Oligonucleotide for detection of SNP TSC0045722
ttttatgaagtgt

SEQ ID NO: 185520 - DNA, 13 bp, Artificial Sequence
  Oligonucleotide for detection of SNP TSC0045722
acacttcataaaa

SEQ ID NO: 185521 - DNA, 13 bp, Artificial Sequence
  Oligonucleotide for detection of SNP TSC0045722
ttttataaagtgt

SEQ ID NO: 185522 - DNA, 13 bp, Artificial Sequence
  Oligonucleotide for detection of SNP TSC0045722
acactttataaaa

SEQ ID NO: 185523 - DNA, 13 bp, Artificial Sequence
  Oligonucleotide for detection of SNP TSC0045722
ttttacgaagtgt

SEQ ID NO: 185524 - DNA, 13 bp, Artificial Sequence
  Oligonucleotide for detection of SNP TSC0045722
acacttcgtaaaa

SEQ ID NO: 185525 - DNA, 13 bp, Artificial Sequence
  Oligonucleotide for detection of SNP TSC0045723
tgagtagaatggg

SEQ ID NO: 185526 - DNA, 13 bp, Artificial Sequence
  Oligonucleotide for detection of SNP TSC0045723
cccattctactca

SEQ ID NO: 185527 - DNA, 13 bp, Artificial Sequence
  Oligonucleotide for detection of SNP TSC0045723
tgagtaaaatggg

SEQ ID NO: 185528 - DNA, 13 bp, Artificial Sequence
  Oligonucleotide for detection of SNP TSC0045723
cccattttactca

SEQ ID NO: 185529 - DNA, 13 bp, Artificial Sequence
  Oligonucleotide for detection of SNP TSC0045724
aggtgtgttttga

SEQ ID NO: 185530 - DNA, 13 bp, Artificial Sequence
  Oligonucleotide for detection of SNP TSC0045724
tcaaaacacacct

SEQ ID NO: 185531 - DNA, 13 bp, Artificial Sequence
  Oligonucleotide for detection of SNP TSC0045724
aggtgtattttga

SEQ ID NO: 185532 - DNA, 13 bp, Artificial Sequence
  Oligonucleotide for detection of SNP TSC0045724
tcaaaatacacct

SEQ ID NO: 185533 - DNA, 13 bp, Artificial Sequence
  Oligonucleotide for detection of SNP TSC0045724
aggcgtgttttga

SEQ ID NO: 185534 - DNA, 13 bp, Artificial Sequence
  Oligonucleotide for detection of SNP TSC0045724
tcaaaacacgcct

SEQ ID NO: 185535 - DNA, 13 bp, Artificial Sequence
  Oligonucleotide for detection of SNP TSC0045724
aggcgtattttga

SEQ ID NO: 185536 - DNA, 13 bp, Artificial Sequence
  Oligonucleotide for detection of SNP TSC0045724
tcaaaatacgcct

SEQ ID NO: 185537 - DNA, 13 bp, Artificial Sequence
  Oligonucleotide for detection of SNP TSC0045729
atttaagtttttt

SEQ ID NO: 185538 - DNA, 13 bp, Artificial Sequence
  Oligonucleotide for detection of SNP TSC0045729
aaaaaacttaaat

SEQ ID NO: 185539 - DNA, 13 bp, Artificial Sequence
  Oligonucleotide for detection of SNP TSC0045729
aaaaaagttgagt

SEQ ID NO: 185540 - DNA, 13 bp, Artificial Sequence
  Oligonucleotide for detection of SNP TSC0045729
actcaactttttt

SEQ ID NO: 185541 - DNA, 13 bp, Artificial Sequence
  Oligonucleotide for detection of SNP TSC0045729
aaaaaatttgagt

SEQ ID NO: 185542 - DNA, 13 bp, Artificial Sequence
  Oligonucleotide for detection of SNP TSC0045729
actcaaatttttt

SEQ ID NO: 185543 - DNA, 13 bp, Artificial Sequence
  Oligonucleotide for detection of SNP TSC0045730
gtatataaagaaa

SEQ ID NO: 185544 - DNA, 13 bp, Artificial Sequence
  Oligonucleotide for detection of SNP TSC0045730
tttctttatatac

SEQ ID NO: 185545 - DNA, 13 bp, Artificial Sequence
  Oligonucleotide for detection of SNP TSC0045730
gtatatgaagaaa

SEQ ID NO: 185546 - DNA, 13 bp, Artificial Sequence
  Oligonucleotide for detection of SNP TSC0045730
tttcttcatatac

SEQ ID NO: 185547 - DNA, 13 bp, Artificial Sequence
  Oligonucleotide for detection of SNP TSC0045730
gtatacgaagaaa

SEQ ID NO: 185548 - DNA, 13 bp, Artificial Sequence
  Oligonucleotide for detection of SNP TSC0045730
tttcttcgtatac

SEQ ID NO: 185549 - DNA, 13 bp, Artificial Sequence
  Oligonucleotide for detection of SNP TSC0045730
tttttttgtgtay

SEQ ID NO: 185550 - DNA, 13 bp, Artificial Sequence
  Oligonucleotide for detection of SNP TSC0045730
rtacacaaaaaaa

SEQ ID NO: 185551 - DNA, 13 bp, Artificial Sequence
  Oligonucleotide for detection of SNP TSC0045730
ttttttcgtgtay

SEQ ID NO: 185552 - DNA, 13 bp, Artificial Sequence
  Oligonucleotide for detection of SNP TSC0045730
rtacacgaaaaaa

SEQ ID NO: 185553 - DNA, 13 bp, Artificial Sequence
  Oligonucleotide for detection of SNP TSC0045731
aagaagtgaagay

SEQ ID NO: 185554 - DNA, 13 bp, Artificial Sequence
  Oligonucleotide for detection of SNP TSC0045731
rtcttcacttctt

SEQ ID NO: 185555 - DNA, 13 bp, Artificial Sequence
  Oligonucleotide for detection of SNP TSC0045731
aagaagcgaagay

SEQ ID NO: 185556 - DNA, 13 bp, Artificial Sequence
  Oligonucleotide for detection of SNP TSC0045731
rtcttcgcttctt

SEQ ID NO: 185557 - DNA, 13 bp, Artificial Sequence
  Oligonucleotide for detection of SNP TSC0045732
agttgaattgtgt

SEQ ID NO: 185558 - DNA, 13 bp, Artificial Sequence
  Oligonucleotide for detection of SNP TSC0045732
acacaattcaact

SEQ ID NO: 185559 - DNA, 13 bp, Artificial Sequence
  Oligonucleotide for detection of SNP TSC0045732
agttgagttgtgt

SEQ ID NO: 185560 - DNA, 13 bp, Artificial Sequence
  Oligonucleotide for detection of SNP TSC0045732
acacaactcaact

SEQ ID NO: 185561 - DNA, 13 bp, Artificial Sequence
  Oligonucleotide for detection of SNP TSC0045735
attagtagggtat

SEQ ID NO: 185562 - DNA, 13 bp, Artificial Sequence
  Oligonucleotide for detection of SNP TSC0045735
ataccctactaat

SEQ ID NO: 185563 - DNA, 13 bp, Artificial Sequence
  Oligonucleotide for detection of SNP TSC0045737
gggagtattttat

SEQ ID NO: 185564 - DNA, 13 bp, Artificial Sequence
  Oligonucleotide for detection of SNP TSC0045737
ataaaatactccc

SEQ ID NO: 185565 - DNA, 13 bp, Artificial Sequence
  Oligonucleotide for detection of SNP TSC0045737
gggagtgttttat

SEQ ID NO: 185566 - DNA, 13 bp, Artificial Sequence
  Oligonucleotide for detection of SNP TSC0045737
ataaaacactccc

SEQ ID NO: 185567 - DNA, 13 bp, Artificial Sequence
  Oligonucleotide for detection of SNP TSC0045737
gggagcgttttat

SEQ ID NO: 185568 - DNA, 13 bp, Artificial Sequence
  Oligonucleotide for detection of SNP TSC0045737
ataaaacgctccc

SEQ ID NO: 185569 - DNA, 13 bp, Artificial Sequence
  Oligonucleotide for detection of SNP TSC0045737
atggagtgtttty

SEQ ID NO: 185570 - DNA, 13 bp, Artificial Sequence
  Oligonucleotide for detection of SNP TSC0045737
raaaacactccat

SEQ ID NO: 185571 - DNA, 13 bp, Artificial Sequence
  Oligonucleotide for detection of SNP TSC0045737
atggagcgtttty

SEQ ID NO: 185572 - DNA, 13 bp, Artificial Sequence
  Oligonucleotide for detection of SNP TSC0045737
raaaacgctccat

SEQ ID NO: 185573 - DNA, 13 bp, Artificial Sequence
  Oligonucleotide for detection of SNP TSC0045738
atgtttgtgttty

SEQ ID NO: 185574 - DNA, 13 bp, Artificial Sequence
  Oligonucleotide for detection of SNP TSC0045738
raaacacaaacat

SEQ ID NO: 185575 - DNA, 13 bp, Artificial Sequence
  Oligonucleotide for detection of SNP TSC0045738
atgtttatgttty

SEQ ID NO: 185576 - DNA, 13 bp, Artificial Sequence
  Oligonucleotide for detection of SNP TSC0045738
raaacataaacat

SEQ ID NO: 185577 - DNA, 13 bp, Artificial Sequence
  Oligonucleotide for detection of SNP TSC0045739
aggtgattggtgg

SEQ ID NO: 185578 - DNA, 13 bp, Artificial Sequence
  Oligonucleotide for detection of SNP TSC0045739
ccaccaatcacct

SEQ ID NO: 185579 - DNA, 13 bp, Artificial Sequence
  Oligonucleotide for detection of SNP TSC0045739
aggtgagtggtgg

SEQ ID NO: 185580 - DNA, 13 bp, Artificial Sequence
  Oligonucleotide for detection of SNP TSC0045739
ccaccactcacct

SEQ ID NO: 185581 - DNA, 13 bp, Artificial Sequence
  Oligonucleotide for detection of SNP TSC0045739
aggcgattggtgg

SEQ ID NO: 185582 - DNA, 13 bp, Artificial Sequence
  Oligonucleotide for detection of SNP TSC0045739
ccaccaatcgcct

SEQ ID NO: 185583 - DNA, 13 bp, Artificial Sequence
  Oligonucleotide for detection of SNP TSC0045739
aggcgagtggtgg

SEQ ID NO: 185584 - DNA, 13 bp, Artificial Sequence
  Oligonucleotide for detection of SNP TSC0045739
ccaccactcgcct

SEQ ID NO: 185585 - DNA, 13 bp, Artificial Sequence
  Oligonucleotide for detection of SNP TSC0045739
ttattatttgttt

SEQ ID NO: 185586 - DNA, 13 bp, Artificial Sequence
  Oligonucleotide for detection of SNP TSC0045739
aaacaaataataa

SEQ ID NO: 185587 - DNA, 13 bp, Artificial Sequence
  Oligonucleotide for detection of SNP TSC0045739
ttattagtcgttt

SEQ ID NO: 185588 - DNA, 13 bp, Artificial Sequence
  Oligonucleotide for detection of SNP TSC0045739
aaacgactaataa

SEQ ID NO: 185589 - DNA, 13 bp, Artificial Sequence
  Oligonucleotide for detection of SNP TSC0045739
ttattattcgttt

SEQ ID NO: 185590 - DNA, 13 bp, Artificial Sequence
  Oligonucleotide for detection of SNP TSC0045739
aaacgaataataa

SEQ ID NO: 185591 - DNA, 13 bp, Artificial Sequence
  Oligonucleotide for detection of SNP TSC0045740
ttttttaaagtaa

SEQ ID NO: 185592 - DNA, 13 bp, Artificial Sequence
  Oligonucleotide for detection of SNP TSC0045740
ttactttaaaaaa

SEQ ID NO: 185593 - DNA, 13 bp, Artificial Sequence
  Oligonucleotide for detection of SNP TSC0045740
tttttcgaagtaa

SEQ ID NO: 185594 - DNA, 13 bp, Artificial Sequence
  Oligonucleotide for detection of SNP TSC0045740
ttacttcgaaaaa

SEQ ID NO: 185595 - DNA, 13 bp, Artificial Sequence
  Oligonucleotide for detection of SNP TSC0045740
ttattttgggaaa

SEQ ID NO: 185596 - DNA, 13 bp, Artificial Sequence
  Oligonucleotide for detection of SNP TSC0045740
tttcccaaaataa

SEQ ID NO: 185597 - DNA, 13 bp, Artificial Sequence
  Oligonucleotide for detection of SNP TSC0045740
ttatttcgggaaa

SEQ ID NO: 185598 - DNA, 13 bp, Artificial Sequence
  Oligonucleotide for detection of SNP TSC0045740
tttcccgaaataa

SEQ ID NO: 185599 - DNA, 13 bp, Artificial Sequence
  Oligonucleotide for detection of SNP TSC0045741
ttataatggagtt

SEQ ID NO: 185600 - DNA, 13 bp, Artificial Sequence
  Oligonucleotide for detection of SNP TSC0045741
aactccattataa

SEQ ID NO: 185601 - DNA, 13 bp, Artificial Sequence
  Oligonucleotide for detection of SNP TSC0045741
ttataagggagtt

SEQ ID NO: 185602 - DNA, 13 bp, Artificial Sequence
  Oligonucleotide for detection of SNP TSC0045741
aactcccttataa

SEQ ID NO: 185603 - DNA, 13 bp, Artificial Sequence
  Oligonucleotide for detection of SNP TSC0045741
agttttattatga

SEQ ID NO: 185604 - DNA, 13 bp, Artificial Sequence
  Oligonucleotide for detection of SNP TSC0045741
tcataataaaact

SEQ ID NO: 185605 - DNA, 13 bp, Artificial Sequence
  Oligonucleotide for detection of SNP TSC0045741
agtttttttatga

SEQ ID NO: 185606 - DNA, 13 bp, Artificial Sequence
  Oligonucleotide for detection of SNP TSC0045741
tcataaaaaaact

SEQ ID NO: 185607 - DNA, 13 bp, Artificial Sequence
  Oligonucleotide for detection of SNP TSC0045742
ttaatgtggtgay

SEQ ID NO: 185608 - DNA, 13 bp, Artificial Sequence
  Oligonucleotide for detection of SNP TSC0045742
rtcaccacattaa

SEQ ID NO: 185609 - DNA, 13 bp, Artificial Sequence
  Oligonucleotide for detection of SNP TSC0045742
ttaatgcggtgay

SEQ ID NO: 185610 - DNA, 13 bp, Artificial Sequence
  Oligonucleotide for detection of SNP TSC0045742
rtcaccgcattaa

SEQ ID NO: 185611 - DNA, 13 bp, Artificial Sequence
  Oligonucleotide for detection of SNP TSC0045742
gttattgtattag

SEQ ID NO: 185612 - DNA, 13 bp, Artificial Sequence
  Oligonucleotide for detection of SNP TSC0045742
ctaatacaataac

SEQ ID NO: 185613 - DNA, 13 bp, Artificial Sequence
  Oligonucleotide for detection of SNP TSC0045742
gttattatattag

SEQ ID NO: 185614 - DNA, 13 bp, Artificial Sequence
  Oligonucleotide for detection of SNP TSC0045742
ctaatataataac

SEQ ID NO: 185615 - DNA, 13 bp, Artificial Sequence
  Oligonucleotide for detection of SNP TSC0045742
gttatcgtattag

SEQ ID NO: 185616 - DNA, 13 bp, Artificial Sequence
  Oligonucleotide for detection of SNP TSC0045742
ctaatacgataac

SEQ ID NO: 185617 - DNA, 13 bp, Artificial Sequence
  Oligonucleotide for detection of SNP TSC0045743
taggtatgatatt

SEQ ID NO: 185618 - DNA, 13 bp, Artificial Sequence
  Oligonucleotide for detection of SNP TSC0045743
aatatcataccta

SEQ ID NO: 185619 - DNA, 13 bp, Artificial Sequence
  Oligonucleotide for detection of SNP TSC0045743
taggtaggatatt

SEQ ID NO: 185620 - DNA, 13 bp, Artificial Sequence
  Oligonucleotide for detection of SNP TSC0045743
aatatcctaccta

SEQ ID NO: 185621 - DNA, 13 bp, Artificial Sequence
  Oligonucleotide for detection of SNP TSC0045743
agtattatgtttg

SEQ ID NO: 185622 - DNA, 13 bp, Artificial Sequence
  Oligonucleotide for detection of SNP TSC0045743
caaacataatact

SEQ ID NO: 185623 - DNA, 13 bp, Artificial Sequence
  Oligonucleotide for detection of SNP TSC0045743
agtattttgtttg

SEQ ID NO: 185624 - DNA, 13 bp, Artificial Sequence
  Oligonucleotide for detection of SNP TSC0045743
caaacaaaatact

SEQ ID NO: 185625 - DNA, 13 bp, Artificial Sequence
  Oligonucleotide for detection of SNP TSC0045745
gtatataggtaay

SEQ ID NO: 185626 - DNA, 13 bp, Artificial Sequence
  Oligonucleotide for detection of SNP TSC0045745
rttacctatatac

SEQ ID NO: 185627 - DNA, 13 bp, Artificial Sequence
  Oligonucleotide for detection of SNP TSC0045745
gtatatgggtaay

SEQ ID NO: 185628 - DNA, 13 bp, Artificial Sequence
  Oligonucleotide for detection of SNP TSC0045745
rttacccatatac

SEQ ID NO: 185629 - DNA, 13 bp, Artificial Sequence
  Oligonucleotide for detection of SNP TSC0045745
gtatacgggtaay

SEQ ID NO: 185630 - DNA, 13 bp, Artificial Sequence
  Oligonucleotide for detection of SNP TSC0045745
rttacccgtatac

SEQ ID NO: 185631 - DNA, 13 bp, Artificial Sequence
  Oligonucleotide for detection of SNP TSC0045745
gttatttgtatgy

SEQ ID NO: 185632 - DNA, 13 bp, Artificial Sequence
  Oligonucleotide for detection of SNP TSC0045745
rcatacaaataac

SEQ ID NO: 185633 - DNA, 13 bp, Artificial Sequence
  Oligonucleotide for detection of SNP TSC0045745
gttattcgtatgy

SEQ ID NO: 185634 - DNA, 13 bp, Artificial Sequence
  Oligonucleotide for detection of SNP TSC0045745
rcatacgaataac

SEQ ID NO: 185635 - DNA, 13 bp, Artificial Sequence
  Oligonucleotide for detection of SNP TSC0045747
agtgaatgagttt

SEQ ID NO: 185636 - DNA, 13 bp, Artificial Sequence
  Oligonucleotide for detection of SNP TSC0045747
aaactcattcact

SEQ ID NO: 185637 - DNA, 13 bp, Artificial Sequence
  Oligonucleotide for detection of SNP TSC0045747
agtgaacgagttt

SEQ ID NO: 185638 - DNA, 13 bp, Artificial Sequence
  Oligonucleotide for detection of SNP TSC0045747
aaactcgttcact

SEQ ID NO: 185639 - DNA, 13 bp, Artificial Sequence
  Oligonucleotide for detection of SNP TSC0045748
aatttatgtttty

SEQ ID NO: 185640 - DNA, 13 bp, Artificial Sequence
  Oligonucleotide for detection of SNP TSC0045748
raaaacataaatt

SEQ ID NO: 185641 - DNA, 13 bp, Artificial Sequence
  Oligonucleotide for detection of SNP TSC0045748
aatttacgtttty

SEQ ID NO: 185642 - DNA, 13 bp, Artificial Sequence
  Oligonucleotide for detection of SNP TSC0045748
raaaacgtaaatt

SEQ ID NO: 185643 - DNA, 13 bp, Artificial Sequence
  Oligonucleotide for detection of SNP TSC0045748
gagaatgtgggtt

SEQ ID NO: 185644 - DNA, 13 bp, Artificial Sequence
  Oligonucleotide for detection of SNP TSC0045748
aacccacattctc

SEQ ID NO: 185645 - DNA, 13 bp, Artificial Sequence
  Oligonucleotide for detection of SNP TSC0045748
gagaatatgggtt

SEQ ID NO: 185646 - DNA, 13 bp, Artificial Sequence
  Oligonucleotide for detection of SNP TSC0045748
aacccatattctc

SEQ ID NO: 185647 - DNA, 13 bp, Artificial Sequence
  Oligonucleotide for detection of SNP TSC0045748
gagaacgtgggtt

SEQ ID NO: 185648 - DNA, 13 bp, Artificial Sequence
  Oligonucleotide for detection of SNP TSC0045748
aacccacgttctc

SEQ ID NO: 185649 - DNA, 13 bp, Artificial Sequence
  Oligonucleotide for detection of SNP TSC0045749
taaaagaaaggat

SEQ ID NO: 185650 - DNA, 13 bp, Artificial Sequence
  Oligonucleotide for detection of SNP TSC0045749
atcctttctttta

SEQ ID NO: 185651 - DNA, 13 bp, Artificial Sequence
  Oligonucleotide for detection of SNP TSC0045749
taaaaggaaggat

SEQ ID NO: 185652 - DNA, 13 bp, Artificial Sequence
  Oligonucleotide for detection of SNP TSC0045749
atccttcctttta

SEQ ID NO: 185653 - DNA, 13 bp, Artificial Sequence
  Oligonucleotide for detection of SNP TSC0045750
gaatggtggaagt

SEQ ID NO: 185654 - DNA, 13 bp, Artificial Sequence
  Oligonucleotide for detection of SNP TSC0045750
acttccaccattc

SEQ ID NO: 185655 - DNA, 13 bp, Artificial Sequence
  Oligonucleotide for detection of SNP TSC0045750
gaatggcggaagt

SEQ ID NO: 185656 - DNA, 13 bp, Artificial Sequence
  Oligonucleotide for detection of SNP TSC0045750
acttccgccattc

SEQ ID NO: 185657 - DNA, 13 bp, Artificial Sequence
  Oligonucleotide for detection of SNP TSC0045751
gtattaagtagat

SEQ ID NO: 185658 - DNA, 13 bp, Artificial Sequence
  Oligonucleotide for detection of SNP TSC0045751
atctacttaatac

SEQ ID NO: 185659 - DNA, 13 bp, Artificial Sequence
  Oligonucleotide for detection of SNP TSC0045751
gtattaggtagat

SEQ ID NO: 185660 - DNA, 13 bp, Artificial Sequence
  Oligonucleotide for detection of SNP TSC0045751
atctacctaatac

SEQ ID NO: 185661 - DNA, 13 bp, Artificial Sequence
  Oligonucleotide for detection of SNP TSC0045755
gttgttgttttat

SEQ ID NO: 185662 - DNA, 13 bp, Artificial Sequence
  Oligonucleotide for detection of SNP TSC0045755
ataaaacaacaac

SEQ ID NO: 185663 - DNA, 13 bp, Artificial Sequence
  Oligonucleotide for detection of SNP TSC0045755
gttgttattttat

SEQ ID NO: 185664 - DNA, 13 bp, Artificial Sequence
  Oligonucleotide for detection of SNP TSC0045755
ataaaataacaac

SEQ ID NO: 185665 - DNA, 13 bp, Artificial Sequence
  Oligonucleotide for detection of SNP TSC0045756
aaaagtatgttta

SEQ ID NO: 185666 - DNA, 13 bp, Artificial Sequence
  Oligonucleotide for detection of SNP TSC0045756
taaacatactttt

SEQ ID NO: 185667 - DNA, 13 bp, Artificial Sequence
  Oligonucleotide for detection of SNP TSC0045756
aaaagtgtgttta

SEQ ID NO: 185668 - DNA, 13 bp, Artificial Sequence
  Oligonucleotide for detection of SNP TSC0045756
taaacacactttt

SEQ ID NO: 185669 - DNA, 13 bp, Artificial Sequence
  Oligonucleotide for detection of SNP TSC0045756
aaaagcgtgttta

SEQ ID NO: 185670 - DNA, 13 bp, Artificial Sequence
  Oligonucleotide for detection of SNP TSC0045756
taaacacgctttt

SEQ ID NO: 185671 - DNA, 13 bp, Artificial Sequence
  Oligonucleotide for detection of SNP TSC0045757
taaaatgttttaa

SEQ ID NO: 185672 - DNA, 13 bp, Artificial Sequence
  Oligonucleotide for detection of SNP TSC0045757
ttaaaacatttta

SEQ ID NO: 185673 - DNA, 13 bp, Artificial Sequence
  Oligonucleotide for detection of SNP TSC0045758
aatttttttttat

SEQ ID NO: 185674 - DNA, 13 bp, Artificial Sequence
  Oligonucleotide for detection of SNP TSC0045758
ataaaaaaaaatt

SEQ ID NO: 185675 - DNA, 13 bp, Artificial Sequence
  Oligonucleotide for detection of SNP TSC0045758
atgaaagaagatt

SEQ ID NO: 185676 - DNA, 13 bp, Artificial Sequence
  Oligonucleotide for detection of SNP TSC0045758
aatcttctttcat

SEQ ID NO: 185677 - DNA, 13 bp, Artificial Sequence
  Oligonucleotide for detection of SNP TSC0045758
atgaaataagatt

SEQ ID NO: 185678 - DNA, 13 bp, Artificial Sequence
  Oligonucleotide for detection of SNP TSC0045758
aatcttatttcat

SEQ ID NO: 185679 - DNA, 13 bp, Artificial Sequence
  Oligonucleotide for detection of SNP TSC0045759
gtttagtgagtta

SEQ ID NO: 185680 - DNA, 13 bp, Artificial Sequence
  Oligonucleotide for detection of SNP TSC0045759
taactcactaaac

SEQ ID NO: 185681 - DNA, 13 bp, Artificial Sequence
  Oligonucleotide for detection of SNP TSC0045759
gtttagcgagtta

SEQ ID NO: 185682 - DNA, 13 bp, Artificial Sequence
  Oligonucleotide for detection of SNP TSC0045759
taactcgctaaac

SEQ ID NO: 185683 - DNA, 13 bp, Artificial Sequence
  Oligonucleotide for detection of SNP TSC0045759
tggtttgttggay

SEQ ID NO: 185684 - DNA, 13 bp, Artificial Sequence
  Oligonucleotide for detection of SNP TSC0045759
rtccaacaaacca

SEQ ID NO: 185685 - DNA, 13 bp, Artificial Sequence
  Oligonucleotide for detection of SNP TSC0045759
tggtttattggay

SEQ ID NO: 185686 - DNA, 13 bp, Artificial Sequence
  Oligonucleotide for detection of SNP TSC0045759
rtccaataaacca

SEQ ID NO: 185687 - DNA, 13 bp, Artificial Sequence
  Oligonucleotide for detection of SNP TSC0045759
tggttcgttggay

SEQ ID NO: 185688 - DNA, 13 bp, Artificial Sequence
  Oligonucleotide for detection of SNP TSC0045759
rtccaacgaacca

SEQ ID NO: 185689 - DNA, 13 bp, Artificial Sequence
  Oligonucleotide for detection of SNP TSC0045760
taaatattttgtg

SEQ ID NO: 185690 - DNA, 13 bp, Artificial Sequence
  Oligonucleotide for detection of SNP TSC0045760
cacaaaatattta

SEQ ID NO: 185691 - DNA, 13 bp, Artificial Sequence
  Oligonucleotide for detection of SNP TSC0045760
taaatagtttgtg

SEQ ID NO: 185692 - DNA, 13 bp, Artificial Sequence
  Oligonucleotide for detection of SNP TSC0045760
cacaaactattta

SEQ ID NO: 185693 - DNA, 13 bp, Artificial Sequence
  Oligonucleotide for detection of SNP TSC0045760
tatagagtgtttg

SEQ ID NO: 185694 - DNA, 13 bp, Artificial Sequence
  Oligonucleotide for detection of SNP TSC0045760
caaacactctata

SEQ ID NO: 185695 - DNA, 13 bp, Artificial Sequence
  Oligonucleotide for detection of SNP TSC0045760
tatagattgtttg

SEQ ID NO: 185696 - DNA, 13 bp, Artificial Sequence
  Oligonucleotide for detection of SNP TSC0045760
caaacaatctata

SEQ ID NO: 185697 - DNA, 13 bp, Artificial Sequence
  Oligonucleotide for detection of SNP TSC0045763
agaaaagagatat

SEQ ID NO: 185698 - DNA, 13 bp, Artificial Sequence
  Oligonucleotide for detection of SNP TSC0045763
atatctcttttct

SEQ ID NO: 185699 - DNA, 13 bp, Artificial Sequence
  Oligonucleotide for detection of SNP TSC0045763
agaaaaaagatat

SEQ ID NO: 185700 - DNA, 13 bp, Artificial Sequence
  Oligonucleotide for detection of SNP TSC0045763
atatcttttttct

SEQ ID NO: 185701 - DNA, 13 bp, Artificial Sequence
  Oligonucleotide for detection of SNP TSC0045764
ttttgttattatt

SEQ ID NO: 185702 - DNA, 13 bp, Artificial Sequence
  Oligonucleotide for detection of SNP TSC0045764
aataataacaaaa

SEQ ID NO: 185703 - DNA, 13 bp, Artificial Sequence
  Oligonucleotide for detection of SNP TSC0045764
ttttgtgattatt

SEQ ID NO: 185704 - DNA, 13 bp, Artificial Sequence
  Oligonucleotide for detection of SNP TSC0045764
aataatcacaaaa

SEQ ID NO: 185705 - DNA, 13 bp, Artificial Sequence
  Oligonucleotide for detection of SNP TSC0045764
aataatgataggg

SEQ ID NO: 185706 - DNA, 13 bp, Artificial Sequence
  Oligonucleotide for detection of SNP TSC0045764
ccctatcattatt

SEQ ID NO: 185707 - DNA, 13 bp, Artificial Sequence
  Oligonucleotide for detection of SNP TSC0045764
aataattataggg

SEQ ID NO: 185708 - DNA, 13 bp, Artificial Sequence
  Oligonucleotide for detection of SNP TSC0045764
ccctataattatt

SEQ ID NO: 185709 - DNA, 13 bp, Artificial Sequence
  Oligonucleotide for detection of SNP TSC0045766
atattgatagtay

SEQ ID NO: 185710 - DNA, 13 bp, Artificial Sequence
  Oligonucleotide for detection of SNP TSC0045766
rtactatcaatat

SEQ ID NO: 185711 - DNA, 13 bp, Artificial Sequence
  Oligonucleotide for detection of SNP TSC0045766
atattggtagtay

SEQ ID NO: 185712 - DNA, 13 bp, Artificial Sequence
  Oligonucleotide for detection of SNP TSC0045766
rtactaccaatat

SEQ ID NO: 185713 - DNA, 13 bp, Artificial Sequence
  Oligonucleotide for detection of SNP TSC0045769
tggttttgatatt

SEQ ID NO: 185714 - DNA, 13 bp, Artificial Sequence
  Oligonucleotide for detection of SNP TSC0045769
aatatcaaaacca

SEQ ID NO: 185715 - DNA, 13 bp, Artificial Sequence
  Oligonucleotide for detection of SNP TSC0045769
tggtttcgatatt

SEQ ID NO: 185716 - DNA, 13 bp, Artificial Sequence
  Oligonucleotide for detection of SNP TSC0045769
aatatcgaaacca

SEQ ID NO: 185717 - DNA, 13 bp, Artificial Sequence
  Oligonucleotide for detection of SNP TSC0045769
agtattgaggtta

SEQ ID NO: 185718 - DNA, 13 bp, Artificial Sequence
  Oligonucleotide for detection of SNP TSC0045769
taacctcaatact

SEQ ID NO: 185719 - DNA, 13 bp, Artificial Sequence
  Oligonucleotide for detection of SNP TSC0045769
agtatcgaggtta

SEQ ID NO: 185720 - DNA, 13 bp, Artificial Sequence
  Oligonucleotide for detection of SNP TSC0045769
taacctcgatact

SEQ ID NO: 185721 - DNA, 13 bp, Artificial Sequence
  Oligonucleotide for detection of SNP TSC0045776
tttttgaagttag

SEQ ID NO: 185722 - DNA, 13 bp, Artificial Sequence
  Oligonucleotide for detection of SNP TSC0045776
ctaacttcaaaaa

SEQ ID NO: 185723 - DNA, 13 bp, Artificial Sequence
  Oligonucleotide for detection of SNP TSC0045776
tttttggagttag

SEQ ID NO: 185724 - DNA, 13 bp, Artificial Sequence
  Oligonucleotide for detection of SNP TSC0045776
ctaactccaaaaa

SEQ ID NO: 185725 - DNA, 13 bp, Artificial Sequence
  Oligonucleotide for detection of SNP TSC0007580
ttgtaaaggatty

SEQ ID NO: 185726 - DNA, 13 bp, Artificial Sequence
  Oligonucleotide for detection of SNP TSC0007580
raatcctttacaa

SEQ ID NO: 185727 - DNA, 13 bp, Artificial Sequence
  Oligonucleotide for detection of SNP TSC0007580
ttgtaatggatty

SEQ ID NO: 185728 - DNA, 13 bp, Artificial Sequence
  Oligonucleotide for detection of SNP TSC0007580
raatccattacaa

SEQ ID NO: 185729 - DNA, 13 bp, Artificial Sequence
  Oligonucleotide for detection of SNP TSC0007580
gaattttttgtaa

SEQ ID NO: 185730 - DNA, 13 bp, Artificial Sequence
  Oligonucleotide for detection of SNP TSC0007580
ttacaaaaaattc

SEQ ID NO: 185731 - DNA, 13 bp, Artificial Sequence
  Oligonucleotide for detection of SNP TSC0007580
gaatttattgtaa

SEQ ID NO: 185732 - DNA, 13 bp, Artificial Sequence
  Oligonucleotide for detection of SNP TSC0007580
ttacaataaattc

SEQ ID NO: 185733 - DNA, 13 bp, Artificial Sequence
  Oligonucleotide for detection of SNP TSC0045780
attaaatgaatgg

SEQ ID NO: 185734 - DNA, 13 bp, Artificial Sequence
  Oligonucleotide for detection of SNP TSC0045780
ccattcatttaat

SEQ ID NO: 185735 - DNA, 13 bp, Artificial Sequence
  Oligonucleotide for detection of SNP TSC0045780
attaaacgaatgg

SEQ ID NO: 185736 - DNA, 13 bp, Artificial Sequence
  Oligonucleotide for detection of SNP TSC0045780
ccattcgtttaat

SEQ ID NO: 185737 - DNA, 13 bp, Artificial Sequence
  Oligonucleotide for detection of SNP TSC0045782
aaaaaagataaat

SEQ ID NO: 185738 - DNA, 13 bp, Artificial Sequence
  Oligonucleotide for detection of SNP TSC0045782
atttatctttttt

SEQ ID NO: 185739 - DNA, 13 bp, Artificial Sequence
  Oligonucleotide for detection of SNP TSC0045783
ttgttatgttgga

SEQ ID NO: 185740 - DNA, 13 bp, Artificial Sequence
  Oligonucleotide for detection of SNP TSC0045783
tccaacataacaa

SEQ ID NO: 185741 - DNA, 13 bp, Artificial Sequence
  Oligonucleotide for detection of SNP TSC0045783
ttgttacgttgga

SEQ ID NO: 185742 - DNA, 13 bp, Artificial Sequence
  Oligonucleotide for detection of SNP TSC0045783
tccaacgtaacaa

SEQ ID NO: 185743 - DNA, 13 bp, Artificial Sequence
  Oligonucleotide for detection of SNP TSC0045783
tttagtgtggtaa

SEQ ID NO: 185744 - DNA, 13 bp, Artificial Sequence
  Oligonucleotide for detection of SNP TSC0045783
ttaccacactaaa

SEQ ID NO: 185745 - DNA, 13 bp, Artificial Sequence
  Oligonucleotide for detection of SNP TSC0045783
tttagtatggtaa

SEQ ID NO: 185746 - DNA, 13 bp, Artificial Sequence
  Oligonucleotide for detection of SNP TSC0045783
ttaccatactaaa

SEQ ID NO: 185747 - DNA, 13 bp, Artificial Sequence
  Oligonucleotide for detection of SNP TSC0045783
tttagcgtggtaa

SEQ ID NO: 185748 - DNA, 13 bp, Artificial Sequence
  Oligonucleotide for detection of SNP TSC0045783
ttaccacgctaaa

SEQ ID NO: 185749 - DNA, 13 bp, Artificial Sequence
  Oligonucleotide for detection of SNP TSC0045784
taaataatagtat

SEQ ID NO: 185750 - DNA, 13 bp, Artificial Sequence
  Oligonucleotide for detection of SNP TSC0045784
atactattattta

SEQ ID NO: 185751 - DNA, 13 bp, Artificial Sequence
  Oligonucleotide for detection of SNP TSC0045784
taaatattagtat

SEQ ID NO: 185752 - DNA, 13 bp, Artificial Sequence
  Oligonucleotide for detection of SNP TSC0045784
atactaatattta

SEQ ID NO: 185753 - DNA, 13 bp, Artificial Sequence
  Oligonucleotide for detection of SNP TSC0045785
tgttaggttatga

SEQ ID NO: 185754 - DNA, 13 bp, Artificial Sequence
  Oligonucleotide for detection of SNP TSC0045785
tcataacctaaca

SEQ ID NO: 185755 - DNA, 13 bp, Artificial Sequence
  Oligonucleotide for detection of SNP TSC0045785
tgttagattatga

SEQ ID NO: 185756 - DNA, 13 bp, Artificial Sequence
  Oligonucleotide for detection of SNP TSC0045785
tcataatctaaca

SEQ ID NO: 185757 - DNA, 13 bp, Artificial Sequence
  Oligonucleotide for detection of SNP TSC0045787
attgttagaagag

SEQ ID NO: 185758 - DNA, 13 bp, Artificial Sequence
  Oligonucleotide for detection of SNP TSC0045787
ctcttctaacaat

SEQ ID NO: 185759 - DNA, 13 bp, Artificial Sequence
  Oligonucleotide for detection of SNP TSC0045787
attgttggaagag

SEQ ID NO: 185760 - DNA, 13 bp, Artificial Sequence
  Oligonucleotide for detection of SNP TSC0045787
ctcttccaacaat

SEQ ID NO: 185761 - DNA, 13 bp, Artificial Sequence
  Oligonucleotide for detection of SNP TSC0045787
attgtcggaagag

SEQ ID NO: 185762 - DNA, 13 bp, Artificial Sequence
  Oligonucleotide for detection of SNP TSC0045787
ctcttccgacaat

SEQ ID NO: 185763 - DNA, 13 bp, Artificial Sequence
  Oligonucleotide for detection of SNP TSC0007757
ttatatatagtay

SEQ ID NO: 185764 - DNA, 13 bp, Artificial Sequence
  Oligonucleotide for detection of SNP TSC0007757
rtactatatataa

SEQ ID NO: 185765 - DNA, 13 bp, Artificial Sequence
  Oligonucleotide for detection of SNP TSC0007757
ttatatgtagtay

SEQ ID NO: 185766 - DNA, 13 bp, Artificial Sequence
  Oligonucleotide for detection of SNP TSC0007757
rtactacatataa

SEQ ID NO: 185767 - DNA, 13 bp, Artificial Sequence
  Oligonucleotide for detection of SNP TSC0045789
gttttgattatta

SEQ ID NO: 185768 - DNA, 13 bp, Artificial Sequence
  Oligonucleotide for detection of SNP TSC0045789
taataatcaaaac

SEQ ID NO: 185769 - DNA, 13 bp, Artificial Sequence
  Oligonucleotide for detection of SNP TSC0045789
gttttggttatta

SEQ ID NO: 185770 - DNA, 13 bp, Artificial Sequence
  Oligonucleotide for detection of SNP TSC0045789
taataaccaaaac

SEQ ID NO: 185771 - DNA, 13 bp, Artificial Sequence
  Oligonucleotide for detection of SNP TSC0045790
ttggttattatat

SEQ ID NO: 185772 - DNA, 13 bp, Artificial Sequence
  Oligonucleotide for detection of SNP TSC0045790
atataataaccaa

SEQ ID NO: 185773 - DNA, 13 bp, Artificial Sequence
  Oligonucleotide for detection of SNP TSC0045790
atgtagagattag

SEQ ID NO: 185774 - DNA, 13 bp, Artificial Sequence
  Oligonucleotide for detection of SNP TSC0045790
ctaatctctacat

SEQ ID NO: 185775 - DNA, 13 bp, Artificial Sequence
  Oligonucleotide for detection of SNP TSC0045791
ttgttgcgtattt

SEQ ID NO: 185776 - DNA, 13 bp, Artificial Sequence
  Oligonucleotide for detection of SNP TSC0045791
aaatacgcaacaa

SEQ ID NO: 185777 - DNA, 13 bp, Artificial Sequence
  Oligonucleotide for detection of SNP TSC0045791
agatgtgtaatag

SEQ ID NO: 185778 - DNA, 13 bp, Artificial Sequence
  Oligonucleotide for detection of SNP TSC0045791
ctattacacatct

SEQ ID NO: 185779 - DNA, 13 bp, Artificial Sequence
  Oligonucleotide for detection of SNP TSC0045791
agatgtataatag

SEQ ID NO: 185780 - DNA, 13 bp, Artificial Sequence
  Oligonucleotide for detection of SNP TSC0045791
ctattatacatct

SEQ ID NO: 185781 - DNA, 13 bp, Artificial Sequence
  Oligonucleotide for detection of SNP TSC0045791
agatgcgtaatag

SEQ ID NO: 185782 - DNA, 13 bp, Artificial Sequence
  Oligonucleotide for detection of SNP TSC0045791
ctattacgcatct

SEQ ID NO: 185783 - DNA, 13 bp, Artificial Sequence
  Oligonucleotide for detection of SNP TSC0045792
ggagtaattgtag

SEQ ID NO: 185784 - DNA, 13 bp, Artificial Sequence
  Oligonucleotide for detection of SNP TSC0045792
ctacaattactcc

SEQ ID NO: 185785 - DNA, 13 bp, Artificial Sequence
  Oligonucleotide for detection of SNP TSC0045792
ggagtatttgtag

SEQ ID NO: 185786 - DNA, 13 bp, Artificial Sequence
  Oligonucleotide for detection of SNP TSC0045792
ctacaaatactcc

SEQ ID NO: 185787 - DNA, 13 bp, Artificial Sequence
  Oligonucleotide for detection of SNP TSC0045792
ttataattgttty

SEQ ID NO: 185788 - DNA, 13 bp, Artificial Sequence
  Oligonucleotide for detection of SNP TSC0045792
raaacaattataa

SEQ ID NO: 185789 - DNA, 13 bp, Artificial Sequence
  Oligonucleotide for detection of SNP TSC0045792
ttataaatgttty

SEQ ID NO: 185790 - DNA, 13 bp, Artificial Sequence
  Oligonucleotide for detection of SNP TSC0045792
raaacatttataa

SEQ ID NO: 185791 - DNA, 13 bp, Artificial Sequence
  Oligonucleotide for detection of SNP TSC0045793
agagggaagatay

SEQ ID NO: 185792 - DNA, 13 bp, Artificial Sequence
  Oligonucleotide for detection of SNP TSC0045793
rtatcttccctct

SEQ ID NO: 185793 - DNA, 13 bp, Artificial Sequence
  Oligonucleotide for detection of SNP TSC0045793
agaggggagatay

SEQ ID NO: 185794 - DNA, 13 bp, Artificial Sequence
  Oligonucleotide for detection of SNP TSC0045793
rtatctcccctct

SEQ ID NO: 185795 - DNA, 13 bp, Artificial Sequence
  Oligonucleotide for detection of SNP TSC0045794
atatatagtaagy

SEQ ID NO: 185796 - DNA, 13 bp, Artificial Sequence
  Oligonucleotide for detection of SNP TSC0045794
rcttactatatat

SEQ ID NO: 185797 - DNA, 13 bp, Artificial Sequence
  Oligonucleotide for detection of SNP TSC0045794
atatatggtaagy

SEQ ID NO: 185798 - DNA, 13 bp, Artificial Sequence
  Oligonucleotide for detection of SNP TSC0045794
rcttaccatatat

SEQ ID NO: 185799 - DNA, 13 bp, Artificial Sequence
  Oligonucleotide for detection of SNP TSC0045794
atatacggtaagy

SEQ ID NO: 185800 - DNA, 13 bp, Artificial Sequence
  Oligonucleotide for detection of SNP TSC0045794
rcttaccgtatat

SEQ ID NO: 185801 - DNA, 13 bp, Artificial Sequence
  Oligonucleotide for detection of SNP TSC0045794
gtttattgtatgt

SEQ ID NO: 185802 - DNA, 13 bp, Artificial Sequence
  Oligonucleotide for detection of SNP TSC0045794
acatacaataaac

SEQ ID NO: 185803 - DNA, 13 bp, Artificial Sequence
  Oligonucleotide for detection of SNP TSC0045794
gtttatcgtatgt

SEQ ID NO: 185804 - DNA, 13 bp, Artificial Sequence
  Oligonucleotide for detection of SNP TSC0045794
acatacgataaac

SEQ ID NO: 185805 - DNA, 13 bp, Artificial Sequence
  Oligonucleotide for detection of SNP TSC0045795
gtttatattataa

SEQ ID NO: 185806 - DNA, 13 bp, Artificial Sequence
  Oligonucleotide for detection of SNP TSC0045795
ttataatataaac

SEQ ID NO: 185807 - DNA, 13 bp, Artificial Sequence
  Oligonucleotide for detection of SNP TSC0045795
gtttatgttataa

SEQ ID NO: 185808 - DNA, 13 bp, Artificial Sequence
  Oligonucleotide for detection of SNP TSC0045795
ttataacataaac

SEQ ID NO: 185809 - DNA, 13 bp, Artificial Sequence
  Oligonucleotide for detection of SNP TSC0045795
gtttacgttataa

SEQ ID NO: 185810 - DNA, 13 bp, Artificial Sequence
  Oligonucleotide for detection of SNP TSC0045795
ttataacgtaaac

SEQ ID NO: 185811 - DNA, 13 bp, Artificial Sequence
  Oligonucleotide for detection of SNP TSC0045795
ttatgatgtaaay

SEQ ID NO: 185812 - DNA, 13 bp, Artificial Sequence
  Oligonucleotide for detection of SNP TSC0045795
rtttacatcataa

SEQ ID NO: 185813 - DNA, 13 bp, Artificial Sequence
  Oligonucleotide for detection of SNP TSC0045795
ttatgacgtaaay

SEQ ID NO: 185814 - DNA, 13 bp, Artificial Sequence
  Oligonucleotide for detection of SNP TSC0045795
rtttacgtcataa

SEQ ID NO: 185815 - DNA, 13 bp, Artificial Sequence
  Oligonucleotide for detection of SNP TSC0045798
aggataattttty

SEQ ID NO: 185816 - DNA, 13 bp, Artificial Sequence
  Oligonucleotide for detection of SNP TSC0045798
raaaaattatcct

SEQ ID NO: 185817 - DNA, 13 bp, Artificial Sequence
  Oligonucleotide for detection of SNP TSC0045799
attgaaatggtag

SEQ ID NO: 185818 - DNA, 13 bp, Artificial Sequence
  Oligonucleotide for detection of SNP TSC0045799
ctaccatttcaat

SEQ ID NO: 185819 - DNA, 13 bp, Artificial Sequence
  Oligonucleotide for detection of SNP TSC0045799
attgaagtggtag

SEQ ID NO: 185820 - DNA, 13 bp, Artificial Sequence
  Oligonucleotide for detection of SNP TSC0045799
ctaccacttcaat

SEQ ID NO: 185821 - DNA, 13 bp, Artificial Sequence
  Oligonucleotide for detection of SNP TSC0045801
agaaatatatttg

SEQ ID NO: 185822 - DNA, 13 bp, Artificial Sequence
  Oligonucleotide for detection of SNP TSC0045801
caaatatatttct

SEQ ID NO: 185823 - DNA, 13 bp, Artificial Sequence
  Oligonucleotide for detection of SNP TSC0045801
agaaatgtatttg

SEQ ID NO: 185824 - DNA, 13 bp, Artificial Sequence
  Oligonucleotide for detection of SNP TSC0045801
caaatacatttct

SEQ ID NO: 185825 - DNA, 13 bp, Artificial Sequence
  Oligonucleotide for detection of SNP TSC0045801
agaaacgtatttg

SEQ ID NO: 185826 - DNA, 13 bp, Artificial Sequence
  Oligonucleotide for detection of SNP TSC0045801
caaatacgtttct

SEQ ID NO: 185827 - DNA, 13 bp, Artificial Sequence
  Oligonucleotide for detection of SNP TSC0045802
ttagtaatgtaga

SEQ ID NO: 185828 - DNA, 13 bp, Artificial Sequence
  Oligonucleotide for detection of SNP TSC0045802
tctacattactaa

SEQ ID NO: 185829 - DNA, 13 bp, Artificial Sequence
  Oligonucleotide for detection of SNP TSC0045802
ttagtattgtaga

SEQ ID NO: 185830 - DNA, 13 bp, Artificial Sequence
  Oligonucleotide for detection of SNP TSC0045802
tctacaatactaa

SEQ ID NO: 185831 - DNA, 13 bp, Artificial Sequence
  Oligonucleotide for detection of SNP TSC0045802
tttgtattgttaa

SEQ ID NO: 185832 - DNA, 13 bp, Artificial Sequence
  Oligonucleotide for detection of SNP TSC0045802
ttaacaatacaaa

SEQ ID NO: 185833 - DNA, 13 bp, Artificial Sequence
  Oligonucleotide for detection of SNP TSC0045802
tttgtagtgttaa

SEQ ID NO: 185834 - DNA, 13 bp, Artificial Sequence
  Oligonucleotide for detection of SNP TSC0045802
ttaacactacaaa

SEQ ID NO: 185835 - DNA, 13 bp, Artificial Sequence
  Oligonucleotide for detection of SNP TSC0045803
gtaaaattattgt

SEQ ID NO: 185836 - DNA, 13 bp, Artificial Sequence
  Oligonucleotide for detection of SNP TSC0045803
acaataattttac

SEQ ID NO: 185837 - DNA, 13 bp, Artificial Sequence
  Oligonucleotide for detection of SNP TSC0045803
gtaaaagtattgt

SEQ ID NO: 185838 - DNA, 13 bp, Artificial Sequence
  Oligonucleotide for detection of SNP TSC0045803
acaatacttttac

SEQ ID NO: 185839 - DNA, 13 bp, Artificial Sequence
  Oligonucleotide for detection of SNP TSC0045803
atagtggttttay

SEQ ID NO: 185840 - DNA, 13 bp, Artificial Sequence
  Oligonucleotide for detection of SNP TSC0045803
rtaaaaccactat

SEQ ID NO: 185841 - DNA, 13 bp, Artificial Sequence
  Oligonucleotide for detection of SNP TSC0045803
atagtgtttttay

SEQ ID NO: 185842 - DNA, 13 bp, Artificial Sequence
  Oligonucleotide for detection of SNP TSC0045803
rtaaaaacactat

SEQ ID NO: 185843 - DNA, 13 bp, Artificial Sequence
  Oligonucleotide for detection of SNP TSC0045804
aaaaaatgaaagt

SEQ ID NO: 185844 - DNA, 13 bp, Artificial Sequence
  Oligonucleotide for detection of SNP TSC0045804
actttcatttttt

SEQ ID NO: 185845 - DNA, 13 bp, Artificial Sequence
  Oligonucleotide for detection of SNP TSC0045804
aaaaaaagaaagt

SEQ ID NO: 185846 - DNA, 13 bp, Artificial Sequence
  Oligonucleotide for detection of SNP TSC0045804
actttcttttttt

SEQ ID NO: 185847 - DNA, 13 bp, Artificial Sequence
  Oligonucleotide for detection of SNP TSC0045805
gtgtgtttttgtg

SEQ ID NO: 185848 - DNA, 13 bp, Artificial Sequence
  Oligonucleotide for detection of SNP TSC0045805
cacaaaaacacac

SEQ ID NO: 185849 - DNA, 13 bp, Artificial Sequence
  Oligonucleotide for detection of SNP TSC0045805
gtgtgtgtttgtg

SEQ ID NO: 185850 - DNA, 13 bp, Artificial Sequence
  Oligonucleotide for detection of SNP TSC0045805
cacaaacacacac

SEQ ID NO: 185851 - DNA, 13 bp, Artificial Sequence
  Oligonucleotide for detection of SNP TSC0045805
tataaaaatatay

SEQ ID NO: 185852 - DNA, 13 bp, Artificial Sequence
  Oligonucleotide for detection of SNP TSC0045805
rtatatttttata

SEQ ID NO: 185853 - DNA, 13 bp, Artificial Sequence
  Oligonucleotide for detection of SNP TSC0045805
tataaatatatay

SEQ ID NO: 185854 - DNA, 13 bp, Artificial Sequence
  Oligonucleotide for detection of SNP TSC0045805
rtatatatttata

SEQ ID NO: 185855 - DNA, 13 bp, Artificial Sequence
  Oligonucleotide for detection of SNP TSC0045806
gtattatagttta

SEQ ID NO: 185856 - DNA, 13 bp, Artificial Sequence
  Oligonucleotide for detection of SNP TSC0045806
taaactataatac

SEQ ID NO: 185857 - DNA, 13 bp, Artificial Sequence
  Oligonucleotide for detection of SNP TSC0045806
gtattagagttta

SEQ ID NO: 185858 - DNA, 13 bp, Artificial Sequence
  Oligonucleotide for detection of SNP TSC0045806
taaactctaatac

SEQ ID NO: 185859 - DNA, 13 bp, Artificial Sequence
  Oligonucleotide for detection of SNP TSC0045806
taaattgtgatay

SEQ ID NO: 185860 - DNA, 13 bp, Artificial Sequence
  Oligonucleotide for detection of SNP TSC0045806
rtatcacaattta

SEQ ID NO: 185861 - DNA, 13 bp, Artificial Sequence
  Oligonucleotide for detection of SNP TSC0045806
taaattttgatay

SEQ ID NO: 185862 - DNA, 13 bp, Artificial Sequence
  Oligonucleotide for detection of SNP TSC0045806
rtatcaaaattta

SEQ ID NO: 185863 - DNA, 13 bp, Artificial Sequence
  Oligonucleotide for detection of SNP TSC0045808
cgtttattgtgtt

SEQ ID NO: 185864 - DNA, 13 bp, Artificial Sequence
  Oligonucleotide for detection of SNP TSC0045808
aacacaataaacg

SEQ ID NO: 185865 - DNA, 13 bp, Artificial Sequence
  Oligonucleotide for detection of SNP TSC0045808
cgtttagtgtgtt

SEQ ID NO: 185866 - DNA, 13 bp, Artificial Sequence
  Oligonucleotide for detection of SNP TSC0045808
aacacactaaacg

SEQ ID NO: 185867 - DNA, 13 bp, Artificial Sequence
  Oligonucleotide for detection of SNP TSC0045808
aatatagtgggtg

SEQ ID NO: 185868 - DNA, 13 bp, Artificial Sequence
  Oligonucleotide for detection of SNP TSC0045808
cacccactatatt

SEQ ID NO: 185869 - DNA, 13 bp, Artificial Sequence
  Oligonucleotide for detection of SNP TSC0045808
aatatattgggtg

SEQ ID NO: 185870 - DNA, 13 bp, Artificial Sequence
  Oligonucleotide for detection of SNP TSC0045808
cacccaatatatt

SEQ ID NO: 185871 - DNA, 13 bp, Artificial Sequence
  Oligonucleotide for detection of SNP TSC0045808
aatatagtgggcg

SEQ ID NO: 185872 - DNA, 13 bp, Artificial Sequence
  Oligonucleotide for detection of SNP TSC0045808
cgcccactatatt

SEQ ID NO: 185873 - DNA, 13 bp, Artificial Sequence
  Oligonucleotide for detection of SNP TSC0045808
aatatattgggcg

SEQ ID NO: 185874 - DNA, 13 bp, Artificial Sequence
  Oligonucleotide for detection of SNP TSC0045808
cgcccaatatatt

SEQ ID NO: 185875 - DNA, 13 bp, Artificial Sequence
  Oligonucleotide for detection of SNP TSC0045809
tggtaagggtata

SEQ ID NO: 185876 - DNA, 13 bp, Artificial Sequence
  Oligonucleotide for detection of SNP TSC0045809
tatacccttacca

SEQ ID NO: 185877 - DNA, 13 bp, Artificial Sequence
  Oligonucleotide for detection of SNP TSC0045809
tggtaaaggtata

SEQ ID NO: 185878 - DNA, 13 bp, Artificial Sequence
  Oligonucleotide for detection of SNP TSC0045809
tatacctttacca

SEQ ID NO: 185879 - DNA, 13 bp, Artificial Sequence
  Oligonucleotide for detection of SNP TSC0045813
ttattatgataaa

SEQ ID NO: 185880 - DNA, 13 bp, Artificial Sequence
  Oligonucleotide for detection of SNP TSC0045813
tttatcataataa

SEQ ID NO: 185881 - DNA, 13 bp, Artificial Sequence
  Oligonucleotide for detection of SNP TSC0045813
ttattaggataaa

SEQ ID NO: 185882 - DNA, 13 bp, Artificial Sequence
  Oligonucleotide for detection of SNP TSC0045813
tttatcctaataa

SEQ ID NO: 185883 - DNA, 13 bp, Artificial Sequence
  Oligonucleotide for detection of SNP TSC0045813
ttattacgataaa

SEQ ID NO: 185884 - DNA, 13 bp, Artificial Sequence
  Oligonucleotide for detection of SNP TSC0045813
tttatcgtaataa

SEQ ID NO: 185885 - DNA, 13 bp, Artificial Sequence
  Oligonucleotide for detection of SNP TSC0045813
tttattgtaataa

SEQ ID NO: 185886 - DNA, 13 bp, Artificial Sequence
  Oligonucleotide for detection of SNP TSC0045813
ttattacaataaa

SEQ ID NO: 185887 - DNA, 13 bp, Artificial Sequence
  Oligonucleotide for detection of SNP TSC0045813
tttattttaataa

SEQ ID NO: 185888 - DNA, 13 bp, Artificial Sequence
  Oligonucleotide for detection of SNP TSC0045813
ttattaaaataaa

SEQ ID NO: 185889 - DNA, 13 bp, Artificial Sequence
  Oligonucleotide for detection of SNP TSC0010288
taagtaaaatttt

SEQ ID NO: 185890 - DNA, 13 bp, Artificial Sequence
  Oligonucleotide for detection of SNP TSC0010288
aaaattttactta

SEQ ID NO: 185891 - DNA, 13 bp, Artificial Sequence
  Oligonucleotide for detection of SNP TSC0010288
taagtataatttt

SEQ ID NO: 185892 - DNA, 13 bp, Artificial Sequence
  Oligonucleotide for detection of SNP TSC0010288
aaaattatactta

SEQ ID NO: 185893 - DNA, 13 bp, Artificial Sequence
  Oligonucleotide for detection of SNP TSC0010288
agaattttgtttg

SEQ ID NO: 185894 - DNA, 13 bp, Artificial Sequence
  Oligonucleotide for detection of SNP TSC0010288
caaacaaaattct

SEQ ID NO: 185895 - DNA, 13 bp, Artificial Sequence
  Oligonucleotide for detection of SNP TSC0010288
agaattgtgtttg

SEQ ID NO: 185896 - DNA, 13 bp, Artificial Sequence
  Oligonucleotide for detection of SNP TSC0010288
caaacacaattct

SEQ ID NO: 185897 - DNA, 13 bp, Artificial Sequence
  Oligonucleotide for detection of SNP TSC0045815
tattatatagaty

SEQ ID NO: 185898 - DNA, 13 bp, Artificial Sequence
  Oligonucleotide for detection of SNP TSC0045815
ratctatataata

SEQ ID NO: 185899 - DNA, 13 bp, Artificial Sequence
  Oligonucleotide for detection of SNP TSC0045815
tattatgtagaty

SEQ ID NO: 185900 - DNA, 13 bp, Artificial Sequence
  Oligonucleotide for detection of SNP TSC0045815
ratctacataata

SEQ ID NO: 185901 - DNA, 13 bp, Artificial Sequence
  Oligonucleotide for detection of SNP TSC0045815
tattacgtagaty

SEQ ID NO: 185902 - DNA, 13 bp, Artificial Sequence
  Oligonucleotide for detection of SNP TSC0045815
ratctacgtaata

SEQ ID NO: 185903 - DNA, 13 bp, Artificial Sequence
  Oligonucleotide for detection of SNP TSC0045815
gatttatgtagtg

SEQ ID NO: 185904 - DNA, 13 bp, Artificial Sequence
  Oligonucleotide for detection of SNP TSC0045815
cactacataaatc

SEQ ID NO: 185905 - DNA, 13 bp, Artificial Sequence
  Oligonucleotide for detection of SNP TSC0045815
gatttacgtagtg

SEQ ID NO: 185906 - DNA, 13 bp, Artificial Sequence
  Oligonucleotide for detection of SNP TSC0045815
cactacgtaaatc

SEQ ID NO: 185907 - DNA, 13 bp, Artificial Sequence
  Oligonucleotide for detection of SNP TSC0045819
ataatatagtata

SEQ ID NO: 185908 - DNA, 13 bp, Artificial Sequence
  Oligonucleotide for detection of SNP TSC0045819
tatactatattat

SEQ ID NO: 185909 - DNA, 13 bp, Artificial Sequence
  Oligonucleotide for detection of SNP TSC0045819
ataatagagtata

SEQ ID NO: 185910 - DNA, 13 bp, Artificial Sequence
  Oligonucleotide for detection of SNP TSC0045819
tatactctattat

SEQ ID NO: 185911 - DNA, 13 bp, Artificial Sequence
  Oligonucleotide for detection of SNP TSC0045819
tatattgtgttat

SEQ ID NO: 185912 - DNA, 13 bp, Artificial Sequence
  Oligonucleotide for detection of SNP TSC0045819
ataacacaatata

SEQ ID NO: 185913 - DNA, 13 bp, Artificial Sequence
  Oligonucleotide for detection of SNP TSC0045819
tatattttgttat

SEQ ID NO: 185914 - DNA, 13 bp, Artificial Sequence
  Oligonucleotide for detection of SNP TSC0045819
ataacaaaatata

SEQ ID NO: 185915 - DNA, 13 bp, Artificial Sequence
  Oligonucleotide for detection of SNP TSC0045820
atatacgttttta

SEQ ID NO: 185916 - DNA, 13 bp, Artificial Sequence
  Oligonucleotide for detection of SNP TSC0045820
taaaaacgtatat

SEQ ID NO: 185917 - DNA, 13 bp, Artificial Sequence
  Oligonucleotide for detection of SNP TSC0045820
taaaaatgtatgt

SEQ ID NO: 185918 - DNA, 13 bp, Artificial Sequence
  Oligonucleotide for detection of SNP TSC0045820
acatacattttta

SEQ ID NO: 185919 - DNA, 13 bp, Artificial Sequence
  Oligonucleotide for detection of SNP TSC0045820
taaaaacgtatgt

SEQ ID NO: 185920 - DNA, 13 bp, Artificial Sequence
  Oligonucleotide for detection of SNP TSC0045820
acatacgttttta

SEQ ID NO: 185921 - DNA, 13 bp, Artificial Sequence
  Oligonucleotide for detection of SNP TSC0045821
tagattagtggta

SEQ ID NO: 185922 - DNA, 13 bp, Artificial Sequence
  Oligonucleotide for detection of SNP TSC0045821
taccactaatcta

SEQ ID NO: 185923 - DNA, 13 bp, Artificial Sequence
  Oligonucleotide for detection of SNP TSC0045821
tagattggtggta

SEQ ID NO: 185924 - DNA, 13 bp, Artificial Sequence
  Oligonucleotide for detection of SNP TSC0045821
taccaccaatcta

SEQ ID NO: 185925 - DNA, 13 bp, Artificial Sequence
  Oligonucleotide for detection of SNP TSC0045821
tagatcggtggta

SEQ ID NO: 185926 - DNA, 13 bp, Artificial Sequence
  Oligonucleotide for detection of SNP TSC0045821
taccaccgatcta

SEQ ID NO: 185927 - DNA, 13 bp, Artificial Sequence
  Oligonucleotide for detection of SNP TSC0045821
tgttattgattta

SEQ ID NO: 185928 - DNA, 13 bp, Artificial Sequence
  Oligonucleotide for detection of SNP TSC0045821
taaatcaataaca

SEQ ID NO: 185929 - DNA, 13 bp, Artificial Sequence
  Oligonucleotide for detection of SNP TSC0045821
tgttatcgattta

SEQ ID NO: 185930 - DNA, 13 bp, Artificial Sequence
  Oligonucleotide for detection of SNP TSC0045821
taaatcgataaca

SEQ ID NO: 185931 - DNA, 13 bp, Artificial Sequence
  Oligonucleotide for detection of SNP TSC0045822
tgaataagttgta

SEQ ID NO: 185932 - DNA, 13 bp, Artificial Sequence
  Oligonucleotide for detection of SNP TSC0045822
tacaacttattca

SEQ ID NO: 185933 - DNA, 13 bp, Artificial Sequence
  Oligonucleotide for detection of SNP TSC0045822
tgaatatgttgta

SEQ ID NO: 185934 - DNA, 13 bp, Artificial Sequence
  Oligonucleotide for detection of SNP TSC0045822
tacaacatattca

SEQ ID NO: 185935 - DNA, 13 bp, Artificial Sequence
  Oligonucleotide for detection of SNP TSC0045822
tgaatacgttgta

SEQ ID NO: 185936 - DNA, 13 bp, Artificial Sequence
  Oligonucleotide for detection of SNP TSC0045822
tacaacgtattca

SEQ ID NO: 185937 - DNA, 13 bp, Artificial Sequence
  Oligonucleotide for detection of SNP TSC0045822
tataatttattta

SEQ ID NO: 185938 - DNA, 13 bp, Artificial Sequence
  Oligonucleotide for detection of SNP TSC0045822
taaataaattata

SEQ ID NO: 185939 - DNA, 13 bp, Artificial Sequence
  Oligonucleotide for detection of SNP TSC0045822
tataatgtattta

SEQ ID NO: 185940 - DNA, 13 bp, Artificial Sequence
  Oligonucleotide for detection of SNP TSC0045822
taaatacattata

SEQ ID NO: 185941 - DNA, 13 bp, Artificial Sequence
  Oligonucleotide for detection of SNP TSC0045822
tataacgtattta

SEQ ID NO: 185942 - DNA, 13 bp, Artificial Sequence
  Oligonucleotide for detection of SNP TSC0045822
taaatacgttata

SEQ ID NO: 185943 - DNA, 13 bp, Artificial Sequence
  Oligonucleotide for detection of SNP TSC0045823
tttgaggttgagg

SEQ ID NO: 185944 - DNA, 13 bp, Artificial Sequence
  Oligonucleotide for detection of SNP TSC0045823
cctcaacctcaaa

SEQ ID NO: 185945 - DNA, 13 bp, Artificial Sequence
  Oligonucleotide for detection of SNP TSC0045823
tttgagattgagg

SEQ ID NO: 185946 - DNA, 13 bp, Artificial Sequence
  Oligonucleotide for detection of SNP TSC0045823
cctcaatctcaaa

SEQ ID NO: 185947 - DNA, 13 bp, Artificial Sequence
  Oligonucleotide for detection of SNP TSC0045824
tttggtgttgaat

SEQ ID NO: 185948 - DNA, 13 bp, Artificial Sequence
  Oligonucleotide for detection of SNP TSC0045824
attcaacaccaaa

SEQ ID NO: 185949 - DNA, 13 bp, Artificial Sequence
  Oligonucleotide for detection of SNP TSC0045824
tttggtattgaat

SEQ ID NO: 185950 - DNA, 13 bp, Artificial Sequence
  Oligonucleotide for detection of SNP TSC0045824
attcaataccaaa

SEQ ID NO: 185951 - DNA, 13 bp, Artificial Sequence
  Oligonucleotide for detection of SNP TSC0045825
aaaaaaatttgtt

SEQ ID NO: 185952 - DNA, 13 bp, Artificial Sequence
  Oligonucleotide for detection of SNP TSC0045825
aacaaattttttt

SEQ ID NO: 185953 - DNA, 13 bp, Artificial Sequence
  Oligonucleotide for detection of SNP TSC0045825
aaaaaattttgtt

SEQ ID NO: 185954 - DNA, 13 bp, Artificial Sequence
  Oligonucleotide for detection of SNP TSC0045825
aacaaaatttttt

SEQ ID NO: 185955 - DNA, 13 bp, Artificial Sequence
  Oligonucleotide for detection of SNP TSC0045825
aatagattttttt

SEQ ID NO: 185956 - DNA, 13 bp, Artificial Sequence
  Oligonucleotide for detection of SNP TSC0045825
aaaaaaatctatt

SEQ ID NO: 185957 - DNA, 13 bp, Artificial Sequence
  Oligonucleotide for detection of SNP TSC0045825
aatagaatttttt

SEQ ID NO: 185958 - DNA, 13 bp, Artificial Sequence
  Oligonucleotide for detection of SNP TSC0045825
aaaaaattctatt

SEQ ID NO: 185959 - DNA, 13 bp, Artificial Sequence
  Oligonucleotide for detection of SNP TSC0045827
taataaaggttay

SEQ ID NO: 185960 - DNA, 13 bp, Artificial Sequence
  Oligonucleotide for detection of SNP TSC0045827
rtaacctttatta

SEQ ID NO: 185961 - DNA, 13 bp, Artificial Sequence
  Oligonucleotide for detection of SNP TSC0045827
taataagggttay

SEQ ID NO: 185962 - DNA, 13 bp, Artificial Sequence
  Oligonucleotide for detection of SNP TSC0045827
rtaacccttatta

SEQ ID NO: 185963 - DNA, 13 bp, Artificial Sequence
  Oligonucleotide for detection of SNP TSC0045828
agaaaagaattay

SEQ ID NO: 185964 - DNA, 13 bp, Artificial Sequence
  Oligonucleotide for detection of SNP TSC0045828
rtaattcttttct

SEQ ID NO: 185965 - DNA, 13 bp, Artificial Sequence
  Oligonucleotide for detection of SNP TSC0045828
agaaaaaaattay

SEQ ID NO: 185966 - DNA, 13 bp, Artificial Sequence
  Oligonucleotide for detection of SNP TSC0045828
rtaatttttttct

SEQ ID NO: 185967 - DNA, 13 bp, Artificial Sequence
  Oligonucleotide for detection of SNP TSC0045829
aaagtatgtaagg

SEQ ID NO: 185968 - DNA, 13 bp, Artificial Sequence
  Oligonucleotide for detection of SNP TSC0045829
ccttacatacttt

SEQ ID NO: 185969 - DNA, 13 bp, Artificial Sequence
  Oligonucleotide for detection of SNP TSC0045829
aaagtacgtaagg

SEQ ID NO: 185970 - DNA, 13 bp, Artificial Sequence
  Oligonucleotide for detection of SNP TSC0045829
ccttacgtacttt

SEQ ID NO: 185971 - DNA, 13 bp, Artificial Sequence
  Oligonucleotide for detection of SNP TSC0006449
ggttatggtgggy

SEQ ID NO: 185972 - DNA, 13 bp, Artificial Sequence
  Oligonucleotide for detection of SNP TSC0006449
rcccaccataacc

SEQ ID NO: 185973 - DNA, 13 bp, Artificial Sequence
  Oligonucleotide for detection of SNP TSC0006449
ggttatagtgggy

SEQ ID NO: 185974 - DNA, 13 bp, Artificial Sequence
  Oligonucleotide for detection of SNP TSC0006449
rcccactataacc

SEQ ID NO: 185975 - DNA, 13 bp, Artificial Sequence
  Oligonucleotide for detection of SNP TSC0045830
tgaagaaataagg

SEQ ID NO: 185976 - DNA, 13 bp, Artificial Sequence
  Oligonucleotide for detection of SNP TSC0045830
ccttatttcttca

SEQ ID NO: 185977 - DNA, 13 bp, Artificial Sequence
  Oligonucleotide for detection of SNP TSC0045830
tgaagagataagg

SEQ ID NO: 185978 - DNA, 13 bp, Artificial Sequence
  Oligonucleotide for detection of SNP TSC0045830
ccttatctcttca

SEQ ID NO: 185979 - DNA, 13 bp, Artificial Sequence
  Oligonucleotide for detection of SNP TSC0045831
ttttatggtgttg

SEQ ID NO: 185980 - DNA, 13 bp, Artificial Sequence
  Oligonucleotide for detection of SNP TSC0045831
caacaccataaaa

SEQ ID NO: 185981 - DNA, 13 bp, Artificial Sequence
  Oligonucleotide for detection of SNP TSC0045831
ttttatagtgttg

SEQ ID NO: 185982 - DNA, 13 bp, Artificial Sequence
  Oligonucleotide for detection of SNP TSC0045831
caacactataaaa

SEQ ID NO: 185983 - DNA, 13 bp, Artificial Sequence
  Oligonucleotide for detection of SNP TSC0045831
ttttacggtgttg

SEQ ID NO: 185984 - DNA, 13 bp, Artificial Sequence
  Oligonucleotide for detection of SNP TSC0045831
caacaccgtaaaa

SEQ ID NO: 185985 - DNA, 13 bp, Artificial Sequence
  Oligonucleotide for detection of SNP TSC0045833
gagtagttattaa

SEQ ID NO: 185986 - DNA, 13 bp, Artificial Sequence
  Oligonucleotide for detection of SNP TSC0045833
ttaataactactc

SEQ ID NO: 185987 - DNA, 13 bp, Artificial Sequence
  Oligonucleotide for detection of SNP TSC0045833
gagtaggtattaa

SEQ ID NO: 185988 - DNA, 13 bp, Artificial Sequence
  Oligonucleotide for detection of SNP TSC0045833
ttaatacctactc

SEQ ID NO: 185989 - DNA, 13 bp, Artificial Sequence
  Oligonucleotide for detection of SNP TSC0045833
ttagtggttgtty

SEQ ID NO: 185990 - DNA, 13 bp, Artificial Sequence
  Oligonucleotide for detection of SNP TSC0045833
raacaaccactaa

SEQ ID NO: 185991 - DNA, 13 bp, Artificial Sequence
  Oligonucleotide for detection of SNP TSC0045833
ttagtgtttgtty

SEQ ID NO: 185992 - DNA, 13 bp, Artificial Sequence
  Oligonucleotide for detection of SNP TSC0045833
raacaaacactaa

SEQ ID NO: 185993 - DNA, 13 bp, Artificial Sequence
  Oligonucleotide for detection of SNP TSC0045838
ttaatgaatataa

SEQ ID NO: 185994 - DNA, 13 bp, Artificial Sequence
  Oligonucleotide for detection of SNP TSC0045838
ttatattcattaa

SEQ ID NO: 185995 - DNA, 13 bp, Artificial Sequence
  Oligonucleotide for detection of SNP TSC0045838
ttaatgtatataa

SEQ ID NO: 185996 - DNA, 13 bp, Artificial Sequence
  Oligonucleotide for detection of SNP TSC0045838
ttatatacattaa

SEQ ID NO: 185997 - DNA, 13 bp, Artificial Sequence
  Oligonucleotide for detection of SNP TSC0045838
ttaatggatataa

SEQ ID NO: 185998 - DNA, 13 bp, Artificial Sequence
  Oligonucleotide for detection of SNP TSC0045838
ttatatccattaa

SEQ ID NO: 185999 - DNA, 13 bp, Artificial Sequence
  Oligonucleotide for detection of SNP TSC0045838
ttatgtttattaa

SEQ ID NO: 186000 - DNA, 13 bp, Artificial Sequence
  Oligonucleotide for detection of SNP TSC0045838
ttaataaacataa

SEQ ID NO: 186001 - DNA, 13 bp, Artificial Sequence
  Oligonucleotide for detection of SNP TSC0045838
ttatgtgtattaa

SEQ ID NO: 186002 - DNA, 13 bp, Artificial Sequence
  Oligonucleotide for detection of SNP TSC0045838
ttaatacacataa

SEQ ID NO: 186003 - DNA, 13 bp, Artificial Sequence
  Oligonucleotide for detection of SNP TSC0045838
ttatgtatattaa

SEQ ID NO: 186004 - DNA, 13 bp, Artificial Sequence
  Oligonucleotide for detection of SNP TSC0045838
ttaatatacataa

SEQ ID NO: 186005 - DNA, 13 bp, Artificial Sequence
  Oligonucleotide for detection of SNP TSC0045839
ttaatttttaggg

SEQ ID NO: 186006 - DNA, 13 bp, Artificial Sequence
  Oligonucleotide for detection of SNP TSC0045839
ccctaaaaattaa

SEQ ID NO: 186007 - DNA, 13 bp, Artificial Sequence
  Oligonucleotide for detection of SNP TSC0045839
ttaattgttaggg

SEQ ID NO: 186008 - DNA, 13 bp, Artificial Sequence
  Oligonucleotide for detection of SNP TSC0045839
ccctaacaattaa

SEQ ID NO: 186009 - DNA, 13 bp, Artificial Sequence
  Oligonucleotide for detection of SNP TSC0045839
ttaatcgttaggg

SEQ ID NO: 186010 - DNA, 13 bp, Artificial Sequence
  Oligonucleotide for detection of SNP TSC0045839
ccctaacgattaa

SEQ ID NO: 186011 - DNA, 13 bp, Artificial Sequence
  Oligonucleotide for detection of SNP TSC0045839
ttttgaggattga

SEQ ID NO: 186012 - DNA, 13 bp, Artificial Sequence
  Oligonucleotide for detection of SNP TSC0045839
tcaatcctcaaaa

SEQ ID NO: 186013 - DNA, 13 bp, Artificial Sequence
  Oligonucleotide for detection of SNP TSC0045839
ttttgaagattga

SEQ ID NO: 186014 - DNA, 13 bp, Artificial Sequence
  Oligonucleotide for detection of SNP TSC0045839
tcaatcttcaaaa

SEQ ID NO: 186015 - DNA, 13 bp, Artificial Sequence
  Oligonucleotide for detection of SNP TSC0045839
ttttgatgattga

SEQ ID NO: 186016 - DNA, 13 bp, Artificial Sequence
  Oligonucleotide for detection of SNP TSC0045839
tcaatcatcaaaa

SEQ ID NO: 186017 - DNA, 13 bp, Artificial Sequence
  Oligonucleotide for detection of SNP TSC0045839
ttttgacgattga

SEQ ID NO: 186018 - DNA, 13 bp, Artificial Sequence
  Oligonucleotide for detection of SNP TSC0045839
tcaatcgtcaaaa

SEQ ID NO: 186019 - DNA, 13 bp, Artificial Sequence
  Oligonucleotide for detection of SNP TSC0045840
ttggaaaattgta

SEQ ID NO: 186020 - DNA, 13 bp, Artificial Sequence
  Oligonucleotide for detection of SNP TSC0045840
tacaattttccaa

SEQ ID NO: 186021 - DNA, 13 bp, Artificial Sequence
  Oligonucleotide for detection of SNP TSC0045840
ttggaatattgta

SEQ ID NO: 186022 - DNA, 13 bp, Artificial Sequence
  Oligonucleotide for detection of SNP TSC0045840
tacaatattccaa

SEQ ID NO: 186023 - DNA, 13 bp, Artificial Sequence
  Oligonucleotide for detection of SNP TSC0045840
ttggaaaatcgta

SEQ ID NO: 186024 - DNA, 13 bp, Artificial Sequence
  Oligonucleotide for detection of SNP TSC0045840
tacgattttccaa

SEQ ID NO: 186025 - DNA, 13 bp, Artificial Sequence
  Oligonucleotide for detection of SNP TSC0045840
ttggaatatcgta

SEQ ID NO: 186026 - DNA, 13 bp, Artificial Sequence
  Oligonucleotide for detection of SNP TSC0045840
tacgatattccaa

SEQ ID NO: 186027 - DNA, 13 bp, Artificial Sequence
  Oligonucleotide for detection of SNP TSC0045840
tgtggttttttaa

SEQ ID NO: 186028 - DNA, 13 bp, Artificial Sequence
  Oligonucleotide for detection of SNP TSC0045840
ttaaaaaaccaca

SEQ ID NO: 186029 - DNA, 13 bp, Artificial Sequence
  Oligonucleotide for detection of SNP TSC0045840
tgtggtgttttaa

SEQ ID NO: 186030 - DNA, 13 bp, Artificial Sequence
  Oligonucleotide for detection of SNP TSC0045840
ttaaaacaccaca

SEQ ID NO: 186031 - DNA, 13 bp, Artificial Sequence
  Oligonucleotide for detection of SNP TSC0045840
tgcggttttttaa

SEQ ID NO: 186032 - DNA, 13 bp, Artificial Sequence
  Oligonucleotide for detection of SNP TSC0045840
ttaaaaaaccgca

SEQ ID NO: 186033 - DNA, 13 bp, Artificial Sequence
  Oligonucleotide for detection of SNP TSC0045840
tgcggtgttttaa

SEQ ID NO: 186034 - DNA, 13 bp, Artificial Sequence
  Oligonucleotide for detection of SNP TSC0045840
ttaaaacaccgca

SEQ ID NO: 186035 - DNA, 13 bp, Artificial Sequence
  Oligonucleotide for detection of SNP TSC0045841
ggagtatggaggy

SEQ ID NO: 186036 - DNA, 13 bp, Artificial Sequence
  Oligonucleotide for detection of SNP TSC0045841
rcctccatactcc

SEQ ID NO: 186037 - DNA, 13 bp, Artificial Sequence
  Oligonucleotide for detection of SNP TSC0045841
ggagtacggaggy

SEQ ID NO: 186038 - DNA, 13 bp, Artificial Sequence
  Oligonucleotide for detection of SNP TSC0045841
rcctccgtactcc

SEQ ID NO: 186039 - DNA, 13 bp, Artificial Sequence
  Oligonucleotide for detection of SNP TSC0045842
gagtatggtaagg

SEQ ID NO: 186040 - DNA, 13 bp, Artificial Sequence
  Oligonucleotide for detection of SNP TSC0045842
ccttaccatactc

SEQ ID NO: 186041 - DNA, 13 bp, Artificial Sequence
  Oligonucleotide for detection of SNP TSC0045842
gagtatagtaagg

SEQ ID NO: 186042 - DNA, 13 bp, Artificial Sequence
  Oligonucleotide for detection of SNP TSC0045842
ccttactatactc

SEQ ID NO: 186043 - DNA, 13 bp, Artificial Sequence
  Oligonucleotide for detection of SNP TSC0045842
gagtacggtaagg

SEQ ID NO: 186044 - DNA, 13 bp, Artificial Sequence
  Oligonucleotide for detection of SNP TSC0045842
ccttaccgtactc

SEQ ID NO: 186045 - DNA, 13 bp, Artificial Sequence
  Oligonucleotide for detection of SNP TSC0045843
agattatgtatty

SEQ ID NO: 186046 - DNA, 13 bp, Artificial Sequence
  Oligonucleotide for detection of SNP TSC0045843
raatacataatct

SEQ ID NO: 186047 - DNA, 13 bp, Artificial Sequence
  Oligonucleotide for detection of SNP TSC0045843
agattacgtatty

SEQ ID NO: 186048 - DNA, 13 bp, Artificial Sequence
  Oligonucleotide for detection of SNP TSC0045843
raatacgtaatct

SEQ ID NO: 186049 - DNA, 13 bp, Artificial Sequence
  Oligonucleotide for detection of SNP TSC0045843
gaatgtgtagttt

SEQ ID NO: 186050 - DNA, 13 bp, Artificial Sequence
  Oligonucleotide for detection of SNP TSC0045843
aaactacacattc

SEQ ID NO: 186051 - DNA, 13 bp, Artificial Sequence
  Oligonucleotide for detection of SNP TSC0045843
gaatgtatagttt

SEQ ID NO: 186052 - DNA, 13 bp, Artificial Sequence
  Oligonucleotide for detection of SNP TSC0045843
aaactatacattc

SEQ ID NO: 186053 - DNA, 13 bp, Artificial Sequence
  Oligonucleotide for detection of SNP TSC0045843
gaatgcgtagttt

SEQ ID NO: 186054 - DNA, 13 bp, Artificial Sequence
  Oligonucleotide for detection of SNP TSC0045843
aaactacgcattc

SEQ ID NO: 186055 - DNA, 13 bp, Artificial Sequence
  Oligonucleotide for detection of SNP TSC0045844
gtttaaagaaatt

SEQ ID NO: 186056 - DNA, 13 bp, Artificial Sequence
  Oligonucleotide for detection of SNP TSC0045844
aatttctttaaac

SEQ ID NO: 186057 - DNA, 13 bp, Artificial Sequence
  Oligonucleotide for detection of SNP TSC0045844
gtttaaggaaatt

SEQ ID NO: 186058 - DNA, 13 bp, Artificial Sequence
  Oligonucleotide for detection of SNP TSC0045844
aatttccttaaac

SEQ ID NO: 186059 - DNA, 13 bp, Artificial Sequence
  Oligonucleotide for detection of SNP TSC0010358
tttaaaggtttaa

SEQ ID NO: 186060 - DNA, 13 bp, Artificial Sequence
  Oligonucleotide for detection of SNP TSC0010358
ttaaacctttaaa

SEQ ID NO: 186061 - DNA, 13 bp, Artificial Sequence
  Oligonucleotide for detection of SNP TSC0010358
tttaaaagtttaa

SEQ ID NO: 186062 - DNA, 13 bp, Artificial Sequence
  Oligonucleotide for detection of SNP TSC0010358
ttaaacttttaaa

SEQ ID NO: 186063 - DNA, 13 bp, Artificial Sequence
  Oligonucleotide for detection of SNP TSC0045845
tttttgaggatat

SEQ ID NO: 186064 - DNA, 13 bp, Artificial Sequence
  Oligonucleotide for detection of SNP TSC0045845
atatcctcaaaaa

SEQ ID NO: 186065 - DNA, 13 bp, Artificial Sequence
  Oligonucleotide for detection of SNP TSC0045845
tttttgtggatat

SEQ ID NO: 186066 - DNA, 13 bp, Artificial Sequence
  Oligonucleotide for detection of SNP TSC0045845
atatccacaaaaa

SEQ ID NO: 186067 - DNA, 13 bp, Artificial Sequence
  Oligonucleotide for detection of SNP TSC0045845
atatttttaaggg

SEQ ID NO: 186068 - DNA, 13 bp, Artificial Sequence
  Oligonucleotide for detection of SNP TSC0045845
cccttaaaaatat

SEQ ID NO: 186069 - DNA, 13 bp, Artificial Sequence
  Oligonucleotide for detection of SNP TSC0045845
atatttataaggg

SEQ ID NO: 186070 - DNA, 13 bp, Artificial Sequence
  Oligonucleotide for detection of SNP TSC0045845
cccttataaatat

SEQ ID NO: 186071 - DNA, 13 bp, Artificial Sequence
  Oligonucleotide for detection of SNP TSC0010389
taataatgtatga

SEQ ID NO: 186072 - DNA, 13 bp, Artificial Sequence
  Oligonucleotide for detection of SNP TSC0010389
tcatacattatta

SEQ ID NO: 186073 - DNA, 13 bp, Artificial Sequence
  Oligonucleotide for detection of SNP TSC0010389
taataacgtatga

SEQ ID NO: 186074 - DNA, 13 bp, Artificial Sequence
  Oligonucleotide for detection of SNP TSC0010389
tcatacgttatta

SEQ ID NO: 186075 - DNA, 13 bp, Artificial Sequence
  Oligonucleotide for detection of SNP TSC0045848
tgttatatgttgg

SEQ ID NO: 186076 - DNA, 13 bp, Artificial Sequence
  Oligonucleotide for detection of SNP TSC0045848
ccaacatataaca

SEQ ID NO: 186077 - DNA, 13 bp, Artificial Sequence
  Oligonucleotide for detection of SNP TSC0045848
tgttatgtgttgg

SEQ ID NO: 186078 - DNA, 13 bp, Artificial Sequence
  Oligonucleotide for detection of SNP TSC0045848
ccaacacataaca

SEQ ID NO: 186079 - DNA, 13 bp, Artificial Sequence
  Oligonucleotide for detection of SNP TSC0045848
cgttatatgttgg

SEQ ID NO: 186080 - DNA, 13 bp, Artificial Sequence
  Oligonucleotide for detection of SNP TSC0045848
ccaacatataacg

SEQ ID NO: 186081 - DNA, 13 bp, Artificial Sequence
  Oligonucleotide for detection of SNP TSC0045848
cgttatgtgttgg

SEQ ID NO: 186082 - DNA, 13 bp, Artificial Sequence
  Oligonucleotide for detection of SNP TSC0045848
ccaacacataacg

SEQ ID NO: 186083 - DNA, 13 bp, Artificial Sequence
  Oligonucleotide for detection of SNP TSC0045848
tgttatatgtcgg

SEQ ID NO: 186084 - DNA, 13 bp, Artificial Sequence
  Oligonucleotide for detection of SNP TSC0045848
ccgacatataaca

SEQ ID NO: 186085 - DNA, 13 bp, Artificial Sequence
  Oligonucleotide for detection of SNP TSC0045848
tgttacgtgttgg

SEQ ID NO: 186086 - DNA, 13 bp, Artificial Sequence
  Oligonucleotide for detection of SNP TSC0045848
ccaacacgtaaca

SEQ ID NO: 186087 - DNA, 13 bp, Artificial Sequence
  Oligonucleotide for detection of SNP TSC0045848
cgttatatgtcgg

SEQ ID NO: 186088 - DNA, 13 bp, Artificial Sequence
  Oligonucleotide for detection of SNP TSC0045848
ccgacatataacg

SEQ ID NO: 186089 - DNA, 13 bp, Artificial Sequence
  Oligonucleotide for detection of SNP TSC0045848
tgttatgtgtcgg

SEQ ID NO: 186090 - DNA, 13 bp, Artificial Sequence
  Oligonucleotide for detection of SNP TSC0045848
ccgacacataaca

SEQ ID NO: 186091 - DNA, 13 bp, Artificial Sequence
  Oligonucleotide for detection of SNP TSC0045848
cgttacgtgttgg

SEQ ID NO: 186092 - DNA, 13 bp, Artificial Sequence
  Oligonucleotide for detection of SNP TSC0045848
ccaacacgtaacg

SEQ ID NO: 186093 - DNA, 13 bp, Artificial Sequence
  Oligonucleotide for detection of SNP TSC0045848
cgttatgtgtcgg

SEQ ID NO: 186094 - DNA, 13 bp, Artificial Sequence
  Oligonucleotide for detection of SNP TSC0045848
ccgacacataacg

SEQ ID NO: 186095 - DNA, 13 bp, Artificial Sequence
  Oligonucleotide for detection of SNP TSC0045848
tgttacgtgtcgg

SEQ ID NO: 186096 - DNA, 13 bp, Artificial Sequence
  Oligonucleotide for detection of SNP TSC0045848
ccgacacgtaaca

SEQ ID NO: 186097 - DNA, 13 bp, Artificial Sequence
  Oligonucleotide for detection of SNP TSC0045848
cgttacgtgtcgg

SEQ ID NO: 186098 - DNA, 13 bp, Artificial Sequence
  Oligonucleotide for detection of SNP TSC0045848
ccgacacgtaacg

SEQ ID NO: 186099 - DNA, 13 bp, Artificial Sequence
  Oligonucleotide for detection of SNP TSC0045848
ttggtatgtggtg

SEQ ID NO: 186100 - DNA, 13 bp, Artificial Sequence
  Oligonucleotide for detection of SNP TSC0045848
caccacataccaa

SEQ ID NO: 186101 - DNA, 13 bp, Artificial Sequence
  Oligonucleotide for detection of SNP TSC0045848
tcggtatgtggtg

SEQ ID NO: 186102 - DNA, 13 bp, Artificial Sequence
  Oligonucleotide for detection of SNP TSC0045848
caccacataccga

SEQ ID NO: 186103 - DNA, 13 bp, Artificial Sequence
  Oligonucleotide for detection of SNP TSC0045848
ttggtatgtggcg

SEQ ID NO: 186104 - DNA, 13 bp, Artificial Sequence
  Oligonucleotide for detection of SNP TSC0045848
cgccacataccaa

SEQ ID NO: 186105 - DNA, 13 bp, Artificial Sequence
  Oligonucleotide for detection of SNP TSC0045848
ttggtacgtggtg

SEQ ID NO: 186106 - DNA, 13 bp, Artificial Sequence
  Oligonucleotide for detection of SNP TSC0045848
caccacgtaccaa

SEQ ID NO: 186107 - DNA, 13 bp, Artificial Sequence
  Oligonucleotide for detection of SNP TSC0045848
tcggtatgtggcg

SEQ ID NO: 186108 - DNA, 13 bp, Artificial Sequence
  Oligonucleotide for detection of SNP TSC0045848
cgccacataccga

SEQ ID NO: 186109 - DNA, 13 bp, Artificial Sequence
  Oligonucleotide for detection of SNP TSC0045848
tcggtacgtggtg

SEQ ID NO: 186110 - DNA, 13 bp, Artificial Sequence
  Oligonucleotide for detection of SNP TSC0045848
caccacgtaccga

SEQ ID NO: 186111 - DNA, 13 bp, Artificial Sequence
  Oligonucleotide for detection of SNP TSC0045848
ttggtacgtggcg

SEQ ID NO: 186112 - DNA, 13 bp, Artificial Sequence
  Oligonucleotide for detection of SNP TSC0045848
cgccacgtaccaa

SEQ ID NO: 186113 - DNA, 13 bp, Artificial Sequence
  Oligonucleotide for detection of SNP TSC0045848
tcggtacgtggcg

SEQ ID NO: 186114 - DNA, 13 bp, Artificial Sequence
  Oligonucleotide for detection of SNP TSC0045848
cgccacgtaccga

SEQ ID NO: 186115 - DNA, 13 bp, Artificial Sequence
  Oligonucleotide for detection of SNP TSC0045849
ggttttgttgatg

SEQ ID NO: 186116 - DNA, 13 bp, Artificial Sequence
  Oligonucleotide for detection of SNP TSC0045849
catcaacaaaacc

SEQ ID NO: 186117 - DNA, 13 bp, Artificial Sequence
  Oligonucleotide for detection of SNP TSC0045849
ggtttcgttgatg

SEQ ID NO: 186118 - DNA, 13 bp, Artificial Sequence
  Oligonucleotide for detection of SNP TSC0045849
catcaacgaaacc

SEQ ID NO: 186119 - DNA, 13 bp, Artificial Sequence
  Oligonucleotide for detection of SNP TSC0045849
ggttttgtcgatg

SEQ ID NO: 186120 - DNA, 13 bp, Artificial Sequence
  Oligonucleotide for detection of SNP TSC0045849
catcgacaaaacc

SEQ ID NO: 186121 - DNA, 13 bp, Artificial Sequence
  Oligonucleotide for detection of SNP TSC0045849
ggtttcgtcgatg

SEQ ID NO: 186122 - DNA, 13 bp, Artificial Sequence
  Oligonucleotide for detection of SNP TSC0045849
catcgacgaaacc

SEQ ID NO: 186123 - DNA, 13 bp, Artificial Sequence
  Oligonucleotide for detection of SNP TSC0045849
tattggtggggty

SEQ ID NO: 186124 - DNA, 13 bp, Artificial Sequence
  Oligonucleotide for detection of SNP TSC0045849
raccccaccaata

SEQ ID NO: 186125 - DNA, 13 bp, Artificial Sequence
  Oligonucleotide for detection of SNP TSC0045849
tatcggtggggty

SEQ ID NO: 186126 - DNA, 13 bp, Artificial Sequence
  Oligonucleotide for detection of SNP TSC0045849
raccccaccgata

SEQ ID NO: 186127 - DNA, 13 bp, Artificial Sequence
  Oligonucleotide for detection of SNP TSC0045849
tattggcggggty

SEQ ID NO: 186128 - DNA, 13 bp, Artificial Sequence
  Oligonucleotide for detection of SNP TSC0045849
raccccgccaata

SEQ ID NO: 186129 - DNA, 13 bp, Artificial Sequence
  Oligonucleotide for detection of SNP TSC0045849
tatcggcggggty

SEQ ID NO: 186130 - DNA, 13 bp, Artificial Sequence
  Oligonucleotide for detection of SNP TSC0045849
raccccgccgata

SEQ ID NO: 186131 - DNA, 13 bp, Artificial Sequence
  Oligonucleotide for detection of SNP TSC0045851
aatttaatatatg

SEQ ID NO: 186132 - DNA, 13 bp, Artificial Sequence
  Oligonucleotide for detection of SNP TSC0045851
catatattaaatt

SEQ ID NO: 186133 - DNA, 13 bp, Artificial Sequence
  Oligonucleotide for detection of SNP TSC0045851
aatttattatatg

SEQ ID NO: 186134 - DNA, 13 bp, Artificial Sequence
  Oligonucleotide for detection of SNP TSC0045851
catataataaatt

SEQ ID NO: 186135 - DNA, 13 bp, Artificial Sequence
  Oligonucleotide for detection of SNP TSC0045851
tatatattgagtt

SEQ ID NO: 186136 - DNA, 13 bp, Artificial Sequence
  Oligonucleotide for detection of SNP TSC0045851
aactcaatatata

SEQ ID NO: 186137 - DNA, 13 bp, Artificial Sequence
  Oligonucleotide for detection of SNP TSC0045851
tatataatgagtt

SEQ ID NO: 186138 - DNA, 13 bp, Artificial Sequence
  Oligonucleotide for detection of SNP TSC0045851
aactcattatata

SEQ ID NO: 186139 - DNA, 13 bp, Artificial Sequence
  Oligonucleotide for detection of SNP TSC0008472
ggaaatagataga

SEQ ID NO: 186140 - DNA, 13 bp, Artificial Sequence
  Oligonucleotide for detection of SNP TSC0008472
tctatctatttcc

SEQ ID NO: 186141 - DNA, 13 bp, Artificial Sequence
  Oligonucleotide for detection of SNP TSC0008472
ggaaatggataga

SEQ ID NO: 186142 - DNA, 13 bp, Artificial Sequence
  Oligonucleotide for detection of SNP TSC0008472
tctatccatttcc

SEQ ID NO: 186143 - DNA, 13 bp, Artificial Sequence
  Oligonucleotide for detection of SNP TSC0045854
gggagatagtaga

SEQ ID NO: 186144 - DNA, 13 bp, Artificial Sequence
  Oligonucleotide for detection of SNP TSC0045854
tctactatctccc

SEQ ID NO: 186145 - DNA, 13 bp, Artificial Sequence
  Oligonucleotide for detection of SNP TSC0045854
gggagagagtaga

SEQ ID NO: 186146 - DNA, 13 bp, Artificial Sequence
  Oligonucleotide for detection of SNP TSC0045854
tctactctctccc

SEQ ID NO: 186147 - DNA, 13 bp, Artificial Sequence
  Oligonucleotide for detection of SNP TSC0045855
taaaaattgtggt

SEQ ID NO: 186148 - DNA, 13 bp, Artificial Sequence
  Oligonucleotide for detection of SNP TSC0045855
accacaattttta

SEQ ID NO: 186149 - DNA, 13 bp, Artificial Sequence
  Oligonucleotide for detection of SNP TSC0045855
taaaaagtgtggt

SEQ ID NO: 186150 - DNA, 13 bp, Artificial Sequence
  Oligonucleotide for detection of SNP TSC0045855
accacacttttta

SEQ ID NO: 186151 - DNA, 13 bp, Artificial Sequence
  Oligonucleotide for detection of SNP TSC0045856
gtgattatttttt

SEQ ID NO: 186152 - DNA, 13 bp, Artificial Sequence
  Oligonucleotide for detection of SNP TSC0045856
aaaaaataatcac

SEQ ID NO: 186153 - DNA, 13 bp, Artificial Sequence
  Oligonucleotide for detection of SNP TSC0045856
gtgattgtttttt

SEQ ID NO: 186154 - DNA, 13 bp, Artificial Sequence
  Oligonucleotide for detection of SNP TSC0045856
aaaaaacaatcac

SEQ ID NO: 186155 - DNA, 13 bp, Artificial Sequence
  Oligonucleotide for detection of SNP TSC0045857
tggttatgtaatt

SEQ ID NO: 186156 - DNA, 13 bp, Artificial Sequence
  Oligonucleotide for detection of SNP TSC0045857
aattacataacca

SEQ ID NO: 186157 - DNA, 13 bp, Artificial Sequence
  Oligonucleotide for detection of SNP TSC0045857
tggttacgtaatt

SEQ ID NO: 186158 - DNA, 13 bp, Artificial Sequence
  Oligonucleotide for detection of SNP TSC0045857
aattacgtaacca

SEQ ID NO: 186159 - DNA, 13 bp, Artificial Sequence
  Oligonucleotide for detection of SNP TSC0045857
agttatgtggtta

SEQ ID NO: 186160 - DNA, 13 bp, Artificial Sequence
  Oligonucleotide for detection of SNP TSC0045857
taaccacataact

SEQ ID NO: 186161 - DNA, 13 bp, Artificial Sequence
  Oligonucleotide for detection of SNP TSC0045857
agttatatggtta

SEQ ID NO: 186162 - DNA, 13 bp, Artificial Sequence
  Oligonucleotide for detection of SNP TSC0045857
taaccatataact

SEQ ID NO: 186163 - DNA, 13 bp, Artificial Sequence
  Oligonucleotide for detection of SNP TSC0045857
agttacgtggtta

SEQ ID NO: 186164 - DNA, 13 bp, Artificial Sequence
  Oligonucleotide for detection of SNP TSC0045857
taaccacgtaact

SEQ ID NO: 186165 - DNA, 13 bp, Artificial Sequence
  Oligonucleotide for detection of SNP TSC0045859
aattatagtatty

SEQ ID NO: 186166 - DNA, 13 bp, Artificial Sequence
  Oligonucleotide for detection of SNP TSC0045859
raatactataatt

SEQ ID NO: 186167 - DNA, 13 bp, Artificial Sequence
  Oligonucleotide for detection of SNP TSC0045859
aattatggtatty

SEQ ID NO: 186168 - DNA, 13 bp, Artificial Sequence
  Oligonucleotide for detection of SNP TSC0045859
raataccataatt

SEQ ID NO: 186169 - DNA, 13 bp, Artificial Sequence
  Oligonucleotide for detection of SNP TSC0045859
aattacggtatty

SEQ ID NO: 186170 - DNA, 13 bp, Artificial Sequence
  Oligonucleotide for detection of SNP TSC0045859
raataccgtaatt

SEQ ID NO: 186171 - DNA, 13 bp, Artificial Sequence
  Oligonucleotide for detection of SNP TSC0045859
gaatgttgtgatt

SEQ ID NO: 186172 - DNA, 13 bp, Artificial Sequence
  Oligonucleotide for detection of SNP TSC0045859
aatcacaacattc

SEQ ID NO: 186173 - DNA, 13 bp, Artificial Sequence
  Oligonucleotide for detection of SNP TSC0045859
gaatgtcgtgatt

SEQ ID NO: 186174 - DNA, 13 bp, Artificial Sequence
  Oligonucleotide for detection of SNP TSC0045859
aatcacgacattc

SEQ ID NO: 186175 - DNA, 13 bp, Artificial Sequence
  Oligonucleotide for detection of SNP TSC0008609
atttggagttttt

SEQ ID NO: 186176 - DNA, 13 bp, Artificial Sequence
  Oligonucleotide for detection of SNP TSC0008609
aaaaactccaaat

SEQ ID NO: 186177 - DNA, 13 bp, Artificial Sequence
  Oligonucleotide for detection of SNP TSC0008609
atttggtgttttt

SEQ ID NO: 186178 - DNA, 13 bp, Artificial Sequence
  Oligonucleotide for detection of SNP TSC0008609
aaaaacaccaaat

SEQ ID NO: 186179 - DNA, 13 bp, Artificial Sequence
  Oligonucleotide for detection of SNP TSC0008609
aagaattttagat

SEQ ID NO: 186180 - DNA, 13 bp, Artificial Sequence
  Oligonucleotide for detection of SNP TSC0008609
atctaaaattctt

SEQ ID NO: 186181 - DNA, 13 bp, Artificial Sequence
  Oligonucleotide for detection of SNP TSC0008609
aagaatattagat

SEQ ID NO: 186182 - DNA, 13 bp, Artificial Sequence
  Oligonucleotide for detection of SNP TSC0008609
atctaatattctt

SEQ ID NO: 186183 - DNA, 13 bp, Artificial Sequence
  Oligonucleotide for detection of SNP TSC0045865
ttaggtgtttaat

SEQ ID NO: 186184 - DNA, 13 bp, Artificial Sequence
  Oligonucleotide for detection of SNP TSC0045865
attaaacacctaa

SEQ ID NO: 186185 - DNA, 13 bp, Artificial Sequence
  Oligonucleotide for detection of SNP TSC0045866
aattatagttttg

SEQ ID NO: 186186 - DNA, 13 bp, Artificial Sequence
  Oligonucleotide for detection of SNP TSC0045866
caaaactataatt

SEQ ID NO: 186187 - DNA, 13 bp, Artificial Sequence
  Oligonucleotide for detection of SNP TSC0045866
aattatggttttg

SEQ ID NO: 186188 - DNA, 13 bp, Artificial Sequence
  Oligonucleotide for detection of SNP TSC0045866
caaaaccataatt

SEQ ID NO: 186189 - DNA, 13 bp, Artificial Sequence
  Oligonucleotide for detection of SNP TSC0045866
aattacggttttg

SEQ ID NO: 186190 - DNA, 13 bp, Artificial Sequence
  Oligonucleotide for detection of SNP TSC0045866
caaaaccgtaatt

SEQ ID NO: 186191 - DNA, 13 bp, Artificial Sequence
  Oligonucleotide for detection of SNP TSC0045866
taaggttgtagtt

SEQ ID NO: 186192 - DNA, 13 bp, Artificial Sequence
  Oligonucleotide for detection of SNP TSC0045866
aactacaacctta

SEQ ID NO: 186193 - DNA, 13 bp, Artificial Sequence
  Oligonucleotide for detection of SNP TSC0045866
taaggtcgtagtt

SEQ ID NO: 186194 - DNA, 13 bp, Artificial Sequence
  Oligonucleotide for detection of SNP TSC0045866
aactacgacctta

SEQ ID NO: 186195 - DNA, 13 bp, Artificial Sequence
  Oligonucleotide for detection of SNP TSC0045867
aggatgaaggatg

SEQ ID NO: 186196 - DNA, 13 bp, Artificial Sequence
  Oligonucleotide for detection of SNP TSC0045867
catccttcatcct

SEQ ID NO: 186197 - DNA, 13 bp, Artificial Sequence
  Oligonucleotide for detection of SNP TSC0045867
aggatggaggatg

SEQ ID NO: 186198 - DNA, 13 bp, Artificial Sequence
  Oligonucleotide for detection of SNP TSC0045867
catcctccatcct

SEQ ID NO: 186199 - DNA, 13 bp, Artificial Sequence
  Oligonucleotide for detection of SNP TSC0045868
ttttttgttgtcg

SEQ ID NO: 186200 - DNA, 13 bp, Artificial Sequence
  Oligonucleotide for detection of SNP TSC0045868
cgacaacaaaaaa

SEQ ID NO: 186201 - DNA, 13 bp, Artificial Sequence
  Oligonucleotide for detection of SNP TSC0045868
ttttttattgtcg

SEQ ID NO: 186202 - DNA, 13 bp, Artificial Sequence
  Oligonucleotide for detection of SNP TSC0045868
cgacaataaaaaa

SEQ ID NO: 186203 - DNA, 13 bp, Artificial Sequence
  Oligonucleotide for detection of SNP TSC0045869
agaatgaaggtaa

SEQ ID NO: 186204 - DNA, 13 bp, Artificial Sequence
  Oligonucleotide for detection of SNP TSC0045869
ttaccttcattct

SEQ ID NO: 186205 - DNA, 13 bp, Artificial Sequence
  Oligonucleotide for detection of SNP TSC0045869
agaatggaggtaa

SEQ ID NO: 186206 - DNA, 13 bp, Artificial Sequence
  Oligonucleotide for detection of SNP TSC0045869
ttacctccattct

SEQ ID NO: 186207 - DNA, 13 bp, Artificial Sequence
  Oligonucleotide for detection of SNP TSC0045871
ggtggtagaaata

SEQ ID NO: 186208 - DNA, 13 bp, Artificial Sequence
  Oligonucleotide for detection of SNP TSC0045871
tatttctaccacc

SEQ ID NO: 186209 - DNA, 13 bp, Artificial Sequence
  Oligonucleotide for detection of SNP TSC0045871
ggtggtggaaata

SEQ ID NO: 186210 - DNA, 13 bp, Artificial Sequence
  Oligonucleotide for detection of SNP TSC0045871
tatttccaccacc

SEQ ID NO: 186211 - DNA, 13 bp, Artificial Sequence
  Oligonucleotide for detection of SNP TSC0045871
ggtggcggaaata

SEQ ID NO: 186212 - DNA, 13 bp, Artificial Sequence
  Oligonucleotide for detection of SNP TSC0045871
tatttccgccacc

SEQ ID NO: 186213 - DNA, 13 bp, Artificial Sequence
  Oligonucleotide for detection of SNP TSC0045872
tattgcgtttttt

SEQ ID NO: 186214 - DNA, 13 bp, Artificial Sequence
  Oligonucleotide for detection of SNP TSC0045872
aaaaaacgcaata

SEQ ID NO: 186215 - DNA, 13 bp, Artificial Sequence
  Oligonucleotide for detection of SNP TSC0045872
agaagatgtaatg

SEQ ID NO: 186216 - DNA, 13 bp, Artificial Sequence
  Oligonucleotide for detection of SNP TSC0045872
cattacatcttct

SEQ ID NO: 186217 - DNA, 13 bp, Artificial Sequence
  Oligonucleotide for detection of SNP TSC0045872
agaagacgtaatg

SEQ ID NO: 186218 - DNA, 13 bp, Artificial Sequence
  Oligonucleotide for detection of SNP TSC0045872
cattacgtcttct

SEQ ID NO: 186219 - DNA, 13 bp, Artificial Sequence
  Oligonucleotide for detection of SNP TSC0045873
agttttattttat

SEQ ID NO: 186220 - DNA, 13 bp, Artificial Sequence
  Oligonucleotide for detection of SNP TSC0045873
ataaaataaaact

SEQ ID NO: 186221 - DNA, 13 bp, Artificial Sequence
  Oligonucleotide for detection of SNP TSC0045873
agttttgttttat

SEQ ID NO: 186222 - DNA, 13 bp, Artificial Sequence
  Oligonucleotide for detection of SNP TSC0045873
ataaaacaaaact

SEQ ID NO: 186223 - DNA, 13 bp, Artificial Sequence
  Oligonucleotide for detection of SNP TSC0045873
agtttcgttttat

SEQ ID NO: 186224 - DNA, 13 bp, Artificial Sequence
  Oligonucleotide for detection of SNP TSC0045873
ataaaacgaaact

SEQ ID NO: 186225 - DNA, 13 bp, Artificial Sequence
  Oligonucleotide for detection of SNP TSC0045873
ataaaatgaaatt

SEQ ID NO: 186226 - DNA, 13 bp, Artificial Sequence
  Oligonucleotide for detection of SNP TSC0045873
aatttcattttat

SEQ ID NO: 186227 - DNA, 13 bp, Artificial Sequence
  Oligonucleotide for detection of SNP TSC0045874
ttgggagaaaaat

SEQ ID NO: 186228 - DNA, 13 bp, Artificial Sequence
  Oligonucleotide for detection of SNP TSC0045874
atttttctcccaa

SEQ ID NO: 186229 - DNA, 13 bp, Artificial Sequence
  Oligonucleotide for detection of SNP TSC0045874
ttgggataaaaat

SEQ ID NO: 186230 - DNA, 13 bp, Artificial Sequence
  Oligonucleotide for detection of SNP TSC0045874
atttttatcccaa

SEQ ID NO: 186231 - DNA, 13 bp, Artificial Sequence
  Oligonucleotide for detection of SNP TSC0010791
gttggtaaaaggy

SEQ ID NO: 186232 - DNA, 13 bp, Artificial Sequence
  Oligonucleotide for detection of SNP TSC0010791
rccttttaccaac

SEQ ID NO: 186233 - DNA, 13 bp, Artificial Sequence
  Oligonucleotide for detection of SNP TSC0010791
gttggtgaaaggy

SEQ ID NO: 186234 - DNA, 13 bp, Artificial Sequence
  Oligonucleotide for detection of SNP TSC0010791
rcctttcaccaac

SEQ ID NO: 186235 - DNA, 13 bp, Artificial Sequence
  Oligonucleotide for detection of SNP TSC0010791
gttggcgaaaggy

SEQ ID NO: 186236 - DNA, 13 bp, Artificial Sequence
  Oligonucleotide for detection of SNP TSC0010791
rcctttcgccaac

SEQ ID NO: 186237 - DNA, 13 bp, Artificial Sequence
  Oligonucleotide for detection of SNP TSC0010791
gttttttgttagy

SEQ ID NO: 186238 - DNA, 13 bp, Artificial Sequence
  Oligonucleotide for detection of SNP TSC0010791
rctaacaaaaaac

SEQ ID NO: 186239 - DNA, 13 bp, Artificial Sequence
  Oligonucleotide for detection of SNP TSC0010791
gtttttcgttagy

SEQ ID NO: 186240 - DNA, 13 bp, Artificial Sequence
  Oligonucleotide for detection of SNP TSC0010791
rctaacgaaaaac

SEQ ID NO: 186241 - DNA, 13 bp, Artificial Sequence
  Oligonucleotide for detection of SNP TSC0045875
gttgtgagaggga

SEQ ID NO: 186242 - DNA, 13 bp, Artificial Sequence
  Oligonucleotide for detection of SNP TSC0045875
tccctctcacaac

SEQ ID NO: 186243 - DNA, 13 bp, Artificial Sequence
  Oligonucleotide for detection of SNP TSC0045875
gttgtgggaggga

SEQ ID NO: 186244 - DNA, 13 bp, Artificial Sequence
  Oligonucleotide for detection of SNP TSC0045875
tccctcccacaac

SEQ ID NO: 186245 - DNA, 13 bp, Artificial Sequence
  Oligonucleotide for detection of SNP TSC0045877
ggttattgaagty

SEQ ID NO: 186246 - DNA, 13 bp, Artificial Sequence
  Oligonucleotide for detection of SNP TSC0045877
racttcaataacc

SEQ ID NO: 186247 - DNA, 13 bp, Artificial Sequence
  Oligonucleotide for detection of SNP TSC0045877
ggttatggaagty

SEQ ID NO: 186248 - DNA, 13 bp, Artificial Sequence
  Oligonucleotide for detection of SNP TSC0045877
racttccataacc

SEQ ID NO: 186249 - DNA, 13 bp, Artificial Sequence
  Oligonucleotide for detection of SNP TSC0045877
gattttaatgaty

SEQ ID NO: 186250 - DNA, 13 bp, Artificial Sequence
  Oligonucleotide for detection of SNP TSC0045877
ratcattaaaatc

SEQ ID NO: 186251 - DNA, 13 bp, Artificial Sequence
  Oligonucleotide for detection of SNP TSC0045877
gatttttatgaty

SEQ ID NO: 186252 - DNA, 13 bp, Artificial Sequence
  Oligonucleotide for detection of SNP TSC0045877
ratcataaaaatc

SEQ ID NO: 186253 - DNA, 13 bp, Artificial Sequence
  Oligonucleotide for detection of SNP TSC0045878
agttgtatatgty

SEQ ID NO: 186254 - DNA, 13 bp, Artificial Sequence
  Oligonucleotide for detection of SNP TSC0045878
racatatacaact

SEQ ID NO: 186255 - DNA, 13 bp, Artificial Sequence
  Oligonucleotide for detection of SNP TSC0045878
agttgtgtatgty

SEQ ID NO: 186256 - DNA, 13 bp, Artificial Sequence
  Oligonucleotide for detection of SNP TSC0045878
racatacacaact

SEQ ID NO: 186257 - DNA, 13 bp, Artificial Sequence
  Oligonucleotide for detection of SNP TSC0045879
agtatatgttata

SEQ ID NO: 186258 - DNA, 13 bp, Artificial Sequence
  Oligonucleotide for detection of SNP TSC0045879
tataacatatact

SEQ ID NO: 186259 - DNA, 13 bp, Artificial Sequence
  Oligonucleotide for detection of SNP TSC0045879
agtatacgttata

SEQ ID NO: 186260 - DNA, 13 bp, Artificial Sequence
  Oligonucleotide for detection of SNP TSC0045879
tataacgtatact

SEQ ID NO: 186261 - DNA, 13 bp, Artificial Sequence
  Oligonucleotide for detection of SNP TSC0045879
tatgatgtatgtt

SEQ ID NO: 186262 - DNA, 13 bp, Artificial Sequence
  Oligonucleotide for detection of SNP TSC0045879
aacatacatcata

SEQ ID NO: 186263 - DNA, 13 bp, Artificial Sequence
  Oligonucleotide for detection of SNP TSC0045879
tatgatatatgtt

SEQ ID NO: 186264 - DNA, 13 bp, Artificial Sequence
  Oligonucleotide for detection of SNP TSC0045879
aacatatatcata

SEQ ID NO: 186265 - DNA, 13 bp, Artificial Sequence
  Oligonucleotide for detection of SNP TSC0045879
tatgacgtatgtt

SEQ ID NO: 186266 - DNA, 13 bp, Artificial Sequence
  Oligonucleotide for detection of SNP TSC0045879
aacatacgtcata

SEQ ID NO: 186267 - DNA, 13 bp, Artificial Sequence
  Oligonucleotide for detection of SNP TSC0045880
ttgtatatattgg

SEQ ID NO: 186268 - DNA, 13 bp, Artificial Sequence
  Oligonucleotide for detection of SNP TSC0045880
ccaatatatacaa

SEQ ID NO: 186269 - DNA, 13 bp, Artificial Sequence
  Oligonucleotide for detection of SNP TSC0045880
ttgtatgtattgg

SEQ ID NO: 186270 - DNA, 13 bp, Artificial Sequence
  Oligonucleotide for detection of SNP TSC0045880
ccaatacatacaa

SEQ ID NO: 186271 - DNA, 13 bp, Artificial Sequence
  Oligonucleotide for detection of SNP TSC0045880
ttgtacgtattgg

SEQ ID NO: 186272 - DNA, 13 bp, Artificial Sequence
  Oligonucleotide for detection of SNP TSC0045880
ccaatacgtacaa

SEQ ID NO: 186273 - DNA, 13 bp, Artificial Sequence
  Oligonucleotide for detection of SNP TSC0045880
ttaatatgtatag

SEQ ID NO: 186274 - DNA, 13 bp, Artificial Sequence
  Oligonucleotide for detection of SNP TSC0045880
ctatacatattaa

SEQ ID NO: 186275 - DNA, 13 bp, Artificial Sequence
  Oligonucleotide for detection of SNP TSC0045880
ttaatacgtatag

SEQ ID NO: 186276 - DNA, 13 bp, Artificial Sequence
  Oligonucleotide for detection of SNP TSC0045880
ctatacgtattaa

SEQ ID NO: 186277 - DNA, 13 bp, Artificial Sequence
  Oligonucleotide for detection of SNP TSC0045881
tttttatgtttat

SEQ ID NO: 186278 - DNA, 13 bp, Artificial Sequence
  Oligonucleotide for detection of SNP TSC0045881
ataaacataaaaa

SEQ ID NO: 186279 - DNA, 13 bp, Artificial Sequence
  Oligonucleotide for detection of SNP TSC0045881
tttttaggtttat

SEQ ID NO: 186280 - DNA, 13 bp, Artificial Sequence
  Oligonucleotide for detection of SNP TSC0045881
ataaacctaaaaa

SEQ ID NO: 186281 - DNA, 13 bp, Artificial Sequence
  Oligonucleotide for detection of SNP TSC0045881
atggatatggaag

SEQ ID NO: 186282 - DNA, 13 bp, Artificial Sequence
  Oligonucleotide for detection of SNP TSC0045881
cttccatatccat

SEQ ID NO: 186283 - DNA, 13 bp, Artificial Sequence
  Oligonucleotide for detection of SNP TSC0045881
atggatttggaag

SEQ ID NO: 186284 - DNA, 13 bp, Artificial Sequence
  Oligonucleotide for detection of SNP TSC0045881
cttccaaatccat

SEQ ID NO: 186285 - DNA, 13 bp, Artificial Sequence
  Oligonucleotide for detection of SNP TSC0045882
agtttagtttgat

SEQ ID NO: 186286 - DNA, 13 bp, Artificial Sequence
  Oligonucleotide for detection of SNP TSC0045882
atcaaactaaact

SEQ ID NO: 186287 - DNA, 13 bp, Artificial Sequence
  Oligonucleotide for detection of SNP TSC0045882
agtttaatttgat

SEQ ID NO: 186288 - DNA, 13 bp, Artificial Sequence
  Oligonucleotide for detection of SNP TSC0045882
atcaaattaaact

SEQ ID NO: 186289 - DNA, 13 bp, Artificial Sequence
  Oligonucleotide for detection of SNP TSC0006987
ttttaatgattat

SEQ ID NO: 186290 - DNA, 13 bp, Artificial Sequence
  Oligonucleotide for detection of SNP TSC0006987
ataatcattaaaa

SEQ ID NO: 186291 - DNA, 13 bp, Artificial Sequence
  Oligonucleotide for detection of SNP TSC0006987
ttttaacgattat

SEQ ID NO: 186292 - DNA, 13 bp, Artificial Sequence
  Oligonucleotide for detection of SNP TSC0006987
ataatcgttaaaa

SEQ ID NO: 186293 - DNA, 13 bp, Artificial Sequence
  Oligonucleotide for detection of SNP TSC0006987
ataattgttggag

SEQ ID NO: 186294 - DNA, 13 bp, Artificial Sequence
  Oligonucleotide for detection of SNP TSC0006987
ctccaacaattat

SEQ ID NO: 186295 - DNA, 13 bp, Artificial Sequence
  Oligonucleotide for detection of SNP TSC0006987
ataattattggag

SEQ ID NO: 186296 - DNA, 13 bp, Artificial Sequence
  Oligonucleotide for detection of SNP TSC0006987
ctccaataattat

SEQ ID NO: 186297 - DNA, 13 bp, Artificial Sequence
  Oligonucleotide for detection of SNP TSC0006987
ataatcgttggag

SEQ ID NO: 186298 - DNA, 13 bp, Artificial Sequence
  Oligonucleotide for detection of SNP TSC0006987
ctccaacgattat

SEQ ID NO: 186299 - DNA, 13 bp, Artificial Sequence
  Oligonucleotide for detection of SNP TSC0045883
ggttgtagtttgg

SEQ ID NO: 186300 - DNA, 13 bp, Artificial Sequence
  Oligonucleotide for detection of SNP TSC0045883
ccaaactacaacc

SEQ ID NO: 186301 - DNA, 13 bp, Artificial Sequence
  Oligonucleotide for detection of SNP TSC0045883
ggttgttgtttgg

SEQ ID NO: 186302 - DNA, 13 bp, Artificial Sequence
  Oligonucleotide for detection of SNP TSC0045883
ccaaacaacaacc

SEQ ID NO: 186303 - DNA, 13 bp, Artificial Sequence
  Oligonucleotide for detection of SNP TSC0045883
ttaggttgtagty

SEQ ID NO: 186304 - DNA, 13 bp, Artificial Sequence
  Oligonucleotide for detection of SNP TSC0045883
ractacaacctaa

SEQ ID NO: 186305 - DNA, 13 bp, Artificial Sequence
  Oligonucleotide for detection of SNP TSC0045883
ttaggtagtagty

SEQ ID NO: 186306 - DNA, 13 bp, Artificial Sequence
  Oligonucleotide for detection of SNP TSC0045883
ractactacctaa

SEQ ID NO: 186307 - DNA, 13 bp, Artificial Sequence
  Oligonucleotide for detection of SNP TSC0045886
tcggtaatttttt

SEQ ID NO: 186308 - DNA, 13 bp, Artificial Sequence
  Oligonucleotide for detection of SNP TSC0045886
aaaaaattaccga

SEQ ID NO: 186309 - DNA, 13 bp, Artificial Sequence
  Oligonucleotide for detection of SNP TSC0045886
tcggtattttttt

SEQ ID NO: 186310 - DNA, 13 bp, Artificial Sequence
  Oligonucleotide for detection of SNP TSC0045886
aaaaaaataccga

SEQ ID NO: 186311 - DNA, 13 bp, Artificial Sequence
  Oligonucleotide for detection of SNP TSC0045886
aaaaaattattga

SEQ ID NO: 186312 - DNA, 13 bp, Artificial Sequence
  Oligonucleotide for detection of SNP TSC0045886
tcaataatttttt

SEQ ID NO: 186313 - DNA, 13 bp, Artificial Sequence
  Oligonucleotide for detection of SNP TSC0045886
aaaaaaatattga

SEQ ID NO: 186314 - DNA, 13 bp, Artificial Sequence
  Oligonucleotide for detection of SNP TSC0045886
tcaatattttttt

SEQ ID NO: 186315 - DNA, 13 bp, Artificial Sequence
  Oligonucleotide for detection of SNP TSC0045886
aaaaaattatcga

SEQ ID NO: 186316 - DNA, 13 bp, Artificial Sequence
  Oligonucleotide for detection of SNP TSC0045886
tcgataatttttt

SEQ ID NO: 186317 - DNA, 13 bp, Artificial Sequence
  Oligonucleotide for detection of SNP TSC0045886
aaaaaaatatcga

SEQ ID NO: 186318 - DNA, 13 bp, Artificial Sequence
  Oligonucleotide for detection of SNP TSC0045886
tcgatattttttt

SEQ ID NO: 186319 - DNA, 13 bp, Artificial Sequence
  Oligonucleotide for detection of SNP TSC0045887
ttttatatagaga

SEQ ID NO: 186320 - DNA, 13 bp, Artificial Sequence
  Oligonucleotide for detection of SNP TSC0045887
tctctatataaaa

SEQ ID NO: 186321 - DNA, 13 bp, Artificial Sequence
  Oligonucleotide for detection of SNP TSC0045887
ttttatgtagaga

SEQ ID NO: 186322 - DNA, 13 bp, Artificial Sequence
  Oligonucleotide for detection of SNP TSC0045887
tctctacataaaa

SEQ ID NO: 186323 - DNA, 13 bp, Artificial Sequence
  Oligonucleotide for detection of SNP TSC0045887
ttttacgtagaga

SEQ ID NO: 186324 - DNA, 13 bp, Artificial Sequence
  Oligonucleotide for detection of SNP TSC0045887
tctctacgtaaaa

SEQ ID NO: 186325 - DNA, 13 bp, Artificial Sequence
  Oligonucleotide for detection of SNP TSC0045887
tttttgtgtagaa

SEQ ID NO: 186326 - DNA, 13 bp, Artificial Sequence
  Oligonucleotide for detection of SNP TSC0045887
ttctacacaaaaa

SEQ ID NO: 186327 - DNA, 13 bp, Artificial Sequence
  Oligonucleotide for detection of SNP TSC0045887
tttttgcgtagaa

SEQ ID NO: 186328 - DNA, 13 bp, Artificial Sequence
  Oligonucleotide for detection of SNP TSC0045887
ttctacgcaaaaa

SEQ ID NO: 186329 - DNA, 13 bp, Artificial Sequence
  Oligonucleotide for detection of SNP TSC0045888
gaatgatatgaga

SEQ ID NO: 186330 - DNA, 13 bp, Artificial Sequence
  Oligonucleotide for detection of SNP TSC0045888
tctcatatcattc

SEQ ID NO: 186331 - DNA, 13 bp, Artificial Sequence
  Oligonucleotide for detection of SNP TSC0045888
gaatgagatgaga

SEQ ID NO: 186332 - DNA, 13 bp, Artificial Sequence
  Oligonucleotide for detection of SNP TSC0045888
tctcatctcattc

SEQ ID NO: 186333 - DNA, 13 bp, Artificial Sequence
  Oligonucleotide for detection of SNP TSC0045891
tagtttattgagt

SEQ ID NO: 186334 - DNA, 13 bp, Artificial Sequence
  Oligonucleotide for detection of SNP TSC0045891
actcaataaacta

SEQ ID NO: 186335 - DNA, 13 bp, Artificial Sequence
  Oligonucleotide for detection of SNP TSC0045891
tagttttttgagt

SEQ ID NO: 186336 - DNA, 13 bp, Artificial Sequence
  Oligonucleotide for detection of SNP TSC0045891
actcaaaaaacta

SEQ ID NO: 186337 - DNA, 13 bp, Artificial Sequence
  Oligonucleotide for detection of SNP TSC0045891
atttagtaggttg

SEQ ID NO: 186338 - DNA, 13 bp, Artificial Sequence
  Oligonucleotide for detection of SNP TSC0045891
caacctactaaat

SEQ ID NO: 186339 - DNA, 13 bp, Artificial Sequence
  Oligonucleotide for detection of SNP TSC0045891
atttaggaggttg

SEQ ID NO: 186340 - DNA, 13 bp, Artificial Sequence
  Oligonucleotide for detection of SNP TSC0045891
caacctcctaaat

SEQ ID NO: 186341 - DNA, 13 bp, Artificial Sequence
  Oligonucleotide for detection of SNP TSC0045892
ttttttagagata

SEQ ID NO: 186342 - DNA, 13 bp, Artificial Sequence
  Oligonucleotide for detection of SNP TSC0045892
tatctctaaaaaa

SEQ ID NO: 186343 - DNA, 13 bp, Artificial Sequence
  Oligonucleotide for detection of SNP TSC0045892
tttttcggagata

SEQ ID NO: 186344 - DNA, 13 bp, Artificial Sequence
  Oligonucleotide for detection of SNP TSC0045892
tatctccgaaaaa

SEQ ID NO: 186345 - DNA, 13 bp, Artificial Sequence
  Oligonucleotide for detection of SNP TSC0045892
tatttttgggaag

SEQ ID NO: 186346 - DNA, 13 bp, Artificial Sequence
  Oligonucleotide for detection of SNP TSC0045892
cttcccaaaaata

SEQ ID NO: 186347 - DNA, 13 bp, Artificial Sequence
  Oligonucleotide for detection of SNP TSC0045892
tattttcgggaag

SEQ ID NO: 186348 - DNA, 13 bp, Artificial Sequence
  Oligonucleotide for detection of SNP TSC0045892
cttcccgaaaata

SEQ ID NO: 186349 - DNA, 13 bp, Artificial Sequence
  Oligonucleotide for detection of SNP TSC0045893
agaattgggtgaa

SEQ ID NO: 186350 - DNA, 13 bp, Artificial Sequence
  Oligonucleotide for detection of SNP TSC0045893
ttcacccaattct

SEQ ID NO: 186351 - DNA, 13 bp, Artificial Sequence
  Oligonucleotide for detection of SNP TSC0045893
agaattaggtgaa

SEQ ID NO: 186352 - DNA, 13 bp, Artificial Sequence
  Oligonucleotide for detection of SNP TSC0045893
ttcacctaattct

SEQ ID NO: 186353 - DNA, 13 bp, Artificial Sequence
  Oligonucleotide for detection of SNP TSC0045893
agaatcgggtgaa

SEQ ID NO: 186354 - DNA, 13 bp, Artificial Sequence
  Oligonucleotide for detection of SNP TSC0045893
ttcacccgattct

SEQ ID NO: 186355 - DNA, 13 bp, Artificial Sequence
  Oligonucleotide for detection of SNP TSC0001340
ttattttgtgagy

SEQ ID NO: 186356 - DNA, 13 bp, Artificial Sequence
  Oligonucleotide for detection of SNP TSC0001340
rctcacaaaataa

SEQ ID NO: 186357 - DNA, 13 bp, Artificial Sequence
  Oligonucleotide for detection of SNP TSC0001340
ttatttcgtgagy

SEQ ID NO: 186358 - DNA, 13 bp, Artificial Sequence
  Oligonucleotide for detection of SNP TSC0001340
rctcacgaaataa

SEQ ID NO: 186359 - DNA, 13 bp, Artificial Sequence
  Oligonucleotide for detection of SNP TSC0001340
gtttatggaataa

SEQ ID NO: 186360 - DNA, 13 bp, Artificial Sequence
  Oligonucleotide for detection of SNP TSC0001340
ttattccataaac

SEQ ID NO: 186361 - DNA, 13 bp, Artificial Sequence
  Oligonucleotide for detection of SNP TSC0001340
gtttatagaataa

SEQ ID NO: 186362 - DNA, 13 bp, Artificial Sequence
  Oligonucleotide for detection of SNP TSC0001340
ttattctataaac

SEQ ID NO: 186363 - DNA, 13 bp, Artificial Sequence
  Oligonucleotide for detection of SNP TSC0001340
gtttacggaataa

SEQ ID NO: 186364 - DNA, 13 bp, Artificial Sequence
  Oligonucleotide for detection of SNP TSC0001340
ttattccgtaaac

SEQ ID NO: 186365 - DNA, 13 bp, Artificial Sequence
  Oligonucleotide for detection of SNP TSC0045894
atattgattttga

SEQ ID NO: 186366 - DNA, 13 bp, Artificial Sequence
  Oligonucleotide for detection of SNP TSC0045894
tcaaaatcaatat

SEQ ID NO: 186367 - DNA, 13 bp, Artificial Sequence
  Oligonucleotide for detection of SNP TSC0045894
atattgtttttga

SEQ ID NO: 186368 - DNA, 13 bp, Artificial Sequence
  Oligonucleotide for detection of SNP TSC0045894
tcaaaaacaatat

SEQ ID NO: 186369 - DNA, 13 bp, Artificial Sequence
  Oligonucleotide for detection of SNP TSC0045894
ttaaaattaatat

SEQ ID NO: 186370 - DNA, 13 bp, Artificial Sequence
  Oligonucleotide for detection of SNP TSC0045894
atattaattttaa

SEQ ID NO: 186371 - DNA, 13 bp, Artificial Sequence
  Oligonucleotide for detection of SNP TSC0045894
ttaaaaataatat

SEQ ID NO: 186372 - DNA, 13 bp, Artificial Sequence
  Oligonucleotide for detection of SNP TSC0045894
atattatttttaa

SEQ ID NO: 186373 - DNA, 13 bp, Artificial Sequence
  Oligonucleotide for detection of SNP TSC0045895
tgaaggattttay

SEQ ID NO: 186374 - DNA, 13 bp, Artificial Sequence
  Oligonucleotide for detection of SNP TSC0045895
rtaaaatccttca

SEQ ID NO: 186375 - DNA, 13 bp, Artificial Sequence
  Oligonucleotide for detection of SNP TSC0045895
tgaagggttttay

SEQ ID NO: 186376 - DNA, 13 bp, Artificial Sequence
  Oligonucleotide for detection of SNP TSC0045895
rtaaaacccttca

SEQ ID NO: 186377 - DNA, 13 bp, Artificial Sequence
  Oligonucleotide for detection of SNP TSC0045896
aataaaattttaa

SEQ ID NO: 186378 - DNA, 13 bp, Artificial Sequence
  Oligonucleotide for detection of SNP TSC0045896
ttaaaattttatt

SEQ ID NO: 186379 - DNA, 13 bp, Artificial Sequence
  Oligonucleotide for detection of SNP TSC0045896
aataaatttttaa

SEQ ID NO: 186380 - DNA, 13 bp, Artificial Sequence
  Oligonucleotide for detection of SNP TSC0045896
ttaaaaatttatt

SEQ ID NO: 186381 - DNA, 13 bp, Artificial Sequence
  Oligonucleotide for detection of SNP TSC0045896
ttgaagttttgtt

SEQ ID NO: 186382 - DNA, 13 bp, Artificial Sequence
  Oligonucleotide for detection of SNP TSC0045896
aacaaaacttcaa

SEQ ID NO: 186383 - DNA, 13 bp, Artificial Sequence
  Oligonucleotide for detection of SNP TSC0045896
ttgaaggtttgtt

SEQ ID NO: 186384 - DNA, 13 bp, Artificial Sequence
  Oligonucleotide for detection of SNP TSC0045896
aacaaaccttcaa

SEQ ID NO: 186385 - DNA, 13 bp, Artificial Sequence
  Oligonucleotide for detection of SNP TSC0045897
ttttttgggtaat

SEQ ID NO: 186386 - DNA, 13 bp, Artificial Sequence
  Oligonucleotide for detection of SNP TSC0045897
attacccaaaaaa

SEQ ID NO: 186387 - DNA, 13 bp, Artificial Sequence
  Oligonucleotide for detection of SNP TSC0045897
ttttttaggtaat

SEQ ID NO: 186388 - DNA, 13 bp, Artificial Sequence
  Oligonucleotide for detection of SNP TSC0045897
attacctaaaaaa

SEQ ID NO: 186389 - DNA, 13 bp, Artificial Sequence
  Oligonucleotide for detection of SNP TSC0045898
aggtttattgggt

SEQ ID NO: 186390 - DNA, 13 bp, Artificial Sequence
  Oligonucleotide for detection of SNP TSC0045898
acccaataaacct

SEQ ID NO: 186391 - DNA, 13 bp, Artificial Sequence
  Oligonucleotide for detection of SNP TSC0045898
aggttttttgggt

SEQ ID NO: 186392 - DNA, 13 bp, Artificial Sequence
  Oligonucleotide for detection of SNP TSC0045898
acccaaaaaacct

SEQ ID NO: 186393 - DNA, 13 bp, Artificial Sequence
  Oligonucleotide for detection of SNP TSC0045898
atttaagaaattt

SEQ ID NO: 186394 - DNA, 13 bp, Artificial Sequence
  Oligonucleotide for detection of SNP TSC0045898
aaatttcttaaat

SEQ ID NO: 186395 - DNA, 13 bp, Artificial Sequence
  Oligonucleotide for detection of SNP TSC0045909
ttattaattaata

SEQ ID NO: 186396 - DNA, 13 bp, Artificial Sequence
  Oligonucleotide for detection of SNP TSC0045909
tattaattaataa

SEQ ID NO: 186397 - DNA, 13 bp, Artificial Sequence
  Oligonucleotide for detection of SNP TSC0045909
ttattagttaata

SEQ ID NO: 186398 - DNA, 13 bp, Artificial Sequence
  Oligonucleotide for detection of SNP TSC0045909
tattaactaataa

SEQ ID NO: 186399 - DNA, 13 bp, Artificial Sequence
  Oligonucleotide for detection of SNP TSC0045910
gttatggtaatag

SEQ ID NO: 186400 - DNA, 13 bp, Artificial Sequence
  Oligonucleotide for detection of SNP TSC0045910
ctattaccataac

SEQ ID NO: 186401 - DNA, 13 bp, Artificial Sequence
  Oligonucleotide for detection of SNP TSC0045910
gttatgataatag

SEQ ID NO: 186402 - DNA, 13 bp, Artificial Sequence
  Oligonucleotide for detection of SNP TSC0045910
ctattatcataac

SEQ ID NO: 186403 - DNA, 13 bp, Artificial Sequence
  Oligonucleotide for detection of SNP TSC0000250
ggaagtgtggagg

SEQ ID NO: 186404 - DNA, 13 bp, Artificial Sequence
  Oligonucleotide for detection of SNP TSC0000250
cctccacacttcc

SEQ ID NO: 186405 - DNA, 13 bp, Artificial Sequence
  Oligonucleotide for detection of SNP TSC0000250
ggaagtatggagg

SEQ ID NO: 186406 - DNA, 13 bp, Artificial Sequence
  Oligonucleotide for detection of SNP TSC0000250
cctccatacttcc

SEQ ID NO: 186407 - DNA, 13 bp, Artificial Sequence
  Oligonucleotide for detection of SNP TSC0045911
gaatgtggaagag

SEQ ID NO: 186408 - DNA, 13 bp, Artificial Sequence
  Oligonucleotide for detection of SNP TSC0045911
ctcttccacattc

SEQ ID NO: 186409 - DNA, 13 bp, Artificial Sequence
  Oligonucleotide for detection of SNP TSC0045911
gaatgtagaagag

SEQ ID NO: 186410 - DNA, 13 bp, Artificial Sequence
  Oligonucleotide for detection of SNP TSC0045911
ctcttctacattc

SEQ ID NO: 186411 - DNA, 13 bp, Artificial Sequence
  Oligonucleotide for detection of SNP TSC0045912
ttgtttttattga

SEQ ID NO: 186412 - DNA, 13 bp, Artificial Sequence
  Oligonucleotide for detection of SNP TSC0045912
tcaataaaaacaa

SEQ ID NO: 186413 - DNA, 13 bp, Artificial Sequence
  Oligonucleotide for detection of SNP TSC0045912
ttgtttgtattga

SEQ ID NO: 186414 - DNA, 13 bp, Artificial Sequence
  Oligonucleotide for detection of SNP TSC0045912
tcaatacaaacaa

SEQ ID NO: 186415 - DNA, 13 bp, Artificial Sequence
  Oligonucleotide for detection of SNP TSC0045912
ttgttcgtattga

SEQ ID NO: 186416 - DNA, 13 bp, Artificial Sequence
  Oligonucleotide for detection of SNP TSC0045912
tcaatacgaacaa

SEQ ID NO: 186417 - DNA, 13 bp, Artificial Sequence
  Oligonucleotide for detection of SNP TSC0045919
gttttagtaaaay

SEQ ID NO: 186418 - DNA, 13 bp, Artificial Sequence
  Oligonucleotide for detection of SNP TSC0045919
rttttactaaaac

SEQ ID NO: 186419 - DNA, 13 bp, Artificial Sequence
  Oligonucleotide for detection of SNP TSC0045920
gaagtgagtgggy

SEQ ID NO: 186420 - DNA, 13 bp, Artificial Sequence
  Oligonucleotide for detection of SNP TSC0045920
rcccactcacttc

SEQ ID NO: 186421 - DNA, 13 bp, Artificial Sequence
  Oligonucleotide for detection of SNP TSC0045920
gaagtgggtgggy

SEQ ID NO: 186422 - DNA, 13 bp, Artificial Sequence
  Oligonucleotide for detection of SNP TSC0045920
rcccacccacttc

SEQ ID NO: 186423 - DNA, 13 bp, Artificial Sequence
  Oligonucleotide for detection of SNP TSC0045921
tttagtaagagtg

SEQ ID NO: 186424 - DNA, 13 bp, Artificial Sequence
  Oligonucleotide for detection of SNP TSC0045921
cactcttactaaa

SEQ ID NO: 186425 - DNA, 13 bp, Artificial Sequence
  Oligonucleotide for detection of SNP TSC0045921
tttagtgagagtg

SEQ ID NO: 186426 - DNA, 13 bp, Artificial Sequence
  Oligonucleotide for detection of SNP TSC0045921
cactctcactaaa

SEQ ID NO: 186427 - DNA, 13 bp, Artificial Sequence
  Oligonucleotide for detection of SNP TSC0045924
agtaaattaggga

SEQ ID NO: 186428 - DNA, 13 bp, Artificial Sequence
  Oligonucleotide for detection of SNP TSC0045924
tccctaatttact

SEQ ID NO: 186429 - DNA, 13 bp, Artificial Sequence
  Oligonucleotide for detection of SNP TSC0045924
agtaaagtaggga

SEQ ID NO: 186430 - DNA, 13 bp, Artificial Sequence
  Oligonucleotide for detection of SNP TSC0045924
tccctactttact

SEQ ID NO: 186431 - DNA, 13 bp, Artificial Sequence
  Oligonucleotide for detection of SNP TSC0045925
ttatatagtggaa

SEQ ID NO: 186432 - DNA, 13 bp, Artificial Sequence
  Oligonucleotide for detection of SNP TSC0045925
ttccactatataa

SEQ ID NO: 186433 - DNA, 13 bp, Artificial Sequence
  Oligonucleotide for detection of SNP TSC0045925
ttatatggtggaa

SEQ ID NO: 186434 - DNA, 13 bp, Artificial Sequence
  Oligonucleotide for detection of SNP TSC0045925
ttccaccatataa

SEQ ID NO: 186435 - DNA, 13 bp, Artificial Sequence
  Oligonucleotide for detection of SNP TSC0001178
attttgtatttta

SEQ ID NO: 186436 - DNA, 13 bp, Artificial Sequence
  Oligonucleotide for detection of SNP TSC0001178
taaaatacaaaat

SEQ ID NO: 186437 - DNA, 13 bp, Artificial Sequence
  Oligonucleotide for detection of SNP TSC0001178
attttggatttta

SEQ ID NO: 186438 - DNA, 13 bp, Artificial Sequence
  Oligonucleotide for detection of SNP TSC0001178
taaaatccaaaat

SEQ ID NO: 186439 - DNA, 13 bp, Artificial Sequence
  Oligonucleotide for detection of SNP TSC0001178
taaaatttaagat

SEQ ID NO: 186440 - DNA, 13 bp, Artificial Sequence
  Oligonucleotide for detection of SNP TSC0001178
atcttaaatttta

SEQ ID NO: 186441 - DNA, 13 bp, Artificial Sequence
  Oligonucleotide for detection of SNP TSC0045926
ttaaagatgttty

SEQ ID NO: 186442 - DNA, 13 bp, Artificial Sequence
  Oligonucleotide for detection of SNP TSC0045926
raaacatctttaa

SEQ ID NO: 186443 - DNA, 13 bp, Artificial Sequence
  Oligonucleotide for detection of SNP TSC0045926
ttaaagttgttty

SEQ ID NO: 186444 - DNA, 13 bp, Artificial Sequence
  Oligonucleotide for detection of SNP TSC0045926
raaacaactttaa

SEQ ID NO: 186445 - DNA, 13 bp, Artificial Sequence
  Oligonucleotide for detection of SNP TSC0045926
gaaatatttttgg

SEQ ID NO: 186446 - DNA, 13 bp, Artificial Sequence
  Oligonucleotide for detection of SNP TSC0045926
ccaaaaatatttc

SEQ ID NO: 186447 - DNA, 13 bp, Artificial Sequence
  Oligonucleotide for detection of SNP TSC0045926
gaaataattttgg

SEQ ID NO: 186448 - DNA, 13 bp, Artificial Sequence
  Oligonucleotide for detection of SNP TSC0045926
ccaaaattatttc

SEQ ID NO: 186449 - DNA, 13 bp, Artificial Sequence
  Oligonucleotide for detection of SNP TSC0045928
tttttttttagat

SEQ ID NO: 186450 - DNA, 13 bp, Artificial Sequence
  Oligonucleotide for detection of SNP TSC0045928
atctaaaaaaaaa

SEQ ID NO: 186451 - DNA, 13 bp, Artificial Sequence
  Oligonucleotide for detection of SNP TSC0045928
atttggaagaaga

SEQ ID NO: 186452 - DNA, 13 bp, Artificial Sequence
  Oligonucleotide for detection of SNP TSC0045928
tcttcttccaaat

SEQ ID NO: 186453 - DNA, 13 bp, Artificial Sequence
  Oligonucleotide for detection of SNP TSC0045928
atttggtagaaga

SEQ ID NO: 186454 - DNA, 13 bp, Artificial Sequence
  Oligonucleotide for detection of SNP TSC0045928
tcttctaccaaat

SEQ ID NO: 186455 - DNA, 13 bp, Artificial Sequence
  Oligonucleotide for detection of SNP TSC0045929
gatagaagtgaag

SEQ ID NO: 186456 - DNA, 13 bp, Artificial Sequence
  Oligonucleotide for detection of SNP TSC0045929
cttcacttctatc

SEQ ID NO: 186457 - DNA, 13 bp, Artificial Sequence
  Oligonucleotide for detection of SNP TSC0045929
gatagaggtgaag

SEQ ID NO: 186458 - DNA, 13 bp, Artificial Sequence
  Oligonucleotide for detection of SNP TSC0045929
cttcacctctatc

SEQ ID NO: 186459 - DNA, 13 bp, Artificial Sequence
  Oligonucleotide for detection of SNP TSC0009611
tgtttaaaaagtg

SEQ ID NO: 186460 - DNA, 13 bp, Artificial Sequence
  Oligonucleotide for detection of SNP TSC0009611
cactttttaaaca

SEQ ID NO: 186461 - DNA, 13 bp, Artificial Sequence
  Oligonucleotide for detection of SNP TSC0009611
tgtttagaaagtg

SEQ ID NO: 186462 - DNA, 13 bp, Artificial Sequence
  Oligonucleotide for detection of SNP TSC0009611
cactttctaaaca

SEQ ID NO: 186463 - DNA, 13 bp, Artificial Sequence
  Oligonucleotide for detection of SNP TSC0045930
aagaagagaagga

SEQ ID NO: 186464 - DNA, 13 bp, Artificial Sequence
  Oligonucleotide for detection of SNP TSC0045930
tccttctcttctt

SEQ ID NO: 186465 - DNA, 13 bp, Artificial Sequence
  Oligonucleotide for detection of SNP TSC0045930
aagaagggaagga

SEQ ID NO: 186466 - DNA, 13 bp, Artificial Sequence
  Oligonucleotide for detection of SNP TSC0045930
tccttcccttctt

SEQ ID NO: 186467 - DNA, 13 bp, Artificial Sequence
  Oligonucleotide for detection of SNP TSC0045931
taggattataggy

SEQ ID NO: 186468 - DNA, 13 bp, Artificial Sequence
  Oligonucleotide for detection of SNP TSC0045931
rcctataatccta

SEQ ID NO: 186469 - DNA, 13 bp, Artificial Sequence
  Oligonucleotide for detection of SNP TSC0045931
taggatgataggy

SEQ ID NO: 186470 - DNA, 13 bp, Artificial Sequence
  Oligonucleotide for detection of SNP TSC0045931
rcctatcatccta

SEQ ID NO: 186471 - DNA, 13 bp, Artificial Sequence
  Oligonucleotide for detection of SNP TSC0006703
ggtttatgtttay

SEQ ID NO: 186472 - DNA, 13 bp, Artificial Sequence
  Oligonucleotide for detection of SNP TSC0006703
rtaaacataaacc

SEQ ID NO: 186473 - DNA, 13 bp, Artificial Sequence
  Oligonucleotide for detection of SNP TSC0006703
ggtttacgtttay

SEQ ID NO: 186474 - DNA, 13 bp, Artificial Sequence
  Oligonucleotide for detection of SNP TSC0006703
rtaaacgtaaacc

SEQ ID NO: 186475 - DNA, 13 bp, Artificial Sequence
  Oligonucleotide for detection of SNP TSC0006703
gtaaatgtaagty

SEQ ID NO: 186476 - DNA, 13 bp, Artificial Sequence
  Oligonucleotide for detection of SNP TSC0006703
racttacatttac

SEQ ID NO: 186477 - DNA, 13 bp, Artificial Sequence
  Oligonucleotide for detection of SNP TSC0006703
gtaaatataagty

SEQ ID NO: 186478 - DNA, 13 bp, Artificial Sequence
  Oligonucleotide for detection of SNP TSC0006703
racttatatttac

SEQ ID NO: 186479 - DNA, 13 bp, Artificial Sequence
  Oligonucleotide for detection of SNP TSC0006703
gtaaacgtaagty

SEQ ID NO: 186480 - DNA, 13 bp, Artificial Sequence
  Oligonucleotide for detection of SNP TSC0006703
racttacgtttac

SEQ ID NO: 186481 - DNA, 13 bp, Artificial Sequence
  Oligonucleotide for detection of SNP TSC0045932
agagttgttgata

SEQ ID NO: 186482 - DNA, 13 bp, Artificial Sequence
  Oligonucleotide for detection of SNP TSC0045932
tatcaacaactct

SEQ ID NO: 186483 - DNA, 13 bp, Artificial Sequence
  Oligonucleotide for detection of SNP TSC0045932
agagttattgata

SEQ ID NO: 186484 - DNA, 13 bp, Artificial Sequence
  Oligonucleotide for detection of SNP TSC0045932
tatcaataactct

SEQ ID NO: 186485 - DNA, 13 bp, Artificial Sequence
  Oligonucleotide for detection of SNP TSC0045933
ttaaaagaaatta

SEQ ID NO: 186486 - DNA, 13 bp, Artificial Sequence
  Oligonucleotide for detection of SNP TSC0045933
taatttcttttaa

SEQ ID NO: 186487 - DNA, 13 bp, Artificial Sequence
  Oligonucleotide for detection of SNP TSC0045933
tagtttattttga

SEQ ID NO: 186488 - DNA, 13 bp, Artificial Sequence
  Oligonucleotide for detection of SNP TSC0045933
tcaaaataaacta

SEQ ID NO: 186489 - DNA, 13 bp, Artificial Sequence
  Oligonucleotide for detection of SNP TSC0000199
atgaatatgaaty

SEQ ID NO: 186490 - DNA, 13 bp, Artificial Sequence
  Oligonucleotide for detection of SNP TSC0000199
rattcatattcat

SEQ ID NO: 186491 - DNA, 13 bp, Artificial Sequence
  Oligonucleotide for detection of SNP TSC0000199
atgaatgtgaaty

SEQ ID NO: 186492 - DNA, 13 bp, Artificial Sequence
  Oligonucleotide for detection of SNP TSC0000199
rattcacattcat

SEQ ID NO: 186493 - DNA, 13 bp, Artificial Sequence
  Oligonucleotide for detection of SNP TSC0000878
tgatatatttttt

SEQ ID NO: 186494 - DNA, 13 bp, Artificial Sequence
  Oligonucleotide for detection of SNP TSC0000878
aaaaaatatatca

SEQ ID NO: 186495 - DNA, 13 bp, Artificial Sequence
  Oligonucleotide for detection of SNP TSC0000878
tgatatgtttttt

SEQ ID NO: 186496 - DNA, 13 bp, Artificial Sequence
  Oligonucleotide for detection of SNP TSC0000878
aaaaaacatatca

SEQ ID NO: 186497 - DNA, 13 bp, Artificial Sequence
  Oligonucleotide for detection of SNP TSC0000878
tgatacgtttttt

SEQ ID NO: 186498 - DNA, 13 bp, Artificial Sequence
  Oligonucleotide for detection of SNP TSC0000878
aaaaaacgtatca

SEQ ID NO: 186499 - DNA, 13 bp, Artificial Sequence
  Oligonucleotide for detection of SNP TSC0000878
aaaggatgtgtta

SEQ ID NO: 186500 - DNA, 13 bp, Artificial Sequence
  Oligonucleotide for detection of SNP TSC0000878
taacacatccttt

SEQ ID NO: 186501 - DNA, 13 bp, Artificial Sequence
  Oligonucleotide for detection of SNP TSC0000878
aaaggacgtgtta

SEQ ID NO: 186502 - DNA, 13 bp, Artificial Sequence
  Oligonucleotide for detection of SNP TSC0000878
taacacgtccttt

SEQ ID NO: 186503 - DNA, 13 bp, Artificial Sequence
  Oligonucleotide for detection of SNP TSC0045940
ttttgtaaggagg

SEQ ID NO: 186504 - DNA, 13 bp, Artificial Sequence
  Oligonucleotide for detection of SNP TSC0045940
cctccttacaaaa

SEQ ID NO: 186505 - DNA, 13 bp, Artificial Sequence
  Oligonucleotide for detection of SNP TSC0045940
ttttgtgaggagg

SEQ ID NO: 186506 - DNA, 13 bp, Artificial Sequence
  Oligonucleotide for detection of SNP TSC0045940
cctcctcacaaaa

SEQ ID NO: 186507 - DNA, 13 bp, Artificial Sequence
  Oligonucleotide for detection of SNP TSC0045940
ttttgcgaggagg

SEQ ID NO: 186508 - DNA, 13 bp, Artificial Sequence
  Oligonucleotide for detection of SNP TSC0045940
cctcctcgcaaaa

SEQ ID NO: 186509 - DNA, 13 bp, Artificial Sequence
  Oligonucleotide for detection of SNP TSC0045941
gtatgaagagtgg

SEQ ID NO: 186510 - DNA, 13 bp, Artificial Sequence
  Oligonucleotide for detection of SNP TSC0045941
ccactcttcatac

SEQ ID NO: 186511 - DNA, 13 bp, Artificial Sequence
  Oligonucleotide for detection of SNP TSC0045941
gtatgaggagtgg

SEQ ID NO: 186512 - DNA, 13 bp, Artificial Sequence
  Oligonucleotide for detection of SNP TSC0045941
ccactcctcatac

SEQ ID NO: 186513 - DNA, 13 bp, Artificial Sequence
  Oligonucleotide for detection of SNP TSC0045942
taagtatgtttag

SEQ ID NO: 186514 - DNA, 13 bp, Artificial Sequence
  Oligonucleotide for detection of SNP TSC0045942
ctaaacatactta

SEQ ID NO: 186515 - DNA, 13 bp, Artificial Sequence
  Oligonucleotide for detection of SNP TSC0045942
taagtacgtttag

SEQ ID NO: 186516 - DNA, 13 bp, Artificial Sequence
  Oligonucleotide for detection of SNP TSC0045942
ctaaacgtactta

SEQ ID NO: 186517 - DNA, 13 bp, Artificial Sequence
  Oligonucleotide for detection of SNP TSC0045942
ttggatgtatttg

SEQ ID NO: 186518 - DNA, 13 bp, Artificial Sequence
  Oligonucleotide for detection of SNP TSC0045942
caaatacatccaa

SEQ ID NO: 186519 - DNA, 13 bp, Artificial Sequence
  Oligonucleotide for detection of SNP TSC0045942
ttggatatatttg

SEQ ID NO: 186520 - DNA, 13 bp, Artificial Sequence
  Oligonucleotide for detection of SNP TSC0045942
caaatatatccaa

SEQ ID NO: 186521 - DNA, 13 bp, Artificial Sequence
  Oligonucleotide for detection of SNP TSC0045942
ttggacgtatttg

SEQ ID NO: 186522 - DNA, 13 bp, Artificial Sequence
  Oligonucleotide for detection of SNP TSC0045942
caaatacgtccaa

SEQ ID NO: 186523 - DNA, 13 bp, Artificial Sequence
  Oligonucleotide for detection of SNP TSC0045943
tgttagtggtgga

SEQ ID NO: 186524 - DNA, 13 bp, Artificial Sequence
  Oligonucleotide for detection of SNP TSC0045943
tccaccactaaca

SEQ ID NO: 186525 - DNA, 13 bp, Artificial Sequence
  Oligonucleotide for detection of SNP TSC0045943
tgttagcggtgga

SEQ ID NO: 186526 - DNA, 13 bp, Artificial Sequence
  Oligonucleotide for detection of SNP TSC0045943
tccaccgctaaca

SEQ ID NO: 186527 - DNA, 13 bp, Artificial Sequence
  Oligonucleotide for detection of SNP TSC0045943
tttattgttggta

SEQ ID NO: 186528 - DNA, 13 bp, Artificial Sequence
  Oligonucleotide for detection of SNP TSC0045943
taccaacaataaa

SEQ ID NO: 186529 - DNA, 13 bp, Artificial Sequence
  Oligonucleotide for detection of SNP TSC0045943
tttattattggta

SEQ ID NO: 186530 - DNA, 13 bp, Artificial Sequence
  Oligonucleotide for detection of SNP TSC0045943
taccaataataaa

SEQ ID NO: 186531 - DNA, 13 bp, Artificial Sequence
  Oligonucleotide for detection of SNP TSC0045943
tttatcgttggta

SEQ ID NO: 186532 - DNA, 13 bp, Artificial Sequence
  Oligonucleotide for detection of SNP TSC0045943
taccaacgataaa

SEQ ID NO: 186533 - DNA, 13 bp, Artificial Sequence
  Oligonucleotide for detection of SNP TSC0000553
gttttatgatgtt

SEQ ID NO: 186534 - DNA, 13 bp, Artificial Sequence
  Oligonucleotide for detection of SNP TSC0000553
aacatcataaaac

SEQ ID NO: 186535 - DNA, 13 bp, Artificial Sequence
  Oligonucleotide for detection of SNP TSC0000553
gttttacgatgtt

SEQ ID NO: 186536 - DNA, 13 bp, Artificial Sequence
  Oligonucleotide for detection of SNP TSC0000553
aacatcgtaaaac

SEQ ID NO: 186537 - DNA, 13 bp, Artificial Sequence
  Oligonucleotide for detection of SNP TSC0000553
aatattgtgaaay

SEQ ID NO: 186538 - DNA, 13 bp, Artificial Sequence
  Oligonucleotide for detection of SNP TSC0000553
rtttcacaatatt

SEQ ID NO: 186539 - DNA, 13 bp, Artificial Sequence
  Oligonucleotide for detection of SNP TSC0000553
aatattatgaaay

SEQ ID NO: 186540 - DNA, 13 bp, Artificial Sequence
  Oligonucleotide for detection of SNP TSC0000553
rtttcataatatt

SEQ ID NO: 186541 - DNA, 13 bp, Artificial Sequence
  Oligonucleotide for detection of SNP TSC0000553
aatatcgtgaaay

SEQ ID NO: 186542 - DNA, 13 bp, Artificial Sequence
  Oligonucleotide for detection of SNP TSC0000553
rtttcacgatatt

SEQ ID NO: 186543 - DNA, 13 bp, Artificial Sequence
  Oligonucleotide for detection of SNP TSC0045946
tgtagttgtgtaa

SEQ ID NO: 186544 - DNA, 13 bp, Artificial Sequence
  Oligonucleotide for detection of SNP TSC0045946
ttacacaactaca

SEQ ID NO: 186545 - DNA, 13 bp, Artificial Sequence
  Oligonucleotide for detection of SNP TSC0045946
tgtagtggtgtaa

SEQ ID NO: 186546 - DNA, 13 bp, Artificial Sequence
  Oligonucleotide for detection of SNP TSC0045946
ttacaccactaca

SEQ ID NO: 186547 - DNA, 13 bp, Artificial Sequence
  Oligonucleotide for detection of SNP TSC0045946
ttgtattattgta

SEQ ID NO: 186548 - DNA, 13 bp, Artificial Sequence
  Oligonucleotide for detection of SNP TSC0045946
tacaataatacaa

SEQ ID NO: 186549 - DNA, 13 bp, Artificial Sequence
  Oligonucleotide for detection of SNP TSC0045947
atttgaatatttg

SEQ ID NO: 186550 - DNA, 13 bp, Artificial Sequence
  Oligonucleotide for detection of SNP TSC0045947
caaatattcaaat

SEQ ID NO: 186551 - DNA, 13 bp, Artificial Sequence
  Oligonucleotide for detection of SNP TSC0045947
atttgagtatttg

SEQ ID NO: 186552 - DNA, 13 bp, Artificial Sequence
  Oligonucleotide for detection of SNP TSC0045947
caaatactcaaat

SEQ ID NO: 186553 - DNA, 13 bp, Artificial Sequence
  Oligonucleotide for detection of SNP TSC0045948
tgtaaataaggtt

SEQ ID NO: 186554 - DNA, 13 bp, Artificial Sequence
  Oligonucleotide for detection of SNP TSC0045948
aaccttatttaca

SEQ ID NO: 186555 - DNA, 13 bp, Artificial Sequence
  Oligonucleotide for detection of SNP TSC0045948
tgtaaagaaggtt

SEQ ID NO: 186556 - DNA, 13 bp, Artificial Sequence
  Oligonucleotide for detection of SNP TSC0045948
aaccttctttaca

SEQ ID NO: 186557 - DNA, 13 bp, Artificial Sequence
  Oligonucleotide for detection of SNP TSC0045948
agttttttttata

SEQ ID NO: 186558 - DNA, 13 bp, Artificial Sequence
  Oligonucleotide for detection of SNP TSC0045948
tataaaaaaaact

SEQ ID NO: 186559 - DNA, 13 bp, Artificial Sequence
  Oligonucleotide for detection of SNP TSC0000369
ttgaattttgttt

SEQ ID NO: 186560 - DNA, 13 bp, Artificial Sequence
  Oligonucleotide for detection of SNP TSC0000369
aaacaaaattcaa

SEQ ID NO: 186561 - DNA, 13 bp, Artificial Sequence
  Oligonucleotide for detection of SNP TSC0000369
ttgaatgttgttt

SEQ ID NO: 186562 - DNA, 13 bp, Artificial Sequence
  Oligonucleotide for detection of SNP TSC0000369
aaacaacattcaa

SEQ ID NO: 186563 - DNA, 13 bp, Artificial Sequence
  Oligonucleotide for detection of SNP TSC0000369
aggtagaatttag

SEQ ID NO: 186564 - DNA, 13 bp, Artificial Sequence
  Oligonucleotide for detection of SNP TSC0000369
ctaaattctacct

SEQ ID NO: 186565 - DNA, 13 bp, Artificial Sequence
  Oligonucleotide for detection of SNP TSC0000369
aggtagtatttag

SEQ ID NO: 186566 - DNA, 13 bp, Artificial Sequence
  Oligonucleotide for detection of SNP TSC0000369
ctaaatactacct

SEQ ID NO: 186567 - DNA, 13 bp, Artificial Sequence
  Oligonucleotide for detection of SNP TSC0045953
ttggaaataggtg

SEQ ID NO: 186568 - DNA, 13 bp, Artificial Sequence
  Oligonucleotide for detection of SNP TSC0045953
cacctatttccaa

SEQ ID NO: 186569 - DNA, 13 bp, Artificial Sequence
  Oligonucleotide for detection of SNP TSC0045953
ttggaagtaggtg

SEQ ID NO: 186570 - DNA, 13 bp, Artificial Sequence
  Oligonucleotide for detection of SNP TSC0045953
cacctacttccaa

SEQ ID NO: 186571 - DNA, 13 bp, Artificial Sequence
  Oligonucleotide for detection of SNP TSC0045956
ttggggtaaaaaa

SEQ ID NO: 186572 - DNA, 13 bp, Artificial Sequence
  Oligonucleotide for detection of SNP TSC0045956
ttttttaccccaa

SEQ ID NO: 186573 - DNA, 13 bp, Artificial Sequence
  Oligonucleotide for detection of SNP TSC0045957
tattttatatagg

SEQ ID NO: 186574 - DNA, 13 bp, Artificial Sequence
  Oligonucleotide for detection of SNP TSC0045957
cctatataaaata

SEQ ID NO: 186575 - DNA, 13 bp, Artificial Sequence
  Oligonucleotide for detection of SNP TSC0045958
atattagatttty

SEQ ID NO: 186576 - DNA, 13 bp, Artificial Sequence
  Oligonucleotide for detection of SNP TSC0045958
raaaatctaatat

SEQ ID NO: 186577 - DNA, 13 bp, Artificial Sequence
  Oligonucleotide for detection of SNP TSC0045958
atattaaatttty

SEQ ID NO: 186578 - DNA, 13 bp, Artificial Sequence
  Oligonucleotide for detection of SNP TSC0045958
raaaatttaatat

SEQ ID NO: 186579 - DNA, 13 bp, Artificial Sequence
  Oligonucleotide for detection of SNP TSC0045959
ttatttataggaa

SEQ ID NO: 186580 - DNA, 13 bp, Artificial Sequence
  Oligonucleotide for detection of SNP TSC0045959
ttcctataaataa

SEQ ID NO: 186581 - DNA, 13 bp, Artificial Sequence
  Oligonucleotide for detection of SNP TSC0045959
ttatttgtaggaa

SEQ ID NO: 186582 - DNA, 13 bp, Artificial Sequence
  Oligonucleotide for detection of SNP TSC0045959
ttcctacaaataa

SEQ ID NO: 186583 - DNA, 13 bp, Artificial Sequence
  Oligonucleotide for detection of SNP TSC0045963
gatgatgtaaaaa

SEQ ID NO: 186584 - DNA, 13 bp, Artificial Sequence
  Oligonucleotide for detection of SNP TSC0045963
tttttacatcatc

SEQ ID NO: 186585 - DNA, 13 bp, Artificial Sequence
  Oligonucleotide for detection of SNP TSC0045963
gatgatataaaaa

SEQ ID NO: 186586 - DNA, 13 bp, Artificial Sequence
  Oligonucleotide for detection of SNP TSC0045963
tttttatatcatc

SEQ ID NO: 186587 - DNA, 13 bp, Artificial Sequence
  Oligonucleotide for detection of SNP TSC0045964
gcgattatgttay

SEQ ID NO: 186588 - DNA, 13 bp, Artificial Sequence
  Oligonucleotide for detection of SNP TSC0045964
rtaacataatcgc

SEQ ID NO: 186589 - DNA, 13 bp, Artificial Sequence
  Oligonucleotide for detection of SNP TSC0045964
gcgattgtgttay

SEQ ID NO: 186590 - DNA, 13 bp, Artificial Sequence
  Oligonucleotide for detection of SNP TSC0045964
rtaacacaatcgc

SEQ ID NO: 186591 - DNA, 13 bp, Artificial Sequence
  Oligonucleotide for detection of SNP TSC0045964
gcgattacgttay

SEQ ID NO: 186592 - DNA, 13 bp, Artificial Sequence
  Oligonucleotide for detection of SNP TSC0045964
rtaacgtaatcgc

SEQ ID NO: 186593 - DNA, 13 bp, Artificial Sequence
  Oligonucleotide for detection of SNP TSC0045964
gcgatcgtgttay

SEQ ID NO: 186594 - DNA, 13 bp, Artificial Sequence
  Oligonucleotide for detection of SNP TSC0045964
rtaacacgatcgc

SEQ ID NO: 186595 - DNA, 13 bp, Artificial Sequence
  Oligonucleotide for detection of SNP TSC0045964
gcgattgcgttay

SEQ ID NO: 186596 - DNA, 13 bp, Artificial Sequence
  Oligonucleotide for detection of SNP TSC0045964
rtaacgcaatcgc

SEQ ID NO: 186597 - DNA, 13 bp, Artificial Sequence
  Oligonucleotide for detection of SNP TSC0045964
gcgatcgcgttay

SEQ ID NO: 186598 - DNA, 13 bp, Artificial Sequence
  Oligonucleotide for detection of SNP TSC0045964
rtaacgcgatcgc

SEQ ID NO: 186599 - DNA, 13 bp, Artificial Sequence
  Oligonucleotide for detection of SNP TSC0045964
gtggtgtgattgy

SEQ ID NO: 186600 - DNA, 13 bp, Artificial Sequence
  Oligonucleotide for detection of SNP TSC0045964
rcaatcacaccac

SEQ ID NO: 186601 - DNA, 13 bp, Artificial Sequence
  Oligonucleotide for detection of SNP TSC0045964
gtggcgtgattgy

SEQ ID NO: 186602 - DNA, 13 bp, Artificial Sequence
  Oligonucleotide for detection of SNP TSC0045964
rcaatcacgccac

SEQ ID NO: 186603 - DNA, 13 bp, Artificial Sequence
  Oligonucleotide for detection of SNP TSC0045964
gtggtgtgatcgy

SEQ ID NO: 186604 - DNA, 13 bp, Artificial Sequence
  Oligonucleotide for detection of SNP TSC0045964
rcgatcacaccac

SEQ ID NO: 186605 - DNA, 13 bp, Artificial Sequence
  Oligonucleotide for detection of SNP TSC0045964
gtggtgcgattgy

SEQ ID NO: 186606 - DNA, 13 bp, Artificial Sequence
  Oligonucleotide for detection of SNP TSC0045964
rcaatcgcaccac

SEQ ID NO: 186607 - DNA, 13 bp, Artificial Sequence
  Oligonucleotide for detection of SNP TSC0045964
gtggcgtgatcgy

SEQ ID NO: 186608 - DNA, 13 bp, Artificial Sequence
  Oligonucleotide for detection of SNP TSC0045964
rcgatcacgccac

SEQ ID NO: 186609 - DNA, 13 bp, Artificial Sequence
  Oligonucleotide for detection of SNP TSC0045964
gtggcgcgattgy

SEQ ID NO: 186610 - DNA, 13 bp, Artificial Sequence
  Oligonucleotide for detection of SNP TSC0045964
rcaatcgcgccac

SEQ ID NO: 186611 - DNA, 13 bp, Artificial Sequence
  Oligonucleotide for detection of SNP TSC0045964
gtggtgcgatcgy

SEQ ID NO: 186612 - DNA, 13 bp, Artificial Sequence
  Oligonucleotide for detection of SNP TSC0045964
rcgatcgcaccac

SEQ ID NO: 186613 - DNA, 13 bp, Artificial Sequence
  Oligonucleotide for detection of SNP TSC0045964
gtggcgcgatcgy

SEQ ID NO: 186614 - DNA, 13 bp, Artificial Sequence
  Oligonucleotide for detection of SNP TSC0045964
rcgatcgcgccac

SEQ ID NO: 186615 - DNA, 13 bp, Artificial Sequence
  Oligonucleotide for detection of SNP TSC0045969
tatgggattgata

SEQ ID NO: 186616 - DNA, 13 bp, Artificial Sequence
  Oligonucleotide for detection of SNP TSC0045969
tatcaatcccata

SEQ ID NO: 186617 - DNA, 13 bp, Artificial Sequence
  Oligonucleotide for detection of SNP TSC0045969
tatgggtttgata

SEQ ID NO: 186618 - DNA, 13 bp, Artificial Sequence
  Oligonucleotide for detection of SNP TSC0045969
tatcaaacccata

SEQ ID NO: 186619 - DNA, 13 bp, Artificial Sequence
  Oligonucleotide for detection of SNP TSC0045969
tgttagttttatg

SEQ ID NO: 186620 - DNA, 13 bp, Artificial Sequence
  Oligonucleotide for detection of SNP TSC0045969
cataaaactaaca

SEQ ID NO: 186621 - DNA, 13 bp, Artificial Sequence
  Oligonucleotide for detection of SNP TSC0045969
tgttagatttatg

SEQ ID NO: 186622 - DNA, 13 bp, Artificial Sequence
  Oligonucleotide for detection of SNP TSC0045969
cataaatctaaca

SEQ ID NO: 186623 - DNA, 13 bp, Artificial Sequence
  Oligonucleotide for detection of SNP TSC0045970
ttatgaggaaata

SEQ ID NO: 186624 - DNA, 13 bp, Artificial Sequence
  Oligonucleotide for detection of SNP TSC0045970
tatttcctcataa

SEQ ID NO: 186625 - DNA, 13 bp, Artificial Sequence
  Oligonucleotide for detection of SNP TSC0045970
ttatgaagaaata

SEQ ID NO: 186626 - DNA, 13 bp, Artificial Sequence
  Oligonucleotide for detection of SNP TSC0045970
tatttcttcataa

SEQ ID NO: 186627 - DNA, 13 bp, Artificial Sequence
  Oligonucleotide for detection of SNP TSC0045972
aataggatttata

SEQ ID NO: 186628 - DNA, 13 bp, Artificial Sequence
  Oligonucleotide for detection of SNP TSC0045972
tataaatcctatt

SEQ ID NO: 186629 - DNA, 13 bp, Artificial Sequence
  Oligonucleotide for detection of SNP TSC0045972
aataggttttata

SEQ ID NO: 186630 - DNA, 13 bp, Artificial Sequence
  Oligonucleotide for detection of SNP TSC0045972
tataaaacctatt

SEQ ID NO: 186631 - DNA, 13 bp, Artificial Sequence
  Oligonucleotide for detection of SNP TSC0045972
tgtagattttgtt

SEQ ID NO: 186632 - DNA, 13 bp, Artificial Sequence
  Oligonucleotide for detection of SNP TSC0045972
aacaaaatctaca

SEQ ID NO: 186633 - DNA, 13 bp, Artificial Sequence
  Oligonucleotide for detection of SNP TSC0045972
tgtagaatttgtt

SEQ ID NO: 186634 - DNA, 13 bp, Artificial Sequence
  Oligonucleotide for detection of SNP TSC0045972
aacaaattctaca

SEQ ID NO: 186635 - DNA, 13 bp, Artificial Sequence
  Oligonucleotide for detection of SNP TSC0045973
ggtttaagttaga

SEQ ID NO: 186636 - DNA, 13 bp, Artificial Sequence
  Oligonucleotide for detection of SNP TSC0045973
tctaacttaaacc

SEQ ID NO: 186637 - DNA, 13 bp, Artificial Sequence
  Oligonucleotide for detection of SNP TSC0045973
ggtttaggttaga

SEQ ID NO: 186638 - DNA, 13 bp, Artificial Sequence
  Oligonucleotide for detection of SNP TSC0045973
tctaacctaaacc

SEQ ID NO: 186639 - DNA, 13 bp, Artificial Sequence
  Oligonucleotide for detection of SNP TSC0045974
aatagaaattaaa

SEQ ID NO: 186640 - DNA, 13 bp, Artificial Sequence
  Oligonucleotide for detection of SNP TSC0045974
tttaatttctatt

SEQ ID NO: 186641 - DNA, 13 bp, Artificial Sequence
  Oligonucleotide for detection of SNP TSC0045974
aatagagattaaa

SEQ ID NO: 186642 - DNA, 13 bp, Artificial Sequence
  Oligonucleotide for detection of SNP TSC0045974
tttaatctctatt

SEQ ID NO: 186643 - DNA, 13 bp, Artificial Sequence
  Oligonucleotide for detection of SNP TSC0045988
ggaagtgaggtat

SEQ ID NO: 186644 - DNA, 13 bp, Artificial Sequence
  Oligonucleotide for detection of SNP TSC0045988
atacctcacttcc

SEQ ID NO: 186645 - DNA, 13 bp, Artificial Sequence
  Oligonucleotide for detection of SNP TSC0045988
ggaagcgaggtat

SEQ ID NO: 186646 - DNA, 13 bp, Artificial Sequence
  Oligonucleotide for detection of SNP TSC0045988
atacctcgcttcc

SEQ ID NO: 186647 - DNA, 13 bp, Artificial Sequence
  Oligonucleotide for detection of SNP TSC0045992
gaggagtgagatt

SEQ ID NO: 186648 - DNA, 13 bp, Artificial Sequence
  Oligonucleotide for detection of SNP TSC0045992
aatctcactcctc

SEQ ID NO: 186649 - DNA, 13 bp, Artificial Sequence
  Oligonucleotide for detection of SNP TSC0045992
gaggagggagatt

SEQ ID NO: 186650 - DNA, 13 bp, Artificial Sequence
  Oligonucleotide for detection of SNP TSC0045992
aatctccctcctc

SEQ ID NO: 186651 - DNA, 13 bp, Artificial Sequence
  Oligonucleotide for detection of SNP TSC0045994
tagttattaagta

SEQ ID NO: 186652 - DNA, 13 bp, Artificial Sequence
  Oligonucleotide for detection of SNP TSC0045994
tacttaataacta

SEQ ID NO: 186653 - DNA, 13 bp, Artificial Sequence
  Oligonucleotide for detection of SNP TSC0045997
aaatgtgggagaa

SEQ ID NO: 186654 - DNA, 13 bp, Artificial Sequence
  Oligonucleotide for detection of SNP TSC0045997
ttctcccacattt

SEQ ID NO: 186655 - DNA, 13 bp, Artificial Sequence
  Oligonucleotide for detection of SNP TSC0045997
aaatgtaggagaa

SEQ ID NO: 186656 - DNA, 13 bp, Artificial Sequence
  Oligonucleotide for detection of SNP TSC0045997
ttctcctacattt

SEQ ID NO: 186657 - DNA, 13 bp, Artificial Sequence
  Oligonucleotide for detection of SNP TSC0045998
tttgtagaatata

SEQ ID NO: 186658 - DNA, 13 bp, Artificial Sequence
  Oligonucleotide for detection of SNP TSC0045998
tatattctacaaa

SEQ ID NO: 186659 - DNA, 13 bp, Artificial Sequence
  Oligonucleotide for detection of SNP TSC0045998
ttcgtaaaatata

SEQ ID NO: 186660 - DNA, 13 bp, Artificial Sequence
  Oligonucleotide for detection of SNP TSC0045998
tatattttacgaa

SEQ ID NO: 186661 - DNA, 13 bp, Artificial Sequence
  Oligonucleotide for detection of SNP TSC0045998
ttcgtagaatata

SEQ ID NO: 186662 - DNA, 13 bp, Artificial Sequence
  Oligonucleotide for detection of SNP TSC0045998
tatattctacgaa

SEQ ID NO: 186663 - DNA, 13 bp, Artificial Sequence
  Oligonucleotide for detection of SNP TSC0046000
agaagatattgag

SEQ ID NO: 186664 - DNA, 13 bp, Artificial Sequence
  Oligonucleotide for detection of SNP TSC0046000
ctcaatatcttct

SEQ ID NO: 186665 - DNA, 13 bp, Artificial Sequence
  Oligonucleotide for detection of SNP TSC0046000
agaagagattgag

SEQ ID NO: 186666 - DNA, 13 bp, Artificial Sequence
  Oligonucleotide for detection of SNP TSC0046000
ctcaatctcttct

SEQ ID NO: 186667 - DNA, 13 bp, Artificial Sequence
  Oligonucleotide for detection of SNP TSC0046001
gaagatattgaga

SEQ ID NO: 186668 - DNA, 13 bp, Artificial Sequence
  Oligonucleotide for detection of SNP TSC0046001
tctcaatatcttc

SEQ ID NO: 186669 - DNA, 13 bp, Artificial Sequence
  Oligonucleotide for detection of SNP TSC0046001
gaagattttgaga

SEQ ID NO: 186670 - DNA, 13 bp, Artificial Sequence
  Oligonucleotide for detection of SNP TSC0046001
tctcaaaatcttc

SEQ ID NO: 186671 - DNA, 13 bp, Artificial Sequence
  Oligonucleotide for detection of SNP TSC0046002
gttgttgtagttt

SEQ ID NO: 186672 - DNA, 13 bp, Artificial Sequence
  Oligonucleotide for detection of SNP TSC0046002
aaactacaacaac

SEQ ID NO: 186673 - DNA, 13 bp, Artificial Sequence
  Oligonucleotide for detection of SNP TSC0046002
gttgttatagttt

SEQ ID NO: 186674 - DNA, 13 bp, Artificial Sequence
  Oligonucleotide for detection of SNP TSC0046002
aaactataacaac

SEQ ID NO: 186675 - DNA, 13 bp, Artificial Sequence
  Oligonucleotide for detection of SNP TSC0046003
ttgggtaggtatt

SEQ ID NO: 186676 - DNA, 13 bp, Artificial Sequence
  Oligonucleotide for detection of SNP TSC0046003
aatacctacccaa

SEQ ID NO: 186677 - DNA, 13 bp, Artificial Sequence
  Oligonucleotide for detection of SNP TSC0046003
ttgggtgggtatt

SEQ ID NO: 186678 - DNA, 13 bp, Artificial Sequence
  Oligonucleotide for detection of SNP TSC0046003
aatacccacccaa

SEQ ID NO: 186679 - DNA, 13 bp, Artificial Sequence
  Oligonucleotide for detection of SNP TSC0046004
tattgaattgtat

SEQ ID NO: 186680 - DNA, 13 bp, Artificial Sequence
  Oligonucleotide for detection of SNP TSC0046004
atacaattcaata

SEQ ID NO: 186681 - DNA, 13 bp, Artificial Sequence
  Oligonucleotide for detection of SNP TSC0046004
tattgagttgtat

SEQ ID NO: 186682 - DNA, 13 bp, Artificial Sequence
  Oligonucleotide for detection of SNP TSC0046004
atacaactcaata

SEQ ID NO: 186683 - DNA, 13 bp, Artificial Sequence
  Oligonucleotide for detection of SNP TSC0046005
tatagatatagaa

SEQ ID NO: 186684 - DNA, 13 bp, Artificial Sequence
  Oligonucleotide for detection of SNP TSC0046005
ttctatatctata

SEQ ID NO: 186685 - DNA, 13 bp, Artificial Sequence
  Oligonucleotide for detection of SNP TSC0046005
tatagagatagaa

SEQ ID NO: 186686 - DNA, 13 bp, Artificial Sequence
  Oligonucleotide for detection of SNP TSC0046005
ttctatctctata

SEQ ID NO: 186687 - DNA, 13 bp, Artificial Sequence
  Oligonucleotide for detection of SNP TSC0046005
ttttgtgtttatg

SEQ ID NO: 186688 - DNA, 13 bp, Artificial Sequence
  Oligonucleotide for detection of SNP TSC0046005
cataaacacaaaa

SEQ ID NO: 186689 - DNA, 13 bp, Artificial Sequence
  Oligonucleotide for detection of SNP TSC0046011
tatttattttatt

SEQ ID NO: 186690 - DNA, 13 bp, Artificial Sequence
  Oligonucleotide for detection of SNP TSC0046011
aataaaataaata

SEQ ID NO: 186691 - DNA, 13 bp, Artificial Sequence
  Oligonucleotide for detection of SNP TSC0046011
aatgagttaggtg

SEQ ID NO: 186692 - DNA, 13 bp, Artificial Sequence
  Oligonucleotide for detection of SNP TSC0046011
cacctaactcatt

SEQ ID NO: 186693 - DNA, 13 bp, Artificial Sequence
  Oligonucleotide for detection of SNP TSC0046011
aatgaggtaggtg

SEQ ID NO: 186694 - DNA, 13 bp, Artificial Sequence
  Oligonucleotide for detection of SNP TSC0046011
cacctacctcatt

SEQ ID NO: 186695 - DNA, 13 bp, Artificial Sequence
  Oligonucleotide for detection of SNP TSC0046012
agtttatatgaat

SEQ ID NO: 186696 - DNA, 13 bp, Artificial Sequence
  Oligonucleotide for detection of SNP TSC0046012
attcatataaact

SEQ ID NO: 186697 - DNA, 13 bp, Artificial Sequence
  Oligonucleotide for detection of SNP TSC0046012
agtttagatgaat

SEQ ID NO: 186698 - DNA, 13 bp, Artificial Sequence
  Oligonucleotide for detection of SNP TSC0046012
attcatctaaact

SEQ ID NO: 186699 - DNA, 13 bp, Artificial Sequence
  Oligonucleotide for detection of SNP TSC0046012
atttatatgagtt

SEQ ID NO: 186700 - DNA, 13 bp, Artificial Sequence
  Oligonucleotide for detection of SNP TSC0046012
aactcatataaat

SEQ ID NO: 186701 - DNA, 13 bp, Artificial Sequence
  Oligonucleotide for detection of SNP TSC0046012
atttatttgagtt

SEQ ID NO: 186702 - DNA, 13 bp, Artificial Sequence
  Oligonucleotide for detection of SNP TSC0046012
aactcaaataaat

SEQ ID NO: 186703 - DNA, 13 bp, Artificial Sequence
  Oligonucleotide for detection of SNP TSC0046017
ataatatagttta

SEQ ID NO: 186704 - DNA, 13 bp, Artificial Sequence
  Oligonucleotide for detection of SNP TSC0046017
taaactatattat

SEQ ID NO: 186705 - DNA, 13 bp, Artificial Sequence
  Oligonucleotide for detection of SNP TSC0046017
tgagttttgttgt

SEQ ID NO: 186706 - DNA, 13 bp, Artificial Sequence
  Oligonucleotide for detection of SNP TSC0046017
acaacaaaactca

SEQ ID NO: 186707 - DNA, 13 bp, Artificial Sequence
  Oligonucleotide for detection of SNP TSC0046017
tgagttgtgttgt

SEQ ID NO: 186708 - DNA, 13 bp, Artificial Sequence
  Oligonucleotide for detection of SNP TSC0046017
acaacacaactca

SEQ ID NO: 186709 - DNA, 13 bp, Artificial Sequence
  Oligonucleotide for detection of SNP TSC0046018
tttataggtagty

SEQ ID NO: 186710 - DNA, 13 bp, Artificial Sequence
  Oligonucleotide for detection of SNP TSC0046018
ractacctataaa

SEQ ID NO: 186711 - DNA, 13 bp, Artificial Sequence
  Oligonucleotide for detection of SNP TSC0046019
tttataatagtgy

SEQ ID NO: 186712 - DNA, 13 bp, Artificial Sequence
  Oligonucleotide for detection of SNP TSC0046019
rcactattataaa

SEQ ID NO: 186713 - DNA, 13 bp, Artificial Sequence
  Oligonucleotide for detection of SNP TSC0046019
tttatattagtgy

SEQ ID NO: 186714 - DNA, 13 bp, Artificial Sequence
  Oligonucleotide for detection of SNP TSC0046019
rcactaatataaa

SEQ ID NO: 186715 - DNA, 13 bp, Artificial Sequence
  Oligonucleotide for detection of SNP TSC0046019
gtattgttgtaag

SEQ ID NO: 186716 - DNA, 13 bp, Artificial Sequence
  Oligonucleotide for detection of SNP TSC0046019
cttacaacaatac

SEQ ID NO: 186717 - DNA, 13 bp, Artificial Sequence
  Oligonucleotide for detection of SNP TSC0046019
gtattgatgtaag

SEQ ID NO: 186718 - DNA, 13 bp, Artificial Sequence
  Oligonucleotide for detection of SNP TSC0046019
cttacatcaatac

SEQ ID NO: 186719 - DNA, 13 bp, Artificial Sequence
  Oligonucleotide for detection of SNP TSC0046020
gattataaagtta

SEQ ID NO: 186720 - DNA, 13 bp, Artificial Sequence
  Oligonucleotide for detection of SNP TSC0046020
taactttataatc

SEQ ID NO: 186721 - DNA, 13 bp, Artificial Sequence
  Oligonucleotide for detection of SNP TSC0046020
gattatgaagtta

SEQ ID NO: 186722 - DNA, 13 bp, Artificial Sequence
  Oligonucleotide for detection of SNP TSC0046020
taacttcataatc

SEQ ID NO: 186723 - DNA, 13 bp, Artificial Sequence
  Oligonucleotide for detection of SNP TSC0046020
gattacgaagtta

SEQ ID NO: 186724 - DNA, 13 bp, Artificial Sequence
  Oligonucleotide for detection of SNP TSC0046020
taacttcgtaatc

SEQ ID NO: 186725 - DNA, 13 bp, Artificial Sequence
  Oligonucleotide for detection of SNP TSC0046020
taattttgtagty

SEQ ID NO: 186726 - DNA, 13 bp, Artificial Sequence
  Oligonucleotide for detection of SNP TSC0046020
ractacaaaatta

SEQ ID NO: 186727 - DNA, 13 bp, Artificial Sequence
  Oligonucleotide for detection of SNP TSC0046020
taatttcgtagty

SEQ ID NO: 186728 - DNA, 13 bp, Artificial Sequence
  Oligonucleotide for detection of SNP TSC0046020
ractacgaaatta

SEQ ID NO: 186729 - DNA, 13 bp, Artificial Sequence
  Oligonucleotide for detection of SNP TSC0046021
ttaagtggataat

SEQ ID NO: 186730 - DNA, 13 bp, Artificial Sequence
  Oligonucleotide for detection of SNP TSC0046021
attatccacttaa

SEQ ID NO: 186731 - DNA, 13 bp, Artificial Sequence
  Oligonucleotide for detection of SNP TSC0046021
ttaagtagataat

SEQ ID NO: 186732 - DNA, 13 bp, Artificial Sequence
  Oligonucleotide for detection of SNP TSC0046021
attatctacttaa

SEQ ID NO: 186733 - DNA, 13 bp, Artificial Sequence
  Oligonucleotide for detection of SNP TSC0046027
gaattaagtttaa

SEQ ID NO: 186734 - DNA, 13 bp, Artificial Sequence
  Oligonucleotide for detection of SNP TSC0046027
ttaaacttaattc

SEQ ID NO: 186735 - DNA, 13 bp, Artificial Sequence
  Oligonucleotide for detection of SNP TSC0046027
gaattaggtttaa

SEQ ID NO: 186736 - DNA, 13 bp, Artificial Sequence
  Oligonucleotide for detection of SNP TSC0046027
ttaaacctaattc

SEQ ID NO: 186737 - DNA, 13 bp, Artificial Sequence
  Oligonucleotide for detection of SNP TSC0046030
tagggtagtttag

SEQ ID NO: 186738 - DNA, 13 bp, Artificial Sequence
  Oligonucleotide for detection of SNP TSC0046030
ctaaactacccta

SEQ ID NO: 186739 - DNA, 13 bp, Artificial Sequence
  Oligonucleotide for detection of SNP TSC0046030
tagggtggtttag

SEQ ID NO: 186740 - DNA, 13 bp, Artificial Sequence
  Oligonucleotide for detection of SNP TSC0046030
ctaaaccacccta

SEQ ID NO: 186741 - DNA, 13 bp, Artificial Sequence
  Oligonucleotide for detection of SNP TSC0046031
taggaaaaatgag

SEQ ID NO: 186742 - DNA, 13 bp, Artificial Sequence
  Oligonucleotide for detection of SNP TSC0046031
ctcatttttccta

SEQ ID NO: 186743 - DNA, 13 bp, Artificial Sequence
  Oligonucleotide for detection of SNP TSC0046031
taggaagaatgag

SEQ ID NO: 186744 - DNA, 13 bp, Artificial Sequence
  Oligonucleotide for detection of SNP TSC0046031
ctcattcttccta

SEQ ID NO: 186745 - DNA, 13 bp, Artificial Sequence
  Oligonucleotide for detection of SNP TSC0046035
gagtgatgtatag

SEQ ID NO: 186746 - DNA, 13 bp, Artificial Sequence
  Oligonucleotide for detection of SNP TSC0046035
ctatacatcactc

SEQ ID NO: 186747 - DNA, 13 bp, Artificial Sequence
  Oligonucleotide for detection of SNP TSC0046035
gagtgaggtatag

SEQ ID NO: 186748 - DNA, 13 bp, Artificial Sequence
  Oligonucleotide for detection of SNP TSC0046035
ctatacctcactc

SEQ ID NO: 186749 - DNA, 13 bp, Artificial Sequence
  Oligonucleotide for detection of SNP TSC0046035
gagtgacgtatag

SEQ ID NO: 186750 - DNA, 13 bp, Artificial Sequence
  Oligonucleotide for detection of SNP TSC0046035
ctatacgtcactc

SEQ ID NO: 186751 - DNA, 13 bp, Artificial Sequence
  Oligonucleotide for detection of SNP TSC0046035
ttatgtgttatty

SEQ ID NO: 186752 - DNA, 13 bp, Artificial Sequence
  Oligonucleotide for detection of SNP TSC0046035
raataacacataa

SEQ ID NO: 186753 - DNA, 13 bp, Artificial Sequence
  Oligonucleotide for detection of SNP TSC0046035
ttatgttttatty

SEQ ID NO: 186754 - DNA, 13 bp, Artificial Sequence
  Oligonucleotide for detection of SNP TSC0046035
raataaaacataa

SEQ ID NO: 186755 - DNA, 13 bp, Artificial Sequence
  Oligonucleotide for detection of SNP TSC0046035
ttatgcgttatty

SEQ ID NO: 186756 - DNA, 13 bp, Artificial Sequence
  Oligonucleotide for detection of SNP TSC0046035
raataacgcataa

SEQ ID NO: 186757 - DNA, 13 bp, Artificial Sequence
  Oligonucleotide for detection of SNP TSC0046036
tggagttgtttty

SEQ ID NO: 186758 - DNA, 13 bp, Artificial Sequence
  Oligonucleotide for detection of SNP TSC0046036
raaaacaactcca

SEQ ID NO: 186759 - DNA, 13 bp, Artificial Sequence
  Oligonucleotide for detection of SNP TSC0046036
tggagtcgtttty

SEQ ID NO: 186760 - DNA, 13 bp, Artificial Sequence
  Oligonucleotide for detection of SNP TSC0046036
raaaacgactcca

SEQ ID NO: 186761 - DNA, 13 bp, Artificial Sequence
  Oligonucleotide for detection of SNP TSC0046036
gaaaatggtttta

SEQ ID NO: 186762 - DNA, 13 bp, Artificial Sequence
  Oligonucleotide for detection of SNP TSC0046036
taaaaccattttc

SEQ ID NO: 186763 - DNA, 13 bp, Artificial Sequence
  Oligonucleotide for detection of SNP TSC0046036
gaaaatagtttta

SEQ ID NO: 186764 - DNA, 13 bp, Artificial Sequence
  Oligonucleotide for detection of SNP TSC0046036
taaaactattttc

SEQ ID NO: 186765 - DNA, 13 bp, Artificial Sequence
  Oligonucleotide for detection of SNP TSC0046036
gaaaacggtttta

SEQ ID NO: 186766 - DNA, 13 bp, Artificial Sequence
  Oligonucleotide for detection of SNP TSC0046036
taaaaccgttttc

SEQ ID NO: 186767 - DNA, 13 bp, Artificial Sequence
  Oligonucleotide for detection of SNP TSC0046040
tggttatggtaga

SEQ ID NO: 186768 - DNA, 13 bp, Artificial Sequence
  Oligonucleotide for detection of SNP TSC0046040
tctaccataacca

SEQ ID NO: 186769 - DNA, 13 bp, Artificial Sequence
  Oligonucleotide for detection of SNP TSC0046040
tggttacggtaga

SEQ ID NO: 186770 - DNA, 13 bp, Artificial Sequence
  Oligonucleotide for detection of SNP TSC0046040
tctaccgtaacca

SEQ ID NO: 186771 - DNA, 13 bp, Artificial Sequence
  Oligonucleotide for detection of SNP TSC0046043
gagggtataatgt

SEQ ID NO: 186772 - DNA, 13 bp, Artificial Sequence
  Oligonucleotide for detection of SNP TSC0046043
acattataccctc

SEQ ID NO: 186773 - DNA, 13 bp, Artificial Sequence
  Oligonucleotide for detection of SNP TSC0046043
gagggtgtaatgt

SEQ ID NO: 186774 - DNA, 13 bp, Artificial Sequence
  Oligonucleotide for detection of SNP TSC0046043
acattacaccctc

SEQ ID NO: 186775 - DNA, 13 bp, Artificial Sequence
  Oligonucleotide for detection of SNP TSC0046043
gagggtataacgt

SEQ ID NO: 186776 - DNA, 13 bp, Artificial Sequence
  Oligonucleotide for detection of SNP TSC0046043
acgttataccctc

SEQ ID NO: 186777 - DNA, 13 bp, Artificial Sequence
  Oligonucleotide for detection of SNP TSC0046043
gagggcgtaatgt

SEQ ID NO: 186778 - DNA, 13 bp, Artificial Sequence
  Oligonucleotide for detection of SNP TSC0046043
acattacgccctc

SEQ ID NO: 186779 - DNA, 13 bp, Artificial Sequence
  Oligonucleotide for detection of SNP TSC0046043
gagggtgtaacgt

SEQ ID NO: 186780 - DNA, 13 bp, Artificial Sequence
  Oligonucleotide for detection of SNP TSC0046043
acgttacaccctc

SEQ ID NO: 186781 - DNA, 13 bp, Artificial Sequence
  Oligonucleotide for detection of SNP TSC0046043
gagggcgtaacgt

SEQ ID NO: 186782 - DNA, 13 bp, Artificial Sequence
  Oligonucleotide for detection of SNP TSC0046043
acgttacgccctc

SEQ ID NO: 186783 - DNA, 13 bp, Artificial Sequence
  Oligonucleotide for detection of SNP TSC0046043
atgttatgtttty

SEQ ID NO: 186784 - DNA, 13 bp, Artificial Sequence
  Oligonucleotide for detection of SNP TSC0046043
raaaacataacat

SEQ ID NO: 186785 - DNA, 13 bp, Artificial Sequence
  Oligonucleotide for detection of SNP TSC0046043
acgttatgtttty

SEQ ID NO: 186786 - DNA, 13 bp, Artificial Sequence
  Oligonucleotide for detection of SNP TSC0046043
raaaacataacgt

SEQ ID NO: 186787 - DNA, 13 bp, Artificial Sequence
  Oligonucleotide for detection of SNP TSC0046043
atgttacgtttty

SEQ ID NO: 186788 - DNA, 13 bp, Artificial Sequence
  Oligonucleotide for detection of SNP TSC0046043
raaaacgtaacat

SEQ ID NO: 186789 - DNA, 13 bp, Artificial Sequence
  Oligonucleotide for detection of SNP TSC0046043
acgttacgtttty

SEQ ID NO: 186790 - DNA, 13 bp, Artificial Sequence
  Oligonucleotide for detection of SNP TSC0046043
raaaacgtaacgt

SEQ ID NO: 186791 - DNA, 13 bp, Artificial Sequence
  Oligonucleotide for detection of SNP TSC0046044
ttatggaggttta

SEQ ID NO: 186792 - DNA, 13 bp, Artificial Sequence
  Oligonucleotide for detection of SNP TSC0046044
taaacctccataa

SEQ ID NO: 186793 - DNA, 13 bp, Artificial Sequence
  Oligonucleotide for detection of SNP TSC0046045
tttgaggtggtgt

SEQ ID NO: 186794 - DNA, 13 bp, Artificial Sequence
  Oligonucleotide for detection of SNP TSC0046045
acaccacctcaaa

SEQ ID NO: 186795 - DNA, 13 bp, Artificial Sequence
  Oligonucleotide for detection of SNP TSC0046045
tttgagatggtgt

SEQ ID NO: 186796 - DNA, 13 bp, Artificial Sequence
  Oligonucleotide for detection of SNP TSC0046045
acaccatctcaaa

SEQ ID NO: 186797 - DNA, 13 bp, Artificial Sequence
  Oligonucleotide for detection of SNP TSC0046048
gagaatgttaaaa

SEQ ID NO: 186798 - DNA, 13 bp, Artificial Sequence
  Oligonucleotide for detection of SNP TSC0046048
ttttaacattctc

SEQ ID NO: 186799 - DNA, 13 bp, Artificial Sequence
  Oligonucleotide for detection of SNP TSC0046048
gagaatattaaaa

SEQ ID NO: 186800 - DNA, 13 bp, Artificial Sequence
  Oligonucleotide for detection of SNP TSC0046048
ttttaatattctc

SEQ ID NO: 186801 - DNA, 13 bp, Artificial Sequence
  Oligonucleotide for detection of SNP TSC0046048
gagaacgttaaaa

SEQ ID NO: 186802 - DNA, 13 bp, Artificial Sequence
  Oligonucleotide for detection of SNP TSC0046048
ttttaacgttctc

SEQ ID NO: 186803 - DNA, 13 bp, Artificial Sequence
  Oligonucleotide for detection of SNP TSC0046049
gatgttgagttaa

SEQ ID NO: 186804 - DNA, 13 bp, Artificial Sequence
  Oligonucleotide for detection of SNP TSC0046049
ttaactcaacatc

SEQ ID NO: 186805 - DNA, 13 bp, Artificial Sequence
  Oligonucleotide for detection of SNP TSC0046049
gatgttaagttaa

SEQ ID NO: 186806 - DNA, 13 bp, Artificial Sequence
  Oligonucleotide for detection of SNP TSC0046049
ttaacttaacatc

SEQ ID NO: 186807 - DNA, 13 bp, Artificial Sequence
  Oligonucleotide for detection of SNP TSC0046050
atgtatatagtga

SEQ ID NO: 186808 - DNA, 13 bp, Artificial Sequence
  Oligonucleotide for detection of SNP TSC0046050
tcactatatacat

SEQ ID NO: 186809 - DNA, 13 bp, Artificial Sequence
  Oligonucleotide for detection of SNP TSC0046050
atgtatgtagtga

SEQ ID NO: 186810 - DNA, 13 bp, Artificial Sequence
  Oligonucleotide for detection of SNP TSC0046050
tcactacatacat

SEQ ID NO: 186811 - DNA, 13 bp, Artificial Sequence
  Oligonucleotide for detection of SNP TSC0046050
atgtacgtagtga

SEQ ID NO: 186812 - DNA, 13 bp, Artificial Sequence
  Oligonucleotide for detection of SNP TSC0046050
tcactacgtacat

SEQ ID NO: 186813 - DNA, 13 bp, Artificial Sequence
  Oligonucleotide for detection of SNP TSC0046050
ttattgcgtgtat

SEQ ID NO: 186814 - DNA, 13 bp, Artificial Sequence
  Oligonucleotide for detection of SNP TSC0046050
atacacgcaataa

SEQ ID NO: 186815 - DNA, 13 bp, Artificial Sequence
  Oligonucleotide for detection of SNP TSC0046051
aagttaattaaag

SEQ ID NO: 186816 - DNA, 13 bp, Artificial Sequence
  Oligonucleotide for detection of SNP TSC0046051
ctttaattaactt

SEQ ID NO: 186817 - DNA, 13 bp, Artificial Sequence
  Oligonucleotide for detection of SNP TSC0046051
aagttagttaaag

SEQ ID NO: 186818 - DNA, 13 bp, Artificial Sequence
  Oligonucleotide for detection of SNP TSC0046051
ctttaactaactt

SEQ ID NO: 186819 - DNA, 13 bp, Artificial Sequence
  Oligonucleotide for detection of SNP TSC0046052
aataaagtggatt

SEQ ID NO: 186820 - DNA, 13 bp, Artificial Sequence
  Oligonucleotide for detection of SNP TSC0046052
aatccactttatt

SEQ ID NO: 186821 - DNA, 13 bp, Artificial Sequence
  Oligonucleotide for detection of SNP TSC0046052
aataaaatggatt

SEQ ID NO: 186822 - DNA, 13 bp, Artificial Sequence
  Oligonucleotide for detection of SNP TSC0046052
aatccattttatt

SEQ ID NO: 186823 - DNA, 13 bp, Artificial Sequence
  Oligonucleotide for detection of SNP TSC0046054
gaagttattgtga

SEQ ID NO: 186824 - DNA, 13 bp, Artificial Sequence
  Oligonucleotide for detection of SNP TSC0046054
tcacaataacttc

SEQ ID NO: 186825 - DNA, 13 bp, Artificial Sequence
  Oligonucleotide for detection of SNP TSC0046054
gaagttgttgtga

SEQ ID NO: 186826 - DNA, 13 bp, Artificial Sequence
  Oligonucleotide for detection of SNP TSC0046054
tcacaacaacttc

SEQ ID NO: 186827 - DNA, 13 bp, Artificial Sequence
  Oligonucleotide for detection of SNP TSC0046056
tttgatgataaty

SEQ ID NO: 186828 - DNA, 13 bp, Artificial Sequence
  Oligonucleotide for detection of SNP TSC0046056
rattatcatcaaa

SEQ ID NO: 186829 - DNA, 13 bp, Artificial Sequence
  Oligonucleotide for detection of SNP TSC0046056
tttgataataaty

SEQ ID NO: 186830 - DNA, 13 bp, Artificial Sequence
  Oligonucleotide for detection of SNP TSC0046056
rattattatcaaa

SEQ ID NO: 186831 - DNA, 13 bp, Artificial Sequence
  Oligonucleotide for detection of SNP TSC0046057
gggttaagggagt

SEQ ID NO: 186832 - DNA, 13 bp, Artificial Sequence
  Oligonucleotide for detection of SNP TSC0046057
actcccttaaccc

SEQ ID NO: 186833 - DNA, 13 bp, Artificial Sequence
  Oligonucleotide for detection of SNP TSC0046057
gggttaggggagt

SEQ ID NO: 186834 - DNA, 13 bp, Artificial Sequence
  Oligonucleotide for detection of SNP TSC0046057
actcccctaaccc

SEQ ID NO: 186835 - DNA, 13 bp, Artificial Sequence
  Oligonucleotide for detection of SNP TSC0046058
gtgtaagtatttt

SEQ ID NO: 186836 - DNA, 13 bp, Artificial Sequence
  Oligonucleotide for detection of SNP TSC0046058
aaaatacttacac

SEQ ID NO: 186837 - DNA, 13 bp, Artificial Sequence
  Oligonucleotide for detection of SNP TSC0046058
gtgtaaatatttt

SEQ ID NO: 186838 - DNA, 13 bp, Artificial Sequence
  Oligonucleotide for detection of SNP TSC0046058
aaaatatttacac

SEQ ID NO: 186839 - DNA, 13 bp, Artificial Sequence
  Oligonucleotide for detection of SNP TSC0046059
tagtatgttgtta

SEQ ID NO: 186840 - DNA, 13 bp, Artificial Sequence
  Oligonucleotide for detection of SNP TSC0046059
taacaacatacta

SEQ ID NO: 186841 - DNA, 13 bp, Artificial Sequence
  Oligonucleotide for detection of SNP TSC0046059
tagtatattgtta

SEQ ID NO: 186842 - DNA, 13 bp, Artificial Sequence
  Oligonucleotide for detection of SNP TSC0046059
taacaatatacta

SEQ ID NO: 186843 - DNA, 13 bp, Artificial Sequence
  Oligonucleotide for detection of SNP TSC0046061
gtgataattaaaa

SEQ ID NO: 186844 - DNA, 13 bp, Artificial Sequence
  Oligonucleotide for detection of SNP TSC0046061
ttttaattatcac

SEQ ID NO: 186845 - DNA, 13 bp, Artificial Sequence
  Oligonucleotide for detection of SNP TSC0046061
gtgatagttaaaa

SEQ ID NO: 186846 - DNA, 13 bp, Artificial Sequence
  Oligonucleotide for detection of SNP TSC0046061
ttttaactatcac

SEQ ID NO: 186847 - DNA, 13 bp, Artificial Sequence
  Oligonucleotide for detection of SNP TSC0046062
ttattttatgggy

SEQ ID NO: 186848 - DNA, 13 bp, Artificial Sequence
  Oligonucleotide for detection of SNP TSC0046062
rcccataaaataa

SEQ ID NO: 186849 - DNA, 13 bp, Artificial Sequence
  Oligonucleotide for detection of SNP TSC0046062
ttatttgatgggy

SEQ ID NO: 186850 - DNA, 13 bp, Artificial Sequence
  Oligonucleotide for detection of SNP TSC0046062
rcccatcaaataa

SEQ ID NO: 186851 - DNA, 13 bp, Artificial Sequence
  Oligonucleotide for detection of SNP TSC0046062
gtttatgaggtgg

SEQ ID NO: 186852 - DNA, 13 bp, Artificial Sequence
  Oligonucleotide for detection of SNP TSC0046062
ccacctcataaac

SEQ ID NO: 186853 - DNA, 13 bp, Artificial Sequence
  Oligonucleotide for detection of SNP TSC0046062
gtttattaggtgg

SEQ ID NO: 186854 - DNA, 13 bp, Artificial Sequence
  Oligonucleotide for detection of SNP TSC0046062
ccacctaataaac

SEQ ID NO: 186855 - DNA, 13 bp, Artificial Sequence
  Oligonucleotide for detection of SNP TSC0046063
gaagttattgtgy

SEQ ID NO: 186856 - DNA, 13 bp, Artificial Sequence
  Oligonucleotide for detection of SNP TSC0046063
rcacaataacttc

SEQ ID NO: 186857 - DNA, 13 bp, Artificial Sequence
  Oligonucleotide for detection of SNP TSC0046063
gaagttgttgtgy

SEQ ID NO: 186858 - DNA, 13 bp, Artificial Sequence
  Oligonucleotide for detection of SNP TSC0046063
rcacaacaacttc

SEQ ID NO: 186859 - DNA, 13 bp, Artificial Sequence
  Oligonucleotide for detection of SNP TSC0046064
gtgtagagtttta

SEQ ID NO: 186860 - DNA, 13 bp, Artificial Sequence
  Oligonucleotide for detection of SNP TSC0046064
taaaactctacac

SEQ ID NO: 186861 - DNA, 13 bp, Artificial Sequence
  Oligonucleotide for detection of SNP TSC0046064
gtgtagtgtttta

SEQ ID NO: 186862 - DNA, 13 bp, Artificial Sequence
  Oligonucleotide for detection of SNP TSC0046064
taaaacactacac

SEQ ID NO: 186863 - DNA, 13 bp, Artificial Sequence
  Oligonucleotide for detection of SNP TSC0046064
taaaattttgtay

SEQ ID NO: 186864 - DNA, 13 bp, Artificial Sequence
  Oligonucleotide for detection of SNP TSC0046064
rtacaaaatttta

SEQ ID NO: 186865 - DNA, 13 bp, Artificial Sequence
  Oligonucleotide for detection of SNP TSC0046064
taaaatattgtay

SEQ ID NO: 186866 - DNA, 13 bp, Artificial Sequence
  Oligonucleotide for detection of SNP TSC0046064
rtacaatatttta

SEQ ID NO: 186867 - DNA, 13 bp, Artificial Sequence
  Oligonucleotide for detection of SNP TSC0046065
atttatagatttg

SEQ ID NO: 186868 - DNA, 13 bp, Artificial Sequence
  Oligonucleotide for detection of SNP TSC0046065
caaatctataaat

SEQ ID NO: 186869 - DNA, 13 bp, Artificial Sequence
  Oligonucleotide for detection of SNP TSC0046065
atttattgatttg

SEQ ID NO: 186870 - DNA, 13 bp, Artificial Sequence
  Oligonucleotide for detection of SNP TSC0046065
caaatcaataaat

SEQ ID NO: 186871 - DNA, 13 bp, Artificial Sequence
  Oligonucleotide for detection of SNP TSC0046065
taaatttgtgagt

SEQ ID NO: 186872 - DNA, 13 bp, Artificial Sequence
  Oligonucleotide for detection of SNP TSC0046065
actcacaaattta

SEQ ID NO: 186873 - DNA, 13 bp, Artificial Sequence
  Oligonucleotide for detection of SNP TSC0046065
taaattagtgagt

SEQ ID NO: 186874 - DNA, 13 bp, Artificial Sequence
  Oligonucleotide for detection of SNP TSC0046065
actcactaattta

SEQ ID NO: 186875 - DNA, 13 bp, Artificial Sequence
  Oligonucleotide for detection of SNP TSC0046067
aatttgaaagtta

SEQ ID NO: 186876 - DNA, 13 bp, Artificial Sequence
  Oligonucleotide for detection of SNP TSC0046067
taactttcaaatt

SEQ ID NO: 186877 - DNA, 13 bp, Artificial Sequence
  Oligonucleotide for detection of SNP TSC0046067
aatttgtaagtta

SEQ ID NO: 186878 - DNA, 13 bp, Artificial Sequence
  Oligonucleotide for detection of SNP TSC0046067
taacttacaaatt

SEQ ID NO: 186879 - DNA, 13 bp, Artificial Sequence
  Oligonucleotide for detection of SNP TSC0046067
tgatttttaggtt

SEQ ID NO: 186880 - DNA, 13 bp, Artificial Sequence
  Oligonucleotide for detection of SNP TSC0046067
aacctaaaaatca

SEQ ID NO: 186881 - DNA, 13 bp, Artificial Sequence
  Oligonucleotide for detection of SNP TSC0046067
tgatttgtaggtt

SEQ ID NO: 186882 - DNA, 13 bp, Artificial Sequence
  Oligonucleotide for detection of SNP TSC0046067
aacctacaaatca

SEQ ID NO: 186883 - DNA, 13 bp, Artificial Sequence
  Oligonucleotide for detection of SNP TSC0046068
tttgaaattagga

SEQ ID NO: 186884 - DNA, 13 bp, Artificial Sequence
  Oligonucleotide for detection of SNP TSC0046068
tcctaatttcaaa

SEQ ID NO: 186885 - DNA, 13 bp, Artificial Sequence
  Oligonucleotide for detection of SNP TSC0046068
tttgaatttagga

SEQ ID NO: 186886 - DNA, 13 bp, Artificial Sequence
  Oligonucleotide for detection of SNP TSC0046068
tcctaaattcaaa

SEQ ID NO: 186887 - DNA, 13 bp, Artificial Sequence
  Oligonucleotide for detection of SNP TSC0046068
ttcgaaattagga

SEQ ID NO: 186888 - DNA, 13 bp, Artificial Sequence
  Oligonucleotide for detection of SNP TSC0046068
tcctaatttcgaa

SEQ ID NO: 186889 - DNA, 13 bp, Artificial Sequence
  Oligonucleotide for detection of SNP TSC0046068
ttcgaatttagga

SEQ ID NO: 186890 - DNA, 13 bp, Artificial Sequence
  Oligonucleotide for detection of SNP TSC0046068
tcctaaattcgaa

SEQ ID NO: 186891 - DNA, 13 bp, Artificial Sequence
  Oligonucleotide for detection of SNP TSC0046068
ttttgattttgaa

SEQ ID NO: 186892 - DNA, 13 bp, Artificial Sequence
  Oligonucleotide for detection of SNP TSC0046068
ttcaaaatcaaaa

SEQ ID NO: 186893 - DNA, 13 bp, Artificial Sequence
  Oligonucleotide for detection of SNP TSC0046068
ttttgagtttgaa

SEQ ID NO: 186894 - DNA, 13 bp, Artificial Sequence
  Oligonucleotide for detection of SNP TSC0046068
ttcaaactcaaaa

SEQ ID NO: 186895 - DNA, 13 bp, Artificial Sequence
  Oligonucleotide for detection of SNP TSC0046068
ttttgatttcgaa

SEQ ID NO: 186896 - DNA, 13 bp, Artificial Sequence
  Oligonucleotide for detection of SNP TSC0046068
ttcgaaatcaaaa

SEQ ID NO: 186897 - DNA, 13 bp, Artificial Sequence
  Oligonucleotide for detection of SNP TSC0046068
ttttgagttcgaa

SEQ ID NO: 186898 - DNA, 13 bp, Artificial Sequence
  Oligonucleotide for detection of SNP TSC0046068
ttcgaactcaaaa

SEQ ID NO: 186899 - DNA, 13 bp, Artificial Sequence
  Oligonucleotide for detection of SNP TSC0046069
gaaagagttagat

SEQ ID NO: 186900 - DNA, 13 bp, Artificial Sequence
  Oligonucleotide for detection of SNP TSC0046069
atctaactctttc

SEQ ID NO: 186901 - DNA, 13 bp, Artificial Sequence
  Oligonucleotide for detection of SNP TSC0046069
gaaagaattagat

SEQ ID NO: 186902 - DNA, 13 bp, Artificial Sequence
  Oligonucleotide for detection of SNP TSC0046069
atctaattctttc

SEQ ID NO: 186903 - DNA, 13 bp, Artificial Sequence
  Oligonucleotide for detection of SNP TSC0046070
atttgtaggtatt

SEQ ID NO: 186904 - DNA, 13 bp, Artificial Sequence
  Oligonucleotide for detection of SNP TSC0046070
aatacctacaaat

SEQ ID NO: 186905 - DNA, 13 bp, Artificial Sequence
  Oligonucleotide for detection of SNP TSC0046070
atttgtgggtatt

SEQ ID NO: 186906 - DNA, 13 bp, Artificial Sequence
  Oligonucleotide for detection of SNP TSC0046070
aatacccacaaat

SEQ ID NO: 186907 - DNA, 13 bp, Artificial Sequence
  Oligonucleotide for detection of SNP TSC0046072
gttttattatgag

SEQ ID NO: 186908 - DNA, 13 bp, Artificial Sequence
  Oligonucleotide for detection of SNP TSC0046072
ctcataataaaac

SEQ ID NO: 186909 - DNA, 13 bp, Artificial Sequence
  Oligonucleotide for detection of SNP TSC0046072
gttttagtatgag

SEQ ID NO: 186910 - DNA, 13 bp, Artificial Sequence
  Oligonucleotide for detection of SNP TSC0046072
ctcatactaaaac

SEQ ID NO: 186911 - DNA, 13 bp, Artificial Sequence
  Oligonucleotide for detection of SNP TSC0046072
tttatagtggggy

SEQ ID NO: 186912 - DNA, 13 bp, Artificial Sequence
  Oligonucleotide for detection of SNP TSC0046072
rccccactataaa

SEQ ID NO: 186913 - DNA, 13 bp, Artificial Sequence
  Oligonucleotide for detection of SNP TSC0046072
tttatattggggy

SEQ ID NO: 186914 - DNA, 13 bp, Artificial Sequence
  Oligonucleotide for detection of SNP TSC0046072
rccccaatataaa

SEQ ID NO: 186915 - DNA, 13 bp, Artificial Sequence
  Oligonucleotide for detection of SNP TSC0046073
gtggaagttatat

SEQ ID NO: 186916 - DNA, 13 bp, Artificial Sequence
  Oligonucleotide for detection of SNP TSC0046073
atataacttccac

SEQ ID NO: 186917 - DNA, 13 bp, Artificial Sequence
  Oligonucleotide for detection of SNP TSC0046073
gtggaaattatat

SEQ ID NO: 186918 - DNA, 13 bp, Artificial Sequence
  Oligonucleotide for detection of SNP TSC0046073
atataatttccac

SEQ ID NO: 186919 - DNA, 13 bp, Artificial Sequence
  Oligonucleotide for detection of SNP TSC0046074
tagagaaggattg

SEQ ID NO: 186920 - DNA, 13 bp, Artificial Sequence
  Oligonucleotide for detection of SNP TSC0046074
caatccttctcta

SEQ ID NO: 186921 - DNA, 13 bp, Artificial Sequence
  Oligonucleotide for detection of SNP TSC0046074
tagagagggattg

SEQ ID NO: 186922 - DNA, 13 bp, Artificial Sequence
  Oligonucleotide for detection of SNP TSC0046074
caatccctctcta

SEQ ID NO: 186923 - DNA, 13 bp, Artificial Sequence
  Oligonucleotide for detection of SNP TSC0046074
tagagaaggatcg

SEQ ID NO: 186924 - DNA, 13 bp, Artificial Sequence
  Oligonucleotide for detection of SNP TSC0046074
cgatccttctcta

SEQ ID NO: 186925 - DNA, 13 bp, Artificial Sequence
  Oligonucleotide for detection of SNP TSC0046074
tagagagggatcg

SEQ ID NO: 186926 - DNA, 13 bp, Artificial Sequence
  Oligonucleotide for detection of SNP TSC0046074
cgatccctctcta

SEQ ID NO: 186927 - DNA, 13 bp, Artificial Sequence
  Oligonucleotide for detection of SNP TSC0046075
tttaaaatagtta

SEQ ID NO: 186928 - DNA, 13 bp, Artificial Sequence
  Oligonucleotide for detection of SNP TSC0046075
taactattttaaa

SEQ ID NO: 186929 - DNA, 13 bp, Artificial Sequence
  Oligonucleotide for detection of SNP TSC0046075
tttaaattagtta

SEQ ID NO: 186930 - DNA, 13 bp, Artificial Sequence
  Oligonucleotide for detection of SNP TSC0046075
taactaatttaaa

SEQ ID NO: 186931 - DNA, 13 bp, Artificial Sequence
  Oligonucleotide for detection of SNP TSC0046075
tgattattttaga

SEQ ID NO: 186932 - DNA, 13 bp, Artificial Sequence
  Oligonucleotide for detection of SNP TSC0046075
tctaaaataatca

SEQ ID NO: 186933 - DNA, 13 bp, Artificial Sequence
  Oligonucleotide for detection of SNP TSC0046075
tgattagtttaga

SEQ ID NO: 186934 - DNA, 13 bp, Artificial Sequence
  Oligonucleotide for detection of SNP TSC0046075
tctaaactaatca

SEQ ID NO: 186935 - DNA, 13 bp, Artificial Sequence
  Oligonucleotide for detection of SNP TSC0046078
aaattattttaag

SEQ ID NO: 186936 - DNA, 13 bp, Artificial Sequence
  Oligonucleotide for detection of SNP TSC0046078
cttaaaataattt

SEQ ID NO: 186937 - DNA, 13 bp, Artificial Sequence
  Oligonucleotide for detection of SNP TSC0046078
aaattagtttaag

SEQ ID NO: 186938 - DNA, 13 bp, Artificial Sequence
  Oligonucleotide for detection of SNP TSC0046078
cttaaactaattt

SEQ ID NO: 186939 - DNA, 13 bp, Artificial Sequence
  Oligonucleotide for detection of SNP TSC0046078
tttgaaataattt

SEQ ID NO: 186940 - DNA, 13 bp, Artificial Sequence
  Oligonucleotide for detection of SNP TSC0046078
aaattatttcaaa

SEQ ID NO: 186941 - DNA, 13 bp, Artificial Sequence
  Oligonucleotide for detection of SNP TSC0046078
tttgaattaattt

SEQ ID NO: 186942 - DNA, 13 bp, Artificial Sequence
  Oligonucleotide for detection of SNP TSC0046078
aaattaattcaaa

SEQ ID NO: 186943 - DNA, 13 bp, Artificial Sequence
  Oligonucleotide for detection of SNP TSC0046079
tttttaatagagy

SEQ ID NO: 186944 - DNA, 13 bp, Artificial Sequence
  Oligonucleotide for detection of SNP TSC0046079
rctctattaaaaa

SEQ ID NO: 186945 - DNA, 13 bp, Artificial Sequence
  Oligonucleotide for detection of SNP TSC0046079
tttttagtagagy

SEQ ID NO: 186946 - DNA, 13 bp, Artificial Sequence
  Oligonucleotide for detection of SNP TSC0046079
rctctactaaaaa

SEQ ID NO: 186947 - DNA, 13 bp, Artificial Sequence
  Oligonucleotide for detection of SNP TSC0046081
atattaatgtgta

SEQ ID NO: 186948 - DNA, 13 bp, Artificial Sequence
  Oligonucleotide for detection of SNP TSC0046081
tacacattaatat

SEQ ID NO: 186949 - DNA, 13 bp, Artificial Sequence
  Oligonucleotide for detection of SNP TSC0046081
atattagcgtgta

SEQ ID NO: 186950 - DNA, 13 bp, Artificial Sequence
  Oligonucleotide for detection of SNP TSC0046081
tacacgctaatat

SEQ ID NO: 186951 - DNA, 13 bp, Artificial Sequence
  Oligonucleotide for detection of SNP TSC0046081
atattaacgtgta

SEQ ID NO: 186952 - DNA, 13 bp, Artificial Sequence
  Oligonucleotide for detection of SNP TSC0046081
tacacgttaatat

SEQ ID NO: 186953 - DNA, 13 bp, Artificial Sequence
  Oligonucleotide for detection of SNP TSC0046082
ttatttagtgtta

SEQ ID NO: 186954 - DNA, 13 bp, Artificial Sequence
  Oligonucleotide for detection of SNP TSC0046082
taacactaaataa

SEQ ID NO: 186955 - DNA, 13 bp, Artificial Sequence
  Oligonucleotide for detection of SNP TSC0046082
ttatttggtgtta

SEQ ID NO: 186956 - DNA, 13 bp, Artificial Sequence
  Oligonucleotide for detection of SNP TSC0046082
taacaccaaataa

SEQ ID NO: 186957 - DNA, 13 bp, Artificial Sequence
  Oligonucleotide for detection of SNP TSC0046082
ttattcggtgtta

SEQ ID NO: 186958 - DNA, 13 bp, Artificial Sequence
  Oligonucleotide for detection of SNP TSC0046082
taacaccgaataa

SEQ ID NO: 186959 - DNA, 13 bp, Artificial Sequence
  Oligonucleotide for detection of SNP TSC0046082
tgatattggatgg

SEQ ID NO: 186960 - DNA, 13 bp, Artificial Sequence
  Oligonucleotide for detection of SNP TSC0046082
ccatccaatatca

SEQ ID NO: 186961 - DNA, 13 bp, Artificial Sequence
  Oligonucleotide for detection of SNP TSC0046082
tgatatcggatgg

SEQ ID NO: 186962 - DNA, 13 bp, Artificial Sequence
  Oligonucleotide for detection of SNP TSC0046082
ccatccgatatca

SEQ ID NO: 186963 - DNA, 13 bp, Artificial Sequence
  Oligonucleotide for detection of SNP TSC0046083
attataatggtgy

SEQ ID NO: 186964 - DNA, 13 bp, Artificial Sequence
  Oligonucleotide for detection of SNP TSC0046083
rcaccattataat

SEQ ID NO: 186965 - DNA, 13 bp, Artificial Sequence
  Oligonucleotide for detection of SNP TSC0046083
attatagtggtgy

SEQ ID NO: 186966 - DNA, 13 bp, Artificial Sequence
  Oligonucleotide for detection of SNP TSC0046083
rcaccactataat

SEQ ID NO: 186967 - DNA, 13 bp, Artificial Sequence
  Oligonucleotide for detection of SNP TSC0046084
attggtattttat

SEQ ID NO: 186968 - DNA, 13 bp, Artificial Sequence
  Oligonucleotide for detection of SNP TSC0046084
ataaaataccaat

SEQ ID NO: 186969 - DNA, 13 bp, Artificial Sequence
  Oligonucleotide for detection of SNP TSC0046084
attggttttttat

SEQ ID NO: 186970 - DNA, 13 bp, Artificial Sequence
  Oligonucleotide for detection of SNP TSC0046084
ataaaaaaccaat

SEQ ID NO: 186971 - DNA, 13 bp, Artificial Sequence
  Oligonucleotide for detection of SNP TSC0046084
atgagatgttagt

SEQ ID NO: 186972 - DNA, 13 bp, Artificial Sequence
  Oligonucleotide for detection of SNP TSC0046084
actaacatctcat

SEQ ID NO: 186973 - DNA, 13 bp, Artificial Sequence
  Oligonucleotide for detection of SNP TSC0046084
atgagaagttagt

SEQ ID NO: 186974 - DNA, 13 bp, Artificial Sequence
  Oligonucleotide for detection of SNP TSC0046084
actaacttctcat

SEQ ID NO: 186975 - DNA, 13 bp, Artificial Sequence
  Oligonucleotide for detection of SNP TSC0046085
tattatttgatta

SEQ ID NO: 186976 - DNA, 13 bp, Artificial Sequence
  Oligonucleotide for detection of SNP TSC0046085
taatcaaataata

SEQ ID NO: 186977 - DNA, 13 bp, Artificial Sequence
  Oligonucleotide for detection of SNP TSC0046085
tattatgtgatta

SEQ ID NO: 186978 - DNA, 13 bp, Artificial Sequence
  Oligonucleotide for detection of SNP TSC0046085
taatcacataata

SEQ ID NO: 186979 - DNA, 13 bp, Artificial Sequence
  Oligonucleotide for detection of SNP TSC0046085
tattacgtgatta

SEQ ID NO: 186980 - DNA, 13 bp, Artificial Sequence
  Oligonucleotide for detection of SNP TSC0046085
taatcacgtaata

SEQ ID NO: 186981 - DNA, 13 bp, Artificial Sequence
  Oligonucleotide for detection of SNP TSC0046085
tgattaagtggtg

SEQ ID NO: 186982 - DNA, 13 bp, Artificial Sequence
  Oligonucleotide for detection of SNP TSC0046085
caccacttaatca

SEQ ID NO: 186983 - DNA, 13 bp, Artificial Sequence
  Oligonucleotide for detection of SNP TSC0046085
tgattatgtggtg

SEQ ID NO: 186984 - DNA, 13 bp, Artificial Sequence
  Oligonucleotide for detection of SNP TSC0046085
caccacataatca

SEQ ID NO: 186985 - DNA, 13 bp, Artificial Sequence
  Oligonucleotide for detection of SNP TSC0046085
tgattacgtggtg

SEQ ID NO: 186986 - DNA, 13 bp, Artificial Sequence
  Oligonucleotide for detection of SNP TSC0046085
caccacgtaatca

SEQ ID NO: 186987 - DNA, 13 bp, Artificial Sequence
  Oligonucleotide for detection of SNP TSC0007230
ggggagagaggag

SEQ ID NO: 186988 - DNA, 13 bp, Artificial Sequence
  Oligonucleotide for detection of SNP TSC0007230
ctcctctctcccc

SEQ ID NO: 186989 - DNA, 13 bp, Artificial Sequence
  Oligonucleotide for detection of SNP TSC0007230
ggggagggaggag

SEQ ID NO: 186990 - DNA, 13 bp, Artificial Sequence
  Oligonucleotide for detection of SNP TSC0007230
ctcctccctcccc

SEQ ID NO: 186991 - DNA, 13 bp, Artificial Sequence
  Oligonucleotide for detection of SNP TSC0046089
aaaaaaagaaaay

SEQ ID NO: 186992 - DNA, 13 bp, Artificial Sequence
  Oligonucleotide for detection of SNP TSC0046089
rttttcttttttt

SEQ ID NO: 186993 - DNA, 13 bp, Artificial Sequence
  Oligonucleotide for detection of SNP TSC0046089
aaaaaatgaaaay

SEQ ID NO: 186994 - DNA, 13 bp, Artificial Sequence
  Oligonucleotide for detection of SNP TSC0046089
rttttcatttttt

SEQ ID NO: 186995 - DNA, 13 bp, Artificial Sequence
  Oligonucleotide for detection of SNP TSC0046089
aaaaaacgaaaay

SEQ ID NO: 186996 - DNA, 13 bp, Artificial Sequence
  Oligonucleotide for detection of SNP TSC0046089
rttttcgtttttt

SEQ ID NO: 186997 - DNA, 13 bp, Artificial Sequence
  Oligonucleotide for detection of SNP TSC0046091
tagggtatatata

SEQ ID NO: 186998 - DNA, 13 bp, Artificial Sequence
  Oligonucleotide for detection of SNP TSC0046091
tatatatacccta

SEQ ID NO: 186999 - DNA, 13 bp, Artificial Sequence
  Oligonucleotide for detection of SNP TSC0046091
tagggtgtatata

SEQ ID NO: 187000 - DNA, 13 bp, Artificial Sequence
  Oligonucleotide for detection of SNP TSC0046091
tatatacacccta

SEQ ID NO: 187001 - DNA, 13 bp, Artificial Sequence
  Oligonucleotide for detection of SNP TSC0046092
tattgttggttgt

SEQ ID NO: 187002 - DNA, 13 bp, Artificial Sequence
  Oligonucleotide for detection of SNP TSC0046092
acaaccaacaata

SEQ ID NO: 187003 - DNA, 13 bp, Artificial Sequence
  Oligonucleotide for detection of SNP TSC0046092
tatcgttggttgt

SEQ ID NO: 187004 - DNA, 13 bp, Artificial Sequence
  Oligonucleotide for detection of SNP TSC0046092
acaaccaacgata

SEQ ID NO: 187005 - DNA, 13 bp, Artificial Sequence
  Oligonucleotide for detection of SNP TSC0046092
tattgtcggttgt

SEQ ID NO: 187006 - DNA, 13 bp, Artificial Sequence
  Oligonucleotide for detection of SNP TSC0046092
acaaccgacaata

SEQ ID NO: 187007 - DNA, 13 bp, Artificial Sequence
  Oligonucleotide for detection of SNP TSC0046092
tatcgtcggttgt

SEQ ID NO: 187008 - DNA, 13 bp, Artificial Sequence
  Oligonucleotide for detection of SNP TSC0046092
acaaccgacgata

SEQ ID NO: 187009 - DNA, 13 bp, Artificial Sequence
  Oligonucleotide for detection of SNP TSC0046092
atagttggtgata

SEQ ID NO: 187010 - DNA, 13 bp, Artificial Sequence
  Oligonucleotide for detection of SNP TSC0046092
tatcaccaactat

SEQ ID NO: 187011 - DNA, 13 bp, Artificial Sequence
  Oligonucleotide for detection of SNP TSC0046092
atagttagtgata

SEQ ID NO: 187012 - DNA, 13 bp, Artificial Sequence
  Oligonucleotide for detection of SNP TSC0046092
tatcactaactat

SEQ ID NO: 187013 - DNA, 13 bp, Artificial Sequence
  Oligonucleotide for detection of SNP TSC0046092
atagtcggtgata

SEQ ID NO: 187014 - DNA, 13 bp, Artificial Sequence
  Oligonucleotide for detection of SNP TSC0046092
tatcaccgactat

SEQ ID NO: 187015 - DNA, 13 bp, Artificial Sequence
  Oligonucleotide for detection of SNP TSC0046092
atagttagcgata

SEQ ID NO: 187016 - DNA, 13 bp, Artificial Sequence
  Oligonucleotide for detection of SNP TSC0046092
tatcgctaactat

SEQ ID NO: 187017 - DNA, 13 bp, Artificial Sequence
  Oligonucleotide for detection of SNP TSC0046092
atagttggcgata

SEQ ID NO: 187018 - DNA, 13 bp, Artificial Sequence
  Oligonucleotide for detection of SNP TSC0046092
tatcgccaactat

SEQ ID NO: 187019 - DNA, 13 bp, Artificial Sequence
  Oligonucleotide for detection of SNP TSC0046092
atagtcggcgata

SEQ ID NO: 187020 - DNA, 13 bp, Artificial Sequence
  Oligonucleotide for detection of SNP TSC0046092
tatcgccgactat

SEQ ID NO: 187021 - DNA, 13 bp, Artificial Sequence
  Oligonucleotide for detection of SNP TSC0046101
tttgaggggggaa

SEQ ID NO: 187022 - DNA, 13 bp, Artificial Sequence
  Oligonucleotide for detection of SNP TSC0046101
ttcccccctcaaa

SEQ ID NO: 187023 - DNA, 13 bp, Artificial Sequence
  Oligonucleotide for detection of SNP TSC0046101
tttgagtggggaa

SEQ ID NO: 187024 - DNA, 13 bp, Artificial Sequence
  Oligonucleotide for detection of SNP TSC0046101
ttccccactcaaa

SEQ ID NO: 187025 - DNA, 13 bp, Artificial Sequence
  Oligonucleotide for detection of SNP TSC0046101
tttgagcggggaa

SEQ ID NO: 187026 - DNA, 13 bp, Artificial Sequence
  Oligonucleotide for detection of SNP TSC0046101
ttccccgctcaaa

SEQ ID NO: 187027 - DNA, 13 bp, Artificial Sequence
  Oligonucleotide for detection of SNP TSC0046102
agttgaagtggtg

SEQ ID NO: 187028 - DNA, 13 bp, Artificial Sequence
  Oligonucleotide for detection of SNP TSC0046102
caccacttcaact

SEQ ID NO: 187029 - DNA, 13 bp, Artificial Sequence
  Oligonucleotide for detection of SNP TSC0046102
agttgaggtggtg

SEQ ID NO: 187030 - DNA, 13 bp, Artificial Sequence
  Oligonucleotide for detection of SNP TSC0046102
caccacctcaact

SEQ ID NO: 187031 - DNA, 13 bp, Artificial Sequence
  Oligonucleotide for detection of SNP TSC0046102
agttgaagtggcg

SEQ ID NO: 187032 - DNA, 13 bp, Artificial Sequence
  Oligonucleotide for detection of SNP TSC0046102
cgccacttcaact

SEQ ID NO: 187033 - DNA, 13 bp, Artificial Sequence
  Oligonucleotide for detection of SNP TSC0046102
agttgaggtggcg

SEQ ID NO: 187034 - DNA, 13 bp, Artificial Sequence
  Oligonucleotide for detection of SNP TSC0046102
cgccacctcaact

SEQ ID NO: 187035 - DNA, 13 bp, Artificial Sequence
  Oligonucleotide for detection of SNP TSC0046103
ttgaattttttay

SEQ ID NO: 187036 - DNA, 13 bp, Artificial Sequence
  Oligonucleotide for detection of SNP TSC0046103
rtaaaaaattcaa

SEQ ID NO: 187037 - DNA, 13 bp, Artificial Sequence
  Oligonucleotide for detection of SNP TSC0046103
ttgaatgttttay

SEQ ID NO: 187038 - DNA, 13 bp, Artificial Sequence
  Oligonucleotide for detection of SNP TSC0046103
rtaaaacattcaa

SEQ ID NO: 187039 - DNA, 13 bp, Artificial Sequence
  Oligonucleotide for detection of SNP TSC0046103
gtaggaaatttag

SEQ ID NO: 187040 - DNA, 13 bp, Artificial Sequence
  Oligonucleotide for detection of SNP TSC0046103
ctaaatttcctac

SEQ ID NO: 187041 - DNA, 13 bp, Artificial Sequence
  Oligonucleotide for detection of SNP TSC0046103
gtaggatatttag

SEQ ID NO: 187042 - DNA, 13 bp, Artificial Sequence
  Oligonucleotide for detection of SNP TSC0046103
ctaaatatcctac

SEQ ID NO: 187043 - DNA, 13 bp, Artificial Sequence
  Oligonucleotide for detection of SNP TSC0046104
ttaatatgaaaay

SEQ ID NO: 187044 - DNA, 13 bp, Artificial Sequence
  Oligonucleotide for detection of SNP TSC0046104
rttttcatattaa

SEQ ID NO: 187045 - DNA, 13 bp, Artificial Sequence
  Oligonucleotide for detection of SNP TSC0046104
ttaatacgaaaay

SEQ ID NO: 187046 - DNA, 13 bp, Artificial Sequence
  Oligonucleotide for detection of SNP TSC0046104
rttttcgtattaa

SEQ ID NO: 187047 - DNA, 13 bp, Artificial Sequence
  Oligonucleotide for detection of SNP TSC0046105
aaatagattaaat

SEQ ID NO: 187048 - DNA, 13 bp, Artificial Sequence
  Oligonucleotide for detection of SNP TSC0046105
atttaatctattt

SEQ ID NO: 187049 - DNA, 13 bp, Artificial Sequence
  Oligonucleotide for detection of SNP TSC0046105
aaatagtttaaat

SEQ ID NO: 187050 - DNA, 13 bp, Artificial Sequence
  Oligonucleotide for detection of SNP TSC0046105
atttaaactattt

SEQ ID NO: 187051 - DNA, 13 bp, Artificial Sequence
  Oligonucleotide for detection of SNP TSC0046105
atttagtttgttt

SEQ ID NO: 187052 - DNA, 13 bp, Artificial Sequence
  Oligonucleotide for detection of SNP TSC0046105
aaacaaactaaat

SEQ ID NO: 187053 - DNA, 13 bp, Artificial Sequence
  Oligonucleotide for detection of SNP TSC0046105
atttaggttgttt

SEQ ID NO: 187054 - DNA, 13 bp, Artificial Sequence
  Oligonucleotide for detection of SNP TSC0046105
aaacaacctaaat

SEQ ID NO: 187055 - DNA, 13 bp, Artificial Sequence
  Oligonucleotide for detection of SNP TSC0046106
attttgttttgaa

SEQ ID NO: 187056 - DNA, 13 bp, Artificial Sequence
  Oligonucleotide for detection of SNP TSC0046106
ttcaaaacaaaat

SEQ ID NO: 187057 - DNA, 13 bp, Artificial Sequence
  Oligonucleotide for detection of SNP TSC0046106
attttggtttgaa

SEQ ID NO: 187058 - DNA, 13 bp, Artificial Sequence
  Oligonucleotide for detection of SNP TSC0046106
ttcaaaccaaaat

SEQ ID NO: 187059 - DNA, 13 bp, Artificial Sequence
  Oligonucleotide for detection of SNP TSC0046106
tttaaaataaaat

SEQ ID NO: 187060 - DNA, 13 bp, Artificial Sequence
  Oligonucleotide for detection of SNP TSC0046106
attttattttaaa

SEQ ID NO: 187061 - DNA, 13 bp, Artificial Sequence
  Oligonucleotide for detection of SNP TSC0046106
tttaaattaaaat

SEQ ID NO: 187062 - DNA, 13 bp, Artificial Sequence
  Oligonucleotide for detection of SNP TSC0046106
attttaatttaaa

SEQ ID NO: 187063 - DNA, 13 bp, Artificial Sequence
  Oligonucleotide for detection of SNP TSC0006524
attatggtaggay

SEQ ID NO: 187064 - DNA, 13 bp, Artificial Sequence
  Oligonucleotide for detection of SNP TSC0006524
rtcctaccataat

SEQ ID NO: 187065 - DNA, 13 bp, Artificial Sequence
  Oligonucleotide for detection of SNP TSC0006524
attatgataggay

SEQ ID NO: 187066 - DNA, 13 bp, Artificial Sequence
  Oligonucleotide for detection of SNP TSC0006524
rtcctatcataat

SEQ ID NO: 187067 - DNA, 13 bp, Artificial Sequence
  Oligonucleotide for detection of SNP TSC0046109
aattggaaaaatt

SEQ ID NO: 187068 - DNA, 13 bp, Artificial Sequence
  Oligonucleotide for detection of SNP TSC0046109
aatttttccaatt

SEQ ID NO: 187069 - DNA, 13 bp, Artificial Sequence
  Oligonucleotide for detection of SNP TSC0046109
aattggtaaaatt

SEQ ID NO: 187070 - DNA, 13 bp, Artificial Sequence
  Oligonucleotide for detection of SNP TSC0046109
aattttaccaatt

SEQ ID NO: 187071 - DNA, 13 bp, Artificial Sequence
  Oligonucleotide for detection of SNP TSC0046109
aattgggaaaatt

SEQ ID NO: 187072 - DNA, 13 bp, Artificial Sequence
  Oligonucleotide for detection of SNP TSC0046109
aattttcccaatt

SEQ ID NO: 187073 - DNA, 13 bp, Artificial Sequence
  Oligonucleotide for detection of SNP TSC0046109
aatttttttaatt

SEQ ID NO: 187074 - DNA, 13 bp, Artificial Sequence
  Oligonucleotide for detection of SNP TSC0046109
aattaaaaaaatt

SEQ ID NO: 187075 - DNA, 13 bp, Artificial Sequence
  Oligonucleotide for detection of SNP TSC0046109
aattttattaatt

SEQ ID NO: 187076 - DNA, 13 bp, Artificial Sequence
  Oligonucleotide for detection of SNP TSC0046109
aattaataaaatt

SEQ ID NO: 187077 - DNA, 13 bp, Artificial Sequence
  Oligonucleotide for detection of SNP TSC0046110
gtttttagttatg

SEQ ID NO: 187078 - DNA, 13 bp, Artificial Sequence
  Oligonucleotide for detection of SNP TSC0046110
cataactaaaaac

SEQ ID NO: 187079 - DNA, 13 bp, Artificial Sequence
  Oligonucleotide for detection of SNP TSC0046110
gttttttgttatg

SEQ ID NO: 187080 - DNA, 13 bp, Artificial Sequence
  Oligonucleotide for detection of SNP TSC0046110
cataacaaaaaac

SEQ ID NO: 187081 - DNA, 13 bp, Artificial Sequence
  Oligonucleotide for detection of SNP TSC0046110
gtttttggttatg

SEQ ID NO: 187082 - DNA, 13 bp, Artificial Sequence
  Oligonucleotide for detection of SNP TSC0046110
cataaccaaaaac

SEQ ID NO: 187083 - DNA, 13 bp, Artificial Sequence
  Oligonucleotide for detection of SNP TSC0046110
gtttttagttacg

SEQ ID NO: 187084 - DNA, 13 bp, Artificial Sequence
  Oligonucleotide for detection of SNP TSC0046110
cgtaactaaaaac

SEQ ID NO: 187085 - DNA, 13 bp, Artificial Sequence
  Oligonucleotide for detection of SNP TSC0046110
gttttttgttacg

SEQ ID NO: 187086 - DNA, 13 bp, Artificial Sequence
  Oligonucleotide for detection of SNP TSC0046110
cgtaacaaaaaac

SEQ ID NO: 187087 - DNA, 13 bp, Artificial Sequence
  Oligonucleotide for detection of SNP TSC0046110
gttttcggttatg

SEQ ID NO: 187088 - DNA, 13 bp, Artificial Sequence
  Oligonucleotide for detection of SNP TSC0046110
cataaccgaaaac

SEQ ID NO: 187089 - DNA, 13 bp, Artificial Sequence
  Oligonucleotide for detection of SNP TSC0046110
gtttttggttacg

SEQ ID NO: 187090 - DNA, 13 bp, Artificial Sequence
  Oligonucleotide for detection of SNP TSC0046110
cgtaaccaaaaac

SEQ ID NO: 187091 - DNA, 13 bp, Artificial Sequence
  Oligonucleotide for detection of SNP TSC0046110
gttttcggttacg

SEQ ID NO: 187092 - DNA, 13 bp, Artificial Sequence
  Oligonucleotide for detection of SNP TSC0046110
cgtaaccgaaaac

SEQ ID NO: 187093 - DNA, 13 bp, Artificial Sequence
  Oligonucleotide for detection of SNP TSC0046110
tgtgattgagaay

SEQ ID NO: 187094 - DNA, 13 bp, Artificial Sequence
  Oligonucleotide for detection of SNP TSC0046110
rttctcaatcaca

SEQ ID NO: 187095 - DNA, 13 bp, Artificial Sequence
  Oligonucleotide for detection of SNP TSC0046110
tgtgatagagaay

SEQ ID NO: 187096 - DNA, 13 bp, Artificial Sequence
  Oligonucleotide for detection of SNP TSC0046110
rttctctatcaca

SEQ ID NO: 187097 - DNA, 13 bp, Artificial Sequence
  Oligonucleotide for detection of SNP TSC0046110
cgtgattgagaay

SEQ ID NO: 187098 - DNA, 13 bp, Artificial Sequence
  Oligonucleotide for detection of SNP TSC0046110
rttctcaatcacg

SEQ ID NO: 187099 - DNA, 13 bp, Artificial Sequence
  Oligonucleotide for detection of SNP TSC0046110
cgtgatagagaay

SEQ ID NO: 187100 - DNA, 13 bp, Artificial Sequence
  Oligonucleotide for detection of SNP TSC0046110
rttctctatcacg

SEQ ID NO: 187101 - DNA, 13 bp, Artificial Sequence
  Oligonucleotide for detection of SNP TSC0046110
tgtgatcgagaay

SEQ ID NO: 187102 - DNA, 13 bp, Artificial Sequence
  Oligonucleotide for detection of SNP TSC0046110
rttctcgatcaca

SEQ ID NO: 187103 - DNA, 13 bp, Artificial Sequence
  Oligonucleotide for detection of SNP TSC0046110
cgtgatcgagaay

SEQ ID NO: 187104 - DNA, 13 bp, Artificial Sequence
  Oligonucleotide for detection of SNP TSC0046110
rttctcgatcacg

SEQ ID NO: 187105 - DNA, 13 bp, Artificial Sequence
  Oligonucleotide for detection of SNP TSC0046116
atatatatattat

SEQ ID NO: 187106 - DNA, 13 bp, Artificial Sequence
  Oligonucleotide for detection of SNP TSC0046116
ataatatatatat

SEQ ID NO: 187107 - DNA, 13 bp, Artificial Sequence
  Oligonucleotide for detection of SNP TSC0046116
atatatgtattat

SEQ ID NO: 187108 - DNA, 13 bp, Artificial Sequence
  Oligonucleotide for detection of SNP TSC0046116
ataatacatatat

SEQ ID NO: 187109 - DNA, 13 bp, Artificial Sequence
  Oligonucleotide for detection of SNP TSC0046116
atatacgtattat

SEQ ID NO: 187110 - DNA, 13 bp, Artificial Sequence
  Oligonucleotide for detection of SNP TSC0046116
ataatacgtatat

SEQ ID NO: 187111 - DNA, 13 bp, Artificial Sequence
  Oligonucleotide for detection of SNP TSC0046116
ataatatgtgtgt

SEQ ID NO: 187112 - DNA, 13 bp, Artificial Sequence
  Oligonucleotide for detection of SNP TSC0046116
acacacatattat

SEQ ID NO: 187113 - DNA, 13 bp, Artificial Sequence
  Oligonucleotide for detection of SNP TSC0046116
ataatacgtgtgt

SEQ ID NO: 187114 - DNA, 13 bp, Artificial Sequence
  Oligonucleotide for detection of SNP TSC0046116
acacacgtattat

SEQ ID NO: 187115 - DNA, 13 bp, Artificial Sequence
  Oligonucleotide for detection of SNP TSC0046117
tagatttgataat

SEQ ID NO: 187116 - DNA, 13 bp, Artificial Sequence
  Oligonucleotide for detection of SNP TSC0046117
attatcaaatcta

SEQ ID NO: 187117 - DNA, 13 bp, Artificial Sequence
  Oligonucleotide for detection of SNP TSC0046117
tagattcgataat

SEQ ID NO: 187118 - DNA, 13 bp, Artificial Sequence
  Oligonucleotide for detection of SNP TSC0046117
attatcgaatcta

SEQ ID NO: 187119 - DNA, 13 bp, Artificial Sequence
  Oligonucleotide for detection of SNP TSC0046117
attattgaatttg

SEQ ID NO: 187120 - DNA, 13 bp, Artificial Sequence
  Oligonucleotide for detection of SNP TSC0046117
caaattcaataat

SEQ ID NO: 187121 - DNA, 13 bp, Artificial Sequence
  Oligonucleotide for detection of SNP TSC0046117
attattaaatttg

SEQ ID NO: 187122 - DNA, 13 bp, Artificial Sequence
  Oligonucleotide for detection of SNP TSC0046117
caaatttaataat

SEQ ID NO: 187123 - DNA, 13 bp, Artificial Sequence
  Oligonucleotide for detection of SNP TSC0046117
attatcgaatttg

SEQ ID NO: 187124 - DNA, 13 bp, Artificial Sequence
  Oligonucleotide for detection of SNP TSC0046117
caaattcgataat

SEQ ID NO: 187125 - DNA, 13 bp, Artificial Sequence
  Oligonucleotide for detection of SNP TSC0046121
tttttggaaatty

SEQ ID NO: 187126 - DNA, 13 bp, Artificial Sequence
  Oligonucleotide for detection of SNP TSC0046121
raatttccaaaaa

SEQ ID NO: 187127 - DNA, 13 bp, Artificial Sequence
  Oligonucleotide for detection of SNP TSC0046121
tttttgaaaatty

SEQ ID NO: 187128 - DNA, 13 bp, Artificial Sequence
  Oligonucleotide for detection of SNP TSC0046121
raattttcaaaaa

SEQ ID NO: 187129 - DNA, 13 bp, Artificial Sequence
  Oligonucleotide for detection of SNP TSC0046124
ttgtatagattty

SEQ ID NO: 187130 - DNA, 13 bp, Artificial Sequence
  Oligonucleotide for detection of SNP TSC0046124
raaatctatacaa

SEQ ID NO: 187131 - DNA, 13 bp, Artificial Sequence
  Oligonucleotide for detection of SNP TSC0046124
ttgtatggattty

SEQ ID NO: 187132 - DNA, 13 bp, Artificial Sequence
  Oligonucleotide for detection of SNP TSC0046124
raaatccatacaa

SEQ ID NO: 187133 - DNA, 13 bp, Artificial Sequence
  Oligonucleotide for detection of SNP TSC0046125
taaattaaagagy

SEQ ID NO: 187134 - DNA, 13 bp, Artificial Sequence
  Oligonucleotide for detection of SNP TSC0046125
rctctttaattta

SEQ ID NO: 187135 - DNA, 13 bp, Artificial Sequence
  Oligonucleotide for detection of SNP TSC0046125
taaattgaagagy

SEQ ID NO: 187136 - DNA, 13 bp, Artificial Sequence
  Oligonucleotide for detection of SNP TSC0046125
rctcttcaattta

SEQ ID NO: 187137 - DNA, 13 bp, Artificial Sequence
  Oligonucleotide for detection of SNP TSC0046126
taagaggatagta

SEQ ID NO: 187138 - DNA, 13 bp, Artificial Sequence
  Oligonucleotide for detection of SNP TSC0046126
tactatcctctta

SEQ ID NO: 187139 - DNA, 13 bp, Artificial Sequence
  Oligonucleotide for detection of SNP TSC0046126
taagagaatagta

SEQ ID NO: 187140 - DNA, 13 bp, Artificial Sequence
  Oligonucleotide for detection of SNP TSC0046126
tactattctctta

SEQ ID NO: 187141 - DNA, 13 bp, Artificial Sequence
  Oligonucleotide for detection of SNP TSC0046128
gttgaggtacgag

SEQ ID NO: 187142 - DNA, 13 bp, Artificial Sequence
  Oligonucleotide for detection of SNP TSC0046128
ctcgtacctcaac

SEQ ID NO: 187143 - DNA, 13 bp, Artificial Sequence
  Oligonucleotide for detection of SNP TSC0046128
gttgagatacgag

SEQ ID NO: 187144 - DNA, 13 bp, Artificial Sequence
  Oligonucleotide for detection of SNP TSC0046128
ctcgtatctcaac

SEQ ID NO: 187145 - DNA, 13 bp, Artificial Sequence
  Oligonucleotide for detection of SNP TSC0010682
tatattgtagggg

SEQ ID NO: 187146 - DNA, 13 bp, Artificial Sequence
  Oligonucleotide for detection of SNP TSC0010682
cccctacaatata

SEQ ID NO: 187147 - DNA, 13 bp, Artificial Sequence
  Oligonucleotide for detection of SNP TSC0010682
tatattatagggg

SEQ ID NO: 187148 - DNA, 13 bp, Artificial Sequence
  Oligonucleotide for detection of SNP TSC0010682
cccctataatata

SEQ ID NO: 187149 - DNA, 13 bp, Artificial Sequence
  Oligonucleotide for detection of SNP TSC0010683
tattatgtgaaga

SEQ ID NO: 187150 - DNA, 13 bp, Artificial Sequence
  Oligonucleotide for detection of SNP TSC0010683
tcttcacataata

SEQ ID NO: 187151 - DNA, 13 bp, Artificial Sequence
  Oligonucleotide for detection of SNP TSC0010683
tattatatgaaga

SEQ ID NO: 187152 - DNA, 13 bp, Artificial Sequence
  Oligonucleotide for detection of SNP TSC0010683
tcttcatataata

SEQ ID NO: 187153 - DNA, 13 bp, Artificial Sequence
  Oligonucleotide for detection of SNP TSC0010684
taagaagataaay

SEQ ID NO: 187154 - DNA, 13 bp, Artificial Sequence
  Oligonucleotide for detection of SNP TSC0010684
rtttatcttctta

SEQ ID NO: 187155 - DNA, 13 bp, Artificial Sequence
  Oligonucleotide for detection of SNP TSC0010684
taagaaaataaay

SEQ ID NO: 187156 - DNA, 13 bp, Artificial Sequence
  Oligonucleotide for detection of SNP TSC0010684
rtttattttctta

SEQ ID NO: 187157 - DNA, 13 bp, Artificial Sequence
  Oligonucleotide for detection of SNP TSC0046130
tagataattatag

SEQ ID NO: 187158 - DNA, 13 bp, Artificial Sequence
  Oligonucleotide for detection of SNP TSC0046130
ctataattatcta

SEQ ID NO: 187159 - DNA, 13 bp, Artificial Sequence
  Oligonucleotide for detection of SNP TSC0046130
tagatagttatag

SEQ ID NO: 187160 - DNA, 13 bp, Artificial Sequence
  Oligonucleotide for detection of SNP TSC0046130
ctataactatcta

SEQ ID NO: 187161 - DNA, 13 bp, Artificial Sequence
  Oligonucleotide for detection of SNP TSC0046131
ttgtaaagttatg

SEQ ID NO: 187162 - DNA, 13 bp, Artificial Sequence
  Oligonucleotide for detection of SNP TSC0046131
cataactttacaa

SEQ ID NO: 187163 - DNA, 13 bp, Artificial Sequence
  Oligonucleotide for detection of SNP TSC0046131
ttgtaaggttatg

SEQ ID NO: 187164 - DNA, 13 bp, Artificial Sequence
  Oligonucleotide for detection of SNP TSC0046131
cataaccttacaa

SEQ ID NO: 187165 - DNA, 13 bp, Artificial Sequence
  Oligonucleotide for detection of SNP TSC0046131
tcgtaaagttatg

SEQ ID NO: 187166 - DNA, 13 bp, Artificial Sequence
  Oligonucleotide for detection of SNP TSC0046131
cataactttacga

SEQ ID NO: 187167 - DNA, 13 bp, Artificial Sequence
  Oligonucleotide for detection of SNP TSC0046131
tcgtaaggttatg

SEQ ID NO: 187168 - DNA, 13 bp, Artificial Sequence
  Oligonucleotide for detection of SNP TSC0046131
cataaccttacga

SEQ ID NO: 187169 - DNA, 13 bp, Artificial Sequence
  Oligonucleotide for detection of SNP TSC0046132
gttataaaattta

SEQ ID NO: 187170 - DNA, 13 bp, Artificial Sequence
  Oligonucleotide for detection of SNP TSC0046132
taaattttataac

SEQ ID NO: 187171 - DNA, 13 bp, Artificial Sequence
  Oligonucleotide for detection of SNP TSC0046132
gttatagaattta

SEQ ID NO: 187172 - DNA, 13 bp, Artificial Sequence
  Oligonucleotide for detection of SNP TSC0046132
taaattctataac

SEQ ID NO: 187173 - DNA, 13 bp, Artificial Sequence
  Oligonucleotide for detection of SNP TSC0046137
aaaaattggtttg

SEQ ID NO: 187174 - DNA, 13 bp, Artificial Sequence
  Oligonucleotide for detection of SNP TSC0046137
caaaccaattttt

SEQ ID NO: 187175 - DNA, 13 bp, Artificial Sequence
  Oligonucleotide for detection of SNP TSC0046137
aaaaatcggtttg

SEQ ID NO: 187176 - DNA, 13 bp, Artificial Sequence
  Oligonucleotide for detection of SNP TSC0046137
caaaccgattttt

SEQ ID NO: 187177 - DNA, 13 bp, Artificial Sequence
  Oligonucleotide for detection of SNP TSC0046137
taggtcgattttt

SEQ ID NO: 187178 - DNA, 13 bp, Artificial Sequence
  Oligonucleotide for detection of SNP TSC0046137
aaaaatcgaccta

SEQ ID NO: 187179 - DNA, 13 bp, Artificial Sequence
  Oligonucleotide for detection of SNP TSC0046138
gtttaggttgtat

SEQ ID NO: 187180 - DNA, 13 bp, Artificial Sequence
  Oligonucleotide for detection of SNP TSC0046138
atacaacctaaac

SEQ ID NO: 187181 - DNA, 13 bp, Artificial Sequence
  Oligonucleotide for detection of SNP TSC0046138
gtttagattgtat

SEQ ID NO: 187182 - DNA, 13 bp, Artificial Sequence
  Oligonucleotide for detection of SNP TSC0046138
atacaatctaaac

SEQ ID NO: 187183 - DNA, 13 bp, Artificial Sequence
  Oligonucleotide for detection of SNP TSC0046139
aagtgtagtggta

SEQ ID NO: 187184 - DNA, 13 bp, Artificial Sequence
  Oligonucleotide for detection of SNP TSC0046139
taccactacactt

SEQ ID NO: 187185 - DNA, 13 bp, Artificial Sequence
  Oligonucleotide for detection of SNP TSC0046139
aagtgtggtggta

SEQ ID NO: 187186 - DNA, 13 bp, Artificial Sequence
  Oligonucleotide for detection of SNP TSC0046139
taccaccacactt

SEQ ID NO: 187187 - DNA, 13 bp, Artificial Sequence
  Oligonucleotide for detection of SNP TSC0046139
aagtgcggtggta

SEQ ID NO: 187188 - DNA, 13 bp, Artificial Sequence
  Oligonucleotide for detection of SNP TSC0046139
taccaccgcactt

SEQ ID NO: 187189 - DNA, 13 bp, Artificial Sequence
  Oligonucleotide for detection of SNP TSC0046141
taattaatagaay

SEQ ID NO: 187190 - DNA, 13 bp, Artificial Sequence
  Oligonucleotide for detection of SNP TSC0046141
rttctattaatta

SEQ ID NO: 187191 - DNA, 13 bp, Artificial Sequence
  Oligonucleotide for detection of SNP TSC0046141
taattagtagaay

SEQ ID NO: 187192 - DNA, 13 bp, Artificial Sequence
  Oligonucleotide for detection of SNP TSC0046141
rttctactaatta

SEQ ID NO: 187193 - DNA, 13 bp, Artificial Sequence
  Oligonucleotide for detection of SNP TSC0046144
tttataggaagag

SEQ ID NO: 187194 - DNA, 13 bp, Artificial Sequence
  Oligonucleotide for detection of SNP TSC0046144
ctcttcctataaa

SEQ ID NO: 187195 - DNA, 13 bp, Artificial Sequence
  Oligonucleotide for detection of SNP TSC0046144
tttataagaagag

SEQ ID NO: 187196 - DNA, 13 bp, Artificial Sequence
  Oligonucleotide for detection of SNP TSC0046144
ctcttcttataaa

SEQ ID NO: 187197 - DNA, 13 bp, Artificial Sequence
  Oligonucleotide for detection of SNP TSC0046145
ttgtaatggtgta

SEQ ID NO: 187198 - DNA, 13 bp, Artificial Sequence
  Oligonucleotide for detection of SNP TSC0046145
tacaccattacaa

SEQ ID NO: 187199 - DNA, 13 bp, Artificial Sequence
  Oligonucleotide for detection of SNP TSC0046145
ttgtaacggtgta

SEQ ID NO: 187200 - DNA, 13 bp, Artificial Sequence
  Oligonucleotide for detection of SNP TSC0046145
tacaccgttacaa

SEQ ID NO: 187201 - DNA, 13 bp, Artificial Sequence
  Oligonucleotide for detection of SNP TSC0046145
tatattattataa

SEQ ID NO: 187202 - DNA, 13 bp, Artificial Sequence
  Oligonucleotide for detection of SNP TSC0046145
ttataataatata

SEQ ID NO: 187203 - DNA, 13 bp, Artificial Sequence
  Oligonucleotide for detection of SNP TSC0046146
gtgtgtattatta

SEQ ID NO: 187204 - DNA, 13 bp, Artificial Sequence
  Oligonucleotide for detection of SNP TSC0046146
taataatacacac

SEQ ID NO: 187205 - DNA, 13 bp, Artificial Sequence
  Oligonucleotide for detection of SNP TSC0046146
gtgtgtgttatta

SEQ ID NO: 187206 - DNA, 13 bp, Artificial Sequence
  Oligonucleotide for detection of SNP TSC0046146
taataacacacac

SEQ ID NO: 187207 - DNA, 13 bp, Artificial Sequence
  Oligonucleotide for detection of SNP TSC0046146
gcgtgtattatta

SEQ ID NO: 187208 - DNA, 13 bp, Artificial Sequence
  Oligonucleotide for detection of SNP TSC0046146
taataatacacgc

SEQ ID NO: 187209 - DNA, 13 bp, Artificial Sequence
  Oligonucleotide for detection of SNP TSC0046146
gcgtgtgttatta

SEQ ID NO: 187210 - DNA, 13 bp, Artificial Sequence
  Oligonucleotide for detection of SNP TSC0046146
taataacacacgc

SEQ ID NO: 187211 - DNA, 13 bp, Artificial Sequence
  Oligonucleotide for detection of SNP TSC0046146
gtgtgcgttatta

SEQ ID NO: 187212 - DNA, 13 bp, Artificial Sequence
  Oligonucleotide for detection of SNP TSC0046146
taataacgcacac

SEQ ID NO: 187213 - DNA, 13 bp, Artificial Sequence
  Oligonucleotide for detection of SNP TSC0046146
gcgtgcgttatta

SEQ ID NO: 187214 - DNA, 13 bp, Artificial Sequence
  Oligonucleotide for detection of SNP TSC0046146
taataacgcacgc

SEQ ID NO: 187215 - DNA, 13 bp, Artificial Sequence
  Oligonucleotide for detection of SNP TSC0046146
tggtggtgtacgy

SEQ ID NO: 187216 - DNA, 13 bp, Artificial Sequence
  Oligonucleotide for detection of SNP TSC0046146
rcgtacaccacca

SEQ ID NO: 187217 - DNA, 13 bp, Artificial Sequence
  Oligonucleotide for detection of SNP TSC0046146
tggtggcgtacgy

SEQ ID NO: 187218 - DNA, 13 bp, Artificial Sequence
  Oligonucleotide for detection of SNP TSC0046146
rcgtacgccacca

SEQ ID NO: 187219 - DNA, 13 bp, Artificial Sequence
  Oligonucleotide for detection of SNP TSC0046147
aaaggagattttg

SEQ ID NO: 187220 - DNA, 13 bp, Artificial Sequence
  Oligonucleotide for detection of SNP TSC0046147
caaaatctccttt

SEQ ID NO: 187221 - DNA, 13 bp, Artificial Sequence
  Oligonucleotide for detection of SNP TSC0046147
aaaggaaattttg

SEQ ID NO: 187222 - DNA, 13 bp, Artificial Sequence
  Oligonucleotide for detection of SNP TSC0046147
caaaatttccttt

SEQ ID NO: 187223 - DNA, 13 bp, Artificial Sequence
  Oligonucleotide for detection of SNP TSC0046148
attaaagttttta

SEQ ID NO: 187224 - DNA, 13 bp, Artificial Sequence
  Oligonucleotide for detection of SNP TSC0046148
taaaaactttaat

SEQ ID NO: 187225 - DNA, 13 bp, Artificial Sequence
  Oligonucleotide for detection of SNP TSC0046148
attaaaattttta

SEQ ID NO: 187226 - DNA, 13 bp, Artificial Sequence
  Oligonucleotide for detection of SNP TSC0046148
taaaaattttaat

SEQ ID NO: 187227 - DNA, 13 bp, Artificial Sequence
  Oligonucleotide for detection of SNP TSC0046149
tatgttagttttg

SEQ ID NO: 187228 - DNA, 13 bp, Artificial Sequence
  Oligonucleotide for detection of SNP TSC0046149
caaaactaacata

SEQ ID NO: 187229 - DNA, 13 bp, Artificial Sequence
  Oligonucleotide for detection of SNP TSC0046149
tatgttggttttg

SEQ ID NO: 187230 - DNA, 13 bp, Artificial Sequence
  Oligonucleotide for detection of SNP TSC0046149
caaaaccaacata

SEQ ID NO: 187231 - DNA, 13 bp, Artificial Sequence
  Oligonucleotide for detection of SNP TSC0046149
tatgtcggttttg

SEQ ID NO: 187232 - DNA, 13 bp, Artificial Sequence
  Oligonucleotide for detection of SNP TSC0046149
caaaaccgacata

SEQ ID NO: 187233 - DNA, 13 bp, Artificial Sequence
  Oligonucleotide for detection of SNP TSC0046149
tagagttggtatg

SEQ ID NO: 187234 - DNA, 13 bp, Artificial Sequence
  Oligonucleotide for detection of SNP TSC0046149
cataccaactcta

SEQ ID NO: 187235 - DNA, 13 bp, Artificial Sequence
  Oligonucleotide for detection of SNP TSC0046149
tagagtcggtatg

SEQ ID NO: 187236 - DNA, 13 bp, Artificial Sequence
  Oligonucleotide for detection of SNP TSC0046149
cataccgactcta

SEQ ID NO: 187237 - DNA, 13 bp, Artificial Sequence
  Oligonucleotide for detection of SNP TSC0046150
aaggatatgtaty

SEQ ID NO: 187238 - DNA, 13 bp, Artificial Sequence
  Oligonucleotide for detection of SNP TSC0046150
ratacatatcctt

SEQ ID NO: 187239 - DNA, 13 bp, Artificial Sequence
  Oligonucleotide for detection of SNP TSC0046150
aaggatgtgtaty

SEQ ID NO: 187240 - DNA, 13 bp, Artificial Sequence
  Oligonucleotide for detection of SNP TSC0046150
ratacacatcctt

SEQ ID NO: 187241 - DNA, 13 bp, Artificial Sequence
  Oligonucleotide for detection of SNP TSC0046152
ggtgataaagtat

SEQ ID NO: 187242 - DNA, 13 bp, Artificial Sequence
  Oligonucleotide for detection of SNP TSC0046152
atactttatcacc

SEQ ID NO: 187243 - DNA, 13 bp, Artificial Sequence
  Oligonucleotide for detection of SNP TSC0046152
ggtgatgaagtat

SEQ ID NO: 187244 - DNA, 13 bp, Artificial Sequence
  Oligonucleotide for detection of SNP TSC0046152
atacttcatcacc

SEQ ID NO: 187245 - DNA, 13 bp, Artificial Sequence
  Oligonucleotide for detection of SNP TSC0046153
gttggtgaggtta

SEQ ID NO: 187246 - DNA, 13 bp, Artificial Sequence
  Oligonucleotide for detection of SNP TSC0046153
taacctcaccaac

SEQ ID NO: 187247 - DNA, 13 bp, Artificial Sequence
  Oligonucleotide for detection of SNP TSC0046153
gttggtaaggtta

SEQ ID NO: 187248 - DNA, 13 bp, Artificial Sequence
  Oligonucleotide for detection of SNP TSC0046153
taaccttaccaac

SEQ ID NO: 187249 - DNA, 13 bp, Artificial Sequence
  Oligonucleotide for detection of SNP TSC0046153
gttggcgaggtta

SEQ ID NO: 187250 - DNA, 13 bp, Artificial Sequence
  Oligonucleotide for detection of SNP TSC0046153
taacctcgccaac

SEQ ID NO: 187251 - DNA, 13 bp, Artificial Sequence
  Oligonucleotide for detection of SNP TSC0046154
aaaaaagagttaa

SEQ ID NO: 187252 - DNA, 13 bp, Artificial Sequence
  Oligonucleotide for detection of SNP TSC0046154
ttaactctttttt

SEQ ID NO: 187253 - DNA, 13 bp, Artificial Sequence
  Oligonucleotide for detection of SNP TSC0046154
aaaaaaaagttaa

SEQ ID NO: 187254 - DNA, 13 bp, Artificial Sequence
  Oligonucleotide for detection of SNP TSC0046154
ttaactttttttt

SEQ ID NO: 187255 - DNA, 13 bp, Artificial Sequence
  Oligonucleotide for detection of SNP TSC0046157
gtttttataaagt

SEQ ID NO: 187256 - DNA, 13 bp, Artificial Sequence
  Oligonucleotide for detection of SNP TSC0046157
actttataaaaac

SEQ ID NO: 187257 - DNA, 13 bp, Artificial Sequence
  Oligonucleotide for detection of SNP TSC0046157
gtttttgtaaagt

SEQ ID NO: 187258 - DNA, 13 bp, Artificial Sequence
  Oligonucleotide for detection of SNP TSC0046157
actttacaaaaac

SEQ ID NO: 187259 - DNA, 13 bp, Artificial Sequence
  Oligonucleotide for detection of SNP TSC0046158
taaagaaatttag

SEQ ID NO: 187260 - DNA, 13 bp, Artificial Sequence
  Oligonucleotide for detection of SNP TSC0046158
ctaaatttcttta

SEQ ID NO: 187261 - DNA, 13 bp, Artificial Sequence
  Oligonucleotide for detection of SNP TSC0046158
taaagatatttag

SEQ ID NO: 187262 - DNA, 13 bp, Artificial Sequence
  Oligonucleotide for detection of SNP TSC0046158
ctaaatatcttta

SEQ ID NO: 187263 - DNA, 13 bp, Artificial Sequence
  Oligonucleotide for detection of SNP TSC0046162
tttttaagagaty

SEQ ID NO: 187264 - DNA, 13 bp, Artificial Sequence
  Oligonucleotide for detection of SNP TSC0046162
ratctcttaaaaa

SEQ ID NO: 187265 - DNA, 13 bp, Artificial Sequence
  Oligonucleotide for detection of SNP TSC0046162
tttttaggagaty

SEQ ID NO: 187266 - DNA, 13 bp, Artificial Sequence
  Oligonucleotide for detection of SNP TSC0046162
ratctcctaaaaa

SEQ ID NO: 187267 - DNA, 13 bp, Artificial Sequence
  Oligonucleotide for detection of SNP TSC0046163
tttttaagtaagg

SEQ ID NO: 187268 - DNA, 13 bp, Artificial Sequence
  Oligonucleotide for detection of SNP TSC0046163
ccttacttaaaaa

SEQ ID NO: 187269 - DNA, 13 bp, Artificial Sequence
  Oligonucleotide for detection of SNP TSC0046163
tttttaggtaagg

SEQ ID NO: 187270 - DNA, 13 bp, Artificial Sequence
  Oligonucleotide for detection of SNP TSC0046163
ccttacctaaaaa

SEQ ID NO: 187271 - DNA, 13 bp, Artificial Sequence
  Oligonucleotide for detection of SNP TSC0046164
gggttaggatttg

SEQ ID NO: 187272 - DNA, 13 bp, Artificial Sequence
  Oligonucleotide for detection of SNP TSC0046164
caaatcctaaccc

SEQ ID NO: 187273 - DNA, 13 bp, Artificial Sequence
  Oligonucleotide for detection of SNP TSC0046164
gggttaagatttg

SEQ ID NO: 187274 - DNA, 13 bp, Artificial Sequence
  Oligonucleotide for detection of SNP TSC0046164
caaatcttaaccc

SEQ ID NO: 187275 - DNA, 13 bp, Artificial Sequence
  Oligonucleotide for detection of SNP TSC0046165
ttagagtgtatay

SEQ ID NO: 187276 - DNA, 13 bp, Artificial Sequence
  Oligonucleotide for detection of SNP TSC0046165
rtatacactctaa

SEQ ID NO: 187277 - DNA, 13 bp, Artificial Sequence
  Oligonucleotide for detection of SNP TSC0046165
ttagagcgtatay

SEQ ID NO: 187278 - DNA, 13 bp, Artificial Sequence
  Oligonucleotide for detection of SNP TSC0046165
rtatacgctctaa

SEQ ID NO: 187279 - DNA, 13 bp, Artificial Sequence
  Oligonucleotide for detection of SNP TSC0046165
gtatatgttttgg

SEQ ID NO: 187280 - DNA, 13 bp, Artificial Sequence
  Oligonucleotide for detection of SNP TSC0046165
ccaaaacatatac

SEQ ID NO: 187281 - DNA, 13 bp, Artificial Sequence
  Oligonucleotide for detection of SNP TSC0046165
gtatacgttttgg

SEQ ID NO: 187282 - DNA, 13 bp, Artificial Sequence
  Oligonucleotide for detection of SNP TSC0046165
ccaaaacgtatac

SEQ ID NO: 187283 - DNA, 13 bp, Artificial Sequence
  Oligonucleotide for detection of SNP TSC0046166
tagttttttgttt

SEQ ID NO: 187284 - DNA, 13 bp, Artificial Sequence
  Oligonucleotide for detection of SNP TSC0046166
aaacaaaaaacta

SEQ ID NO: 187285 - DNA, 13 bp, Artificial Sequence
  Oligonucleotide for detection of SNP TSC0046166
tagtttgttgttt

SEQ ID NO: 187286 - DNA, 13 bp, Artificial Sequence
  Oligonucleotide for detection of SNP TSC0046166
aaacaacaaacta

SEQ ID NO: 187287 - DNA, 13 bp, Artificial Sequence
  Oligonucleotide for detection of SNP TSC0046166
agatagaagattg

SEQ ID NO: 187288 - DNA, 13 bp, Artificial Sequence
  Oligonucleotide for detection of SNP TSC0046166
caatcttctatct

SEQ ID NO: 187289 - DNA, 13 bp, Artificial Sequence
  Oligonucleotide for detection of SNP TSC0046166
agatagtagattg

SEQ ID NO: 187290 - DNA, 13 bp, Artificial Sequence
  Oligonucleotide for detection of SNP TSC0046166
caatctactatct

SEQ ID NO: 187291 - DNA, 13 bp, Artificial Sequence
  Oligonucleotide for detection of SNP TSC0008757
taaatagtaagag

SEQ ID NO: 187292 - DNA, 13 bp, Artificial Sequence
  Oligonucleotide for detection of SNP TSC0008757
ctcttactattta

SEQ ID NO: 187293 - DNA, 13 bp, Artificial Sequence
  Oligonucleotide for detection of SNP TSC0008757
taaataataagag

SEQ ID NO: 187294 - DNA, 13 bp, Artificial Sequence
  Oligonucleotide for detection of SNP TSC0008757
ctcttattattta

SEQ ID NO: 187295 - DNA, 13 bp, Artificial Sequence
  Oligonucleotide for detection of SNP TSC0046168
aaattagtgaaat

SEQ ID NO: 187296 - DNA, 13 bp, Artificial Sequence
  Oligonucleotide for detection of SNP TSC0046168
atttcactaattt

SEQ ID NO: 187297 - DNA, 13 bp, Artificial Sequence
  Oligonucleotide for detection of SNP TSC0046168
aaattaatgaaat

SEQ ID NO: 187298 - DNA, 13 bp, Artificial Sequence
  Oligonucleotide for detection of SNP TSC0046168
atttcattaattt

SEQ ID NO: 187299 - DNA, 13 bp, Artificial Sequence
  Oligonucleotide for detection of SNP TSC0046169
gtgggtaggttty

SEQ ID NO: 187300 - DNA, 13 bp, Artificial Sequence
  Oligonucleotide for detection of SNP TSC0046169
raaacctacccac

SEQ ID NO: 187301 - DNA, 13 bp, Artificial Sequence
  Oligonucleotide for detection of SNP TSC0046169
gtgggtgggttty

SEQ ID NO: 187302 - DNA, 13 bp, Artificial Sequence
  Oligonucleotide for detection of SNP TSC0046169
raaacccacccac

SEQ ID NO: 187303 - DNA, 13 bp, Artificial Sequence
  Oligonucleotide for detection of SNP TSC0046170
ggttaaagtaagt

SEQ ID NO: 187304 - DNA, 13 bp, Artificial Sequence
  Oligonucleotide for detection of SNP TSC0046170
acttactttaacc

SEQ ID NO: 187305 - DNA, 13 bp, Artificial Sequence
  Oligonucleotide for detection of SNP TSC0046170
ggttaatgtaagt

SEQ ID NO: 187306 - DNA, 13 bp, Artificial Sequence
  Oligonucleotide for detection of SNP TSC0046170
acttacattaacc

SEQ ID NO: 187307 - DNA, 13 bp, Artificial Sequence
  Oligonucleotide for detection of SNP TSC0046170
atttgtattggty

SEQ ID NO: 187308 - DNA, 13 bp, Artificial Sequence
  Oligonucleotide for detection of SNP TSC0046170
raccaatacaaat

SEQ ID NO: 187309 - DNA, 13 bp, Artificial Sequence
  Oligonucleotide for detection of SNP TSC0046171
tttagtatattag

SEQ ID NO: 187310 - DNA, 13 bp, Artificial Sequence
  Oligonucleotide for detection of SNP TSC0046171
ctaatatactaaa

SEQ ID NO: 187311 - DNA, 13 bp, Artificial Sequence
  Oligonucleotide for detection of SNP TSC0046171
tttagtttattag

SEQ ID NO: 187312 - DNA, 13 bp, Artificial Sequence
  Oligonucleotide for detection of SNP TSC0046171
ctaataaactaaa

SEQ ID NO: 187313 - DNA, 13 bp, Artificial Sequence
  Oligonucleotide for detection of SNP TSC0046171
ttaatgtattaga

SEQ ID NO: 187314 - DNA, 13 bp, Artificial Sequence
  Oligonucleotide for detection of SNP TSC0046171
tctaatacattaa

SEQ ID NO: 187315 - DNA, 13 bp, Artificial Sequence
  Oligonucleotide for detection of SNP TSC0046171
ttaatgaattaga

SEQ ID NO: 187316 - DNA, 13 bp, Artificial Sequence
  Oligonucleotide for detection of SNP TSC0046171
tctaattcattaa

SEQ ID NO: 187317 - DNA, 13 bp, Artificial Sequence
  Oligonucleotide for detection of SNP TSC0046172
tgttggtgaggtt

SEQ ID NO: 187318 - DNA, 13 bp, Artificial Sequence
  Oligonucleotide for detection of SNP TSC0046172
aacctcaccaaca

SEQ ID NO: 187319 - DNA, 13 bp, Artificial Sequence
  Oligonucleotide for detection of SNP TSC0046172
tgttggcgaggtt

SEQ ID NO: 187320 - DNA, 13 bp, Artificial Sequence
  Oligonucleotide for detection of SNP TSC0046172
aacctcgccaaca

SEQ ID NO: 187321 - DNA, 13 bp, Artificial Sequence
  Oligonucleotide for detection of SNP TSC0046172
agttttgttagta

SEQ ID NO: 187322 - DNA, 13 bp, Artificial Sequence
  Oligonucleotide for detection of SNP TSC0046172
tactaacaaaact

SEQ ID NO: 187323 - DNA, 13 bp, Artificial Sequence
  Oligonucleotide for detection of SNP TSC0046172
agttttattagta

SEQ ID NO: 187324 - DNA, 13 bp, Artificial Sequence
  Oligonucleotide for detection of SNP TSC0046172
tactaataaaact

SEQ ID NO: 187325 - DNA, 13 bp, Artificial Sequence
  Oligonucleotide for detection of SNP TSC0046172
agtttcgttagta

SEQ ID NO: 187326 - DNA, 13 bp, Artificial Sequence
  Oligonucleotide for detection of SNP TSC0046172
tactaacgaaact

SEQ ID NO: 187327 - DNA, 13 bp, Artificial Sequence
  Oligonucleotide for detection of SNP TSC0046173
atattgttaaaay

SEQ ID NO: 187328 - DNA, 13 bp, Artificial Sequence
  Oligonucleotide for detection of SNP TSC0046173
rttttaacaatat

SEQ ID NO: 187329 - DNA, 13 bp, Artificial Sequence
  Oligonucleotide for detection of SNP TSC0046173
atattggtaaaay

SEQ ID NO: 187330 - DNA, 13 bp, Artificial Sequence
  Oligonucleotide for detection of SNP TSC0046173
rttttaccaatat

SEQ ID NO: 187331 - DNA, 13 bp, Artificial Sequence
  Oligonucleotide for detection of SNP TSC0046173
gttttagtaatgt

SEQ ID NO: 187332 - DNA, 13 bp, Artificial Sequence
  Oligonucleotide for detection of SNP TSC0046173
acattactaaaac

SEQ ID NO: 187333 - DNA, 13 bp, Artificial Sequence
  Oligonucleotide for detection of SNP TSC0046173
gttttattaatgt

SEQ ID NO: 187334 - DNA, 13 bp, Artificial Sequence
  Oligonucleotide for detection of SNP TSC0046173
acattaataaaac

SEQ ID NO: 187335 - DNA, 13 bp, Artificial Sequence
  Oligonucleotide for detection of SNP TSC0046174
atggggtaaaaga

SEQ ID NO: 187336 - DNA, 13 bp, Artificial Sequence
  Oligonucleotide for detection of SNP TSC0046174
tcttttaccccat

SEQ ID NO: 187337 - DNA, 13 bp, Artificial Sequence
  Oligonucleotide for detection of SNP TSC0046174
atggggaaaaaga

SEQ ID NO: 187338 - DNA, 13 bp, Artificial Sequence
  Oligonucleotide for detection of SNP TSC0046174
tctttttccccat

SEQ ID NO: 187339 - DNA, 13 bp, Artificial Sequence
  Oligonucleotide for detection of SNP TSC0046178
tttatagtaaaga

SEQ ID NO: 187340 - DNA, 13 bp, Artificial Sequence
  Oligonucleotide for detection of SNP TSC0046178
tctttactataaa

SEQ ID NO: 187341 - DNA, 13 bp, Artificial Sequence
  Oligonucleotide for detection of SNP TSC0046178
tttataataaaga

SEQ ID NO: 187342 - DNA, 13 bp, Artificial Sequence
  Oligonucleotide for detection of SNP TSC0046178
tctttattataaa

SEQ ID NO: 187343 - DNA, 13 bp, Artificial Sequence
  Oligonucleotide for detection of SNP TSC0046181
gtatttattgtta

SEQ ID NO: 187344 - DNA, 13 bp, Artificial Sequence
  Oligonucleotide for detection of SNP TSC0046181
taacaataaatac

SEQ ID NO: 187345 - DNA, 13 bp, Artificial Sequence
  Oligonucleotide for detection of SNP TSC0046181
gtatttgttgtta

SEQ ID NO: 187346 - DNA, 13 bp, Artificial Sequence
  Oligonucleotide for detection of SNP TSC0046181
taacaacaaatac

SEQ ID NO: 187347 - DNA, 13 bp, Artificial Sequence
  Oligonucleotide for detection of SNP TSC0046182
gtattaaggttgg

SEQ ID NO: 187348 - DNA, 13 bp, Artificial Sequence
  Oligonucleotide for detection of SNP TSC0046182
ccaaccttaatac

SEQ ID NO: 187349 - DNA, 13 bp, Artificial Sequence
  Oligonucleotide for detection of SNP TSC0046182
gtattagggttgg

SEQ ID NO: 187350 - DNA, 13 bp, Artificial Sequence
  Oligonucleotide for detection of SNP TSC0046182
ccaaccctaatac

SEQ ID NO: 187351 - DNA, 13 bp, Artificial Sequence
  Oligonucleotide for detection of SNP TSC0046183
ttatttgtggttt

SEQ ID NO: 187352 - DNA, 13 bp, Artificial Sequence
  Oligonucleotide for detection of SNP TSC0046183
aaaccacaaataa

SEQ ID NO: 187353 - DNA, 13 bp, Artificial Sequence
  Oligonucleotide for detection of SNP TSC0046183
ttatttatggttt

SEQ ID NO: 187354 - DNA, 13 bp, Artificial Sequence
  Oligonucleotide for detection of SNP TSC0046183
aaaccataaataa

SEQ ID NO: 187355 - DNA, 13 bp, Artificial Sequence
  Oligonucleotide for detection of SNP TSC0046188
agtaaaagttttg

SEQ ID NO: 187356 - DNA, 13 bp, Artificial Sequence
  Oligonucleotide for detection of SNP TSC0046188
caaaacttttact

SEQ ID NO: 187357 - DNA, 13 bp, Artificial Sequence
  Oligonucleotide for detection of SNP TSC0046188
agtaaaggttttg

SEQ ID NO: 187358 - DNA, 13 bp, Artificial Sequence
  Oligonucleotide for detection of SNP TSC0046188
caaaacctttact

SEQ ID NO: 187359 - DNA, 13 bp, Artificial Sequence
  Oligonucleotide for detection of SNP TSC0046188
agtaaaagtttcg

SEQ ID NO: 187360 - DNA, 13 bp, Artificial Sequence
  Oligonucleotide for detection of SNP TSC0046188
cgaaacttttact

SEQ ID NO: 187361 - DNA, 13 bp, Artificial Sequence
  Oligonucleotide for detection of SNP TSC0046188
agtaaaggtttcg

SEQ ID NO: 187362 - DNA, 13 bp, Artificial Sequence
  Oligonucleotide for detection of SNP TSC0046188
cgaaacctttact

SEQ ID NO: 187363 - DNA, 13 bp, Artificial Sequence
  Oligonucleotide for detection of SNP TSC0046189
tgtttagtgagty

SEQ ID NO: 187364 - DNA, 13 bp, Artificial Sequence
  Oligonucleotide for detection of SNP TSC0046189
ractcactaaaca

SEQ ID NO: 187365 - DNA, 13 bp, Artificial Sequence
  Oligonucleotide for detection of SNP TSC0046189
tgtttaatgagty

SEQ ID NO: 187366 - DNA, 13 bp, Artificial Sequence
  Oligonucleotide for detection of SNP TSC0046189
ractcattaaaca

SEQ ID NO: 187367 - DNA, 13 bp, Artificial Sequence
  Oligonucleotide for detection of SNP TSC0046190
gaggatattgaay

SEQ ID NO: 187368 - DNA, 13 bp, Artificial Sequence
  Oligonucleotide for detection of SNP TSC0046190
rttcaatatcctc

SEQ ID NO: 187369 - DNA, 13 bp, Artificial Sequence
  Oligonucleotide for detection of SNP TSC0046190
gaggatgttgaay

SEQ ID NO: 187370 - DNA, 13 bp, Artificial Sequence
  Oligonucleotide for detection of SNP TSC0046190
rttcaacatcctc

SEQ ID NO: 187371 - DNA, 13 bp, Artificial Sequence
  Oligonucleotide for detection of SNP TSC0046190
gaggacgttgaay

SEQ ID NO: 187372 - DNA, 13 bp, Artificial Sequence
  Oligonucleotide for detection of SNP TSC0046190
rttcaacgtcctc

SEQ ID NO: 187373 - DNA, 13 bp, Artificial Sequence
  Oligonucleotide for detection of SNP TSC0046190
gtttagtgtttty

SEQ ID NO: 187374 - DNA, 13 bp, Artificial Sequence
  Oligonucleotide for detection of SNP TSC0046190
raaaacactaaac

SEQ ID NO: 187375 - DNA, 13 bp, Artificial Sequence
  Oligonucleotide for detection of SNP TSC0046190
gtttagcgtttty

SEQ ID NO: 187376 - DNA, 13 bp, Artificial Sequence
  Oligonucleotide for detection of SNP TSC0046190
raaaacgctaaac

SEQ ID NO: 187377 - DNA, 13 bp, Artificial Sequence
  Oligonucleotide for detection of SNP TSC0006721
gttttaatatttt

SEQ ID NO: 187378 - DNA, 13 bp, Artificial Sequence
  Oligonucleotide for detection of SNP TSC0006721
aaaatattaaaac

SEQ ID NO: 187379 - DNA, 13 bp, Artificial Sequence
  Oligonucleotide for detection of SNP TSC0006721
gttttagtatttt

SEQ ID NO: 187380 - DNA, 13 bp, Artificial Sequence
  Oligonucleotide for detection of SNP TSC0006721
aaaatactaaaac

SEQ ID NO: 187381 - DNA, 13 bp, Artificial Sequence
  Oligonucleotide for detection of SNP TSC0046191
atagaggtaaggg

SEQ ID NO: 187382 - DNA, 13 bp, Artificial Sequence
  Oligonucleotide for detection of SNP TSC0046191
cccttacctctat

SEQ ID NO: 187383 - DNA, 13 bp, Artificial Sequence
  Oligonucleotide for detection of SNP TSC0046191
atagagataaggg

SEQ ID NO: 187384 - DNA, 13 bp, Artificial Sequence
  Oligonucleotide for detection of SNP TSC0046191
cccttatctctat

SEQ ID NO: 187385 - DNA, 13 bp, Artificial Sequence
  Oligonucleotide for detection of SNP TSC0046193
gtgtttagtttaa

SEQ ID NO: 187386 - DNA, 13 bp, Artificial Sequence
  Oligonucleotide for detection of SNP TSC0046193
ttaaactaaacac

SEQ ID NO: 187387 - DNA, 13 bp, Artificial Sequence
  Oligonucleotide for detection of SNP TSC0046193
gtgtttggtttaa

SEQ ID NO: 187388 - DNA, 13 bp, Artificial Sequence
  Oligonucleotide for detection of SNP TSC0046193
ttaaaccaaacac

SEQ ID NO: 187389 - DNA, 13 bp, Artificial Sequence
  Oligonucleotide for detection of SNP TSC0046193
gcgtttagtttaa

SEQ ID NO: 187390 - DNA, 13 bp, Artificial Sequence
  Oligonucleotide for detection of SNP TSC0046193
ttaaactaaacgc

SEQ ID NO: 187391 - DNA, 13 bp, Artificial Sequence
  Oligonucleotide for detection of SNP TSC0046193
gcgtttggtttaa

SEQ ID NO: 187392 - DNA, 13 bp, Artificial Sequence
  Oligonucleotide for detection of SNP TSC0046193
ttaaaccaaacgc

SEQ ID NO: 187393 - DNA, 13 bp, Artificial Sequence
  Oligonucleotide for detection of SNP TSC0046193
gtgttcggtttaa

SEQ ID NO: 187394 - DNA, 13 bp, Artificial Sequence
  Oligonucleotide for detection of SNP TSC0046193
ttaaaccgaacac

SEQ ID NO: 187395 - DNA, 13 bp, Artificial Sequence
  Oligonucleotide for detection of SNP TSC0046193
gcgttcggtttaa

SEQ ID NO: 187396 - DNA, 13 bp, Artificial Sequence
  Oligonucleotide for detection of SNP TSC0046193
ttaaaccgaacgc

SEQ ID NO: 187397 - DNA, 13 bp, Artificial Sequence
  Oligonucleotide for detection of SNP TSC0046193
ttaggttgggtgy

SEQ ID NO: 187398 - DNA, 13 bp, Artificial Sequence
  Oligonucleotide for detection of SNP TSC0046193
rcacccaacctaa

SEQ ID NO: 187399 - DNA, 13 bp, Artificial Sequence
  Oligonucleotide for detection of SNP TSC0046193
ttaggttgggcgy

SEQ ID NO: 187400 - DNA, 13 bp, Artificial Sequence
  Oligonucleotide for detection of SNP TSC0046193
rcgcccaacctaa

SEQ ID NO: 187401 - DNA, 13 bp, Artificial Sequence
  Oligonucleotide for detection of SNP TSC0046193
ttaggtcgggtgy

SEQ ID NO: 187402 - DNA, 13 bp, Artificial Sequence
  Oligonucleotide for detection of SNP TSC0046193
rcacccgacctaa

SEQ ID NO: 187403 - DNA, 13 bp, Artificial Sequence
  Oligonucleotide for detection of SNP TSC0046193
ttaggtcgggcgy

SEQ ID NO: 187404 - DNA, 13 bp, Artificial Sequence
  Oligonucleotide for detection of SNP TSC0046193
rcgcccgacctaa

SEQ ID NO: 187405 - DNA, 13 bp, Artificial Sequence
  Oligonucleotide for detection of SNP TSC0046196
attagattaaaty

SEQ ID NO: 187406 - DNA, 13 bp, Artificial Sequence
  Oligonucleotide for detection of SNP TSC0046196
ratttaatctaat

SEQ ID NO: 187407 - DNA, 13 bp, Artificial Sequence
  Oligonucleotide for detection of SNP TSC0046196
attagagtaaaty

SEQ ID NO: 187408 - DNA, 13 bp, Artificial Sequence
  Oligonucleotide for detection of SNP TSC0046196
ratttactctaat

SEQ ID NO: 187409 - DNA, 13 bp, Artificial Sequence
  Oligonucleotide for detection of SNP TSC0046196
ggtttggtttggt

SEQ ID NO: 187410 - DNA, 13 bp, Artificial Sequence
  Oligonucleotide for detection of SNP TSC0046196
accaaaccaaacc

SEQ ID NO: 187411 - DNA, 13 bp, Artificial Sequence
  Oligonucleotide for detection of SNP TSC0046196
ggtttgttttggt

SEQ ID NO: 187412 - DNA, 13 bp, Artificial Sequence
  Oligonucleotide for detection of SNP TSC0046196
accaaaacaaacc

SEQ ID NO: 187413 - DNA, 13 bp, Artificial Sequence
  Oligonucleotide for detection of SNP TSC0046197
attattgttggtt

SEQ ID NO: 187414 - DNA, 13 bp, Artificial Sequence
  Oligonucleotide for detection of SNP TSC0046197
aaccaacaataat

SEQ ID NO: 187415 - DNA, 13 bp, Artificial Sequence
  Oligonucleotide for detection of SNP TSC0046197
attatcgttggtt

SEQ ID NO: 187416 - DNA, 13 bp, Artificial Sequence
  Oligonucleotide for detection of SNP TSC0046197
aaccaacgataat

SEQ ID NO: 187417 - DNA, 13 bp, Artificial Sequence
  Oligonucleotide for detection of SNP TSC0046197
aattaatggtggt

SEQ ID NO: 187418 - DNA, 13 bp, Artificial Sequence
  Oligonucleotide for detection of SNP TSC0046197
accaccattaatt

SEQ ID NO: 187419 - DNA, 13 bp, Artificial Sequence
  Oligonucleotide for detection of SNP TSC0046197
aattaacggtggt

SEQ ID NO: 187420 - DNA, 13 bp, Artificial Sequence
  Oligonucleotide for detection of SNP TSC0046197
accaccgttaatt

SEQ ID NO: 187421 - DNA, 13 bp, Artificial Sequence
  Oligonucleotide for detection of SNP TSC0046198
tttagtaaataga

SEQ ID NO: 187422 - DNA, 13 bp, Artificial Sequence
  Oligonucleotide for detection of SNP TSC0046198
tctatttactaaa

SEQ ID NO: 187423 - DNA, 13 bp, Artificial Sequence
  Oligonucleotide for detection of SNP TSC0046198
tttagtgaataga

SEQ ID NO: 187424 - DNA, 13 bp, Artificial Sequence
  Oligonucleotide for detection of SNP TSC0046198
tctattcactaaa

SEQ ID NO: 187425 - DNA, 13 bp, Artificial Sequence
  Oligonucleotide for detection of SNP TSC0046198
tttagcgaataga

SEQ ID NO: 187426 - DNA, 13 bp, Artificial Sequence
  Oligonucleotide for detection of SNP TSC0046198
tctattcgctaaa

SEQ ID NO: 187427 - DNA, 13 bp, Artificial Sequence
  Oligonucleotide for detection of SNP TSC0046199
tgtttgaatattt

SEQ ID NO: 187428 - DNA, 13 bp, Artificial Sequence
  Oligonucleotide for detection of SNP TSC0046199
aaatattcaaaca

SEQ ID NO: 187429 - DNA, 13 bp, Artificial Sequence
  Oligonucleotide for detection of SNP TSC0046199
tgtttggatattt

SEQ ID NO: 187430 - DNA, 13 bp, Artificial Sequence
  Oligonucleotide for detection of SNP TSC0046199
aaatatccaaaca

SEQ ID NO: 187431 - DNA, 13 bp, Artificial Sequence
  Oligonucleotide for detection of SNP TSC0046204
ttttagattaaaa

SEQ ID NO: 187432 - DNA, 13 bp, Artificial Sequence
  Oligonucleotide for detection of SNP TSC0046204
ttttaatctaaaa

SEQ ID NO: 187433 - DNA, 13 bp, Artificial Sequence
  Oligonucleotide for detection of SNP TSC0046204
ttttaggttaaaa

SEQ ID NO: 187434 - DNA, 13 bp, Artificial Sequence
  Oligonucleotide for detection of SNP TSC0046204
ttttaacctaaaa

SEQ ID NO: 187435 - DNA, 13 bp, Artificial Sequence
  Oligonucleotide for detection of SNP TSC0046205
agtattagtttat

SEQ ID NO: 187436 - DNA, 13 bp, Artificial Sequence
  Oligonucleotide for detection of SNP TSC0046205
ataaactaatact

SEQ ID NO: 187437 - DNA, 13 bp, Artificial Sequence
  Oligonucleotide for detection of SNP TSC0046205
agtatttgtttat

SEQ ID NO: 187438 - DNA, 13 bp, Artificial Sequence
  Oligonucleotide for detection of SNP TSC0046205
ataaacaaatact

SEQ ID NO: 187439 - DNA, 13 bp, Artificial Sequence
  Oligonucleotide for detection of SNP TSC0046205
ataaattggtatt

SEQ ID NO: 187440 - DNA, 13 bp, Artificial Sequence
  Oligonucleotide for detection of SNP TSC0046205
aataccaatttat

SEQ ID NO: 187441 - DNA, 13 bp, Artificial Sequence
  Oligonucleotide for detection of SNP TSC0046205
ataaataggtatt

SEQ ID NO: 187442 - DNA, 13 bp, Artificial Sequence
  Oligonucleotide for detection of SNP TSC0046205
aatacctatttat

SEQ ID NO: 187443 - DNA, 13 bp, Artificial Sequence
  Oligonucleotide for detection of SNP TSC0046207
tgaattagggagg

SEQ ID NO: 187444 - DNA, 13 bp, Artificial Sequence
  Oligonucleotide for detection of SNP TSC0046207
cctccctaattca

SEQ ID NO: 187445 - DNA, 13 bp, Artificial Sequence
  Oligonucleotide for detection of SNP TSC0046208
aaatgatgtgtta

SEQ ID NO: 187446 - DNA, 13 bp, Artificial Sequence
  Oligonucleotide for detection of SNP TSC0046208
taacacatcattt

SEQ ID NO: 187447 - DNA, 13 bp, Artificial Sequence
  Oligonucleotide for detection of SNP TSC0046208
aaatgacgtgtta

SEQ ID NO: 187448 - DNA, 13 bp, Artificial Sequence
  Oligonucleotide for detection of SNP TSC0046208
taacacgtcattt

SEQ ID NO: 187449 - DNA, 13 bp, Artificial Sequence
  Oligonucleotide for detection of SNP TSC0046208
tagtacgttattt

SEQ ID NO: 187450 - DNA, 13 bp, Artificial Sequence
  Oligonucleotide for detection of SNP TSC0046208
aaataacgtacta

SEQ ID NO: 187451 - DNA, 13 bp, Artificial Sequence
  Oligonucleotide for detection of SNP TSC0046211
gagagtatagtgy

SEQ ID NO: 187452 - DNA, 13 bp, Artificial Sequence
  Oligonucleotide for detection of SNP TSC0046211
rcactatactctc

SEQ ID NO: 187453 - DNA, 13 bp, Artificial Sequence
  Oligonucleotide for detection of SNP TSC0046211
gagagtttagtgy

SEQ ID NO: 187454 - DNA, 13 bp, Artificial Sequence
  Oligonucleotide for detection of SNP TSC0046211
rcactaaactctc

SEQ ID NO: 187455 - DNA, 13 bp, Artificial Sequence
  Oligonucleotide for detection of SNP TSC0046211
gtattgtgtttty

SEQ ID NO: 187456 - DNA, 13 bp, Artificial Sequence
  Oligonucleotide for detection of SNP TSC0046211
raaaacacaatac

SEQ ID NO: 187457 - DNA, 13 bp, Artificial Sequence
  Oligonucleotide for detection of SNP TSC0046211
gtattgagtttty

SEQ ID NO: 187458 - DNA, 13 bp, Artificial Sequence
  Oligonucleotide for detection of SNP TSC0046211
raaaactcaatac

SEQ ID NO: 187459 - DNA, 13 bp, Artificial Sequence
  Oligonucleotide for detection of SNP TSC0046212
ttaagaataattt

SEQ ID NO: 187460 - DNA, 13 bp, Artificial Sequence
  Oligonucleotide for detection of SNP TSC0046212
aaattattcttaa

SEQ ID NO: 187461 - DNA, 13 bp, Artificial Sequence
  Oligonucleotide for detection of SNP TSC0046212
ttaagattaattt

SEQ ID NO: 187462 - DNA, 13 bp, Artificial Sequence
  Oligonucleotide for detection of SNP TSC0046212
aaattaatcttaa

SEQ ID NO: 187463 - DNA, 13 bp, Artificial Sequence
  Oligonucleotide for detection of SNP TSC0046212
ttaagagtaattt

SEQ ID NO: 187464 - DNA, 13 bp, Artificial Sequence
  Oligonucleotide for detection of SNP TSC0046212
aaattactcttaa

SEQ ID NO: 187465 - DNA, 13 bp, Artificial Sequence
  Oligonucleotide for detection of SNP TSC0046212
aaattatttttaa

SEQ ID NO: 187466 - DNA, 13 bp, Artificial Sequence
  Oligonucleotide for detection of SNP TSC0046212
ttaaaaataattt

SEQ ID NO: 187467 - DNA, 13 bp, Artificial Sequence
  Oligonucleotide for detection of SNP TSC0046212
aaattagttttaa

SEQ ID NO: 187468 - DNA, 13 bp, Artificial Sequence
  Oligonucleotide for detection of SNP TSC0046212
ttaaaactaattt

SEQ ID NO: 187469 - DNA, 13 bp, Artificial Sequence
  Oligonucleotide for detection of SNP TSC0046213
tatttttgatgaa

SEQ ID NO: 187470 - DNA, 13 bp, Artificial Sequence
  Oligonucleotide for detection of SNP TSC0046213
ttcatcaaaaata

SEQ ID NO: 187471 - DNA, 13 bp, Artificial Sequence
  Oligonucleotide for detection of SNP TSC0046213
tattttcgatgaa

SEQ ID NO: 187472 - DNA, 13 bp, Artificial Sequence
  Oligonucleotide for detection of SNP TSC0046213
ttcatcgaaaata

SEQ ID NO: 187473 - DNA, 13 bp, Artificial Sequence
  Oligonucleotide for detection of SNP TSC0046213
tttattggagata

SEQ ID NO: 187474 - DNA, 13 bp, Artificial Sequence
  Oligonucleotide for detection of SNP TSC0046213
tatctccaataaa

SEQ ID NO: 187475 - DNA, 13 bp, Artificial Sequence
  Oligonucleotide for detection of SNP TSC0046213
tttattagagata

SEQ ID NO: 187476 - DNA, 13 bp, Artificial Sequence
  Oligonucleotide for detection of SNP TSC0046213
tatctctaataaa

SEQ ID NO: 187477 - DNA, 13 bp, Artificial Sequence
  Oligonucleotide for detection of SNP TSC0046213
tttatcggagata

SEQ ID NO: 187478 - DNA, 13 bp, Artificial Sequence
  Oligonucleotide for detection of SNP TSC0046213
tatctccgataaa

SEQ ID NO: 187479 - DNA, 13 bp, Artificial Sequence
  Oligonucleotide for detection of SNP TSC0046214
tttaggaaagggg

SEQ ID NO: 187480 - DNA, 13 bp, Artificial Sequence
  Oligonucleotide for detection of SNP TSC0046214
cccctttcctaaa

SEQ ID NO: 187481 - DNA, 13 bp, Artificial Sequence
  Oligonucleotide for detection of SNP TSC0046214
tttagggaagggg

SEQ ID NO: 187482 - DNA, 13 bp, Artificial Sequence
  Oligonucleotide for detection of SNP TSC0046214
ccccttccctaaa

SEQ ID NO: 187483 - DNA, 13 bp, Artificial Sequence
  Oligonucleotide for detection of SNP TSC0006518
ttgaaagaagtaa

SEQ ID NO: 187484 - DNA, 13 bp, Artificial Sequence
  Oligonucleotide for detection of SNP TSC0006518
ttacttctttcaa

SEQ ID NO: 187485 - DNA, 13 bp, Artificial Sequence
  Oligonucleotide for detection of SNP TSC0006518
ttgaaaaaagtaa

SEQ ID NO: 187486 - DNA, 13 bp, Artificial Sequence
  Oligonucleotide for detection of SNP TSC0006518
ttacttttttcaa

SEQ ID NO: 187487 - DNA, 13 bp, Artificial Sequence
  Oligonucleotide for detection of SNP TSC0046215
atttgtatgttat

SEQ ID NO: 187488 - DNA, 13 bp, Artificial Sequence
  Oligonucleotide for detection of SNP TSC0046215
ataacatacaaat

SEQ ID NO: 187489 - DNA, 13 bp, Artificial Sequence
  Oligonucleotide for detection of SNP TSC0046215
atttgtgtgttat

SEQ ID NO: 187490 - DNA, 13 bp, Artificial Sequence
  Oligonucleotide for detection of SNP TSC0046215
ataacacacaaat

SEQ ID NO: 187491 - DNA, 13 bp, Artificial Sequence
  Oligonucleotide for detection of SNP TSC0046215
attcgtatgttat

SEQ ID NO: 187492 - DNA, 13 bp, Artificial Sequence
  Oligonucleotide for detection of SNP TSC0046215
ataacatacgaat

SEQ ID NO: 187493 - DNA, 13 bp, Artificial Sequence
  Oligonucleotide for detection of SNP TSC0046215
attcgtgtgttat

SEQ ID NO: 187494 - DNA, 13 bp, Artificial Sequence
  Oligonucleotide for detection of SNP TSC0046215
ataacacacgaat

SEQ ID NO: 187495 - DNA, 13 bp, Artificial Sequence
  Oligonucleotide for detection of SNP TSC0000125
gtaaatgatgaaa

SEQ ID NO: 187496 - DNA, 13 bp, Artificial Sequence
  Oligonucleotide for detection of SNP TSC0000125
tttcatcatttac

SEQ ID NO: 187497 - DNA, 13 bp, Artificial Sequence
  Oligonucleotide for detection of SNP TSC0000125
gtaaataatgaaa

SEQ ID NO: 187498 - DNA, 13 bp, Artificial Sequence
  Oligonucleotide for detection of SNP TSC0000125
tttcattatttac

SEQ ID NO: 187499 - DNA, 13 bp, Artificial Sequence
  Oligonucleotide for detection of SNP TSC0046216
tgattgtgtagag

SEQ ID NO: 187500 - DNA, 13 bp, Artificial Sequence
  Oligonucleotide for detection of SNP TSC0046216
ctctacacaatca

SEQ ID NO: 187501 - DNA, 13 bp, Artificial Sequence
  Oligonucleotide for detection of SNP TSC0046216
tgattgcgtagag

SEQ ID NO: 187502 - DNA, 13 bp, Artificial Sequence
  Oligonucleotide for detection of SNP TSC0046216
ctctacgcaatca

SEQ ID NO: 187503 - DNA, 13 bp, Artificial Sequence
  Oligonucleotide for detection of SNP TSC0046216
ttttgtgtagtta

SEQ ID NO: 187504 - DNA, 13 bp, Artificial Sequence
  Oligonucleotide for detection of SNP TSC0046216
taactacacaaaa

SEQ ID NO: 187505 - DNA, 13 bp, Artificial Sequence
  Oligonucleotide for detection of SNP TSC0046216
ttttgtatagtta

SEQ ID NO: 187506 - DNA, 13 bp, Artificial Sequence
  Oligonucleotide for detection of SNP TSC0046216
taactatacaaaa

SEQ ID NO: 187507 - DNA, 13 bp, Artificial Sequence
  Oligonucleotide for detection of SNP TSC0046216
ttttgcgtagtta

SEQ ID NO: 187508 - DNA, 13 bp, Artificial Sequence
  Oligonucleotide for detection of SNP TSC0046216
taactacgcaaaa

SEQ ID NO: 187509 - DNA, 13 bp, Artificial Sequence
  Oligonucleotide for detection of SNP TSC0046217
tagttatatgtgg

SEQ ID NO: 187510 - DNA, 13 bp, Artificial Sequence
  Oligonucleotide for detection of SNP TSC0046217
ccacatataacta

SEQ ID NO: 187511 - DNA, 13 bp, Artificial Sequence
  Oligonucleotide for detection of SNP TSC0046217
tagttagatgtgg

SEQ ID NO: 187512 - DNA, 13 bp, Artificial Sequence
  Oligonucleotide for detection of SNP TSC0046217
ccacatctaacta

SEQ ID NO: 187513 - DNA, 13 bp, Artificial Sequence
  Oligonucleotide for detection of SNP TSC0046217
ttatatatggtta

SEQ ID NO: 187514 - DNA, 13 bp, Artificial Sequence
  Oligonucleotide for detection of SNP TSC0046217
taaccatatataa

SEQ ID NO: 187515 - DNA, 13 bp, Artificial Sequence
  Oligonucleotide for detection of SNP TSC0046217
ttatatttggtta

SEQ ID NO: 187516 - DNA, 13 bp, Artificial Sequence
  Oligonucleotide for detection of SNP TSC0046217
taaccaaatataa

SEQ ID NO: 187517 - DNA, 13 bp, Artificial Sequence
  Oligonucleotide for detection of SNP TSC0006013
tttgttaggtgta

SEQ ID NO: 187518 - DNA, 13 bp, Artificial Sequence
  Oligonucleotide for detection of SNP TSC0006013
tacacctaacaaa

SEQ ID NO: 187519 - DNA, 13 bp, Artificial Sequence
  Oligonucleotide for detection of SNP TSC0006013
tttgtttggtgta

SEQ ID NO: 187520 - DNA, 13 bp, Artificial Sequence
  Oligonucleotide for detection of SNP TSC0006013
tacaccaaacaaa

SEQ ID NO: 187521 - DNA, 13 bp, Artificial Sequence
  Oligonucleotide for detection of SNP TSC0006013
tttgttgggtgta

SEQ ID NO: 187522 - DNA, 13 bp, Artificial Sequence
  Oligonucleotide for detection of SNP TSC0006013
tacacccaacaaa

SEQ ID NO: 187523 - DNA, 13 bp, Artificial Sequence
  Oligonucleotide for detection of SNP TSC0006013
tttgttaggcgta

SEQ ID NO: 187524 - DNA, 13 bp, Artificial Sequence
  Oligonucleotide for detection of SNP TSC0006013
tacgcctaacaaa

SEQ ID NO: 187525 - DNA, 13 bp, Artificial Sequence
  Oligonucleotide for detection of SNP TSC0006013
tttgttcggtgta

SEQ ID NO: 187526 - DNA, 13 bp, Artificial Sequence
  Oligonucleotide for detection of SNP TSC0006013
tacaccgaacaaa

SEQ ID NO: 187527 - DNA, 13 bp, Artificial Sequence
  Oligonucleotide for detection of SNP TSC0006013
tttgtttggcgta

SEQ ID NO: 187528 - DNA, 13 bp, Artificial Sequence
  Oligonucleotide for detection of SNP TSC0006013
tacgccaaacaaa

SEQ ID NO: 187529 - DNA, 13 bp, Artificial Sequence
  Oligonucleotide for detection of SNP TSC0006013
tttgtcgggtgta

SEQ ID NO: 187530 - DNA, 13 bp, Artificial Sequence
  Oligonucleotide for detection of SNP TSC0006013
tacacccgacaaa

SEQ ID NO: 187531 - DNA, 13 bp, Artificial Sequence
  Oligonucleotide for detection of SNP TSC0006013
tttgttgggcgta

SEQ ID NO: 187532 - DNA, 13 bp, Artificial Sequence
  Oligonucleotide for detection of SNP TSC0006013
tacgcccaacaaa

SEQ ID NO: 187533 - DNA, 13 bp, Artificial Sequence
  Oligonucleotide for detection of SNP TSC0006013
tttgttcggcgta

SEQ ID NO: 187534 - DNA, 13 bp, Artificial Sequence
  Oligonucleotide for detection of SNP TSC0006013
tacgccgaacaaa

SEQ ID NO: 187535 - DNA, 13 bp, Artificial Sequence
  Oligonucleotide for detection of SNP TSC0006013
tttgtcgggcgta

SEQ ID NO: 187536 - DNA, 13 bp, Artificial Sequence
  Oligonucleotide for detection of SNP TSC0006013
tacgcccgacaaa

SEQ ID NO: 187537 - DNA, 13 bp, Artificial Sequence
  Oligonucleotide for detection of SNP TSC0006013
tgtgtttggtaaa

SEQ ID NO: 187538 - DNA, 13 bp, Artificial Sequence
  Oligonucleotide for detection of SNP TSC0006013
tttaccaaacaca

SEQ ID NO: 187539 - DNA, 13 bp, Artificial Sequence
  Oligonucleotide for detection of SNP TSC0006013
tgtgttgggtaaa

SEQ ID NO: 187540 - DNA, 13 bp, Artificial Sequence
  Oligonucleotide for detection of SNP TSC0006013
tttacccaacaca

SEQ ID NO: 187541 - DNA, 13 bp, Artificial Sequence
  Oligonucleotide for detection of SNP TSC0006013
tgtgttaggtaaa

SEQ ID NO: 187542 - DNA, 13 bp, Artificial Sequence
  Oligonucleotide for detection of SNP TSC0006013
tttacctaacaca

SEQ ID NO: 187543 - DNA, 13 bp, Artificial Sequence
  Oligonucleotide for detection of SNP TSC0006013
tgcgtttggtaaa

SEQ ID NO: 187544 - DNA, 13 bp, Artificial Sequence
  Oligonucleotide for detection of SNP TSC0006013
tttaccaaacgca

SEQ ID NO: 187545 - DNA, 13 bp, Artificial Sequence
  Oligonucleotide for detection of SNP TSC0006013
tgcgttgggtaaa

SEQ ID NO: 187546 - DNA, 13 bp, Artificial Sequence
  Oligonucleotide for detection of SNP TSC0006013
tttacccaacgca

SEQ ID NO: 187547 - DNA, 13 bp, Artificial Sequence
  Oligonucleotide for detection of SNP TSC0006013
tgcgttaggtaaa

SEQ ID NO: 187548 - DNA, 13 bp, Artificial Sequence
  Oligonucleotide for detection of SNP TSC0006013
tttacctaacgca

SEQ ID NO: 187549 - DNA, 13 bp, Artificial Sequence
  Oligonucleotide for detection of SNP TSC0006013
tgtgtcgggtaaa

SEQ ID NO: 187550 - DNA, 13 bp, Artificial Sequence
  Oligonucleotide for detection of SNP TSC0006013
tttacccgacaca

SEQ ID NO: 187551 - DNA, 13 bp, Artificial Sequence
  Oligonucleotide for detection of SNP TSC0006013
tgtgttcggtaaa

SEQ ID NO: 187552 - DNA, 13 bp, Artificial Sequence
  Oligonucleotide for detection of SNP TSC0006013
tttaccgaacaca

SEQ ID NO: 187553 - DNA, 13 bp, Artificial Sequence
  Oligonucleotide for detection of SNP TSC0006013
tgcgtcgggtaaa

SEQ ID NO: 187554 - DNA, 13 bp, Artificial Sequence
  Oligonucleotide for detection of SNP TSC0006013
tttacccgacgca

SEQ ID NO: 187555 - DNA, 13 bp, Artificial Sequence
  Oligonucleotide for detection of SNP TSC0006013
tgcgttcggtaaa

SEQ ID NO: 187556 - DNA, 13 bp, Artificial Sequence
  Oligonucleotide for detection of SNP TSC0006013
tttaccgaacgca

SEQ ID NO: 187557 - DNA, 13 bp, Artificial Sequence
  Oligonucleotide for detection of SNP TSC0046219
tttttataagtaa

SEQ ID NO: 187558 - DNA, 13 bp, Artificial Sequence
  Oligonucleotide for detection of SNP TSC0046219
ttacttataaaaa

SEQ ID NO: 187559 - DNA, 13 bp, Artificial Sequence
  Oligonucleotide for detection of SNP TSC0046219
tttttagaagtaa

SEQ ID NO: 187560 - DNA, 13 bp, Artificial Sequence
  Oligonucleotide for detection of SNP TSC0046219
ttacttctaaaaa

SEQ ID NO: 187561 - DNA, 13 bp, Artificial Sequence
  Oligonucleotide for detection of SNP TSC0046219
ttatttatgagaa

SEQ ID NO: 187562 - DNA, 13 bp, Artificial Sequence
  Oligonucleotide for detection of SNP TSC0046219
ttctcataaataa

SEQ ID NO: 187563 - DNA, 13 bp, Artificial Sequence
  Oligonucleotide for detection of SNP TSC0046219
ttatttttgagaa

SEQ ID NO: 187564 - DNA, 13 bp, Artificial Sequence
  Oligonucleotide for detection of SNP TSC0046219
ttctcaaaaataa

SEQ ID NO: 187565 - DNA, 13 bp, Artificial Sequence
  Oligonucleotide for detection of SNP TSC0000096
tttttaattattg

SEQ ID NO: 187566 - DNA, 13 bp, Artificial Sequence
  Oligonucleotide for detection of SNP TSC0000096
caataattaaaaa

SEQ ID NO: 187567 - DNA, 13 bp, Artificial Sequence
  Oligonucleotide for detection of SNP TSC0000096
tttttatttattg

SEQ ID NO: 187568 - DNA, 13 bp, Artificial Sequence
  Oligonucleotide for detection of SNP TSC0000096
caataaataaaaa

SEQ ID NO: 187569 - DNA, 13 bp, Artificial Sequence
  Oligonucleotide for detection of SNP TSC0000096
tagtggttggaaa

SEQ ID NO: 187570 - DNA, 13 bp, Artificial Sequence
  Oligonucleotide for detection of SNP TSC0000096
tttccaaccacta

SEQ ID NO: 187571 - DNA, 13 bp, Artificial Sequence
  Oligonucleotide for detection of SNP TSC0000096
tagtggatggaaa

SEQ ID NO: 187572 - DNA, 13 bp, Artificial Sequence
  Oligonucleotide for detection of SNP TSC0000096
tttccatccacta

SEQ ID NO: 187573 - DNA, 13 bp, Artificial Sequence
  Oligonucleotide for detection of SNP TSC0006053
tgttttagaatag

SEQ ID NO: 187574 - DNA, 13 bp, Artificial Sequence
  Oligonucleotide for detection of SNP TSC0006053
ctattctaaaaca

SEQ ID NO: 187575 - DNA, 13 bp, Artificial Sequence
  Oligonucleotide for detection of SNP TSC0006053
tgttttggaatag

SEQ ID NO: 187576 - DNA, 13 bp, Artificial Sequence
  Oligonucleotide for detection of SNP TSC0006053
ctattccaaaaca

SEQ ID NO: 187577 - DNA, 13 bp, Artificial Sequence
  Oligonucleotide for detection of SNP TSC0006054
gttagttgagata

SEQ ID NO: 187578 - DNA, 13 bp, Artificial Sequence
  Oligonucleotide for detection of SNP TSC0006054
tatctcaactaac

SEQ ID NO: 187579 - DNA, 13 bp, Artificial Sequence
  Oligonucleotide for detection of SNP TSC0006054
gttagtcgagata

SEQ ID NO: 187580 - DNA, 13 bp, Artificial Sequence
  Oligonucleotide for detection of SNP TSC0006054
tatctcgactaac

SEQ ID NO: 187581 - DNA, 13 bp, Artificial Sequence
  Oligonucleotide for detection of SNP TSC0006054
tattttggttggy

SEQ ID NO: 187582 - DNA, 13 bp, Artificial Sequence
  Oligonucleotide for detection of SNP TSC0006054
rccaaccaaaata

SEQ ID NO: 187583 - DNA, 13 bp, Artificial Sequence
  Oligonucleotide for detection of SNP TSC0006054
tattttagttggy

SEQ ID NO: 187584 - DNA, 13 bp, Artificial Sequence
  Oligonucleotide for detection of SNP TSC0006054
rccaactaaaata

SEQ ID NO: 187585 - DNA, 13 bp, Artificial Sequence
  Oligonucleotide for detection of SNP TSC0006054
tatttcggttggy

SEQ ID NO: 187586 - DNA, 13 bp, Artificial Sequence
  Oligonucleotide for detection of SNP TSC0006054
rccaaccgaaata

SEQ ID NO: 187587 - DNA, 13 bp, Artificial Sequence
  Oligonucleotide for detection of SNP TSC0046227
aaattaaaaatat

SEQ ID NO: 187588 - DNA, 13 bp, Artificial Sequence
  Oligonucleotide for detection of SNP TSC0046227
atatttttaattt

SEQ ID NO: 187589 - DNA, 13 bp, Artificial Sequence
  Oligonucleotide for detection of SNP TSC0046228
ggttttataatta

SEQ ID NO: 187590 - DNA, 13 bp, Artificial Sequence
  Oligonucleotide for detection of SNP TSC0046228
taattataaaacc

SEQ ID NO: 187591 - DNA, 13 bp, Artificial Sequence
  Oligonucleotide for detection of SNP TSC0046228
ggttttgtaatta

SEQ ID NO: 187592 - DNA, 13 bp, Artificial Sequence
  Oligonucleotide for detection of SNP TSC0046228
taattacaaaacc

SEQ ID NO: 187593 - DNA, 13 bp, Artificial Sequence
  Oligonucleotide for detection of SNP TSC0046228
ggtttcgtaatta

SEQ ID NO: 187594 - DNA, 13 bp, Artificial Sequence
  Oligonucleotide for detection of SNP TSC0046228
taattacgaaacc

SEQ ID NO: 187595 - DNA, 13 bp, Artificial Sequence
  Oligonucleotide for detection of SNP TSC0046228
tgattgtgaggty

SEQ ID NO: 187596 - DNA, 13 bp, Artificial Sequence
  Oligonucleotide for detection of SNP TSC0046228
racctcacaatca

SEQ ID NO: 187597 - DNA, 13 bp, Artificial Sequence
  Oligonucleotide for detection of SNP TSC0046228
tgattgcgaggty

SEQ ID NO: 187598 - DNA, 13 bp, Artificial Sequence
  Oligonucleotide for detection of SNP TSC0046228
racctcgcaatca

SEQ ID NO: 187599 - DNA, 13 bp, Artificial Sequence
  Oligonucleotide for detection of SNP TSC0046229
gttatatgaaagy

SEQ ID NO: 187600 - DNA, 13 bp, Artificial Sequence
  Oligonucleotide for detection of SNP TSC0046229
rctttcatataac

SEQ ID NO: 187601 - DNA, 13 bp, Artificial Sequence
  Oligonucleotide for detection of SNP TSC0046229
gttatacgaaagy

SEQ ID NO: 187602 - DNA, 13 bp, Artificial Sequence
  Oligonucleotide for detection of SNP TSC0046229
rctttcgtataac

SEQ ID NO: 187603 - DNA, 13 bp, Artificial Sequence
  Oligonucleotide for detection of SNP TSC0046229
gtttttgtgtaay

SEQ ID NO: 187604 - DNA, 13 bp, Artificial Sequence
  Oligonucleotide for detection of SNP TSC0046229
rttacacaaaaac

SEQ ID NO: 187605 - DNA, 13 bp, Artificial Sequence
  Oligonucleotide for detection of SNP TSC0046229
gtttttatgtaay

SEQ ID NO: 187606 - DNA, 13 bp, Artificial Sequence
  Oligonucleotide for detection of SNP TSC0046229
rttacataaaaac

SEQ ID NO: 187607 - DNA, 13 bp, Artificial Sequence
  Oligonucleotide for detection of SNP TSC0046229
gttttcgtgtaay

SEQ ID NO: 187608 - DNA, 13 bp, Artificial Sequence
  Oligonucleotide for detection of SNP TSC0046229
rttacacgaaaac

SEQ ID NO: 187609 - DNA, 13 bp, Artificial Sequence
  Oligonucleotide for detection of SNP TSC0007370
ttgaattggttaa

SEQ ID NO: 187610 - DNA, 13 bp, Artificial Sequence
  Oligonucleotide for detection of SNP TSC0007370
ttaaccaattcaa

SEQ ID NO: 187611 - DNA, 13 bp, Artificial Sequence
  Oligonucleotide for detection of SNP TSC0007370
ttgaatgggttaa

SEQ ID NO: 187612 - DNA, 13 bp, Artificial Sequence
  Oligonucleotide for detection of SNP TSC0007370
ttaacccattcaa

SEQ ID NO: 187613 - DNA, 13 bp, Artificial Sequence
  Oligonucleotide for detection of SNP TSC0007370
ttgaacgggttaa

SEQ ID NO: 187614 - DNA, 13 bp, Artificial Sequence
  Oligonucleotide for detection of SNP TSC0007370
ttaacccgttcaa

SEQ ID NO: 187615 - DNA, 13 bp, Artificial Sequence
  Oligonucleotide for detection of SNP TSC0007370
ttgattagtttaa

SEQ ID NO: 187616 - DNA, 13 bp, Artificial Sequence
  Oligonucleotide for detection of SNP TSC0007370
ttaaactaatcaa

SEQ ID NO: 187617 - DNA, 13 bp, Artificial Sequence
  Oligonucleotide for detection of SNP TSC0007370
ttgatttgtttaa

SEQ ID NO: 187618 - DNA, 13 bp, Artificial Sequence
  Oligonucleotide for detection of SNP TSC0007370
ttaaacaaatcaa

SEQ ID NO: 187619 - DNA, 13 bp, Artificial Sequence
  Oligonucleotide for detection of SNP TSC0007370
ttgattcgtttaa

SEQ ID NO: 187620 - DNA, 13 bp, Artificial Sequence
  Oligonucleotide for detection of SNP TSC0007370
ttaaacgaatcaa

SEQ ID NO: 187621 - DNA, 13 bp, Artificial Sequence
  Oligonucleotide for detection of SNP TSC0007371
aaagtatgtgagt

SEQ ID NO: 187622 - DNA, 13 bp, Artificial Sequence
  Oligonucleotide for detection of SNP TSC0007371
actcacatacttt

SEQ ID NO: 187623 - DNA, 13 bp, Artificial Sequence
  Oligonucleotide for detection of SNP TSC0007371
aaagtacgtgagt

SEQ ID NO: 187624 - DNA, 13 bp, Artificial Sequence
  Oligonucleotide for detection of SNP TSC0007371
actcacgtacttt

SEQ ID NO: 187625 - DNA, 13 bp, Artificial Sequence
  Oligonucleotide for detection of SNP TSC0007371
aaagtatgcgagt

SEQ ID NO: 187626 - DNA, 13 bp, Artificial Sequence
  Oligonucleotide for detection of SNP TSC0007371
actcgcatacttt

SEQ ID NO: 187627 - DNA, 13 bp, Artificial Sequence
  Oligonucleotide for detection of SNP TSC0007371
aaagtacgcgagt

SEQ ID NO: 187628 - DNA, 13 bp, Artificial Sequence
  Oligonucleotide for detection of SNP TSC0007371
actcgcgtacttt

SEQ ID NO: 187629 - DNA, 13 bp, Artificial Sequence
  Oligonucleotide for detection of SNP TSC0007371
atttgtgtgtttt

SEQ ID NO: 187630 - DNA, 13 bp, Artificial Sequence
  Oligonucleotide for detection of SNP TSC0007371
aaaacacacaaat

SEQ ID NO: 187631 - DNA, 13 bp, Artificial Sequence
  Oligonucleotide for detection of SNP TSC0007371
atttgtatgtttt

SEQ ID NO: 187632 - DNA, 13 bp, Artificial Sequence
  Oligonucleotide for detection of SNP TSC0007371
aaaacatacaaat

SEQ ID NO: 187633 - DNA, 13 bp, Artificial Sequence
  Oligonucleotide for detection of SNP TSC0007371
attcgtgtgtttt

SEQ ID NO: 187634 - DNA, 13 bp, Artificial Sequence
  Oligonucleotide for detection of SNP TSC0007371
aaaacacacgaat

SEQ ID NO: 187635 - DNA, 13 bp, Artificial Sequence
  Oligonucleotide for detection of SNP TSC0007371
attcgtatgtttt

SEQ ID NO: 187636 - DNA, 13 bp, Artificial Sequence
  Oligonucleotide for detection of SNP TSC0007371
aaaacatacgaat

SEQ ID NO: 187637 - DNA, 13 bp, Artificial Sequence
  Oligonucleotide for detection of SNP TSC0007371
atttgcgtgtttt

SEQ ID NO: 187638 - DNA, 13 bp, Artificial Sequence
  Oligonucleotide for detection of SNP TSC0007371
aaaacacgcaaat

SEQ ID NO: 187639 - DNA, 13 bp, Artificial Sequence
  Oligonucleotide for detection of SNP TSC0007371
attcgcgtgtttt

SEQ ID NO: 187640 - DNA, 13 bp, Artificial Sequence
  Oligonucleotide for detection of SNP TSC0007371
aaaacacgcgaat

SEQ ID NO: 187641 - DNA, 13 bp, Artificial Sequence
  Oligonucleotide for detection of SNP TSC0046230
aaaagtatgatay

SEQ ID NO: 187642 - DNA, 13 bp, Artificial Sequence
  Oligonucleotide for detection of SNP TSC0046230
rtatcatactttt

SEQ ID NO: 187643 - DNA, 13 bp, Artificial Sequence
  Oligonucleotide for detection of SNP TSC0046230
aaaagtgtgatay

SEQ ID NO: 187644 - DNA, 13 bp, Artificial Sequence
  Oligonucleotide for detection of SNP TSC0046230
rtatcacactttt

SEQ ID NO: 187645 - DNA, 13 bp, Artificial Sequence
  Oligonucleotide for detection of SNP TSC0000542
tttgtcgtattty

SEQ ID NO: 187646 - DNA, 13 bp, Artificial Sequence
  Oligonucleotide for detection of SNP TSC0000542
raaatacgacaaa

SEQ ID NO: 187647 - DNA, 13 bp, Artificial Sequence
  Oligonucleotide for detection of SNP TSC0000542
ggggtgtgatagg

SEQ ID NO: 187648 - DNA, 13 bp, Artificial Sequence
  Oligonucleotide for detection of SNP TSC0000542
cctatcacacccc

SEQ ID NO: 187649 - DNA, 13 bp, Artificial Sequence
  Oligonucleotide for detection of SNP TSC0000542
ggggtgcgatagg

SEQ ID NO: 187650 - DNA, 13 bp, Artificial Sequence
  Oligonucleotide for detection of SNP TSC0000542
cctatcgcacccc

SEQ ID NO: 187651 - DNA, 13 bp, Artificial Sequence
  Oligonucleotide for detection of SNP TSC0046231
ggaagaatagtag

SEQ ID NO: 187652 - DNA, 13 bp, Artificial Sequence
  Oligonucleotide for detection of SNP TSC0046231
ctactattcttcc

SEQ ID NO: 187653 - DNA, 13 bp, Artificial Sequence
  Oligonucleotide for detection of SNP TSC0046231
ggaagagtagtag

SEQ ID NO: 187654 - DNA, 13 bp, Artificial Sequence
  Oligonucleotide for detection of SNP TSC0046231
ctactactcttcc

SEQ ID NO: 187655 - DNA, 13 bp, Artificial Sequence
  Oligonucleotide for detection of SNP TSC0000115
tgaagtttgggaa

SEQ ID NO: 187656 - DNA, 13 bp, Artificial Sequence
  Oligonucleotide for detection of SNP TSC0000115
ttcccaaacttca

SEQ ID NO: 187657 - DNA, 13 bp, Artificial Sequence
  Oligonucleotide for detection of SNP TSC0000115
tgaagtgtgggaa

SEQ ID NO: 187658 - DNA, 13 bp, Artificial Sequence
  Oligonucleotide for detection of SNP TSC0000115
ttcccacacttca

SEQ ID NO: 187659 - DNA, 13 bp, Artificial Sequence
  Oligonucleotide for detection of SNP TSC0000115
tgaagcgtgggaa

SEQ ID NO: 187660 - DNA, 13 bp, Artificial Sequence
  Oligonucleotide for detection of SNP TSC0000115
ttcccacgcttca

SEQ ID NO: 187661 - DNA, 13 bp, Artificial Sequence
  Oligonucleotide for detection of SNP TSC0046235
atgaaagaatggy

SEQ ID NO: 187662 - DNA, 13 bp, Artificial Sequence
  Oligonucleotide for detection of SNP TSC0046235
rccattctttcat

SEQ ID NO: 187663 - DNA, 13 bp, Artificial Sequence
  Oligonucleotide for detection of SNP TSC0046235
atgaaaaaatggy

SEQ ID NO: 187664 - DNA, 13 bp, Artificial Sequence
  Oligonucleotide for detection of SNP TSC0046235
rccattttttcat

SEQ ID NO: 187665 - DNA, 13 bp, Artificial Sequence
  Oligonucleotide for detection of SNP TSC0046236
ttttatggatttt

SEQ ID NO: 187666 - DNA, 13 bp, Artificial Sequence
  Oligonucleotide for detection of SNP TSC0046236
aaaatccataaaa

SEQ ID NO: 187667 - DNA, 13 bp, Artificial Sequence
  Oligonucleotide for detection of SNP TSC0046236
ttttatagatttt

SEQ ID NO: 187668 - DNA, 13 bp, Artificial Sequence
  Oligonucleotide for detection of SNP TSC0046236
aaaatctataaaa

SEQ ID NO: 187669 - DNA, 13 bp, Artificial Sequence
  Oligonucleotide for detection of SNP TSC0046237
aaggtatggataa

SEQ ID NO: 187670 - DNA, 13 bp, Artificial Sequence
  Oligonucleotide for detection of SNP TSC0046237
ttatccatacctt

SEQ ID NO: 187671 - DNA, 13 bp, Artificial Sequence
  Oligonucleotide for detection of SNP TSC0046237
aaggtacggataa

SEQ ID NO: 187672 - DNA, 13 bp, Artificial Sequence
  Oligonucleotide for detection of SNP TSC0046237
ttatccgtacctt

SEQ ID NO: 187673 - DNA, 13 bp, Artificial Sequence
  Oligonucleotide for detection of SNP TSC0046238
tatgtatgtgtat

SEQ ID NO: 187674 - DNA, 13 bp, Artificial Sequence
  Oligonucleotide for detection of SNP TSC0046238
atacacatacata

SEQ ID NO: 187675 - DNA, 13 bp, Artificial Sequence
  Oligonucleotide for detection of SNP TSC0046238
tatgtacgtgtat

SEQ ID NO: 187676 - DNA, 13 bp, Artificial Sequence
  Oligonucleotide for detection of SNP TSC0046238
atacacgtacata

SEQ ID NO: 187677 - DNA, 13 bp, Artificial Sequence
  Oligonucleotide for detection of SNP TSC0046239
aagtgagatattt

SEQ ID NO: 187678 - DNA, 13 bp, Artificial Sequence
  Oligonucleotide for detection of SNP TSC0046239
aaatatctcactt

SEQ ID NO: 187679 - DNA, 13 bp, Artificial Sequence
  Oligonucleotide for detection of SNP TSC0046239
aagtgaaatattt

SEQ ID NO: 187680 - DNA, 13 bp, Artificial Sequence
  Oligonucleotide for detection of SNP TSC0046239
aaatatttcactt

SEQ ID NO: 187681 - DNA, 13 bp, Artificial Sequence
  Oligonucleotide for detection of SNP TSC0046242
gtgttttgttgay

SEQ ID NO: 187682 - DNA, 13 bp, Artificial Sequence
  Oligonucleotide for detection of SNP TSC0046242
rtcaacaaaacac

SEQ ID NO: 187683 - DNA, 13 bp, Artificial Sequence
  Oligonucleotide for detection of SNP TSC0046242
gcgttttgttgay

SEQ ID NO: 187684 - DNA, 13 bp, Artificial Sequence
  Oligonucleotide for detection of SNP TSC0046242
rtcaacaaaacgc

SEQ ID NO: 187685 - DNA, 13 bp, Artificial Sequence
  Oligonucleotide for detection of SNP TSC0046242
gtgtttcgttgay

SEQ ID NO: 187686 - DNA, 13 bp, Artificial Sequence
  Oligonucleotide for detection of SNP TSC0046242
rtcaacgaaacac

SEQ ID NO: 187687 - DNA, 13 bp, Artificial Sequence
  Oligonucleotide for detection of SNP TSC0046242
gtgttttgtcgay

SEQ ID NO: 187688 - DNA, 13 bp, Artificial Sequence
  Oligonucleotide for detection of SNP TSC0046242
rtcgacaaaacac

SEQ ID NO: 187689 - DNA, 13 bp, Artificial Sequence
  Oligonucleotide for detection of SNP TSC0046242
gcgttttgtcgay

SEQ ID NO: 187690 - DNA, 13 bp, Artificial Sequence
  Oligonucleotide for detection of SNP TSC0046242
rtcgacaaaacgc

SEQ ID NO: 187691 - DNA, 13 bp, Artificial Sequence
  Oligonucleotide for detection of SNP TSC0046242
gcgtttcgttgay

SEQ ID NO: 187692 - DNA, 13 bp, Artificial Sequence
  Oligonucleotide for detection of SNP TSC0046242
rtcaacgaaacgc

SEQ ID NO: 187693 - DNA, 13 bp, Artificial Sequence
  Oligonucleotide for detection of SNP TSC0046242
gtgtttcgtcgay

SEQ ID NO: 187694 - DNA, 13 bp, Artificial Sequence
  Oligonucleotide for detection of SNP TSC0046242
rtcgacgaaacac

SEQ ID NO: 187695 - DNA, 13 bp, Artificial Sequence
  Oligonucleotide for detection of SNP TSC0046242
gcgtttcgtcgay

SEQ ID NO: 187696 - DNA, 13 bp, Artificial Sequence
  Oligonucleotide for detection of SNP TSC0046242
rtcgacgaaacgc

SEQ ID NO: 187697 - DNA, 13 bp, Artificial Sequence
  Oligonucleotide for detection of SNP TSC0046242
gttggtggaatgy

SEQ ID NO: 187698 - DNA, 13 bp, Artificial Sequence
  Oligonucleotide for detection of SNP TSC0046242
rcattccaccaac

SEQ ID NO: 187699 - DNA, 13 bp, Artificial Sequence
  Oligonucleotide for detection of SNP TSC0046242
gttggtagaatgy

SEQ ID NO: 187700 - DNA, 13 bp, Artificial Sequence
  Oligonucleotide for detection of SNP TSC0046242
rcattctaccaac

SEQ ID NO: 187701 - DNA, 13 bp, Artificial Sequence
  Oligonucleotide for detection of SNP TSC0046242
gtcggtggaatgy

SEQ ID NO: 187702 - DNA, 13 bp, Artificial Sequence
  Oligonucleotide for detection of SNP TSC0046242
rcattccaccgac

SEQ ID NO: 187703 - DNA, 13 bp, Artificial Sequence
  Oligonucleotide for detection of SNP TSC0046242
gtcggtagaatgy

SEQ ID NO: 187704 - DNA, 13 bp, Artificial Sequence
  Oligonucleotide for detection of SNP TSC0046242
rcattctaccgac

SEQ ID NO: 187705 - DNA, 13 bp, Artificial Sequence
  Oligonucleotide for detection of SNP TSC0046242
gttggcggaatgy

SEQ ID NO: 187706 - DNA, 13 bp, Artificial Sequence
  Oligonucleotide for detection of SNP TSC0046242
rcattccgccaac

SEQ ID NO: 187707 - DNA, 13 bp, Artificial Sequence
  Oligonucleotide for detection of SNP TSC0046242
gttggtagaacgy

SEQ ID NO: 187708 - DNA, 13 bp, Artificial Sequence
  Oligonucleotide for detection of SNP TSC0046242
rcgttctaccaac

SEQ ID NO: 187709 - DNA, 13 bp, Artificial Sequence
  Oligonucleotide for detection of SNP TSC0046242
gttggtggaacgy

SEQ ID NO: 187710 - DNA, 13 bp, Artificial Sequence
  Oligonucleotide for detection of SNP TSC0046242
rcgttccaccaac

SEQ ID NO: 187711 - DNA, 13 bp, Artificial Sequence
  Oligonucleotide for detection of SNP TSC0046242
gtcggtagaacgy

SEQ ID NO: 187712 - DNA, 13 bp, Artificial Sequence
  Oligonucleotide for detection of SNP TSC0046242
rcgttctaccgac

SEQ ID NO: 187713 - DNA, 13 bp, Artificial Sequence
  Oligonucleotide for detection of SNP TSC0046242
gtcggcggaatgy

SEQ ID NO: 187714 - DNA, 13 bp, Artificial Sequence
  Oligonucleotide for detection of SNP TSC0046242
rcattccgccgac

SEQ ID NO: 187715 - DNA, 13 bp, Artificial Sequence
  Oligonucleotide for detection of SNP TSC0046242
gtcggtggaacgy

SEQ ID NO: 187716 - DNA, 13 bp, Artificial Sequence
  Oligonucleotide for detection of SNP TSC0046242
rcgttccaccgac

SEQ ID NO: 187717 - DNA, 13 bp, Artificial Sequence
  Oligonucleotide for detection of SNP TSC0046242
gttggcggaacgy

SEQ ID NO: 187718 - DNA, 13 bp, Artificial Sequence
  Oligonucleotide for detection of SNP TSC0046242
rcgttccgccaac

SEQ ID NO: 187719 - DNA, 13 bp, Artificial Sequence
  Oligonucleotide for detection of SNP TSC0046242
gtcggcggaacgy

SEQ ID NO: 187720 - DNA, 13 bp, Artificial Sequence
  Oligonucleotide for detection of SNP TSC0046242
rcgttccgccgac

SEQ ID NO: 187721 - DNA, 13 bp, Artificial Sequence
  Oligonucleotide for detection of SNP TSC0046243
ttattaatgtatt

SEQ ID NO: 187722 - DNA, 13 bp, Artificial Sequence
  Oligonucleotide for detection of SNP TSC0046243
aatacattaataa

SEQ ID NO: 187723 - DNA, 13 bp, Artificial Sequence
  Oligonucleotide for detection of SNP TSC0046243
ttattagtgtatt

SEQ ID NO: 187724 - DNA, 13 bp, Artificial Sequence
  Oligonucleotide for detection of SNP TSC0046243
aatacactaataa

SEQ ID NO: 187725 - DNA, 13 bp, Artificial Sequence
  Oligonucleotide for detection of SNP TSC0046244
aaaagaaattaag

SEQ ID NO: 187726 - DNA, 13 bp, Artificial Sequence
  Oligonucleotide for detection of SNP TSC0046244
cttaatttctttt

SEQ ID NO: 187727 - DNA, 13 bp, Artificial Sequence
  Oligonucleotide for detection of SNP TSC0046244
aaaagatattaag

SEQ ID NO: 187728 - DNA, 13 bp, Artificial Sequence
  Oligonucleotide for detection of SNP TSC0046244
cttaatatctttt

SEQ ID NO: 187729 - DNA, 13 bp, Artificial Sequence
  Oligonucleotide for detection of SNP TSC0046246
agggttattagaa

SEQ ID NO: 187730 - DNA, 13 bp, Artificial Sequence
  Oligonucleotide for detection of SNP TSC0046246
ttctaataaccct

SEQ ID NO: 187731 - DNA, 13 bp, Artificial Sequence
  Oligonucleotide for detection of SNP TSC0046246
agggttgttagaa

SEQ ID NO: 187732 - DNA, 13 bp, Artificial Sequence
  Oligonucleotide for detection of SNP TSC0046246
ttctaacaaccct

SEQ ID NO: 187733 - DNA, 13 bp, Artificial Sequence
  Oligonucleotide for detection of SNP TSC0046246
agggtcgttagaa

SEQ ID NO: 187734 - DNA, 13 bp, Artificial Sequence
  Oligonucleotide for detection of SNP TSC0046246
ttctaacgaccct

SEQ ID NO: 187735 - DNA, 13 bp, Artificial Sequence
  Oligonucleotide for detection of SNP TSC0046246
ttttaatgatttt

SEQ ID NO: 187736 - DNA, 13 bp, Artificial Sequence
  Oligonucleotide for detection of SNP TSC0046246
aaaatcattaaaa

SEQ ID NO: 187737 - DNA, 13 bp, Artificial Sequence
  Oligonucleotide for detection of SNP TSC0046246
ttttaacgatttt

SEQ ID NO: 187738 - DNA, 13 bp, Artificial Sequence
  Oligonucleotide for detection of SNP TSC0046246
aaaatcgttaaaa

SEQ ID NO: 187739 - DNA, 13 bp, Artificial Sequence
  Oligonucleotide for detection of SNP TSC0046249
gaagggaaggtgy

SEQ ID NO: 187740 - DNA, 13 bp, Artificial Sequence
  Oligonucleotide for detection of SNP TSC0046249
rcaccttcccttc

SEQ ID NO: 187741 - DNA, 13 bp, Artificial Sequence
  Oligonucleotide for detection of SNP TSC0046249
gaaggggaggtgy

SEQ ID NO: 187742 - DNA, 13 bp, Artificial Sequence
  Oligonucleotide for detection of SNP TSC0046249
rcacctccccttc

SEQ ID NO: 187743 - DNA, 13 bp, Artificial Sequence
  Oligonucleotide for detection of SNP TSC0046250
ataattagaaata

SEQ ID NO: 187744 - DNA, 13 bp, Artificial Sequence
  Oligonucleotide for detection of SNP TSC0046250
tatttctaattat

SEQ ID NO: 187745 - DNA, 13 bp, Artificial Sequence
  Oligonucleotide for detection of SNP TSC0046250
ataatttgaaata

SEQ ID NO: 187746 - DNA, 13 bp, Artificial Sequence
  Oligonucleotide for detection of SNP TSC0046250
tatttcaaattat

SEQ ID NO: 187747 - DNA, 13 bp, Artificial Sequence
  Oligonucleotide for detection of SNP TSC0046250
tgtttttagttat

SEQ ID NO: 187748 - DNA, 13 bp, Artificial Sequence
  Oligonucleotide for detection of SNP TSC0046250
ataactaaaaaca

SEQ ID NO: 187749 - DNA, 13 bp, Artificial Sequence
  Oligonucleotide for detection of SNP TSC0046250
tgttttaagttat

SEQ ID NO: 187750 - DNA, 13 bp, Artificial Sequence
  Oligonucleotide for detection of SNP TSC0046250
ataacttaaaaca

SEQ ID NO: 187751 - DNA, 13 bp, Artificial Sequence
  Oligonucleotide for detection of SNP TSC0046251
tttgtgaaagttt

SEQ ID NO: 187752 - DNA, 13 bp, Artificial Sequence
  Oligonucleotide for detection of SNP TSC0046251
aaactttcacaaa

SEQ ID NO: 187753 - DNA, 13 bp, Artificial Sequence
  Oligonucleotide for detection of SNP TSC0046251
tttgtggaagttt

SEQ ID NO: 187754 - DNA, 13 bp, Artificial Sequence
  Oligonucleotide for detection of SNP TSC0046251
aaacttccacaaa

SEQ ID NO: 187755 - DNA, 13 bp, Artificial Sequence
  Oligonucleotide for detection of SNP TSC0046252
aattatcgtagtt

SEQ ID NO: 187756 - DNA, 13 bp, Artificial Sequence
  Oligonucleotide for detection of SNP TSC0046252
aactacgataatt

SEQ ID NO: 187757 - DNA, 13 bp, Artificial Sequence
  Oligonucleotide for detection of SNP TSC0046252
agttatgataatt

SEQ ID NO: 187758 - DNA, 13 bp, Artificial Sequence
  Oligonucleotide for detection of SNP TSC0046252
aattatcataact

SEQ ID NO: 187759 - DNA, 13 bp, Artificial Sequence
  Oligonucleotide for detection of SNP TSC0046252
agttataataatt

SEQ ID NO: 187760 - DNA, 13 bp, Artificial Sequence
  Oligonucleotide for detection of SNP TSC0046252
aattattataact

SEQ ID NO: 187761 - DNA, 13 bp, Artificial Sequence
  Oligonucleotide for detection of SNP TSC0046252
agttacgataatt

SEQ ID NO: 187762 - DNA, 13 bp, Artificial Sequence
  Oligonucleotide for detection of SNP TSC0046252
aattatcgtaact

SEQ ID NO: 187763 - DNA, 13 bp, Artificial Sequence
  Oligonucleotide for detection of SNP TSC0046253
tttgaagaataaa

SEQ ID NO: 187764 - DNA, 13 bp, Artificial Sequence
  Oligonucleotide for detection of SNP TSC0046253
tttattcttcaaa

SEQ ID NO: 187765 - DNA, 13 bp, Artificial Sequence
  Oligonucleotide for detection of SNP TSC0046253
tttgaaaaataaa

SEQ ID NO: 187766 - DNA, 13 bp, Artificial Sequence
  Oligonucleotide for detection of SNP TSC0046253
tttatttttcaaa

SEQ ID NO: 187767 - DNA, 13 bp, Artificial Sequence
  Oligonucleotide for detection of SNP TSC0007533
taaggtaatttta

SEQ ID NO: 187768 - DNA, 13 bp, Artificial Sequence
  Oligonucleotide for detection of SNP TSC0007533
taaaattacctta

SEQ ID NO: 187769 - DNA, 13 bp, Artificial Sequence
  Oligonucleotide for detection of SNP TSC0007533
taaggtgatttta

SEQ ID NO: 187770 - DNA, 13 bp, Artificial Sequence
  Oligonucleotide for detection of SNP TSC0007533
taaaatcacctta

SEQ ID NO: 187771 - DNA, 13 bp, Artificial Sequence
  Oligonucleotide for detection of SNP TSC0007534
gttgaggaaatgt

SEQ ID NO: 187772 - DNA, 13 bp, Artificial Sequence
  Oligonucleotide for detection of SNP TSC0007534
acatttcctcaac

SEQ ID NO: 187773 - DNA, 13 bp, Artificial Sequence
  Oligonucleotide for detection of SNP TSC0007534
gttgagaaaatgt

SEQ ID NO: 187774 - DNA, 13 bp, Artificial Sequence
  Oligonucleotide for detection of SNP TSC0007534
acattttctcaac

SEQ ID NO: 187775 - DNA, 13 bp, Artificial Sequence
  Oligonucleotide for detection of SNP TSC0046254
aaaaggtttttgt

SEQ ID NO: 187776 - DNA, 13 bp, Artificial Sequence
  Oligonucleotide for detection of SNP TSC0046254
acaaaaacctttt

SEQ ID NO: 187777 - DNA, 13 bp, Artificial Sequence
  Oligonucleotide for detection of SNP TSC0046254
aaaaggattttgt

SEQ ID NO: 187778 - DNA, 13 bp, Artificial Sequence
  Oligonucleotide for detection of SNP TSC0046254
acaaaatcctttt

SEQ ID NO: 187779 - DNA, 13 bp, Artificial Sequence
  Oligonucleotide for detection of SNP TSC0046255
ataatgtggttty

SEQ ID NO: 187780 - DNA, 13 bp, Artificial Sequence
  Oligonucleotide for detection of SNP TSC0046255
raaaccacattat

SEQ ID NO: 187781 - DNA, 13 bp, Artificial Sequence
  Oligonucleotide for detection of SNP TSC0046255
ataatgcggttty

SEQ ID NO: 187782 - DNA, 13 bp, Artificial Sequence
  Oligonucleotide for detection of SNP TSC0046255
raaaccgcattat

SEQ ID NO: 187783 - DNA, 13 bp, Artificial Sequence
  Oligonucleotide for detection of SNP TSC0046255
gaaattgtattat

SEQ ID NO: 187784 - DNA, 13 bp, Artificial Sequence
  Oligonucleotide for detection of SNP TSC0046255
ataatacaatttc

SEQ ID NO: 187785 - DNA, 13 bp, Artificial Sequence
  Oligonucleotide for detection of SNP TSC0046255
gaaattatattat

SEQ ID NO: 187786 - DNA, 13 bp, Artificial Sequence
  Oligonucleotide for detection of SNP TSC0046255
ataatataatttc

SEQ ID NO: 187787 - DNA, 13 bp, Artificial Sequence
  Oligonucleotide for detection of SNP TSC0046255
gaaatcgtattat

SEQ ID NO: 187788 - DNA, 13 bp, Artificial Sequence
  Oligonucleotide for detection of SNP TSC0046255
ataatacgatttc

SEQ ID NO: 187789 - DNA, 13 bp, Artificial Sequence
  Oligonucleotide for detection of SNP TSC0046256
atatattgattaa

SEQ ID NO: 187790 - DNA, 13 bp, Artificial Sequence
  Oligonucleotide for detection of SNP TSC0046256
ttaatcaatatat

SEQ ID NO: 187791 - DNA, 13 bp, Artificial Sequence
  Oligonucleotide for detection of SNP TSC0046256
atatatcgattaa

SEQ ID NO: 187792 - DNA, 13 bp, Artificial Sequence
  Oligonucleotide for detection of SNP TSC0046256
ttaatcgatatat

SEQ ID NO: 187793 - DNA, 13 bp, Artificial Sequence
  Oligonucleotide for detection of SNP TSC0046256
ttggttggtgtgt

SEQ ID NO: 187794 - DNA, 13 bp, Artificial Sequence
  Oligonucleotide for detection of SNP TSC0046256
acacaccaaccaa

SEQ ID NO: 187795 - DNA, 13 bp, Artificial Sequence
  Oligonucleotide for detection of SNP TSC0046256
ttggttagtgtgt

SEQ ID NO: 187796 - DNA, 13 bp, Artificial Sequence
  Oligonucleotide for detection of SNP TSC0046256
acacactaaccaa

SEQ ID NO: 187797 - DNA, 13 bp, Artificial Sequence
  Oligonucleotide for detection of SNP TSC0046256
ttggtcggtgtgt

SEQ ID NO: 187798 - DNA, 13 bp, Artificial Sequence
  Oligonucleotide for detection of SNP TSC0046256
acacaccgaccaa

SEQ ID NO: 187799 - DNA, 13 bp, Artificial Sequence
  Oligonucleotide for detection of SNP TSC0046257
aattataaaagat

SEQ ID NO: 187800 - DNA, 13 bp, Artificial Sequence
  Oligonucleotide for detection of SNP TSC0046257
atcttttataatt

SEQ ID NO: 187801 - DNA, 13 bp, Artificial Sequence
  Oligonucleotide for detection of SNP TSC0046257
aattatgaaagat

SEQ ID NO: 187802 - DNA, 13 bp, Artificial Sequence
  Oligonucleotide for detection of SNP TSC0046257
atctttcataatt

SEQ ID NO: 187803 - DNA, 13 bp, Artificial Sequence
  Oligonucleotide for detection of SNP TSC0046257
aattacgaaagat

SEQ ID NO: 187804 - DNA, 13 bp, Artificial Sequence
  Oligonucleotide for detection of SNP TSC0046257
atctttcgtaatt

SEQ ID NO: 187805 - DNA, 13 bp, Artificial Sequence
  Oligonucleotide for detection of SNP TSC0046258
tggttaattatag

SEQ ID NO: 187806 - DNA, 13 bp, Artificial Sequence
  Oligonucleotide for detection of SNP TSC0046258
ctataattaacca

SEQ ID NO: 187807 - DNA, 13 bp, Artificial Sequence
  Oligonucleotide for detection of SNP TSC0046258
tggttatttatag

SEQ ID NO: 187808 - DNA, 13 bp, Artificial Sequence
  Oligonucleotide for detection of SNP TSC0046258
ctataaataacca

SEQ ID NO: 187809 - DNA, 13 bp, Artificial Sequence
  Oligonucleotide for detection of SNP TSC0046258
ttgtagttggtta

SEQ ID NO: 187810 - DNA, 13 bp, Artificial Sequence
  Oligonucleotide for detection of SNP TSC0046258
taaccaactacaa

SEQ ID NO: 187811 - DNA, 13 bp, Artificial Sequence
  Oligonucleotide for detection of SNP TSC0046258
ttgtaggtggtta

SEQ ID NO: 187812 - DNA, 13 bp, Artificial Sequence
  Oligonucleotide for detection of SNP TSC0046258
taaccacctacaa

SEQ ID NO: 187813 - DNA, 13 bp, Artificial Sequence
  Oligonucleotide for detection of SNP TSC0001438
attataatttgag

SEQ ID NO: 187814 - DNA, 13 bp, Artificial Sequence
  Oligonucleotide for detection of SNP TSC0001438
ctcaaattataat

SEQ ID NO: 187815 - DNA, 13 bp, Artificial Sequence
  Oligonucleotide for detection of SNP TSC0001438
attatagtttgag

SEQ ID NO: 187816 - DNA, 13 bp, Artificial Sequence
  Oligonucleotide for detection of SNP TSC0001438
ctcaaactataat

SEQ ID NO: 187817 - DNA, 13 bp, Artificial Sequence
  Oligonucleotide for detection of SNP TSC0001438
attataattcgag

SEQ ID NO: 187818 - DNA, 13 bp, Artificial Sequence
  Oligonucleotide for detection of SNP TSC0001438
ctcgaattataat

SEQ ID NO: 187819 - DNA, 13 bp, Artificial Sequence
  Oligonucleotide for detection of SNP TSC0001438
attatagttcgag

SEQ ID NO: 187820 - DNA, 13 bp, Artificial Sequence
  Oligonucleotide for detection of SNP TSC0001438
ctcgaactataat

SEQ ID NO: 187821 - DNA, 13 bp, Artificial Sequence
  Oligonucleotide for detection of SNP TSC0001439
tgtgttgagggag

SEQ ID NO: 187822 - DNA, 13 bp, Artificial Sequence
  Oligonucleotide for detection of SNP TSC0001439
ctccctcaacaca

SEQ ID NO: 187823 - DNA, 13 bp, Artificial Sequence
  Oligonucleotide for detection of SNP TSC0001439
tgtgttaagggag

SEQ ID NO: 187824 - DNA, 13 bp, Artificial Sequence
  Oligonucleotide for detection of SNP TSC0001439
ctcccttaacaca

SEQ ID NO: 187825 - DNA, 13 bp, Artificial Sequence
  Oligonucleotide for detection of SNP TSC0001439
tgtgtcgagggag

SEQ ID NO: 187826 - DNA, 13 bp, Artificial Sequence
  Oligonucleotide for detection of SNP TSC0001439
ctccctcgacaca

SEQ ID NO: 187827 - DNA, 13 bp, Artificial Sequence
  Oligonucleotide for detection of SNP TSC0000228
atggttattgttt

SEQ ID NO: 187828 - DNA, 13 bp, Artificial Sequence
  Oligonucleotide for detection of SNP TSC0000228
aaacaataaccat

SEQ ID NO: 187829 - DNA, 13 bp, Artificial Sequence
  Oligonucleotide for detection of SNP TSC0000228
atggttgttgttt

SEQ ID NO: 187830 - DNA, 13 bp, Artificial Sequence
  Oligonucleotide for detection of SNP TSC0000228
aaacaacaaccat

SEQ ID NO: 187831 - DNA, 13 bp, Artificial Sequence
  Oligonucleotide for detection of SNP TSC0000228
atggtcgttgttt

SEQ ID NO: 187832 - DNA, 13 bp, Artificial Sequence
  Oligonucleotide for detection of SNP TSC0000228
aaacaacgaccat

SEQ ID NO: 187833 - DNA, 13 bp, Artificial Sequence
  Oligonucleotide for detection of SNP TSC0000228
agatagtggttat

SEQ ID NO: 187834 - DNA, 13 bp, Artificial Sequence
  Oligonucleotide for detection of SNP TSC0000228
ataaccactatct

SEQ ID NO: 187835 - DNA, 13 bp, Artificial Sequence
  Oligonucleotide for detection of SNP TSC0000228
agatagcggttat

SEQ ID NO: 187836 - DNA, 13 bp, Artificial Sequence
  Oligonucleotide for detection of SNP TSC0000228
ataaccgctatct

SEQ ID NO: 187837 - DNA, 13 bp, Artificial Sequence
  Oligonucleotide for detection of SNP TSC0046259
gtgcgtatgtgta

SEQ ID NO: 187838 - DNA, 13 bp, Artificial Sequence
  Oligonucleotide for detection of SNP TSC0046259
tacacatacgcac

SEQ ID NO: 187839 - DNA, 13 bp, Artificial Sequence
  Oligonucleotide for detection of SNP TSC0046259
gtgcgtgtgtgta

SEQ ID NO: 187840 - DNA, 13 bp, Artificial Sequence
  Oligonucleotide for detection of SNP TSC0046259
tacacacacgcac

SEQ ID NO: 187841 - DNA, 13 bp, Artificial Sequence
  Oligonucleotide for detection of SNP TSC0046259
gtgtgtacgtgta

SEQ ID NO: 187842 - DNA, 13 bp, Artificial Sequence
  Oligonucleotide for detection of SNP TSC0046259
tacacgtacacac

SEQ ID NO: 187843 - DNA, 13 bp, Artificial Sequence
  Oligonucleotide for detection of SNP TSC0046259
gtgtgtatgcgta

SEQ ID NO: 187844 - DNA, 13 bp, Artificial Sequence
  Oligonucleotide for detection of SNP TSC0046259
tacgcatacacac

SEQ ID NO: 187845 - DNA, 13 bp, Artificial Sequence
  Oligonucleotide for detection of SNP TSC0046259
gtgtgtgcgtgta

SEQ ID NO: 187846 - DNA, 13 bp, Artificial Sequence
  Oligonucleotide for detection of SNP TSC0046259
tacacgcacacac

SEQ ID NO: 187847 - DNA, 13 bp, Artificial Sequence
  Oligonucleotide for detection of SNP TSC0046259
gtgcgtacgtgta

SEQ ID NO: 187848 - DNA, 13 bp, Artificial Sequence
  Oligonucleotide for detection of SNP TSC0046259
tacacgtacgcac

SEQ ID NO: 187849 - DNA, 13 bp, Artificial Sequence
  Oligonucleotide for detection of SNP TSC0046259
gtgtgtgtgcgta

SEQ ID NO: 187850 - DNA, 13 bp, Artificial Sequence
  Oligonucleotide for detection of SNP TSC0046259
tacgcacacacac

SEQ ID NO: 187851 - DNA, 13 bp, Artificial Sequence
  Oligonucleotide for detection of SNP TSC0046259
gtgcgtatgcgta

SEQ ID NO: 187852 - DNA, 13 bp, Artificial Sequence
  Oligonucleotide for detection of SNP TSC0046259
tacgcatacgcac

SEQ ID NO: 187853 - DNA, 13 bp, Artificial Sequence
  Oligonucleotide for detection of SNP TSC0046259
gtgcgcgtgtgta

SEQ ID NO: 187854 - DNA, 13 bp, Artificial Sequence
  Oligonucleotide for detection of SNP TSC0046259
tacacacgcgcac

SEQ ID NO: 187855 - DNA, 13 bp, Artificial Sequence
  Oligonucleotide for detection of SNP TSC0046259
gtgtgtacgcgta

SEQ ID NO: 187856 - DNA, 13 bp, Artificial Sequence
  Oligonucleotide for detection of SNP TSC0046259
tacgcgtacacac

SEQ ID NO: 187857 - DNA, 13 bp, Artificial Sequence
  Oligonucleotide for detection of SNP TSC0046259
gtgcgtgcgtgta

SEQ ID NO: 187858 - DNA, 13 bp, Artificial Sequence
  Oligonucleotide for detection of SNP TSC0046259
tacacgcacgcac

SEQ ID NO: 187859 - DNA, 13 bp, Artificial Sequence
  Oligonucleotide for detection of SNP TSC0046259
gtgcgtacgcgta

SEQ ID NO: 187860 - DNA, 13 bp, Artificial Sequence
  Oligonucleotide for detection of SNP TSC0046259
tacgcgtacgcac

SEQ ID NO: 187861 - DNA, 13 bp, Artificial Sequence
  Oligonucleotide for detection of SNP TSC0046259
gtgcgtgtgcgta

SEQ ID NO: 187862 - DNA, 13 bp, Artificial Sequence
  Oligonucleotide for detection of SNP TSC0046259
tacgcacacgcac

SEQ ID NO: 187863 - DNA, 13 bp, Artificial Sequence
  Oligonucleotide for detection of SNP TSC0046259
gtgtgcgcgtgta

SEQ ID NO: 187864 - DNA, 13 bp, Artificial Sequence
  Oligonucleotide for detection of SNP TSC0046259
tacacgcgcacac

SEQ ID NO: 187865 - DNA, 13 bp, Artificial Sequence
  Oligonucleotide for detection of SNP TSC0046259
gtgtgcgtgcgta

SEQ ID NO: 187866 - DNA, 13 bp, Artificial Sequence
  Oligonucleotide for detection of SNP TSC0046259
tacgcacgcacac

SEQ ID NO: 187867 - DNA, 13 bp, Artificial Sequence
  Oligonucleotide for detection of SNP TSC0046259
gtgtgtgcgcgta

SEQ ID NO: 187868 - DNA, 13 bp, Artificial Sequence
  Oligonucleotide for detection of SNP TSC0046259
tacgcgcacacac

SEQ ID NO: 187869 - DNA, 13 bp, Artificial Sequence
  Oligonucleotide for detection of SNP TSC0046259
gtgcgcgcgtgta

SEQ ID NO: 187870 - DNA, 13 bp, Artificial Sequence
  Oligonucleotide for detection of SNP TSC0046259
tacacgcgcgcac

SEQ ID NO: 187871 - DNA, 13 bp, Artificial Sequence
  Oligonucleotide for detection of SNP TSC0046259
gtgcgcgtgcgta

SEQ ID NO: 187872 - DNA, 13 bp, Artificial Sequence
  Oligonucleotide for detection of SNP TSC0046259
tacgcacgcgcac

SEQ ID NO: 187873 - DNA, 13 bp, Artificial Sequence
  Oligonucleotide for detection of SNP TSC0046259
gtgcgtgcgcgta

SEQ ID NO: 187874 - DNA, 13 bp, Artificial Sequence
  Oligonucleotide for detection of SNP TSC0046259
tacgcgcacgcac

SEQ ID NO: 187875 - DNA, 13 bp, Artificial Sequence
  Oligonucleotide for detection of SNP TSC0046259
gtgtgcgcgcgta

SEQ ID NO: 187876 - DNA, 13 bp, Artificial Sequence
  Oligonucleotide for detection of SNP TSC0046259
tacgcgcgcacac

SEQ ID NO: 187877 - DNA, 13 bp, Artificial Sequence
  Oligonucleotide for detection of SNP TSC0046259
gtgcgcgcgcgta

SEQ ID NO: 187878 - DNA, 13 bp, Artificial Sequence
  Oligonucleotide for detection of SNP TSC0046259
tacgcgcgcgcac

SEQ ID NO: 187879 - DNA, 13 bp, Artificial Sequence
  Oligonucleotide for detection of SNP TSC0046259
tgtgtgtgtgtay

SEQ ID NO: 187880 - DNA, 13 bp, Artificial Sequence
  Oligonucleotide for detection of SNP TSC0046259
rtacacacacaca

SEQ ID NO: 187881 - DNA, 13 bp, Artificial Sequence
  Oligonucleotide for detection of SNP TSC0046259
tgcgtgtgtgtay

SEQ ID NO: 187882 - DNA, 13 bp, Artificial Sequence
  Oligonucleotide for detection of SNP TSC0046259
rtacacacacgca

SEQ ID NO: 187883 - DNA, 13 bp, Artificial Sequence
  Oligonucleotide for detection of SNP TSC0046259
tgtgcgtgtgtay

SEQ ID NO: 187884 - DNA, 13 bp, Artificial Sequence
  Oligonucleotide for detection of SNP TSC0046259
rtacacacgcaca

SEQ ID NO: 187885 - DNA, 13 bp, Artificial Sequence
  Oligonucleotide for detection of SNP TSC0046259
tgtgtgtgcgtay

SEQ ID NO: 187886 - DNA, 13 bp, Artificial Sequence
  Oligonucleotide for detection of SNP TSC0046259
rtacgcacacaca

SEQ ID NO: 187887 - DNA, 13 bp, Artificial Sequence
  Oligonucleotide for detection of SNP TSC0046259
tgtgtgcgtgtay

SEQ ID NO: 187888 - DNA, 13 bp, Artificial Sequence
  Oligonucleotide for detection of SNP TSC0046259
rtacacgcacaca

SEQ ID NO: 187889 - DNA, 13 bp, Artificial Sequence
  Oligonucleotide for detection of SNP TSC0046259
tgcgcgtgtgtay

SEQ ID NO: 187890 - DNA, 13 bp, Artificial Sequence
  Oligonucleotide for detection of SNP TSC0046259
rtacacacgcgca

SEQ ID NO: 187891 - DNA, 13 bp, Artificial Sequence
  Oligonucleotide for detection of SNP TSC0046259
tgcgtgtgcgtay

SEQ ID NO: 187892 - DNA, 13 bp, Artificial Sequence
  Oligonucleotide for detection of SNP TSC0046259
rtacgcacacgca

SEQ ID NO: 187893 - DNA, 13 bp, Artificial Sequence
  Oligonucleotide for detection of SNP TSC0046259
tgtgcgtgcgtay

SEQ ID NO: 187894 - DNA, 13 bp, Artificial Sequence
  Oligonucleotide for detection of SNP TSC0046259
rtacgcacgcaca

SEQ ID NO: 187895 - DNA, 13 bp, Artificial Sequence
  Oligonucleotide for detection of SNP TSC0046259
tgcgtgcgtgtay

SEQ ID NO: 187896 - DNA, 13 bp, Artificial Sequence
  Oligonucleotide for detection of SNP TSC0046259
rtacacgcacgca

SEQ ID NO: 187897 - DNA, 13 bp, Artificial Sequence
  Oligonucleotide for detection of SNP TSC0046259
tgcgcgtgcgtay

SEQ ID NO: 187898 - DNA, 13 bp, Artificial Sequence
  Oligonucleotide for detection of SNP TSC0046259
rtacgcacgcgca

SEQ ID NO: 187899 - DNA, 13 bp, Artificial Sequence
  Oligonucleotide for detection of SNP TSC0046259
tgtgcgcgtgtay

SEQ ID NO: 187900 - DNA, 13 bp, Artificial Sequence
  Oligonucleotide for detection of SNP TSC0046259
rtacacgcgcaca

SEQ ID NO: 187901 - DNA, 13 bp, Artificial Sequence
  Oligonucleotide for detection of SNP TSC0046259
tgtgtgcgcgtay

SEQ ID NO: 187902 - DNA, 13 bp, Artificial Sequence
  Oligonucleotide for detection of SNP TSC0046259
rtacgcgcacaca

SEQ ID NO: 187903 - DNA, 13 bp, Artificial Sequence
  Oligonucleotide for detection of SNP TSC0046259
tgcgcgcgtgtay

SEQ ID NO: 187904 - DNA, 13 bp, Artificial Sequence
  Oligonucleotide for detection of SNP TSC0046259
rtacacgcgcgca

SEQ ID NO: 187905 - DNA, 13 bp, Artificial Sequence
  Oligonucleotide for detection of SNP TSC0046259
tgcgtgcgcgtay

SEQ ID NO: 187906 - DNA, 13 bp, Artificial Sequence
  Oligonucleotide for detection of SNP TSC0046259
rtacgcgcacgca

SEQ ID NO: 187907 - DNA, 13 bp, Artificial Sequence
  Oligonucleotide for detection of SNP TSC0046259
tgtgcgcgcgtay

SEQ ID NO: 187908 - DNA, 13 bp, Artificial Sequence
  Oligonucleotide for detection of SNP TSC0046259
rtacgcgcgcaca

SEQ ID NO: 187909 - DNA, 13 bp, Artificial Sequence
  Oligonucleotide for detection of SNP TSC0046259
tgcgcgcgcgtay

SEQ ID NO: 187910 - DNA, 13 bp, Artificial Sequence
  Oligonucleotide for detection of SNP TSC0046259
rtacgcgcgcgca

SEQ ID NO: 187911 - DNA, 13 bp, Artificial Sequence
  Oligonucleotide for detection of SNP TSC0000379
aaaattgaaagag

SEQ ID NO: 187912 - DNA, 13 bp, Artificial Sequence
  Oligonucleotide for detection of SNP TSC0000379
ctctttcaatttt

SEQ ID NO: 187913 - DNA, 13 bp, Artificial Sequence
  Oligonucleotide for detection of SNP TSC0000379
aaaattaaaagag

SEQ ID NO: 187914 - DNA, 13 bp, Artificial Sequence
  Oligonucleotide for detection of SNP TSC0000379
ctcttttaatttt

SEQ ID NO: 187915 - DNA, 13 bp, Artificial Sequence
  Oligonucleotide for detection of SNP TSC0046260
agatgatggaagg

SEQ ID NO: 187916 - DNA, 13 bp, Artificial Sequence
  Oligonucleotide for detection of SNP TSC0046260
ccttccatcatct

SEQ ID NO: 187917 - DNA, 13 bp, Artificial Sequence
  Oligonucleotide for detection of SNP TSC0046260
agatgacggaagg

SEQ ID NO: 187918 - DNA, 13 bp, Artificial Sequence
  Oligonucleotide for detection of SNP TSC0046260
ccttccgtcatct

SEQ ID NO: 187919 - DNA, 13 bp, Artificial Sequence
  Oligonucleotide for detection of SNP TSC0046261
taatgtatgtata

SEQ ID NO: 187920 - DNA, 13 bp, Artificial Sequence
  Oligonucleotide for detection of SNP TSC0046261
tatacatacatta

SEQ ID NO: 187921 - DNA, 13 bp, Artificial Sequence
  Oligonucleotide for detection of SNP TSC0046261
taatgtttgtata

SEQ ID NO: 187922 - DNA, 13 bp, Artificial Sequence
  Oligonucleotide for detection of SNP TSC0046261
tatacaaacatta

SEQ ID NO: 187923 - DNA, 13 bp, Artificial Sequence
  Oligonucleotide for detection of SNP TSC0046261
taacgtatgtata

SEQ ID NO: 187924 - DNA, 13 bp, Artificial Sequence
  Oligonucleotide for detection of SNP TSC0046261
tatacatacgtta

SEQ ID NO: 187925 - DNA, 13 bp, Artificial Sequence
  Oligonucleotide for detection of SNP TSC0046261
taacgtttgtata

SEQ ID NO: 187926 - DNA, 13 bp, Artificial Sequence
  Oligonucleotide for detection of SNP TSC0046261
tatacaaacgtta

SEQ ID NO: 187927 - DNA, 13 bp, Artificial Sequence
  Oligonucleotide for detection of SNP TSC0046261
tgtatatatgtta

SEQ ID NO: 187928 - DNA, 13 bp, Artificial Sequence
  Oligonucleotide for detection of SNP TSC0046261
taacatatataca

SEQ ID NO: 187929 - DNA, 13 bp, Artificial Sequence
  Oligonucleotide for detection of SNP TSC0046261
tgtatagatgtta

SEQ ID NO: 187930 - DNA, 13 bp, Artificial Sequence
  Oligonucleotide for detection of SNP TSC0046261
taacatctataca

SEQ ID NO: 187931 - DNA, 13 bp, Artificial Sequence
  Oligonucleotide for detection of SNP TSC0046261
tgtatatacgtta

SEQ ID NO: 187932 - DNA, 13 bp, Artificial Sequence
  Oligonucleotide for detection of SNP TSC0046261
taacgtatataca

SEQ ID NO: 187933 - DNA, 13 bp, Artificial Sequence
  Oligonucleotide for detection of SNP TSC0046261
tgtatagacgtta

SEQ ID NO: 187934 - DNA, 13 bp, Artificial Sequence
  Oligonucleotide for detection of SNP TSC0046261
taacgtctataca

SEQ ID NO: 187935 - DNA, 13 bp, Artificial Sequence
  Oligonucleotide for detection of SNP TSC0046264
ttttaaagtatty

SEQ ID NO: 187936 - DNA, 13 bp, Artificial Sequence
  Oligonucleotide for detection of SNP TSC0046264
raatactttaaaa

SEQ ID NO: 187937 - DNA, 13 bp, Artificial Sequence
  Oligonucleotide for detection of SNP TSC0046264
gaatgttttgaaa

SEQ ID NO: 187938 - DNA, 13 bp, Artificial Sequence
  Oligonucleotide for detection of SNP TSC0046264
tttcaaaacattc

SEQ ID NO: 187939 - DNA, 13 bp, Artificial Sequence
  Oligonucleotide for detection of SNP TSC0046264
gaatgtgttgaaa

SEQ ID NO: 187940 - DNA, 13 bp, Artificial Sequence
  Oligonucleotide for detection of SNP TSC0046264
tttcaacacattc

SEQ ID NO: 187941 - DNA, 13 bp, Artificial Sequence
  Oligonucleotide for detection of SNP TSC0046264
gaatgcgttgaaa

SEQ ID NO: 187942 - DNA, 13 bp, Artificial Sequence
  Oligonucleotide for detection of SNP TSC0046264
tttcaacgcattc

SEQ ID NO: 187943 - DNA, 13 bp, Artificial Sequence
  Oligonucleotide for detection of SNP TSC0046267
aggagtggtgtta

SEQ ID NO: 187944 - DNA, 13 bp, Artificial Sequence
  Oligonucleotide for detection of SNP TSC0046267
taacaccactcct

SEQ ID NO: 187945 - DNA, 13 bp, Artificial Sequence
  Oligonucleotide for detection of SNP TSC0046267
aggagtagtgtta

SEQ ID NO: 187946 - DNA, 13 bp, Artificial Sequence
  Oligonucleotide for detection of SNP TSC0046267
taacactactcct

SEQ ID NO: 187947 - DNA, 13 bp, Artificial Sequence
  Oligonucleotide for detection of SNP TSC0046268
tttagattttttt

SEQ ID NO: 187948 - DNA, 13 bp, Artificial Sequence
  Oligonucleotide for detection of SNP TSC0046268
aaaaaaatctaaa

SEQ ID NO: 187949 - DNA, 13 bp, Artificial Sequence
  Oligonucleotide for detection of SNP TSC0046268
tttagagtttttt

SEQ ID NO: 187950 - DNA, 13 bp, Artificial Sequence
  Oligonucleotide for detection of SNP TSC0046268
aaaaaactctaaa

SEQ ID NO: 187951 - DNA, 13 bp, Artificial Sequence
  Oligonucleotide for detection of SNP TSC0046268
agagaagtttggg

SEQ ID NO: 187952 - DNA, 13 bp, Artificial Sequence
  Oligonucleotide for detection of SNP TSC0046268
cccaaacttctct

SEQ ID NO: 187953 - DNA, 13 bp, Artificial Sequence
  Oligonucleotide for detection of SNP TSC0046268
agagaattttggg

SEQ ID NO: 187954 - DNA, 13 bp, Artificial Sequence
  Oligonucleotide for detection of SNP TSC0046268
cccaaaattctct

SEQ ID NO: 187955 - DNA, 13 bp, Artificial Sequence
  Oligonucleotide for detection of SNP TSC0046272
agttataaaaaaa

SEQ ID NO: 187956 - DNA, 13 bp, Artificial Sequence
  Oligonucleotide for detection of SNP TSC0046272
tttttttataact

SEQ ID NO: 187957 - DNA, 13 bp, Artificial Sequence
  Oligonucleotide for detection of SNP TSC0046272
agttatgaaaaaa

SEQ ID NO: 187958 - DNA, 13 bp, Artificial Sequence
  Oligonucleotide for detection of SNP TSC0046272
ttttttcataact

SEQ ID NO: 187959 - DNA, 13 bp, Artificial Sequence
  Oligonucleotide for detection of SNP TSC0046273
ataatggaataaa

SEQ ID NO: 187960 - DNA, 13 bp, Artificial Sequence
  Oligonucleotide for detection of SNP TSC0046273
tttattccattat

SEQ ID NO: 187961 - DNA, 13 bp, Artificial Sequence
  Oligonucleotide for detection of SNP TSC0046273
ataatgaaataaa

SEQ ID NO: 187962 - DNA, 13 bp, Artificial Sequence
  Oligonucleotide for detection of SNP TSC0046273
tttatttcattat

SEQ ID NO: 187963 - DNA, 13 bp, Artificial Sequence
  Oligonucleotide for detection of SNP TSC0046274
ggtttatggtgaa

SEQ ID NO: 187964 - DNA, 13 bp, Artificial Sequence
  Oligonucleotide for detection of SNP TSC0046274
ttcaccataaacc

SEQ ID NO: 187965 - DNA, 13 bp, Artificial Sequence
  Oligonucleotide for detection of SNP TSC0046274
ggtttacggtgaa

SEQ ID NO: 187966 - DNA, 13 bp, Artificial Sequence
  Oligonucleotide for detection of SNP TSC0046274
ttcaccgtaaacc

SEQ ID NO: 187967 - DNA, 13 bp, Artificial Sequence
  Oligonucleotide for detection of SNP TSC0046275
tttgtagaattta

SEQ ID NO: 187968 - DNA, 13 bp, Artificial Sequence
  Oligonucleotide for detection of SNP TSC0046275
taaattctacaaa

SEQ ID NO: 187969 - DNA, 13 bp, Artificial Sequence
  Oligonucleotide for detection of SNP TSC0046275
tttgtaaaattta

SEQ ID NO: 187970 - DNA, 13 bp, Artificial Sequence
  Oligonucleotide for detection of SNP TSC0046275
taaattttacaaa

SEQ ID NO: 187971 - DNA, 13 bp, Artificial Sequence
  Oligonucleotide for detection of SNP TSC0046276
tatagatagtttg

SEQ ID NO: 187972 - DNA, 13 bp, Artificial Sequence
  Oligonucleotide for detection of SNP TSC0046276
caaactatctata

SEQ ID NO: 187973 - DNA, 13 bp, Artificial Sequence
  Oligonucleotide for detection of SNP TSC0046276
tatagagagtttg

SEQ ID NO: 187974 - DNA, 13 bp, Artificial Sequence
  Oligonucleotide for detection of SNP TSC0046276
caaactctctata

SEQ ID NO: 187975 - DNA, 13 bp, Artificial Sequence
  Oligonucleotide for detection of SNP TSC0046276
taagttatttgtg

SEQ ID NO: 187976 - DNA, 13 bp, Artificial Sequence
  Oligonucleotide for detection of SNP TSC0046276
cacaaataactta

SEQ ID NO: 187977 - DNA, 13 bp, Artificial Sequence
  Oligonucleotide for detection of SNP TSC0046276
taagttttttgtg

SEQ ID NO: 187978 - DNA, 13 bp, Artificial Sequence
  Oligonucleotide for detection of SNP TSC0046276
cacaaaaaactta

SEQ ID NO: 187979 - DNA, 13 bp, Artificial Sequence
  Oligonucleotide for detection of SNP TSC0046277
tatttaagagatt

SEQ ID NO: 187980 - DNA, 13 bp, Artificial Sequence
  Oligonucleotide for detection of SNP TSC0046277
aatctcttaaata

SEQ ID NO: 187981 - DNA, 13 bp, Artificial Sequence
  Oligonucleotide for detection of SNP TSC0046277
tatttaggagatt

SEQ ID NO: 187982 - DNA, 13 bp, Artificial Sequence
  Oligonucleotide for detection of SNP TSC0046277
aatctcctaaata

SEQ ID NO: 187983 - DNA, 13 bp, Artificial Sequence
  Oligonucleotide for detection of SNP TSC0046278
tatattttgttta

SEQ ID NO: 187984 - DNA, 13 bp, Artificial Sequence
  Oligonucleotide for detection of SNP TSC0046278
taaacaaaatata

SEQ ID NO: 187985 - DNA, 13 bp, Artificial Sequence
  Oligonucleotide for detection of SNP TSC0046278
tatattgtgttta

SEQ ID NO: 187986 - DNA, 13 bp, Artificial Sequence
  Oligonucleotide for detection of SNP TSC0046278
taaacacaatata

SEQ ID NO: 187987 - DNA, 13 bp, Artificial Sequence
  Oligonucleotide for detection of SNP TSC0046278
tagataaaatata

SEQ ID NO: 187988 - DNA, 13 bp, Artificial Sequence
  Oligonucleotide for detection of SNP TSC0046278
tatattttatcta

SEQ ID NO: 187989 - DNA, 13 bp, Artificial Sequence
  Oligonucleotide for detection of SNP TSC0046278
tagatataatata

SEQ ID NO: 187990 - DNA, 13 bp, Artificial Sequence
  Oligonucleotide for detection of SNP TSC0046278
tatattatatcta

SEQ ID NO: 187991 - DNA, 13 bp, Artificial Sequence
  Oligonucleotide for detection of SNP TSC0046280
ggtttatgaaaag

SEQ ID NO: 187992 - DNA, 13 bp, Artificial Sequence
  Oligonucleotide for detection of SNP TSC0046280
cttttcataaacc

SEQ ID NO: 187993 - DNA, 13 bp, Artificial Sequence
  Oligonucleotide for detection of SNP TSC0046280
ggtttaggaaaag

SEQ ID NO: 187994 - DNA, 13 bp, Artificial Sequence
  Oligonucleotide for detection of SNP TSC0046280
cttttcctaaacc

SEQ ID NO: 187995 - DNA, 13 bp, Artificial Sequence
  Oligonucleotide for detection of SNP TSC0046281
tttttataaaatg

SEQ ID NO: 187996 - DNA, 13 bp, Artificial Sequence
  Oligonucleotide for detection of SNP TSC0046281
cattttataaaaa

SEQ ID NO: 187997 - DNA, 13 bp, Artificial Sequence
  Oligonucleotide for detection of SNP TSC0046281
tttttagaaaatg

SEQ ID NO: 187998 - DNA, 13 bp, Artificial Sequence
  Oligonucleotide for detection of SNP TSC0046281
cattttctaaaaa

SEQ ID NO: 187999 - DNA, 13 bp, Artificial Sequence
  Oligonucleotide for detection of SNP TSC0046281
tattttttaagga

SEQ ID NO: 188000 - DNA, 13 bp, Artificial Sequence
  Oligonucleotide for detection of SNP TSC0046281
tccttaaaaaata

SEQ ID NO: 188001 - DNA, 13 bp, Artificial Sequence
  Oligonucleotide for detection of SNP TSC0046282
gagtatagtgtga

SEQ ID NO: 188002 - DNA, 13 bp, Artificial Sequence
  Oligonucleotide for detection of SNP TSC0046282
tcacactatactc

SEQ ID NO: 188003 - DNA, 13 bp, Artificial Sequence
  Oligonucleotide for detection of SNP TSC0046282
gagtattgtgtga

SEQ ID NO: 188004 - DNA, 13 bp, Artificial Sequence
  Oligonucleotide for detection of SNP TSC0046282
tcacacaatactc

SEQ ID NO: 188005 - DNA, 13 bp, Artificial Sequence
  Oligonucleotide for detection of SNP TSC0046282
gagtatcgtgtga

SEQ ID NO: 188006 - DNA, 13 bp, Artificial Sequence
  Oligonucleotide for detection of SNP TSC0046282
tcacacgatactc

SEQ ID NO: 188007 - DNA, 13 bp, Artificial Sequence
  Oligonucleotide for detection of SNP TSC0046282
ttatacgatatty

SEQ ID NO: 188008 - DNA, 13 bp, Artificial Sequence
  Oligonucleotide for detection of SNP TSC0046282
raatatcgtataa

SEQ ID NO: 188009 - DNA, 13 bp, Artificial Sequence
  Oligonucleotide for detection of SNP TSC0046284
attattgtaataa

SEQ ID NO: 188010 - DNA, 13 bp, Artificial Sequence
  Oligonucleotide for detection of SNP TSC0046284
ttattacaataat

SEQ ID NO: 188011 - DNA, 13 bp, Artificial Sequence
  Oligonucleotide for detection of SNP TSC0046284
attattataataa

SEQ ID NO: 188012 - DNA, 13 bp, Artificial Sequence
  Oligonucleotide for detection of SNP TSC0046284
ttattataataat

SEQ ID NO: 188013 - DNA, 13 bp, Artificial Sequence
  Oligonucleotide for detection of SNP TSC0046291
gatattatagttg

SEQ ID NO: 188014 - DNA, 13 bp, Artificial Sequence
  Oligonucleotide for detection of SNP TSC0046291
caactataatatc

SEQ ID NO: 188015 - DNA, 13 bp, Artificial Sequence
  Oligonucleotide for detection of SNP TSC0046291
gatattttagttg

SEQ ID NO: 188016 - DNA, 13 bp, Artificial Sequence
  Oligonucleotide for detection of SNP TSC0046291
caactaaaatatc

SEQ ID NO: 188017 - DNA, 13 bp, Artificial Sequence
  Oligonucleotide for detection of SNP TSC0046291
taattataatgty

SEQ ID NO: 188018 - DNA, 13 bp, Artificial Sequence
  Oligonucleotide for detection of SNP TSC0046291
racattataatta

SEQ ID NO: 188019 - DNA, 13 bp, Artificial Sequence
  Oligonucleotide for detection of SNP TSC0046291
taattaaaatgty

SEQ ID NO: 188020 - DNA, 13 bp, Artificial Sequence
  Oligonucleotide for detection of SNP TSC0046291
racattttaatta

SEQ ID NO: 188021 - DNA, 13 bp, Artificial Sequence
  Oligonucleotide for detection of SNP TSC0046294
atgaaaagaatta

SEQ ID NO: 188022 - DNA, 13 bp, Artificial Sequence
  Oligonucleotide for detection of SNP TSC0046294
taattcttttcat

SEQ ID NO: 188023 - DNA, 13 bp, Artificial Sequence
  Oligonucleotide for detection of SNP TSC0046294
atgaaaggaatta

SEQ ID NO: 188024 - DNA, 13 bp, Artificial Sequence
  Oligonucleotide for detection of SNP TSC0046294
taattcctttcat

SEQ ID NO: 188025 - DNA, 13 bp, Artificial Sequence
  Oligonucleotide for detection of SNP TSC0046295
aaggaagttaagy

SEQ ID NO: 188026 - DNA, 13 bp, Artificial Sequence
  Oligonucleotide for detection of SNP TSC0046295
rcttaacttcctt

SEQ ID NO: 188027 - DNA, 13 bp, Artificial Sequence
  Oligonucleotide for detection of SNP TSC0046295
aaggaaattaagy

SEQ ID NO: 188028 - DNA, 13 bp, Artificial Sequence
  Oligonucleotide for detection of SNP TSC0046295
rcttaatttcctt

SEQ ID NO: 188029 - DNA, 13 bp, Artificial Sequence
  Oligonucleotide for detection of SNP TSC0046296
tttttaaaaggay

SEQ ID NO: 188030 - DNA, 13 bp, Artificial Sequence
  Oligonucleotide for detection of SNP TSC0046296
rtccttttaaaaa

SEQ ID NO: 188031 - DNA, 13 bp, Artificial Sequence
  Oligonucleotide for detection of SNP TSC0046296
tttttataaggay

SEQ ID NO: 188032 - DNA, 13 bp, Artificial Sequence
  Oligonucleotide for detection of SNP TSC0046296
rtccttataaaaa

SEQ ID NO: 188033 - DNA, 13 bp, Artificial Sequence
  Oligonucleotide for detection of SNP TSC0046296
gtttttttaagag

SEQ ID NO: 188034 - DNA, 13 bp, Artificial Sequence
  Oligonucleotide for detection of SNP TSC0046296
ctcttaaaaaaac

SEQ ID NO: 188035 - DNA, 13 bp, Artificial Sequence
  Oligonucleotide for detection of SNP TSC0046298
ttaagaattatta

SEQ ID NO: 188036 - DNA, 13 bp, Artificial Sequence
  Oligonucleotide for detection of SNP TSC0046298
taataattcttaa

SEQ ID NO: 188037 - DNA, 13 bp, Artificial Sequence
  Oligonucleotide for detection of SNP TSC0046298
ttaagagttatta

SEQ ID NO: 188038 - DNA, 13 bp, Artificial Sequence
  Oligonucleotide for detection of SNP TSC0046298
taataactcttaa

SEQ ID NO: 188039 - DNA, 13 bp, Artificial Sequence
  Oligonucleotide for detection of SNP TSC0046299
aagtttaagaatg

SEQ ID NO: 188040 - DNA, 13 bp, Artificial Sequence
  Oligonucleotide for detection of SNP TSC0046299
cattcttaaactt

SEQ ID NO: 188041 - DNA, 13 bp, Artificial Sequence
  Oligonucleotide for detection of SNP TSC0046299
aagtttgagaatg

SEQ ID NO: 188042 - DNA, 13 bp, Artificial Sequence
  Oligonucleotide for detection of SNP TSC0046299
cattctcaaactt

SEQ ID NO: 188043 - DNA, 13 bp, Artificial Sequence
  Oligonucleotide for detection of SNP TSC0046300
attttattgttat

SEQ ID NO: 188044 - DNA, 13 bp, Artificial Sequence
  Oligonucleotide for detection of SNP TSC0046300
ataacaataaaat

SEQ ID NO: 188045 - DNA, 13 bp, Artificial Sequence
  Oligonucleotide for detection of SNP TSC0046300
attttagtgttat

SEQ ID NO: 188046 - DNA, 13 bp, Artificial Sequence
  Oligonucleotide for detection of SNP TSC0046300
ataacactaaaat

SEQ ID NO: 188047 - DNA, 13 bp, Artificial Sequence
  Oligonucleotide for detection of SNP TSC0046300
atgatagtgggat

SEQ ID NO: 188048 - DNA, 13 bp, Artificial Sequence
  Oligonucleotide for detection of SNP TSC0046300
atcccactatcat

SEQ ID NO: 188049 - DNA, 13 bp, Artificial Sequence
  Oligonucleotide for detection of SNP TSC0046300
atgatattgggat

SEQ ID NO: 188050 - DNA, 13 bp, Artificial Sequence
  Oligonucleotide for detection of SNP TSC0046300
atcccaatatcat

SEQ ID NO: 188051 - DNA, 13 bp, Artificial Sequence
  Oligonucleotide for detection of SNP TSC0046302
aggagtagattaa

SEQ ID NO: 188052 - DNA, 13 bp, Artificial Sequence
  Oligonucleotide for detection of SNP TSC0046302
ttaatctactcct

SEQ ID NO: 188053 - DNA, 13 bp, Artificial Sequence
  Oligonucleotide for detection of SNP TSC0046302
aggagtggattaa

SEQ ID NO: 188054 - DNA, 13 bp, Artificial Sequence
  Oligonucleotide for detection of SNP TSC0046302
ttaatccactcct

SEQ ID NO: 188055 - DNA, 13 bp, Artificial Sequence
  Oligonucleotide for detection of SNP TSC0046303
gggaataattttg

SEQ ID NO: 188056 - DNA, 13 bp, Artificial Sequence
  Oligonucleotide for detection of SNP TSC0046303
caaaattattccc

SEQ ID NO: 188057 - DNA, 13 bp, Artificial Sequence
  Oligonucleotide for detection of SNP TSC0046303
gggaattattttg

SEQ ID NO: 188058 - DNA, 13 bp, Artificial Sequence
  Oligonucleotide for detection of SNP TSC0046303
caaaataattccc

SEQ ID NO: 188059 - DNA, 13 bp, Artificial Sequence
  Oligonucleotide for detection of SNP TSC0046304
tagtagggagagt

SEQ ID NO: 188060 - DNA, 13 bp, Artificial Sequence
  Oligonucleotide for detection of SNP TSC0046304
actctccctacta

SEQ ID NO: 188061 - DNA, 13 bp, Artificial Sequence
  Oligonucleotide for detection of SNP TSC0046304
tagtagagagagt

SEQ ID NO: 188062 - DNA, 13 bp, Artificial Sequence
  Oligonucleotide for detection of SNP TSC0046304
actctctctacta

SEQ ID NO: 188063 - DNA, 13 bp, Artificial Sequence
  Oligonucleotide for detection of SNP TSC0046305
gaggaaggaataa

SEQ ID NO: 188064 - DNA, 13 bp, Artificial Sequence
  Oligonucleotide for detection of SNP TSC0046305
ttattccttcctc

SEQ ID NO: 188065 - DNA, 13 bp, Artificial Sequence
  Oligonucleotide for detection of SNP TSC0046305
gaggaaagaataa

SEQ ID NO: 188066 - DNA, 13 bp, Artificial Sequence
  Oligonucleotide for detection of SNP TSC0046305
ttattctttcctc

SEQ ID NO: 188067 - DNA, 13 bp, Artificial Sequence
  Oligonucleotide for detection of SNP TSC0046306
gtataagaagtgy

SEQ ID NO: 188068 - DNA, 13 bp, Artificial Sequence
  Oligonucleotide for detection of SNP TSC0046306
rcacttcttatac

SEQ ID NO: 188069 - DNA, 13 bp, Artificial Sequence
  Oligonucleotide for detection of SNP TSC0046306
gtataaaaagtgy

SEQ ID NO: 188070 - DNA, 13 bp, Artificial Sequence
  Oligonucleotide for detection of SNP TSC0046306
rcactttttatac

SEQ ID NO: 188071 - DNA, 13 bp, Artificial Sequence
  Oligonucleotide for detection of SNP TSC0046307
atatatgtaattt

SEQ ID NO: 188072 - DNA, 13 bp, Artificial Sequence
  Oligonucleotide for detection of SNP TSC0046307
aaattacatatat

SEQ ID NO: 188073 - DNA, 13 bp, Artificial Sequence
  Oligonucleotide for detection of SNP TSC0046308
tttaggtgggtga

SEQ ID NO: 188074 - DNA, 13 bp, Artificial Sequence
  Oligonucleotide for detection of SNP TSC0046308
tcacccacctaaa

SEQ ID NO: 188075 - DNA, 13 bp, Artificial Sequence
  Oligonucleotide for detection of SNP TSC0046308
tttaggggggtga

SEQ ID NO: 188076 - DNA, 13 bp, Artificial Sequence
  Oligonucleotide for detection of SNP TSC0046308
tcacccccctaaa

SEQ ID NO: 188077 - DNA, 13 bp, Artificial Sequence
  Oligonucleotide for detection of SNP TSC0046308
tttaggtgggcga

SEQ ID NO: 188078 - DNA, 13 bp, Artificial Sequence
  Oligonucleotide for detection of SNP TSC0046308
tcgcccacctaaa

SEQ ID NO: 188079 - DNA, 13 bp, Artificial Sequence
  Oligonucleotide for detection of SNP TSC0046308
tttaggggggcga

SEQ ID NO: 188080 - DNA, 13 bp, Artificial Sequence
  Oligonucleotide for detection of SNP TSC0046308
tcgcccccctaaa

SEQ ID NO: 188081 - DNA, 13 bp, Artificial Sequence
  Oligonucleotide for detection of SNP TSC0046308
ttgtttttttagg

SEQ ID NO: 188082 - DNA, 13 bp, Artificial Sequence
  Oligonucleotide for detection of SNP TSC0046308
cctaaaaaaacaa

SEQ ID NO: 188083 - DNA, 13 bp, Artificial Sequence
  Oligonucleotide for detection of SNP TSC0046308
tcgtttatttagg

SEQ ID NO: 188084 - DNA, 13 bp, Artificial Sequence
  Oligonucleotide for detection of SNP TSC0046308
cctaaataaacga

SEQ ID NO: 188085 - DNA, 13 bp, Artificial Sequence
  Oligonucleotide for detection of SNP TSC0046308
tcgtttttttagg

SEQ ID NO: 188086 - DNA, 13 bp, Artificial Sequence
  Oligonucleotide for detection of SNP TSC0046308
cctaaaaaaacga

SEQ ID NO: 188087 - DNA, 13 bp, Artificial Sequence
  Oligonucleotide for detection of SNP TSC0046311
tgttttaatttaa

SEQ ID NO: 188088 - DNA, 13 bp, Artificial Sequence
  Oligonucleotide for detection of SNP TSC0046311
ttaaattaaaaca

SEQ ID NO: 188089 - DNA, 13 bp, Artificial Sequence
  Oligonucleotide for detection of SNP TSC0046311
tgtttcgatttaa

SEQ ID NO: 188090 - DNA, 13 bp, Artificial Sequence
  Oligonucleotide for detection of SNP TSC0046311
ttaaatcgaaaca

SEQ ID NO: 188091 - DNA, 13 bp, Artificial Sequence
  Oligonucleotide for detection of SNP TSC0046311
ttaaattgaaata

SEQ ID NO: 188092 - DNA, 13 bp, Artificial Sequence
  Oligonucleotide for detection of SNP TSC0046311
tatttcaatttaa

SEQ ID NO: 188093 - DNA, 13 bp, Artificial Sequence
  Oligonucleotide for detection of SNP TSC0046311
ttaaatcgaaata

SEQ ID NO: 188094 - DNA, 13 bp, Artificial Sequence
  Oligonucleotide for detection of SNP TSC0046311
tatttcgatttaa

SEQ ID NO: 188095 - DNA, 13 bp, Artificial Sequence
  Oligonucleotide for detection of SNP TSC0046312
gagatggtattgy

SEQ ID NO: 188096 - DNA, 13 bp, Artificial Sequence
  Oligonucleotide for detection of SNP TSC0046312
rcaataccatctc

SEQ ID NO: 188097 - DNA, 13 bp, Artificial Sequence
  Oligonucleotide for detection of SNP TSC0046312
gagatgatattgy

SEQ ID NO: 188098 - DNA, 13 bp, Artificial Sequence
  Oligonucleotide for detection of SNP TSC0046312
rcaatatcatctc

SEQ ID NO: 188099 - DNA, 13 bp, Artificial Sequence
  Oligonucleotide for detection of SNP TSC0046312
gagacggtattgy

SEQ ID NO: 188100 - DNA, 13 bp, Artificial Sequence
  Oligonucleotide for detection of SNP TSC0046312
rcaataccgtctc

SEQ ID NO: 188101 - DNA, 13 bp, Artificial Sequence
  Oligonucleotide for detection of SNP TSC0046312
gagacgatattgy

SEQ ID NO: 188102 - DNA, 13 bp, Artificial Sequence
  Oligonucleotide for detection of SNP TSC0046312
rcaatatcgtctc

SEQ ID NO: 188103 - DNA, 13 bp, Artificial Sequence
  Oligonucleotide for detection of SNP TSC0046316
ttagtaggtatgg

SEQ ID NO: 188104 - DNA, 13 bp, Artificial Sequence
  Oligonucleotide for detection of SNP TSC0046316
ccatacctactaa

SEQ ID NO: 188105 - DNA, 13 bp, Artificial Sequence
  Oligonucleotide for detection of SNP TSC0046316
ttagtaagtatgg

SEQ ID NO: 188106 - DNA, 13 bp, Artificial Sequence
  Oligonucleotide for detection of SNP TSC0046316
ccatacttactaa

SEQ ID NO: 188107 - DNA, 13 bp, Artificial Sequence
  Oligonucleotide for detection of SNP TSC0046317
tataaggaagggt

SEQ ID NO: 188108 - DNA, 13 bp, Artificial Sequence
  Oligonucleotide for detection of SNP TSC0046317
acccttccttata

SEQ ID NO: 188109 - DNA, 13 bp, Artificial Sequence
  Oligonucleotide for detection of SNP TSC0046317
tataagaaagggt

SEQ ID NO: 188110 - DNA, 13 bp, Artificial Sequence
  Oligonucleotide for detection of SNP TSC0046317
accctttcttata

SEQ ID NO: 188111 - DNA, 13 bp, Artificial Sequence
  Oligonucleotide for detection of SNP TSC0046318
tttaatgatatat

SEQ ID NO: 188112 - DNA, 13 bp, Artificial Sequence
  Oligonucleotide for detection of SNP TSC0046318
atatatcattaaa

SEQ ID NO: 188113 - DNA, 13 bp, Artificial Sequence
  Oligonucleotide for detection of SNP TSC0046318
tttaacgatatat

SEQ ID NO: 188114 - DNA, 13 bp, Artificial Sequence
  Oligonucleotide for detection of SNP TSC0046318
atatatcgttaaa

SEQ ID NO: 188115 - DNA, 13 bp, Artificial Sequence
  Oligonucleotide for detection of SNP TSC0046318
atatattgttagg

SEQ ID NO: 188116 - DNA, 13 bp, Artificial Sequence
  Oligonucleotide for detection of SNP TSC0046318
cctaacaatatat

SEQ ID NO: 188117 - DNA, 13 bp, Artificial Sequence
  Oligonucleotide for detection of SNP TSC0046318
atatatcgttagg

SEQ ID NO: 188118 - DNA, 13 bp, Artificial Sequence
  Oligonucleotide for detection of SNP TSC0046318
cctaacgatatat

SEQ ID NO: 188119 - DNA, 13 bp, Artificial Sequence
  Oligonucleotide for detection of SNP TSC0046322
attagtttttttg

SEQ ID NO: 188120 - DNA, 13 bp, Artificial Sequence
  Oligonucleotide for detection of SNP TSC0046322
caaaaaaactaat

SEQ ID NO: 188121 - DNA, 13 bp, Artificial Sequence
  Oligonucleotide for detection of SNP TSC0046322
attagtattttcg

SEQ ID NO: 188122 - DNA, 13 bp, Artificial Sequence
  Oligonucleotide for detection of SNP TSC0046322
cgaaaatactaat

SEQ ID NO: 188123 - DNA, 13 bp, Artificial Sequence
  Oligonucleotide for detection of SNP TSC0046322
attagttttttcg

SEQ ID NO: 188124 - DNA, 13 bp, Artificial Sequence
  Oligonucleotide for detection of SNP TSC0046322
cgaaaaaactaat

SEQ ID NO: 188125 - DNA, 13 bp, Artificial Sequence
  Oligonucleotide for detection of SNP TSC0046322
tggaagtgttgat

SEQ ID NO: 188126 - DNA, 13 bp, Artificial Sequence
  Oligonucleotide for detection of SNP TSC0046322
atcaacacttcca

SEQ ID NO: 188127 - DNA, 13 bp, Artificial Sequence
  Oligonucleotide for detection of SNP TSC0046322
tggaagagttgat

SEQ ID NO: 188128 - DNA, 13 bp, Artificial Sequence
  Oligonucleotide for detection of SNP TSC0046322
atcaactcttcca

SEQ ID NO: 188129 - DNA, 13 bp, Artificial Sequence
  Oligonucleotide for detection of SNP TSC0046322
cggaagtgttgat

SEQ ID NO: 188130 - DNA, 13 bp, Artificial Sequence
  Oligonucleotide for detection of SNP TSC0046322
atcaacacttccg

SEQ ID NO: 188131 - DNA, 13 bp, Artificial Sequence
  Oligonucleotide for detection of SNP TSC0046322
cggaagagttgat

SEQ ID NO: 188132 - DNA, 13 bp, Artificial Sequence
  Oligonucleotide for detection of SNP TSC0046322
atcaactcttccg

SEQ ID NO: 188133 - DNA, 13 bp, Artificial Sequence
  Oligonucleotide for detection of SNP TSC0046327
tttataaaagttt

SEQ ID NO: 188134 - DNA, 13 bp, Artificial Sequence
  Oligonucleotide for detection of SNP TSC0046327
aaacttttataaa

SEQ ID NO: 188135 - DNA, 13 bp, Artificial Sequence
  Oligonucleotide for detection of SNP TSC0046327
tttatagaagttt

SEQ ID NO: 188136 - DNA, 13 bp, Artificial Sequence
  Oligonucleotide for detection of SNP TSC0046327
aaacttctataaa

SEQ ID NO: 188137 - DNA, 13 bp, Artificial Sequence
  Oligonucleotide for detection of SNP TSC0046328
ggttttatattta

SEQ ID NO: 188138 - DNA, 13 bp, Artificial Sequence
  Oligonucleotide for detection of SNP TSC0046328
taaatataaaacc

SEQ ID NO: 188139 - DNA, 13 bp, Artificial Sequence
  Oligonucleotide for detection of SNP TSC0046328
ggttttgtattta

SEQ ID NO: 188140 - DNA, 13 bp, Artificial Sequence
  Oligonucleotide for detection of SNP TSC0046328
taaatacaaaacc

SEQ ID NO: 188141 - DNA, 13 bp, Artificial Sequence
  Oligonucleotide for detection of SNP TSC0046328
ggtttcgtattta

SEQ ID NO: 188142 - DNA, 13 bp, Artificial Sequence
  Oligonucleotide for detection of SNP TSC0046328
taaatacgaaacc

SEQ ID NO: 188143 - DNA, 13 bp, Artificial Sequence
  Oligonucleotide for detection of SNP TSC0046328
tagatatgaaaty

SEQ ID NO: 188144 - DNA, 13 bp, Artificial Sequence
  Oligonucleotide for detection of SNP TSC0046328
ratttcatatcta

SEQ ID NO: 188145 - DNA, 13 bp, Artificial Sequence
  Oligonucleotide for detection of SNP TSC0046328
tagatacgaaaty

SEQ ID NO: 188146 - DNA, 13 bp, Artificial Sequence
  Oligonucleotide for detection of SNP TSC0046328
ratttcgtatcta

SEQ ID NO: 188147 - DNA, 13 bp, Artificial Sequence
  Oligonucleotide for detection of SNP TSC0046329
tagatagtatatg

SEQ ID NO: 188148 - DNA, 13 bp, Artificial Sequence
  Oligonucleotide for detection of SNP TSC0046329
catatactatcta

SEQ ID NO: 188149 - DNA, 13 bp, Artificial Sequence
  Oligonucleotide for detection of SNP TSC0046329
tagatattatatg

SEQ ID NO: 188150 - DNA, 13 bp, Artificial Sequence
  Oligonucleotide for detection of SNP TSC0046329
catataatatcta

SEQ ID NO: 188151 - DNA, 13 bp, Artificial Sequence
  Oligonucleotide for detection of SNP TSC0046330
aaataggtgaaaa

SEQ ID NO: 188152 - DNA, 13 bp, Artificial Sequence
  Oligonucleotide for detection of SNP TSC0046330
ttttcacctattt

SEQ ID NO: 188153 - DNA, 13 bp, Artificial Sequence
  Oligonucleotide for detection of SNP TSC0046330
aaatagatgaaaa

SEQ ID NO: 188154 - DNA, 13 bp, Artificial Sequence
  Oligonucleotide for detection of SNP TSC0046330
ttttcatctattt

SEQ ID NO: 188155 - DNA, 13 bp, Artificial Sequence
  Oligonucleotide for detection of SNP TSC0046331
ttgtattgtgggg

SEQ ID NO: 188156 - DNA, 13 bp, Artificial Sequence
  Oligonucleotide for detection of SNP TSC0046331
ccccacaatacaa

SEQ ID NO: 188157 - DNA, 13 bp, Artificial Sequence
  Oligonucleotide for detection of SNP TSC0046331
ttgtatggtgggg

SEQ ID NO: 188158 - DNA, 13 bp, Artificial Sequence
  Oligonucleotide for detection of SNP TSC0046331
ccccaccatacaa

SEQ ID NO: 188159 - DNA, 13 bp, Artificial Sequence
  Oligonucleotide for detection of SNP TSC0046331
ttttattatataa

SEQ ID NO: 188160 - DNA, 13 bp, Artificial Sequence
  Oligonucleotide for detection of SNP TSC0046331
ttatataataaaa

SEQ ID NO: 188161 - DNA, 13 bp, Artificial Sequence
  Oligonucleotide for detection of SNP TSC0046332
tatgtgatgggat

SEQ ID NO: 188162 - DNA, 13 bp, Artificial Sequence
  Oligonucleotide for detection of SNP TSC0046332
atcccatcacata

SEQ ID NO: 188163 - DNA, 13 bp, Artificial Sequence
  Oligonucleotide for detection of SNP TSC0046332
tatgtgttgggat

SEQ ID NO: 188164 - DNA, 13 bp, Artificial Sequence
  Oligonucleotide for detection of SNP TSC0046332
atcccaacacata

SEQ ID NO: 188165 - DNA, 13 bp, Artificial Sequence
  Oligonucleotide for detection of SNP TSC0046332
tatgtggtgggat

SEQ ID NO: 188166 - DNA, 13 bp, Artificial Sequence
  Oligonucleotide for detection of SNP TSC0046332
atcccaccacata

SEQ ID NO: 188167 - DNA, 13 bp, Artificial Sequence
  Oligonucleotide for detection of SNP TSC0046332
attttattatatg

SEQ ID NO: 188168 - DNA, 13 bp, Artificial Sequence
  Oligonucleotide for detection of SNP TSC0046332
catataataaaat

SEQ ID NO: 188169 - DNA, 13 bp, Artificial Sequence
  Oligonucleotide for detection of SNP TSC0046332
attttagtatatg

SEQ ID NO: 188170 - DNA, 13 bp, Artificial Sequence
  Oligonucleotide for detection of SNP TSC0046332
catatactaaaat

SEQ ID NO: 188171 - DNA, 13 bp, Artificial Sequence
  Oligonucleotide for detection of SNP TSC0046332
attttaatatatg

SEQ ID NO: 188172 - DNA, 13 bp, Artificial Sequence
  Oligonucleotide for detection of SNP TSC0046332
catatattaaaat

SEQ ID NO: 188173 - DNA, 13 bp, Artificial Sequence
  Oligonucleotide for detection of SNP TSC0046333
gtatgtatttaty

SEQ ID NO: 188174 - DNA, 13 bp, Artificial Sequence
  Oligonucleotide for detection of SNP TSC0046333
rataaatacatac

SEQ ID NO: 188175 - DNA, 13 bp, Artificial Sequence
  Oligonucleotide for detection of SNP TSC0046333
gtatgtttttaty

SEQ ID NO: 188176 - DNA, 13 bp, Artificial Sequence
  Oligonucleotide for detection of SNP TSC0046333
rataaaaacatac

SEQ ID NO: 188177 - DNA, 13 bp, Artificial Sequence
  Oligonucleotide for detection of SNP TSC0046333
gtatgtgtttaty

SEQ ID NO: 188178 - DNA, 13 bp, Artificial Sequence
  Oligonucleotide for detection of SNP TSC0046333
rataaacacatac

SEQ ID NO: 188179 - DNA, 13 bp, Artificial Sequence
  Oligonucleotide for detection of SNP TSC0046333
gtatgcgtttaty

SEQ ID NO: 188180 - DNA, 13 bp, Artificial Sequence
  Oligonucleotide for detection of SNP TSC0046333
rataaacgcatac

SEQ ID NO: 188181 - DNA, 13 bp, Artificial Sequence
  Oligonucleotide for detection of SNP TSC0046333
ggtaaatgtatgy

SEQ ID NO: 188182 - DNA, 13 bp, Artificial Sequence
  Oligonucleotide for detection of SNP TSC0046333
rcatacatttacc

SEQ ID NO: 188183 - DNA, 13 bp, Artificial Sequence
  Oligonucleotide for detection of SNP TSC0046333
ggtaaaggtatgy

SEQ ID NO: 188184 - DNA, 13 bp, Artificial Sequence
  Oligonucleotide for detection of SNP TSC0046333
rcatacctttacc

SEQ ID NO: 188185 - DNA, 13 bp, Artificial Sequence
  Oligonucleotide for detection of SNP TSC0046333
ggtaaacgtatgy

SEQ ID NO: 188186 - DNA, 13 bp, Artificial Sequence
  Oligonucleotide for detection of SNP TSC0046333
rcatacgtttacc

SEQ ID NO: 188187 - DNA, 13 bp, Artificial Sequence
  Oligonucleotide for detection of SNP TSC0046335
gagaaagtataaa

SEQ ID NO: 188188 - DNA, 13 bp, Artificial Sequence
  Oligonucleotide for detection of SNP TSC0046335
tttatactttctc

SEQ ID NO: 188189 - DNA, 13 bp, Artificial Sequence
  Oligonucleotide for detection of SNP TSC0046335
gagaaaatataaa

SEQ ID NO: 188190 - DNA, 13 bp, Artificial Sequence
  Oligonucleotide for detection of SNP TSC0046335
tttatattttctc

SEQ ID NO: 188191 - DNA, 13 bp, Artificial Sequence
  Oligonucleotide for detection of SNP TSC0046336
atgataatttgtg

SEQ ID NO: 188192 - DNA, 13 bp, Artificial Sequence
  Oligonucleotide for detection of SNP TSC0046336
cacaaattatcat

SEQ ID NO: 188193 - DNA, 13 bp, Artificial Sequence
  Oligonucleotide for detection of SNP TSC0046336
atgatagtttgtg

SEQ ID NO: 188194 - DNA, 13 bp, Artificial Sequence
  Oligonucleotide for detection of SNP TSC0046336
cacaaactatcat

SEQ ID NO: 188195 - DNA, 13 bp, Artificial Sequence
  Oligonucleotide for detection of SNP TSC0046337
tggggtatgtttg

SEQ ID NO: 188196 - DNA, 13 bp, Artificial Sequence
  Oligonucleotide for detection of SNP TSC0046337
caaacatacccca

SEQ ID NO: 188197 - DNA, 13 bp, Artificial Sequence
  Oligonucleotide for detection of SNP TSC0046337
tggggtgtgtttg

SEQ ID NO: 188198 - DNA, 13 bp, Artificial Sequence
  Oligonucleotide for detection of SNP TSC0046337
caaacacacccca

SEQ ID NO: 188199 - DNA, 13 bp, Artificial Sequence
  Oligonucleotide for detection of SNP TSC0046337
tggggcgtgtttg

SEQ ID NO: 188200 - DNA, 13 bp, Artificial Sequence
  Oligonucleotide for detection of SNP TSC0046337
caaacacgcccca

SEQ ID NO: 188201 - DNA, 13 bp, Artificial Sequence
  Oligonucleotide for detection of SNP TSC0046338
gaaaatgaaagty

SEQ ID NO: 188202 - DNA, 13 bp, Artificial Sequence
  Oligonucleotide for detection of SNP TSC0046338
ractttcattttc

SEQ ID NO: 188203 - DNA, 13 bp, Artificial Sequence
  Oligonucleotide for detection of SNP TSC0046338
gaaaataaaagty

SEQ ID NO: 188204 - DNA, 13 bp, Artificial Sequence
  Oligonucleotide for detection of SNP TSC0046338
racttttattttc

SEQ ID NO: 188205 - DNA, 13 bp, Artificial Sequence
  Oligonucleotide for detection of SNP TSC0046338
gaaaacgaaagty

SEQ ID NO: 188206 - DNA, 13 bp, Artificial Sequence
  Oligonucleotide for detection of SNP TSC0046338
ractttcgttttc

SEQ ID NO: 188207 - DNA, 13 bp, Artificial Sequence
  Oligonucleotide for detection of SNP TSC0046339
agatttaatttta

SEQ ID NO: 188208 - DNA, 13 bp, Artificial Sequence
  Oligonucleotide for detection of SNP TSC0046339
taaaattaaatct

SEQ ID NO: 188209 - DNA, 13 bp, Artificial Sequence
  Oligonucleotide for detection of SNP TSC0046339
agatttgatttta

SEQ ID NO: 188210 - DNA, 13 bp, Artificial Sequence
  Oligonucleotide for detection of SNP TSC0046339
taaaatcaaatct

SEQ ID NO: 188211 - DNA, 13 bp, Artificial Sequence
  Oligonucleotide for detection of SNP TSC0046339
agattcgatttta

SEQ ID NO: 188212 - DNA, 13 bp, Artificial Sequence
  Oligonucleotide for detection of SNP TSC0046339
taaaatcgaatct

SEQ ID NO: 188213 - DNA, 13 bp, Artificial Sequence
  Oligonucleotide for detection of SNP TSC0046339
tgaaattggattt

SEQ ID NO: 188214 - DNA, 13 bp, Artificial Sequence
  Oligonucleotide for detection of SNP TSC0046339
aaatccaatttca

SEQ ID NO: 188215 - DNA, 13 bp, Artificial Sequence
  Oligonucleotide for detection of SNP TSC0046339
tgaaatcggattt

SEQ ID NO: 188216 - DNA, 13 bp, Artificial Sequence
  Oligonucleotide for detection of SNP TSC0046339
aaatccgatttca

SEQ ID NO: 188217 - DNA, 13 bp, Artificial Sequence
  Oligonucleotide for detection of SNP TSC0046340
gagagagtatatt

SEQ ID NO: 188218 - DNA, 13 bp, Artificial Sequence
  Oligonucleotide for detection of SNP TSC0046340
aatatactctctc

SEQ ID NO: 188219 - DNA, 13 bp, Artificial Sequence
  Oligonucleotide for detection of SNP TSC0046340
gagagaatatatt

SEQ ID NO: 188220 - DNA, 13 bp, Artificial Sequence
  Oligonucleotide for detection of SNP TSC0046340
aatatattctctc

SEQ ID NO: 188221 - DNA, 13 bp, Artificial Sequence
  Oligonucleotide for detection of SNP TSC0046344
gttagtattatta

SEQ ID NO: 188222 - DNA, 13 bp, Artificial Sequence
  Oligonucleotide for detection of SNP TSC0046344
taataatactaac

SEQ ID NO: 188223 - DNA, 13 bp, Artificial Sequence
  Oligonucleotide for detection of SNP TSC0046344
gttagttttatta

SEQ ID NO: 188224 - DNA, 13 bp, Artificial Sequence
  Oligonucleotide for detection of SNP TSC0046344
taataaaactaac

SEQ ID NO: 188225 - DNA, 13 bp, Artificial Sequence
  Oligonucleotide for detection of SNP TSC0046344
tagtaatattaay

SEQ ID NO: 188226 - DNA, 13 bp, Artificial Sequence
  Oligonucleotide for detection of SNP TSC0046344
rttaatattacta

SEQ ID NO: 188227 - DNA, 13 bp, Artificial Sequence
  Oligonucleotide for detection of SNP TSC0046344
tagtaagattaay

SEQ ID NO: 188228 - DNA, 13 bp, Artificial Sequence
  Oligonucleotide for detection of SNP TSC0046344
rttaatcttacta

SEQ ID NO: 188229 - DNA, 13 bp, Artificial Sequence
  Oligonucleotide for detection of SNP TSC0046345
tggttaaaaaaty

SEQ ID NO: 188230 - DNA, 13 bp, Artificial Sequence
  Oligonucleotide for detection of SNP TSC0046345
rattttttaacca

SEQ ID NO: 188231 - DNA, 13 bp, Artificial Sequence
  Oligonucleotide for detection of SNP TSC0046345
tggttagaaaaty

SEQ ID NO: 188232 - DNA, 13 bp, Artificial Sequence
  Oligonucleotide for detection of SNP TSC0046345
rattttctaacca

SEQ ID NO: 188233 - DNA, 13 bp, Artificial Sequence
  Oligonucleotide for detection of SNP TSC0046347
atagaaattttaa

SEQ ID NO: 188234 - DNA, 13 bp, Artificial Sequence
  Oligonucleotide for detection of SNP TSC0046347
ttaaaatttctat

SEQ ID NO: 188235 - DNA, 13 bp, Artificial Sequence
  Oligonucleotide for detection of SNP TSC0046347
atagaatttttaa

SEQ ID NO: 188236 - DNA, 13 bp, Artificial Sequence
  Oligonucleotide for detection of SNP TSC0046347
ttaaaaattctat

SEQ ID NO: 188237 - DNA, 13 bp, Artificial Sequence
  Oligonucleotide for detection of SNP TSC0046347
ttggggtttttgt

SEQ ID NO: 188238 - DNA, 13 bp, Artificial Sequence
  Oligonucleotide for detection of SNP TSC0046347
acaaaaaccccaa

SEQ ID NO: 188239 - DNA, 13 bp, Artificial Sequence
  Oligonucleotide for detection of SNP TSC0046347
ttgggggttttgt

SEQ ID NO: 188240 - DNA, 13 bp, Artificial Sequence
  Oligonucleotide for detection of SNP TSC0046347
acaaaacccccaa

SEQ ID NO: 188241 - DNA, 13 bp, Artificial Sequence
  Oligonucleotide for detection of SNP TSC0046349
tagatgattttty

SEQ ID NO: 188242 - DNA, 13 bp, Artificial Sequence
  Oligonucleotide for detection of SNP TSC0046349
raaaaatcatcta

SEQ ID NO: 188243 - DNA, 13 bp, Artificial Sequence
  Oligonucleotide for detection of SNP TSC0046349
tagatgtttttty

SEQ ID NO: 188244 - DNA, 13 bp, Artificial Sequence
  Oligonucleotide for detection of SNP TSC0046349
raaaaaacatcta

SEQ ID NO: 188245 - DNA, 13 bp, Artificial Sequence
  Oligonucleotide for detection of SNP TSC0046349
ggggggttattta

SEQ ID NO: 188246 - DNA, 13 bp, Artificial Sequence
  Oligonucleotide for detection of SNP TSC0046349
taaataacccccc

SEQ ID NO: 188247 - DNA, 13 bp, Artificial Sequence
  Oligonucleotide for detection of SNP TSC0046350
taggttgaaatag

SEQ ID NO: 188248 - DNA, 13 bp, Artificial Sequence
  Oligonucleotide for detection of SNP TSC0046350
ctatttcaaccta

SEQ ID NO: 188249 - DNA, 13 bp, Artificial Sequence
  Oligonucleotide for detection of SNP TSC0046350
taggtttaaatag

SEQ ID NO: 188250 - DNA, 13 bp, Artificial Sequence
  Oligonucleotide for detection of SNP TSC0046350
ctatttaaaccta

SEQ ID NO: 188251 - DNA, 13 bp, Artificial Sequence
  Oligonucleotide for detection of SNP TSC0046353
ttagtcggttttt

SEQ ID NO: 188252 - DNA, 13 bp, Artificial Sequence
  Oligonucleotide for detection of SNP TSC0046353
aaaaaccgactaa

SEQ ID NO: 188253 - DNA, 13 bp, Artificial Sequence
  Oligonucleotide for detection of SNP TSC0046353
aggggtagattga

SEQ ID NO: 188254 - DNA, 13 bp, Artificial Sequence
  Oligonucleotide for detection of SNP TSC0046353
tcaatctacccct

SEQ ID NO: 188255 - DNA, 13 bp, Artificial Sequence
  Oligonucleotide for detection of SNP TSC0046353
aggggttgattga

SEQ ID NO: 188256 - DNA, 13 bp, Artificial Sequence
  Oligonucleotide for detection of SNP TSC0046353
tcaatcaacccct

SEQ ID NO: 188257 - DNA, 13 bp, Artificial Sequence
  Oligonucleotide for detection of SNP TSC0046353
aggggtcgattga

SEQ ID NO: 188258 - DNA, 13 bp, Artificial Sequence
  Oligonucleotide for detection of SNP TSC0046353
tcaatcgacccct

SEQ ID NO: 188259 - DNA, 13 bp, Artificial Sequence
  Oligonucleotide for detection of SNP TSC0046354
tggtatttttatt

SEQ ID NO: 188260 - DNA, 13 bp, Artificial Sequence
  Oligonucleotide for detection of SNP TSC0046354
aataaaaatacca

SEQ ID NO: 188261 - DNA, 13 bp, Artificial Sequence
  Oligonucleotide for detection of SNP TSC0046354
tggtatgtttatt

SEQ ID NO: 188262 - DNA, 13 bp, Artificial Sequence
  Oligonucleotide for detection of SNP TSC0046354
aataaacatacca

SEQ ID NO: 188263 - DNA, 13 bp, Artificial Sequence
  Oligonucleotide for detection of SNP TSC0046354
aataaaaatatta

SEQ ID NO: 188264 - DNA, 13 bp, Artificial Sequence
  Oligonucleotide for detection of SNP TSC0046354
taatatttttatt

SEQ ID NO: 188265 - DNA, 13 bp, Artificial Sequence
  Oligonucleotide for detection of SNP TSC0046354
aataaatatatta

SEQ ID NO: 188266 - DNA, 13 bp, Artificial Sequence
  Oligonucleotide for detection of SNP TSC0046354
taatatatttatt

SEQ ID NO: 188267 - DNA, 13 bp, Artificial Sequence
  Oligonucleotide for detection of SNP TSC0046355
tgtatgaattttt

SEQ ID NO: 188268 - DNA, 13 bp, Artificial Sequence
  Oligonucleotide for detection of SNP TSC0046355
aaaaattcataca

SEQ ID NO: 188269 - DNA, 13 bp, Artificial Sequence
  Oligonucleotide for detection of SNP TSC0046355
tgtatgtattttt

SEQ ID NO: 188270 - DNA, 13 bp, Artificial Sequence
  Oligonucleotide for detection of SNP TSC0046355
aaaaatacataca

SEQ ID NO: 188271 - DNA, 13 bp, Artificial Sequence
  Oligonucleotide for detection of SNP TSC0046356
atagaggatataa

SEQ ID NO: 188272 - DNA, 13 bp, Artificial Sequence
  Oligonucleotide for detection of SNP TSC0046356
ttatatcctctat

SEQ ID NO: 188273 - DNA, 13 bp, Artificial Sequence
  Oligonucleotide for detection of SNP TSC0046356
atagagaatataa

SEQ ID NO: 188274 - DNA, 13 bp, Artificial Sequence
  Oligonucleotide for detection of SNP TSC0046356
ttatattctctat

SEQ ID NO: 188275 - DNA, 13 bp, Artificial Sequence
  Oligonucleotide for detection of SNP TSC0046357
gaaaaatggaaay

SEQ ID NO: 188276 - DNA, 13 bp, Artificial Sequence
  Oligonucleotide for detection of SNP TSC0046357
rtttccatttttc

SEQ ID NO: 188277 - DNA, 13 bp, Artificial Sequence
  Oligonucleotide for detection of SNP TSC0046357
gaaaaacggaaay

SEQ ID NO: 188278 - DNA, 13 bp, Artificial Sequence
  Oligonucleotide for detection of SNP TSC0046357
rtttccgtttttc

SEQ ID NO: 188279 - DNA, 13 bp, Artificial Sequence
  Oligonucleotide for detection of SNP TSC0046358
atgtggagttgaa

SEQ ID NO: 188280 - DNA, 13 bp, Artificial Sequence
  Oligonucleotide for detection of SNP TSC0046358
ttcaactccacat

SEQ ID NO: 188281 - DNA, 13 bp, Artificial Sequence
  Oligonucleotide for detection of SNP TSC0046358
atgtggggttgaa

SEQ ID NO: 188282 - DNA, 13 bp, Artificial Sequence
  Oligonucleotide for detection of SNP TSC0046358
ttcaaccccacat

SEQ ID NO: 188283 - DNA, 13 bp, Artificial Sequence
  Oligonucleotide for detection of SNP TSC0046360
gaaattattatay

SEQ ID NO: 188284 - DNA, 13 bp, Artificial Sequence
  Oligonucleotide for detection of SNP TSC0046360
rtataataatttc

SEQ ID NO: 188285 - DNA, 13 bp, Artificial Sequence
  Oligonucleotide for detection of SNP TSC0046360
gaaattgttatay

SEQ ID NO: 188286 - DNA, 13 bp, Artificial Sequence
  Oligonucleotide for detection of SNP TSC0046360
rtataacaatttc

SEQ ID NO: 188287 - DNA, 13 bp, Artificial Sequence
  Oligonucleotide for detection of SNP TSC0046362
tttttgatattag

SEQ ID NO: 188288 - DNA, 13 bp, Artificial Sequence
  Oligonucleotide for detection of SNP TSC0046362
ctaatatcaaaaa

SEQ ID NO: 188289 - DNA, 13 bp, Artificial Sequence
  Oligonucleotide for detection of SNP TSC0046362
tttttggtattag

SEQ ID NO: 188290 - DNA, 13 bp, Artificial Sequence
  Oligonucleotide for detection of SNP TSC0046362
ctaataccaaaaa

SEQ ID NO: 188291 - DNA, 13 bp, Artificial Sequence
  Oligonucleotide for detection of SNP TSC0046363
tttagaaatgtgg

SEQ ID NO: 188292 - DNA, 13 bp, Artificial Sequence
  Oligonucleotide for detection of SNP TSC0046363
ccacatttctaaa

SEQ ID NO: 188293 - DNA, 13 bp, Artificial Sequence
  Oligonucleotide for detection of SNP TSC0046363
tttagagatgtgg

SEQ ID NO: 188294 - DNA, 13 bp, Artificial Sequence
  Oligonucleotide for detection of SNP TSC0046363
ccacatctctaaa

SEQ ID NO: 188295 - DNA, 13 bp, Artificial Sequence
  Oligonucleotide for detection of SNP TSC0046364
tttgaaagtatta

SEQ ID NO: 188296 - DNA, 13 bp, Artificial Sequence
  Oligonucleotide for detection of SNP TSC0046364
taatactttcaaa

SEQ ID NO: 188297 - DNA, 13 bp, Artificial Sequence
  Oligonucleotide for detection of SNP TSC0046364
tttgaatgtatta

SEQ ID NO: 188298 - DNA, 13 bp, Artificial Sequence
  Oligonucleotide for detection of SNP TSC0046364
taatacattcaaa

SEQ ID NO: 188299 - DNA, 13 bp, Artificial Sequence
  Oligonucleotide for detection of SNP TSC0046364
tagtatttttaag

SEQ ID NO: 188300 - DNA, 13 bp, Artificial Sequence
  Oligonucleotide for detection of SNP TSC0046364
cttaaaaatacta

SEQ ID NO: 188301 - DNA, 13 bp, Artificial Sequence
  Oligonucleotide for detection of SNP TSC0046364
tagtatatttaag

SEQ ID NO: 188302 - DNA, 13 bp, Artificial Sequence
  Oligonucleotide for detection of SNP TSC0046364
cttaaatatacta

SEQ ID NO: 188303 - DNA, 13 bp, Artificial Sequence
  Oligonucleotide for detection of SNP TSC0046367
gggaatatattgt

SEQ ID NO: 188304 - DNA, 13 bp, Artificial Sequence
  Oligonucleotide for detection of SNP TSC0046367
acaatatattccc

SEQ ID NO: 188305 - DNA, 13 bp, Artificial Sequence
  Oligonucleotide for detection of SNP TSC0046367
gggaatttattgt

SEQ ID NO: 188306 - DNA, 13 bp, Artificial Sequence
  Oligonucleotide for detection of SNP TSC0046367
acaataaattccc

SEQ ID NO: 188307 - DNA, 13 bp, Artificial Sequence
  Oligonucleotide for detection of SNP TSC0046367
atagtgtatttty

SEQ ID NO: 188308 - DNA, 13 bp, Artificial Sequence
  Oligonucleotide for detection of SNP TSC0046367
raaaatacactat

SEQ ID NO: 188309 - DNA, 13 bp, Artificial Sequence
  Oligonucleotide for detection of SNP TSC0046367
atagtggatttty

SEQ ID NO: 188310 - DNA, 13 bp, Artificial Sequence
  Oligonucleotide for detection of SNP TSC0046367
raaaatccactat

SEQ ID NO: 188311 - DNA, 13 bp, Artificial Sequence
  Oligonucleotide for detection of SNP TSC0046374
taaatgatattag

SEQ ID NO: 188312 - DNA, 13 bp, Artificial Sequence
  Oligonucleotide for detection of SNP TSC0046374
ctaatatcattta

SEQ ID NO: 188313 - DNA, 13 bp, Artificial Sequence
  Oligonucleotide for detection of SNP TSC0046374
taaatgttattag

SEQ ID NO: 188314 - DNA, 13 bp, Artificial Sequence
  Oligonucleotide for detection of SNP TSC0046374
ctaataacattta

SEQ ID NO: 188315 - DNA, 13 bp, Artificial Sequence
  Oligonucleotide for detection of SNP TSC0046374
taaacgatattag

SEQ ID NO: 188316 - DNA, 13 bp, Artificial Sequence
  Oligonucleotide for detection of SNP TSC0046374
ctaatatcgttta

SEQ ID NO: 188317 - DNA, 13 bp, Artificial Sequence
  Oligonucleotide for detection of SNP TSC0046374
taaacgttattag

SEQ ID NO: 188318 - DNA, 13 bp, Artificial Sequence
  Oligonucleotide for detection of SNP TSC0046374
ctaataacgttta

SEQ ID NO: 188319 - DNA, 13 bp, Artificial Sequence
  Oligonucleotide for detection of SNP TSC0046374
ttgatattgtttg

SEQ ID NO: 188320 - DNA, 13 bp, Artificial Sequence
  Oligonucleotide for detection of SNP TSC0046374
caaacaatatcaa

SEQ ID NO: 188321 - DNA, 13 bp, Artificial Sequence
  Oligonucleotide for detection of SNP TSC0046374
ttgatagtgtttg

SEQ ID NO: 188322 - DNA, 13 bp, Artificial Sequence
  Oligonucleotide for detection of SNP TSC0046374
caaacactatcaa

SEQ ID NO: 188323 - DNA, 13 bp, Artificial Sequence
  Oligonucleotide for detection of SNP TSC0046374
ttgatatcgtttg

SEQ ID NO: 188324 - DNA, 13 bp, Artificial Sequence
  Oligonucleotide for detection of SNP TSC0046374
caaacgatatcaa

SEQ ID NO: 188325 - DNA, 13 bp, Artificial Sequence
  Oligonucleotide for detection of SNP TSC0046374
ttgatagcgtttg

SEQ ID NO: 188326 - DNA, 13 bp, Artificial Sequence
  Oligonucleotide for detection of SNP TSC0046374
caaacgctatcaa

SEQ ID NO: 188327 - DNA, 13 bp, Artificial Sequence
  Oligonucleotide for detection of SNP TSC0046377
atggttgttttag

SEQ ID NO: 188328 - DNA, 13 bp, Artificial Sequence
  Oligonucleotide for detection of SNP TSC0046377
ctaaaacaaccat

SEQ ID NO: 188329 - DNA, 13 bp, Artificial Sequence
  Oligonucleotide for detection of SNP TSC0046383
tttttaaatgtta

SEQ ID NO: 188330 - DNA, 13 bp, Artificial Sequence
  Oligonucleotide for detection of SNP TSC0046383
taacatttaaaaa

SEQ ID NO: 188331 - DNA, 13 bp, Artificial Sequence
  Oligonucleotide for detection of SNP TSC0046390
aaatttggaatag

SEQ ID NO: 188332 - DNA, 13 bp, Artificial Sequence
  Oligonucleotide for detection of SNP TSC0046390
ctattccaaattt

SEQ ID NO: 188333 - DNA, 13 bp, Artificial Sequence
  Oligonucleotide for detection of SNP TSC0046390
aaatttagaatag

SEQ ID NO: 188334 - DNA, 13 bp, Artificial Sequence
  Oligonucleotide for detection of SNP TSC0046390
ctattctaaattt

SEQ ID NO: 188335 - DNA, 13 bp, Artificial Sequence
  Oligonucleotide for detection of SNP TSC0046391
gggaataatatty

SEQ ID NO: 188336 - DNA, 13 bp, Artificial Sequence
  Oligonucleotide for detection of SNP TSC0046391
raatattattccc

SEQ ID NO: 188337 - DNA, 13 bp, Artificial Sequence
  Oligonucleotide for detection of SNP TSC0046391
gggaatgatatty

SEQ ID NO: 188338 - DNA, 13 bp, Artificial Sequence
  Oligonucleotide for detection of SNP TSC0046391
raatatcattccc

SEQ ID NO: 188339 - DNA, 13 bp, Artificial Sequence
  Oligonucleotide for detection of SNP TSC0046392
agtattatttagt

SEQ ID NO: 188340 - DNA, 13 bp, Artificial Sequence
  Oligonucleotide for detection of SNP TSC0046392
actaaataatact

SEQ ID NO: 188341 - DNA, 13 bp, Artificial Sequence
  Oligonucleotide for detection of SNP TSC0046392
agtattgtttagt

SEQ ID NO: 188342 - DNA, 13 bp, Artificial Sequence
  Oligonucleotide for detection of SNP TSC0046392
actaaacaatact

SEQ ID NO: 188343 - DNA, 13 bp, Artificial Sequence
  Oligonucleotide for detection of SNP TSC0046392
agtatcgtttagt

SEQ ID NO: 188344 - DNA, 13 bp, Artificial Sequence
  Oligonucleotide for detection of SNP TSC0046392
actaaacgatact

SEQ ID NO: 188345 - DNA, 13 bp, Artificial Sequence
  Oligonucleotide for detection of SNP TSC0046392
attgaatggtatt

SEQ ID NO: 188346 - DNA, 13 bp, Artificial Sequence
  Oligonucleotide for detection of SNP TSC0046392
aataccattcaat

SEQ ID NO: 188347 - DNA, 13 bp, Artificial Sequence
  Oligonucleotide for detection of SNP TSC0046392
attgaacggtatt

SEQ ID NO: 188348 - DNA, 13 bp, Artificial Sequence
  Oligonucleotide for detection of SNP TSC0046392
aataccgttcaat

SEQ ID NO: 188349 - DNA, 13 bp, Artificial Sequence
  Oligonucleotide for detection of SNP TSC0046393
ttagagtatttta

SEQ ID NO: 188350 - DNA, 13 bp, Artificial Sequence
  Oligonucleotide for detection of SNP TSC0046393
taaaatactctaa

SEQ ID NO: 188351 - DNA, 13 bp, Artificial Sequence
  Oligonucleotide for detection of SNP TSC0046393
ttagaggatttta

SEQ ID NO: 188352 - DNA, 13 bp, Artificial Sequence
  Oligonucleotide for detection of SNP TSC0046393
taaaatcctctaa

SEQ ID NO: 188353 - DNA, 13 bp, Artificial Sequence
  Oligonucleotide for detection of SNP TSC0046393
taaggtattttgg

SEQ ID NO: 188354 - DNA, 13 bp, Artificial Sequence
  Oligonucleotide for detection of SNP TSC0046393
ccaaaatacctta

SEQ ID NO: 188355 - DNA, 13 bp, Artificial Sequence
  Oligonucleotide for detection of SNP TSC0046393
taaggttttttgg

SEQ ID NO: 188356 - DNA, 13 bp, Artificial Sequence
  Oligonucleotide for detection of SNP TSC0046393
ccaaaaaacctta

SEQ ID NO: 188357 - DNA, 13 bp, Artificial Sequence
  Oligonucleotide for detection of SNP TSC0046395
gttgtaaattgaa

SEQ ID NO: 188358 - DNA, 13 bp, Artificial Sequence
  Oligonucleotide for detection of SNP TSC0046395
ttcaatttacaac

SEQ ID NO: 188359 - DNA, 13 bp, Artificial Sequence
  Oligonucleotide for detection of SNP TSC0046395
gttgtatattgaa

SEQ ID NO: 188360 - DNA, 13 bp, Artificial Sequence
  Oligonucleotide for detection of SNP TSC0046395
ttcaatatacaac

SEQ ID NO: 188361 - DNA, 13 bp, Artificial Sequence
  Oligonucleotide for detection of SNP TSC0046395
gtcgtaaattgaa

SEQ ID NO: 188362 - DNA, 13 bp, Artificial Sequence
  Oligonucleotide for detection of SNP TSC0046395
ttcaatttacgac

SEQ ID NO: 188363 - DNA, 13 bp, Artificial Sequence
  Oligonucleotide for detection of SNP TSC0046395
gtcgtatattgaa

SEQ ID NO: 188364 - DNA, 13 bp, Artificial Sequence
  Oligonucleotide for detection of SNP TSC0046395
ttcaatatacgac

SEQ ID NO: 188365 - DNA, 13 bp, Artificial Sequence
  Oligonucleotide for detection of SNP TSC0046395
tttagtttgtggy

SEQ ID NO: 188366 - DNA, 13 bp, Artificial Sequence
  Oligonucleotide for detection of SNP TSC0046395
rccacaaactaaa

SEQ ID NO: 188367 - DNA, 13 bp, Artificial Sequence
  Oligonucleotide for detection of SNP TSC0046395
tttagtatgtggy

SEQ ID NO: 188368 - DNA, 13 bp, Artificial Sequence
  Oligonucleotide for detection of SNP TSC0046395
rccacatactaaa

SEQ ID NO: 188369 - DNA, 13 bp, Artificial Sequence
  Oligonucleotide for detection of SNP TSC0046395
tttagtttgcggy

SEQ ID NO: 188370 - DNA, 13 bp, Artificial Sequence
  Oligonucleotide for detection of SNP TSC0046395
rccgcaaactaaa

SEQ ID NO: 188371 - DNA, 13 bp, Artificial Sequence
  Oligonucleotide for detection of SNP TSC0046395
tttagtatgcggy

SEQ ID NO: 188372 - DNA, 13 bp, Artificial Sequence
  Oligonucleotide for detection of SNP TSC0046395
rccgcatactaaa

SEQ ID NO: 188373 - DNA, 13 bp, Artificial Sequence
  Oligonucleotide for detection of SNP TSC0046396
tttagtaggagaa

SEQ ID NO: 188374 - DNA, 13 bp, Artificial Sequence
  Oligonucleotide for detection of SNP TSC0046396
ttctcctactaaa

SEQ ID NO: 188375 - DNA, 13 bp, Artificial Sequence
  Oligonucleotide for detection of SNP TSC0046396
tttagtgggagaa

SEQ ID NO: 188376 - DNA, 13 bp, Artificial Sequence
  Oligonucleotide for detection of SNP TSC0046396
ttctcccactaaa

SEQ ID NO: 188377 - DNA, 13 bp, Artificial Sequence
  Oligonucleotide for detection of SNP TSC0046399
tattatatattaa

SEQ ID NO: 188378 - DNA, 13 bp, Artificial Sequence
  Oligonucleotide for detection of SNP TSC0046399
ttaatatataata

SEQ ID NO: 188379 - DNA, 13 bp, Artificial Sequence
  Oligonucleotide for detection of SNP TSC0046399
ttggtatgtaata

SEQ ID NO: 188380 - DNA, 13 bp, Artificial Sequence
  Oligonucleotide for detection of SNP TSC0046399
tattacataccaa

SEQ ID NO: 188381 - DNA, 13 bp, Artificial Sequence
  Oligonucleotide for detection of SNP TSC0046399
ttggtaggtaata

SEQ ID NO: 188382 - DNA, 13 bp, Artificial Sequence
  Oligonucleotide for detection of SNP TSC0046399
tattacctaccaa

SEQ ID NO: 188383 - DNA, 13 bp, Artificial Sequence
  Oligonucleotide for detection of SNP TSC0046400
ttttgttttatta

SEQ ID NO: 188384 - DNA, 13 bp, Artificial Sequence
  Oligonucleotide for detection of SNP TSC0046400
taataaaacaaaa

SEQ ID NO: 188385 - DNA, 13 bp, Artificial Sequence
  Oligonucleotide for detection of SNP TSC0046400
tggtgaggtagga

SEQ ID NO: 188386 - DNA, 13 bp, Artificial Sequence
  Oligonucleotide for detection of SNP TSC0046400
tcctacctcacca

SEQ ID NO: 188387 - DNA, 13 bp, Artificial Sequence
  Oligonucleotide for detection of SNP TSC0046400
tggtgatgtagga

SEQ ID NO: 188388 - DNA, 13 bp, Artificial Sequence
  Oligonucleotide for detection of SNP TSC0046400
tcctacatcacca

SEQ ID NO: 188389 - DNA, 13 bp, Artificial Sequence
  Oligonucleotide for detection of SNP TSC0046400
tggtgacgtagga

SEQ ID NO: 188390 - DNA, 13 bp, Artificial Sequence
  Oligonucleotide for detection of SNP TSC0046400
tcctacgtcacca

SEQ ID NO: 188391 - DNA, 13 bp, Artificial Sequence
  Oligonucleotide for detection of SNP TSC0046404
taagtttggtaga

SEQ ID NO: 188392 - DNA, 13 bp, Artificial Sequence
  Oligonucleotide for detection of SNP TSC0046404
tctaccaaactta

SEQ ID NO: 188393 - DNA, 13 bp, Artificial Sequence
  Oligonucleotide for detection of SNP TSC0046404
taagttgggtaga

SEQ ID NO: 188394 - DNA, 13 bp, Artificial Sequence
  Oligonucleotide for detection of SNP TSC0046404
tctacccaactta

SEQ ID NO: 188395 - DNA, 13 bp, Artificial Sequence
  Oligonucleotide for detection of SNP TSC0046404
tttattaaatttg

SEQ ID NO: 188396 - DNA, 13 bp, Artificial Sequence
  Oligonucleotide for detection of SNP TSC0046404
caaatttaataaa

SEQ ID NO: 188397 - DNA, 13 bp, Artificial Sequence
  Oligonucleotide for detection of SNP TSC0046404
tttatttaatttg

SEQ ID NO: 188398 - DNA, 13 bp, Artificial Sequence
  Oligonucleotide for detection of SNP TSC0046404
caaattaaataaa

SEQ ID NO: 188399 - DNA, 13 bp, Artificial Sequence
  Oligonucleotide for detection of SNP TSC0046405
gaggttattttay

SEQ ID NO: 188400 - DNA, 13 bp, Artificial Sequence
  Oligonucleotide for detection of SNP TSC0046405
rtaaaataacctc

SEQ ID NO: 188401 - DNA, 13 bp, Artificial Sequence
  Oligonucleotide for detection of SNP TSC0046405
gaggttgttttay

SEQ ID NO: 188402 - DNA, 13 bp, Artificial Sequence
  Oligonucleotide for detection of SNP TSC0046405
rtaaaacaacctc

SEQ ID NO: 188403 - DNA, 13 bp, Artificial Sequence
  Oligonucleotide for detection of SNP TSC0046405
gaggtcgttttay

SEQ ID NO: 188404 - DNA, 13 bp, Artificial Sequence
  Oligonucleotide for detection of SNP TSC0046405
rtaaaacgacctc

SEQ ID NO: 188405 - DNA, 13 bp, Artificial Sequence
  Oligonucleotide for detection of SNP TSC0046405
gtaaagtgattty

SEQ ID NO: 188406 - DNA, 13 bp, Artificial Sequence
  Oligonucleotide for detection of SNP TSC0046405
raaatcactttac

SEQ ID NO: 188407 - DNA, 13 bp, Artificial Sequence
  Oligonucleotide for detection of SNP TSC0046405
gtaaagcgattty

SEQ ID NO: 188408 - DNA, 13 bp, Artificial Sequence
  Oligonucleotide for detection of SNP TSC0046405
raaatcgctttac

SEQ ID NO: 188409 - DNA, 13 bp, Artificial Sequence
  Oligonucleotide for detection of SNP TSC0046406
gttgataattagt

SEQ ID NO: 188410 - DNA, 13 bp, Artificial Sequence
  Oligonucleotide for detection of SNP TSC0046406
actaattatcaac

SEQ ID NO: 188411 - DNA, 13 bp, Artificial Sequence
  Oligonucleotide for detection of SNP TSC0046406
gttgatgattagt

SEQ ID NO: 188412 - DNA, 13 bp, Artificial Sequence
  Oligonucleotide for detection of SNP TSC0046406
actaatcatcaac

SEQ ID NO: 188413 - DNA, 13 bp, Artificial Sequence
  Oligonucleotide for detection of SNP TSC0046406
gttgacgattagt

SEQ ID NO: 188414 - DNA, 13 bp, Artificial Sequence
  Oligonucleotide for detection of SNP TSC0046406
actaatcgtcaac

SEQ ID NO: 188415 - DNA, 13 bp, Artificial Sequence
  Oligonucleotide for detection of SNP TSC0046406
attaattgttagy

SEQ ID NO: 188416 - DNA, 13 bp, Artificial Sequence
  Oligonucleotide for detection of SNP TSC0046406
rctaacaattaat

SEQ ID NO: 188417 - DNA, 13 bp, Artificial Sequence
  Oligonucleotide for detection of SNP TSC0046406
attaatcgttagy

SEQ ID NO: 188418 - DNA, 13 bp, Artificial Sequence
  Oligonucleotide for detection of SNP TSC0046406
rctaacgattaat

SEQ ID NO: 188419 - DNA, 13 bp, Artificial Sequence
  Oligonucleotide for detection of SNP TSC0046407
taagtatggatat

SEQ ID NO: 188420 - DNA, 13 bp, Artificial Sequence
  Oligonucleotide for detection of SNP TSC0046407
atatccatactta

SEQ ID NO: 188421 - DNA, 13 bp, Artificial Sequence
  Oligonucleotide for detection of SNP TSC0046407
taagtacggatat

SEQ ID NO: 188422 - DNA, 13 bp, Artificial Sequence
  Oligonucleotide for detection of SNP TSC0046407
atatccgtactta

SEQ ID NO: 188423 - DNA, 13 bp, Artificial Sequence
  Oligonucleotide for detection of SNP TSC0046410
ttgtttagtagat

SEQ ID NO: 188424 - DNA, 13 bp, Artificial Sequence
  Oligonucleotide for detection of SNP TSC0046410
atctactaaacaa

SEQ ID NO: 188425 - DNA, 13 bp, Artificial Sequence
  Oligonucleotide for detection of SNP TSC0046410
ttgtttggtagat

SEQ ID NO: 188426 - DNA, 13 bp, Artificial Sequence
  Oligonucleotide for detection of SNP TSC0046410
atctaccaaacaa

SEQ ID NO: 188427 - DNA, 13 bp, Artificial Sequence
  Oligonucleotide for detection of SNP TSC0046410
tcgtttagtagat

SEQ ID NO: 188428 - DNA, 13 bp, Artificial Sequence
  Oligonucleotide for detection of SNP TSC0046410
atctactaaacga

SEQ ID NO: 188429 - DNA, 13 bp, Artificial Sequence
  Oligonucleotide for detection of SNP TSC0046410
tcgtttggtagat

SEQ ID NO: 188430 - DNA, 13 bp, Artificial Sequence
  Oligonucleotide for detection of SNP TSC0046410
atctaccaaacga

SEQ ID NO: 188431 - DNA, 13 bp, Artificial Sequence
  Oligonucleotide for detection of SNP TSC0046410
ttgttcggtagat

SEQ ID NO: 188432 - DNA, 13 bp, Artificial Sequence
  Oligonucleotide for detection of SNP TSC0046410
atctaccgaacaa

SEQ ID NO: 188433 - DNA, 13 bp, Artificial Sequence
  Oligonucleotide for detection of SNP TSC0046410
tcgttcggtagat

SEQ ID NO: 188434 - DNA, 13 bp, Artificial Sequence
  Oligonucleotide for detection of SNP TSC0046410
atctaccgaacga

SEQ ID NO: 188435 - DNA, 13 bp, Artificial Sequence
  Oligonucleotide for detection of SNP TSC0046410
atttgttgggtgg

SEQ ID NO: 188436 - DNA, 13 bp, Artificial Sequence
  Oligonucleotide for detection of SNP TSC0046410
ccacccaacaaat

SEQ ID NO: 188437 - DNA, 13 bp, Artificial Sequence
  Oligonucleotide for detection of SNP TSC0046410
atttgttgggcgg

SEQ ID NO: 188438 - DNA, 13 bp, Artificial Sequence
  Oligonucleotide for detection of SNP TSC0046410
ccgcccaacaaat

SEQ ID NO: 188439 - DNA, 13 bp, Artificial Sequence
  Oligonucleotide for detection of SNP TSC0046410
atttgtcgggtgg

SEQ ID NO: 188440 - DNA, 13 bp, Artificial Sequence
  Oligonucleotide for detection of SNP TSC0046410
ccacccgacaaat

SEQ ID NO: 188441 - DNA, 13 bp, Artificial Sequence
  Oligonucleotide for detection of SNP TSC0046410
atttgtcgggcgg

SEQ ID NO: 188442 - DNA, 13 bp, Artificial Sequence
  Oligonucleotide for detection of SNP TSC0046410
ccgcccgacaaat

SEQ ID NO: 188443 - DNA, 13 bp, Artificial Sequence
  Oligonucleotide for detection of SNP TSC0046411
ttcgatgtttaty

SEQ ID NO: 188444 - DNA, 13 bp, Artificial Sequence
  Oligonucleotide for detection of SNP TSC0046411
rataaacatcgaa

SEQ ID NO: 188445 - DNA, 13 bp, Artificial Sequence
  Oligonucleotide for detection of SNP TSC0046411
ttcgatatttaty

SEQ ID NO: 188446 - DNA, 13 bp, Artificial Sequence
  Oligonucleotide for detection of SNP TSC0046411
rataaatatcgaa

SEQ ID NO: 188447 - DNA, 13 bp, Artificial Sequence
  Oligonucleotide for detection of SNP TSC0046413
aaaaagaaatata

SEQ ID NO: 188448 - DNA, 13 bp, Artificial Sequence
  Oligonucleotide for detection of SNP TSC0046413
tatatttcttttt

SEQ ID NO: 188449 - DNA, 13 bp, Artificial Sequence
  Oligonucleotide for detection of SNP TSC0046413
aaaaagtaatata

SEQ ID NO: 188450 - DNA, 13 bp, Artificial Sequence
  Oligonucleotide for detection of SNP TSC0046413
tatattacttttt

SEQ ID NO: 188451 - DNA, 13 bp, Artificial Sequence
  Oligonucleotide for detection of SNP TSC0046418
aaaaattaatgat

SEQ ID NO: 188452 - DNA, 13 bp, Artificial Sequence
  Oligonucleotide for detection of SNP TSC0046418
atcattaattttt

SEQ ID NO: 188453 - DNA, 13 bp, Artificial Sequence
  Oligonucleotide for detection of SNP TSC0046418
aaaaatgaatgat

SEQ ID NO: 188454 - DNA, 13 bp, Artificial Sequence
  Oligonucleotide for detection of SNP TSC0046418
atcattcattttt

SEQ ID NO: 188455 - DNA, 13 bp, Artificial Sequence
  Oligonucleotide for detection of SNP TSC0046418
aaaaattaacgat

SEQ ID NO: 188456 - DNA, 13 bp, Artificial Sequence
  Oligonucleotide for detection of SNP TSC0046418
atcgttaattttt

SEQ ID NO: 188457 - DNA, 13 bp, Artificial Sequence
  Oligonucleotide for detection of SNP TSC0046418
aaaaacgaatgat

SEQ ID NO: 188458 - DNA, 13 bp, Artificial Sequence
  Oligonucleotide for detection of SNP TSC0046418
atcattcgttttt

SEQ ID NO: 188459 - DNA, 13 bp, Artificial Sequence
  Oligonucleotide for detection of SNP TSC0046418
aaaaatgaacgat

SEQ ID NO: 188460 - DNA, 13 bp, Artificial Sequence
  Oligonucleotide for detection of SNP TSC0046418
atcgttcattttt

SEQ ID NO: 188461 - DNA, 13 bp, Artificial Sequence
  Oligonucleotide for detection of SNP TSC0046418
aaaaacgaacgat

SEQ ID NO: 188462 - DNA, 13 bp, Artificial Sequence
  Oligonucleotide for detection of SNP TSC0046418
atcgttcgttttt

SEQ ID NO: 188463 - DNA, 13 bp, Artificial Sequence
  Oligonucleotide for detection of SNP TSC0046418
attgttggttttt

SEQ ID NO: 188464 - DNA, 13 bp, Artificial Sequence
  Oligonucleotide for detection of SNP TSC0046418
aaaaaccaacaat

SEQ ID NO: 188465 - DNA, 13 bp, Artificial Sequence
  Oligonucleotide for detection of SNP TSC0046418
attgtttgttttt

SEQ ID NO: 188466 - DNA, 13 bp, Artificial Sequence
  Oligonucleotide for detection of SNP TSC0046418
aaaaacaaacaat

SEQ ID NO: 188467 - DNA, 13 bp, Artificial Sequence
  Oligonucleotide for detection of SNP TSC0046418
atcgttggttttt

SEQ ID NO: 188468 - DNA, 13 bp, Artificial Sequence
  Oligonucleotide for detection of SNP TSC0046418
aaaaaccaacgat

SEQ ID NO: 188469 - DNA, 13 bp, Artificial Sequence
  Oligonucleotide for detection of SNP TSC0046418
atcgtttgttttt

SEQ ID NO: 188470 - DNA, 13 bp, Artificial Sequence
  Oligonucleotide for detection of SNP TSC0046418
aaaaacaaacgat

SEQ ID NO: 188471 - DNA, 13 bp, Artificial Sequence
  Oligonucleotide for detection of SNP TSC0046418
attgttcgttttt

SEQ ID NO: 188472 - DNA, 13 bp, Artificial Sequence
  Oligonucleotide for detection of SNP TSC0046418
aaaaacgaacaat

SEQ ID NO: 188473 - DNA, 13 bp, Artificial Sequence
  Oligonucleotide for detection of SNP TSC0046419
atgatgagagaaa

SEQ ID NO: 188474 - DNA, 13 bp, Artificial Sequence
  Oligonucleotide for detection of SNP TSC0046419
tttctctcatcat

SEQ ID NO: 188475 - DNA, 13 bp, Artificial Sequence
  Oligonucleotide for detection of SNP TSC0046419
atgatgtgagaaa

SEQ ID NO: 188476 - DNA, 13 bp, Artificial Sequence
  Oligonucleotide for detection of SNP TSC0046419
tttctcacatcat

SEQ ID NO: 188477 - DNA, 13 bp, Artificial Sequence
  Oligonucleotide for detection of SNP TSC0046420
ggttttggggttt

SEQ ID NO: 188478 - DNA, 13 bp, Artificial Sequence
  Oligonucleotide for detection of SNP TSC0046420
aaaccccaaaacc

SEQ ID NO: 188479 - DNA, 13 bp, Artificial Sequence
  Oligonucleotide for detection of SNP TSC0046420
ggttttagggttt

SEQ ID NO: 188480 - DNA, 13 bp, Artificial Sequence
  Oligonucleotide for detection of SNP TSC0046420
aaaccctaaaacc

SEQ ID NO: 188481 - DNA, 13 bp, Artificial Sequence
  Oligonucleotide for detection of SNP TSC0006061
agaggtgtggagg

SEQ ID NO: 188482 - DNA, 13 bp, Artificial Sequence
  Oligonucleotide for detection of SNP TSC0006061
cctccacacctct

SEQ ID NO: 188483 - DNA, 13 bp, Artificial Sequence
  Oligonucleotide for detection of SNP TSC0006061
agaggtatggagg

SEQ ID NO: 188484 - DNA, 13 bp, Artificial Sequence
  Oligonucleotide for detection of SNP TSC0006061
cctccatacctct

SEQ ID NO: 188485 - DNA, 13 bp, Artificial Sequence
  Oligonucleotide for detection of SNP TSC0006061
agaggcgtggagg

SEQ ID NO: 188486 - DNA, 13 bp, Artificial Sequence
  Oligonucleotide for detection of SNP TSC0006061
cctccacgcctct

SEQ ID NO: 188487 - DNA, 13 bp, Artificial Sequence
  Oligonucleotide for detection of SNP TSC0046421
gaaggagttgaat

SEQ ID NO: 188488 - DNA, 13 bp, Artificial Sequence
  Oligonucleotide for detection of SNP TSC0046421
attcaactccttc

SEQ ID NO: 188489 - DNA, 13 bp, Artificial Sequence
  Oligonucleotide for detection of SNP TSC0046421
gaaggatttgaat

SEQ ID NO: 188490 - DNA, 13 bp, Artificial Sequence
  Oligonucleotide for detection of SNP TSC0046421
attcaaatccttc

SEQ ID NO: 188491 - DNA, 13 bp, Artificial Sequence
  Oligonucleotide for detection of SNP TSC0046422
agaatttggatty

SEQ ID NO: 188492 - DNA, 13 bp, Artificial Sequence
  Oligonucleotide for detection of SNP TSC0046422
raatccaaattct

SEQ ID NO: 188493 - DNA, 13 bp, Artificial Sequence
  Oligonucleotide for detection of SNP TSC0046422
agaattgggatty

SEQ ID NO: 188494 - DNA, 13 bp, Artificial Sequence
  Oligonucleotide for detection of SNP TSC0046422
raatcccaattct

SEQ ID NO: 188495 - DNA, 13 bp, Artificial Sequence
  Oligonucleotide for detection of SNP TSC0046422
ggatttaagtttt

SEQ ID NO: 188496 - DNA, 13 bp, Artificial Sequence
  Oligonucleotide for detection of SNP TSC0046422
aaaacttaaatcc

SEQ ID NO: 188497 - DNA, 13 bp, Artificial Sequence
  Oligonucleotide for detection of SNP TSC0046422
ggattttagtttt

SEQ ID NO: 188498 - DNA, 13 bp, Artificial Sequence
  Oligonucleotide for detection of SNP TSC0046422
aaaactaaaatcc

SEQ ID NO: 188499 - DNA, 13 bp, Artificial Sequence
  Oligonucleotide for detection of SNP TSC0046423
aaatataatttgt

SEQ ID NO: 188500 - DNA, 13 bp, Artificial Sequence
  Oligonucleotide for detection of SNP TSC0046423
acaaattatattt

SEQ ID NO: 188501 - DNA, 13 bp, Artificial Sequence
  Oligonucleotide for detection of SNP TSC0046423
aaatatgatttgt

SEQ ID NO: 188502 - DNA, 13 bp, Artificial Sequence
  Oligonucleotide for detection of SNP TSC0046423
acaaatcatattt

SEQ ID NO: 188503 - DNA, 13 bp, Artificial Sequence
  Oligonucleotide for detection of SNP TSC0046424
tagttttggatgg

SEQ ID NO: 188504 - DNA, 13 bp, Artificial Sequence
  Oligonucleotide for detection of SNP TSC0046424
ccatccaaaacta

SEQ ID NO: 188505 - DNA, 13 bp, Artificial Sequence
  Oligonucleotide for detection of SNP TSC0046424
tagtttcggatgg

SEQ ID NO: 188506 - DNA, 13 bp, Artificial Sequence
  Oligonucleotide for detection of SNP TSC0046424
ccatccgaaacta

SEQ ID NO: 188507 - DNA, 13 bp, Artificial Sequence
  Oligonucleotide for detection of SNP TSC0046424
ttatttggaattg

SEQ ID NO: 188508 - DNA, 13 bp, Artificial Sequence
  Oligonucleotide for detection of SNP TSC0046424
caattccaaataa

SEQ ID NO: 188509 - DNA, 13 bp, Artificial Sequence
  Oligonucleotide for detection of SNP TSC0046424
ttatttagaattg

SEQ ID NO: 188510 - DNA, 13 bp, Artificial Sequence
  Oligonucleotide for detection of SNP TSC0046424
caattctaaataa

SEQ ID NO: 188511 - DNA, 13 bp, Artificial Sequence
  Oligonucleotide for detection of SNP TSC0046424
ttattcggaattg

SEQ ID NO: 188512 - DNA, 13 bp, Artificial Sequence
  Oligonucleotide for detection of SNP TSC0046424
caattccgaataa

SEQ ID NO: 188513 - DNA, 13 bp, Artificial Sequence
  Oligonucleotide for detection of SNP TSC0046425
gtttatagggaag

SEQ ID NO: 188514 - DNA, 13 bp, Artificial Sequence
  Oligonucleotide for detection of SNP TSC0046425
cttccctataaac

SEQ ID NO: 188515 - DNA, 13 bp, Artificial Sequence
  Oligonucleotide for detection of SNP TSC0046425
gtttatggggaag

SEQ ID NO: 188516 - DNA, 13 bp, Artificial Sequence
  Oligonucleotide for detection of SNP TSC0046425
cttccccataaac

SEQ ID NO: 188517 - DNA, 13 bp, Artificial Sequence
  Oligonucleotide for detection of SNP TSC0046425
gtttacggggaag

SEQ ID NO: 188518 - DNA, 13 bp, Artificial Sequence
  Oligonucleotide for detection of SNP TSC0046425
cttccccgtaaac

SEQ ID NO: 188519 - DNA, 13 bp, Artificial Sequence
  Oligonucleotide for detection of SNP TSC0046425
tttttttgtgaay

SEQ ID NO: 188520 - DNA, 13 bp, Artificial Sequence
  Oligonucleotide for detection of SNP TSC0046425
rttcacaaaaaaa

SEQ ID NO: 188521 - DNA, 13 bp, Artificial Sequence
  Oligonucleotide for detection of SNP TSC0046425
ttttttcgtgaay

SEQ ID NO: 188522 - DNA, 13 bp, Artificial Sequence
  Oligonucleotide for detection of SNP TSC0046425
rttcacgaaaaaa

SEQ ID NO: 188523 - DNA, 13 bp, Artificial Sequence
  Oligonucleotide for detection of SNP TSC0046426
tagtatatgggtt

SEQ ID NO: 188524 - DNA, 13 bp, Artificial Sequence
  Oligonucleotide for detection of SNP TSC0046426
aacccatatacta

SEQ ID NO: 188525 - DNA, 13 bp, Artificial Sequence
  Oligonucleotide for detection of SNP TSC0046426
tagtatgtgggtt

SEQ ID NO: 188526 - DNA, 13 bp, Artificial Sequence
  Oligonucleotide for detection of SNP TSC0046426
aacccacatacta

SEQ ID NO: 188527 - DNA, 13 bp, Artificial Sequence
  Oligonucleotide for detection of SNP TSC0046426
tagtacgtgggtt

SEQ ID NO: 188528 - DNA, 13 bp, Artificial Sequence
  Oligonucleotide for detection of SNP TSC0046426
aacccacgtacta

SEQ ID NO: 188529 - DNA, 13 bp, Artificial Sequence
  Oligonucleotide for detection of SNP TSC0046426
agtttatgtattg

SEQ ID NO: 188530 - DNA, 13 bp, Artificial Sequence
  Oligonucleotide for detection of SNP TSC0046426
caatacataaact

SEQ ID NO: 188531 - DNA, 13 bp, Artificial Sequence
  Oligonucleotide for detection of SNP TSC0046426
agtttacgtattg

SEQ ID NO: 188532 - DNA, 13 bp, Artificial Sequence
  Oligonucleotide for detection of SNP TSC0046426
caatacgtaaact

SEQ ID NO: 188533 - DNA, 13 bp, Artificial Sequence
  Oligonucleotide for detection of SNP TSC0046427
aagatatgtaaga

SEQ ID NO: 188534 - DNA, 13 bp, Artificial Sequence
  Oligonucleotide for detection of SNP TSC0046427
tcttacatatctt

SEQ ID NO: 188535 - DNA, 13 bp, Artificial Sequence
  Oligonucleotide for detection of SNP TSC0046427
aagatacgtaaga

SEQ ID NO: 188536 - DNA, 13 bp, Artificial Sequence
  Oligonucleotide for detection of SNP TSC0046427
tcttacgtatctt

SEQ ID NO: 188537 - DNA, 13 bp, Artificial Sequence
  Oligonucleotide for detection of SNP TSC0046428
atgtttattttgg

SEQ ID NO: 188538 - DNA, 13 bp, Artificial Sequence
  Oligonucleotide for detection of SNP TSC0046428
ccaaaataaacat

SEQ ID NO: 188539 - DNA, 13 bp, Artificial Sequence
  Oligonucleotide for detection of SNP TSC0046428
atgtttgttttgg

SEQ ID NO: 188540 - DNA, 13 bp, Artificial Sequence
  Oligonucleotide for detection of SNP TSC0046428
ccaaaacaaacat

SEQ ID NO: 188541 - DNA, 13 bp, Artificial Sequence
  Oligonucleotide for detection of SNP TSC0046428
atgttcgttttgg

SEQ ID NO: 188542 - DNA, 13 bp, Artificial Sequence
  Oligonucleotide for detection of SNP TSC0046428
ccaaaacgaacat

SEQ ID NO: 188543 - DNA, 13 bp, Artificial Sequence
  Oligonucleotide for detection of SNP TSC0046428
ttaaaatgggtat

SEQ ID NO: 188544 - DNA, 13 bp, Artificial Sequence
  Oligonucleotide for detection of SNP TSC0046428
atacccattttaa

SEQ ID NO: 188545 - DNA, 13 bp, Artificial Sequence
  Oligonucleotide for detection of SNP TSC0046428
ttaaaacgggtat

SEQ ID NO: 188546 - DNA, 13 bp, Artificial Sequence
  Oligonucleotide for detection of SNP TSC0046428
atacccgttttaa

SEQ ID NO: 188547 - DNA, 13 bp, Artificial Sequence
  Oligonucleotide for detection of SNP TSC0046429
tatattgttgtay

SEQ ID NO: 188548 - DNA, 13 bp, Artificial Sequence
  Oligonucleotide for detection of SNP TSC0046429
rtacaacaatata

SEQ ID NO: 188549 - DNA, 13 bp, Artificial Sequence
  Oligonucleotide for detection of SNP TSC0046430
gaatttagtaggy

SEQ ID NO: 188550 - DNA, 13 bp, Artificial Sequence
  Oligonucleotide for detection of SNP TSC0046430
rcctactaaattc

SEQ ID NO: 188551 - DNA, 13 bp, Artificial Sequence
  Oligonucleotide for detection of SNP TSC0046430
gaatttggtaggy

SEQ ID NO: 188552 - DNA, 13 bp, Artificial Sequence
  Oligonucleotide for detection of SNP TSC0046430
rcctaccaaattc

SEQ ID NO: 188553 - DNA, 13 bp, Artificial Sequence
  Oligonucleotide for detection of SNP TSC0046430
gaattcggtaggy

SEQ ID NO: 188554 - DNA, 13 bp, Artificial Sequence
  Oligonucleotide for detection of SNP TSC0046430
rcctaccgaattc

SEQ ID NO: 188555 - DNA, 13 bp, Artificial Sequence
  Oligonucleotide for detection of SNP TSC0046430
gtttattgggtty

SEQ ID NO: 188556 - DNA, 13 bp, Artificial Sequence
  Oligonucleotide for detection of SNP TSC0046430
raacccaataaac

SEQ ID NO: 188557 - DNA, 13 bp, Artificial Sequence
  Oligonucleotide for detection of SNP TSC0046430
gtttatcgggtty

SEQ ID NO: 188558 - DNA, 13 bp, Artificial Sequence
  Oligonucleotide for detection of SNP TSC0046430
raacccgataaac

SEQ ID NO: 188559 - DNA, 13 bp, Artificial Sequence
  Oligonucleotide for detection of SNP TSC0046431
aggattgtaaaat

SEQ ID NO: 188560 - DNA, 13 bp, Artificial Sequence
  Oligonucleotide for detection of SNP TSC0046431
attttacaatcct

SEQ ID NO: 188561 - DNA, 13 bp, Artificial Sequence
  Oligonucleotide for detection of SNP TSC0046431
aggattataaaat

SEQ ID NO: 188562 - DNA, 13 bp, Artificial Sequence
  Oligonucleotide for detection of SNP TSC0046431
attttataatcct

SEQ ID NO: 188563 - DNA, 13 bp, Artificial Sequence
  Oligonucleotide for detection of SNP TSC0010549
aataaatgaaaga

SEQ ID NO: 188564 - DNA, 13 bp, Artificial Sequence
  Oligonucleotide for detection of SNP TSC0010549
tctttcatttatt

SEQ ID NO: 188565 - DNA, 13 bp, Artificial Sequence
  Oligonucleotide for detection of SNP TSC0010549
aataaaagaaaga

SEQ ID NO: 188566 - DNA, 13 bp, Artificial Sequence
  Oligonucleotide for detection of SNP TSC0010549
tctttcttttatt

SEQ ID NO: 188567 - DNA, 13 bp, Artificial Sequence
  Oligonucleotide for detection of SNP TSC0046433
ttgtatattagty

SEQ ID NO: 188568 - DNA, 13 bp, Artificial Sequence
  Oligonucleotide for detection of SNP TSC0046433
ractaatatacaa

SEQ ID NO: 188569 - DNA, 13 bp, Artificial Sequence
  Oligonucleotide for detection of SNP TSC0046433
ttgtatgttagty

SEQ ID NO: 188570 - DNA, 13 bp, Artificial Sequence
  Oligonucleotide for detection of SNP TSC0046433
ractaacatacaa

SEQ ID NO: 188571 - DNA, 13 bp, Artificial Sequence
  Oligonucleotide for detection of SNP TSC0046433
ttgtacgttagty

SEQ ID NO: 188572 - DNA, 13 bp, Artificial Sequence
  Oligonucleotide for detection of SNP TSC0046433
ractaacgtacaa

SEQ ID NO: 188573 - DNA, 13 bp, Artificial Sequence
  Oligonucleotide for detection of SNP TSC0046433
gattggtgtgtag

SEQ ID NO: 188574 - DNA, 13 bp, Artificial Sequence
  Oligonucleotide for detection of SNP TSC0046433
ctacacaccaatc

SEQ ID NO: 188575 - DNA, 13 bp, Artificial Sequence
  Oligonucleotide for detection of SNP TSC0046433
gattggcgtgtag

SEQ ID NO: 188576 - DNA, 13 bp, Artificial Sequence
  Oligonucleotide for detection of SNP TSC0046433
ctacacgccaatc

SEQ ID NO: 188577 - DNA, 13 bp, Artificial Sequence
  Oligonucleotide for detection of SNP TSC0046434
agggattgttaat

SEQ ID NO: 188578 - DNA, 13 bp, Artificial Sequence
  Oligonucleotide for detection of SNP TSC0046434
attaacaatccct

SEQ ID NO: 188579 - DNA, 13 bp, Artificial Sequence
  Oligonucleotide for detection of SNP TSC0046434
agggatcgttaat

SEQ ID NO: 188580 - DNA, 13 bp, Artificial Sequence
  Oligonucleotide for detection of SNP TSC0046434
attaacgatccct

SEQ ID NO: 188581 - DNA, 13 bp, Artificial Sequence
  Oligonucleotide for detection of SNP TSC0046434
attagtggttttt

SEQ ID NO: 188582 - DNA, 13 bp, Artificial Sequence
  Oligonucleotide for detection of SNP TSC0046434
aaaaaccactaat

SEQ ID NO: 188583 - DNA, 13 bp, Artificial Sequence
  Oligonucleotide for detection of SNP TSC0046434
attagtagttttt

SEQ ID NO: 188584 - DNA, 13 bp, Artificial Sequence
  Oligonucleotide for detection of SNP TSC0046434
aaaaactactaat

SEQ ID NO: 188585 - DNA, 13 bp, Artificial Sequence
  Oligonucleotide for detection of SNP TSC0046434
attagcggttttt

SEQ ID NO: 188586 - DNA, 13 bp, Artificial Sequence
  Oligonucleotide for detection of SNP TSC0046434
aaaaaccgctaat

SEQ ID NO: 188587 - DNA, 13 bp, Artificial Sequence
  Oligonucleotide for detection of SNP TSC0046436
ttatttaaaaaay

SEQ ID NO: 188588 - DNA, 13 bp, Artificial Sequence
  Oligonucleotide for detection of SNP TSC0046436
rttttttaaataa

SEQ ID NO: 188589 - DNA, 13 bp, Artificial Sequence
  Oligonucleotide for detection of SNP TSC0046436
ttattttaaaaay

SEQ ID NO: 188590 - DNA, 13 bp, Artificial Sequence
  Oligonucleotide for detection of SNP TSC0046436
rtttttaaaataa

SEQ ID NO: 188591 - DNA, 13 bp, Artificial Sequence
  Oligonucleotide for detection of SNP TSC0046436
gttttttaaatga

SEQ ID NO: 188592 - DNA, 13 bp, Artificial Sequence
  Oligonucleotide for detection of SNP TSC0046436
tcatttaaaaaac

SEQ ID NO: 188593 - DNA, 13 bp, Artificial Sequence
  Oligonucleotide for detection of SNP TSC0046436
gtttttaaaatga

SEQ ID NO: 188594 - DNA, 13 bp, Artificial Sequence
  Oligonucleotide for detection of SNP TSC0046436
tcattttaaaaac

SEQ ID NO: 188595 - DNA, 13 bp, Artificial Sequence
  Oligonucleotide for detection of SNP TSC0046437
taatatatttgtt

SEQ ID NO: 188596 - DNA, 13 bp, Artificial Sequence
  Oligonucleotide for detection of SNP TSC0046437
aacaaatatatta

SEQ ID NO: 188597 - DNA, 13 bp, Artificial Sequence
  Oligonucleotide for detection of SNP TSC0046437
taatatttttgtt

SEQ ID NO: 188598 - DNA, 13 bp, Artificial Sequence
  Oligonucleotide for detection of SNP TSC0046437
aacaaaaatatta

SEQ ID NO: 188599 - DNA, 13 bp, Artificial Sequence
  Oligonucleotide for detection of SNP TSC0046438
tatttaattaaga

SEQ ID NO: 188600 - DNA, 13 bp, Artificial Sequence
  Oligonucleotide for detection of SNP TSC0046438
tcttaattaaata

SEQ ID NO: 188601 - DNA, 13 bp, Artificial Sequence
  Oligonucleotide for detection of SNP TSC0046438
tatttagttaaga

SEQ ID NO: 188602 - DNA, 13 bp, Artificial Sequence
  Oligonucleotide for detection of SNP TSC0046438
tcttaactaaata

SEQ ID NO: 188603 - DNA, 13 bp, Artificial Sequence
  Oligonucleotide for detection of SNP TSC0046439
gttttgattatty

SEQ ID NO: 188604 - DNA, 13 bp, Artificial Sequence
  Oligonucleotide for detection of SNP TSC0046439
raataatcaaaac

SEQ ID NO: 188605 - DNA, 13 bp, Artificial Sequence
  Oligonucleotide for detection of SNP TSC0046439
gttttggttatty

SEQ ID NO: 188606 - DNA, 13 bp, Artificial Sequence
  Oligonucleotide for detection of SNP TSC0046439
raataaccaaaac

SEQ ID NO: 188607 - DNA, 13 bp, Artificial Sequence
  Oligonucleotide for detection of SNP TSC0046440
ggttttgttttag

SEQ ID NO: 188608 - DNA, 13 bp, Artificial Sequence
  Oligonucleotide for detection of SNP TSC0046440
ctaaaacaaaacc

SEQ ID NO: 188609 - DNA, 13 bp, Artificial Sequence
  Oligonucleotide for detection of SNP TSC0046440
ggttttattttag

SEQ ID NO: 188610 - DNA, 13 bp, Artificial Sequence
  Oligonucleotide for detection of SNP TSC0046440
ctaaaataaaacc

SEQ ID NO: 188611 - DNA, 13 bp, Artificial Sequence
  Oligonucleotide for detection of SNP TSC0046440
ggtttcgttttag

SEQ ID NO: 188612 - DNA, 13 bp, Artificial Sequence
  Oligonucleotide for detection of SNP TSC0046440
ctaaaacgaaacc

SEQ ID NO: 188613 - DNA, 13 bp, Artificial Sequence
  Oligonucleotide for detection of SNP TSC0046441
tgtaaatgataat

SEQ ID NO: 188614 - DNA, 13 bp, Artificial Sequence
  Oligonucleotide for detection of SNP TSC0046441
attatcatttaca

SEQ ID NO: 188615 - DNA, 13 bp, Artificial Sequence
  Oligonucleotide for detection of SNP TSC0046441
tgtaaaggataat

SEQ ID NO: 188616 - DNA, 13 bp, Artificial Sequence
  Oligonucleotide for detection of SNP TSC0046441
attatcctttaca

SEQ ID NO: 188617 - DNA, 13 bp, Artificial Sequence
  Oligonucleotide for detection of SNP TSC0046441
attattatttgta

SEQ ID NO: 188618 - DNA, 13 bp, Artificial Sequence
  Oligonucleotide for detection of SNP TSC0046441
tacaaataataat

SEQ ID NO: 188619 - DNA, 13 bp, Artificial Sequence
  Oligonucleotide for detection of SNP TSC0046441
attattttttgta

SEQ ID NO: 188620 - DNA, 13 bp, Artificial Sequence
  Oligonucleotide for detection of SNP TSC0046441
tacaaaaaataat

SEQ ID NO: 188621 - DNA, 13 bp, Artificial Sequence
  Oligonucleotide for detection of SNP TSC0046442
tatttattttgta

SEQ ID NO: 188622 - DNA, 13 bp, Artificial Sequence
  Oligonucleotide for detection of SNP TSC0046442
tacaaaataaata

SEQ ID NO: 188623 - DNA, 13 bp, Artificial Sequence
  Oligonucleotide for detection of SNP TSC0046442
tgtaggataggta

SEQ ID NO: 188624 - DNA, 13 bp, Artificial Sequence
  Oligonucleotide for detection of SNP TSC0046442
tacctatcctaca

SEQ ID NO: 188625 - DNA, 13 bp, Artificial Sequence
  Oligonucleotide for detection of SNP TSC0046442
tgtaggttaggta

SEQ ID NO: 188626 - DNA, 13 bp, Artificial Sequence
  Oligonucleotide for detection of SNP TSC0046442
tacctaacctaca

SEQ ID NO: 188627 - DNA, 13 bp, Artificial Sequence
  Oligonucleotide for detection of SNP TSC0007983
taagaagagaggt

SEQ ID NO: 188628 - DNA, 13 bp, Artificial Sequence
  Oligonucleotide for detection of SNP TSC0007983
acctctcttctta

SEQ ID NO: 188629 - DNA, 13 bp, Artificial Sequence
  Oligonucleotide for detection of SNP TSC0007983
taagaaaagaggt

SEQ ID NO: 188630 - DNA, 13 bp, Artificial Sequence
  Oligonucleotide for detection of SNP TSC0007983
acctcttttctta

SEQ ID NO: 188631 - DNA, 13 bp, Artificial Sequence
  Oligonucleotide for detection of SNP TSC0046444
gagattgaataaa

SEQ ID NO: 188632 - DNA, 13 bp, Artificial Sequence
  Oligonucleotide for detection of SNP TSC0046444
tttattcaatctc

SEQ ID NO: 188633 - DNA, 13 bp, Artificial Sequence
  Oligonucleotide for detection of SNP TSC0046444
gagattaaataaa

SEQ ID NO: 188634 - DNA, 13 bp, Artificial Sequence
  Oligonucleotide for detection of SNP TSC0046444
tttatttaatctc

SEQ ID NO: 188635 - DNA, 13 bp, Artificial Sequence
  Oligonucleotide for detection of SNP TSC0046445
tattgtgtgttaa

SEQ ID NO: 188636 - DNA, 13 bp, Artificial Sequence
  Oligonucleotide for detection of SNP TSC0046445
ttaacacacaata

SEQ ID NO: 188637 - DNA, 13 bp, Artificial Sequence
  Oligonucleotide for detection of SNP TSC0046445
tattgtatgttaa

SEQ ID NO: 188638 - DNA, 13 bp, Artificial Sequence
  Oligonucleotide for detection of SNP TSC0046445
ttaacatacaata

SEQ ID NO: 188639 - DNA, 13 bp, Artificial Sequence
  Oligonucleotide for detection of SNP TSC0046446
agaaaatgagaat

SEQ ID NO: 188640 - DNA, 13 bp, Artificial Sequence
  Oligonucleotide for detection of SNP TSC0046446
attctcattttct

SEQ ID NO: 188641 - DNA, 13 bp, Artificial Sequence
  Oligonucleotide for detection of SNP TSC0046446
agaaaaggagaat

SEQ ID NO: 188642 - DNA, 13 bp, Artificial Sequence
  Oligonucleotide for detection of SNP TSC0046446
attctccttttct

SEQ ID NO: 188643 - DNA, 13 bp, Artificial Sequence
  Oligonucleotide for detection of SNP TSC0046447
atatatgtatttt

SEQ ID NO: 188644 - DNA, 13 bp, Artificial Sequence
  Oligonucleotide for detection of SNP TSC0046447
aaaatacatatat

SEQ ID NO: 188645 - DNA, 13 bp, Artificial Sequence
  Oligonucleotide for detection of SNP TSC0046448
tagagtagaatty

SEQ ID NO: 188646 - DNA, 13 bp, Artificial Sequence
  Oligonucleotide for detection of SNP TSC0046448
raattctactcta

SEQ ID NO: 188647 - DNA, 13 bp, Artificial Sequence
  Oligonucleotide for detection of SNP TSC0046448
tagagtggaatty

SEQ ID NO: 188648 - DNA, 13 bp, Artificial Sequence
  Oligonucleotide for detection of SNP TSC0046448
raattccactcta

SEQ ID NO: 188649 - DNA, 13 bp, Artificial Sequence
  Oligonucleotide for detection of SNP TSC0046448
tagagcggaatty

SEQ ID NO: 188650 - DNA, 13 bp, Artificial Sequence
  Oligonucleotide for detection of SNP TSC0046448
raattccgctcta

SEQ ID NO: 188651 - DNA, 13 bp, Artificial Sequence
  Oligonucleotide for detection of SNP TSC0046448
gggtttcgtttta

SEQ ID NO: 188652 - DNA, 13 bp, Artificial Sequence
  Oligonucleotide for detection of SNP TSC0046448
taaaacgaaaccc

SEQ ID NO: 188653 - DNA, 13 bp, Artificial Sequence
  Oligonucleotide for detection of SNP TSC0046449
gagtaagtaaatt

SEQ ID NO: 188654 - DNA, 13 bp, Artificial Sequence
  Oligonucleotide for detection of SNP TSC0046449
aatttacttactc

SEQ ID NO: 188655 - DNA, 13 bp, Artificial Sequence
  Oligonucleotide for detection of SNP TSC0046449
gagtaaataaatt

SEQ ID NO: 188656 - DNA, 13 bp, Artificial Sequence
  Oligonucleotide for detection of SNP TSC0046449
aatttatttactc

SEQ ID NO: 188657 - DNA, 13 bp, Artificial Sequence
  Oligonucleotide for detection of SNP TSC0009217
tttatggtggttg

SEQ ID NO: 188658 - DNA, 13 bp, Artificial Sequence
  Oligonucleotide for detection of SNP TSC0009217
caaccaccataaa

SEQ ID NO: 188659 - DNA, 13 bp, Artificial Sequence
  Oligonucleotide for detection of SNP TSC0009217
tttatgatggttg

SEQ ID NO: 188660 - DNA, 13 bp, Artificial Sequence
  Oligonucleotide for detection of SNP TSC0009217
caaccatcataaa

SEQ ID NO: 188661 - DNA, 13 bp, Artificial Sequence
  Oligonucleotide for detection of SNP TSC0009218
aattatatggaay

SEQ ID NO: 188662 - DNA, 13 bp, Artificial Sequence
  Oligonucleotide for detection of SNP TSC0009218
rttccatataatt

SEQ ID NO: 188663 - DNA, 13 bp, Artificial Sequence
  Oligonucleotide for detection of SNP TSC0009218
aattatgtggaay

SEQ ID NO: 188664 - DNA, 13 bp, Artificial Sequence
  Oligonucleotide for detection of SNP TSC0009218
rttccacataatt

SEQ ID NO: 188665 - DNA, 13 bp, Artificial Sequence
  Oligonucleotide for detection of SNP TSC0009218
aattacgtggaay

SEQ ID NO: 188666 - DNA, 13 bp, Artificial Sequence
  Oligonucleotide for detection of SNP TSC0009218
rttccacgtaatt

SEQ ID NO: 188667 - DNA, 13 bp, Artificial Sequence
  Oligonucleotide for detection of SNP TSC0009218
gttttatgtggtt

SEQ ID NO: 188668 - DNA, 13 bp, Artificial Sequence
  Oligonucleotide for detection of SNP TSC0009218
aaccacataaaac

SEQ ID NO: 188669 - DNA, 13 bp, Artificial Sequence
  Oligonucleotide for detection of SNP TSC0009218
gttttacgtggtt

SEQ ID NO: 188670 - DNA, 13 bp, Artificial Sequence
  Oligonucleotide for detection of SNP TSC0009218
aaccacgtaaaac

SEQ ID NO: 188671 - DNA, 13 bp, Artificial Sequence
  Oligonucleotide for detection of SNP TSC0046451
gttttaagaagag

SEQ ID NO: 188672 - DNA, 13 bp, Artificial Sequence
  Oligonucleotide for detection of SNP TSC0046451
ctcttcttaaaac

SEQ ID NO: 188673 - DNA, 13 bp, Artificial Sequence
  Oligonucleotide for detection of SNP TSC0046451
gttttaggaagag

SEQ ID NO: 188674 - DNA, 13 bp, Artificial Sequence
  Oligonucleotide for detection of SNP TSC0046451
ctcttcctaaaac

SEQ ID NO: 188675 - DNA, 13 bp, Artificial Sequence
  Oligonucleotide for detection of SNP TSC0046452
gaggttggaaaaa

SEQ ID NO: 188676 - DNA, 13 bp, Artificial Sequence
  Oligonucleotide for detection of SNP TSC0046452
tttttccaacctc

SEQ ID NO: 188677 - DNA, 13 bp, Artificial Sequence
  Oligonucleotide for detection of SNP TSC0046452
gaggttagaaaaa

SEQ ID NO: 188678 - DNA, 13 bp, Artificial Sequence
  Oligonucleotide for detection of SNP TSC0046452
tttttctaacctc

SEQ ID NO: 188679 - DNA, 13 bp, Artificial Sequence
  Oligonucleotide for detection of SNP TSC0046452
gaggtcggaaaaa

SEQ ID NO: 188680 - DNA, 13 bp, Artificial Sequence
  Oligonucleotide for detection of SNP TSC0046452
tttttccgacctc

SEQ ID NO: 188681 - DNA, 13 bp, Artificial Sequence
  Oligonucleotide for detection of SNP TSC0046453
aaggatgttatgg

SEQ ID NO: 188682 - DNA, 13 bp, Artificial Sequence
  Oligonucleotide for detection of SNP TSC0046453
ccataacatcctt

SEQ ID NO: 188683 - DNA, 13 bp, Artificial Sequence
  Oligonucleotide for detection of SNP TSC0046453
aaggatattatgg

SEQ ID NO: 188684 - DNA, 13 bp, Artificial Sequence
  Oligonucleotide for detection of SNP TSC0046453
ccataatatcctt

SEQ ID NO: 188685 - DNA, 13 bp, Artificial Sequence
  Oligonucleotide for detection of SNP TSC0046454
tttttagtgtgtg

SEQ ID NO: 188686 - DNA, 13 bp, Artificial Sequence
  Oligonucleotide for detection of SNP TSC0046454
cacacactaaaaa

SEQ ID NO: 188687 - DNA, 13 bp, Artificial Sequence
  Oligonucleotide for detection of SNP TSC0046454
tttttaatgtgtg

SEQ ID NO: 188688 - DNA, 13 bp, Artificial Sequence
  Oligonucleotide for detection of SNP TSC0046454
cacacattaaaaa

SEQ ID NO: 188689 - DNA, 13 bp, Artificial Sequence
  Oligonucleotide for detection of SNP TSC0046455
aatttgagagatg

SEQ ID NO: 188690 - DNA, 13 bp, Artificial Sequence
  Oligonucleotide for detection of SNP TSC0046455
catctctcaaatt

SEQ ID NO: 188691 - DNA, 13 bp, Artificial Sequence
  Oligonucleotide for detection of SNP TSC0046455
aatttgggagatg

SEQ ID NO: 188692 - DNA, 13 bp, Artificial Sequence
  Oligonucleotide for detection of SNP TSC0046455
catctcccaaatt

SEQ ID NO: 188693 - DNA, 13 bp, Artificial Sequence
  Oligonucleotide for detection of SNP TSC0046455
aatttgagagacg

SEQ ID NO: 188694 - DNA, 13 bp, Artificial Sequence
  Oligonucleotide for detection of SNP TSC0046455
cgtctctcaaatt

SEQ ID NO: 188695 - DNA, 13 bp, Artificial Sequence
  Oligonucleotide for detection of SNP TSC0046455
aatttgggagacg

SEQ ID NO: 188696 - DNA, 13 bp, Artificial Sequence
  Oligonucleotide for detection of SNP TSC0046455
cgtctcccaaatt

SEQ ID NO: 188697 - DNA, 13 bp, Artificial Sequence
  Oligonucleotide for detection of SNP TSC0046456
tttttaagaatgy

SEQ ID NO: 188698 - DNA, 13 bp, Artificial Sequence
  Oligonucleotide for detection of SNP TSC0046456
rcattcttaaaaa

SEQ ID NO: 188699 - DNA, 13 bp, Artificial Sequence
  Oligonucleotide for detection of SNP TSC0046456
tttttaggaatgy

SEQ ID NO: 188700 - DNA, 13 bp, Artificial Sequence
  Oligonucleotide for detection of SNP TSC0046456
rcattcctaaaaa

SEQ ID NO: 188701 - DNA, 13 bp, Artificial Sequence
  Oligonucleotide for detection of SNP TSC0046457
gatatgaaatttt

SEQ ID NO: 188702 - DNA, 13 bp, Artificial Sequence
  Oligonucleotide for detection of SNP TSC0046457
aaaatttcatatc

SEQ ID NO: 188703 - DNA, 13 bp, Artificial Sequence
  Oligonucleotide for detection of SNP TSC0046457
gatatggaatttt

SEQ ID NO: 188704 - DNA, 13 bp, Artificial Sequence
  Oligonucleotide for detection of SNP TSC0046457
aaaattccatatc

SEQ ID NO: 188705 - DNA, 13 bp, Artificial Sequence
  Oligonucleotide for detection of SNP TSC0046458
taaaatgtagaag

SEQ ID NO: 188706 - DNA, 13 bp, Artificial Sequence
  Oligonucleotide for detection of SNP TSC0046458
cttctacatttta

SEQ ID NO: 188707 - DNA, 13 bp, Artificial Sequence
  Oligonucleotide for detection of SNP TSC0046458
taaaatatagaag

SEQ ID NO: 188708 - DNA, 13 bp, Artificial Sequence
  Oligonucleotide for detection of SNP TSC0046458
cttctatatttta

SEQ ID NO: 188709 - DNA, 13 bp, Artificial Sequence
  Oligonucleotide for detection of SNP TSC0046458
taaaacgtagaag

SEQ ID NO: 188710 - DNA, 13 bp, Artificial Sequence
  Oligonucleotide for detection of SNP TSC0046458
cttctacgtttta

SEQ ID NO: 188711 - DNA, 13 bp, Artificial Sequence
  Oligonucleotide for detection of SNP TSC0046463
gtgttaatttgty

SEQ ID NO: 188712 - DNA, 13 bp, Artificial Sequence
  Oligonucleotide for detection of SNP TSC0046463
racaaattaacac

SEQ ID NO: 188713 - DNA, 13 bp, Artificial Sequence
  Oligonucleotide for detection of SNP TSC0046463
gtgttattttgty

SEQ ID NO: 188714 - DNA, 13 bp, Artificial Sequence
  Oligonucleotide for detection of SNP TSC0046463
racaaaataacac

SEQ ID NO: 188715 - DNA, 13 bp, Artificial Sequence
  Oligonucleotide for detection of SNP TSC0046463
ggtaggttggtay

SEQ ID NO: 188716 - DNA, 13 bp, Artificial Sequence
  Oligonucleotide for detection of SNP TSC0046463
rtaccaacctacc

SEQ ID NO: 188717 - DNA, 13 bp, Artificial Sequence
  Oligonucleotide for detection of SNP TSC0046463
ggtagggtggtay

SEQ ID NO: 188718 - DNA, 13 bp, Artificial Sequence
  Oligonucleotide for detection of SNP TSC0046463
rtaccaccctacc

SEQ ID NO: 188719 - DNA, 13 bp, Artificial Sequence
  Oligonucleotide for detection of SNP TSC0046464
ggggtatattttt

SEQ ID NO: 188720 - DNA, 13 bp, Artificial Sequence
  Oligonucleotide for detection of SNP TSC0046464
aaaaatatacccc

SEQ ID NO: 188721 - DNA, 13 bp, Artificial Sequence
  Oligonucleotide for detection of SNP TSC0046464
ggggtagattttt

SEQ ID NO: 188722 - DNA, 13 bp, Artificial Sequence
  Oligonucleotide for detection of SNP TSC0046464
aaaaatctacccc

SEQ ID NO: 188723 - DNA, 13 bp, Artificial Sequence
  Oligonucleotide for detection of SNP TSC0046464
aaggatgtgttty

SEQ ID NO: 188724 - DNA, 13 bp, Artificial Sequence
  Oligonucleotide for detection of SNP TSC0046464
raaacacatcctt

SEQ ID NO: 188725 - DNA, 13 bp, Artificial Sequence
  Oligonucleotide for detection of SNP TSC0046464
aaggatttgttty

SEQ ID NO: 188726 - DNA, 13 bp, Artificial Sequence
  Oligonucleotide for detection of SNP TSC0046464
raaacaaatcctt

SEQ ID NO: 188727 - DNA, 13 bp, Artificial Sequence
  Oligonucleotide for detection of SNP TSC0046466
taaagggtttggt

SEQ ID NO: 188728 - DNA, 13 bp, Artificial Sequence
  Oligonucleotide for detection of SNP TSC0046466
accaaacccttta

SEQ ID NO: 188729 - DNA, 13 bp, Artificial Sequence
  Oligonucleotide for detection of SNP TSC0046466
taaaggatttggt

SEQ ID NO: 188730 - DNA, 13 bp, Artificial Sequence
  Oligonucleotide for detection of SNP TSC0046466
accaaatccttta

SEQ ID NO: 188731 - DNA, 13 bp, Artificial Sequence
  Oligonucleotide for detection of SNP TSC0046467
gaaattaaggtty

SEQ ID NO: 188732 - DNA, 13 bp, Artificial Sequence
  Oligonucleotide for detection of SNP TSC0046467
raaccttaatttc

SEQ ID NO: 188733 - DNA, 13 bp, Artificial Sequence
  Oligonucleotide for detection of SNP TSC0046467
gaaattgaggtty

SEQ ID NO: 188734 - DNA, 13 bp, Artificial Sequence
  Oligonucleotide for detection of SNP TSC0046467
raacctcaatttc

SEQ ID NO: 188735 - DNA, 13 bp, Artificial Sequence
  Oligonucleotide for detection of SNP TSC0046468
tattatatttata

SEQ ID NO: 188736 - DNA, 13 bp, Artificial Sequence
  Oligonucleotide for detection of SNP TSC0046468
tataaatataata

SEQ ID NO: 188737 - DNA, 13 bp, Artificial Sequence
  Oligonucleotide for detection of SNP TSC0046468
tattatgtttata

SEQ ID NO: 188738 - DNA, 13 bp, Artificial Sequence
  Oligonucleotide for detection of SNP TSC0046468
tataaacataata

SEQ ID NO: 188739 - DNA, 13 bp, Artificial Sequence
  Oligonucleotide for detection of SNP TSC0046469
tttatagttaatt

SEQ ID NO: 188740 - DNA, 13 bp, Artificial Sequence
  Oligonucleotide for detection of SNP TSC0046469
aattaactataaa

SEQ ID NO: 188741 - DNA, 13 bp, Artificial Sequence
  Oligonucleotide for detection of SNP TSC0046469
tttataattaatt

SEQ ID NO: 188742 - DNA, 13 bp, Artificial Sequence
  Oligonucleotide for detection of SNP TSC0046469
aattaattataaa

SEQ ID NO: 188743 - DNA, 13 bp, Artificial Sequence
  Oligonucleotide for detection of SNP TSC0046470
ttaatagtataga

SEQ ID NO: 188744 - DNA, 13 bp, Artificial Sequence
  Oligonucleotide for detection of SNP TSC0046470
tctatactattaa

SEQ ID NO: 188745 - DNA, 13 bp, Artificial Sequence
  Oligonucleotide for detection of SNP TSC0046470
ttaataatataga

SEQ ID NO: 188746 - DNA, 13 bp, Artificial Sequence
  Oligonucleotide for detection of SNP TSC0046470
tctatattattaa

SEQ ID NO: 188747 - DNA, 13 bp, Artificial Sequence
  Oligonucleotide for detection of SNP TSC0046471
ttgtttaatttgy

SEQ ID NO: 188748 - DNA, 13 bp, Artificial Sequence
  Oligonucleotide for detection of SNP TSC0046471
rcaaattaaacaa

SEQ ID NO: 188749 - DNA, 13 bp, Artificial Sequence
  Oligonucleotide for detection of SNP TSC0046471
ttgtttgatttgy

SEQ ID NO: 188750 - DNA, 13 bp, Artificial Sequence
  Oligonucleotide for detection of SNP TSC0046471
rcaaatcaaacaa

SEQ ID NO: 188751 - DNA, 13 bp, Artificial Sequence
  Oligonucleotide for detection of SNP TSC0046471
ttgttcgatttgy

SEQ ID NO: 188752 - DNA, 13 bp, Artificial Sequence
  Oligonucleotide for detection of SNP TSC0046471
rcaaatcgaacaa

SEQ ID NO: 188753 - DNA, 13 bp, Artificial Sequence
  Oligonucleotide for detection of SNP TSC0046471
gtaaattgaatag

SEQ ID NO: 188754 - DNA, 13 bp, Artificial Sequence
  Oligonucleotide for detection of SNP TSC0046471
ctattcaatttac

SEQ ID NO: 188755 - DNA, 13 bp, Artificial Sequence
  Oligonucleotide for detection of SNP TSC0046471
gtaaatcgaatag

SEQ ID NO: 188756 - DNA, 13 bp, Artificial Sequence
  Oligonucleotide for detection of SNP TSC0046471
ctattcgatttac

SEQ ID NO: 188757 - DNA, 13 bp, Artificial Sequence
  Oligonucleotide for detection of SNP TSC0046472
gtgatgggatgat

SEQ ID NO: 188758 - DNA, 13 bp, Artificial Sequence
  Oligonucleotide for detection of SNP TSC0046472
atcatcccatcac

SEQ ID NO: 188759 - DNA, 13 bp, Artificial Sequence
  Oligonucleotide for detection of SNP TSC0046472
gtgatgagatgat

SEQ ID NO: 188760 - DNA, 13 bp, Artificial Sequence
  Oligonucleotide for detection of SNP TSC0046472
atcatctcatcac

SEQ ID NO: 188761 - DNA, 13 bp, Artificial Sequence
  Oligonucleotide for detection of SNP TSC0046473
atttataaaggaa

SEQ ID NO: 188762 - DNA, 13 bp, Artificial Sequence
  Oligonucleotide for detection of SNP TSC0046473
ttcctttataaat

SEQ ID NO: 188763 - DNA, 13 bp, Artificial Sequence
  Oligonucleotide for detection of SNP TSC0046473
atttatgaaggaa

SEQ ID NO: 188764 - DNA, 13 bp, Artificial Sequence
  Oligonucleotide for detection of SNP TSC0046473
ttccttcataaat

SEQ ID NO: 188765 - DNA, 13 bp, Artificial Sequence
  Oligonucleotide for detection of SNP TSC0046474
aggaagtagaagt

SEQ ID NO: 188766 - DNA, 13 bp, Artificial Sequence
  Oligonucleotide for detection of SNP TSC0046474
acttctacttcct

SEQ ID NO: 188767 - DNA, 13 bp, Artificial Sequence
  Oligonucleotide for detection of SNP TSC0046474
aggaaggagaagt

SEQ ID NO: 188768 - DNA, 13 bp, Artificial Sequence
  Oligonucleotide for detection of SNP TSC0046474
acttctccttcct

SEQ ID NO: 188769 - DNA, 13 bp, Artificial Sequence
  Oligonucleotide for detection of SNP TSC0046475
tgagaatgtttty

SEQ ID NO: 188770 - DNA, 13 bp, Artificial Sequence
  Oligonucleotide for detection of SNP TSC0046475
raaaacattctca

SEQ ID NO: 188771 - DNA, 13 bp, Artificial Sequence
  Oligonucleotide for detection of SNP TSC0046475
tgagaacgtttty

SEQ ID NO: 188772 - DNA, 13 bp, Artificial Sequence
  Oligonucleotide for detection of SNP TSC0046475
raaaacgttctca

SEQ ID NO: 188773 - DNA, 13 bp, Artificial Sequence
  Oligonucleotide for detection of SNP TSC0046476
gtttgttgttgtt

SEQ ID NO: 188774 - DNA, 13 bp, Artificial Sequence
  Oligonucleotide for detection of SNP TSC0046476
aacaacaacaaac

SEQ ID NO: 188775 - DNA, 13 bp, Artificial Sequence
  Oligonucleotide for detection of SNP TSC0046476
gtttgtcgttgtt

SEQ ID NO: 188776 - DNA, 13 bp, Artificial Sequence
  Oligonucleotide for detection of SNP TSC0046476
aacaacgacaaac

SEQ ID NO: 188777 - DNA, 13 bp, Artificial Sequence
  Oligonucleotide for detection of SNP TSC0046476
agtagtggtaggy

SEQ ID NO: 188778 - DNA, 13 bp, Artificial Sequence
  Oligonucleotide for detection of SNP TSC0046476
rcctaccactact

SEQ ID NO: 188779 - DNA, 13 bp, Artificial Sequence
  Oligonucleotide for detection of SNP TSC0046476
agtagtagtaggy

SEQ ID NO: 188780 - DNA, 13 bp, Artificial Sequence
  Oligonucleotide for detection of SNP TSC0046476
rcctactactact

SEQ ID NO: 188781 - DNA, 13 bp, Artificial Sequence
  Oligonucleotide for detection of SNP TSC0046476
agtagcggtaggy

SEQ ID NO: 188782 - DNA, 13 bp, Artificial Sequence
  Oligonucleotide for detection of SNP TSC0046476
rcctaccgctact

SEQ ID NO: 188783 - DNA, 13 bp, Artificial Sequence
  Oligonucleotide for detection of SNP TSC0010542
tttattgtgttgg

SEQ ID NO: 188784 - DNA, 13 bp, Artificial Sequence
  Oligonucleotide for detection of SNP TSC0010542
ccaacacaataaa

SEQ ID NO: 188785 - DNA, 13 bp, Artificial Sequence
  Oligonucleotide for detection of SNP TSC0010542
tttatcgtgttgg

SEQ ID NO: 188786 - DNA, 13 bp, Artificial Sequence
  Oligonucleotide for detection of SNP TSC0010542
ccaacacgataaa

SEQ ID NO: 188787 - DNA, 13 bp, Artificial Sequence
  Oligonucleotide for detection of SNP TSC0010543
atggtatgtattt

SEQ ID NO: 188788 - DNA, 13 bp, Artificial Sequence
  Oligonucleotide for detection of SNP TSC0010543
aaatacataccat

SEQ ID NO: 188789 - DNA, 13 bp, Artificial Sequence
  Oligonucleotide for detection of SNP TSC0010543
atggtacgtattt

SEQ ID NO: 188790 - DNA, 13 bp, Artificial Sequence
  Oligonucleotide for detection of SNP TSC0010543
aaatacgtaccat

SEQ ID NO: 188791 - DNA, 13 bp, Artificial Sequence
  Oligonucleotide for detection of SNP TSC0010543
aggtgtgtgttat

SEQ ID NO: 188792 - DNA, 13 bp, Artificial Sequence
  Oligonucleotide for detection of SNP TSC0010543
ataacacacacct

SEQ ID NO: 188793 - DNA, 13 bp, Artificial Sequence
  Oligonucleotide for detection of SNP TSC0010543
aggtgtatgttat

SEQ ID NO: 188794 - DNA, 13 bp, Artificial Sequence
  Oligonucleotide for detection of SNP TSC0010543
ataacatacacct

SEQ ID NO: 188795 - DNA, 13 bp, Artificial Sequence
  Oligonucleotide for detection of SNP TSC0010543
aggtgcgtgttat

SEQ ID NO: 188796 - DNA, 13 bp, Artificial Sequence
  Oligonucleotide for detection of SNP TSC0010543
ataacacgcacct

SEQ ID NO: 188797 - DNA, 13 bp, Artificial Sequence
  Oligonucleotide for detection of SNP TSC0046478
gattaaatgtggg

SEQ ID NO: 188798 - DNA, 13 bp, Artificial Sequence
  Oligonucleotide for detection of SNP TSC0046478
cccacatttaatc

SEQ ID NO: 188799 - DNA, 13 bp, Artificial Sequence
  Oligonucleotide for detection of SNP TSC0046478
gattaagtgtggg

SEQ ID NO: 188800 - DNA, 13 bp, Artificial Sequence
  Oligonucleotide for detection of SNP TSC0046478
cccacacttaatc

SEQ ID NO: 188801 - DNA, 13 bp, Artificial Sequence
  Oligonucleotide for detection of SNP TSC0046480
ttgagaattaggg

SEQ ID NO: 188802 - DNA, 13 bp, Artificial Sequence
  Oligonucleotide for detection of SNP TSC0046480
ccctaattctcaa

SEQ ID NO: 188803 - DNA, 13 bp, Artificial Sequence
  Oligonucleotide for detection of SNP TSC0046480
ttgagagttaggg

SEQ ID NO: 188804 - DNA, 13 bp, Artificial Sequence
  Oligonucleotide for detection of SNP TSC0046480
ccctaactctcaa

SEQ ID NO: 188805 - DNA, 13 bp, Artificial Sequence
  Oligonucleotide for detection of SNP TSC0046481
ttagtttgttaat

SEQ ID NO: 188806 - DNA, 13 bp, Artificial Sequence
  Oligonucleotide for detection of SNP TSC0046481
attaacaaactaa

SEQ ID NO: 188807 - DNA, 13 bp, Artificial Sequence
  Oligonucleotide for detection of SNP TSC0046481
ttagttcgttaat

SEQ ID NO: 188808 - DNA, 13 bp, Artificial Sequence
  Oligonucleotide for detection of SNP TSC0046481
attaacgaactaa

SEQ ID NO: 188809 - DNA, 13 bp, Artificial Sequence
  Oligonucleotide for detection of SNP TSC0046481
attggtggattgg

SEQ ID NO: 188810 - DNA, 13 bp, Artificial Sequence
  Oligonucleotide for detection of SNP TSC0046481
ccaatccaccaat

SEQ ID NO: 188811 - DNA, 13 bp, Artificial Sequence
  Oligonucleotide for detection of SNP TSC0046481
attggtagattgg

SEQ ID NO: 188812 - DNA, 13 bp, Artificial Sequence
  Oligonucleotide for detection of SNP TSC0046481
ccaatctaccaat

SEQ ID NO: 188813 - DNA, 13 bp, Artificial Sequence
  Oligonucleotide for detection of SNP TSC0046481
attggcggattgg

SEQ ID NO: 188814 - DNA, 13 bp, Artificial Sequence
  Oligonucleotide for detection of SNP TSC0046481
ccaatccgccaat

SEQ ID NO: 188815 - DNA, 13 bp, Artificial Sequence
  Oligonucleotide for detection of SNP TSC0046482
tagttatttggty

SEQ ID NO: 188816 - DNA, 13 bp, Artificial Sequence
  Oligonucleotide for detection of SNP TSC0046482
raccaaataacta

SEQ ID NO: 188817 - DNA, 13 bp, Artificial Sequence
  Oligonucleotide for detection of SNP TSC0046482
tagttagttggty

SEQ ID NO: 188818 - DNA, 13 bp, Artificial Sequence
  Oligonucleotide for detection of SNP TSC0046482
raccaactaacta

SEQ ID NO: 188819 - DNA, 13 bp, Artificial Sequence
  Oligonucleotide for detection of SNP TSC0046482
gattaggtggtta

SEQ ID NO: 188820 - DNA, 13 bp, Artificial Sequence
  Oligonucleotide for detection of SNP TSC0046482
taaccacctaatc

SEQ ID NO: 188821 - DNA, 13 bp, Artificial Sequence
  Oligonucleotide for detection of SNP TSC0046482
gattagttggtta

SEQ ID NO: 188822 - DNA, 13 bp, Artificial Sequence
  Oligonucleotide for detection of SNP TSC0046482
taaccaactaatc

SEQ ID NO: 188823 - DNA, 13 bp, Artificial Sequence
  Oligonucleotide for detection of SNP TSC0046483
taagggaatagty

SEQ ID NO: 188824 - DNA, 13 bp, Artificial Sequence
  Oligonucleotide for detection of SNP TSC0046483
ractattccctta

SEQ ID NO: 188825 - DNA, 13 bp, Artificial Sequence
  Oligonucleotide for detection of SNP TSC0046483
taaggggatagty

SEQ ID NO: 188826 - DNA, 13 bp, Artificial Sequence
  Oligonucleotide for detection of SNP TSC0046483
ractatcccctta

SEQ ID NO: 188827 - DNA, 13 bp, Artificial Sequence
  Oligonucleotide for detection of SNP TSC0046484
tgatgtaaaggga

SEQ ID NO: 188828 - DNA, 13 bp, Artificial Sequence
  Oligonucleotide for detection of SNP TSC0046484
tccctttacatca

SEQ ID NO: 188829 - DNA, 13 bp, Artificial Sequence
  Oligonucleotide for detection of SNP TSC0046484
tgatgtgaaggga

SEQ ID NO: 188830 - DNA, 13 bp, Artificial Sequence
  Oligonucleotide for detection of SNP TSC0046484
tcccttcacatca

SEQ ID NO: 188831 - DNA, 13 bp, Artificial Sequence
  Oligonucleotide for detection of SNP TSC0046484
tgatgcgaaggga

SEQ ID NO: 188832 - DNA, 13 bp, Artificial Sequence
  Oligonucleotide for detection of SNP TSC0046484
tcccttcgcatca

SEQ ID NO: 188833 - DNA, 13 bp, Artificial Sequence
  Oligonucleotide for detection of SNP TSC0046484
tttttttgtatta

SEQ ID NO: 188834 - DNA, 13 bp, Artificial Sequence
  Oligonucleotide for detection of SNP TSC0046484
taatacaaaaaaa

SEQ ID NO: 188835 - DNA, 13 bp, Artificial Sequence
  Oligonucleotide for detection of SNP TSC0046484
ttttttcgtatta

SEQ ID NO: 188836 - DNA, 13 bp, Artificial Sequence
  Oligonucleotide for detection of SNP TSC0046484
taatacgaaaaaa

SEQ ID NO: 188837 - DNA, 13 bp, Artificial Sequence
  Oligonucleotide for detection of SNP TSC0046485
tttgaaaagaggy

SEQ ID NO: 188838 - DNA, 13 bp, Artificial Sequence
  Oligonucleotide for detection of SNP TSC0046485
rcctcttttcaaa

SEQ ID NO: 188839 - DNA, 13 bp, Artificial Sequence
  Oligonucleotide for detection of SNP TSC0046485
tttgaagagaggy

SEQ ID NO: 188840 - DNA, 13 bp, Artificial Sequence
  Oligonucleotide for detection of SNP TSC0046485
rcctctcttcaaa

SEQ ID NO: 188841 - DNA, 13 bp, Artificial Sequence
  Oligonucleotide for detection of SNP TSC0046486
atagtatgtatta

SEQ ID NO: 188842 - DNA, 13 bp, Artificial Sequence
  Oligonucleotide for detection of SNP TSC0046486
taatacatactat

SEQ ID NO: 188843 - DNA, 13 bp, Artificial Sequence
  Oligonucleotide for detection of SNP TSC0046486
atagtaggtatta

SEQ ID NO: 188844 - DNA, 13 bp, Artificial Sequence
  Oligonucleotide for detection of SNP TSC0046486
taatacctactat

SEQ ID NO: 188845 - DNA, 13 bp, Artificial Sequence
  Oligonucleotide for detection of SNP TSC0046486
atagtacgtatta

SEQ ID NO: 188846 - DNA, 13 bp, Artificial Sequence
  Oligonucleotide for detection of SNP TSC0046486
taatacgtactat

SEQ ID NO: 188847 - DNA, 13 bp, Artificial Sequence
  Oligonucleotide for detection of SNP TSC0046486
tagtatgtattgt

SEQ ID NO: 188848 - DNA, 13 bp, Artificial Sequence
  Oligonucleotide for detection of SNP TSC0046486
acaatacatacta

SEQ ID NO: 188849 - DNA, 13 bp, Artificial Sequence
  Oligonucleotide for detection of SNP TSC0046486
tagtatttattgt

SEQ ID NO: 188850 - DNA, 13 bp, Artificial Sequence
  Oligonucleotide for detection of SNP TSC0046486
acaataaatacta

SEQ ID NO: 188851 - DNA, 13 bp, Artificial Sequence
  Oligonucleotide for detection of SNP TSC0046486
tagtacgtattgt

SEQ ID NO: 188852 - DNA, 13 bp, Artificial Sequence
  Oligonucleotide for detection of SNP TSC0046486
acaatacgtacta

SEQ ID NO: 188853 - DNA, 13 bp, Artificial Sequence
  Oligonucleotide for detection of SNP TSC0046489
ttagtaatataaa

SEQ ID NO: 188854 - DNA, 13 bp, Artificial Sequence
  Oligonucleotide for detection of SNP TSC0046489
tttatattactaa

SEQ ID NO: 188855 - DNA, 13 bp, Artificial Sequence
  Oligonucleotide for detection of SNP TSC0046489
ttagtagtataaa

SEQ ID NO: 188856 - DNA, 13 bp, Artificial Sequence
  Oligonucleotide for detection of SNP TSC0046489
tttatactactaa

SEQ ID NO: 188857 - DNA, 13 bp, Artificial Sequence
  Oligonucleotide for detection of SNP TSC0046493
gggtatagaaagy

SEQ ID NO: 188858 - DNA, 13 bp, Artificial Sequence
  Oligonucleotide for detection of SNP TSC0046493
rctttctataccc

SEQ ID NO: 188859 - DNA, 13 bp, Artificial Sequence
  Oligonucleotide for detection of SNP TSC0046493
gggtatggaaagy

SEQ ID NO: 188860 - DNA, 13 bp, Artificial Sequence
  Oligonucleotide for detection of SNP TSC0046493
rctttccataccc

SEQ ID NO: 188861 - DNA, 13 bp, Artificial Sequence
  Oligonucleotide for detection of SNP TSC0046494
ttttttagatagt

SEQ ID NO: 188862 - DNA, 13 bp, Artificial Sequence
  Oligonucleotide for detection of SNP TSC0046494
actatctaaaaaa

SEQ ID NO: 188863 - DNA, 13 bp, Artificial Sequence
  Oligonucleotide for detection of SNP TSC0046495
ttataggagttaa

SEQ ID NO: 188864 - DNA, 13 bp, Artificial Sequence
  Oligonucleotide for detection of SNP TSC0046495
ttaactcctataa

SEQ ID NO: 188865 - DNA, 13 bp, Artificial Sequence
  Oligonucleotide for detection of SNP TSC0046495
ttatagaagttaa

SEQ ID NO: 188866 - DNA, 13 bp, Artificial Sequence
  Oligonucleotide for detection of SNP TSC0046495
ttaacttctataa

SEQ ID NO: 188867 - DNA, 13 bp, Artificial Sequence
  Oligonucleotide for detection of SNP TSC0046496
aagattatttttt

SEQ ID NO: 188868 - DNA, 13 bp, Artificial Sequence
  Oligonucleotide for detection of SNP TSC0046496
aaaaaataatctt

SEQ ID NO: 188869 - DNA, 13 bp, Artificial Sequence
  Oligonucleotide for detection of SNP TSC0046497
tagaggagttgaa

SEQ ID NO: 188870 - DNA, 13 bp, Artificial Sequence
  Oligonucleotide for detection of SNP TSC0046497
ttcaactcctcta

SEQ ID NO: 188871 - DNA, 13 bp, Artificial Sequence
  Oligonucleotide for detection of SNP TSC0046497
tagaggggttgaa

SEQ ID NO: 188872 - DNA, 13 bp, Artificial Sequence
  Oligonucleotide for detection of SNP TSC0046497
ttcaacccctcta

SEQ ID NO: 188873 - DNA, 13 bp, Artificial Sequence
  Oligonucleotide for detection of SNP TSC0046498
tgtgtttgttaty

SEQ ID NO: 188874 - DNA, 13 bp, Artificial Sequence
  Oligonucleotide for detection of SNP TSC0046498
rataacaaacaca

SEQ ID NO: 188875 - DNA, 13 bp, Artificial Sequence
  Oligonucleotide for detection of SNP TSC0046498
tgtgttcgttaty

SEQ ID NO: 188876 - DNA, 13 bp, Artificial Sequence
  Oligonucleotide for detection of SNP TSC0046498
rataacgaacaca

SEQ ID NO: 188877 - DNA, 13 bp, Artificial Sequence
  Oligonucleotide for detection of SNP TSC0046498
gatagtggatata

SEQ ID NO: 188878 - DNA, 13 bp, Artificial Sequence
  Oligonucleotide for detection of SNP TSC0046498
tatatccactatc

SEQ ID NO: 188879 - DNA, 13 bp, Artificial Sequence
  Oligonucleotide for detection of SNP TSC0046498
gatagtagatata

SEQ ID NO: 188880 - DNA, 13 bp, Artificial Sequence
  Oligonucleotide for detection of SNP TSC0046498
tatatctactatc

SEQ ID NO: 188881 - DNA, 13 bp, Artificial Sequence
  Oligonucleotide for detection of SNP TSC0046498
gatagcggatata

SEQ ID NO: 188882 - DNA, 13 bp, Artificial Sequence
  Oligonucleotide for detection of SNP TSC0046498
tatatccgctatc

SEQ ID NO: 188883 - DNA, 13 bp, Artificial Sequence
  Oligonucleotide for detection of SNP TSC0046500
gttattagaagtt

SEQ ID NO: 188884 - DNA, 13 bp, Artificial Sequence
  Oligonucleotide for detection of SNP TSC0046500
aacttctaataac

SEQ ID NO: 188885 - DNA, 13 bp, Artificial Sequence
  Oligonucleotide for detection of SNP TSC0046500
gttattggaagtt

SEQ ID NO: 188886 - DNA, 13 bp, Artificial Sequence
  Oligonucleotide for detection of SNP TSC0046500
aacttccaataac

SEQ ID NO: 188887 - DNA, 13 bp, Artificial Sequence
  Oligonucleotide for detection of SNP TSC0046500
gttatcggaagtt

SEQ ID NO: 188888 - DNA, 13 bp, Artificial Sequence
  Oligonucleotide for detection of SNP TSC0046500
aacttccgataac

SEQ ID NO: 188889 - DNA, 13 bp, Artificial Sequence
  Oligonucleotide for detection of SNP TSC0046500
aatttttggtgay

SEQ ID NO: 188890 - DNA, 13 bp, Artificial Sequence
  Oligonucleotide for detection of SNP TSC0046500
rtcaccaaaaatt

SEQ ID NO: 188891 - DNA, 13 bp, Artificial Sequence
  Oligonucleotide for detection of SNP TSC0046500
aattttcggtgay

SEQ ID NO: 188892 - DNA, 13 bp, Artificial Sequence
  Oligonucleotide for detection of SNP TSC0046500
rtcaccgaaaatt

SEQ ID NO: 188893 - DNA, 13 bp, Artificial Sequence
  Oligonucleotide for detection of SNP TSC0046502
aagaattggtgta

SEQ ID NO: 188894 - DNA, 13 bp, Artificial Sequence
  Oligonucleotide for detection of SNP TSC0046502
tacaccaattctt

SEQ ID NO: 188895 - DNA, 13 bp, Artificial Sequence
  Oligonucleotide for detection of SNP TSC0046502
aagaataggtgta

SEQ ID NO: 188896 - DNA, 13 bp, Artificial Sequence
  Oligonucleotide for detection of SNP TSC0046502
tacacctattctt

SEQ ID NO: 188897 - DNA, 13 bp, Artificial Sequence
  Oligonucleotide for detection of SNP TSC0046504
aaataagggatty

SEQ ID NO: 188898 - DNA, 13 bp, Artificial Sequence
  Oligonucleotide for detection of SNP TSC0046504
raatcccttattt

SEQ ID NO: 188899 - DNA, 13 bp, Artificial Sequence
  Oligonucleotide for detection of SNP TSC0046504
aaataaaggatty

SEQ ID NO: 188900 - DNA, 13 bp, Artificial Sequence
  Oligonucleotide for detection of SNP TSC0046504
raatcctttattt

SEQ ID NO: 188901 - DNA, 13 bp, Artificial Sequence
  Oligonucleotide for detection of SNP TSC0046505
ggtatatgaggaa

SEQ ID NO: 188902 - DNA, 13 bp, Artificial Sequence
  Oligonucleotide for detection of SNP TSC0046505
ttcctcatatacc

SEQ ID NO: 188903 - DNA, 13 bp, Artificial Sequence
  Oligonucleotide for detection of SNP TSC0046505
ggtatacgaggaa

SEQ ID NO: 188904 - DNA, 13 bp, Artificial Sequence
  Oligonucleotide for detection of SNP TSC0046505
ttcctcgtatacc

SEQ ID NO: 188905 - DNA, 13 bp, Artificial Sequence
  Oligonucleotide for detection of SNP TSC0046506
taagtatgttttg

SEQ ID NO: 188906 - DNA, 13 bp, Artificial Sequence
  Oligonucleotide for detection of SNP TSC0046506
caaaacatactta

SEQ ID NO: 188907 - DNA, 13 bp, Artificial Sequence
  Oligonucleotide for detection of SNP TSC0046506
taagtaggttttg

SEQ ID NO: 188908 - DNA, 13 bp, Artificial Sequence
  Oligonucleotide for detection of SNP TSC0046506
caaaacctactta

SEQ ID NO: 188909 - DNA, 13 bp, Artificial Sequence
  Oligonucleotide for detection of SNP TSC0046506
taaggtatgtttg

SEQ ID NO: 188910 - DNA, 13 bp, Artificial Sequence
  Oligonucleotide for detection of SNP TSC0046506
caaacatacctta

SEQ ID NO: 188911 - DNA, 13 bp, Artificial Sequence
  Oligonucleotide for detection of SNP TSC0046506
taaggtttgtttg

SEQ ID NO: 188912 - DNA, 13 bp, Artificial Sequence
  Oligonucleotide for detection of SNP TSC0046506
caaacaaacctta

SEQ ID NO: 188913 - DNA, 13 bp, Artificial Sequence
  Oligonucleotide for detection of SNP TSC0046507
gttttagtggtag

SEQ ID NO: 188914 - DNA, 13 bp, Artificial Sequence
  Oligonucleotide for detection of SNP TSC0046507
ctaccactaaaac

SEQ ID NO: 188915 - DNA, 13 bp, Artificial Sequence
  Oligonucleotide for detection of SNP TSC0046507
gttttaatggtag

SEQ ID NO: 188916 - DNA, 13 bp, Artificial Sequence
  Oligonucleotide for detection of SNP TSC0046507
ctaccattaaaac

SEQ ID NO: 188917 - DNA, 13 bp, Artificial Sequence
  Oligonucleotide for detection of SNP TSC0046509
ttgttcgtgttgg

SEQ ID NO: 188918 - DNA, 13 bp, Artificial Sequence
  Oligonucleotide for detection of SNP TSC0046509
ccaacacgaacaa

SEQ ID NO: 188919 - DNA, 13 bp, Artificial Sequence
  Oligonucleotide for detection of SNP TSC0046509
ttagtatgaatag

SEQ ID NO: 188920 - DNA, 13 bp, Artificial Sequence
  Oligonucleotide for detection of SNP TSC0046509
ctattcatactaa

SEQ ID NO: 188921 - DNA, 13 bp, Artificial Sequence
  Oligonucleotide for detection of SNP TSC0046509
ttagtacgaatag

SEQ ID NO: 188922 - DNA, 13 bp, Artificial Sequence
  Oligonucleotide for detection of SNP TSC0046509
ctattcgtactaa

SEQ ID NO: 188923 - DNA, 13 bp, Artificial Sequence
  Oligonucleotide for detection of SNP TSC0046510
tggatagttgtta

SEQ ID NO: 188924 - DNA, 13 bp, Artificial Sequence
  Oligonucleotide for detection of SNP TSC0046510
taacaactatcca

SEQ ID NO: 188925 - DNA, 13 bp, Artificial Sequence
  Oligonucleotide for detection of SNP TSC0046510
tggataattgtta

SEQ ID NO: 188926 - DNA, 13 bp, Artificial Sequence
  Oligonucleotide for detection of SNP TSC0046510
taacaattatcca

SEQ ID NO: 188927 - DNA, 13 bp, Artificial Sequence
  Oligonucleotide for detection of SNP TSC0046513
aatgatggttaaa

SEQ ID NO: 188928 - DNA, 13 bp, Artificial Sequence
  Oligonucleotide for detection of SNP TSC0046513
tttaaccatcatt

SEQ ID NO: 188929 - DNA, 13 bp, Artificial Sequence
  Oligonucleotide for detection of SNP TSC0046513
aatgatagttaaa

SEQ ID NO: 188930 - DNA, 13 bp, Artificial Sequence
  Oligonucleotide for detection of SNP TSC0046513
tttaactatcatt

SEQ ID NO: 188931 - DNA, 13 bp, Artificial Sequence
  Oligonucleotide for detection of SNP TSC0046514
gagtaagtgatat

SEQ ID NO: 188932 - DNA, 13 bp, Artificial Sequence
  Oligonucleotide for detection of SNP TSC0046514
atatcacttactc

SEQ ID NO: 188933 - DNA, 13 bp, Artificial Sequence
  Oligonucleotide for detection of SNP TSC0046514
gagtaaatgatat

SEQ ID NO: 188934 - DNA, 13 bp, Artificial Sequence
  Oligonucleotide for detection of SNP TSC0046514
atatcatttactc

SEQ ID NO: 188935 - DNA, 13 bp, Artificial Sequence
  Oligonucleotide for detection of SNP TSC0046515
ttgtggatagtaa

SEQ ID NO: 188936 - DNA, 13 bp, Artificial Sequence
  Oligonucleotide for detection of SNP TSC0046515
ttactatccacaa

SEQ ID NO: 188937 - DNA, 13 bp, Artificial Sequence
  Oligonucleotide for detection of SNP TSC0046515
ttgtgggtagtaa

SEQ ID NO: 188938 - DNA, 13 bp, Artificial Sequence
  Oligonucleotide for detection of SNP TSC0046515
ttactacccacaa

SEQ ID NO: 188939 - DNA, 13 bp, Artificial Sequence
  Oligonucleotide for detection of SNP TSC0046516
atttgtttgtttg

SEQ ID NO: 188940 - DNA, 13 bp, Artificial Sequence
  Oligonucleotide for detection of SNP TSC0046516
caaacaaacaaat

SEQ ID NO: 188941 - DNA, 13 bp, Artificial Sequence
  Oligonucleotide for detection of SNP TSC0046516
atttgtgtgtttg

SEQ ID NO: 188942 - DNA, 13 bp, Artificial Sequence
  Oligonucleotide for detection of SNP TSC0046516
caaacacacaaat

SEQ ID NO: 188943 - DNA, 13 bp, Artificial Sequence
  Oligonucleotide for detection of SNP TSC0046516
attcgtttgtttg

SEQ ID NO: 188944 - DNA, 13 bp, Artificial Sequence
  Oligonucleotide for detection of SNP TSC0046516
caaacaaacgaat

SEQ ID NO: 188945 - DNA, 13 bp, Artificial Sequence
  Oligonucleotide for detection of SNP TSC0046516
attcgtgtgtttg

SEQ ID NO: 188946 - DNA, 13 bp, Artificial Sequence
  Oligonucleotide for detection of SNP TSC0046516
caaacacacgaat

SEQ ID NO: 188947 - DNA, 13 bp, Artificial Sequence
  Oligonucleotide for detection of SNP TSC0046516
atttgcgtgtttg

SEQ ID NO: 188948 - DNA, 13 bp, Artificial Sequence
  Oligonucleotide for detection of SNP TSC0046516
caaacacgcaaat

SEQ ID NO: 188949 - DNA, 13 bp, Artificial Sequence
  Oligonucleotide for detection of SNP TSC0046516
attcgcgtgtttg

SEQ ID NO: 188950 - DNA, 13 bp, Artificial Sequence
  Oligonucleotide for detection of SNP TSC0046516
caaacacgcgaat

SEQ ID NO: 188951 - DNA, 13 bp, Artificial Sequence
  Oligonucleotide for detection of SNP TSC0046516
taggtaggtggat

SEQ ID NO: 188952 - DNA, 13 bp, Artificial Sequence
  Oligonucleotide for detection of SNP TSC0046516
atccacctaccta

SEQ ID NO: 188953 - DNA, 13 bp, Artificial Sequence
  Oligonucleotide for detection of SNP TSC0046516
taggtatgtggat

SEQ ID NO: 188954 - DNA, 13 bp, Artificial Sequence
  Oligonucleotide for detection of SNP TSC0046516
atccacataccta

SEQ ID NO: 188955 - DNA, 13 bp, Artificial Sequence
  Oligonucleotide for detection of SNP TSC0046516
taggtaggcggat

SEQ ID NO: 188956 - DNA, 13 bp, Artificial Sequence
  Oligonucleotide for detection of SNP TSC0046516
atccgcctaccta

SEQ ID NO: 188957 - DNA, 13 bp, Artificial Sequence
  Oligonucleotide for detection of SNP TSC0046516
taggtacgtggat

SEQ ID NO: 188958 - DNA, 13 bp, Artificial Sequence
  Oligonucleotide for detection of SNP TSC0046516
atccacgtaccta

SEQ ID NO: 188959 - DNA, 13 bp, Artificial Sequence
  Oligonucleotide for detection of SNP TSC0046516
taggtatgcggat

SEQ ID NO: 188960 - DNA, 13 bp, Artificial Sequence
  Oligonucleotide for detection of SNP TSC0046516
atccgcataccta

SEQ ID NO: 188961 - DNA, 13 bp, Artificial Sequence
  Oligonucleotide for detection of SNP TSC0046516
taggtacgcggat

SEQ ID NO: 188962 - DNA, 13 bp, Artificial Sequence
  Oligonucleotide for detection of SNP TSC0046516
atccgcgtaccta

SEQ ID NO: 188963 - DNA, 13 bp, Artificial Sequence
  Oligonucleotide for detection of SNP TSC0046517
gttgtatatttty

SEQ ID NO: 188964 - DNA, 13 bp, Artificial Sequence
  Oligonucleotide for detection of SNP TSC0046517
raaaatatacaac

SEQ ID NO: 188965 - DNA, 13 bp, Artificial Sequence
  Oligonucleotide for detection of SNP TSC0046517
gttgtagatttty

SEQ ID NO: 188966 - DNA, 13 bp, Artificial Sequence
  Oligonucleotide for detection of SNP TSC0046517
raaaatctacaac

SEQ ID NO: 188967 - DNA, 13 bp, Artificial Sequence
  Oligonucleotide for detection of SNP TSC0046517
gaaggtgtgtagy

SEQ ID NO: 188968 - DNA, 13 bp, Artificial Sequence
  Oligonucleotide for detection of SNP TSC0046517
rctacacaccttc

SEQ ID NO: 188969 - DNA, 13 bp, Artificial Sequence
  Oligonucleotide for detection of SNP TSC0046517
gaaggtttgtagy

SEQ ID NO: 188970 - DNA, 13 bp, Artificial Sequence
  Oligonucleotide for detection of SNP TSC0046517
rctacaaaccttc

SEQ ID NO: 188971 - DNA, 13 bp, Artificial Sequence
  Oligonucleotide for detection of SNP TSC0046518
agaataggtagay

SEQ ID NO: 188972 - DNA, 13 bp, Artificial Sequence
  Oligonucleotide for detection of SNP TSC0046518
rtctacctattct

SEQ ID NO: 188973 - DNA, 13 bp, Artificial Sequence
  Oligonucleotide for detection of SNP TSC0046518
agaataagtagay

SEQ ID NO: 188974 - DNA, 13 bp, Artificial Sequence
  Oligonucleotide for detection of SNP TSC0046518
rtctacttattct

SEQ ID NO: 188975 - DNA, 13 bp, Artificial Sequence
  Oligonucleotide for detection of SNP TSC0046519
taaggtgggtgga

SEQ ID NO: 188976 - DNA, 13 bp, Artificial Sequence
  Oligonucleotide for detection of SNP TSC0046519
tccacccacctta

SEQ ID NO: 188977 - DNA, 13 bp, Artificial Sequence
  Oligonucleotide for detection of SNP TSC0046519
taaggtaggtgga

SEQ ID NO: 188978 - DNA, 13 bp, Artificial Sequence
  Oligonucleotide for detection of SNP TSC0046519
tccacctacctta

SEQ ID NO: 188979 - DNA, 13 bp, Artificial Sequence
  Oligonucleotide for detection of SNP TSC0046519
taaggcgggtgga

SEQ ID NO: 188980 - DNA, 13 bp, Artificial Sequence
  Oligonucleotide for detection of SNP TSC0046519
tccacccgcctta

SEQ ID NO: 188981 - DNA, 13 bp, Artificial Sequence
  Oligonucleotide for detection of SNP TSC0046520
atatggttattgt

SEQ ID NO: 188982 - DNA, 13 bp, Artificial Sequence
  Oligonucleotide for detection of SNP TSC0046520
acaataaccatat

SEQ ID NO: 188983 - DNA, 13 bp, Artificial Sequence
  Oligonucleotide for detection of SNP TSC0046520
atatgggtattgt

SEQ ID NO: 188984 - DNA, 13 bp, Artificial Sequence
  Oligonucleotide for detection of SNP TSC0046520
acaatacccatat

SEQ ID NO: 188985 - DNA, 13 bp, Artificial Sequence
  Oligonucleotide for detection of SNP TSC0046520
ataataattatat

SEQ ID NO: 188986 - DNA, 13 bp, Artificial Sequence
  Oligonucleotide for detection of SNP TSC0046520
atataattattat

SEQ ID NO: 188987 - DNA, 13 bp, Artificial Sequence
  Oligonucleotide for detection of SNP TSC0046520
ataatatttatat

SEQ ID NO: 188988 - DNA, 13 bp, Artificial Sequence
  Oligonucleotide for detection of SNP TSC0046520
atataaatattat

SEQ ID NO: 188989 - DNA, 13 bp, Artificial Sequence
  Oligonucleotide for detection of SNP TSC0004545
agagaaatttgga

SEQ ID NO: 188990 - DNA, 13 bp, Artificial Sequence
  Oligonucleotide for detection of SNP TSC0004545
tccaaatttctct

SEQ ID NO: 188991 - DNA, 13 bp, Artificial Sequence
  Oligonucleotide for detection of SNP TSC0004545
agagaattttgga

SEQ ID NO: 188992 - DNA, 13 bp, Artificial Sequence
  Oligonucleotide for detection of SNP TSC0004545
tccaaaattctct

SEQ ID NO: 188993 - DNA, 13 bp, Artificial Sequence
  Oligonucleotide for detection of SNP TSC0046525
tgtttaaaattgg

SEQ ID NO: 188994 - DNA, 13 bp, Artificial Sequence
  Oligonucleotide for detection of SNP TSC0046525
ccaattttaaaca

SEQ ID NO: 188995 - DNA, 13 bp, Artificial Sequence
  Oligonucleotide for detection of SNP TSC0046525
tgtttagaattgg

SEQ ID NO: 188996 - DNA, 13 bp, Artificial Sequence
  Oligonucleotide for detection of SNP TSC0046525
ccaattctaaaca

SEQ ID NO: 188997 - DNA, 13 bp, Artificial Sequence
  Oligonucleotide for detection of SNP TSC0046526
attgtattgaaty

SEQ ID NO: 188998 - DNA, 13 bp, Artificial Sequence
  Oligonucleotide for detection of SNP TSC0046526
rattcaatacaat

SEQ ID NO: 188999 - DNA, 13 bp, Artificial Sequence
  Oligonucleotide for detection of SNP TSC0046526
attgtagtgaaty

SEQ ID NO: 189000 - DNA, 13 bp, Artificial Sequence
  Oligonucleotide for detection of SNP TSC0046526
rattcactacaat

SEQ ID NO: 189001 - DNA, 13 bp, Artificial Sequence
  Oligonucleotide for detection of SNP TSC0046526
ggtttagtatagt

SEQ ID NO: 189002 - DNA, 13 bp, Artificial Sequence
  Oligonucleotide for detection of SNP TSC0046526
actatactaaacc

SEQ ID NO: 189003 - DNA, 13 bp, Artificial Sequence
  Oligonucleotide for detection of SNP TSC0046526
ggtttattatagt

SEQ ID NO: 189004 - DNA, 13 bp, Artificial Sequence
  Oligonucleotide for detection of SNP TSC0046526
actataataaacc

SEQ ID NO: 189005 - DNA, 13 bp, Artificial Sequence
  Oligonucleotide for detection of SNP TSC0046527
ttgggaattattt

SEQ ID NO: 189006 - DNA, 13 bp, Artificial Sequence
  Oligonucleotide for detection of SNP TSC0046527
aaataattcccaa

SEQ ID NO: 189007 - DNA, 13 bp, Artificial Sequence
  Oligonucleotide for detection of SNP TSC0046527
ttgggatttattt

SEQ ID NO: 189008 - DNA, 13 bp, Artificial Sequence
  Oligonucleotide for detection of SNP TSC0046527
aaataaatcccaa

SEQ ID NO: 189009 - DNA, 13 bp, Artificial Sequence
  Oligonucleotide for detection of SNP TSC0046527
aagtgatttttag

SEQ ID NO: 189010 - DNA, 13 bp, Artificial Sequence
  Oligonucleotide for detection of SNP TSC0046527
ctaaaaatcactt

SEQ ID NO: 189011 - DNA, 13 bp, Artificial Sequence
  Oligonucleotide for detection of SNP TSC0046527
aagtgagttttag

SEQ ID NO: 189012 - DNA, 13 bp, Artificial Sequence
  Oligonucleotide for detection of SNP TSC0046527
ctaaaactcactt

SEQ ID NO: 189013 - DNA, 13 bp, Artificial Sequence
  Oligonucleotide for detection of SNP TSC0046528
ttaattattttag

SEQ ID NO: 189014 - DNA, 13 bp, Artificial Sequence
  Oligonucleotide for detection of SNP TSC0046528
ctaaaataattaa

SEQ ID NO: 189015 - DNA, 13 bp, Artificial Sequence
  Oligonucleotide for detection of SNP TSC0046528
ttaattgttttag

SEQ ID NO: 189016 - DNA, 13 bp, Artificial Sequence
  Oligonucleotide for detection of SNP TSC0046528
ctaaaacaattaa

SEQ ID NO: 189017 - DNA, 13 bp, Artificial Sequence
  Oligonucleotide for detection of SNP TSC0046529
tttagtatgtttt

SEQ ID NO: 189018 - DNA, 13 bp, Artificial Sequence
  Oligonucleotide for detection of SNP TSC0046529
aaaacatactaaa

SEQ ID NO: 189019 - DNA, 13 bp, Artificial Sequence
  Oligonucleotide for detection of SNP TSC0046529
tttagtgtgtttt

SEQ ID NO: 189020 - DNA, 13 bp, Artificial Sequence
  Oligonucleotide for detection of SNP TSC0046529
aaaacacactaaa

SEQ ID NO: 189021 - DNA, 13 bp, Artificial Sequence
  Oligonucleotide for detection of SNP TSC0046529
tttagcgtgtttt

SEQ ID NO: 189022 - DNA, 13 bp, Artificial Sequence
  Oligonucleotide for detection of SNP TSC0046529
aaaacacgctaaa

SEQ ID NO: 189023 - DNA, 13 bp, Artificial Sequence
  Oligonucleotide for detection of SNP TSC0046529
aaggtatgttgag

SEQ ID NO: 189024 - DNA, 13 bp, Artificial Sequence
  Oligonucleotide for detection of SNP TSC0046529
ctcaacatacctt

SEQ ID NO: 189025 - DNA, 13 bp, Artificial Sequence
  Oligonucleotide for detection of SNP TSC0046529
aaggtacgttgag

SEQ ID NO: 189026 - DNA, 13 bp, Artificial Sequence
  Oligonucleotide for detection of SNP TSC0046529
ctcaacgtacctt

SEQ ID NO: 189027 - DNA, 13 bp, Artificial Sequence
  Oligonucleotide for detection of SNP TSC0046531
ttgagtatacgaa

SEQ ID NO: 189028 - DNA, 13 bp, Artificial Sequence
  Oligonucleotide for detection of SNP TSC0046531
ttcgtatactcaa

SEQ ID NO: 189029 - DNA, 13 bp, Artificial Sequence
  Oligonucleotide for detection of SNP TSC0046531
ttgagtgtacgaa

SEQ ID NO: 189030 - DNA, 13 bp, Artificial Sequence
  Oligonucleotide for detection of SNP TSC0046531
ttcgtacactcaa

SEQ ID NO: 189031 - DNA, 13 bp, Artificial Sequence
  Oligonucleotide for detection of SNP TSC0046532
ttagaaaaaaaaa

SEQ ID NO: 189032 - DNA, 13 bp, Artificial Sequence
  Oligonucleotide for detection of SNP TSC0046532
tttttttttctaa

SEQ ID NO: 189033 - DNA, 13 bp, Artificial Sequence
  Oligonucleotide for detection of SNP TSC0046532
ttagaagaaaaaa

SEQ ID NO: 189034 - DNA, 13 bp, Artificial Sequence
  Oligonucleotide for detection of SNP TSC0046532
ttttttcttctaa

SEQ ID NO: 189035 - DNA, 13 bp, Artificial Sequence
  Oligonucleotide for detection of SNP TSC0046533
attttttgttatg

SEQ ID NO: 189036 - DNA, 13 bp, Artificial Sequence
  Oligonucleotide for detection of SNP TSC0046533
cataacaaaaaat

SEQ ID NO: 189037 - DNA, 13 bp, Artificial Sequence
  Oligonucleotide for detection of SNP TSC0046533
atttttcgttatg

SEQ ID NO: 189038 - DNA, 13 bp, Artificial Sequence
  Oligonucleotide for detection of SNP TSC0046533
cataacgaaaaat

SEQ ID NO: 189039 - DNA, 13 bp, Artificial Sequence
  Oligonucleotide for detection of SNP TSC0046533
tatggtgggaggt

SEQ ID NO: 189040 - DNA, 13 bp, Artificial Sequence
  Oligonucleotide for detection of SNP TSC0046533
acctcccaccata

SEQ ID NO: 189041 - DNA, 13 bp, Artificial Sequence
  Oligonucleotide for detection of SNP TSC0046533
tatggtaggaggt

SEQ ID NO: 189042 - DNA, 13 bp, Artificial Sequence
  Oligonucleotide for detection of SNP TSC0046533
acctcctaccata

SEQ ID NO: 189043 - DNA, 13 bp, Artificial Sequence
  Oligonucleotide for detection of SNP TSC0046533
tatggcgggaggt

SEQ ID NO: 189044 - DNA, 13 bp, Artificial Sequence
  Oligonucleotide for detection of SNP TSC0046533
acctcccgccata

SEQ ID NO: 189045 - DNA, 13 bp, Artificial Sequence
  Oligonucleotide for detection of SNP TSC0046534
aagaagaaagttt

SEQ ID NO: 189046 - DNA, 13 bp, Artificial Sequence
  Oligonucleotide for detection of SNP TSC0046534
aaactttcttctt

SEQ ID NO: 189047 - DNA, 13 bp, Artificial Sequence
  Oligonucleotide for detection of SNP TSC0046534
aagaagtaagttt

SEQ ID NO: 189048 - DNA, 13 bp, Artificial Sequence
  Oligonucleotide for detection of SNP TSC0046534
aaacttacttctt

SEQ ID NO: 189049 - DNA, 13 bp, Artificial Sequence
  Oligonucleotide for detection of SNP TSC0046535
aagagataagaty

SEQ ID NO: 189050 - DNA, 13 bp, Artificial Sequence
  Oligonucleotide for detection of SNP TSC0046535
ratcttatctctt

SEQ ID NO: 189051 - DNA, 13 bp, Artificial Sequence
  Oligonucleotide for detection of SNP TSC0046535
aagagagaagaty

SEQ ID NO: 189052 - DNA, 13 bp, Artificial Sequence
  Oligonucleotide for detection of SNP TSC0046535
ratcttctctctt

SEQ ID NO: 189053 - DNA, 13 bp, Artificial Sequence
  Oligonucleotide for detection of SNP TSC0046535
gattttgtttttt

SEQ ID NO: 189054 - DNA, 13 bp, Artificial Sequence
  Oligonucleotide for detection of SNP TSC0046535
aaaaaacaaaatc

SEQ ID NO: 189055 - DNA, 13 bp, Artificial Sequence
  Oligonucleotide for detection of SNP TSC0046537
ttttaagaaagga

SEQ ID NO: 189056 - DNA, 13 bp, Artificial Sequence
  Oligonucleotide for detection of SNP TSC0046537
tcctttcttaaaa

SEQ ID NO: 189057 - DNA, 13 bp, Artificial Sequence
  Oligonucleotide for detection of SNP TSC0046537
ttttaaaaaagga

SEQ ID NO: 189058 - DNA, 13 bp, Artificial Sequence
  Oligonucleotide for detection of SNP TSC0046537
tccttttttaaaa

SEQ ID NO: 189059 - DNA, 13 bp, Artificial Sequence
  Oligonucleotide for detection of SNP TSC0009884
ttgggtatagtgy

SEQ ID NO: 189060 - DNA, 13 bp, Artificial Sequence
  Oligonucleotide for detection of SNP TSC0009884
rcactatacccaa

SEQ ID NO: 189061 - DNA, 13 bp, Artificial Sequence
  Oligonucleotide for detection of SNP TSC0009884
ttgggtgtagtgy

SEQ ID NO: 189062 - DNA, 13 bp, Artificial Sequence
  Oligonucleotide for detection of SNP TSC0009884
rcactacacccaa

SEQ ID NO: 189063 - DNA, 13 bp, Artificial Sequence
  Oligonucleotide for detection of SNP TSC0009884
ttgggcgtagtgy

SEQ ID NO: 189064 - DNA, 13 bp, Artificial Sequence
  Oligonucleotide for detection of SNP TSC0009884
rcactacgcccaa

SEQ ID NO: 189065 - DNA, 13 bp, Artificial Sequence
  Oligonucleotide for detection of SNP TSC0009884
gtattgtgtttag

SEQ ID NO: 189066 - DNA, 13 bp, Artificial Sequence
  Oligonucleotide for detection of SNP TSC0009884
ctaaacacaatac

SEQ ID NO: 189067 - DNA, 13 bp, Artificial Sequence
  Oligonucleotide for detection of SNP TSC0009884
gtattgcgtttag

SEQ ID NO: 189068 - DNA, 13 bp, Artificial Sequence
  Oligonucleotide for detection of SNP TSC0009884
ctaaacgcaatac

SEQ ID NO: 189069 - DNA, 13 bp, Artificial Sequence
  Oligonucleotide for detection of SNP TSC0006744
aaattgtttttat

SEQ ID NO: 189070 - DNA, 13 bp, Artificial Sequence
  Oligonucleotide for detection of SNP TSC0006744
ataaaaacaattt

SEQ ID NO: 189071 - DNA, 13 bp, Artificial Sequence
  Oligonucleotide for detection of SNP TSC0006744
aaattggttttat

SEQ ID NO: 189072 - DNA, 13 bp, Artificial Sequence
  Oligonucleotide for detection of SNP TSC0006744
ataaaaccaattt

SEQ ID NO: 189073 - DNA, 13 bp, Artificial Sequence
  Oligonucleotide for detection of SNP TSC0006744
atgggggtagttt

SEQ ID NO: 189074 - DNA, 13 bp, Artificial Sequence
  Oligonucleotide for detection of SNP TSC0006744
aaactacccccat

SEQ ID NO: 189075 - DNA, 13 bp, Artificial Sequence
  Oligonucleotide for detection of SNP TSC0006744
atggggttagttt

SEQ ID NO: 189076 - DNA, 13 bp, Artificial Sequence
  Oligonucleotide for detection of SNP TSC0006744
aaactaaccccat

SEQ ID NO: 189077 - DNA, 13 bp, Artificial Sequence
  Oligonucleotide for detection of SNP TSC0046541
gttagatgtatty

SEQ ID NO: 189078 - DNA, 13 bp, Artificial Sequence
  Oligonucleotide for detection of SNP TSC0046541
raatacatctaac

SEQ ID NO: 189079 - DNA, 13 bp, Artificial Sequence
  Oligonucleotide for detection of SNP TSC0046541
gttagaggtatty

SEQ ID NO: 189080 - DNA, 13 bp, Artificial Sequence
  Oligonucleotide for detection of SNP TSC0046541
raatacctctaac

SEQ ID NO: 189081 - DNA, 13 bp, Artificial Sequence
  Oligonucleotide for detection of SNP TSC0046541
gttagacgtatty

SEQ ID NO: 189082 - DNA, 13 bp, Artificial Sequence
  Oligonucleotide for detection of SNP TSC0046541
raatacgtctaac

SEQ ID NO: 189083 - DNA, 13 bp, Artificial Sequence
  Oligonucleotide for detection of SNP TSC0046541
gaatatgtttaay

SEQ ID NO: 189084 - DNA, 13 bp, Artificial Sequence
  Oligonucleotide for detection of SNP TSC0046541
rttaaacatattc

SEQ ID NO: 189085 - DNA, 13 bp, Artificial Sequence
  Oligonucleotide for detection of SNP TSC0046541
gaatatttttaay

SEQ ID NO: 189086 - DNA, 13 bp, Artificial Sequence
  Oligonucleotide for detection of SNP TSC0046541
rttaaaaatattc

SEQ ID NO: 189087 - DNA, 13 bp, Artificial Sequence
  Oligonucleotide for detection of SNP TSC0046541
gaatacgtttaay

SEQ ID NO: 189088 - DNA, 13 bp, Artificial Sequence
  Oligonucleotide for detection of SNP TSC0046541
rttaaacgtattc

SEQ ID NO: 189089 - DNA, 13 bp, Artificial Sequence
  Oligonucleotide for detection of SNP TSC0046542
tatggtaatggta

SEQ ID NO: 189090 - DNA, 13 bp, Artificial Sequence
  Oligonucleotide for detection of SNP TSC0046542
taccattaccata

SEQ ID NO: 189091 - DNA, 13 bp, Artificial Sequence
  Oligonucleotide for detection of SNP TSC0046542
tatggtgatggta

SEQ ID NO: 189092 - DNA, 13 bp, Artificial Sequence
  Oligonucleotide for detection of SNP TSC0046542
taccatcaccata

SEQ ID NO: 189093 - DNA, 13 bp, Artificial Sequence
  Oligonucleotide for detection of SNP TSC0046542
tatggcgatggta

SEQ ID NO: 189094 - DNA, 13 bp, Artificial Sequence
  Oligonucleotide for detection of SNP TSC0046542
taccatcgccata

SEQ ID NO: 189095 - DNA, 13 bp, Artificial Sequence
  Oligonucleotide for detection of SNP TSC0046542
tgttattgttata

SEQ ID NO: 189096 - DNA, 13 bp, Artificial Sequence
  Oligonucleotide for detection of SNP TSC0046542
tataacaataaca

SEQ ID NO: 189097 - DNA, 13 bp, Artificial Sequence
  Oligonucleotide for detection of SNP TSC0046542
tgttatcgttata

SEQ ID NO: 189098 - DNA, 13 bp, Artificial Sequence
  Oligonucleotide for detection of SNP TSC0046542
tataacgataaca

SEQ ID NO: 189099 - DNA, 13 bp, Artificial Sequence
  Oligonucleotide for detection of SNP TSC0046543
tataagatgttgg

SEQ ID NO: 189100 - DNA, 13 bp, Artificial Sequence
  Oligonucleotide for detection of SNP TSC0046543
ccaacatcttata

SEQ ID NO: 189101 - DNA, 13 bp, Artificial Sequence
  Oligonucleotide for detection of SNP TSC0046543
tataagttgttgg

SEQ ID NO: 189102 - DNA, 13 bp, Artificial Sequence
  Oligonucleotide for detection of SNP TSC0046543
ccaacaacttata

SEQ ID NO: 189103 - DNA, 13 bp, Artificial Sequence
  Oligonucleotide for detection of SNP TSC0046543
ttaatattttatg

SEQ ID NO: 189104 - DNA, 13 bp, Artificial Sequence
  Oligonucleotide for detection of SNP TSC0046543
cataaaatattaa

SEQ ID NO: 189105 - DNA, 13 bp, Artificial Sequence
  Oligonucleotide for detection of SNP TSC0046543
ttaataatttatg

SEQ ID NO: 189106 - DNA, 13 bp, Artificial Sequence
  Oligonucleotide for detection of SNP TSC0046543
cataaattattaa

SEQ ID NO: 189107 - DNA, 13 bp, Artificial Sequence
  Oligonucleotide for detection of SNP TSC0046544
aatatttgataty

SEQ ID NO: 189108 - DNA, 13 bp, Artificial Sequence
  Oligonucleotide for detection of SNP TSC0046544
ratatcaaatatt

SEQ ID NO: 189109 - DNA, 13 bp, Artificial Sequence
  Oligonucleotide for detection of SNP TSC0046544
aatattggataty

SEQ ID NO: 189110 - DNA, 13 bp, Artificial Sequence
  Oligonucleotide for detection of SNP TSC0046544
ratatccaatatt

SEQ ID NO: 189111 - DNA, 13 bp, Artificial Sequence
  Oligonucleotide for detection of SNP TSC0046544
aatattcgataty

SEQ ID NO: 189112 - DNA, 13 bp, Artificial Sequence
  Oligonucleotide for detection of SNP TSC0046544
ratatcgaatatt

SEQ ID NO: 189113 - DNA, 13 bp, Artificial Sequence
  Oligonucleotide for detection of SNP TSC0046544
ggtattgagtatt

SEQ ID NO: 189114 - DNA, 13 bp, Artificial Sequence
  Oligonucleotide for detection of SNP TSC0046544
aatactcaatacc

SEQ ID NO: 189115 - DNA, 13 bp, Artificial Sequence
  Oligonucleotide for detection of SNP TSC0046544
ggtatttagtatt

SEQ ID NO: 189116 - DNA, 13 bp, Artificial Sequence
  Oligonucleotide for detection of SNP TSC0046544
aatactaaatacc

SEQ ID NO: 189117 - DNA, 13 bp, Artificial Sequence
  Oligonucleotide for detection of SNP TSC0046544
ggtatcgagtatt

SEQ ID NO: 189118 - DNA, 13 bp, Artificial Sequence
  Oligonucleotide for detection of SNP TSC0046544
aatactcgatacc

SEQ ID NO: 189119 - DNA, 13 bp, Artificial Sequence
  Oligonucleotide for detection of SNP TSC0046547
gaggtaagtaatt

SEQ ID NO: 189120 - DNA, 13 bp, Artificial Sequence
  Oligonucleotide for detection of SNP TSC0046547
aattacttacctc

SEQ ID NO: 189121 - DNA, 13 bp, Artificial Sequence
  Oligonucleotide for detection of SNP TSC0046547
gaggtaggtaatt

SEQ ID NO: 189122 - DNA, 13 bp, Artificial Sequence
  Oligonucleotide for detection of SNP TSC0046547
aattacctacctc

SEQ ID NO: 189123 - DNA, 13 bp, Artificial Sequence
  Oligonucleotide for detection of SNP TSC0046548
aagtatatttaay

SEQ ID NO: 189124 - DNA, 13 bp, Artificial Sequence
  Oligonucleotide for detection of SNP TSC0046548
rttaaatatactt

SEQ ID NO: 189125 - DNA, 13 bp, Artificial Sequence
  Oligonucleotide for detection of SNP TSC0046548
aagtatgtttaay

SEQ ID NO: 189126 - DNA, 13 bp, Artificial Sequence
  Oligonucleotide for detection of SNP TSC0046548
rttaaacatactt

SEQ ID NO: 189127 - DNA, 13 bp, Artificial Sequence
  Oligonucleotide for detection of SNP TSC0046549
tttgggatattga

SEQ ID NO: 189128 - DNA, 13 bp, Artificial Sequence
  Oligonucleotide for detection of SNP TSC0046549
tcaatatcccaaa

SEQ ID NO: 189129 - DNA, 13 bp, Artificial Sequence
  Oligonucleotide for detection of SNP TSC0046549
tttggggtattga

SEQ ID NO: 189130 - DNA, 13 bp, Artificial Sequence
  Oligonucleotide for detection of SNP TSC0046549
tcaataccccaaa

SEQ ID NO: 189131 - DNA, 13 bp, Artificial Sequence
  Oligonucleotide for detection of SNP TSC0046554
taaaaagtagaay

SEQ ID NO: 189132 - DNA, 13 bp, Artificial Sequence
  Oligonucleotide for detection of SNP TSC0046554
rttctacttttta

SEQ ID NO: 189133 - DNA, 13 bp, Artificial Sequence
  Oligonucleotide for detection of SNP TSC0046554
taaaaaatagaay

SEQ ID NO: 189134 - DNA, 13 bp, Artificial Sequence
  Oligonucleotide for detection of SNP TSC0046554
rttctatttttta

SEQ ID NO: 189135 - DNA, 13 bp, Artificial Sequence
  Oligonucleotide for detection of SNP TSC0001266
gtattagagtatg

SEQ ID NO: 189136 - DNA, 13 bp, Artificial Sequence
  Oligonucleotide for detection of SNP TSC0001266
catactctaatac

SEQ ID NO: 189137 - DNA, 13 bp, Artificial Sequence
  Oligonucleotide for detection of SNP TSC0001266
gtattaaagtatg

SEQ ID NO: 189138 - DNA, 13 bp, Artificial Sequence
  Oligonucleotide for detection of SNP TSC0001266
catactttaatac

SEQ ID NO: 189139 - DNA, 13 bp, Artificial Sequence
  Oligonucleotide for detection of SNP TSC0009578
ggtataatgtttt

SEQ ID NO: 189140 - DNA, 13 bp, Artificial Sequence
  Oligonucleotide for detection of SNP TSC0009578
aaaacattatacc

SEQ ID NO: 189141 - DNA, 13 bp, Artificial Sequence
  Oligonucleotide for detection of SNP TSC0009578
ggtatagtgtttt

SEQ ID NO: 189142 - DNA, 13 bp, Artificial Sequence
  Oligonucleotide for detection of SNP TSC0009578
aaaacactatacc

SEQ ID NO: 189143 - DNA, 13 bp, Artificial Sequence
  Oligonucleotide for detection of SNP TSC0046561
gaggtcgtgggag

SEQ ID NO: 189144 - DNA, 13 bp, Artificial Sequence
  Oligonucleotide for detection of SNP TSC0046561
ctcccacgacctc

SEQ ID NO: 189145 - DNA, 13 bp, Artificial Sequence
  Oligonucleotide for detection of SNP TSC0000498
atgtagagatata

SEQ ID NO: 189146 - DNA, 13 bp, Artificial Sequence
  Oligonucleotide for detection of SNP TSC0000498
tatatctctacat

SEQ ID NO: 189147 - DNA, 13 bp, Artificial Sequence
  Oligonucleotide for detection of SNP TSC0000498
atgtagtgatata

SEQ ID NO: 189148 - DNA, 13 bp, Artificial Sequence
  Oligonucleotide for detection of SNP TSC0000498
tatatcactacat

SEQ ID NO: 189149 - DNA, 13 bp, Artificial Sequence
  Oligonucleotide for detection of SNP TSC0000498
tgtgtttttatat

SEQ ID NO: 189150 - DNA, 13 bp, Artificial Sequence
  Oligonucleotide for detection of SNP TSC0000498
atataaaaacaca

SEQ ID NO: 189151 - DNA, 13 bp, Artificial Sequence
  Oligonucleotide for detection of SNP TSC0000498
tgtgttattatat

SEQ ID NO: 189152 - DNA, 13 bp, Artificial Sequence
  Oligonucleotide for detection of SNP TSC0000498
atataataacaca

SEQ ID NO: 189153 - DNA, 13 bp, Artificial Sequence
  Oligonucleotide for detection of SNP TSC0046563
atttatttattta

SEQ ID NO: 189154 - DNA, 13 bp, Artificial Sequence
  Oligonucleotide for detection of SNP TSC0046563
taaataaataaat

SEQ ID NO: 189155 - DNA, 13 bp, Artificial Sequence
  Oligonucleotide for detection of SNP TSC0046565
aatatagagtaga

SEQ ID NO: 189156 - DNA, 13 bp, Artificial Sequence
  Oligonucleotide for detection of SNP TSC0046565
tctactctatatt

SEQ ID NO: 189157 - DNA, 13 bp, Artificial Sequence
  Oligonucleotide for detection of SNP TSC0046565
aatataaagtaga

SEQ ID NO: 189158 - DNA, 13 bp, Artificial Sequence
  Oligonucleotide for detection of SNP TSC0046565
tctactttatatt

SEQ ID NO: 189159 - DNA, 13 bp, Artificial Sequence
  Oligonucleotide for detection of SNP TSC0046566
taatgggtttgay

SEQ ID NO: 189160 - DNA, 13 bp, Artificial Sequence
  Oligonucleotide for detection of SNP TSC0046566
rtcaaacccatta

SEQ ID NO: 189161 - DNA, 13 bp, Artificial Sequence
  Oligonucleotide for detection of SNP TSC0046566
taatggatttgay

SEQ ID NO: 189162 - DNA, 13 bp, Artificial Sequence
  Oligonucleotide for detection of SNP TSC0046566
rtcaaatccatta

SEQ ID NO: 189163 - DNA, 13 bp, Artificial Sequence
  Oligonucleotide for detection of SNP TSC0046567
ttgtgatttggty

SEQ ID NO: 189164 - DNA, 13 bp, Artificial Sequence
  Oligonucleotide for detection of SNP TSC0046567
raccaaatcacaa

SEQ ID NO: 189165 - DNA, 13 bp, Artificial Sequence
  Oligonucleotide for detection of SNP TSC0046567
ttgtgagttggty

SEQ ID NO: 189166 - DNA, 13 bp, Artificial Sequence
  Oligonucleotide for detection of SNP TSC0046567
raccaactcacaa

SEQ ID NO: 189167 - DNA, 13 bp, Artificial Sequence
  Oligonucleotide for detection of SNP TSC0046567
gattagattatag

SEQ ID NO: 189168 - DNA, 13 bp, Artificial Sequence
  Oligonucleotide for detection of SNP TSC0046567
ctataatctaatc

SEQ ID NO: 189169 - DNA, 13 bp, Artificial Sequence
  Oligonucleotide for detection of SNP TSC0046567
gattagtttatag

SEQ ID NO: 189170 - DNA, 13 bp, Artificial Sequence
  Oligonucleotide for detection of SNP TSC0046567
ctataaactaatc

SEQ ID NO: 189171 - DNA, 13 bp, Artificial Sequence
  Oligonucleotide for detection of SNP TSC0046568
taaaaagttaata

SEQ ID NO: 189172 - DNA, 13 bp, Artificial Sequence
  Oligonucleotide for detection of SNP TSC0046568
tattaacttttta

SEQ ID NO: 189173 - DNA, 13 bp, Artificial Sequence
  Oligonucleotide for detection of SNP TSC0046569
gagtatataatgy

SEQ ID NO: 189174 - DNA, 13 bp, Artificial Sequence
  Oligonucleotide for detection of SNP TSC0046569
rcattatatactc

SEQ ID NO: 189175 - DNA, 13 bp, Artificial Sequence
  Oligonucleotide for detection of SNP TSC0046569
gagtatttaatgy

SEQ ID NO: 189176 - DNA, 13 bp, Artificial Sequence
  Oligonucleotide for detection of SNP TSC0046569
rcattaaatactc

SEQ ID NO: 189177 - DNA, 13 bp, Artificial Sequence
  Oligonucleotide for detection of SNP TSC0046569
gagtatataacgy

SEQ ID NO: 189178 - DNA, 13 bp, Artificial Sequence
  Oligonucleotide for detection of SNP TSC0046569
rcgttatatactc

SEQ ID NO: 189179 - DNA, 13 bp, Artificial Sequence
  Oligonucleotide for detection of SNP TSC0046569
gagtatttaacgy

SEQ ID NO: 189180 - DNA, 13 bp, Artificial Sequence
  Oligonucleotide for detection of SNP TSC0046569
rcgttaaatactc

SEQ ID NO: 189181 - DNA, 13 bp, Artificial Sequence
  Oligonucleotide for detection of SNP TSC0046569
gtgttatatatty

SEQ ID NO: 189182 - DNA, 13 bp, Artificial Sequence
  Oligonucleotide for detection of SNP TSC0046569
raatatataacac

SEQ ID NO: 189183 - DNA, 13 bp, Artificial Sequence
  Oligonucleotide for detection of SNP TSC0046569
gtgttaaatatty

SEQ ID NO: 189184 - DNA, 13 bp, Artificial Sequence
  Oligonucleotide for detection of SNP TSC0046569
raatatttaacac

SEQ ID NO: 189185 - DNA, 13 bp, Artificial Sequence
  Oligonucleotide for detection of SNP TSC0046569
gcgttatatatty

SEQ ID NO: 189186 - DNA, 13 bp, Artificial Sequence
  Oligonucleotide for detection of SNP TSC0046569
raatatataacgc

SEQ ID NO: 189187 - DNA, 13 bp, Artificial Sequence
  Oligonucleotide for detection of SNP TSC0046569
gcgttaaatatty

SEQ ID NO: 189188 - DNA, 13 bp, Artificial Sequence
  Oligonucleotide for detection of SNP TSC0046569
raatatttaacgc

SEQ ID NO: 189189 - DNA, 13 bp, Artificial Sequence
  Oligonucleotide for detection of SNP TSC0000267
gatgtggttgtag

SEQ ID NO: 189190 - DNA, 13 bp, Artificial Sequence
  Oligonucleotide for detection of SNP TSC0000267
ctacaaccacatc

SEQ ID NO: 189191 - DNA, 13 bp, Artificial Sequence
  Oligonucleotide for detection of SNP TSC0000267
gatgtgattgtag

SEQ ID NO: 189192 - DNA, 13 bp, Artificial Sequence
  Oligonucleotide for detection of SNP TSC0000267
ctacaatcacatc

SEQ ID NO: 189193 - DNA, 13 bp, Artificial Sequence
  Oligonucleotide for detection of SNP TSC0000267
gatgcggttgtag

SEQ ID NO: 189194 - DNA, 13 bp, Artificial Sequence
  Oligonucleotide for detection of SNP TSC0000267
ctacaaccgcatc

SEQ ID NO: 189195 - DNA, 13 bp, Artificial Sequence
  Oligonucleotide for detection of SNP TSC0000267
gatgcgattgtag

SEQ ID NO: 189196 - DNA, 13 bp, Artificial Sequence
  Oligonucleotide for detection of SNP TSC0000267
ctacaatcgcatc

SEQ ID NO: 189197 - DNA, 13 bp, Artificial Sequence
  Oligonucleotide for detection of SNP TSC0008275
ttttgtcggtaty

SEQ ID NO: 189198 - DNA, 13 bp, Artificial Sequence
  Oligonucleotide for detection of SNP TSC0008275
rataccgacaaaa

SEQ ID NO: 189199 - DNA, 13 bp, Artificial Sequence
  Oligonucleotide for detection of SNP TSC0008275
ggtattggtagga

SEQ ID NO: 189200 - DNA, 13 bp, Artificial Sequence
  Oligonucleotide for detection of SNP TSC0008275
tcctaccaatacc

SEQ ID NO: 189201 - DNA, 13 bp, Artificial Sequence
  Oligonucleotide for detection of SNP TSC0008275
ggtattagtagga

SEQ ID NO: 189202 - DNA, 13 bp, Artificial Sequence
  Oligonucleotide for detection of SNP TSC0008275
tcctactaatacc

SEQ ID NO: 189203 - DNA, 13 bp, Artificial Sequence
  Oligonucleotide for detection of SNP TSC0008275
ggtatcggtagga

SEQ ID NO: 189204 - DNA, 13 bp, Artificial Sequence
  Oligonucleotide for detection of SNP TSC0008275
tcctaccgatacc

SEQ ID NO: 189205 - DNA, 13 bp, Artificial Sequence
  Oligonucleotide for detection of SNP TSC0008276
tattttgtatata

SEQ ID NO: 189206 - DNA, 13 bp, Artificial Sequence
  Oligonucleotide for detection of SNP TSC0008276
tatatacaaaata

SEQ ID NO: 189207 - DNA, 13 bp, Artificial Sequence
  Oligonucleotide for detection of SNP TSC0008276
tatttcgtatata

SEQ ID NO: 189208 - DNA, 13 bp, Artificial Sequence
  Oligonucleotide for detection of SNP TSC0008276
tatatacgaaata

SEQ ID NO: 189209 - DNA, 13 bp, Artificial Sequence
  Oligonucleotide for detection of SNP TSC0008276
tgtatgtgggatg

SEQ ID NO: 189210 - DNA, 13 bp, Artificial Sequence
  Oligonucleotide for detection of SNP TSC0008276
catcccacataca

SEQ ID NO: 189211 - DNA, 13 bp, Artificial Sequence
  Oligonucleotide for detection of SNP TSC0008276
tgtatgcgggatg

SEQ ID NO: 189212 - DNA, 13 bp, Artificial Sequence
  Oligonucleotide for detection of SNP TSC0008276
catcccgcataca

SEQ ID NO: 189213 - DNA, 13 bp, Artificial Sequence
  Oligonucleotide for detection of SNP TSC0046570
tagagtaatatta

SEQ ID NO: 189214 - DNA, 13 bp, Artificial Sequence
  Oligonucleotide for detection of SNP TSC0046570
taatattactcta

SEQ ID NO: 189215 - DNA, 13 bp, Artificial Sequence
  Oligonucleotide for detection of SNP TSC0046570
tagagttatatta

SEQ ID NO: 189216 - DNA, 13 bp, Artificial Sequence
  Oligonucleotide for detection of SNP TSC0046570
taatataactcta

SEQ ID NO: 189217 - DNA, 13 bp, Artificial Sequence
  Oligonucleotide for detection of SNP TSC0046570
tgatatagtttta

SEQ ID NO: 189218 - DNA, 13 bp, Artificial Sequence
  Oligonucleotide for detection of SNP TSC0046570
taaaactatatca

SEQ ID NO: 189219 - DNA, 13 bp, Artificial Sequence
  Oligonucleotide for detection of SNP TSC0046571
tgtttattaatat

SEQ ID NO: 189220 - DNA, 13 bp, Artificial Sequence
  Oligonucleotide for detection of SNP TSC0046571
atattaataaaca

SEQ ID NO: 189221 - DNA, 13 bp, Artificial Sequence
  Oligonucleotide for detection of SNP TSC0046571
tgtttagtaatat

SEQ ID NO: 189222 - DNA, 13 bp, Artificial Sequence
  Oligonucleotide for detection of SNP TSC0046571
atattactaaaca

SEQ ID NO: 189223 - DNA, 13 bp, Artificial Sequence
  Oligonucleotide for detection of SNP TSC0046571
cgtttattaatat

SEQ ID NO: 189224 - DNA, 13 bp, Artificial Sequence
  Oligonucleotide for detection of SNP TSC0046571
atattaataaacg

SEQ ID NO: 189225 - DNA, 13 bp, Artificial Sequence
  Oligonucleotide for detection of SNP TSC0046571
cgtttagtaatat

SEQ ID NO: 189226 - DNA, 13 bp, Artificial Sequence
  Oligonucleotide for detection of SNP TSC0046571
atattactaaacg

SEQ ID NO: 189227 - DNA, 13 bp, Artificial Sequence
  Oligonucleotide for detection of SNP TSC0046571
atattgataagtg

SEQ ID NO: 189228 - DNA, 13 bp, Artificial Sequence
  Oligonucleotide for detection of SNP TSC0046571
cacttatcaatat

SEQ ID NO: 189229 - DNA, 13 bp, Artificial Sequence
  Oligonucleotide for detection of SNP TSC0046571
atattgttaagtg

SEQ ID NO: 189230 - DNA, 13 bp, Artificial Sequence
  Oligonucleotide for detection of SNP TSC0046571
cacttaacaatat

SEQ ID NO: 189231 - DNA, 13 bp, Artificial Sequence
  Oligonucleotide for detection of SNP TSC0046571
atattgataagcg

SEQ ID NO: 189232 - DNA, 13 bp, Artificial Sequence
  Oligonucleotide for detection of SNP TSC0046571
cgcttatcaatat

SEQ ID NO: 189233 - DNA, 13 bp, Artificial Sequence
  Oligonucleotide for detection of SNP TSC0046571
atattgttaagcg

SEQ ID NO: 189234 - DNA, 13 bp, Artificial Sequence
  Oligonucleotide for detection of SNP TSC0046571
cgcttaacaatat

SEQ ID NO: 189235 - DNA, 13 bp, Artificial Sequence
  Oligonucleotide for detection of SNP TSC0046572
agtttttggtaty

SEQ ID NO: 189236 - DNA, 13 bp, Artificial Sequence
  Oligonucleotide for detection of SNP TSC0046572
rataccaaaaact

SEQ ID NO: 189237 - DNA, 13 bp, Artificial Sequence
  Oligonucleotide for detection of SNP TSC0046572
agttttgggtaty

SEQ ID NO: 189238 - DNA, 13 bp, Artificial Sequence
  Oligonucleotide for detection of SNP TSC0046572
ratacccaaaact

SEQ ID NO: 189239 - DNA, 13 bp, Artificial Sequence
  Oligonucleotide for detection of SNP TSC0046572
agtttcgggtaty

SEQ ID NO: 189240 - DNA, 13 bp, Artificial Sequence
  Oligonucleotide for detection of SNP TSC0046572
ratacccgaaact

SEQ ID NO: 189241 - DNA, 13 bp, Artificial Sequence
  Oligonucleotide for detection of SNP TSC0046572
gatattagaggtt

SEQ ID NO: 189242 - DNA, 13 bp, Artificial Sequence
  Oligonucleotide for detection of SNP TSC0046572
aacctctaatatc

SEQ ID NO: 189243 - DNA, 13 bp, Artificial Sequence
  Oligonucleotide for detection of SNP TSC0046572
gatatttgaggtt

SEQ ID NO: 189244 - DNA, 13 bp, Artificial Sequence
  Oligonucleotide for detection of SNP TSC0046572
aacctcaaatatc

SEQ ID NO: 189245 - DNA, 13 bp, Artificial Sequence
  Oligonucleotide for detection of SNP TSC0046572
gatattcgaggtt

SEQ ID NO: 189246 - DNA, 13 bp, Artificial Sequence
  Oligonucleotide for detection of SNP TSC0046572
aacctcgaatatc

SEQ ID NO: 189247 - DNA, 13 bp, Artificial Sequence
  Oligonucleotide for detection of SNP TSC0046573
ttgagatatgggg

SEQ ID NO: 189248 - DNA, 13 bp, Artificial Sequence
  Oligonucleotide for detection of SNP TSC0046573
ccccatatctcaa

SEQ ID NO: 189249 - DNA, 13 bp, Artificial Sequence
  Oligonucleotide for detection of SNP TSC0046573
ttgagagatgggg

SEQ ID NO: 189250 - DNA, 13 bp, Artificial Sequence
  Oligonucleotide for detection of SNP TSC0046573
ccccatctctcaa

SEQ ID NO: 189251 - DNA, 13 bp, Artificial Sequence
  Oligonucleotide for detection of SNP TSC0046574
agtttatgggtta

SEQ ID NO: 189252 - DNA, 13 bp, Artificial Sequence
  Oligonucleotide for detection of SNP TSC0046574
taacccataaact

SEQ ID NO: 189253 - DNA, 13 bp, Artificial Sequence
  Oligonucleotide for detection of SNP TSC0046574
agtttacgggtta

SEQ ID NO: 189254 - DNA, 13 bp, Artificial Sequence
  Oligonucleotide for detection of SNP TSC0046574
taacccgtaaact

SEQ ID NO: 189255 - DNA, 13 bp, Artificial Sequence
  Oligonucleotide for detection of SNP TSC0046574
tagtttgtgagtt

SEQ ID NO: 189256 - DNA, 13 bp, Artificial Sequence
  Oligonucleotide for detection of SNP TSC0046574
aactcacaaacta

SEQ ID NO: 189257 - DNA, 13 bp, Artificial Sequence
  Oligonucleotide for detection of SNP TSC0046574
tagtttatgagtt

SEQ ID NO: 189258 - DNA, 13 bp, Artificial Sequence
  Oligonucleotide for detection of SNP TSC0046574
aactcataaacta

SEQ ID NO: 189259 - DNA, 13 bp, Artificial Sequence
  Oligonucleotide for detection of SNP TSC0046574
tagttcgtgagtt

SEQ ID NO: 189260 - DNA, 13 bp, Artificial Sequence
  Oligonucleotide for detection of SNP TSC0046574
aactcacgaacta

SEQ ID NO: 189261 - DNA, 13 bp, Artificial Sequence
  Oligonucleotide for detection of SNP TSC0046575
ttgggattgaggy

SEQ ID NO: 189262 - DNA, 13 bp, Artificial Sequence
  Oligonucleotide for detection of SNP TSC0046575
rcctcaatcccaa

SEQ ID NO: 189263 - DNA, 13 bp, Artificial Sequence
  Oligonucleotide for detection of SNP TSC0046575
ttgggagtgaggy

SEQ ID NO: 189264 - DNA, 13 bp, Artificial Sequence
  Oligonucleotide for detection of SNP TSC0046575
rcctcactcccaa

SEQ ID NO: 189265 - DNA, 13 bp, Artificial Sequence
  Oligonucleotide for detection of SNP TSC0046575
tcgggattgaggy

SEQ ID NO: 189266 - DNA, 13 bp, Artificial Sequence
  Oligonucleotide for detection of SNP TSC0046575
rcctcaatcccga

SEQ ID NO: 189267 - DNA, 13 bp, Artificial Sequence
  Oligonucleotide for detection of SNP TSC0046575
tcgggagtgaggy

SEQ ID NO: 189268 - DNA, 13 bp, Artificial Sequence
  Oligonucleotide for detection of SNP TSC0046575
rcctcactcccga

SEQ ID NO: 189269 - DNA, 13 bp, Artificial Sequence
  Oligonucleotide for detection of SNP TSC0046575
ttgggatcgaggy

SEQ ID NO: 189270 - DNA, 13 bp, Artificial Sequence
  Oligonucleotide for detection of SNP TSC0046575
rcctcgatcccaa

SEQ ID NO: 189271 - DNA, 13 bp, Artificial Sequence
  Oligonucleotide for detection of SNP TSC0046575
ttgggagcgaggy

SEQ ID NO: 189272 - DNA, 13 bp, Artificial Sequence
  Oligonucleotide for detection of SNP TSC0046575
rcctcgctcccaa

SEQ ID NO: 189273 - DNA, 13 bp, Artificial Sequence
  Oligonucleotide for detection of SNP TSC0046575
tcgggatcgaggy

SEQ ID NO: 189274 - DNA, 13 bp, Artificial Sequence
  Oligonucleotide for detection of SNP TSC0046575
rcctcgatcccga

SEQ ID NO: 189275 - DNA, 13 bp, Artificial Sequence
  Oligonucleotide for detection of SNP TSC0046575
tcgggagcgaggy

SEQ ID NO: 189276 - DNA, 13 bp, Artificial Sequence
  Oligonucleotide for detection of SNP TSC0046575
rcctcgctcccga

SEQ ID NO: 189277 - DNA, 13 bp, Artificial Sequence
  Oligonucleotide for detection of SNP TSC0046575
gttttggttttgg

SEQ ID NO: 189278 - DNA, 13 bp, Artificial Sequence
  Oligonucleotide for detection of SNP TSC0046575
ccaaaaccaaaac

SEQ ID NO: 189279 - DNA, 13 bp, Artificial Sequence
  Oligonucleotide for detection of SNP TSC0046575
gttttgtttttgg

SEQ ID NO: 189280 - DNA, 13 bp, Artificial Sequence
  Oligonucleotide for detection of SNP TSC0046575
ccaaaaacaaaac

SEQ ID NO: 189281 - DNA, 13 bp, Artificial Sequence
  Oligonucleotide for detection of SNP TSC0046575
gtttcggttttgg

SEQ ID NO: 189282 - DNA, 13 bp, Artificial Sequence
  Oligonucleotide for detection of SNP TSC0046575
ccaaaaccgaaac

SEQ ID NO: 189283 - DNA, 13 bp, Artificial Sequence
  Oligonucleotide for detection of SNP TSC0046575
gtttcgtttttgg

SEQ ID NO: 189284 - DNA, 13 bp, Artificial Sequence
  Oligonucleotide for detection of SNP TSC0046575
ccaaaaacgaaac

SEQ ID NO: 189285 - DNA, 13 bp, Artificial Sequence
  Oligonucleotide for detection of SNP TSC0046575
gttttggtttcgg

SEQ ID NO: 189286 - DNA, 13 bp, Artificial Sequence
  Oligonucleotide for detection of SNP TSC0046575
ccgaaaccaaaac

SEQ ID NO: 189287 - DNA, 13 bp, Artificial Sequence
  Oligonucleotide for detection of SNP TSC0046575
gttttgttttcgg

SEQ ID NO: 189288 - DNA, 13 bp, Artificial Sequence
  Oligonucleotide for detection of SNP TSC0046575
ccgaaaacaaaac

SEQ ID NO: 189289 - DNA, 13 bp, Artificial Sequence
  Oligonucleotide for detection of SNP TSC0046575
gtttcggtttcgg

SEQ ID NO: 189290 - DNA, 13 bp, Artificial Sequence
  Oligonucleotide for detection of SNP TSC0046575
ccgaaaccgaaac

SEQ ID NO: 189291 - DNA, 13 bp, Artificial Sequence
  Oligonucleotide for detection of SNP TSC0046575
gtttcgttttcgg

SEQ ID NO: 189292 - DNA, 13 bp, Artificial Sequence
  Oligonucleotide for detection of SNP TSC0046575
ccgaaaacgaaac

SEQ ID NO: 189293 - DNA, 13 bp, Artificial Sequence
  Oligonucleotide for detection of SNP TSC0046576
taattgttttttt

SEQ ID NO: 189294 - DNA, 13 bp, Artificial Sequence
  Oligonucleotide for detection of SNP TSC0046576
aaaaaaacaatta

SEQ ID NO: 189295 - DNA, 13 bp, Artificial Sequence
  Oligonucleotide for detection of SNP TSC0046576
taattggtttttt

SEQ ID NO: 189296 - DNA, 13 bp, Artificial Sequence
  Oligonucleotide for detection of SNP TSC0046576
aaaaaaccaatta

SEQ ID NO: 189297 - DNA, 13 bp, Artificial Sequence
  Oligonucleotide for detection of SNP TSC0046576
aaaaaattaatta

SEQ ID NO: 189298 - DNA, 13 bp, Artificial Sequence
  Oligonucleotide for detection of SNP TSC0046576
taattaatttttt

SEQ ID NO: 189299 - DNA, 13 bp, Artificial Sequence
  Oligonucleotide for detection of SNP TSC0046577
tatttattttgat

SEQ ID NO: 189300 - DNA, 13 bp, Artificial Sequence
  Oligonucleotide for detection of SNP TSC0046577
atcaaaataaata

SEQ ID NO: 189301 - DNA, 13 bp, Artificial Sequence
  Oligonucleotide for detection of SNP TSC0046577
attagaatggata

SEQ ID NO: 189302 - DNA, 13 bp, Artificial Sequence
  Oligonucleotide for detection of SNP TSC0046577
tatccattctaat

SEQ ID NO: 189303 - DNA, 13 bp, Artificial Sequence
  Oligonucleotide for detection of SNP TSC0046577
attagattggata

SEQ ID NO: 189304 - DNA, 13 bp, Artificial Sequence
  Oligonucleotide for detection of SNP TSC0046577
tatccaatctaat

SEQ ID NO: 189305 - DNA, 13 bp, Artificial Sequence
  Oligonucleotide for detection of SNP TSC0046578
atatagagagaag

SEQ ID NO: 189306 - DNA, 13 bp, Artificial Sequence
  Oligonucleotide for detection of SNP TSC0046578
cttctctctatat

SEQ ID NO: 189307 - DNA, 13 bp, Artificial Sequence
  Oligonucleotide for detection of SNP TSC0046578
atatagtgagaag

SEQ ID NO: 189308 - DNA, 13 bp, Artificial Sequence
  Oligonucleotide for detection of SNP TSC0046578
cttctcactatat

SEQ ID NO: 189309 - DNA, 13 bp, Artificial Sequence
  Oligonucleotide for detection of SNP TSC0046578
atatagcgagaag

SEQ ID NO: 189310 - DNA, 13 bp, Artificial Sequence
  Oligonucleotide for detection of SNP TSC0046578
cttctcgctatat

SEQ ID NO: 189311 - DNA, 13 bp, Artificial Sequence
  Oligonucleotide for detection of SNP TSC0046578
tttttttttgtgt

SEQ ID NO: 189312 - DNA, 13 bp, Artificial Sequence
  Oligonucleotide for detection of SNP TSC0046578
acacaaaaaaaaa

SEQ ID NO: 189313 - DNA, 13 bp, Artificial Sequence
  Oligonucleotide for detection of SNP TSC0046578
ttttttgttgtgt

SEQ ID NO: 189314 - DNA, 13 bp, Artificial Sequence
  Oligonucleotide for detection of SNP TSC0046578
acacaacaaaaaa

SEQ ID NO: 189315 - DNA, 13 bp, Artificial Sequence
  Oligonucleotide for detection of SNP TSC0046578
tttttcgttgtgt

SEQ ID NO: 189316 - DNA, 13 bp, Artificial Sequence
  Oligonucleotide for detection of SNP TSC0046578
acacaacgaaaaa

SEQ ID NO: 189317 - DNA, 13 bp, Artificial Sequence
  Oligonucleotide for detection of SNP TSC0000797
aggaaggaatttt

SEQ ID NO: 189318 - DNA, 13 bp, Artificial Sequence
  Oligonucleotide for detection of SNP TSC0000797
aaaattccttcct

SEQ ID NO: 189319 - DNA, 13 bp, Artificial Sequence
  Oligonucleotide for detection of SNP TSC0000797
aggaagaaatttt

SEQ ID NO: 189320 - DNA, 13 bp, Artificial Sequence
  Oligonucleotide for detection of SNP TSC0000797
aaaatttcttcct

SEQ ID NO: 189321 - DNA, 13 bp, Artificial Sequence
  Oligonucleotide for detection of SNP TSC0000915
tagtgaatgagtt

SEQ ID NO: 189322 - DNA, 13 bp, Artificial Sequence
  Oligonucleotide for detection of SNP TSC0000915
aactcattcacta

SEQ ID NO: 189323 - DNA, 13 bp, Artificial Sequence
  Oligonucleotide for detection of SNP TSC0000915
tagtgagtgagtt

SEQ ID NO: 189324 - DNA, 13 bp, Artificial Sequence
  Oligonucleotide for detection of SNP TSC0000915
aactcactcacta

SEQ ID NO: 189325 - DNA, 13 bp, Artificial Sequence
  Oligonucleotide for detection of SNP TSC0000916
attttatgttgga

SEQ ID NO: 189326 - DNA, 13 bp, Artificial Sequence
  Oligonucleotide for detection of SNP TSC0000916
tccaacataaaat

SEQ ID NO: 189327 - DNA, 13 bp, Artificial Sequence
  Oligonucleotide for detection of SNP TSC0000916
attttacgttgga

SEQ ID NO: 189328 - DNA, 13 bp, Artificial Sequence
  Oligonucleotide for detection of SNP TSC0000916
tccaacgtaaaat

SEQ ID NO: 189329 - DNA, 13 bp, Artificial Sequence
  Oligonucleotide for detection of SNP TSC0000916
tttaatgtgagat

SEQ ID NO: 189330 - DNA, 13 bp, Artificial Sequence
  Oligonucleotide for detection of SNP TSC0000916
atctcacattaaa

SEQ ID NO: 189331 - DNA, 13 bp, Artificial Sequence
  Oligonucleotide for detection of SNP TSC0000916
tttaatatgagat

SEQ ID NO: 189332 - DNA, 13 bp, Artificial Sequence
  Oligonucleotide for detection of SNP TSC0000916
atctcatattaaa

SEQ ID NO: 189333 - DNA, 13 bp, Artificial Sequence
  Oligonucleotide for detection of SNP TSC0000916
tttaacgtgagat

SEQ ID NO: 189334 - DNA, 13 bp, Artificial Sequence
  Oligonucleotide for detection of SNP TSC0000916
atctcacgttaaa

SEQ ID NO: 189335 - DNA, 13 bp, Artificial Sequence
  Oligonucleotide for detection of SNP TSC0000848
tattatgtgtaty

SEQ ID NO: 189336 - DNA, 13 bp, Artificial Sequence
  Oligonucleotide for detection of SNP TSC0000848
ratacacataata

SEQ ID NO: 189337 - DNA, 13 bp, Artificial Sequence
  Oligonucleotide for detection of SNP TSC0000848
tattatatgtaty

SEQ ID NO: 189338 - DNA, 13 bp, Artificial Sequence
  Oligonucleotide for detection of SNP TSC0000848
ratacatataata

SEQ ID NO: 189339 - DNA, 13 bp, Artificial Sequence
  Oligonucleotide for detection of SNP TSC0046583
agaagagggggag

SEQ ID NO: 189340 - DNA, 13 bp, Artificial Sequence
  Oligonucleotide for detection of SNP TSC0046583
ctccccctcttct

SEQ ID NO: 189341 - DNA, 13 bp, Artificial Sequence
  Oligonucleotide for detection of SNP TSC0046583
agaagaaggggag

SEQ ID NO: 189342 - DNA, 13 bp, Artificial Sequence
  Oligonucleotide for detection of SNP TSC0046583
ctccccttcttct

SEQ ID NO: 189343 - DNA, 13 bp, Artificial Sequence
  Oligonucleotide for detection of SNP TSC0046584
tatgttattattt

SEQ ID NO: 189344 - DNA, 13 bp, Artificial Sequence
  Oligonucleotide for detection of SNP TSC0046584
aaataataacata

SEQ ID NO: 189345 - DNA, 13 bp, Artificial Sequence
  Oligonucleotide for detection of SNP TSC0046584
tatgttgttattt

SEQ ID NO: 189346 - DNA, 13 bp, Artificial Sequence
  Oligonucleotide for detection of SNP TSC0046584
aaataacaacata

SEQ ID NO: 189347 - DNA, 13 bp, Artificial Sequence
  Oligonucleotide for detection of SNP TSC0046584
tacgttattattt

SEQ ID NO: 189348 - DNA, 13 bp, Artificial Sequence
  Oligonucleotide for detection of SNP TSC0046584
aaataataacgta

SEQ ID NO: 189349 - DNA, 13 bp, Artificial Sequence
  Oligonucleotide for detection of SNP TSC0046584
tacgttgttattt

SEQ ID NO: 189350 - DNA, 13 bp, Artificial Sequence
  Oligonucleotide for detection of SNP TSC0046584
aaataacaacgta

SEQ ID NO: 189351 - DNA, 13 bp, Artificial Sequence
  Oligonucleotide for detection of SNP TSC0046584
tatgtcgttattt

SEQ ID NO: 189352 - DNA, 13 bp, Artificial Sequence
  Oligonucleotide for detection of SNP TSC0046584
aaataacgacata

SEQ ID NO: 189353 - DNA, 13 bp, Artificial Sequence
  Oligonucleotide for detection of SNP TSC0046584
tacgtcgttattt

SEQ ID NO: 189354 - DNA, 13 bp, Artificial Sequence
  Oligonucleotide for detection of SNP TSC0046584
aaataacgacgta

SEQ ID NO: 189355 - DNA, 13 bp, Artificial Sequence
  Oligonucleotide for detection of SNP TSC0046584
aggtggtggtgtg

SEQ ID NO: 189356 - DNA, 13 bp, Artificial Sequence
  Oligonucleotide for detection of SNP TSC0046584
cacaccaccacct

SEQ ID NO: 189357 - DNA, 13 bp, Artificial Sequence
  Oligonucleotide for detection of SNP TSC0046584
aggtggtggcgtg

SEQ ID NO: 189358 - DNA, 13 bp, Artificial Sequence
  Oligonucleotide for detection of SNP TSC0046584
cacgccaccacct

SEQ ID NO: 189359 - DNA, 13 bp, Artificial Sequence
  Oligonucleotide for detection of SNP TSC0046584
aggtggcggtgtg

SEQ ID NO: 189360 - DNA, 13 bp, Artificial Sequence
  Oligonucleotide for detection of SNP TSC0046584
cacaccgccacct

SEQ ID NO: 189361 - DNA, 13 bp, Artificial Sequence
  Oligonucleotide for detection of SNP TSC0046584
aggtggcggcgtg

SEQ ID NO: 189362 - DNA, 13 bp, Artificial Sequence
  Oligonucleotide for detection of SNP TSC0046584
cacgccgccacct

SEQ ID NO: 189363 - DNA, 13 bp, Artificial Sequence
  Oligonucleotide for detection of SNP TSC0046585
aagaatatggggg

SEQ ID NO: 189364 - DNA, 13 bp, Artificial Sequence
  Oligonucleotide for detection of SNP TSC0046585
cccccatattctt

SEQ ID NO: 189365 - DNA, 13 bp, Artificial Sequence
  Oligonucleotide for detection of SNP TSC0046585
aagaatttggggg

SEQ ID NO: 189366 - DNA, 13 bp, Artificial Sequence
  Oligonucleotide for detection of SNP TSC0046585
cccccaaattctt

SEQ ID NO: 189367 - DNA, 13 bp, Artificial Sequence
  Oligonucleotide for detection of SNP TSC0046588
tttataaagaatt

SEQ ID NO: 189368 - DNA, 13 bp, Artificial Sequence
  Oligonucleotide for detection of SNP TSC0046588
aattctttataaa

SEQ ID NO: 189369 - DNA, 13 bp, Artificial Sequence
  Oligonucleotide for detection of SNP TSC0046588
tttatatagaatt

SEQ ID NO: 189370 - DNA, 13 bp, Artificial Sequence
  Oligonucleotide for detection of SNP TSC0046588
aattctatataaa

SEQ ID NO: 189371 - DNA, 13 bp, Artificial Sequence
  Oligonucleotide for detection of SNP TSC0046588
agttttttgtggg

SEQ ID NO: 189372 - DNA, 13 bp, Artificial Sequence
  Oligonucleotide for detection of SNP TSC0046588
cccacaaaaaact

SEQ ID NO: 189373 - DNA, 13 bp, Artificial Sequence
  Oligonucleotide for detection of SNP TSC0046588
agttttatgtggg

SEQ ID NO: 189374 - DNA, 13 bp, Artificial Sequence
  Oligonucleotide for detection of SNP TSC0046588
cccacataaaact

SEQ ID NO: 189375 - DNA, 13 bp, Artificial Sequence
  Oligonucleotide for detection of SNP TSC0046589
ttataaagaattg

SEQ ID NO: 189376 - DNA, 13 bp, Artificial Sequence
  Oligonucleotide for detection of SNP TSC0046589
caattctttataa

SEQ ID NO: 189377 - DNA, 13 bp, Artificial Sequence
  Oligonucleotide for detection of SNP TSC0046589
ttataaggaattg

SEQ ID NO: 189378 - DNA, 13 bp, Artificial Sequence
  Oligonucleotide for detection of SNP TSC0046589
caattccttataa

SEQ ID NO: 189379 - DNA, 13 bp, Artificial Sequence
  Oligonucleotide for detection of SNP TSC0046590
tgtataattttty

SEQ ID NO: 189380 - DNA, 13 bp, Artificial Sequence
  Oligonucleotide for detection of SNP TSC0046590
raaaaattataca

SEQ ID NO: 189381 - DNA, 13 bp, Artificial Sequence
  Oligonucleotide for detection of SNP TSC0046590
tgtatagttttty

SEQ ID NO: 189382 - DNA, 13 bp, Artificial Sequence
  Oligonucleotide for detection of SNP TSC0046590
raaaaactataca

SEQ ID NO: 189383 - DNA, 13 bp, Artificial Sequence
  Oligonucleotide for detection of SNP TSC0046592
agttagaattagy

SEQ ID NO: 189384 - DNA, 13 bp, Artificial Sequence
  Oligonucleotide for detection of SNP TSC0046592
rctaattctaact

SEQ ID NO: 189385 - DNA, 13 bp, Artificial Sequence
  Oligonucleotide for detection of SNP TSC0046592
agttaggattagy

SEQ ID NO: 189386 - DNA, 13 bp, Artificial Sequence
  Oligonucleotide for detection of SNP TSC0046592
rctaatcctaact

SEQ ID NO: 189387 - DNA, 13 bp, Artificial Sequence
  Oligonucleotide for detection of SNP TSC0046594
gttgtaattagtg

SEQ ID NO: 189388 - DNA, 13 bp, Artificial Sequence
  Oligonucleotide for detection of SNP TSC0046594
cactaattacaac

SEQ ID NO: 189389 - DNA, 13 bp, Artificial Sequence
  Oligonucleotide for detection of SNP TSC0046594
gttgtatttagtg

SEQ ID NO: 189390 - DNA, 13 bp, Artificial Sequence
  Oligonucleotide for detection of SNP TSC0046594
cactaaatacaac

SEQ ID NO: 189391 - DNA, 13 bp, Artificial Sequence
  Oligonucleotide for detection of SNP TSC0046594
tattggttatagy

SEQ ID NO: 189392 - DNA, 13 bp, Artificial Sequence
  Oligonucleotide for detection of SNP TSC0046594
rctataaccaata

SEQ ID NO: 189393 - DNA, 13 bp, Artificial Sequence
  Oligonucleotide for detection of SNP TSC0046594
tattgggtatagy

SEQ ID NO: 189394 - DNA, 13 bp, Artificial Sequence
  Oligonucleotide for detection of SNP TSC0046594
rctatacccaata

SEQ ID NO: 189395 - DNA, 13 bp, Artificial Sequence
  Oligonucleotide for detection of SNP TSC0046595
ttgtttattttag

SEQ ID NO: 189396 - DNA, 13 bp, Artificial Sequence
  Oligonucleotide for detection of SNP TSC0046595
ctaaaataaacaa

SEQ ID NO: 189397 - DNA, 13 bp, Artificial Sequence
  Oligonucleotide for detection of SNP TSC0046595
ttgaaatgaatag

SEQ ID NO: 189398 - DNA, 13 bp, Artificial Sequence
  Oligonucleotide for detection of SNP TSC0046595
ctattcatttcaa

SEQ ID NO: 189399 - DNA, 13 bp, Artificial Sequence
  Oligonucleotide for detection of SNP TSC0046595
ttgaaaagaatag

SEQ ID NO: 189400 - DNA, 13 bp, Artificial Sequence
  Oligonucleotide for detection of SNP TSC0046595
ctattcttttcaa

SEQ ID NO: 189401 - DNA, 13 bp, Artificial Sequence
  Oligonucleotide for detection of SNP TSC0046596
ttaaggattatag

SEQ ID NO: 189402 - DNA, 13 bp, Artificial Sequence
  Oligonucleotide for detection of SNP TSC0046596
ctataatccttaa

SEQ ID NO: 189403 - DNA, 13 bp, Artificial Sequence
  Oligonucleotide for detection of SNP TSC0046596
ttaaggtttatag

SEQ ID NO: 189404 - DNA, 13 bp, Artificial Sequence
  Oligonucleotide for detection of SNP TSC0046596
ctataaaccttaa

SEQ ID NO: 189405 - DNA, 13 bp, Artificial Sequence
  Oligonucleotide for detection of SNP TSC0046596
ttataggttttaa

SEQ ID NO: 189406 - DNA, 13 bp, Artificial Sequence
  Oligonucleotide for detection of SNP TSC0046596
ttaaaacctataa

SEQ ID NO: 189407 - DNA, 13 bp, Artificial Sequence
  Oligonucleotide for detection of SNP TSC0000731
aagaatgtttttg

SEQ ID NO: 189408 - DNA, 13 bp, Artificial Sequence
  Oligonucleotide for detection of SNP TSC0000731
caaaaacattctt

SEQ ID NO: 189409 - DNA, 13 bp, Artificial Sequence
  Oligonucleotide for detection of SNP TSC0000731
aagaatatttttg

SEQ ID NO: 189410 - DNA, 13 bp, Artificial Sequence
  Oligonucleotide for detection of SNP TSC0000731
caaaaatattctt

SEQ ID NO: 189411 - DNA, 13 bp, Artificial Sequence
  Oligonucleotide for detection of SNP TSC0046599
agagttatgtagt

SEQ ID NO: 189412 - DNA, 13 bp, Artificial Sequence
  Oligonucleotide for detection of SNP TSC0046599
actacataactct

SEQ ID NO: 189413 - DNA, 13 bp, Artificial Sequence
  Oligonucleotide for detection of SNP TSC0046599
agagttgtgtagt

SEQ ID NO: 189414 - DNA, 13 bp, Artificial Sequence
  Oligonucleotide for detection of SNP TSC0046599
actacacaactct

SEQ ID NO: 189415 - DNA, 13 bp, Artificial Sequence
  Oligonucleotide for detection of SNP TSC0046599
agagtcgtgtagt

SEQ ID NO: 189416 - DNA, 13 bp, Artificial Sequence
  Oligonucleotide for detection of SNP TSC0046599
actacacgactct

SEQ ID NO: 189417 - DNA, 13 bp, Artificial Sequence
  Oligonucleotide for detection of SNP TSC0046599
attatatggtttt

SEQ ID NO: 189418 - DNA, 13 bp, Artificial Sequence
  Oligonucleotide for detection of SNP TSC0046599
aaaaccatataat

SEQ ID NO: 189419 - DNA, 13 bp, Artificial Sequence
  Oligonucleotide for detection of SNP TSC0046599
attatacggtttt

SEQ ID NO: 189420 - DNA, 13 bp, Artificial Sequence
  Oligonucleotide for detection of SNP TSC0046599
aaaaccgtataat

SEQ ID NO: 189421 - DNA, 13 bp, Artificial Sequence
  Oligonucleotide for detection of SNP TSC0046601
ttatggagagggy

SEQ ID NO: 189422 - DNA, 13 bp, Artificial Sequence
  Oligonucleotide for detection of SNP TSC0046601
rccctctccataa

SEQ ID NO: 189423 - DNA, 13 bp, Artificial Sequence
  Oligonucleotide for detection of SNP TSC0046601
ttatggtgagggy

SEQ ID NO: 189424 - DNA, 13 bp, Artificial Sequence
  Oligonucleotide for detection of SNP TSC0046601
rccctcaccataa

SEQ ID NO: 189425 - DNA, 13 bp, Artificial Sequence
  Oligonucleotide for detection of SNP TSC0046601
gttttttttataa

SEQ ID NO: 189426 - DNA, 13 bp, Artificial Sequence
  Oligonucleotide for detection of SNP TSC0046601
ttataaaaaaaac

SEQ ID NO: 189427 - DNA, 13 bp, Artificial Sequence
  Oligonucleotide for detection of SNP TSC0046602
ttatggagtagtt

SEQ ID NO: 189428 - DNA, 13 bp, Artificial Sequence
  Oligonucleotide for detection of SNP TSC0046602
aactactccataa

SEQ ID NO: 189429 - DNA, 13 bp, Artificial Sequence
  Oligonucleotide for detection of SNP TSC0046602
ttatggggtagtt

SEQ ID NO: 189430 - DNA, 13 bp, Artificial Sequence
  Oligonucleotide for detection of SNP TSC0046602
aactaccccataa

SEQ ID NO: 189431 - DNA, 13 bp, Artificial Sequence
  Oligonucleotide for detection of SNP TSC0046603
gagatgaataata

SEQ ID NO: 189432 - DNA, 13 bp, Artificial Sequence
  Oligonucleotide for detection of SNP TSC0046603
tattattcatctc

SEQ ID NO: 189433 - DNA, 13 bp, Artificial Sequence
  Oligonucleotide for detection of SNP TSC0046603
gagatggataata

SEQ ID NO: 189434 - DNA, 13 bp, Artificial Sequence
  Oligonucleotide for detection of SNP TSC0046603
tattatccatctc

SEQ ID NO: 189435 - DNA, 13 bp, Artificial Sequence
  Oligonucleotide for detection of SNP TSC0046604
tgatgtatttggg

SEQ ID NO: 189436 - DNA, 13 bp, Artificial Sequence
  Oligonucleotide for detection of SNP TSC0046604
cccaaatacatca

SEQ ID NO: 189437 - DNA, 13 bp, Artificial Sequence
  Oligonucleotide for detection of SNP TSC0046604
tgatgtgtttggg

SEQ ID NO: 189438 - DNA, 13 bp, Artificial Sequence
  Oligonucleotide for detection of SNP TSC0046604
cccaaacacatca

SEQ ID NO: 189439 - DNA, 13 bp, Artificial Sequence
  Oligonucleotide for detection of SNP TSC0046604
tgatgcgtttggg

SEQ ID NO: 189440 - DNA, 13 bp, Artificial Sequence
  Oligonucleotide for detection of SNP TSC0046604
cccaaacgcatca

SEQ ID NO: 189441 - DNA, 13 bp, Artificial Sequence
  Oligonucleotide for detection of SNP TSC0046604
tttaaatgtatta

SEQ ID NO: 189442 - DNA, 13 bp, Artificial Sequence
  Oligonucleotide for detection of SNP TSC0046604
taatacatttaaa

SEQ ID NO: 189443 - DNA, 13 bp, Artificial Sequence
  Oligonucleotide for detection of SNP TSC0046604
tttaaacgtatta

SEQ ID NO: 189444 - DNA, 13 bp, Artificial Sequence
  Oligonucleotide for detection of SNP TSC0046604
taatacgtttaaa

SEQ ID NO: 189445 - DNA, 13 bp, Artificial Sequence
  Oligonucleotide for detection of SNP TSC0046607
ggggagatggtty

SEQ ID NO: 189446 - DNA, 13 bp, Artificial Sequence
  Oligonucleotide for detection of SNP TSC0046607
raaccatctcccc

SEQ ID NO: 189447 - DNA, 13 bp, Artificial Sequence
  Oligonucleotide for detection of SNP TSC0046607
ggggagttggtty

SEQ ID NO: 189448 - DNA, 13 bp, Artificial Sequence
  Oligonucleotide for detection of SNP TSC0046607
raaccaactcccc

SEQ ID NO: 189449 - DNA, 13 bp, Artificial Sequence
  Oligonucleotide for detection of SNP TSC0046607
gagttatttttty

SEQ ID NO: 189450 - DNA, 13 bp, Artificial Sequence
  Oligonucleotide for detection of SNP TSC0046607
raaaaaataactc

SEQ ID NO: 189451 - DNA, 13 bp, Artificial Sequence
  Oligonucleotide for detection of SNP TSC0046607
gagttaattttty

SEQ ID NO: 189452 - DNA, 13 bp, Artificial Sequence
  Oligonucleotide for detection of SNP TSC0046607
raaaaattaactc

SEQ ID NO: 189453 - DNA, 13 bp, Artificial Sequence
  Oligonucleotide for detection of SNP TSC0046608
tagggttgtattg

SEQ ID NO: 189454 - DNA, 13 bp, Artificial Sequence
  Oligonucleotide for detection of SNP TSC0046608
caatacaacccta

SEQ ID NO: 189455 - DNA, 13 bp, Artificial Sequence
  Oligonucleotide for detection of SNP TSC0046608
tagggtcgtattg

SEQ ID NO: 189456 - DNA, 13 bp, Artificial Sequence
  Oligonucleotide for detection of SNP TSC0046608
caatacgacccta

SEQ ID NO: 189457 - DNA, 13 bp, Artificial Sequence
  Oligonucleotide for detection of SNP TSC0046608
tagtgtgattttg

SEQ ID NO: 189458 - DNA, 13 bp, Artificial Sequence
  Oligonucleotide for detection of SNP TSC0046608
caaaatcacacta

SEQ ID NO: 189459 - DNA, 13 bp, Artificial Sequence
  Oligonucleotide for detection of SNP TSC0046608
tagtgtaattttg

SEQ ID NO: 189460 - DNA, 13 bp, Artificial Sequence
  Oligonucleotide for detection of SNP TSC0046608
caaaattacacta

SEQ ID NO: 189461 - DNA, 13 bp, Artificial Sequence
  Oligonucleotide for detection of SNP TSC0046608
tagtgcgattttg

SEQ ID NO: 189462 - DNA, 13 bp, Artificial Sequence
  Oligonucleotide for detection of SNP TSC0046608
caaaatcgcacta

SEQ ID NO: 189463 - DNA, 13 bp, Artificial Sequence
  Oligonucleotide for detection of SNP TSC0046609
ggatttgaggtta

SEQ ID NO: 189464 - DNA, 13 bp, Artificial Sequence
  Oligonucleotide for detection of SNP TSC0046609
taacctcaaatcc

SEQ ID NO: 189465 - DNA, 13 bp, Artificial Sequence
  Oligonucleotide for detection of SNP TSC0046609
ggatttaaggtta

SEQ ID NO: 189466 - DNA, 13 bp, Artificial Sequence
  Oligonucleotide for detection of SNP TSC0046609
taaccttaaatcc

SEQ ID NO: 189467 - DNA, 13 bp, Artificial Sequence
  Oligonucleotide for detection of SNP TSC0046609
ggattcgaggtta

SEQ ID NO: 189468 - DNA, 13 bp, Artificial Sequence
  Oligonucleotide for detection of SNP TSC0046609
taacctcgaatcc

SEQ ID NO: 189469 - DNA, 13 bp, Artificial Sequence
  Oligonucleotide for detection of SNP TSC0046610
aaaatatgtgttt

SEQ ID NO: 189470 - DNA, 13 bp, Artificial Sequence
  Oligonucleotide for detection of SNP TSC0046610
aaacacatatttt

SEQ ID NO: 189471 - DNA, 13 bp, Artificial Sequence
  Oligonucleotide for detection of SNP TSC0046610
aaaatacgtgttt

SEQ ID NO: 189472 - DNA, 13 bp, Artificial Sequence
  Oligonucleotide for detection of SNP TSC0046610
aaacacgtatttt

SEQ ID NO: 189473 - DNA, 13 bp, Artificial Sequence
  Oligonucleotide for detection of SNP TSC0046610
aagtatgtgtttt

SEQ ID NO: 189474 - DNA, 13 bp, Artificial Sequence
  Oligonucleotide for detection of SNP TSC0046610
aaaacacatactt

SEQ ID NO: 189475 - DNA, 13 bp, Artificial Sequence
  Oligonucleotide for detection of SNP TSC0046610
aagtatatgtttt

SEQ ID NO: 189476 - DNA, 13 bp, Artificial Sequence
  Oligonucleotide for detection of SNP TSC0046610
aaaacatatactt

SEQ ID NO: 189477 - DNA, 13 bp, Artificial Sequence
  Oligonucleotide for detection of SNP TSC0046610
aagtacgtgtttt

SEQ ID NO: 189478 - DNA, 13 bp, Artificial Sequence
  Oligonucleotide for detection of SNP TSC0046610
aaaacacgtactt

SEQ ID NO: 189479 - DNA, 13 bp, Artificial Sequence
  Oligonucleotide for detection of SNP TSC0046611
aaatgtttttgat

SEQ ID NO: 189480 - DNA, 13 bp, Artificial Sequence
  Oligonucleotide for detection of SNP TSC0046611
atcaaaaacattt

SEQ ID NO: 189481 - DNA, 13 bp, Artificial Sequence
  Oligonucleotide for detection of SNP TSC0046611
aaatgtgtttgat

SEQ ID NO: 189482 - DNA, 13 bp, Artificial Sequence
  Oligonucleotide for detection of SNP TSC0046611
atcaaacacattt

SEQ ID NO: 189483 - DNA, 13 bp, Artificial Sequence
  Oligonucleotide for detection of SNP TSC0046611
attaaagatattt

SEQ ID NO: 189484 - DNA, 13 bp, Artificial Sequence
  Oligonucleotide for detection of SNP TSC0046611
aaatatctttaat

SEQ ID NO: 189485 - DNA, 13 bp, Artificial Sequence
  Oligonucleotide for detection of SNP TSC0046611
attaaatatattt

SEQ ID NO: 189486 - DNA, 13 bp, Artificial Sequence
  Oligonucleotide for detection of SNP TSC0046611
aaatatatttaat

SEQ ID NO: 189487 - DNA, 13 bp, Artificial Sequence
  Oligonucleotide for detection of SNP TSC0046617
gaggttaaagaty

SEQ ID NO: 189488 - DNA, 13 bp, Artificial Sequence
  Oligonucleotide for detection of SNP TSC0046617
ratctttaacctc

SEQ ID NO: 189489 - DNA, 13 bp, Artificial Sequence
  Oligonucleotide for detection of SNP TSC0046617
gaggttgaagaty

SEQ ID NO: 189490 - DNA, 13 bp, Artificial Sequence
  Oligonucleotide for detection of SNP TSC0046617
ratcttcaacctc

SEQ ID NO: 189491 - DNA, 13 bp, Artificial Sequence
  Oligonucleotide for detection of SNP TSC0046617
gaggtcgaagaty

SEQ ID NO: 189492 - DNA, 13 bp, Artificial Sequence
  Oligonucleotide for detection of SNP TSC0046617
ratcttcgacctc

SEQ ID NO: 189493 - DNA, 13 bp, Artificial Sequence
  Oligonucleotide for detection of SNP TSC0046618
tttggaagatgat

SEQ ID NO: 189494 - DNA, 13 bp, Artificial Sequence
  Oligonucleotide for detection of SNP TSC0046618
atcatcttccaaa

SEQ ID NO: 189495 - DNA, 13 bp, Artificial Sequence
  Oligonucleotide for detection of SNP TSC0046618
tttggatgatgat

SEQ ID NO: 189496 - DNA, 13 bp, Artificial Sequence
  Oligonucleotide for detection of SNP TSC0046618
atcatcatccaaa

SEQ ID NO: 189497 - DNA, 13 bp, Artificial Sequence
  Oligonucleotide for detection of SNP TSC0046618
tttggacgatgat

SEQ ID NO: 189498 - DNA, 13 bp, Artificial Sequence
  Oligonucleotide for detection of SNP TSC0046618
atcatcgtccaaa

SEQ ID NO: 189499 - DNA, 13 bp, Artificial Sequence
  Oligonucleotide for detection of SNP TSC0046618
attatcgtttagg

SEQ ID NO: 189500 - DNA, 13 bp, Artificial Sequence
  Oligonucleotide for detection of SNP TSC0046618
cctaaacgataat

SEQ ID NO: 189501 - DNA, 13 bp, Artificial Sequence
  Oligonucleotide for detection of SNP TSC0046619
gatttattgtttt

SEQ ID NO: 189502 - DNA, 13 bp, Artificial Sequence
  Oligonucleotide for detection of SNP TSC0046619
aaaacaataaatc

SEQ ID NO: 189503 - DNA, 13 bp, Artificial Sequence
  Oligonucleotide for detection of SNP TSC0046619
gatttagtgtttt

SEQ ID NO: 189504 - DNA, 13 bp, Artificial Sequence
  Oligonucleotide for detection of SNP TSC0046619
aaaacactaaatc

SEQ ID NO: 189505 - DNA, 13 bp, Artificial Sequence
  Oligonucleotide for detection of SNP TSC0046619
agagtaataagty

SEQ ID NO: 189506 - DNA, 13 bp, Artificial Sequence
  Oligonucleotide for detection of SNP TSC0046619
racttattactct

SEQ ID NO: 189507 - DNA, 13 bp, Artificial Sequence
  Oligonucleotide for detection of SNP TSC0046619
agagtattaagty

SEQ ID NO: 189508 - DNA, 13 bp, Artificial Sequence
  Oligonucleotide for detection of SNP TSC0046619
racttaatactct

SEQ ID NO: 189509 - DNA, 13 bp, Artificial Sequence
  Oligonucleotide for detection of SNP TSC0046622
tatttttggagga

SEQ ID NO: 189510 - DNA, 13 bp, Artificial Sequence
  Oligonucleotide for detection of SNP TSC0046622
tcctccaaaaata

SEQ ID NO: 189511 - DNA, 13 bp, Artificial Sequence
  Oligonucleotide for detection of SNP TSC0046622
tattttcggagga

SEQ ID NO: 189512 - DNA, 13 bp, Artificial Sequence
  Oligonucleotide for detection of SNP TSC0046622
tcctccgaaaata

SEQ ID NO: 189513 - DNA, 13 bp, Artificial Sequence
  Oligonucleotide for detection of SNP TSC0046624
tttgtaatgtttg

SEQ ID NO: 189514 - DNA, 13 bp, Artificial Sequence
  Oligonucleotide for detection of SNP TSC0046624
caaacattacaaa

SEQ ID NO: 189515 - DNA, 13 bp, Artificial Sequence
  Oligonucleotide for detection of SNP TSC0046624
tttgtattgtttg

SEQ ID NO: 189516 - DNA, 13 bp, Artificial Sequence
  Oligonucleotide for detection of SNP TSC0046624
caaacaatacaaa

SEQ ID NO: 189517 - DNA, 13 bp, Artificial Sequence
  Oligonucleotide for detection of SNP TSC0046624
taagtattgtaaa

SEQ ID NO: 189518 - DNA, 13 bp, Artificial Sequence
  Oligonucleotide for detection of SNP TSC0046624
tttacaatactta

SEQ ID NO: 189519 - DNA, 13 bp, Artificial Sequence
  Oligonucleotide for detection of SNP TSC0046624
taagtagtgtaaa

SEQ ID NO: 189520 - DNA, 13 bp, Artificial Sequence
  Oligonucleotide for detection of SNP TSC0046624
tttacactactta

SEQ ID NO: 189521 - DNA, 13 bp, Artificial Sequence
  Oligonucleotide for detection of SNP TSC0046626
tgattgcgaagag

SEQ ID NO: 189522 - DNA, 13 bp, Artificial Sequence
  Oligonucleotide for detection of SNP TSC0046626
ctcttcgcaatca

SEQ ID NO: 189523 - DNA, 13 bp, Artificial Sequence
  Oligonucleotide for detection of SNP TSC0046630
ttatacgtattat

SEQ ID NO: 189524 - DNA, 13 bp, Artificial Sequence
  Oligonucleotide for detection of SNP TSC0046630
ataatacgtataa

SEQ ID NO: 189525 - DNA, 13 bp, Artificial Sequence
  Oligonucleotide for detection of SNP TSC0046630
ataatgtgtatga

SEQ ID NO: 189526 - DNA, 13 bp, Artificial Sequence
  Oligonucleotide for detection of SNP TSC0046630
tcatacacattat

SEQ ID NO: 189527 - DNA, 13 bp, Artificial Sequence
  Oligonucleotide for detection of SNP TSC0046630
ataatgcgtatga

SEQ ID NO: 189528 - DNA, 13 bp, Artificial Sequence
  Oligonucleotide for detection of SNP TSC0046630
tcatacgcattat

SEQ ID NO: 189529 - DNA, 13 bp, Artificial Sequence
  Oligonucleotide for detection of SNP TSC0046632
aattagtgttaat

SEQ ID NO: 189530 - DNA, 13 bp, Artificial Sequence
  Oligonucleotide for detection of SNP TSC0046632
attaacactaatt

SEQ ID NO: 189531 - DNA, 13 bp, Artificial Sequence
  Oligonucleotide for detection of SNP TSC0046632
aattagggttaat

SEQ ID NO: 189532 - DNA, 13 bp, Artificial Sequence
  Oligonucleotide for detection of SNP TSC0046632
attaaccctaatt

SEQ ID NO: 189533 - DNA, 13 bp, Artificial Sequence
  Oligonucleotide for detection of SNP TSC0046632
attaatattaatt

SEQ ID NO: 189534 - DNA, 13 bp, Artificial Sequence
  Oligonucleotide for detection of SNP TSC0046632
aattaatattaat

SEQ ID NO: 189535 - DNA, 13 bp, Artificial Sequence
  Oligonucleotide for detection of SNP TSC0046632
attaattttaatt

SEQ ID NO: 189536 - DNA, 13 bp, Artificial Sequence
  Oligonucleotide for detection of SNP TSC0046632
aattaaaattaat

SEQ ID NO: 189537 - DNA, 13 bp, Artificial Sequence
  Oligonucleotide for detection of SNP TSC0046634
ttagaagagtaat

SEQ ID NO: 189538 - DNA, 13 bp, Artificial Sequence
  Oligonucleotide for detection of SNP TSC0046634
attactcttctaa

SEQ ID NO: 189539 - DNA, 13 bp, Artificial Sequence
  Oligonucleotide for detection of SNP TSC0046634
ttagaaaagtaat

SEQ ID NO: 189540 - DNA, 13 bp, Artificial Sequence
  Oligonucleotide for detection of SNP TSC0046634
attacttttctaa

SEQ ID NO: 189541 - DNA, 13 bp, Artificial Sequence
  Oligonucleotide for detection of SNP TSC0046635
tttatgtatttgt

SEQ ID NO: 189542 - DNA, 13 bp, Artificial Sequence
  Oligonucleotide for detection of SNP TSC0046635
acaaatacataaa

SEQ ID NO: 189543 - DNA, 13 bp, Artificial Sequence
  Oligonucleotide for detection of SNP TSC0046635
tttatggatttgt

SEQ ID NO: 189544 - DNA, 13 bp, Artificial Sequence
  Oligonucleotide for detection of SNP TSC0046635
acaaatccataaa

SEQ ID NO: 189545 - DNA, 13 bp, Artificial Sequence
  Oligonucleotide for detection of SNP TSC0046635
tttacgtatttgt

SEQ ID NO: 189546 - DNA, 13 bp, Artificial Sequence
  Oligonucleotide for detection of SNP TSC0046635
acaaatacgtaaa

SEQ ID NO: 189547 - DNA, 13 bp, Artificial Sequence
  Oligonucleotide for detection of SNP TSC0046635
tttacggatttgt

SEQ ID NO: 189548 - DNA, 13 bp, Artificial Sequence
  Oligonucleotide for detection of SNP TSC0046635
acaaatccgtaaa

SEQ ID NO: 189549 - DNA, 13 bp, Artificial Sequence
  Oligonucleotide for detection of SNP TSC0046635
atagatatgtaga

SEQ ID NO: 189550 - DNA, 13 bp, Artificial Sequence
  Oligonucleotide for detection of SNP TSC0046635
tctacatatctat

SEQ ID NO: 189551 - DNA, 13 bp, Artificial Sequence
  Oligonucleotide for detection of SNP TSC0046635
atagatttgtaga

SEQ ID NO: 189552 - DNA, 13 bp, Artificial Sequence
  Oligonucleotide for detection of SNP TSC0046635
tctacaaatctat

SEQ ID NO: 189553 - DNA, 13 bp, Artificial Sequence
  Oligonucleotide for detection of SNP TSC0046635
atagatacgtaga

SEQ ID NO: 189554 - DNA, 13 bp, Artificial Sequence
  Oligonucleotide for detection of SNP TSC0046635
tctacgtatctat

SEQ ID NO: 189555 - DNA, 13 bp, Artificial Sequence
  Oligonucleotide for detection of SNP TSC0046635
atagattcgtaga

SEQ ID NO: 189556 - DNA, 13 bp, Artificial Sequence
  Oligonucleotide for detection of SNP TSC0046635
tctacgaatctat

SEQ ID NO: 189557 - DNA, 13 bp, Artificial Sequence
  Oligonucleotide for detection of SNP TSC0046636
tgttgatggttta

SEQ ID NO: 189558 - DNA, 13 bp, Artificial Sequence
  Oligonucleotide for detection of SNP TSC0046636
taaaccatcaaca

SEQ ID NO: 189559 - DNA, 13 bp, Artificial Sequence
  Oligonucleotide for detection of SNP TSC0046636
tgttgacggttta

SEQ ID NO: 189560 - DNA, 13 bp, Artificial Sequence
  Oligonucleotide for detection of SNP TSC0046636
taaaccgtcaaca

SEQ ID NO: 189561 - DNA, 13 bp, Artificial Sequence
  Oligonucleotide for detection of SNP TSC0046636
tgggttgttagta

SEQ ID NO: 189562 - DNA, 13 bp, Artificial Sequence
  Oligonucleotide for detection of SNP TSC0046636
tactaacaaccca

SEQ ID NO: 189563 - DNA, 13 bp, Artificial Sequence
  Oligonucleotide for detection of SNP TSC0046636
tgggttattagta

SEQ ID NO: 189564 - DNA, 13 bp, Artificial Sequence
  Oligonucleotide for detection of SNP TSC0046636
tactaataaccca

SEQ ID NO: 189565 - DNA, 13 bp, Artificial Sequence
  Oligonucleotide for detection of SNP TSC0046636
tgggtcgttagta

SEQ ID NO: 189566 - DNA, 13 bp, Artificial Sequence
  Oligonucleotide for detection of SNP TSC0046636
tactaacgaccca

SEQ ID NO: 189567 - DNA, 13 bp, Artificial Sequence
  Oligonucleotide for detection of SNP TSC0046640
ttaatgtggatta

SEQ ID NO: 189568 - DNA, 13 bp, Artificial Sequence
  Oligonucleotide for detection of SNP TSC0046640
taatccacattaa

SEQ ID NO: 189569 - DNA, 13 bp, Artificial Sequence
  Oligonucleotide for detection of SNP TSC0046640
ttaatgcggatta

SEQ ID NO: 189570 - DNA, 13 bp, Artificial Sequence
  Oligonucleotide for detection of SNP TSC0046640
taatccgcattaa

SEQ ID NO: 189571 - DNA, 13 bp, Artificial Sequence
  Oligonucleotide for detection of SNP TSC0046640
tgatttgtattag

SEQ ID NO: 189572 - DNA, 13 bp, Artificial Sequence
  Oligonucleotide for detection of SNP TSC0046640
ctaatacaaatca

SEQ ID NO: 189573 - DNA, 13 bp, Artificial Sequence
  Oligonucleotide for detection of SNP TSC0046640
tgatttatattag

SEQ ID NO: 189574 - DNA, 13 bp, Artificial Sequence
  Oligonucleotide for detection of SNP TSC0046640
ctaatataaatca

SEQ ID NO: 189575 - DNA, 13 bp, Artificial Sequence
  Oligonucleotide for detection of SNP TSC0046640
tgattcgtattag

SEQ ID NO: 189576 - DNA, 13 bp, Artificial Sequence
  Oligonucleotide for detection of SNP TSC0046640
ctaatacgaatca

SEQ ID NO: 189577 - DNA, 13 bp, Artificial Sequence
  Oligonucleotide for detection of SNP TSC0046643
aatttattaaaty

SEQ ID NO: 189578 - DNA, 13 bp, Artificial Sequence
  Oligonucleotide for detection of SNP TSC0046643
ratttaataaatt

SEQ ID NO: 189579 - DNA, 13 bp, Artificial Sequence
  Oligonucleotide for detection of SNP TSC0046643
aatttagtaaaty

SEQ ID NO: 189580 - DNA, 13 bp, Artificial Sequence
  Oligonucleotide for detection of SNP TSC0046643
ratttactaaatt

SEQ ID NO: 189581 - DNA, 13 bp, Artificial Sequence
  Oligonucleotide for detection of SNP TSC0046643
gatttaatgaatt

SEQ ID NO: 189582 - DNA, 13 bp, Artificial Sequence
  Oligonucleotide for detection of SNP TSC0046643
aattcattaaatc

SEQ ID NO: 189583 - DNA, 13 bp, Artificial Sequence
  Oligonucleotide for detection of SNP TSC0046643
gatttattgaatt

SEQ ID NO: 189584 - DNA, 13 bp, Artificial Sequence
  Oligonucleotide for detection of SNP TSC0046643
aattcaataaatc

SEQ ID NO: 189585 - DNA, 13 bp, Artificial Sequence
  Oligonucleotide for detection of SNP TSC0046644
aaaaaagttgatt

SEQ ID NO: 189586 - DNA, 13 bp, Artificial Sequence
  Oligonucleotide for detection of SNP TSC0046644
aatcaactttttt

SEQ ID NO: 189587 - DNA, 13 bp, Artificial Sequence
  Oligonucleotide for detection of SNP TSC0046644
aaaaaaattgatt

SEQ ID NO: 189588 - DNA, 13 bp, Artificial Sequence
  Oligonucleotide for detection of SNP TSC0046644
aatcaattttttt

SEQ ID NO: 189589 - DNA, 13 bp, Artificial Sequence
  Oligonucleotide for detection of SNP TSC0046645
ttaatgtagtata

SEQ ID NO: 189590 - DNA, 13 bp, Artificial Sequence
  Oligonucleotide for detection of SNP TSC0046645
tatactacattaa

SEQ ID NO: 189591 - DNA, 13 bp, Artificial Sequence
  Oligonucleotide for detection of SNP TSC0046645
ttaatggagtata

SEQ ID NO: 189592 - DNA, 13 bp, Artificial Sequence
  Oligonucleotide for detection of SNP TSC0046645
tatactccattaa

SEQ ID NO: 189593 - DNA, 13 bp, Artificial Sequence
  Oligonucleotide for detection of SNP TSC0046645
tgtattatattga

SEQ ID NO: 189594 - DNA, 13 bp, Artificial Sequence
  Oligonucleotide for detection of SNP TSC0046645
tcaatataataca

SEQ ID NO: 189595 - DNA, 13 bp, Artificial Sequence
  Oligonucleotide for detection of SNP TSC0046645
tgtattttattga

SEQ ID NO: 189596 - DNA, 13 bp, Artificial Sequence
  Oligonucleotide for detection of SNP TSC0046645
tcaataaaataca

SEQ ID NO: 189597 - DNA, 13 bp, Artificial Sequence
  Oligonucleotide for detection of SNP TSC0046647
ttgtttaaagagy

SEQ ID NO: 189598 - DNA, 13 bp, Artificial Sequence
  Oligonucleotide for detection of SNP TSC0046647
rctctttaaacaa

SEQ ID NO: 189599 - DNA, 13 bp, Artificial Sequence
  Oligonucleotide for detection of SNP TSC0046647
ttgttttaagagy

SEQ ID NO: 189600 - DNA, 13 bp, Artificial Sequence
  Oligonucleotide for detection of SNP TSC0046647
rctcttaaaacaa

SEQ ID NO: 189601 - DNA, 13 bp, Artificial Sequence
  Oligonucleotide for detection of SNP TSC0046647
gttttttaaataa

SEQ ID NO: 189602 - DNA, 13 bp, Artificial Sequence
  Oligonucleotide for detection of SNP TSC0046647
ttatttaaaaaac

SEQ ID NO: 189603 - DNA, 13 bp, Artificial Sequence
  Oligonucleotide for detection of SNP TSC0046647
gtttttgaaataa

SEQ ID NO: 189604 - DNA, 13 bp, Artificial Sequence
  Oligonucleotide for detection of SNP TSC0046647
ttatttcaaaaac

SEQ ID NO: 189605 - DNA, 13 bp, Artificial Sequence
  Oligonucleotide for detection of SNP TSC0046648
ttatatatgaatt

SEQ ID NO: 189606 - DNA, 13 bp, Artificial Sequence
  Oligonucleotide for detection of SNP TSC0046648
aattcatatataa

SEQ ID NO: 189607 - DNA, 13 bp, Artificial Sequence
  Oligonucleotide for detection of SNP TSC0046648
ttatatttgaatt

SEQ ID NO: 189608 - DNA, 13 bp, Artificial Sequence
  Oligonucleotide for detection of SNP TSC0046648
aattcaaatataa

SEQ ID NO: 189609 - DNA, 13 bp, Artificial Sequence
  Oligonucleotide for detection of SNP TSC0046648
aatttatatataa

SEQ ID NO: 189610 - DNA, 13 bp, Artificial Sequence
  Oligonucleotide for detection of SNP TSC0046648
ttatatataaatt

SEQ ID NO: 189611 - DNA, 13 bp, Artificial Sequence
  Oligonucleotide for detection of SNP TSC0046648
aatttaaatataa

SEQ ID NO: 189612 - DNA, 13 bp, Artificial Sequence
  Oligonucleotide for detection of SNP TSC0046648
ttatatttaaatt

SEQ ID NO: 189613 - DNA, 13 bp, Artificial Sequence
  Oligonucleotide for detection of SNP TSC0046651
ttgttcgttagtt

SEQ ID NO: 189614 - DNA, 13 bp, Artificial Sequence
  Oligonucleotide for detection of SNP TSC0046651
aactaacgaacaa

SEQ ID NO: 189615 - DNA, 13 bp, Artificial Sequence
  Oligonucleotide for detection of SNP TSC0046651
aattaaggaataa

SEQ ID NO: 189616 - DNA, 13 bp, Artificial Sequence
  Oligonucleotide for detection of SNP TSC0046651
ttattccttaatt

SEQ ID NO: 189617 - DNA, 13 bp, Artificial Sequence
  Oligonucleotide for detection of SNP TSC0046651
aattaatgaataa

SEQ ID NO: 189618 - DNA, 13 bp, Artificial Sequence
  Oligonucleotide for detection of SNP TSC0046651
ttattcattaatt

SEQ ID NO: 189619 - DNA, 13 bp, Artificial Sequence
  Oligonucleotide for detection of SNP TSC0046651
aattaacgaataa

SEQ ID NO: 189620 - DNA, 13 bp, Artificial Sequence
  Oligonucleotide for detection of SNP TSC0046651
ttattcgttaatt

SEQ ID NO: 189621 - DNA, 13 bp, Artificial Sequence
  Oligonucleotide for detection of SNP TSC0046652
aggggggttagat

SEQ ID NO: 189622 - DNA, 13 bp, Artificial Sequence
  Oligonucleotide for detection of SNP TSC0046652
atctaacccccct

SEQ ID NO: 189623 - DNA, 13 bp, Artificial Sequence
  Oligonucleotide for detection of SNP TSC0046652
agggggattagat

SEQ ID NO: 189624 - DNA, 13 bp, Artificial Sequence
  Oligonucleotide for detection of SNP TSC0046652
atctaatccccct

SEQ ID NO: 189625 - DNA, 13 bp, Artificial Sequence
  Oligonucleotide for detection of SNP TSC0046654
ttttttttgtatt

SEQ ID NO: 189626 - DNA, 13 bp, Artificial Sequence
  Oligonucleotide for detection of SNP TSC0046654
aatacaaaaaaaa

SEQ ID NO: 189627 - DNA, 13 bp, Artificial Sequence
  Oligonucleotide for detection of SNP TSC0046654
agtgtagaaggaa

SEQ ID NO: 189628 - DNA, 13 bp, Artificial Sequence
  Oligonucleotide for detection of SNP TSC0046654
ttccttctacact

SEQ ID NO: 189629 - DNA, 13 bp, Artificial Sequence
  Oligonucleotide for detection of SNP TSC0046654
agtgtataaggaa

SEQ ID NO: 189630 - DNA, 13 bp, Artificial Sequence
  Oligonucleotide for detection of SNP TSC0046654
ttccttatacact

SEQ ID NO: 189631 - DNA, 13 bp, Artificial Sequence
  Oligonucleotide for detection of SNP TSC0046655
agttggattttat

SEQ ID NO: 189632 - DNA, 13 bp, Artificial Sequence
  Oligonucleotide for detection of SNP TSC0046655
ataaaatccaact

SEQ ID NO: 189633 - DNA, 13 bp, Artificial Sequence
  Oligonucleotide for detection of SNP TSC0046655
agttggtttttat

SEQ ID NO: 189634 - DNA, 13 bp, Artificial Sequence
  Oligonucleotide for detection of SNP TSC0046655
ataaaaaccaact

SEQ ID NO: 189635 - DNA, 13 bp, Artificial Sequence
  Oligonucleotide for detection of SNP TSC0046655
atgaagtttaatt

SEQ ID NO: 189636 - DNA, 13 bp, Artificial Sequence
  Oligonucleotide for detection of SNP TSC0046655
aattaaacttcat

SEQ ID NO: 189637 - DNA, 13 bp, Artificial Sequence
  Oligonucleotide for detection of SNP TSC0046655
atgaaggttaatt

SEQ ID NO: 189638 - DNA, 13 bp, Artificial Sequence
  Oligonucleotide for detection of SNP TSC0046655
aattaaccttcat

SEQ ID NO: 189639 - DNA, 13 bp, Artificial Sequence
  Oligonucleotide for detection of SNP TSC0046656
tttgatattaaag

SEQ ID NO: 189640 - DNA, 13 bp, Artificial Sequence
  Oligonucleotide for detection of SNP TSC0046656
ctttaatatcaaa

SEQ ID NO: 189641 - DNA, 13 bp, Artificial Sequence
  Oligonucleotide for detection of SNP TSC0046656
tttgattttaaag

SEQ ID NO: 189642 - DNA, 13 bp, Artificial Sequence
  Oligonucleotide for detection of SNP TSC0046656
ctttaaaatcaaa

SEQ ID NO: 189643 - DNA, 13 bp, Artificial Sequence
  Oligonucleotide for detection of SNP TSC0046656
ttttgatattagg

SEQ ID NO: 189644 - DNA, 13 bp, Artificial Sequence
  Oligonucleotide for detection of SNP TSC0046656
cctaatatcaaaa

SEQ ID NO: 189645 - DNA, 13 bp, Artificial Sequence
  Oligonucleotide for detection of SNP TSC0046656
ttttgaaattagg

SEQ ID NO: 189646 - DNA, 13 bp, Artificial Sequence
  Oligonucleotide for detection of SNP TSC0046656
cctaatttcaaaa

SEQ ID NO: 189647 - DNA, 13 bp, Artificial Sequence
  Oligonucleotide for detection of SNP TSC0046657
ttaattaaattag

SEQ ID NO: 189648 - DNA, 13 bp, Artificial Sequence
  Oligonucleotide for detection of SNP TSC0046657
ctaatttaattaa

SEQ ID NO: 189649 - DNA, 13 bp, Artificial Sequence
  Oligonucleotide for detection of SNP TSC0046657
ttaatttaattag

SEQ ID NO: 189650 - DNA, 13 bp, Artificial Sequence
  Oligonucleotide for detection of SNP TSC0046657
ctaattaaattaa

SEQ ID NO: 189651 - DNA, 13 bp, Artificial Sequence
  Oligonucleotide for detection of SNP TSC0046657
ttgatttgattgg

SEQ ID NO: 189652 - DNA, 13 bp, Artificial Sequence
  Oligonucleotide for detection of SNP TSC0046657
ccaatcaaatcaa

SEQ ID NO: 189653 - DNA, 13 bp, Artificial Sequence
  Oligonucleotide for detection of SNP TSC0046658
aatagtattttty

SEQ ID NO: 189654 - DNA, 13 bp, Artificial Sequence
  Oligonucleotide for detection of SNP TSC0046658
raaaaatactatt

SEQ ID NO: 189655 - DNA, 13 bp, Artificial Sequence
  Oligonucleotide for detection of SNP TSC0046658
aatagttttttty

SEQ ID NO: 189656 - DNA, 13 bp, Artificial Sequence
  Oligonucleotide for detection of SNP TSC0046658
raaaaaaactatt

SEQ ID NO: 189657 - DNA, 13 bp, Artificial Sequence
  Oligonucleotide for detection of SNP TSC0046658
gaaaaatgttgtt

SEQ ID NO: 189658 - DNA, 13 bp, Artificial Sequence
  Oligonucleotide for detection of SNP TSC0046658
aacaacatttttc

SEQ ID NO: 189659 - DNA, 13 bp, Artificial Sequence
  Oligonucleotide for detection of SNP TSC0046658
gaaaaaggttgtt

SEQ ID NO: 189660 - DNA, 13 bp, Artificial Sequence
  Oligonucleotide for detection of SNP TSC0046658
aacaacctttttc

SEQ ID NO: 189661 - DNA, 13 bp, Artificial Sequence
  Oligonucleotide for detection of SNP TSC0046659
gttttaaaaagtt

SEQ ID NO: 189662 - DNA, 13 bp, Artificial Sequence
  Oligonucleotide for detection of SNP TSC0046659
aactttttaaaac

SEQ ID NO: 189663 - DNA, 13 bp, Artificial Sequence
  Oligonucleotide for detection of SNP TSC0046659
gttttagaaagtt

SEQ ID NO: 189664 - DNA, 13 bp, Artificial Sequence
  Oligonucleotide for detection of SNP TSC0046659
aactttctaaaac

SEQ ID NO: 189665 - DNA, 13 bp, Artificial Sequence
  Oligonucleotide for detection of SNP TSC0046662
tattaaaatgtag

SEQ ID NO: 189666 - DNA, 13 bp, Artificial Sequence
  Oligonucleotide for detection of SNP TSC0046662
ctacattttaata

SEQ ID NO: 189667 - DNA, 13 bp, Artificial Sequence
  Oligonucleotide for detection of SNP TSC0046662
tattaagatgtag

SEQ ID NO: 189668 - DNA, 13 bp, Artificial Sequence
  Oligonucleotide for detection of SNP TSC0046662
ctacatcttaata

SEQ ID NO: 189669 - DNA, 13 bp, Artificial Sequence
  Oligonucleotide for detection of SNP TSC0046663
aaaaatgggagtt

SEQ ID NO: 189670 - DNA, 13 bp, Artificial Sequence
  Oligonucleotide for detection of SNP TSC0046663
aactcccattttt

SEQ ID NO: 189671 - DNA, 13 bp, Artificial Sequence
  Oligonucleotide for detection of SNP TSC0046663
aaaaataggagtt

SEQ ID NO: 189672 - DNA, 13 bp, Artificial Sequence
  Oligonucleotide for detection of SNP TSC0046663
aactcctattttt

SEQ ID NO: 189673 - DNA, 13 bp, Artificial Sequence
  Oligonucleotide for detection of SNP TSC0046663
aaaaacgggagtt

SEQ ID NO: 189674 - DNA, 13 bp, Artificial Sequence
  Oligonucleotide for detection of SNP TSC0046663
aactcccgttttt

SEQ ID NO: 189675 - DNA, 13 bp, Artificial Sequence
  Oligonucleotide for detection of SNP TSC0046665
tagttgttgttat

SEQ ID NO: 189676 - DNA, 13 bp, Artificial Sequence
  Oligonucleotide for detection of SNP TSC0046665
ataacaacaacta

SEQ ID NO: 189677 - DNA, 13 bp, Artificial Sequence
  Oligonucleotide for detection of SNP TSC0046665
tagttggtgttat

SEQ ID NO: 189678 - DNA, 13 bp, Artificial Sequence
  Oligonucleotide for detection of SNP TSC0046665
ataacaccaacta

SEQ ID NO: 189679 - DNA, 13 bp, Artificial Sequence
  Oligonucleotide for detection of SNP TSC0046665
ataatagtagtta

SEQ ID NO: 189680 - DNA, 13 bp, Artificial Sequence
  Oligonucleotide for detection of SNP TSC0046665
taactactattat

SEQ ID NO: 189681 - DNA, 13 bp, Artificial Sequence
  Oligonucleotide for detection of SNP TSC0046667
ggatttggtgtty

SEQ ID NO: 189682 - DNA, 13 bp, Artificial Sequence
  Oligonucleotide for detection of SNP TSC0046667
raacaccaaatcc

SEQ ID NO: 189683 - DNA, 13 bp, Artificial Sequence
  Oligonucleotide for detection of SNP TSC0046667
ggatttagtgtty

SEQ ID NO: 189684 - DNA, 13 bp, Artificial Sequence
  Oligonucleotide for detection of SNP TSC0046667
raacactaaatcc

SEQ ID NO: 189685 - DNA, 13 bp, Artificial Sequence
  Oligonucleotide for detection of SNP TSC0046668
aaagattagaaaa

SEQ ID NO: 189686 - DNA, 13 bp, Artificial Sequence
  Oligonucleotide for detection of SNP TSC0046668
ttttctaatcttt

SEQ ID NO: 189687 - DNA, 13 bp, Artificial Sequence
  Oligonucleotide for detection of SNP TSC0046668
aaagatgagaaaa

SEQ ID NO: 189688 - DNA, 13 bp, Artificial Sequence
  Oligonucleotide for detection of SNP TSC0046668
ttttctcatcttt

SEQ ID NO: 189689 - DNA, 13 bp, Artificial Sequence
  Oligonucleotide for detection of SNP TSC0046670
taaattaaatatg

SEQ ID NO: 189690 - DNA, 13 bp, Artificial Sequence
  Oligonucleotide for detection of SNP TSC0046670
catatttaattta

SEQ ID NO: 189691 - DNA, 13 bp, Artificial Sequence
  Oligonucleotide for detection of SNP TSC0046670
taaattgaatatg

SEQ ID NO: 189692 - DNA, 13 bp, Artificial Sequence
  Oligonucleotide for detection of SNP TSC0046670
catattcaattta

SEQ ID NO: 189693 - DNA, 13 bp, Artificial Sequence
  Oligonucleotide for detection of SNP TSC0046670
taaatcgaatatg

SEQ ID NO: 189694 - DNA, 13 bp, Artificial Sequence
  Oligonucleotide for detection of SNP TSC0046670
catattcgattta

SEQ ID NO: 189695 - DNA, 13 bp, Artificial Sequence
  Oligonucleotide for detection of SNP TSC0046670
tatatttgatttg

SEQ ID NO: 189696 - DNA, 13 bp, Artificial Sequence
  Oligonucleotide for detection of SNP TSC0046670
caaatcaaatata

SEQ ID NO: 189697 - DNA, 13 bp, Artificial Sequence
  Oligonucleotide for detection of SNP TSC0046670
tatattcgatttg

SEQ ID NO: 189698 - DNA, 13 bp, Artificial Sequence
  Oligonucleotide for detection of SNP TSC0046670
caaatcgaatata

SEQ ID NO: 189699 - DNA, 13 bp, Artificial Sequence
  Oligonucleotide for detection of SNP TSC0046671
gggaatattttty

SEQ ID NO: 189700 - DNA, 13 bp, Artificial Sequence
  Oligonucleotide for detection of SNP TSC0046671
raaaaatattccc

SEQ ID NO: 189701 - DNA, 13 bp, Artificial Sequence
  Oligonucleotide for detection of SNP TSC0046671
gggaatgttttty

SEQ ID NO: 189702 - DNA, 13 bp, Artificial Sequence
  Oligonucleotide for detection of SNP TSC0046671
raaaaacattccc

SEQ ID NO: 189703 - DNA, 13 bp, Artificial Sequence
  Oligonucleotide for detection of SNP TSC0046675
ttatttttatgay

SEQ ID NO: 189704 - DNA, 13 bp, Artificial Sequence
  Oligonucleotide for detection of SNP TSC0046675
rtcataaaaataa

SEQ ID NO: 189705 - DNA, 13 bp, Artificial Sequence
  Oligonucleotide for detection of SNP TSC0046675
ttatttgtatgay

SEQ ID NO: 189706 - DNA, 13 bp, Artificial Sequence
  Oligonucleotide for detection of SNP TSC0046675
rtcatacaaataa

SEQ ID NO: 189707 - DNA, 13 bp, Artificial Sequence
  Oligonucleotide for detection of SNP TSC0046675
gttatggagatgg

SEQ ID NO: 189708 - DNA, 13 bp, Artificial Sequence
  Oligonucleotide for detection of SNP TSC0046675
ccatctccataac

SEQ ID NO: 189709 - DNA, 13 bp, Artificial Sequence
  Oligonucleotide for detection of SNP TSC0046675
gttatgtagatgg

SEQ ID NO: 189710 - DNA, 13 bp, Artificial Sequence
  Oligonucleotide for detection of SNP TSC0046675
ccatctacataac

SEQ ID NO: 189711 - DNA, 13 bp, Artificial Sequence
  Oligonucleotide for detection of SNP TSC0046676
agttttgaaatta

SEQ ID NO: 189712 - DNA, 13 bp, Artificial Sequence
  Oligonucleotide for detection of SNP TSC0046676
taatttcaaaact

SEQ ID NO: 189713 - DNA, 13 bp, Artificial Sequence
  Oligonucleotide for detection of SNP TSC0046676
agttttaaaatta

SEQ ID NO: 189714 - DNA, 13 bp, Artificial Sequence
  Oligonucleotide for detection of SNP TSC0046676
taattttaaaact

SEQ ID NO: 189715 - DNA, 13 bp, Artificial Sequence
  Oligonucleotide for detection of SNP TSC0046677
taaagtatatgag

SEQ ID NO: 189716 - DNA, 13 bp, Artificial Sequence
  Oligonucleotide for detection of SNP TSC0046677
ctcatatacttta

SEQ ID NO: 189717 - DNA, 13 bp, Artificial Sequence
  Oligonucleotide for detection of SNP TSC0046677
taaagtgtatgag

SEQ ID NO: 189718 - DNA, 13 bp, Artificial Sequence
  Oligonucleotide for detection of SNP TSC0046677
ctcatacacttta

SEQ ID NO: 189719 - DNA, 13 bp, Artificial Sequence
  Oligonucleotide for detection of SNP TSC0046677
taaagtatacgag

SEQ ID NO: 189720 - DNA, 13 bp, Artificial Sequence
  Oligonucleotide for detection of SNP TSC0046677
ctcgtatacttta

SEQ ID NO: 189721 - DNA, 13 bp, Artificial Sequence
  Oligonucleotide for detection of SNP TSC0046677
taaagtgtacgag

SEQ ID NO: 189722 - DNA, 13 bp, Artificial Sequence
  Oligonucleotide for detection of SNP TSC0046677
ctcgtacacttta

SEQ ID NO: 189723 - DNA, 13 bp, Artificial Sequence
  Oligonucleotide for detection of SNP TSC0046679
taaatataataag

SEQ ID NO: 189724 - DNA, 13 bp, Artificial Sequence
  Oligonucleotide for detection of SNP TSC0046679
cttattatattta

SEQ ID NO: 189725 - DNA, 13 bp, Artificial Sequence
  Oligonucleotide for detection of SNP TSC0046679
tttattttattta

SEQ ID NO: 189726 - DNA, 13 bp, Artificial Sequence
  Oligonucleotide for detection of SNP TSC0046679
taaataaaataaa

SEQ ID NO: 189727 - DNA, 13 bp, Artificial Sequence
  Oligonucleotide for detection of SNP TSC0046680
gtttatatgtttg

SEQ ID NO: 189728 - DNA, 13 bp, Artificial Sequence
  Oligonucleotide for detection of SNP TSC0046680
caaacatataaac

SEQ ID NO: 189729 - DNA, 13 bp, Artificial Sequence
  Oligonucleotide for detection of SNP TSC0046680
gtttatgtgtttg

SEQ ID NO: 189730 - DNA, 13 bp, Artificial Sequence
  Oligonucleotide for detection of SNP TSC0046680
caaacacataaac

SEQ ID NO: 189731 - DNA, 13 bp, Artificial Sequence
  Oligonucleotide for detection of SNP TSC0046680
gtttacgtgtttg

SEQ ID NO: 189732 - DNA, 13 bp, Artificial Sequence
  Oligonucleotide for detection of SNP TSC0046680
caaacacgtaaac

SEQ ID NO: 189733 - DNA, 13 bp, Artificial Sequence
  Oligonucleotide for detection of SNP TSC0046680
taagtatgtaggy

SEQ ID NO: 189734 - DNA, 13 bp, Artificial Sequence
  Oligonucleotide for detection of SNP TSC0046680
rcctacatactta

SEQ ID NO: 189735 - DNA, 13 bp, Artificial Sequence
  Oligonucleotide for detection of SNP TSC0046680
taagtacgtaggy

SEQ ID NO: 189736 - DNA, 13 bp, Artificial Sequence
  Oligonucleotide for detection of SNP TSC0046680
rcctacgtactta

SEQ ID NO: 189737 - DNA, 13 bp, Artificial Sequence
  Oligonucleotide for detection of SNP TSC0046681
tattgtgtaagta

SEQ ID NO: 189738 - DNA, 13 bp, Artificial Sequence
  Oligonucleotide for detection of SNP TSC0046681
tacttacacaata

SEQ ID NO: 189739 - DNA, 13 bp, Artificial Sequence
  Oligonucleotide for detection of SNP TSC0046681
tattgtataagta

SEQ ID NO: 189740 - DNA, 13 bp, Artificial Sequence
  Oligonucleotide for detection of SNP TSC0046681
tacttatacaata

SEQ ID NO: 189741 - DNA, 13 bp, Artificial Sequence
  Oligonucleotide for detection of SNP TSC0046682
taaatgatttttt

SEQ ID NO: 189742 - DNA, 13 bp, Artificial Sequence
  Oligonucleotide for detection of SNP TSC0046682
aaaaaatcattta

SEQ ID NO: 189743 - DNA, 13 bp, Artificial Sequence
  Oligonucleotide for detection of SNP TSC0046682
taaatggtttttt

SEQ ID NO: 189744 - DNA, 13 bp, Artificial Sequence
  Oligonucleotide for detection of SNP TSC0046682
aaaaaaccattta

SEQ ID NO: 189745 - DNA, 13 bp, Artificial Sequence
  Oligonucleotide for detection of SNP TSC0046682
taaacgatttttt

SEQ ID NO: 189746 - DNA, 13 bp, Artificial Sequence
  Oligonucleotide for detection of SNP TSC0046682
aaaaaatcgttta

SEQ ID NO: 189747 - DNA, 13 bp, Artificial Sequence
  Oligonucleotide for detection of SNP TSC0046682
taaacggtttttt

SEQ ID NO: 189748 - DNA, 13 bp, Artificial Sequence
  Oligonucleotide for detection of SNP TSC0046682
aaaaaaccgttta

SEQ ID NO: 189749 - DNA, 13 bp, Artificial Sequence
  Oligonucleotide for detection of SNP TSC0046683
ttatttgtaggga

SEQ ID NO: 189750 - DNA, 13 bp, Artificial Sequence
  Oligonucleotide for detection of SNP TSC0046683
tccctacaaataa

SEQ ID NO: 189751 - DNA, 13 bp, Artificial Sequence
  Oligonucleotide for detection of SNP TSC0046683
ttatttataggga

SEQ ID NO: 189752 - DNA, 13 bp, Artificial Sequence
  Oligonucleotide for detection of SNP TSC0046683
tccctataaataa

SEQ ID NO: 189753 - DNA, 13 bp, Artificial Sequence
  Oligonucleotide for detection of SNP TSC0046683
ttattcgtaggga

SEQ ID NO: 189754 - DNA, 13 bp, Artificial Sequence
  Oligonucleotide for detection of SNP TSC0046683
tccctacgaataa

SEQ ID NO: 189755 - DNA, 13 bp, Artificial Sequence
  Oligonucleotide for detection of SNP TSC0046688
tataatattaggg

SEQ ID NO: 189756 - DNA, 13 bp, Artificial Sequence
  Oligonucleotide for detection of SNP TSC0046688
ccctaatattata

SEQ ID NO: 189757 - DNA, 13 bp, Artificial Sequence
  Oligonucleotide for detection of SNP TSC0046688
tataatgttaggg

SEQ ID NO: 189758 - DNA, 13 bp, Artificial Sequence
  Oligonucleotide for detection of SNP TSC0046688
ccctaacattata

SEQ ID NO: 189759 - DNA, 13 bp, Artificial Sequence
  Oligonucleotide for detection of SNP TSC0046689
tggtttattattg

SEQ ID NO: 189760 - DNA, 13 bp, Artificial Sequence
  Oligonucleotide for detection of SNP TSC0046689
caataataaacca

SEQ ID NO: 189761 - DNA, 13 bp, Artificial Sequence
  Oligonucleotide for detection of SNP TSC0046690
taatatataaatt

SEQ ID NO: 189762 - DNA, 13 bp, Artificial Sequence
  Oligonucleotide for detection of SNP TSC0046690
aatttatatatta

SEQ ID NO: 189763 - DNA, 13 bp, Artificial Sequence
  Oligonucleotide for detection of SNP TSC0046690
taatatgtaaatt

SEQ ID NO: 189764 - DNA, 13 bp, Artificial Sequence
  Oligonucleotide for detection of SNP TSC0046690
aatttacatatta

SEQ ID NO: 189765 - DNA, 13 bp, Artificial Sequence
  Oligonucleotide for detection of SNP TSC0046694
ttaaatgtaagta

SEQ ID NO: 189766 - DNA, 13 bp, Artificial Sequence
  Oligonucleotide for detection of SNP TSC0046694
tacttacatttaa

SEQ ID NO: 189767 - DNA, 13 bp, Artificial Sequence
  Oligonucleotide for detection of SNP TSC0046694
ttaaatataagta

SEQ ID NO: 189768 - DNA, 13 bp, Artificial Sequence
  Oligonucleotide for detection of SNP TSC0046694
tacttatatttaa

SEQ ID NO: 189769 - DNA, 13 bp, Artificial Sequence
  Oligonucleotide for detection of SNP TSC0046696
tggtgtaggagag

SEQ ID NO: 189770 - DNA, 13 bp, Artificial Sequence
  Oligonucleotide for detection of SNP TSC0046696
ctctcctacacca

SEQ ID NO: 189771 - DNA, 13 bp, Artificial Sequence
  Oligonucleotide for detection of SNP TSC0046696
tggtgttggagag

SEQ ID NO: 189772 - DNA, 13 bp, Artificial Sequence
  Oligonucleotide for detection of SNP TSC0046696
ctctccaacacca

SEQ ID NO: 189773 - DNA, 13 bp, Artificial Sequence
  Oligonucleotide for detection of SNP TSC0046696
tggtgtcggagag

SEQ ID NO: 189774 - DNA, 13 bp, Artificial Sequence
  Oligonucleotide for detection of SNP TSC0046696
ctctccgacacca

SEQ ID NO: 189775 - DNA, 13 bp, Artificial Sequence
  Oligonucleotide for detection of SNP TSC0046699
tatttttaaaaag

SEQ ID NO: 189776 - DNA, 13 bp, Artificial Sequence
  Oligonucleotide for detection of SNP TSC0046699
ctttttaaaaata

SEQ ID NO: 189777 - DNA, 13 bp, Artificial Sequence
  Oligonucleotide for detection of SNP TSC0046699
tattttaaaaaag

SEQ ID NO: 189778 - DNA, 13 bp, Artificial Sequence
  Oligonucleotide for detection of SNP TSC0046699
cttttttaaaata

SEQ ID NO: 189779 - DNA, 13 bp, Artificial Sequence
  Oligonucleotide for detection of SNP TSC0046702
gttttaatatagg

SEQ ID NO: 189780 - DNA, 13 bp, Artificial Sequence
  Oligonucleotide for detection of SNP TSC0046702
cctatattaaaac

SEQ ID NO: 189781 - DNA, 13 bp, Artificial Sequence
  Oligonucleotide for detection of SNP TSC0046702
gttttagtatagg

SEQ ID NO: 189782 - DNA, 13 bp, Artificial Sequence
  Oligonucleotide for detection of SNP TSC0046702
cctatactaaaac

SEQ ID NO: 189783 - DNA, 13 bp, Artificial Sequence
  Oligonucleotide for detection of SNP TSC0046703
tgagagattgttg

SEQ ID NO: 189784 - DNA, 13 bp, Artificial Sequence
  Oligonucleotide for detection of SNP TSC0046703
caacaatctctca

SEQ ID NO: 189785 - DNA, 13 bp, Artificial Sequence
  Oligonucleotide for detection of SNP TSC0046703
tgagagtttgttg

SEQ ID NO: 189786 - DNA, 13 bp, Artificial Sequence
  Oligonucleotide for detection of SNP TSC0046703
caacaaactctca

SEQ ID NO: 189787 - DNA, 13 bp, Artificial Sequence
  Oligonucleotide for detection of SNP TSC0046703
tgagagatcgttg

SEQ ID NO: 189788 - DNA, 13 bp, Artificial Sequence
  Oligonucleotide for detection of SNP TSC0046703
caacgatctctca

SEQ ID NO: 189789 - DNA, 13 bp, Artificial Sequence
  Oligonucleotide for detection of SNP TSC0046703
tgagagttcgttg

SEQ ID NO: 189790 - DNA, 13 bp, Artificial Sequence
  Oligonucleotide for detection of SNP TSC0046703
caacgaactctca

SEQ ID NO: 189791 - DNA, 13 bp, Artificial Sequence
  Oligonucleotide for detection of SNP TSC0046703
taatggtttttta

SEQ ID NO: 189792 - DNA, 13 bp, Artificial Sequence
  Oligonucleotide for detection of SNP TSC0046703
taaaaaaccatta

SEQ ID NO: 189793 - DNA, 13 bp, Artificial Sequence
  Oligonucleotide for detection of SNP TSC0046703
taatggattttta

SEQ ID NO: 189794 - DNA, 13 bp, Artificial Sequence
  Oligonucleotide for detection of SNP TSC0046703
taaaaatccatta

SEQ ID NO: 189795 - DNA, 13 bp, Artificial Sequence
  Oligonucleotide for detection of SNP TSC0046703
taacggtttttta

SEQ ID NO: 189796 - DNA, 13 bp, Artificial Sequence
  Oligonucleotide for detection of SNP TSC0046703
taaaaaaccgtta

SEQ ID NO: 189797 - DNA, 13 bp, Artificial Sequence
  Oligonucleotide for detection of SNP TSC0046703
taacggattttta

SEQ ID NO: 189798 - DNA, 13 bp, Artificial Sequence
  Oligonucleotide for detection of SNP TSC0046703
taaaaatccgtta

SEQ ID NO: 189799 - DNA, 13 bp, Artificial Sequence
  Oligonucleotide for detection of SNP TSC0046704
tgtggagtattgt

SEQ ID NO: 189800 - DNA, 13 bp, Artificial Sequence
  Oligonucleotide for detection of SNP TSC0046704
acaatactccaca

SEQ ID NO: 189801 - DNA, 13 bp, Artificial Sequence
  Oligonucleotide for detection of SNP TSC0046704
tgtggaatattgt

SEQ ID NO: 189802 - DNA, 13 bp, Artificial Sequence
  Oligonucleotide for detection of SNP TSC0046704
acaatattccaca

SEQ ID NO: 189803 - DNA, 13 bp, Artificial Sequence
  Oligonucleotide for detection of SNP TSC0046704
cgtggagtattgt

SEQ ID NO: 189804 - DNA, 13 bp, Artificial Sequence
  Oligonucleotide for detection of SNP TSC0046704
acaatactccacg

SEQ ID NO: 189805 - DNA, 13 bp, Artificial Sequence
  Oligonucleotide for detection of SNP TSC0046704
cgtggaatattgt

SEQ ID NO: 189806 - DNA, 13 bp, Artificial Sequence
  Oligonucleotide for detection of SNP TSC0046704
acaatattccacg

SEQ ID NO: 189807 - DNA, 13 bp, Artificial Sequence
  Oligonucleotide for detection of SNP TSC0046705
ttattataaaagy

SEQ ID NO: 189808 - DNA, 13 bp, Artificial Sequence
  Oligonucleotide for detection of SNP TSC0046705
rcttttataataa

SEQ ID NO: 189809 - DNA, 13 bp, Artificial Sequence
  Oligonucleotide for detection of SNP TSC0046705
ttattagaaaagy

SEQ ID NO: 189810 - DNA, 13 bp, Artificial Sequence
  Oligonucleotide for detection of SNP TSC0046705
rcttttctaataa

SEQ ID NO: 189811 - DNA, 13 bp, Artificial Sequence
  Oligonucleotide for detection of SNP TSC0046705
gtttttgtgatgg

SEQ ID NO: 189812 - DNA, 13 bp, Artificial Sequence
  Oligonucleotide for detection of SNP TSC0046705
ccatcacaaaaac

SEQ ID NO: 189813 - DNA, 13 bp, Artificial Sequence
  Oligonucleotide for detection of SNP TSC0046705
gtttttttgatgg

SEQ ID NO: 189814 - DNA, 13 bp, Artificial Sequence
  Oligonucleotide for detection of SNP TSC0046705
ccatcaaaaaaac

SEQ ID NO: 189815 - DNA, 13 bp, Artificial Sequence
  Oligonucleotide for detection of SNP TSC0046706
atttaaaggtttg

SEQ ID NO: 189816 - DNA, 13 bp, Artificial Sequence
  Oligonucleotide for detection of SNP TSC0046706
caaacctttaaat

SEQ ID NO: 189817 - DNA, 13 bp, Artificial Sequence
  Oligonucleotide for detection of SNP TSC0046706
atttaagggtttg

SEQ ID NO: 189818 - DNA, 13 bp, Artificial Sequence
  Oligonucleotide for detection of SNP TSC0046706
caaacccttaaat

SEQ ID NO: 189819 - DNA, 13 bp, Artificial Sequence
  Oligonucleotide for detection of SNP TSC0046707
gaataaaggtgay

SEQ ID NO: 189820 - DNA, 13 bp, Artificial Sequence
  Oligonucleotide for detection of SNP TSC0046707
rtcacctttattc

SEQ ID NO: 189821 - DNA, 13 bp, Artificial Sequence
  Oligonucleotide for detection of SNP TSC0046707
gaataagggtgay

SEQ ID NO: 189822 - DNA, 13 bp, Artificial Sequence
  Oligonucleotide for detection of SNP TSC0046707
rtcacccttattc

SEQ ID NO: 189823 - DNA, 13 bp, Artificial Sequence
  Oligonucleotide for detection of SNP TSC0005608
atattttgggtty

SEQ ID NO: 189824 - DNA, 13 bp, Artificial Sequence
  Oligonucleotide for detection of SNP TSC0005608
raacccaaaatat

SEQ ID NO: 189825 - DNA, 13 bp, Artificial Sequence
  Oligonucleotide for detection of SNP TSC0005608
atatttcgggtty

SEQ ID NO: 189826 - DNA, 13 bp, Artificial Sequence
  Oligonucleotide for detection of SNP TSC0005608
raacccgaaatat

SEQ ID NO: 189827 - DNA, 13 bp, Artificial Sequence
  Oligonucleotide for detection of SNP TSC0005608
gaatttggaatgt

SEQ ID NO: 189828 - DNA, 13 bp, Artificial Sequence
  Oligonucleotide for detection of SNP TSC0005608
acattccaaattc

SEQ ID NO: 189829 - DNA, 13 bp, Artificial Sequence
  Oligonucleotide for detection of SNP TSC0005608
gaatttagaatgt

SEQ ID NO: 189830 - DNA, 13 bp, Artificial Sequence
  Oligonucleotide for detection of SNP TSC0005608
acattctaaattc

SEQ ID NO: 189831 - DNA, 13 bp, Artificial Sequence
  Oligonucleotide for detection of SNP TSC0005608
gaattcggaatgt

SEQ ID NO: 189832 - DNA, 13 bp, Artificial Sequence
  Oligonucleotide for detection of SNP TSC0005608
acattccgaattc

SEQ ID NO: 189833 - DNA, 13 bp, Artificial Sequence
  Oligonucleotide for detection of SNP TSC0046715
aggttagtgataa

SEQ ID NO: 189834 - DNA, 13 bp, Artificial Sequence
  Oligonucleotide for detection of SNP TSC0046715
ttatcactaacct

SEQ ID NO: 189835 - DNA, 13 bp, Artificial Sequence
  Oligonucleotide for detection of SNP TSC0046715
aggttaatgataa

SEQ ID NO: 189836 - DNA, 13 bp, Artificial Sequence
  Oligonucleotide for detection of SNP TSC0046715
ttatcattaacct

SEQ ID NO: 189837 - DNA, 13 bp, Artificial Sequence
  Oligonucleotide for detection of SNP TSC0046716
ttattgagatgtt

SEQ ID NO: 189838 - DNA, 13 bp, Artificial Sequence
  Oligonucleotide for detection of SNP TSC0046716
aacatctcaataa

SEQ ID NO: 189839 - DNA, 13 bp, Artificial Sequence
  Oligonucleotide for detection of SNP TSC0046716
ttattgtgatgtt

SEQ ID NO: 189840 - DNA, 13 bp, Artificial Sequence
  Oligonucleotide for detection of SNP TSC0046716
aacatcacaataa

SEQ ID NO: 189841 - DNA, 13 bp, Artificial Sequence
  Oligonucleotide for detection of SNP TSC0046716
agtattttagtga

SEQ ID NO: 189842 - DNA, 13 bp, Artificial Sequence
  Oligonucleotide for detection of SNP TSC0046716
tcactaaaatact

SEQ ID NO: 189843 - DNA, 13 bp, Artificial Sequence
  Oligonucleotide for detection of SNP TSC0046716
agtattatagtga

SEQ ID NO: 189844 - DNA, 13 bp, Artificial Sequence
  Oligonucleotide for detection of SNP TSC0046716
tcactataatact

SEQ ID NO: 189845 - DNA, 13 bp, Artificial Sequence
  Oligonucleotide for detection of SNP TSC0046718
agttaaattttty

SEQ ID NO: 189846 - DNA, 13 bp, Artificial Sequence
  Oligonucleotide for detection of SNP TSC0046718
raaaaatttaact

SEQ ID NO: 189847 - DNA, 13 bp, Artificial Sequence
  Oligonucleotide for detection of SNP TSC0046718
agttaatttttty

SEQ ID NO: 189848 - DNA, 13 bp, Artificial Sequence
  Oligonucleotide for detection of SNP TSC0046718
raaaaaattaact

SEQ ID NO: 189849 - DNA, 13 bp, Artificial Sequence
  Oligonucleotide for detection of SNP TSC0046718
gaaaaatttaatt

SEQ ID NO: 189850 - DNA, 13 bp, Artificial Sequence
  Oligonucleotide for detection of SNP TSC0046718
aattaaatttttc

SEQ ID NO: 189851 - DNA, 13 bp, Artificial Sequence
  Oligonucleotide for detection of SNP TSC0046718
gaaaaaattaatt

SEQ ID NO: 189852 - DNA, 13 bp, Artificial Sequence
  Oligonucleotide for detection of SNP TSC0046718
aattaattttttc

SEQ ID NO: 189853 - DNA, 13 bp, Artificial Sequence
  Oligonucleotide for detection of SNP TSC0046719
aataaagaaaaaa

SEQ ID NO: 189854 - DNA, 13 bp, Artificial Sequence
  Oligonucleotide for detection of SNP TSC0046719
ttttttctttatt

SEQ ID NO: 189855 - DNA, 13 bp, Artificial Sequence
  Oligonucleotide for detection of SNP TSC0046720
ttttgtattatgg

SEQ ID NO: 189856 - DNA, 13 bp, Artificial Sequence
  Oligonucleotide for detection of SNP TSC0046720
ccataatacaaaa

SEQ ID NO: 189857 - DNA, 13 bp, Artificial Sequence
  Oligonucleotide for detection of SNP TSC0046720
ttttgttttatgg

SEQ ID NO: 189858 - DNA, 13 bp, Artificial Sequence
  Oligonucleotide for detection of SNP TSC0046720
ccataaaacaaaa

SEQ ID NO: 189859 - DNA, 13 bp, Artificial Sequence
  Oligonucleotide for detection of SNP TSC0046720
ttatggtataaag

SEQ ID NO: 189860 - DNA, 13 bp, Artificial Sequence
  Oligonucleotide for detection of SNP TSC0046720
ctttataccataa

SEQ ID NO: 189861 - DNA, 13 bp, Artificial Sequence
  Oligonucleotide for detection of SNP TSC0046720
ttatgggataaag

SEQ ID NO: 189862 - DNA, 13 bp, Artificial Sequence
  Oligonucleotide for detection of SNP TSC0046720
ctttatcccataa

SEQ ID NO: 189863 - DNA, 13 bp, Artificial Sequence
  Oligonucleotide for detection of SNP TSC0046722
tttgttaatagtg

SEQ ID NO: 189864 - DNA, 13 bp, Artificial Sequence
  Oligonucleotide for detection of SNP TSC0046722
cactattaacaaa

SEQ ID NO: 189865 - DNA, 13 bp, Artificial Sequence
  Oligonucleotide for detection of SNP TSC0046722
tttgtttatagtg

SEQ ID NO: 189866 - DNA, 13 bp, Artificial Sequence
  Oligonucleotide for detection of SNP TSC0046722
cactataaacaaa

SEQ ID NO: 189867 - DNA, 13 bp, Artificial Sequence
  Oligonucleotide for detection of SNP TSC0046722
tattgttggtagg

SEQ ID NO: 189868 - DNA, 13 bp, Artificial Sequence
  Oligonucleotide for detection of SNP TSC0046722
cctaccaacaata

SEQ ID NO: 189869 - DNA, 13 bp, Artificial Sequence
  Oligonucleotide for detection of SNP TSC0046722
tattgtgggtagg

SEQ ID NO: 189870 - DNA, 13 bp, Artificial Sequence
  Oligonucleotide for detection of SNP TSC0046722
cctacccacaata

SEQ ID NO: 189871 - DNA, 13 bp, Artificial Sequence
  Oligonucleotide for detection of SNP TSC0046723
gtgtgtagattgt

SEQ ID NO: 189872 - DNA, 13 bp, Artificial Sequence
  Oligonucleotide for detection of SNP TSC0046723
acaatctacacac

SEQ ID NO: 189873 - DNA, 13 bp, Artificial Sequence
  Oligonucleotide for detection of SNP TSC0046723
gtgtgtggattgt

SEQ ID NO: 189874 - DNA, 13 bp, Artificial Sequence
  Oligonucleotide for detection of SNP TSC0046723
acaatccacacac

SEQ ID NO: 189875 - DNA, 13 bp, Artificial Sequence
  Oligonucleotide for detection of SNP TSC0046723
gtgcgtagattgt

SEQ ID NO: 189876 - DNA, 13 bp, Artificial Sequence
  Oligonucleotide for detection of SNP TSC0046723
acaatctacgcac

SEQ ID NO: 189877 - DNA, 13 bp, Artificial Sequence
  Oligonucleotide for detection of SNP TSC0046723
gtgcgtggattgt

SEQ ID NO: 189878 - DNA, 13 bp, Artificial Sequence
  Oligonucleotide for detection of SNP TSC0046723
acaatccacgcac

SEQ ID NO: 189879 - DNA, 13 bp, Artificial Sequence
  Oligonucleotide for detection of SNP TSC0046723
gtgtgtagatcgt

SEQ ID NO: 189880 - DNA, 13 bp, Artificial Sequence
  Oligonucleotide for detection of SNP TSC0046723
acgatctacacac

SEQ ID NO: 189881 - DNA, 13 bp, Artificial Sequence
  Oligonucleotide for detection of SNP TSC0046723
gtgtgcggattgt

SEQ ID NO: 189882 - DNA, 13 bp, Artificial Sequence
  Oligonucleotide for detection of SNP TSC0046723
acaatccgcacac

SEQ ID NO: 189883 - DNA, 13 bp, Artificial Sequence
  Oligonucleotide for detection of SNP TSC0046723
gtgcgtagatcgt

SEQ ID NO: 189884 - DNA, 13 bp, Artificial Sequence
  Oligonucleotide for detection of SNP TSC0046723
acgatctacgcac

SEQ ID NO: 189885 - DNA, 13 bp, Artificial Sequence
  Oligonucleotide for detection of SNP TSC0046723
gtgtgtggatcgt

SEQ ID NO: 189886 - DNA, 13 bp, Artificial Sequence
  Oligonucleotide for detection of SNP TSC0046723
acgatccacacac

SEQ ID NO: 189887 - DNA, 13 bp, Artificial Sequence
  Oligonucleotide for detection of SNP TSC0046723
gtgcgcggattgt

SEQ ID NO: 189888 - DNA, 13 bp, Artificial Sequence
  Oligonucleotide for detection of SNP TSC0046723
acaatccgcgcac

SEQ ID NO: 189889 - DNA, 13 bp, Artificial Sequence
  Oligonucleotide for detection of SNP TSC0046723
gtgcgtggatcgt

SEQ ID NO: 189890 - DNA, 13 bp, Artificial Sequence
  Oligonucleotide for detection of SNP TSC0046723
acgatccacgcac

SEQ ID NO: 189891 - DNA, 13 bp, Artificial Sequence
  Oligonucleotide for detection of SNP TSC0046723
gtgtgcggatcgt

SEQ ID NO: 189892 - DNA, 13 bp, Artificial Sequence
  Oligonucleotide for detection of SNP TSC0046723
acgatccgcacac

SEQ ID NO: 189893 - DNA, 13 bp, Artificial Sequence
  Oligonucleotide for detection of SNP TSC0046723
gtgcgcggatcgt

SEQ ID NO: 189894 - DNA, 13 bp, Artificial Sequence
  Oligonucleotide for detection of SNP TSC0046723
acgatccgcgcac

SEQ ID NO: 189895 - DNA, 13 bp, Artificial Sequence
  Oligonucleotide for detection of SNP TSC0046723
atggtttgtgtay

SEQ ID NO: 189896 - DNA, 13 bp, Artificial Sequence
  Oligonucleotide for detection of SNP TSC0046723
rtacacaaaccat

SEQ ID NO: 189897 - DNA, 13 bp, Artificial Sequence
  Oligonucleotide for detection of SNP TSC0046723
acggtttgtgtay

SEQ ID NO: 189898 - DNA, 13 bp, Artificial Sequence
  Oligonucleotide for detection of SNP TSC0046723
rtacacaaaccgt

SEQ ID NO: 189899 - DNA, 13 bp, Artificial Sequence
  Oligonucleotide for detection of SNP TSC0046723
atggtttgcgtay

SEQ ID NO: 189900 - DNA, 13 bp, Artificial Sequence
  Oligonucleotide for detection of SNP TSC0046723
rtacgcaaaccat

SEQ ID NO: 189901 - DNA, 13 bp, Artificial Sequence
  Oligonucleotide for detection of SNP TSC0046723
atggttcgtgtay

SEQ ID NO: 189902 - DNA, 13 bp, Artificial Sequence
  Oligonucleotide for detection of SNP TSC0046723
rtacacgaaccat

SEQ ID NO: 189903 - DNA, 13 bp, Artificial Sequence
  Oligonucleotide for detection of SNP TSC0046723
acggtttgcgtay

SEQ ID NO: 189904 - DNA, 13 bp, Artificial Sequence
  Oligonucleotide for detection of SNP TSC0046723
rtacgcaaaccgt

SEQ ID NO: 189905 - DNA, 13 bp, Artificial Sequence
  Oligonucleotide for detection of SNP TSC0046723
acggttcgtgtay

SEQ ID NO: 189906 - DNA, 13 bp, Artificial Sequence
  Oligonucleotide for detection of SNP TSC0046723
rtacacgaaccgt

SEQ ID NO: 189907 - DNA, 13 bp, Artificial Sequence
  Oligonucleotide for detection of SNP TSC0046723
atggttcgcgtay

SEQ ID NO: 189908 - DNA, 13 bp, Artificial Sequence
  Oligonucleotide for detection of SNP TSC0046723
rtacgcgaaccat

SEQ ID NO: 189909 - DNA, 13 bp, Artificial Sequence
  Oligonucleotide for detection of SNP TSC0046723
acggttcgcgtay

SEQ ID NO: 189910 - DNA, 13 bp, Artificial Sequence
  Oligonucleotide for detection of SNP TSC0046723
rtacgcgaaccgt

SEQ ID NO: 189911 - DNA, 13 bp, Artificial Sequence
  Oligonucleotide for detection of SNP TSC0046725
gaggttagtttta

SEQ ID NO: 189912 - DNA, 13 bp, Artificial Sequence
  Oligonucleotide for detection of SNP TSC0046725
taaaactaacctc

SEQ ID NO: 189913 - DNA, 13 bp, Artificial Sequence
  Oligonucleotide for detection of SNP TSC0046725
gaggtttgtttta

SEQ ID NO: 189914 - DNA, 13 bp, Artificial Sequence
  Oligonucleotide for detection of SNP TSC0046725
taaaacaaacctc

SEQ ID NO: 189915 - DNA, 13 bp, Artificial Sequence
  Oligonucleotide for detection of SNP TSC0046725
gaggttcgtttta

SEQ ID NO: 189916 - DNA, 13 bp, Artificial Sequence
  Oligonucleotide for detection of SNP TSC0046725
taaaacgaacctc

SEQ ID NO: 189917 - DNA, 13 bp, Artificial Sequence
  Oligonucleotide for detection of SNP TSC0046725
tgaggttggttty

SEQ ID NO: 189918 - DNA, 13 bp, Artificial Sequence
  Oligonucleotide for detection of SNP TSC0046725
raaaccaacctca

SEQ ID NO: 189919 - DNA, 13 bp, Artificial Sequence
  Oligonucleotide for detection of SNP TSC0046725
tgaggtgggttty

SEQ ID NO: 189920 - DNA, 13 bp, Artificial Sequence
  Oligonucleotide for detection of SNP TSC0046725
raaacccacctca

SEQ ID NO: 189921 - DNA, 13 bp, Artificial Sequence
  Oligonucleotide for detection of SNP TSC0046725
tgaggcgggttty

SEQ ID NO: 189922 - DNA, 13 bp, Artificial Sequence
  Oligonucleotide for detection of SNP TSC0046725
raaacccgcctca

SEQ ID NO: 189923 - DNA, 13 bp, Artificial Sequence
  Oligonucleotide for detection of SNP TSC0046726
gtttttaaggatt

SEQ ID NO: 189924 - DNA, 13 bp, Artificial Sequence
  Oligonucleotide for detection of SNP TSC0046726
aatccttaaaaac

SEQ ID NO: 189925 - DNA, 13 bp, Artificial Sequence
  Oligonucleotide for detection of SNP TSC0046726
gttttttaggatt

SEQ ID NO: 189926 - DNA, 13 bp, Artificial Sequence
  Oligonucleotide for detection of SNP TSC0046726
aatcctaaaaaac

SEQ ID NO: 189927 - DNA, 13 bp, Artificial Sequence
  Oligonucleotide for detection of SNP TSC0046726
agtttttgagagy

SEQ ID NO: 189928 - DNA, 13 bp, Artificial Sequence
  Oligonucleotide for detection of SNP TSC0046726
rctctcaaaaact

SEQ ID NO: 189929 - DNA, 13 bp, Artificial Sequence
  Oligonucleotide for detection of SNP TSC0046726
agttttggagagy

SEQ ID NO: 189930 - DNA, 13 bp, Artificial Sequence
  Oligonucleotide for detection of SNP TSC0046726
rctctccaaaact

SEQ ID NO: 189931 - DNA, 13 bp, Artificial Sequence
  Oligonucleotide for detection of SNP TSC0046727
tggaatatagaat

SEQ ID NO: 189932 - DNA, 13 bp, Artificial Sequence
  Oligonucleotide for detection of SNP TSC0046727
attctatattcca

SEQ ID NO: 189933 - DNA, 13 bp, Artificial Sequence
  Oligonucleotide for detection of SNP TSC0046727
tggaatttagaat

SEQ ID NO: 189934 - DNA, 13 bp, Artificial Sequence
  Oligonucleotide for detection of SNP TSC0046727
attctaaattcca

SEQ ID NO: 189935 - DNA, 13 bp, Artificial Sequence
  Oligonucleotide for detection of SNP TSC0008506
taaaatggaaaay

SEQ ID NO: 189936 - DNA, 13 bp, Artificial Sequence
  Oligonucleotide for detection of SNP TSC0008506
rttttccatttta

SEQ ID NO: 189937 - DNA, 13 bp, Artificial Sequence
  Oligonucleotide for detection of SNP TSC0008506
taaaatagaaaay

SEQ ID NO: 189938 - DNA, 13 bp, Artificial Sequence
  Oligonucleotide for detection of SNP TSC0008506
rttttctatttta

SEQ ID NO: 189939 - DNA, 13 bp, Artificial Sequence
  Oligonucleotide for detection of SNP TSC0010679
aaatataggtaat

SEQ ID NO: 189940 - DNA, 13 bp, Artificial Sequence
  Oligonucleotide for detection of SNP TSC0010679
attacctatattt

SEQ ID NO: 189941 - DNA, 13 bp, Artificial Sequence
  Oligonucleotide for detection of SNP TSC0010679
aaatattggtaat

SEQ ID NO: 189942 - DNA, 13 bp, Artificial Sequence
  Oligonucleotide for detection of SNP TSC0010679
attaccaatattt

SEQ ID NO: 189943 - DNA, 13 bp, Artificial Sequence
  Oligonucleotide for detection of SNP TSC0010679
aaatatcggtaat

SEQ ID NO: 189944 - DNA, 13 bp, Artificial Sequence
  Oligonucleotide for detection of SNP TSC0010679
attaccgatattt

SEQ ID NO: 189945 - DNA, 13 bp, Artificial Sequence
  Oligonucleotide for detection of SNP TSC0046728
gtggataaaatta

SEQ ID NO: 189946 - DNA, 13 bp, Artificial Sequence
  Oligonucleotide for detection of SNP TSC0046728
taattttatccac

SEQ ID NO: 189947 - DNA, 13 bp, Artificial Sequence
  Oligonucleotide for detection of SNP TSC0046728
gtggatgaaatta

SEQ ID NO: 189948 - DNA, 13 bp, Artificial Sequence
  Oligonucleotide for detection of SNP TSC0046728
taatttcatccac

SEQ ID NO: 189949 - DNA, 13 bp, Artificial Sequence
  Oligonucleotide for detection of SNP TSC0046728
gtggacgaaatta

SEQ ID NO: 189950 - DNA, 13 bp, Artificial Sequence
  Oligonucleotide for detection of SNP TSC0046728
taatttcgtccac

SEQ ID NO: 189951 - DNA, 13 bp, Artificial Sequence
  Oligonucleotide for detection of SNP TSC0046728
tagttttgtttay

SEQ ID NO: 189952 - DNA, 13 bp, Artificial Sequence
  Oligonucleotide for detection of SNP TSC0046728
rtaaacaaaacta

SEQ ID NO: 189953 - DNA, 13 bp, Artificial Sequence
  Oligonucleotide for detection of SNP TSC0046728
tagtttcgtttay

SEQ ID NO: 189954 - DNA, 13 bp, Artificial Sequence
  Oligonucleotide for detection of SNP TSC0046728
rtaaacgaaacta

SEQ ID NO: 189955 - DNA, 13 bp, Artificial Sequence
  Oligonucleotide for detection of SNP TSC0046729
tgtataggttgta

SEQ ID NO: 189956 - DNA, 13 bp, Artificial Sequence
  Oligonucleotide for detection of SNP TSC0046729
tacaacctataca

SEQ ID NO: 189957 - DNA, 13 bp, Artificial Sequence
  Oligonucleotide for detection of SNP TSC0046729
tgtataagttgta

SEQ ID NO: 189958 - DNA, 13 bp, Artificial Sequence
  Oligonucleotide for detection of SNP TSC0046729
tacaacttataca

SEQ ID NO: 189959 - DNA, 13 bp, Artificial Sequence
  Oligonucleotide for detection of SNP TSC0046730
tagtttatattty

SEQ ID NO: 189960 - DNA, 13 bp, Artificial Sequence
  Oligonucleotide for detection of SNP TSC0046730
raaatataaacta

SEQ ID NO: 189961 - DNA, 13 bp, Artificial Sequence
  Oligonucleotide for detection of SNP TSC0046730
tagtttttattty

SEQ ID NO: 189962 - DNA, 13 bp, Artificial Sequence
  Oligonucleotide for detection of SNP TSC0046730
raaataaaaacta

SEQ ID NO: 189963 - DNA, 13 bp, Artificial Sequence
  Oligonucleotide for detection of SNP TSC0046730
ggaatataaattg

SEQ ID NO: 189964 - DNA, 13 bp, Artificial Sequence
  Oligonucleotide for detection of SNP TSC0046730
caatttatattcc

SEQ ID NO: 189965 - DNA, 13 bp, Artificial Sequence
  Oligonucleotide for detection of SNP TSC0046730
ggaataaaaattg

SEQ ID NO: 189966 - DNA, 13 bp, Artificial Sequence
  Oligonucleotide for detection of SNP TSC0046730
caatttttattcc

SEQ ID NO: 189967 - DNA, 13 bp, Artificial Sequence
  Oligonucleotide for detection of SNP TSC0046731
tttgttggggttt

SEQ ID NO: 189968 - DNA, 13 bp, Artificial Sequence
  Oligonucleotide for detection of SNP TSC0046731
aaaccccaacaaa

SEQ ID NO: 189969 - DNA, 13 bp, Artificial Sequence
  Oligonucleotide for detection of SNP TSC0046731
tttgtcggggttt

SEQ ID NO: 189970 - DNA, 13 bp, Artificial Sequence
  Oligonucleotide for detection of SNP TSC0046731
aaaccccgacaaa

SEQ ID NO: 189971 - DNA, 13 bp, Artificial Sequence
  Oligonucleotide for detection of SNP TSC0046731
aaatttaggtaga

SEQ ID NO: 189972 - DNA, 13 bp, Artificial Sequence
  Oligonucleotide for detection of SNP TSC0046731
tctacctaaattt

SEQ ID NO: 189973 - DNA, 13 bp, Artificial Sequence
  Oligonucleotide for detection of SNP TSC0046731
aaattttggtaga

SEQ ID NO: 189974 - DNA, 13 bp, Artificial Sequence
  Oligonucleotide for detection of SNP TSC0046731
tctaccaaaattt

SEQ ID NO: 189975 - DNA, 13 bp, Artificial Sequence
  Oligonucleotide for detection of SNP TSC0046731
aaatttcggtaga

SEQ ID NO: 189976 - DNA, 13 bp, Artificial Sequence
  Oligonucleotide for detection of SNP TSC0046731
tctaccgaaattt

SEQ ID NO: 189977 - DNA, 13 bp, Artificial Sequence
  Oligonucleotide for detection of SNP TSC0046732
ttgaggtgatggt

SEQ ID NO: 189978 - DNA, 13 bp, Artificial Sequence
  Oligonucleotide for detection of SNP TSC0046732
accatcacctcaa

SEQ ID NO: 189979 - DNA, 13 bp, Artificial Sequence
  Oligonucleotide for detection of SNP TSC0046732
ttgaggggatggt

SEQ ID NO: 189980 - DNA, 13 bp, Artificial Sequence
  Oligonucleotide for detection of SNP TSC0046732
accatcccctcaa

SEQ ID NO: 189981 - DNA, 13 bp, Artificial Sequence
  Oligonucleotide for detection of SNP TSC0046732
attatttttttag

SEQ ID NO: 189982 - DNA, 13 bp, Artificial Sequence
  Oligonucleotide for detection of SNP TSC0046732
ctaaaaaaataat

SEQ ID NO: 189983 - DNA, 13 bp, Artificial Sequence
  Oligonucleotide for detection of SNP TSC0046733
aaaaaagtaataa

SEQ ID NO: 189984 - DNA, 13 bp, Artificial Sequence
  Oligonucleotide for detection of SNP TSC0046733
ttattactttttt

SEQ ID NO: 189985 - DNA, 13 bp, Artificial Sequence
  Oligonucleotide for detection of SNP TSC0046735
tattgattttata

SEQ ID NO: 189986 - DNA, 13 bp, Artificial Sequence
  Oligonucleotide for detection of SNP TSC0046735
tataaaatcaata

SEQ ID NO: 189987 - DNA, 13 bp, Artificial Sequence
  Oligonucleotide for detection of SNP TSC0046735
tattgagtttata

SEQ ID NO: 189988 - DNA, 13 bp, Artificial Sequence
  Oligonucleotide for detection of SNP TSC0046735
tataaactcaata

SEQ ID NO: 189989 - DNA, 13 bp, Artificial Sequence
  Oligonucleotide for detection of SNP TSC0046735
tataagattaatg

SEQ ID NO: 189990 - DNA, 13 bp, Artificial Sequence
  Oligonucleotide for detection of SNP TSC0046735
cattaatcttata

SEQ ID NO: 189991 - DNA, 13 bp, Artificial Sequence
  Oligonucleotide for detection of SNP TSC0046735
tataagtttaatg

SEQ ID NO: 189992 - DNA, 13 bp, Artificial Sequence
  Oligonucleotide for detection of SNP TSC0046735
cattaaacttata

SEQ ID NO: 189993 - DNA, 13 bp, Artificial Sequence
  Oligonucleotide for detection of SNP TSC0046736
tatataaggagta

SEQ ID NO: 189994 - DNA, 13 bp, Artificial Sequence
  Oligonucleotide for detection of SNP TSC0046736
tactccttatata

SEQ ID NO: 189995 - DNA, 13 bp, Artificial Sequence
  Oligonucleotide for detection of SNP TSC0046736
tatatagggagta

SEQ ID NO: 189996 - DNA, 13 bp, Artificial Sequence
  Oligonucleotide for detection of SNP TSC0046736
tactccctatata

SEQ ID NO: 189997 - DNA, 13 bp, Artificial Sequence
  Oligonucleotide for detection of SNP TSC0008953
attatgtggttaa

SEQ ID NO: 189998 - DNA, 13 bp, Artificial Sequence
  Oligonucleotide for detection of SNP TSC0008953
ttaaccacataat

SEQ ID NO: 189999 - DNA, 13 bp, Artificial Sequence
  Oligonucleotide for detection of SNP TSC0008953
attatgcggttaa

SEQ ID NO: 190000 - DNA, 13 bp, Artificial Sequence
  Oligonucleotide for detection of SNP TSC0008953
ttaaccgcataat

SEQ ID NO: 190001 - DNA, 13 bp, Artificial Sequence
  Oligonucleotide for detection of SNP TSC0008953
ttaattgtataat

SEQ ID NO: 190002 - DNA, 13 bp, Artificial Sequence
  Oligonucleotide for detection of SNP TSC0008953
attatacaattaa

SEQ ID NO: 190003 - DNA, 13 bp, Artificial Sequence
  Oligonucleotide for detection of SNP TSC0008953
ttaatcgtataat

SEQ ID NO: 190004 - DNA, 13 bp, Artificial Sequence
  Oligonucleotide for detection of SNP TSC0008953
attatacgattaa

SEQ ID NO: 190005 - DNA, 13 bp, Artificial Sequence
  Oligonucleotide for detection of SNP TSC0008954
tgaaatattattt

SEQ ID NO: 190006 - DNA, 13 bp, Artificial Sequence
  Oligonucleotide for detection of SNP TSC0008954
aaataatatttca

SEQ ID NO: 190007 - DNA, 13 bp, Artificial Sequence
  Oligonucleotide for detection of SNP TSC0008954
tgaaatgttattt

SEQ ID NO: 190008 - DNA, 13 bp, Artificial Sequence
  Oligonucleotide for detection of SNP TSC0008954
aaataacatttca

SEQ ID NO: 190009 - DNA, 13 bp, Artificial Sequence
  Oligonucleotide for detection of SNP TSC0046739
tatagagatttat

SEQ ID NO: 190010 - DNA, 13 bp, Artificial Sequence
  Oligonucleotide for detection of SNP TSC0046739
ataaatctctata

SEQ ID NO: 190011 - DNA, 13 bp, Artificial Sequence
  Oligonucleotide for detection of SNP TSC0046739
tatagaaatttat

SEQ ID NO: 190012 - DNA, 13 bp, Artificial Sequence
  Oligonucleotide for detection of SNP TSC0046739
ataaatttctata

SEQ ID NO: 190013 - DNA, 13 bp, Artificial Sequence
  Oligonucleotide for detection of SNP TSC0046740
aaaatttaagtta

SEQ ID NO: 190014 - DNA, 13 bp, Artificial Sequence
  Oligonucleotide for detection of SNP TSC0046740
taacttaaatttt

SEQ ID NO: 190015 - DNA, 13 bp, Artificial Sequence
  Oligonucleotide for detection of SNP TSC0046740
aaaattgaagtta

SEQ ID NO: 190016 - DNA, 13 bp, Artificial Sequence
  Oligonucleotide for detection of SNP TSC0046740
taacttcaatttt

SEQ ID NO: 190017 - DNA, 13 bp, Artificial Sequence
  Oligonucleotide for detection of SNP TSC0046740
tggtttgaatttt

SEQ ID NO: 190018 - DNA, 13 bp, Artificial Sequence
  Oligonucleotide for detection of SNP TSC0046740
aaaattcaaacca

SEQ ID NO: 190019 - DNA, 13 bp, Artificial Sequence
  Oligonucleotide for detection of SNP TSC0046740
tggttttaatttt

SEQ ID NO: 190020 - DNA, 13 bp, Artificial Sequence
  Oligonucleotide for detection of SNP TSC0046740
aaaattaaaacca

SEQ ID NO: 190021 - DNA, 13 bp, Artificial Sequence
  Oligonucleotide for detection of SNP TSC0046741
aggtagggtttag

SEQ ID NO: 190022 - DNA, 13 bp, Artificial Sequence
  Oligonucleotide for detection of SNP TSC0046741
ctaaaccctacct

SEQ ID NO: 190023 - DNA, 13 bp, Artificial Sequence
  Oligonucleotide for detection of SNP TSC0046741
aggtagagtttag

SEQ ID NO: 190024 - DNA, 13 bp, Artificial Sequence
  Oligonucleotide for detection of SNP TSC0046741
ctaaactctacct

SEQ ID NO: 190025 - DNA, 13 bp, Artificial Sequence
  Oligonucleotide for detection of SNP TSC0046742
tatattataaatt

SEQ ID NO: 190026 - DNA, 13 bp, Artificial Sequence
  Oligonucleotide for detection of SNP TSC0046742
aatttataatata

SEQ ID NO: 190027 - DNA, 13 bp, Artificial Sequence
  Oligonucleotide for detection of SNP TSC0046742
tatattttaaatt

SEQ ID NO: 190028 - DNA, 13 bp, Artificial Sequence
  Oligonucleotide for detection of SNP TSC0046742
aatttaaaatata

SEQ ID NO: 190029 - DNA, 13 bp, Artificial Sequence
  Oligonucleotide for detection of SNP TSC0046742
agtttataatata

SEQ ID NO: 190030 - DNA, 13 bp, Artificial Sequence
  Oligonucleotide for detection of SNP TSC0046742
tatattataaact

SEQ ID NO: 190031 - DNA, 13 bp, Artificial Sequence
  Oligonucleotide for detection of SNP TSC0046742
agtttagaatata

SEQ ID NO: 190032 - DNA, 13 bp, Artificial Sequence
  Oligonucleotide for detection of SNP TSC0046742
tatattctaaact

SEQ ID NO: 190033 - DNA, 13 bp, Artificial Sequence
  Oligonucleotide for detection of SNP TSC0046743
taaagagaggtgy

SEQ ID NO: 190034 - DNA, 13 bp, Artificial Sequence
  Oligonucleotide for detection of SNP TSC0046743
rcacctctcttta

SEQ ID NO: 190035 - DNA, 13 bp, Artificial Sequence
  Oligonucleotide for detection of SNP TSC0046743
taaagaaaggtgy

SEQ ID NO: 190036 - DNA, 13 bp, Artificial Sequence
  Oligonucleotide for detection of SNP TSC0046743
rcacctttcttta

SEQ ID NO: 190037 - DNA, 13 bp, Artificial Sequence
  Oligonucleotide for detection of SNP TSC0046744
tattgtaggaaat

SEQ ID NO: 190038 - DNA, 13 bp, Artificial Sequence
  Oligonucleotide for detection of SNP TSC0046744
atttcctacaata

SEQ ID NO: 190039 - DNA, 13 bp, Artificial Sequence
  Oligonucleotide for detection of SNP TSC0046744
tattgtgggaaat

SEQ ID NO: 190040 - DNA, 13 bp, Artificial Sequence
  Oligonucleotide for detection of SNP TSC0046744
atttcccacaata

SEQ ID NO: 190041 - DNA, 13 bp, Artificial Sequence
  Oligonucleotide for detection of SNP TSC0046746
gtttgtagtattt

SEQ ID NO: 190042 - DNA, 13 bp, Artificial Sequence
  Oligonucleotide for detection of SNP TSC0046746
aaatactacaaac

SEQ ID NO: 190043 - DNA, 13 bp, Artificial Sequence
  Oligonucleotide for detection of SNP TSC0046746
gtttgttgtattt

SEQ ID NO: 190044 - DNA, 13 bp, Artificial Sequence
  Oligonucleotide for detection of SNP TSC0046746
aaatacaacaaac

SEQ ID NO: 190045 - DNA, 13 bp, Artificial Sequence
  Oligonucleotide for detection of SNP TSC0046746
aggtgttgtaaay

SEQ ID NO: 190046 - DNA, 13 bp, Artificial Sequence
  Oligonucleotide for detection of SNP TSC0046746
rtttacaacacct

SEQ ID NO: 190047 - DNA, 13 bp, Artificial Sequence
  Oligonucleotide for detection of SNP TSC0046746
aggtgtagtaaay

SEQ ID NO: 190048 - DNA, 13 bp, Artificial Sequence
  Oligonucleotide for detection of SNP TSC0046746
rtttactacacct

SEQ ID NO: 190049 - DNA, 13 bp, Artificial Sequence
  Oligonucleotide for detection of SNP TSC0009718
ttaaaagtatttg

SEQ ID NO: 190050 - DNA, 13 bp, Artificial Sequence
  Oligonucleotide for detection of SNP TSC0009718
caaatacttttaa

SEQ ID NO: 190051 - DNA, 13 bp, Artificial Sequence
  Oligonucleotide for detection of SNP TSC0009718
ttaaaaatatttg

SEQ ID NO: 190052 - DNA, 13 bp, Artificial Sequence
  Oligonucleotide for detection of SNP TSC0009718
caaatatttttaa

SEQ ID NO: 190053 - DNA, 13 bp, Artificial Sequence
  Oligonucleotide for detection of SNP TSC0046747
agataggtaataa

SEQ ID NO: 190054 - DNA, 13 bp, Artificial Sequence
  Oligonucleotide for detection of SNP TSC0046747
ttattacctatct

SEQ ID NO: 190055 - DNA, 13 bp, Artificial Sequence
  Oligonucleotide for detection of SNP TSC0046747
agatagataataa

SEQ ID NO: 190056 - DNA, 13 bp, Artificial Sequence
  Oligonucleotide for detection of SNP TSC0046747
ttattatctatct

SEQ ID NO: 190057 - DNA, 13 bp, Artificial Sequence
  Oligonucleotide for detection of SNP TSC0046748
gaatatgtgaaay

SEQ ID NO: 190058 - DNA, 13 bp, Artificial Sequence
  Oligonucleotide for detection of SNP TSC0046748
rtttcacatattc

SEQ ID NO: 190059 - DNA, 13 bp, Artificial Sequence
  Oligonucleotide for detection of SNP TSC0046748
gaatatatgaaay

SEQ ID NO: 190060 - DNA, 13 bp, Artificial Sequence
  Oligonucleotide for detection of SNP TSC0046748
rtttcatatattc

SEQ ID NO: 190061 - DNA, 13 bp, Artificial Sequence
  Oligonucleotide for detection of SNP TSC0046748
gaatacgtgaaay

SEQ ID NO: 190062 - DNA, 13 bp, Artificial Sequence
  Oligonucleotide for detection of SNP TSC0046748
rtttcacgtattc

SEQ ID NO: 190063 - DNA, 13 bp, Artificial Sequence
  Oligonucleotide for detection of SNP TSC0046750
tttttaaagaagg

SEQ ID NO: 190064 - DNA, 13 bp, Artificial Sequence
  Oligonucleotide for detection of SNP TSC0046750
ccttctttaaaaa

SEQ ID NO: 190065 - DNA, 13 bp, Artificial Sequence
  Oligonucleotide for detection of SNP TSC0046750
tttttagagaagg

SEQ ID NO: 190066 - DNA, 13 bp, Artificial Sequence
  Oligonucleotide for detection of SNP TSC0046750
ccttctctaaaaa

SEQ ID NO: 190067 - DNA, 13 bp, Artificial Sequence
  Oligonucleotide for detection of SNP TSC0046752
aggaaaataaaat

SEQ ID NO: 190068 - DNA, 13 bp, Artificial Sequence
  Oligonucleotide for detection of SNP TSC0046752
attttattttcct

SEQ ID NO: 190069 - DNA, 13 bp, Artificial Sequence
  Oligonucleotide for detection of SNP TSC0046752
aggaaattaaaat

SEQ ID NO: 190070 - DNA, 13 bp, Artificial Sequence
  Oligonucleotide for detection of SNP TSC0046752
attttaatttcct

SEQ ID NO: 190071 - DNA, 13 bp, Artificial Sequence
  Oligonucleotide for detection of SNP TSC0046753
ttttttgtaaaay

SEQ ID NO: 190072 - DNA, 13 bp, Artificial Sequence
  Oligonucleotide for detection of SNP TSC0046753
rttttacaaaaaa

SEQ ID NO: 190073 - DNA, 13 bp, Artificial Sequence
  Oligonucleotide for detection of SNP TSC0046754
gtttttgtagttt

SEQ ID NO: 190074 - DNA, 13 bp, Artificial Sequence
  Oligonucleotide for detection of SNP TSC0046754
aaactacaaaaac

SEQ ID NO: 190075 - DNA, 13 bp, Artificial Sequence
  Oligonucleotide for detection of SNP TSC0046754
gtttttatagttt

SEQ ID NO: 190076 - DNA, 13 bp, Artificial Sequence
  Oligonucleotide for detection of SNP TSC0046754
aaactataaaaac

SEQ ID NO: 190077 - DNA, 13 bp, Artificial Sequence
  Oligonucleotide for detection of SNP TSC0046757
tattagtgattgy

SEQ ID NO: 190078 - DNA, 13 bp, Artificial Sequence
  Oligonucleotide for detection of SNP TSC0046757
rcaatcactaata

SEQ ID NO: 190079 - DNA, 13 bp, Artificial Sequence
  Oligonucleotide for detection of SNP TSC0046757
tattagggattgy

SEQ ID NO: 190080 - DNA, 13 bp, Artificial Sequence
  Oligonucleotide for detection of SNP TSC0046757
rcaatccctaata

SEQ ID NO: 190081 - DNA, 13 bp, Artificial Sequence
  Oligonucleotide for detection of SNP TSC0046757
gtaattattgatg

SEQ ID NO: 190082 - DNA, 13 bp, Artificial Sequence
  Oligonucleotide for detection of SNP TSC0046757
catcaataattac

SEQ ID NO: 190083 - DNA, 13 bp, Artificial Sequence
  Oligonucleotide for detection of SNP TSC0046757
gtaatttttgatg

SEQ ID NO: 190084 - DNA, 13 bp, Artificial Sequence
  Oligonucleotide for detection of SNP TSC0046757
catcaaaaattac

SEQ ID NO: 190085 - DNA, 13 bp, Artificial Sequence
  Oligonucleotide for detection of SNP TSC0046758
gttatataaattt

SEQ ID NO: 190086 - DNA, 13 bp, Artificial Sequence
  Oligonucleotide for detection of SNP TSC0046758
aaatttatataac

SEQ ID NO: 190087 - DNA, 13 bp, Artificial Sequence
  Oligonucleotide for detection of SNP TSC0046758
gttatagaaattt

SEQ ID NO: 190088 - DNA, 13 bp, Artificial Sequence
  Oligonucleotide for detection of SNP TSC0046758
aaatttctataac

SEQ ID NO: 190089 - DNA, 13 bp, Artificial Sequence
  Oligonucleotide for detection of SNP TSC0046758
aagtttatatgay

SEQ ID NO: 190090 - DNA, 13 bp, Artificial Sequence
  Oligonucleotide for detection of SNP TSC0046758
rtcatataaactt

SEQ ID NO: 190091 - DNA, 13 bp, Artificial Sequence
  Oligonucleotide for detection of SNP TSC0046758
aagtttttatgay

SEQ ID NO: 190092 - DNA, 13 bp, Artificial Sequence
  Oligonucleotide for detection of SNP TSC0046758
rtcataaaaactt

SEQ ID NO: 190093 - DNA, 13 bp, Artificial Sequence
  Oligonucleotide for detection of SNP TSC0046759
gagagtatatgta

SEQ ID NO: 190094 - DNA, 13 bp, Artificial Sequence
  Oligonucleotide for detection of SNP TSC0046759
tacatatactctc

SEQ ID NO: 190095 - DNA, 13 bp, Artificial Sequence
  Oligonucleotide for detection of SNP TSC0046759
gagagtgtatgta

SEQ ID NO: 190096 - DNA, 13 bp, Artificial Sequence
  Oligonucleotide for detection of SNP TSC0046759
tacatacactctc

SEQ ID NO: 190097 - DNA, 13 bp, Artificial Sequence
  Oligonucleotide for detection of SNP TSC0046760
gagatggttgttg

SEQ ID NO: 190098 - DNA, 13 bp, Artificial Sequence
  Oligonucleotide for detection of SNP TSC0046760
caacaaccatctc

SEQ ID NO: 190099 - DNA, 13 bp, Artificial Sequence
  Oligonucleotide for detection of SNP TSC0046760
gagatgattgttg

SEQ ID NO: 190100 - DNA, 13 bp, Artificial Sequence
  Oligonucleotide for detection of SNP TSC0046760
caacaatcatctc

SEQ ID NO: 190101 - DNA, 13 bp, Artificial Sequence
  Oligonucleotide for detection of SNP TSC0046760
gagatggtcgttg

SEQ ID NO: 190102 - DNA, 13 bp, Artificial Sequence
  Oligonucleotide for detection of SNP TSC0046760
caacgaccatctc

SEQ ID NO: 190103 - DNA, 13 bp, Artificial Sequence
  Oligonucleotide for detection of SNP TSC0046760
gagatgatcgttg

SEQ ID NO: 190104 - DNA, 13 bp, Artificial Sequence
  Oligonucleotide for detection of SNP TSC0046760
caacgatcatctc

SEQ ID NO: 190105 - DNA, 13 bp, Artificial Sequence
  Oligonucleotide for detection of SNP TSC0046761
gggaatagtagat

SEQ ID NO: 190106 - DNA, 13 bp, Artificial Sequence
  Oligonucleotide for detection of SNP TSC0046761
atctactattccc

SEQ ID NO: 190107 - DNA, 13 bp, Artificial Sequence
  Oligonucleotide for detection of SNP TSC0046761
gggaatggtagat

SEQ ID NO: 190108 - DNA, 13 bp, Artificial Sequence
  Oligonucleotide for detection of SNP TSC0046761
atctaccattccc

SEQ ID NO: 190109 - DNA, 13 bp, Artificial Sequence
  Oligonucleotide for detection of SNP TSC0046761
gggaacggtagat

SEQ ID NO: 190110 - DNA, 13 bp, Artificial Sequence
  Oligonucleotide for detection of SNP TSC0046761
atctaccgttccc

SEQ ID NO: 190111 - DNA, 13 bp, Artificial Sequence
  Oligonucleotide for detection of SNP TSC0046762
tttttttatagty

SEQ ID NO: 190112 - DNA, 13 bp, Artificial Sequence
  Oligonucleotide for detection of SNP TSC0046762
ractataaaaaaa

SEQ ID NO: 190113 - DNA, 13 bp, Artificial Sequence
  Oligonucleotide for detection of SNP TSC0046762
gattgttaaggaa

SEQ ID NO: 190114 - DNA, 13 bp, Artificial Sequence
  Oligonucleotide for detection of SNP TSC0046762
ttccttaacaatc

SEQ ID NO: 190115 - DNA, 13 bp, Artificial Sequence
  Oligonucleotide for detection of SNP TSC0046762
gattgtaaaggaa

SEQ ID NO: 190116 - DNA, 13 bp, Artificial Sequence
  Oligonucleotide for detection of SNP TSC0046762
ttcctttacaatc

SEQ ID NO: 190117 - DNA, 13 bp, Artificial Sequence
  Oligonucleotide for detection of SNP TSC0046763
ttatttaaaagaa

SEQ ID NO: 190118 - DNA, 13 bp, Artificial Sequence
  Oligonucleotide for detection of SNP TSC0046763
ttcttttaaataa

SEQ ID NO: 190119 - DNA, 13 bp, Artificial Sequence
  Oligonucleotide for detection of SNP TSC0046763
ttatttgaaagaa

SEQ ID NO: 190120 - DNA, 13 bp, Artificial Sequence
  Oligonucleotide for detection of SNP TSC0046763
ttctttcaaataa

SEQ ID NO: 190121 - DNA, 13 bp, Artificial Sequence
  Oligonucleotide for detection of SNP TSC0046763
ttattcgaaagaa

SEQ ID NO: 190122 - DNA, 13 bp, Artificial Sequence
  Oligonucleotide for detection of SNP TSC0046763
ttctttcgaataa

SEQ ID NO: 190123 - DNA, 13 bp, Artificial Sequence
  Oligonucleotide for detection of SNP TSC0046763
tttttttgggtaa

SEQ ID NO: 190124 - DNA, 13 bp, Artificial Sequence
  Oligonucleotide for detection of SNP TSC0046763
ttacccaaaaaaa

SEQ ID NO: 190125 - DNA, 13 bp, Artificial Sequence
  Oligonucleotide for detection of SNP TSC0046763
ttttttcgggtaa

SEQ ID NO: 190126 - DNA, 13 bp, Artificial Sequence
  Oligonucleotide for detection of SNP TSC0046763
ttacccgaaaaaa

SEQ ID NO: 190127 - DNA, 13 bp, Artificial Sequence
  Oligonucleotide for detection of SNP TSC0046765
atgttttggttat

SEQ ID NO: 190128 - DNA, 13 bp, Artificial Sequence
  Oligonucleotide for detection of SNP TSC0046765
ataaccaaaacat

SEQ ID NO: 190129 - DNA, 13 bp, Artificial Sequence
  Oligonucleotide for detection of SNP TSC0046765
atgtttcggttat

SEQ ID NO: 190130 - DNA, 13 bp, Artificial Sequence
  Oligonucleotide for detection of SNP TSC0046765
ataaccgaaacat

SEQ ID NO: 190131 - DNA, 13 bp, Artificial Sequence
  Oligonucleotide for detection of SNP TSC0046765
atggttgaggtat

SEQ ID NO: 190132 - DNA, 13 bp, Artificial Sequence
  Oligonucleotide for detection of SNP TSC0046765
atacctcaaccat

SEQ ID NO: 190133 - DNA, 13 bp, Artificial Sequence
  Oligonucleotide for detection of SNP TSC0046765
atggttaaggtat

SEQ ID NO: 190134 - DNA, 13 bp, Artificial Sequence
  Oligonucleotide for detection of SNP TSC0046765
ataccttaaccat

SEQ ID NO: 190135 - DNA, 13 bp, Artificial Sequence
  Oligonucleotide for detection of SNP TSC0046765
atggtcgaggtat

SEQ ID NO: 190136 - DNA, 13 bp, Artificial Sequence
  Oligonucleotide for detection of SNP TSC0046765
atacctcgaccat

SEQ ID NO: 190137 - DNA, 13 bp, Artificial Sequence
  Oligonucleotide for detection of SNP TSC0046770
tttgattagattt

SEQ ID NO: 190138 - DNA, 13 bp, Artificial Sequence
  Oligonucleotide for detection of SNP TSC0046770
aaatctaatcaaa

SEQ ID NO: 190139 - DNA, 13 bp, Artificial Sequence
  Oligonucleotide for detection of SNP TSC0046770
tttgatgagattt

SEQ ID NO: 190140 - DNA, 13 bp, Artificial Sequence
  Oligonucleotide for detection of SNP TSC0046770
aaatctcatcaaa

SEQ ID NO: 190141 - DNA, 13 bp, Artificial Sequence
  Oligonucleotide for detection of SNP TSC0046770
aagtttgattaaa

SEQ ID NO: 190142 - DNA, 13 bp, Artificial Sequence
  Oligonucleotide for detection of SNP TSC0046770
tttaatcaaactt

SEQ ID NO: 190143 - DNA, 13 bp, Artificial Sequence
  Oligonucleotide for detection of SNP TSC0046770
aagttttattaaa

SEQ ID NO: 190144 - DNA, 13 bp, Artificial Sequence
  Oligonucleotide for detection of SNP TSC0046770
tttaataaaactt

SEQ ID NO: 190145 - DNA, 13 bp, Artificial Sequence
  Oligonucleotide for detection of SNP TSC0046771
gggggaatttgtt

SEQ ID NO: 190146 - DNA, 13 bp, Artificial Sequence
  Oligonucleotide for detection of SNP TSC0046771
aacaaattccccc

SEQ ID NO: 190147 - DNA, 13 bp, Artificial Sequence
  Oligonucleotide for detection of SNP TSC0046771
gggggagtttgtt

SEQ ID NO: 190148 - DNA, 13 bp, Artificial Sequence
  Oligonucleotide for detection of SNP TSC0046771
aacaaactccccc

SEQ ID NO: 190149 - DNA, 13 bp, Artificial Sequence
  Oligonucleotide for detection of SNP TSC0046772
gttaaatgtagtg

SEQ ID NO: 190150 - DNA, 13 bp, Artificial Sequence
  Oligonucleotide for detection of SNP TSC0046772
cactacatttaac

SEQ ID NO: 190151 - DNA, 13 bp, Artificial Sequence
  Oligonucleotide for detection of SNP TSC0046772
gttaaacgtagtg

SEQ ID NO: 190152 - DNA, 13 bp, Artificial Sequence
  Oligonucleotide for detection of SNP TSC0046772
cactacgtttaac

SEQ ID NO: 190153 - DNA, 13 bp, Artificial Sequence
  Oligonucleotide for detection of SNP TSC0046772
tattatgtttaay

SEQ ID NO: 190154 - DNA, 13 bp, Artificial Sequence
  Oligonucleotide for detection of SNP TSC0046772
rttaaacataata

SEQ ID NO: 190155 - DNA, 13 bp, Artificial Sequence
  Oligonucleotide for detection of SNP TSC0046772
tattatatttaay

SEQ ID NO: 190156 - DNA, 13 bp, Artificial Sequence
  Oligonucleotide for detection of SNP TSC0046772
rttaaatataata

SEQ ID NO: 190157 - DNA, 13 bp, Artificial Sequence
  Oligonucleotide for detection of SNP TSC0046772
tattacgtttaay

SEQ ID NO: 190158 - DNA, 13 bp, Artificial Sequence
  Oligonucleotide for detection of SNP TSC0046772
rttaaacgtaata

SEQ ID NO: 190159 - DNA, 13 bp, Artificial Sequence
  Oligonucleotide for detection of SNP TSC0046773
ttgttttgtaaty

SEQ ID NO: 190160 - DNA, 13 bp, Artificial Sequence
  Oligonucleotide for detection of SNP TSC0046773
rattacaaaacaa

SEQ ID NO: 190161 - DNA, 13 bp, Artificial Sequence
  Oligonucleotide for detection of SNP TSC0046773
ttgtttggtaaty

SEQ ID NO: 190162 - DNA, 13 bp, Artificial Sequence
  Oligonucleotide for detection of SNP TSC0046773
rattaccaaacaa

SEQ ID NO: 190163 - DNA, 13 bp, Artificial Sequence
  Oligonucleotide for detection of SNP TSC0046773
ttgtttcgtaaty

SEQ ID NO: 190164 - DNA, 13 bp, Artificial Sequence
  Oligonucleotide for detection of SNP TSC0046773
rattacgaaacaa

SEQ ID NO: 190165 - DNA, 13 bp, Artificial Sequence
  Oligonucleotide for detection of SNP TSC0046773
ttgttcggtaaty

SEQ ID NO: 190166 - DNA, 13 bp, Artificial Sequence
  Oligonucleotide for detection of SNP TSC0046773
rattaccgaacaa

SEQ ID NO: 190167 - DNA, 13 bp, Artificial Sequence
  Oligonucleotide for detection of SNP TSC0046773
gattatggggtaa

SEQ ID NO: 190168 - DNA, 13 bp, Artificial Sequence
  Oligonucleotide for detection of SNP TSC0046773
ttaccccataatc

SEQ ID NO: 190169 - DNA, 13 bp, Artificial Sequence
  Oligonucleotide for detection of SNP TSC0046773
gattattgggtaa

SEQ ID NO: 190170 - DNA, 13 bp, Artificial Sequence
  Oligonucleotide for detection of SNP TSC0046773
ttacccaataatc

SEQ ID NO: 190171 - DNA, 13 bp, Artificial Sequence
  Oligonucleotide for detection of SNP TSC0046773
gattacggggtaa

SEQ ID NO: 190172 - DNA, 13 bp, Artificial Sequence
  Oligonucleotide for detection of SNP TSC0046773
ttaccccgtaatc

SEQ ID NO: 190173 - DNA, 13 bp, Artificial Sequence
  Oligonucleotide for detection of SNP TSC0046773
gattatcgggtaa

SEQ ID NO: 190174 - DNA, 13 bp, Artificial Sequence
  Oligonucleotide for detection of SNP TSC0046773
ttacccgataatc

SEQ ID NO: 190175 - DNA, 13 bp, Artificial Sequence
  Oligonucleotide for detection of SNP TSC0046774
gttttaatgaatt

SEQ ID NO: 190176 - DNA, 13 bp, Artificial Sequence
  Oligonucleotide for detection of SNP TSC0046774
aattcattaaaac

SEQ ID NO: 190177 - DNA, 13 bp, Artificial Sequence
  Oligonucleotide for detection of SNP TSC0046774
gttttagtgaatt

SEQ ID NO: 190178 - DNA, 13 bp, Artificial Sequence
  Oligonucleotide for detection of SNP TSC0046774
aattcactaaaac

SEQ ID NO: 190179 - DNA, 13 bp, Artificial Sequence
  Oligonucleotide for detection of SNP TSC0010551
atattaagagagt

SEQ ID NO: 190180 - DNA, 13 bp, Artificial Sequence
  Oligonucleotide for detection of SNP TSC0010551
actctcttaatat

SEQ ID NO: 190181 - DNA, 13 bp, Artificial Sequence
  Oligonucleotide for detection of SNP TSC0010551
atattaggagagt

SEQ ID NO: 190182 - DNA, 13 bp, Artificial Sequence
  Oligonucleotide for detection of SNP TSC0010551
actctcctaatat

SEQ ID NO: 190183 - DNA, 13 bp, Artificial Sequence
  Oligonucleotide for detection of SNP TSC0010552
tagataaaagtay

SEQ ID NO: 190184 - DNA, 13 bp, Artificial Sequence
  Oligonucleotide for detection of SNP TSC0010552
rtacttttatcta

SEQ ID NO: 190185 - DNA, 13 bp, Artificial Sequence
  Oligonucleotide for detection of SNP TSC0010552
tagatataagtay

SEQ ID NO: 190186 - DNA, 13 bp, Artificial Sequence
  Oligonucleotide for detection of SNP TSC0010552
rtacttatatcta

SEQ ID NO: 190187 - DNA, 13 bp, Artificial Sequence
  Oligonucleotide for detection of SNP TSC0046777
taggttaattgaa

SEQ ID NO: 190188 - DNA, 13 bp, Artificial Sequence
  Oligonucleotide for detection of SNP TSC0046777
ttcaattaaccta

SEQ ID NO: 190189 - DNA, 13 bp, Artificial Sequence
  Oligonucleotide for detection of SNP TSC0046777
taggtttattgaa

SEQ ID NO: 190190 - DNA, 13 bp, Artificial Sequence
  Oligonucleotide for detection of SNP TSC0046777
ttcaataaaccta

SEQ ID NO: 190191 - DNA, 13 bp, Artificial Sequence
  Oligonucleotide for detection of SNP TSC0046777
tttagttagtttg

SEQ ID NO: 190192 - DNA, 13 bp, Artificial Sequence
  Oligonucleotide for detection of SNP TSC0046777
caaactaactaaa

SEQ ID NO: 190193 - DNA, 13 bp, Artificial Sequence
  Oligonucleotide for detection of SNP TSC0046777
tttagtaagtttg

SEQ ID NO: 190194 - DNA, 13 bp, Artificial Sequence
  Oligonucleotide for detection of SNP TSC0046777
caaacttactaaa

SEQ ID NO: 190195 - DNA, 13 bp, Artificial Sequence
  Oligonucleotide for detection of SNP TSC0046778
atttggttatatt

SEQ ID NO: 190196 - DNA, 13 bp, Artificial Sequence
  Oligonucleotide for detection of SNP TSC0046778
aatataaccaaat

SEQ ID NO: 190197 - DNA, 13 bp, Artificial Sequence
  Oligonucleotide for detection of SNP TSC0046778
atttgggtatatt

SEQ ID NO: 190198 - DNA, 13 bp, Artificial Sequence
  Oligonucleotide for detection of SNP TSC0046778
aatatacccaaat

SEQ ID NO: 190199 - DNA, 13 bp, Artificial Sequence
  Oligonucleotide for detection of SNP TSC0046778
aatatatttagat

SEQ ID NO: 190200 - DNA, 13 bp, Artificial Sequence
  Oligonucleotide for detection of SNP TSC0046778
atctaaatatatt

SEQ ID NO: 190201 - DNA, 13 bp, Artificial Sequence
  Oligonucleotide for detection of SNP TSC0046779
gtgtagtggtgta

SEQ ID NO: 190202 - DNA, 13 bp, Artificial Sequence
  Oligonucleotide for detection of SNP TSC0046779
tacaccactacac

SEQ ID NO: 190203 - DNA, 13 bp, Artificial Sequence
  Oligonucleotide for detection of SNP TSC0046779
gtgtaggggtgta

SEQ ID NO: 190204 - DNA, 13 bp, Artificial Sequence
  Oligonucleotide for detection of SNP TSC0046779
tacacccctacac

SEQ ID NO: 190205 - DNA, 13 bp, Artificial Sequence
  Oligonucleotide for detection of SNP TSC0046779
gtgtagtggcgta

SEQ ID NO: 190206 - DNA, 13 bp, Artificial Sequence
  Oligonucleotide for detection of SNP TSC0046779
tacgccactacac

SEQ ID NO: 190207 - DNA, 13 bp, Artificial Sequence
  Oligonucleotide for detection of SNP TSC0046779
gtgtaggggcgta

SEQ ID NO: 190208 - DNA, 13 bp, Artificial Sequence
  Oligonucleotide for detection of SNP TSC0046779
tacgcccctacac

SEQ ID NO: 190209 - DNA, 13 bp, Artificial Sequence
  Oligonucleotide for detection of SNP TSC0046783
tttaagatatttt

SEQ ID NO: 190210 - DNA, 13 bp, Artificial Sequence
  Oligonucleotide for detection of SNP TSC0046783
aaaatatcttaaa

SEQ ID NO: 190211 - DNA, 13 bp, Artificial Sequence
  Oligonucleotide for detection of SNP TSC0046785
tgtttaaataata

SEQ ID NO: 190212 - DNA, 13 bp, Artificial Sequence
  Oligonucleotide for detection of SNP TSC0046785
tattatttaaaca

SEQ ID NO: 190213 - DNA, 13 bp, Artificial Sequence
  Oligonucleotide for detection of SNP TSC0046785
tgtttatataata

SEQ ID NO: 190214 - DNA, 13 bp, Artificial Sequence
  Oligonucleotide for detection of SNP TSC0046785
tattatataaaca

SEQ ID NO: 190215 - DNA, 13 bp, Artificial Sequence
  Oligonucleotide for detection of SNP TSC0046785
tattgtttagata

SEQ ID NO: 190216 - DNA, 13 bp, Artificial Sequence
  Oligonucleotide for detection of SNP TSC0046785
tatctaaacaata

SEQ ID NO: 190217 - DNA, 13 bp, Artificial Sequence
  Oligonucleotide for detection of SNP TSC0046785
tattgtatagata

SEQ ID NO: 190218 - DNA, 13 bp, Artificial Sequence
  Oligonucleotide for detection of SNP TSC0046785
tatctatacaata

SEQ ID NO: 190219 - DNA, 13 bp, Artificial Sequence
  Oligonucleotide for detection of SNP TSC0046786
ttttggagtaggg

SEQ ID NO: 190220 - DNA, 13 bp, Artificial Sequence
  Oligonucleotide for detection of SNP TSC0046786
ccctactccaaaa

SEQ ID NO: 190221 - DNA, 13 bp, Artificial Sequence
  Oligonucleotide for detection of SNP TSC0046786
ttttggtgtaggg

SEQ ID NO: 190222 - DNA, 13 bp, Artificial Sequence
  Oligonucleotide for detection of SNP TSC0046786
ccctacaccaaaa

SEQ ID NO: 190223 - DNA, 13 bp, Artificial Sequence
  Oligonucleotide for detection of SNP TSC0046786
ttttgttttaggg

SEQ ID NO: 190224 - DNA, 13 bp, Artificial Sequence
  Oligonucleotide for detection of SNP TSC0046786
ccctaaaacaaaa

SEQ ID NO: 190225 - DNA, 13 bp, Artificial Sequence
  Oligonucleotide for detection of SNP TSC0046786
ttttgtattaggg

SEQ ID NO: 190226 - DNA, 13 bp, Artificial Sequence
  Oligonucleotide for detection of SNP TSC0046786
ccctaatacaaaa

SEQ ID NO: 190227 - DNA, 13 bp, Artificial Sequence
  Oligonucleotide for detection of SNP TSC0046787
ttattatgataay

SEQ ID NO: 190228 - DNA, 13 bp, Artificial Sequence
  Oligonucleotide for detection of SNP TSC0046787
rttatcataataa

SEQ ID NO: 190229 - DNA, 13 bp, Artificial Sequence
  Oligonucleotide for detection of SNP TSC0046787
ttattacgataay

SEQ ID NO: 190230 - DNA, 13 bp, Artificial Sequence
  Oligonucleotide for detection of SNP TSC0046787
rttatcgtaataa

SEQ ID NO: 190231 - DNA, 13 bp, Artificial Sequence
  Oligonucleotide for detection of SNP TSC0046787
gttattgtagtaa

SEQ ID NO: 190232 - DNA, 13 bp, Artificial Sequence
  Oligonucleotide for detection of SNP TSC0046787
ttactacaataac

SEQ ID NO: 190233 - DNA, 13 bp, Artificial Sequence
  Oligonucleotide for detection of SNP TSC0046787
gttattatagtaa

SEQ ID NO: 190234 - DNA, 13 bp, Artificial Sequence
  Oligonucleotide for detection of SNP TSC0046787
ttactataataac

SEQ ID NO: 190235 - DNA, 13 bp, Artificial Sequence
  Oligonucleotide for detection of SNP TSC0046787
gttatcgtagtaa

SEQ ID NO: 190236 - DNA, 13 bp, Artificial Sequence
  Oligonucleotide for detection of SNP TSC0046787
ttactacgataac

SEQ ID NO: 190237 - DNA, 13 bp, Artificial Sequence
  Oligonucleotide for detection of SNP TSC0046788
tggggtaggtaaa

SEQ ID NO: 190238 - DNA, 13 bp, Artificial Sequence
  Oligonucleotide for detection of SNP TSC0046788
tttacctacccca

SEQ ID NO: 190239 - DNA, 13 bp, Artificial Sequence
  Oligonucleotide for detection of SNP TSC0046788
tggggtgggtaaa

SEQ ID NO: 190240 - DNA, 13 bp, Artificial Sequence
  Oligonucleotide for detection of SNP TSC0046788
tttacccacccca

SEQ ID NO: 190241 - DNA, 13 bp, Artificial Sequence
  Oligonucleotide for detection of SNP TSC0046788
cggggtaggtaaa

SEQ ID NO: 190242 - DNA, 13 bp, Artificial Sequence
  Oligonucleotide for detection of SNP TSC0046788
tttacctaccccg

SEQ ID NO: 190243 - DNA, 13 bp, Artificial Sequence
  Oligonucleotide for detection of SNP TSC0046788
cggggtgggtaaa

SEQ ID NO: 190244 - DNA, 13 bp, Artificial Sequence
  Oligonucleotide for detection of SNP TSC0046788
tttacccaccccg

SEQ ID NO: 190245 - DNA, 13 bp, Artificial Sequence
  Oligonucleotide for detection of SNP TSC0046788
tggggcgggtaaa

SEQ ID NO: 190246 - DNA, 13 bp, Artificial Sequence
  Oligonucleotide for detection of SNP TSC0046788
tttacccgcccca

SEQ ID NO: 190247 - DNA, 13 bp, Artificial Sequence
  Oligonucleotide for detection of SNP TSC0046788
cggggcgggtaaa

SEQ ID NO: 190248 - DNA, 13 bp, Artificial Sequence
  Oligonucleotide for detection of SNP TSC0046788
tttacccgccccg

SEQ ID NO: 190249 - DNA, 13 bp, Artificial Sequence
  Oligonucleotide for detection of SNP TSC0046789
aggtgtcgtggtg

SEQ ID NO: 190250 - DNA, 13 bp, Artificial Sequence
  Oligonucleotide for detection of SNP TSC0046789
caccacgacacct

SEQ ID NO: 190251 - DNA, 13 bp, Artificial Sequence
  Oligonucleotide for detection of SNP TSC0046789
tattatgatattt

SEQ ID NO: 190252 - DNA, 13 bp, Artificial Sequence
  Oligonucleotide for detection of SNP TSC0046789
aaatatcataata

SEQ ID NO: 190253 - DNA, 13 bp, Artificial Sequence
  Oligonucleotide for detection of SNP TSC0046789
tattattatattt

SEQ ID NO: 190254 - DNA, 13 bp, Artificial Sequence
  Oligonucleotide for detection of SNP TSC0046789
aaatataataata

SEQ ID NO: 190255 - DNA, 13 bp, Artificial Sequence
  Oligonucleotide for detection of SNP TSC0046789
tattacgatattt

SEQ ID NO: 190256 - DNA, 13 bp, Artificial Sequence
  Oligonucleotide for detection of SNP TSC0046789
aaatatcgtaata

SEQ ID NO: 190257 - DNA, 13 bp, Artificial Sequence
  Oligonucleotide for detection of SNP TSC0046791
ttaaaatatttty

SEQ ID NO: 190258 - DNA, 13 bp, Artificial Sequence
  Oligonucleotide for detection of SNP TSC0046791
raaaatattttaa

SEQ ID NO: 190259 - DNA, 13 bp, Artificial Sequence
  Oligonucleotide for detection of SNP TSC0046791
gagggtgttttaa

SEQ ID NO: 190260 - DNA, 13 bp, Artificial Sequence
  Oligonucleotide for detection of SNP TSC0046791
ttaaaacaccctc

SEQ ID NO: 190261 - DNA, 13 bp, Artificial Sequence
  Oligonucleotide for detection of SNP TSC0046791
gagggttttttaa

SEQ ID NO: 190262 - DNA, 13 bp, Artificial Sequence
  Oligonucleotide for detection of SNP TSC0046791
ttaaaaaaccctc

SEQ ID NO: 190263 - DNA, 13 bp, Artificial Sequence
  Oligonucleotide for detection of SNP TSC0046797
atttgatggtggy

SEQ ID NO: 190264 - DNA, 13 bp, Artificial Sequence
  Oligonucleotide for detection of SNP TSC0046797
rccaccatcaaat

SEQ ID NO: 190265 - DNA, 13 bp, Artificial Sequence
  Oligonucleotide for detection of SNP TSC0046797
atttgacggtggy

SEQ ID NO: 190266 - DNA, 13 bp, Artificial Sequence
  Oligonucleotide for detection of SNP TSC0046797
rccaccgtcaaat

SEQ ID NO: 190267 - DNA, 13 bp, Artificial Sequence
  Oligonucleotide for detection of SNP TSC0046797
gttattgttaggt

SEQ ID NO: 190268 - DNA, 13 bp, Artificial Sequence
  Oligonucleotide for detection of SNP TSC0046797
acctaacaataac

SEQ ID NO: 190269 - DNA, 13 bp, Artificial Sequence
  Oligonucleotide for detection of SNP TSC0046797
gttattattaggt

SEQ ID NO: 190270 - DNA, 13 bp, Artificial Sequence
  Oligonucleotide for detection of SNP TSC0046797
acctaataataac

SEQ ID NO: 190271 - DNA, 13 bp, Artificial Sequence
  Oligonucleotide for detection of SNP TSC0046797
gttatcgttaggt

SEQ ID NO: 190272 - DNA, 13 bp, Artificial Sequence
  Oligonucleotide for detection of SNP TSC0046797
acctaacgataac

SEQ ID NO: 190273 - DNA, 13 bp, Artificial Sequence
  Oligonucleotide for detection of SNP TSC0046798
tgtttatgtttgy

SEQ ID NO: 190274 - DNA, 13 bp, Artificial Sequence
  Oligonucleotide for detection of SNP TSC0046798
rcaaacataaaca

SEQ ID NO: 190275 - DNA, 13 bp, Artificial Sequence
  Oligonucleotide for detection of SNP TSC0046798
tgtttacgtttgy

SEQ ID NO: 190276 - DNA, 13 bp, Artificial Sequence
  Oligonucleotide for detection of SNP TSC0046798
rcaaacgtaaaca

SEQ ID NO: 190277 - DNA, 13 bp, Artificial Sequence
  Oligonucleotide for detection of SNP TSC0046798
gtagatgtgagta

SEQ ID NO: 190278 - DNA, 13 bp, Artificial Sequence
  Oligonucleotide for detection of SNP TSC0046798
tactcacatctac

SEQ ID NO: 190279 - DNA, 13 bp, Artificial Sequence
  Oligonucleotide for detection of SNP TSC0046798
gtagatatgagta

SEQ ID NO: 190280 - DNA, 13 bp, Artificial Sequence
  Oligonucleotide for detection of SNP TSC0046798
tactcatatctac

SEQ ID NO: 190281 - DNA, 13 bp, Artificial Sequence
  Oligonucleotide for detection of SNP TSC0046798
gtagacgtgagta

SEQ ID NO: 190282 - DNA, 13 bp, Artificial Sequence
  Oligonucleotide for detection of SNP TSC0046798
tactcacgtctac

SEQ ID NO: 190283 - DNA, 13 bp, Artificial Sequence
  Oligonucleotide for detection of SNP TSC0046799
atttttattgtta

SEQ ID NO: 190284 - DNA, 13 bp, Artificial Sequence
  Oligonucleotide for detection of SNP TSC0046799
taacaataaaaat

SEQ ID NO: 190285 - DNA, 13 bp, Artificial Sequence
  Oligonucleotide for detection of SNP TSC0046799
attttttttgtta

SEQ ID NO: 190286 - DNA, 13 bp, Artificial Sequence
  Oligonucleotide for detection of SNP TSC0046799
taacaaaaaaaat

SEQ ID NO: 190287 - DNA, 13 bp, Artificial Sequence
  Oligonucleotide for detection of SNP TSC0046799
tggtaatggagat

SEQ ID NO: 190288 - DNA, 13 bp, Artificial Sequence
  Oligonucleotide for detection of SNP TSC0046799
atctccattacca

SEQ ID NO: 190289 - DNA, 13 bp, Artificial Sequence
  Oligonucleotide for detection of SNP TSC0046799
tggtaagggagat

SEQ ID NO: 190290 - DNA, 13 bp, Artificial Sequence
  Oligonucleotide for detection of SNP TSC0046799
atctcccttacca

SEQ ID NO: 190291 - DNA, 13 bp, Artificial Sequence
  Oligonucleotide for detection of SNP TSC0008814
attggaataattt

SEQ ID NO: 190292 - DNA, 13 bp, Artificial Sequence
  Oligonucleotide for detection of SNP TSC0008814
aaattattccaat

SEQ ID NO: 190293 - DNA, 13 bp, Artificial Sequence
  Oligonucleotide for detection of SNP TSC0008814
attggagtaattt

SEQ ID NO: 190294 - DNA, 13 bp, Artificial Sequence
  Oligonucleotide for detection of SNP TSC0008814
aaattactccaat

SEQ ID NO: 190295 - DNA, 13 bp, Artificial Sequence
  Oligonucleotide for detection of SNP TSC0008815
tattggataataa

SEQ ID NO: 190296 - DNA, 13 bp, Artificial Sequence
  Oligonucleotide for detection of SNP TSC0008815
ttattatccaata

SEQ ID NO: 190297 - DNA, 13 bp, Artificial Sequence
  Oligonucleotide for detection of SNP TSC0008815
tattgggtaataa

SEQ ID NO: 190298 - DNA, 13 bp, Artificial Sequence
  Oligonucleotide for detection of SNP TSC0008815
ttattacccaata

SEQ ID NO: 190299 - DNA, 13 bp, Artificial Sequence
  Oligonucleotide for detection of SNP TSC0046804
gggaagttttgat

SEQ ID NO: 190300 - DNA, 13 bp, Artificial Sequence
  Oligonucleotide for detection of SNP TSC0046804
atcaaaacttccc

SEQ ID NO: 190301 - DNA, 13 bp, Artificial Sequence
  Oligonucleotide for detection of SNP TSC0046804
gggaaggtttgat

SEQ ID NO: 190302 - DNA, 13 bp, Artificial Sequence
  Oligonucleotide for detection of SNP TSC0046804
atcaaaccttccc

SEQ ID NO: 190303 - DNA, 13 bp, Artificial Sequence
  Oligonucleotide for detection of SNP TSC0046804
attaaggttttty

SEQ ID NO: 190304 - DNA, 13 bp, Artificial Sequence
  Oligonucleotide for detection of SNP TSC0046804
raaaaaccttaat

SEQ ID NO: 190305 - DNA, 13 bp, Artificial Sequence
  Oligonucleotide for detection of SNP TSC0046808
taggttattaagy

SEQ ID NO: 190306 - DNA, 13 bp, Artificial Sequence
  Oligonucleotide for detection of SNP TSC0046808
rcttaataaccta

SEQ ID NO: 190307 - DNA, 13 bp, Artificial Sequence
  Oligonucleotide for detection of SNP TSC0046808
taggttgttaagy

SEQ ID NO: 190308 - DNA, 13 bp, Artificial Sequence
  Oligonucleotide for detection of SNP TSC0046808
rcttaacaaccta

SEQ ID NO: 190309 - DNA, 13 bp, Artificial Sequence
  Oligonucleotide for detection of SNP TSC0046808
taggtcgttaagy

SEQ ID NO: 190310 - DNA, 13 bp, Artificial Sequence
  Oligonucleotide for detection of SNP TSC0046808
rcttaacgaccta

SEQ ID NO: 190311 - DNA, 13 bp, Artificial Sequence
  Oligonucleotide for detection of SNP TSC0046808
gtttaatgattta

SEQ ID NO: 190312 - DNA, 13 bp, Artificial Sequence
  Oligonucleotide for detection of SNP TSC0046808
taaatcattaaac

SEQ ID NO: 190313 - DNA, 13 bp, Artificial Sequence
  Oligonucleotide for detection of SNP TSC0046808
gtttaacgattta

SEQ ID NO: 190314 - DNA, 13 bp, Artificial Sequence
  Oligonucleotide for detection of SNP TSC0046808
taaatcgttaaac

SEQ ID NO: 190315 - DNA, 13 bp, Artificial Sequence
  Oligonucleotide for detection of SNP TSC0046809
ttgataattatag

SEQ ID NO: 190316 - DNA, 13 bp, Artificial Sequence
  Oligonucleotide for detection of SNP TSC0046809
ctataattatcaa

SEQ ID NO: 190317 - DNA, 13 bp, Artificial Sequence
  Oligonucleotide for detection of SNP TSC0046809
ttgatagttatag

SEQ ID NO: 190318 - DNA, 13 bp, Artificial Sequence
  Oligonucleotide for detection of SNP TSC0046809
ctataactatcaa

SEQ ID NO: 190319 - DNA, 13 bp, Artificial Sequence
  Oligonucleotide for detection of SNP TSC0046809
tcgataattatag

SEQ ID NO: 190320 - DNA, 13 bp, Artificial Sequence
  Oligonucleotide for detection of SNP TSC0046809
ctataattatcga

SEQ ID NO: 190321 - DNA, 13 bp, Artificial Sequence
  Oligonucleotide for detection of SNP TSC0046809
tcgatagttatag

SEQ ID NO: 190322 - DNA, 13 bp, Artificial Sequence
  Oligonucleotide for detection of SNP TSC0046809
ctataactatcga

SEQ ID NO: 190323 - DNA, 13 bp, Artificial Sequence
  Oligonucleotide for detection of SNP TSC0046810
agaaatatatgga

SEQ ID NO: 190324 - DNA, 13 bp, Artificial Sequence
  Oligonucleotide for detection of SNP TSC0046810
tccatatatttct

SEQ ID NO: 190325 - DNA, 13 bp, Artificial Sequence
  Oligonucleotide for detection of SNP TSC0046810
agaaatttatgga

SEQ ID NO: 190326 - DNA, 13 bp, Artificial Sequence
  Oligonucleotide for detection of SNP TSC0046810
tccataaatttct

SEQ ID NO: 190327 - DNA, 13 bp, Artificial Sequence
  Oligonucleotide for detection of SNP TSC0046810
tttatgtgttttt

SEQ ID NO: 190328 - DNA, 13 bp, Artificial Sequence
  Oligonucleotide for detection of SNP TSC0046810
aaaaacacataaa

SEQ ID NO: 190329 - DNA, 13 bp, Artificial Sequence
  Oligonucleotide for detection of SNP TSC0046810
tttatgagttttt

SEQ ID NO: 190330 - DNA, 13 bp, Artificial Sequence
  Oligonucleotide for detection of SNP TSC0046810
aaaaactcataaa

SEQ ID NO: 190331 - DNA, 13 bp, Artificial Sequence
  Oligonucleotide for detection of SNP TSC0046812
gttgtggttttga

SEQ ID NO: 190332 - DNA, 13 bp, Artificial Sequence
  Oligonucleotide for detection of SNP TSC0046812
tcaaaaccacaac

SEQ ID NO: 190333 - DNA, 13 bp, Artificial Sequence
  Oligonucleotide for detection of SNP TSC0046812
gttgtgattttga

SEQ ID NO: 190334 - DNA, 13 bp, Artificial Sequence
  Oligonucleotide for detection of SNP TSC0046812
tcaaaatcacaac

SEQ ID NO: 190335 - DNA, 13 bp, Artificial Sequence
  Oligonucleotide for detection of SNP TSC0046813
gtttggagagggy

SEQ ID NO: 190336 - DNA, 13 bp, Artificial Sequence
  Oligonucleotide for detection of SNP TSC0046813
rccctctccaaac

SEQ ID NO: 190337 - DNA, 13 bp, Artificial Sequence
  Oligonucleotide for detection of SNP TSC0046813
gtttggtgagggy

SEQ ID NO: 190338 - DNA, 13 bp, Artificial Sequence
  Oligonucleotide for detection of SNP TSC0046813
rccctcaccaaac

SEQ ID NO: 190339 - DNA, 13 bp, Artificial Sequence
  Oligonucleotide for detection of SNP TSC0046813
gtttggcgagggy

SEQ ID NO: 190340 - DNA, 13 bp, Artificial Sequence
  Oligonucleotide for detection of SNP TSC0046813
rccctcgccaaac

SEQ ID NO: 190341 - DNA, 13 bp, Artificial Sequence
  Oligonucleotide for detection of SNP TSC0046813
gttttttttagay

SEQ ID NO: 190342 - DNA, 13 bp, Artificial Sequence
  Oligonucleotide for detection of SNP TSC0046813
rtctaaaaaaaac

SEQ ID NO: 190343 - DNA, 13 bp, Artificial Sequence
  Oligonucleotide for detection of SNP TSC0046813
gtttttgttagay

SEQ ID NO: 190344 - DNA, 13 bp, Artificial Sequence
  Oligonucleotide for detection of SNP TSC0046813
rtctaacaaaaac

SEQ ID NO: 190345 - DNA, 13 bp, Artificial Sequence
  Oligonucleotide for detection of SNP TSC0046813
gttttcgttagay

SEQ ID NO: 190346 - DNA, 13 bp, Artificial Sequence
  Oligonucleotide for detection of SNP TSC0046813
rtctaacgaaaac

SEQ ID NO: 190347 - DNA, 13 bp, Artificial Sequence
  Oligonucleotide for detection of SNP TSC0046815
attggaatattgy

SEQ ID NO: 190348 - DNA, 13 bp, Artificial Sequence
  Oligonucleotide for detection of SNP TSC0046815
rcaatattccaat

SEQ ID NO: 190349 - DNA, 13 bp, Artificial Sequence
  Oligonucleotide for detection of SNP TSC0046815
attggagtattgy

SEQ ID NO: 190350 - DNA, 13 bp, Artificial Sequence
  Oligonucleotide for detection of SNP TSC0046815
rcaatactccaat

SEQ ID NO: 190351 - DNA, 13 bp, Artificial Sequence
  Oligonucleotide for detection of SNP TSC0046816
tgttatttttgaa

SEQ ID NO: 190352 - DNA, 13 bp, Artificial Sequence
  Oligonucleotide for detection of SNP TSC0046816
ttcaaaaataaca

SEQ ID NO: 190353 - DNA, 13 bp, Artificial Sequence
  Oligonucleotide for detection of SNP TSC0046816
tgttatgtttgaa

SEQ ID NO: 190354 - DNA, 13 bp, Artificial Sequence
  Oligonucleotide for detection of SNP TSC0046816
ttcaaacataaca

SEQ ID NO: 190355 - DNA, 13 bp, Artificial Sequence
  Oligonucleotide for detection of SNP TSC0046816
tttaagaatgata

SEQ ID NO: 190356 - DNA, 13 bp, Artificial Sequence
  Oligonucleotide for detection of SNP TSC0046816
tatcattcttaaa

SEQ ID NO: 190357 - DNA, 13 bp, Artificial Sequence
  Oligonucleotide for detection of SNP TSC0046816
tttaagtatgata

SEQ ID NO: 190358 - DNA, 13 bp, Artificial Sequence
  Oligonucleotide for detection of SNP TSC0046816
tatcatacttaaa

SEQ ID NO: 190359 - DNA, 13 bp, Artificial Sequence
  Oligonucleotide for detection of SNP TSC0046817
tatagaaaaaata

SEQ ID NO: 190360 - DNA, 13 bp, Artificial Sequence
  Oligonucleotide for detection of SNP TSC0046817
tattttttctata

SEQ ID NO: 190361 - DNA, 13 bp, Artificial Sequence
  Oligonucleotide for detection of SNP TSC0046817
tatagataaaata

SEQ ID NO: 190362 - DNA, 13 bp, Artificial Sequence
  Oligonucleotide for detection of SNP TSC0046817
tattttatctata

SEQ ID NO: 190363 - DNA, 13 bp, Artificial Sequence
  Oligonucleotide for detection of SNP TSC0046817
tgttttttttata

SEQ ID NO: 190364 - DNA, 13 bp, Artificial Sequence
  Oligonucleotide for detection of SNP TSC0046817
tataaaaaaaaca

SEQ ID NO: 190365 - DNA, 13 bp, Artificial Sequence
  Oligonucleotide for detection of SNP TSC0046818
gaattaggtgtta

SEQ ID NO: 190366 - DNA, 13 bp, Artificial Sequence
  Oligonucleotide for detection of SNP TSC0046818
taacacctaattc

SEQ ID NO: 190367 - DNA, 13 bp, Artificial Sequence
  Oligonucleotide for detection of SNP TSC0046818
gaattaagtgtta

SEQ ID NO: 190368 - DNA, 13 bp, Artificial Sequence
  Oligonucleotide for detection of SNP TSC0046818
taacacttaattc

SEQ ID NO: 190369 - DNA, 13 bp, Artificial Sequence
  Oligonucleotide for detection of SNP TSC0046821
aatgttattttag

SEQ ID NO: 190370 - DNA, 13 bp, Artificial Sequence
  Oligonucleotide for detection of SNP TSC0046821
ctaaaataacatt

SEQ ID NO: 190371 - DNA, 13 bp, Artificial Sequence
  Oligonucleotide for detection of SNP TSC0046824
tggattgtaattg

SEQ ID NO: 190372 - DNA, 13 bp, Artificial Sequence
  Oligonucleotide for detection of SNP TSC0046824
caattacaatcca

SEQ ID NO: 190373 - DNA, 13 bp, Artificial Sequence
  Oligonucleotide for detection of SNP TSC0046824
tggattataattg

SEQ ID NO: 190374 - DNA, 13 bp, Artificial Sequence
  Oligonucleotide for detection of SNP TSC0046824
caattataatcca

SEQ ID NO: 190375 - DNA, 13 bp, Artificial Sequence
  Oligonucleotide for detection of SNP TSC0046825
aagtaaaaataaa

SEQ ID NO: 190376 - DNA, 13 bp, Artificial Sequence
  Oligonucleotide for detection of SNP TSC0046825
tttatttttactt

SEQ ID NO: 190377 - DNA, 13 bp, Artificial Sequence
  Oligonucleotide for detection of SNP TSC0046825
aagtaataataaa

SEQ ID NO: 190378 - DNA, 13 bp, Artificial Sequence
  Oligonucleotide for detection of SNP TSC0046825
tttattattactt

SEQ ID NO: 190379 - DNA, 13 bp, Artificial Sequence
  Oligonucleotide for detection of SNP TSC0046825
tttatttttgttt

SEQ ID NO: 190380 - DNA, 13 bp, Artificial Sequence
  Oligonucleotide for detection of SNP TSC0046825
aaacaaaaataaa

SEQ ID NO: 190381 - DNA, 13 bp, Artificial Sequence
  Oligonucleotide for detection of SNP TSC0046825
tttattattgttt

SEQ ID NO: 190382 - DNA, 13 bp, Artificial Sequence
  Oligonucleotide for detection of SNP TSC0046825
aaacaataataaa

SEQ ID NO: 190383 - DNA, 13 bp, Artificial Sequence
  Oligonucleotide for detection of SNP TSC0046826
agagttttagaty

SEQ ID NO: 190384 - DNA, 13 bp, Artificial Sequence
  Oligonucleotide for detection of SNP TSC0046826
ratctaaaactct

SEQ ID NO: 190385 - DNA, 13 bp, Artificial Sequence
  Oligonucleotide for detection of SNP TSC0046826
agagttgtagaty

SEQ ID NO: 190386 - DNA, 13 bp, Artificial Sequence
  Oligonucleotide for detection of SNP TSC0046826
ratctacaactct

SEQ ID NO: 190387 - DNA, 13 bp, Artificial Sequence
  Oligonucleotide for detection of SNP TSC0046826
ggtttaaaatttt

SEQ ID NO: 190388 - DNA, 13 bp, Artificial Sequence
  Oligonucleotide for detection of SNP TSC0046826
aaaattttaaacc

SEQ ID NO: 190389 - DNA, 13 bp, Artificial Sequence
  Oligonucleotide for detection of SNP TSC0046826
ggtttataatttt

SEQ ID NO: 190390 - DNA, 13 bp, Artificial Sequence
  Oligonucleotide for detection of SNP TSC0046826
aaaattataaacc

SEQ ID NO: 190391 - DNA, 13 bp, Artificial Sequence
  Oligonucleotide for detection of SNP TSC0046827
attttatataatt

SEQ ID NO: 190392 - DNA, 13 bp, Artificial Sequence
  Oligonucleotide for detection of SNP TSC0046827
aattatataaaat

SEQ ID NO: 190393 - DNA, 13 bp, Artificial Sequence
  Oligonucleotide for detection of SNP TSC0046827
attttagataatt

SEQ ID NO: 190394 - DNA, 13 bp, Artificial Sequence
  Oligonucleotide for detection of SNP TSC0046827
aattatctaaaat

SEQ ID NO: 190395 - DNA, 13 bp, Artificial Sequence
  Oligonucleotide for detection of SNP TSC0046827
aattgtgtgggat

SEQ ID NO: 190396 - DNA, 13 bp, Artificial Sequence
  Oligonucleotide for detection of SNP TSC0046827
atcccacacaatt

SEQ ID NO: 190397 - DNA, 13 bp, Artificial Sequence
  Oligonucleotide for detection of SNP TSC0046827
aattgtatgggat

SEQ ID NO: 190398 - DNA, 13 bp, Artificial Sequence
  Oligonucleotide for detection of SNP TSC0046827
atcccatacaatt

SEQ ID NO: 190399 - DNA, 13 bp, Artificial Sequence
  Oligonucleotide for detection of SNP TSC0046827
aattgtttgggat

SEQ ID NO: 190400 - DNA, 13 bp, Artificial Sequence
  Oligonucleotide for detection of SNP TSC0046827
atcccaaacaatt

SEQ ID NO: 190401 - DNA, 13 bp, Artificial Sequence
  Oligonucleotide for detection of SNP TSC0046828
tagaatggtggtt

SEQ ID NO: 190402 - DNA, 13 bp, Artificial Sequence
  Oligonucleotide for detection of SNP TSC0046828
aaccaccattcta

SEQ ID NO: 190403 - DNA, 13 bp, Artificial Sequence
  Oligonucleotide for detection of SNP TSC0046828
tagaatagtggtt

SEQ ID NO: 190404 - DNA, 13 bp, Artificial Sequence
  Oligonucleotide for detection of SNP TSC0046828
aaccactattcta

SEQ ID NO: 190405 - DNA, 13 bp, Artificial Sequence
  Oligonucleotide for detection of SNP TSC0046831
tttatagtaagta

SEQ ID NO: 190406 - DNA, 13 bp, Artificial Sequence
  Oligonucleotide for detection of SNP TSC0046831
tacttactataaa

SEQ ID NO: 190407 - DNA, 13 bp, Artificial Sequence
  Oligonucleotide for detection of SNP TSC0046831
tttataataagta

SEQ ID NO: 190408 - DNA, 13 bp, Artificial Sequence
  Oligonucleotide for detection of SNP TSC0046831
tacttattataaa

SEQ ID NO: 190409 - DNA, 13 bp, Artificial Sequence
  Oligonucleotide for detection of SNP TSC0046832
atgatatgttaag

SEQ ID NO: 190410 - DNA, 13 bp, Artificial Sequence
  Oligonucleotide for detection of SNP TSC0046832
cttaacatatcat

SEQ ID NO: 190411 - DNA, 13 bp, Artificial Sequence
  Oligonucleotide for detection of SNP TSC0046832
atgatacgttaag

SEQ ID NO: 190412 - DNA, 13 bp, Artificial Sequence
  Oligonucleotide for detection of SNP TSC0046832
cttaacgtatcat

SEQ ID NO: 190413 - DNA, 13 bp, Artificial Sequence
  Oligonucleotide for detection of SNP TSC0046832
tttggtgtattat

SEQ ID NO: 190414 - DNA, 13 bp, Artificial Sequence
  Oligonucleotide for detection of SNP TSC0046832
ataatacaccaaa

SEQ ID NO: 190415 - DNA, 13 bp, Artificial Sequence
  Oligonucleotide for detection of SNP TSC0046832
tttggtatattat

SEQ ID NO: 190416 - DNA, 13 bp, Artificial Sequence
  Oligonucleotide for detection of SNP TSC0046832
ataatataccaaa

SEQ ID NO: 190417 - DNA, 13 bp, Artificial Sequence
  Oligonucleotide for detection of SNP TSC0046832
tttggcgtattat

SEQ ID NO: 190418 - DNA, 13 bp, Artificial Sequence
  Oligonucleotide for detection of SNP TSC0046832
ataatacgccaaa

SEQ ID NO: 190419 - DNA, 13 bp, Artificial Sequence
  Oligonucleotide for detection of SNP TSC0046833
ttattatgagaay

SEQ ID NO: 190420 - DNA, 13 bp, Artificial Sequence
  Oligonucleotide for detection of SNP TSC0046833
rttctcataataa

SEQ ID NO: 190421 - DNA, 13 bp, Artificial Sequence
  Oligonucleotide for detection of SNP TSC0046833
ttattacgagaay

SEQ ID NO: 190422 - DNA, 13 bp, Artificial Sequence
  Oligonucleotide for detection of SNP TSC0046833
rttctcgtaataa

SEQ ID NO: 190423 - DNA, 13 bp, Artificial Sequence
  Oligonucleotide for detection of SNP TSC0046833
gtttttgtgatag

SEQ ID NO: 190424 - DNA, 13 bp, Artificial Sequence
  Oligonucleotide for detection of SNP TSC0046833
ctatcacaaaaac

SEQ ID NO: 190425 - DNA, 13 bp, Artificial Sequence
  Oligonucleotide for detection of SNP TSC0046833
gtttttatgatag

SEQ ID NO: 190426 - DNA, 13 bp, Artificial Sequence
  Oligonucleotide for detection of SNP TSC0046833
ctatcataaaaac

SEQ ID NO: 190427 - DNA, 13 bp, Artificial Sequence
  Oligonucleotide for detection of SNP TSC0046833
gttttcgtgatag

SEQ ID NO: 190428 - DNA, 13 bp, Artificial Sequence
  Oligonucleotide for detection of SNP TSC0046833
ctatcacgaaaac

SEQ ID NO: 190429 - DNA, 13 bp, Artificial Sequence
  Oligonucleotide for detection of SNP TSC0009678
agttgaagattga

SEQ ID NO: 190430 - DNA, 13 bp, Artificial Sequence
  Oligonucleotide for detection of SNP TSC0009678
tcaatcttcaact

SEQ ID NO: 190431 - DNA, 13 bp, Artificial Sequence
  Oligonucleotide for detection of SNP TSC0009678
agttgaggattga

SEQ ID NO: 190432 - DNA, 13 bp, Artificial Sequence
  Oligonucleotide for detection of SNP TSC0009678
tcaatcctcaact

SEQ ID NO: 190433 - DNA, 13 bp, Artificial Sequence
  Oligonucleotide for detection of SNP TSC0046836
aaaagtttttaat

SEQ ID NO: 190434 - DNA, 13 bp, Artificial Sequence
  Oligonucleotide for detection of SNP TSC0046836
attaaaaactttt

SEQ ID NO: 190435 - DNA, 13 bp, Artificial Sequence
  Oligonucleotide for detection of SNP TSC0046836
aaaagtgtttaat

SEQ ID NO: 190436 - DNA, 13 bp, Artificial Sequence
  Oligonucleotide for detection of SNP TSC0046836
attaaacactttt

SEQ ID NO: 190437 - DNA, 13 bp, Artificial Sequence
  Oligonucleotide for detection of SNP TSC0046836
attaaagattttt

SEQ ID NO: 190438 - DNA, 13 bp, Artificial Sequence
  Oligonucleotide for detection of SNP TSC0046836
aaaaatctttaat

SEQ ID NO: 190439 - DNA, 13 bp, Artificial Sequence
  Oligonucleotide for detection of SNP TSC0046836
attaaatattttt

SEQ ID NO: 190440 - DNA, 13 bp, Artificial Sequence
  Oligonucleotide for detection of SNP TSC0046836
aaaaatatttaat

SEQ ID NO: 190441 - DNA, 13 bp, Artificial Sequence
  Oligonucleotide for detection of SNP TSC0046837
atttaatgtttty

SEQ ID NO: 190442 - DNA, 13 bp, Artificial Sequence
  Oligonucleotide for detection of SNP TSC0046837
raaaacattaaat

SEQ ID NO: 190443 - DNA, 13 bp, Artificial Sequence
  Oligonucleotide for detection of SNP TSC0046837
atttaacgtttty

SEQ ID NO: 190444 - DNA, 13 bp, Artificial Sequence
  Oligonucleotide for detection of SNP TSC0046837
raaaacgttaaat

SEQ ID NO: 190445 - DNA, 13 bp, Artificial Sequence
  Oligonucleotide for detection of SNP TSC0046837
ggaaatgttaagt

SEQ ID NO: 190446 - DNA, 13 bp, Artificial Sequence
  Oligonucleotide for detection of SNP TSC0046837
acttaacatttcc

SEQ ID NO: 190447 - DNA, 13 bp, Artificial Sequence
  Oligonucleotide for detection of SNP TSC0046837
ggaaatattaagt

SEQ ID NO: 190448 - DNA, 13 bp, Artificial Sequence
  Oligonucleotide for detection of SNP TSC0046837
acttaatatttcc

SEQ ID NO: 190449 - DNA, 13 bp, Artificial Sequence
  Oligonucleotide for detection of SNP TSC0046837
ggaaacgttaagt

SEQ ID NO: 190450 - DNA, 13 bp, Artificial Sequence
  Oligonucleotide for detection of SNP TSC0046837
acttaacgtttcc

SEQ ID NO: 190451 - DNA, 13 bp, Artificial Sequence
  Oligonucleotide for detection of SNP TSC0046838
ataggtatttaag

SEQ ID NO: 190452 - DNA, 13 bp, Artificial Sequence
  Oligonucleotide for detection of SNP TSC0046838
cttaaatacctat

SEQ ID NO: 190453 - DNA, 13 bp, Artificial Sequence
  Oligonucleotide for detection of SNP TSC0046838
ataggtgtttaag

SEQ ID NO: 190454 - DNA, 13 bp, Artificial Sequence
  Oligonucleotide for detection of SNP TSC0046838
cttaaacacctat

SEQ ID NO: 190455 - DNA, 13 bp, Artificial Sequence
  Oligonucleotide for detection of SNP TSC0000398
gtgagagtgttag

SEQ ID NO: 190456 - DNA, 13 bp, Artificial Sequence
  Oligonucleotide for detection of SNP TSC0000398
ctaacactctcac

SEQ ID NO: 190457 - DNA, 13 bp, Artificial Sequence
  Oligonucleotide for detection of SNP TSC0000398
gtgagaatgttag

SEQ ID NO: 190458 - DNA, 13 bp, Artificial Sequence
  Oligonucleotide for detection of SNP TSC0000398
ctaacattctcac

SEQ ID NO: 190459 - DNA, 13 bp, Artificial Sequence
  Oligonucleotide for detection of SNP TSC0000399
gtagtaatattgt

SEQ ID NO: 190460 - DNA, 13 bp, Artificial Sequence
  Oligonucleotide for detection of SNP TSC0000399
acaatattactac

SEQ ID NO: 190461 - DNA, 13 bp, Artificial Sequence
  Oligonucleotide for detection of SNP TSC0000399
gtagtagtattgt

SEQ ID NO: 190462 - DNA, 13 bp, Artificial Sequence
  Oligonucleotide for detection of SNP TSC0000399
acaatactactac

SEQ ID NO: 190463 - DNA, 13 bp, Artificial Sequence
  Oligonucleotide for detection of SNP TSC0046843
ttttgtattagtt

SEQ ID NO: 190464 - DNA, 13 bp, Artificial Sequence
  Oligonucleotide for detection of SNP TSC0046843
aactaatacaaaa

SEQ ID NO: 190465 - DNA, 13 bp, Artificial Sequence
  Oligonucleotide for detection of SNP TSC0046843
ttttgtgttagtt

SEQ ID NO: 190466 - DNA, 13 bp, Artificial Sequence
  Oligonucleotide for detection of SNP TSC0046843
aactaacacaaaa

SEQ ID NO: 190467 - DNA, 13 bp, Artificial Sequence
  Oligonucleotide for detection of SNP TSC0046843
ttttgcgttagtt

SEQ ID NO: 190468 - DNA, 13 bp, Artificial Sequence
  Oligonucleotide for detection of SNP TSC0046843
aactaacgcaaaa

SEQ ID NO: 190469 - DNA, 13 bp, Artificial Sequence
  Oligonucleotide for detection of SNP TSC0046843
aattgatgtagga

SEQ ID NO: 190470 - DNA, 13 bp, Artificial Sequence
  Oligonucleotide for detection of SNP TSC0046843
tcctacatcaatt

SEQ ID NO: 190471 - DNA, 13 bp, Artificial Sequence
  Oligonucleotide for detection of SNP TSC0046843
aattgacgtagga

SEQ ID NO: 190472 - DNA, 13 bp, Artificial Sequence
  Oligonucleotide for detection of SNP TSC0046843
tcctacgtcaatt

SEQ ID NO: 190473 - DNA, 13 bp, Artificial Sequence
  Oligonucleotide for detection of SNP TSC0046844
aggtgaggtgtgg

SEQ ID NO: 190474 - DNA, 13 bp, Artificial Sequence
  Oligonucleotide for detection of SNP TSC0046844
ccacacctcacct

SEQ ID NO: 190475 - DNA, 13 bp, Artificial Sequence
  Oligonucleotide for detection of SNP TSC0046844
aggtgaagtgtgg

SEQ ID NO: 190476 - DNA, 13 bp, Artificial Sequence
  Oligonucleotide for detection of SNP TSC0046844
ccacacttcacct

SEQ ID NO: 190477 - DNA, 13 bp, Artificial Sequence
  Oligonucleotide for detection of SNP TSC0046846
taaatagtatggt

SEQ ID NO: 190478 - DNA, 13 bp, Artificial Sequence
  Oligonucleotide for detection of SNP TSC0046846
accatactattta

SEQ ID NO: 190479 - DNA, 13 bp, Artificial Sequence
  Oligonucleotide for detection of SNP TSC0046846
taaataatatggt

SEQ ID NO: 190480 - DNA, 13 bp, Artificial Sequence
  Oligonucleotide for detection of SNP TSC0046846
accatattattta

SEQ ID NO: 190481 - DNA, 13 bp, Artificial Sequence
  Oligonucleotide for detection of SNP TSC0046847
tgaagtattttty

SEQ ID NO: 190482 - DNA, 13 bp, Artificial Sequence
  Oligonucleotide for detection of SNP TSC0046847
raaaaatacttca

SEQ ID NO: 190483 - DNA, 13 bp, Artificial Sequence
  Oligonucleotide for detection of SNP TSC0046847
tgaagttttttty

SEQ ID NO: 190484 - DNA, 13 bp, Artificial Sequence
  Oligonucleotide for detection of SNP TSC0046847
raaaaaaacttca

SEQ ID NO: 190485 - DNA, 13 bp, Artificial Sequence
  Oligonucleotide for detection of SNP TSC0046847
gggaaatgtttta

SEQ ID NO: 190486 - DNA, 13 bp, Artificial Sequence
  Oligonucleotide for detection of SNP TSC0046847
taaaacatttccc

SEQ ID NO: 190487 - DNA, 13 bp, Artificial Sequence
  Oligonucleotide for detection of SNP TSC0046847
gggaaaggtttta

SEQ ID NO: 190488 - DNA, 13 bp, Artificial Sequence
  Oligonucleotide for detection of SNP TSC0046847
taaaacctttccc

SEQ ID NO: 190489 - DNA, 13 bp, Artificial Sequence
  Oligonucleotide for detection of SNP TSC0046848
ttaaaaataatta

SEQ ID NO: 190490 - DNA, 13 bp, Artificial Sequence
  Oligonucleotide for detection of SNP TSC0046848
taattatttttaa

SEQ ID NO: 190491 - DNA, 13 bp, Artificial Sequence
  Oligonucleotide for detection of SNP TSC0046850
tgtattaagaaaa

SEQ ID NO: 190492 - DNA, 13 bp, Artificial Sequence
  Oligonucleotide for detection of SNP TSC0046850
ttttcttaataca

SEQ ID NO: 190493 - DNA, 13 bp, Artificial Sequence
  Oligonucleotide for detection of SNP TSC0046850
tgtatttagaaaa

SEQ ID NO: 190494 - DNA, 13 bp, Artificial Sequence
  Oligonucleotide for detection of SNP TSC0046850
ttttctaaataca

SEQ ID NO: 190495 - DNA, 13 bp, Artificial Sequence
  Oligonucleotide for detection of SNP TSC0046851
gttgtcgttttat

SEQ ID NO: 190496 - DNA, 13 bp, Artificial Sequence
  Oligonucleotide for detection of SNP TSC0046851
ataaaacgacaac

SEQ ID NO: 190497 - DNA, 13 bp, Artificial Sequence
  Oligonucleotide for detection of SNP TSC0046851
ataaaatgataay

SEQ ID NO: 190498 - DNA, 13 bp, Artificial Sequence
  Oligonucleotide for detection of SNP TSC0046851
rttatcattttat

SEQ ID NO: 190499 - DNA, 13 bp, Artificial Sequence
  Oligonucleotide for detection of SNP TSC0046851
ataaaacgataay

SEQ ID NO: 190500 - DNA, 13 bp, Artificial Sequence
  Oligonucleotide for detection of SNP TSC0046851
rttatcgttttat

SEQ ID NO: 190501 - DNA, 13 bp, Artificial Sequence
  Oligonucleotide for detection of SNP TSC0010733
ttgttaggtataa

SEQ ID NO: 190502 - DNA, 13 bp, Artificial Sequence
  Oligonucleotide for detection of SNP TSC0010733
ttatacctaacaa

SEQ ID NO: 190503 - DNA, 13 bp, Artificial Sequence
  Oligonucleotide for detection of SNP TSC0010733
ttgttaagtataa

SEQ ID NO: 190504 - DNA, 13 bp, Artificial Sequence
  Oligonucleotide for detection of SNP TSC0010733
ttatacttaacaa

SEQ ID NO: 190505 - DNA, 13 bp, Artificial Sequence
  Oligonucleotide for detection of SNP TSC0046852
taatatataaata

SEQ ID NO: 190506 - DNA, 13 bp, Artificial Sequence
  Oligonucleotide for detection of SNP TSC0046852
tatttatatatta

SEQ ID NO: 190507 - DNA, 13 bp, Artificial Sequence
  Oligonucleotide for detection of SNP TSC0046852
taatatttaaata

SEQ ID NO: 190508 - DNA, 13 bp, Artificial Sequence
  Oligonucleotide for detection of SNP TSC0046852
tatttaaatatta

SEQ ID NO: 190509 - DNA, 13 bp, Artificial Sequence
  Oligonucleotide for detection of SNP TSC0046852
tgtttgtgtatta

SEQ ID NO: 190510 - DNA, 13 bp, Artificial Sequence
  Oligonucleotide for detection of SNP TSC0046852
taatacacaaaca

SEQ ID NO: 190511 - DNA, 13 bp, Artificial Sequence
  Oligonucleotide for detection of SNP TSC0046853
atttaaatagaag

SEQ ID NO: 190512 - DNA, 13 bp, Artificial Sequence
  Oligonucleotide for detection of SNP TSC0046853
cttctatttaaat

SEQ ID NO: 190513 - DNA, 13 bp, Artificial Sequence
  Oligonucleotide for detection of SNP TSC0046853
atttaagtagaag

SEQ ID NO: 190514 - DNA, 13 bp, Artificial Sequence
  Oligonucleotide for detection of SNP TSC0046853
cttctacttaaat

SEQ ID NO: 190515 - DNA, 13 bp, Artificial Sequence
  Oligonucleotide for detection of SNP TSC0046854
tttaagatataaa

SEQ ID NO: 190516 - DNA, 13 bp, Artificial Sequence
  Oligonucleotide for detection of SNP TSC0046854
tttatatcttaaa

SEQ ID NO: 190517 - DNA, 13 bp, Artificial Sequence
  Oligonucleotide for detection of SNP TSC0046854
tttaagttataaa

SEQ ID NO: 190518 - DNA, 13 bp, Artificial Sequence
  Oligonucleotide for detection of SNP TSC0046854
tttataacttaaa

SEQ ID NO: 190519 - DNA, 13 bp, Artificial Sequence
  Oligonucleotide for detection of SNP TSC0046854
tttatgttttgaa

SEQ ID NO: 190520 - DNA, 13 bp, Artificial Sequence
  Oligonucleotide for detection of SNP TSC0046854
ttcaaaacataaa

SEQ ID NO: 190521 - DNA, 13 bp, Artificial Sequence
  Oligonucleotide for detection of SNP TSC0046854
tttatgatttgaa

SEQ ID NO: 190522 - DNA, 13 bp, Artificial Sequence
  Oligonucleotide for detection of SNP TSC0046854
ttcaaatcataaa

SEQ ID NO: 190523 - DNA, 13 bp, Artificial Sequence
  Oligonucleotide for detection of SNP TSC0046855
aagaaagtgaaga

SEQ ID NO: 190524 - DNA, 13 bp, Artificial Sequence
  Oligonucleotide for detection of SNP TSC0046855
tcttcactttctt

SEQ ID NO: 190525 - DNA, 13 bp, Artificial Sequence
  Oligonucleotide for detection of SNP TSC0046855
aagaaattgaaga

SEQ ID NO: 190526 - DNA, 13 bp, Artificial Sequence
  Oligonucleotide for detection of SNP TSC0046855
tcttcaatttctt

SEQ ID NO: 190527 - DNA, 13 bp, Artificial Sequence
  Oligonucleotide for detection of SNP TSC0046856
ttagtaatataat

SEQ ID NO: 190528 - DNA, 13 bp, Artificial Sequence
  Oligonucleotide for detection of SNP TSC0046856
attatattactaa

SEQ ID NO: 190529 - DNA, 13 bp, Artificial Sequence
  Oligonucleotide for detection of SNP TSC0046856
ttagtattataat

SEQ ID NO: 190530 - DNA, 13 bp, Artificial Sequence
  Oligonucleotide for detection of SNP TSC0046856
attataatactaa

SEQ ID NO: 190531 - DNA, 13 bp, Artificial Sequence
  Oligonucleotide for detection of SNP TSC0046856
attgtattgttga

SEQ ID NO: 190532 - DNA, 13 bp, Artificial Sequence
  Oligonucleotide for detection of SNP TSC0046856
tcaacaatacaat

SEQ ID NO: 190533 - DNA, 13 bp, Artificial Sequence
  Oligonucleotide for detection of SNP TSC0046856
attgtagtgttga

SEQ ID NO: 190534 - DNA, 13 bp, Artificial Sequence
  Oligonucleotide for detection of SNP TSC0046856
tcaacactacaat

SEQ ID NO: 190535 - DNA, 13 bp, Artificial Sequence
  Oligonucleotide for detection of SNP TSC0046859
ataatttgattgt

SEQ ID NO: 190536 - DNA, 13 bp, Artificial Sequence
  Oligonucleotide for detection of SNP TSC0046859
acaatcaaattat

SEQ ID NO: 190537 - DNA, 13 bp, Artificial Sequence
  Oligonucleotide for detection of SNP TSC0046859
ataattggattgt

SEQ ID NO: 190538 - DNA, 13 bp, Artificial Sequence
  Oligonucleotide for detection of SNP TSC0046859
acaatccaattat

SEQ ID NO: 190539 - DNA, 13 bp, Artificial Sequence
  Oligonucleotide for detection of SNP TSC0046859
ataatttgatcgt

SEQ ID NO: 190540 - DNA, 13 bp, Artificial Sequence
  Oligonucleotide for detection of SNP TSC0046859
acgatcaaattat

SEQ ID NO: 190541 - DNA, 13 bp, Artificial Sequence
  Oligonucleotide for detection of SNP TSC0046859
ataattggatcgt

SEQ ID NO: 190542 - DNA, 13 bp, Artificial Sequence
  Oligonucleotide for detection of SNP TSC0046859
acgatccaattat

SEQ ID NO: 190543 - DNA, 13 bp, Artificial Sequence
  Oligonucleotide for detection of SNP TSC0046859
atgattaagttat

SEQ ID NO: 190544 - DNA, 13 bp, Artificial Sequence
  Oligonucleotide for detection of SNP TSC0046859
ataacttaatcat

SEQ ID NO: 190545 - DNA, 13 bp, Artificial Sequence
  Oligonucleotide for detection of SNP TSC0046859
atgatttagttat

SEQ ID NO: 190546 - DNA, 13 bp, Artificial Sequence
  Oligonucleotide for detection of SNP TSC0046859
ataactaaatcat

SEQ ID NO: 190547 - DNA, 13 bp, Artificial Sequence
  Oligonucleotide for detection of SNP TSC0046859
acgattaagttat

SEQ ID NO: 190548 - DNA, 13 bp, Artificial Sequence
  Oligonucleotide for detection of SNP TSC0046859
ataacttaatcgt

SEQ ID NO: 190549 - DNA, 13 bp, Artificial Sequence
  Oligonucleotide for detection of SNP TSC0046859
acgatttagttat

SEQ ID NO: 190550 - DNA, 13 bp, Artificial Sequence
  Oligonucleotide for detection of SNP TSC0046859
ataactaaatcgt

SEQ ID NO: 190551 - DNA, 13 bp, Artificial Sequence
  Oligonucleotide for detection of SNP TSC0046860
ggaaatgaggaay

SEQ ID NO: 190552 - DNA, 13 bp, Artificial Sequence
  Oligonucleotide for detection of SNP TSC0046860
rttcctcatttcc

SEQ ID NO: 190553 - DNA, 13 bp, Artificial Sequence
  Oligonucleotide for detection of SNP TSC0046860
ggaaataaggaay

SEQ ID NO: 190554 - DNA, 13 bp, Artificial Sequence
  Oligonucleotide for detection of SNP TSC0046860
rttccttatttcc

SEQ ID NO: 190555 - DNA, 13 bp, Artificial Sequence
  Oligonucleotide for detection of SNP TSC0046861
tagtgtgtggtaa

SEQ ID NO: 190556 - DNA, 13 bp, Artificial Sequence
  Oligonucleotide for detection of SNP TSC0046861
ttaccacacacta

SEQ ID NO: 190557 - DNA, 13 bp, Artificial Sequence
  Oligonucleotide for detection of SNP TSC0046861
tagtgtatggtaa

SEQ ID NO: 190558 - DNA, 13 bp, Artificial Sequence
  Oligonucleotide for detection of SNP TSC0046861
ttaccatacacta

SEQ ID NO: 190559 - DNA, 13 bp, Artificial Sequence
  Oligonucleotide for detection of SNP TSC0046862
atgagttgttttt

SEQ ID NO: 190560 - DNA, 13 bp, Artificial Sequence
  Oligonucleotide for detection of SNP TSC0046862
aaaaacaactcat

SEQ ID NO: 190561 - DNA, 13 bp, Artificial Sequence
  Oligonucleotide for detection of SNP TSC0046862
atgagtcgttttt

SEQ ID NO: 190562 - DNA, 13 bp, Artificial Sequence
  Oligonucleotide for detection of SNP TSC0046862
aaaaacgactcat

SEQ ID NO: 190563 - DNA, 13 bp, Artificial Sequence
  Oligonucleotide for detection of SNP TSC0046862
agagatggtttat

SEQ ID NO: 190564 - DNA, 13 bp, Artificial Sequence
  Oligonucleotide for detection of SNP TSC0046862
ataaaccatctct

SEQ ID NO: 190565 - DNA, 13 bp, Artificial Sequence
  Oligonucleotide for detection of SNP TSC0046862
agagatagtttat

SEQ ID NO: 190566 - DNA, 13 bp, Artificial Sequence
  Oligonucleotide for detection of SNP TSC0046862
ataaactatctct

SEQ ID NO: 190567 - DNA, 13 bp, Artificial Sequence
  Oligonucleotide for detection of SNP TSC0046862
agagacggtttat

SEQ ID NO: 190568 - DNA, 13 bp, Artificial Sequence
  Oligonucleotide for detection of SNP TSC0046862
ataaaccgtctct

SEQ ID NO: 190569 - DNA, 13 bp, Artificial Sequence
  Oligonucleotide for detection of SNP TSC0046863
gaggtaggagaat

SEQ ID NO: 190570 - DNA, 13 bp, Artificial Sequence
  Oligonucleotide for detection of SNP TSC0046863
attctcctacctc

SEQ ID NO: 190571 - DNA, 13 bp, Artificial Sequence
  Oligonucleotide for detection of SNP TSC0046863
gaggtaagagaat

SEQ ID NO: 190572 - DNA, 13 bp, Artificial Sequence
  Oligonucleotide for detection of SNP TSC0046863
attctcttacctc

SEQ ID NO: 190573 - DNA, 13 bp, Artificial Sequence
  Oligonucleotide for detection of SNP TSC0046864
aatttggggggty

SEQ ID NO: 190574 - DNA, 13 bp, Artificial Sequence
  Oligonucleotide for detection of SNP TSC0046864
raccccccaaatt

SEQ ID NO: 190575 - DNA, 13 bp, Artificial Sequence
  Oligonucleotide for detection of SNP TSC0046864
aatttgaggggty

SEQ ID NO: 190576 - DNA, 13 bp, Artificial Sequence
  Oligonucleotide for detection of SNP TSC0046864
racccctcaaatt

SEQ ID NO: 190577 - DNA, 13 bp, Artificial Sequence
  Oligonucleotide for detection of SNP TSC0000356
gttaatatgggag

SEQ ID NO: 190578 - DNA, 13 bp, Artificial Sequence
  Oligonucleotide for detection of SNP TSC0000356
ctcccatattaac

SEQ ID NO: 190579 - DNA, 13 bp, Artificial Sequence
  Oligonucleotide for detection of SNP TSC0000356
gttaatttgggag

SEQ ID NO: 190580 - DNA, 13 bp, Artificial Sequence
  Oligonucleotide for detection of SNP TSC0000356
ctcccaaattaac

SEQ ID NO: 190581 - DNA, 13 bp, Artificial Sequence
  Oligonucleotide for detection of SNP TSC0000356
tttttatattaay

SEQ ID NO: 190582 - DNA, 13 bp, Artificial Sequence
  Oligonucleotide for detection of SNP TSC0000356
rttaatataaaaa

SEQ ID NO: 190583 - DNA, 13 bp, Artificial Sequence
  Oligonucleotide for detection of SNP TSC0000356
tttttaaattaay

SEQ ID NO: 190584 - DNA, 13 bp, Artificial Sequence
  Oligonucleotide for detection of SNP TSC0000356
rttaatttaaaaa

SEQ ID NO: 190585 - DNA, 13 bp, Artificial Sequence
  Oligonucleotide for detection of SNP TSC0009714
ttttttattaaag

SEQ ID NO: 190586 - DNA, 13 bp, Artificial Sequence
  Oligonucleotide for detection of SNP TSC0009714
ctttaataaaaaa

SEQ ID NO: 190587 - DNA, 13 bp, Artificial Sequence
  Oligonucleotide for detection of SNP TSC0009715
tataaagaaattt

SEQ ID NO: 190588 - DNA, 13 bp, Artificial Sequence
  Oligonucleotide for detection of SNP TSC0009715
aaatttctttata

SEQ ID NO: 190589 - DNA, 13 bp, Artificial Sequence
  Oligonucleotide for detection of SNP TSC0009715
tataaaaaaattt

SEQ ID NO: 190590 - DNA, 13 bp, Artificial Sequence
  Oligonucleotide for detection of SNP TSC0009715
aaatttttttata

SEQ ID NO: 190591 - DNA, 13 bp, Artificial Sequence
  Oligonucleotide for detection of SNP TSC0046867
tataaaataatay

SEQ ID NO: 190592 - DNA, 13 bp, Artificial Sequence
  Oligonucleotide for detection of SNP TSC0046867
rtattattttata

SEQ ID NO: 190593 - DNA, 13 bp, Artificial Sequence
  Oligonucleotide for detection of SNP TSC0046867
tataaagtaatay

SEQ ID NO: 190594 - DNA, 13 bp, Artificial Sequence
  Oligonucleotide for detection of SNP TSC0046867
rtattactttata

SEQ ID NO: 190595 - DNA, 13 bp, Artificial Sequence
  Oligonucleotide for detection of SNP TSC0046868
tatttagtgtgga

SEQ ID NO: 190596 - DNA, 13 bp, Artificial Sequence
  Oligonucleotide for detection of SNP TSC0046868
tccacactaaata

SEQ ID NO: 190597 - DNA, 13 bp, Artificial Sequence
  Oligonucleotide for detection of SNP TSC0046868
tatttaatgtgga

SEQ ID NO: 190598 - DNA, 13 bp, Artificial Sequence
  Oligonucleotide for detection of SNP TSC0046868
tccacattaaata

SEQ ID NO: 190599 - DNA, 13 bp, Artificial Sequence
  Oligonucleotide for detection of SNP TSC0046868
tatttagtgcgga

SEQ ID NO: 190600 - DNA, 13 bp, Artificial Sequence
  Oligonucleotide for detection of SNP TSC0046868
tccgcactaaata

SEQ ID NO: 190601 - DNA, 13 bp, Artificial Sequence
  Oligonucleotide for detection of SNP TSC0046868
tatttaatgcgga

SEQ ID NO: 190602 - DNA, 13 bp, Artificial Sequence
  Oligonucleotide for detection of SNP TSC0046868
tccgcattaaata

SEQ ID NO: 190603 - DNA, 13 bp, Artificial Sequence
  Oligonucleotide for detection of SNP TSC0046869
tgaagtatagtaa

SEQ ID NO: 190604 - DNA, 13 bp, Artificial Sequence
  Oligonucleotide for detection of SNP TSC0046869
ttactatacttca

SEQ ID NO: 190605 - DNA, 13 bp, Artificial Sequence
  Oligonucleotide for detection of SNP TSC0046869
tgaagtttagtaa

SEQ ID NO: 190606 - DNA, 13 bp, Artificial Sequence
  Oligonucleotide for detection of SNP TSC0046869
ttactaaacttca

SEQ ID NO: 190607 - DNA, 13 bp, Artificial Sequence
  Oligonucleotide for detection of SNP TSC0046869
cgaagtatagtaa

SEQ ID NO: 190608 - DNA, 13 bp, Artificial Sequence
  Oligonucleotide for detection of SNP TSC0046869
ttactatacttcg

SEQ ID NO: 190609 - DNA, 13 bp, Artificial Sequence
  Oligonucleotide for detection of SNP TSC0046869
cgaagtttagtaa

SEQ ID NO: 190610 - DNA, 13 bp, Artificial Sequence
  Oligonucleotide for detection of SNP TSC0046869
ttactaaacttcg

SEQ ID NO: 190611 - DNA, 13 bp, Artificial Sequence
  Oligonucleotide for detection of SNP TSC0046870
ttggggggatatg

SEQ ID NO: 190612 - DNA, 13 bp, Artificial Sequence
  Oligonucleotide for detection of SNP TSC0046870
catatccccccaa

SEQ ID NO: 190613 - DNA, 13 bp, Artificial Sequence
  Oligonucleotide for detection of SNP TSC0046870
ttggggagatatg

SEQ ID NO: 190614 - DNA, 13 bp, Artificial Sequence
  Oligonucleotide for detection of SNP TSC0046870
catatctccccaa

SEQ ID NO: 190615 - DNA, 13 bp, Artificial Sequence
  Oligonucleotide for detection of SNP TSC0046872
ttttattgagttt

SEQ ID NO: 190616 - DNA, 13 bp, Artificial Sequence
  Oligonucleotide for detection of SNP TSC0046872
aaactcaataaaa

SEQ ID NO: 190617 - DNA, 13 bp, Artificial Sequence
  Oligonucleotide for detection of SNP TSC0046872
ttttatcgagttt

SEQ ID NO: 190618 - DNA, 13 bp, Artificial Sequence
  Oligonucleotide for detection of SNP TSC0046872
aaactcgataaaa

SEQ ID NO: 190619 - DNA, 13 bp, Artificial Sequence
  Oligonucleotide for detection of SNP TSC0046872
aaatttggtaaaa

SEQ ID NO: 190620 - DNA, 13 bp, Artificial Sequence
  Oligonucleotide for detection of SNP TSC0046872
ttttaccaaattt

SEQ ID NO: 190621 - DNA, 13 bp, Artificial Sequence
  Oligonucleotide for detection of SNP TSC0046872
aaatttagtaaaa

SEQ ID NO: 190622 - DNA, 13 bp, Artificial Sequence
  Oligonucleotide for detection of SNP TSC0046872
ttttactaaattt

SEQ ID NO: 190623 - DNA, 13 bp, Artificial Sequence
  Oligonucleotide for detection of SNP TSC0046872
aaattcggtaaaa

SEQ ID NO: 190624 - DNA, 13 bp, Artificial Sequence
  Oligonucleotide for detection of SNP TSC0046872
ttttaccgaattt

SEQ ID NO: 190625 - DNA, 13 bp, Artificial Sequence
  Oligonucleotide for detection of SNP TSC0046874
agtaggtagttgt

SEQ ID NO: 190626 - DNA, 13 bp, Artificial Sequence
  Oligonucleotide for detection of SNP TSC0046874
acaactacctact

SEQ ID NO: 190627 - DNA, 13 bp, Artificial Sequence
  Oligonucleotide for detection of SNP TSC0046874
agtagggagttgt

SEQ ID NO: 190628 - DNA, 13 bp, Artificial Sequence
  Oligonucleotide for detection of SNP TSC0046874
acaactccctact

SEQ ID NO: 190629 - DNA, 13 bp, Artificial Sequence
  Oligonucleotide for detection of SNP TSC0046874
ataattatttgtt

SEQ ID NO: 190630 - DNA, 13 bp, Artificial Sequence
  Oligonucleotide for detection of SNP TSC0046874
aacaaataattat

SEQ ID NO: 190631 - DNA, 13 bp, Artificial Sequence
  Oligonucleotide for detection of SNP TSC0046874
ataattttttgtt

SEQ ID NO: 190632 - DNA, 13 bp, Artificial Sequence
  Oligonucleotide for detection of SNP TSC0046874
aacaaaaaattat

SEQ ID NO: 190633 - DNA, 13 bp, Artificial Sequence
  Oligonucleotide for detection of SNP TSC0046875
taaattagtggga

SEQ ID NO: 190634 - DNA, 13 bp, Artificial Sequence
  Oligonucleotide for detection of SNP TSC0046875
tcccactaattta

SEQ ID NO: 190635 - DNA, 13 bp, Artificial Sequence
  Oligonucleotide for detection of SNP TSC0046875
taaatttgtggga

SEQ ID NO: 190636 - DNA, 13 bp, Artificial Sequence
  Oligonucleotide for detection of SNP TSC0046875
tcccacaaattta

SEQ ID NO: 190637 - DNA, 13 bp, Artificial Sequence
  Oligonucleotide for detection of SNP TSC0046875
ttttattgattta

SEQ ID NO: 190638 - DNA, 13 bp, Artificial Sequence
  Oligonucleotide for detection of SNP TSC0046875
taaatcaataaaa

SEQ ID NO: 190639 - DNA, 13 bp, Artificial Sequence
  Oligonucleotide for detection of SNP TSC0046875
ttttatagattta

SEQ ID NO: 190640 - DNA, 13 bp, Artificial Sequence
  Oligonucleotide for detection of SNP TSC0046875
taaatctataaaa

SEQ ID NO: 190641 - DNA, 13 bp, Artificial Sequence
  Oligonucleotide for detection of SNP TSC0046876
tttttttgataay

SEQ ID NO: 190642 - DNA, 13 bp, Artificial Sequence
  Oligonucleotide for detection of SNP TSC0046876
rttatcaaaaaaa

SEQ ID NO: 190643 - DNA, 13 bp, Artificial Sequence
  Oligonucleotide for detection of SNP TSC0046876
ttttttcgataay

SEQ ID NO: 190644 - DNA, 13 bp, Artificial Sequence
  Oligonucleotide for detection of SNP TSC0046876
rttatcgaaaaaa

SEQ ID NO: 190645 - DNA, 13 bp, Artificial Sequence
  Oligonucleotide for detection of SNP TSC0046876
gttattgagggga

SEQ ID NO: 190646 - DNA, 13 bp, Artificial Sequence
  Oligonucleotide for detection of SNP TSC0046876
tcccctcaataac

SEQ ID NO: 190647 - DNA, 13 bp, Artificial Sequence
  Oligonucleotide for detection of SNP TSC0046876
gttattaagggga

SEQ ID NO: 190648 - DNA, 13 bp, Artificial Sequence
  Oligonucleotide for detection of SNP TSC0046876
tccccttaataac

SEQ ID NO: 190649 - DNA, 13 bp, Artificial Sequence
  Oligonucleotide for detection of SNP TSC0046876
gttatcgagggga

SEQ ID NO: 190650 - DNA, 13 bp, Artificial Sequence
  Oligonucleotide for detection of SNP TSC0046876
tcccctcgataac

SEQ ID NO: 190651 - DNA, 13 bp, Artificial Sequence
  Oligonucleotide for detection of SNP TSC0046877
ttttaaagttgag

SEQ ID NO: 190652 - DNA, 13 bp, Artificial Sequence
  Oligonucleotide for detection of SNP TSC0046877
ctcaactttaaaa

SEQ ID NO: 190653 - DNA, 13 bp, Artificial Sequence
  Oligonucleotide for detection of SNP TSC0046877
ttttaatgttgag

SEQ ID NO: 190654 - DNA, 13 bp, Artificial Sequence
  Oligonucleotide for detection of SNP TSC0046877
ctcaacattaaaa

SEQ ID NO: 190655 - DNA, 13 bp, Artificial Sequence
  Oligonucleotide for detection of SNP TSC0046877
ttttaacgttgag

SEQ ID NO: 190656 - DNA, 13 bp, Artificial Sequence
  Oligonucleotide for detection of SNP TSC0046877
ctcaacgttaaaa

SEQ ID NO: 190657 - DNA, 13 bp, Artificial Sequence
  Oligonucleotide for detection of SNP TSC0046877
tttagttttggga

SEQ ID NO: 190658 - DNA, 13 bp, Artificial Sequence
  Oligonucleotide for detection of SNP TSC0046877
tcccaaaactaaa

SEQ ID NO: 190659 - DNA, 13 bp, Artificial Sequence
  Oligonucleotide for detection of SNP TSC0046877
tttagtgttggga

SEQ ID NO: 190660 - DNA, 13 bp, Artificial Sequence
  Oligonucleotide for detection of SNP TSC0046877
tcccaacactaaa

SEQ ID NO: 190661 - DNA, 13 bp, Artificial Sequence
  Oligonucleotide for detection of SNP TSC0046877
tttagcgttggga

SEQ ID NO: 190662 - DNA, 13 bp, Artificial Sequence
  Oligonucleotide for detection of SNP TSC0046877
tcccaacgctaaa

SEQ ID NO: 190663 - DNA, 13 bp, Artificial Sequence
  Oligonucleotide for detection of SNP TSC0046878
ttgagaggttgay

SEQ ID NO: 190664 - DNA, 13 bp, Artificial Sequence
  Oligonucleotide for detection of SNP TSC0046878
rtcaacctctcaa

SEQ ID NO: 190665 - DNA, 13 bp, Artificial Sequence
  Oligonucleotide for detection of SNP TSC0046878
ttgagaagttgay

SEQ ID NO: 190666 - DNA, 13 bp, Artificial Sequence
  Oligonucleotide for detection of SNP TSC0046878
rtcaacttctcaa

SEQ ID NO: 190667 - DNA, 13 bp, Artificial Sequence
  Oligonucleotide for detection of SNP TSC0046879
gaggataaaaata

SEQ ID NO: 190668 - DNA, 13 bp, Artificial Sequence
  Oligonucleotide for detection of SNP TSC0046879
tatttttatcctc

SEQ ID NO: 190669 - DNA, 13 bp, Artificial Sequence
  Oligonucleotide for detection of SNP TSC0046879
gaggatgaaaata

SEQ ID NO: 190670 - DNA, 13 bp, Artificial Sequence
  Oligonucleotide for detection of SNP TSC0046879
tattttcatcctc

SEQ ID NO: 190671 - DNA, 13 bp, Artificial Sequence
  Oligonucleotide for detection of SNP TSC0046879
gaggacgaaaata

SEQ ID NO: 190672 - DNA, 13 bp, Artificial Sequence
  Oligonucleotide for detection of SNP TSC0046879
tattttcgtcctc

SEQ ID NO: 190673 - DNA, 13 bp, Artificial Sequence
  Oligonucleotide for detection of SNP TSC0046883
agttaagttgatt

SEQ ID NO: 190674 - DNA, 13 bp, Artificial Sequence
  Oligonucleotide for detection of SNP TSC0046883
aatcaacttaact

SEQ ID NO: 190675 - DNA, 13 bp, Artificial Sequence
  Oligonucleotide for detection of SNP TSC0046883
agttaaattgatt

SEQ ID NO: 190676 - DNA, 13 bp, Artificial Sequence
  Oligonucleotide for detection of SNP TSC0046883
aatcaatttaact

SEQ ID NO: 190677 - DNA, 13 bp, Artificial Sequence
  Oligonucleotide for detection of SNP TSC0046884
tttttttggggay

SEQ ID NO: 190678 - DNA, 13 bp, Artificial Sequence
  Oligonucleotide for detection of SNP TSC0046884
rtccccaaaaaaa

SEQ ID NO: 190679 - DNA, 13 bp, Artificial Sequence
  Oligonucleotide for detection of SNP TSC0046884
ttttttgggggay

SEQ ID NO: 190680 - DNA, 13 bp, Artificial Sequence
  Oligonucleotide for detection of SNP TSC0046884
rtcccccaaaaaa

SEQ ID NO: 190681 - DNA, 13 bp, Artificial Sequence
  Oligonucleotide for detection of SNP TSC0046885
atggtgtgattty

SEQ ID NO: 190682 - DNA, 13 bp, Artificial Sequence
  Oligonucleotide for detection of SNP TSC0046885
raaatcacaccat

SEQ ID NO: 190683 - DNA, 13 bp, Artificial Sequence
  Oligonucleotide for detection of SNP TSC0046885
atggcgtgattty

SEQ ID NO: 190684 - DNA, 13 bp, Artificial Sequence
  Oligonucleotide for detection of SNP TSC0046885
raaatcacgccat

SEQ ID NO: 190685 - DNA, 13 bp, Artificial Sequence
  Oligonucleotide for detection of SNP TSC0046885
atggtgcgattty

SEQ ID NO: 190686 - DNA, 13 bp, Artificial Sequence
  Oligonucleotide for detection of SNP TSC0046885
raaatcgcaccat

SEQ ID NO: 190687 - DNA, 13 bp, Artificial Sequence
  Oligonucleotide for detection of SNP TSC0046885
atggcgcgattty

SEQ ID NO: 190688 - DNA, 13 bp, Artificial Sequence
  Oligonucleotide for detection of SNP TSC0046885
raaatcgcgccat

SEQ ID NO: 190689 - DNA, 13 bp, Artificial Sequence
  Oligonucleotide for detection of SNP TSC0046885
gagattgtgttat

SEQ ID NO: 190690 - DNA, 13 bp, Artificial Sequence
  Oligonucleotide for detection of SNP TSC0046885
ataacacaatctc

SEQ ID NO: 190691 - DNA, 13 bp, Artificial Sequence
  Oligonucleotide for detection of SNP TSC0046885
gagattatgttat

SEQ ID NO: 190692 - DNA, 13 bp, Artificial Sequence
  Oligonucleotide for detection of SNP TSC0046885
ataacataatctc

SEQ ID NO: 190693 - DNA, 13 bp, Artificial Sequence
  Oligonucleotide for detection of SNP TSC0046885
gagatcgtgttat

SEQ ID NO: 190694 - DNA, 13 bp, Artificial Sequence
  Oligonucleotide for detection of SNP TSC0046885
ataacacgatctc

SEQ ID NO: 190695 - DNA, 13 bp, Artificial Sequence
  Oligonucleotide for detection of SNP TSC0046885
gagattacgttat

SEQ ID NO: 190696 - DNA, 13 bp, Artificial Sequence
  Oligonucleotide for detection of SNP TSC0046885
ataacgtaatctc

SEQ ID NO: 190697 - DNA, 13 bp, Artificial Sequence
  Oligonucleotide for detection of SNP TSC0046885
gagattgcgttat

SEQ ID NO: 190698 - DNA, 13 bp, Artificial Sequence
  Oligonucleotide for detection of SNP TSC0046885
ataacgcaatctc

SEQ ID NO: 190699 - DNA, 13 bp, Artificial Sequence
  Oligonucleotide for detection of SNP TSC0046885
gagatcgcgttat

SEQ ID NO: 190700 - DNA, 13 bp, Artificial Sequence
  Oligonucleotide for detection of SNP TSC0046885
ataacgcgatctc

SEQ ID NO: 190701 - DNA, 13 bp, Artificial Sequence
  Oligonucleotide for detection of SNP TSC0046891
gtttttaggttcg

SEQ ID NO: 190702 - DNA, 13 bp, Artificial Sequence
  Oligonucleotide for detection of SNP TSC0046891
cgaacctaaaaac

SEQ ID NO: 190703 - DNA, 13 bp, Artificial Sequence
  Oligonucleotide for detection of SNP TSC0046891
gtttttgggttcg

SEQ ID NO: 190704 - DNA, 13 bp, Artificial Sequence
  Oligonucleotide for detection of SNP TSC0046891
cgaacccaaaaac

SEQ ID NO: 190705 - DNA, 13 bp, Artificial Sequence
  Oligonucleotide for detection of SNP TSC0046892
ggtttgaaataay

SEQ ID NO: 190706 - DNA, 13 bp, Artificial Sequence
  Oligonucleotide for detection of SNP TSC0046892
rttatttcaaacc

SEQ ID NO: 190707 - DNA, 13 bp, Artificial Sequence
  Oligonucleotide for detection of SNP TSC0046892
ggtttggaataay

SEQ ID NO: 190708 - DNA, 13 bp, Artificial Sequence
  Oligonucleotide for detection of SNP TSC0046892
rttattccaaacc

SEQ ID NO: 190709 - DNA, 13 bp, Artificial Sequence
  Oligonucleotide for detection of SNP TSC0046892
ggttcgaaataay

SEQ ID NO: 190710 - DNA, 13 bp, Artificial Sequence
  Oligonucleotide for detection of SNP TSC0046892
rttatttcgaacc

SEQ ID NO: 190711 - DNA, 13 bp, Artificial Sequence
  Oligonucleotide for detection of SNP TSC0046892
ggttcggaataay

SEQ ID NO: 190712 - DNA, 13 bp, Artificial Sequence
  Oligonucleotide for detection of SNP TSC0046892
rttattccgaacc

SEQ ID NO: 190713 - DNA, 13 bp, Artificial Sequence
  Oligonucleotide for detection of SNP TSC0046893
attgtaaggtggg

SEQ ID NO: 190714 - DNA, 13 bp, Artificial Sequence
  Oligonucleotide for detection of SNP TSC0046893
cccaccttacaat

SEQ ID NO: 190715 - DNA, 13 bp, Artificial Sequence
  Oligonucleotide for detection of SNP TSC0046893
attgtagggtggg

SEQ ID NO: 190716 - DNA, 13 bp, Artificial Sequence
  Oligonucleotide for detection of SNP TSC0046893
cccaccctacaat

SEQ ID NO: 190717 - DNA, 13 bp, Artificial Sequence
  Oligonucleotide for detection of SNP TSC0046894
taattagagtttg

SEQ ID NO: 190718 - DNA, 13 bp, Artificial Sequence
  Oligonucleotide for detection of SNP TSC0046894
caaactctaatta

SEQ ID NO: 190719 - DNA, 13 bp, Artificial Sequence
  Oligonucleotide for detection of SNP TSC0046894
taattaaagtttg

SEQ ID NO: 190720 - DNA, 13 bp, Artificial Sequence
  Oligonucleotide for detection of SNP TSC0046894
caaactttaatta

SEQ ID NO: 190721 - DNA, 13 bp, Artificial Sequence
  Oligonucleotide for detection of SNP TSC0046895
aatttaattataa

SEQ ID NO: 190722 - DNA, 13 bp, Artificial Sequence
  Oligonucleotide for detection of SNP TSC0046895
ttataattaaatt

SEQ ID NO: 190723 - DNA, 13 bp, Artificial Sequence
  Oligonucleotide for detection of SNP TSC0046895
aatttagttataa

SEQ ID NO: 190724 - DNA, 13 bp, Artificial Sequence
  Oligonucleotide for detection of SNP TSC0046895
ttataactaaatt

SEQ ID NO: 190725 - DNA, 13 bp, Artificial Sequence
  Oligonucleotide for detection of SNP TSC0046896
tgagtttggagaa

SEQ ID NO: 190726 - DNA, 13 bp, Artificial Sequence
  Oligonucleotide for detection of SNP TSC0046896
ttctccaaactca

SEQ ID NO: 190727 - DNA, 13 bp, Artificial Sequence
  Oligonucleotide for detection of SNP TSC0046896
tgagttcggagaa

SEQ ID NO: 190728 - DNA, 13 bp, Artificial Sequence
  Oligonucleotide for detection of SNP TSC0046896
ttctccgaactca

SEQ ID NO: 190729 - DNA, 13 bp, Artificial Sequence
  Oligonucleotide for detection of SNP TSC0046897
gaaattttatatt

SEQ ID NO: 190730 - DNA, 13 bp, Artificial Sequence
  Oligonucleotide for detection of SNP TSC0046897
aatataaaatttc

SEQ ID NO: 190731 - DNA, 13 bp, Artificial Sequence
  Oligonucleotide for detection of SNP TSC0046897
gaaattgtatatt

SEQ ID NO: 190732 - DNA, 13 bp, Artificial Sequence
  Oligonucleotide for detection of SNP TSC0046897
aatatacaatttc

SEQ ID NO: 190733 - DNA, 13 bp, Artificial Sequence
  Oligonucleotide for detection of SNP TSC0046897
agtataaaattty

SEQ ID NO: 190734 - DNA, 13 bp, Artificial Sequence
  Oligonucleotide for detection of SNP TSC0046897
raaattttatact

SEQ ID NO: 190735 - DNA, 13 bp, Artificial Sequence
  Oligonucleotide for detection of SNP TSC0046897
agtatataattty

SEQ ID NO: 190736 - DNA, 13 bp, Artificial Sequence
  Oligonucleotide for detection of SNP TSC0046897
raaattatatact

SEQ ID NO: 190737 - DNA, 13 bp, Artificial Sequence
  Oligonucleotide for detection of SNP TSC0046898
ataattaaaagay

SEQ ID NO: 190738 - DNA, 13 bp, Artificial Sequence
  Oligonucleotide for detection of SNP TSC0046898
rtcttttaattat

SEQ ID NO: 190739 - DNA, 13 bp, Artificial Sequence
  Oligonucleotide for detection of SNP TSC0046898
ataattgaaagay

SEQ ID NO: 190740 - DNA, 13 bp, Artificial Sequence
  Oligonucleotide for detection of SNP TSC0046898
rtctttcaattat

SEQ ID NO: 190741 - DNA, 13 bp, Artificial Sequence
  Oligonucleotide for detection of SNP TSC0046898
ataatcgaaagay

SEQ ID NO: 190742 - DNA, 13 bp, Artificial Sequence
  Oligonucleotide for detection of SNP TSC0046898
rtctttcgattat

SEQ ID NO: 190743 - DNA, 13 bp, Artificial Sequence
  Oligonucleotide for detection of SNP TSC0046898
gttttttgattgt

SEQ ID NO: 190744 - DNA, 13 bp, Artificial Sequence
  Oligonucleotide for detection of SNP TSC0046898
acaatcaaaaaac

SEQ ID NO: 190745 - DNA, 13 bp, Artificial Sequence
  Oligonucleotide for detection of SNP TSC0046898
gtttttcgattgt

SEQ ID NO: 190746 - DNA, 13 bp, Artificial Sequence
  Oligonucleotide for detection of SNP TSC0046898
acaatcgaaaaac

SEQ ID NO: 190747 - DNA, 13 bp, Artificial Sequence
  Oligonucleotide for detection of SNP TSC0046899
ttattatggtttt

SEQ ID NO: 190748 - DNA, 13 bp, Artificial Sequence
  Oligonucleotide for detection of SNP TSC0046899
aaaaccataataa

SEQ ID NO: 190749 - DNA, 13 bp, Artificial Sequence
  Oligonucleotide for detection of SNP TSC0046899
ttattacggtttt

SEQ ID NO: 190750 - DNA, 13 bp, Artificial Sequence
  Oligonucleotide for detection of SNP TSC0046899
aaaaccgtaataa

SEQ ID NO: 190751 - DNA, 13 bp, Artificial Sequence
  Oligonucleotide for detection of SNP TSC0046899
agaattgtaataa

SEQ ID NO: 190752 - DNA, 13 bp, Artificial Sequence
  Oligonucleotide for detection of SNP TSC0046899
ttattacaattct

SEQ ID NO: 190753 - DNA, 13 bp, Artificial Sequence
  Oligonucleotide for detection of SNP TSC0046899
agaattataataa

SEQ ID NO: 190754 - DNA, 13 bp, Artificial Sequence
  Oligonucleotide for detection of SNP TSC0046899
ttattataattct

SEQ ID NO: 190755 - DNA, 13 bp, Artificial Sequence
  Oligonucleotide for detection of SNP TSC0046899
agaatcgtaataa

SEQ ID NO: 190756 - DNA, 13 bp, Artificial Sequence
  Oligonucleotide for detection of SNP TSC0046899
ttattacgattct

SEQ ID NO: 190757 - DNA, 13 bp, Artificial Sequence
  Oligonucleotide for detection of SNP TSC0046900
ttatgttgaattt

SEQ ID NO: 190758 - DNA, 13 bp, Artificial Sequence
  Oligonucleotide for detection of SNP TSC0046900
aaattcaacataa

SEQ ID NO: 190759 - DNA, 13 bp, Artificial Sequence
  Oligonucleotide for detection of SNP TSC0046900
ttatgtggaattt

SEQ ID NO: 190760 - DNA, 13 bp, Artificial Sequence
  Oligonucleotide for detection of SNP TSC0046900
aaattccacataa

SEQ ID NO: 190761 - DNA, 13 bp, Artificial Sequence
  Oligonucleotide for detection of SNP TSC0046901
atataatgaataa

SEQ ID NO: 190762 - DNA, 13 bp, Artificial Sequence
  Oligonucleotide for detection of SNP TSC0046901
ttattcattatat

SEQ ID NO: 190763 - DNA, 13 bp, Artificial Sequence
  Oligonucleotide for detection of SNP TSC0046901
ttgttcgttgtat

SEQ ID NO: 190764 - DNA, 13 bp, Artificial Sequence
  Oligonucleotide for detection of SNP TSC0046901
atacaacgaacaa

SEQ ID NO: 190765 - DNA, 13 bp, Artificial Sequence
  Oligonucleotide for detection of SNP TSC0046902
ttgtatgttgaaa

SEQ ID NO: 190766 - DNA, 13 bp, Artificial Sequence
  Oligonucleotide for detection of SNP TSC0046902
tttcaacatacaa

SEQ ID NO: 190767 - DNA, 13 bp, Artificial Sequence
  Oligonucleotide for detection of SNP TSC0046902
ttgtatattgaaa

SEQ ID NO: 190768 - DNA, 13 bp, Artificial Sequence
  Oligonucleotide for detection of SNP TSC0046902
tttcaatatacaa

SEQ ID NO: 190769 - DNA, 13 bp, Artificial Sequence
  Oligonucleotide for detection of SNP TSC0046903
aaatatgtggata

SEQ ID NO: 190770 - DNA, 13 bp, Artificial Sequence
  Oligonucleotide for detection of SNP TSC0046903
tatccacatattt

SEQ ID NO: 190771 - DNA, 13 bp, Artificial Sequence
  Oligonucleotide for detection of SNP TSC0046903
aaatatttggata

SEQ ID NO: 190772 - DNA, 13 bp, Artificial Sequence
  Oligonucleotide for detection of SNP TSC0046903
tatccaaatattt

SEQ ID NO: 190773 - DNA, 13 bp, Artificial Sequence
  Oligonucleotide for detection of SNP TSC0046903
aaatacgtggata

SEQ ID NO: 190774 - DNA, 13 bp, Artificial Sequence
  Oligonucleotide for detection of SNP TSC0046903
tatccacgtattt

SEQ ID NO: 190775 - DNA, 13 bp, Artificial Sequence
  Oligonucleotide for detection of SNP TSC0046904
atttgtgttatat

SEQ ID NO: 190776 - DNA, 13 bp, Artificial Sequence
  Oligonucleotide for detection of SNP TSC0046904
atataacacaaat

SEQ ID NO: 190777 - DNA, 13 bp, Artificial Sequence
  Oligonucleotide for detection of SNP TSC0046904
atttgtattatat

SEQ ID NO: 190778 - DNA, 13 bp, Artificial Sequence
  Oligonucleotide for detection of SNP TSC0046904
atataatacaaat

SEQ ID NO: 190779 - DNA, 13 bp, Artificial Sequence
  Oligonucleotide for detection of SNP TSC0046907
atgttgggttaga

SEQ ID NO: 190780 - DNA, 13 bp, Artificial Sequence
  Oligonucleotide for detection of SNP TSC0046907
tctaacccaacat

SEQ ID NO: 190781 - DNA, 13 bp, Artificial Sequence
  Oligonucleotide for detection of SNP TSC0046907
atgttgagttaga

SEQ ID NO: 190782 - DNA, 13 bp, Artificial Sequence
  Oligonucleotide for detection of SNP TSC0046907
tctaactcaacat

SEQ ID NO: 190783 - DNA, 13 bp, Artificial Sequence
  Oligonucleotide for detection of SNP TSC0046908
taattttgtttat

SEQ ID NO: 190784 - DNA, 13 bp, Artificial Sequence
  Oligonucleotide for detection of SNP TSC0046908
ataaacaaaatta

SEQ ID NO: 190785 - DNA, 13 bp, Artificial Sequence
  Oligonucleotide for detection of SNP TSC0046908
taatttcgtttat

SEQ ID NO: 190786 - DNA, 13 bp, Artificial Sequence
  Oligonucleotide for detection of SNP TSC0046908
ataaacgaaatta

SEQ ID NO: 190787 - DNA, 13 bp, Artificial Sequence
  Oligonucleotide for detection of SNP TSC0046908
atgaatgggatta

SEQ ID NO: 190788 - DNA, 13 bp, Artificial Sequence
  Oligonucleotide for detection of SNP TSC0046908
taatcccattcat

SEQ ID NO: 190789 - DNA, 13 bp, Artificial Sequence
  Oligonucleotide for detection of SNP TSC0046908
atgaataggatta

SEQ ID NO: 190790 - DNA, 13 bp, Artificial Sequence
  Oligonucleotide for detection of SNP TSC0046908
taatcctattcat

SEQ ID NO: 190791 - DNA, 13 bp, Artificial Sequence
  Oligonucleotide for detection of SNP TSC0046908
atgaacgggatta

SEQ ID NO: 190792 - DNA, 13 bp, Artificial Sequence
  Oligonucleotide for detection of SNP TSC0046908
taatcccgttcat

SEQ ID NO: 190793 - DNA, 13 bp, Artificial Sequence
  Oligonucleotide for detection of SNP TSC0046910
gtttgtgtgtaaa

SEQ ID NO: 190794 - DNA, 13 bp, Artificial Sequence
  Oligonucleotide for detection of SNP TSC0046910
tttacacacaaac

SEQ ID NO: 190795 - DNA, 13 bp, Artificial Sequence
  Oligonucleotide for detection of SNP TSC0046910
gtttgtatgtaaa

SEQ ID NO: 190796 - DNA, 13 bp, Artificial Sequence
  Oligonucleotide for detection of SNP TSC0046910
tttacatacaaac

SEQ ID NO: 190797 - DNA, 13 bp, Artificial Sequence
  Oligonucleotide for detection of SNP TSC0046911
aatataaaaaaaa

SEQ ID NO: 190798 - DNA, 13 bp, Artificial Sequence
  Oligonucleotide for detection of SNP TSC0046911
ttttttttatatt

SEQ ID NO: 190799 - DNA, 13 bp, Artificial Sequence
  Oligonucleotide for detection of SNP TSC0046911
ttttttgtgtgtt

SEQ ID NO: 190800 - DNA, 13 bp, Artificial Sequence
  Oligonucleotide for detection of SNP TSC0046911
aacacacaaaaaa

SEQ ID NO: 190801 - DNA, 13 bp, Artificial Sequence
  Oligonucleotide for detection of SNP TSC0046915
tataaaaaaggtg

SEQ ID NO: 190802 - DNA, 13 bp, Artificial Sequence
  Oligonucleotide for detection of SNP TSC0046915
caccttttttata

SEQ ID NO: 190803 - DNA, 13 bp, Artificial Sequence
  Oligonucleotide for detection of SNP TSC0046915
tataaagaaggtg

SEQ ID NO: 190804 - DNA, 13 bp, Artificial Sequence
  Oligonucleotide for detection of SNP TSC0046915
caccttctttata

SEQ ID NO: 190805 - DNA, 13 bp, Artificial Sequence
  Oligonucleotide for detection of SNP TSC0046918
tatatgttttata

SEQ ID NO: 190806 - DNA, 13 bp, Artificial Sequence
  Oligonucleotide for detection of SNP TSC0046918
tataaaacatata

SEQ ID NO: 190807 - DNA, 13 bp, Artificial Sequence
  Oligonucleotide for detection of SNP TSC0046918
tgtaaagtatata

SEQ ID NO: 190808 - DNA, 13 bp, Artificial Sequence
  Oligonucleotide for detection of SNP TSC0046918
tatatactttaca

SEQ ID NO: 190809 - DNA, 13 bp, Artificial Sequence
  Oligonucleotide for detection of SNP TSC0046918
tgtaaattatata

SEQ ID NO: 190810 - DNA, 13 bp, Artificial Sequence
  Oligonucleotide for detection of SNP TSC0046918
tatataatttaca

SEQ ID NO: 190811 - DNA, 13 bp, Artificial Sequence
  Oligonucleotide for detection of SNP TSC0046919
attgaatgatgta

SEQ ID NO: 190812 - DNA, 13 bp, Artificial Sequence
  Oligonucleotide for detection of SNP TSC0046919
tacatcattcaat

SEQ ID NO: 190813 - DNA, 13 bp, Artificial Sequence
  Oligonucleotide for detection of SNP TSC0046919
attgaacgatgta

SEQ ID NO: 190814 - DNA, 13 bp, Artificial Sequence
  Oligonucleotide for detection of SNP TSC0046919
tacatcgttcaat

SEQ ID NO: 190815 - DNA, 13 bp, Artificial Sequence
  Oligonucleotide for detection of SNP TSC0046919
tgtattgtttagt

SEQ ID NO: 190816 - DNA, 13 bp, Artificial Sequence
  Oligonucleotide for detection of SNP TSC0046919
actaaacaataca

SEQ ID NO: 190817 - DNA, 13 bp, Artificial Sequence
  Oligonucleotide for detection of SNP TSC0046919
tgtatcgtttagt

SEQ ID NO: 190818 - DNA, 13 bp, Artificial Sequence
  Oligonucleotide for detection of SNP TSC0046919
actaaacgataca

SEQ ID NO: 190819 - DNA, 13 bp, Artificial Sequence
  Oligonucleotide for detection of SNP TSC0046920
ttaaaatggaggt

SEQ ID NO: 190820 - DNA, 13 bp, Artificial Sequence
  Oligonucleotide for detection of SNP TSC0046920
acctccattttaa

SEQ ID NO: 190821 - DNA, 13 bp, Artificial Sequence
  Oligonucleotide for detection of SNP TSC0046920
ttaaaacggaggt

SEQ ID NO: 190822 - DNA, 13 bp, Artificial Sequence
  Oligonucleotide for detection of SNP TSC0046920
acctccgttttaa

SEQ ID NO: 190823 - DNA, 13 bp, Artificial Sequence
  Oligonucleotide for detection of SNP TSC0046921
aatataggagagt

SEQ ID NO: 190824 - DNA, 13 bp, Artificial Sequence
  Oligonucleotide for detection of SNP TSC0046921
actctcctatatt

SEQ ID NO: 190825 - DNA, 13 bp, Artificial Sequence
  Oligonucleotide for detection of SNP TSC0046921
aatataagagagt

SEQ ID NO: 190826 - DNA, 13 bp, Artificial Sequence
  Oligonucleotide for detection of SNP TSC0046921
actctcttatatt

SEQ ID NO: 190827 - DNA, 13 bp, Artificial Sequence
  Oligonucleotide for detection of SNP TSC0046922
gtaagaagaattt

SEQ ID NO: 190828 - DNA, 13 bp, Artificial Sequence
  Oligonucleotide for detection of SNP TSC0046922
aaattcttcttac

SEQ ID NO: 190829 - DNA, 13 bp, Artificial Sequence
  Oligonucleotide for detection of SNP TSC0046922
gtaagaggaattt

SEQ ID NO: 190830 - DNA, 13 bp, Artificial Sequence
  Oligonucleotide for detection of SNP TSC0046922
aaattcctcttac

SEQ ID NO: 190831 - DNA, 13 bp, Artificial Sequence
  Oligonucleotide for detection of SNP TSC0046931
tttgtagaattat

SEQ ID NO: 190832 - DNA, 13 bp, Artificial Sequence
  Oligonucleotide for detection of SNP TSC0046931
ataattctacaaa

SEQ ID NO: 190833 - DNA, 13 bp, Artificial Sequence
  Oligonucleotide for detection of SNP TSC0046931
tttgtaaaattat

SEQ ID NO: 190834 - DNA, 13 bp, Artificial Sequence
  Oligonucleotide for detection of SNP TSC0046931
ataattttacaaa

SEQ ID NO: 190835 - DNA, 13 bp, Artificial Sequence
  Oligonucleotide for detection of SNP TSC0046932
ttttataaaaatt

SEQ ID NO: 190836 - DNA, 13 bp, Artificial Sequence
  Oligonucleotide for detection of SNP TSC0046932
aatttttataaaa

SEQ ID NO: 190837 - DNA, 13 bp, Artificial Sequence
  Oligonucleotide for detection of SNP TSC0046934
tggggaaaggggt

SEQ ID NO: 190838 - DNA, 13 bp, Artificial Sequence
  Oligonucleotide for detection of SNP TSC0046934
acccctttcccca

SEQ ID NO: 190839 - DNA, 13 bp, Artificial Sequence
  Oligonucleotide for detection of SNP TSC0046934
tggggagaggggt

SEQ ID NO: 190840 - DNA, 13 bp, Artificial Sequence
  Oligonucleotide for detection of SNP TSC0046934
acccctctcccca

SEQ ID NO: 190841 - DNA, 13 bp, Artificial Sequence
  Oligonucleotide for detection of SNP TSC0046937
tgaaatattaaat

SEQ ID NO: 190842 - DNA, 13 bp, Artificial Sequence
  Oligonucleotide for detection of SNP TSC0046937
atttaatatttca

SEQ ID NO: 190843 - DNA, 13 bp, Artificial Sequence
  Oligonucleotide for detection of SNP TSC0046937
tgaaattttaaat

SEQ ID NO: 190844 - DNA, 13 bp, Artificial Sequence
  Oligonucleotide for detection of SNP TSC0046937
atttaaaatttca

SEQ ID NO: 190845 - DNA, 13 bp, Artificial Sequence
  Oligonucleotide for detection of SNP TSC0046937
atttagtgtttta

SEQ ID NO: 190846 - DNA, 13 bp, Artificial Sequence
  Oligonucleotide for detection of SNP TSC0046937
taaaacactaaat

SEQ ID NO: 190847 - DNA, 13 bp, Artificial Sequence
  Oligonucleotide for detection of SNP TSC0046944
aattttatttgtt

SEQ ID NO: 190848 - DNA, 13 bp, Artificial Sequence
  Oligonucleotide for detection of SNP TSC0046944
aacaaataaaatt

SEQ ID NO: 190849 - DNA, 13 bp, Artificial Sequence
  Oligonucleotide for detection of SNP TSC0046944
aatttcgtttgtt

SEQ ID NO: 190850 - DNA, 13 bp, Artificial Sequence
  Oligonucleotide for detection of SNP TSC0046944
aacaaacgaaatt

SEQ ID NO: 190851 - DNA, 13 bp, Artificial Sequence
  Oligonucleotide for detection of SNP TSC0046944
agtaaatggagtt

SEQ ID NO: 190852 - DNA, 13 bp, Artificial Sequence
  Oligonucleotide for detection of SNP TSC0046944
aactccatttact

SEQ ID NO: 190853 - DNA, 13 bp, Artificial Sequence
  Oligonucleotide for detection of SNP TSC0046944
agtaaacggagtt

SEQ ID NO: 190854 - DNA, 13 bp, Artificial Sequence
  Oligonucleotide for detection of SNP TSC0046944
aactccgtttact

SEQ ID NO: 190855 - DNA, 13 bp, Artificial Sequence
  Oligonucleotide for detection of SNP TSC0046945
gaattaaattaga

SEQ ID NO: 190856 - DNA, 13 bp, Artificial Sequence
  Oligonucleotide for detection of SNP TSC0046945
tctaatttaattc

SEQ ID NO: 190857 - DNA, 13 bp, Artificial Sequence
  Oligonucleotide for detection of SNP TSC0046945
gaattagattaga

SEQ ID NO: 190858 - DNA, 13 bp, Artificial Sequence
  Oligonucleotide for detection of SNP TSC0046945
tctaatctaattc

SEQ ID NO: 190859 - DNA, 13 bp, Artificial Sequence
  Oligonucleotide for detection of SNP TSC0046946
tagtttaagttta

SEQ ID NO: 190860 - DNA, 13 bp, Artificial Sequence
  Oligonucleotide for detection of SNP TSC0046946
taaacttaaacta

SEQ ID NO: 190861 - DNA, 13 bp, Artificial Sequence
  Oligonucleotide for detection of SNP TSC0046946
tagttttagttta

SEQ ID NO: 190862 - DNA, 13 bp, Artificial Sequence
  Oligonucleotide for detection of SNP TSC0046946
taaactaaaacta

SEQ ID NO: 190863 - DNA, 13 bp, Artificial Sequence
  Oligonucleotide for detection of SNP TSC0046946
tggatttaagtta

SEQ ID NO: 190864 - DNA, 13 bp, Artificial Sequence
  Oligonucleotide for detection of SNP TSC0046946
taacttaaatcca

SEQ ID NO: 190865 - DNA, 13 bp, Artificial Sequence
  Oligonucleotide for detection of SNP TSC0046946
tggattgaagtta

SEQ ID NO: 190866 - DNA, 13 bp, Artificial Sequence
  Oligonucleotide for detection of SNP TSC0046946
taacttcaatcca

SEQ ID NO: 190867 - DNA, 13 bp, Artificial Sequence
  Oligonucleotide for detection of SNP TSC0046947
tattaaaaaaagg

SEQ ID NO: 190868 - DNA, 13 bp, Artificial Sequence
  Oligonucleotide for detection of SNP TSC0046947
cctttttttaata

SEQ ID NO: 190869 - DNA, 13 bp, Artificial Sequence
  Oligonucleotide for detection of SNP TSC0046947
tattaataaaagg

SEQ ID NO: 190870 - DNA, 13 bp, Artificial Sequence
  Oligonucleotide for detection of SNP TSC0046947
ccttttattaata

SEQ ID NO: 190871 - DNA, 13 bp, Artificial Sequence
  Oligonucleotide for detection of SNP TSC0046949
atatgtgggggta

SEQ ID NO: 190872 - DNA, 13 bp, Artificial Sequence
  Oligonucleotide for detection of SNP TSC0046949
tacccccacatat

SEQ ID NO: 190873 - DNA, 13 bp, Artificial Sequence
  Oligonucleotide for detection of SNP TSC0046949
atatgtaggggta

SEQ ID NO: 190874 - DNA, 13 bp, Artificial Sequence
  Oligonucleotide for detection of SNP TSC0046949
tacccctacatat

SEQ ID NO: 190875 - DNA, 13 bp, Artificial Sequence
  Oligonucleotide for detection of SNP TSC0046950
gatatagatgaaa

SEQ ID NO: 190876 - DNA, 13 bp, Artificial Sequence
  Oligonucleotide for detection of SNP TSC0046950
tttcatctatatc

SEQ ID NO: 190877 - DNA, 13 bp, Artificial Sequence
  Oligonucleotide for detection of SNP TSC0046950
gatataaatgaaa

SEQ ID NO: 190878 - DNA, 13 bp, Artificial Sequence
  Oligonucleotide for detection of SNP TSC0046950
tttcatttatatc

SEQ ID NO: 190879 - DNA, 13 bp, Artificial Sequence
  Oligonucleotide for detection of SNP TSC0007930
ttgtaaattttgt

SEQ ID NO: 190880 - DNA, 13 bp, Artificial Sequence
  Oligonucleotide for detection of SNP TSC0007930
acaaaatttacaa

SEQ ID NO: 190881 - DNA, 13 bp, Artificial Sequence
  Oligonucleotide for detection of SNP TSC0007930
ttgtaatttttgt

SEQ ID NO: 190882 - DNA, 13 bp, Artificial Sequence
  Oligonucleotide for detection of SNP TSC0007930
acaaaaattacaa

SEQ ID NO: 190883 - DNA, 13 bp, Artificial Sequence
  Oligonucleotide for detection of SNP TSC0007930
atagagtttatag

SEQ ID NO: 190884 - DNA, 13 bp, Artificial Sequence
  Oligonucleotide for detection of SNP TSC0007930
ctataaactctat

SEQ ID NO: 190885 - DNA, 13 bp, Artificial Sequence
  Oligonucleotide for detection of SNP TSC0007930
atagaggttatag

SEQ ID NO: 190886 - DNA, 13 bp, Artificial Sequence
  Oligonucleotide for detection of SNP TSC0007930
ctataacctctat

SEQ ID NO: 190887 - DNA, 13 bp, Artificial Sequence
  Oligonucleotide for detection of SNP TSC0046952
atattagtaataa

SEQ ID NO: 190888 - DNA, 13 bp, Artificial Sequence
  Oligonucleotide for detection of SNP TSC0046952
ttattactaatat

SEQ ID NO: 190889 - DNA, 13 bp, Artificial Sequence
  Oligonucleotide for detection of SNP TSC0046952
ttgttgatgatgt

SEQ ID NO: 190890 - DNA, 13 bp, Artificial Sequence
  Oligonucleotide for detection of SNP TSC0046952
acatcatcaacaa

SEQ ID NO: 190891 - DNA, 13 bp, Artificial Sequence
  Oligonucleotide for detection of SNP TSC0046952
ttgttgttgatgt

SEQ ID NO: 190892 - DNA, 13 bp, Artificial Sequence
  Oligonucleotide for detection of SNP TSC0046952
acatcaacaacaa

SEQ ID NO: 190893 - DNA, 13 bp, Artificial Sequence
  Oligonucleotide for detection of SNP TSC0046954
ataataagtatgg

SEQ ID NO: 190894 - DNA, 13 bp, Artificial Sequence
  Oligonucleotide for detection of SNP TSC0046954
ccatacttattat

SEQ ID NO: 190895 - DNA, 13 bp, Artificial Sequence
  Oligonucleotide for detection of SNP TSC0046954
ataataggtatgg

SEQ ID NO: 190896 - DNA, 13 bp, Artificial Sequence
  Oligonucleotide for detection of SNP TSC0046954
ccatacctattat

SEQ ID NO: 190897 - DNA, 13 bp, Artificial Sequence
  Oligonucleotide for detection of SNP TSC0046955
tgggtgggataat

SEQ ID NO: 190898 - DNA, 13 bp, Artificial Sequence
  Oligonucleotide for detection of SNP TSC0046955
attatcccaccca

SEQ ID NO: 190899 - DNA, 13 bp, Artificial Sequence
  Oligonucleotide for detection of SNP TSC0046955
tgggtgagataat

SEQ ID NO: 190900 - DNA, 13 bp, Artificial Sequence
  Oligonucleotide for detection of SNP TSC0046955
attatctcaccca

SEQ ID NO: 190901 - DNA, 13 bp, Artificial Sequence
  Oligonucleotide for detection of SNP TSC0046956
gtttttatattay

SEQ ID NO: 190902 - DNA, 13 bp, Artificial Sequence
  Oligonucleotide for detection of SNP TSC0046956
rtaatataaaaac

SEQ ID NO: 190903 - DNA, 13 bp, Artificial Sequence
  Oligonucleotide for detection of SNP TSC0046956
gtttttttattay

SEQ ID NO: 190904 - DNA, 13 bp, Artificial Sequence
  Oligonucleotide for detection of SNP TSC0046956
rtaataaaaaaac

SEQ ID NO: 190905 - DNA, 13 bp, Artificial Sequence
  Oligonucleotide for detection of SNP TSC0046956
gtggtatgagagy

SEQ ID NO: 190906 - DNA, 13 bp, Artificial Sequence
  Oligonucleotide for detection of SNP TSC0046956
rctctcataccac

SEQ ID NO: 190907 - DNA, 13 bp, Artificial Sequence
  Oligonucleotide for detection of SNP TSC0046956
gtggtaagagagy

SEQ ID NO: 190908 - DNA, 13 bp, Artificial Sequence
  Oligonucleotide for detection of SNP TSC0046956
rctctcttaccac

SEQ ID NO: 190909 - DNA, 13 bp, Artificial Sequence
  Oligonucleotide for detection of SNP TSC0046959
aaagaatgaaaga

SEQ ID NO: 190910 - DNA, 13 bp, Artificial Sequence
  Oligonucleotide for detection of SNP TSC0046959
tctttcattcttt

SEQ ID NO: 190911 - DNA, 13 bp, Artificial Sequence
  Oligonucleotide for detection of SNP TSC0046959
aaagaaagaaaga

SEQ ID NO: 190912 - DNA, 13 bp, Artificial Sequence
  Oligonucleotide for detection of SNP TSC0046959
tctttctttcttt

SEQ ID NO: 190913 - DNA, 13 bp, Artificial Sequence
  Oligonucleotide for detection of SNP TSC0046961
atgtgagggataa

SEQ ID NO: 190914 - DNA, 13 bp, Artificial Sequence
  Oligonucleotide for detection of SNP TSC0046961
ttatccctcacat

SEQ ID NO: 190915 - DNA, 13 bp, Artificial Sequence
  Oligonucleotide for detection of SNP TSC0046961
atgtgaaggataa

SEQ ID NO: 190916 - DNA, 13 bp, Artificial Sequence
  Oligonucleotide for detection of SNP TSC0046961
ttatccttcacat

SEQ ID NO: 190917 - DNA, 13 bp, Artificial Sequence
  Oligonucleotide for detection of SNP TSC0046962
ttgttttgtgtgt

SEQ ID NO: 190918 - DNA, 13 bp, Artificial Sequence
  Oligonucleotide for detection of SNP TSC0046962
acacacaaaacaa

SEQ ID NO: 190919 - DNA, 13 bp, Artificial Sequence
  Oligonucleotide for detection of SNP TSC0046962
ttgtttcgtgtgt

SEQ ID NO: 190920 - DNA, 13 bp, Artificial Sequence
  Oligonucleotide for detection of SNP TSC0046962
acacacgaaacaa

SEQ ID NO: 190921 - DNA, 13 bp, Artificial Sequence
  Oligonucleotide for detection of SNP TSC0046962
ttgttttgcgtgt

SEQ ID NO: 190922 - DNA, 13 bp, Artificial Sequence
  Oligonucleotide for detection of SNP TSC0046962
acacgcaaaacaa

SEQ ID NO: 190923 - DNA, 13 bp, Artificial Sequence
  Oligonucleotide for detection of SNP TSC0046962
ttgtttcgcgtgt

SEQ ID NO: 190924 - DNA, 13 bp, Artificial Sequence
  Oligonucleotide for detection of SNP TSC0046962
acacgcgaaacaa

SEQ ID NO: 190925 - DNA, 13 bp, Artificial Sequence
  Oligonucleotide for detection of SNP TSC0046962
atatgtgggatag

SEQ ID NO: 190926 - DNA, 13 bp, Artificial Sequence
  Oligonucleotide for detection of SNP TSC0046962
ctatcccacatat

SEQ ID NO: 190927 - DNA, 13 bp, Artificial Sequence
  Oligonucleotide for detection of SNP TSC0046962
atatgtaggatag

SEQ ID NO: 190928 - DNA, 13 bp, Artificial Sequence
  Oligonucleotide for detection of SNP TSC0046962
ctatcctacatat

SEQ ID NO: 190929 - DNA, 13 bp, Artificial Sequence
  Oligonucleotide for detection of SNP TSC0046962
atacgtgggatag

SEQ ID NO: 190930 - DNA, 13 bp, Artificial Sequence
  Oligonucleotide for detection of SNP TSC0046962
ctatcccacgtat

SEQ ID NO: 190931 - DNA, 13 bp, Artificial Sequence
  Oligonucleotide for detection of SNP TSC0046962
atacgtaggatag

SEQ ID NO: 190932 - DNA, 13 bp, Artificial Sequence
  Oligonucleotide for detection of SNP TSC0046962
ctatcctacgtat

SEQ ID NO: 190933 - DNA, 13 bp, Artificial Sequence
  Oligonucleotide for detection of SNP TSC0046962
atatgcgggatag

SEQ ID NO: 190934 - DNA, 13 bp, Artificial Sequence
  Oligonucleotide for detection of SNP TSC0046962
ctatcccgcatat

SEQ ID NO: 190935 - DNA, 13 bp, Artificial Sequence
  Oligonucleotide for detection of SNP TSC0046962
atacgcgggatag

SEQ ID NO: 190936 - DNA, 13 bp, Artificial Sequence
  Oligonucleotide for detection of SNP TSC0046962
ctatcccgcgtat

SEQ ID NO: 190937 - DNA, 13 bp, Artificial Sequence
  Oligonucleotide for detection of SNP TSC0046964
taatttatatatt

SEQ ID NO: 190938 - DNA, 13 bp, Artificial Sequence
  Oligonucleotide for detection of SNP TSC0046964
aatatataaatta

SEQ ID NO: 190939 - DNA, 13 bp, Artificial Sequence
  Oligonucleotide for detection of SNP TSC0046964
taattcgtatatt

SEQ ID NO: 190940 - DNA, 13 bp, Artificial Sequence
  Oligonucleotide for detection of SNP TSC0046964
aatatacgaatta

SEQ ID NO: 190941 - DNA, 13 bp, Artificial Sequence
  Oligonucleotide for detection of SNP TSC0046964
aatgtatgggtta

SEQ ID NO: 190942 - DNA, 13 bp, Artificial Sequence
  Oligonucleotide for detection of SNP TSC0046964
taacccatacatt

SEQ ID NO: 190943 - DNA, 13 bp, Artificial Sequence
  Oligonucleotide for detection of SNP TSC0046964
aatgtacgggtta

SEQ ID NO: 190944 - DNA, 13 bp, Artificial Sequence
  Oligonucleotide for detection of SNP TSC0046964
taacccgtacatt

SEQ ID NO: 190945 - DNA, 13 bp, Artificial Sequence
  Oligonucleotide for detection of SNP TSC0046974
tgtgttattagtt

SEQ ID NO: 190946 - DNA, 13 bp, Artificial Sequence
  Oligonucleotide for detection of SNP TSC0046974
aactaataacaca

SEQ ID NO: 190947 - DNA, 13 bp, Artificial Sequence
  Oligonucleotide for detection of SNP TSC0046974
tgtgttgttagtt

SEQ ID NO: 190948 - DNA, 13 bp, Artificial Sequence
  Oligonucleotide for detection of SNP TSC0046974
aactaacaacaca

SEQ ID NO: 190949 - DNA, 13 bp, Artificial Sequence
  Oligonucleotide for detection of SNP TSC0046974
tgtgtcgttagtt

SEQ ID NO: 190950 - DNA, 13 bp, Artificial Sequence
  Oligonucleotide for detection of SNP TSC0046974
aactaacgacaca

SEQ ID NO: 190951 - DNA, 13 bp, Artificial Sequence
  Oligonucleotide for detection of SNP TSC0046974
agttggtggtata

SEQ ID NO: 190952 - DNA, 13 bp, Artificial Sequence
  Oligonucleotide for detection of SNP TSC0046974
tataccaccaact

SEQ ID NO: 190953 - DNA, 13 bp, Artificial Sequence
  Oligonucleotide for detection of SNP TSC0046974
agttggcggtata

SEQ ID NO: 190954 - DNA, 13 bp, Artificial Sequence
  Oligonucleotide for detection of SNP TSC0046974
tataccgccaact

SEQ ID NO: 190955 - DNA, 13 bp, Artificial Sequence
  Oligonucleotide for detection of SNP TSC0046975
ttgttgtttttag

SEQ ID NO: 190956 - DNA, 13 bp, Artificial Sequence
  Oligonucleotide for detection of SNP TSC0046975
ctaaaaacaacaa

SEQ ID NO: 190957 - DNA, 13 bp, Artificial Sequence
  Oligonucleotide for detection of SNP TSC0046975
ttgttggttttag

SEQ ID NO: 190958 - DNA, 13 bp, Artificial Sequence
  Oligonucleotide for detection of SNP TSC0046975
ctaaaaccaacaa

SEQ ID NO: 190959 - DNA, 13 bp, Artificial Sequence
  Oligonucleotide for detection of SNP TSC0046975
ttgaaggtagtaa

SEQ ID NO: 190960 - DNA, 13 bp, Artificial Sequence
  Oligonucleotide for detection of SNP TSC0046975
ttactaccttcaa

SEQ ID NO: 190961 - DNA, 13 bp, Artificial Sequence
  Oligonucleotide for detection of SNP TSC0046975
ttgaagttagtaa

SEQ ID NO: 190962 - DNA, 13 bp, Artificial Sequence
  Oligonucleotide for detection of SNP TSC0046975
ttactaacttcaa

SEQ ID NO: 190963 - DNA, 13 bp, Artificial Sequence
  Oligonucleotide for detection of SNP TSC0046976
tttgttaagttty

SEQ ID NO: 190964 - DNA, 13 bp, Artificial Sequence
  Oligonucleotide for detection of SNP TSC0046976
raaacttaacaaa

SEQ ID NO: 190965 - DNA, 13 bp, Artificial Sequence
  Oligonucleotide for detection of SNP TSC0046976
ttcgttaagttty

SEQ ID NO: 190966 - DNA, 13 bp, Artificial Sequence
  Oligonucleotide for detection of SNP TSC0046976
raaacttaacgaa

SEQ ID NO: 190967 - DNA, 13 bp, Artificial Sequence
  Oligonucleotide for detection of SNP TSC0046977
tttagtggtgaaa

SEQ ID NO: 190968 - DNA, 13 bp, Artificial Sequence
  Oligonucleotide for detection of SNP TSC0046977
tttcaccactaaa

SEQ ID NO: 190969 - DNA, 13 bp, Artificial Sequence
  Oligonucleotide for detection of SNP TSC0046977
tttagtagtgaaa

SEQ ID NO: 190970 - DNA, 13 bp, Artificial Sequence
  Oligonucleotide for detection of SNP TSC0046977
tttcactactaaa

SEQ ID NO: 190971 - DNA, 13 bp, Artificial Sequence
  Oligonucleotide for detection of SNP TSC0046979
gaggtggagtttg

SEQ ID NO: 190972 - DNA, 13 bp, Artificial Sequence
  Oligonucleotide for detection of SNP TSC0046979
caaactccacctc

SEQ ID NO: 190973 - DNA, 13 bp, Artificial Sequence
  Oligonucleotide for detection of SNP TSC0046979
gaggtgaagtttg

SEQ ID NO: 190974 - DNA, 13 bp, Artificial Sequence
  Oligonucleotide for detection of SNP TSC0046979
caaacttcacctc

SEQ ID NO: 190975 - DNA, 13 bp, Artificial Sequence
  Oligonucleotide for detection of SNP TSC0046979
gaggcggagtttg

SEQ ID NO: 190976 - DNA, 13 bp, Artificial Sequence
  Oligonucleotide for detection of SNP TSC0046979
caaactccgcctc

SEQ ID NO: 190977 - DNA, 13 bp, Artificial Sequence
  Oligonucleotide for detection of SNP TSC0046979
gaggcgaagtttg

SEQ ID NO: 190978 - DNA, 13 bp, Artificial Sequence
  Oligonucleotide for detection of SNP TSC0046979
caaacttcgcctc

SEQ ID NO: 190979 - DNA, 13 bp, Artificial Sequence
  Oligonucleotide for detection of SNP TSC0046980
atgataaaatgat

SEQ ID NO: 190980 - DNA, 13 bp, Artificial Sequence
  Oligonucleotide for detection of SNP TSC0046980
atcattttatcat

SEQ ID NO: 190981 - DNA, 13 bp, Artificial Sequence
  Oligonucleotide for detection of SNP TSC0046980
atgatataatgat

SEQ ID NO: 190982 - DNA, 13 bp, Artificial Sequence
  Oligonucleotide for detection of SNP TSC0046980
atcattatatcat

SEQ ID NO: 190983 - DNA, 13 bp, Artificial Sequence
  Oligonucleotide for detection of SNP TSC0046980
attattttattat

SEQ ID NO: 190984 - DNA, 13 bp, Artificial Sequence
  Oligonucleotide for detection of SNP TSC0046980
ataataaaataat

SEQ ID NO: 190985 - DNA, 13 bp, Artificial Sequence
  Oligonucleotide for detection of SNP TSC0046980
attattgtattat

SEQ ID NO: 190986 - DNA, 13 bp, Artificial Sequence
  Oligonucleotide for detection of SNP TSC0046980
ataatacaataat

SEQ ID NO: 190987 - DNA, 13 bp, Artificial Sequence
  Oligonucleotide for detection of SNP TSC0046985
ttggtaagattgt

SEQ ID NO: 190988 - DNA, 13 bp, Artificial Sequence
  Oligonucleotide for detection of SNP TSC0046985
acaatcttaccaa

SEQ ID NO: 190989 - DNA, 13 bp, Artificial Sequence
  Oligonucleotide for detection of SNP TSC0046985
ttggtaggattgt

SEQ ID NO: 190990 - DNA, 13 bp, Artificial Sequence
  Oligonucleotide for detection of SNP TSC0046985
acaatcctaccaa

SEQ ID NO: 190991 - DNA, 13 bp, Artificial Sequence
  Oligonucleotide for detection of SNP TSC0046989
tagtataataggg

SEQ ID NO: 190992 - DNA, 13 bp, Artificial Sequence
  Oligonucleotide for detection of SNP TSC0046989
ccctattatacta

SEQ ID NO: 190993 - DNA, 13 bp, Artificial Sequence
  Oligonucleotide for detection of SNP TSC0046989
tagtattataggg

SEQ ID NO: 190994 - DNA, 13 bp, Artificial Sequence
  Oligonucleotide for detection of SNP TSC0046989
ccctataatacta

SEQ ID NO: 190995 - DNA, 13 bp, Artificial Sequence
  Oligonucleotide for detection of SNP TSC0046990
aattgatttttty

SEQ ID NO: 190996 - DNA, 13 bp, Artificial Sequence
  Oligonucleotide for detection of SNP TSC0046990
raaaaaatcaatt

SEQ ID NO: 190997 - DNA, 13 bp, Artificial Sequence
  Oligonucleotide for detection of SNP TSC0046990
aattgagttttty

SEQ ID NO: 190998 - DNA, 13 bp, Artificial Sequence
  Oligonucleotide for detection of SNP TSC0046990
raaaaactcaatt

SEQ ID NO: 190999 - DNA, 13 bp, Artificial Sequence
  Oligonucleotide for detection of SNP TSC0046990
ggggggattaatt

SEQ ID NO: 191000 - DNA, 13 bp, Artificial Sequence
  Oligonucleotide for detection of SNP TSC0046990
aattaatcccccc

SEQ ID NO: 191001 - DNA, 13 bp, Artificial Sequence
  Oligonucleotide for detection of SNP TSC0046990
ggggggtttaatt

SEQ ID NO: 191002 - DNA, 13 bp, Artificial Sequence
  Oligonucleotide for detection of SNP TSC0046990
aattaaacccccc

SEQ ID NO: 191003 - DNA, 13 bp, Artificial Sequence
  Oligonucleotide for detection of SNP TSC0046991
agttatgttttta

SEQ ID NO: 191004 - DNA, 13 bp, Artificial Sequence
  Oligonucleotide for detection of SNP TSC0046991
taaaaacataact

SEQ ID NO: 191005 - DNA, 13 bp, Artificial Sequence
  Oligonucleotide for detection of SNP TSC0046991
agttacgttttta

SEQ ID NO: 191006 - DNA, 13 bp, Artificial Sequence
  Oligonucleotide for detection of SNP TSC0046991
taaaaacgtaact

SEQ ID NO: 191007 - DNA, 13 bp, Artificial Sequence
  Oligonucleotide for detection of SNP TSC0046991
tagaaaggtaatt

SEQ ID NO: 191008 - DNA, 13 bp, Artificial Sequence
  Oligonucleotide for detection of SNP TSC0046991
aattacctttcta

SEQ ID NO: 191009 - DNA, 13 bp, Artificial Sequence
  Oligonucleotide for detection of SNP TSC0046991
tagaaatgtaatt

SEQ ID NO: 191010 - DNA, 13 bp, Artificial Sequence
  Oligonucleotide for detection of SNP TSC0046991
aattacatttcta

SEQ ID NO: 191011 - DNA, 13 bp, Artificial Sequence
  Oligonucleotide for detection of SNP TSC0046991
tagaaacgtaatt

SEQ ID NO: 191012 - DNA, 13 bp, Artificial Sequence
  Oligonucleotide for detection of SNP TSC0046991
aattacgtttcta

SEQ ID NO: 191013 - DNA, 13 bp, Artificial Sequence
  Oligonucleotide for detection of SNP TSC0046992
ttatatattgtta

SEQ ID NO: 191014 - DNA, 13 bp, Artificial Sequence
  Oligonucleotide for detection of SNP TSC0046992
taacaatatataa

SEQ ID NO: 191015 - DNA, 13 bp, Artificial Sequence
  Oligonucleotide for detection of SNP TSC0046992
ttatatgttgtta

SEQ ID NO: 191016 - DNA, 13 bp, Artificial Sequence
  Oligonucleotide for detection of SNP TSC0046992
taacaacatataa

SEQ ID NO: 191017 - DNA, 13 bp, Artificial Sequence
  Oligonucleotide for detection of SNP TSC0046995
aggtagtttttty

SEQ ID NO: 191018 - DNA, 13 bp, Artificial Sequence
  Oligonucleotide for detection of SNP TSC0046995
raaaaaactacct

SEQ ID NO: 191019 - DNA, 13 bp, Artificial Sequence
  Oligonucleotide for detection of SNP TSC0046995
aggtaggttttty

SEQ ID NO: 191020 - DNA, 13 bp, Artificial Sequence
  Oligonucleotide for detection of SNP TSC0046995
raaaaacctacct

SEQ ID NO: 191021 - DNA, 13 bp, Artificial Sequence
  Oligonucleotide for detection of SNP TSC0046995
gaaagaattgttt

SEQ ID NO: 191022 - DNA, 13 bp, Artificial Sequence
  Oligonucleotide for detection of SNP TSC0046995
aaacaattctttc

SEQ ID NO: 191023 - DNA, 13 bp, Artificial Sequence
  Oligonucleotide for detection of SNP TSC0046995
gaaagatttgttt

SEQ ID NO: 191024 - DNA, 13 bp, Artificial Sequence
  Oligonucleotide for detection of SNP TSC0046995
aaacaaatctttc

SEQ ID NO: 191025 - DNA, 13 bp, Artificial Sequence
  Oligonucleotide for detection of SNP TSC0046996
tgttgttaggttg

SEQ ID NO: 191026 - DNA, 13 bp, Artificial Sequence
  Oligonucleotide for detection of SNP TSC0046996
caacctaacaaca

SEQ ID NO: 191027 - DNA, 13 bp, Artificial Sequence
  Oligonucleotide for detection of SNP TSC0046996
tgttgtgaggttg

SEQ ID NO: 191028 - DNA, 13 bp, Artificial Sequence
  Oligonucleotide for detection of SNP TSC0046996
caacctcacaaca

SEQ ID NO: 191029 - DNA, 13 bp, Artificial Sequence
  Oligonucleotide for detection of SNP TSC0046996
tgttgcgaggttg

SEQ ID NO: 191030 - DNA, 13 bp, Artificial Sequence
  Oligonucleotide for detection of SNP TSC0046996
caacctcgcaaca

SEQ ID NO: 191031 - DNA, 13 bp, Artificial Sequence
  Oligonucleotide for detection of SNP TSC0046996
tagttttgtaata

SEQ ID NO: 191032 - DNA, 13 bp, Artificial Sequence
  Oligonucleotide for detection of SNP TSC0046996
tattacaaaacta

SEQ ID NO: 191033 - DNA, 13 bp, Artificial Sequence
  Oligonucleotide for detection of SNP TSC0046996
tagtttcgtaata

SEQ ID NO: 191034 - DNA, 13 bp, Artificial Sequence
  Oligonucleotide for detection of SNP TSC0046996
tattacgaaacta

SEQ ID NO: 191035 - DNA, 13 bp, Artificial Sequence
  Oligonucleotide for detection of SNP TSC0047000
tataaataataat

SEQ ID NO: 191036 - DNA, 13 bp, Artificial Sequence
  Oligonucleotide for detection of SNP TSC0047000
attattatttata

SEQ ID NO: 191037 - DNA, 13 bp, Artificial Sequence
  Oligonucleotide for detection of SNP TSC0047000
tataaagaataat

SEQ ID NO: 191038 - DNA, 13 bp, Artificial Sequence
  Oligonucleotide for detection of SNP TSC0047000
attattctttata

SEQ ID NO: 191039 - DNA, 13 bp, Artificial Sequence
  Oligonucleotide for detection of SNP TSC0047000
attgttatttgtg

SEQ ID NO: 191040 - DNA, 13 bp, Artificial Sequence
  Oligonucleotide for detection of SNP TSC0047000
cacaaataacaat

SEQ ID NO: 191041 - DNA, 13 bp, Artificial Sequence
  Oligonucleotide for detection of SNP TSC0047000
attgttttttgtg

SEQ ID NO: 191042 - DNA, 13 bp, Artificial Sequence
  Oligonucleotide for detection of SNP TSC0047000
cacaaaaaacaat

SEQ ID NO: 191043 - DNA, 13 bp, Artificial Sequence
  Oligonucleotide for detection of SNP TSC0047001
ataggagtggtga

SEQ ID NO: 191044 - DNA, 13 bp, Artificial Sequence
  Oligonucleotide for detection of SNP TSC0047001
tcaccactcctat

SEQ ID NO: 191045 - DNA, 13 bp, Artificial Sequence
  Oligonucleotide for detection of SNP TSC0047001
ataggaatggtga

SEQ ID NO: 191046 - DNA, 13 bp, Artificial Sequence
  Oligonucleotide for detection of SNP TSC0047001
tcaccattcctat

SEQ ID NO: 191047 - DNA, 13 bp, Artificial Sequence
  Oligonucleotide for detection of SNP TSC0047002
atgggttaaaaag

SEQ ID NO: 191048 - DNA, 13 bp, Artificial Sequence
  Oligonucleotide for detection of SNP TSC0047002
ctttttaacccat

SEQ ID NO: 191049 - DNA, 13 bp, Artificial Sequence
  Oligonucleotide for detection of SNP TSC0047002
atgggtgaaaaag

SEQ ID NO: 191050 - DNA, 13 bp, Artificial Sequence
  Oligonucleotide for detection of SNP TSC0047002
ctttttcacccat

SEQ ID NO: 191051 - DNA, 13 bp, Artificial Sequence
  Oligonucleotide for detection of SNP TSC0047003
tggattaaattta

SEQ ID NO: 191052 - DNA, 13 bp, Artificial Sequence
  Oligonucleotide for detection of SNP TSC0047003
taaatttaatcca

SEQ ID NO: 191053 - DNA, 13 bp, Artificial Sequence
  Oligonucleotide for detection of SNP TSC0047003
tggattgaattta

SEQ ID NO: 191054 - DNA, 13 bp, Artificial Sequence
  Oligonucleotide for detection of SNP TSC0047003
taaattcaatcca

SEQ ID NO: 191055 - DNA, 13 bp, Artificial Sequence
  Oligonucleotide for detection of SNP TSC0047004
tttttatgtggta

SEQ ID NO: 191056 - DNA, 13 bp, Artificial Sequence
  Oligonucleotide for detection of SNP TSC0047004
taccacataaaaa

SEQ ID NO: 191057 - DNA, 13 bp, Artificial Sequence
  Oligonucleotide for detection of SNP TSC0047004
tttttacgtggta

SEQ ID NO: 191058 - DNA, 13 bp, Artificial Sequence
  Oligonucleotide for detection of SNP TSC0047004
taccacgtaaaaa

SEQ ID NO: 191059 - DNA, 13 bp, Artificial Sequence
  Oligonucleotide for detection of SNP TSC0047004
tgttatgtgaagg

SEQ ID NO: 191060 - DNA, 13 bp, Artificial Sequence
  Oligonucleotide for detection of SNP TSC0047004
ccttcacataaca

SEQ ID NO: 191061 - DNA, 13 bp, Artificial Sequence
  Oligonucleotide for detection of SNP TSC0047004
tgttatatgaagg

SEQ ID NO: 191062 - DNA, 13 bp, Artificial Sequence
  Oligonucleotide for detection of SNP TSC0047004
ccttcatataaca

SEQ ID NO: 191063 - DNA, 13 bp, Artificial Sequence
  Oligonucleotide for detection of SNP TSC0047004
tgttacgtgaagg

SEQ ID NO: 191064 - DNA, 13 bp, Artificial Sequence
  Oligonucleotide for detection of SNP TSC0047004
ccttcacgtaaca

SEQ ID NO: 191065 - DNA, 13 bp, Artificial Sequence
  Oligonucleotide for detection of SNP TSC0047014
ttttatattttgt

SEQ ID NO: 191066 - DNA, 13 bp, Artificial Sequence
  Oligonucleotide for detection of SNP TSC0047014
acaaaatataaaa

SEQ ID NO: 191067 - DNA, 13 bp, Artificial Sequence
  Oligonucleotide for detection of SNP TSC0047014
ttttatgttttgt

SEQ ID NO: 191068 - DNA, 13 bp, Artificial Sequence
  Oligonucleotide for detection of SNP TSC0047014
acaaaacataaaa

SEQ ID NO: 191069 - DNA, 13 bp, Artificial Sequence
  Oligonucleotide for detection of SNP TSC0047015
atttattatttty

SEQ ID NO: 191070 - DNA, 13 bp, Artificial Sequence
  Oligonucleotide for detection of SNP TSC0047015
raaaataataaat

SEQ ID NO: 191071 - DNA, 13 bp, Artificial Sequence
  Oligonucleotide for detection of SNP TSC0047015
atttatgatttty

SEQ ID NO: 191072 - DNA, 13 bp, Artificial Sequence
  Oligonucleotide for detection of SNP TSC0047015
raaaatcataaat

SEQ ID NO: 191073 - DNA, 13 bp, Artificial Sequence
  Oligonucleotide for detection of SNP TSC0047015
ggaaatgataaat

SEQ ID NO: 191074 - DNA, 13 bp, Artificial Sequence
  Oligonucleotide for detection of SNP TSC0047015
atttatcatttcc

SEQ ID NO: 191075 - DNA, 13 bp, Artificial Sequence
  Oligonucleotide for detection of SNP TSC0047015
ggaaattataaat

SEQ ID NO: 191076 - DNA, 13 bp, Artificial Sequence
  Oligonucleotide for detection of SNP TSC0047015
atttataatttcc

SEQ ID NO: 191077 - DNA, 13 bp, Artificial Sequence
  Oligonucleotide for detection of SNP TSC0047016
agttaatggatat

SEQ ID NO: 191078 - DNA, 13 bp, Artificial Sequence
  Oligonucleotide for detection of SNP TSC0047016
atatccattaact

SEQ ID NO: 191079 - DNA, 13 bp, Artificial Sequence
  Oligonucleotide for detection of SNP TSC0047016
agttaacggatat

SEQ ID NO: 191080 - DNA, 13 bp, Artificial Sequence
  Oligonucleotide for detection of SNP TSC0047016
atatccgttaact

SEQ ID NO: 191081 - DNA, 13 bp, Artificial Sequence
  Oligonucleotide for detection of SNP TSC0047016
atgtttgttgatt

SEQ ID NO: 191082 - DNA, 13 bp, Artificial Sequence
  Oligonucleotide for detection of SNP TSC0047016
aatcaacaaacat

SEQ ID NO: 191083 - DNA, 13 bp, Artificial Sequence
  Oligonucleotide for detection of SNP TSC0047016
atgtttattgatt

SEQ ID NO: 191084 - DNA, 13 bp, Artificial Sequence
  Oligonucleotide for detection of SNP TSC0047016
aatcaataaacat

SEQ ID NO: 191085 - DNA, 13 bp, Artificial Sequence
  Oligonucleotide for detection of SNP TSC0047016
atgttcgttgatt

SEQ ID NO: 191086 - DNA, 13 bp, Artificial Sequence
  Oligonucleotide for detection of SNP TSC0047016
aatcaacgaacat

SEQ ID NO: 191087 - DNA, 13 bp, Artificial Sequence
  Oligonucleotide for detection of SNP TSC0047017
attatttgttata

SEQ ID NO: 191088 - DNA, 13 bp, Artificial Sequence
  Oligonucleotide for detection of SNP TSC0047017
tataacaaataat

SEQ ID NO: 191089 - DNA, 13 bp, Artificial Sequence
  Oligonucleotide for detection of SNP TSC0047017
attattggttata

SEQ ID NO: 191090 - DNA, 13 bp, Artificial Sequence
  Oligonucleotide for detection of SNP TSC0047017
tataaccaataat

SEQ ID NO: 191091 - DNA, 13 bp, Artificial Sequence
  Oligonucleotide for detection of SNP TSC0047017
attatcggttata

SEQ ID NO: 191092 - DNA, 13 bp, Artificial Sequence
  Oligonucleotide for detection of SNP TSC0047017
tataaccgataat

SEQ ID NO: 191093 - DNA, 13 bp, Artificial Sequence
  Oligonucleotide for detection of SNP TSC0047017
tataatagataat

SEQ ID NO: 191094 - DNA, 13 bp, Artificial Sequence
  Oligonucleotide for detection of SNP TSC0047017
attatctattata

SEQ ID NO: 191095 - DNA, 13 bp, Artificial Sequence
  Oligonucleotide for detection of SNP TSC0047017
tataattgataat

SEQ ID NO: 191096 - DNA, 13 bp, Artificial Sequence
  Oligonucleotide for detection of SNP TSC0047017
attatcaattata

SEQ ID NO: 191097 - DNA, 13 bp, Artificial Sequence
  Oligonucleotide for detection of SNP TSC0047017
tataatcgataat

SEQ ID NO: 191098 - DNA, 13 bp, Artificial Sequence
  Oligonucleotide for detection of SNP TSC0047017
attatcgattata

SEQ ID NO: 191099 - DNA, 13 bp, Artificial Sequence
  Oligonucleotide for detection of SNP TSC0047019
tatttatagttgy

SEQ ID NO: 191100 - DNA, 13 bp, Artificial Sequence
  Oligonucleotide for detection of SNP TSC0047019
rcaactataaata

SEQ ID NO: 191101 - DNA, 13 bp, Artificial Sequence
  Oligonucleotide for detection of SNP TSC0047019
tatttagagttgy

SEQ ID NO: 191102 - DNA, 13 bp, Artificial Sequence
  Oligonucleotide for detection of SNP TSC0047019
rcaactctaaata

SEQ ID NO: 191103 - DNA, 13 bp, Artificial Sequence
  Oligonucleotide for detection of SNP TSC0047019
gtaattgtaagta

SEQ ID NO: 191104 - DNA, 13 bp, Artificial Sequence
  Oligonucleotide for detection of SNP TSC0047019
tacttacaattac

SEQ ID NO: 191105 - DNA, 13 bp, Artificial Sequence
  Oligonucleotide for detection of SNP TSC0047019
gtaattttaagta

SEQ ID NO: 191106 - DNA, 13 bp, Artificial Sequence
  Oligonucleotide for detection of SNP TSC0047019
tacttaaaattac

SEQ ID NO: 191107 - DNA, 13 bp, Artificial Sequence
  Oligonucleotide for detection of SNP TSC0047021
ttaatatgtaatt

SEQ ID NO: 191108 - DNA, 13 bp, Artificial Sequence
  Oligonucleotide for detection of SNP TSC0047021
aattacatattaa

SEQ ID NO: 191109 - DNA, 13 bp, Artificial Sequence
  Oligonucleotide for detection of SNP TSC0047021
ttaatacgtaatt

SEQ ID NO: 191110 - DNA, 13 bp, Artificial Sequence
  Oligonucleotide for detection of SNP TSC0047021
aattacgtattaa

SEQ ID NO: 191111 - DNA, 13 bp, Artificial Sequence
  Oligonucleotide for detection of SNP TSC0047021
aattatgtgttaa

SEQ ID NO: 191112 - DNA, 13 bp, Artificial Sequence
  Oligonucleotide for detection of SNP TSC0047021
ttaacacataatt

SEQ ID NO: 191113 - DNA, 13 bp, Artificial Sequence
  Oligonucleotide for detection of SNP TSC0047021
aattatatgttaa

SEQ ID NO: 191114 - DNA, 13 bp, Artificial Sequence
  Oligonucleotide for detection of SNP TSC0047021
ttaacatataatt

SEQ ID NO: 191115 - DNA, 13 bp, Artificial Sequence
  Oligonucleotide for detection of SNP TSC0047021
aattacgtgttaa

SEQ ID NO: 191116 - DNA, 13 bp, Artificial Sequence
  Oligonucleotide for detection of SNP TSC0047021
ttaacacgtaatt

SEQ ID NO: 191117 - DNA, 13 bp, Artificial Sequence
  Oligonucleotide for detection of SNP TSC0047022
ttttgattgattg

SEQ ID NO: 191118 - DNA, 13 bp, Artificial Sequence
  Oligonucleotide for detection of SNP TSC0047022
caatcaatcaaaa

SEQ ID NO: 191119 - DNA, 13 bp, Artificial Sequence
  Oligonucleotide for detection of SNP TSC0047022
ttttgagtgattg

SEQ ID NO: 191120 - DNA, 13 bp, Artificial Sequence
  Oligonucleotide for detection of SNP TSC0047022
caatcactcaaaa

SEQ ID NO: 191121 - DNA, 13 bp, Artificial Sequence
  Oligonucleotide for detection of SNP TSC0047022
taattaattagga

SEQ ID NO: 191122 - DNA, 13 bp, Artificial Sequence
  Oligonucleotide for detection of SNP TSC0047022
tcctaattaatta

SEQ ID NO: 191123 - DNA, 13 bp, Artificial Sequence
  Oligonucleotide for detection of SNP TSC0047022
taattatttagga

SEQ ID NO: 191124 - DNA, 13 bp, Artificial Sequence
  Oligonucleotide for detection of SNP TSC0047022
tcctaaataatta

SEQ ID NO: 191125 - DNA, 13 bp, Artificial Sequence
  Oligonucleotide for detection of SNP TSC0047023
ttggttagatttt

SEQ ID NO: 191126 - DNA, 13 bp, Artificial Sequence
  Oligonucleotide for detection of SNP TSC0047023
aaaatctaaccaa

SEQ ID NO: 191127 - DNA, 13 bp, Artificial Sequence
  Oligonucleotide for detection of SNP TSC0047023
ttggttggatttt

SEQ ID NO: 191128 - DNA, 13 bp, Artificial Sequence
  Oligonucleotide for detection of SNP TSC0047023
aaaatccaaccaa

SEQ ID NO: 191129 - DNA, 13 bp, Artificial Sequence
  Oligonucleotide for detection of SNP TSC0047025
attttgataaaay

SEQ ID NO: 191130 - DNA, 13 bp, Artificial Sequence
  Oligonucleotide for detection of SNP TSC0047025
rttttatcaaaat

SEQ ID NO: 191131 - DNA, 13 bp, Artificial Sequence
  Oligonucleotide for detection of SNP TSC0047025
attttggtaaaay

SEQ ID NO: 191132 - DNA, 13 bp, Artificial Sequence
  Oligonucleotide for detection of SNP TSC0047025
rttttaccaaaat

SEQ ID NO: 191133 - DNA, 13 bp, Artificial Sequence
  Oligonucleotide for detection of SNP TSC0047029
taagaaattttat

SEQ ID NO: 191134 - DNA, 13 bp, Artificial Sequence
  Oligonucleotide for detection of SNP TSC0047029
ataaaatttctta

SEQ ID NO: 191135 - DNA, 13 bp, Artificial Sequence
  Oligonucleotide for detection of SNP TSC0047029
taagaagttttat

SEQ ID NO: 191136 - DNA, 13 bp, Artificial Sequence
  Oligonucleotide for detection of SNP TSC0047029
ataaaacttctta

SEQ ID NO: 191137 - DNA, 13 bp, Artificial Sequence
  Oligonucleotide for detection of SNP TSC0047030
tgaaataaggaat

SEQ ID NO: 191138 - DNA, 13 bp, Artificial Sequence
  Oligonucleotide for detection of SNP TSC0047030
attccttatttca

SEQ ID NO: 191139 - DNA, 13 bp, Artificial Sequence
  Oligonucleotide for detection of SNP TSC0047030
tgaaattaggaat

SEQ ID NO: 191140 - DNA, 13 bp, Artificial Sequence
  Oligonucleotide for detection of SNP TSC0047030
attcctaatttca

SEQ ID NO: 191141 - DNA, 13 bp, Artificial Sequence
  Oligonucleotide for detection of SNP TSC0047031
aaattagttagaa

SEQ ID NO: 191142 - DNA, 13 bp, Artificial Sequence
  Oligonucleotide for detection of SNP TSC0047031
ttctaactaattt

SEQ ID NO: 191143 - DNA, 13 bp, Artificial Sequence
  Oligonucleotide for detection of SNP TSC0047031
aaattaattagaa

SEQ ID NO: 191144 - DNA, 13 bp, Artificial Sequence
  Oligonucleotide for detection of SNP TSC0047031
ttctaattaattt

SEQ ID NO: 191145 - DNA, 13 bp, Artificial Sequence
  Oligonucleotide for detection of SNP TSC0047032
aggaattggtatt

SEQ ID NO: 191146 - DNA, 13 bp, Artificial Sequence
  Oligonucleotide for detection of SNP TSC0047032
aataccaattcct

SEQ ID NO: 191147 - DNA, 13 bp, Artificial Sequence
  Oligonucleotide for detection of SNP TSC0047032
aggaatcggtatt

SEQ ID NO: 191148 - DNA, 13 bp, Artificial Sequence
  Oligonucleotide for detection of SNP TSC0047032
aataccgattcct

SEQ ID NO: 191149 - DNA, 13 bp, Artificial Sequence
  Oligonucleotide for detection of SNP TSC0047032
agtattgattttt

SEQ ID NO: 191150 - DNA, 13 bp, Artificial Sequence
  Oligonucleotide for detection of SNP TSC0047032
aaaaatcaatact

SEQ ID NO: 191151 - DNA, 13 bp, Artificial Sequence
  Oligonucleotide for detection of SNP TSC0047032
agtattaattttt

SEQ ID NO: 191152 - DNA, 13 bp, Artificial Sequence
  Oligonucleotide for detection of SNP TSC0047032
aaaaattaatact

SEQ ID NO: 191153 - DNA, 13 bp, Artificial Sequence
  Oligonucleotide for detection of SNP TSC0047032
agtatcgattttt

SEQ ID NO: 191154 - DNA, 13 bp, Artificial Sequence
  Oligonucleotide for detection of SNP TSC0047032
aaaaatcgatact

SEQ ID NO: 191155 - DNA, 13 bp, Artificial Sequence
  Oligonucleotide for detection of SNP TSC0047033
taaaagatttttt

SEQ ID NO: 191156 - DNA, 13 bp, Artificial Sequence
  Oligonucleotide for detection of SNP TSC0047033
aaaaaatctttta

SEQ ID NO: 191157 - DNA, 13 bp, Artificial Sequence
  Oligonucleotide for detection of SNP TSC0047033
taaaaggtttttt

SEQ ID NO: 191158 - DNA, 13 bp, Artificial Sequence
  Oligonucleotide for detection of SNP TSC0047033
aaaaaacctttta

SEQ ID NO: 191159 - DNA, 13 bp, Artificial Sequence
  Oligonucleotide for detection of SNP TSC0047034
ggtgaaatggtty

SEQ ID NO: 191160 - DNA, 13 bp, Artificial Sequence
  Oligonucleotide for detection of SNP TSC0047034
raaccatttcacc

SEQ ID NO: 191161 - DNA, 13 bp, Artificial Sequence
  Oligonucleotide for detection of SNP TSC0047034
ggtgaattggtty

SEQ ID NO: 191162 - DNA, 13 bp, Artificial Sequence
  Oligonucleotide for detection of SNP TSC0047034
raaccaattcacc

SEQ ID NO: 191163 - DNA, 13 bp, Artificial Sequence
  Oligonucleotide for detection of SNP TSC0047034
gagttattttaty

SEQ ID NO: 191164 - DNA, 13 bp, Artificial Sequence
  Oligonucleotide for detection of SNP TSC0047034
rataaaataactc

SEQ ID NO: 191165 - DNA, 13 bp, Artificial Sequence
  Oligonucleotide for detection of SNP TSC0047034
gagttagtttaty

SEQ ID NO: 191166 - DNA, 13 bp, Artificial Sequence
  Oligonucleotide for detection of SNP TSC0047034
rataaactaactc

SEQ ID NO: 191167 - DNA, 13 bp, Artificial Sequence
  Oligonucleotide for detection of SNP TSC0047037
gatgatagtgtty

SEQ ID NO: 191168 - DNA, 13 bp, Artificial Sequence
  Oligonucleotide for detection of SNP TSC0047037
raacactatcatc

SEQ ID NO: 191169 - DNA, 13 bp, Artificial Sequence
  Oligonucleotide for detection of SNP TSC0047037
gatgattgtgtty

SEQ ID NO: 191170 - DNA, 13 bp, Artificial Sequence
  Oligonucleotide for detection of SNP TSC0047037
raacacaatcatc

SEQ ID NO: 191171 - DNA, 13 bp, Artificial Sequence
  Oligonucleotide for detection of SNP TSC0047037
gaatattgttaty

SEQ ID NO: 191172 - DNA, 13 bp, Artificial Sequence
  Oligonucleotide for detection of SNP TSC0047037
rataacaatattc

SEQ ID NO: 191173 - DNA, 13 bp, Artificial Sequence
  Oligonucleotide for detection of SNP TSC0047037
gaatatagttaty

SEQ ID NO: 191174 - DNA, 13 bp, Artificial Sequence
  Oligonucleotide for detection of SNP TSC0047037
rataactatattc

SEQ ID NO: 191175 - DNA, 13 bp, Artificial Sequence
  Oligonucleotide for detection of SNP TSC0047039
atattttaagaaa

SEQ ID NO: 191176 - DNA, 13 bp, Artificial Sequence
  Oligonucleotide for detection of SNP TSC0047039
tttcttaaaatat

SEQ ID NO: 191177 - DNA, 13 bp, Artificial Sequence
  Oligonucleotide for detection of SNP TSC0047039
atatttgaagaaa

SEQ ID NO: 191178 - DNA, 13 bp, Artificial Sequence
  Oligonucleotide for detection of SNP TSC0047039
tttcttcaaatat

SEQ ID NO: 191179 - DNA, 13 bp, Artificial Sequence
  Oligonucleotide for detection of SNP TSC0047040
aagggatggtatg

SEQ ID NO: 191180 - DNA, 13 bp, Artificial Sequence
  Oligonucleotide for detection of SNP TSC0047040
cataccatccctt

SEQ ID NO: 191181 - DNA, 13 bp, Artificial Sequence
  Oligonucleotide for detection of SNP TSC0047040
aagggacggtatg

SEQ ID NO: 191182 - DNA, 13 bp, Artificial Sequence
  Oligonucleotide for detection of SNP TSC0047040
cataccgtccctt

SEQ ID NO: 191183 - DNA, 13 bp, Artificial Sequence
  Oligonucleotide for detection of SNP TSC0047040
tatatcgtttttt

SEQ ID NO: 191184 - DNA, 13 bp, Artificial Sequence
  Oligonucleotide for detection of SNP TSC0047040
aaaaaacgatata

SEQ ID NO: 191185 - DNA, 13 bp, Artificial Sequence
  Oligonucleotide for detection of SNP TSC0047041
gtagtcgtttttt

SEQ ID NO: 191186 - DNA, 13 bp, Artificial Sequence
  Oligonucleotide for detection of SNP TSC0047041
aaaaaacgactac

SEQ ID NO: 191187 - DNA, 13 bp, Artificial Sequence
  Oligonucleotide for detection of SNP TSC0047041
agagggtggttgy

SEQ ID NO: 191188 - DNA, 13 bp, Artificial Sequence
  Oligonucleotide for detection of SNP TSC0047041
rcaaccaccctct

SEQ ID NO: 191189 - DNA, 13 bp, Artificial Sequence
  Oligonucleotide for detection of SNP TSC0047041
agagggcggttgy

SEQ ID NO: 191190 - DNA, 13 bp, Artificial Sequence
  Oligonucleotide for detection of SNP TSC0047041
rcaaccgccctct

SEQ ID NO: 191191 - DNA, 13 bp, Artificial Sequence
  Oligonucleotide for detection of SNP TSC0047042
ggaattaggttgy

SEQ ID NO: 191192 - DNA, 13 bp, Artificial Sequence
  Oligonucleotide for detection of SNP TSC0047042
rcaacctaattcc

SEQ ID NO: 191193 - DNA, 13 bp, Artificial Sequence
  Oligonucleotide for detection of SNP TSC0047042
ggaattgggttgy

SEQ ID NO: 191194 - DNA, 13 bp, Artificial Sequence
  Oligonucleotide for detection of SNP TSC0047042
rcaacccaattcc

SEQ ID NO: 191195 - DNA, 13 bp, Artificial Sequence
  Oligonucleotide for detection of SNP TSC0047042
ggaattaggtcgy

SEQ ID NO: 191196 - DNA, 13 bp, Artificial Sequence
  Oligonucleotide for detection of SNP TSC0047042
rcgacctaattcc

SEQ ID NO: 191197 - DNA, 13 bp, Artificial Sequence
  Oligonucleotide for detection of SNP TSC0047042
ggaatcgggttgy

SEQ ID NO: 191198 - DNA, 13 bp, Artificial Sequence
  Oligonucleotide for detection of SNP TSC0047042
rcaacccgattcc

SEQ ID NO: 191199 - DNA, 13 bp, Artificial Sequence
  Oligonucleotide for detection of SNP TSC0047042
ggaattgggtcgy

SEQ ID NO: 191200 - DNA, 13 bp, Artificial Sequence
  Oligonucleotide for detection of SNP TSC0047042
rcgacccaattcc

SEQ ID NO: 191201 - DNA, 13 bp, Artificial Sequence
  Oligonucleotide for detection of SNP TSC0047042
ggaatcgggtcgy

SEQ ID NO: 191202 - DNA, 13 bp, Artificial Sequence
  Oligonucleotide for detection of SNP TSC0047042
rcgacccgattcc

SEQ ID NO: 191203 - DNA, 13 bp, Artificial Sequence
  Oligonucleotide for detection of SNP TSC0047043
ggattttgggtta

SEQ ID NO: 191204 - DNA, 13 bp, Artificial Sequence
  Oligonucleotide for detection of SNP TSC0047043
taacccaaaatcc

SEQ ID NO: 191205 - DNA, 13 bp, Artificial Sequence
  Oligonucleotide for detection of SNP TSC0047043
ggatttggggtta

SEQ ID NO: 191206 - DNA, 13 bp, Artificial Sequence
  Oligonucleotide for detection of SNP TSC0047043
taaccccaaatcc

SEQ ID NO: 191207 - DNA, 13 bp, Artificial Sequence
  Oligonucleotide for detection of SNP TSC0047043
ggattcggggtta

SEQ ID NO: 191208 - DNA, 13 bp, Artificial Sequence
  Oligonucleotide for detection of SNP TSC0047043
taaccccgaatcc

SEQ ID NO: 191209 - DNA, 13 bp, Artificial Sequence
  Oligonucleotide for detection of SNP TSC0047043
tgatttagagtty

SEQ ID NO: 191210 - DNA, 13 bp, Artificial Sequence
  Oligonucleotide for detection of SNP TSC0047043
raactctaaatca

SEQ ID NO: 191211 - DNA, 13 bp, Artificial Sequence
  Oligonucleotide for detection of SNP TSC0047043
tgatttcgagtty

SEQ ID NO: 191212 - DNA, 13 bp, Artificial Sequence
  Oligonucleotide for detection of SNP TSC0047043
raactcgaaatca

SEQ ID NO: 191213 - DNA, 13 bp, Artificial Sequence
  Oligonucleotide for detection of SNP TSC0047044
ggtttgtaattag

SEQ ID NO: 191214 - DNA, 13 bp, Artificial Sequence
  Oligonucleotide for detection of SNP TSC0047044
ctaattacaaacc

SEQ ID NO: 191215 - DNA, 13 bp, Artificial Sequence
  Oligonucleotide for detection of SNP TSC0047044
ggtttggaattag

SEQ ID NO: 191216 - DNA, 13 bp, Artificial Sequence
  Oligonucleotide for detection of SNP TSC0047044
ctaattccaaacc

SEQ ID NO: 191217 - DNA, 13 bp, Artificial Sequence
  Oligonucleotide for detection of SNP TSC0047044
ttggttgtaggty

SEQ ID NO: 191218 - DNA, 13 bp, Artificial Sequence
  Oligonucleotide for detection of SNP TSC0047044
racctacaaccaa

SEQ ID NO: 191219 - DNA, 13 bp, Artificial Sequence
  Oligonucleotide for detection of SNP TSC0047044
ttggttttaggty

SEQ ID NO: 191220 - DNA, 13 bp, Artificial Sequence
  Oligonucleotide for detection of SNP TSC0047044
racctaaaaccaa

SEQ ID NO: 191221 - DNA, 13 bp, Artificial Sequence
  Oligonucleotide for detection of SNP TSC0047045
ttattggttataa

SEQ ID NO: 191222 - DNA, 13 bp, Artificial Sequence
  Oligonucleotide for detection of SNP TSC0047045
ttataaccaataa

SEQ ID NO: 191223 - DNA, 13 bp, Artificial Sequence
  Oligonucleotide for detection of SNP TSC0047045
ttattgattataa

SEQ ID NO: 191224 - DNA, 13 bp, Artificial Sequence
  Oligonucleotide for detection of SNP TSC0047045
ttataatcaataa

SEQ ID NO: 191225 - DNA, 13 bp, Artificial Sequence
  Oligonucleotide for detection of SNP TSC0047045
ttatcggttataa

SEQ ID NO: 191226 - DNA, 13 bp, Artificial Sequence
  Oligonucleotide for detection of SNP TSC0047045
ttataaccgataa

SEQ ID NO: 191227 - DNA, 13 bp, Artificial Sequence
  Oligonucleotide for detection of SNP TSC0047045
ttatcgattataa

SEQ ID NO: 191228 - DNA, 13 bp, Artificial Sequence
  Oligonucleotide for detection of SNP TSC0047045
ttataatcgataa

SEQ ID NO: 191229 - DNA, 13 bp, Artificial Sequence
  Oligonucleotide for detection of SNP TSC0047046
ttttgtaagggaa

SEQ ID NO: 191230 - DNA, 13 bp, Artificial Sequence
  Oligonucleotide for detection of SNP TSC0047046
ttcccttacaaaa

SEQ ID NO: 191231 - DNA, 13 bp, Artificial Sequence
  Oligonucleotide for detection of SNP TSC0047046
ttttgtgagggaa

SEQ ID NO: 191232 - DNA, 13 bp, Artificial Sequence
  Oligonucleotide for detection of SNP TSC0047046
ttccctcacaaaa

SEQ ID NO: 191233 - DNA, 13 bp, Artificial Sequence
  Oligonucleotide for detection of SNP TSC0047046
ttttgcgagggaa

SEQ ID NO: 191234 - DNA, 13 bp, Artificial Sequence
  Oligonucleotide for detection of SNP TSC0047046
ttccctcgcaaaa

SEQ ID NO: 191235 - DNA, 13 bp, Artificial Sequence
  Oligonucleotide for detection of SNP TSC0047046
tttttttgtagaa

SEQ ID NO: 191236 - DNA, 13 bp, Artificial Sequence
  Oligonucleotide for detection of SNP TSC0047046
ttctacaaaaaaa

SEQ ID NO: 191237 - DNA, 13 bp, Artificial Sequence
  Oligonucleotide for detection of SNP TSC0047046
ttttttcgtagaa

SEQ ID NO: 191238 - DNA, 13 bp, Artificial Sequence
  Oligonucleotide for detection of SNP TSC0047046
ttctacgaaaaaa

SEQ ID NO: 191239 - DNA, 13 bp, Artificial Sequence
  Oligonucleotide for detection of SNP TSC0047047
tgtgttgttgtay

SEQ ID NO: 191240 - DNA, 13 bp, Artificial Sequence
  Oligonucleotide for detection of SNP TSC0047047
rtacaacaacaca

SEQ ID NO: 191241 - DNA, 13 bp, Artificial Sequence
  Oligonucleotide for detection of SNP TSC0047047
cgtgttgttgtay

SEQ ID NO: 191242 - DNA, 13 bp, Artificial Sequence
  Oligonucleotide for detection of SNP TSC0047047
rtacaacaacacg

SEQ ID NO: 191243 - DNA, 13 bp, Artificial Sequence
  Oligonucleotide for detection of SNP TSC0047047
tgtgtcgttgtay

SEQ ID NO: 191244 - DNA, 13 bp, Artificial Sequence
  Oligonucleotide for detection of SNP TSC0047047
rtacaacgacaca

SEQ ID NO: 191245 - DNA, 13 bp, Artificial Sequence
  Oligonucleotide for detection of SNP TSC0047047
cgtgtcgttgtay

SEQ ID NO: 191246 - DNA, 13 bp, Artificial Sequence
  Oligonucleotide for detection of SNP TSC0047047
rtacaacgacacg

SEQ ID NO: 191247 - DNA, 13 bp, Artificial Sequence
  Oligonucleotide for detection of SNP TSC0047047
gtgtagtggtatg

SEQ ID NO: 191248 - DNA, 13 bp, Artificial Sequence
  Oligonucleotide for detection of SNP TSC0047047
cataccactacac

SEQ ID NO: 191249 - DNA, 13 bp, Artificial Sequence
  Oligonucleotide for detection of SNP TSC0047047
gtgtagtggtacg

SEQ ID NO: 191250 - DNA, 13 bp, Artificial Sequence
  Oligonucleotide for detection of SNP TSC0047047
cgtaccactacac

SEQ ID NO: 191251 - DNA, 13 bp, Artificial Sequence
  Oligonucleotide for detection of SNP TSC0047047
gtgtagcggtatg

SEQ ID NO: 191252 - DNA, 13 bp, Artificial Sequence
  Oligonucleotide for detection of SNP TSC0047047
cataccgctacac

SEQ ID NO: 191253 - DNA, 13 bp, Artificial Sequence
  Oligonucleotide for detection of SNP TSC0047047
gtgtagcggtacg

SEQ ID NO: 191254 - DNA, 13 bp, Artificial Sequence
  Oligonucleotide for detection of SNP TSC0047047
cgtaccgctacac

SEQ ID NO: 191255 - DNA, 13 bp, Artificial Sequence
  Oligonucleotide for detection of SNP TSC0047049
tttgaaatatttg

SEQ ID NO: 191256 - DNA, 13 bp, Artificial Sequence
  Oligonucleotide for detection of SNP TSC0047049
caaatatttcaaa

SEQ ID NO: 191257 - DNA, 13 bp, Artificial Sequence
  Oligonucleotide for detection of SNP TSC0047049
tttgaagtatttg

SEQ ID NO: 191258 - DNA, 13 bp, Artificial Sequence
  Oligonucleotide for detection of SNP TSC0047049
caaatacttcaaa

SEQ ID NO: 191259 - DNA, 13 bp, Artificial Sequence
  Oligonucleotide for detection of SNP TSC0047053
attataaaatgta

SEQ ID NO: 191260 - DNA, 13 bp, Artificial Sequence
  Oligonucleotide for detection of SNP TSC0047053
tacattttataat

SEQ ID NO: 191261 - DNA, 13 bp, Artificial Sequence
  Oligonucleotide for detection of SNP TSC0047053
tgtattttataat

SEQ ID NO: 191262 - DNA, 13 bp, Artificial Sequence
  Oligonucleotide for detection of SNP TSC0047053
attataaaataca

SEQ ID NO: 191263 - DNA, 13 bp, Artificial Sequence
  Oligonucleotide for detection of SNP TSC0047053
tgtattgtataat

SEQ ID NO: 191264 - DNA, 13 bp, Artificial Sequence
  Oligonucleotide for detection of SNP TSC0047053
attatacaataca

SEQ ID NO: 191265 - DNA, 13 bp, Artificial Sequence
  Oligonucleotide for detection of SNP TSC0047054
ataataaatgtaa

SEQ ID NO: 191266 - DNA, 13 bp, Artificial Sequence
  Oligonucleotide for detection of SNP TSC0047054
ttacatttattat

SEQ ID NO: 191267 - DNA, 13 bp, Artificial Sequence
  Oligonucleotide for detection of SNP TSC0047054
ataatagatgtaa

SEQ ID NO: 191268 - DNA, 13 bp, Artificial Sequence
  Oligonucleotide for detection of SNP TSC0047054
ttacatctattat

SEQ ID NO: 191269 - DNA, 13 bp, Artificial Sequence
  Oligonucleotide for detection of SNP TSC0047055
agagatgaaataa

SEQ ID NO: 191270 - DNA, 13 bp, Artificial Sequence
  Oligonucleotide for detection of SNP TSC0047055
ttatttcatctct

SEQ ID NO: 191271 - DNA, 13 bp, Artificial Sequence
  Oligonucleotide for detection of SNP TSC0047055
agagattaaataa

SEQ ID NO: 191272 - DNA, 13 bp, Artificial Sequence
  Oligonucleotide for detection of SNP TSC0047055
ttatttaatctct

SEQ ID NO: 191273 - DNA, 13 bp, Artificial Sequence
  Oligonucleotide for detection of SNP TSC0005656
gagtgattttgty

SEQ ID NO: 191274 - DNA, 13 bp, Artificial Sequence
  Oligonucleotide for detection of SNP TSC0005656
racaaaatcactc

SEQ ID NO: 191275 - DNA, 13 bp, Artificial Sequence
  Oligonucleotide for detection of SNP TSC0005656
gagtgagtttgty

SEQ ID NO: 191276 - DNA, 13 bp, Artificial Sequence
  Oligonucleotide for detection of SNP TSC0005656
racaaactcactc

SEQ ID NO: 191277 - DNA, 13 bp, Artificial Sequence
  Oligonucleotide for detection of SNP TSC0005656
gataaagttatty

SEQ ID NO: 191278 - DNA, 13 bp, Artificial Sequence
  Oligonucleotide for detection of SNP TSC0005656
raataactttatc

SEQ ID NO: 191279 - DNA, 13 bp, Artificial Sequence
  Oligonucleotide for detection of SNP TSC0005656
gataaatttatty

SEQ ID NO: 191280 - DNA, 13 bp, Artificial Sequence
  Oligonucleotide for detection of SNP TSC0005656
raataaatttatc

SEQ ID NO: 191281 - DNA, 13 bp, Artificial Sequence
  Oligonucleotide for detection of SNP TSC0047056
aggaaggtggttt

SEQ ID NO: 191282 - DNA, 13 bp, Artificial Sequence
  Oligonucleotide for detection of SNP TSC0047056
aaaccaccttcct

SEQ ID NO: 191283 - DNA, 13 bp, Artificial Sequence
  Oligonucleotide for detection of SNP TSC0047056
aggaagatggttt

SEQ ID NO: 191284 - DNA, 13 bp, Artificial Sequence
  Oligonucleotide for detection of SNP TSC0047056
aaaccatcttcct

SEQ ID NO: 191285 - DNA, 13 bp, Artificial Sequence
  Oligonucleotide for detection of SNP TSC0047057
ggaatagaaggaa

SEQ ID NO: 191286 - DNA, 13 bp, Artificial Sequence
  Oligonucleotide for detection of SNP TSC0047057
ttccttctattcc

SEQ ID NO: 191287 - DNA, 13 bp, Artificial Sequence
  Oligonucleotide for detection of SNP TSC0047057
ggaataaaaggaa

SEQ ID NO: 191288 - DNA, 13 bp, Artificial Sequence
  Oligonucleotide for detection of SNP TSC0047057
ttccttttattcc

SEQ ID NO: 191289 - DNA, 13 bp, Artificial Sequence
  Oligonucleotide for detection of SNP TSC0047058
attataaagagat

SEQ ID NO: 191290 - DNA, 13 bp, Artificial Sequence
  Oligonucleotide for detection of SNP TSC0047058
atctctttataat

SEQ ID NO: 191291 - DNA, 13 bp, Artificial Sequence
  Oligonucleotide for detection of SNP TSC0047058
attatagagagat

SEQ ID NO: 191292 - DNA, 13 bp, Artificial Sequence
  Oligonucleotide for detection of SNP TSC0047058
atctctctataat

SEQ ID NO: 191293 - DNA, 13 bp, Artificial Sequence
  Oligonucleotide for detection of SNP TSC0047059
aaatatgttatay

SEQ ID NO: 191294 - DNA, 13 bp, Artificial Sequence
  Oligonucleotide for detection of SNP TSC0047059
rtataacatattt

SEQ ID NO: 191295 - DNA, 13 bp, Artificial Sequence
  Oligonucleotide for detection of SNP TSC0047059
aaatatattatay

SEQ ID NO: 191296 - DNA, 13 bp, Artificial Sequence
  Oligonucleotide for detection of SNP TSC0047059
rtataatatattt

SEQ ID NO: 191297 - DNA, 13 bp, Artificial Sequence
  Oligonucleotide for detection of SNP TSC0047061
ttttaaggggagt

SEQ ID NO: 191298 - DNA, 13 bp, Artificial Sequence
  Oligonucleotide for detection of SNP TSC0047061
actccccttaaaa

SEQ ID NO: 191299 - DNA, 13 bp, Artificial Sequence
  Oligonucleotide for detection of SNP TSC0047061
ttttaaagggagt

SEQ ID NO: 191300 - DNA, 13 bp, Artificial Sequence
  Oligonucleotide for detection of SNP TSC0047061
actccctttaaaa

SEQ ID NO: 191301 - DNA, 13 bp, Artificial Sequence
  Oligonucleotide for detection of SNP TSC0047070
ttttatagattgg

SEQ ID NO: 191302 - DNA, 13 bp, Artificial Sequence
  Oligonucleotide for detection of SNP TSC0047070
ccaatctataaaa

SEQ ID NO: 191303 - DNA, 13 bp, Artificial Sequence
  Oligonucleotide for detection of SNP TSC0047070
ttttattgattgg

SEQ ID NO: 191304 - DNA, 13 bp, Artificial Sequence
  Oligonucleotide for detection of SNP TSC0047070
ccaatcaataaaa

SEQ ID NO: 191305 - DNA, 13 bp, Artificial Sequence
  Oligonucleotide for detection of SNP TSC0047070
ttttatcgattgg

SEQ ID NO: 191306 - DNA, 13 bp, Artificial Sequence
  Oligonucleotide for detection of SNP TSC0047070
ccaatcgataaaa

SEQ ID NO: 191307 - DNA, 13 bp, Artificial Sequence
  Oligonucleotide for detection of SNP TSC0047070
ttagtttgtaaaa

SEQ ID NO: 191308 - DNA, 13 bp, Artificial Sequence
  Oligonucleotide for detection of SNP TSC0047070
ttttacaaactaa

SEQ ID NO: 191309 - DNA, 13 bp, Artificial Sequence
  Oligonucleotide for detection of SNP TSC0047070
ttagttggtaaaa

SEQ ID NO: 191310 - DNA, 13 bp, Artificial Sequence
  Oligonucleotide for detection of SNP TSC0047070
ttttaccaactaa

SEQ ID NO: 191311 - DNA, 13 bp, Artificial Sequence
  Oligonucleotide for detection of SNP TSC0047070
ttagtcggtaaaa

SEQ ID NO: 191312 - DNA, 13 bp, Artificial Sequence
  Oligonucleotide for detection of SNP TSC0047070
ttttaccgactaa

SEQ ID NO: 191313 - DNA, 13 bp, Artificial Sequence
  Oligonucleotide for detection of SNP TSC0047071
gttatagttatgy

SEQ ID NO: 191314 - DNA, 13 bp, Artificial Sequence
  Oligonucleotide for detection of SNP TSC0047071
rcataactataac

SEQ ID NO: 191315 - DNA, 13 bp, Artificial Sequence
  Oligonucleotide for detection of SNP TSC0047071
gttataattatgy

SEQ ID NO: 191316 - DNA, 13 bp, Artificial Sequence
  Oligonucleotide for detection of SNP TSC0047071
rcataattataac

SEQ ID NO: 191317 - DNA, 13 bp, Artificial Sequence
  Oligonucleotide for detection of SNP TSC0047077
aaataatttagat

SEQ ID NO: 191318 - DNA, 13 bp, Artificial Sequence
  Oligonucleotide for detection of SNP TSC0047077
atctaaattattt

SEQ ID NO: 191319 - DNA, 13 bp, Artificial Sequence
  Oligonucleotide for detection of SNP TSC0047077
aaataagttagat

SEQ ID NO: 191320 - DNA, 13 bp, Artificial Sequence
  Oligonucleotide for detection of SNP TSC0047077
atctaacttattt

SEQ ID NO: 191321 - DNA, 13 bp, Artificial Sequence
  Oligonucleotide for detection of SNP TSC0047077
atttgggttattt

SEQ ID NO: 191322 - DNA, 13 bp, Artificial Sequence
  Oligonucleotide for detection of SNP TSC0047077
aaataacccaaat

SEQ ID NO: 191323 - DNA, 13 bp, Artificial Sequence
  Oligonucleotide for detection of SNP TSC0047077
atttggtttattt

SEQ ID NO: 191324 - DNA, 13 bp, Artificial Sequence
  Oligonucleotide for detection of SNP TSC0047077
aaataaaccaaat

SEQ ID NO: 191325 - DNA, 13 bp, Artificial Sequence
  Oligonucleotide for detection of SNP TSC0047079
tgttttaatgaty

SEQ ID NO: 191326 - DNA, 13 bp, Artificial Sequence
  Oligonucleotide for detection of SNP TSC0047079
ratcattaaaaca

SEQ ID NO: 191327 - DNA, 13 bp, Artificial Sequence
  Oligonucleotide for detection of SNP TSC0047079
tgttttgatgaty

SEQ ID NO: 191328 - DNA, 13 bp, Artificial Sequence
  Oligonucleotide for detection of SNP TSC0047079
ratcatcaaaaca

SEQ ID NO: 191329 - DNA, 13 bp, Artificial Sequence
  Oligonucleotide for detection of SNP TSC0047079
tgtttcgatgaty

SEQ ID NO: 191330 - DNA, 13 bp, Artificial Sequence
  Oligonucleotide for detection of SNP TSC0047079
ratcatcgaaaca

SEQ ID NO: 191331 - DNA, 13 bp, Artificial Sequence
  Oligonucleotide for detection of SNP TSC0047079
ggttattgaagta

SEQ ID NO: 191332 - DNA, 13 bp, Artificial Sequence
  Oligonucleotide for detection of SNP TSC0047079
tacttcaataacc

SEQ ID NO: 191333 - DNA, 13 bp, Artificial Sequence
  Oligonucleotide for detection of SNP TSC0047079
ggttatcgaagta

SEQ ID NO: 191334 - DNA, 13 bp, Artificial Sequence
  Oligonucleotide for detection of SNP TSC0047079
tacttcgataacc

SEQ ID NO: 191335 - DNA, 13 bp, Artificial Sequence
  Oligonucleotide for detection of SNP TSC0047080
tttattaagttty

SEQ ID NO: 191336 - DNA, 13 bp, Artificial Sequence
  Oligonucleotide for detection of SNP TSC0047080
raaacttaataaa

SEQ ID NO: 191337 - DNA, 13 bp, Artificial Sequence
  Oligonucleotide for detection of SNP TSC0047080
tttatttagttty

SEQ ID NO: 191338 - DNA, 13 bp, Artificial Sequence
  Oligonucleotide for detection of SNP TSC0047080
raaactaaataaa

SEQ ID NO: 191339 - DNA, 13 bp, Artificial Sequence
  Oligonucleotide for detection of SNP TSC0047080
gaagtttagtaaa

SEQ ID NO: 191340 - DNA, 13 bp, Artificial Sequence
  Oligonucleotide for detection of SNP TSC0047080
tttactaaacttc

SEQ ID NO: 191341 - DNA, 13 bp, Artificial Sequence
  Oligonucleotide for detection of SNP TSC0047080
gaagttaagtaaa

SEQ ID NO: 191342 - DNA, 13 bp, Artificial Sequence
  Oligonucleotide for detection of SNP TSC0047080
tttacttaacttc

SEQ ID NO: 191343 - DNA, 13 bp, Artificial Sequence
  Oligonucleotide for detection of SNP TSC0047085
attttttatatty

SEQ ID NO: 191344 - DNA, 13 bp, Artificial Sequence
  Oligonucleotide for detection of SNP TSC0047085
raatataaaaaat

SEQ ID NO: 191345 - DNA, 13 bp, Artificial Sequence
  Oligonucleotide for detection of SNP TSC0047085
atttttgatatty

SEQ ID NO: 191346 - DNA, 13 bp, Artificial Sequence
  Oligonucleotide for detection of SNP TSC0047085
raatatcaaaaat

SEQ ID NO: 191347 - DNA, 13 bp, Artificial Sequence
  Oligonucleotide for detection of SNP TSC0047085
attttcgatatty

SEQ ID NO: 191348 - DNA, 13 bp, Artificial Sequence
  Oligonucleotide for detection of SNP TSC0047085
raatatcgaaaat

SEQ ID NO: 191349 - DNA, 13 bp, Artificial Sequence
  Oligonucleotide for detection of SNP TSC0047085
gagtgtagggggt

SEQ ID NO: 191350 - DNA, 13 bp, Artificial Sequence
  Oligonucleotide for detection of SNP TSC0047085
accccctacactc

SEQ ID NO: 191351 - DNA, 13 bp, Artificial Sequence
  Oligonucleotide for detection of SNP TSC0047085
gagtgttgggggt

SEQ ID NO: 191352 - DNA, 13 bp, Artificial Sequence
  Oligonucleotide for detection of SNP TSC0047085
acccccaacactc

SEQ ID NO: 191353 - DNA, 13 bp, Artificial Sequence
  Oligonucleotide for detection of SNP TSC0047085
gagtgtcgggggt

SEQ ID NO: 191354 - DNA, 13 bp, Artificial Sequence
  Oligonucleotide for detection of SNP TSC0047085
acccccgacactc

SEQ ID NO: 191355 - DNA, 13 bp, Artificial Sequence
  Oligonucleotide for detection of SNP TSC0047086
ttgggtagaatat

SEQ ID NO: 191356 - DNA, 13 bp, Artificial Sequence
  Oligonucleotide for detection of SNP TSC0047086
atattctacccaa

SEQ ID NO: 191357 - DNA, 13 bp, Artificial Sequence
  Oligonucleotide for detection of SNP TSC0047086
ttgggtggaatat

SEQ ID NO: 191358 - DNA, 13 bp, Artificial Sequence
  Oligonucleotide for detection of SNP TSC0047086
atattccacccaa

SEQ ID NO: 191359 - DNA, 13 bp, Artificial Sequence
  Oligonucleotide for detection of SNP TSC0047087
taatttatatagt

SEQ ID NO: 191360 - DNA, 13 bp, Artificial Sequence
  Oligonucleotide for detection of SNP TSC0047087
actatataaatta

SEQ ID NO: 191361 - DNA, 13 bp, Artificial Sequence
  Oligonucleotide for detection of SNP TSC0047087
taatttgtatagt

SEQ ID NO: 191362 - DNA, 13 bp, Artificial Sequence
  Oligonucleotide for detection of SNP TSC0047087
actatacaaatta

SEQ ID NO: 191363 - DNA, 13 bp, Artificial Sequence
  Oligonucleotide for detection of SNP TSC0047087
taattcgtatagt

SEQ ID NO: 191364 - DNA, 13 bp, Artificial Sequence
  Oligonucleotide for detection of SNP TSC0047087
actatacgaatta

SEQ ID NO: 191365 - DNA, 13 bp, Artificial Sequence
  Oligonucleotide for detection of SNP TSC0047087
attgtatggattg

SEQ ID NO: 191366 - DNA, 13 bp, Artificial Sequence
  Oligonucleotide for detection of SNP TSC0047087
caatccatacaat

SEQ ID NO: 191367 - DNA, 13 bp, Artificial Sequence
  Oligonucleotide for detection of SNP TSC0047087
attgtacggattg

SEQ ID NO: 191368 - DNA, 13 bp, Artificial Sequence
  Oligonucleotide for detection of SNP TSC0047087
caatccgtacaat

SEQ ID NO: 191369 - DNA, 13 bp, Artificial Sequence
  Oligonucleotide for detection of SNP TSC0047088
ggtttaaggagat

SEQ ID NO: 191370 - DNA, 13 bp, Artificial Sequence
  Oligonucleotide for detection of SNP TSC0047088
atctccttaaacc

SEQ ID NO: 191371 - DNA, 13 bp, Artificial Sequence
  Oligonucleotide for detection of SNP TSC0047088
ggtttagggagat

SEQ ID NO: 191372 - DNA, 13 bp, Artificial Sequence
  Oligonucleotide for detection of SNP TSC0047088
atctccctaaacc

SEQ ID NO: 191373 - DNA, 13 bp, Artificial Sequence
  Oligonucleotide for detection of SNP TSC0047089
agagatttgatgg

SEQ ID NO: 191374 - DNA, 13 bp, Artificial Sequence
  Oligonucleotide for detection of SNP TSC0047089
ccatcaaatctct

SEQ ID NO: 191375 - DNA, 13 bp, Artificial Sequence
  Oligonucleotide for detection of SNP TSC0047089
agagatgtgatgg

SEQ ID NO: 191376 - DNA, 13 bp, Artificial Sequence
  Oligonucleotide for detection of SNP TSC0047089
ccatcacatctct

SEQ ID NO: 191377 - DNA, 13 bp, Artificial Sequence
  Oligonucleotide for detection of SNP TSC0047089
ttattatattttt

SEQ ID NO: 191378 - DNA, 13 bp, Artificial Sequence
  Oligonucleotide for detection of SNP TSC0047089
aaaaatataataa

SEQ ID NO: 191379 - DNA, 13 bp, Artificial Sequence
  Oligonucleotide for detection of SNP TSC0047090
tggggggtatgta

SEQ ID NO: 191380 - DNA, 13 bp, Artificial Sequence
  Oligonucleotide for detection of SNP TSC0047090
tacatacccccca

SEQ ID NO: 191381 - DNA, 13 bp, Artificial Sequence
  Oligonucleotide for detection of SNP TSC0047090
tgggggatatgta

SEQ ID NO: 191382 - DNA, 13 bp, Artificial Sequence
  Oligonucleotide for detection of SNP TSC0047090
tacatatccccca

SEQ ID NO: 191383 - DNA, 13 bp, Artificial Sequence
  Oligonucleotide for detection of SNP TSC0047092
ggtttaggttgga

SEQ ID NO: 191384 - DNA, 13 bp, Artificial Sequence
  Oligonucleotide for detection of SNP TSC0047092
tccaacctaaacc

SEQ ID NO: 191385 - DNA, 13 bp, Artificial Sequence
  Oligonucleotide for detection of SNP TSC0047092
ggtttaagttgga

SEQ ID NO: 191386 - DNA, 13 bp, Artificial Sequence
  Oligonucleotide for detection of SNP TSC0047092
tccaacttaaacc

SEQ ID NO: 191387 - DNA, 13 bp, Artificial Sequence
  Oligonucleotide for detection of SNP TSC0047093
aagaaaatgttga

SEQ ID NO: 191388 - DNA, 13 bp, Artificial Sequence
  Oligonucleotide for detection of SNP TSC0047093
tcaacattttctt

SEQ ID NO: 191389 - DNA, 13 bp, Artificial Sequence
  Oligonucleotide for detection of SNP TSC0047093
aagaaagtgttga

SEQ ID NO: 191390 - DNA, 13 bp, Artificial Sequence
  Oligonucleotide for detection of SNP TSC0047093
tcaacactttctt

SEQ ID NO: 191391 - DNA, 13 bp, Artificial Sequence
  Oligonucleotide for detection of SNP TSC0047097
gtaagtagtataa

SEQ ID NO: 191392 - DNA, 13 bp, Artificial Sequence
  Oligonucleotide for detection of SNP TSC0047097
ttatactacttac

SEQ ID NO: 191393 - DNA, 13 bp, Artificial Sequence
  Oligonucleotide for detection of SNP TSC0047097
gtaagtggtataa

SEQ ID NO: 191394 - DNA, 13 bp, Artificial Sequence
  Oligonucleotide for detection of SNP TSC0047097
ttataccacttac

SEQ ID NO: 191395 - DNA, 13 bp, Artificial Sequence
  Oligonucleotide for detection of SNP TSC0047097
gtaagcggtataa

SEQ ID NO: 191396 - DNA, 13 bp, Artificial Sequence
  Oligonucleotide for detection of SNP TSC0047097
ttataccgcttac

SEQ ID NO: 191397 - DNA, 13 bp, Artificial Sequence
  Oligonucleotide for detection of SNP TSC0047097
ttgtgttgtttgy

SEQ ID NO: 191398 - DNA, 13 bp, Artificial Sequence
  Oligonucleotide for detection of SNP TSC0047097
rcaaacaacacaa

SEQ ID NO: 191399 - DNA, 13 bp, Artificial Sequence
  Oligonucleotide for detection of SNP TSC0047097
ttgtgtcgtttgy

SEQ ID NO: 191400 - DNA, 13 bp, Artificial Sequence
  Oligonucleotide for detection of SNP TSC0047097
rcaaacgacacaa

SEQ ID NO: 191401 - DNA, 13 bp, Artificial Sequence
  Oligonucleotide for detection of SNP TSC0047098
taaataaatttaa

SEQ ID NO: 191402 - DNA, 13 bp, Artificial Sequence
  Oligonucleotide for detection of SNP TSC0047098
ttaaatttattta

SEQ ID NO: 191403 - DNA, 13 bp, Artificial Sequence
  Oligonucleotide for detection of SNP TSC0047098
taaatatatttaa

SEQ ID NO: 191404 - DNA, 13 bp, Artificial Sequence
  Oligonucleotide for detection of SNP TSC0047098
ttaaatatattta

SEQ ID NO: 191405 - DNA, 13 bp, Artificial Sequence
  Oligonucleotide for detection of SNP TSC0047098
ttaagtttgttta

SEQ ID NO: 191406 - DNA, 13 bp, Artificial Sequence
  Oligonucleotide for detection of SNP TSC0047098
taaacaaacttaa

SEQ ID NO: 191407 - DNA, 13 bp, Artificial Sequence
  Oligonucleotide for detection of SNP TSC0047098
ttaagtgtgttta

SEQ ID NO: 191408 - DNA, 13 bp, Artificial Sequence
  Oligonucleotide for detection of SNP TSC0047098
taaacacacttaa

SEQ ID NO: 191409 - DNA, 13 bp, Artificial Sequence
  Oligonucleotide for detection of SNP TSC0007743
ttatattatatat

SEQ ID NO: 191410 - DNA, 13 bp, Artificial Sequence
  Oligonucleotide for detection of SNP TSC0007743
atatataatataa

SEQ ID NO: 191411 - DNA, 13 bp, Artificial Sequence
  Oligonucleotide for detection of SNP TSC0007743
ttatatgatatat

SEQ ID NO: 191412 - DNA, 13 bp, Artificial Sequence
  Oligonucleotide for detection of SNP TSC0007743
atatatcatataa

SEQ ID NO: 191413 - DNA, 13 bp, Artificial Sequence
  Oligonucleotide for detection of SNP TSC0007743
atgtatgatgtga

SEQ ID NO: 191414 - DNA, 13 bp, Artificial Sequence
  Oligonucleotide for detection of SNP TSC0007743
tcacatcatacat

SEQ ID NO: 191415 - DNA, 13 bp, Artificial Sequence
  Oligonucleotide for detection of SNP TSC0007743
atgtattatgtga

SEQ ID NO: 191416 - DNA, 13 bp, Artificial Sequence
  Oligonucleotide for detection of SNP TSC0007743
tcacataatacat

SEQ ID NO: 191417 - DNA, 13 bp, Artificial Sequence
  Oligonucleotide for detection of SNP TSC0047102
aataaatataaty

SEQ ID NO: 191418 - DNA, 13 bp, Artificial Sequence
  Oligonucleotide for detection of SNP TSC0047102
rattatatttatt

SEQ ID NO: 191419 - DNA, 13 bp, Artificial Sequence
  Oligonucleotide for detection of SNP TSC0047102
aataaagataaty

SEQ ID NO: 191420 - DNA, 13 bp, Artificial Sequence
  Oligonucleotide for detection of SNP TSC0047102
rattatctttatt

SEQ ID NO: 191421 - DNA, 13 bp, Artificial Sequence
  Oligonucleotide for detection of SNP TSC0047102
gattatatttgtt

SEQ ID NO: 191422 - DNA, 13 bp, Artificial Sequence
  Oligonucleotide for detection of SNP TSC0047102
aacaaatataatc

SEQ ID NO: 191423 - DNA, 13 bp, Artificial Sequence
  Oligonucleotide for detection of SNP TSC0047102
gattatttttgtt

SEQ ID NO: 191424 - DNA, 13 bp, Artificial Sequence
  Oligonucleotide for detection of SNP TSC0047102
aacaaaaataatc

SEQ ID NO: 191425 - DNA, 13 bp, Artificial Sequence
  Oligonucleotide for detection of SNP TSC0047103
tattaagagtaay

SEQ ID NO: 191426 - DNA, 13 bp, Artificial Sequence
  Oligonucleotide for detection of SNP TSC0047103
rttactcttaata

SEQ ID NO: 191427 - DNA, 13 bp, Artificial Sequence
  Oligonucleotide for detection of SNP TSC0047103
tattaaaagtaay

SEQ ID NO: 191428 - DNA, 13 bp, Artificial Sequence
  Oligonucleotide for detection of SNP TSC0047103
rttacttttaata

SEQ ID NO: 191429 - DNA, 13 bp, Artificial Sequence
  Oligonucleotide for detection of SNP TSC0047104
gaaaaggtagttt

SEQ ID NO: 191430 - DNA, 13 bp, Artificial Sequence
  Oligonucleotide for detection of SNP TSC0047104
aaactaccttttc

SEQ ID NO: 191431 - DNA, 13 bp, Artificial Sequence
  Oligonucleotide for detection of SNP TSC0047104
gaaaagatagttt

SEQ ID NO: 191432 - DNA, 13 bp, Artificial Sequence
  Oligonucleotide for detection of SNP TSC0047104
aaactatcttttc

SEQ ID NO: 191433 - DNA, 13 bp, Artificial Sequence
  Oligonucleotide for detection of SNP TSC0047106
aaaaggttttgag

SEQ ID NO: 191434 - DNA, 13 bp, Artificial Sequence
  Oligonucleotide for detection of SNP TSC0047106
ctcaaaacctttt

SEQ ID NO: 191435 - DNA, 13 bp, Artificial Sequence
  Oligonucleotide for detection of SNP TSC0047106
aaaaggatttgag

SEQ ID NO: 191436 - DNA, 13 bp, Artificial Sequence
  Oligonucleotide for detection of SNP TSC0047106
ctcaaatcctttt

SEQ ID NO: 191437 - DNA, 13 bp, Artificial Sequence
  Oligonucleotide for detection of SNP TSC0047106
aaaaggtttcgag

SEQ ID NO: 191438 - DNA, 13 bp, Artificial Sequence
  Oligonucleotide for detection of SNP TSC0047106
ctcgaaacctttt

SEQ ID NO: 191439 - DNA, 13 bp, Artificial Sequence
  Oligonucleotide for detection of SNP TSC0047106
aaaaggattcgag

SEQ ID NO: 191440 - DNA, 13 bp, Artificial Sequence
  Oligonucleotide for detection of SNP TSC0047106
ctcgaatcctttt

SEQ ID NO: 191441 - DNA, 13 bp, Artificial Sequence
  Oligonucleotide for detection of SNP TSC0047107
aagattaataaaa

SEQ ID NO: 191442 - DNA, 13 bp, Artificial Sequence
  Oligonucleotide for detection of SNP TSC0047107
ttttattaatctt

SEQ ID NO: 191443 - DNA, 13 bp, Artificial Sequence
  Oligonucleotide for detection of SNP TSC0047107
aagattgataaaa

SEQ ID NO: 191444 - DNA, 13 bp, Artificial Sequence
  Oligonucleotide for detection of SNP TSC0047107
ttttatcaatctt

SEQ ID NO: 191445 - DNA, 13 bp, Artificial Sequence
  Oligonucleotide for detection of SNP TSC0047108
tagtagattttga

SEQ ID NO: 191446 - DNA, 13 bp, Artificial Sequence
  Oligonucleotide for detection of SNP TSC0047108
tcaaaatctacta

SEQ ID NO: 191447 - DNA, 13 bp, Artificial Sequence
  Oligonucleotide for detection of SNP TSC0047108
tagtaggttttga

SEQ ID NO: 191448 - DNA, 13 bp, Artificial Sequence
  Oligonucleotide for detection of SNP TSC0047108
tcaaaacctacta

SEQ ID NO: 191449 - DNA, 13 bp, Artificial Sequence
  Oligonucleotide for detection of SNP TSC0047109
atagaattttgga

SEQ ID NO: 191450 - DNA, 13 bp, Artificial Sequence
  Oligonucleotide for detection of SNP TSC0047109
tccaaaattctat

SEQ ID NO: 191451 - DNA, 13 bp, Artificial Sequence
  Oligonucleotide for detection of SNP TSC0047109
atagaagtttgga

SEQ ID NO: 191452 - DNA, 13 bp, Artificial Sequence
  Oligonucleotide for detection of SNP TSC0047109
tccaaacttctat

SEQ ID NO: 191453 - DNA, 13 bp, Artificial Sequence
  Oligonucleotide for detection of SNP TSC0047109
tttaaagttttat

SEQ ID NO: 191454 - DNA, 13 bp, Artificial Sequence
  Oligonucleotide for detection of SNP TSC0047109
ataaaactttaaa

SEQ ID NO: 191455 - DNA, 13 bp, Artificial Sequence
  Oligonucleotide for detection of SNP TSC0047110
tttaatattaatt

SEQ ID NO: 191456 - DNA, 13 bp, Artificial Sequence
  Oligonucleotide for detection of SNP TSC0047110
aattaatattaaa

SEQ ID NO: 191457 - DNA, 13 bp, Artificial Sequence
  Oligonucleotide for detection of SNP TSC0047110
tttaatgttaatt

SEQ ID NO: 191458 - DNA, 13 bp, Artificial Sequence
  Oligonucleotide for detection of SNP TSC0047110
aattaacattaaa

SEQ ID NO: 191459 - DNA, 13 bp, Artificial Sequence
  Oligonucleotide for detection of SNP TSC0047110
tttaacgttaatt

SEQ ID NO: 191460 - DNA, 13 bp, Artificial Sequence
  Oligonucleotide for detection of SNP TSC0047110
aattaacgttaaa

SEQ ID NO: 191461 - DNA, 13 bp, Artificial Sequence
  Oligonucleotide for detection of SNP TSC0047110
aattgatgttgga

SEQ ID NO: 191462 - DNA, 13 bp, Artificial Sequence
  Oligonucleotide for detection of SNP TSC0047110
tccaacatcaatt

SEQ ID NO: 191463 - DNA, 13 bp, Artificial Sequence
  Oligonucleotide for detection of SNP TSC0047110
aattgacgttgga

SEQ ID NO: 191464 - DNA, 13 bp, Artificial Sequence
  Oligonucleotide for detection of SNP TSC0047110
tccaacgtcaatt

SEQ ID NO: 191465 - DNA, 13 bp, Artificial Sequence
  Oligonucleotide for detection of SNP TSC0047111
aatattaattttg

SEQ ID NO: 191466 - DNA, 13 bp, Artificial Sequence
  Oligonucleotide for detection of SNP TSC0047111
caaaattaatatt

SEQ ID NO: 191467 - DNA, 13 bp, Artificial Sequence
  Oligonucleotide for detection of SNP TSC0047111
aatattgattttg

SEQ ID NO: 191468 - DNA, 13 bp, Artificial Sequence
  Oligonucleotide for detection of SNP TSC0047111
caaaatcaatatt

SEQ ID NO: 191469 - DNA, 13 bp, Artificial Sequence
  Oligonucleotide for detection of SNP TSC0047111
aatatcgattttg

SEQ ID NO: 191470 - DNA, 13 bp, Artificial Sequence
  Oligonucleotide for detection of SNP TSC0047111
caaaatcgatatt

SEQ ID NO: 191471 - DNA, 13 bp, Artificial Sequence
  Oligonucleotide for detection of SNP TSC0047111
taaaattgatgtt

SEQ ID NO: 191472 - DNA, 13 bp, Artificial Sequence
  Oligonucleotide for detection of SNP TSC0047111
aacatcaatttta

SEQ ID NO: 191473 - DNA, 13 bp, Artificial Sequence
  Oligonucleotide for detection of SNP TSC0047111
taaaatcgatgtt

SEQ ID NO: 191474 - DNA, 13 bp, Artificial Sequence
  Oligonucleotide for detection of SNP TSC0047111
aacatcgatttta

SEQ ID NO: 191475 - DNA, 13 bp, Artificial Sequence
  Oligonucleotide for detection of SNP TSC0047116
gttattttggttg

SEQ ID NO: 191476 - DNA, 13 bp, Artificial Sequence
  Oligonucleotide for detection of SNP TSC0047116
caaccaaaataac

SEQ ID NO: 191477 - DNA, 13 bp, Artificial Sequence
  Oligonucleotide for detection of SNP TSC0047116
gttattgtggttg

SEQ ID NO: 191478 - DNA, 13 bp, Artificial Sequence
  Oligonucleotide for detection of SNP TSC0047116
caaccacaataac

SEQ ID NO: 191479 - DNA, 13 bp, Artificial Sequence
  Oligonucleotide for detection of SNP TSC0047116
gttatcgtggttg

SEQ ID NO: 191480 - DNA, 13 bp, Artificial Sequence
  Oligonucleotide for detection of SNP TSC0047116
caaccacgataac

SEQ ID NO: 191481 - DNA, 13 bp, Artificial Sequence
  Oligonucleotide for detection of SNP TSC0047116
taattaagatggy

SEQ ID NO: 191482 - DNA, 13 bp, Artificial Sequence
  Oligonucleotide for detection of SNP TSC0047116
rccatcttaatta

SEQ ID NO: 191483 - DNA, 13 bp, Artificial Sequence
  Oligonucleotide for detection of SNP TSC0047116
taattatgatggy

SEQ ID NO: 191484 - DNA, 13 bp, Artificial Sequence
  Oligonucleotide for detection of SNP TSC0047116
rccatcataatta

SEQ ID NO: 191485 - DNA, 13 bp, Artificial Sequence
  Oligonucleotide for detection of SNP TSC0047116
taattacgatggy

SEQ ID NO: 191486 - DNA, 13 bp, Artificial Sequence
  Oligonucleotide for detection of SNP TSC0047116
rccatcgtaatta

SEQ ID NO: 191487 - DNA, 13 bp, Artificial Sequence
  Oligonucleotide for detection of SNP TSC0047117
tttatgaattatt

SEQ ID NO: 191488 - DNA, 13 bp, Artificial Sequence
  Oligonucleotide for detection of SNP TSC0047117
aataattcataaa

SEQ ID NO: 191489 - DNA, 13 bp, Artificial Sequence
  Oligonucleotide for detection of SNP TSC0047117
agtaatttataag

SEQ ID NO: 191490 - DNA, 13 bp, Artificial Sequence
  Oligonucleotide for detection of SNP TSC0047117
cttataaattact

SEQ ID NO: 191491 - DNA, 13 bp, Artificial Sequence
  Oligonucleotide for detection of SNP TSC0047117
agtaatatataag

SEQ ID NO: 191492 - DNA, 13 bp, Artificial Sequence
  Oligonucleotide for detection of SNP TSC0047117
cttatatattact

SEQ ID NO: 191493 - DNA, 13 bp, Artificial Sequence
  Oligonucleotide for detection of SNP TSC0047118
ataaaatgtatat

SEQ ID NO: 191494 - DNA, 13 bp, Artificial Sequence
  Oligonucleotide for detection of SNP TSC0047118
atatacattttat

SEQ ID NO: 191495 - DNA, 13 bp, Artificial Sequence
  Oligonucleotide for detection of SNP TSC0047118
atgtatgttttat

SEQ ID NO: 191496 - DNA, 13 bp, Artificial Sequence
  Oligonucleotide for detection of SNP TSC0047118
ataaaacatacat

SEQ ID NO: 191497 - DNA, 13 bp, Artificial Sequence
  Oligonucleotide for detection of SNP TSC0047118
atgtatattttat

SEQ ID NO: 191498 - DNA, 13 bp, Artificial Sequence
  Oligonucleotide for detection of SNP TSC0047118
ataaaatatacat

SEQ ID NO: 191499 - DNA, 13 bp, Artificial Sequence
  Oligonucleotide for detection of SNP TSC0047118
atgtacgttttat

SEQ ID NO: 191500 - DNA, 13 bp, Artificial Sequence
  Oligonucleotide for detection of SNP TSC0047118
ataaaacgtacat

SEQ ID NO: 191501 - DNA, 13 bp, Artificial Sequence
  Oligonucleotide for detection of SNP TSC0047119
aatttttatggga

SEQ ID NO: 191502 - DNA, 13 bp, Artificial Sequence
  Oligonucleotide for detection of SNP TSC0047119
tcccataaaaatt

SEQ ID NO: 191503 - DNA, 13 bp, Artificial Sequence
  Oligonucleotide for detection of SNP TSC0047119
aattttgatggga

SEQ ID NO: 191504 - DNA, 13 bp, Artificial Sequence
  Oligonucleotide for detection of SNP TSC0047119
tcccatcaaaatt

SEQ ID NO: 191505 - DNA, 13 bp, Artificial Sequence
  Oligonucleotide for detection of SNP TSC0047120
aagaagattaaag

SEQ ID NO: 191506 - DNA, 13 bp, Artificial Sequence
  Oligonucleotide for detection of SNP TSC0047120
ctttaatcttctt

SEQ ID NO: 191507 - DNA, 13 bp, Artificial Sequence
  Oligonucleotide for detection of SNP TSC0047120
aagaaggttaaag

SEQ ID NO: 191508 - DNA, 13 bp, Artificial Sequence
  Oligonucleotide for detection of SNP TSC0047120
ctttaaccttctt

SEQ ID NO: 191509 - DNA, 13 bp, Artificial Sequence
  Oligonucleotide for detection of SNP TSC0047122
gttttttatttta

SEQ ID NO: 191510 - DNA, 13 bp, Artificial Sequence
  Oligonucleotide for detection of SNP TSC0047122
taaaataaaaaac

SEQ ID NO: 191511 - DNA, 13 bp, Artificial Sequence
  Oligonucleotide for detection of SNP TSC0047123
atgaaatgatatt

SEQ ID NO: 191512 - DNA, 13 bp, Artificial Sequence
  Oligonucleotide for detection of SNP TSC0047123
aatatcatttcat

SEQ ID NO: 191513 - DNA, 13 bp, Artificial Sequence
  Oligonucleotide for detection of SNP TSC0047123
atgaaacgatatt

SEQ ID NO: 191514 - DNA, 13 bp, Artificial Sequence
  Oligonucleotide for detection of SNP TSC0047123
aatatcgtttcat

SEQ ID NO: 191515 - DNA, 13 bp, Artificial Sequence
  Oligonucleotide for detection of SNP TSC0047129
tttggagttaatt

SEQ ID NO: 191516 - DNA, 13 bp, Artificial Sequence
  Oligonucleotide for detection of SNP TSC0047129
aattaactccaaa

SEQ ID NO: 191517 - DNA, 13 bp, Artificial Sequence
  Oligonucleotide for detection of SNP TSC0047129
tttggaattaatt

SEQ ID NO: 191518 - DNA, 13 bp, Artificial Sequence
  Oligonucleotide for detection of SNP TSC0047129
aattaattccaaa

SEQ ID NO: 191519 - DNA, 13 bp, Artificial Sequence
  Oligonucleotide for detection of SNP TSC0047130
attttatagggga

SEQ ID NO: 191520 - DNA, 13 bp, Artificial Sequence
  Oligonucleotide for detection of SNP TSC0047130
tcccctataaaat

SEQ ID NO: 191521 - DNA, 13 bp, Artificial Sequence
  Oligonucleotide for detection of SNP TSC0047130
attttagagggga

SEQ ID NO: 191522 - DNA, 13 bp, Artificial Sequence
  Oligonucleotide for detection of SNP TSC0047130
tcccctctaaaat

SEQ ID NO: 191523 - DNA, 13 bp, Artificial Sequence
  Oligonucleotide for detection of SNP TSC0047130
ttttttatgaagt

SEQ ID NO: 191524 - DNA, 13 bp, Artificial Sequence
  Oligonucleotide for detection of SNP TSC0047130
acttcataaaaaa

SEQ ID NO: 191525 - DNA, 13 bp, Artificial Sequence
  Oligonucleotide for detection of SNP TSC0047130
ttttttttgaagt

SEQ ID NO: 191526 - DNA, 13 bp, Artificial Sequence
  Oligonucleotide for detection of SNP TSC0047130
acttcaaaaaaaa

SEQ ID NO: 191527 - DNA, 13 bp, Artificial Sequence
  Oligonucleotide for detection of SNP TSC0047131
taaataagatgty

SEQ ID NO: 191528 - DNA, 13 bp, Artificial Sequence
  Oligonucleotide for detection of SNP TSC0047131
racatcttattta

SEQ ID NO: 191529 - DNA, 13 bp, Artificial Sequence
  Oligonucleotide for detection of SNP TSC0047131
taaataggatgty

SEQ ID NO: 191530 - DNA, 13 bp, Artificial Sequence
  Oligonucleotide for detection of SNP TSC0047131
racatcctattta

SEQ ID NO: 191531 - DNA, 13 bp, Artificial Sequence
  Oligonucleotide for detection of SNP TSC0047131
taaataagacgty

SEQ ID NO: 191532 - DNA, 13 bp, Artificial Sequence
  Oligonucleotide for detection of SNP TSC0047131
racgtcttattta

SEQ ID NO: 191533 - DNA, 13 bp, Artificial Sequence
  Oligonucleotide for detection of SNP TSC0047131
taaataggacgty

SEQ ID NO: 191534 - DNA, 13 bp, Artificial Sequence
  Oligonucleotide for detection of SNP TSC0047131
racgtcctattta

SEQ ID NO: 191535 - DNA, 13 bp, Artificial Sequence
  Oligonucleotide for detection of SNP TSC0047132
gttattatagttt

SEQ ID NO: 191536 - DNA, 13 bp, Artificial Sequence
  Oligonucleotide for detection of SNP TSC0047132
aaactataataac

SEQ ID NO: 191537 - DNA, 13 bp, Artificial Sequence
  Oligonucleotide for detection of SNP TSC0047135
ttgttaaaatttt

SEQ ID NO: 191538 - DNA, 13 bp, Artificial Sequence
  Oligonucleotide for detection of SNP TSC0047135
aaaattttaacaa

SEQ ID NO: 191539 - DNA, 13 bp, Artificial Sequence
  Oligonucleotide for detection of SNP TSC0047135
ttgttataatttt

SEQ ID NO: 191540 - DNA, 13 bp, Artificial Sequence
  Oligonucleotide for detection of SNP TSC0047135
aaaattataacaa

SEQ ID NO: 191541 - DNA, 13 bp, Artificial Sequence
  Oligonucleotide for detection of SNP TSC0047135
aaaattgtaataa

SEQ ID NO: 191542 - DNA, 13 bp, Artificial Sequence
  Oligonucleotide for detection of SNP TSC0047135
ttattacaatttt

SEQ ID NO: 191543 - DNA, 13 bp, Artificial Sequence
  Oligonucleotide for detection of SNP TSC0047136
agtgtattatata

SEQ ID NO: 191544 - DNA, 13 bp, Artificial Sequence
  Oligonucleotide for detection of SNP TSC0047136
tatataatacact

SEQ ID NO: 191545 - DNA, 13 bp, Artificial Sequence
  Oligonucleotide for detection of SNP TSC0047136
agtgtagtatata

SEQ ID NO: 191546 - DNA, 13 bp, Artificial Sequence
  Oligonucleotide for detection of SNP TSC0047136
tatatactacact

SEQ ID NO: 191547 - DNA, 13 bp, Artificial Sequence
  Oligonucleotide for detection of SNP TSC0047136
tgtgtaatgtatt

SEQ ID NO: 191548 - DNA, 13 bp, Artificial Sequence
  Oligonucleotide for detection of SNP TSC0047136
aatacattacaca

SEQ ID NO: 191549 - DNA, 13 bp, Artificial Sequence
  Oligonucleotide for detection of SNP TSC0047136
tgtgtattgtatt

SEQ ID NO: 191550 - DNA, 13 bp, Artificial Sequence
  Oligonucleotide for detection of SNP TSC0047136
aatacaatacaca

SEQ ID NO: 191551 - DNA, 13 bp, Artificial Sequence
  Oligonucleotide for detection of SNP TSC0047139
agtggggaaagaa

SEQ ID NO: 191552 - DNA, 13 bp, Artificial Sequence
  Oligonucleotide for detection of SNP TSC0047139
ttctttccccact

SEQ ID NO: 191553 - DNA, 13 bp, Artificial Sequence
  Oligonucleotide for detection of SNP TSC0047139
agtgggaaaagaa

SEQ ID NO: 191554 - DNA, 13 bp, Artificial Sequence
  Oligonucleotide for detection of SNP TSC0047139
ttcttttcccact

SEQ ID NO: 191555 - DNA, 13 bp, Artificial Sequence
  Oligonucleotide for detection of SNP TSC0047140
tatttatagttta

SEQ ID NO: 191556 - DNA, 13 bp, Artificial Sequence
  Oligonucleotide for detection of SNP TSC0047140
taaactataaata

SEQ ID NO: 191557 - DNA, 13 bp, Artificial Sequence
  Oligonucleotide for detection of SNP TSC0047140
tatttagagttta

SEQ ID NO: 191558 - DNA, 13 bp, Artificial Sequence
  Oligonucleotide for detection of SNP TSC0047140
taaactctaaata

SEQ ID NO: 191559 - DNA, 13 bp, Artificial Sequence
  Oligonucleotide for detection of SNP TSC0047140
taaattataaatg

SEQ ID NO: 191560 - DNA, 13 bp, Artificial Sequence
  Oligonucleotide for detection of SNP TSC0047140
catttataattta

SEQ ID NO: 191561 - DNA, 13 bp, Artificial Sequence
  Oligonucleotide for detection of SNP TSC0047140
taaattttaaatg

SEQ ID NO: 191562 - DNA, 13 bp, Artificial Sequence
  Oligonucleotide for detection of SNP TSC0047140
catttaaaattta

SEQ ID NO: 191563 - DNA, 13 bp, Artificial Sequence
  Oligonucleotide for detection of SNP TSC0047141
ttatttatatgat

SEQ ID NO: 191564 - DNA, 13 bp, Artificial Sequence
  Oligonucleotide for detection of SNP TSC0047141
atcatataaataa

SEQ ID NO: 191565 - DNA, 13 bp, Artificial Sequence
  Oligonucleotide for detection of SNP TSC0047141
ttatttgtatgat

SEQ ID NO: 191566 - DNA, 13 bp, Artificial Sequence
  Oligonucleotide for detection of SNP TSC0047141
atcatacaaataa

SEQ ID NO: 191567 - DNA, 13 bp, Artificial Sequence
  Oligonucleotide for detection of SNP TSC0047141
ttattcgtatgat

SEQ ID NO: 191568 - DNA, 13 bp, Artificial Sequence
  Oligonucleotide for detection of SNP TSC0047141
atcatacgaataa

SEQ ID NO: 191569 - DNA, 13 bp, Artificial Sequence
  Oligonucleotide for detection of SNP TSC0047141
attatatgagtga

SEQ ID NO: 191570 - DNA, 13 bp, Artificial Sequence
  Oligonucleotide for detection of SNP TSC0047141
tcactcatataat

SEQ ID NO: 191571 - DNA, 13 bp, Artificial Sequence
  Oligonucleotide for detection of SNP TSC0047141
attatacgagtga

SEQ ID NO: 191572 - DNA, 13 bp, Artificial Sequence
  Oligonucleotide for detection of SNP TSC0047141
tcactcgtataat

SEQ ID NO: 191573 - DNA, 13 bp, Artificial Sequence
  Oligonucleotide for detection of SNP TSC0047142
tgtatatgttaat

SEQ ID NO: 191574 - DNA, 13 bp, Artificial Sequence
  Oligonucleotide for detection of SNP TSC0047142
attaacatataca

SEQ ID NO: 191575 - DNA, 13 bp, Artificial Sequence
  Oligonucleotide for detection of SNP TSC0047142
tgtatacgttaat

SEQ ID NO: 191576 - DNA, 13 bp, Artificial Sequence
  Oligonucleotide for detection of SNP TSC0047142
attaacgtataca

SEQ ID NO: 191577 - DNA, 13 bp, Artificial Sequence
  Oligonucleotide for detection of SNP TSC0047142
attaatgtatata

SEQ ID NO: 191578 - DNA, 13 bp, Artificial Sequence
  Oligonucleotide for detection of SNP TSC0047142
tatatacattaat

SEQ ID NO: 191579 - DNA, 13 bp, Artificial Sequence
  Oligonucleotide for detection of SNP TSC0047142
attaacgtatata

SEQ ID NO: 191580 - DNA, 13 bp, Artificial Sequence
  Oligonucleotide for detection of SNP TSC0047142
tatatacgttaat

SEQ ID NO: 191581 - DNA, 13 bp, Artificial Sequence
  Oligonucleotide for detection of SNP TSC0000546
atgtgggaaagtt

SEQ ID NO: 191582 - DNA, 13 bp, Artificial Sequence
  Oligonucleotide for detection of SNP TSC0000546
aactttcccacat

SEQ ID NO: 191583 - DNA, 13 bp, Artificial Sequence
  Oligonucleotide for detection of SNP TSC0000546
atgtggaaaagtt

SEQ ID NO: 191584 - DNA, 13 bp, Artificial Sequence
  Oligonucleotide for detection of SNP TSC0000546
aacttttccacat

SEQ ID NO: 191585 - DNA, 13 bp, Artificial Sequence
  Oligonucleotide for detection of SNP TSC0009652
atttgtgagaggg

SEQ ID NO: 191586 - DNA, 13 bp, Artificial Sequence
  Oligonucleotide for detection of SNP TSC0009652
ccctctcacaaat

SEQ ID NO: 191587 - DNA, 13 bp, Artificial Sequence
  Oligonucleotide for detection of SNP TSC0009652
atttgtaagaggg

SEQ ID NO: 191588 - DNA, 13 bp, Artificial Sequence
  Oligonucleotide for detection of SNP TSC0009652
ccctcttacaaat

SEQ ID NO: 191589 - DNA, 13 bp, Artificial Sequence
  Oligonucleotide for detection of SNP TSC0047143
aatatatgtagta

SEQ ID NO: 191590 - DNA, 13 bp, Artificial Sequence
  Oligonucleotide for detection of SNP TSC0047143
tactacatatatt

SEQ ID NO: 191591 - DNA, 13 bp, Artificial Sequence
  Oligonucleotide for detection of SNP TSC0047143
aatataagtagta

SEQ ID NO: 191592 - DNA, 13 bp, Artificial Sequence
  Oligonucleotide for detection of SNP TSC0047143
tactacttatatt

SEQ ID NO: 191593 - DNA, 13 bp, Artificial Sequence
  Oligonucleotide for detection of SNP TSC0000200
agttttgtatgtg

SEQ ID NO: 191594 - DNA, 13 bp, Artificial Sequence
  Oligonucleotide for detection of SNP TSC0000200
cacatacaaaact

SEQ ID NO: 191595 - DNA, 13 bp, Artificial Sequence
  Oligonucleotide for detection of SNP TSC0000200
agttttatatgtg

SEQ ID NO: 191596 - DNA, 13 bp, Artificial Sequence
  Oligonucleotide for detection of SNP TSC0000200
cacatataaaact

SEQ ID NO: 191597 - DNA, 13 bp, Artificial Sequence
  Oligonucleotide for detection of SNP TSC0047144
tttgttaattagg

SEQ ID NO: 191598 - DNA, 13 bp, Artificial Sequence
  Oligonucleotide for detection of SNP TSC0047144
cctaattaacaaa

SEQ ID NO: 191599 - DNA, 13 bp, Artificial Sequence
  Oligonucleotide for detection of SNP TSC0047144
tttgttgattagg

SEQ ID NO: 191600 - DNA, 13 bp, Artificial Sequence
  Oligonucleotide for detection of SNP TSC0047144
cctaatcaacaaa

SEQ ID NO: 191601 - DNA, 13 bp, Artificial Sequence
  Oligonucleotide for detection of SNP TSC0047144
tttgtcgattagg

SEQ ID NO: 191602 - DNA, 13 bp, Artificial Sequence
  Oligonucleotide for detection of SNP TSC0047144
cctaatcgacaaa

SEQ ID NO: 191603 - DNA, 13 bp, Artificial Sequence
  Oligonucleotide for detection of SNP TSC0047144
tttaattggtaaa

SEQ ID NO: 191604 - DNA, 13 bp, Artificial Sequence
  Oligonucleotide for detection of SNP TSC0047144
tttaccaattaaa

SEQ ID NO: 191605 - DNA, 13 bp, Artificial Sequence
  Oligonucleotide for detection of SNP TSC0047144
tttaatcggtaaa

SEQ ID NO: 191606 - DNA, 13 bp, Artificial Sequence
  Oligonucleotide for detection of SNP TSC0047144
tttaccgattaaa

SEQ ID NO: 191607 - DNA, 13 bp, Artificial Sequence
  Oligonucleotide for detection of SNP TSC0000218
tttgtaagtgatt

SEQ ID NO: 191608 - DNA, 13 bp, Artificial Sequence
  Oligonucleotide for detection of SNP TSC0000218
aatcacttacaaa

SEQ ID NO: 191609 - DNA, 13 bp, Artificial Sequence
  Oligonucleotide for detection of SNP TSC0000218
tttgtaggtgatt

SEQ ID NO: 191610 - DNA, 13 bp, Artificial Sequence
  Oligonucleotide for detection of SNP TSC0000218
aatcacctacaaa

SEQ ID NO: 191611 - DNA, 13 bp, Artificial Sequence
  Oligonucleotide for detection of SNP TSC0000218
tttgtaagcgatt

SEQ ID NO: 191612 - DNA, 13 bp, Artificial Sequence
  Oligonucleotide for detection of SNP TSC0000218
aatcgcttacaaa

SEQ ID NO: 191613 - DNA, 13 bp, Artificial Sequence
  Oligonucleotide for detection of SNP TSC0000218
tttgtaggcgatt

SEQ ID NO: 191614 - DNA, 13 bp, Artificial Sequence
  Oligonucleotide for detection of SNP TSC0000218
aatcgcctacaaa

SEQ ID NO: 191615 - DNA, 13 bp, Artificial Sequence
  Oligonucleotide for detection of SNP TSC0001421
taagttaattaag

SEQ ID NO: 191616 - DNA, 13 bp, Artificial Sequence
  Oligonucleotide for detection of SNP TSC0001421
cttaattaactta

SEQ ID NO: 191617 - DNA, 13 bp, Artificial Sequence
  Oligonucleotide for detection of SNP TSC0001421
taagtttattaag

SEQ ID NO: 191618 - DNA, 13 bp, Artificial Sequence
  Oligonucleotide for detection of SNP TSC0001421
cttaataaactta

SEQ ID NO: 191619 - DNA, 13 bp, Artificial Sequence
  Oligonucleotide for detection of SNP TSC0001421
tttgattggttta

SEQ ID NO: 191620 - DNA, 13 bp, Artificial Sequence
  Oligonucleotide for detection of SNP TSC0001421
taaaccaatcaaa

SEQ ID NO: 191621 - DNA, 13 bp, Artificial Sequence
  Oligonucleotide for detection of SNP TSC0047149
ggatttaaattaa

SEQ ID NO: 191622 - DNA, 13 bp, Artificial Sequence
  Oligonucleotide for detection of SNP TSC0047149
ttaatttaaatcc

SEQ ID NO: 191623 - DNA, 13 bp, Artificial Sequence
  Oligonucleotide for detection of SNP TSC0047149
ggatttgaattaa

SEQ ID NO: 191624 - DNA, 13 bp, Artificial Sequence
  Oligonucleotide for detection of SNP TSC0047149
ttaattcaaatcc

SEQ ID NO: 191625 - DNA, 13 bp, Artificial Sequence
  Oligonucleotide for detection of SNP TSC0047149
ggattcgaattaa

SEQ ID NO: 191626 - DNA, 13 bp, Artificial Sequence
  Oligonucleotide for detection of SNP TSC0047149
ttaattcgaatcc

SEQ ID NO: 191627 - DNA, 13 bp, Artificial Sequence
  Oligonucleotide for detection of SNP TSC0047149
ttggtttggatty

SEQ ID NO: 191628 - DNA, 13 bp, Artificial Sequence
  Oligonucleotide for detection of SNP TSC0047149
raatccaaaccaa

SEQ ID NO: 191629 - DNA, 13 bp, Artificial Sequence
  Oligonucleotide for detection of SNP TSC0047149
ttggttcggatty

SEQ ID NO: 191630 - DNA, 13 bp, Artificial Sequence
  Oligonucleotide for detection of SNP TSC0047149
raatccgaaccaa

SEQ ID NO: 191631 - DNA, 13 bp, Artificial Sequence
  Oligonucleotide for detection of SNP TSC0001135
ataaatattttaa

SEQ ID NO: 191632 - DNA, 13 bp, Artificial Sequence
  Oligonucleotide for detection of SNP TSC0001135
ttaaaatatttat

SEQ ID NO: 191633 - DNA, 13 bp, Artificial Sequence
  Oligonucleotide for detection of SNP TSC0001135
ataaatgttttaa

SEQ ID NO: 191634 - DNA, 13 bp, Artificial Sequence
  Oligonucleotide for detection of SNP TSC0001135
ttaaaacatttat

SEQ ID NO: 191635 - DNA, 13 bp, Artificial Sequence
  Oligonucleotide for detection of SNP TSC0001138
tttttgtattatt

SEQ ID NO: 191636 - DNA, 13 bp, Artificial Sequence
  Oligonucleotide for detection of SNP TSC0001138
aataatacaaaaa

SEQ ID NO: 191637 - DNA, 13 bp, Artificial Sequence
  Oligonucleotide for detection of SNP TSC0001138
tttttggattatt

SEQ ID NO: 191638 - DNA, 13 bp, Artificial Sequence
  Oligonucleotide for detection of SNP TSC0001138
aataatccaaaaa

SEQ ID NO: 191639 - DNA, 13 bp, Artificial Sequence
  Oligonucleotide for detection of SNP TSC0001138
agtaatgtaagaa

SEQ ID NO: 191640 - DNA, 13 bp, Artificial Sequence
  Oligonucleotide for detection of SNP TSC0001138
ttcttacattact

SEQ ID NO: 191641 - DNA, 13 bp, Artificial Sequence
  Oligonucleotide for detection of SNP TSC0047152
tatgaagggagay

SEQ ID NO: 191642 - DNA, 13 bp, Artificial Sequence
  Oligonucleotide for detection of SNP TSC0047152
rtctcccttcata

SEQ ID NO: 191643 - DNA, 13 bp, Artificial Sequence
  Oligonucleotide for detection of SNP TSC0047152
tatgaatggagay

SEQ ID NO: 191644 - DNA, 13 bp, Artificial Sequence
  Oligonucleotide for detection of SNP TSC0047152
rtctccattcata

SEQ ID NO: 191645 - DNA, 13 bp, Artificial Sequence
  Oligonucleotide for detection of SNP TSC0047152
tatgaacggagay

SEQ ID NO: 191646 - DNA, 13 bp, Artificial Sequence
  Oligonucleotide for detection of SNP TSC0047152
rtctccgttcata

SEQ ID NO: 191647 - DNA, 13 bp, Artificial Sequence
  Oligonucleotide for detection of SNP TSC0001244
attttttgtgtgt

SEQ ID NO: 191648 - DNA, 13 bp, Artificial Sequence
  Oligonucleotide for detection of SNP TSC0001244
acacacaaaaaat

SEQ ID NO: 191649 - DNA, 13 bp, Artificial Sequence
  Oligonucleotide for detection of SNP TSC0001244
atttttcgtgtgt

SEQ ID NO: 191650 - DNA, 13 bp, Artificial Sequence
  Oligonucleotide for detection of SNP TSC0001244
acacacgaaaaat

SEQ ID NO: 191651 - DNA, 13 bp, Artificial Sequence
  Oligonucleotide for detection of SNP TSC0001244
atatatgaggaat

SEQ ID NO: 191652 - DNA, 13 bp, Artificial Sequence
  Oligonucleotide for detection of SNP TSC0001244
attcctcatatat

SEQ ID NO: 191653 - DNA, 13 bp, Artificial Sequence
  Oligonucleotide for detection of SNP TSC0001244
atatataaggaat

SEQ ID NO: 191654 - DNA, 13 bp, Artificial Sequence
  Oligonucleotide for detection of SNP TSC0001244
attccttatatat

SEQ ID NO: 191655 - DNA, 13 bp, Artificial Sequence
  Oligonucleotide for detection of SNP TSC0001244
atatacgaggaat

SEQ ID NO: 191656 - DNA, 13 bp, Artificial Sequence
  Oligonucleotide for detection of SNP TSC0001244
attcctcgtatat

SEQ ID NO: 191657 - DNA, 13 bp, Artificial Sequence
  Oligonucleotide for detection of SNP TSC0047156
tgagttattggta

SEQ ID NO: 191658 - DNA, 13 bp, Artificial Sequence
  Oligonucleotide for detection of SNP TSC0047156
taccaataactca

SEQ ID NO: 191659 - DNA, 13 bp, Artificial Sequence
  Oligonucleotide for detection of SNP TSC0047156
tgagttgttggta

SEQ ID NO: 191660 - DNA, 13 bp, Artificial Sequence
  Oligonucleotide for detection of SNP TSC0047156
taccaacaactca

SEQ ID NO: 191661 - DNA, 13 bp, Artificial Sequence
  Oligonucleotide for detection of SNP TSC0047156
cgagttattggta

SEQ ID NO: 191662 - DNA, 13 bp, Artificial Sequence
  Oligonucleotide for detection of SNP TSC0047156
taccaataactcg

SEQ ID NO: 191663 - DNA, 13 bp, Artificial Sequence
  Oligonucleotide for detection of SNP TSC0047156
cgagttgttggta

SEQ ID NO: 191664 - DNA, 13 bp, Artificial Sequence
  Oligonucleotide for detection of SNP TSC0047156
taccaacaactcg

SEQ ID NO: 191665 - DNA, 13 bp, Artificial Sequence
  Oligonucleotide for detection of SNP TSC0047157
agaggtgaatttt

SEQ ID NO: 191666 - DNA, 13 bp, Artificial Sequence
  Oligonucleotide for detection of SNP TSC0047157
aaaattcacctct

SEQ ID NO: 191667 - DNA, 13 bp, Artificial Sequence
  Oligonucleotide for detection of SNP TSC0047157
agaggtaaatttt

SEQ ID NO: 191668 - DNA, 13 bp, Artificial Sequence
  Oligonucleotide for detection of SNP TSC0047157
aaaatttacctct

SEQ ID NO: 191669 - DNA, 13 bp, Artificial Sequence
  Oligonucleotide for detection of SNP TSC0047158
tgaggaagataty

SEQ ID NO: 191670 - DNA, 13 bp, Artificial Sequence
  Oligonucleotide for detection of SNP TSC0047158
ratatcttcctca

SEQ ID NO: 191671 - DNA, 13 bp, Artificial Sequence
  Oligonucleotide for detection of SNP TSC0047158
tgaggaggataty

SEQ ID NO: 191672 - DNA, 13 bp, Artificial Sequence
  Oligonucleotide for detection of SNP TSC0047158
ratatcctcctca

SEQ ID NO: 191673 - DNA, 13 bp, Artificial Sequence
  unsure (12): Oligonucleotide for detection of SNP TSC0047159
ttatgaagttang

SEQ ID NO: 191674 - DNA, 13 bp, Artificial Sequence
  unsure (2): Oligonucleotide for detection of SNP TSC0047159
cntaacttcataa

SEQ ID NO: 191675 - DNA, 13 bp, Artificial Sequence
  unsure (12): Oligonucleotide for detection of SNP TSC0047159
ttatgaggttang

SEQ ID NO: 191676 - DNA, 13 bp, Artificial Sequence
  unsure (2): Oligonucleotide for detection of SNP TSC0047159
cntaacctcataa

SEQ ID NO: 191677 - DNA, 13 bp, Artificial Sequence
  Oligonucleotide for detection of SNP TSC0000293
tcgtttatttttt

SEQ ID NO: 191678 - DNA, 13 bp, Artificial Sequence
  Oligonucleotide for detection of SNP TSC0000293
aaaaaataaacga

SEQ ID NO: 191679 - DNA, 13 bp, Artificial Sequence
  Oligonucleotide for detection of SNP TSC0000293
tcgtttgtttttt

SEQ ID NO: 191680 - DNA, 13 bp, Artificial Sequence
  Oligonucleotide for detection of SNP TSC0000293
aaaaaacaaacga

SEQ ID NO: 191681 - DNA, 13 bp, Artificial Sequence
  Oligonucleotide for detection of SNP TSC0000813
ttatatattaagy

SEQ ID NO: 191682 - DNA, 13 bp, Artificial Sequence
  Oligonucleotide for detection of SNP TSC0000813
rcttaatatataa

SEQ ID NO: 191683 - DNA, 13 bp, Artificial Sequence
  Oligonucleotide for detection of SNP TSC0000813
ttatatgttaagy

SEQ ID NO: 191684 - DNA, 13 bp, Artificial Sequence
  Oligonucleotide for detection of SNP TSC0000813
rcttaacatataa

SEQ ID NO: 191685 - DNA, 13 bp, Artificial Sequence
  Oligonucleotide for detection of SNP TSC0000813
ttatacgttaagy

SEQ ID NO: 191686 - DNA, 13 bp, Artificial Sequence
  Oligonucleotide for detection of SNP TSC0000813
rcttaacgtataa

SEQ ID NO: 191687 - DNA, 13 bp, Artificial Sequence
  Oligonucleotide for detection of SNP TSC0000813
gtttgatgtataa

SEQ ID NO: 191688 - DNA, 13 bp, Artificial Sequence
  Oligonucleotide for detection of SNP TSC0000813
ttatacatcaaac

SEQ ID NO: 191689 - DNA, 13 bp, Artificial Sequence
  Oligonucleotide for detection of SNP TSC0000813
gtttgacgtataa

SEQ ID NO: 191690 - DNA, 13 bp, Artificial Sequence
  Oligonucleotide for detection of SNP TSC0000813
ttatacgtcaaac

SEQ ID NO: 191691 - DNA, 13 bp, Artificial Sequence
  Oligonucleotide for detection of SNP TSC0047161
gtttgaatattay

SEQ ID NO: 191692 - DNA, 13 bp, Artificial Sequence
  Oligonucleotide for detection of SNP TSC0047161
rtaatattcaaac

SEQ ID NO: 191693 - DNA, 13 bp, Artificial Sequence
  Oligonucleotide for detection of SNP TSC0047161
gtttgattattay

SEQ ID NO: 191694 - DNA, 13 bp, Artificial Sequence
  Oligonucleotide for detection of SNP TSC0047161
rtaataatcaaac

SEQ ID NO: 191695 - DNA, 13 bp, Artificial Sequence
  Oligonucleotide for detection of SNP TSC0047161
gtgatatttaaay

SEQ ID NO: 191696 - DNA, 13 bp, Artificial Sequence
  Oligonucleotide for detection of SNP TSC0047161
rtttaaatatcac

SEQ ID NO: 191697 - DNA, 13 bp, Artificial Sequence
  Oligonucleotide for detection of SNP TSC0047161
gtgataattaaay

SEQ ID NO: 191698 - DNA, 13 bp, Artificial Sequence
  Oligonucleotide for detection of SNP TSC0047161
rtttaattatcac

SEQ ID NO: 191699 - DNA, 13 bp, Artificial Sequence
  Oligonucleotide for detection of SNP TSC0047162
ttataggttgttg

SEQ ID NO: 191700 - DNA, 13 bp, Artificial Sequence
  Oligonucleotide for detection of SNP TSC0047162
caacaacctataa

SEQ ID NO: 191701 - DNA, 13 bp, Artificial Sequence
  Oligonucleotide for detection of SNP TSC0047162
ttatagattgttg

SEQ ID NO: 191702 - DNA, 13 bp, Artificial Sequence
  Oligonucleotide for detection of SNP TSC0047162
caacaatctataa

SEQ ID NO: 191703 - DNA, 13 bp, Artificial Sequence
  Oligonucleotide for detection of SNP TSC0047163
gatagaaagaaag

SEQ ID NO: 191704 - DNA, 13 bp, Artificial Sequence
  Oligonucleotide for detection of SNP TSC0047163
ctttctttctatc

SEQ ID NO: 191705 - DNA, 13 bp, Artificial Sequence
  Oligonucleotide for detection of SNP TSC0047163
gatagatagaaag

SEQ ID NO: 191706 - DNA, 13 bp, Artificial Sequence
  Oligonucleotide for detection of SNP TSC0047163
ctttctatctatc

SEQ ID NO: 191707 - DNA, 13 bp, Artificial Sequence
  Oligonucleotide for detection of SNP TSC0047164
gggaggtattata

SEQ ID NO: 191708 - DNA, 13 bp, Artificial Sequence
  Oligonucleotide for detection of SNP TSC0047164
tataatacctccc

SEQ ID NO: 191709 - DNA, 13 bp, Artificial Sequence
  Oligonucleotide for detection of SNP TSC0047164
gggagggattata

SEQ ID NO: 191710 - DNA, 13 bp, Artificial Sequence
  Oligonucleotide for detection of SNP TSC0047164
tataatccctccc

SEQ ID NO: 191711 - DNA, 13 bp, Artificial Sequence
  Oligonucleotide for detection of SNP TSC0047165
ttttaaggatata

SEQ ID NO: 191712 - DNA, 13 bp, Artificial Sequence
  Oligonucleotide for detection of SNP TSC0047165
tatatccttaaaa

SEQ ID NO: 191713 - DNA, 13 bp, Artificial Sequence
  Oligonucleotide for detection of SNP TSC0047165
ttttaaagatata

SEQ ID NO: 191714 - DNA, 13 bp, Artificial Sequence
  Oligonucleotide for detection of SNP TSC0047165
tatatctttaaaa

SEQ ID NO: 191715 - DNA, 13 bp, Artificial Sequence
  Oligonucleotide for detection of SNP TSC0047166
attttaatggtta

SEQ ID NO: 191716 - DNA, 13 bp, Artificial Sequence
  Oligonucleotide for detection of SNP TSC0047166
taaccattaaaat

SEQ ID NO: 191717 - DNA, 13 bp, Artificial Sequence
  Oligonucleotide for detection of SNP TSC0047166
attttattggtta

SEQ ID NO: 191718 - DNA, 13 bp, Artificial Sequence
  Oligonucleotide for detection of SNP TSC0047166
taaccaataaaat

SEQ ID NO: 191719 - DNA, 13 bp, Artificial Sequence
  Oligonucleotide for detection of SNP TSC0047166
tggttattgggat

SEQ ID NO: 191720 - DNA, 13 bp, Artificial Sequence
  Oligonucleotide for detection of SNP TSC0047166
atcccaataacca

SEQ ID NO: 191721 - DNA, 13 bp, Artificial Sequence
  Oligonucleotide for detection of SNP TSC0047166
tggttaatgggat

SEQ ID NO: 191722 - DNA, 13 bp, Artificial Sequence
  Oligonucleotide for detection of SNP TSC0047166
atcccattaacca

SEQ ID NO: 191723 - DNA, 13 bp, Artificial Sequence
  Oligonucleotide for detection of SNP TSC0047167
atattacgttgta

SEQ ID NO: 191724 - DNA, 13 bp, Artificial Sequence
  Oligonucleotide for detection of SNP TSC0047167
tacaacgtaatat

SEQ ID NO: 191725 - DNA, 13 bp, Artificial Sequence
  Oligonucleotide for detection of SNP TSC0047167
tgtagtgtggtat

SEQ ID NO: 191726 - DNA, 13 bp, Artificial Sequence
  Oligonucleotide for detection of SNP TSC0047167
ataccacactaca

SEQ ID NO: 191727 - DNA, 13 bp, Artificial Sequence
  Oligonucleotide for detection of SNP TSC0047167
tgtagtatggtat

SEQ ID NO: 191728 - DNA, 13 bp, Artificial Sequence
  Oligonucleotide for detection of SNP TSC0047167
ataccatactaca

SEQ ID NO: 191729 - DNA, 13 bp, Artificial Sequence
  Oligonucleotide for detection of SNP TSC0047167
tgtagcgtggtat

SEQ ID NO: 191730 - DNA, 13 bp, Artificial Sequence
  Oligonucleotide for detection of SNP TSC0047167
ataccacgctaca

SEQ ID NO: 191731 - DNA, 13 bp, Artificial Sequence
  Oligonucleotide for detection of SNP TSC0047171
cgtatatgtttta

SEQ ID NO: 191732 - DNA, 13 bp, Artificial Sequence
  Oligonucleotide for detection of SNP TSC0047171
taaaacatatacg

SEQ ID NO: 191733 - DNA, 13 bp, Artificial Sequence
  Oligonucleotide for detection of SNP TSC0047171
cgtataggtttta

SEQ ID NO: 191734 - DNA, 13 bp, Artificial Sequence
  Oligonucleotide for detection of SNP TSC0047171
taaaacctatacg

SEQ ID NO: 191735 - DNA, 13 bp, Artificial Sequence
  Oligonucleotide for detection of SNP TSC0047171
tgaaatatatatg

SEQ ID NO: 191736 - DNA, 13 bp, Artificial Sequence
  Oligonucleotide for detection of SNP TSC0047171
catatatatttca

SEQ ID NO: 191737 - DNA, 13 bp, Artificial Sequence
  Oligonucleotide for detection of SNP TSC0047171
tgaaatttatatg

SEQ ID NO: 191738 - DNA, 13 bp, Artificial Sequence
  Oligonucleotide for detection of SNP TSC0047171
catataaatttca

SEQ ID NO: 191739 - DNA, 13 bp, Artificial Sequence
  Oligonucleotide for detection of SNP TSC0047171
tgaaatatatacg

SEQ ID NO: 191740 - DNA, 13 bp, Artificial Sequence
  Oligonucleotide for detection of SNP TSC0047171
cgtatatatttca

SEQ ID NO: 191741 - DNA, 13 bp, Artificial Sequence
  Oligonucleotide for detection of SNP TSC0047171
tgaaatttatacg

SEQ ID NO: 191742 - DNA, 13 bp, Artificial Sequence
  Oligonucleotide for detection of SNP TSC0047171
cgtataaatttca

SEQ ID NO: 191743 - DNA, 13 bp, Artificial Sequence
  Oligonucleotide for detection of SNP TSC0047172
gttttatgttaag

SEQ ID NO: 191744 - DNA, 13 bp, Artificial Sequence
  Oligonucleotide for detection of SNP TSC0047172
cttaacataaaac

SEQ ID NO: 191745 - DNA, 13 bp, Artificial Sequence
  Oligonucleotide for detection of SNP TSC0047172
gttttacgttaag

SEQ ID NO: 191746 - DNA, 13 bp, Artificial Sequence
  Oligonucleotide for detection of SNP TSC0047172
cttaacgtaaaac

SEQ ID NO: 191747 - DNA, 13 bp, Artificial Sequence
  Oligonucleotide for detection of SNP TSC0047172
tttggtgtgaagy

SEQ ID NO: 191748 - DNA, 13 bp, Artificial Sequence
  Oligonucleotide for detection of SNP TSC0047172
rcttcacaccaaa

SEQ ID NO: 191749 - DNA, 13 bp, Artificial Sequence
  Oligonucleotide for detection of SNP TSC0047172
tttggtatgaagy

SEQ ID NO: 191750 - DNA, 13 bp, Artificial Sequence
  Oligonucleotide for detection of SNP TSC0047172
rcttcataccaaa

SEQ ID NO: 191751 - DNA, 13 bp, Artificial Sequence
  Oligonucleotide for detection of SNP TSC0047172
tttggcgtgaagy

SEQ ID NO: 191752 - DNA, 13 bp, Artificial Sequence
  Oligonucleotide for detection of SNP TSC0047172
rcttcacgccaaa

SEQ ID NO: 191753 - DNA, 13 bp, Artificial Sequence
  Oligonucleotide for detection of SNP TSC0047176
ttattagtgatgg

SEQ ID NO: 191754 - DNA, 13 bp, Artificial Sequence
  Oligonucleotide for detection of SNP TSC0047176
ccatcactaataa

SEQ ID NO: 191755 - DNA, 13 bp, Artificial Sequence
  Oligonucleotide for detection of SNP TSC0047176
ttattaatgatgg

SEQ ID NO: 191756 - DNA, 13 bp, Artificial Sequence
  Oligonucleotide for detection of SNP TSC0047176
ccatcattaataa

SEQ ID NO: 191757 - DNA, 13 bp, Artificial Sequence
  Oligonucleotide for detection of SNP TSC0047177
atgtatttttata

SEQ ID NO: 191758 - DNA, 13 bp, Artificial Sequence
  Oligonucleotide for detection of SNP TSC0047177
tataaaaatacat

SEQ ID NO: 191759 - DNA, 13 bp, Artificial Sequence
  Oligonucleotide for detection of SNP TSC0047177
atgtatatttata

SEQ ID NO: 191760 - DNA, 13 bp, Artificial Sequence
  Oligonucleotide for detection of SNP TSC0047177
tataaatatacat

SEQ ID NO: 191761 - DNA, 13 bp, Artificial Sequence
  Oligonucleotide for detection of SNP TSC0047179
gatttgtgtagaa

SEQ ID NO: 191762 - DNA, 13 bp, Artificial Sequence
  Oligonucleotide for detection of SNP TSC0047179
ttctacacaaatc

SEQ ID NO: 191763 - DNA, 13 bp, Artificial Sequence
  Oligonucleotide for detection of SNP TSC0047179
gatttgggtagaa

SEQ ID NO: 191764 - DNA, 13 bp, Artificial Sequence
  Oligonucleotide for detection of SNP TSC0047179
ttctacccaaatc

SEQ ID NO: 191765 - DNA, 13 bp, Artificial Sequence
  Oligonucleotide for detection of SNP TSC0047179
ttttgtataggty

SEQ ID NO: 191766 - DNA, 13 bp, Artificial Sequence
  Oligonucleotide for detection of SNP TSC0047179
racctatacaaaa

SEQ ID NO: 191767 - DNA, 13 bp, Artificial Sequence
  Oligonucleotide for detection of SNP TSC0047179
ttttgtttaggty

SEQ ID NO: 191768 - DNA, 13 bp, Artificial Sequence
  Oligonucleotide for detection of SNP TSC0047179
racctaaacaaaa

SEQ ID NO: 191769 - DNA, 13 bp, Artificial Sequence
  Oligonucleotide for detection of SNP TSC0047182
agtaagagatttt

SEQ ID NO: 191770 - DNA, 13 bp, Artificial Sequence
  Oligonucleotide for detection of SNP TSC0047182
aaaatctcttact

SEQ ID NO: 191771 - DNA, 13 bp, Artificial Sequence
  Oligonucleotide for detection of SNP TSC0047182
agtaagggatttt

SEQ ID NO: 191772 - DNA, 13 bp, Artificial Sequence
  Oligonucleotide for detection of SNP TSC0047182
aaaatcccttact

SEQ ID NO: 191773 - DNA, 13 bp, Artificial Sequence
  Oligonucleotide for detection of SNP TSC0047183
ataagatttgagy

SEQ ID NO: 191774 - DNA, 13 bp, Artificial Sequence
  Oligonucleotide for detection of SNP TSC0047183
rctcaaatcttat

SEQ ID NO: 191775 - DNA, 13 bp, Artificial Sequence
  Oligonucleotide for detection of SNP TSC0047183
ataagagttgagy

SEQ ID NO: 191776 - DNA, 13 bp, Artificial Sequence
  Oligonucleotide for detection of SNP TSC0047183
rctcaactcttat

SEQ ID NO: 191777 - DNA, 13 bp, Artificial Sequence
  Oligonucleotide for detection of SNP TSC0047183
gtttaggttttgt

SEQ ID NO: 191778 - DNA, 13 bp, Artificial Sequence
  Oligonucleotide for detection of SNP TSC0047183
acaaaacctaaac

SEQ ID NO: 191779 - DNA, 13 bp, Artificial Sequence
  Oligonucleotide for detection of SNP TSC0047183
gtttagtttttgt

SEQ ID NO: 191780 - DNA, 13 bp, Artificial Sequence
  Oligonucleotide for detection of SNP TSC0047183
acaaaaactaaac

SEQ ID NO: 191781 - DNA, 13 bp, Artificial Sequence
  Oligonucleotide for detection of SNP TSC0047184
ggagggggataay

SEQ ID NO: 191782 - DNA, 13 bp, Artificial Sequence
  Oligonucleotide for detection of SNP TSC0047184
rttatccccctcc

SEQ ID NO: 191783 - DNA, 13 bp, Artificial Sequence
  Oligonucleotide for detection of SNP TSC0047184
ggagggtgataay

SEQ ID NO: 191784 - DNA, 13 bp, Artificial Sequence
  Oligonucleotide for detection of SNP TSC0047184
rttatcaccctcc

SEQ ID NO: 191785 - DNA, 13 bp, Artificial Sequence
  Oligonucleotide for detection of SNP TSC0047184
ggagggcgataay

SEQ ID NO: 191786 - DNA, 13 bp, Artificial Sequence
  Oligonucleotide for detection of SNP TSC0047184
rttatcgccctcc

SEQ ID NO: 191787 - DNA, 13 bp, Artificial Sequence
  Oligonucleotide for detection of SNP TSC0047185
agaagggttattg

SEQ ID NO: 191788 - DNA, 13 bp, Artificial Sequence
  Oligonucleotide for detection of SNP TSC0047185
caataacccttct

SEQ ID NO: 191789 - DNA, 13 bp, Artificial Sequence
  Oligonucleotide for detection of SNP TSC0047186
ttaggttgggagg

SEQ ID NO: 191790 - DNA, 13 bp, Artificial Sequence
  Oligonucleotide for detection of SNP TSC0047186
cctcccaacctaa

SEQ ID NO: 191791 - DNA, 13 bp, Artificial Sequence
  Oligonucleotide for detection of SNP TSC0047186
ttaggtcgggagg

SEQ ID NO: 191792 - DNA, 13 bp, Artificial Sequence
  Oligonucleotide for detection of SNP TSC0047186
cctcccgacctaa

SEQ ID NO: 191793 - DNA, 13 bp, Artificial Sequence
  Oligonucleotide for detection of SNP TSC0047197
gtttttcgttatg

SEQ ID NO: 191794 - DNA, 13 bp, Artificial Sequence
  Oligonucleotide for detection of SNP TSC0047197
cataacgaaaaac

SEQ ID NO: 191795 - DNA, 13 bp, Artificial Sequence
  Oligonucleotide for detection of SNP TSC0047197
tatggtggaaggy

SEQ ID NO: 191796 - DNA, 13 bp, Artificial Sequence
  Oligonucleotide for detection of SNP TSC0047197
rccttccaccata

SEQ ID NO: 191797 - DNA, 13 bp, Artificial Sequence
  Oligonucleotide for detection of SNP TSC0047197
tatggtagaaggy

SEQ ID NO: 191798 - DNA, 13 bp, Artificial Sequence
  Oligonucleotide for detection of SNP TSC0047197
rccttctaccata

SEQ ID NO: 191799 - DNA, 13 bp, Artificial Sequence
  Oligonucleotide for detection of SNP TSC0047197
tatggcggaaggy

SEQ ID NO: 191800 - DNA, 13 bp, Artificial Sequence
  Oligonucleotide for detection of SNP TSC0047197
rccttccgccata

SEQ ID NO: 191801 - DNA, 13 bp, Artificial Sequence
  Oligonucleotide for detection of SNP TSC0005257
tttgtagatatat

SEQ ID NO: 191802 - DNA, 13 bp, Artificial Sequence
  Oligonucleotide for detection of SNP TSC0005257
atatatctacaaa

SEQ ID NO: 191803 - DNA, 13 bp, Artificial Sequence
  Oligonucleotide for detection of SNP TSC0005257
tttgtaaatatat

SEQ ID NO: 191804 - DNA, 13 bp, Artificial Sequence
  Oligonucleotide for detection of SNP TSC0005257
atatatttacaaa

SEQ ID NO: 191805 - DNA, 13 bp, Artificial Sequence
  Oligonucleotide for detection of SNP TSC0005258
tatattattttag

SEQ ID NO: 191806 - DNA, 13 bp, Artificial Sequence
  Oligonucleotide for detection of SNP TSC0005258
ctaaaataatata

SEQ ID NO: 191807 - DNA, 13 bp, Artificial Sequence
  Oligonucleotide for detection of SNP TSC0005258
tatattgttttag

SEQ ID NO: 191808 - DNA, 13 bp, Artificial Sequence
  Oligonucleotide for detection of SNP TSC0005258
ctaaaacaatata

SEQ ID NO: 191809 - DNA, 13 bp, Artificial Sequence
  Oligonucleotide for detection of SNP TSC0005259
tgggggtgtgtag

SEQ ID NO: 191810 - DNA, 13 bp, Artificial Sequence
  Oligonucleotide for detection of SNP TSC0005259
ctacacaccccca

SEQ ID NO: 191811 - DNA, 13 bp, Artificial Sequence
  Oligonucleotide for detection of SNP TSC0005259
tgggggggtgtag

SEQ ID NO: 191812 - DNA, 13 bp, Artificial Sequence
  Oligonucleotide for detection of SNP TSC0005259
ctacaccccccca

SEQ ID NO: 191813 - DNA, 13 bp, Artificial Sequence
  Oligonucleotide for detection of SNP TSC0047198
ttgggtattgtty

SEQ ID NO: 191814 - DNA, 13 bp, Artificial Sequence
  Oligonucleotide for detection of SNP TSC0047198
raacaatacccaa

SEQ ID NO: 191815 - DNA, 13 bp, Artificial Sequence
  Oligonucleotide for detection of SNP TSC0047198
ttgggtgttgtty

SEQ ID NO: 191816 - DNA, 13 bp, Artificial Sequence
  Oligonucleotide for detection of SNP TSC0047198
raacaacacccaa

SEQ ID NO: 191817 - DNA, 13 bp, Artificial Sequence
  Oligonucleotide for detection of SNP TSC0047198
ttgggcgttgtty

SEQ ID NO: 191818 - DNA, 13 bp, Artificial Sequence
  Oligonucleotide for detection of SNP TSC0047198
raacaacgcccaa

SEQ ID NO: 191819 - DNA, 13 bp, Artificial Sequence
  Oligonucleotide for detection of SNP TSC0047198
gaatagtgtttaa

SEQ ID NO: 191820 - DNA, 13 bp, Artificial Sequence
  Oligonucleotide for detection of SNP TSC0047198
ttaaacactattc

SEQ ID NO: 191821 - DNA, 13 bp, Artificial Sequence
  Oligonucleotide for detection of SNP TSC0047198
gaatagcgtttaa

SEQ ID NO: 191822 - DNA, 13 bp, Artificial Sequence
  Oligonucleotide for detection of SNP TSC0047198
ttaaacgctattc

SEQ ID NO: 191823 - DNA, 13 bp, Artificial Sequence
  Oligonucleotide for detection of SNP TSC0047199
attaaggagtaga

SEQ ID NO: 191824 - DNA, 13 bp, Artificial Sequence
  Oligonucleotide for detection of SNP TSC0047199
tctactccttaat

SEQ ID NO: 191825 - DNA, 13 bp, Artificial Sequence
  Oligonucleotide for detection of SNP TSC0047199
attaagaagtaga

SEQ ID NO: 191826 - DNA, 13 bp, Artificial Sequence
  Oligonucleotide for detection of SNP TSC0047199
tctacttcttaat

SEQ ID NO: 191827 - DNA, 13 bp, Artificial Sequence
  Oligonucleotide for detection of SNP TSC0047201
gagatatagagaa

SEQ ID NO: 191828 - DNA, 13 bp, Artificial Sequence
  Oligonucleotide for detection of SNP TSC0047201
ttctctatatctc

SEQ ID NO: 191829 - DNA, 13 bp, Artificial Sequence
  Oligonucleotide for detection of SNP TSC0047201
gagataaagagaa

SEQ ID NO: 191830 - DNA, 13 bp, Artificial Sequence
  Oligonucleotide for detection of SNP TSC0047201
ttctctttatctc

SEQ ID NO: 191831 - DNA, 13 bp, Artificial Sequence
  Oligonucleotide for detection of SNP TSC0047202
tgaaaaatttata

SEQ ID NO: 191832 - DNA, 13 bp, Artificial Sequence
  Oligonucleotide for detection of SNP TSC0047202
tataaatttttca

SEQ ID NO: 191833 - DNA, 13 bp, Artificial Sequence
  Oligonucleotide for detection of SNP TSC0047202
tgaaaattttata

SEQ ID NO: 191834 - DNA, 13 bp, Artificial Sequence
  Oligonucleotide for detection of SNP TSC0047202
tataaaattttca

SEQ ID NO: 191835 - DNA, 13 bp, Artificial Sequence
  Oligonucleotide for detection of SNP TSC0047204
agggtagtagagg

SEQ ID NO: 191836 - DNA, 13 bp, Artificial Sequence
  Oligonucleotide for detection of SNP TSC0047204
cctctactaccct

SEQ ID NO: 191837 - DNA, 13 bp, Artificial Sequence
  Oligonucleotide for detection of SNP TSC0047204
agggtaatagagg

SEQ ID NO: 191838 - DNA, 13 bp, Artificial Sequence
  Oligonucleotide for detection of SNP TSC0047204
cctctattaccct

SEQ ID NO: 191839 - DNA, 13 bp, Artificial Sequence
  Oligonucleotide for detection of SNP TSC0047206
ttttaggagttay

SEQ ID NO: 191840 - DNA, 13 bp, Artificial Sequence
  Oligonucleotide for detection of SNP TSC0047206
rtaactcctaaaa

SEQ ID NO: 191841 - DNA, 13 bp, Artificial Sequence
  Oligonucleotide for detection of SNP TSC0047206
ttttagaagttay

SEQ ID NO: 191842 - DNA, 13 bp, Artificial Sequence
  Oligonucleotide for detection of SNP TSC0047206
rtaacttctaaaa

SEQ ID NO: 191843 - DNA, 13 bp, Artificial Sequence
  Oligonucleotide for detection of SNP TSC0047207
gaataaattaaty

SEQ ID NO: 191844 - DNA, 13 bp, Artificial Sequence
  Oligonucleotide for detection of SNP TSC0047207
rattaatttattc

SEQ ID NO: 191845 - DNA, 13 bp, Artificial Sequence
  Oligonucleotide for detection of SNP TSC0047207
gaataatttaaty

SEQ ID NO: 191846 - DNA, 13 bp, Artificial Sequence
  Oligonucleotide for detection of SNP TSC0047207
rattaaattattc

SEQ ID NO: 191847 - DNA, 13 bp, Artificial Sequence
  Oligonucleotide for detection of SNP TSC0047207
ggttagtttatty

SEQ ID NO: 191848 - DNA, 13 bp, Artificial Sequence
  Oligonucleotide for detection of SNP TSC0047207
raataaactaacc

SEQ ID NO: 191849 - DNA, 13 bp, Artificial Sequence
  Oligonucleotide for detection of SNP TSC0047207
ggttagattatty

SEQ ID NO: 191850 - DNA, 13 bp, Artificial Sequence
  Oligonucleotide for detection of SNP TSC0047207
raataatctaacc

SEQ ID NO: 191851 - DNA, 13 bp, Artificial Sequence
  Oligonucleotide for detection of SNP TSC0047208
tttttaaattgga

SEQ ID NO: 191852 - DNA, 13 bp, Artificial Sequence
  Oligonucleotide for detection of SNP TSC0047208
tccaatttaaaaa

SEQ ID NO: 191853 - DNA, 13 bp, Artificial Sequence
  Oligonucleotide for detection of SNP TSC0047208
tttttagattgga

SEQ ID NO: 191854 - DNA, 13 bp, Artificial Sequence
  Oligonucleotide for detection of SNP TSC0047208
tccaatctaaaaa

SEQ ID NO: 191855 - DNA, 13 bp, Artificial Sequence
  Oligonucleotide for detection of SNP TSC0047209
ttataagtataat

SEQ ID NO: 191856 - DNA, 13 bp, Artificial Sequence
  Oligonucleotide for detection of SNP TSC0047209
attatacttataa

SEQ ID NO: 191857 - DNA, 13 bp, Artificial Sequence
  Oligonucleotide for detection of SNP TSC0047209
ttataaatataat

SEQ ID NO: 191858 - DNA, 13 bp, Artificial Sequence
  Oligonucleotide for detection of SNP TSC0047209
attatatttataa

SEQ ID NO: 191859 - DNA, 13 bp, Artificial Sequence
  Oligonucleotide for detection of SNP TSC0047210
ttagttggaagta

SEQ ID NO: 191860 - DNA, 13 bp, Artificial Sequence
  Oligonucleotide for detection of SNP TSC0047210
tacttccaactaa

SEQ ID NO: 191861 - DNA, 13 bp, Artificial Sequence
  Oligonucleotide for detection of SNP TSC0047210
ttagttagaagta

SEQ ID NO: 191862 - DNA, 13 bp, Artificial Sequence
  Oligonucleotide for detection of SNP TSC0047210
tacttctaactaa

SEQ ID NO: 191863 - DNA, 13 bp, Artificial Sequence
  Oligonucleotide for detection of SNP TSC0047213
tttgtggttgata

SEQ ID NO: 191864 - DNA, 13 bp, Artificial Sequence
  Oligonucleotide for detection of SNP TSC0047213
tatcaaccacaaa

SEQ ID NO: 191865 - DNA, 13 bp, Artificial Sequence
  Oligonucleotide for detection of SNP TSC0047213
tttgtgattgata

SEQ ID NO: 191866 - DNA, 13 bp, Artificial Sequence
  Oligonucleotide for detection of SNP TSC0047213
tatcaatcacaaa

SEQ ID NO: 191867 - DNA, 13 bp, Artificial Sequence
  Oligonucleotide for detection of SNP TSC0047213
tttgtggtcgata

SEQ ID NO: 191868 - DNA, 13 bp, Artificial Sequence
  Oligonucleotide for detection of SNP TSC0047213
tatcgaccacaaa

SEQ ID NO: 191869 - DNA, 13 bp, Artificial Sequence
  Oligonucleotide for detection of SNP TSC0047213
tttgtgatcgata

SEQ ID NO: 191870 - DNA, 13 bp, Artificial Sequence
  Oligonucleotide for detection of SNP TSC0047213
tatcgatcacaaa

SEQ ID NO: 191871 - DNA, 13 bp, Artificial Sequence
  Oligonucleotide for detection of SNP TSC0047214
ggatagatagtga

SEQ ID NO: 191872 - DNA, 13 bp, Artificial Sequence
  Oligonucleotide for detection of SNP TSC0047214
tcactatctatcc

SEQ ID NO: 191873 - DNA, 13 bp, Artificial Sequence
  Oligonucleotide for detection of SNP TSC0047214
ggataggtagtga

SEQ ID NO: 191874 - DNA, 13 bp, Artificial Sequence
  Oligonucleotide for detection of SNP TSC0047214
tcactacctatcc

SEQ ID NO: 191875 - DNA, 13 bp, Artificial Sequence
  Oligonucleotide for detection of SNP TSC0047215
tattattggtgtg

SEQ ID NO: 191876 - DNA, 13 bp, Artificial Sequence
  Oligonucleotide for detection of SNP TSC0047215
cacaccaataata

SEQ ID NO: 191877 - DNA, 13 bp, Artificial Sequence
  Oligonucleotide for detection of SNP TSC0047215
tattatcggtgtg

SEQ ID NO: 191878 - DNA, 13 bp, Artificial Sequence
  Oligonucleotide for detection of SNP TSC0047215
cacaccgataata

SEQ ID NO: 191879 - DNA, 13 bp, Artificial Sequence
  Oligonucleotide for detection of SNP TSC0047215
tatattggtgatg

SEQ ID NO: 191880 - DNA, 13 bp, Artificial Sequence
  Oligonucleotide for detection of SNP TSC0047215
catcaccaatata

SEQ ID NO: 191881 - DNA, 13 bp, Artificial Sequence
  Oligonucleotide for detection of SNP TSC0047215
tatattagtgatg

SEQ ID NO: 191882 - DNA, 13 bp, Artificial Sequence
  Oligonucleotide for detection of SNP TSC0047215
catcactaatata

SEQ ID NO: 191883 - DNA, 13 bp, Artificial Sequence
  Oligonucleotide for detection of SNP TSC0047215
tatatcggtgatg

SEQ ID NO: 191884 - DNA, 13 bp, Artificial Sequence
  Oligonucleotide for detection of SNP TSC0047215
catcaccgatata

SEQ ID NO: 191885 - DNA, 13 bp, Artificial Sequence
  Oligonucleotide for detection of SNP TSC0047216
ttattaatataty

SEQ ID NO: 191886 - DNA, 13 bp, Artificial Sequence
  Oligonucleotide for detection of SNP TSC0047216
ratatattaataa

SEQ ID NO: 191887 - DNA, 13 bp, Artificial Sequence
  Oligonucleotide for detection of SNP TSC0047216
ttattattataty

SEQ ID NO: 191888 - DNA, 13 bp, Artificial Sequence
  Oligonucleotide for detection of SNP TSC0047216
ratataataataa

SEQ ID NO: 191889 - DNA, 13 bp, Artificial Sequence
  Oligonucleotide for detection of SNP TSC0047216
gatatattaataa

SEQ ID NO: 191890 - DNA, 13 bp, Artificial Sequence
  Oligonucleotide for detection of SNP TSC0047216
ttattaatatatc

SEQ ID NO: 191891 - DNA, 13 bp, Artificial Sequence
  Oligonucleotide for detection of SNP TSC0047216
gatatagtaataa

SEQ ID NO: 191892 - DNA, 13 bp, Artificial Sequence
  Oligonucleotide for detection of SNP TSC0047216
ttattactatatc

SEQ ID NO: 191893 - DNA, 13 bp, Artificial Sequence
  Oligonucleotide for detection of SNP TSC0047217
gtggaaaatggtt

SEQ ID NO: 191894 - DNA, 13 bp, Artificial Sequence
  Oligonucleotide for detection of SNP TSC0047217
aaccattttccac

SEQ ID NO: 191895 - DNA, 13 bp, Artificial Sequence
  Oligonucleotide for detection of SNP TSC0047217
gtggaagatggtt

SEQ ID NO: 191896 - DNA, 13 bp, Artificial Sequence
  Oligonucleotide for detection of SNP TSC0047217
aaccatcttccac

SEQ ID NO: 191897 - DNA, 13 bp, Artificial Sequence
  Oligonucleotide for detection of SNP TSC0047218
ggtagaggttgta

SEQ ID NO: 191898 - DNA, 13 bp, Artificial Sequence
  Oligonucleotide for detection of SNP TSC0047218
tacaacctctacc

SEQ ID NO: 191899 - DNA, 13 bp, Artificial Sequence
  Oligonucleotide for detection of SNP TSC0047218
ggtagaagttgta

SEQ ID NO: 191900 - DNA, 13 bp, Artificial Sequence
  Oligonucleotide for detection of SNP TSC0047218
tacaacttctacc

SEQ ID NO: 191901 - DNA, 13 bp, Artificial Sequence
  Oligonucleotide for detection of SNP TSC0047219
tgagggttagttt

SEQ ID NO: 191902 - DNA, 13 bp, Artificial Sequence
  Oligonucleotide for detection of SNP TSC0047219
aaactaaccctca

SEQ ID NO: 191903 - DNA, 13 bp, Artificial Sequence
  Oligonucleotide for detection of SNP TSC0047219
tgagggatagttt

SEQ ID NO: 191904 - DNA, 13 bp, Artificial Sequence
  Oligonucleotide for detection of SNP TSC0047219
aaactatccctca

SEQ ID NO: 191905 - DNA, 13 bp, Artificial Sequence
  Oligonucleotide for detection of SNP TSC0005359
ggtagaagtaata

SEQ ID NO: 191906 - DNA, 13 bp, Artificial Sequence
  Oligonucleotide for detection of SNP TSC0005359
tattacttctacc

SEQ ID NO: 191907 - DNA, 13 bp, Artificial Sequence
  Oligonucleotide for detection of SNP TSC0005359
ggtagaggtaata

SEQ ID NO: 191908 - DNA, 13 bp, Artificial Sequence
  Oligonucleotide for detection of SNP TSC0005359
tattacctctacc

SEQ ID NO: 191909 - DNA, 13 bp, Artificial Sequence
  Oligonucleotide for detection of SNP TSC0047221
ttggtatagtgta

SEQ ID NO: 191910 - DNA, 13 bp, Artificial Sequence
  Oligonucleotide for detection of SNP TSC0047221
tacactataccaa

SEQ ID NO: 191911 - DNA, 13 bp, Artificial Sequence
  Oligonucleotide for detection of SNP TSC0047221
ttggtagagtgta

SEQ ID NO: 191912 - DNA, 13 bp, Artificial Sequence
  Oligonucleotide for detection of SNP TSC0047221
tacactctaccaa

SEQ ID NO: 191913 - DNA, 13 bp, Artificial Sequence
  Oligonucleotide for detection of SNP TSC0047221
tgtattatattaa

SEQ ID NO: 191914 - DNA, 13 bp, Artificial Sequence
  Oligonucleotide for detection of SNP TSC0047221
ttaatataataca

SEQ ID NO: 191915 - DNA, 13 bp, Artificial Sequence
  Oligonucleotide for detection of SNP TSC0047221
tgtattttattaa

SEQ ID NO: 191916 - DNA, 13 bp, Artificial Sequence
  Oligonucleotide for detection of SNP TSC0047221
ttaataaaataca

SEQ ID NO: 191917 - DNA, 13 bp, Artificial Sequence
  Oligonucleotide for detection of SNP TSC0047222
tatttcgaataty

SEQ ID NO: 191918 - DNA, 13 bp, Artificial Sequence
  Oligonucleotide for detection of SNP TSC0047222
ratattcgaaata

SEQ ID NO: 191919 - DNA, 13 bp, Artificial Sequence
  Oligonucleotide for detection of SNP TSC0047222
ggtatttggagtg

SEQ ID NO: 191920 - DNA, 13 bp, Artificial Sequence
  Oligonucleotide for detection of SNP TSC0047222
cactccaaatacc

SEQ ID NO: 191921 - DNA, 13 bp, Artificial Sequence
  Oligonucleotide for detection of SNP TSC0047222
ggtattcggagtg

SEQ ID NO: 191922 - DNA, 13 bp, Artificial Sequence
  Oligonucleotide for detection of SNP TSC0047222
cactccgaatacc

SEQ ID NO: 191923 - DNA, 13 bp, Artificial Sequence
  Oligonucleotide for detection of SNP TSC0047224
tttgatgtaagtg

SEQ ID NO: 191924 - DNA, 13 bp, Artificial Sequence
  Oligonucleotide for detection of SNP TSC0047224
cacttacatcaaa

SEQ ID NO: 191925 - DNA, 13 bp, Artificial Sequence
  Oligonucleotide for detection of SNP TSC0047224
tttgatataagtg

SEQ ID NO: 191926 - DNA, 13 bp, Artificial Sequence
  Oligonucleotide for detection of SNP TSC0047224
cacttatatcaaa

SEQ ID NO: 191927 - DNA, 13 bp, Artificial Sequence
  Oligonucleotide for detection of SNP TSC0047224
tttgacgtaagtg

SEQ ID NO: 191928 - DNA, 13 bp, Artificial Sequence
  Oligonucleotide for detection of SNP TSC0047224
cacttacgtcaaa

SEQ ID NO: 191929 - DNA, 13 bp, Artificial Sequence
  Oligonucleotide for detection of SNP TSC0047225
gggttgatttgaa

SEQ ID NO: 191930 - DNA, 13 bp, Artificial Sequence
  Oligonucleotide for detection of SNP TSC0047225
ttcaaatcaaccc

SEQ ID NO: 191931 - DNA, 13 bp, Artificial Sequence
  Oligonucleotide for detection of SNP TSC0047225
gggttggtttgaa

SEQ ID NO: 191932 - DNA, 13 bp, Artificial Sequence
  Oligonucleotide for detection of SNP TSC0047225
ttcaaaccaaccc

SEQ ID NO: 191933 - DNA, 13 bp, Artificial Sequence
  Oligonucleotide for detection of SNP TSC0009642
atttgtgaattgg

SEQ ID NO: 191934 - DNA, 13 bp, Artificial Sequence
  Oligonucleotide for detection of SNP TSC0009642
ccaattcacaaat

SEQ ID NO: 191935 - DNA, 13 bp, Artificial Sequence
  Oligonucleotide for detection of SNP TSC0009642
atttgtaaattgg

SEQ ID NO: 191936 - DNA, 13 bp, Artificial Sequence
  Oligonucleotide for detection of SNP TSC0009642
ccaatttacaaat

SEQ ID NO: 191937 - DNA, 13 bp, Artificial Sequence
  Oligonucleotide for detection of SNP TSC0047227
tagaagtttatag

SEQ ID NO: 191938 - DNA, 13 bp, Artificial Sequence
  Oligonucleotide for detection of SNP TSC0047227
ctataaacttcta

SEQ ID NO: 191939 - DNA, 13 bp, Artificial Sequence
  Oligonucleotide for detection of SNP TSC0047227
tagaaggttatag

SEQ ID NO: 191940 - DNA, 13 bp, Artificial Sequence
  Oligonucleotide for detection of SNP TSC0047227
ctataaccttcta

SEQ ID NO: 191941 - DNA, 13 bp, Artificial Sequence
  Oligonucleotide for detection of SNP TSC0047228
ttaggggaatttt

SEQ ID NO: 191942 - DNA, 13 bp, Artificial Sequence
  Oligonucleotide for detection of SNP TSC0047228
aaaattcccctaa

SEQ ID NO: 191943 - DNA, 13 bp, Artificial Sequence
  Oligonucleotide for detection of SNP TSC0047228
ttagggaaatttt

SEQ ID NO: 191944 - DNA, 13 bp, Artificial Sequence
  Oligonucleotide for detection of SNP TSC0047228
aaaatttccctaa

SEQ ID NO: 191945 - DNA, 13 bp, Artificial Sequence
  Oligonucleotide for detection of SNP TSC0047229
tttttataaaggg

SEQ ID NO: 191946 - DNA, 13 bp, Artificial Sequence
  Oligonucleotide for detection of SNP TSC0047229
ccctttataaaaa

SEQ ID NO: 191947 - DNA, 13 bp, Artificial Sequence
  Oligonucleotide for detection of SNP TSC0047229
ttttttatgggaa

SEQ ID NO: 191948 - DNA, 13 bp, Artificial Sequence
  Oligonucleotide for detection of SNP TSC0047229
ttcccataaaaaa

SEQ ID NO: 191949 - DNA, 13 bp, Artificial Sequence
  Oligonucleotide for detection of SNP TSC0047229
ttttttttgggaa

SEQ ID NO: 191950 - DNA, 13 bp, Artificial Sequence
  Oligonucleotide for detection of SNP TSC0047229
ttcccaaaaaaaa

SEQ ID NO: 191951 - DNA, 13 bp, Artificial Sequence
  Oligonucleotide for detection of SNP TSC0047230
aagtaatgatgaa

SEQ ID NO: 191952 - DNA, 13 bp, Artificial Sequence
  Oligonucleotide for detection of SNP TSC0047230
ttcatcattactt

SEQ ID NO: 191953 - DNA, 13 bp, Artificial Sequence
  Oligonucleotide for detection of SNP TSC0047230
aagtaacgatgaa

SEQ ID NO: 191954 - DNA, 13 bp, Artificial Sequence
  Oligonucleotide for detection of SNP TSC0047230
ttcatcgttactt

SEQ ID NO: 191955 - DNA, 13 bp, Artificial Sequence
  Oligonucleotide for detection of SNP TSC0047231
tttataagttgga

SEQ ID NO: 191956 - DNA, 13 bp, Artificial Sequence
  Oligonucleotide for detection of SNP TSC0047231
tccaacttataaa

SEQ ID NO: 191957 - DNA, 13 bp, Artificial Sequence
  Oligonucleotide for detection of SNP TSC0047231
tttataggttgga

SEQ ID NO: 191958 - DNA, 13 bp, Artificial Sequence
  Oligonucleotide for detection of SNP TSC0047231
tccaacctataaa

SEQ ID NO: 191959 - DNA, 13 bp, Artificial Sequence
  Oligonucleotide for detection of SNP TSC0047234
aatttgtgataga

SEQ ID NO: 191960 - DNA, 13 bp, Artificial Sequence
  Oligonucleotide for detection of SNP TSC0047234
tctatcacaaatt

SEQ ID NO: 191961 - DNA, 13 bp, Artificial Sequence
  Oligonucleotide for detection of SNP TSC0047234
aatttgggataga

SEQ ID NO: 191962 - DNA, 13 bp, Artificial Sequence
  Oligonucleotide for detection of SNP TSC0047234
tctatcccaaatt

SEQ ID NO: 191963 - DNA, 13 bp, Artificial Sequence
  Oligonucleotide for detection of SNP TSC0047238
agagaaagaaaaa

SEQ ID NO: 191964 - DNA, 13 bp, Artificial Sequence
  Oligonucleotide for detection of SNP TSC0047238
tttttctttctct

SEQ ID NO: 191965 - DNA, 13 bp, Artificial Sequence
  Oligonucleotide for detection of SNP TSC0047238
agagaaggaaaaa

SEQ ID NO: 191966 - DNA, 13 bp, Artificial Sequence
  Oligonucleotide for detection of SNP TSC0047238
tttttccttctct

SEQ ID NO: 191967 - DNA, 13 bp, Artificial Sequence
  Oligonucleotide for detection of SNP TSC0047239
tttaataaaggaa

SEQ ID NO: 191968 - DNA, 13 bp, Artificial Sequence
  Oligonucleotide for detection of SNP TSC0047239
ttcctttattaaa

SEQ ID NO: 191969 - DNA, 13 bp, Artificial Sequence
  Oligonucleotide for detection of SNP TSC0047239
tttaatgaaggaa

SEQ ID NO: 191970 - DNA, 13 bp, Artificial Sequence
  Oligonucleotide for detection of SNP TSC0047239
ttccttcattaaa

SEQ ID NO: 191971 - DNA, 13 bp, Artificial Sequence
  Oligonucleotide for detection of SNP TSC0047240
ttttgattttaat

SEQ ID NO: 191972 - DNA, 13 bp, Artificial Sequence
  Oligonucleotide for detection of SNP TSC0047240
attaaaatcaaaa

SEQ ID NO: 191973 - DNA, 13 bp, Artificial Sequence
  Oligonucleotide for detection of SNP TSC0047240
ttttgagtttaat

SEQ ID NO: 191974 - DNA, 13 bp, Artificial Sequence
  Oligonucleotide for detection of SNP TSC0047240
attaaactcaaaa

SEQ ID NO: 191975 - DNA, 13 bp, Artificial Sequence
  Oligonucleotide for detection of SNP TSC0047240
attaaagttaaag

SEQ ID NO: 191976 - DNA, 13 bp, Artificial Sequence
  Oligonucleotide for detection of SNP TSC0047240
ctttaactttaat

SEQ ID NO: 191977 - DNA, 13 bp, Artificial Sequence
  Oligonucleotide for detection of SNP TSC0047240
attaaatttaaag

SEQ ID NO: 191978 - DNA, 13 bp, Artificial Sequence
  Oligonucleotide for detection of SNP TSC0047240
ctttaaatttaat

SEQ ID NO: 191979 - DNA, 13 bp, Artificial Sequence
  Oligonucleotide for detection of SNP TSC0009495
tttattatgatta

SEQ ID NO: 191980 - DNA, 13 bp, Artificial Sequence
  Oligonucleotide for detection of SNP TSC0009495
taatcataataaa

SEQ ID NO: 191981 - DNA, 13 bp, Artificial Sequence
  Oligonucleotide for detection of SNP TSC0009495
tttattgtgatta

SEQ ID NO: 191982 - DNA, 13 bp, Artificial Sequence
  Oligonucleotide for detection of SNP TSC0009495
taatcacaataaa

SEQ ID NO: 191983 - DNA, 13 bp, Artificial Sequence
  Oligonucleotide for detection of SNP TSC0047241
aataaatagtaga

SEQ ID NO: 191984 - DNA, 13 bp, Artificial Sequence
  Oligonucleotide for detection of SNP TSC0047241
tctactatttatt

SEQ ID NO: 191985 - DNA, 13 bp, Artificial Sequence
  Oligonucleotide for detection of SNP TSC0047241
aataaagagtaga

SEQ ID NO: 191986 - DNA, 13 bp, Artificial Sequence
  Oligonucleotide for detection of SNP TSC0047241
tctactctttatt

SEQ ID NO: 191987 - DNA, 13 bp, Artificial Sequence
  Oligonucleotide for detection of SNP TSC0047242
attaataatagta

SEQ ID NO: 191988 - DNA, 13 bp, Artificial Sequence
  Oligonucleotide for detection of SNP TSC0047242
tactattattaat

SEQ ID NO: 191989 - DNA, 13 bp, Artificial Sequence
  Oligonucleotide for detection of SNP TSC0047242
attaattatagta

SEQ ID NO: 191990 - DNA, 13 bp, Artificial Sequence
  Oligonucleotide for detection of SNP TSC0047242
tactataattaat

SEQ ID NO: 191991 - DNA, 13 bp, Artificial Sequence
  Oligonucleotide for detection of SNP TSC0047242
tgttgttgttaat

SEQ ID NO: 191992 - DNA, 13 bp, Artificial Sequence
  Oligonucleotide for detection of SNP TSC0047242
attaacaacaaca

SEQ ID NO: 191993 - DNA, 13 bp, Artificial Sequence
  Oligonucleotide for detection of SNP TSC0047242
tgttgtggttaat

SEQ ID NO: 191994 - DNA, 13 bp, Artificial Sequence
  Oligonucleotide for detection of SNP TSC0047242
attaaccacaaca

SEQ ID NO: 191995 - DNA, 13 bp, Artificial Sequence
  Oligonucleotide for detection of SNP TSC0047243
agttattgtaatt

SEQ ID NO: 191996 - DNA, 13 bp, Artificial Sequence
  Oligonucleotide for detection of SNP TSC0047243
aattacaataact

SEQ ID NO: 191997 - DNA, 13 bp, Artificial Sequence
  Oligonucleotide for detection of SNP TSC0047243
agttatcgtaatt

SEQ ID NO: 191998 - DNA, 13 bp, Artificial Sequence
  Oligonucleotide for detection of SNP TSC0047243
aattacgataact

SEQ ID NO: 191999 - DNA, 13 bp, Artificial Sequence
  Oligonucleotide for detection of SNP TSC0047243
agttgtgatgatt

SEQ ID NO: 192000 - DNA, 13 bp, Artificial Sequence
  Oligonucleotide for detection of SNP TSC0047243
aatcatcacaact

SEQ ID NO: 192001 - DNA, 13 bp, Artificial Sequence
  Oligonucleotide for detection of SNP TSC0047243
agttgtaatgatt

SEQ ID NO: 192002 - DNA, 13 bp, Artificial Sequence
  Oligonucleotide for detection of SNP TSC0047243
aatcattacaact

SEQ ID NO: 192003 - DNA, 13 bp, Artificial Sequence
  Oligonucleotide for detection of SNP TSC0047243
agttgcgatgatt

SEQ ID NO: 192004 - DNA, 13 bp, Artificial Sequence
  Oligonucleotide for detection of SNP TSC0047243
aatcatcgcaact

SEQ ID NO: 192005 - DNA, 13 bp, Artificial Sequence
  Oligonucleotide for detection of SNP TSC0047244
tgtatttttttta

SEQ ID NO: 192006 - DNA, 13 bp, Artificial Sequence
  Oligonucleotide for detection of SNP TSC0047244
taaaaaaaataca

SEQ ID NO: 192007 - DNA, 13 bp, Artificial Sequence
  Oligonucleotide for detection of SNP TSC0047244
taaaaatgatgta

SEQ ID NO: 192008 - DNA, 13 bp, Artificial Sequence
  Oligonucleotide for detection of SNP TSC0047244
tacatcattttta

SEQ ID NO: 192009 - DNA, 13 bp, Artificial Sequence
  Oligonucleotide for detection of SNP TSC0047244
taaaaaggatgta

SEQ ID NO: 192010 - DNA, 13 bp, Artificial Sequence
  Oligonucleotide for detection of SNP TSC0047244
tacatccttttta

SEQ ID NO: 192011 - DNA, 13 bp, Artificial Sequence
  Oligonucleotide for detection of SNP TSC0010033
tttttttaattaa

SEQ ID NO: 192012 - DNA, 13 bp, Artificial Sequence
  Oligonucleotide for detection of SNP TSC0010033
ttaattaaaaaaa

SEQ ID NO: 192013 - DNA, 13 bp, Artificial Sequence
  Oligonucleotide for detection of SNP TSC0010033
ttttttaaattaa

SEQ ID NO: 192014 - DNA, 13 bp, Artificial Sequence
  Oligonucleotide for detection of SNP TSC0010033
ttaatttaaaaaa

SEQ ID NO: 192015 - DNA, 13 bp, Artificial Sequence
  Oligonucleotide for detection of SNP TSC0047246
tggtaaaggtatg

SEQ ID NO: 192016 - DNA, 13 bp, Artificial Sequence
  Oligonucleotide for detection of SNP TSC0047246
catacctttacca

SEQ ID NO: 192017 - DNA, 13 bp, Artificial Sequence
  Oligonucleotide for detection of SNP TSC0047246
tggtaatggtatg

SEQ ID NO: 192018 - DNA, 13 bp, Artificial Sequence
  Oligonucleotide for detection of SNP TSC0047246
cataccattacca

SEQ ID NO: 192019 - DNA, 13 bp, Artificial Sequence
  Oligonucleotide for detection of SNP TSC0047246
tggtaaaggtacg

SEQ ID NO: 192020 - DNA, 13 bp, Artificial Sequence
  Oligonucleotide for detection of SNP TSC0047246
cgtacctttacca

SEQ ID NO: 192021 - DNA, 13 bp, Artificial Sequence
  Oligonucleotide for detection of SNP TSC0047246
tggtaacggtatg

SEQ ID NO: 192022 - DNA, 13 bp, Artificial Sequence
  Oligonucleotide for detection of SNP TSC0047246
cataccgttacca

SEQ ID NO: 192023 - DNA, 13 bp, Artificial Sequence
  Oligonucleotide for detection of SNP TSC0047246
tggtaatggtacg

SEQ ID NO: 192024 - DNA, 13 bp, Artificial Sequence
  Oligonucleotide for detection of SNP TSC0047246
cgtaccattacca

SEQ ID NO: 192025 - DNA, 13 bp, Artificial Sequence
  Oligonucleotide for detection of SNP TSC0047246
tggtaacggtacg

SEQ ID NO: 192026 - DNA, 13 bp, Artificial Sequence
  Oligonucleotide for detection of SNP TSC0047246
cgtaccgttacca

SEQ ID NO: 192027 - DNA, 13 bp, Artificial Sequence
  Oligonucleotide for detection of SNP TSC0047246
tgtgtttttgtta

SEQ ID NO: 192028 - DNA, 13 bp, Artificial Sequence
  Oligonucleotide for detection of SNP TSC0047246
taacaaaaacaca

SEQ ID NO: 192029 - DNA, 13 bp, Artificial Sequence
  Oligonucleotide for detection of SNP TSC0047246
tgtgttgttgtta

SEQ ID NO: 192030 - DNA, 13 bp, Artificial Sequence
  Oligonucleotide for detection of SNP TSC0047246
taacaacaacaca

SEQ ID NO: 192031 - DNA, 13 bp, Artificial Sequence
  Oligonucleotide for detection of SNP TSC0047246
cgtgtttttgtta

SEQ ID NO: 192032 - DNA, 13 bp, Artificial Sequence
  Oligonucleotide for detection of SNP TSC0047246
taacaaaaacacg

SEQ ID NO: 192033 - DNA, 13 bp, Artificial Sequence
  Oligonucleotide for detection of SNP TSC0047246
cgtgttgttgtta

SEQ ID NO: 192034 - DNA, 13 bp, Artificial Sequence
  Oligonucleotide for detection of SNP TSC0047246
taacaacaacacg

SEQ ID NO: 192035 - DNA, 13 bp, Artificial Sequence
  Oligonucleotide for detection of SNP TSC0047246
tgtgtcgttgtta

SEQ ID NO: 192036 - DNA, 13 bp, Artificial Sequence
  Oligonucleotide for detection of SNP TSC0047246
taacaacgacaca

SEQ ID NO: 192037 - DNA, 13 bp, Artificial Sequence
  Oligonucleotide for detection of SNP TSC0047246
cgtgtcgttgtta

SEQ ID NO: 192038 - DNA, 13 bp, Artificial Sequence
  Oligonucleotide for detection of SNP TSC0047246
taacaacgacacg

SEQ ID NO: 192039 - DNA, 13 bp, Artificial Sequence
  Oligonucleotide for detection of SNP TSC0047247
aaaaagaaaatay

SEQ ID NO: 192040 - DNA, 13 bp, Artificial Sequence
  Oligonucleotide for detection of SNP TSC0047247
rtattttcttttt

SEQ ID NO: 192041 - DNA, 13 bp, Artificial Sequence
  Oligonucleotide for detection of SNP TSC0047247
aaaaaggaaatay

SEQ ID NO: 192042 - DNA, 13 bp, Artificial Sequence
  Oligonucleotide for detection of SNP TSC0047247
rtatttccttttt

SEQ ID NO: 192043 - DNA, 13 bp, Artificial Sequence
  Oligonucleotide for detection of SNP TSC0047250
aaattatgaagaa

SEQ ID NO: 192044 - DNA, 13 bp, Artificial Sequence
  Oligonucleotide for detection of SNP TSC0047250
ttcttcataattt

SEQ ID NO: 192045 - DNA, 13 bp, Artificial Sequence
  Oligonucleotide for detection of SNP TSC0047250
aaattaggaagaa

SEQ ID NO: 192046 - DNA, 13 bp, Artificial Sequence
  Oligonucleotide for detection of SNP TSC0047250
ttcttcctaattt

SEQ ID NO: 192047 - DNA, 13 bp, Artificial Sequence
  Oligonucleotide for detection of SNP TSC0047250
ttttttttaattt

SEQ ID NO: 192048 - DNA, 13 bp, Artificial Sequence
  Oligonucleotide for detection of SNP TSC0047250
aaattaaaaaaaa

SEQ ID NO: 192049 - DNA, 13 bp, Artificial Sequence
  Oligonucleotide for detection of SNP TSC0047259
ttttaggtagaat

SEQ ID NO: 192050 - DNA, 13 bp, Artificial Sequence
  Oligonucleotide for detection of SNP TSC0047259
attctacctaaaa

SEQ ID NO: 192051 - DNA, 13 bp, Artificial Sequence
  Oligonucleotide for detection of SNP TSC0047259
ttttagatagaat

SEQ ID NO: 192052 - DNA, 13 bp, Artificial Sequence
  Oligonucleotide for detection of SNP TSC0047259
attctatctaaaa

SEQ ID NO: 192053 - DNA, 13 bp, Artificial Sequence
  Oligonucleotide for detection of SNP TSC0047260
gttttgatattay

SEQ ID NO: 192054 - DNA, 13 bp, Artificial Sequence
  Oligonucleotide for detection of SNP TSC0047260
rtaatatcaaaac

SEQ ID NO: 192055 - DNA, 13 bp, Artificial Sequence
  Oligonucleotide for detection of SNP TSC0047260
gttttgttattay

SEQ ID NO: 192056 - DNA, 13 bp, Artificial Sequence
  Oligonucleotide for detection of SNP TSC0047260
rtaataacaaaac

SEQ ID NO: 192057 - DNA, 13 bp, Artificial Sequence
  Oligonucleotide for detection of SNP TSC0047260
gtgatattagggy

SEQ ID NO: 192058 - DNA, 13 bp, Artificial Sequence
  Oligonucleotide for detection of SNP TSC0047260
rccctaatatcac

SEQ ID NO: 192059 - DNA, 13 bp, Artificial Sequence
  Oligonucleotide for detection of SNP TSC0047260
gtgataatagggy

SEQ ID NO: 192060 - DNA, 13 bp, Artificial Sequence
  Oligonucleotide for detection of SNP TSC0047260
rccctattatcac

SEQ ID NO: 192061 - DNA, 13 bp, Artificial Sequence
  Oligonucleotide for detection of SNP TSC0047261
aaatttgtttaaa

SEQ ID NO: 192062 - DNA, 13 bp, Artificial Sequence
  Oligonucleotide for detection of SNP TSC0047261
tttaaacaaattt

SEQ ID NO: 192063 - DNA, 13 bp, Artificial Sequence
  Oligonucleotide for detection of SNP TSC0047261
aaatttatttaaa

SEQ ID NO: 192064 - DNA, 13 bp, Artificial Sequence
  Oligonucleotide for detection of SNP TSC0047261
tttaaataaattt

SEQ ID NO: 192065 - DNA, 13 bp, Artificial Sequence
  Oligonucleotide for detection of SNP TSC0047262
atttaagagttay

SEQ ID NO: 192066 - DNA, 13 bp, Artificial Sequence
  Oligonucleotide for detection of SNP TSC0047262
rtaactcttaaat

SEQ ID NO: 192067 - DNA, 13 bp, Artificial Sequence
  Oligonucleotide for detection of SNP TSC0047262
atttaaaagttay

SEQ ID NO: 192068 - DNA, 13 bp, Artificial Sequence
  Oligonucleotide for detection of SNP TSC0047262
rtaacttttaaat

SEQ ID NO: 192069 - DNA, 13 bp, Artificial Sequence
  Oligonucleotide for detection of SNP TSC0047263
atgattattttay

SEQ ID NO: 192070 - DNA, 13 bp, Artificial Sequence
  Oligonucleotide for detection of SNP TSC0047263
rtaaaataatcat

SEQ ID NO: 192071 - DNA, 13 bp, Artificial Sequence
  Oligonucleotide for detection of SNP TSC0047263
atgattgttttay

SEQ ID NO: 192072 - DNA, 13 bp, Artificial Sequence
  Oligonucleotide for detection of SNP TSC0047263
rtaaaacaatcat

SEQ ID NO: 192073 - DNA, 13 bp, Artificial Sequence
  Oligonucleotide for detection of SNP TSC0047263
atgatcgttttay

SEQ ID NO: 192074 - DNA, 13 bp, Artificial Sequence
  Oligonucleotide for detection of SNP TSC0047263
rtaaaacgatcat

SEQ ID NO: 192075 - DNA, 13 bp, Artificial Sequence
  Oligonucleotide for detection of SNP TSC0047263
gtgaggtgattat

SEQ ID NO: 192076 - DNA, 13 bp, Artificial Sequence
  Oligonucleotide for detection of SNP TSC0047263
ataatcacctcac

SEQ ID NO: 192077 - DNA, 13 bp, Artificial Sequence
  Oligonucleotide for detection of SNP TSC0047263
gtgaggcgattat

SEQ ID NO: 192078 - DNA, 13 bp, Artificial Sequence
  Oligonucleotide for detection of SNP TSC0047263
ataatcgcctcac

SEQ ID NO: 192079 - DNA, 13 bp, Artificial Sequence
  Oligonucleotide for detection of SNP TSC0047264
agttgtaaataaa

SEQ ID NO: 192080 - DNA, 13 bp, Artificial Sequence
  Oligonucleotide for detection of SNP TSC0047264
tttatttacaact

SEQ ID NO: 192081 - DNA, 13 bp, Artificial Sequence
  Oligonucleotide for detection of SNP TSC0047264
agttgttaataaa

SEQ ID NO: 192082 - DNA, 13 bp, Artificial Sequence
  Oligonucleotide for detection of SNP TSC0047264
tttattaacaact

SEQ ID NO: 192083 - DNA, 13 bp, Artificial Sequence
  Oligonucleotide for detection of SNP TSC0047264
tttatttgtagtt

SEQ ID NO: 192084 - DNA, 13 bp, Artificial Sequence
  Oligonucleotide for detection of SNP TSC0047264
aactacaaataaa

SEQ ID NO: 192085 - DNA, 13 bp, Artificial Sequence
  Oligonucleotide for detection of SNP TSC0047264
tttattagtagtt

SEQ ID NO: 192086 - DNA, 13 bp, Artificial Sequence
  Oligonucleotide for detection of SNP TSC0047264
aactactaataaa

SEQ ID NO: 192087 - DNA, 13 bp, Artificial Sequence
  Oligonucleotide for detection of SNP TSC0047265
tttaattgttgtt

SEQ ID NO: 192088 - DNA, 13 bp, Artificial Sequence
  Oligonucleotide for detection of SNP TSC0047265
aacaacaattaaa

SEQ ID NO: 192089 - DNA, 13 bp, Artificial Sequence
  Oligonucleotide for detection of SNP TSC0047265
tttaatcgttgtt

SEQ ID NO: 192090 - DNA, 13 bp, Artificial Sequence
  Oligonucleotide for detection of SNP TSC0047265
aacaacgattaaa

SEQ ID NO: 192091 - DNA, 13 bp, Artificial Sequence
  Oligonucleotide for detection of SNP TSC0047265
aataatggttggg

SEQ ID NO: 192092 - DNA, 13 bp, Artificial Sequence
  Oligonucleotide for detection of SNP TSC0047265
cccaaccattatt

SEQ ID NO: 192093 - DNA, 13 bp, Artificial Sequence
  Oligonucleotide for detection of SNP TSC0047265
aataatagttggg

SEQ ID NO: 192094 - DNA, 13 bp, Artificial Sequence
  Oligonucleotide for detection of SNP TSC0047265
cccaactattatt

SEQ ID NO: 192095 - DNA, 13 bp, Artificial Sequence
  Oligonucleotide for detection of SNP TSC0047265
aataacggttggg

SEQ ID NO: 192096 - DNA, 13 bp, Artificial Sequence
  Oligonucleotide for detection of SNP TSC0047265
cccaaccgttatt

SEQ ID NO: 192097 - DNA, 13 bp, Artificial Sequence
  Oligonucleotide for detection of SNP TSC0047266
gtagaaaagataa

SEQ ID NO: 192098 - DNA, 13 bp, Artificial Sequence
  Oligonucleotide for detection of SNP TSC0047266
ttatcttttctac

SEQ ID NO: 192099 - DNA, 13 bp, Artificial Sequence
  Oligonucleotide for detection of SNP TSC0047266
gtagaagagataa

SEQ ID NO: 192100 - DNA, 13 bp, Artificial Sequence
  Oligonucleotide for detection of SNP TSC0047266
ttatctcttctac

SEQ ID NO: 192101 - DNA, 13 bp, Artificial Sequence
  Oligonucleotide for detection of SNP TSC0047269
tttgtgatatagg

SEQ ID NO: 192102 - DNA, 13 bp, Artificial Sequence
  Oligonucleotide for detection of SNP TSC0047269
cctatatcacaaa

SEQ ID NO: 192103 - DNA, 13 bp, Artificial Sequence
  Oligonucleotide for detection of SNP TSC0047269
tttgtgttatagg

SEQ ID NO: 192104 - DNA, 13 bp, Artificial Sequence
  Oligonucleotide for detection of SNP TSC0047269
cctataacacaaa

SEQ ID NO: 192105 - DNA, 13 bp, Artificial Sequence
  Oligonucleotide for detection of SNP TSC0047269
tttgtattataaa

SEQ ID NO: 192106 - DNA, 13 bp, Artificial Sequence
  Oligonucleotide for detection of SNP TSC0047269
tttataatacaaa

SEQ ID NO: 192107 - DNA, 13 bp, Artificial Sequence
  Oligonucleotide for detection of SNP TSC0047269
tttgtaatataaa

SEQ ID NO: 192108 - DNA, 13 bp, Artificial Sequence
  Oligonucleotide for detection of SNP TSC0047269
tttatattacaaa

SEQ ID NO: 192109 - DNA, 13 bp, Artificial Sequence
  Oligonucleotide for detection of SNP TSC0047271
agtgatgttaagy

SEQ ID NO: 192110 - DNA, 13 bp, Artificial Sequence
  Oligonucleotide for detection of SNP TSC0047271
rcttaacatcact

SEQ ID NO: 192111 - DNA, 13 bp, Artificial Sequence
  Oligonucleotide for detection of SNP TSC0047271
agtgatattaagy

SEQ ID NO: 192112 - DNA, 13 bp, Artificial Sequence
  Oligonucleotide for detection of SNP TSC0047271
rcttaatatcact

SEQ ID NO: 192113 - DNA, 13 bp, Artificial Sequence
  Oligonucleotide for detection of SNP TSC0047272
tattgagtattty

SEQ ID NO: 192114 - DNA, 13 bp, Artificial Sequence
  Oligonucleotide for detection of SNP TSC0047272
raaatactcaata

SEQ ID NO: 192115 - DNA, 13 bp, Artificial Sequence
  Oligonucleotide for detection of SNP TSC0047272
tattgaatattty

SEQ ID NO: 192116 - DNA, 13 bp, Artificial Sequence
  Oligonucleotide for detection of SNP TSC0047272
raaatattcaata

SEQ ID NO: 192117 - DNA, 13 bp, Artificial Sequence
  Oligonucleotide for detection of SNP TSC0047273
gaaaaagaattag

SEQ ID NO: 192118 - DNA, 13 bp, Artificial Sequence
  Oligonucleotide for detection of SNP TSC0047273
ctaattctttttc

SEQ ID NO: 192119 - DNA, 13 bp, Artificial Sequence
  Oligonucleotide for detection of SNP TSC0047273
gaaaaaaaattag

SEQ ID NO: 192120 - DNA, 13 bp, Artificial Sequence
  Oligonucleotide for detection of SNP TSC0047273
ctaattttttttc

SEQ ID NO: 192121 - DNA, 13 bp, Artificial Sequence
  Oligonucleotide for detection of SNP TSC0047275
taggttagtttta

SEQ ID NO: 192122 - DNA, 13 bp, Artificial Sequence
  Oligonucleotide for detection of SNP TSC0047275
taaaactaaccta

SEQ ID NO: 192123 - DNA, 13 bp, Artificial Sequence
  Oligonucleotide for detection of SNP TSC0047275
taggttggtttta

SEQ ID NO: 192124 - DNA, 13 bp, Artificial Sequence
  Oligonucleotide for detection of SNP TSC0047275
taaaaccaaccta

SEQ ID NO: 192125 - DNA, 13 bp, Artificial Sequence
  Oligonucleotide for detection of SNP TSC0047282
ttaattgaatgta

SEQ ID NO: 192126 - DNA, 13 bp, Artificial Sequence
  Oligonucleotide for detection of SNP TSC0047282
tacattcaattaa

SEQ ID NO: 192127 - DNA, 13 bp, Artificial Sequence
  Oligonucleotide for detection of SNP TSC0047282
ttaattaaatgta

SEQ ID NO: 192128 - DNA, 13 bp, Artificial Sequence
  Oligonucleotide for detection of SNP TSC0047282
tacatttaattaa

SEQ ID NO: 192129 - DNA, 13 bp, Artificial Sequence
  Oligonucleotide for detection of SNP TSC0047283
agtagtatgagaa

SEQ ID NO: 192130 - DNA, 13 bp, Artificial Sequence
  Oligonucleotide for detection of SNP TSC0047283
ttctcatactact

SEQ ID NO: 192131 - DNA, 13 bp, Artificial Sequence
  Oligonucleotide for detection of SNP TSC0047283
agtagtgtgagaa

SEQ ID NO: 192132 - DNA, 13 bp, Artificial Sequence
  Oligonucleotide for detection of SNP TSC0047283
ttctcacactact

SEQ ID NO: 192133 - DNA, 13 bp, Artificial Sequence
  Oligonucleotide for detection of SNP TSC0047283
agtagcgtgagaa

SEQ ID NO: 192134 - DNA, 13 bp, Artificial Sequence
  Oligonucleotide for detection of SNP TSC0047283
ttctcacgctact

SEQ ID NO: 192135 - DNA, 13 bp, Artificial Sequence
  Oligonucleotide for detection of SNP TSC0047284
gagaatagattaa

SEQ ID NO: 192136 - DNA, 13 bp, Artificial Sequence
  Oligonucleotide for detection of SNP TSC0047284
ttaatctattctc

SEQ ID NO: 192137 - DNA, 13 bp, Artificial Sequence
  Oligonucleotide for detection of SNP TSC0047284
gagaatggattaa

SEQ ID NO: 192138 - DNA, 13 bp, Artificial Sequence
  Oligonucleotide for detection of SNP TSC0047284
ttaatccattctc

SEQ ID NO: 192139 - DNA, 13 bp, Artificial Sequence
  Oligonucleotide for detection of SNP TSC0047294
gtttttgatttgg

SEQ ID NO: 192140 - DNA, 13 bp, Artificial Sequence
  Oligonucleotide for detection of SNP TSC0047294
ccaaatcaaaaac

SEQ ID NO: 192141 - DNA, 13 bp, Artificial Sequence
  Oligonucleotide for detection of SNP TSC0047295
aattatattgtga

SEQ ID NO: 192142 - DNA, 13 bp, Artificial Sequence
  Oligonucleotide for detection of SNP TSC0047295
tcacaatataatt

SEQ ID NO: 192143 - DNA, 13 bp, Artificial Sequence
  Oligonucleotide for detection of SNP TSC0047295
aattatgttgtga

SEQ ID NO: 192144 - DNA, 13 bp, Artificial Sequence
  Oligonucleotide for detection of SNP TSC0047295
tcacaacataatt

SEQ ID NO: 192145 - DNA, 13 bp, Artificial Sequence
  Oligonucleotide for detection of SNP TSC0047296
gttgttatttgtt

SEQ ID NO: 192146 - DNA, 13 bp, Artificial Sequence
  Oligonucleotide for detection of SNP TSC0047296
aacaaataacaac

SEQ ID NO: 192147 - DNA, 13 bp, Artificial Sequence
  Oligonucleotide for detection of SNP TSC0047296
agtaaatggtaay

SEQ ID NO: 192148 - DNA, 13 bp, Artificial Sequence
  Oligonucleotide for detection of SNP TSC0047296
rttaccatttact

SEQ ID NO: 192149 - DNA, 13 bp, Artificial Sequence
  Oligonucleotide for detection of SNP TSC0047296
agtaaaaggtaay

SEQ ID NO: 192150 - DNA, 13 bp, Artificial Sequence
  Oligonucleotide for detection of SNP TSC0047296
rttaccttttact

SEQ ID NO: 192151 - DNA, 13 bp, Artificial Sequence
  Oligonucleotide for detection of SNP TSC0009621
ggtatgaatttty

SEQ ID NO: 192152 - DNA, 13 bp, Artificial Sequence
  Oligonucleotide for detection of SNP TSC0009621
raaaattcatacc

SEQ ID NO: 192153 - DNA, 13 bp, Artificial Sequence
  Oligonucleotide for detection of SNP TSC0009621
ggtatgtatttty

SEQ ID NO: 192154 - DNA, 13 bp, Artificial Sequence
  Oligonucleotide for detection of SNP TSC0009621
raaaatacatacc

SEQ ID NO: 192155 - DNA, 13 bp, Artificial Sequence
  Oligonucleotide for detection of SNP TSC0009621
gaaaatttatgty

SEQ ID NO: 192156 - DNA, 13 bp, Artificial Sequence
  Oligonucleotide for detection of SNP TSC0009621
racataaattttc

SEQ ID NO: 192157 - DNA, 13 bp, Artificial Sequence
  Oligonucleotide for detection of SNP TSC0009621
gaaaatgtatgty

SEQ ID NO: 192158 - DNA, 13 bp, Artificial Sequence
  Oligonucleotide for detection of SNP TSC0009621
racatacattttc

SEQ ID NO: 192159 - DNA, 13 bp, Artificial Sequence
  Oligonucleotide for detection of SNP TSC0047303
aataaaaagatgy

SEQ ID NO: 192160 - DNA, 13 bp, Artificial Sequence
  Oligonucleotide for detection of SNP TSC0047303
rcatctttttatt

SEQ ID NO: 192161 - DNA, 13 bp, Artificial Sequence
  Oligonucleotide for detection of SNP TSC0047303
aataaagagatgy

SEQ ID NO: 192162 - DNA, 13 bp, Artificial Sequence
  Oligonucleotide for detection of SNP TSC0047303
rcatctctttatt

SEQ ID NO: 192163 - DNA, 13 bp, Artificial Sequence
  Oligonucleotide for detection of SNP TSC0047305
gatgtggttttgy

SEQ ID NO: 192164 - DNA, 13 bp, Artificial Sequence
  Oligonucleotide for detection of SNP TSC0047305
rcaaaaccacatc

SEQ ID NO: 192165 - DNA, 13 bp, Artificial Sequence
  Oligonucleotide for detection of SNP TSC0047305
gatgtgattttgy

SEQ ID NO: 192166 - DNA, 13 bp, Artificial Sequence
  Oligonucleotide for detection of SNP TSC0047305
rcaaaatcacatc

SEQ ID NO: 192167 - DNA, 13 bp, Artificial Sequence
  Oligonucleotide for detection of SNP TSC0047307
ttgaagaagtgaa

SEQ ID NO: 192168 - DNA, 13 bp, Artificial Sequence
  Oligonucleotide for detection of SNP TSC0047307
ttcacttcttcaa

SEQ ID NO: 192169 - DNA, 13 bp, Artificial Sequence
  Oligonucleotide for detection of SNP TSC0047307
ttgaaggagtgaa

SEQ ID NO: 192170 - DNA, 13 bp, Artificial Sequence
  Oligonucleotide for detection of SNP TSC0047307
ttcactccttcaa

SEQ ID NO: 192171 - DNA, 13 bp, Artificial Sequence
  Oligonucleotide for detection of SNP TSC0047311
tttaggggtatty

SEQ ID NO: 192172 - DNA, 13 bp, Artificial Sequence
  Oligonucleotide for detection of SNP TSC0047311
raatacccctaaa

SEQ ID NO: 192173 - DNA, 13 bp, Artificial Sequence
  Oligonucleotide for detection of SNP TSC0047311
tttaggagtatty

SEQ ID NO: 192174 - DNA, 13 bp, Artificial Sequence
  Oligonucleotide for detection of SNP TSC0047311
raatactcctaaa

SEQ ID NO: 192175 - DNA, 13 bp, Artificial Sequence
  Oligonucleotide for detection of SNP TSC0047314
attttaattaaaa

SEQ ID NO: 192176 - DNA, 13 bp, Artificial Sequence
  Oligonucleotide for detection of SNP TSC0047314
ttttaattaaaat

SEQ ID NO: 192177 - DNA, 13 bp, Artificial Sequence
  Oligonucleotide for detection of SNP TSC0047315
ttagtaataaaaa

SEQ ID NO: 192178 - DNA, 13 bp, Artificial Sequence
  Oligonucleotide for detection of SNP TSC0047315
tttttattactaa

SEQ ID NO: 192179 - DNA, 13 bp, Artificial Sequence
  Oligonucleotide for detection of SNP TSC0047315
ttagtagtaaaaa

SEQ ID NO: 192180 - DNA, 13 bp, Artificial Sequence
  Oligonucleotide for detection of SNP TSC0047315
tttttactactaa

SEQ ID NO: 192181 - DNA, 13 bp, Artificial Sequence
  Oligonucleotide for detection of SNP TSC0047316
tgtggaattttgy

SEQ ID NO: 192182 - DNA, 13 bp, Artificial Sequence
  Oligonucleotide for detection of SNP TSC0047316
rcaaaattccaca

SEQ ID NO: 192183 - DNA, 13 bp, Artificial Sequence
  Oligonucleotide for detection of SNP TSC0047316
tgtggagttttgy

SEQ ID NO: 192184 - DNA, 13 bp, Artificial Sequence
  Oligonucleotide for detection of SNP TSC0047316
rcaaaactccaca

SEQ ID NO: 192185 - DNA, 13 bp, Artificial Sequence
  Oligonucleotide for detection of SNP TSC0047316
tgcggaattttgy

SEQ ID NO: 192186 - DNA, 13 bp, Artificial Sequence
  Oligonucleotide for detection of SNP TSC0047316
rcaaaattccgca

SEQ ID NO: 192187 - DNA, 13 bp, Artificial Sequence
  Oligonucleotide for detection of SNP TSC0047316
tgcggagttttgy

SEQ ID NO: 192188 - DNA, 13 bp, Artificial Sequence
  Oligonucleotide for detection of SNP TSC0047316
rcaaaactccgca

SEQ ID NO: 192189 - DNA, 13 bp, Artificial Sequence
  Oligonucleotide for detection of SNP TSC0047317
tgatgtaaataga

SEQ ID NO: 192190 - DNA, 13 bp, Artificial Sequence
  Oligonucleotide for detection of SNP TSC0047317
tctatttacatca

SEQ ID NO: 192191 - DNA, 13 bp, Artificial Sequence
  Oligonucleotide for detection of SNP TSC0047317
tgatgtgaataga

SEQ ID NO: 192192 - DNA, 13 bp, Artificial Sequence
  Oligonucleotide for detection of SNP TSC0047317
tctattcacatca

SEQ ID NO: 192193 - DNA, 13 bp, Artificial Sequence
  Oligonucleotide for detection of SNP TSC0047322
tggggatgaggay

SEQ ID NO: 192194 - DNA, 13 bp, Artificial Sequence
  Oligonucleotide for detection of SNP TSC0047322
rtcctcatcccca

SEQ ID NO: 192195 - DNA, 13 bp, Artificial Sequence
  Oligonucleotide for detection of SNP TSC0047322
tggggacgaggay

SEQ ID NO: 192196 - DNA, 13 bp, Artificial Sequence
  Oligonucleotide for detection of SNP TSC0047322
rtcctcgtcccca

SEQ ID NO: 192197 - DNA, 13 bp, Artificial Sequence
  Oligonucleotide for detection of SNP TSC0047324
gatttgataagga

SEQ ID NO: 192198 - DNA, 13 bp, Artificial Sequence
  Oligonucleotide for detection of SNP TSC0047324
tccttatcaaatc

SEQ ID NO: 192199 - DNA, 13 bp, Artificial Sequence
  Oligonucleotide for detection of SNP TSC0047324
gatttgttaagga

SEQ ID NO: 192200 - DNA, 13 bp, Artificial Sequence
  Oligonucleotide for detection of SNP TSC0047324
tccttaacaaatc

SEQ ID NO: 192201 - DNA, 13 bp, Artificial Sequence
  Oligonucleotide for detection of SNP TSC0047324
gatttggtaagga

SEQ ID NO: 192202 - DNA, 13 bp, Artificial Sequence
  Oligonucleotide for detection of SNP TSC0047324
tccttaccaaatc

SEQ ID NO: 192203 - DNA, 13 bp, Artificial Sequence
  Oligonucleotide for detection of SNP TSC0047324
gattcgataagga

SEQ ID NO: 192204 - DNA, 13 bp, Artificial Sequence
  Oligonucleotide for detection of SNP TSC0047324
tccttatcgaatc

SEQ ID NO: 192205 - DNA, 13 bp, Artificial Sequence
  Oligonucleotide for detection of SNP TSC0047324
gattcgttaagga

SEQ ID NO: 192206 - DNA, 13 bp, Artificial Sequence
  Oligonucleotide for detection of SNP TSC0047324
tccttaacgaatc

SEQ ID NO: 192207 - DNA, 13 bp, Artificial Sequence
  Oligonucleotide for detection of SNP TSC0047324
gattcggtaagga

SEQ ID NO: 192208 - DNA, 13 bp, Artificial Sequence
  Oligonucleotide for detection of SNP TSC0047324
tccttaccgaatc

SEQ ID NO: 192209 - DNA, 13 bp, Artificial Sequence
  Oligonucleotide for detection of SNP TSC0047324
tttttattgggty

SEQ ID NO: 192210 - DNA, 13 bp, Artificial Sequence
  Oligonucleotide for detection of SNP TSC0047324
racccaataaaaa

SEQ ID NO: 192211 - DNA, 13 bp, Artificial Sequence
  Oligonucleotide for detection of SNP TSC0047324
tttttagtgggty

SEQ ID NO: 192212 - DNA, 13 bp, Artificial Sequence
  Oligonucleotide for detection of SNP TSC0047324
racccactaaaaa

SEQ ID NO: 192213 - DNA, 13 bp, Artificial Sequence
  Oligonucleotide for detection of SNP TSC0047324
tttttatcgggty

SEQ ID NO: 192214 - DNA, 13 bp, Artificial Sequence
  Oligonucleotide for detection of SNP TSC0047324
racccgataaaaa

SEQ ID NO: 192215 - DNA, 13 bp, Artificial Sequence
  Oligonucleotide for detection of SNP TSC0047324
tttttagcgggty

SEQ ID NO: 192216 - DNA, 13 bp, Artificial Sequence
  Oligonucleotide for detection of SNP TSC0047324
racccgctaaaaa

SEQ ID NO: 192217 - DNA, 13 bp, Artificial Sequence
  Oligonucleotide for detection of SNP TSC0047325
aaaaaaagaatgt

SEQ ID NO: 192218 - DNA, 13 bp, Artificial Sequence
  Oligonucleotide for detection of SNP TSC0047325
acattcttttttt

SEQ ID NO: 192219 - DNA, 13 bp, Artificial Sequence
  Oligonucleotide for detection of SNP TSC0047325
aaaaaatgaatgt

SEQ ID NO: 192220 - DNA, 13 bp, Artificial Sequence
  Oligonucleotide for detection of SNP TSC0047325
acattcatttttt

SEQ ID NO: 192221 - DNA, 13 bp, Artificial Sequence
  Oligonucleotide for detection of SNP TSC0047326
ggtttatttgggt

SEQ ID NO: 192222 - DNA, 13 bp, Artificial Sequence
  Oligonucleotide for detection of SNP TSC0047326
acccaaataaacc

SEQ ID NO: 192223 - DNA, 13 bp, Artificial Sequence
  Oligonucleotide for detection of SNP TSC0047326
ggtttagttgggt

SEQ ID NO: 192224 - DNA, 13 bp, Artificial Sequence
  Oligonucleotide for detection of SNP TSC0047326
acccaactaaacc

SEQ ID NO: 192225 - DNA, 13 bp, Artificial Sequence
  Oligonucleotide for detection of SNP TSC0047326
atttaattgggty

SEQ ID NO: 192226 - DNA, 13 bp, Artificial Sequence
  Oligonucleotide for detection of SNP TSC0047326
racccaattaaat

SEQ ID NO: 192227 - DNA, 13 bp, Artificial Sequence
  Oligonucleotide for detection of SNP TSC0047327
gtaaacgtgtttt

SEQ ID NO: 192228 - DNA, 13 bp, Artificial Sequence
  Oligonucleotide for detection of SNP TSC0047327
aaaacacgtttac

SEQ ID NO: 192229 - DNA, 13 bp, Artificial Sequence
  Oligonucleotide for detection of SNP TSC0047327
agaatatgtttgy

SEQ ID NO: 192230 - DNA, 13 bp, Artificial Sequence
  Oligonucleotide for detection of SNP TSC0047327
rcaaacatattct

SEQ ID NO: 192231 - DNA, 13 bp, Artificial Sequence
  Oligonucleotide for detection of SNP TSC0047327
agaatacgtttgy

SEQ ID NO: 192232 - DNA, 13 bp, Artificial Sequence
  Oligonucleotide for detection of SNP TSC0047327
rcaaacgtattct

SEQ ID NO: 192233 - DNA, 13 bp, Artificial Sequence
  Oligonucleotide for detection of SNP TSC0047328
aaatttaattaty

SEQ ID NO: 192234 - DNA, 13 bp, Artificial Sequence
  Oligonucleotide for detection of SNP TSC0047328
rataattaaattt

SEQ ID NO: 192235 - DNA, 13 bp, Artificial Sequence
  Oligonucleotide for detection of SNP TSC0047328
aaattttattaty

SEQ ID NO: 192236 - DNA, 13 bp, Artificial Sequence
  Oligonucleotide for detection of SNP TSC0047328
rataataaaattt

SEQ ID NO: 192237 - DNA, 13 bp, Artificial Sequence
  Oligonucleotide for detection of SNP TSC0047328
gataattgaattt

SEQ ID NO: 192238 - DNA, 13 bp, Artificial Sequence
  Oligonucleotide for detection of SNP TSC0047328
aaattcaattatc

SEQ ID NO: 192239 - DNA, 13 bp, Artificial Sequence
  Oligonucleotide for detection of SNP TSC0047328
gataatggaattt

SEQ ID NO: 192240 - DNA, 13 bp, Artificial Sequence
  Oligonucleotide for detection of SNP TSC0047328
aaattccattatc

SEQ ID NO: 192241 - DNA, 13 bp, Artificial Sequence
  Oligonucleotide for detection of SNP TSC0047329
tagagtatatgaa

SEQ ID NO: 192242 - DNA, 13 bp, Artificial Sequence
  Oligonucleotide for detection of SNP TSC0047329
ttcatatactcta

SEQ ID NO: 192243 - DNA, 13 bp, Artificial Sequence
  Oligonucleotide for detection of SNP TSC0047329
tagagtgtatgaa

SEQ ID NO: 192244 - DNA, 13 bp, Artificial Sequence
  Oligonucleotide for detection of SNP TSC0047329
ttcatacactcta

SEQ ID NO: 192245 - DNA, 13 bp, Artificial Sequence
  Oligonucleotide for detection of SNP TSC0047330
agaattaggtttt

SEQ ID NO: 192246 - DNA, 13 bp, Artificial Sequence
  Oligonucleotide for detection of SNP TSC0047330
aaaacctaattct

SEQ ID NO: 192247 - DNA, 13 bp, Artificial Sequence
  Oligonucleotide for detection of SNP TSC0047330
agaatttggtttt

SEQ ID NO: 192248 - DNA, 13 bp, Artificial Sequence
  Oligonucleotide for detection of SNP TSC0047330
aaaaccaaattct

SEQ ID NO: 192249 - DNA, 13 bp, Artificial Sequence
  Oligonucleotide for detection of SNP TSC0047330
aaaatttggtttt

SEQ ID NO: 192250 - DNA, 13 bp, Artificial Sequence
  Oligonucleotide for detection of SNP TSC0047330
aaaaccaaatttt

SEQ ID NO: 192251 - DNA, 13 bp, Artificial Sequence
  Oligonucleotide for detection of SNP TSC0047330
aaaattaggtttt

SEQ ID NO: 192252 - DNA, 13 bp, Artificial Sequence
  Oligonucleotide for detection of SNP TSC0047330
aaaacctaatttt

SEQ ID NO: 192253 - DNA, 13 bp, Artificial Sequence
  Oligonucleotide for detection of SNP TSC0047331
gagtttagtttay

SEQ ID NO: 192254 - DNA, 13 bp, Artificial Sequence
  Oligonucleotide for detection of SNP TSC0047331
rtaaactaaactc

SEQ ID NO: 192255 - DNA, 13 bp, Artificial Sequence
  Oligonucleotide for detection of SNP TSC0047331
gagtttggtttay

SEQ ID NO: 192256 - DNA, 13 bp, Artificial Sequence
  Oligonucleotide for detection of SNP TSC0047331
rtaaaccaaactc

SEQ ID NO: 192257 - DNA, 13 bp, Artificial Sequence
  Oligonucleotide for detection of SNP TSC0047331
gagttcggtttay

SEQ ID NO: 192258 - DNA, 13 bp, Artificial Sequence
  Oligonucleotide for detection of SNP TSC0047331
rtaaaccgaactc

SEQ ID NO: 192259 - DNA, 13 bp, Artificial Sequence
  Oligonucleotide for detection of SNP TSC0047331
gtgaattgagtty

SEQ ID NO: 192260 - DNA, 13 bp, Artificial Sequence
  Oligonucleotide for detection of SNP TSC0047331
raactcaattcac

SEQ ID NO: 192261 - DNA, 13 bp, Artificial Sequence
  Oligonucleotide for detection of SNP TSC0047331
gtgaatcgagtty

SEQ ID NO: 192262 - DNA, 13 bp, Artificial Sequence
  Oligonucleotide for detection of SNP TSC0047331
raactcgattcac

SEQ ID NO: 192263 - DNA, 13 bp, Artificial Sequence
  Oligonucleotide for detection of SNP TSC0047332
attgagaagttty

SEQ ID NO: 192264 - DNA, 13 bp, Artificial Sequence
  Oligonucleotide for detection of SNP TSC0047332
raaacttctcaat

SEQ ID NO: 192265 - DNA, 13 bp, Artificial Sequence
  Oligonucleotide for detection of SNP TSC0047332
attgaggagttty

SEQ ID NO: 192266 - DNA, 13 bp, Artificial Sequence
  Oligonucleotide for detection of SNP TSC0047332
raaactcctcaat

SEQ ID NO: 192267 - DNA, 13 bp, Artificial Sequence
  Oligonucleotide for detection of SNP TSC0047332
atcgagaagttty

SEQ ID NO: 192268 - DNA, 13 bp, Artificial Sequence
  Oligonucleotide for detection of SNP TSC0047332
raaacttctcgat

SEQ ID NO: 192269 - DNA, 13 bp, Artificial Sequence
  Oligonucleotide for detection of SNP TSC0047332
atcgaggagttty

SEQ ID NO: 192270 - DNA, 13 bp, Artificial Sequence
  Oligonucleotide for detection of SNP TSC0047332
raaactcctcgat

SEQ ID NO: 192271 - DNA, 13 bp, Artificial Sequence
  Oligonucleotide for detection of SNP TSC0047333
aaatataagaaga

SEQ ID NO: 192272 - DNA, 13 bp, Artificial Sequence
  Oligonucleotide for detection of SNP TSC0047333
tcttcttatattt

SEQ ID NO: 192273 - DNA, 13 bp, Artificial Sequence
  Oligonucleotide for detection of SNP TSC0047333
aaatatgagaaga

SEQ ID NO: 192274 - DNA, 13 bp, Artificial Sequence
  Oligonucleotide for detection of SNP TSC0047333
tcttctcatattt

SEQ ID NO: 192275 - DNA, 13 bp, Artificial Sequence
  Oligonucleotide for detection of SNP TSC0047333
aaatacgagaaga

SEQ ID NO: 192276 - DNA, 13 bp, Artificial Sequence
  Oligonucleotide for detection of SNP TSC0047333
tcttctcgtattt

SEQ ID NO: 192277 - DNA, 13 bp, Artificial Sequence
  Oligonucleotide for detection of SNP TSC0047335
taatgtatattga

SEQ ID NO: 192278 - DNA, 13 bp, Artificial Sequence
  Oligonucleotide for detection of SNP TSC0047335
tcaatatacatta

SEQ ID NO: 192279 - DNA, 13 bp, Artificial Sequence
  Oligonucleotide for detection of SNP TSC0047335
taatgtttattga

SEQ ID NO: 192280 - DNA, 13 bp, Artificial Sequence
  Oligonucleotide for detection of SNP TSC0047335
tcaataaacatta

SEQ ID NO: 192281 - DNA, 13 bp, Artificial Sequence
  Oligonucleotide for detection of SNP TSC0047335
ttagtatgtatta

SEQ ID NO: 192282 - DNA, 13 bp, Artificial Sequence
  Oligonucleotide for detection of SNP TSC0047335
taatacatactaa

SEQ ID NO: 192283 - DNA, 13 bp, Artificial Sequence
  Oligonucleotide for detection of SNP TSC0047335
ttagtaggtatta

SEQ ID NO: 192284 - DNA, 13 bp, Artificial Sequence
  Oligonucleotide for detection of SNP TSC0047335
taatacctactaa

SEQ ID NO: 192285 - DNA, 13 bp, Artificial Sequence
  Oligonucleotide for detection of SNP TSC0047336
ataaagaaatttt

SEQ ID NO: 192286 - DNA, 13 bp, Artificial Sequence
  Oligonucleotide for detection of SNP TSC0047336
aaaatttctttat

SEQ ID NO: 192287 - DNA, 13 bp, Artificial Sequence
  Oligonucleotide for detection of SNP TSC0047336
ataaaggaatttt

SEQ ID NO: 192288 - DNA, 13 bp, Artificial Sequence
  Oligonucleotide for detection of SNP TSC0047336
aaaattcctttat

SEQ ID NO: 192289 - DNA, 13 bp, Artificial Sequence
  Oligonucleotide for detection of SNP TSC0047339
ggtggtaggtagy

SEQ ID NO: 192290 - DNA, 13 bp, Artificial Sequence
  Oligonucleotide for detection of SNP TSC0047339
rctacctaccacc

SEQ ID NO: 192291 - DNA, 13 bp, Artificial Sequence
  Oligonucleotide for detection of SNP TSC0047339
ggtggtgggtagy

SEQ ID NO: 192292 - DNA, 13 bp, Artificial Sequence
  Oligonucleotide for detection of SNP TSC0047339
rctacccaccacc

SEQ ID NO: 192293 - DNA, 13 bp, Artificial Sequence
  Oligonucleotide for detection of SNP TSC0047339
ggtggcgggtagy

SEQ ID NO: 192294 - DNA, 13 bp, Artificial Sequence
  Oligonucleotide for detection of SNP TSC0047339
rctacccgccacc

SEQ ID NO: 192295 - DNA, 13 bp, Artificial Sequence
  Oligonucleotide for detection of SNP TSC0047339
gttgtttgttaty

SEQ ID NO: 192296 - DNA, 13 bp, Artificial Sequence
  Oligonucleotide for detection of SNP TSC0047339
rataacaaacaac

SEQ ID NO: 192297 - DNA, 13 bp, Artificial Sequence
  Oligonucleotide for detection of SNP TSC0047339
gttgttcgttaty

SEQ ID NO: 192298 - DNA, 13 bp, Artificial Sequence
  Oligonucleotide for detection of SNP TSC0047339
rataacgaacaac

SEQ ID NO: 192299 - DNA, 13 bp, Artificial Sequence
  Oligonucleotide for detection of SNP TSC0047340
atggtatgagatt

SEQ ID NO: 192300 - DNA, 13 bp, Artificial Sequence
  Oligonucleotide for detection of SNP TSC0047340
aatctcataccat

SEQ ID NO: 192301 - DNA, 13 bp, Artificial Sequence
  Oligonucleotide for detection of SNP TSC0047340
atggtacgagatt

SEQ ID NO: 192302 - DNA, 13 bp, Artificial Sequence
  Oligonucleotide for detection of SNP TSC0047340
aatctcgtaccat

SEQ ID NO: 192303 - DNA, 13 bp, Artificial Sequence
  Oligonucleotide for detection of SNP TSC0047340
aattttgtattat

SEQ ID NO: 192304 - DNA, 13 bp, Artificial Sequence
  Oligonucleotide for detection of SNP TSC0047340
ataatacaaaatt

SEQ ID NO: 192305 - DNA, 13 bp, Artificial Sequence
  Oligonucleotide for detection of SNP TSC0047340
aattttatattat

SEQ ID NO: 192306 - DNA, 13 bp, Artificial Sequence
  Oligonucleotide for detection of SNP TSC0047340
ataatataaaatt

SEQ ID NO: 192307 - DNA, 13 bp, Artificial Sequence
  Oligonucleotide for detection of SNP TSC0047340
aatttcgtattat

SEQ ID NO: 192308 - DNA, 13 bp, Artificial Sequence
  Oligonucleotide for detection of SNP TSC0047340
ataatacgaaatt

SEQ ID NO: 192309 - DNA, 13 bp, Artificial Sequence
  Oligonucleotide for detection of SNP TSC0000699
aagaatggagaaa

SEQ ID NO: 192310 - DNA, 13 bp, Artificial Sequence
  Oligonucleotide for detection of SNP TSC0000699
tttctccattctt

SEQ ID NO: 192311 - DNA, 13 bp, Artificial Sequence
  Oligonucleotide for detection of SNP TSC0000699
aagaatagagaaa

SEQ ID NO: 192312 - DNA, 13 bp, Artificial Sequence
  Oligonucleotide for detection of SNP TSC0000699
tttctctattctt

SEQ ID NO: 192313 - DNA, 13 bp, Artificial Sequence
  Oligonucleotide for detection of SNP TSC0000432
agtgaaatagaat

SEQ ID NO: 192314 - DNA, 13 bp, Artificial Sequence
  Oligonucleotide for detection of SNP TSC0000432
attctatttcact

SEQ ID NO: 192315 - DNA, 13 bp, Artificial Sequence
  Oligonucleotide for detection of SNP TSC0000432
agtgaagtagaat

SEQ ID NO: 192316 - DNA, 13 bp, Artificial Sequence
  Oligonucleotide for detection of SNP TSC0000432
attctacttcact

SEQ ID NO: 192317 - DNA, 13 bp, Artificial Sequence
  Oligonucleotide for detection of SNP TSC0047342
tataggaatttat

SEQ ID NO: 192318 - DNA, 13 bp, Artificial Sequence
  Oligonucleotide for detection of SNP TSC0047342
ataaattcctata

SEQ ID NO: 192319 - DNA, 13 bp, Artificial Sequence
  Oligonucleotide for detection of SNP TSC0047342
tatagggatttat

SEQ ID NO: 192320 - DNA, 13 bp, Artificial Sequence
  Oligonucleotide for detection of SNP TSC0047342
ataaatccctata

SEQ ID NO: 192321 - DNA, 13 bp, Artificial Sequence
  Oligonucleotide for detection of SNP TSC0047343
tatattgtgaagg

SEQ ID NO: 192322 - DNA, 13 bp, Artificial Sequence
  Oligonucleotide for detection of SNP TSC0047343
ccttcacaatata

SEQ ID NO: 192323 - DNA, 13 bp, Artificial Sequence
  Oligonucleotide for detection of SNP TSC0047343
tatattatgaagg

SEQ ID NO: 192324 - DNA, 13 bp, Artificial Sequence
  Oligonucleotide for detection of SNP TSC0047343
ccttcataatata

SEQ ID NO: 192325 - DNA, 13 bp, Artificial Sequence
  Oligonucleotide for detection of SNP TSC0047344
tttttttagaagg

SEQ ID NO: 192326 - DNA, 13 bp, Artificial Sequence
  Oligonucleotide for detection of SNP TSC0047344
ccttctaaaaaaa

SEQ ID NO: 192327 - DNA, 13 bp, Artificial Sequence
  Oligonucleotide for detection of SNP TSC0047344
ttttttgagaagg

SEQ ID NO: 192328 - DNA, 13 bp, Artificial Sequence
  Oligonucleotide for detection of SNP TSC0047344
ccttctcaaaaaa

SEQ ID NO: 192329 - DNA, 13 bp, Artificial Sequence
  Oligonucleotide for detection of SNP TSC0047345
ttaaggtgttaty

SEQ ID NO: 192330 - DNA, 13 bp, Artificial Sequence
  Oligonucleotide for detection of SNP TSC0047345
rataacaccttaa

SEQ ID NO: 192331 - DNA, 13 bp, Artificial Sequence
  Oligonucleotide for detection of SNP TSC0047345
ttaaggcgttaty

SEQ ID NO: 192332 - DNA, 13 bp, Artificial Sequence
  Oligonucleotide for detection of SNP TSC0047345
rataacgccttaa

SEQ ID NO: 192333 - DNA, 13 bp, Artificial Sequence
  Oligonucleotide for detection of SNP TSC0047345
gatgacgttttgg

SEQ ID NO: 192334 - DNA, 13 bp, Artificial Sequence
  Oligonucleotide for detection of SNP TSC0047345
ccaaaacgtcatc

SEQ ID NO: 192335 - DNA, 13 bp, Artificial Sequence
  Oligonucleotide for detection of SNP TSC0047346
tatagtgatgaaa

SEQ ID NO: 192336 - DNA, 13 bp, Artificial Sequence
  Oligonucleotide for detection of SNP TSC0047346
tttcatcactata

SEQ ID NO: 192337 - DNA, 13 bp, Artificial Sequence
  Oligonucleotide for detection of SNP TSC0047346
tatagtaatgaaa

SEQ ID NO: 192338 - DNA, 13 bp, Artificial Sequence
  Oligonucleotide for detection of SNP TSC0047346
tttcattactata

SEQ ID NO: 192339 - DNA, 13 bp, Artificial Sequence
  Oligonucleotide for detection of SNP TSC0047347
ataaaatgttttt

SEQ ID NO: 192340 - DNA, 13 bp, Artificial Sequence
  Oligonucleotide for detection of SNP TSC0047347
aaaaacattttat

SEQ ID NO: 192341 - DNA, 13 bp, Artificial Sequence
  Oligonucleotide for detection of SNP TSC0047347
ataaaacgttttt

SEQ ID NO: 192342 - DNA, 13 bp, Artificial Sequence
  Oligonucleotide for detection of SNP TSC0047347
aaaaacgttttat

SEQ ID NO: 192343 - DNA, 13 bp, Artificial Sequence
  Oligonucleotide for detection of SNP TSC0047347
agagatgttttat

SEQ ID NO: 192344 - DNA, 13 bp, Artificial Sequence
  Oligonucleotide for detection of SNP TSC0047347
ataaaacatctct

SEQ ID NO: 192345 - DNA, 13 bp, Artificial Sequence
  Oligonucleotide for detection of SNP TSC0047347
agagatattttat

SEQ ID NO: 192346 - DNA, 13 bp, Artificial Sequence
  Oligonucleotide for detection of SNP TSC0047347
ataaaatatctct

SEQ ID NO: 192347 - DNA, 13 bp, Artificial Sequence
  Oligonucleotide for detection of SNP TSC0047347
agagacgttttat

SEQ ID NO: 192348 - DNA, 13 bp, Artificial Sequence
  Oligonucleotide for detection of SNP TSC0047347
ataaaacgtctct

SEQ ID NO: 192349 - DNA, 13 bp, Artificial Sequence
  Oligonucleotide for detection of SNP TSC0047348
gatatatgttttt

SEQ ID NO: 192350 - DNA, 13 bp, Artificial Sequence
  Oligonucleotide for detection of SNP TSC0047348
aaaaacatatatc

SEQ ID NO: 192351 - DNA, 13 bp, Artificial Sequence
  Oligonucleotide for detection of SNP TSC0047348
gatatacgttttt

SEQ ID NO: 192352 - DNA, 13 bp, Artificial Sequence
  Oligonucleotide for detection of SNP TSC0047348
aaaaacgtatatc

SEQ ID NO: 192353 - DNA, 13 bp, Artificial Sequence
  Oligonucleotide for detection of SNP TSC0047348
aagagtgtatgty

SEQ ID NO: 192354 - DNA, 13 bp, Artificial Sequence
  Oligonucleotide for detection of SNP TSC0047348
racatacactctt

SEQ ID NO: 192355 - DNA, 13 bp, Artificial Sequence
  Oligonucleotide for detection of SNP TSC0047348
aagagtatatgty

SEQ ID NO: 192356 - DNA, 13 bp, Artificial Sequence
  Oligonucleotide for detection of SNP TSC0047348
racatatactctt

SEQ ID NO: 192357 - DNA, 13 bp, Artificial Sequence
  Oligonucleotide for detection of SNP TSC0047348
aagagcgtatgty

SEQ ID NO: 192358 - DNA, 13 bp, Artificial Sequence
  Oligonucleotide for detection of SNP TSC0047348
racatacgctctt

SEQ ID NO: 192359 - DNA, 13 bp, Artificial Sequence
  Oligonucleotide for detection of SNP TSC0047349
gattaaagtagga

SEQ ID NO: 192360 - DNA, 13 bp, Artificial Sequence
  Oligonucleotide for detection of SNP TSC0047349
tcctactttaatc

SEQ ID NO: 192361 - DNA, 13 bp, Artificial Sequence
  Oligonucleotide for detection of SNP TSC0047349
gattaaggtagga

SEQ ID NO: 192362 - DNA, 13 bp, Artificial Sequence
  Oligonucleotide for detection of SNP TSC0047349
tcctaccttaatc

SEQ ID NO: 192363 - DNA, 13 bp, Artificial Sequence
  Oligonucleotide for detection of SNP TSC0047353
gtaattttggagy

SEQ ID NO: 192364 - DNA, 13 bp, Artificial Sequence
  Oligonucleotide for detection of SNP TSC0047353
rctccaaaattac

SEQ ID NO: 192365 - DNA, 13 bp, Artificial Sequence
  Oligonucleotide for detection of SNP TSC0047353
gtaattgtggagy

SEQ ID NO: 192366 - DNA, 13 bp, Artificial Sequence
  Oligonucleotide for detection of SNP TSC0047353
rctccacaattac

SEQ ID NO: 192367 - DNA, 13 bp, Artificial Sequence
  Oligonucleotide for detection of SNP TSC0047353
gttttagagttgy

SEQ ID NO: 192368 - DNA, 13 bp, Artificial Sequence
  Oligonucleotide for detection of SNP TSC0047353
rcaactctaaaac

SEQ ID NO: 192369 - DNA, 13 bp, Artificial Sequence
  Oligonucleotide for detection of SNP TSC0047353
gttttatagttgy

SEQ ID NO: 192370 - DNA, 13 bp, Artificial Sequence
  Oligonucleotide for detection of SNP TSC0047353
rcaactataaaac

SEQ ID NO: 192371 - DNA, 13 bp, Artificial Sequence
  Oligonucleotide for detection of SNP TSC0047355
gggtatttgaggg

SEQ ID NO: 192372 - DNA, 13 bp, Artificial Sequence
  Oligonucleotide for detection of SNP TSC0047355
ccctcaaataccc

SEQ ID NO: 192373 - DNA, 13 bp, Artificial Sequence
  Oligonucleotide for detection of SNP TSC0047355
gggtatgtgaggg

SEQ ID NO: 192374 - DNA, 13 bp, Artificial Sequence
  Oligonucleotide for detection of SNP TSC0047355
ccctcacataccc

SEQ ID NO: 192375 - DNA, 13 bp, Artificial Sequence
  Oligonucleotide for detection of SNP TSC0047355
gggtacgtgaggg

SEQ ID NO: 192376 - DNA, 13 bp, Artificial Sequence
  Oligonucleotide for detection of SNP TSC0047355
ccctcacgtaccc

SEQ ID NO: 192377 - DNA, 13 bp, Artificial Sequence
  Oligonucleotide for detection of SNP TSC0047356
attttgagataat

SEQ ID NO: 192378 - DNA, 13 bp, Artificial Sequence
  Oligonucleotide for detection of SNP TSC0047356
attatctcaaaat

SEQ ID NO: 192379 - DNA, 13 bp, Artificial Sequence
  Oligonucleotide for detection of SNP TSC0047356
attttgggataat

SEQ ID NO: 192380 - DNA, 13 bp, Artificial Sequence
  Oligonucleotide for detection of SNP TSC0047356
attatcccaaaat

SEQ ID NO: 192381 - DNA, 13 bp, Artificial Sequence
  Oligonucleotide for detection of SNP TSC0047357
tttttttgttagt

SEQ ID NO: 192382 - DNA, 13 bp, Artificial Sequence
  Oligonucleotide for detection of SNP TSC0047357
actaacaaaaaaa

SEQ ID NO: 192383 - DNA, 13 bp, Artificial Sequence
  Oligonucleotide for detection of SNP TSC0047357
ttttttggttagt

SEQ ID NO: 192384 - DNA, 13 bp, Artificial Sequence
  Oligonucleotide for detection of SNP TSC0047357
actaaccaaaaaa

SEQ ID NO: 192385 - DNA, 13 bp, Artificial Sequence
  Oligonucleotide for detection of SNP TSC0047357
attaataagaaaa

SEQ ID NO: 192386 - DNA, 13 bp, Artificial Sequence
  Oligonucleotide for detection of SNP TSC0047357
ttttcttattaat

SEQ ID NO: 192387 - DNA, 13 bp, Artificial Sequence
  Oligonucleotide for detection of SNP TSC0047357
attaattagaaaa

SEQ ID NO: 192388 - DNA, 13 bp, Artificial Sequence
  Oligonucleotide for detection of SNP TSC0047357
ttttctaattaat

SEQ ID NO: 192389 - DNA, 13 bp, Artificial Sequence
  Oligonucleotide for detection of SNP TSC0047358
gttagggattatt

SEQ ID NO: 192390 - DNA, 13 bp, Artificial Sequence
  Oligonucleotide for detection of SNP TSC0047358
aataatccctaac

SEQ ID NO: 192391 - DNA, 13 bp, Artificial Sequence
  Oligonucleotide for detection of SNP TSC0047358
gttaggaattatt

SEQ ID NO: 192392 - DNA, 13 bp, Artificial Sequence
  Oligonucleotide for detection of SNP TSC0047358
aataattcctaac

SEQ ID NO: 192393 - DNA, 13 bp, Artificial Sequence
  Oligonucleotide for detection of SNP TSC0047359
gatggtagttttg

SEQ ID NO: 192394 - DNA, 13 bp, Artificial Sequence
  Oligonucleotide for detection of SNP TSC0047359
caaaactaccatc

SEQ ID NO: 192395 - DNA, 13 bp, Artificial Sequence
  Oligonucleotide for detection of SNP TSC0047359
gatggtggttttg

SEQ ID NO: 192396 - DNA, 13 bp, Artificial Sequence
  Oligonucleotide for detection of SNP TSC0047359
caaaaccaccatc

SEQ ID NO: 192397 - DNA, 13 bp, Artificial Sequence
  Oligonucleotide for detection of SNP TSC0047360
taggggttgggay

SEQ ID NO: 192398 - DNA, 13 bp, Artificial Sequence
  Oligonucleotide for detection of SNP TSC0047360
rtcccaaccccta

SEQ ID NO: 192399 - DNA, 13 bp, Artificial Sequence
  Oligonucleotide for detection of SNP TSC0047360
tagggggtgggay

SEQ ID NO: 192400 - DNA, 13 bp, Artificial Sequence
  Oligonucleotide for detection of SNP TSC0047360
rtcccacccccta

SEQ ID NO: 192401 - DNA, 13 bp, Artificial Sequence
  Oligonucleotide for detection of SNP TSC0047361
tagaaattaagtt

SEQ ID NO: 192402 - DNA, 13 bp, Artificial Sequence
  Oligonucleotide for detection of SNP TSC0047361
aacttaatttcta

SEQ ID NO: 192403 - DNA, 13 bp, Artificial Sequence
  Oligonucleotide for detection of SNP TSC0047361
tagaaagtaagtt

SEQ ID NO: 192404 - DNA, 13 bp, Artificial Sequence
  Oligonucleotide for detection of SNP TSC0047361
aacttactttcta

SEQ ID NO: 192405 - DNA, 13 bp, Artificial Sequence
  Oligonucleotide for detection of SNP TSC0047361
agtttaatttttg

SEQ ID NO: 192406 - DNA, 13 bp, Artificial Sequence
  Oligonucleotide for detection of SNP TSC0047361
caaaaattaaact

SEQ ID NO: 192407 - DNA, 13 bp, Artificial Sequence
  Oligonucleotide for detection of SNP TSC0047361
agtttattttttg

SEQ ID NO: 192408 - DNA, 13 bp, Artificial Sequence
  Oligonucleotide for detection of SNP TSC0047361
caaaaaataaact

SEQ ID NO: 192409 - DNA, 13 bp, Artificial Sequence
  Oligonucleotide for detection of SNP TSC0047362
gaagaaatgttgt

SEQ ID NO: 192410 - DNA, 13 bp, Artificial Sequence
  Oligonucleotide for detection of SNP TSC0047362
acaacatttcttc

SEQ ID NO: 192411 - DNA, 13 bp, Artificial Sequence
  Oligonucleotide for detection of SNP TSC0047362
gaagaagtgttgt

SEQ ID NO: 192412 - DNA, 13 bp, Artificial Sequence
  Oligonucleotide for detection of SNP TSC0047362
acaacacttcttc

SEQ ID NO: 192413 - DNA, 13 bp, Artificial Sequence
  Oligonucleotide for detection of SNP TSC0047363
atgtgagtttatg

SEQ ID NO: 192414 - DNA, 13 bp, Artificial Sequence
  Oligonucleotide for detection of SNP TSC0047363
cataaactcacat

SEQ ID NO: 192415 - DNA, 13 bp, Artificial Sequence
  Oligonucleotide for detection of SNP TSC0047363
atgtgaatttatg

SEQ ID NO: 192416 - DNA, 13 bp, Artificial Sequence
  Oligonucleotide for detection of SNP TSC0047363
cataaattcacat

SEQ ID NO: 192417 - DNA, 13 bp, Artificial Sequence
  Oligonucleotide for detection of SNP TSC0047364
ggttttataattg

SEQ ID NO: 192418 - DNA, 13 bp, Artificial Sequence
  Oligonucleotide for detection of SNP TSC0047364
caattataaaacc

SEQ ID NO: 192419 - DNA, 13 bp, Artificial Sequence
  Oligonucleotide for detection of SNP TSC0047364
ggttttgtaattg

SEQ ID NO: 192420 - DNA, 13 bp, Artificial Sequence
  Oligonucleotide for detection of SNP TSC0047364
caattacaaaacc

SEQ ID NO: 192421 - DNA, 13 bp, Artificial Sequence
  Oligonucleotide for detection of SNP TSC0047364
ggtttcgtaattg

SEQ ID NO: 192422 - DNA, 13 bp, Artificial Sequence
  Oligonucleotide for detection of SNP TSC0047364
caattacgaaacc

SEQ ID NO: 192423 - DNA, 13 bp, Artificial Sequence
  Oligonucleotide for detection of SNP TSC0047364
taattatggagty

SEQ ID NO: 192424 - DNA, 13 bp, Artificial Sequence
  Oligonucleotide for detection of SNP TSC0047364
ractccataatta

SEQ ID NO: 192425 - DNA, 13 bp, Artificial Sequence
  Oligonucleotide for detection of SNP TSC0047364
taattacggagty

SEQ ID NO: 192426 - DNA, 13 bp, Artificial Sequence
  Oligonucleotide for detection of SNP TSC0047364
ractccgtaatta

SEQ ID NO: 192427 - DNA, 13 bp, Artificial Sequence
  Oligonucleotide for detection of SNP TSC0047366
aaggggtattgat

SEQ ID NO: 192428 - DNA, 13 bp, Artificial Sequence
  Oligonucleotide for detection of SNP TSC0047366
atcaatacccctt

SEQ ID NO: 192429 - DNA, 13 bp, Artificial Sequence
  Oligonucleotide for detection of SNP TSC0047366
aagggggattgat

SEQ ID NO: 192430 - DNA, 13 bp, Artificial Sequence
  Oligonucleotide for detection of SNP TSC0047366
atcaatccccctt

SEQ ID NO: 192431 - DNA, 13 bp, Artificial Sequence
  Oligonucleotide for detection of SNP TSC0047367
atttttggatatg

SEQ ID NO: 192432 - DNA, 13 bp, Artificial Sequence
  Oligonucleotide for detection of SNP TSC0047367
catatccaaaaat

SEQ ID NO: 192433 - DNA, 13 bp, Artificial Sequence
  Oligonucleotide for detection of SNP TSC0047367
atttttagatatg

SEQ ID NO: 192434 - DNA, 13 bp, Artificial Sequence
  Oligonucleotide for detection of SNP TSC0047367
catatctaaaaat

SEQ ID NO: 192435 - DNA, 13 bp, Artificial Sequence
  Oligonucleotide for detection of SNP TSC0047367
attttcggatatg

SEQ ID NO: 192436 - DNA, 13 bp, Artificial Sequence
  Oligonucleotide for detection of SNP TSC0047367
catatccgaaaat

SEQ ID NO: 192437 - DNA, 13 bp, Artificial Sequence
  Oligonucleotide for detection of SNP TSC0047368
tcgagattgggta

SEQ ID NO: 192438 - DNA, 13 bp, Artificial Sequence
  Oligonucleotide for detection of SNP TSC0047368
tacccaatctcga

SEQ ID NO: 192439 - DNA, 13 bp, Artificial Sequence
  Oligonucleotide for detection of SNP TSC0047368
tcgagagtgggta

SEQ ID NO: 192440 - DNA, 13 bp, Artificial Sequence
  Oligonucleotide for detection of SNP TSC0047368
tacccactctcga

SEQ ID NO: 192441 - DNA, 13 bp, Artificial Sequence
  Oligonucleotide for detection of SNP TSC0047368
tatttagttttgg

SEQ ID NO: 192442 - DNA, 13 bp, Artificial Sequence
  Oligonucleotide for detection of SNP TSC0047368
ccaaaactaaata

SEQ ID NO: 192443 - DNA, 13 bp, Artificial Sequence
  Oligonucleotide for detection of SNP TSC0047368
tatttatttttgg

SEQ ID NO: 192444 - DNA, 13 bp, Artificial Sequence
  Oligonucleotide for detection of SNP TSC0047368
ccaaaaataaata

SEQ ID NO: 192445 - DNA, 13 bp, Artificial Sequence
  Oligonucleotide for detection of SNP TSC0047368
tatttagtttcgg

SEQ ID NO: 192446 - DNA, 13 bp, Artificial Sequence
  Oligonucleotide for detection of SNP TSC0047368
ccgaaactaaata

SEQ ID NO: 192447 - DNA, 13 bp, Artificial Sequence
  Oligonucleotide for detection of SNP TSC0047368
tatttattttcgg

SEQ ID NO: 192448 - DNA, 13 bp, Artificial Sequence
  Oligonucleotide for detection of SNP TSC0047368
ccgaaaataaata

SEQ ID NO: 192449 - DNA, 13 bp, Artificial Sequence
  Oligonucleotide for detection of SNP TSC0000480
tttatttgtatag

SEQ ID NO: 192450 - DNA, 13 bp, Artificial Sequence
  Oligonucleotide for detection of SNP TSC0000480
ctatacaaataaa

SEQ ID NO: 192451 - DNA, 13 bp, Artificial Sequence
  Oligonucleotide for detection of SNP TSC0000480
tttattcgtatag

SEQ ID NO: 192452 - DNA, 13 bp, Artificial Sequence
  Oligonucleotide for detection of SNP TSC0000480
ctatacgaataaa

SEQ ID NO: 192453 - DNA, 13 bp, Artificial Sequence
  Oligonucleotide for detection of SNP TSC0000480
ttgtgtgaatgaa

SEQ ID NO: 192454 - DNA, 13 bp, Artificial Sequence
  Oligonucleotide for detection of SNP TSC0000480
ttcattcacacaa

SEQ ID NO: 192455 - DNA, 13 bp, Artificial Sequence
  Oligonucleotide for detection of SNP TSC0000480
ttgtgtaaatgaa

SEQ ID NO: 192456 - DNA, 13 bp, Artificial Sequence
  Oligonucleotide for detection of SNP TSC0000480
ttcatttacacaa

SEQ ID NO: 192457 - DNA, 13 bp, Artificial Sequence
  Oligonucleotide for detection of SNP TSC0000480
ttgtgcgaatgaa

SEQ ID NO: 192458 - DNA, 13 bp, Artificial Sequence
  Oligonucleotide for detection of SNP TSC0000480
ttcattcgcacaa

SEQ ID NO: 192459 - DNA, 13 bp, Artificial Sequence
  Oligonucleotide for detection of SNP TSC0047369
tgtgtatgtgtgt

SEQ ID NO: 192460 - DNA, 13 bp, Artificial Sequence
  Oligonucleotide for detection of SNP TSC0047369
acacacatacaca

SEQ ID NO: 192461 - DNA, 13 bp, Artificial Sequence
  Oligonucleotide for detection of SNP TSC0047369
tgtgtacgtgtgt

SEQ ID NO: 192462 - DNA, 13 bp, Artificial Sequence
  Oligonucleotide for detection of SNP TSC0047369
acacacgtacaca

SEQ ID NO: 192463 - DNA, 13 bp, Artificial Sequence
  Oligonucleotide for detection of SNP TSC0047370
gtgtacgtgtgtg

SEQ ID NO: 192464 - DNA, 13 bp, Artificial Sequence
  Oligonucleotide for detection of SNP TSC0047370
cacacacgtacac

SEQ ID NO: 192465 - DNA, 13 bp, Artificial Sequence
  Oligonucleotide for detection of SNP TSC0000138
ttttgttttgttt

SEQ ID NO: 192466 - DNA, 13 bp, Artificial Sequence
  Oligonucleotide for detection of SNP TSC0000138
aaacaaaacaaaa

SEQ ID NO: 192467 - DNA, 13 bp, Artificial Sequence
  Oligonucleotide for detection of SNP TSC0000138
agatagtgtaagg

SEQ ID NO: 192468 - DNA, 13 bp, Artificial Sequence
  Oligonucleotide for detection of SNP TSC0000138
ccttacactatct

SEQ ID NO: 192469 - DNA, 13 bp, Artificial Sequence
  Oligonucleotide for detection of SNP TSC0000138
agatagggtaagg

SEQ ID NO: 192470 - DNA, 13 bp, Artificial Sequence
  Oligonucleotide for detection of SNP TSC0000138
ccttaccctatct

SEQ ID NO: 192471 - DNA, 13 bp, Artificial Sequence
  Oligonucleotide for detection of SNP TSC0047371
tttttattttaat

SEQ ID NO: 192472 - DNA, 13 bp, Artificial Sequence
  Oligonucleotide for detection of SNP TSC0047371
attaaaataaaaa

SEQ ID NO: 192473 - DNA, 13 bp, Artificial Sequence
  Oligonucleotide for detection of SNP TSC0047371
tttttagtttaat

SEQ ID NO: 192474 - DNA, 13 bp, Artificial Sequence
  Oligonucleotide for detection of SNP TSC0047371
attaaactaaaaa

SEQ ID NO: 192475 - DNA, 13 bp, Artificial Sequence
  Oligonucleotide for detection of SNP TSC0047371
attaaggtaaaaa

SEQ ID NO: 192476 - DNA, 13 bp, Artificial Sequence
  Oligonucleotide for detection of SNP TSC0047371
tttttaccttaat

SEQ ID NO: 192477 - DNA, 13 bp, Artificial Sequence
  Oligonucleotide for detection of SNP TSC0047371
attaagttaaaaa

SEQ ID NO: 192478 - DNA, 13 bp, Artificial Sequence
  Oligonucleotide for detection of SNP TSC0047371
tttttaacttaat

SEQ ID NO: 192479 - DNA, 13 bp, Artificial Sequence
  Oligonucleotide for detection of SNP TSC0047372
ttatattgagagt

SEQ ID NO: 192480 - DNA, 13 bp, Artificial Sequence
  Oligonucleotide for detection of SNP TSC0047372
actctcaatataa

SEQ ID NO: 192481 - DNA, 13 bp, Artificial Sequence
  Oligonucleotide for detection of SNP TSC0047372
ttatatggagagt

SEQ ID NO: 192482 - DNA, 13 bp, Artificial Sequence
  Oligonucleotide for detection of SNP TSC0047372
actctccatataa

SEQ ID NO: 192483 - DNA, 13 bp, Artificial Sequence
  Oligonucleotide for detection of SNP TSC0047372
atttttaatatag

SEQ ID NO: 192484 - DNA, 13 bp, Artificial Sequence
  Oligonucleotide for detection of SNP TSC0047372
ctatattaaaaat

SEQ ID NO: 192485 - DNA, 13 bp, Artificial Sequence
  Oligonucleotide for detection of SNP TSC0047372
attttttatatag

SEQ ID NO: 192486 - DNA, 13 bp, Artificial Sequence
  Oligonucleotide for detection of SNP TSC0047372
ctatataaaaaat

SEQ ID NO: 192487 - DNA, 13 bp, Artificial Sequence
  Oligonucleotide for detection of SNP TSC0047373
attatatgtaaaa

SEQ ID NO: 192488 - DNA, 13 bp, Artificial Sequence
  Oligonucleotide for detection of SNP TSC0047373
ttttacatataat

SEQ ID NO: 192489 - DNA, 13 bp, Artificial Sequence
  Oligonucleotide for detection of SNP TSC0047373
attatacgtaaaa

SEQ ID NO: 192490 - DNA, 13 bp, Artificial Sequence
  Oligonucleotide for detection of SNP TSC0047373
ttttacgtataat

SEQ ID NO: 192491 - DNA, 13 bp, Artificial Sequence
  Oligonucleotide for detection of SNP TSC0047374
tttattatttgga

SEQ ID NO: 192492 - DNA, 13 bp, Artificial Sequence
  Oligonucleotide for detection of SNP TSC0047374
tccaaataataaa

SEQ ID NO: 192493 - DNA, 13 bp, Artificial Sequence
  Oligonucleotide for detection of SNP TSC0047374
tttattgtttgga

SEQ ID NO: 192494 - DNA, 13 bp, Artificial Sequence
  Oligonucleotide for detection of SNP TSC0047374
tccaaacaataaa

SEQ ID NO: 192495 - DNA, 13 bp, Artificial Sequence
  Oligonucleotide for detection of SNP TSC0047374
tttatcgtttgga

SEQ ID NO: 192496 - DNA, 13 bp, Artificial Sequence
  Oligonucleotide for detection of SNP TSC0047374
tccaaacgataaa

SEQ ID NO: 192497 - DNA, 13 bp, Artificial Sequence
  Oligonucleotide for detection of SNP TSC0047374
tttaagtggtggg

SEQ ID NO: 192498 - DNA, 13 bp, Artificial Sequence
  Oligonucleotide for detection of SNP TSC0047374
cccaccacttaaa

SEQ ID NO: 192499 - DNA, 13 bp, Artificial Sequence
  Oligonucleotide for detection of SNP TSC0047374
tttaagcggtggg

SEQ ID NO: 192500 - DNA, 13 bp, Artificial Sequence
  Oligonucleotide for detection of SNP TSC0047374
cccaccgcttaaa

SEQ ID NO: 192501 - DNA, 13 bp, Artificial Sequence
  Oligonucleotide for detection of SNP TSC0047375
ataaattagaaaa

SEQ ID NO: 192502 - DNA, 13 bp, Artificial Sequence
  Oligonucleotide for detection of SNP TSC0047375
ttttctaatttat

SEQ ID NO: 192503 - DNA, 13 bp, Artificial Sequence
  Oligonucleotide for detection of SNP TSC0047375
ataaatgagaaaa

SEQ ID NO: 192504 - DNA, 13 bp, Artificial Sequence
  Oligonucleotide for detection of SNP TSC0047375
ttttctcatttat

SEQ ID NO: 192505 - DNA, 13 bp, Artificial Sequence
  Oligonucleotide for detection of SNP TSC0047376
agtagtgatggaa

SEQ ID NO: 192506 - DNA, 13 bp, Artificial Sequence
  Oligonucleotide for detection of SNP TSC0047376
ttccatcactact

SEQ ID NO: 192507 - DNA, 13 bp, Artificial Sequence
  Oligonucleotide for detection of SNP TSC0047376
agtagtaatggaa

SEQ ID NO: 192508 - DNA, 13 bp, Artificial Sequence
  Oligonucleotide for detection of SNP TSC0047376
ttccattactact

SEQ ID NO: 192509 - DNA, 13 bp, Artificial Sequence
  Oligonucleotide for detection of SNP TSC0047377
taaaattagttat

SEQ ID NO: 192510 - DNA, 13 bp, Artificial Sequence
  Oligonucleotide for detection of SNP TSC0047377
ataactaatttta

SEQ ID NO: 192511 - DNA, 13 bp, Artificial Sequence
  Oligonucleotide for detection of SNP TSC0047377
taaaatgagttat

SEQ ID NO: 192512 - DNA, 13 bp, Artificial Sequence
  Oligonucleotide for detection of SNP TSC0047377
ataactcatttta

SEQ ID NO: 192513 - DNA, 13 bp, Artificial Sequence
  Oligonucleotide for detection of SNP TSC0047377
atgattgatttta

SEQ ID NO: 192514 - DNA, 13 bp, Artificial Sequence
  Oligonucleotide for detection of SNP TSC0047377
taaaatcaatcat

SEQ ID NO: 192515 - DNA, 13 bp, Artificial Sequence
  Oligonucleotide for detection of SNP TSC0047377
atgatttatttta

SEQ ID NO: 192516 - DNA, 13 bp, Artificial Sequence
  Oligonucleotide for detection of SNP TSC0047377
taaaataaatcat

SEQ ID NO: 192517 - DNA, 13 bp, Artificial Sequence
  Oligonucleotide for detection of SNP TSC0047378
tatgataaaatgy

SEQ ID NO: 192518 - DNA, 13 bp, Artificial Sequence
  Oligonucleotide for detection of SNP TSC0047378
rcattttatcata

SEQ ID NO: 192519 - DNA, 13 bp, Artificial Sequence
  Oligonucleotide for detection of SNP TSC0047378
tatgatgaaatgy

SEQ ID NO: 192520 - DNA, 13 bp, Artificial Sequence
  Oligonucleotide for detection of SNP TSC0047378
rcatttcatcata

SEQ ID NO: 192521 - DNA, 13 bp, Artificial Sequence
  Oligonucleotide for detection of SNP TSC0047379
aagagtgagttta

SEQ ID NO: 192522 - DNA, 13 bp, Artificial Sequence
  Oligonucleotide for detection of SNP TSC0047379
taaactcactctt

SEQ ID NO: 192523 - DNA, 13 bp, Artificial Sequence
  Oligonucleotide for detection of SNP TSC0047379
aagagtaagttta

SEQ ID NO: 192524 - DNA, 13 bp, Artificial Sequence
  Oligonucleotide for detection of SNP TSC0047379
taaacttactctt

SEQ ID NO: 192525 - DNA, 13 bp, Artificial Sequence
  Oligonucleotide for detection of SNP TSC0009836
tttgttttatgat

SEQ ID NO: 192526 - DNA, 13 bp, Artificial Sequence
  Oligonucleotide for detection of SNP TSC0009836
atcataaaacaaa

SEQ ID NO: 192527 - DNA, 13 bp, Artificial Sequence
  Oligonucleotide for detection of SNP TSC0009836
tttgttgtatgat

SEQ ID NO: 192528 - DNA, 13 bp, Artificial Sequence
  Oligonucleotide for detection of SNP TSC0009836
atcatacaacaaa

SEQ ID NO: 192529 - DNA, 13 bp, Artificial Sequence
  Oligonucleotide for detection of SNP TSC0009836
attatatagtaag

SEQ ID NO: 192530 - DNA, 13 bp, Artificial Sequence
  Oligonucleotide for detection of SNP TSC0009836
cttactatataat

SEQ ID NO: 192531 - DNA, 13 bp, Artificial Sequence
  Oligonucleotide for detection of SNP TSC0009837
tttgttgttttat

SEQ ID NO: 192532 - DNA, 13 bp, Artificial Sequence
  Oligonucleotide for detection of SNP TSC0009837
ataaaacaacaaa

SEQ ID NO: 192533 - DNA, 13 bp, Artificial Sequence
  Oligonucleotide for detection of SNP TSC0009837
ttcgttattttat

SEQ ID NO: 192534 - DNA, 13 bp, Artificial Sequence
  Oligonucleotide for detection of SNP TSC0009837
ataaaataacgaa

SEQ ID NO: 192535 - DNA, 13 bp, Artificial Sequence
  Oligonucleotide for detection of SNP TSC0009837
ttcgttgttttat

SEQ ID NO: 192536 - DNA, 13 bp, Artificial Sequence
  Oligonucleotide for detection of SNP TSC0009837
ataaaacaacgaa

SEQ ID NO: 192537 - DNA, 13 bp, Artificial Sequence
  Oligonucleotide for detection of SNP TSC0009837
tttgtcgttttat

SEQ ID NO: 192538 - DNA, 13 bp, Artificial Sequence
  Oligonucleotide for detection of SNP TSC0009837
ataaaacgacaaa

SEQ ID NO: 192539 - DNA, 13 bp, Artificial Sequence
  Oligonucleotide for detection of SNP TSC0009837
ttcgtcgttttat

SEQ ID NO: 192540 - DNA, 13 bp, Artificial Sequence
  Oligonucleotide for detection of SNP TSC0009837
ataaaacgacgaa

SEQ ID NO: 192541 - DNA, 13 bp, Artificial Sequence
  Oligonucleotide for detection of SNP TSC0009837
ataaagtggtggg

SEQ ID NO: 192542 - DNA, 13 bp, Artificial Sequence
  Oligonucleotide for detection of SNP TSC0009837
cccaccactttat

SEQ ID NO: 192543 - DNA, 13 bp, Artificial Sequence
  Oligonucleotide for detection of SNP TSC0009837
ataaagtggcggg

SEQ ID NO: 192544 - DNA, 13 bp, Artificial Sequence
  Oligonucleotide for detection of SNP TSC0009837
cccgccactttat

SEQ ID NO: 192545 - DNA, 13 bp, Artificial Sequence
  Oligonucleotide for detection of SNP TSC0009837
ataaagcggtggg

SEQ ID NO: 192546 - DNA, 13 bp, Artificial Sequence
  Oligonucleotide for detection of SNP TSC0009837
cccaccgctttat

SEQ ID NO: 192547 - DNA, 13 bp, Artificial Sequence
  Oligonucleotide for detection of SNP TSC0009837
ataaagcggcggg

SEQ ID NO: 192548 - DNA, 13 bp, Artificial Sequence
  Oligonucleotide for detection of SNP TSC0009837
cccgccgctttat

SEQ ID NO: 192549 - DNA, 13 bp, Artificial Sequence
  Oligonucleotide for detection of SNP TSC0047380
taagtttttttty

SEQ ID NO: 192550 - DNA, 13 bp, Artificial Sequence
  Oligonucleotide for detection of SNP TSC0047380
raaaaaaaactta

SEQ ID NO: 192551 - DNA, 13 bp, Artificial Sequence
  Oligonucleotide for detection of SNP TSC0047380
ggggaggagttta

SEQ ID NO: 192552 - DNA, 13 bp, Artificial Sequence
  Oligonucleotide for detection of SNP TSC0047380
taaactcctcccc

SEQ ID NO: 192553 - DNA, 13 bp, Artificial Sequence
  Oligonucleotide for detection of SNP TSC0047380
ggggagtagttta

SEQ ID NO: 192554 - DNA, 13 bp, Artificial Sequence
  Oligonucleotide for detection of SNP TSC0047380
taaactactcccc

SEQ ID NO: 192555 - DNA, 13 bp, Artificial Sequence
  Oligonucleotide for detection of SNP TSC0047381
ttgttgatggtgg

SEQ ID NO: 192556 - DNA, 13 bp, Artificial Sequence
  Oligonucleotide for detection of SNP TSC0047381
ccaccatcaacaa

SEQ ID NO: 192557 - DNA, 13 bp, Artificial Sequence
  Oligonucleotide for detection of SNP TSC0047381
ttgtcgatggtgg

SEQ ID NO: 192558 - DNA, 13 bp, Artificial Sequence
  Oligonucleotide for detection of SNP TSC0047381
ccaccatcgacaa

SEQ ID NO: 192559 - DNA, 13 bp, Artificial Sequence
  Oligonucleotide for detection of SNP TSC0047381
ttgtcggtggtgg

SEQ ID NO: 192560 - DNA, 13 bp, Artificial Sequence
  Oligonucleotide for detection of SNP TSC0047381
ccaccaccgacaa

SEQ ID NO: 192561 - DNA, 13 bp, Artificial Sequence
  Oligonucleotide for detection of SNP TSC0005317
aaatgttagtggg

SEQ ID NO: 192562 - DNA, 13 bp, Artificial Sequence
  Oligonucleotide for detection of SNP TSC0005317
cccactaacattt

SEQ ID NO: 192563 - DNA, 13 bp, Artificial Sequence
  Oligonucleotide for detection of SNP TSC0005317
aaatgtgagtggg

SEQ ID NO: 192564 - DNA, 13 bp, Artificial Sequence
  Oligonucleotide for detection of SNP TSC0005317
cccactcacattt

SEQ ID NO: 192565 - DNA, 13 bp, Artificial Sequence
  Oligonucleotide for detection of SNP TSC0005317
aaacgttagtggg

SEQ ID NO: 192566 - DNA, 13 bp, Artificial Sequence
  Oligonucleotide for detection of SNP TSC0005317
cccactaacgttt

SEQ ID NO: 192567 - DNA, 13 bp, Artificial Sequence
  Oligonucleotide for detection of SNP TSC0005317
aaacgtgagtggg

SEQ ID NO: 192568 - DNA, 13 bp, Artificial Sequence
  Oligonucleotide for detection of SNP TSC0005317
cccactcacgttt

SEQ ID NO: 192569 - DNA, 13 bp, Artificial Sequence
  Oligonucleotide for detection of SNP TSC0005317
aaatgttagcggg

SEQ ID NO: 192570 - DNA, 13 bp, Artificial Sequence
  Oligonucleotide for detection of SNP TSC0005317
cccgctaacattt

SEQ ID NO: 192571 - DNA, 13 bp, Artificial Sequence
  Oligonucleotide for detection of SNP TSC0005317
aaatgtgagcggg

SEQ ID NO: 192572 - DNA, 13 bp, Artificial Sequence
  Oligonucleotide for detection of SNP TSC0005317
cccgctcacattt

SEQ ID NO: 192573 - DNA, 13 bp, Artificial Sequence
  Oligonucleotide for detection of SNP TSC0005317
aaacgttagcggg

SEQ ID NO: 192574 - DNA, 13 bp, Artificial Sequence
  Oligonucleotide for detection of SNP TSC0005317
cccgctaacgttt

SEQ ID NO: 192575 - DNA, 13 bp, Artificial Sequence
  Oligonucleotide for detection of SNP TSC0005317
aaacgtgagcggg

SEQ ID NO: 192576 - DNA, 13 bp, Artificial Sequence
  Oligonucleotide for detection of SNP TSC0005317
cccgctcacgttt

SEQ ID NO: 192577 - DNA, 13 bp, Artificial Sequence
  Oligonucleotide for detection of SNP TSC0005317
tttgttgatgttt

SEQ ID NO: 192578 - DNA, 13 bp, Artificial Sequence
  Oligonucleotide for detection of SNP TSC0005317
aaacatcaacaaa

SEQ ID NO: 192579 - DNA, 13 bp, Artificial Sequence
  Oligonucleotide for detection of SNP TSC0005317
tttgtttatgttt

SEQ ID NO: 192580 - DNA, 13 bp, Artificial Sequence
  Oligonucleotide for detection of SNP TSC0005317
aaacataaacaaa

SEQ ID NO: 192581 - DNA, 13 bp, Artificial Sequence
  Oligonucleotide for detection of SNP TSC0005317
ttcgttgatgttt

SEQ ID NO: 192582 - DNA, 13 bp, Artificial Sequence
  Oligonucleotide for detection of SNP TSC0005317
aaacatcaacgaa

SEQ ID NO: 192583 - DNA, 13 bp, Artificial Sequence
  Oligonucleotide for detection of SNP TSC0005317
ttcgtttatgttt

SEQ ID NO: 192584 - DNA, 13 bp, Artificial Sequence
  Oligonucleotide for detection of SNP TSC0005317
aaacataaacgaa

SEQ ID NO: 192585 - DNA, 13 bp, Artificial Sequence
  Oligonucleotide for detection of SNP TSC0005317
tttgttgacgttt

SEQ ID NO: 192586 - DNA, 13 bp, Artificial Sequence
  Oligonucleotide for detection of SNP TSC0005317
aaacgtcaacaaa

SEQ ID NO: 192587 - DNA, 13 bp, Artificial Sequence
  Oligonucleotide for detection of SNP TSC0005317
tttgtttacgttt

SEQ ID NO: 192588 - DNA, 13 bp, Artificial Sequence
  Oligonucleotide for detection of SNP TSC0005317
aaacgtaaacaaa

SEQ ID NO: 192589 - DNA, 13 bp, Artificial Sequence
  Oligonucleotide for detection of SNP TSC0005317
ttcgttgacgttt

SEQ ID NO: 192590 - DNA, 13 bp, Artificial Sequence
  Oligonucleotide for detection of SNP TSC0005317
aaacgtcaacgaa

SEQ ID NO: 192591 - DNA, 13 bp, Artificial Sequence
  Oligonucleotide for detection of SNP TSC0005317
ttcgtttacgttt

SEQ ID NO: 192592 - DNA, 13 bp, Artificial Sequence
  Oligonucleotide for detection of SNP TSC0005317
aaacgtaaacgaa

SEQ ID NO: 192593 - DNA, 13 bp, Artificial Sequence
  Oligonucleotide for detection of SNP TSC0005318
taaggattagggy

SEQ ID NO: 192594 - DNA, 13 bp, Artificial Sequence
  Oligonucleotide for detection of SNP TSC0005318
rccctaatcctta

SEQ ID NO: 192595 - DNA, 13 bp, Artificial Sequence
  Oligonucleotide for detection of SNP TSC0005318
taaggagtagggy

SEQ ID NO: 192596 - DNA, 13 bp, Artificial Sequence
  Oligonucleotide for detection of SNP TSC0005318
rccctactcctta

SEQ ID NO: 192597 - DNA, 13 bp, Artificial Sequence
  Oligonucleotide for detection of SNP TSC0047382
tttagtttgtgty

SEQ ID NO: 192598 - DNA, 13 bp, Artificial Sequence
  Oligonucleotide for detection of SNP TSC0047382
racacaaactaaa

SEQ ID NO: 192599 - DNA, 13 bp, Artificial Sequence
  Oligonucleotide for detection of SNP TSC0047382
gatatatattaga

SEQ ID NO: 192600 - DNA, 13 bp, Artificial Sequence
  Oligonucleotide for detection of SNP TSC0047382
tctaatatatatc

SEQ ID NO: 192601 - DNA, 13 bp, Artificial Sequence
  Oligonucleotide for detection of SNP TSC0047382
gatatagattaga

SEQ ID NO: 192602 - DNA, 13 bp, Artificial Sequence
  Oligonucleotide for detection of SNP TSC0047382
tctaatctatatc

SEQ ID NO: 192603 - DNA, 13 bp, Artificial Sequence
  Oligonucleotide for detection of SNP TSC0047384
agattagagatga

SEQ ID NO: 192604 - DNA, 13 bp, Artificial Sequence
  Oligonucleotide for detection of SNP TSC0047384
tcatctctaatct

SEQ ID NO: 192605 - DNA, 13 bp, Artificial Sequence
  Oligonucleotide for detection of SNP TSC0047384
agattaaagatga

SEQ ID NO: 192606 - DNA, 13 bp, Artificial Sequence
  Oligonucleotide for detection of SNP TSC0047384
tcatctttaatct

SEQ ID NO: 192607 - DNA, 13 bp, Artificial Sequence
  Oligonucleotide for detection of SNP TSC0047387
tttttaatatatt

SEQ ID NO: 192608 - DNA, 13 bp, Artificial Sequence
  Oligonucleotide for detection of SNP TSC0047387
aatatattaaaaa

SEQ ID NO: 192609 - DNA, 13 bp, Artificial Sequence
  Oligonucleotide for detection of SNP TSC0047388
gagaaatgttaat

SEQ ID NO: 192610 - DNA, 13 bp, Artificial Sequence
  Oligonucleotide for detection of SNP TSC0047388
attaacatttctc

SEQ ID NO: 192611 - DNA, 13 bp, Artificial Sequence
  Oligonucleotide for detection of SNP TSC0047388
gagaaaagttaat

SEQ ID NO: 192612 - DNA, 13 bp, Artificial Sequence
  Oligonucleotide for detection of SNP TSC0047388
attaacttttctc

SEQ ID NO: 192613 - DNA, 13 bp, Artificial Sequence
  Oligonucleotide for detection of SNP TSC0047389
gatgttgttagty

SEQ ID NO: 192614 - DNA, 13 bp, Artificial Sequence
  Oligonucleotide for detection of SNP TSC0047389
ractaacaacatc

SEQ ID NO: 192615 - DNA, 13 bp, Artificial Sequence
  Oligonucleotide for detection of SNP TSC0047389
gatgttattagty

SEQ ID NO: 192616 - DNA, 13 bp, Artificial Sequence
  Oligonucleotide for detection of SNP TSC0047389
ractaataacatc

SEQ ID NO: 192617 - DNA, 13 bp, Artificial Sequence
  Oligonucleotide for detection of SNP TSC0047390
aaaaaatgtttag

SEQ ID NO: 192618 - DNA, 13 bp, Artificial Sequence
  Oligonucleotide for detection of SNP TSC0047390
ctaaacatttttt

SEQ ID NO: 192619 - DNA, 13 bp, Artificial Sequence
  Oligonucleotide for detection of SNP TSC0047390
aaaaaacgtttag

SEQ ID NO: 192620 - DNA, 13 bp, Artificial Sequence
  Oligonucleotide for detection of SNP TSC0047390
ctaaacgtttttt

SEQ ID NO: 192621 - DNA, 13 bp, Artificial Sequence
  Oligonucleotide for detection of SNP TSC0047395
agatagagttgta

SEQ ID NO: 192622 - DNA, 13 bp, Artificial Sequence
  Oligonucleotide for detection of SNP TSC0047395
tacaactctatct

SEQ ID NO: 192623 - DNA, 13 bp, Artificial Sequence
  Oligonucleotide for detection of SNP TSC0047395
agatagtgttgta

SEQ ID NO: 192624 - DNA, 13 bp, Artificial Sequence
  Oligonucleotide for detection of SNP TSC0047395
tacaacactatct

SEQ ID NO: 192625 - DNA, 13 bp, Artificial Sequence
  Oligonucleotide for detection of SNP TSC0047395
agatagagtcgta

SEQ ID NO: 192626 - DNA, 13 bp, Artificial Sequence
  Oligonucleotide for detection of SNP TSC0047395
tacgactctatct

SEQ ID NO: 192627 - DNA, 13 bp, Artificial Sequence
  Oligonucleotide for detection of SNP TSC0047395
agatagtgtcgta

SEQ ID NO: 192628 - DNA, 13 bp, Artificial Sequence
  Oligonucleotide for detection of SNP TSC0047395
tacgacactatct

SEQ ID NO: 192629 - DNA, 13 bp, Artificial Sequence
  Oligonucleotide for detection of SNP TSC0047395
tgtgattttgttt

SEQ ID NO: 192630 - DNA, 13 bp, Artificial Sequence
  Oligonucleotide for detection of SNP TSC0047395
aaacaaaatcaca

SEQ ID NO: 192631 - DNA, 13 bp, Artificial Sequence
  Oligonucleotide for detection of SNP TSC0047395
tgtgatattgttt

SEQ ID NO: 192632 - DNA, 13 bp, Artificial Sequence
  Oligonucleotide for detection of SNP TSC0047395
aaacaatatcaca

SEQ ID NO: 192633 - DNA, 13 bp, Artificial Sequence
  Oligonucleotide for detection of SNP TSC0047395
tgcgattttgttt

SEQ ID NO: 192634 - DNA, 13 bp, Artificial Sequence
  Oligonucleotide for detection of SNP TSC0047395
aaacaaaatcgca

SEQ ID NO: 192635 - DNA, 13 bp, Artificial Sequence
  Oligonucleotide for detection of SNP TSC0047395
tgcgatattgttt

SEQ ID NO: 192636 - DNA, 13 bp, Artificial Sequence
  Oligonucleotide for detection of SNP TSC0047395
aaacaatatcgca

SEQ ID NO: 192637 - DNA, 13 bp, Artificial Sequence
  Oligonucleotide for detection of SNP TSC0047396
atagtagtttggg

SEQ ID NO: 192638 - DNA, 13 bp, Artificial Sequence
  Oligonucleotide for detection of SNP TSC0047396
cccaaactactat

SEQ ID NO: 192639 - DNA, 13 bp, Artificial Sequence
  Oligonucleotide for detection of SNP TSC0047396
atagtaatttggg

SEQ ID NO: 192640 - DNA, 13 bp, Artificial Sequence
  Oligonucleotide for detection of SNP TSC0047396
cccaaattactat

SEQ ID NO: 192641 - DNA, 13 bp, Artificial Sequence
  Oligonucleotide for detection of SNP TSC0000168
gatgagattattt

SEQ ID NO: 192642 - DNA, 13 bp, Artificial Sequence
  Oligonucleotide for detection of SNP TSC0000168
aaataatctcatc

SEQ ID NO: 192643 - DNA, 13 bp, Artificial Sequence
  Oligonucleotide for detection of SNP TSC0000168
gatgagtttattt

SEQ ID NO: 192644 - DNA, 13 bp, Artificial Sequence
  Oligonucleotide for detection of SNP TSC0000168
aaataaactcatc

SEQ ID NO: 192645 - DNA, 13 bp, Artificial Sequence
  Oligonucleotide for detection of SNP TSC0000168
aagtaattttaty

SEQ ID NO: 192646 - DNA, 13 bp, Artificial Sequence
  Oligonucleotide for detection of SNP TSC0000168
rataaaattactt

SEQ ID NO: 192647 - DNA, 13 bp, Artificial Sequence
  Oligonucleotide for detection of SNP TSC0000168
aagtaaatttaty

SEQ ID NO: 192648 - DNA, 13 bp, Artificial Sequence
  Oligonucleotide for detection of SNP TSC0000168
rataaatttactt

SEQ ID NO: 192649 - DNA, 13 bp, Artificial Sequence
  Oligonucleotide for detection of SNP TSC0047406
gttggtagatagg

SEQ ID NO: 192650 - DNA, 13 bp, Artificial Sequence
  Oligonucleotide for detection of SNP TSC0047406
cctatctaccaac

SEQ ID NO: 192651 - DNA, 13 bp, Artificial Sequence
  Oligonucleotide for detection of SNP TSC0047406
gttggtggatagg

SEQ ID NO: 192652 - DNA, 13 bp, Artificial Sequence
  Oligonucleotide for detection of SNP TSC0047406
cctatccaccaac

SEQ ID NO: 192653 - DNA, 13 bp, Artificial Sequence
  Oligonucleotide for detection of SNP TSC0047406
gttggcggatagg

SEQ ID NO: 192654 - DNA, 13 bp, Artificial Sequence
  Oligonucleotide for detection of SNP TSC0047406
cctatccgccaac

SEQ ID NO: 192655 - DNA, 13 bp, Artificial Sequence
  Oligonucleotide for detection of SNP TSC0047406
tttgtttgttagy

SEQ ID NO: 192656 - DNA, 13 bp, Artificial Sequence
  Oligonucleotide for detection of SNP TSC0047406
rctaacaaacaaa

SEQ ID NO: 192657 - DNA, 13 bp, Artificial Sequence
  Oligonucleotide for detection of SNP TSC0047406
tttgttcgttagy

SEQ ID NO: 192658 - DNA, 13 bp, Artificial Sequence
  Oligonucleotide for detection of SNP TSC0047406
rctaacgaacaaa

SEQ ID NO: 192659 - DNA, 13 bp, Artificial Sequence
  Oligonucleotide for detection of SNP TSC0047407
atttatagttttg

SEQ ID NO: 192660 - DNA, 13 bp, Artificial Sequence
  Oligonucleotide for detection of SNP TSC0047407
caaaactataaat

SEQ ID NO: 192661 - DNA, 13 bp, Artificial Sequence
  Oligonucleotide for detection of SNP TSC0047407
atttattgttttg

SEQ ID NO: 192662 - DNA, 13 bp, Artificial Sequence
  Oligonucleotide for detection of SNP TSC0047407
caaaacaataaat

SEQ ID NO: 192663 - DNA, 13 bp, Artificial Sequence
  Oligonucleotide for detection of SNP TSC0047407
tagagttgtgagt

SEQ ID NO: 192664 - DNA, 13 bp, Artificial Sequence
  Oligonucleotide for detection of SNP TSC0047407
actcacaactcta

SEQ ID NO: 192665 - DNA, 13 bp, Artificial Sequence
  Oligonucleotide for detection of SNP TSC0047407
tagagtagtgagt

SEQ ID NO: 192666 - DNA, 13 bp, Artificial Sequence
  Oligonucleotide for detection of SNP TSC0047407
actcactactcta

SEQ ID NO: 192667 - DNA, 13 bp, Artificial Sequence
  Oligonucleotide for detection of SNP TSC0047409
ggatgtgttggay

SEQ ID NO: 192668 - DNA, 13 bp, Artificial Sequence
  Oligonucleotide for detection of SNP TSC0047409
rtccaacacatcc

SEQ ID NO: 192669 - DNA, 13 bp, Artificial Sequence
  Oligonucleotide for detection of SNP TSC0047409
ggatgtattggay

SEQ ID NO: 192670 - DNA, 13 bp, Artificial Sequence
  Oligonucleotide for detection of SNP TSC0047409
rtccaatacatcc

SEQ ID NO: 192671 - DNA, 13 bp, Artificial Sequence
  Oligonucleotide for detection of SNP TSC0047411
atttatatgtata

SEQ ID NO: 192672 - DNA, 13 bp, Artificial Sequence
  Oligonucleotide for detection of SNP TSC0047411
tatacatataaat

SEQ ID NO: 192673 - DNA, 13 bp, Artificial Sequence
  Oligonucleotide for detection of SNP TSC0047411
atttatgtgtata

SEQ ID NO: 192674 - DNA, 13 bp, Artificial Sequence
  Oligonucleotide for detection of SNP TSC0047411
tatacacataaat

SEQ ID NO: 192675 - DNA, 13 bp, Artificial Sequence
  Oligonucleotide for detection of SNP TSC0047411
atttacgtgtata

SEQ ID NO: 192676 - DNA, 13 bp, Artificial Sequence
  Oligonucleotide for detection of SNP TSC0047411
tatacacgtaaat

SEQ ID NO: 192677 - DNA, 13 bp, Artificial Sequence
  Oligonucleotide for detection of SNP TSC0047411
tatgtatgtaaat

SEQ ID NO: 192678 - DNA, 13 bp, Artificial Sequence
  Oligonucleotide for detection of SNP TSC0047411
atttacatacata

SEQ ID NO: 192679 - DNA, 13 bp, Artificial Sequence
  Oligonucleotide for detection of SNP TSC0047411
tatgtacgtaaat

SEQ ID NO: 192680 - DNA, 13 bp, Artificial Sequence
  Oligonucleotide for detection of SNP TSC0047411
atttacgtacata

SEQ ID NO: 192681 - DNA, 13 bp, Artificial Sequence
  Oligonucleotide for detection of SNP TSC0047412
atggtggaaggtg

SEQ ID NO: 192682 - DNA, 13 bp, Artificial Sequence
  Oligonucleotide for detection of SNP TSC0047412
caccttccaccat

SEQ ID NO: 192683 - DNA, 13 bp, Artificial Sequence
  Oligonucleotide for detection of SNP TSC0047412
atggtgaaaggtg

SEQ ID NO: 192684 - DNA, 13 bp, Artificial Sequence
  Oligonucleotide for detection of SNP TSC0047412
cacctttcaccat

SEQ ID NO: 192685 - DNA, 13 bp, Artificial Sequence
  Oligonucleotide for detection of SNP TSC0047414
tttatagtaatga

SEQ ID NO: 192686 - DNA, 13 bp, Artificial Sequence
  Oligonucleotide for detection of SNP TSC0047414
tcattactataaa

SEQ ID NO: 192687 - DNA, 13 bp, Artificial Sequence
  Oligonucleotide for detection of SNP TSC0047414
tttataataatga

SEQ ID NO: 192688 - DNA, 13 bp, Artificial Sequence
  Oligonucleotide for detection of SNP TSC0047414
tcattattataaa

SEQ ID NO: 192689 - DNA, 13 bp, Artificial Sequence
  Oligonucleotide for detection of SNP TSC0047415
tgatgttgagggy

SEQ ID NO: 192690 - DNA, 13 bp, Artificial Sequence
  Oligonucleotide for detection of SNP TSC0047415
rccctcaacatca

SEQ ID NO: 192691 - DNA, 13 bp, Artificial Sequence
  Oligonucleotide for detection of SNP TSC0047415
tgacgttgagggy

SEQ ID NO: 192692 - DNA, 13 bp, Artificial Sequence
  Oligonucleotide for detection of SNP TSC0047415
rccctcaacgtca

SEQ ID NO: 192693 - DNA, 13 bp, Artificial Sequence
  Oligonucleotide for detection of SNP TSC0047415
tgatgtcgagggy

SEQ ID NO: 192694 - DNA, 13 bp, Artificial Sequence
  Oligonucleotide for detection of SNP TSC0047415
rccctcgacatca

SEQ ID NO: 192695 - DNA, 13 bp, Artificial Sequence
  Oligonucleotide for detection of SNP TSC0047415
tgacgtcgagggy

SEQ ID NO: 192696 - DNA, 13 bp, Artificial Sequence
  Oligonucleotide for detection of SNP TSC0047415
rccctcgacgtca

SEQ ID NO: 192697 - DNA, 13 bp, Artificial Sequence
  Oligonucleotide for detection of SNP TSC0047415
gtttttgatgtta

SEQ ID NO: 192698 - DNA, 13 bp, Artificial Sequence
  Oligonucleotide for detection of SNP TSC0047415
taacatcaaaaac

SEQ ID NO: 192699 - DNA, 13 bp, Artificial Sequence
  Oligonucleotide for detection of SNP TSC0047415
gtttttaatgtta

SEQ ID NO: 192700 - DNA, 13 bp, Artificial Sequence
  Oligonucleotide for detection of SNP TSC0047415
taacattaaaaac

SEQ ID NO: 192701 - DNA, 13 bp, Artificial Sequence
  Oligonucleotide for detection of SNP TSC0047415
gttttcgatgtta

SEQ ID NO: 192702 - DNA, 13 bp, Artificial Sequence
  Oligonucleotide for detection of SNP TSC0047415
taacatcgaaaac

SEQ ID NO: 192703 - DNA, 13 bp, Artificial Sequence
  Oligonucleotide for detection of SNP TSC0047415
gtttttaacgtta

SEQ ID NO: 192704 - DNA, 13 bp, Artificial Sequence
  Oligonucleotide for detection of SNP TSC0047415
taacgttaaaaac

SEQ ID NO: 192705 - DNA, 13 bp, Artificial Sequence
  Oligonucleotide for detection of SNP TSC0047415
gtttttgacgtta

SEQ ID NO: 192706 - DNA, 13 bp, Artificial Sequence
  Oligonucleotide for detection of SNP TSC0047415
taacgtcaaaaac

SEQ ID NO: 192707 - DNA, 13 bp, Artificial Sequence
  Oligonucleotide for detection of SNP TSC0047415
gttttcgacgtta

SEQ ID NO: 192708 - DNA, 13 bp, Artificial Sequence
  Oligonucleotide for detection of SNP TSC0047415
taacgtcgaaaac

SEQ ID NO: 192709 - DNA, 13 bp, Artificial Sequence
  Oligonucleotide for detection of SNP TSC0047422
ggtttagttttay

SEQ ID NO: 192710 - DNA, 13 bp, Artificial Sequence
  Oligonucleotide for detection of SNP TSC0047422
rtaaaactaaacc

SEQ ID NO: 192711 - DNA, 13 bp, Artificial Sequence
  Oligonucleotide for detection of SNP TSC0047422
ggtttaattttay

SEQ ID NO: 192712 - DNA, 13 bp, Artificial Sequence
  Oligonucleotide for detection of SNP TSC0047422
rtaaaattaaacc

SEQ ID NO: 192713 - DNA, 13 bp, Artificial Sequence
  Oligonucleotide for detection of SNP TSC0047423
atagttaatatga

SEQ ID NO: 192714 - DNA, 13 bp, Artificial Sequence
  Oligonucleotide for detection of SNP TSC0047423
tcatattaactat

SEQ ID NO: 192715 - DNA, 13 bp, Artificial Sequence
  Oligonucleotide for detection of SNP TSC0047423
atagttgatatga

SEQ ID NO: 192716 - DNA, 13 bp, Artificial Sequence
  Oligonucleotide for detection of SNP TSC0047423
tcatatcaactat

SEQ ID NO: 192717 - DNA, 13 bp, Artificial Sequence
  Oligonucleotide for detection of SNP TSC0047423
atagtcgatatga

SEQ ID NO: 192718 - DNA, 13 bp, Artificial Sequence
  Oligonucleotide for detection of SNP TSC0047423
tcatatcgactat

SEQ ID NO: 192719 - DNA, 13 bp, Artificial Sequence
  Oligonucleotide for detection of SNP TSC0047423
ttatattggttgt

SEQ ID NO: 192720 - DNA, 13 bp, Artificial Sequence
  Oligonucleotide for detection of SNP TSC0047423
acaaccaatataa

SEQ ID NO: 192721 - DNA, 13 bp, Artificial Sequence
  Oligonucleotide for detection of SNP TSC0047423
ttatatcggttgt

SEQ ID NO: 192722 - DNA, 13 bp, Artificial Sequence
  Oligonucleotide for detection of SNP TSC0047423
acaaccgatataa

SEQ ID NO: 192723 - DNA, 13 bp, Artificial Sequence
  Oligonucleotide for detection of SNP TSC0047424
cgttttgtttttt

SEQ ID NO: 192724 - DNA, 13 bp, Artificial Sequence
  Oligonucleotide for detection of SNP TSC0047424
aaaaaacaaaacg

SEQ ID NO: 192725 - DNA, 13 bp, Artificial Sequence
  Oligonucleotide for detection of SNP TSC0005302
ataagtatagagy

SEQ ID NO: 192726 - DNA, 13 bp, Artificial Sequence
  Oligonucleotide for detection of SNP TSC0005302
rctctatacttat

SEQ ID NO: 192727 - DNA, 13 bp, Artificial Sequence
  Oligonucleotide for detection of SNP TSC0005303
ataattataaata

SEQ ID NO: 192728 - DNA, 13 bp, Artificial Sequence
  Oligonucleotide for detection of SNP TSC0005303
tatttataattat

SEQ ID NO: 192729 - DNA, 13 bp, Artificial Sequence
  Oligonucleotide for detection of SNP TSC0005303
ataattgtaaata

SEQ ID NO: 192730 - DNA, 13 bp, Artificial Sequence
  Oligonucleotide for detection of SNP TSC0005303
tatttacaattat

SEQ ID NO: 192731 - DNA, 13 bp, Artificial Sequence
  Oligonucleotide for detection of SNP TSC0005303
ataatcgtaaata

SEQ ID NO: 192732 - DNA, 13 bp, Artificial Sequence
  Oligonucleotide for detection of SNP TSC0005303
tatttacgattat

SEQ ID NO: 192733 - DNA, 13 bp, Artificial Sequence
  Oligonucleotide for detection of SNP TSC0005303
tatttgtggttat

SEQ ID NO: 192734 - DNA, 13 bp, Artificial Sequence
  Oligonucleotide for detection of SNP TSC0005303
ataaccacaaata

SEQ ID NO: 192735 - DNA, 13 bp, Artificial Sequence
  Oligonucleotide for detection of SNP TSC0005303
tatttgcggttat

SEQ ID NO: 192736 - DNA, 13 bp, Artificial Sequence
  Oligonucleotide for detection of SNP TSC0005303
ataaccgcaaata

SEQ ID NO: 192737 - DNA, 13 bp, Artificial Sequence
  Oligonucleotide for detection of SNP TSC0047427
taaggatgtgtgt

SEQ ID NO: 192738 - DNA, 13 bp, Artificial Sequence
  Oligonucleotide for detection of SNP TSC0047427
acacacatcctta

SEQ ID NO: 192739 - DNA, 13 bp, Artificial Sequence
  Oligonucleotide for detection of SNP TSC0047427
taaggacgtgtgt

SEQ ID NO: 192740 - DNA, 13 bp, Artificial Sequence
  Oligonucleotide for detection of SNP TSC0047427
acacacgtcctta

SEQ ID NO: 192741 - DNA, 13 bp, Artificial Sequence
  Oligonucleotide for detection of SNP TSC0047427
taaggatgcgtgt

SEQ ID NO: 192742 - DNA, 13 bp, Artificial Sequence
  Oligonucleotide for detection of SNP TSC0047427
acacgcatcctta

SEQ ID NO: 192743 - DNA, 13 bp, Artificial Sequence
  Oligonucleotide for detection of SNP TSC0047427
taaggacgcgtgt

SEQ ID NO: 192744 - DNA, 13 bp, Artificial Sequence
  Oligonucleotide for detection of SNP TSC0047427
acacgcgtcctta

SEQ ID NO: 192745 - DNA, 13 bp, Artificial Sequence
  Oligonucleotide for detection of SNP TSC0047427
atatgtgtttttg

SEQ ID NO: 192746 - DNA, 13 bp, Artificial Sequence
  Oligonucleotide for detection of SNP TSC0047427
caaaaacacatat

SEQ ID NO: 192747 - DNA, 13 bp, Artificial Sequence
  Oligonucleotide for detection of SNP TSC0047427
atatgtatttttg

SEQ ID NO: 192748 - DNA, 13 bp, Artificial Sequence
  Oligonucleotide for detection of SNP TSC0047427
caaaaatacatat

SEQ ID NO: 192749 - DNA, 13 bp, Artificial Sequence
  Oligonucleotide for detection of SNP TSC0047427
atacgtgtttttg

SEQ ID NO: 192750 - DNA, 13 bp, Artificial Sequence
  Oligonucleotide for detection of SNP TSC0047427
caaaaacacgtat

SEQ ID NO: 192751 - DNA, 13 bp, Artificial Sequence
  Oligonucleotide for detection of SNP TSC0047427
atacgtatttttg

SEQ ID NO: 192752 - DNA, 13 bp, Artificial Sequence
  Oligonucleotide for detection of SNP TSC0047427
caaaaatacgtat

SEQ ID NO: 192753 - DNA, 13 bp, Artificial Sequence
  Oligonucleotide for detection of SNP TSC0047427
atatgcgtttttg

SEQ ID NO: 192754 - DNA, 13 bp, Artificial Sequence
  Oligonucleotide for detection of SNP TSC0047427
caaaaacgcatat

SEQ ID NO: 192755 - DNA, 13 bp, Artificial Sequence
  Oligonucleotide for detection of SNP TSC0047427
atacgcgtttttg

SEQ ID NO: 192756 - DNA, 13 bp, Artificial Sequence
  Oligonucleotide for detection of SNP TSC0047427
caaaaacgcgtat

SEQ ID NO: 192757 - DNA, 13 bp, Artificial Sequence
  Oligonucleotide for detection of SNP TSC0047428
aggatagtgaagg

SEQ ID NO: 192758 - DNA, 13 bp, Artificial Sequence
  Oligonucleotide for detection of SNP TSC0047428
ccttcactatcct

SEQ ID NO: 192759 - DNA, 13 bp, Artificial Sequence
  Oligonucleotide for detection of SNP TSC0047428
aggataatgaagg

SEQ ID NO: 192760 - DNA, 13 bp, Artificial Sequence
  Oligonucleotide for detection of SNP TSC0047428
ccttcattatcct

SEQ ID NO: 192761 - DNA, 13 bp, Artificial Sequence
  Oligonucleotide for detection of SNP TSC0047428
aggatagcgaagg

SEQ ID NO: 192762 - DNA, 13 bp, Artificial Sequence
  Oligonucleotide for detection of SNP TSC0047428
ccttcgctatcct

SEQ ID NO: 192763 - DNA, 13 bp, Artificial Sequence
  Oligonucleotide for detection of SNP TSC0047428
aggataacgaagg

SEQ ID NO: 192764 - DNA, 13 bp, Artificial Sequence
  Oligonucleotide for detection of SNP TSC0047428
ccttcgttatcct

SEQ ID NO: 192765 - DNA, 13 bp, Artificial Sequence
  Oligonucleotide for detection of SNP TSC0047429
ttgttagaggtta

SEQ ID NO: 192766 - DNA, 13 bp, Artificial Sequence
  Oligonucleotide for detection of SNP TSC0047429
taacctctaacaa

SEQ ID NO: 192767 - DNA, 13 bp, Artificial Sequence
  Oligonucleotide for detection of SNP TSC0047429
ttgttaaaggtta

SEQ ID NO: 192768 - DNA, 13 bp, Artificial Sequence
  Oligonucleotide for detection of SNP TSC0047429
taacctttaacaa

SEQ ID NO: 192769 - DNA, 13 bp, Artificial Sequence
  Oligonucleotide for detection of SNP TSC0047430
tagtaaaatgtta

SEQ ID NO: 192770 - DNA, 13 bp, Artificial Sequence
  Oligonucleotide for detection of SNP TSC0047430
taacattttacta

SEQ ID NO: 192771 - DNA, 13 bp, Artificial Sequence
  Oligonucleotide for detection of SNP TSC0047430
tagtaatatgtta

SEQ ID NO: 192772 - DNA, 13 bp, Artificial Sequence
  Oligonucleotide for detection of SNP TSC0047430
taacatattacta

SEQ ID NO: 192773 - DNA, 13 bp, Artificial Sequence
  Oligonucleotide for detection of SNP TSC0047430
taatattttgttg

SEQ ID NO: 192774 - DNA, 13 bp, Artificial Sequence
  Oligonucleotide for detection of SNP TSC0047430
caacaaaatatta

SEQ ID NO: 192775 - DNA, 13 bp, Artificial Sequence
  Oligonucleotide for detection of SNP TSC0047430
taatatattgttg

SEQ ID NO: 192776 - DNA, 13 bp, Artificial Sequence
  Oligonucleotide for detection of SNP TSC0047430
caacaatatatta

SEQ ID NO: 192777 - DNA, 13 bp, Artificial Sequence
  Oligonucleotide for detection of SNP TSC0047431
taggtaaaggtgy

SEQ ID NO: 192778 - DNA, 13 bp, Artificial Sequence
  Oligonucleotide for detection of SNP TSC0047431
rcacctttaccta

SEQ ID NO: 192779 - DNA, 13 bp, Artificial Sequence
  Oligonucleotide for detection of SNP TSC0047431
taggtagaggtgy

SEQ ID NO: 192780 - DNA, 13 bp, Artificial Sequence
  Oligonucleotide for detection of SNP TSC0047431
rcacctctaccta

SEQ ID NO: 192781 - DNA, 13 bp, Artificial Sequence
  Oligonucleotide for detection of SNP TSC0047433
attttataattat

SEQ ID NO: 192782 - DNA, 13 bp, Artificial Sequence
  Oligonucleotide for detection of SNP TSC0047433
ataattataaaat

SEQ ID NO: 192783 - DNA, 13 bp, Artificial Sequence
  Oligonucleotide for detection of SNP TSC0047433
attttagaattat

SEQ ID NO: 192784 - DNA, 13 bp, Artificial Sequence
  Oligonucleotide for detection of SNP TSC0047433
ataattctaaaat

SEQ ID NO: 192785 - DNA, 13 bp, Artificial Sequence
  Oligonucleotide for detection of SNP TSC0047433
ataattgtgagat

SEQ ID NO: 192786 - DNA, 13 bp, Artificial Sequence
  Oligonucleotide for detection of SNP TSC0047433
atctcacaattat

SEQ ID NO: 192787 - DNA, 13 bp, Artificial Sequence
  Oligonucleotide for detection of SNP TSC0047433
ataattttgagat

SEQ ID NO: 192788 - DNA, 13 bp, Artificial Sequence
  Oligonucleotide for detection of SNP TSC0047433
atctcaaaattat

SEQ ID NO: 192789 - DNA, 13 bp, Artificial Sequence
  Oligonucleotide for detection of SNP TSC0047435
ttgaattttgtgt

SEQ ID NO: 192790 - DNA, 13 bp, Artificial Sequence
  Oligonucleotide for detection of SNP TSC0047435
acacaaaattcaa

SEQ ID NO: 192791 - DNA, 13 bp, Artificial Sequence
  Oligonucleotide for detection of SNP TSC0047435
ttgaatgttgtgt

SEQ ID NO: 192792 - DNA, 13 bp, Artificial Sequence
  Oligonucleotide for detection of SNP TSC0047435
acacaacattcaa

SEQ ID NO: 192793 - DNA, 13 bp, Artificial Sequence
  Oligonucleotide for detection of SNP TSC0047435
atataaaatttag

SEQ ID NO: 192794 - DNA, 13 bp, Artificial Sequence
  Oligonucleotide for detection of SNP TSC0047435
ctaaattttatat

SEQ ID NO: 192795 - DNA, 13 bp, Artificial Sequence
  Oligonucleotide for detection of SNP TSC0047435
atataatatttag

SEQ ID NO: 192796 - DNA, 13 bp, Artificial Sequence
  Oligonucleotide for detection of SNP TSC0047435
ctaaatattatat

SEQ ID NO: 192797 - DNA, 13 bp, Artificial Sequence
  Oligonucleotide for detection of SNP TSC0047436
agaggaaaatatg

SEQ ID NO: 192798 - DNA, 13 bp, Artificial Sequence
  Oligonucleotide for detection of SNP TSC0047436
catattttcctct

SEQ ID NO: 192799 - DNA, 13 bp, Artificial Sequence
  Oligonucleotide for detection of SNP TSC0047436
agaggataatatg

SEQ ID NO: 192800 - DNA, 13 bp, Artificial Sequence
  Oligonucleotide for detection of SNP TSC0047436
catattatcctct

SEQ ID NO: 192801 - DNA, 13 bp, Artificial Sequence
  Oligonucleotide for detection of SNP TSC0047438
ttaggtaattttt

SEQ ID NO: 192802 - DNA, 13 bp, Artificial Sequence
  Oligonucleotide for detection of SNP TSC0047438
aaaaattacctaa

SEQ ID NO: 192803 - DNA, 13 bp, Artificial Sequence
  Oligonucleotide for detection of SNP TSC0047438
ttaggtgattttt

SEQ ID NO: 192804 - DNA, 13 bp, Artificial Sequence
  Oligonucleotide for detection of SNP TSC0047438
aaaaatcacctaa

SEQ ID NO: 192805 - DNA, 13 bp, Artificial Sequence
  Oligonucleotide for detection of SNP TSC0047439
aatatttttttat

SEQ ID NO: 192806 - DNA, 13 bp, Artificial Sequence
  Oligonucleotide for detection of SNP TSC0047439
ataaaaaaatatt

SEQ ID NO: 192807 - DNA, 13 bp, Artificial Sequence
  Oligonucleotide for detection of SNP TSC0047439
atggagtagtgtt

SEQ ID NO: 192808 - DNA, 13 bp, Artificial Sequence
  Oligonucleotide for detection of SNP TSC0047439
aacactactccat

SEQ ID NO: 192809 - DNA, 13 bp, Artificial Sequence
  Oligonucleotide for detection of SNP TSC0047439
atggagaagtgtt

SEQ ID NO: 192810 - DNA, 13 bp, Artificial Sequence
  Oligonucleotide for detection of SNP TSC0047439
aacacttctccat

SEQ ID NO: 192811 - DNA, 13 bp, Artificial Sequence
  Oligonucleotide for detection of SNP TSC0047440
aataggtatatta

SEQ ID NO: 192812 - DNA, 13 bp, Artificial Sequence
  Oligonucleotide for detection of SNP TSC0047440
taatatacctatt

SEQ ID NO: 192813 - DNA, 13 bp, Artificial Sequence
  Oligonucleotide for detection of SNP TSC0047440
aatagggatatta

SEQ ID NO: 192814 - DNA, 13 bp, Artificial Sequence
  Oligonucleotide for detection of SNP TSC0047440
taatatccctatt

SEQ ID NO: 192815 - DNA, 13 bp, Artificial Sequence
  Oligonucleotide for detection of SNP TSC0047440
tggtatatttatt

SEQ ID NO: 192816 - DNA, 13 bp, Artificial Sequence
  Oligonucleotide for detection of SNP TSC0047440
aataaatatacca

SEQ ID NO: 192817 - DNA, 13 bp, Artificial Sequence
  Oligonucleotide for detection of SNP TSC0047441
ggaagtaaaggay

SEQ ID NO: 192818 - DNA, 13 bp, Artificial Sequence
  Oligonucleotide for detection of SNP TSC0047441
rtcctttacttcc

SEQ ID NO: 192819 - DNA, 13 bp, Artificial Sequence
  Oligonucleotide for detection of SNP TSC0047441
ggaagttaaggay

SEQ ID NO: 192820 - DNA, 13 bp, Artificial Sequence
  Oligonucleotide for detection of SNP TSC0047441
rtccttaacttcc

SEQ ID NO: 192821 - DNA, 13 bp, Artificial Sequence
  Oligonucleotide for detection of SNP TSC0047442
ggtatatattgty

SEQ ID NO: 192822 - DNA, 13 bp, Artificial Sequence
  Oligonucleotide for detection of SNP TSC0047442
racaatatatacc

SEQ ID NO: 192823 - DNA, 13 bp, Artificial Sequence
  Oligonucleotide for detection of SNP TSC0047442
ggtatagattgty

SEQ ID NO: 192824 - DNA, 13 bp, Artificial Sequence
  Oligonucleotide for detection of SNP TSC0047442
racaatctatacc

SEQ ID NO: 192825 - DNA, 13 bp, Artificial Sequence
  Oligonucleotide for detection of SNP TSC0047442
ggtagtatatgty

SEQ ID NO: 192826 - DNA, 13 bp, Artificial Sequence
  Oligonucleotide for detection of SNP TSC0047442
racatatactacc

SEQ ID NO: 192827 - DNA, 13 bp, Artificial Sequence
  Oligonucleotide for detection of SNP TSC0047442
ggtagtttatgty

SEQ ID NO: 192828 - DNA, 13 bp, Artificial Sequence
  Oligonucleotide for detection of SNP TSC0047442
racataaactacc

SEQ ID NO: 192829 - DNA, 13 bp, Artificial Sequence
  Oligonucleotide for detection of SNP TSC0000191
agttttatgatty

SEQ ID NO: 192830 - DNA, 13 bp, Artificial Sequence
  Oligonucleotide for detection of SNP TSC0000191
raatcataaaact

SEQ ID NO: 192831 - DNA, 13 bp, Artificial Sequence
  Oligonucleotide for detection of SNP TSC0000191
agttttgtgatty

SEQ ID NO: 192832 - DNA, 13 bp, Artificial Sequence
  Oligonucleotide for detection of SNP TSC0000191
raatcacaaaact

SEQ ID NO: 192833 - DNA, 13 bp, Artificial Sequence
  Oligonucleotide for detection of SNP TSC0000191
agtttcgtgatty

SEQ ID NO: 192834 - DNA, 13 bp, Artificial Sequence
  Oligonucleotide for detection of SNP TSC0000191
raatcacgaaact

SEQ ID NO: 192835 - DNA, 13 bp, Artificial Sequence
  Oligonucleotide for detection of SNP TSC0000191
ggattatggggtt

SEQ ID NO: 192836 - DNA, 13 bp, Artificial Sequence
  Oligonucleotide for detection of SNP TSC0000191
aaccccataatcc

SEQ ID NO: 192837 - DNA, 13 bp, Artificial Sequence
  Oligonucleotide for detection of SNP TSC0000191
ggattacggggtt

SEQ ID NO: 192838 - DNA, 13 bp, Artificial Sequence
  Oligonucleotide for detection of SNP TSC0000191
aaccccgtaatcc

SEQ ID NO: 192839 - DNA, 13 bp, Artificial Sequence
  Oligonucleotide for detection of SNP TSC0005222
tataattgaagat

SEQ ID NO: 192840 - DNA, 13 bp, Artificial Sequence
  Oligonucleotide for detection of SNP TSC0005222
atcttcaattata

SEQ ID NO: 192841 - DNA, 13 bp, Artificial Sequence
  Oligonucleotide for detection of SNP TSC0005222
tataatcgaagat

SEQ ID NO: 192842 - DNA, 13 bp, Artificial Sequence
  Oligonucleotide for detection of SNP TSC0005222
atcttcgattata

SEQ ID NO: 192843 - DNA, 13 bp, Artificial Sequence
  Oligonucleotide for detection of SNP TSC0005222
atttttagttata

SEQ ID NO: 192844 - DNA, 13 bp, Artificial Sequence
  Oligonucleotide for detection of SNP TSC0005222
tataactaaaaat

SEQ ID NO: 192845 - DNA, 13 bp, Artificial Sequence
  Oligonucleotide for detection of SNP TSC0005222
attttcggttata

SEQ ID NO: 192846 - DNA, 13 bp, Artificial Sequence
  Oligonucleotide for detection of SNP TSC0005222
tataaccgaaaat

SEQ ID NO: 192847 - DNA, 13 bp, Artificial Sequence
  Oligonucleotide for detection of SNP TSC0005223
aggtagaaggaty

SEQ ID NO: 192848 - DNA, 13 bp, Artificial Sequence
  Oligonucleotide for detection of SNP TSC0005223
ratccttctacct

SEQ ID NO: 192849 - DNA, 13 bp, Artificial Sequence
  Oligonucleotide for detection of SNP TSC0005223
aggtaggaggaty

SEQ ID NO: 192850 - DNA, 13 bp, Artificial Sequence
  Oligonucleotide for detection of SNP TSC0005223
ratcctcctacct

SEQ ID NO: 192851 - DNA, 13 bp, Artificial Sequence
  Oligonucleotide for detection of SNP TSC0005224
agatggggttttg

SEQ ID NO: 192852 - DNA, 13 bp, Artificial Sequence
  Oligonucleotide for detection of SNP TSC0005224
caaaaccccatct

SEQ ID NO: 192853 - DNA, 13 bp, Artificial Sequence
  Oligonucleotide for detection of SNP TSC0005225
agttttgtgattg

SEQ ID NO: 192854 - DNA, 13 bp, Artificial Sequence
  Oligonucleotide for detection of SNP TSC0005225
caatcacaaaact

SEQ ID NO: 192855 - DNA, 13 bp, Artificial Sequence
  Oligonucleotide for detection of SNP TSC0005225
agttttatgattg

SEQ ID NO: 192856 - DNA, 13 bp, Artificial Sequence
  Oligonucleotide for detection of SNP TSC0005225
caatcataaaact

SEQ ID NO: 192857 - DNA, 13 bp, Artificial Sequence
  Oligonucleotide for detection of SNP TSC0047444
atttttttataga

SEQ ID NO: 192858 - DNA, 13 bp, Artificial Sequence
  Oligonucleotide for detection of SNP TSC0047444
tctataaaaaaat

SEQ ID NO: 192859 - DNA, 13 bp, Artificial Sequence
  Oligonucleotide for detection of SNP TSC0047444
atttttgtataga

SEQ ID NO: 192860 - DNA, 13 bp, Artificial Sequence
  Oligonucleotide for detection of SNP TSC0047444
tctatacaaaaat

SEQ ID NO: 192861 - DNA, 13 bp, Artificial Sequence
  Oligonucleotide for detection of SNP TSC0047444
tttgtaaaaagat

SEQ ID NO: 192862 - DNA, 13 bp, Artificial Sequence
  Oligonucleotide for detection of SNP TSC0047444
atctttttacaaa

SEQ ID NO: 192863 - DNA, 13 bp, Artificial Sequence
  Oligonucleotide for detection of SNP TSC0047444
tttgtataaagat

SEQ ID NO: 192864 - DNA, 13 bp, Artificial Sequence
  Oligonucleotide for detection of SNP TSC0047444
atctttatacaaa

SEQ ID NO: 192865 - DNA, 13 bp, Artificial Sequence
  Oligonucleotide for detection of SNP TSC0047446
ggatattgtggat

SEQ ID NO: 192866 - DNA, 13 bp, Artificial Sequence
  Oligonucleotide for detection of SNP TSC0047446
atccacaatatcc

SEQ ID NO: 192867 - DNA, 13 bp, Artificial Sequence
  Oligonucleotide for detection of SNP TSC0047446
ggatatcgtggat

SEQ ID NO: 192868 - DNA, 13 bp, Artificial Sequence
  Oligonucleotide for detection of SNP TSC0047446
atccacgatatcc

SEQ ID NO: 192869 - DNA, 13 bp, Artificial Sequence
  Oligonucleotide for detection of SNP TSC0047446
atttatggtgtty

SEQ ID NO: 192870 - DNA, 13 bp, Artificial Sequence
  Oligonucleotide for detection of SNP TSC0047446
raacaccataaat

SEQ ID NO: 192871 - DNA, 13 bp, Artificial Sequence
  Oligonucleotide for detection of SNP TSC0047446
atttatagtgtty

SEQ ID NO: 192872 - DNA, 13 bp, Artificial Sequence
  Oligonucleotide for detection of SNP TSC0047446
raacactataaat

SEQ ID NO: 192873 - DNA, 13 bp, Artificial Sequence
  Oligonucleotide for detection of SNP TSC0047446
atttacggtgtty

SEQ ID NO: 192874 - DNA, 13 bp, Artificial Sequence
  Oligonucleotide for detection of SNP TSC0047446
raacaccgtaaat

SEQ ID NO: 192875 - DNA, 13 bp, Artificial Sequence
  Oligonucleotide for detection of SNP TSC0047447
gtatatgggagga

SEQ ID NO: 192876 - DNA, 13 bp, Artificial Sequence
  Oligonucleotide for detection of SNP TSC0047447
tcctcccatatac

SEQ ID NO: 192877 - DNA, 13 bp, Artificial Sequence
  Oligonucleotide for detection of SNP TSC0047447
gtatataggagga

SEQ ID NO: 192878 - DNA, 13 bp, Artificial Sequence
  Oligonucleotide for detection of SNP TSC0047447
tcctcctatatac

SEQ ID NO: 192879 - DNA, 13 bp, Artificial Sequence
  Oligonucleotide for detection of SNP TSC0047447
gtatacgggagga

SEQ ID NO: 192880 - DNA, 13 bp, Artificial Sequence
  Oligonucleotide for detection of SNP TSC0047447
tcctcccgtatac

SEQ ID NO: 192881 - DNA, 13 bp, Artificial Sequence
  Oligonucleotide for detection of SNP TSC0047448
gtttaaatgattt

SEQ ID NO: 192882 - DNA, 13 bp, Artificial Sequence
  Oligonucleotide for detection of SNP TSC0047448
aaatcatttaaac

SEQ ID NO: 192883 - DNA, 13 bp, Artificial Sequence
  Oligonucleotide for detection of SNP TSC0047452
tgtttagtttttt

SEQ ID NO: 192884 - DNA, 13 bp, Artificial Sequence
  Oligonucleotide for detection of SNP TSC0047452
aaaaaactaaaca

SEQ ID NO: 192885 - DNA, 13 bp, Artificial Sequence
  Oligonucleotide for detection of SNP TSC0007287
tttttatttgaat

SEQ ID NO: 192886 - DNA, 13 bp, Artificial Sequence
  Oligonucleotide for detection of SNP TSC0007287
attcaaataaaaa

SEQ ID NO: 192887 - DNA, 13 bp, Artificial Sequence
  Oligonucleotide for detection of SNP TSC0007287
tttttagttgaat

SEQ ID NO: 192888 - DNA, 13 bp, Artificial Sequence
  Oligonucleotide for detection of SNP TSC0007287
attcaactaaaaa

SEQ ID NO: 192889 - DNA, 13 bp, Artificial Sequence
  Oligonucleotide for detection of SNP TSC0007287
atttaaatgagga

SEQ ID NO: 192890 - DNA, 13 bp, Artificial Sequence
  Oligonucleotide for detection of SNP TSC0007287
tcctcatttaaat

SEQ ID NO: 192891 - DNA, 13 bp, Artificial Sequence
  Oligonucleotide for detection of SNP TSC0007287
atttaattgagga

SEQ ID NO: 192892 - DNA, 13 bp, Artificial Sequence
  Oligonucleotide for detection of SNP TSC0007287
tcctcaattaaat

SEQ ID NO: 192893 - DNA, 13 bp, Artificial Sequence
  Oligonucleotide for detection of SNP TSC0047453
gtttgtaagtatt

SEQ ID NO: 192894 - DNA, 13 bp, Artificial Sequence
  Oligonucleotide for detection of SNP TSC0047453
aatacttacaaac

SEQ ID NO: 192895 - DNA, 13 bp, Artificial Sequence
  Oligonucleotide for detection of SNP TSC0047453
gtttgtgagtatt

SEQ ID NO: 192896 - DNA, 13 bp, Artificial Sequence
  Oligonucleotide for detection of SNP TSC0047453
aatactcacaaac

SEQ ID NO: 192897 - DNA, 13 bp, Artificial Sequence
  Oligonucleotide for detection of SNP TSC0005402
ttaaaaattatta

SEQ ID NO: 192898 - DNA, 13 bp, Artificial Sequence
  Oligonucleotide for detection of SNP TSC0005402
taataatttttaa

SEQ ID NO: 192899 - DNA, 13 bp, Artificial Sequence
  Oligonucleotide for detection of SNP TSC0005402
ttaaaatttatta

SEQ ID NO: 192900 - DNA, 13 bp, Artificial Sequence
  Oligonucleotide for detection of SNP TSC0005402
taataaattttaa

SEQ ID NO: 192901 - DNA, 13 bp, Artificial Sequence
  Oligonucleotide for detection of SNP TSC0005402
tggtggtttttag

SEQ ID NO: 192902 - DNA, 13 bp, Artificial Sequence
  Oligonucleotide for detection of SNP TSC0005402
ctaaaaaccacca

SEQ ID NO: 192903 - DNA, 13 bp, Artificial Sequence
  Oligonucleotide for detection of SNP TSC0005402
tggtgggttttag

SEQ ID NO: 192904 - DNA, 13 bp, Artificial Sequence
  Oligonucleotide for detection of SNP TSC0005402
ctaaaacccacca

SEQ ID NO: 192905 - DNA, 13 bp, Artificial Sequence
  Oligonucleotide for detection of SNP TSC0047456
tttatggtatggy

SEQ ID NO: 192906 - DNA, 13 bp, Artificial Sequence
  Oligonucleotide for detection of SNP TSC0047456
rccataccataaa

SEQ ID NO: 192907 - DNA, 13 bp, Artificial Sequence
  Oligonucleotide for detection of SNP TSC0047456
tttatgatatggy

SEQ ID NO: 192908 - DNA, 13 bp, Artificial Sequence
  Oligonucleotide for detection of SNP TSC0047456
rccatatcataaa

SEQ ID NO: 192909 - DNA, 13 bp, Artificial Sequence
  Oligonucleotide for detection of SNP TSC0047456
tttacggtatggy

SEQ ID NO: 192910 - DNA, 13 bp, Artificial Sequence
  Oligonucleotide for detection of SNP TSC0047456
rccataccgtaaa

SEQ ID NO: 192911 - DNA, 13 bp, Artificial Sequence
  Oligonucleotide for detection of SNP TSC0047456
tttacgatatggy

SEQ ID NO: 192912 - DNA, 13 bp, Artificial Sequence
  Oligonucleotide for detection of SNP TSC0047456
rccatatcgtaaa

SEQ ID NO: 192913 - DNA, 13 bp, Artificial Sequence
  Oligonucleotide for detection of SNP TSC0010840
atttatttgttty

SEQ ID NO: 192914 - DNA, 13 bp, Artificial Sequence
  Oligonucleotide for detection of SNP TSC0010840
raaacaaataaat

SEQ ID NO: 192915 - DNA, 13 bp, Artificial Sequence
  Oligonucleotide for detection of SNP TSC0010840
gaggtatgtggat

SEQ ID NO: 192916 - DNA, 13 bp, Artificial Sequence
  Oligonucleotide for detection of SNP TSC0010840
atccacatacctc

SEQ ID NO: 192917 - DNA, 13 bp, Artificial Sequence
  Oligonucleotide for detection of SNP TSC0010841
ttggtggaggagg

SEQ ID NO: 192918 - DNA, 13 bp, Artificial Sequence
  Oligonucleotide for detection of SNP TSC0010841
cctcctccaccaa

SEQ ID NO: 192919 - DNA, 13 bp, Artificial Sequence
  Oligonucleotide for detection of SNP TSC0010841
ttggtgtaggagg

SEQ ID NO: 192920 - DNA, 13 bp, Artificial Sequence
  Oligonucleotide for detection of SNP TSC0010841
cctcctacaccaa

SEQ ID NO: 192921 - DNA, 13 bp, Artificial Sequence
  Oligonucleotide for detection of SNP TSC0010842
gatattttttgat

SEQ ID NO: 192922 - DNA, 13 bp, Artificial Sequence
  Oligonucleotide for detection of SNP TSC0010842
atcaaaaaatatc

SEQ ID NO: 192923 - DNA, 13 bp, Artificial Sequence
  Oligonucleotide for detection of SNP TSC0010842
gatattgtttgat

SEQ ID NO: 192924 - DNA, 13 bp, Artificial Sequence
  Oligonucleotide for detection of SNP TSC0010842
atcaaacaatatc

SEQ ID NO: 192925 - DNA, 13 bp, Artificial Sequence
  Oligonucleotide for detection of SNP TSC0010842
gatatcgtttgat

SEQ ID NO: 192926 - DNA, 13 bp, Artificial Sequence
  Oligonucleotide for detection of SNP TSC0010842
atcaaacgatatc

SEQ ID NO: 192927 - DNA, 13 bp, Artificial Sequence
  Oligonucleotide for detection of SNP TSC0010842
attagagggtaty

SEQ ID NO: 192928 - DNA, 13 bp, Artificial Sequence
  Oligonucleotide for detection of SNP TSC0010842
rataccctctaat

SEQ ID NO: 192929 - DNA, 13 bp, Artificial Sequence
  Oligonucleotide for detection of SNP TSC0010842
attagatggtaty

SEQ ID NO: 192930 - DNA, 13 bp, Artificial Sequence
  Oligonucleotide for detection of SNP TSC0010842
rataccatctaat

SEQ ID NO: 192931 - DNA, 13 bp, Artificial Sequence
  Oligonucleotide for detection of SNP TSC0010842
attagacggtaty

SEQ ID NO: 192932 - DNA, 13 bp, Artificial Sequence
  Oligonucleotide for detection of SNP TSC0010842
rataccgtctaat

SEQ ID NO: 192933 - DNA, 13 bp, Artificial Sequence
  Oligonucleotide for detection of SNP TSC0047457
gatagggatatat

SEQ ID NO: 192934 - DNA, 13 bp, Artificial Sequence
  Oligonucleotide for detection of SNP TSC0047457
atatatccctatc

SEQ ID NO: 192935 - DNA, 13 bp, Artificial Sequence
  Oligonucleotide for detection of SNP TSC0047457
gataggaatatat

SEQ ID NO: 192936 - DNA, 13 bp, Artificial Sequence
  Oligonucleotide for detection of SNP TSC0047457
atatattcctatc

SEQ ID NO: 192937 - DNA, 13 bp, Artificial Sequence
  Oligonucleotide for detection of SNP TSC0047458
tgggtagagatga

SEQ ID NO: 192938 - DNA, 13 bp, Artificial Sequence
  Oligonucleotide for detection of SNP TSC0047458
tcatctctaccca

SEQ ID NO: 192939 - DNA, 13 bp, Artificial Sequence
  Oligonucleotide for detection of SNP TSC0047458
tgggtaaagatga

SEQ ID NO: 192940 - DNA, 13 bp, Artificial Sequence
  Oligonucleotide for detection of SNP TSC0047458
tcatctttaccca

SEQ ID NO: 192941 - DNA, 13 bp, Artificial Sequence
  Oligonucleotide for detection of SNP TSC0004802
taaaagattttat

SEQ ID NO: 192942 - DNA, 13 bp, Artificial Sequence
  Oligonucleotide for detection of SNP TSC0004802
ataaaatctttta

SEQ ID NO: 192943 - DNA, 13 bp, Artificial Sequence
  Oligonucleotide for detection of SNP TSC0004802
taaaaggttttat

SEQ ID NO: 192944 - DNA, 13 bp, Artificial Sequence
  Oligonucleotide for detection of SNP TSC0004802
ataaaacctttta

SEQ ID NO: 192945 - DNA, 13 bp, Artificial Sequence
  Oligonucleotide for detection of SNP TSC0047466
ttaagtgatttat

SEQ ID NO: 192946 - DNA, 13 bp, Artificial Sequence
  Oligonucleotide for detection of SNP TSC0047466
ataaatcacttaa

SEQ ID NO: 192947 - DNA, 13 bp, Artificial Sequence
  Oligonucleotide for detection of SNP TSC0047466
ttaagttatttat

SEQ ID NO: 192948 - DNA, 13 bp, Artificial Sequence
  Oligonucleotide for detection of SNP TSC0047466
ataaataacttaa

SEQ ID NO: 192949 - DNA, 13 bp, Artificial Sequence
  Oligonucleotide for detection of SNP TSC0047469
ataatatagtagt

SEQ ID NO: 192950 - DNA, 13 bp, Artificial Sequence
  Oligonucleotide for detection of SNP TSC0047469
actactatattat

SEQ ID NO: 192951 - DNA, 13 bp, Artificial Sequence
  Oligonucleotide for detection of SNP TSC0047469
ataatagagtagt

SEQ ID NO: 192952 - DNA, 13 bp, Artificial Sequence
  Oligonucleotide for detection of SNP TSC0047469
actactctattat

SEQ ID NO: 192953 - DNA, 13 bp, Artificial Sequence
  Oligonucleotide for detection of SNP TSC0047470
gttttaagtattt

SEQ ID NO: 192954 - DNA, 13 bp, Artificial Sequence
  Oligonucleotide for detection of SNP TSC0047470
aaatacttaaaac

SEQ ID NO: 192955 - DNA, 13 bp, Artificial Sequence
  Oligonucleotide for detection of SNP TSC0047470
gttttaggtattt

SEQ ID NO: 192956 - DNA, 13 bp, Artificial Sequence
  Oligonucleotide for detection of SNP TSC0047470
aaatacctaaaac

SEQ ID NO: 192957 - DNA, 13 bp, Artificial Sequence
  Oligonucleotide for detection of SNP TSC0047471
aattagatagtty

SEQ ID NO: 192958 - DNA, 13 bp, Artificial Sequence
  Oligonucleotide for detection of SNP TSC0047471
raactatctaatt

SEQ ID NO: 192959 - DNA, 13 bp, Artificial Sequence
  Oligonucleotide for detection of SNP TSC0047471
aattaggtagtty

SEQ ID NO: 192960 - DNA, 13 bp, Artificial Sequence
  Oligonucleotide for detection of SNP TSC0047471
raactacctaatt

SEQ ID NO: 192961 - DNA, 13 bp, Artificial Sequence
  Oligonucleotide for detection of SNP TSC0009387
tttataatagtta

SEQ ID NO: 192962 - DNA, 13 bp, Artificial Sequence
  Oligonucleotide for detection of SNP TSC0009387
taactattataaa

SEQ ID NO: 192963 - DNA, 13 bp, Artificial Sequence
  Oligonucleotide for detection of SNP TSC0047474
atttggtgtatga

SEQ ID NO: 192964 - DNA, 13 bp, Artificial Sequence
  Oligonucleotide for detection of SNP TSC0047474
tcatacaccaaat

SEQ ID NO: 192965 - DNA, 13 bp, Artificial Sequence
  Oligonucleotide for detection of SNP TSC0047474
atttggcgtatga

SEQ ID NO: 192966 - DNA, 13 bp, Artificial Sequence
  Oligonucleotide for detection of SNP TSC0047474
tcatacgccaaat

SEQ ID NO: 192967 - DNA, 13 bp, Artificial Sequence
  Oligonucleotide for detection of SNP TSC0047474
ttatgtgttaggt

SEQ ID NO: 192968 - DNA, 13 bp, Artificial Sequence
  Oligonucleotide for detection of SNP TSC0047474
acctaacacataa

SEQ ID NO: 192969 - DNA, 13 bp, Artificial Sequence
  Oligonucleotide for detection of SNP TSC0047474
ttatgtattaggt

SEQ ID NO: 192970 - DNA, 13 bp, Artificial Sequence
  Oligonucleotide for detection of SNP TSC0047474
acctaatacataa

SEQ ID NO: 192971 - DNA, 13 bp, Artificial Sequence
  Oligonucleotide for detection of SNP TSC0047474
ttatgcgttaggt

SEQ ID NO: 192972 - DNA, 13 bp, Artificial Sequence
  Oligonucleotide for detection of SNP TSC0047474
acctaacgcataa

SEQ ID NO: 192973 - DNA, 13 bp, Artificial Sequence
  Oligonucleotide for detection of SNP TSC0047476
agatattaagttg

SEQ ID NO: 192974 - DNA, 13 bp, Artificial Sequence
  Oligonucleotide for detection of SNP TSC0047476
caacttaatatct

SEQ ID NO: 192975 - DNA, 13 bp, Artificial Sequence
  Oligonucleotide for detection of SNP TSC0047476
agatatgaagttg

SEQ ID NO: 192976 - DNA, 13 bp, Artificial Sequence
  Oligonucleotide for detection of SNP TSC0047476
caacttcatatct

SEQ ID NO: 192977 - DNA, 13 bp, Artificial Sequence
  Oligonucleotide for detection of SNP TSC0047476
taatttaatgttt

SEQ ID NO: 192978 - DNA, 13 bp, Artificial Sequence
  Oligonucleotide for detection of SNP TSC0047476
aaacattaaatta

SEQ ID NO: 192979 - DNA, 13 bp, Artificial Sequence
  Oligonucleotide for detection of SNP TSC0047476
taattttatgttt

SEQ ID NO: 192980 - DNA, 13 bp, Artificial Sequence
  Oligonucleotide for detection of SNP TSC0047476
aaacataaaatta

SEQ ID NO: 192981 - DNA, 13 bp, Artificial Sequence
  Oligonucleotide for detection of SNP TSC0047477
tattatatcgata

SEQ ID NO: 192982 - DNA, 13 bp, Artificial Sequence
  Oligonucleotide for detection of SNP TSC0047477
tatcgatataata

SEQ ID NO: 192983 - DNA, 13 bp, Artificial Sequence
  Oligonucleotide for detection of SNP TSC0047477
tattacgttgata

SEQ ID NO: 192984 - DNA, 13 bp, Artificial Sequence
  Oligonucleotide for detection of SNP TSC0047477
tatcaacgtaata

SEQ ID NO: 192985 - DNA, 13 bp, Artificial Sequence
  Oligonucleotide for detection of SNP TSC0047477
tattatgtcgata

SEQ ID NO: 192986 - DNA, 13 bp, Artificial Sequence
  Oligonucleotide for detection of SNP TSC0047477
tatcgacataata

SEQ ID NO: 192987 - DNA, 13 bp, Artificial Sequence
  Oligonucleotide for detection of SNP TSC0047477
tattacgtcgata

SEQ ID NO: 192988 - DNA, 13 bp, Artificial Sequence
  Oligonucleotide for detection of SNP TSC0047477
tatcgacgtaata

SEQ ID NO: 192989 - DNA, 13 bp, Artificial Sequence
  Oligonucleotide for detection of SNP TSC0047477
tgttgatgtggtg

SEQ ID NO: 192990 - DNA, 13 bp, Artificial Sequence
  Oligonucleotide for detection of SNP TSC0047477
caccacatcaaca

SEQ ID NO: 192991 - DNA, 13 bp, Artificial Sequence
  Oligonucleotide for detection of SNP TSC0047477
tgtcgatgtggtg

SEQ ID NO: 192992 - DNA, 13 bp, Artificial Sequence
  Oligonucleotide for detection of SNP TSC0047477
caccacatcgaca

SEQ ID NO: 192993 - DNA, 13 bp, Artificial Sequence
  Oligonucleotide for detection of SNP TSC0047477
tgttgacgtggtg

SEQ ID NO: 192994 - DNA, 13 bp, Artificial Sequence
  Oligonucleotide for detection of SNP TSC0047477
caccacgtcaaca

SEQ ID NO: 192995 - DNA, 13 bp, Artificial Sequence
  Oligonucleotide for detection of SNP TSC0047477
tgtcgacgtggtg

SEQ ID NO: 192996 - DNA, 13 bp, Artificial Sequence
  Oligonucleotide for detection of SNP TSC0047477
caccacgtcgaca

SEQ ID NO: 192997 - DNA, 13 bp, Artificial Sequence
  Oligonucleotide for detection of SNP TSC0047478
gagaaggaaaaaa

SEQ ID NO: 192998 - DNA, 13 bp, Artificial Sequence
  Oligonucleotide for detection of SNP TSC0047478
ttttttccttctc

SEQ ID NO: 192999 - DNA, 13 bp, Artificial Sequence
  Oligonucleotide for detection of SNP TSC0047478
gagaagaaaaaaa

SEQ ID NO: 193000 - DNA, 13 bp, Artificial Sequence
  Oligonucleotide for detection of SNP TSC0047478
tttttttcttctc

SEQ ID NO: 193001 - DNA, 13 bp, Artificial Sequence
  Oligonucleotide for detection of SNP TSC0047480
atagtatttagga

SEQ ID NO: 193002 - DNA, 13 bp, Artificial Sequence
  Oligonucleotide for detection of SNP TSC0047480
tcctaaatactat

SEQ ID NO: 193003 - DNA, 13 bp, Artificial Sequence
  Oligonucleotide for detection of SNP TSC0047480
atagtagttagga

SEQ ID NO: 193004 - DNA, 13 bp, Artificial Sequence
  Oligonucleotide for detection of SNP TSC0047480
tcctaactactat

SEQ ID NO: 193005 - DNA, 13 bp, Artificial Sequence
  Oligonucleotide for detection of SNP TSC0047480
ttttaaatattgt

SEQ ID NO: 193006 - DNA, 13 bp, Artificial Sequence
  Oligonucleotide for detection of SNP TSC0047480
acaatatttaaaa

SEQ ID NO: 193007 - DNA, 13 bp, Artificial Sequence
  Oligonucleotide for detection of SNP TSC0047480
ttttaattattgt

SEQ ID NO: 193008 - DNA, 13 bp, Artificial Sequence
  Oligonucleotide for detection of SNP TSC0047480
acaataattaaaa

SEQ ID NO: 193009 - DNA, 13 bp, Artificial Sequence
  Oligonucleotide for detection of SNP TSC0047481
ttggagttttagt

SEQ ID NO: 193010 - DNA, 13 bp, Artificial Sequence
  Oligonucleotide for detection of SNP TSC0047481
actaaaactccaa

SEQ ID NO: 193011 - DNA, 13 bp, Artificial Sequence
  Oligonucleotide for detection of SNP TSC0047481
ttggaggtttagt

SEQ ID NO: 193012 - DNA, 13 bp, Artificial Sequence
  Oligonucleotide for detection of SNP TSC0047481
actaaacctccaa

SEQ ID NO: 193013 - DNA, 13 bp, Artificial Sequence
  Oligonucleotide for detection of SNP TSC0047481
attgagtttttag

SEQ ID NO: 193014 - DNA, 13 bp, Artificial Sequence
  Oligonucleotide for detection of SNP TSC0047481
ctaaaaactcaat

SEQ ID NO: 193015 - DNA, 13 bp, Artificial Sequence
  Oligonucleotide for detection of SNP TSC0008888
atttataaaagaa

SEQ ID NO: 193016 - DNA, 13 bp, Artificial Sequence
  Oligonucleotide for detection of SNP TSC0008888
ttcttttataaat

SEQ ID NO: 193017 - DNA, 13 bp, Artificial Sequence
  Oligonucleotide for detection of SNP TSC0008888
atttatgaaagaa

SEQ ID NO: 193018 - DNA, 13 bp, Artificial Sequence
  Oligonucleotide for detection of SNP TSC0008888
ttctttcataaat

SEQ ID NO: 193019 - DNA, 13 bp, Artificial Sequence
  Oligonucleotide for detection of SNP TSC0008888
atttacgaaagaa

SEQ ID NO: 193020 - DNA, 13 bp, Artificial Sequence
  Oligonucleotide for detection of SNP TSC0008888
ttctttcgtaaat

SEQ ID NO: 193021 - DNA, 13 bp, Artificial Sequence
  Oligonucleotide for detection of SNP TSC0008888
tttttttgtaaat

SEQ ID NO: 193022 - DNA, 13 bp, Artificial Sequence
  Oligonucleotide for detection of SNP TSC0008888
atttacaaaaaaa

SEQ ID NO: 193023 - DNA, 13 bp, Artificial Sequence
  Oligonucleotide for detection of SNP TSC0008888
ttttttcgtaaat

SEQ ID NO: 193024 - DNA, 13 bp, Artificial Sequence
  Oligonucleotide for detection of SNP TSC0008888
atttacgaaaaaa

SEQ ID NO: 193025 - DNA, 13 bp, Artificial Sequence
  Oligonucleotide for detection of SNP TSC0047482
taggaaagttgaa

SEQ ID NO: 193026 - DNA, 13 bp, Artificial Sequence
  Oligonucleotide for detection of SNP TSC0047482
ttcaactttccta

SEQ ID NO: 193027 - DNA, 13 bp, Artificial Sequence
  Oligonucleotide for detection of SNP TSC0047482
taggaaggttgaa

SEQ ID NO: 193028 - DNA, 13 bp, Artificial Sequence
  Oligonucleotide for detection of SNP TSC0047482
ttcaaccttccta

SEQ ID NO: 193029 - DNA, 13 bp, Artificial Sequence
  Oligonucleotide for detection of SNP TSC0047483
tagttatggagta

SEQ ID NO: 193030 - DNA, 13 bp, Artificial Sequence
  Oligonucleotide for detection of SNP TSC0047483
tactccataacta

SEQ ID NO: 193031 - DNA, 13 bp, Artificial Sequence
  Oligonucleotide for detection of SNP TSC0047483
tagttacggagta

SEQ ID NO: 193032 - DNA, 13 bp, Artificial Sequence
  Oligonucleotide for detection of SNP TSC0047483
tactccgtaacta

SEQ ID NO: 193033 - DNA, 13 bp, Artificial Sequence
  Oligonucleotide for detection of SNP TSC0047483
tattttgtaattg

SEQ ID NO: 193034 - DNA, 13 bp, Artificial Sequence
  Oligonucleotide for detection of SNP TSC0047483
caattacaaaata

SEQ ID NO: 193035 - DNA, 13 bp, Artificial Sequence
  Oligonucleotide for detection of SNP TSC0047483
tattttataattg

SEQ ID NO: 193036 - DNA, 13 bp, Artificial Sequence
  Oligonucleotide for detection of SNP TSC0047483
caattataaaata

SEQ ID NO: 193037 - DNA, 13 bp, Artificial Sequence
  Oligonucleotide for detection of SNP TSC0047483
tatttcgtaattg

SEQ ID NO: 193038 - DNA, 13 bp, Artificial Sequence
  Oligonucleotide for detection of SNP TSC0047483
caattacgaaata

SEQ ID NO: 193039 - DNA, 13 bp, Artificial Sequence
  Oligonucleotide for detection of SNP TSC0047484
ttaaatgttagtt

SEQ ID NO: 193040 - DNA, 13 bp, Artificial Sequence
  Oligonucleotide for detection of SNP TSC0047484
aactaacatttaa

SEQ ID NO: 193041 - DNA, 13 bp, Artificial Sequence
  Oligonucleotide for detection of SNP TSC0047484
ttaaacgttagtt

SEQ ID NO: 193042 - DNA, 13 bp, Artificial Sequence
  Oligonucleotide for detection of SNP TSC0047484
aactaacgtttaa

SEQ ID NO: 193043 - DNA, 13 bp, Artificial Sequence
  Oligonucleotide for detection of SNP TSC0047488
ggtttgataggtt

SEQ ID NO: 193044 - DNA, 13 bp, Artificial Sequence
  Oligonucleotide for detection of SNP TSC0047488
aacctatcaaacc

SEQ ID NO: 193045 - DNA, 13 bp, Artificial Sequence
  Oligonucleotide for detection of SNP TSC0047488
ggtttggtaggtt

SEQ ID NO: 193046 - DNA, 13 bp, Artificial Sequence
  Oligonucleotide for detection of SNP TSC0047488
aacctaccaaacc

SEQ ID NO: 193047 - DNA, 13 bp, Artificial Sequence
  Oligonucleotide for detection of SNP TSC0047491
agattaatgtggg

SEQ ID NO: 193048 - DNA, 13 bp, Artificial Sequence
  Oligonucleotide for detection of SNP TSC0047491
cccacattaatct

SEQ ID NO: 193049 - DNA, 13 bp, Artificial Sequence
  Oligonucleotide for detection of SNP TSC0047491
agattagtgtggg

SEQ ID NO: 193050 - DNA, 13 bp, Artificial Sequence
  Oligonucleotide for detection of SNP TSC0047491
cccacactaatct

SEQ ID NO: 193051 - DNA, 13 bp, Artificial Sequence
  Oligonucleotide for detection of SNP TSC0047492
tttggtaagaatt

SEQ ID NO: 193052 - DNA, 13 bp, Artificial Sequence
  Oligonucleotide for detection of SNP TSC0047492
aattcttaccaaa

SEQ ID NO: 193053 - DNA, 13 bp, Artificial Sequence
  Oligonucleotide for detection of SNP TSC0047492
tttggtgagaatt

SEQ ID NO: 193054 - DNA, 13 bp, Artificial Sequence
  Oligonucleotide for detection of SNP TSC0047492
aattctcaccaaa

SEQ ID NO: 193055 - DNA, 13 bp, Artificial Sequence
  Oligonucleotide for detection of SNP TSC0047492
tttggcgagaatt

SEQ ID NO: 193056 - DNA, 13 bp, Artificial Sequence
  Oligonucleotide for detection of SNP TSC0047492
aattctcgccaaa

SEQ ID NO: 193057 - DNA, 13 bp, Artificial Sequence
  Oligonucleotide for detection of SNP TSC0047492
agtttttgttaga

SEQ ID NO: 193058 - DNA, 13 bp, Artificial Sequence
  Oligonucleotide for detection of SNP TSC0047492
tctaacaaaaact

SEQ ID NO: 193059 - DNA, 13 bp, Artificial Sequence
  Oligonucleotide for detection of SNP TSC0047492
agttttcgttaga

SEQ ID NO: 193060 - DNA, 13 bp, Artificial Sequence
  Oligonucleotide for detection of SNP TSC0047492
tctaacgaaaact

SEQ ID NO: 193061 - DNA, 13 bp, Artificial Sequence
  Oligonucleotide for detection of SNP TSC0047493
agaagagtttaaa

SEQ ID NO: 193062 - DNA, 13 bp, Artificial Sequence
  Oligonucleotide for detection of SNP TSC0047493
tttaaactcttct

SEQ ID NO: 193063 - DNA, 13 bp, Artificial Sequence
  Oligonucleotide for detection of SNP TSC0047493
agaagaatttaaa

SEQ ID NO: 193064 - DNA, 13 bp, Artificial Sequence
  Oligonucleotide for detection of SNP TSC0047493
tttaaattcttct

SEQ ID NO: 193065 - DNA, 13 bp, Artificial Sequence
  Oligonucleotide for detection of SNP TSC0047496
ttttgtagtgtty

SEQ ID NO: 193066 - DNA, 13 bp, Artificial Sequence
  Oligonucleotide for detection of SNP TSC0047496
raacactacaaaa

SEQ ID NO: 193067 - DNA, 13 bp, Artificial Sequence
  Oligonucleotide for detection of SNP TSC0047496
tttcgtagtgtty

SEQ ID NO: 193068 - DNA, 13 bp, Artificial Sequence
  Oligonucleotide for detection of SNP TSC0047496
raacactacgaaa

SEQ ID NO: 193069 - DNA, 13 bp, Artificial Sequence
  Oligonucleotide for detection of SNP TSC0047496
tttcgtggtgtty

SEQ ID NO: 193070 - DNA, 13 bp, Artificial Sequence
  Oligonucleotide for detection of SNP TSC0047496
raacaccacgaaa

SEQ ID NO: 193071 - DNA, 13 bp, Artificial Sequence
  Oligonucleotide for detection of SNP TSC0047497
aattatgggtaag

SEQ ID NO: 193072 - DNA, 13 bp, Artificial Sequence
  Oligonucleotide for detection of SNP TSC0047497
cttacccataatt

SEQ ID NO: 193073 - DNA, 13 bp, Artificial Sequence
  Oligonucleotide for detection of SNP TSC0047497
aattataggtaag

SEQ ID NO: 193074 - DNA, 13 bp, Artificial Sequence
  Oligonucleotide for detection of SNP TSC0047497
cttacctataatt

SEQ ID NO: 193075 - DNA, 13 bp, Artificial Sequence
  Oligonucleotide for detection of SNP TSC0047497
aattacgggtaag

SEQ ID NO: 193076 - DNA, 13 bp, Artificial Sequence
  Oligonucleotide for detection of SNP TSC0047497
cttacccgtaatt

SEQ ID NO: 193077 - DNA, 13 bp, Artificial Sequence
  Oligonucleotide for detection of SNP TSC0047498
agggtatgaattg

SEQ ID NO: 193078 - DNA, 13 bp, Artificial Sequence
  Oligonucleotide for detection of SNP TSC0047498
caattcataccct

SEQ ID NO: 193079 - DNA, 13 bp, Artificial Sequence
  Oligonucleotide for detection of SNP TSC0047498
agggtacgaattg

SEQ ID NO: 193080 - DNA, 13 bp, Artificial Sequence
  Oligonucleotide for detection of SNP TSC0047498
caattcgtaccct

SEQ ID NO: 193081 - DNA, 13 bp, Artificial Sequence
  Oligonucleotide for detection of SNP TSC0047498
taattcgtatttt

SEQ ID NO: 193082 - DNA, 13 bp, Artificial Sequence
  Oligonucleotide for detection of SNP TSC0047498
aaaatacgaatta

SEQ ID NO: 193083 - DNA, 13 bp, Artificial Sequence
  Oligonucleotide for detection of SNP TSC0047499
agttgttggaaaa

SEQ ID NO: 193084 - DNA, 13 bp, Artificial Sequence
  Oligonucleotide for detection of SNP TSC0047499
ttttccaacaact

SEQ ID NO: 193085 - DNA, 13 bp, Artificial Sequence
  Oligonucleotide for detection of SNP TSC0047499
agttgtcggaaaa

SEQ ID NO: 193086 - DNA, 13 bp, Artificial Sequence
  Oligonucleotide for detection of SNP TSC0047499
ttttccgacaact

SEQ ID NO: 193087 - DNA, 13 bp, Artificial Sequence
  Oligonucleotide for detection of SNP TSC0047500
ggtttaaataaaa

SEQ ID NO: 193088 - DNA, 13 bp, Artificial Sequence
  Oligonucleotide for detection of SNP TSC0047500
ttttatttaaacc

SEQ ID NO: 193089 - DNA, 13 bp, Artificial Sequence
  Oligonucleotide for detection of SNP TSC0047500
ggtttagataaaa

SEQ ID NO: 193090 - DNA, 13 bp, Artificial Sequence
  Oligonucleotide for detection of SNP TSC0047500
ttttatctaaacc

SEQ ID NO: 193091 - DNA, 13 bp, Artificial Sequence
  Oligonucleotide for detection of SNP TSC0047502
ttggttattatty

SEQ ID NO: 193092 - DNA, 13 bp, Artificial Sequence
  Oligonucleotide for detection of SNP TSC0047502
raataataaccaa

SEQ ID NO: 193093 - DNA, 13 bp, Artificial Sequence
  Oligonucleotide for detection of SNP TSC0047502
ttggttgttatty

SEQ ID NO: 193094 - DNA, 13 bp, Artificial Sequence
  Oligonucleotide for detection of SNP TSC0047502
raataacaaccaa

SEQ ID NO: 193095 - DNA, 13 bp, Artificial Sequence
  Oligonucleotide for detection of SNP TSC0047502
tcggttattatty

SEQ ID NO: 193096 - DNA, 13 bp, Artificial Sequence
  Oligonucleotide for detection of SNP TSC0047502
raataataaccga

SEQ ID NO: 193097 - DNA, 13 bp, Artificial Sequence
  Oligonucleotide for detection of SNP TSC0047502
tcggttgttatty

SEQ ID NO: 193098 - DNA, 13 bp, Artificial Sequence
  Oligonucleotide for detection of SNP TSC0047502
raataacaaccga

SEQ ID NO: 193099 - DNA, 13 bp, Artificial Sequence
  Oligonucleotide for detection of SNP TSC0047502
ttggtcgttatty

SEQ ID NO: 193100 - DNA, 13 bp, Artificial Sequence
  Oligonucleotide for detection of SNP TSC0047502
raataacgaccaa

SEQ ID NO: 193101 - DNA, 13 bp, Artificial Sequence
  Oligonucleotide for detection of SNP TSC0047502
tcggtcgttatty

SEQ ID NO: 193102 - DNA, 13 bp, Artificial Sequence
  Oligonucleotide for detection of SNP TSC0047502
raataacgaccga

SEQ ID NO: 193103 - DNA, 13 bp, Artificial Sequence
  Oligonucleotide for detection of SNP TSC0047502
gagtggtggttgg

SEQ ID NO: 193104 - DNA, 13 bp, Artificial Sequence
  Oligonucleotide for detection of SNP TSC0047502
ccaaccaccactc

SEQ ID NO: 193105 - DNA, 13 bp, Artificial Sequence
  Oligonucleotide for detection of SNP TSC0047502
gagtggtggtcgg

SEQ ID NO: 193106 - DNA, 13 bp, Artificial Sequence
  Oligonucleotide for detection of SNP TSC0047502
ccgaccaccactc

SEQ ID NO: 193107 - DNA, 13 bp, Artificial Sequence
  Oligonucleotide for detection of SNP TSC0047502
gagtggcggttgg

SEQ ID NO: 193108 - DNA, 13 bp, Artificial Sequence
  Oligonucleotide for detection of SNP TSC0047502
ccaaccgccactc

SEQ ID NO: 193109 - DNA, 13 bp, Artificial Sequence
  Oligonucleotide for detection of SNP TSC0047502
gagtggcggtcgg

SEQ ID NO: 193110 - DNA, 13 bp, Artificial Sequence
  Oligonucleotide for detection of SNP TSC0047502
ccgaccgccactc

SEQ ID NO: 193111 - DNA, 13 bp, Artificial Sequence
  Oligonucleotide for detection of SNP TSC0047503
aataggatatatt

SEQ ID NO: 193112 - DNA, 13 bp, Artificial Sequence
  Oligonucleotide for detection of SNP TSC0047503
aatatatcctatt

SEQ ID NO: 193113 - DNA, 13 bp, Artificial Sequence
  Oligonucleotide for detection of SNP TSC0047503
aatagggtatatt

SEQ ID NO: 193114 - DNA, 13 bp, Artificial Sequence
  Oligonucleotide for detection of SNP TSC0047503
aatataccctatt

SEQ ID NO: 193115 - DNA, 13 bp, Artificial Sequence
  Oligonucleotide for detection of SNP TSC0007774
tagaatggagtty

SEQ ID NO: 193116 - DNA, 13 bp, Artificial Sequence
  Oligonucleotide for detection of SNP TSC0007774
raactccattcta

SEQ ID NO: 193117 - DNA, 13 bp, Artificial Sequence
  Oligonucleotide for detection of SNP TSC0007774
tagaacggagtty

SEQ ID NO: 193118 - DNA, 13 bp, Artificial Sequence
  Oligonucleotide for detection of SNP TSC0007774
raactccgttcta

SEQ ID NO: 193119 - DNA, 13 bp, Artificial Sequence
  Oligonucleotide for detection of SNP TSC0047504
taatagtggaaat

SEQ ID NO: 193120 - DNA, 13 bp, Artificial Sequence
  Oligonucleotide for detection of SNP TSC0047504
atttccactatta

SEQ ID NO: 193121 - DNA, 13 bp, Artificial Sequence
  Oligonucleotide for detection of SNP TSC0047504
taatagcggaaat

SEQ ID NO: 193122 - DNA, 13 bp, Artificial Sequence
  Oligonucleotide for detection of SNP TSC0047504
atttccgctatta

SEQ ID NO: 193123 - DNA, 13 bp, Artificial Sequence
  Oligonucleotide for detection of SNP TSC0047504
attttcgttgttg

SEQ ID NO: 193124 - DNA, 13 bp, Artificial Sequence
  Oligonucleotide for detection of SNP TSC0047504
caacaacgaaaat

SEQ ID NO: 193125 - DNA, 13 bp, Artificial Sequence
  Oligonucleotide for detection of SNP TSC0047507
aagttatataatt

SEQ ID NO: 193126 - DNA, 13 bp, Artificial Sequence
  Oligonucleotide for detection of SNP TSC0047507
aattatataactt

SEQ ID NO: 193127 - DNA, 13 bp, Artificial Sequence
  Oligonucleotide for detection of SNP TSC0047507
aagttagataatt

SEQ ID NO: 193128 - DNA, 13 bp, Artificial Sequence
  Oligonucleotide for detection of SNP TSC0047507
aattatctaactt

SEQ ID NO: 193129 - DNA, 13 bp, Artificial Sequence
  Oligonucleotide for detection of SNP TSC0047507
agttatatgattt

SEQ ID NO: 193130 - DNA, 13 bp, Artificial Sequence
  Oligonucleotide for detection of SNP TSC0047507
aaatcatataact

SEQ ID NO: 193131 - DNA, 13 bp, Artificial Sequence
  Oligonucleotide for detection of SNP TSC0047507
agttatttgattt

SEQ ID NO: 193132 - DNA, 13 bp, Artificial Sequence
  Oligonucleotide for detection of SNP TSC0047507
aaatcaaataact

SEQ ID NO: 193133 - DNA, 13 bp, Artificial Sequence
  Oligonucleotide for detection of SNP TSC0047508
ggagataaggtty

SEQ ID NO: 193134 - DNA, 13 bp, Artificial Sequence
  Oligonucleotide for detection of SNP TSC0047508
raaccttatctcc

SEQ ID NO: 193135 - DNA, 13 bp, Artificial Sequence
  Oligonucleotide for detection of SNP TSC0047508
ggagatgaggtty

SEQ ID NO: 193136 - DNA, 13 bp, Artificial Sequence
  Oligonucleotide for detection of SNP TSC0047508
raacctcatctcc

SEQ ID NO: 193137 - DNA, 13 bp, Artificial Sequence
  Oligonucleotide for detection of SNP TSC0047508
ggagacgaggtty

SEQ ID NO: 193138 - DNA, 13 bp, Artificial Sequence
  Oligonucleotide for detection of SNP TSC0047508
raacctcgtctcc

SEQ ID NO: 193139 - DNA, 13 bp, Artificial Sequence
  Oligonucleotide for detection of SNP TSC0047509
tagagtgagaata

SEQ ID NO: 193140 - DNA, 13 bp, Artificial Sequence
  Oligonucleotide for detection of SNP TSC0047509
tattctcactcta

SEQ ID NO: 193141 - DNA, 13 bp, Artificial Sequence
  Oligonucleotide for detection of SNP TSC0047509
tagagtaagaata

SEQ ID NO: 193142 - DNA, 13 bp, Artificial Sequence
  Oligonucleotide for detection of SNP TSC0047509
tattcttactcta

SEQ ID NO: 193143 - DNA, 13 bp, Artificial Sequence
  Oligonucleotide for detection of SNP TSC0047510
tggggatttagtt

SEQ ID NO: 193144 - DNA, 13 bp, Artificial Sequence
  Oligonucleotide for detection of SNP TSC0047510
aactaaatcccca

SEQ ID NO: 193145 - DNA, 13 bp, Artificial Sequence
  Oligonucleotide for detection of SNP TSC0047510
tggggaattagtt

SEQ ID NO: 193146 - DNA, 13 bp, Artificial Sequence
  Oligonucleotide for detection of SNP TSC0047510
aactaattcccca

SEQ ID NO: 193147 - DNA, 13 bp, Artificial Sequence
  Oligonucleotide for detection of SNP TSC0047511
gaggaaaagaagy

SEQ ID NO: 193148 - DNA, 13 bp, Artificial Sequence
  Oligonucleotide for detection of SNP TSC0047511
rcttcttttcctc

SEQ ID NO: 193149 - DNA, 13 bp, Artificial Sequence
  Oligonucleotide for detection of SNP TSC0047511
gaggaatagaagy

SEQ ID NO: 193150 - DNA, 13 bp, Artificial Sequence
  Oligonucleotide for detection of SNP TSC0047511
rcttctattcctc

SEQ ID NO: 193151 - DNA, 13 bp, Artificial Sequence
  Oligonucleotide for detection of SNP TSC0009788
gggaataggattt

SEQ ID NO: 193152 - DNA, 13 bp, Artificial Sequence
  Oligonucleotide for detection of SNP TSC0009788
aaatcctattccc

SEQ ID NO: 193153 - DNA, 13 bp, Artificial Sequence
  Oligonucleotide for detection of SNP TSC0009788
gggaatgggattt

SEQ ID NO: 193154 - DNA, 13 bp, Artificial Sequence
  Oligonucleotide for detection of SNP TSC0009788
aaatcccattccc

SEQ ID NO: 193155 - DNA, 13 bp, Artificial Sequence
  Oligonucleotide for detection of SNP TSC0009788
gggaacgggattt

SEQ ID NO: 193156 - DNA, 13 bp, Artificial Sequence
  Oligonucleotide for detection of SNP TSC0009788
aaatcccgttccc

SEQ ID NO: 193157 - DNA, 13 bp, Artificial Sequence
  Oligonucleotide for detection of SNP TSC0009788
agattttgtttty

SEQ ID NO: 193158 - DNA, 13 bp, Artificial Sequence
  Oligonucleotide for detection of SNP TSC0009788
raaaacaaaatct

SEQ ID NO: 193159 - DNA, 13 bp, Artificial Sequence
  Oligonucleotide for detection of SNP TSC0009788
agatttcgtttty

SEQ ID NO: 193160 - DNA, 13 bp, Artificial Sequence
  Oligonucleotide for detection of SNP TSC0009788
raaaacgaaatct

SEQ ID NO: 193161 - DNA, 13 bp, Artificial Sequence
  Oligonucleotide for detection of SNP TSC0047514
aagatatgttttt

SEQ ID NO: 193162 - DNA, 13 bp, Artificial Sequence
  Oligonucleotide for detection of SNP TSC0047514
aaaaacatatctt

SEQ ID NO: 193163 - DNA, 13 bp, Artificial Sequence
  Oligonucleotide for detection of SNP TSC0047514
aagatacgttttt

SEQ ID NO: 193164 - DNA, 13 bp, Artificial Sequence
  Oligonucleotide for detection of SNP TSC0047514
aaaaacgtatctt

SEQ ID NO: 193165 - DNA, 13 bp, Artificial Sequence
  Oligonucleotide for detection of SNP TSC0047514
aaaggtgtgtttt

SEQ ID NO: 193166 - DNA, 13 bp, Artificial Sequence
  Oligonucleotide for detection of SNP TSC0047514
aaaacacaccttt

SEQ ID NO: 193167 - DNA, 13 bp, Artificial Sequence
  Oligonucleotide for detection of SNP TSC0047514
aaaggtatgtttt

SEQ ID NO: 193168 - DNA, 13 bp, Artificial Sequence
  Oligonucleotide for detection of SNP TSC0047514
aaaacataccttt

SEQ ID NO: 193169 - DNA, 13 bp, Artificial Sequence
  Oligonucleotide for detection of SNP TSC0047514
aaaggcgtgtttt

SEQ ID NO: 193170 - DNA, 13 bp, Artificial Sequence
  Oligonucleotide for detection of SNP TSC0047514
aaaacacgccttt

SEQ ID NO: 193171 - DNA, 13 bp, Artificial Sequence
  Oligonucleotide for detection of SNP TSC0047515
gagagatagaagt

SEQ ID NO: 193172 - DNA, 13 bp, Artificial Sequence
  Oligonucleotide for detection of SNP TSC0047515
acttctatctctc

SEQ ID NO: 193173 - DNA, 13 bp, Artificial Sequence
  Oligonucleotide for detection of SNP TSC0047515
gagagagagaagt

SEQ ID NO: 193174 - DNA, 13 bp, Artificial Sequence
  Oligonucleotide for detection of SNP TSC0047515
acttctctctctc

SEQ ID NO: 193175 - DNA, 13 bp, Artificial Sequence
  Oligonucleotide for detection of SNP TSC0000970
gagataggaattt

SEQ ID NO: 193176 - DNA, 13 bp, Artificial Sequence
  Oligonucleotide for detection of SNP TSC0000970
aaattcctatctc

SEQ ID NO: 193177 - DNA, 13 bp, Artificial Sequence
  Oligonucleotide for detection of SNP TSC0000970
gagataagaattt

SEQ ID NO: 193178 - DNA, 13 bp, Artificial Sequence
  Oligonucleotide for detection of SNP TSC0000970
aaattcttatctc

SEQ ID NO: 193179 - DNA, 13 bp, Artificial Sequence
  Oligonucleotide for detection of SNP TSC0047517
gtggttaaattta

SEQ ID NO: 193180 - DNA, 13 bp, Artificial Sequence
  Oligonucleotide for detection of SNP TSC0047517
taaatttaaccac

SEQ ID NO: 193181 - DNA, 13 bp, Artificial Sequence
  Oligonucleotide for detection of SNP TSC0047517
gtggttgaattta

SEQ ID NO: 193182 - DNA, 13 bp, Artificial Sequence
  Oligonucleotide for detection of SNP TSC0047517
taaattcaaccac

SEQ ID NO: 193183 - DNA, 13 bp, Artificial Sequence
  Oligonucleotide for detection of SNP TSC0008662
atatatatatgtt

SEQ ID NO: 193184 - DNA, 13 bp, Artificial Sequence
  Oligonucleotide for detection of SNP TSC0008662
aacatatatatat

SEQ ID NO: 193185 - DNA, 13 bp, Artificial Sequence
  Oligonucleotide for detection of SNP TSC0008662
atatatgtatgtt

SEQ ID NO: 193186 - DNA, 13 bp, Artificial Sequence
  Oligonucleotide for detection of SNP TSC0008662
aacatacatatat

SEQ ID NO: 193187 - DNA, 13 bp, Artificial Sequence
  Oligonucleotide for detection of SNP TSC0047522
gattatttgagta

SEQ ID NO: 193188 - DNA, 13 bp, Artificial Sequence
  Oligonucleotide for detection of SNP TSC0047522
tactcaaataatc

SEQ ID NO: 193189 - DNA, 13 bp, Artificial Sequence
  Oligonucleotide for detection of SNP TSC0047522
gattatgtgagta

SEQ ID NO: 193190 - DNA, 13 bp, Artificial Sequence
  Oligonucleotide for detection of SNP TSC0047522
tactcacataatc

SEQ ID NO: 193191 - DNA, 13 bp, Artificial Sequence
  Oligonucleotide for detection of SNP TSC0047522
tatttaaataaty

SEQ ID NO: 193192 - DNA, 13 bp, Artificial Sequence
  Oligonucleotide for detection of SNP TSC0047522
rattatttaaata

SEQ ID NO: 193193 - DNA, 13 bp, Artificial Sequence
  Oligonucleotide for detection of SNP TSC0047522
tatttatataaty

SEQ ID NO: 193194 - DNA, 13 bp, Artificial Sequence
  Oligonucleotide for detection of SNP TSC0047522
rattatataaata

SEQ ID NO: 193195 - DNA, 13 bp, Artificial Sequence
  Oligonucleotide for detection of SNP TSC0047525
ggtatatgatttt

SEQ ID NO: 193196 - DNA, 13 bp, Artificial Sequence
  Oligonucleotide for detection of SNP TSC0047525
aaaatcatatacc

SEQ ID NO: 193197 - DNA, 13 bp, Artificial Sequence
  Oligonucleotide for detection of SNP TSC0047525
ggtatacgatttt

SEQ ID NO: 193198 - DNA, 13 bp, Artificial Sequence
  Oligonucleotide for detection of SNP TSC0047525
aaaatcgtatacc

SEQ ID NO: 193199 - DNA, 13 bp, Artificial Sequence
  Oligonucleotide for detection of SNP TSC0047525
aaggttgtataty

SEQ ID NO: 193200 - DNA, 13 bp, Artificial Sequence
  Oligonucleotide for detection of SNP TSC0047525
ratatacaacctt

SEQ ID NO: 193201 - DNA, 13 bp, Artificial Sequence
  Oligonucleotide for detection of SNP TSC0047525
aaggttatataty

SEQ ID NO: 193202 - DNA, 13 bp, Artificial Sequence
  Oligonucleotide for detection of SNP TSC0047525
ratatataacctt

SEQ ID NO: 193203 - DNA, 13 bp, Artificial Sequence
  Oligonucleotide for detection of SNP TSC0047525
aaggtcgtataty

SEQ ID NO: 193204 - DNA, 13 bp, Artificial Sequence
  Oligonucleotide for detection of SNP TSC0047525
ratatacgacctt

SEQ ID NO: 193205 - DNA, 13 bp, Artificial Sequence
  Oligonucleotide for detection of SNP TSC0047526
attataatgtgtt

SEQ ID NO: 193206 - DNA, 13 bp, Artificial Sequence
  Oligonucleotide for detection of SNP TSC0047526
aacacattataat

SEQ ID NO: 193207 - DNA, 13 bp, Artificial Sequence
  Oligonucleotide for detection of SNP TSC0047526
attatagtgtgtt

SEQ ID NO: 193208 - DNA, 13 bp, Artificial Sequence
  Oligonucleotide for detection of SNP TSC0047526
aacacactataat

SEQ ID NO: 193209 - DNA, 13 bp, Artificial Sequence
  Oligonucleotide for detection of SNP TSC0047527
tagataattagga

SEQ ID NO: 193210 - DNA, 13 bp, Artificial Sequence
  Oligonucleotide for detection of SNP TSC0047527
tcctaattatcta

SEQ ID NO: 193211 - DNA, 13 bp, Artificial Sequence
  Oligonucleotide for detection of SNP TSC0047527
tagatagttagga

SEQ ID NO: 193212 - DNA, 13 bp, Artificial Sequence
  Oligonucleotide for detection of SNP TSC0047527
tcctaactatcta

SEQ ID NO: 193213 - DNA, 13 bp, Artificial Sequence
  Oligonucleotide for detection of SNP TSC0047528
aatgaatgttaag

SEQ ID NO: 193214 - DNA, 13 bp, Artificial Sequence
  Oligonucleotide for detection of SNP TSC0047528
cttaacattcatt

SEQ ID NO: 193215 - DNA, 13 bp, Artificial Sequence
  Oligonucleotide for detection of SNP TSC0047528
aatgaacgttaag

SEQ ID NO: 193216 - DNA, 13 bp, Artificial Sequence
  Oligonucleotide for detection of SNP TSC0047528
cttaacgttcatt

SEQ ID NO: 193217 - DNA, 13 bp, Artificial Sequence
  Oligonucleotide for detection of SNP TSC0047529
tagttgataaata

SEQ ID NO: 193218 - DNA, 13 bp, Artificial Sequence
  Oligonucleotide for detection of SNP TSC0047529
tatttatcaacta

SEQ ID NO: 193219 - DNA, 13 bp, Artificial Sequence
  Oligonucleotide for detection of SNP TSC0047529
tatttattaattg

SEQ ID NO: 193220 - DNA, 13 bp, Artificial Sequence
  Oligonucleotide for detection of SNP TSC0047529
caattaataaata

SEQ ID NO: 193221 - DNA, 13 bp, Artificial Sequence
  Oligonucleotide for detection of SNP TSC0047529
tatttaataattg

SEQ ID NO: 193222 - DNA, 13 bp, Artificial Sequence
  Oligonucleotide for detection of SNP TSC0047529
caattattaaata

SEQ ID NO: 193223 - DNA, 13 bp, Artificial Sequence
  Oligonucleotide for detection of SNP TSC0047530
tttgatattgtta

SEQ ID NO: 193224 - DNA, 13 bp, Artificial Sequence
  Oligonucleotide for detection of SNP TSC0047530
taacaatatcaaa

SEQ ID NO: 193225 - DNA, 13 bp, Artificial Sequence
  Oligonucleotide for detection of SNP TSC0047530
tttgacgttgtta

SEQ ID NO: 193226 - DNA, 13 bp, Artificial Sequence
  Oligonucleotide for detection of SNP TSC0047530
taacaacgtcaaa

SEQ ID NO: 193227 - DNA, 13 bp, Artificial Sequence
  Oligonucleotide for detection of SNP TSC0047530
tgatagtgttaga

SEQ ID NO: 193228 - DNA, 13 bp, Artificial Sequence
  Oligonucleotide for detection of SNP TSC0047530
tctaacactatca

SEQ ID NO: 193229 - DNA, 13 bp, Artificial Sequence
  Oligonucleotide for detection of SNP TSC0047530
tgatagcgttaga

SEQ ID NO: 193230 - DNA, 13 bp, Artificial Sequence
  Oligonucleotide for detection of SNP TSC0047530
tctaacgctatca

SEQ ID NO: 193231 - DNA, 13 bp, Artificial Sequence
  Oligonucleotide for detection of SNP TSC0047532
ttggttattgtat

SEQ ID NO: 193232 - DNA, 13 bp, Artificial Sequence
  Oligonucleotide for detection of SNP TSC0047532
atacaataaccaa

SEQ ID NO: 193233 - DNA, 13 bp, Artificial Sequence
  Oligonucleotide for detection of SNP TSC0047532
ttggttgttgtat

SEQ ID NO: 193234 - DNA, 13 bp, Artificial Sequence
  Oligonucleotide for detection of SNP TSC0047532
atacaacaaccaa

SEQ ID NO: 193235 - DNA, 13 bp, Artificial Sequence
  Oligonucleotide for detection of SNP TSC0047532
ttggtcgttgtat

SEQ ID NO: 193236 - DNA, 13 bp, Artificial Sequence
  Oligonucleotide for detection of SNP TSC0047532
atacaacgaccaa

SEQ ID NO: 193237 - DNA, 13 bp, Artificial Sequence
  Oligonucleotide for detection of SNP TSC0047532
atataatggttag

SEQ ID NO: 193238 - DNA, 13 bp, Artificial Sequence
  Oligonucleotide for detection of SNP TSC0047532
ctaaccattatat

SEQ ID NO: 193239 - DNA, 13 bp, Artificial Sequence
  Oligonucleotide for detection of SNP TSC0047532
atataacggttag

SEQ ID NO: 193240 - DNA, 13 bp, Artificial Sequence
  Oligonucleotide for detection of SNP TSC0047532
ctaaccgttatat

SEQ ID NO: 193241 - DNA, 13 bp, Artificial Sequence
  Oligonucleotide for detection of SNP TSC0047538
gttgtaggaaggt

SEQ ID NO: 193242 - DNA, 13 bp, Artificial Sequence
  Oligonucleotide for detection of SNP TSC0047538
accttcctacaac

SEQ ID NO: 193243 - DNA, 13 bp, Artificial Sequence
  Oligonucleotide for detection of SNP TSC0047538
gttgtaagaaggt

SEQ ID NO: 193244 - DNA, 13 bp, Artificial Sequence
  Oligonucleotide for detection of SNP TSC0047538
accttcttacaac

SEQ ID NO: 193245 - DNA, 13 bp, Artificial Sequence
  Oligonucleotide for detection of SNP TSC0047539
tagttaagagatt

SEQ ID NO: 193246 - DNA, 13 bp, Artificial Sequence
  Oligonucleotide for detection of SNP TSC0047539
aatctcttaacta

SEQ ID NO: 193247 - DNA, 13 bp, Artificial Sequence
  Oligonucleotide for detection of SNP TSC0047539
tagttatgagatt

SEQ ID NO: 193248 - DNA, 13 bp, Artificial Sequence
  Oligonucleotide for detection of SNP TSC0047539
aatctcataacta

SEQ ID NO: 193249 - DNA, 13 bp, Artificial Sequence
  Oligonucleotide for detection of SNP TSC0047539
tagttacgagatt

SEQ ID NO: 193250 - DNA, 13 bp, Artificial Sequence
  Oligonucleotide for detection of SNP TSC0047539
aatctcgtaacta

SEQ ID NO: 193251 - DNA, 13 bp, Artificial Sequence
  Oligonucleotide for detection of SNP TSC0047539
aattttttggtta

SEQ ID NO: 193252 - DNA, 13 bp, Artificial Sequence
  Oligonucleotide for detection of SNP TSC0047539
taaccaaaaaatt

SEQ ID NO: 193253 - DNA, 13 bp, Artificial Sequence
  Oligonucleotide for detection of SNP TSC0047539
aattttgtggtta

SEQ ID NO: 193254 - DNA, 13 bp, Artificial Sequence
  Oligonucleotide for detection of SNP TSC0047539
taaccacaaaatt

SEQ ID NO: 193255 - DNA, 13 bp, Artificial Sequence
  Oligonucleotide for detection of SNP TSC0047539
aatttcgtggtta

SEQ ID NO: 193256 - DNA, 13 bp, Artificial Sequence
  Oligonucleotide for detection of SNP TSC0047539
taaccacgaaatt

SEQ ID NO: 193257 - DNA, 13 bp, Artificial Sequence
  Oligonucleotide for detection of SNP TSC0047546
gaaaggtgtaaag

SEQ ID NO: 193258 - DNA, 13 bp, Artificial Sequence
  Oligonucleotide for detection of SNP TSC0047546
ctttacacctttc

SEQ ID NO: 193259 - DNA, 13 bp, Artificial Sequence
  Oligonucleotide for detection of SNP TSC0047546
gaaaggcgtaaag

SEQ ID NO: 193260 - DNA, 13 bp, Artificial Sequence
  Oligonucleotide for detection of SNP TSC0047546
ctttacgcctttc

SEQ ID NO: 193261 - DNA, 13 bp, Artificial Sequence
  Oligonucleotide for detection of SNP TSC0047549
tatatatgtgtat

SEQ ID NO: 193262 - DNA, 13 bp, Artificial Sequence
  Oligonucleotide for detection of SNP TSC0047549
atacacatatata

SEQ ID NO: 193263 - DNA, 13 bp, Artificial Sequence
  Oligonucleotide for detection of SNP TSC0047549
tatataggtgtat

SEQ ID NO: 193264 - DNA, 13 bp, Artificial Sequence
  Oligonucleotide for detection of SNP TSC0047549
atacacctatata

SEQ ID NO: 193265 - DNA, 13 bp, Artificial Sequence
  Oligonucleotide for detection of SNP TSC0047550
attaatatatgga

SEQ ID NO: 193266 - DNA, 13 bp, Artificial Sequence
  Oligonucleotide for detection of SNP TSC0047550
tccatatattaat

SEQ ID NO: 193267 - DNA, 13 bp, Artificial Sequence
  Oligonucleotide for detection of SNP TSC0047550
attaatgtatgga

SEQ ID NO: 193268 - DNA, 13 bp, Artificial Sequence
  Oligonucleotide for detection of SNP TSC0047550
tccatacattaat

SEQ ID NO: 193269 - DNA, 13 bp, Artificial Sequence
  Oligonucleotide for detection of SNP TSC0047550
attaatatacgga

SEQ ID NO: 193270 - DNA, 13 bp, Artificial Sequence
  Oligonucleotide for detection of SNP TSC0047550
tccgtatattaat

SEQ ID NO: 193271 - DNA, 13 bp, Artificial Sequence
  Oligonucleotide for detection of SNP TSC0047550
attaatgtacgga

SEQ ID NO: 193272 - DNA, 13 bp, Artificial Sequence
  Oligonucleotide for detection of SNP TSC0047550
tccgtacattaat

SEQ ID NO: 193273 - DNA, 13 bp, Artificial Sequence
  Oligonucleotide for detection of SNP TSC0047551
tgaggaaatatty

SEQ ID NO: 193274 - DNA, 13 bp, Artificial Sequence
  Oligonucleotide for detection of SNP TSC0047551
raatatttcctca

SEQ ID NO: 193275 - DNA, 13 bp, Artificial Sequence
  Oligonucleotide for detection of SNP TSC0047551
tgaggatatatty

SEQ ID NO: 193276 - DNA, 13 bp, Artificial Sequence
  Oligonucleotide for detection of SNP TSC0047551
raatatatcctca

SEQ ID NO: 193277 - DNA, 13 bp, Artificial Sequence
  Oligonucleotide for detection of SNP TSC0047551
gaatattttttta

SEQ ID NO: 193278 - DNA, 13 bp, Artificial Sequence
  Oligonucleotide for detection of SNP TSC0047551
taaaaaaatattc

SEQ ID NO: 193279 - DNA, 13 bp, Artificial Sequence
  Oligonucleotide for detection of SNP TSC0047551
gaatatattttta

SEQ ID NO: 193280 - DNA, 13 bp, Artificial Sequence
  Oligonucleotide for detection of SNP TSC0047551
taaaaatatattc

SEQ ID NO: 193281 - DNA, 13 bp, Artificial Sequence
  Oligonucleotide for detection of SNP TSC0047552
aagatagttgtaa

SEQ ID NO: 193282 - DNA, 13 bp, Artificial Sequence
  Oligonucleotide for detection of SNP TSC0047552
ttacaactatctt

SEQ ID NO: 193283 - DNA, 13 bp, Artificial Sequence
  Oligonucleotide for detection of SNP TSC0047552
aagataattgtaa

SEQ ID NO: 193284 - DNA, 13 bp, Artificial Sequence
  Oligonucleotide for detection of SNP TSC0047552
ttacaattatctt

SEQ ID NO: 193285 - DNA, 13 bp, Artificial Sequence
  Oligonucleotide for detection of SNP TSC0047553
gtgtatgtgaaga

SEQ ID NO: 193286 - DNA, 13 bp, Artificial Sequence
  Oligonucleotide for detection of SNP TSC0047553
tcttcacatacac

SEQ ID NO: 193287 - DNA, 13 bp, Artificial Sequence
  Oligonucleotide for detection of SNP TSC0047553
gtgtatatgaaga

SEQ ID NO: 193288 - DNA, 13 bp, Artificial Sequence
  Oligonucleotide for detection of SNP TSC0047553
tcttcatatacac

SEQ ID NO: 193289 - DNA, 13 bp, Artificial Sequence
  Oligonucleotide for detection of SNP TSC0047554
aagtatgttataa

SEQ ID NO: 193290 - DNA, 13 bp, Artificial Sequence
  Oligonucleotide for detection of SNP TSC0047554
ttataacatactt

SEQ ID NO: 193291 - DNA, 13 bp, Artificial Sequence
  Oligonucleotide for detection of SNP TSC0047554
aagtatattataa

SEQ ID NO: 193292 - DNA, 13 bp, Artificial Sequence
  Oligonucleotide for detection of SNP TSC0047554
ttataatatactt

SEQ ID NO: 193293 - DNA, 13 bp, Artificial Sequence
  Oligonucleotide for detection of SNP TSC0047555
taaataatatatg

SEQ ID NO: 193294 - DNA, 13 bp, Artificial Sequence
  Oligonucleotide for detection of SNP TSC0047555
catatattattta

SEQ ID NO: 193295 - DNA, 13 bp, Artificial Sequence
  Oligonucleotide for detection of SNP TSC0047555
taaatattatatg

SEQ ID NO: 193296 - DNA, 13 bp, Artificial Sequence
  Oligonucleotide for detection of SNP TSC0047555
catataatattta

SEQ ID NO: 193297 - DNA, 13 bp, Artificial Sequence
  Oligonucleotide for detection of SNP TSC0047555
tatgtgttattta

SEQ ID NO: 193298 - DNA, 13 bp, Artificial Sequence
  Oligonucleotide for detection of SNP TSC0047555
taaataacacata

SEQ ID NO: 193299 - DNA, 13 bp, Artificial Sequence
  Oligonucleotide for detection of SNP TSC0047555
tatgtggtattta

SEQ ID NO: 193300 - DNA, 13 bp, Artificial Sequence
  Oligonucleotide for detection of SNP TSC0047555
taaataccacata

SEQ ID NO: 193301 - DNA, 13 bp, Artificial Sequence
  Oligonucleotide for detection of SNP TSC0047559
ggttaatgtatty

SEQ ID NO: 193302 - DNA, 13 bp, Artificial Sequence
  Oligonucleotide for detection of SNP TSC0047559
raatacattaacc

SEQ ID NO: 193303 - DNA, 13 bp, Artificial Sequence
  Oligonucleotide for detection of SNP TSC0047559
ggttaacgtatty

SEQ ID NO: 193304 - DNA, 13 bp, Artificial Sequence
  Oligonucleotide for detection of SNP TSC0047559
raatacgttaacc

SEQ ID NO: 193305 - DNA, 13 bp, Artificial Sequence
  Oligonucleotide for detection of SNP TSC0047559
gagtatgttaaty

SEQ ID NO: 193306 - DNA, 13 bp, Artificial Sequence
  Oligonucleotide for detection of SNP TSC0047559
rattaacatactc

SEQ ID NO: 193307 - DNA, 13 bp, Artificial Sequence
  Oligonucleotide for detection of SNP TSC0047559
gagtatattaaty

SEQ ID NO: 193308 - DNA, 13 bp, Artificial Sequence
  Oligonucleotide for detection of SNP TSC0047559
rattaatatactc

SEQ ID NO: 193309 - DNA, 13 bp, Artificial Sequence
  Oligonucleotide for detection of SNP TSC0047559
gagtacgttaaty

SEQ ID NO: 193310 - DNA, 13 bp, Artificial Sequence
  Oligonucleotide for detection of SNP TSC0047559
rattaacgtactc

SEQ ID NO: 193311 - DNA, 13 bp, Artificial Sequence
  Oligonucleotide for detection of SNP TSC0047560
ttagaatgtaggg

SEQ ID NO: 193312 - DNA, 13 bp, Artificial Sequence
  Oligonucleotide for detection of SNP TSC0047560
ccctacattctaa

SEQ ID NO: 193313 - DNA, 13 bp, Artificial Sequence
  Oligonucleotide for detection of SNP TSC0047560
ttagaacgtaggg

SEQ ID NO: 193314 - DNA, 13 bp, Artificial Sequence
  Oligonucleotide for detection of SNP TSC0047560
ccctacgttctaa

SEQ ID NO: 193315 - DNA, 13 bp, Artificial Sequence
  Oligonucleotide for detection of SNP TSC0047561
atatggttagtat

SEQ ID NO: 193316 - DNA, 13 bp, Artificial Sequence
  Oligonucleotide for detection of SNP TSC0047561
atactaaccatat

SEQ ID NO: 193317 - DNA, 13 bp, Artificial Sequence
  Oligonucleotide for detection of SNP TSC0047561
atatgggtagtat

SEQ ID NO: 193318 - DNA, 13 bp, Artificial Sequence
  Oligonucleotide for detection of SNP TSC0047561
atactacccatat

SEQ ID NO: 193319 - DNA, 13 bp, Artificial Sequence
  Oligonucleotide for detection of SNP TSC0047561
atattaattatgt

SEQ ID NO: 193320 - DNA, 13 bp, Artificial Sequence
  Oligonucleotide for detection of SNP TSC0047561
acataattaatat

SEQ ID NO: 193321 - DNA, 13 bp, Artificial Sequence
  Oligonucleotide for detection of SNP TSC0047561
atattatttatgt

SEQ ID NO: 193322 - DNA, 13 bp, Artificial Sequence
  Oligonucleotide for detection of SNP TSC0047561
acataaataatat

SEQ ID NO: 193323 - DNA, 13 bp, Artificial Sequence
  Oligonucleotide for detection of SNP TSC0004642
tattatgttgtty

SEQ ID NO: 193324 - DNA, 13 bp, Artificial Sequence
  Oligonucleotide for detection of SNP TSC0004642
raacaacataata

SEQ ID NO: 193325 - DNA, 13 bp, Artificial Sequence
  Oligonucleotide for detection of SNP TSC0047569
atttgttagggaa

SEQ ID NO: 193326 - DNA, 13 bp, Artificial Sequence
  Oligonucleotide for detection of SNP TSC0047569
ttccctaacaaat

SEQ ID NO: 193327 - DNA, 13 bp, Artificial Sequence
  Oligonucleotide for detection of SNP TSC0047569
atttgtgagggaa

SEQ ID NO: 193328 - DNA, 13 bp, Artificial Sequence
  Oligonucleotide for detection of SNP TSC0047569
ttccctcacaaat

SEQ ID NO: 193329 - DNA, 13 bp, Artificial Sequence
  Oligonucleotide for detection of SNP TSC0047569
atttgcgagggaa

SEQ ID NO: 193330 - DNA, 13 bp, Artificial Sequence
  Oligonucleotide for detection of SNP TSC0047569
ttccctcgcaaat

SEQ ID NO: 193331 - DNA, 13 bp, Artificial Sequence
  Oligonucleotide for detection of SNP TSC0047570
tgtgagatagaty

SEQ ID NO: 193332 - DNA, 13 bp, Artificial Sequence
  Oligonucleotide for detection of SNP TSC0047570
ratctatctcaca

SEQ ID NO: 193333 - DNA, 13 bp, Artificial Sequence
  Oligonucleotide for detection of SNP TSC0047570
tgtgaggtagaty

SEQ ID NO: 193334 - DNA, 13 bp, Artificial Sequence
  Oligonucleotide for detection of SNP TSC0047570
ratctacctcaca

SEQ ID NO: 193335 - DNA, 13 bp, Artificial Sequence
  Oligonucleotide for detection of SNP TSC0047571
aatgtgatttatg

SEQ ID NO: 193336 - DNA, 13 bp, Artificial Sequence
  Oligonucleotide for detection of SNP TSC0047571
cataaatcacatt

SEQ ID NO: 193337 - DNA, 13 bp, Artificial Sequence
  Oligonucleotide for detection of SNP TSC0047571
aatgtgttttatg

SEQ ID NO: 193338 - DNA, 13 bp, Artificial Sequence
  Oligonucleotide for detection of SNP TSC0047571
cataaaacacatt

SEQ ID NO: 193339 - DNA, 13 bp, Artificial Sequence
  Oligonucleotide for detection of SNP TSC0047571
tataggttatatt

SEQ ID NO: 193340 - DNA, 13 bp, Artificial Sequence
  Oligonucleotide for detection of SNP TSC0047571
aatataacctata

SEQ ID NO: 193341 - DNA, 13 bp, Artificial Sequence
  Oligonucleotide for detection of SNP TSC0047571
tataggatatatt

SEQ ID NO: 193342 - DNA, 13 bp, Artificial Sequence
  Oligonucleotide for detection of SNP TSC0047571
aatatatcctata

SEQ ID NO: 193343 - DNA, 13 bp, Artificial Sequence
  Oligonucleotide for detection of SNP TSC0047572
ggaaaaatatagt

SEQ ID NO: 193344 - DNA, 13 bp, Artificial Sequence
  Oligonucleotide for detection of SNP TSC0047572
actatatttttcc

SEQ ID NO: 193345 - DNA, 13 bp, Artificial Sequence
  Oligonucleotide for detection of SNP TSC0047572
ggaaaagtatagt

SEQ ID NO: 193346 - DNA, 13 bp, Artificial Sequence
  Oligonucleotide for detection of SNP TSC0047572
actatacttttcc

SEQ ID NO: 193347 - DNA, 13 bp, Artificial Sequence
  Oligonucleotide for detection of SNP TSC0047573
aatattaagttag

SEQ ID NO: 193348 - DNA, 13 bp, Artificial Sequence
  Oligonucleotide for detection of SNP TSC0047573
ctaacttaatatt

SEQ ID NO: 193349 - DNA, 13 bp, Artificial Sequence
  Oligonucleotide for detection of SNP TSC0047573
aatattgagttag

SEQ ID NO: 193350 - DNA, 13 bp, Artificial Sequence
  Oligonucleotide for detection of SNP TSC0047573
ctaactcaatatt

SEQ ID NO: 193351 - DNA, 13 bp, Artificial Sequence
  Oligonucleotide for detection of SNP TSC0047573
aatatcgagttag

SEQ ID NO: 193352 - DNA, 13 bp, Artificial Sequence
  Oligonucleotide for detection of SNP TSC0047573
ctaactcgatatt

SEQ ID NO: 193353 - DNA, 13 bp, Artificial Sequence
  Oligonucleotide for detection of SNP TSC0047573
ttgatttggtgtt

SEQ ID NO: 193354 - DNA, 13 bp, Artificial Sequence
  Oligonucleotide for detection of SNP TSC0047573
aacaccaaatcaa

SEQ ID NO: 193355 - DNA, 13 bp, Artificial Sequence
  Oligonucleotide for detection of SNP TSC0047573
ttgattcggtgtt

SEQ ID NO: 193356 - DNA, 13 bp, Artificial Sequence
  Oligonucleotide for detection of SNP TSC0047573
aacaccgaatcaa

SEQ ID NO: 193357 - DNA, 13 bp, Artificial Sequence
  Oligonucleotide for detection of SNP TSC0047574
ttattttattggt

SEQ ID NO: 193358 - DNA, 13 bp, Artificial Sequence
  Oligonucleotide for detection of SNP TSC0047574
accaataaaataa

SEQ ID NO: 193359 - DNA, 13 bp, Artificial Sequence
  Oligonucleotide for detection of SNP TSC0047574
ttatttgattggt

SEQ ID NO: 193360 - DNA, 13 bp, Artificial Sequence
  Oligonucleotide for detection of SNP TSC0047574
accaatcaaataa

SEQ ID NO: 193361 - DNA, 13 bp, Artificial Sequence
  Oligonucleotide for detection of SNP TSC0047574
ttattcgattggt

SEQ ID NO: 193362 - DNA, 13 bp, Artificial Sequence
  Oligonucleotide for detection of SNP TSC0047574
accaatcgaataa

SEQ ID NO: 193363 - DNA, 13 bp, Artificial Sequence
  Oligonucleotide for detection of SNP TSC0047574
attaatggggtga

SEQ ID NO: 193364 - DNA, 13 bp, Artificial Sequence
  Oligonucleotide for detection of SNP TSC0047574
tcaccccattaat

SEQ ID NO: 193365 - DNA, 13 bp, Artificial Sequence
  Oligonucleotide for detection of SNP TSC0047574
attaattgggtga

SEQ ID NO: 193366 - DNA, 13 bp, Artificial Sequence
  Oligonucleotide for detection of SNP TSC0047574
tcacccaattaat

SEQ ID NO: 193367 - DNA, 13 bp, Artificial Sequence
  Oligonucleotide for detection of SNP TSC0047574
attaatcgggtga

SEQ ID NO: 193368 - DNA, 13 bp, Artificial Sequence
  Oligonucleotide for detection of SNP TSC0047574
tcacccgattaat

SEQ ID NO: 193369 - DNA, 13 bp, Artificial Sequence
  Oligonucleotide for detection of SNP TSC0047575
aaaagtaaaaaay

SEQ ID NO: 193370 - DNA, 13 bp, Artificial Sequence
  Oligonucleotide for detection of SNP TSC0047575
rttttttactttt

SEQ ID NO: 193371 - DNA, 13 bp, Artificial Sequence
  Oligonucleotide for detection of SNP TSC0047575
aaaagtgaaaaay

SEQ ID NO: 193372 - DNA, 13 bp, Artificial Sequence
  Oligonucleotide for detection of SNP TSC0047575
rtttttcactttt

SEQ ID NO: 193373 - DNA, 13 bp, Artificial Sequence
  Oligonucleotide for detection of SNP TSC0047576
ggtgtgtggagtt

SEQ ID NO: 193374 - DNA, 13 bp, Artificial Sequence
  Oligonucleotide for detection of SNP TSC0047576
aactccacacacc

SEQ ID NO: 193375 - DNA, 13 bp, Artificial Sequence
  Oligonucleotide for detection of SNP TSC0047576
ggtgtgcggagtt

SEQ ID NO: 193376 - DNA, 13 bp, Artificial Sequence
  Oligonucleotide for detection of SNP TSC0047576
aactccgcacacc

SEQ ID NO: 193377 - DNA, 13 bp, Artificial Sequence
  Oligonucleotide for detection of SNP TSC0047576
agttttgtataty

SEQ ID NO: 193378 - DNA, 13 bp, Artificial Sequence
  Oligonucleotide for detection of SNP TSC0047576
ratatacaaaact

SEQ ID NO: 193379 - DNA, 13 bp, Artificial Sequence
  Oligonucleotide for detection of SNP TSC0047576
agttttatataty

SEQ ID NO: 193380 - DNA, 13 bp, Artificial Sequence
  Oligonucleotide for detection of SNP TSC0047576
ratatataaaact

SEQ ID NO: 193381 - DNA, 13 bp, Artificial Sequence
  Oligonucleotide for detection of SNP TSC0047576
agtttcgtataty

SEQ ID NO: 193382 - DNA, 13 bp, Artificial Sequence
  Oligonucleotide for detection of SNP TSC0047576
ratatacgaaact

SEQ ID NO: 193383 - DNA, 13 bp, Artificial Sequence
  Oligonucleotide for detection of SNP TSC0047577
aaattatgtggtt

SEQ ID NO: 193384 - DNA, 13 bp, Artificial Sequence
  Oligonucleotide for detection of SNP TSC0047577
aaccacataattt

SEQ ID NO: 193385 - DNA, 13 bp, Artificial Sequence
  Oligonucleotide for detection of SNP TSC0047577
aaattaggtggtt

SEQ ID NO: 193386 - DNA, 13 bp, Artificial Sequence
  Oligonucleotide for detection of SNP TSC0047577
aaccacctaattt

SEQ ID NO: 193387 - DNA, 13 bp, Artificial Sequence
  Oligonucleotide for detection of SNP TSC0047577
agttatttaattt

SEQ ID NO: 193388 - DNA, 13 bp, Artificial Sequence
  Oligonucleotide for detection of SNP TSC0047577
aaattaaataact

SEQ ID NO: 193389 - DNA, 13 bp, Artificial Sequence
  Oligonucleotide for detection of SNP TSC0047578
atattgttatgta

SEQ ID NO: 193390 - DNA, 13 bp, Artificial Sequence
  Oligonucleotide for detection of SNP TSC0047578
tacataacaatat

SEQ ID NO: 193391 - DNA, 13 bp, Artificial Sequence
  Oligonucleotide for detection of SNP TSC0047578
atattgatatgta

SEQ ID NO: 193392 - DNA, 13 bp, Artificial Sequence
  Oligonucleotide for detection of SNP TSC0047578
tacatatcaatat

SEQ ID NO: 193393 - DNA, 13 bp, Artificial Sequence
  Oligonucleotide for detection of SNP TSC0047583
tatgaaaagtttg

SEQ ID NO: 193394 - DNA, 13 bp, Artificial Sequence
  Oligonucleotide for detection of SNP TSC0047583
caaacttttcata

SEQ ID NO: 193395 - DNA, 13 bp, Artificial Sequence
  Oligonucleotide for detection of SNP TSC0047583
tatgaagagtttg

SEQ ID NO: 193396 - DNA, 13 bp, Artificial Sequence
  Oligonucleotide for detection of SNP TSC0047583
caaactcttcata

SEQ ID NO: 193397 - DNA, 13 bp, Artificial Sequence
  Oligonucleotide for detection of SNP TSC0047583
tacgaaaagtttg

SEQ ID NO: 193398 - DNA, 13 bp, Artificial Sequence
  Oligonucleotide for detection of SNP TSC0047583
caaacttttcgta

SEQ ID NO: 193399 - DNA, 13 bp, Artificial Sequence
  Oligonucleotide for detection of SNP TSC0047583
tacgaagagtttg

SEQ ID NO: 193400 - DNA, 13 bp, Artificial Sequence
  Oligonucleotide for detection of SNP TSC0047583
caaactcttcgta

SEQ ID NO: 193401 - DNA, 13 bp, Artificial Sequence
  Oligonucleotide for detection of SNP TSC0047585
tttgtaaaaaaat

SEQ ID NO: 193402 - DNA, 13 bp, Artificial Sequence
  Oligonucleotide for detection of SNP TSC0047585
atttttttacaaa

SEQ ID NO: 193403 - DNA, 13 bp, Artificial Sequence
  Oligonucleotide for detection of SNP TSC0047585
tttgtagaaaaat

SEQ ID NO: 193404 - DNA, 13 bp, Artificial Sequence
  Oligonucleotide for detection of SNP TSC0047585
atttttctacaaa

SEQ ID NO: 193405 - DNA, 13 bp, Artificial Sequence
  Oligonucleotide for detection of SNP TSC0047586
tgataaagtagaa

SEQ ID NO: 193406 - DNA, 13 bp, Artificial Sequence
  Oligonucleotide for detection of SNP TSC0047586
ttctactttatca

SEQ ID NO: 193407 - DNA, 13 bp, Artificial Sequence
  Oligonucleotide for detection of SNP TSC0047586
tgataaggtagaa

SEQ ID NO: 193408 - DNA, 13 bp, Artificial Sequence
  Oligonucleotide for detection of SNP TSC0047586
ttctaccttatca

SEQ ID NO: 193409 - DNA, 13 bp, Artificial Sequence
  Oligonucleotide for detection of SNP TSC0047587
atttttaattgag

SEQ ID NO: 193410 - DNA, 13 bp, Artificial Sequence
  Oligonucleotide for detection of SNP TSC0047587
ctcaattaaaaat

SEQ ID NO: 193411 - DNA, 13 bp, Artificial Sequence
  Oligonucleotide for detection of SNP TSC0047587
attttttattgag

SEQ ID NO: 193412 - DNA, 13 bp, Artificial Sequence
  Oligonucleotide for detection of SNP TSC0047587
ctcaataaaaaat

SEQ ID NO: 193413 - DNA, 13 bp, Artificial Sequence
  Oligonucleotide for detection of SNP TSC0047587
tttagttggaaat

SEQ ID NO: 193414 - DNA, 13 bp, Artificial Sequence
  Oligonucleotide for detection of SNP TSC0047587
atttccaactaaa

SEQ ID NO: 193415 - DNA, 13 bp, Artificial Sequence
  Oligonucleotide for detection of SNP TSC0047587
tttagtgggaaat

SEQ ID NO: 193416 - DNA, 13 bp, Artificial Sequence
  Oligonucleotide for detection of SNP TSC0047587
atttcccactaaa

SEQ ID NO: 193417 - DNA, 13 bp, Artificial Sequence
  Oligonucleotide for detection of SNP TSC0047588
aaacgtatttttt

SEQ ID NO: 193418 - DNA, 13 bp, Artificial Sequence
  Oligonucleotide for detection of SNP TSC0047588
aaaaaatacgttt

SEQ ID NO: 193419 - DNA, 13 bp, Artificial Sequence
  Oligonucleotide for detection of SNP TSC0047588
aaacgtgtttttt

SEQ ID NO: 193420 - DNA, 13 bp, Artificial Sequence
  Oligonucleotide for detection of SNP TSC0047588
aaaaaacacgttt

SEQ ID NO: 193421 - DNA, 13 bp, Artificial Sequence
  Oligonucleotide for detection of SNP TSC0047588
aaatgcgtttttt

SEQ ID NO: 193422 - DNA, 13 bp, Artificial Sequence
  Oligonucleotide for detection of SNP TSC0047588
aaaaaacgcattt

SEQ ID NO: 193423 - DNA, 13 bp, Artificial Sequence
  Oligonucleotide for detection of SNP TSC0047588
aaacgcgtttttt

SEQ ID NO: 193424 - DNA, 13 bp, Artificial Sequence
  Oligonucleotide for detection of SNP TSC0047588
aaaaaacgcgttt

SEQ ID NO: 193425 - DNA, 13 bp, Artificial Sequence
  Oligonucleotide for detection of SNP TSC0047588
aggggatgtgttt

SEQ ID NO: 193426 - DNA, 13 bp, Artificial Sequence
  Oligonucleotide for detection of SNP TSC0047588
aaacacatcccct

SEQ ID NO: 193427 - DNA, 13 bp, Artificial Sequence
  Oligonucleotide for detection of SNP TSC0047588
aggggatgcgttt

SEQ ID NO: 193428 - DNA, 13 bp, Artificial Sequence
  Oligonucleotide for detection of SNP TSC0047588
aaacgcatcccct

SEQ ID NO: 193429 - DNA, 13 bp, Artificial Sequence
  Oligonucleotide for detection of SNP TSC0047588
aggggacgtgttt

SEQ ID NO: 193430 - DNA, 13 bp, Artificial Sequence
  Oligonucleotide for detection of SNP TSC0047588
aaacacgtcccct

SEQ ID NO: 193431 - DNA, 13 bp, Artificial Sequence
  Oligonucleotide for detection of SNP TSC0047588
aggggacgcgttt

SEQ ID NO: 193432 - DNA, 13 bp, Artificial Sequence
  Oligonucleotide for detection of SNP TSC0047588
aaacgcgtcccct

SEQ ID NO: 193433 - DNA, 13 bp, Artificial Sequence
  Oligonucleotide for detection of SNP TSC0047589
aattggaaaaaaa

SEQ ID NO: 193434 - DNA, 13 bp, Artificial Sequence
  Oligonucleotide for detection of SNP TSC0047589
tttttttccaatt

SEQ ID NO: 193435 - DNA, 13 bp, Artificial Sequence
  Oligonucleotide for detection of SNP TSC0047589
aattgggaaaaaa

SEQ ID NO: 193436 - DNA, 13 bp, Artificial Sequence
  Oligonucleotide for detection of SNP TSC0047589
ttttttcccaatt

SEQ ID NO: 193437 - DNA, 13 bp, Artificial Sequence
  Oligonucleotide for detection of SNP TSC0047591
ttagtaaagatag

SEQ ID NO: 193438 - DNA, 13 bp, Artificial Sequence
  Oligonucleotide for detection of SNP TSC0047591
ctatctttactaa

SEQ ID NO: 193439 - DNA, 13 bp, Artificial Sequence
  Oligonucleotide for detection of SNP TSC0047592
gggagattgaggy

SEQ ID NO: 193440 - DNA, 13 bp, Artificial Sequence
  Oligonucleotide for detection of SNP TSC0047592
rcctcaatctccc

SEQ ID NO: 193441 - DNA, 13 bp, Artificial Sequence
  Oligonucleotide for detection of SNP TSC0047592
gggagagtgaggy

SEQ ID NO: 193442 - DNA, 13 bp, Artificial Sequence
  Oligonucleotide for detection of SNP TSC0047592
rcctcactctccc

SEQ ID NO: 193443 - DNA, 13 bp, Artificial Sequence
  Oligonucleotide for detection of SNP TSC0047593
agttttgaaagaa

SEQ ID NO: 193444 - DNA, 13 bp, Artificial Sequence
  Oligonucleotide for detection of SNP TSC0047593
ttctttcaaaact

SEQ ID NO: 193445 - DNA, 13 bp, Artificial Sequence
  Oligonucleotide for detection of SNP TSC0047593
agttttaaaagaa

SEQ ID NO: 193446 - DNA, 13 bp, Artificial Sequence
  Oligonucleotide for detection of SNP TSC0047593
ttcttttaaaact

SEQ ID NO: 193447 - DNA, 13 bp, Artificial Sequence
  Oligonucleotide for detection of SNP TSC0047594
ataatgtttttta

SEQ ID NO: 193448 - DNA, 13 bp, Artificial Sequence
  Oligonucleotide for detection of SNP TSC0047594
taaaaaacattat

SEQ ID NO: 193449 - DNA, 13 bp, Artificial Sequence
  Oligonucleotide for detection of SNP TSC0047594
ataatggttttta

SEQ ID NO: 193450 - DNA, 13 bp, Artificial Sequence
  Oligonucleotide for detection of SNP TSC0047594
taaaaaccattat

SEQ ID NO: 193451 - DNA, 13 bp, Artificial Sequence
  Oligonucleotide for detection of SNP TSC0047594
tgaagaatattgt

SEQ ID NO: 193452 - DNA, 13 bp, Artificial Sequence
  Oligonucleotide for detection of SNP TSC0047594
acaatattcttca

SEQ ID NO: 193453 - DNA, 13 bp, Artificial Sequence
  Oligonucleotide for detection of SNP TSC0047594
tgaagattattgt

SEQ ID NO: 193454 - DNA, 13 bp, Artificial Sequence
  Oligonucleotide for detection of SNP TSC0047594
acaataatcttca

SEQ ID NO: 193455 - DNA, 13 bp, Artificial Sequence
  Oligonucleotide for detection of SNP TSC0047595
ttatgtagtttty

SEQ ID NO: 193456 - DNA, 13 bp, Artificial Sequence
  Oligonucleotide for detection of SNP TSC0047595
raaaactacataa

SEQ ID NO: 193457 - DNA, 13 bp, Artificial Sequence
  Oligonucleotide for detection of SNP TSC0047595
ttacgtagtttty

SEQ ID NO: 193458 - DNA, 13 bp, Artificial Sequence
  Oligonucleotide for detection of SNP TSC0047595
raaaactacgtaa

SEQ ID NO: 193459 - DNA, 13 bp, Artificial Sequence
  Oligonucleotide for detection of SNP TSC0047595
ttacgttgtttty

SEQ ID NO: 193460 - DNA, 13 bp, Artificial Sequence
  Oligonucleotide for detection of SNP TSC0047595
raaaacaacgtaa

SEQ ID NO: 193461 - DNA, 13 bp, Artificial Sequence
  Oligonucleotide for detection of SNP TSC0047595
ttatgtcgtttty

SEQ ID NO: 193462 - DNA, 13 bp, Artificial Sequence
  Oligonucleotide for detection of SNP TSC0047595
raaaacgacataa

SEQ ID NO: 193463 - DNA, 13 bp, Artificial Sequence
  Oligonucleotide for detection of SNP TSC0047595
ttacgtcgtttty

SEQ ID NO: 193464 - DNA, 13 bp, Artificial Sequence
  Oligonucleotide for detection of SNP TSC0047595
raaaacgacgtaa

SEQ ID NO: 193465 - DNA, 13 bp, Artificial Sequence
  Oligonucleotide for detection of SNP TSC0047595
gagaattgtgtga

SEQ ID NO: 193466 - DNA, 13 bp, Artificial Sequence
  Oligonucleotide for detection of SNP TSC0047595
tcacacaattctc

SEQ ID NO: 193467 - DNA, 13 bp, Artificial Sequence
  Oligonucleotide for detection of SNP TSC0047595
gagaatggtgtga

SEQ ID NO: 193468 - DNA, 13 bp, Artificial Sequence
  Oligonucleotide for detection of SNP TSC0047595
tcacaccattctc

SEQ ID NO: 193469 - DNA, 13 bp, Artificial Sequence
  Oligonucleotide for detection of SNP TSC0047595
gagaattgcgtga

SEQ ID NO: 193470 - DNA, 13 bp, Artificial Sequence
  Oligonucleotide for detection of SNP TSC0047595
tcacgcaattctc

SEQ ID NO: 193471 - DNA, 13 bp, Artificial Sequence
  Oligonucleotide for detection of SNP TSC0047595
gagaacggtgtga

SEQ ID NO: 193472 - DNA, 13 bp, Artificial Sequence
  Oligonucleotide for detection of SNP TSC0047595
tcacaccgttctc

SEQ ID NO: 193473 - DNA, 13 bp, Artificial Sequence
  Oligonucleotide for detection of SNP TSC0047595
gagaatggcgtga

SEQ ID NO: 193474 - DNA, 13 bp, Artificial Sequence
  Oligonucleotide for detection of SNP TSC0047595
tcacgccattctc

SEQ ID NO: 193475 - DNA, 13 bp, Artificial Sequence
  Oligonucleotide for detection of SNP TSC0047595
gagaacggcgtga

SEQ ID NO: 193476 - DNA, 13 bp, Artificial Sequence
  Oligonucleotide for detection of SNP TSC0047595
tcacgccgttctc

SEQ ID NO: 193477 - DNA, 13 bp, Artificial Sequence
  Oligonucleotide for detection of SNP TSC0047597
atgatagtgttty

SEQ ID NO: 193478 - DNA, 13 bp, Artificial Sequence
  Oligonucleotide for detection of SNP TSC0047597
raaacactatcat

SEQ ID NO: 193479 - DNA, 13 bp, Artificial Sequence
  Oligonucleotide for detection of SNP TSC0047597
atgataatgttty

SEQ ID NO: 193480 - DNA, 13 bp, Artificial Sequence
  Oligonucleotide for detection of SNP TSC0047597
raaacattatcat

SEQ ID NO: 193481 - DNA, 13 bp, Artificial Sequence
  Oligonucleotide for detection of SNP TSC0047598
tgaagatgagaga

SEQ ID NO: 193482 - DNA, 13 bp, Artificial Sequence
  Oligonucleotide for detection of SNP TSC0047598
tctctcatcttca

SEQ ID NO: 193483 - DNA, 13 bp, Artificial Sequence
  Oligonucleotide for detection of SNP TSC0047598
tgaagacgagaga

SEQ ID NO: 193484 - DNA, 13 bp, Artificial Sequence
  Oligonucleotide for detection of SNP TSC0047598
tctctcgtcttca

SEQ ID NO: 193485 - DNA, 13 bp, Artificial Sequence
  Oligonucleotide for detection of SNP TSC0047599
taatttttgttag

SEQ ID NO: 193486 - DNA, 13 bp, Artificial Sequence
  Oligonucleotide for detection of SNP TSC0047599
ctaacaaaaatta

SEQ ID NO: 193487 - DNA, 13 bp, Artificial Sequence
  Oligonucleotide for detection of SNP TSC0047599
taatttgtgttag

SEQ ID NO: 193488 - DNA, 13 bp, Artificial Sequence
  Oligonucleotide for detection of SNP TSC0047599
ctaacacaaatta

SEQ ID NO: 193489 - DNA, 13 bp, Artificial Sequence
  Oligonucleotide for detection of SNP TSC0047599
ttaataaaaattg

SEQ ID NO: 193490 - DNA, 13 bp, Artificial Sequence
  Oligonucleotide for detection of SNP TSC0047599
caatttttattaa

SEQ ID NO: 193491 - DNA, 13 bp, Artificial Sequence
  Oligonucleotide for detection of SNP TSC0047599
ttaatataaattg

SEQ ID NO: 193492 - DNA, 13 bp, Artificial Sequence
  Oligonucleotide for detection of SNP TSC0047599
caatttatattaa

SEQ ID NO: 193493 - DNA, 13 bp, Artificial Sequence
  Oligonucleotide for detection of SNP TSC0047600
gtagttagagaga

SEQ ID NO: 193494 - DNA, 13 bp, Artificial Sequence
  Oligonucleotide for detection of SNP TSC0047600
tctctctaactac

SEQ ID NO: 193495 - DNA, 13 bp, Artificial Sequence
  Oligonucleotide for detection of SNP TSC0047600
gtagtttgagaga

SEQ ID NO: 193496 - DNA, 13 bp, Artificial Sequence
  Oligonucleotide for detection of SNP TSC0047600
tctctcaaactac

SEQ ID NO: 193497 - DNA, 13 bp, Artificial Sequence
  Oligonucleotide for detection of SNP TSC0047600
gtagttcgagaga

SEQ ID NO: 193498 - DNA, 13 bp, Artificial Sequence
  Oligonucleotide for detection of SNP TSC0047600
tctctcgaactac

SEQ ID NO: 193499 - DNA, 13 bp, Artificial Sequence
  Oligonucleotide for detection of SNP TSC0047600
ttttttgggttgy

SEQ ID NO: 193500 - DNA, 13 bp, Artificial Sequence
  Oligonucleotide for detection of SNP TSC0047600
rcaacccaaaaaa

SEQ ID NO: 193501 - DNA, 13 bp, Artificial Sequence
  Oligonucleotide for detection of SNP TSC0047600
tttttcgggttgy

SEQ ID NO: 193502 - DNA, 13 bp, Artificial Sequence
  Oligonucleotide for detection of SNP TSC0047600
rcaacccgaaaaa

SEQ ID NO: 193503 - DNA, 13 bp, Artificial Sequence
  Oligonucleotide for detection of SNP TSC0047601
aattatgttagtg

SEQ ID NO: 193504 - DNA, 13 bp, Artificial Sequence
  Oligonucleotide for detection of SNP TSC0047601
cactaacataatt

SEQ ID NO: 193505 - DNA, 13 bp, Artificial Sequence
  Oligonucleotide for detection of SNP TSC0047601
aattatattagtg

SEQ ID NO: 193506 - DNA, 13 bp, Artificial Sequence
  Oligonucleotide for detection of SNP TSC0047601
cactaatataatt

SEQ ID NO: 193507 - DNA, 13 bp, Artificial Sequence
  Oligonucleotide for detection of SNP TSC0047603
tttaagttttggt

SEQ ID NO: 193508 - DNA, 13 bp, Artificial Sequence
  Oligonucleotide for detection of SNP TSC0047603
accaaaacttaaa

SEQ ID NO: 193509 - DNA, 13 bp, Artificial Sequence
  Oligonucleotide for detection of SNP TSC0047603
tttaaggtttggt

SEQ ID NO: 193510 - DNA, 13 bp, Artificial Sequence
  Oligonucleotide for detection of SNP TSC0047603
accaaaccttaaa

SEQ ID NO: 193511 - DNA, 13 bp, Artificial Sequence
  Oligonucleotide for detection of SNP TSC0047603
attaaattttgaa

SEQ ID NO: 193512 - DNA, 13 bp, Artificial Sequence
  Oligonucleotide for detection of SNP TSC0047603
ttcaaaatttaat

SEQ ID NO: 193513 - DNA, 13 bp, Artificial Sequence
  Oligonucleotide for detection of SNP TSC0047604
ttttatataatag

SEQ ID NO: 193514 - DNA, 13 bp, Artificial Sequence
  Oligonucleotide for detection of SNP TSC0047604
ctattatataaaa

SEQ ID NO: 193515 - DNA, 13 bp, Artificial Sequence
  Oligonucleotide for detection of SNP TSC0047604
ttttatgtaatag

SEQ ID NO: 193516 - DNA, 13 bp, Artificial Sequence
  Oligonucleotide for detection of SNP TSC0047604
ctattacataaaa

SEQ ID NO: 193517 - DNA, 13 bp, Artificial Sequence
  Oligonucleotide for detection of SNP TSC0047604
ttttacgtaatag

SEQ ID NO: 193518 - DNA, 13 bp, Artificial Sequence
  Oligonucleotide for detection of SNP TSC0047604
ctattacgtaaaa

SEQ ID NO: 193519 - DNA, 13 bp, Artificial Sequence
  Oligonucleotide for detection of SNP TSC0047604
ttgttatgtagga

SEQ ID NO: 193520 - DNA, 13 bp, Artificial Sequence
  Oligonucleotide for detection of SNP TSC0047604
tcctacataacaa

SEQ ID NO: 193521 - DNA, 13 bp, Artificial Sequence
  Oligonucleotide for detection of SNP TSC0047604
ttgttacgtagga

SEQ ID NO: 193522 - DNA, 13 bp, Artificial Sequence
  Oligonucleotide for detection of SNP TSC0047604
tcctacgtaacaa

SEQ ID NO: 193523 - DNA, 13 bp, Artificial Sequence
  Oligonucleotide for detection of SNP TSC0047605
tatagaatagatt

SEQ ID NO: 193524 - DNA, 13 bp, Artificial Sequence
  Oligonucleotide for detection of SNP TSC0047605
aatctattctata

SEQ ID NO: 193525 - DNA, 13 bp, Artificial Sequence
  Oligonucleotide for detection of SNP TSC0047605
tatagattagatt

SEQ ID NO: 193526 - DNA, 13 bp, Artificial Sequence
  Oligonucleotide for detection of SNP TSC0047605
aatctaatctata

SEQ ID NO: 193527 - DNA, 13 bp, Artificial Sequence
  Oligonucleotide for detection of SNP TSC0047605
aatttattttatg

SEQ ID NO: 193528 - DNA, 13 bp, Artificial Sequence
  Oligonucleotide for detection of SNP TSC0047605
cataaaataaatt

SEQ ID NO: 193529 - DNA, 13 bp, Artificial Sequence
  Oligonucleotide for detection of SNP TSC0047608
tgtgaagagtgtg

SEQ ID NO: 193530 - DNA, 13 bp, Artificial Sequence
  Oligonucleotide for detection of SNP TSC0047608
cacactcttcaca

SEQ ID NO: 193531 - DNA, 13 bp, Artificial Sequence
  Oligonucleotide for detection of SNP TSC0047608
tgtgaaaagtgtg

SEQ ID NO: 193532 - DNA, 13 bp, Artificial Sequence
  Oligonucleotide for detection of SNP TSC0047608
cacacttttcaca

SEQ ID NO: 193533 - DNA, 13 bp, Artificial Sequence
  Oligonucleotide for detection of SNP TSC0047609
tttggagttggaa

SEQ ID NO: 193534 - DNA, 13 bp, Artificial Sequence
  Oligonucleotide for detection of SNP TSC0047609
ttccaactccaaa

SEQ ID NO: 193535 - DNA, 13 bp, Artificial Sequence
  Oligonucleotide for detection of SNP TSC0047609
tttggaattggaa

SEQ ID NO: 193536 - DNA, 13 bp, Artificial Sequence
  Oligonucleotide for detection of SNP TSC0047609
ttccaattccaaa

SEQ ID NO: 193537 - DNA, 13 bp, Artificial Sequence
  Oligonucleotide for detection of SNP TSC0047609
ttcggagttggaa

SEQ ID NO: 193538 - DNA, 13 bp, Artificial Sequence
  Oligonucleotide for detection of SNP TSC0047609
ttccaactccgaa

SEQ ID NO: 193539 - DNA, 13 bp, Artificial Sequence
  Oligonucleotide for detection of SNP TSC0047609
ttcggaattggaa

SEQ ID NO: 193540 - DNA, 13 bp, Artificial Sequence
  Oligonucleotide for detection of SNP TSC0047609
ttccaattccgaa

SEQ ID NO: 193541 - DNA, 13 bp, Artificial Sequence
  Oligonucleotide for detection of SNP TSC0047612
tagaggtgtgagt

SEQ ID NO: 193542 - DNA, 13 bp, Artificial Sequence
  Oligonucleotide for detection of SNP TSC0047612
actcacacctcta

SEQ ID NO: 193543 - DNA, 13 bp, Artificial Sequence
  Oligonucleotide for detection of SNP TSC0047612
tagaggcgtgagt

SEQ ID NO: 193544 - DNA, 13 bp, Artificial Sequence
  Oligonucleotide for detection of SNP TSC0047612
actcacgcctcta

SEQ ID NO: 193545 - DNA, 13 bp, Artificial Sequence
  Oligonucleotide for detection of SNP TSC0047612
atttatgttttta

SEQ ID NO: 193546 - DNA, 13 bp, Artificial Sequence
  Oligonucleotide for detection of SNP TSC0047612
taaaaacataaat

SEQ ID NO: 193547 - DNA, 13 bp, Artificial Sequence
  Oligonucleotide for detection of SNP TSC0047612
atttacgttttta

SEQ ID NO: 193548 - DNA, 13 bp, Artificial Sequence
  Oligonucleotide for detection of SNP TSC0047612
taaaaacgtaaat

SEQ ID NO: 193549 - DNA, 13 bp, Artificial Sequence
  Oligonucleotide for detection of SNP TSC0047613
taaatttgtaagg

SEQ ID NO: 193550 - DNA, 13 bp, Artificial Sequence
  Oligonucleotide for detection of SNP TSC0047613
ccttacaaattta

SEQ ID NO: 193551 - DNA, 13 bp, Artificial Sequence
  Oligonucleotide for detection of SNP TSC0047613
taaattcgtaagg

SEQ ID NO: 193552 - DNA, 13 bp, Artificial Sequence
  Oligonucleotide for detection of SNP TSC0047613
ccttacgaattta

SEQ ID NO: 193553 - DNA, 13 bp, Artificial Sequence
  Oligonucleotide for detection of SNP TSC0047613
ttttatgggtttg

SEQ ID NO: 193554 - DNA, 13 bp, Artificial Sequence
  Oligonucleotide for detection of SNP TSC0047613
caaacccataaaa

SEQ ID NO: 193555 - DNA, 13 bp, Artificial Sequence
  Oligonucleotide for detection of SNP TSC0047613
ttttataggtttg

SEQ ID NO: 193556 - DNA, 13 bp, Artificial Sequence
  Oligonucleotide for detection of SNP TSC0047613
caaacctataaaa

SEQ ID NO: 193557 - DNA, 13 bp, Artificial Sequence
  Oligonucleotide for detection of SNP TSC0047613
ttttacgggtttg

SEQ ID NO: 193558 - DNA, 13 bp, Artificial Sequence
  Oligonucleotide for detection of SNP TSC0047613
caaacccgtaaaa

SEQ ID NO: 193559 - DNA, 13 bp, Artificial Sequence
  Oligonucleotide for detection of SNP TSC0047616
attagataaatay

SEQ ID NO: 193560 - DNA, 13 bp, Artificial Sequence
  Oligonucleotide for detection of SNP TSC0047616
rtatttatctaat

SEQ ID NO: 193561 - DNA, 13 bp, Artificial Sequence
  Oligonucleotide for detection of SNP TSC0047616
attagagaaatay

SEQ ID NO: 193562 - DNA, 13 bp, Artificial Sequence
  Oligonucleotide for detection of SNP TSC0047616
rtatttctctaat

SEQ ID NO: 193563 - DNA, 13 bp, Artificial Sequence
  Oligonucleotide for detection of SNP TSC0047616
gtatttatttggt

SEQ ID NO: 193564 - DNA, 13 bp, Artificial Sequence
  Oligonucleotide for detection of SNP TSC0047616
accaaataaatac

SEQ ID NO: 193565 - DNA, 13 bp, Artificial Sequence
  Oligonucleotide for detection of SNP TSC0047616
gtatttttttggt

SEQ ID NO: 193566 - DNA, 13 bp, Artificial Sequence
  Oligonucleotide for detection of SNP TSC0047616
accaaaaaaatac

SEQ ID NO: 193567 - DNA, 13 bp, Artificial Sequence
  Oligonucleotide for detection of SNP TSC0047620
gttttagtattgt

SEQ ID NO: 193568 - DNA, 13 bp, Artificial Sequence
  Oligonucleotide for detection of SNP TSC0047620
acaatactaaaac

SEQ ID NO: 193569 - DNA, 13 bp, Artificial Sequence
  Oligonucleotide for detection of SNP TSC0047620
gttttaatattgt

SEQ ID NO: 193570 - DNA, 13 bp, Artificial Sequence
  Oligonucleotide for detection of SNP TSC0047620
acaatattaaaac

SEQ ID NO: 193571 - DNA, 13 bp, Artificial Sequence
  Oligonucleotide for detection of SNP TSC0047622
ttcggggggttga

SEQ ID NO: 193572 - DNA, 13 bp, Artificial Sequence
  Oligonucleotide for detection of SNP TSC0047622
tcaaccccccgaa

SEQ ID NO: 193573 - DNA, 13 bp, Artificial Sequence
  Oligonucleotide for detection of SNP TSC0047623
tggttttgaattt

SEQ ID NO: 193574 - DNA, 13 bp, Artificial Sequence
  Oligonucleotide for detection of SNP TSC0047623
aaattcaaaacca

SEQ ID NO: 193575 - DNA, 13 bp, Artificial Sequence
  Oligonucleotide for detection of SNP TSC0047623
tggtttcgaattt

SEQ ID NO: 193576 - DNA, 13 bp, Artificial Sequence
  Oligonucleotide for detection of SNP TSC0047623
aaattcgaaacca

SEQ ID NO: 193577 - DNA, 13 bp, Artificial Sequence
  Oligonucleotide for detection of SNP TSC0047625
ttgagattatgag

SEQ ID NO: 193578 - DNA, 13 bp, Artificial Sequence
  Oligonucleotide for detection of SNP TSC0047625
ctcataatctcaa

SEQ ID NO: 193579 - DNA, 13 bp, Artificial Sequence
  Oligonucleotide for detection of SNP TSC0047625
ttgagaatatgag

SEQ ID NO: 193580 - DNA, 13 bp, Artificial Sequence
  Oligonucleotide for detection of SNP TSC0047625
ctcatattctcaa

SEQ ID NO: 193581 - DNA, 13 bp, Artificial Sequence
  Oligonucleotide for detection of SNP TSC0047626
taattttttatat

SEQ ID NO: 193582 - DNA, 13 bp, Artificial Sequence
  Oligonucleotide for detection of SNP TSC0047626
atataaaaaatta

SEQ ID NO: 193583 - DNA, 13 bp, Artificial Sequence
  Oligonucleotide for detection of SNP TSC0047626
taatttgttatat

SEQ ID NO: 193584 - DNA, 13 bp, Artificial Sequence
  Oligonucleotide for detection of SNP TSC0047626
atataacaaatta

SEQ ID NO: 193585 - DNA, 13 bp, Artificial Sequence
  Oligonucleotide for detection of SNP TSC0047626
atatggaaaattg

SEQ ID NO: 193586 - DNA, 13 bp, Artificial Sequence
  Oligonucleotide for detection of SNP TSC0047626
caattttccatat

SEQ ID NO: 193587 - DNA, 13 bp, Artificial Sequence
  Oligonucleotide for detection of SNP TSC0047626
atatggtaaattg

SEQ ID NO: 193588 - DNA, 13 bp, Artificial Sequence
  Oligonucleotide for detection of SNP TSC0047626
caatttaccatat

SEQ ID NO: 193589 - DNA, 13 bp, Artificial Sequence
  Oligonucleotide for detection of SNP TSC0047627
agaaatgtattgt

SEQ ID NO: 193590 - DNA, 13 bp, Artificial Sequence
  Oligonucleotide for detection of SNP TSC0047627
acaatacatttct

SEQ ID NO: 193591 - DNA, 13 bp, Artificial Sequence
  Oligonucleotide for detection of SNP TSC0047627
agaaatatattgt

SEQ ID NO: 193592 - DNA, 13 bp, Artificial Sequence
  Oligonucleotide for detection of SNP TSC0047627
acaatatatttct

SEQ ID NO: 193593 - DNA, 13 bp, Artificial Sequence
  Oligonucleotide for detection of SNP TSC0047627
agaaatgtatcgt

SEQ ID NO: 193594 - DNA, 13 bp, Artificial Sequence
  Oligonucleotide for detection of SNP TSC0047627
acgatacatttct

SEQ ID NO: 193595 - DNA, 13 bp, Artificial Sequence
  Oligonucleotide for detection of SNP TSC0047627
agaaatatatcgt

SEQ ID NO: 193596 - DNA, 13 bp, Artificial Sequence
  Oligonucleotide for detection of SNP TSC0047627
acgatatatttct

SEQ ID NO: 193597 - DNA, 13 bp, Artificial Sequence
  Oligonucleotide for detection of SNP TSC0047628
ggatagatatagt

SEQ ID NO: 193598 - DNA, 13 bp, Artificial Sequence
  Oligonucleotide for detection of SNP TSC0047628
actatatctatcc

SEQ ID NO: 193599 - DNA, 13 bp, Artificial Sequence
  Oligonucleotide for detection of SNP TSC0047628
ggataggtatagt

SEQ ID NO: 193600 - DNA, 13 bp, Artificial Sequence
  Oligonucleotide for detection of SNP TSC0047628
actatacctatcc

SEQ ID NO: 193601 - DNA, 13 bp, Artificial Sequence
  Oligonucleotide for detection of SNP TSC0047632
taatttgatgtta

SEQ ID NO: 193602 - DNA, 13 bp, Artificial Sequence
  Oligonucleotide for detection of SNP TSC0047632
taacatcaaatta

SEQ ID NO: 193603 - DNA, 13 bp, Artificial Sequence
  Oligonucleotide for detection of SNP TSC0047632
taatttaatgtta

SEQ ID NO: 193604 - DNA, 13 bp, Artificial Sequence
  Oligonucleotide for detection of SNP TSC0047632
taacattaaatta

SEQ ID NO: 193605 - DNA, 13 bp, Artificial Sequence
  Oligonucleotide for detection of SNP TSC0047633
gatagaaggaggy

SEQ ID NO: 193606 - DNA, 13 bp, Artificial Sequence
  Oligonucleotide for detection of SNP TSC0047633
rcctccttctatc

SEQ ID NO: 193607 - DNA, 13 bp, Artificial Sequence
  Oligonucleotide for detection of SNP TSC0047633
gatagagggaggy

SEQ ID NO: 193608 - DNA, 13 bp, Artificial Sequence
  Oligonucleotide for detection of SNP TSC0047633
rcctccctctatc

SEQ ID NO: 193609 - DNA, 13 bp, Artificial Sequence
  Oligonucleotide for detection of SNP TSC0047634
gtaaattttttty

SEQ ID NO: 193610 - DNA, 13 bp, Artificial Sequence
  Oligonucleotide for detection of SNP TSC0047634
raaaaaaatttac

SEQ ID NO: 193611 - DNA, 13 bp, Artificial Sequence
  Oligonucleotide for detection of SNP TSC0047634
gagaaatgtttgy

SEQ ID NO: 193612 - DNA, 13 bp, Artificial Sequence
  Oligonucleotide for detection of SNP TSC0047634
rcaaacatttctc

SEQ ID NO: 193613 - DNA, 13 bp, Artificial Sequence
  Oligonucleotide for detection of SNP TSC0047634
gagaaaggtttgy

SEQ ID NO: 193614 - DNA, 13 bp, Artificial Sequence
  Oligonucleotide for detection of SNP TSC0047634
rcaaacctttctc

SEQ ID NO: 193615 - DNA, 13 bp, Artificial Sequence
  Oligonucleotide for detection of SNP TSC0047635
aataaattttaaa

SEQ ID NO: 193616 - DNA, 13 bp, Artificial Sequence
  Oligonucleotide for detection of SNP TSC0047635
tttaaaatttatt

SEQ ID NO: 193617 - DNA, 13 bp, Artificial Sequence
  Oligonucleotide for detection of SNP TSC0047635
aataaagtttaaa

SEQ ID NO: 193618 - DNA, 13 bp, Artificial Sequence
  Oligonucleotide for detection of SNP TSC0047635
tttaaactttatt

SEQ ID NO: 193619 - DNA, 13 bp, Artificial Sequence
  Oligonucleotide for detection of SNP TSC0047635
tttggggtttgtt

SEQ ID NO: 193620 - DNA, 13 bp, Artificial Sequence
  Oligonucleotide for detection of SNP TSC0047635
aacaaaccccaaa

SEQ ID NO: 193621 - DNA, 13 bp, Artificial Sequence
  Oligonucleotide for detection of SNP TSC0047635
tttgggttttgtt

SEQ ID NO: 193622 - DNA, 13 bp, Artificial Sequence
  Oligonucleotide for detection of SNP TSC0047635
aacaaaacccaaa

SEQ ID NO: 193623 - DNA, 13 bp, Artificial Sequence
  Oligonucleotide for detection of SNP TSC0007172
agttatttgtaat

SEQ ID NO: 193624 - DNA, 13 bp, Artificial Sequence
  Oligonucleotide for detection of SNP TSC0007172
attacaaataact

SEQ ID NO: 193625 - DNA, 13 bp, Artificial Sequence
  Oligonucleotide for detection of SNP TSC0007172
agttatgtgtaat

SEQ ID NO: 193626 - DNA, 13 bp, Artificial Sequence
  Oligonucleotide for detection of SNP TSC0007172
attacacataact

SEQ ID NO: 193627 - DNA, 13 bp, Artificial Sequence
  Oligonucleotide for detection of SNP TSC0007172
agttacgtgtaat

SEQ ID NO: 193628 - DNA, 13 bp, Artificial Sequence
  Oligonucleotide for detection of SNP TSC0007172
attacacgtaact

SEQ ID NO: 193629 - DNA, 13 bp, Artificial Sequence
  Oligonucleotide for detection of SNP TSC0007172
attataggtgatt

SEQ ID NO: 193630 - DNA, 13 bp, Artificial Sequence
  Oligonucleotide for detection of SNP TSC0007172
aatcacctataat

SEQ ID NO: 193631 - DNA, 13 bp, Artificial Sequence
  Oligonucleotide for detection of SNP TSC0007172
attatatgtgatt

SEQ ID NO: 193632 - DNA, 13 bp, Artificial Sequence
  Oligonucleotide for detection of SNP TSC0007172
aatcacatataat

SEQ ID NO: 193633 - DNA, 13 bp, Artificial Sequence
  Oligonucleotide for detection of SNP TSC0007172
attatacgtgatt

SEQ ID NO: 193634 - DNA, 13 bp, Artificial Sequence
  Oligonucleotide for detection of SNP TSC0007172
aatcacgtataat

SEQ ID NO: 193635 - DNA, 13 bp, Artificial Sequence
  Oligonucleotide for detection of SNP TSC0047640
agatgatgtattt

SEQ ID NO: 193636 - DNA, 13 bp, Artificial Sequence
  Oligonucleotide for detection of SNP TSC0047640
aaatacatcatct

SEQ ID NO: 193637 - DNA, 13 bp, Artificial Sequence
  Oligonucleotide for detection of SNP TSC0047640
agatgaggtattt

SEQ ID NO: 193638 - DNA, 13 bp, Artificial Sequence
  Oligonucleotide for detection of SNP TSC0047640
aaatacctcatct

SEQ ID NO: 193639 - DNA, 13 bp, Artificial Sequence
  Oligonucleotide for detection of SNP TSC0047640
aaatatattattt

SEQ ID NO: 193640 - DNA, 13 bp, Artificial Sequence
  Oligonucleotide for detection of SNP TSC0047640
aaataatatattt

SEQ ID NO: 193641 - DNA, 13 bp, Artificial Sequence
  Oligonucleotide for detection of SNP TSC0047640
aaatattttattt

SEQ ID NO: 193642 - DNA, 13 bp, Artificial Sequence
  Oligonucleotide for detection of SNP TSC0047640
aaataaaatattt

SEQ ID NO: 193643 - DNA, 13 bp, Artificial Sequence
  Oligonucleotide for detection of SNP TSC0047641
gtaggttgggttg

SEQ ID NO: 193644 - DNA, 13 bp, Artificial Sequence
  Oligonucleotide for detection of SNP TSC0047641
caacccaacctac

SEQ ID NO: 193645 - DNA, 13 bp, Artificial Sequence
  Oligonucleotide for detection of SNP TSC0047641
gtaggtcgggttg

SEQ ID NO: 193646 - DNA, 13 bp, Artificial Sequence
  Oligonucleotide for detection of SNP TSC0047641
caacccgacctac

SEQ ID NO: 193647 - DNA, 13 bp, Artificial Sequence
  Oligonucleotide for detection of SNP TSC0047642
atttttatggaaa

SEQ ID NO: 193648 - DNA, 13 bp, Artificial Sequence
  Oligonucleotide for detection of SNP TSC0047642
tttccataaaaat

SEQ ID NO: 193649 - DNA, 13 bp, Artificial Sequence
  Oligonucleotide for detection of SNP TSC0047642
atttttgtggaaa

SEQ ID NO: 193650 - DNA, 13 bp, Artificial Sequence
  Oligonucleotide for detection of SNP TSC0047642
tttccacaaaaat

SEQ ID NO: 193651 - DNA, 13 bp, Artificial Sequence
  Oligonucleotide for detection of SNP TSC0047642
attttcgtggaaa

SEQ ID NO: 193652 - DNA, 13 bp, Artificial Sequence
  Oligonucleotide for detection of SNP TSC0047642
tttccacgaaaat

SEQ ID NO: 193653 - DNA, 13 bp, Artificial Sequence
  Oligonucleotide for detection of SNP TSC0047642
tttttatggaagt

SEQ ID NO: 193654 - DNA, 13 bp, Artificial Sequence
  Oligonucleotide for detection of SNP TSC0047642
acttccataaaaa

SEQ ID NO: 193655 - DNA, 13 bp, Artificial Sequence
  Oligonucleotide for detection of SNP TSC0047642
tttttacggaagt

SEQ ID NO: 193656 - DNA, 13 bp, Artificial Sequence
  Oligonucleotide for detection of SNP TSC0047642
acttccgtaaaaa

SEQ ID NO: 193657 - DNA, 13 bp, Artificial Sequence
  Oligonucleotide for detection of SNP TSC0047644
atttgtgttttaa

SEQ ID NO: 193658 - DNA, 13 bp, Artificial Sequence
  Oligonucleotide for detection of SNP TSC0047644
ttaaaacacaaat

SEQ ID NO: 193659 - DNA, 13 bp, Artificial Sequence
  Oligonucleotide for detection of SNP TSC0047644
attcgtattttaa

SEQ ID NO: 193660 - DNA, 13 bp, Artificial Sequence
  Oligonucleotide for detection of SNP TSC0047644
ttaaaatacgaat

SEQ ID NO: 193661 - DNA, 13 bp, Artificial Sequence
  Oligonucleotide for detection of SNP TSC0047644
attcgtgttttaa

SEQ ID NO: 193662 - DNA, 13 bp, Artificial Sequence
  Oligonucleotide for detection of SNP TSC0047644
ttaaaacacgaat

SEQ ID NO: 193663 - DNA, 13 bp, Artificial Sequence
  Oligonucleotide for detection of SNP TSC0047644
atttgcgttttaa

SEQ ID NO: 193664 - DNA, 13 bp, Artificial Sequence
  Oligonucleotide for detection of SNP TSC0047644
ttaaaacgcaaat

SEQ ID NO: 193665 - DNA, 13 bp, Artificial Sequence
  Oligonucleotide for detection of SNP TSC0047644
attcgcgttttaa

SEQ ID NO: 193666 - DNA, 13 bp, Artificial Sequence
  Oligonucleotide for detection of SNP TSC0047644
ttaaaacgcgaat

SEQ ID NO: 193667 - DNA, 13 bp, Artificial Sequence
  Oligonucleotide for detection of SNP TSC0047644
ttaagatgtgagt

SEQ ID NO: 193668 - DNA, 13 bp, Artificial Sequence
  Oligonucleotide for detection of SNP TSC0047644
actcacatcttaa

SEQ ID NO: 193669 - DNA, 13 bp, Artificial Sequence
  Oligonucleotide for detection of SNP TSC0047644
ttaagatgcgagt

SEQ ID NO: 193670 - DNA, 13 bp, Artificial Sequence
  Oligonucleotide for detection of SNP TSC0047644
actcgcatcttaa

SEQ ID NO: 193671 - DNA, 13 bp, Artificial Sequence
  Oligonucleotide for detection of SNP TSC0047644
ttaagacgtgagt

SEQ ID NO: 193672 - DNA, 13 bp, Artificial Sequence
  Oligonucleotide for detection of SNP TSC0047644
actcacgtcttaa

SEQ ID NO: 193673 - DNA, 13 bp, Artificial Sequence
  Oligonucleotide for detection of SNP TSC0047644
ttaagacgcgagt

SEQ ID NO: 193674 - DNA, 13 bp, Artificial Sequence
  Oligonucleotide for detection of SNP TSC0047644
actcgcgtcttaa

SEQ ID NO: 193675 - DNA, 13 bp, Artificial Sequence
  Oligonucleotide for detection of SNP TSC0047645
aaggtttgagagg

SEQ ID NO: 193676 - DNA, 13 bp, Artificial Sequence
  Oligonucleotide for detection of SNP TSC0047645
cctctcaaacctt

SEQ ID NO: 193677 - DNA, 13 bp, Artificial Sequence
  Oligonucleotide for detection of SNP TSC0047645
aaggttcgagagg

SEQ ID NO: 193678 - DNA, 13 bp, Artificial Sequence
  Oligonucleotide for detection of SNP TSC0047645
cctctcgaacctt

SEQ ID NO: 193679 - DNA, 13 bp, Artificial Sequence
  Oligonucleotide for detection of SNP TSC0047646
gaggttaagagay

SEQ ID NO: 193680 - DNA, 13 bp, Artificial Sequence
  Oligonucleotide for detection of SNP TSC0047646
rtctcttaacctc

SEQ ID NO: 193681 - DNA, 13 bp, Artificial Sequence
  Oligonucleotide for detection of SNP TSC0047646
gaggtttagagay

SEQ ID NO: 193682 - DNA, 13 bp, Artificial Sequence
  Oligonucleotide for detection of SNP TSC0047646
rtctctaaacctc

SEQ ID NO: 193683 - DNA, 13 bp, Artificial Sequence
  Oligonucleotide for detection of SNP TSC0047646
gttttttagttty

SEQ ID NO: 193684 - DNA, 13 bp, Artificial Sequence
  Oligonucleotide for detection of SNP TSC0047646
raaactaaaaaac

SEQ ID NO: 193685 - DNA, 13 bp, Artificial Sequence
  Oligonucleotide for detection of SNP TSC0047646
gtttttgagttty

SEQ ID NO: 193686 - DNA, 13 bp, Artificial Sequence
  Oligonucleotide for detection of SNP TSC0047646
raaactcaaaaac

SEQ ID NO: 193687 - DNA, 13 bp, Artificial Sequence
  Oligonucleotide for detection of SNP TSC0047647
ttttacgtgttag

SEQ ID NO: 193688 - DNA, 13 bp, Artificial Sequence
  Oligonucleotide for detection of SNP TSC0047647
ctaacacgtaaaa

SEQ ID NO: 193689 - DNA, 13 bp, Artificial Sequence
  Oligonucleotide for detection of SNP TSC0047647
ttgatatgtaagg

SEQ ID NO: 193690 - DNA, 13 bp, Artificial Sequence
  Oligonucleotide for detection of SNP TSC0047647
ccttacatatcaa

SEQ ID NO: 193691 - DNA, 13 bp, Artificial Sequence
  Oligonucleotide for detection of SNP TSC0047647
ttgatacgtaagg

SEQ ID NO: 193692 - DNA, 13 bp, Artificial Sequence
  Oligonucleotide for detection of SNP TSC0047647
ccttacgtatcaa

SEQ ID NO: 193693 - DNA, 13 bp, Artificial Sequence
  Oligonucleotide for detection of SNP TSC0047648
ggtagaaagggtg

SEQ ID NO: 193694 - DNA, 13 bp, Artificial Sequence
  Oligonucleotide for detection of SNP TSC0047648
caccctttctacc

SEQ ID NO: 193695 - DNA, 13 bp, Artificial Sequence
  Oligonucleotide for detection of SNP TSC0047648
ggtagatagggtg

SEQ ID NO: 193696 - DNA, 13 bp, Artificial Sequence
  Oligonucleotide for detection of SNP TSC0047648
caccctatctacc

SEQ ID NO: 193697 - DNA, 13 bp, Artificial Sequence
  Oligonucleotide for detection of SNP TSC0047648
tattttttttgty

SEQ ID NO: 193698 - DNA, 13 bp, Artificial Sequence
  Oligonucleotide for detection of SNP TSC0047648
racaaaaaaaata

SEQ ID NO: 193699 - DNA, 13 bp, Artificial Sequence
  Oligonucleotide for detection of SNP TSC0047648
tattttgtttgty

SEQ ID NO: 193700 - DNA, 13 bp, Artificial Sequence
  Oligonucleotide for detection of SNP TSC0047648
racaaacaaaata

SEQ ID NO: 193701 - DNA, 13 bp, Artificial Sequence
  Oligonucleotide for detection of SNP TSC0047649
ttgttaggggagg

SEQ ID NO: 193702 - DNA, 13 bp, Artificial Sequence
  Oligonucleotide for detection of SNP TSC0047649
cctcccctaacaa

SEQ ID NO: 193703 - DNA, 13 bp, Artificial Sequence
  Oligonucleotide for detection of SNP TSC0047649
ttgttaagggagg

SEQ ID NO: 193704 - DNA, 13 bp, Artificial Sequence
  Oligonucleotide for detection of SNP TSC0047649
cctcccttaacaa

SEQ ID NO: 193705 - DNA, 13 bp, Artificial Sequence
  Oligonucleotide for detection of SNP TSC0047650
ttaaatattgtgg

SEQ ID NO: 193706 - DNA, 13 bp, Artificial Sequence
  Oligonucleotide for detection of SNP TSC0047650
ccacaatatttaa

SEQ ID NO: 193707 - DNA, 13 bp, Artificial Sequence
  Oligonucleotide for detection of SNP TSC0047650
ttaaatgttgtgg

SEQ ID NO: 193708 - DNA, 13 bp, Artificial Sequence
  Oligonucleotide for detection of SNP TSC0047650
ccacaacatttaa

SEQ ID NO: 193709 - DNA, 13 bp, Artificial Sequence
  Oligonucleotide for detection of SNP TSC0047650
ttaaacgttgtgg

SEQ ID NO: 193710 - DNA, 13 bp, Artificial Sequence
  Oligonucleotide for detection of SNP TSC0047650
ccacaacgtttaa

SEQ ID NO: 193711 - DNA, 13 bp, Artificial Sequence
  Oligonucleotide for detection of SNP TSC0047651
ttgtatataaatt

SEQ ID NO: 193712 - DNA, 13 bp, Artificial Sequence
  Oligonucleotide for detection of SNP TSC0047651
aatttatatacaa

SEQ ID NO: 193713 - DNA, 13 bp, Artificial Sequence
  Oligonucleotide for detection of SNP TSC0047651
ttgtatgtaaatt

SEQ ID NO: 193714 - DNA, 13 bp, Artificial Sequence
  Oligonucleotide for detection of SNP TSC0047651
aatttacatacaa

SEQ ID NO: 193715 - DNA, 13 bp, Artificial Sequence
  Oligonucleotide for detection of SNP TSC0047652
tgtgatgtgtttg

SEQ ID NO: 193716 - DNA, 13 bp, Artificial Sequence
  Oligonucleotide for detection of SNP TSC0047652
caaacacatcaca

SEQ ID NO: 193717 - DNA, 13 bp, Artificial Sequence
  Oligonucleotide for detection of SNP TSC0047652
tgtgatatgtttg

SEQ ID NO: 193718 - DNA, 13 bp, Artificial Sequence
  Oligonucleotide for detection of SNP TSC0047652
caaacatatcaca

SEQ ID NO: 193719 - DNA, 13 bp, Artificial Sequence
  Oligonucleotide for detection of SNP TSC0000462
tttttgggttgtt

SEQ ID NO: 193720 - DNA, 13 bp, Artificial Sequence
  Oligonucleotide for detection of SNP TSC0000462
aacaacccaaaaa

SEQ ID NO: 193721 - DNA, 13 bp, Artificial Sequence
  Oligonucleotide for detection of SNP TSC0000462
tttttgcgttgtt

SEQ ID NO: 193722 - DNA, 13 bp, Artificial Sequence
  Oligonucleotide for detection of SNP TSC0000462
aacaacgcaaaaa

SEQ ID NO: 193723 - DNA, 13 bp, Artificial Sequence
  Oligonucleotide for detection of SNP TSC0000462
aataatgtagaaa

SEQ ID NO: 193724 - DNA, 13 bp, Artificial Sequence
  Oligonucleotide for detection of SNP TSC0000462
tttctacattatt

SEQ ID NO: 193725 - DNA, 13 bp, Artificial Sequence
  Oligonucleotide for detection of SNP TSC0000462
aataatttagaaa

SEQ ID NO: 193726 - DNA, 13 bp, Artificial Sequence
  Oligonucleotide for detection of SNP TSC0000462
tttctaaattatt

SEQ ID NO: 193727 - DNA, 13 bp, Artificial Sequence
  Oligonucleotide for detection of SNP TSC0000462
aataacgtagaaa

SEQ ID NO: 193728 - DNA, 13 bp, Artificial Sequence
  Oligonucleotide for detection of SNP TSC0000462
tttctacgttatt

SEQ ID NO: 193729 - DNA, 13 bp, Artificial Sequence
  Oligonucleotide for detection of SNP TSC0000463
atataatggttgg

SEQ ID NO: 193730 - DNA, 13 bp, Artificial Sequence
  Oligonucleotide for detection of SNP TSC0000463
ccaaccattatat

SEQ ID NO: 193731 - DNA, 13 bp, Artificial Sequence
  Oligonucleotide for detection of SNP TSC0000463
atataacggttgg

SEQ ID NO: 193732 - DNA, 13 bp, Artificial Sequence
  Oligonucleotide for detection of SNP TSC0000463
ccaaccgttatat

SEQ ID NO: 193733 - DNA, 13 bp, Artificial Sequence
  Oligonucleotide for detection of SNP TSC0000463
ttagttgttgtat

SEQ ID NO: 193734 - DNA, 13 bp, Artificial Sequence
  Oligonucleotide for detection of SNP TSC0000463
atacaacaactaa

SEQ ID NO: 193735 - DNA, 13 bp, Artificial Sequence
  Oligonucleotide for detection of SNP TSC0000463
ttagttattgtat

SEQ ID NO: 193736 - DNA, 13 bp, Artificial Sequence
  Oligonucleotide for detection of SNP TSC0000463
atacaataactaa

SEQ ID NO: 193737 - DNA, 13 bp, Artificial Sequence
  Oligonucleotide for detection of SNP TSC0000463
ttagtcgttgtat

SEQ ID NO: 193738 - DNA, 13 bp, Artificial Sequence
  Oligonucleotide for detection of SNP TSC0000463
atacaacgactaa

SEQ ID NO: 193739 - DNA, 13 bp, Artificial Sequence
  Oligonucleotide for detection of SNP TSC0007262
gaattttgtatty

SEQ ID NO: 193740 - DNA, 13 bp, Artificial Sequence
  Oligonucleotide for detection of SNP TSC0007262
raatacaaaattc

SEQ ID NO: 193741 - DNA, 13 bp, Artificial Sequence
  Oligonucleotide for detection of SNP TSC0007262
gaatttcgtatty

SEQ ID NO: 193742 - DNA, 13 bp, Artificial Sequence
  Oligonucleotide for detection of SNP TSC0007262
raatacgaaattc

SEQ ID NO: 193743 - DNA, 13 bp, Artificial Sequence
  Oligonucleotide for detection of SNP TSC0007262
ggatatgaaatty

SEQ ID NO: 193744 - DNA, 13 bp, Artificial Sequence
  Oligonucleotide for detection of SNP TSC0007262
raatttcatatcc

SEQ ID NO: 193745 - DNA, 13 bp, Artificial Sequence
  Oligonucleotide for detection of SNP TSC0007262
ggatataaaatty

SEQ ID NO: 193746 - DNA, 13 bp, Artificial Sequence
  Oligonucleotide for detection of SNP TSC0007262
raattttatatcc

SEQ ID NO: 193747 - DNA, 13 bp, Artificial Sequence
  Oligonucleotide for detection of SNP TSC0007262
ggatacgaaatty

SEQ ID NO: 193748 - DNA, 13 bp, Artificial Sequence
  Oligonucleotide for detection of SNP TSC0007262
raatttcgtatcc

SEQ ID NO: 193749 - DNA, 13 bp, Artificial Sequence
  Oligonucleotide for detection of SNP TSC0047656
gtttttgggtttt

SEQ ID NO: 193750 - DNA, 13 bp, Artificial Sequence
  Oligonucleotide for detection of SNP TSC0047656
aaaacccaaaaac

SEQ ID NO: 193751 - DNA, 13 bp, Artificial Sequence
  Oligonucleotide for detection of SNP TSC0047656
gtttttaggtttt

SEQ ID NO: 193752 - DNA, 13 bp, Artificial Sequence
  Oligonucleotide for detection of SNP TSC0047656
aaaacctaaaaac

SEQ ID NO: 193753 - DNA, 13 bp, Artificial Sequence
  Oligonucleotide for detection of SNP TSC0047657
ttgtagtgtttta

SEQ ID NO: 193754 - DNA, 13 bp, Artificial Sequence
  Oligonucleotide for detection of SNP TSC0047657
taaaacactacaa

SEQ ID NO: 193755 - DNA, 13 bp, Artificial Sequence
  Oligonucleotide for detection of SNP TSC0047657
ttgtagggtttta

SEQ ID NO: 193756 - DNA, 13 bp, Artificial Sequence
  Oligonucleotide for detection of SNP TSC0047657
taaaaccctacaa

SEQ ID NO: 193757 - DNA, 13 bp, Artificial Sequence
  Oligonucleotide for detection of SNP TSC0047657
taggatattgtaa

SEQ ID NO: 193758 - DNA, 13 bp, Artificial Sequence
  Oligonucleotide for detection of SNP TSC0047657
ttacaatatccta

SEQ ID NO: 193759 - DNA, 13 bp, Artificial Sequence
  Oligonucleotide for detection of SNP TSC0047657
taggattttgtaa

SEQ ID NO: 193760 - DNA, 13 bp, Artificial Sequence
  Oligonucleotide for detection of SNP TSC0047657
ttacaaaatccta

SEQ ID NO: 193761 - DNA, 13 bp, Artificial Sequence
  Oligonucleotide for detection of SNP TSC0047658
aaaagggtaaaay

SEQ ID NO: 193762 - DNA, 13 bp, Artificial Sequence
  Oligonucleotide for detection of SNP TSC0047658
rttttaccctttt

SEQ ID NO: 193763 - DNA, 13 bp, Artificial Sequence
  Oligonucleotide for detection of SNP TSC0047658
aaaaggataaaay

SEQ ID NO: 193764 - DNA, 13 bp, Artificial Sequence
  Oligonucleotide for detection of SNP TSC0047658
rttttatcctttt

SEQ ID NO: 193765 - DNA, 13 bp, Artificial Sequence
  Oligonucleotide for detection of SNP TSC0047659
gttattagtaaaa

SEQ ID NO: 193766 - DNA, 13 bp, Artificial Sequence
  Oligonucleotide for detection of SNP TSC0047659
ttttactaataac

SEQ ID NO: 193767 - DNA, 13 bp, Artificial Sequence
  Oligonucleotide for detection of SNP TSC0047659
gttattggtaaaa

SEQ ID NO: 193768 - DNA, 13 bp, Artificial Sequence
  Oligonucleotide for detection of SNP TSC0047659
ttttaccaataac

SEQ ID NO: 193769 - DNA, 13 bp, Artificial Sequence
  Oligonucleotide for detection of SNP TSC0047659
gttatcggtaaaa

SEQ ID NO: 193770 - DNA, 13 bp, Artificial Sequence
  Oligonucleotide for detection of SNP TSC0047659
ttttaccgataac

SEQ ID NO: 193771 - DNA, 13 bp, Artificial Sequence
  Oligonucleotide for detection of SNP TSC0047659
ttttgttgatagy

SEQ ID NO: 193772 - DNA, 13 bp, Artificial Sequence
  Oligonucleotide for detection of SNP TSC0047659
rctatcaacaaaa

SEQ ID NO: 193773 - DNA, 13 bp, Artificial Sequence
  Oligonucleotide for detection of SNP TSC0047659
ttttgtcgatagy

SEQ ID NO: 193774 - DNA, 13 bp, Artificial Sequence
  Oligonucleotide for detection of SNP TSC0047659
rctatcgacaaaa

SEQ ID NO: 193775 - DNA, 13 bp, Artificial Sequence
  Oligonucleotide for detection of SNP TSC0047663
atggttatttggg

SEQ ID NO: 193776 - DNA, 13 bp, Artificial Sequence
  Oligonucleotide for detection of SNP TSC0047663
cccaaataaccat

SEQ ID NO: 193777 - DNA, 13 bp, Artificial Sequence
  Oligonucleotide for detection of SNP TSC0047663
atggttttttggg

SEQ ID NO: 193778 - DNA, 13 bp, Artificial Sequence
  Oligonucleotide for detection of SNP TSC0047663
cccaaaaaaccat

SEQ ID NO: 193779 - DNA, 13 bp, Artificial Sequence
  Oligonucleotide for detection of SNP TSC0047663
tttaaatgattat

SEQ ID NO: 193780 - DNA, 13 bp, Artificial Sequence
  Oligonucleotide for detection of SNP TSC0047663
ataatcatttaaa

SEQ ID NO: 193781 - DNA, 13 bp, Artificial Sequence
  Oligonucleotide for detection of SNP TSC0047663
tttaaaagattat

SEQ ID NO: 193782 - DNA, 13 bp, Artificial Sequence
  Oligonucleotide for detection of SNP TSC0047663
ataatcttttaaa

SEQ ID NO: 193783 - DNA, 13 bp, Artificial Sequence
  Oligonucleotide for detection of SNP TSC0010432
agttgtatttaaa

SEQ ID NO: 193784 - DNA, 13 bp, Artificial Sequence
  Oligonucleotide for detection of SNP TSC0010432
tttaaatacaact

SEQ ID NO: 193785 - DNA, 13 bp, Artificial Sequence
  Oligonucleotide for detection of SNP TSC0010432
agttgtgtttaaa

SEQ ID NO: 193786 - DNA, 13 bp, Artificial Sequence
  Oligonucleotide for detection of SNP TSC0010432
tttaaacacaact

SEQ ID NO: 193787 - DNA, 13 bp, Artificial Sequence
  Oligonucleotide for detection of SNP TSC0047666
tgtatatttggay

SEQ ID NO: 193788 - DNA, 13 bp, Artificial Sequence
  Oligonucleotide for detection of SNP TSC0047666
rtccaaatataca

SEQ ID NO: 193789 - DNA, 13 bp, Artificial Sequence
  Oligonucleotide for detection of SNP TSC0047666
tgtatagttggay

SEQ ID NO: 193790 - DNA, 13 bp, Artificial Sequence
  Oligonucleotide for detection of SNP TSC0047666
rtccaactataca

SEQ ID NO: 193791 - DNA, 13 bp, Artificial Sequence
  Oligonucleotide for detection of SNP TSC0047666
gtttagatatgta

SEQ ID NO: 193792 - DNA, 13 bp, Artificial Sequence
  Oligonucleotide for detection of SNP TSC0047666
tacatatctaaac

SEQ ID NO: 193793 - DNA, 13 bp, Artificial Sequence
  Oligonucleotide for detection of SNP TSC0047666
gtttagttatgta

SEQ ID NO: 193794 - DNA, 13 bp, Artificial Sequence
  Oligonucleotide for detection of SNP TSC0047666
tacataactaaac

SEQ ID NO: 193795 - DNA, 13 bp, Artificial Sequence
  Oligonucleotide for detection of SNP TSC0047667
ttgatgtgtaagg

SEQ ID NO: 193796 - DNA, 13 bp, Artificial Sequence
  Oligonucleotide for detection of SNP TSC0047667
ccttacacatcaa

SEQ ID NO: 193797 - DNA, 13 bp, Artificial Sequence
  Oligonucleotide for detection of SNP TSC0047667
ttgatgcgtaagg

SEQ ID NO: 193798 - DNA, 13 bp, Artificial Sequence
  Oligonucleotide for detection of SNP TSC0047667
ccttacgcatcaa

SEQ ID NO: 193799 - DNA, 13 bp, Artificial Sequence
  Oligonucleotide for detection of SNP TSC0047668
tttttgtaattty

SEQ ID NO: 193800 - DNA, 13 bp, Artificial Sequence
  Oligonucleotide for detection of SNP TSC0047668
raaattacaaaaa

SEQ ID NO: 193801 - DNA, 13 bp, Artificial Sequence
  Oligonucleotide for detection of SNP TSC0047668
tttttggaattty

SEQ ID NO: 193802 - DNA, 13 bp, Artificial Sequence
  Oligonucleotide for detection of SNP TSC0047668
raaattccaaaaa

SEQ ID NO: 193803 - DNA, 13 bp, Artificial Sequence
  Oligonucleotide for detection of SNP TSC0047668
ggaattttaggaa

SEQ ID NO: 193804 - DNA, 13 bp, Artificial Sequence
  Oligonucleotide for detection of SNP TSC0047668
ttcctaaaattcc

SEQ ID NO: 193805 - DNA, 13 bp, Artificial Sequence
  Oligonucleotide for detection of SNP TSC0047669
tggtttaaggatg

SEQ ID NO: 193806 - DNA, 13 bp, Artificial Sequence
  Oligonucleotide for detection of SNP TSC0047669
catccttaaacca

SEQ ID NO: 193807 - DNA, 13 bp, Artificial Sequence
  Oligonucleotide for detection of SNP TSC0047669
tggtttgaggatg

SEQ ID NO: 193808 - DNA, 13 bp, Artificial Sequence
  Oligonucleotide for detection of SNP TSC0047669
catcctcaaacca

SEQ ID NO: 193809 - DNA, 13 bp, Artificial Sequence
  Oligonucleotide for detection of SNP TSC0047669
tggttcgaggatg

SEQ ID NO: 193810 - DNA, 13 bp, Artificial Sequence
  Oligonucleotide for detection of SNP TSC0047669
catcctcgaacca

SEQ ID NO: 193811 - DNA, 13 bp, Artificial Sequence
  Oligonucleotide for detection of SNP TSC0047669
tatttttgggtta

SEQ ID NO: 193812 - DNA, 13 bp, Artificial Sequence
  Oligonucleotide for detection of SNP TSC0047669
taacccaaaaata

SEQ ID NO: 193813 - DNA, 13 bp, Artificial Sequence
  Oligonucleotide for detection of SNP TSC0047669
tattttcgggtta

SEQ ID NO: 193814 - DNA, 13 bp, Artificial Sequence
  Oligonucleotide for detection of SNP TSC0047669
taacccgaaaata

SEQ ID NO: 193815 - DNA, 13 bp, Artificial Sequence
  Oligonucleotide for detection of SNP TSC0005356
aatatatgggagt

SEQ ID NO: 193816 - DNA, 13 bp, Artificial Sequence
  Oligonucleotide for detection of SNP TSC0005356
actcccatatatt

SEQ ID NO: 193817 - DNA, 13 bp, Artificial Sequence
  Oligonucleotide for detection of SNP TSC0005356
aatatacgggagt

SEQ ID NO: 193818 - DNA, 13 bp, Artificial Sequence
  Oligonucleotide for detection of SNP TSC0005356
actcccgtatatt

SEQ ID NO: 193819 - DNA, 13 bp, Artificial Sequence
  Oligonucleotide for detection of SNP TSC0005357
aagtgatggggta

SEQ ID NO: 193820 - DNA, 13 bp, Artificial Sequence
  Oligonucleotide for detection of SNP TSC0005357
taccccatcactt

SEQ ID NO: 193821 - DNA, 13 bp, Artificial Sequence
  Oligonucleotide for detection of SNP TSC0005357
aagtgacggggta

SEQ ID NO: 193822 - DNA, 13 bp, Artificial Sequence
  Oligonucleotide for detection of SNP TSC0005357
taccccgtcactt

SEQ ID NO: 193823 - DNA, 13 bp, Artificial Sequence
  Oligonucleotide for detection of SNP TSC0005045
tttgagttgggga

SEQ ID NO: 193824 - DNA, 13 bp, Artificial Sequence
  Oligonucleotide for detection of SNP TSC0005045
tccccaactcaaa

SEQ ID NO: 193825 - DNA, 13 bp, Artificial Sequence
  Oligonucleotide for detection of SNP TSC0005045
tttgaggtgggga

SEQ ID NO: 193826 - DNA, 13 bp, Artificial Sequence
  Oligonucleotide for detection of SNP TSC0005045
tccccacctcaaa

SEQ ID NO: 193827 - DNA, 13 bp, Artificial Sequence
  Oligonucleotide for detection of SNP TSC0005045
tttttattttaga

SEQ ID NO: 193828 - DNA, 13 bp, Artificial Sequence
  Oligonucleotide for detection of SNP TSC0005045
tctaaaataaaaa

SEQ ID NO: 193829 - DNA, 13 bp, Artificial Sequence
  Oligonucleotide for detection of SNP TSC0005046
tgttatggtatty

SEQ ID NO: 193830 - DNA, 13 bp, Artificial Sequence
  Oligonucleotide for detection of SNP TSC0005046
raataccataaca

SEQ ID NO: 193831 - DNA, 13 bp, Artificial Sequence
  Oligonucleotide for detection of SNP TSC0005046
tgttacggtatty

SEQ ID NO: 193832 - DNA, 13 bp, Artificial Sequence
  Oligonucleotide for detection of SNP TSC0005046
raataccgtaaca

SEQ ID NO: 193833 - DNA, 13 bp, Artificial Sequence
  Oligonucleotide for detection of SNP TSC0005046
gagtgtagtggta

SEQ ID NO: 193834 - DNA, 13 bp, Artificial Sequence
  Oligonucleotide for detection of SNP TSC0005046
taccactacactc

SEQ ID NO: 193835 - DNA, 13 bp, Artificial Sequence
  Oligonucleotide for detection of SNP TSC0005046
gagtgttgtggta

SEQ ID NO: 193836 - DNA, 13 bp, Artificial Sequence
  Oligonucleotide for detection of SNP TSC0005046
taccacaacactc

SEQ ID NO: 193837 - DNA, 13 bp, Artificial Sequence
  Oligonucleotide for detection of SNP TSC0005046
gagtgtcgtggta

SEQ ID NO: 193838 - DNA, 13 bp, Artificial Sequence
  Oligonucleotide for detection of SNP TSC0005046
taccacgacactc

SEQ ID NO: 193839 - DNA, 13 bp, Artificial Sequence
  Oligonucleotide for detection of SNP TSC0005706
ggggtagtggtga

SEQ ID NO: 193840 - DNA, 13 bp, Artificial Sequence
  Oligonucleotide for detection of SNP TSC0005706
tcaccactacccc

SEQ ID NO: 193841 - DNA, 13 bp, Artificial Sequence
  Oligonucleotide for detection of SNP TSC0005706
ggggtaatggtga

SEQ ID NO: 193842 - DNA, 13 bp, Artificial Sequence
  Oligonucleotide for detection of SNP TSC0005706
tcaccattacccc

SEQ ID NO: 193843 - DNA, 13 bp, Artificial Sequence
  Oligonucleotide for detection of SNP TSC0005707
tatgattgataty

SEQ ID NO: 193844 - DNA, 13 bp, Artificial Sequence
  Oligonucleotide for detection of SNP TSC0005707
ratatcaatcata

SEQ ID NO: 193845 - DNA, 13 bp, Artificial Sequence
  Oligonucleotide for detection of SNP TSC0005707
tatgatcgataty

SEQ ID NO: 193846 - DNA, 13 bp, Artificial Sequence
  Oligonucleotide for detection of SNP TSC0005707
ratatcgatcata

SEQ ID NO: 193847 - DNA, 13 bp, Artificial Sequence
  Oligonucleotide for detection of SNP TSC0005707
gatgttggttata

SEQ ID NO: 193848 - DNA, 13 bp, Artificial Sequence
  Oligonucleotide for detection of SNP TSC0005707
tataaccaacatc

SEQ ID NO: 193849 - DNA, 13 bp, Artificial Sequence
  Oligonucleotide for detection of SNP TSC0005707
gatgttagttata

SEQ ID NO: 193850 - DNA, 13 bp, Artificial Sequence
  Oligonucleotide for detection of SNP TSC0005707
tataactaacatc

SEQ ID NO: 193851 - DNA, 13 bp, Artificial Sequence
  Oligonucleotide for detection of SNP TSC0005707
gatgtcggttata

SEQ ID NO: 193852 - DNA, 13 bp, Artificial Sequence
  Oligonucleotide for detection of SNP TSC0005707
tataaccgacatc

SEQ ID NO: 193853 - DNA, 13 bp, Artificial Sequence
  Oligonucleotide for detection of SNP TSC0047671
tgggagatagagg

SEQ ID NO: 193854 - DNA, 13 bp, Artificial Sequence
  Oligonucleotide for detection of SNP TSC0047671
cctctatctccca

SEQ ID NO: 193855 - DNA, 13 bp, Artificial Sequence
  Oligonucleotide for detection of SNP TSC0047671
tgggaggtagagg

SEQ ID NO: 193856 - DNA, 13 bp, Artificial Sequence
  Oligonucleotide for detection of SNP TSC0047671
cctctacctccca

SEQ ID NO: 193857 - DNA, 13 bp, Artificial Sequence
  Oligonucleotide for detection of SNP TSC0009033
tttataaaaagaa

SEQ ID NO: 193858 - DNA, 13 bp, Artificial Sequence
  Oligonucleotide for detection of SNP TSC0009033
ttctttttataaa

SEQ ID NO: 193859 - DNA, 13 bp, Artificial Sequence
  Oligonucleotide for detection of SNP TSC0009033
tttatataaagaa

SEQ ID NO: 193860 - DNA, 13 bp, Artificial Sequence
  Oligonucleotide for detection of SNP TSC0009033
ttctttatataaa

SEQ ID NO: 193861 - DNA, 13 bp, Artificial Sequence
  Oligonucleotide for detection of SNP TSC0009033
ttttttttgtgaa

SEQ ID NO: 193862 - DNA, 13 bp, Artificial Sequence
  Oligonucleotide for detection of SNP TSC0009033
ttcacaaaaaaaa

SEQ ID NO: 193863 - DNA, 13 bp, Artificial Sequence
  Oligonucleotide for detection of SNP TSC0009033
ttttttatgtgaa

SEQ ID NO: 193864 - DNA, 13 bp, Artificial Sequence
  Oligonucleotide for detection of SNP TSC0009033
ttcacataaaaaa

SEQ ID NO: 193865 - DNA, 13 bp, Artificial Sequence
  Oligonucleotide for detection of SNP TSC0047675
atggagatgataa

SEQ ID NO: 193866 - DNA, 13 bp, Artificial Sequence
  Oligonucleotide for detection of SNP TSC0047675
ttatcatctccat

SEQ ID NO: 193867 - DNA, 13 bp, Artificial Sequence
  Oligonucleotide for detection of SNP TSC0047675
atggaggtgataa

SEQ ID NO: 193868 - DNA, 13 bp, Artificial Sequence
  Oligonucleotide for detection of SNP TSC0047675
ttatcacctccat

SEQ ID NO: 193869 - DNA, 13 bp, Artificial Sequence
  Oligonucleotide for detection of SNP TSC0047676
tttttatagaaga

SEQ ID NO: 193870 - DNA, 13 bp, Artificial Sequence
  Oligonucleotide for detection of SNP TSC0047676
tcttctataaaaa

SEQ ID NO: 193871 - DNA, 13 bp, Artificial Sequence
  Oligonucleotide for detection of SNP TSC0047676
tttttagagaaga

SEQ ID NO: 193872 - DNA, 13 bp, Artificial Sequence
  Oligonucleotide for detection of SNP TSC0047676
tcttctctaaaaa

SEQ ID NO: 193873 - DNA, 13 bp, Artificial Sequence
  Oligonucleotide for detection of SNP TSC0047677
tattttggttggg

SEQ ID NO: 193874 - DNA, 13 bp, Artificial Sequence
  Oligonucleotide for detection of SNP TSC0047677
cccaaccaaaata

SEQ ID NO: 193875 - DNA, 13 bp, Artificial Sequence
  Oligonucleotide for detection of SNP TSC0047677
tattttggtcggg

SEQ ID NO: 193876 - DNA, 13 bp, Artificial Sequence
  Oligonucleotide for detection of SNP TSC0047677
cccgaccaaaata

SEQ ID NO: 193877 - DNA, 13 bp, Artificial Sequence
  Oligonucleotide for detection of SNP TSC0047677
tatttttgtcggg

SEQ ID NO: 193878 - DNA, 13 bp, Artificial Sequence
  Oligonucleotide for detection of SNP TSC0047677
cccgacaaaaata

SEQ ID NO: 193879 - DNA, 13 bp, Artificial Sequence
  Oligonucleotide for detection of SNP TSC0047677
tattttcgtcggg

SEQ ID NO: 193880 - DNA, 13 bp, Artificial Sequence
  Oligonucleotide for detection of SNP TSC0047677
cccgacgaaaata

SEQ ID NO: 193881 - DNA, 13 bp, Artificial Sequence
  Oligonucleotide for detection of SNP TSC0047677
tttggtgagggtg

SEQ ID NO: 193882 - DNA, 13 bp, Artificial Sequence
  Oligonucleotide for detection of SNP TSC0047677
caccctcaccaaa

SEQ ID NO: 193883 - DNA, 13 bp, Artificial Sequence
  Oligonucleotide for detection of SNP TSC0047677
tttggttagggtg

SEQ ID NO: 193884 - DNA, 13 bp, Artificial Sequence
  Oligonucleotide for detection of SNP TSC0047677
caccctaaccaaa

SEQ ID NO: 193885 - DNA, 13 bp, Artificial Sequence
  Oligonucleotide for detection of SNP TSC0047677
ttcggtgagggtg

SEQ ID NO: 193886 - DNA, 13 bp, Artificial Sequence
  Oligonucleotide for detection of SNP TSC0047677
caccctcaccgaa

SEQ ID NO: 193887 - DNA, 13 bp, Artificial Sequence
  Oligonucleotide for detection of SNP TSC0047677
ttcggttagggtg

SEQ ID NO: 193888 - DNA, 13 bp, Artificial Sequence
  Oligonucleotide for detection of SNP TSC0047677
caccctaaccgaa

SEQ ID NO: 193889 - DNA, 13 bp, Artificial Sequence
  Oligonucleotide for detection of SNP TSC0047677
tttggcgagggtg

SEQ ID NO: 193890 - DNA, 13 bp, Artificial Sequence
  Oligonucleotide for detection of SNP TSC0047677
caccctcgccaaa

SEQ ID NO: 193891 - DNA, 13 bp, Artificial Sequence
  Oligonucleotide for detection of SNP TSC0047677
ttcggcgagggtg

SEQ ID NO: 193892 - DNA, 13 bp, Artificial Sequence
  Oligonucleotide for detection of SNP TSC0047677
caccctcgccgaa

SEQ ID NO: 193893 - DNA, 13 bp, Artificial Sequence
  Oligonucleotide for detection of SNP TSC0047678
attttagtagtgt

SEQ ID NO: 193894 - DNA, 13 bp, Artificial Sequence
  Oligonucleotide for detection of SNP TSC0047678
acactactaaaat

SEQ ID NO: 193895 - DNA, 13 bp, Artificial Sequence
  Oligonucleotide for detection of SNP TSC0047678
attttaatagtgt

SEQ ID NO: 193896 - DNA, 13 bp, Artificial Sequence
  Oligonucleotide for detection of SNP TSC0047678
acactattaaaat

SEQ ID NO: 193897 - DNA, 13 bp, Artificial Sequence
  Oligonucleotide for detection of SNP TSC0047679
tagaatataaatt

SEQ ID NO: 193898 - DNA, 13 bp, Artificial Sequence
  Oligonucleotide for detection of SNP TSC0047679
aatttatattcta

SEQ ID NO: 193899 - DNA, 13 bp, Artificial Sequence
  Oligonucleotide for detection of SNP TSC0047679
tagaatgtaaatt

SEQ ID NO: 193900 - DNA, 13 bp, Artificial Sequence
  Oligonucleotide for detection of SNP TSC0047679
aatttacattcta

SEQ ID NO: 193901 - DNA, 13 bp, Artificial Sequence
  Oligonucleotide for detection of SNP TSC0047681
ttttttgtaggtt

SEQ ID NO: 193902 - DNA, 13 bp, Artificial Sequence
  Oligonucleotide for detection of SNP TSC0047681
aacctacaaaaaa

SEQ ID NO: 193903 - DNA, 13 bp, Artificial Sequence
  Oligonucleotide for detection of SNP TSC0047681
ttttttataggtt

SEQ ID NO: 193904 - DNA, 13 bp, Artificial Sequence
  Oligonucleotide for detection of SNP TSC0047681
aacctataaaaaa

SEQ ID NO: 193905 - DNA, 13 bp, Artificial Sequence
  Oligonucleotide for detection of SNP TSC0047683
attttaagaaggg

SEQ ID NO: 193906 - DNA, 13 bp, Artificial Sequence
  Oligonucleotide for detection of SNP TSC0047683
cccttcttaaaat

SEQ ID NO: 193907 - DNA, 13 bp, Artificial Sequence
  Oligonucleotide for detection of SNP TSC0047683
attttaggaaggg

SEQ ID NO: 193908 - DNA, 13 bp, Artificial Sequence
  Oligonucleotide for detection of SNP TSC0047683
cccttcctaaaat

SEQ ID NO: 193909 - DNA, 13 bp, Artificial Sequence
  Oligonucleotide for detection of SNP TSC0010583
tataaaataatty

SEQ ID NO: 193910 - DNA, 13 bp, Artificial Sequence
  Oligonucleotide for detection of SNP TSC0010583
raattattttata

SEQ ID NO: 193911 - DNA, 13 bp, Artificial Sequence
  Oligonucleotide for detection of SNP TSC0010583
tataaagtaatty

SEQ ID NO: 193912 - DNA, 13 bp, Artificial Sequence
  Oligonucleotide for detection of SNP TSC0010583
raattactttata

SEQ ID NO: 193913 - DNA, 13 bp, Artificial Sequence
  Oligonucleotide for detection of SNP TSC0010584
atatatatgtaty

SEQ ID NO: 193914 - DNA, 13 bp, Artificial Sequence
  Oligonucleotide for detection of SNP TSC0010584
ratacatatatat

SEQ ID NO: 193915 - DNA, 13 bp, Artificial Sequence
  Oligonucleotide for detection of SNP TSC0010584
atatatgtgtaty

SEQ ID NO: 193916 - DNA, 13 bp, Artificial Sequence
  Oligonucleotide for detection of SNP TSC0010584
ratacacatatat

SEQ ID NO: 193917 - DNA, 13 bp, Artificial Sequence
  Oligonucleotide for detection of SNP TSC0005074
gatatttatataa

SEQ ID NO: 193918 - DNA, 13 bp, Artificial Sequence
  Oligonucleotide for detection of SNP TSC0005074
ttatataaatatc

SEQ ID NO: 193919 - DNA, 13 bp, Artificial Sequence
  Oligonucleotide for detection of SNP TSC0005074
gatattgatataa

SEQ ID NO: 193920 - DNA, 13 bp, Artificial Sequence
  Oligonucleotide for detection of SNP TSC0005074
ttatatcaatatc

SEQ ID NO: 193921 - DNA, 13 bp, Artificial Sequence
  Oligonucleotide for detection of SNP TSC0005074
ttatataaatgty

SEQ ID NO: 193922 - DNA, 13 bp, Artificial Sequence
  Oligonucleotide for detection of SNP TSC0005074
racatttatataa

SEQ ID NO: 193923 - DNA, 13 bp, Artificial Sequence
  Oligonucleotide for detection of SNP TSC0005074
ttatattaatgty

SEQ ID NO: 193924 - DNA, 13 bp, Artificial Sequence
  Oligonucleotide for detection of SNP TSC0005074
racattaatataa

SEQ ID NO: 193925 - DNA, 13 bp, Artificial Sequence
  Oligonucleotide for detection of SNP TSC0047685
tgttttgtgataa

SEQ ID NO: 193926 - DNA, 13 bp, Artificial Sequence
  Oligonucleotide for detection of SNP TSC0047685
ttatcacaaaaca

SEQ ID NO: 193927 - DNA, 13 bp, Artificial Sequence
  Oligonucleotide for detection of SNP TSC0047685
tgttttatgataa

SEQ ID NO: 193928 - DNA, 13 bp, Artificial Sequence
  Oligonucleotide for detection of SNP TSC0047685
ttatcataaaaca

SEQ ID NO: 193929 - DNA, 13 bp, Artificial Sequence
  Oligonucleotide for detection of SNP TSC0047686
aaatataagaatt

SEQ ID NO: 193930 - DNA, 13 bp, Artificial Sequence
  Oligonucleotide for detection of SNP TSC0047686
aattcttatattt

SEQ ID NO: 193931 - DNA, 13 bp, Artificial Sequence
  Oligonucleotide for detection of SNP TSC0047686
aaatatgagaatt

SEQ ID NO: 193932 - DNA, 13 bp, Artificial Sequence
  Oligonucleotide for detection of SNP TSC0047686
aattctcatattt

SEQ ID NO: 193933 - DNA, 13 bp, Artificial Sequence
  Oligonucleotide for detection of SNP TSC0047687
tttgaagtaagta

SEQ ID NO: 193934 - DNA, 13 bp, Artificial Sequence
  Oligonucleotide for detection of SNP TSC0047687
tacttacttcaaa

SEQ ID NO: 193935 - DNA, 13 bp, Artificial Sequence
  Oligonucleotide for detection of SNP TSC0047687
tttgaaataagta

SEQ ID NO: 193936 - DNA, 13 bp, Artificial Sequence
  Oligonucleotide for detection of SNP TSC0047687
tacttatttcaaa

SEQ ID NO: 193937 - DNA, 13 bp, Artificial Sequence
  Oligonucleotide for detection of SNP TSC0047688
tttgatgttttay

SEQ ID NO: 193938 - DNA, 13 bp, Artificial Sequence
  Oligonucleotide for detection of SNP TSC0047688
rtaaaacatcaaa

SEQ ID NO: 193939 - DNA, 13 bp, Artificial Sequence
  Oligonucleotide for detection of SNP TSC0047688
tttgatattttay

SEQ ID NO: 193940 - DNA, 13 bp, Artificial Sequence
  Oligonucleotide for detection of SNP TSC0047688
rtaaaatatcaaa

SEQ ID NO: 193941 - DNA, 13 bp, Artificial Sequence
  Oligonucleotide for detection of SNP TSC0047688
ttcgatgttttay

SEQ ID NO: 193942 - DNA, 13 bp, Artificial Sequence
  Oligonucleotide for detection of SNP TSC0047688
rtaaaacatcgaa

SEQ ID NO: 193943 - DNA, 13 bp, Artificial Sequence
  Oligonucleotide for detection of SNP TSC0047688
ttcgatattttay

SEQ ID NO: 193944 - DNA, 13 bp, Artificial Sequence
  Oligonucleotide for detection of SNP TSC0047688
rtaaaatatcgaa

SEQ ID NO: 193945 - DNA, 13 bp, Artificial Sequence
  Oligonucleotide for detection of SNP TSC0047689
taatatgtgggaa

SEQ ID NO: 193946 - DNA, 13 bp, Artificial Sequence
  Oligonucleotide for detection of SNP TSC0047689
ttcccacatatta

SEQ ID NO: 193947 - DNA, 13 bp, Artificial Sequence
  Oligonucleotide for detection of SNP TSC0047689
taatatatgggaa

SEQ ID NO: 193948 - DNA, 13 bp, Artificial Sequence
  Oligonucleotide for detection of SNP TSC0047689
ttcccatatatta

SEQ ID NO: 193949 - DNA, 13 bp, Artificial Sequence
  Oligonucleotide for detection of SNP TSC0005684
aatggtaggaaga

SEQ ID NO: 193950 - DNA, 13 bp, Artificial Sequence
  Oligonucleotide for detection of SNP TSC0005684
tcttcctaccatt

SEQ ID NO: 193951 - DNA, 13 bp, Artificial Sequence
  Oligonucleotide for detection of SNP TSC0005684
aatggttggaaga

SEQ ID NO: 193952 - DNA, 13 bp, Artificial Sequence
  Oligonucleotide for detection of SNP TSC0005684
tcttccaaccatt

SEQ ID NO: 193953 - DNA, 13 bp, Artificial Sequence
  Oligonucleotide for detection of SNP TSC0047691
tattgaatgtggt

SEQ ID NO: 193954 - DNA, 13 bp, Artificial Sequence
  Oligonucleotide for detection of SNP TSC0047691
accacattcaata

SEQ ID NO: 193955 - DNA, 13 bp, Artificial Sequence
  Oligonucleotide for detection of SNP TSC0047691
tattgagtgtggt

SEQ ID NO: 193956 - DNA, 13 bp, Artificial Sequence
  Oligonucleotide for detection of SNP TSC0047691
accacactcaata

SEQ ID NO: 193957 - DNA, 13 bp, Artificial Sequence
  Oligonucleotide for detection of SNP TSC0047692
tattgagtgagay

SEQ ID NO: 193958 - DNA, 13 bp, Artificial Sequence
  Oligonucleotide for detection of SNP TSC0047692
rtctcactcaata

SEQ ID NO: 193959 - DNA, 13 bp, Artificial Sequence
  Oligonucleotide for detection of SNP TSC0047692
tattgattgagay

SEQ ID NO: 193960 - DNA, 13 bp, Artificial Sequence
  Oligonucleotide for detection of SNP TSC0047692
rtctcaatcaata

SEQ ID NO: 193961 - DNA, 13 bp, Artificial Sequence
  Oligonucleotide for detection of SNP TSC0047693
ttgtttaaaaata

SEQ ID NO: 193962 - DNA, 13 bp, Artificial Sequence
  Oligonucleotide for detection of SNP TSC0047693
tatttttaaacaa

SEQ ID NO: 193963 - DNA, 13 bp, Artificial Sequence
  Oligonucleotide for detection of SNP TSC0047693
ttgtttgaaaata

SEQ ID NO: 193964 - DNA, 13 bp, Artificial Sequence
  Oligonucleotide for detection of SNP TSC0047693
tattttcaaacaa

SEQ ID NO: 193965 - DNA, 13 bp, Artificial Sequence
  Oligonucleotide for detection of SNP TSC0047694
aagttaataatgt

SEQ ID NO: 193966 - DNA, 13 bp, Artificial Sequence
  Oligonucleotide for detection of SNP TSC0047694
acattattaactt

SEQ ID NO: 193967 - DNA, 13 bp, Artificial Sequence
  Oligonucleotide for detection of SNP TSC0047694
aagttagtaatgt

SEQ ID NO: 193968 - DNA, 13 bp, Artificial Sequence
  Oligonucleotide for detection of SNP TSC0047694
acattactaactt

SEQ ID NO: 193969 - DNA, 13 bp, Artificial Sequence
  Oligonucleotide for detection of SNP TSC0047695
ttattatgaattt

SEQ ID NO: 193970 - DNA, 13 bp, Artificial Sequence
  Oligonucleotide for detection of SNP TSC0047695
aaattcataataa

SEQ ID NO: 193971 - DNA, 13 bp, Artificial Sequence
  Oligonucleotide for detection of SNP TSC0047695
ttattacgaattt

SEQ ID NO: 193972 - DNA, 13 bp, Artificial Sequence
  Oligonucleotide for detection of SNP TSC0047695
aaattcgtaataa

SEQ ID NO: 193973 - DNA, 13 bp, Artificial Sequence
  Oligonucleotide for detection of SNP TSC0047695
aagtttgtggtaa

SEQ ID NO: 193974 - DNA, 13 bp, Artificial Sequence
  Oligonucleotide for detection of SNP TSC0047695
ttaccacaaactt

SEQ ID NO: 193975 - DNA, 13 bp, Artificial Sequence
  Oligonucleotide for detection of SNP TSC0047695
aagtttatggtaa

SEQ ID NO: 193976 - DNA, 13 bp, Artificial Sequence
  Oligonucleotide for detection of SNP TSC0047695
ttaccataaactt

SEQ ID NO: 193977 - DNA, 13 bp, Artificial Sequence
  Oligonucleotide for detection of SNP TSC0047695
aagttcgtggtaa

SEQ ID NO: 193978 - DNA, 13 bp, Artificial Sequence
  Oligonucleotide for detection of SNP TSC0047695
ttaccacgaactt

SEQ ID NO: 193979 - DNA, 13 bp, Artificial Sequence
  Oligonucleotide for detection of SNP TSC0047696
tatttttaattat

SEQ ID NO: 193980 - DNA, 13 bp, Artificial Sequence
  Oligonucleotide for detection of SNP TSC0047696
ataattaaaaata

SEQ ID NO: 193981 - DNA, 13 bp, Artificial Sequence
  Oligonucleotide for detection of SNP TSC0047696
tattttgaattat

SEQ ID NO: 193982 - DNA, 13 bp, Artificial Sequence
  Oligonucleotide for detection of SNP TSC0047696
ataattcaaaata

SEQ ID NO: 193983 - DNA, 13 bp, Artificial Sequence
  Oligonucleotide for detection of SNP TSC0047696
atgattaaagata

SEQ ID NO: 193984 - DNA, 13 bp, Artificial Sequence
  Oligonucleotide for detection of SNP TSC0047696
tatctttaatcat

SEQ ID NO: 193985 - DNA, 13 bp, Artificial Sequence
  Oligonucleotide for detection of SNP TSC0047696
atgatttaagata

SEQ ID NO: 193986 - DNA, 13 bp, Artificial Sequence
  Oligonucleotide for detection of SNP TSC0047696
tatcttaaatcat

SEQ ID NO: 193987 - DNA, 13 bp, Artificial Sequence
  Oligonucleotide for detection of SNP TSC0047702
tatagtatgtgaa

SEQ ID NO: 193988 - DNA, 13 bp, Artificial Sequence
  Oligonucleotide for detection of SNP TSC0047702
ttcacatactata

SEQ ID NO: 193989 - DNA, 13 bp, Artificial Sequence
  Oligonucleotide for detection of SNP TSC0047702
tatagtgtgtgaa

SEQ ID NO: 193990 - DNA, 13 bp, Artificial Sequence
  Oligonucleotide for detection of SNP TSC0047702
ttcacacactata

SEQ ID NO: 193991 - DNA, 13 bp, Artificial Sequence
  Oligonucleotide for detection of SNP TSC0047702
tatagcgtgtgaa

SEQ ID NO: 193992 - DNA, 13 bp, Artificial Sequence
  Oligonucleotide for detection of SNP TSC0047702
ttcacacgctata

SEQ ID NO: 193993 - DNA, 13 bp, Artificial Sequence
  Oligonucleotide for detection of SNP TSC0047702
tttatatgttgtg

SEQ ID NO: 193994 - DNA, 13 bp, Artificial Sequence
  Oligonucleotide for detection of SNP TSC0047702
cacaacatataaa

SEQ ID NO: 193995 - DNA, 13 bp, Artificial Sequence
  Oligonucleotide for detection of SNP TSC0047702
tttatacgttgtg

SEQ ID NO: 193996 - DNA, 13 bp, Artificial Sequence
  Oligonucleotide for detection of SNP TSC0047702
cacaacgtataaa

SEQ ID NO: 193997 - DNA, 13 bp, Artificial Sequence
  Oligonucleotide for detection of SNP TSC0047706
aaaaagtgttatt

SEQ ID NO: 193998 - DNA, 13 bp, Artificial Sequence
  Oligonucleotide for detection of SNP TSC0047706
aataacacttttt

SEQ ID NO: 193999 - DNA, 13 bp, Artificial Sequence
  Oligonucleotide for detection of SNP TSC0047706
aaaaagcgttatt

SEQ ID NO: 194000 - DNA, 13 bp, Artificial Sequence
  Oligonucleotide for detection of SNP TSC0047706
aataacgcttttt

SEQ ID NO: 194001 - DNA, 13 bp, Artificial Sequence
  Oligonucleotide for detection of SNP TSC0047706
agtaatgtttttt

SEQ ID NO: 194002 - DNA, 13 bp, Artificial Sequence
  Oligonucleotide for detection of SNP TSC0047706
aaaaaacattact

SEQ ID NO: 194003 - DNA, 13 bp, Artificial Sequence
  Oligonucleotide for detection of SNP TSC0047706
agtaatatttttt

SEQ ID NO: 194004 - DNA, 13 bp, Artificial Sequence
  Oligonucleotide for detection of SNP TSC0047706
aaaaaatattact

SEQ ID NO: 194005 - DNA, 13 bp, Artificial Sequence
  Oligonucleotide for detection of SNP TSC0047706
agtaacgtttttt

SEQ ID NO: 194006 - DNA, 13 bp, Artificial Sequence
  Oligonucleotide for detection of SNP TSC0047706
aaaaaacgttact

SEQ ID NO: 194007 - DNA, 13 bp, Artificial Sequence
  Oligonucleotide for detection of SNP TSC0047707
tttgttaaggata

SEQ ID NO: 194008 - DNA, 13 bp, Artificial Sequence
  Oligonucleotide for detection of SNP TSC0047707
tatccttaacaaa

SEQ ID NO: 194009 - DNA, 13 bp, Artificial Sequence
  Oligonucleotide for detection of SNP TSC0047707
tttgtttaggata

SEQ ID NO: 194010 - DNA, 13 bp, Artificial Sequence
  Oligonucleotide for detection of SNP TSC0047707
tatcctaaacaaa

SEQ ID NO: 194011 - DNA, 13 bp, Artificial Sequence
  Oligonucleotide for detection of SNP TSC0047707
tatttttaataga

SEQ ID NO: 194012 - DNA, 13 bp, Artificial Sequence
  Oligonucleotide for detection of SNP TSC0047707
tctattaaaaata

SEQ ID NO: 194013 - DNA, 13 bp, Artificial Sequence
  Oligonucleotide for detection of SNP TSC0047707
tattttgaataga

SEQ ID NO: 194014 - DNA, 13 bp, Artificial Sequence
  Oligonucleotide for detection of SNP TSC0047707
tctattcaaaata

SEQ ID NO: 194015 - DNA, 13 bp, Artificial Sequence
  Oligonucleotide for detection of SNP TSC0047708
taaaaacgaagtt

SEQ ID NO: 194016 - DNA, 13 bp, Artificial Sequence
  Oligonucleotide for detection of SNP TSC0047708
aacttcgttttta

SEQ ID NO: 194017 - DNA, 13 bp, Artificial Sequence
  Oligonucleotide for detection of SNP TSC0047710
ttatatagtagta

SEQ ID NO: 194018 - DNA, 13 bp, Artificial Sequence
  Oligonucleotide for detection of SNP TSC0047710
tactactatataa

SEQ ID NO: 194019 - DNA, 13 bp, Artificial Sequence
  Oligonucleotide for detection of SNP TSC0047711
ttattgattatgt

SEQ ID NO: 194020 - DNA, 13 bp, Artificial Sequence
  Oligonucleotide for detection of SNP TSC0047711
acataatcaataa

SEQ ID NO: 194021 - DNA, 13 bp, Artificial Sequence
  Oligonucleotide for detection of SNP TSC0047711
ttattgtttatgt

SEQ ID NO: 194022 - DNA, 13 bp, Artificial Sequence
  Oligonucleotide for detection of SNP TSC0047711
acataaacaataa

SEQ ID NO: 194023 - DNA, 13 bp, Artificial Sequence
  Oligonucleotide for detection of SNP TSC0047711
atatagttaatgg

SEQ ID NO: 194024 - DNA, 13 bp, Artificial Sequence
  Oligonucleotide for detection of SNP TSC0047711
ccattaactatat

SEQ ID NO: 194025 - DNA, 13 bp, Artificial Sequence
  Oligonucleotide for detection of SNP TSC0047711
atatagataatgg

SEQ ID NO: 194026 - DNA, 13 bp, Artificial Sequence
  Oligonucleotide for detection of SNP TSC0047711
ccattatctatat

SEQ ID NO: 194027 - DNA, 13 bp, Artificial Sequence
  Oligonucleotide for detection of SNP TSC0047719
gttgagattttga

SEQ ID NO: 194028 - DNA, 13 bp, Artificial Sequence
  Oligonucleotide for detection of SNP TSC0047719
tcaaaatctcaac

SEQ ID NO: 194029 - DNA, 13 bp, Artificial Sequence
  Oligonucleotide for detection of SNP TSC0047719
gttgaggttttga

SEQ ID NO: 194030 - DNA, 13 bp, Artificial Sequence
  Oligonucleotide for detection of SNP TSC0047719
tcaaaacctcaac

SEQ ID NO: 194031 - DNA, 13 bp, Artificial Sequence
  Oligonucleotide for detection of SNP TSC0009467
agattgaggaggg

SEQ ID NO: 194032 - DNA, 13 bp, Artificial Sequence
  Oligonucleotide for detection of SNP TSC0009467
ccctcctcaatct

SEQ ID NO: 194033 - DNA, 13 bp, Artificial Sequence
  Oligonucleotide for detection of SNP TSC0009467
agattggggaggg

SEQ ID NO: 194034 - DNA, 13 bp, Artificial Sequence
  Oligonucleotide for detection of SNP TSC0009467
ccctccccaatct

SEQ ID NO: 194035 - DNA, 13 bp, Artificial Sequence
  Oligonucleotide for detection of SNP TSC0009468
taggttgaattga

SEQ ID NO: 194036 - DNA, 13 bp, Artificial Sequence
  Oligonucleotide for detection of SNP TSC0009468
tcaattcaaccta

SEQ ID NO: 194037 - DNA, 13 bp, Artificial Sequence
  Oligonucleotide for detection of SNP TSC0009468
taggttaaattga

SEQ ID NO: 194038 - DNA, 13 bp, Artificial Sequence
  Oligonucleotide for detection of SNP TSC0009468
tcaatttaaccta

SEQ ID NO: 194039 - DNA, 13 bp, Artificial Sequence
  Oligonucleotide for detection of SNP TSC0010232
tgggatattggag

SEQ ID NO: 194040 - DNA, 13 bp, Artificial Sequence
  Oligonucleotide for detection of SNP TSC0010232
ctccaatatccca

SEQ ID NO: 194041 - DNA, 13 bp, Artificial Sequence
  Oligonucleotide for detection of SNP TSC0010232
tgggatgttggag

SEQ ID NO: 194042 - DNA, 13 bp, Artificial Sequence
  Oligonucleotide for detection of SNP TSC0010232
ctccaacatccca

SEQ ID NO: 194043 - DNA, 13 bp, Artificial Sequence
  Oligonucleotide for detection of SNP TSC0010232
tgggacgttggag

SEQ ID NO: 194044 - DNA, 13 bp, Artificial Sequence
  Oligonucleotide for detection of SNP TSC0010232
ctccaacgtccca

SEQ ID NO: 194045 - DNA, 13 bp, Artificial Sequence
  Oligonucleotide for detection of SNP TSC0010232
ttttagtgtttta

SEQ ID NO: 194046 - DNA, 13 bp, Artificial Sequence
  Oligonucleotide for detection of SNP TSC0010232
taaaacactaaaa

SEQ ID NO: 194047 - DNA, 13 bp, Artificial Sequence
  Oligonucleotide for detection of SNP TSC0010232
ttttagcgtttta

SEQ ID NO: 194048 - DNA, 13 bp, Artificial Sequence
  Oligonucleotide for detection of SNP TSC0010232
taaaacgctaaaa

SEQ ID NO: 194049 - DNA, 13 bp, Artificial Sequence
  Oligonucleotide for detection of SNP TSC0047723
aaaatttagtagy

SEQ ID NO: 194050 - DNA, 13 bp, Artificial Sequence
  Oligonucleotide for detection of SNP TSC0047723
rctactaaatttt

SEQ ID NO: 194051 - DNA, 13 bp, Artificial Sequence
  Oligonucleotide for detection of SNP TSC0047723
aaaattgagtagy

SEQ ID NO: 194052 - DNA, 13 bp, Artificial Sequence
  Oligonucleotide for detection of SNP TSC0047723
rctactcaatttt

SEQ ID NO: 194053 - DNA, 13 bp, Artificial Sequence
  Oligonucleotide for detection of SNP TSC0047724
tggaggtgggttt

SEQ ID NO: 194054 - DNA, 13 bp, Artificial Sequence
  Oligonucleotide for detection of SNP TSC0047724
aaacccacctcca

SEQ ID NO: 194055 - DNA, 13 bp, Artificial Sequence
  Oligonucleotide for detection of SNP TSC0047724
tggaggcgggttt

SEQ ID NO: 194056 - DNA, 13 bp, Artificial Sequence
  Oligonucleotide for detection of SNP TSC0047724
aaacccgcctcca

SEQ ID NO: 194057 - DNA, 13 bp, Artificial Sequence
  Oligonucleotide for detection of SNP TSC0047728
attttaagaatgt

SEQ ID NO: 194058 - DNA, 13 bp, Artificial Sequence
  Oligonucleotide for detection of SNP TSC0047728
acattcttaaaat

SEQ ID NO: 194059 - DNA, 13 bp, Artificial Sequence
  Oligonucleotide for detection of SNP TSC0047728
attttatgaatgt

SEQ ID NO: 194060 - DNA, 13 bp, Artificial Sequence
  Oligonucleotide for detection of SNP TSC0047728
acattcataaaat

SEQ ID NO: 194061 - DNA, 13 bp, Artificial Sequence
  Oligonucleotide for detection of SNP TSC0047728
atatttttgaggt

SEQ ID NO: 194062 - DNA, 13 bp, Artificial Sequence
  Oligonucleotide for detection of SNP TSC0047728
acctcaaaaatat

SEQ ID NO: 194063 - DNA, 13 bp, Artificial Sequence
  Oligonucleotide for detection of SNP TSC0047728
atatttatgaggt

SEQ ID NO: 194064 - DNA, 13 bp, Artificial Sequence
  Oligonucleotide for detection of SNP TSC0047728
acctcataaatat

SEQ ID NO: 194065 - DNA, 13 bp, Artificial Sequence
  Oligonucleotide for detection of SNP TSC0006497
ttagtttgttagt

SEQ ID NO: 194066 - DNA, 13 bp, Artificial Sequence
  Oligonucleotide for detection of SNP TSC0006497
actaacaaactaa

SEQ ID NO: 194067 - DNA, 13 bp, Artificial Sequence
  Oligonucleotide for detection of SNP TSC0006497
ttagttcgttagt

SEQ ID NO: 194068 - DNA, 13 bp, Artificial Sequence
  Oligonucleotide for detection of SNP TSC0006497
actaacgaactaa

SEQ ID NO: 194069 - DNA, 13 bp, Artificial Sequence
  Oligonucleotide for detection of SNP TSC0006497
attggtgaattaa

SEQ ID NO: 194070 - DNA, 13 bp, Artificial Sequence
  Oligonucleotide for detection of SNP TSC0006497
ttaattcaccaat

SEQ ID NO: 194071 - DNA, 13 bp, Artificial Sequence
  Oligonucleotide for detection of SNP TSC0006497
attggtaaattaa

SEQ ID NO: 194072 - DNA, 13 bp, Artificial Sequence
  Oligonucleotide for detection of SNP TSC0006497
ttaatttaccaat

SEQ ID NO: 194073 - DNA, 13 bp, Artificial Sequence
  Oligonucleotide for detection of SNP TSC0006497
attggcgaattaa

SEQ ID NO: 194074 - DNA, 13 bp, Artificial Sequence
  Oligonucleotide for detection of SNP TSC0006497
ttaattcgccaat

SEQ ID NO: 194075 - DNA, 13 bp, Artificial Sequence
  Oligonucleotide for detection of SNP TSC0006498
aagataataagtg

SEQ ID NO: 194076 - DNA, 13 bp, Artificial Sequence
  Oligonucleotide for detection of SNP TSC0006498
cacttattatctt

SEQ ID NO: 194077 - DNA, 13 bp, Artificial Sequence
  Oligonucleotide for detection of SNP TSC0006498
aagatagtaagtg

SEQ ID NO: 194078 - DNA, 13 bp, Artificial Sequence
  Oligonucleotide for detection of SNP TSC0006498
cacttactatctt

SEQ ID NO: 194079 - DNA, 13 bp, Artificial Sequence
  Oligonucleotide for detection of SNP TSC0006499
tggttaagtttgg

SEQ ID NO: 194080 - DNA, 13 bp, Artificial Sequence
  Oligonucleotide for detection of SNP TSC0006499
ccaaacttaacca

SEQ ID NO: 194081 - DNA, 13 bp, Artificial Sequence
  Oligonucleotide for detection of SNP TSC0006499
tggttaggtttgg

SEQ ID NO: 194082 - DNA, 13 bp, Artificial Sequence
  Oligonucleotide for detection of SNP TSC0006499
ccaaacctaacca

SEQ ID NO: 194083 - DNA, 13 bp, Artificial Sequence
  Oligonucleotide for detection of SNP TSC0047729
tggtagattatgy

SEQ ID NO: 194084 - DNA, 13 bp, Artificial Sequence
  Oligonucleotide for detection of SNP TSC0047729
rcataatctacca

SEQ ID NO: 194085 - DNA, 13 bp, Artificial Sequence
  Oligonucleotide for detection of SNP TSC0047729
tggtagtttatgy

SEQ ID NO: 194086 - DNA, 13 bp, Artificial Sequence
  Oligonucleotide for detection of SNP TSC0047729
rcataaactacca

SEQ ID NO: 194087 - DNA, 13 bp, Artificial Sequence
  Oligonucleotide for detection of SNP TSC0047729
gtatgatttatta

SEQ ID NO: 194088 - DNA, 13 bp, Artificial Sequence
  Oligonucleotide for detection of SNP TSC0047729
taataaatcatac

SEQ ID NO: 194089 - DNA, 13 bp, Artificial Sequence
  Oligonucleotide for detection of SNP TSC0047729
gtatgagttatta

SEQ ID NO: 194090 - DNA, 13 bp, Artificial Sequence
  Oligonucleotide for detection of SNP TSC0047729
taataactcatac

SEQ ID NO: 194091 - DNA, 13 bp, Artificial Sequence
  Oligonucleotide for detection of SNP TSC0047730
agaaatattttta

SEQ ID NO: 194092 - DNA, 13 bp, Artificial Sequence
  Oligonucleotide for detection of SNP TSC0047730
taaaaatatttct

SEQ ID NO: 194093 - DNA, 13 bp, Artificial Sequence
  Oligonucleotide for detection of SNP TSC0047730
agaaattttttta

SEQ ID NO: 194094 - DNA, 13 bp, Artificial Sequence
  Oligonucleotide for detection of SNP TSC0047730
taaaaaaatttct

SEQ ID NO: 194095 - DNA, 13 bp, Artificial Sequence
  Oligonucleotide for detection of SNP TSC0047730
taagaatattttt

SEQ ID NO: 194096 - DNA, 13 bp, Artificial Sequence
  Oligonucleotide for detection of SNP TSC0047730
aaaaatattctta

SEQ ID NO: 194097 - DNA, 13 bp, Artificial Sequence
  Oligonucleotide for detection of SNP TSC0047730
taagaagattttt

SEQ ID NO: 194098 - DNA, 13 bp, Artificial Sequence
  Oligonucleotide for detection of SNP TSC0047730
aaaaatcttctta

SEQ ID NO: 194099 - DNA, 13 bp, Artificial Sequence
  Oligonucleotide for detection of SNP TSC0047732
gtagagagagtga

SEQ ID NO: 194100 - DNA, 13 bp, Artificial Sequence
  Oligonucleotide for detection of SNP TSC0047732
tcactctctctac

SEQ ID NO: 194101 - DNA, 13 bp, Artificial Sequence
  Oligonucleotide for detection of SNP TSC0047732
gtagagtgagtga

SEQ ID NO: 194102 - DNA, 13 bp, Artificial Sequence
  Oligonucleotide for detection of SNP TSC0047732
tcactcactctac

SEQ ID NO: 194103 - DNA, 13 bp, Artificial Sequence
  Oligonucleotide for detection of SNP TSC0047732
ttatttattttgy

SEQ ID NO: 194104 - DNA, 13 bp, Artificial Sequence
  Oligonucleotide for detection of SNP TSC0047732
rcaaaataaataa

SEQ ID NO: 194105 - DNA, 13 bp, Artificial Sequence
  Oligonucleotide for detection of SNP TSC0047733
aatttgtgggaga

SEQ ID NO: 194106 - DNA, 13 bp, Artificial Sequence
  Oligonucleotide for detection of SNP TSC0047733
tctcccacaaatt

SEQ ID NO: 194107 - DNA, 13 bp, Artificial Sequence
  Oligonucleotide for detection of SNP TSC0047733
aatttgcgggaga

SEQ ID NO: 194108 - DNA, 13 bp, Artificial Sequence
  Oligonucleotide for detection of SNP TSC0047733
tctcccgcaaatt

SEQ ID NO: 194109 - DNA, 13 bp, Artificial Sequence
  Oligonucleotide for detection of SNP TSC0047733
tttttcgtagatt

SEQ ID NO: 194110 - DNA, 13 bp, Artificial Sequence
  Oligonucleotide for detection of SNP TSC0047733
aatctacgaaaaa

SEQ ID NO: 194111 - DNA, 13 bp, Artificial Sequence
  Oligonucleotide for detection of SNP TSC0047735
gtatttaaggtgt

SEQ ID NO: 194112 - DNA, 13 bp, Artificial Sequence
  Oligonucleotide for detection of SNP TSC0047735
acaccttaaatac

SEQ ID NO: 194113 - DNA, 13 bp, Artificial Sequence
  Oligonucleotide for detection of SNP TSC0047735
gtattttaggtgt

SEQ ID NO: 194114 - DNA, 13 bp, Artificial Sequence
  Oligonucleotide for detection of SNP TSC0047735
acacctaaaatac

SEQ ID NO: 194115 - DNA, 13 bp, Artificial Sequence
  Oligonucleotide for detection of SNP TSC0047735
gtatttaaggcgt

SEQ ID NO: 194116 - DNA, 13 bp, Artificial Sequence
  Oligonucleotide for detection of SNP TSC0047735
acgccttaaatac

SEQ ID NO: 194117 - DNA, 13 bp, Artificial Sequence
  Oligonucleotide for detection of SNP TSC0047735
gtattttaggcgt

SEQ ID NO: 194118 - DNA, 13 bp, Artificial Sequence
  Oligonucleotide for detection of SNP TSC0047735
acgcctaaaatac

SEQ ID NO: 194119 - DNA, 13 bp, Artificial Sequence
  Oligonucleotide for detection of SNP TSC0047735
atgttttggatay

SEQ ID NO: 194120 - DNA, 13 bp, Artificial Sequence
  Oligonucleotide for detection of SNP TSC0047735
rtatccaaaacat

SEQ ID NO: 194121 - DNA, 13 bp, Artificial Sequence
  Oligonucleotide for detection of SNP TSC0047735
atgtttgggatay

SEQ ID NO: 194122 - DNA, 13 bp, Artificial Sequence
  Oligonucleotide for detection of SNP TSC0047735
rtatcccaaacat

SEQ ID NO: 194123 - DNA, 13 bp, Artificial Sequence
  Oligonucleotide for detection of SNP TSC0047735
acgttttggatay

SEQ ID NO: 194124 - DNA, 13 bp, Artificial Sequence
  Oligonucleotide for detection of SNP TSC0047735
rtatccaaaacgt

SEQ ID NO: 194125 - DNA, 13 bp, Artificial Sequence
  Oligonucleotide for detection of SNP TSC0047735
acgtttgggatay

SEQ ID NO: 194126 - DNA, 13 bp, Artificial Sequence
  Oligonucleotide for detection of SNP TSC0047735
rtatcccaaacgt

SEQ ID NO: 194127 - DNA, 13 bp, Artificial Sequence
  Oligonucleotide for detection of SNP TSC0047737
tttgtggttttat

SEQ ID NO: 194128 - DNA, 13 bp, Artificial Sequence
  Oligonucleotide for detection of SNP TSC0047737
ataaaaccacaaa

SEQ ID NO: 194129 - DNA, 13 bp, Artificial Sequence
  Oligonucleotide for detection of SNP TSC0047737
ataggaatataga

SEQ ID NO: 194130 - DNA, 13 bp, Artificial Sequence
  Oligonucleotide for detection of SNP TSC0047737
tctatattcctat

SEQ ID NO: 194131 - DNA, 13 bp, Artificial Sequence
  Oligonucleotide for detection of SNP TSC0047737
ataggattataga

SEQ ID NO: 194132 - DNA, 13 bp, Artificial Sequence
  Oligonucleotide for detection of SNP TSC0047737
tctataatcctat

SEQ ID NO: 194133 - DNA, 13 bp, Artificial Sequence
  Oligonucleotide for detection of SNP TSC0047740
tggtataatttcg

SEQ ID NO: 194134 - DNA, 13 bp, Artificial Sequence
  Oligonucleotide for detection of SNP TSC0047740
cgaaattatacca

SEQ ID NO: 194135 - DNA, 13 bp, Artificial Sequence
  Oligonucleotide for detection of SNP TSC0047740
tggtacgattttg

SEQ ID NO: 194136 - DNA, 13 bp, Artificial Sequence
  Oligonucleotide for detection of SNP TSC0047740
caaaatcgtacca

SEQ ID NO: 194137 - DNA, 13 bp, Artificial Sequence
  Oligonucleotide for detection of SNP TSC0047740
tggtatgatttcg

SEQ ID NO: 194138 - DNA, 13 bp, Artificial Sequence
  Oligonucleotide for detection of SNP TSC0047740
cgaaatcatacca

SEQ ID NO: 194139 - DNA, 13 bp, Artificial Sequence
  Oligonucleotide for detection of SNP TSC0047740
tggtacgatttcg

SEQ ID NO: 194140 - DNA, 13 bp, Artificial Sequence
  Oligonucleotide for detection of SNP TSC0047740
cgaaatcgtacca

SEQ ID NO: 194141 - DNA, 13 bp, Artificial Sequence
  Oligonucleotide for detection of SNP TSC0047741
aggtaggggttgy

SEQ ID NO: 194142 - DNA, 13 bp, Artificial Sequence
  Oligonucleotide for detection of SNP TSC0047741
rcaacccctacct

SEQ ID NO: 194143 - DNA, 13 bp, Artificial Sequence
  Oligonucleotide for detection of SNP TSC0047741
aggtagaggttgy

SEQ ID NO: 194144 - DNA, 13 bp, Artificial Sequence
  Oligonucleotide for detection of SNP TSC0047741
rcaacctctacct

SEQ ID NO: 194145 - DNA, 13 bp, Artificial Sequence
  Oligonucleotide for detection of SNP TSC0007947
ttgtgtgtgttga

SEQ ID NO: 194146 - DNA, 13 bp, Artificial Sequence
  Oligonucleotide for detection of SNP TSC0007947
tcaacacacacaa

SEQ ID NO: 194147 - DNA, 13 bp, Artificial Sequence
  Oligonucleotide for detection of SNP TSC0007947
ttgtgtatgttga

SEQ ID NO: 194148 - DNA, 13 bp, Artificial Sequence
  Oligonucleotide for detection of SNP TSC0007947
tcaacatacacaa

SEQ ID NO: 194149 - DNA, 13 bp, Artificial Sequence
  Oligonucleotide for detection of SNP TSC0005253
aaagggattttga

SEQ ID NO: 194150 - DNA, 13 bp, Artificial Sequence
  Oligonucleotide for detection of SNP TSC0005253
tcaaaatcccttt

SEQ ID NO: 194151 - DNA, 13 bp, Artificial Sequence
  Oligonucleotide for detection of SNP TSC0005253
ttaaggttttttt

SEQ ID NO: 194152 - DNA, 13 bp, Artificial Sequence
  Oligonucleotide for detection of SNP TSC0005253
aaaaaaaccttaa

SEQ ID NO: 194153 - DNA, 13 bp, Artificial Sequence
  Oligonucleotide for detection of SNP TSC0005253
ttaagggtttttt

SEQ ID NO: 194154 - DNA, 13 bp, Artificial Sequence
  Oligonucleotide for detection of SNP TSC0005253
aaaaaacccttaa

SEQ ID NO: 194155 - DNA, 13 bp, Artificial Sequence
  Oligonucleotide for detection of SNP TSC0005254
agttttagttttt

SEQ ID NO: 194156 - DNA, 13 bp, Artificial Sequence
  Oligonucleotide for detection of SNP TSC0005254
aaaaactaaaact

SEQ ID NO: 194157 - DNA, 13 bp, Artificial Sequence
  Oligonucleotide for detection of SNP TSC0047745
tgtataaatataa

SEQ ID NO: 194158 - DNA, 13 bp, Artificial Sequence
  Oligonucleotide for detection of SNP TSC0047745
ttatatttataca

SEQ ID NO: 194159 - DNA, 13 bp, Artificial Sequence
  Oligonucleotide for detection of SNP TSC0047745
tgtatatatataa

SEQ ID NO: 194160 - DNA, 13 bp, Artificial Sequence
  Oligonucleotide for detection of SNP TSC0047745
ttatatatataca

SEQ ID NO: 194161 - DNA, 13 bp, Artificial Sequence
  Oligonucleotide for detection of SNP TSC0047745
ttatatgtgtgta

SEQ ID NO: 194162 - DNA, 13 bp, Artificial Sequence
  Oligonucleotide for detection of SNP TSC0047745
tacacacatataa

SEQ ID NO: 194163 - DNA, 13 bp, Artificial Sequence
  Oligonucleotide for detection of SNP TSC0047747
gaaaagtgggaty

SEQ ID NO: 194164 - DNA, 13 bp, Artificial Sequence
  Oligonucleotide for detection of SNP TSC0047747
ratcccacttttc

SEQ ID NO: 194165 - DNA, 13 bp, Artificial Sequence
  Oligonucleotide for detection of SNP TSC0047747
gaaaagggggaty

SEQ ID NO: 194166 - DNA, 13 bp, Artificial Sequence
  Oligonucleotide for detection of SNP TSC0047747
ratcccccttttc

SEQ ID NO: 194167 - DNA, 13 bp, Artificial Sequence
  Oligonucleotide for detection of SNP TSC0047750
ttttttgggaata

SEQ ID NO: 194168 - DNA, 13 bp, Artificial Sequence
  Oligonucleotide for detection of SNP TSC0047750
tattcccaaaaaa

SEQ ID NO: 194169 - DNA, 13 bp, Artificial Sequence
  Oligonucleotide for detection of SNP TSC0047750
ttttttaggaata

SEQ ID NO: 194170 - DNA, 13 bp, Artificial Sequence
  Oligonucleotide for detection of SNP TSC0047750
tattcctaaaaaa

SEQ ID NO: 194171 - DNA, 13 bp, Artificial Sequence
  Oligonucleotide for detection of SNP TSC0047751
aggtagtgaaaaa

SEQ ID NO: 194172 - DNA, 13 bp, Artificial Sequence
  Oligonucleotide for detection of SNP TSC0047751
tttttcactacct

SEQ ID NO: 194173 - DNA, 13 bp, Artificial Sequence
  Oligonucleotide for detection of SNP TSC0047751
aggtagcgaaaaa

SEQ ID NO: 194174 - DNA, 13 bp, Artificial Sequence
  Oligonucleotide for detection of SNP TSC0047751
tttttcgctacct

SEQ ID NO: 194175 - DNA, 13 bp, Artificial Sequence
  Oligonucleotide for detection of SNP TSC0047754
atagtaagatgta

SEQ ID NO: 194176 - DNA, 13 bp, Artificial Sequence
  Oligonucleotide for detection of SNP TSC0047754
tacatcttactat

SEQ ID NO: 194177 - DNA, 13 bp, Artificial Sequence
  Oligonucleotide for detection of SNP TSC0047754
atagtaggatgta

SEQ ID NO: 194178 - DNA, 13 bp, Artificial Sequence
  Oligonucleotide for detection of SNP TSC0047754
tacatcctactat

SEQ ID NO: 194179 - DNA, 13 bp, Artificial Sequence
  Oligonucleotide for detection of SNP TSC0047755
agatatattaaat

SEQ ID NO: 194180 - DNA, 13 bp, Artificial Sequence
  Oligonucleotide for detection of SNP TSC0047755
atttaatatatct

SEQ ID NO: 194181 - DNA, 13 bp, Artificial Sequence
  Oligonucleotide for detection of SNP TSC0047755
agatattttaaat

SEQ ID NO: 194182 - DNA, 13 bp, Artificial Sequence
  Oligonucleotide for detection of SNP TSC0047755
atttaaaatatct

SEQ ID NO: 194183 - DNA, 13 bp, Artificial Sequence
  Oligonucleotide for detection of SNP TSC0047755
atttagtatattt

SEQ ID NO: 194184 - DNA, 13 bp, Artificial Sequence
  Oligonucleotide for detection of SNP TSC0047755
aaatatactaaat

SEQ ID NO: 194185 - DNA, 13 bp, Artificial Sequence
  Oligonucleotide for detection of SNP TSC0047755
atttaggatattt

SEQ ID NO: 194186 - DNA, 13 bp, Artificial Sequence
  Oligonucleotide for detection of SNP TSC0047755
aaatatcctaaat

SEQ ID NO: 194187 - DNA, 13 bp, Artificial Sequence
  Oligonucleotide for detection of SNP TSC0047757
atatgtataaatt

SEQ ID NO: 194188 - DNA, 13 bp, Artificial Sequence
  Oligonucleotide for detection of SNP TSC0047757
aatttatacatat

SEQ ID NO: 194189 - DNA, 13 bp, Artificial Sequence
  Oligonucleotide for detection of SNP TSC0047757
atatgtttaaatt

SEQ ID NO: 194190 - DNA, 13 bp, Artificial Sequence
  Oligonucleotide for detection of SNP TSC0047757
aatttaaacatat

SEQ ID NO: 194191 - DNA, 13 bp, Artificial Sequence
  Oligonucleotide for detection of SNP TSC0047757
aatttatatatgt

SEQ ID NO: 194192 - DNA, 13 bp, Artificial Sequence
  Oligonucleotide for detection of SNP TSC0047757
acatatataaatt

SEQ ID NO: 194193 - DNA, 13 bp, Artificial Sequence
  Oligonucleotide for detection of SNP TSC0047757
aatttagatatgt

SEQ ID NO: 194194 - DNA, 13 bp, Artificial Sequence
  Oligonucleotide for detection of SNP TSC0047757
acatatctaaatt

SEQ ID NO: 194195 - DNA, 13 bp, Artificial Sequence
  Oligonucleotide for detection of SNP TSC0047758
atgtgtattaaaa

SEQ ID NO: 194196 - DNA, 13 bp, Artificial Sequence
  Oligonucleotide for detection of SNP TSC0047758
ttttaatacacat

SEQ ID NO: 194197 - DNA, 13 bp, Artificial Sequence
  Oligonucleotide for detection of SNP TSC0047758
atgtgttttaaaa

SEQ ID NO: 194198 - DNA, 13 bp, Artificial Sequence
  Oligonucleotide for detection of SNP TSC0047758
ttttaaaacacat

SEQ ID NO: 194199 - DNA, 13 bp, Artificial Sequence
  Oligonucleotide for detection of SNP TSC0047758
ttttaatgtatat

SEQ ID NO: 194200 - DNA, 13 bp, Artificial Sequence
  Oligonucleotide for detection of SNP TSC0047758
atatacattaaaa

SEQ ID NO: 194201 - DNA, 13 bp, Artificial Sequence
  Oligonucleotide for detection of SNP TSC0047758
ttttaaggtatat

SEQ ID NO: 194202 - DNA, 13 bp, Artificial Sequence
  Oligonucleotide for detection of SNP TSC0047758
atataccttaaaa

SEQ ID NO: 194203 - DNA, 13 bp, Artificial Sequence
  Oligonucleotide for detection of SNP TSC0047759
ttttattagttaa

SEQ ID NO: 194204 - DNA, 13 bp, Artificial Sequence
  Oligonucleotide for detection of SNP TSC0047759
ttaactaataaaa

SEQ ID NO: 194205 - DNA, 13 bp, Artificial Sequence
  Oligonucleotide for detection of SNP TSC0047759
ttttatgagttaa

SEQ ID NO: 194206 - DNA, 13 bp, Artificial Sequence
  Oligonucleotide for detection of SNP TSC0047759
ttaactcataaaa

SEQ ID NO: 194207 - DNA, 13 bp, Artificial Sequence
  Oligonucleotide for detection of SNP TSC0047759
ttggttaataaaa

SEQ ID NO: 194208 - DNA, 13 bp, Artificial Sequence
  Oligonucleotide for detection of SNP TSC0047759
ttttattaaccaa

SEQ ID NO: 194209 - DNA, 13 bp, Artificial Sequence
  Oligonucleotide for detection of SNP TSC0047759
ttggtttataaaa

SEQ ID NO: 194210 - DNA, 13 bp, Artificial Sequence
  Oligonucleotide for detection of SNP TSC0047759
ttttataaaccaa

SEQ ID NO: 194211 - DNA, 13 bp, Artificial Sequence
  Oligonucleotide for detection of SNP TSC0047763
ttttgtattagga

SEQ ID NO: 194212 - DNA, 13 bp, Artificial Sequence
  Oligonucleotide for detection of SNP TSC0047763
tcctaatacaaaa

SEQ ID NO: 194213 - DNA, 13 bp, Artificial Sequence
  Oligonucleotide for detection of SNP TSC0047763
ttttgttttagga

SEQ ID NO: 194214 - DNA, 13 bp, Artificial Sequence
  Oligonucleotide for detection of SNP TSC0047763
tcctaaaacaaaa

SEQ ID NO: 194215 - DNA, 13 bp, Artificial Sequence
  Oligonucleotide for detection of SNP TSC0047763
ttttaatatagga

SEQ ID NO: 194216 - DNA, 13 bp, Artificial Sequence
  Oligonucleotide for detection of SNP TSC0047763
tcctatattaaaa

SEQ ID NO: 194217 - DNA, 13 bp, Artificial Sequence
  Oligonucleotide for detection of SNP TSC0047763
ttttaagatagga

SEQ ID NO: 194218 - DNA, 13 bp, Artificial Sequence
  Oligonucleotide for detection of SNP TSC0047763
tcctatcttaaaa

SEQ ID NO: 194219 - DNA, 13 bp, Artificial Sequence
  Oligonucleotide for detection of SNP TSC0047764
ggaaaataataga

SEQ ID NO: 194220 - DNA, 13 bp, Artificial Sequence
  Oligonucleotide for detection of SNP TSC0047764
tctattattttcc

SEQ ID NO: 194221 - DNA, 13 bp, Artificial Sequence
  Oligonucleotide for detection of SNP TSC0047764
ggaaaagaataga

SEQ ID NO: 194222 - DNA, 13 bp, Artificial Sequence
  Oligonucleotide for detection of SNP TSC0047764
tctattcttttcc

SEQ ID NO: 194223 - DNA, 13 bp, Artificial Sequence
  Oligonucleotide for detection of SNP TSC0047765
ataaaagtagaaa

SEQ ID NO: 194224 - DNA, 13 bp, Artificial Sequence
  Oligonucleotide for detection of SNP TSC0047765
tttctacttttat

SEQ ID NO: 194225 - DNA, 13 bp, Artificial Sequence
  Oligonucleotide for detection of SNP TSC0047765
ataaaaatagaaa

SEQ ID NO: 194226 - DNA, 13 bp, Artificial Sequence
  Oligonucleotide for detection of SNP TSC0047765
tttctatttttat

SEQ ID NO: 194227 - DNA, 13 bp, Artificial Sequence
  Oligonucleotide for detection of SNP TSC0047766
gtgggtgggaaaa

SEQ ID NO: 194228 - DNA, 13 bp, Artificial Sequence
  Oligonucleotide for detection of SNP TSC0047766
ttttcccacccac

SEQ ID NO: 194229 - DNA, 13 bp, Artificial Sequence
  Oligonucleotide for detection of SNP TSC0047766
gtgggtaggaaaa

SEQ ID NO: 194230 - DNA, 13 bp, Artificial Sequence
  Oligonucleotide for detection of SNP TSC0047766
ttttcctacccac

SEQ ID NO: 194231 - DNA, 13 bp, Artificial Sequence
  Oligonucleotide for detection of SNP TSC0047770
tttgaaatgtttt

SEQ ID NO: 194232 - DNA, 13 bp, Artificial Sequence
  Oligonucleotide for detection of SNP TSC0047770
aaaacatttcaaa

SEQ ID NO: 194233 - DNA, 13 bp, Artificial Sequence
  Oligonucleotide for detection of SNP TSC0047770
tttgaattgtttt

SEQ ID NO: 194234 - DNA, 13 bp, Artificial Sequence
  Oligonucleotide for detection of SNP TSC0047770
aaaacaattcaaa

SEQ ID NO: 194235 - DNA, 13 bp, Artificial Sequence
  Oligonucleotide for detection of SNP TSC0047770
aaggtattttaga

SEQ ID NO: 194236 - DNA, 13 bp, Artificial Sequence
  Oligonucleotide for detection of SNP TSC0047770
tctaaaatacctt

SEQ ID NO: 194237 - DNA, 13 bp, Artificial Sequence
  Oligonucleotide for detection of SNP TSC0047770
aaggtagtttaga

SEQ ID NO: 194238 - DNA, 13 bp, Artificial Sequence
  Oligonucleotide for detection of SNP TSC0047770
tctaaactacctt

SEQ ID NO: 194239 - DNA, 13 bp, Artificial Sequence
  Oligonucleotide for detection of SNP TSC0047771
taagttatttgta

SEQ ID NO: 194240 - DNA, 13 bp, Artificial Sequence
  Oligonucleotide for detection of SNP TSC0047771
tacaaataactta

SEQ ID NO: 194241 - DNA, 13 bp, Artificial Sequence
  Oligonucleotide for detection of SNP TSC0047771
taagttttttgta

SEQ ID NO: 194242 - DNA, 13 bp, Artificial Sequence
  Oligonucleotide for detection of SNP TSC0047771
tacaaaaaactta

SEQ ID NO: 194243 - DNA, 13 bp, Artificial Sequence
  Oligonucleotide for detection of SNP TSC0047771
tgtaaatagtttg

SEQ ID NO: 194244 - DNA, 13 bp, Artificial Sequence
  Oligonucleotide for detection of SNP TSC0047771
caaactatttaca

SEQ ID NO: 194245 - DNA, 13 bp, Artificial Sequence
  Oligonucleotide for detection of SNP TSC0047771
tgtaaagagtttg

SEQ ID NO: 194246 - DNA, 13 bp, Artificial Sequence
  Oligonucleotide for detection of SNP TSC0047771
caaactctttaca

SEQ ID NO: 194247 - DNA, 13 bp, Artificial Sequence
  Oligonucleotide for detection of SNP TSC0047777
atatgttatggag

SEQ ID NO: 194248 - DNA, 13 bp, Artificial Sequence
  Oligonucleotide for detection of SNP TSC0047777
ctccataacatat

SEQ ID NO: 194249 - DNA, 13 bp, Artificial Sequence
  Oligonucleotide for detection of SNP TSC0047777
atatgtgatggag

SEQ ID NO: 194250 - DNA, 13 bp, Artificial Sequence
  Oligonucleotide for detection of SNP TSC0047777
ctccatcacatat

SEQ ID NO: 194251 - DNA, 13 bp, Artificial Sequence
  Oligonucleotide for detection of SNP TSC0047777
ttttatgatatat

SEQ ID NO: 194252 - DNA, 13 bp, Artificial Sequence
  Oligonucleotide for detection of SNP TSC0047777
atatatcataaaa

SEQ ID NO: 194253 - DNA, 13 bp, Artificial Sequence
  Oligonucleotide for detection of SNP TSC0047777
ttttattatatat

SEQ ID NO: 194254 - DNA, 13 bp, Artificial Sequence
  Oligonucleotide for detection of SNP TSC0047777
atatataataaaa

SEQ ID NO: 194255 - DNA, 13 bp, Artificial Sequence
  Oligonucleotide for detection of SNP TSC0047780
tgttttatattat

SEQ ID NO: 194256 - DNA, 13 bp, Artificial Sequence
  Oligonucleotide for detection of SNP TSC0047780
ataatataaaaca

SEQ ID NO: 194257 - DNA, 13 bp, Artificial Sequence
  Oligonucleotide for detection of SNP TSC0047780
tgttttttattat

SEQ ID NO: 194258 - DNA, 13 bp, Artificial Sequence
  Oligonucleotide for detection of SNP TSC0047780
ataataaaaaaca

SEQ ID NO: 194259 - DNA, 13 bp, Artificial Sequence
  Oligonucleotide for detection of SNP TSC0047780
ataatataagata

SEQ ID NO: 194260 - DNA, 13 bp, Artificial Sequence
  Oligonucleotide for detection of SNP TSC0047780
tatcttatattat

SEQ ID NO: 194261 - DNA, 13 bp, Artificial Sequence
  Oligonucleotide for detection of SNP TSC0047780
ataatagaagata

SEQ ID NO: 194262 - DNA, 13 bp, Artificial Sequence
  Oligonucleotide for detection of SNP TSC0047780
tatcttctattat

SEQ ID NO: 194263 - DNA, 13 bp, Artificial Sequence
  Oligonucleotide for detection of SNP TSC0047781
taattagagaaag

SEQ ID NO: 194264 - DNA, 13 bp, Artificial Sequence
  Oligonucleotide for detection of SNP TSC0047781
ctttctctaatta

SEQ ID NO: 194265 - DNA, 13 bp, Artificial Sequence
  Oligonucleotide for detection of SNP TSC0047781
taattaaagaaag

SEQ ID NO: 194266 - DNA, 13 bp, Artificial Sequence
  Oligonucleotide for detection of SNP TSC0047781
ctttctttaatta

SEQ ID NO: 194267 - DNA, 13 bp, Artificial Sequence
  Oligonucleotide for detection of SNP TSC0047782
aaaagttaatggg

SEQ ID NO: 194268 - DNA, 13 bp, Artificial Sequence
  Oligonucleotide for detection of SNP TSC0047782
cccattaactttt

SEQ ID NO: 194269 - DNA, 13 bp, Artificial Sequence
  Oligonucleotide for detection of SNP TSC0047782
aaaagtaaatggg

SEQ ID NO: 194270 - DNA, 13 bp, Artificial Sequence
  Oligonucleotide for detection of SNP TSC0047782
cccatttactttt

SEQ ID NO: 194271 - DNA, 13 bp, Artificial Sequence
  Oligonucleotide for detection of SNP TSC0047785
ggtatatagatag

SEQ ID NO: 194272 - DNA, 13 bp, Artificial Sequence
  Oligonucleotide for detection of SNP TSC0047785
ctatctatatacc

SEQ ID NO: 194273 - DNA, 13 bp, Artificial Sequence
  Oligonucleotide for detection of SNP TSC0047785
ggtatagagatag

SEQ ID NO: 194274 - DNA, 13 bp, Artificial Sequence
  Oligonucleotide for detection of SNP TSC0047785
ctatctctatacc

SEQ ID NO: 194275 - DNA, 13 bp, Artificial Sequence
  Oligonucleotide for detection of SNP TSC0047785
ttatttgtgtgty

SEQ ID NO: 194276 - DNA, 13 bp, Artificial Sequence
  Oligonucleotide for detection of SNP TSC0047785
racacacaaataa

SEQ ID NO: 194277 - DNA, 13 bp, Artificial Sequence
  Oligonucleotide for detection of SNP TSC0047785
ttatttttgtgty

SEQ ID NO: 194278 - DNA, 13 bp, Artificial Sequence
  Oligonucleotide for detection of SNP TSC0047785
racacaaaaataa

SEQ ID NO: 194279 - DNA, 13 bp, Artificial Sequence
  Oligonucleotide for detection of SNP TSC0047790
aagtatgggaaag

SEQ ID NO: 194280 - DNA, 13 bp, Artificial Sequence
  Oligonucleotide for detection of SNP TSC0047790
ctttcccatactt

SEQ ID NO: 194281 - DNA, 13 bp, Artificial Sequence
  Oligonucleotide for detection of SNP TSC0047790
aagtataggaaag

SEQ ID NO: 194282 - DNA, 13 bp, Artificial Sequence
  Oligonucleotide for detection of SNP TSC0047790
ctttcctatactt

SEQ ID NO: 194283 - DNA, 13 bp, Artificial Sequence
  Oligonucleotide for detection of SNP TSC0047790
aagtacgggaaag

SEQ ID NO: 194284 - DNA, 13 bp, Artificial Sequence
  Oligonucleotide for detection of SNP TSC0047790
ctttcccgtactt

SEQ ID NO: 194285 - DNA, 13 bp, Artificial Sequence
  Oligonucleotide for detection of SNP TSC0047793
tggtatgtttttt

SEQ ID NO: 194286 - DNA, 13 bp, Artificial Sequence
  Oligonucleotide for detection of SNP TSC0047793
aaaaaacatacca

SEQ ID NO: 194287 - DNA, 13 bp, Artificial Sequence
  Oligonucleotide for detection of SNP TSC0047793
cggtatgtttttt

SEQ ID NO: 194288 - DNA, 13 bp, Artificial Sequence
  Oligonucleotide for detection of SNP TSC0047793
aaaaaacataccg

SEQ ID NO: 194289 - DNA, 13 bp, Artificial Sequence
  Oligonucleotide for detection of SNP TSC0047793
cggtatatttttt

SEQ ID NO: 194290 - DNA, 13 bp, Artificial Sequence
  Oligonucleotide for detection of SNP TSC0047793
aaaaaatataccg

SEQ ID NO: 194291 - DNA, 13 bp, Artificial Sequence
  Oligonucleotide for detection of SNP TSC0047794
tatattaaaggty

SEQ ID NO: 194292 - DNA, 13 bp, Artificial Sequence
  Oligonucleotide for detection of SNP TSC0047794
racctttaatata

SEQ ID NO: 194293 - DNA, 13 bp, Artificial Sequence
  Oligonucleotide for detection of SNP TSC0047794
tatattgaaggty

SEQ ID NO: 194294 - DNA, 13 bp, Artificial Sequence
  Oligonucleotide for detection of SNP TSC0047794
raccttcaatata

SEQ ID NO: 194295 - DNA, 13 bp, Artificial Sequence
  Oligonucleotide for detection of SNP TSC0047794
tatatcgaaggty

SEQ ID NO: 194296 - DNA, 13 bp, Artificial Sequence
  Oligonucleotide for detection of SNP TSC0047794
raccttcgatata

SEQ ID NO: 194297 - DNA, 13 bp, Artificial Sequence
  Oligonucleotide for detection of SNP TSC0047794
ggtttttggtata

SEQ ID NO: 194298 - DNA, 13 bp, Artificial Sequence
  Oligonucleotide for detection of SNP TSC0047794
tataccaaaaacc

SEQ ID NO: 194299 - DNA, 13 bp, Artificial Sequence
  Oligonucleotide for detection of SNP TSC0047794
ggttttcggtata

SEQ ID NO: 194300 - DNA, 13 bp, Artificial Sequence
  Oligonucleotide for detection of SNP TSC0047794
tataccgaaaacc

SEQ ID NO: 194301 - DNA, 13 bp, Artificial Sequence
  Oligonucleotide for detection of SNP TSC0047795
ggttgggtatggg

SEQ ID NO: 194302 - DNA, 13 bp, Artificial Sequence
  Oligonucleotide for detection of SNP TSC0047795
cccatacccaacc

SEQ ID NO: 194303 - DNA, 13 bp, Artificial Sequence
  Oligonucleotide for detection of SNP TSC0047795
ggttggatatggg

SEQ ID NO: 194304 - DNA, 13 bp, Artificial Sequence
  Oligonucleotide for detection of SNP TSC0047795
cccatatccaacc

SEQ ID NO: 194305 - DNA, 13 bp, Artificial Sequence
  Oligonucleotide for detection of SNP TSC0047796
gttaatatagtaa

SEQ ID NO: 194306 - DNA, 13 bp, Artificial Sequence
  Oligonucleotide for detection of SNP TSC0047796
ttactatattaac

SEQ ID NO: 194307 - DNA, 13 bp, Artificial Sequence
  Oligonucleotide for detection of SNP TSC0047796
gttaatgtagtaa

SEQ ID NO: 194308 - DNA, 13 bp, Artificial Sequence
  Oligonucleotide for detection of SNP TSC0047796
ttactacattaac

SEQ ID NO: 194309 - DNA, 13 bp, Artificial Sequence
  Oligonucleotide for detection of SNP TSC0047796
gttaacgtagtaa

SEQ ID NO: 194310 - DNA, 13 bp, Artificial Sequence
  Oligonucleotide for detection of SNP TSC0047796
ttactacgttaac

SEQ ID NO: 194311 - DNA, 13 bp, Artificial Sequence
  Oligonucleotide for detection of SNP TSC0047797
ttgatggtatatt

SEQ ID NO: 194312 - DNA, 13 bp, Artificial Sequence
  Oligonucleotide for detection of SNP TSC0047797
aatataccatcaa

SEQ ID NO: 194313 - DNA, 13 bp, Artificial Sequence
  Oligonucleotide for detection of SNP TSC0047797
ttgatgatatatt

SEQ ID NO: 194314 - DNA, 13 bp, Artificial Sequence
  Oligonucleotide for detection of SNP TSC0047797
aatatatcatcaa

SEQ ID NO: 194315 - DNA, 13 bp, Artificial Sequence
  Oligonucleotide for detection of SNP TSC0047798
tttagtattgggt

SEQ ID NO: 194316 - DNA, 13 bp, Artificial Sequence
  Oligonucleotide for detection of SNP TSC0047798
acccaatactaaa

SEQ ID NO: 194317 - DNA, 13 bp, Artificial Sequence
  Oligonucleotide for detection of SNP TSC0047798
tttagtgttgggt

SEQ ID NO: 194318 - DNA, 13 bp, Artificial Sequence
  Oligonucleotide for detection of SNP TSC0047798
acccaacactaaa

SEQ ID NO: 194319 - DNA, 13 bp, Artificial Sequence
  Oligonucleotide for detection of SNP TSC0047798
tttagcgttgggt

SEQ ID NO: 194320 - DNA, 13 bp, Artificial Sequence
  Oligonucleotide for detection of SNP TSC0047798
acccaacgctaaa

SEQ ID NO: 194321 - DNA, 13 bp, Artificial Sequence
  Oligonucleotide for detection of SNP TSC0047798
atttaatgttgga

SEQ ID NO: 194322 - DNA, 13 bp, Artificial Sequence
  Oligonucleotide for detection of SNP TSC0047798
tccaacattaaat

SEQ ID NO: 194323 - DNA, 13 bp, Artificial Sequence
  Oligonucleotide for detection of SNP TSC0047798
atttaacgttgga

SEQ ID NO: 194324 - DNA, 13 bp, Artificial Sequence
  Oligonucleotide for detection of SNP TSC0047798
tccaacgttaaat

SEQ ID NO: 194325 - DNA, 13 bp, Artificial Sequence
  Oligonucleotide for detection of SNP TSC0047800
aattgttggaagg

SEQ ID NO: 194326 - DNA, 13 bp, Artificial Sequence
  Oligonucleotide for detection of SNP TSC0047800
ccttccaacaatt

SEQ ID NO: 194327 - DNA, 13 bp, Artificial Sequence
  Oligonucleotide for detection of SNP TSC0047800
aattgtgggaagg

SEQ ID NO: 194328 - DNA, 13 bp, Artificial Sequence
  Oligonucleotide for detection of SNP TSC0047800
ccttcccacaatt

SEQ ID NO: 194329 - DNA, 13 bp, Artificial Sequence
  Oligonucleotide for detection of SNP TSC0047801
tttttaggagagy

SEQ ID NO: 194330 - DNA, 13 bp, Artificial Sequence
  Oligonucleotide for detection of SNP TSC0047801
rctctcctaaaaa

SEQ ID NO: 194331 - DNA, 13 bp, Artificial Sequence
  Oligonucleotide for detection of SNP TSC0047801
gtttttataggag

SEQ ID NO: 194332 - DNA, 13 bp, Artificial Sequence
  Oligonucleotide for detection of SNP TSC0047801
ctcctataaaaac

SEQ ID NO: 194333 - DNA, 13 bp, Artificial Sequence
  Oligonucleotide for detection of SNP TSC0047801
gtttttttaggag

SEQ ID NO: 194334 - DNA, 13 bp, Artificial Sequence
  Oligonucleotide for detection of SNP TSC0047801
ctcctaaaaaaac

SEQ ID NO: 194335 - DNA, 13 bp, Artificial Sequence
  Oligonucleotide for detection of SNP TSC0047803
taaagtaagatat

SEQ ID NO: 194336 - DNA, 13 bp, Artificial Sequence
  Oligonucleotide for detection of SNP TSC0047803
atatcttacttta

SEQ ID NO: 194337 - DNA, 13 bp, Artificial Sequence
  Oligonucleotide for detection of SNP TSC0047803
taaagttagatat

SEQ ID NO: 194338 - DNA, 13 bp, Artificial Sequence
  Oligonucleotide for detection of SNP TSC0047803
atatctaacttta

SEQ ID NO: 194339 - DNA, 13 bp, Artificial Sequence
  Oligonucleotide for detection of SNP TSC0047803
atgttttattttg

SEQ ID NO: 194340 - DNA, 13 bp, Artificial Sequence
  Oligonucleotide for detection of SNP TSC0047803
caaaataaaacat

SEQ ID NO: 194341 - DNA, 13 bp, Artificial Sequence
  Oligonucleotide for detection of SNP TSC0047804
gtgtaggtttttt

SEQ ID NO: 194342 - DNA, 13 bp, Artificial Sequence
  Oligonucleotide for detection of SNP TSC0047804
aaaaaacctacac

SEQ ID NO: 194343 - DNA, 13 bp, Artificial Sequence
  Oligonucleotide for detection of SNP TSC0047804
gtgtagatttttt

SEQ ID NO: 194344 - DNA, 13 bp, Artificial Sequence
  Oligonucleotide for detection of SNP TSC0047804
aaaaaatctacac

SEQ ID NO: 194345 - DNA, 13 bp, Artificial Sequence
  Oligonucleotide for detection of SNP TSC0047806
agagtagtaatag

SEQ ID NO: 194346 - DNA, 13 bp, Artificial Sequence
  Oligonucleotide for detection of SNP TSC0047806
ctattactactct

SEQ ID NO: 194347 - DNA, 13 bp, Artificial Sequence
  Oligonucleotide for detection of SNP TSC0047806
agagtaataatag

SEQ ID NO: 194348 - DNA, 13 bp, Artificial Sequence
  Oligonucleotide for detection of SNP TSC0047806
ctattattactct

SEQ ID NO: 194349 - DNA, 13 bp, Artificial Sequence
  Oligonucleotide for detection of SNP TSC0047807
gattattgtttag

SEQ ID NO: 194350 - DNA, 13 bp, Artificial Sequence
  Oligonucleotide for detection of SNP TSC0047807
ctaaacaataatc

SEQ ID NO: 194351 - DNA, 13 bp, Artificial Sequence
  Oligonucleotide for detection of SNP TSC0047807
gattatcgtttag

SEQ ID NO: 194352 - DNA, 13 bp, Artificial Sequence
  Oligonucleotide for detection of SNP TSC0047807
ctaaacgataatc

SEQ ID NO: 194353 - DNA, 13 bp, Artificial Sequence
  Oligonucleotide for detection of SNP TSC0047807
ttggatggtagty

SEQ ID NO: 194354 - DNA, 13 bp, Artificial Sequence
  Oligonucleotide for detection of SNP TSC0047807
ractaccatccaa

SEQ ID NO: 194355 - DNA, 13 bp, Artificial Sequence
  Oligonucleotide for detection of SNP TSC0047807
ttggatagtagty

SEQ ID NO: 194356 - DNA, 13 bp, Artificial Sequence
  Oligonucleotide for detection of SNP TSC0047807
ractactatccaa

SEQ ID NO: 194357 - DNA, 13 bp, Artificial Sequence
  Oligonucleotide for detection of SNP TSC0047807
ttggacggtagty

SEQ ID NO: 194358 - DNA, 13 bp, Artificial Sequence
  Oligonucleotide for detection of SNP TSC0047807
ractaccgtccaa

SEQ ID NO: 194359 - DNA, 13 bp, Artificial Sequence
  Oligonucleotide for detection of SNP TSC0047813
gagttaatgggat

SEQ ID NO: 194360 - DNA, 13 bp, Artificial Sequence
  Oligonucleotide for detection of SNP TSC0047813
atcccattaactc

SEQ ID NO: 194361 - DNA, 13 bp, Artificial Sequence
  Oligonucleotide for detection of SNP TSC0047813
gagttagtgggat

SEQ ID NO: 194362 - DNA, 13 bp, Artificial Sequence
  Oligonucleotide for detection of SNP TSC0047813
atcccactaactc

SEQ ID NO: 194363 - DNA, 13 bp, Artificial Sequence
  Oligonucleotide for detection of SNP TSC0047814
gttagttgatgag

SEQ ID NO: 194364 - DNA, 13 bp, Artificial Sequence
  Oligonucleotide for detection of SNP TSC0047814
ctcatcaactaac

SEQ ID NO: 194365 - DNA, 13 bp, Artificial Sequence
  Oligonucleotide for detection of SNP TSC0047814
gttagtggatgag

SEQ ID NO: 194366 - DNA, 13 bp, Artificial Sequence
  Oligonucleotide for detection of SNP TSC0047814
ctcatccactaac

SEQ ID NO: 194367 - DNA, 13 bp, Artificial Sequence
  Oligonucleotide for detection of SNP TSC0047814
gttagtcgatgag

SEQ ID NO: 194368 - DNA, 13 bp, Artificial Sequence
  Oligonucleotide for detection of SNP TSC0047814
ctcatcgactaac

SEQ ID NO: 194369 - DNA, 13 bp, Artificial Sequence
  Oligonucleotide for detection of SNP TSC0047814
gttagtggacgag

SEQ ID NO: 194370 - DNA, 13 bp, Artificial Sequence
  Oligonucleotide for detection of SNP TSC0047814
ctcgtccactaac

SEQ ID NO: 194371 - DNA, 13 bp, Artificial Sequence
  Oligonucleotide for detection of SNP TSC0047814
gttagttgacgag

SEQ ID NO: 194372 - DNA, 13 bp, Artificial Sequence
  Oligonucleotide for detection of SNP TSC0047814
ctcgtcaactaac

SEQ ID NO: 194373 - DNA, 13 bp, Artificial Sequence
  Oligonucleotide for detection of SNP TSC0047814
gttagtcgacgag

SEQ ID NO: 194374 - DNA, 13 bp, Artificial Sequence
  Oligonucleotide for detection of SNP TSC0047814
ctcgtcgactaac

SEQ ID NO: 194375 - DNA, 13 bp, Artificial Sequence
  Oligonucleotide for detection of SNP TSC0047814
tttgttgattagy

SEQ ID NO: 194376 - DNA, 13 bp, Artificial Sequence
  Oligonucleotide for detection of SNP TSC0047814
rctaatcaacaaa

SEQ ID NO: 194377 - DNA, 13 bp, Artificial Sequence
  Oligonucleotide for detection of SNP TSC0047814
tttgtttattagy

SEQ ID NO: 194378 - DNA, 13 bp, Artificial Sequence
  Oligonucleotide for detection of SNP TSC0047814
rctaataaacaaa

SEQ ID NO: 194379 - DNA, 13 bp, Artificial Sequence
  Oligonucleotide for detection of SNP TSC0047814
ttcgttgattagy

SEQ ID NO: 194380 - DNA, 13 bp, Artificial Sequence
  Oligonucleotide for detection of SNP TSC0047814
rctaatcaacgaa

SEQ ID NO: 194381 - DNA, 13 bp, Artificial Sequence
  Oligonucleotide for detection of SNP TSC0047814
ttcgtttattagy

SEQ ID NO: 194382 - DNA, 13 bp, Artificial Sequence
  Oligonucleotide for detection of SNP TSC0047814
rctaataaacgaa

SEQ ID NO: 194383 - DNA, 13 bp, Artificial Sequence
  Oligonucleotide for detection of SNP TSC0047814
tttgtcgattagy

SEQ ID NO: 194384 - DNA, 13 bp, Artificial Sequence
  Oligonucleotide for detection of SNP TSC0047814
rctaatcgacaaa

SEQ ID NO: 194385 - DNA, 13 bp, Artificial Sequence
  Oligonucleotide for detection of SNP TSC0047814
ttcgtcgattagy

SEQ ID NO: 194386 - DNA, 13 bp, Artificial Sequence
  Oligonucleotide for detection of SNP TSC0047814
rctaatcgacgaa

SEQ ID NO: 194387 - DNA, 13 bp, Artificial Sequence
  Oligonucleotide for detection of SNP TSC0047815
tgggataggtgag

SEQ ID NO: 194388 - DNA, 13 bp, Artificial Sequence
  Oligonucleotide for detection of SNP TSC0047815
ctcacctatccca

SEQ ID NO: 194389 - DNA, 13 bp, Artificial Sequence
  Oligonucleotide for detection of SNP TSC0047815
tgggatgggtgag

SEQ ID NO: 194390 - DNA, 13 bp, Artificial Sequence
  Oligonucleotide for detection of SNP TSC0047815
ctcacccatccca

SEQ ID NO: 194391 - DNA, 13 bp, Artificial Sequence
  Oligonucleotide for detection of SNP TSC0047815
tgggataggcgag

SEQ ID NO: 194392 - DNA, 13 bp, Artificial Sequence
  Oligonucleotide for detection of SNP TSC0047815
ctcgcctatccca

SEQ ID NO: 194393 - DNA, 13 bp, Artificial Sequence
  Oligonucleotide for detection of SNP TSC0047815
tgggacgggtgag

SEQ ID NO: 194394 - DNA, 13 bp, Artificial Sequence
  Oligonucleotide for detection of SNP TSC0047815
ctcacccgtccca

SEQ ID NO: 194395 - DNA, 13 bp, Artificial Sequence
  Oligonucleotide for detection of SNP TSC0047815
tgggatgggcgag

SEQ ID NO: 194396 - DNA, 13 bp, Artificial Sequence
  Oligonucleotide for detection of SNP TSC0047815
ctcgcccatccca

SEQ ID NO: 194397 - DNA, 13 bp, Artificial Sequence
  Oligonucleotide for detection of SNP TSC0047815
tgggacgggcgag

SEQ ID NO: 194398 - DNA, 13 bp, Artificial Sequence
  Oligonucleotide for detection of SNP TSC0047815
ctcgcccgtccca

SEQ ID NO: 194399 - DNA, 13 bp, Artificial Sequence
  Oligonucleotide for detection of SNP TSC0047816
atttatttttgga

SEQ ID NO: 194400 - DNA, 13 bp, Artificial Sequence
  Oligonucleotide for detection of SNP TSC0047816
tccaaaaataaat

SEQ ID NO: 194401 - DNA, 13 bp, Artificial Sequence
  Oligonucleotide for detection of SNP TSC0047816
atttacgtttgga

SEQ ID NO: 194402 - DNA, 13 bp, Artificial Sequence
  Oligonucleotide for detection of SNP TSC0047816
tccaaacgtaaat

SEQ ID NO: 194403 - DNA, 13 bp, Artificial Sequence
  Oligonucleotide for detection of SNP TSC0047816
tttaaaagtgaat

SEQ ID NO: 194404 - DNA, 13 bp, Artificial Sequence
  Oligonucleotide for detection of SNP TSC0047816
attcacttttaaa

SEQ ID NO: 194405 - DNA, 13 bp, Artificial Sequence
  Oligonucleotide for detection of SNP TSC0047816
tttaaatgtgaat

SEQ ID NO: 194406 - DNA, 13 bp, Artificial Sequence
  Oligonucleotide for detection of SNP TSC0047816
attcacatttaaa

SEQ ID NO: 194407 - DNA, 13 bp, Artificial Sequence
  Oligonucleotide for detection of SNP TSC0047816
tttaaacgtgaat

SEQ ID NO: 194408 - DNA, 13 bp, Artificial Sequence
  Oligonucleotide for detection of SNP TSC0047816
attcacgtttaaa

SEQ ID NO: 194409 - DNA, 13 bp, Artificial Sequence
  Oligonucleotide for detection of SNP TSC0047817
ttagagataaaaa

SEQ ID NO: 194410 - DNA, 13 bp, Artificial Sequence
  Oligonucleotide for detection of SNP TSC0047817
tttttatctctaa

SEQ ID NO: 194411 - DNA, 13 bp, Artificial Sequence
  Oligonucleotide for detection of SNP TSC0047817
ttagagttaaaaa

SEQ ID NO: 194412 - DNA, 13 bp, Artificial Sequence
  Oligonucleotide for detection of SNP TSC0047817
tttttaactctaa

SEQ ID NO: 194413 - DNA, 13 bp, Artificial Sequence
  Oligonucleotide for detection of SNP TSC0047818
aatagttgaaggg

SEQ ID NO: 194414 - DNA, 13 bp, Artificial Sequence
  Oligonucleotide for detection of SNP TSC0047818
cccttcaactatt

SEQ ID NO: 194415 - DNA, 13 bp, Artificial Sequence
  Oligonucleotide for detection of SNP TSC0047818
aatagtcgaaggg

SEQ ID NO: 194416 - DNA, 13 bp, Artificial Sequence
  Oligonucleotide for detection of SNP TSC0047818
cccttcgactatt

SEQ ID NO: 194417 - DNA, 13 bp, Artificial Sequence
  Oligonucleotide for detection of SNP TSC0047818
ttttttgattgtt

SEQ ID NO: 194418 - DNA, 13 bp, Artificial Sequence
  Oligonucleotide for detection of SNP TSC0047818
aacaatcaaaaaa

SEQ ID NO: 194419 - DNA, 13 bp, Artificial Sequence
  Oligonucleotide for detection of SNP TSC0047818
tttttcgattgtt

SEQ ID NO: 194420 - DNA, 13 bp, Artificial Sequence
  Oligonucleotide for detection of SNP TSC0047818
aacaatcgaaaaa

SEQ ID NO: 194421 - DNA, 13 bp, Artificial Sequence
  Oligonucleotide for detection of SNP TSC0047819
gtgagaggatata

SEQ ID NO: 194422 - DNA, 13 bp, Artificial Sequence
  Oligonucleotide for detection of SNP TSC0047819
tatatcctctcac

SEQ ID NO: 194423 - DNA, 13 bp, Artificial Sequence
  Oligonucleotide for detection of SNP TSC0047819
gtgagaagatata

SEQ ID NO: 194424 - DNA, 13 bp, Artificial Sequence
  Oligonucleotide for detection of SNP TSC0047819
tatatcttctcac

SEQ ID NO: 194425 - DNA, 13 bp, Artificial Sequence
  Oligonucleotide for detection of SNP TSC0047823
aagaaatgtaaay

SEQ ID NO: 194426 - DNA, 13 bp, Artificial Sequence
  Oligonucleotide for detection of SNP TSC0047823
rtttacatttctt

SEQ ID NO: 194427 - DNA, 13 bp, Artificial Sequence
  Oligonucleotide for detection of SNP TSC0047823
aagaaacgtaaay

SEQ ID NO: 194428 - DNA, 13 bp, Artificial Sequence
  Oligonucleotide for detection of SNP TSC0047823
rtttacgtttctt

SEQ ID NO: 194429 - DNA, 13 bp, Artificial Sequence
  Oligonucleotide for detection of SNP TSC0047826
gattatgggtgtg

SEQ ID NO: 194430 - DNA, 13 bp, Artificial Sequence
  Oligonucleotide for detection of SNP TSC0047826
cacacccataatc

SEQ ID NO: 194431 - DNA, 13 bp, Artificial Sequence
  Oligonucleotide for detection of SNP TSC0047826
gattataggtgtg

SEQ ID NO: 194432 - DNA, 13 bp, Artificial Sequence
  Oligonucleotide for detection of SNP TSC0047826
cacacctataatc

SEQ ID NO: 194433 - DNA, 13 bp, Artificial Sequence
  Oligonucleotide for detection of SNP TSC0047826
gattacgggtgtg

SEQ ID NO: 194434 - DNA, 13 bp, Artificial Sequence
  Oligonucleotide for detection of SNP TSC0047826
cacacccgtaatc

SEQ ID NO: 194435 - DNA, 13 bp, Artificial Sequence
  Oligonucleotide for detection of SNP TSC0047829
aaaataggtagtg

SEQ ID NO: 194436 - DNA, 13 bp, Artificial Sequence
  Oligonucleotide for detection of SNP TSC0047829
cactacctatttt

SEQ ID NO: 194437 - DNA, 13 bp, Artificial Sequence
  Oligonucleotide for detection of SNP TSC0047829
aaaataagtagcg

SEQ ID NO: 194438 - DNA, 13 bp, Artificial Sequence
  Oligonucleotide for detection of SNP TSC0047829
cgctacttatttt

SEQ ID NO: 194439 - DNA, 13 bp, Artificial Sequence
  Oligonucleotide for detection of SNP TSC0047829
aaaataggtagcg

SEQ ID NO: 194440 - DNA, 13 bp, Artificial Sequence
  Oligonucleotide for detection of SNP TSC0047829
cgctacctatttt

SEQ ID NO: 194441 - DNA, 13 bp, Artificial Sequence
  Oligonucleotide for detection of SNP TSC0047830
tttttcgattttt

SEQ ID NO: 194442 - DNA, 13 bp, Artificial Sequence
  Oligonucleotide for detection of SNP TSC0047830
aaaaatcgaaaaa

SEQ ID NO: 194443 - DNA, 13 bp, Artificial Sequence
  Oligonucleotide for detection of SNP TSC0047830
agaaattgagagg

SEQ ID NO: 194444 - DNA, 13 bp, Artificial Sequence
  Oligonucleotide for detection of SNP TSC0047830
cctctcaatttct

SEQ ID NO: 194445 - DNA, 13 bp, Artificial Sequence
  Oligonucleotide for detection of SNP TSC0047830
agaaatcgagagg

SEQ ID NO: 194446 - DNA, 13 bp, Artificial Sequence
  Oligonucleotide for detection of SNP TSC0047830
cctctcgatttct

SEQ ID NO: 194447 - DNA, 13 bp, Artificial Sequence
  Oligonucleotide for detection of SNP TSC0047831
gattgtatgtttt

SEQ ID NO: 194448 - DNA, 13 bp, Artificial Sequence
  Oligonucleotide for detection of SNP TSC0047831
aaaacatacaatc

SEQ ID NO: 194449 - DNA, 13 bp, Artificial Sequence
  Oligonucleotide for detection of SNP TSC0047831
gattgtgtgtttt

SEQ ID NO: 194450 - DNA, 13 bp, Artificial Sequence
  Oligonucleotide for detection of SNP TSC0047831
aaaacacacaatc

SEQ ID NO: 194451 - DNA, 13 bp, Artificial Sequence
  Oligonucleotide for detection of SNP TSC0047831
gattgcgtgtttt

SEQ ID NO: 194452 - DNA, 13 bp, Artificial Sequence
  Oligonucleotide for detection of SNP TSC0047831
aaaacacgcaatc

SEQ ID NO: 194453 - DNA, 13 bp, Artificial Sequence
  Oligonucleotide for detection of SNP TSC0047831
aagatatgtaaty

SEQ ID NO: 194454 - DNA, 13 bp, Artificial Sequence
  Oligonucleotide for detection of SNP TSC0047831
rattacatatctt

SEQ ID NO: 194455 - DNA, 13 bp, Artificial Sequence
  Oligonucleotide for detection of SNP TSC0047831
aagatacgtaaty

SEQ ID NO: 194456 - DNA, 13 bp, Artificial Sequence
  Oligonucleotide for detection of SNP TSC0047831
rattacgtatctt

SEQ ID NO: 194457 - DNA, 13 bp, Artificial Sequence
  Oligonucleotide for detection of SNP TSC0047832
tgttgtaaattaa

SEQ ID NO: 194458 - DNA, 13 bp, Artificial Sequence
  Oligonucleotide for detection of SNP TSC0047832
ttaatttacaaca

SEQ ID NO: 194459 - DNA, 13 bp, Artificial Sequence
  Oligonucleotide for detection of SNP TSC0047832
tgttgttaattaa

SEQ ID NO: 194460 - DNA, 13 bp, Artificial Sequence
  Oligonucleotide for detection of SNP TSC0047832
ttaattaacaaca

SEQ ID NO: 194461 - DNA, 13 bp, Artificial Sequence
  Oligonucleotide for detection of SNP TSC0047832
ttaatttgtaata

SEQ ID NO: 194462 - DNA, 13 bp, Artificial Sequence
  Oligonucleotide for detection of SNP TSC0047832
tattacaaattaa

SEQ ID NO: 194463 - DNA, 13 bp, Artificial Sequence
  Oligonucleotide for detection of SNP TSC0047832
ttaattggtaata

SEQ ID NO: 194464 - DNA, 13 bp, Artificial Sequence
  Oligonucleotide for detection of SNP TSC0047832
tattaccaattaa

SEQ ID NO: 194465 - DNA, 13 bp, Artificial Sequence
  Oligonucleotide for detection of SNP TSC0047833
ttataacgtttaa

SEQ ID NO: 194466 - DNA, 13 bp, Artificial Sequence
  Oligonucleotide for detection of SNP TSC0047833
ttaaacgttataa

SEQ ID NO: 194467 - DNA, 13 bp, Artificial Sequence
  Oligonucleotide for detection of SNP TSC0047833
ttaggtgttatga

SEQ ID NO: 194468 - DNA, 13 bp, Artificial Sequence
  Oligonucleotide for detection of SNP TSC0047833
tcataacacctaa

SEQ ID NO: 194469 - DNA, 13 bp, Artificial Sequence
  Oligonucleotide for detection of SNP TSC0047833
ttaggtattatga

SEQ ID NO: 194470 - DNA, 13 bp, Artificial Sequence
  Oligonucleotide for detection of SNP TSC0047833
tcataatacctaa

SEQ ID NO: 194471 - DNA, 13 bp, Artificial Sequence
  Oligonucleotide for detection of SNP TSC0047833
ttaggcgttatga

SEQ ID NO: 194472 - DNA, 13 bp, Artificial Sequence
  Oligonucleotide for detection of SNP TSC0047833
tcataacgcctaa

SEQ ID NO: 194473 - DNA, 13 bp, Artificial Sequence
  Oligonucleotide for detection of SNP TSC0047834
attatagtgtgaa

SEQ ID NO: 194474 - DNA, 13 bp, Artificial Sequence
  Oligonucleotide for detection of SNP TSC0047834
ttcacactataat

SEQ ID NO: 194475 - DNA, 13 bp, Artificial Sequence
  Oligonucleotide for detection of SNP TSC0047836
aaaagttgatgty

SEQ ID NO: 194476 - DNA, 13 bp, Artificial Sequence
  Oligonucleotide for detection of SNP TSC0047836
racatcaactttt

SEQ ID NO: 194477 - DNA, 13 bp, Artificial Sequence
  Oligonucleotide for detection of SNP TSC0047836
aaaagtcgatgty

SEQ ID NO: 194478 - DNA, 13 bp, Artificial Sequence
  Oligonucleotide for detection of SNP TSC0047836
racatcgactttt

SEQ ID NO: 194479 - DNA, 13 bp, Artificial Sequence
  Oligonucleotide for detection of SNP TSC0047837
gtgtgtacgtatg

SEQ ID NO: 194480 - DNA, 13 bp, Artificial Sequence
  Oligonucleotide for detection of SNP TSC0047837
catacgtacacac

SEQ ID NO: 194481 - DNA, 13 bp, Artificial Sequence
  Oligonucleotide for detection of SNP TSC0047837
gtgtgtgcgtatg

SEQ ID NO: 194482 - DNA, 13 bp, Artificial Sequence
  Oligonucleotide for detection of SNP TSC0047837
catacgcacacac

SEQ ID NO: 194483 - DNA, 13 bp, Artificial Sequence
  Oligonucleotide for detection of SNP TSC0047838
tgtattattgtay

SEQ ID NO: 194484 - DNA, 13 bp, Artificial Sequence
  Oligonucleotide for detection of SNP TSC0047838
rtacaataataca

SEQ ID NO: 194485 - DNA, 13 bp, Artificial Sequence
  Oligonucleotide for detection of SNP TSC0047838
tgtatttttgtay

SEQ ID NO: 194486 - DNA, 13 bp, Artificial Sequence
  Oligonucleotide for detection of SNP TSC0047838
rtacaaaaataca

SEQ ID NO: 194487 - DNA, 13 bp, Artificial Sequence
  Oligonucleotide for detection of SNP TSC0047838
tgtattatcgtay

SEQ ID NO: 194488 - DNA, 13 bp, Artificial Sequence
  Oligonucleotide for detection of SNP TSC0047838
rtacgataataca

SEQ ID NO: 194489 - DNA, 13 bp, Artificial Sequence
  Oligonucleotide for detection of SNP TSC0047838
tgtattttcgtay

SEQ ID NO: 194490 - DNA, 13 bp, Artificial Sequence
  Oligonucleotide for detection of SNP TSC0047838
rtacgaaaataca

SEQ ID NO: 194491 - DNA, 13 bp, Artificial Sequence
  Oligonucleotide for detection of SNP TSC0047838
gtgtgatggtgta

SEQ ID NO: 194492 - DNA, 13 bp, Artificial Sequence
  Oligonucleotide for detection of SNP TSC0047838
tacaccatcacac

SEQ ID NO: 194493 - DNA, 13 bp, Artificial Sequence
  Oligonucleotide for detection of SNP TSC0047838
gtgtgaaggtgta

SEQ ID NO: 194494 - DNA, 13 bp, Artificial Sequence
  Oligonucleotide for detection of SNP TSC0047838
tacaccttcacac

SEQ ID NO: 194495 - DNA, 13 bp, Artificial Sequence
  Oligonucleotide for detection of SNP TSC0047838
gtgcgatggtgta

SEQ ID NO: 194496 - DNA, 13 bp, Artificial Sequence
  Oligonucleotide for detection of SNP TSC0047838
tacaccatcgcac

SEQ ID NO: 194497 - DNA, 13 bp, Artificial Sequence
  Oligonucleotide for detection of SNP TSC0047838
gtgcgaaggtgta

SEQ ID NO: 194498 - DNA, 13 bp, Artificial Sequence
  Oligonucleotide for detection of SNP TSC0047838
tacaccttcgcac

SEQ ID NO: 194499 - DNA, 13 bp, Artificial Sequence
  Oligonucleotide for detection of SNP TSC0047839
taattcgttatta

SEQ ID NO: 194500 - DNA, 13 bp, Artificial Sequence
  Oligonucleotide for detection of SNP TSC0047839
taataacgaatta

SEQ ID NO: 194501 - DNA, 13 bp, Artificial Sequence
  Oligonucleotide for detection of SNP TSC0047839
tagtgatgggttg

SEQ ID NO: 194502 - DNA, 13 bp, Artificial Sequence
  Oligonucleotide for detection of SNP TSC0047839
caacccatcacta

SEQ ID NO: 194503 - DNA, 13 bp, Artificial Sequence
  Oligonucleotide for detection of SNP TSC0047839
tagtgacgggttg

SEQ ID NO: 194504 - DNA, 13 bp, Artificial Sequence
  Oligonucleotide for detection of SNP TSC0047839
caacccgtcacta

SEQ ID NO: 194505 - DNA, 13 bp, Artificial Sequence
  Oligonucleotide for detection of SNP TSC0047842
attttggtgtaag

SEQ ID NO: 194506 - DNA, 13 bp, Artificial Sequence
  Oligonucleotide for detection of SNP TSC0047842
cttacaccaaaat

SEQ ID NO: 194507 - DNA, 13 bp, Artificial Sequence
  Oligonucleotide for detection of SNP TSC0047842
attttgatgtaag

SEQ ID NO: 194508 - DNA, 13 bp, Artificial Sequence
  Oligonucleotide for detection of SNP TSC0047842
cttacatcaaaat

SEQ ID NO: 194509 - DNA, 13 bp, Artificial Sequence
  Oligonucleotide for detection of SNP TSC0047844
atgaaggaattty

SEQ ID NO: 194510 - DNA, 13 bp, Artificial Sequence
  Oligonucleotide for detection of SNP TSC0047844
raaattccttcat

SEQ ID NO: 194511 - DNA, 13 bp, Artificial Sequence
  Oligonucleotide for detection of SNP TSC0047844
atgaagaaattty

SEQ ID NO: 194512 - DNA, 13 bp, Artificial Sequence
  Oligonucleotide for detection of SNP TSC0047844
raaatttcttcat

SEQ ID NO: 194513 - DNA, 13 bp, Artificial Sequence
  Oligonucleotide for detection of SNP TSC0047846
tttaattgtatta

SEQ ID NO: 194514 - DNA, 13 bp, Artificial Sequence
  Oligonucleotide for detection of SNP TSC0047846
taatacaattaaa

SEQ ID NO: 194515 - DNA, 13 bp, Artificial Sequence
  Oligonucleotide for detection of SNP TSC0047846
tttaatcgtatta

SEQ ID NO: 194516 - DNA, 13 bp, Artificial Sequence
  Oligonucleotide for detection of SNP TSC0047846
taatacgattaaa

SEQ ID NO: 194517 - DNA, 13 bp, Artificial Sequence
  Oligonucleotide for detection of SNP TSC0047846
tgatatggttagg

SEQ ID NO: 194518 - DNA, 13 bp, Artificial Sequence
  Oligonucleotide for detection of SNP TSC0047846
cctaaccatatca

SEQ ID NO: 194519 - DNA, 13 bp, Artificial Sequence
  Oligonucleotide for detection of SNP TSC0047846
tgatatagttagg

SEQ ID NO: 194520 - DNA, 13 bp, Artificial Sequence
  Oligonucleotide for detection of SNP TSC0047846
cctaactatatca

SEQ ID NO: 194521 - DNA, 13 bp, Artificial Sequence
  Oligonucleotide for detection of SNP TSC0047846
tgatacggttagg

SEQ ID NO: 194522 - DNA, 13 bp, Artificial Sequence
  Oligonucleotide for detection of SNP TSC0047846
cctaaccgtatca

SEQ ID NO: 194523 - DNA, 13 bp, Artificial Sequence
  Oligonucleotide for detection of SNP TSC0004866
tttaatgtttttg

SEQ ID NO: 194524 - DNA, 13 bp, Artificial Sequence
  Oligonucleotide for detection of SNP TSC0004866
caaaaacattaaa

SEQ ID NO: 194525 - DNA, 13 bp, Artificial Sequence
  Oligonucleotide for detection of SNP TSC0004866
tttaacgtttttg

SEQ ID NO: 194526 - DNA, 13 bp, Artificial Sequence
  Oligonucleotide for detection of SNP TSC0004866
caaaaacgttaaa

SEQ ID NO: 194527 - DNA, 13 bp, Artificial Sequence
  Oligonucleotide for detection of SNP TSC0004866
taagaatgttagg

SEQ ID NO: 194528 - DNA, 13 bp, Artificial Sequence
  Oligonucleotide for detection of SNP TSC0004866
cctaacattctta

SEQ ID NO: 194529 - DNA, 13 bp, Artificial Sequence
  Oligonucleotide for detection of SNP TSC0004866
taagaacgttagg

SEQ ID NO: 194530 - DNA, 13 bp, Artificial Sequence
  Oligonucleotide for detection of SNP TSC0004866
cctaacgttctta

SEQ ID NO: 194531 - DNA, 13 bp, Artificial Sequence
  Oligonucleotide for detection of SNP TSC0004867
ggtattgtaagta

SEQ ID NO: 194532 - DNA, 13 bp, Artificial Sequence
  Oligonucleotide for detection of SNP TSC0004867
tacttacaatacc

SEQ ID NO: 194533 - DNA, 13 bp, Artificial Sequence
  Oligonucleotide for detection of SNP TSC0004867
ggtattataagta

SEQ ID NO: 194534 - DNA, 13 bp, Artificial Sequence
  Oligonucleotide for detection of SNP TSC0004867
tacttataatacc

SEQ ID NO: 194535 - DNA, 13 bp, Artificial Sequence
  Oligonucleotide for detection of SNP TSC0004868
taaattaagttaa

SEQ ID NO: 194536 - DNA, 13 bp, Artificial Sequence
  Oligonucleotide for detection of SNP TSC0004868
ttaacttaattta

SEQ ID NO: 194537 - DNA, 13 bp, Artificial Sequence
  Oligonucleotide for detection of SNP TSC0004868
taaatttagttaa

SEQ ID NO: 194538 - DNA, 13 bp, Artificial Sequence
  Oligonucleotide for detection of SNP TSC0004868
ttaactaaattta

SEQ ID NO: 194539 - DNA, 13 bp, Artificial Sequence
  Oligonucleotide for detection of SNP TSC0004868
ttgatttgattta

SEQ ID NO: 194540 - DNA, 13 bp, Artificial Sequence
  Oligonucleotide for detection of SNP TSC0004868
taaatcaaatcaa

SEQ ID NO: 194541 - DNA, 13 bp, Artificial Sequence
  Oligonucleotide for detection of SNP TSC0004868
ttgattggattta

SEQ ID NO: 194542 - DNA, 13 bp, Artificial Sequence
  Oligonucleotide for detection of SNP TSC0004868
taaatccaatcaa

SEQ ID NO: 194543 - DNA, 13 bp, Artificial Sequence
  Oligonucleotide for detection of SNP TSC0047850
tttttgagattgt

SEQ ID NO: 194544 - DNA, 13 bp, Artificial Sequence
  Oligonucleotide for detection of SNP TSC0047850
acaatctcaaaaa

SEQ ID NO: 194545 - DNA, 13 bp, Artificial Sequence
  Oligonucleotide for detection of SNP TSC0047850
tttttgggattgt

SEQ ID NO: 194546 - DNA, 13 bp, Artificial Sequence
  Oligonucleotide for detection of SNP TSC0047850
acaatcccaaaaa

SEQ ID NO: 194547 - DNA, 13 bp, Artificial Sequence
  Oligonucleotide for detection of SNP TSC0047853
tatatagttgtgt

SEQ ID NO: 194548 - DNA, 13 bp, Artificial Sequence
  Oligonucleotide for detection of SNP TSC0047853
acacaactatata

SEQ ID NO: 194549 - DNA, 13 bp, Artificial Sequence
  Oligonucleotide for detection of SNP TSC0047853
tatataattgtgt

SEQ ID NO: 194550 - DNA, 13 bp, Artificial Sequence
  Oligonucleotide for detection of SNP TSC0047853
acacaattatata

SEQ ID NO: 194551 - DNA, 13 bp, Artificial Sequence
  Oligonucleotide for detection of SNP TSC0047854
gattatgttatat

SEQ ID NO: 194552 - DNA, 13 bp, Artificial Sequence
  Oligonucleotide for detection of SNP TSC0047854
atataacataatc

SEQ ID NO: 194553 - DNA, 13 bp, Artificial Sequence
  Oligonucleotide for detection of SNP TSC0047854
gattatattatat

SEQ ID NO: 194554 - DNA, 13 bp, Artificial Sequence
  Oligonucleotide for detection of SNP TSC0047854
atataatataatc

SEQ ID NO: 194555 - DNA, 13 bp, Artificial Sequence
  Oligonucleotide for detection of SNP TSC0047857
tagaatggggata

SEQ ID NO: 194556 - DNA, 13 bp, Artificial Sequence
  Oligonucleotide for detection of SNP TSC0047857
tatccccattcta

SEQ ID NO: 194557 - DNA, 13 bp, Artificial Sequence
  Oligonucleotide for detection of SNP TSC0047857
tagaatagggata

SEQ ID NO: 194558 - DNA, 13 bp, Artificial Sequence
  Oligonucleotide for detection of SNP TSC0047857
tatccctattcta

SEQ ID NO: 194559 - DNA, 13 bp, Artificial Sequence
  Oligonucleotide for detection of SNP TSC0047857
tagaacggggata

SEQ ID NO: 194560 - DNA, 13 bp, Artificial Sequence
  Oligonucleotide for detection of SNP TSC0047857
tatccccgttcta

SEQ ID NO: 194561 - DNA, 13 bp, Artificial Sequence
  Oligonucleotide for detection of SNP TSC0006134
ggtgaatggagga

SEQ ID NO: 194562 - DNA, 13 bp, Artificial Sequence
  Oligonucleotide for detection of SNP TSC0006134
tcctccattcacc

SEQ ID NO: 194563 - DNA, 13 bp, Artificial Sequence
  Oligonucleotide for detection of SNP TSC0006134
ggtgaacggagga

SEQ ID NO: 194564 - DNA, 13 bp, Artificial Sequence
  Oligonucleotide for detection of SNP TSC0006134
tcctccgttcacc

SEQ ID NO: 194565 - DNA, 13 bp, Artificial Sequence
  Oligonucleotide for detection of SNP TSC0006135
tagtttgtgtgag

SEQ ID NO: 194566 - DNA, 13 bp, Artificial Sequence
  Oligonucleotide for detection of SNP TSC0006135
ctcacacaaacta

SEQ ID NO: 194567 - DNA, 13 bp, Artificial Sequence
  Oligonucleotide for detection of SNP TSC0006135
tagtttatgtgag

SEQ ID NO: 194568 - DNA, 13 bp, Artificial Sequence
  Oligonucleotide for detection of SNP TSC0006135
ctcacataaacta

SEQ ID NO: 194569 - DNA, 13 bp, Artificial Sequence
  Oligonucleotide for detection of SNP TSC0047859
tagataatttgtt

SEQ ID NO: 194570 - DNA, 13 bp, Artificial Sequence
  Oligonucleotide for detection of SNP TSC0047859
aacaaattatcta

SEQ ID NO: 194571 - DNA, 13 bp, Artificial Sequence
  Oligonucleotide for detection of SNP TSC0047859
tagatagtttgtt

SEQ ID NO: 194572 - DNA, 13 bp, Artificial Sequence
  Oligonucleotide for detection of SNP TSC0047859
aacaaactatcta

SEQ ID NO: 194573 - DNA, 13 bp, Artificial Sequence
  Oligonucleotide for detection of SNP TSC0047860
agagttaaaaaaa

SEQ ID NO: 194574 - DNA, 13 bp, Artificial Sequence
  Oligonucleotide for detection of SNP TSC0047860
tttttttaactct

SEQ ID NO: 194575 - DNA, 13 bp, Artificial Sequence
  Oligonucleotide for detection of SNP TSC0047860
agagtttaaaaaa

SEQ ID NO: 194576 - DNA, 13 bp, Artificial Sequence
  Oligonucleotide for detection of SNP TSC0047860
ttttttaaactct

SEQ ID NO: 194577 - DNA, 13 bp, Artificial Sequence
  Oligonucleotide for detection of SNP TSC0047863
ggtaatatattta

SEQ ID NO: 194578 - DNA, 13 bp, Artificial Sequence
  Oligonucleotide for detection of SNP TSC0047863
taaatatattacc

SEQ ID NO: 194579 - DNA, 13 bp, Artificial Sequence
  Oligonucleotide for detection of SNP TSC0047863
ggtaatgtattta

SEQ ID NO: 194580 - DNA, 13 bp, Artificial Sequence
  Oligonucleotide for detection of SNP TSC0047863
taaatacattacc

SEQ ID NO: 194581 - DNA, 13 bp, Artificial Sequence
  Oligonucleotide for detection of SNP TSC0047863
ggtaacgtattta

SEQ ID NO: 194582 - DNA, 13 bp, Artificial Sequence
  Oligonucleotide for detection of SNP TSC0047863
taaatacgttacc

SEQ ID NO: 194583 - DNA, 13 bp, Artificial Sequence
  Oligonucleotide for detection of SNP TSC0047863
taaatatgttaty

SEQ ID NO: 194584 - DNA, 13 bp, Artificial Sequence
  Oligonucleotide for detection of SNP TSC0047863
rataacatattta

SEQ ID NO: 194585 - DNA, 13 bp, Artificial Sequence
  Oligonucleotide for detection of SNP TSC0047863
taaatacgttaty

SEQ ID NO: 194586 - DNA, 13 bp, Artificial Sequence
  Oligonucleotide for detection of SNP TSC0047863
rataacgtattta

SEQ ID NO: 194587 - DNA, 13 bp, Artificial Sequence
  Oligonucleotide for detection of SNP TSC0047864
aaaagtggggggg

SEQ ID NO: 194588 - DNA, 13 bp, Artificial Sequence
  Oligonucleotide for detection of SNP TSC0047864
cccccccactttt

SEQ ID NO: 194589 - DNA, 13 bp, Artificial Sequence
  Oligonucleotide for detection of SNP TSC0047864
aaaagttgggggg

SEQ ID NO: 194590 - DNA, 13 bp, Artificial Sequence
  Oligonucleotide for detection of SNP TSC0047864
ccccccaactttt

SEQ ID NO: 194591 - DNA, 13 bp, Artificial Sequence
  Oligonucleotide for detection of SNP TSC0047864
aaaagtcgggggg

SEQ ID NO: 194592 - DNA, 13 bp, Artificial Sequence
  Oligonucleotide for detection of SNP TSC0047864
ccccccgactttt

SEQ ID NO: 194593 - DNA, 13 bp, Artificial Sequence
  Oligonucleotide for detection of SNP TSC0047865
gaagttgaatagt

SEQ ID NO: 194594 - DNA, 13 bp, Artificial Sequence
  Oligonucleotide for detection of SNP TSC0047865
actattcaacttc

SEQ ID NO: 194595 - DNA, 13 bp, Artificial Sequence
  Oligonucleotide for detection of SNP TSC0047865
gaagttaaatagt

SEQ ID NO: 194596 - DNA, 13 bp, Artificial Sequence
  Oligonucleotide for detection of SNP TSC0047865
actatttaacttc

SEQ ID NO: 194597 - DNA, 13 bp, Artificial Sequence
  Oligonucleotide for detection of SNP TSC0047866
aggtttgggtttt

SEQ ID NO: 194598 - DNA, 13 bp, Artificial Sequence
  Oligonucleotide for detection of SNP TSC0047866
aaaacccaaacct

SEQ ID NO: 194599 - DNA, 13 bp, Artificial Sequence
  Oligonucleotide for detection of SNP TSC0047866
aggtttaggtttt

SEQ ID NO: 194600 - DNA, 13 bp, Artificial Sequence
  Oligonucleotide for detection of SNP TSC0047866
aaaacctaaacct

SEQ ID NO: 194601 - DNA, 13 bp, Artificial Sequence
  Oligonucleotide for detection of SNP TSC0047868
aaaaattataaay

SEQ ID NO: 194602 - DNA, 13 bp, Artificial Sequence
  Oligonucleotide for detection of SNP TSC0047868
rtttataattttt

SEQ ID NO: 194603 - DNA, 13 bp, Artificial Sequence
  Oligonucleotide for detection of SNP TSC0047868
aaaaatgataaay

SEQ ID NO: 194604 - DNA, 13 bp, Artificial Sequence
  Oligonucleotide for detection of SNP TSC0047868
rtttatcattttt

SEQ ID NO: 194605 - DNA, 13 bp, Artificial Sequence
  Oligonucleotide for detection of SNP TSC0047868
gtttatgattttt

SEQ ID NO: 194606 - DNA, 13 bp, Artificial Sequence
  Oligonucleotide for detection of SNP TSC0047868
aaaaatcataaac

SEQ ID NO: 194607 - DNA, 13 bp, Artificial Sequence
  Oligonucleotide for detection of SNP TSC0047868
gtttattattttt

SEQ ID NO: 194608 - DNA, 13 bp, Artificial Sequence
  Oligonucleotide for detection of SNP TSC0047868
aaaaataataaac

SEQ ID NO: 194609 - DNA, 13 bp, Artificial Sequence
  Oligonucleotide for detection of SNP TSC0047869
ttggaattttgtt

SEQ ID NO: 194610 - DNA, 13 bp, Artificial Sequence
  Oligonucleotide for detection of SNP TSC0047869
aacaaaattccaa

SEQ ID NO: 194611 - DNA, 13 bp, Artificial Sequence
  Oligonucleotide for detection of SNP TSC0047869
ttggaagtttgtt

SEQ ID NO: 194612 - DNA, 13 bp, Artificial Sequence
  Oligonucleotide for detection of SNP TSC0047869
aacaaacttccaa

SEQ ID NO: 194613 - DNA, 13 bp, Artificial Sequence
  Oligonucleotide for detection of SNP TSC0047869
aatagagttttaa

SEQ ID NO: 194614 - DNA, 13 bp, Artificial Sequence
  Oligonucleotide for detection of SNP TSC0047869
ttaaaactctatt

SEQ ID NO: 194615 - DNA, 13 bp, Artificial Sequence
  Oligonucleotide for detection of SNP TSC0006422
atgttagtagaay

SEQ ID NO: 194616 - DNA, 13 bp, Artificial Sequence
  Oligonucleotide for detection of SNP TSC0006422
rttctactaacat

SEQ ID NO: 194617 - DNA, 13 bp, Artificial Sequence
  Oligonucleotide for detection of SNP TSC0006422
atgttaatagaay

SEQ ID NO: 194618 - DNA, 13 bp, Artificial Sequence
  Oligonucleotide for detection of SNP TSC0006422
rttctattaacat

SEQ ID NO: 194619 - DNA, 13 bp, Artificial Sequence
  Oligonucleotide for detection of SNP TSC0047871
aggagtataagay

SEQ ID NO: 194620 - DNA, 13 bp, Artificial Sequence
  Oligonucleotide for detection of SNP TSC0047871
rtcttatactcct

SEQ ID NO: 194621 - DNA, 13 bp, Artificial Sequence
  Oligonucleotide for detection of SNP TSC0047871
aggagtgtaagay

SEQ ID NO: 194622 - DNA, 13 bp, Artificial Sequence
  Oligonucleotide for detection of SNP TSC0047871
rtcttacactcct

SEQ ID NO: 194623 - DNA, 13 bp, Artificial Sequence
  Oligonucleotide for detection of SNP TSC0047873
atttttaaattta

SEQ ID NO: 194624 - DNA, 13 bp, Artificial Sequence
  Oligonucleotide for detection of SNP TSC0047873
taaatttaaaaat

SEQ ID NO: 194625 - DNA, 13 bp, Artificial Sequence
  Oligonucleotide for detection of SNP TSC0047873
attttttaattta

SEQ ID NO: 194626 - DNA, 13 bp, Artificial Sequence
  Oligonucleotide for detection of SNP TSC0047873
taaattaaaaaat

SEQ ID NO: 194627 - DNA, 13 bp, Artificial Sequence
  Oligonucleotide for detection of SNP TSC0047873
tagatttaggaat

SEQ ID NO: 194628 - DNA, 13 bp, Artificial Sequence
  Oligonucleotide for detection of SNP TSC0047873
attcctaaatcta

SEQ ID NO: 194629 - DNA, 13 bp, Artificial Sequence
  Oligonucleotide for detection of SNP TSC0047873
tagattgaggaat

SEQ ID NO: 194630 - DNA, 13 bp, Artificial Sequence
  Oligonucleotide for detection of SNP TSC0047873
attcctcaatcta

SEQ ID NO: 194631 - DNA, 13 bp, Artificial Sequence
  Oligonucleotide for detection of SNP TSC0047874
aaaaatgtgatat

SEQ ID NO: 194632 - DNA, 13 bp, Artificial Sequence
  Oligonucleotide for detection of SNP TSC0047874
atatcacattttt

SEQ ID NO: 194633 - DNA, 13 bp, Artificial Sequence
  Oligonucleotide for detection of SNP TSC0047874
aaaaatatgatat

SEQ ID NO: 194634 - DNA, 13 bp, Artificial Sequence
  Oligonucleotide for detection of SNP TSC0047874
atatcatattttt

SEQ ID NO: 194635 - DNA, 13 bp, Artificial Sequence
  Oligonucleotide for detection of SNP TSC0047874
aaaaacgtgatat

SEQ ID NO: 194636 - DNA, 13 bp, Artificial Sequence
  Oligonucleotide for detection of SNP TSC0047874
atatcacgttttt

SEQ ID NO: 194637 - DNA, 13 bp, Artificial Sequence
  Oligonucleotide for detection of SNP TSC0047875
tattatattggga

SEQ ID NO: 194638 - DNA, 13 bp, Artificial Sequence
  Oligonucleotide for detection of SNP TSC0047875
tcccaatataata

SEQ ID NO: 194639 - DNA, 13 bp, Artificial Sequence
  Oligonucleotide for detection of SNP TSC0047875
tattatgttggga

SEQ ID NO: 194640 - DNA, 13 bp, Artificial Sequence
  Oligonucleotide for detection of SNP TSC0047875
tcccaacataata

SEQ ID NO: 194641 - DNA, 13 bp, Artificial Sequence
  Oligonucleotide for detection of SNP TSC0047876
ttgagtgataagt

SEQ ID NO: 194642 - DNA, 13 bp, Artificial Sequence
  Oligonucleotide for detection of SNP TSC0047876
acttatcactcaa

SEQ ID NO: 194643 - DNA, 13 bp, Artificial Sequence
  Oligonucleotide for detection of SNP TSC0047876
ttgagtaataagt

SEQ ID NO: 194644 - DNA, 13 bp, Artificial Sequence
  Oligonucleotide for detection of SNP TSC0047876
acttattactcaa

SEQ ID NO: 194645 - DNA, 13 bp, Artificial Sequence
  Oligonucleotide for detection of SNP TSC0047877
gattttgtgaggg

SEQ ID NO: 194646 - DNA, 13 bp, Artificial Sequence
  Oligonucleotide for detection of SNP TSC0047877
ccctcacaaaatc

SEQ ID NO: 194647 - DNA, 13 bp, Artificial Sequence
  Oligonucleotide for detection of SNP TSC0047877
gattttatgaggg

SEQ ID NO: 194648 - DNA, 13 bp, Artificial Sequence
  Oligonucleotide for detection of SNP TSC0047877
ccctcataaaatc

SEQ ID NO: 194649 - DNA, 13 bp, Artificial Sequence
  Oligonucleotide for detection of SNP TSC0047879
ggatttgtttaaa

SEQ ID NO: 194650 - DNA, 13 bp, Artificial Sequence
  Oligonucleotide for detection of SNP TSC0047879
tttaaacaaatcc

SEQ ID NO: 194651 - DNA, 13 bp, Artificial Sequence
  Oligonucleotide for detection of SNP TSC0047879
ggatttatttaaa

SEQ ID NO: 194652 - DNA, 13 bp, Artificial Sequence
  Oligonucleotide for detection of SNP TSC0047879
tttaaataaatcc

SEQ ID NO: 194653 - DNA, 13 bp, Artificial Sequence
  Oligonucleotide for detection of SNP TSC0047880
ataattttataaa

SEQ ID NO: 194654 - DNA, 13 bp, Artificial Sequence
  Oligonucleotide for detection of SNP TSC0047880
tttataaaattat

SEQ ID NO: 194655 - DNA, 13 bp, Artificial Sequence
  Oligonucleotide for detection of SNP TSC0047880
ataattgtataaa

SEQ ID NO: 194656 - DNA, 13 bp, Artificial Sequence
  Oligonucleotide for detection of SNP TSC0047880
tttatacaattat

SEQ ID NO: 194657 - DNA, 13 bp, Artificial Sequence
  Oligonucleotide for detection of SNP TSC0047880
tttgtgaaattat

SEQ ID NO: 194658 - DNA, 13 bp, Artificial Sequence
  Oligonucleotide for detection of SNP TSC0047880
ataatttcacaaa

SEQ ID NO: 194659 - DNA, 13 bp, Artificial Sequence
  Oligonucleotide for detection of SNP TSC0047880
tttgtgtaattat

SEQ ID NO: 194660 - DNA, 13 bp, Artificial Sequence
  Oligonucleotide for detection of SNP TSC0047880
ataattacacaaa

SEQ ID NO: 194661 - DNA, 13 bp, Artificial Sequence
  Oligonucleotide for detection of SNP TSC0047882
ggtggggtggagt

SEQ ID NO: 194662 - DNA, 13 bp, Artificial Sequence
  Oligonucleotide for detection of SNP TSC0047882
actccaccccacc

SEQ ID NO: 194663 - DNA, 13 bp, Artificial Sequence
  Oligonucleotide for detection of SNP TSC0047882
ggtgggatggagt

SEQ ID NO: 194664 - DNA, 13 bp, Artificial Sequence
  Oligonucleotide for detection of SNP TSC0047882
actccatcccacc

SEQ ID NO: 194665 - DNA, 13 bp, Artificial Sequence
  Oligonucleotide for detection of SNP TSC0047882
ggcggggtggagt

SEQ ID NO: 194666 - DNA, 13 bp, Artificial Sequence
  Oligonucleotide for detection of SNP TSC0047882
actccaccccgcc

SEQ ID NO: 194667 - DNA, 13 bp, Artificial Sequence
  Oligonucleotide for detection of SNP TSC0047882
ggcgggatggagt

SEQ ID NO: 194668 - DNA, 13 bp, Artificial Sequence
  Oligonucleotide for detection of SNP TSC0047882
actccatcccgcc

SEQ ID NO: 194669 - DNA, 13 bp, Artificial Sequence
  Oligonucleotide for detection of SNP TSC0047882
ggtggggcggagt

SEQ ID NO: 194670 - DNA, 13 bp, Artificial Sequence
  Oligonucleotide for detection of SNP TSC0047882
actccgccccacc

SEQ ID NO: 194671 - DNA, 13 bp, Artificial Sequence
  Oligonucleotide for detection of SNP TSC0047882
ggtgggacggagt

SEQ ID NO: 194672 - DNA, 13 bp, Artificial Sequence
  Oligonucleotide for detection of SNP TSC0047882
actccgtcccacc

SEQ ID NO: 194673 - DNA, 13 bp, Artificial Sequence
  Oligonucleotide for detection of SNP TSC0047882
ggcggggcggagt

SEQ ID NO: 194674 - DNA, 13 bp, Artificial Sequence
  Oligonucleotide for detection of SNP TSC0047882
actccgccccgcc

SEQ ID NO: 194675 - DNA, 13 bp, Artificial Sequence
  Oligonucleotide for detection of SNP TSC0047882
ggcgggacggagt

SEQ ID NO: 194676 - DNA, 13 bp, Artificial Sequence
  Oligonucleotide for detection of SNP TSC0047882
actccgtcccgcc

SEQ ID NO: 194677 - DNA, 13 bp, Artificial Sequence
  Oligonucleotide for detection of SNP TSC0047883
gatttaattggtt

SEQ ID NO: 194678 - DNA, 13 bp, Artificial Sequence
  Oligonucleotide for detection of SNP TSC0047883
aaccaattaaatc

SEQ ID NO: 194679 - DNA, 13 bp, Artificial Sequence
  Oligonucleotide for detection of SNP TSC0047883
gatttagttggtt

SEQ ID NO: 194680 - DNA, 13 bp, Artificial Sequence
  Oligonucleotide for detection of SNP TSC0047883
aaccaactaaatc

SEQ ID NO: 194681 - DNA, 13 bp, Artificial Sequence
  Oligonucleotide for detection of SNP TSC0047884
attttaaaagaag

SEQ ID NO: 194682 - DNA, 13 bp, Artificial Sequence
  Oligonucleotide for detection of SNP TSC0047884
cttcttttaaaat

SEQ ID NO: 194683 - DNA, 13 bp, Artificial Sequence
  Oligonucleotide for detection of SNP TSC0047884
attttataagaag

SEQ ID NO: 194684 - DNA, 13 bp, Artificial Sequence
  Oligonucleotide for detection of SNP TSC0047884
cttcttataaaat

SEQ ID NO: 194685 - DNA, 13 bp, Artificial Sequence
  Oligonucleotide for detection of SNP TSC0047884
ttttttttaaggt

SEQ ID NO: 194686 - DNA, 13 bp, Artificial Sequence
  Oligonucleotide for detection of SNP TSC0047884
accttaaaaaaaa

SEQ ID NO: 194687 - DNA, 13 bp, Artificial Sequence
  Oligonucleotide for detection of SNP TSC0047884
ttttttataaggt

SEQ ID NO: 194688 - DNA, 13 bp, Artificial Sequence
  Oligonucleotide for detection of SNP TSC0047884
accttataaaaaa

SEQ ID NO: 194689 - DNA, 13 bp, Artificial Sequence
  Oligonucleotide for detection of SNP TSC0047886
gggtgggggggtg

SEQ ID NO: 194690 - DNA, 13 bp, Artificial Sequence
  Oligonucleotide for detection of SNP TSC0047886
cacccccccaccc

SEQ ID NO: 194691 - DNA, 13 bp, Artificial Sequence
  Oligonucleotide for detection of SNP TSC0047886
gggtggaggggtg

SEQ ID NO: 194692 - DNA, 13 bp, Artificial Sequence
  Oligonucleotide for detection of SNP TSC0047886
cacccctccaccc

SEQ ID NO: 194693 - DNA, 13 bp, Artificial Sequence
  Oligonucleotide for detection of SNP TSC0047887
aattaggtgttty

SEQ ID NO: 194694 - DNA, 13 bp, Artificial Sequence
  Oligonucleotide for detection of SNP TSC0047887
raaacacctaatt

SEQ ID NO: 194695 - DNA, 13 bp, Artificial Sequence
  Oligonucleotide for detection of SNP TSC0047887
aattagatgttty

SEQ ID NO: 194696 - DNA, 13 bp, Artificial Sequence
  Oligonucleotide for detection of SNP TSC0047887
raaacatctaatt

SEQ ID NO: 194697 - DNA, 13 bp, Artificial Sequence
  Oligonucleotide for detection of SNP TSC0047888
gtataggagtttg

SEQ ID NO: 194698 - DNA, 13 bp, Artificial Sequence
  Oligonucleotide for detection of SNP TSC0047888
caaactcctatac

SEQ ID NO: 194699 - DNA, 13 bp, Artificial Sequence
  Oligonucleotide for detection of SNP TSC0047888
gtatagaagtttg

SEQ ID NO: 194700 - DNA, 13 bp, Artificial Sequence
  Oligonucleotide for detection of SNP TSC0047888
caaacttctatac

SEQ ID NO: 194701 - DNA, 13 bp, Artificial Sequence
  Oligonucleotide for detection of SNP TSC0047889
ttttgagtatttt

SEQ ID NO: 194702 - DNA, 13 bp, Artificial Sequence
  Oligonucleotide for detection of SNP TSC0047889
aaaatactcaaaa

SEQ ID NO: 194703 - DNA, 13 bp, Artificial Sequence
  Oligonucleotide for detection of SNP TSC0047889
ttttgaatatttt

SEQ ID NO: 194704 - DNA, 13 bp, Artificial Sequence
  Oligonucleotide for detection of SNP TSC0047889
aaaatattcaaaa

SEQ ID NO: 194705 - DNA, 13 bp, Artificial Sequence
  Oligonucleotide for detection of SNP TSC0047890
gttaaaatattgt

SEQ ID NO: 194706 - DNA, 13 bp, Artificial Sequence
  Oligonucleotide for detection of SNP TSC0047890
acaatattttaac

SEQ ID NO: 194707 - DNA, 13 bp, Artificial Sequence
  Oligonucleotide for detection of SNP TSC0047890
gttaaattattgt

SEQ ID NO: 194708 - DNA, 13 bp, Artificial Sequence
  Oligonucleotide for detection of SNP TSC0047890
acaataatttaac

SEQ ID NO: 194709 - DNA, 13 bp, Artificial Sequence
  Oligonucleotide for detection of SNP TSC0047890
atagtgttttaay

SEQ ID NO: 194710 - DNA, 13 bp, Artificial Sequence
  Oligonucleotide for detection of SNP TSC0047890
rttaaaacactat

SEQ ID NO: 194711 - DNA, 13 bp, Artificial Sequence
  Oligonucleotide for detection of SNP TSC0047890
atagtggtttaay

SEQ ID NO: 194712 - DNA, 13 bp, Artificial Sequence
  Oligonucleotide for detection of SNP TSC0047890
rttaaaccactat

SEQ ID NO: 194713 - DNA, 13 bp, Artificial Sequence
  Oligonucleotide for detection of SNP TSC0047894
tatttatgtgaty

SEQ ID NO: 194714 - DNA, 13 bp, Artificial Sequence
  Oligonucleotide for detection of SNP TSC0047894
ratcacataaata

SEQ ID NO: 194715 - DNA, 13 bp, Artificial Sequence
  Oligonucleotide for detection of SNP TSC0047894
tatttaggtgaty

SEQ ID NO: 194716 - DNA, 13 bp, Artificial Sequence
  Oligonucleotide for detection of SNP TSC0047894
ratcacctaaata

SEQ ID NO: 194717 - DNA, 13 bp, Artificial Sequence
  Oligonucleotide for detection of SNP TSC0047894
gattatataggtg

SEQ ID NO: 194718 - DNA, 13 bp, Artificial Sequence
  Oligonucleotide for detection of SNP TSC0047894
cacctatataatc

SEQ ID NO: 194719 - DNA, 13 bp, Artificial Sequence
  Oligonucleotide for detection of SNP TSC0047894
gattatttaggtg

SEQ ID NO: 194720 - DNA, 13 bp, Artificial Sequence
  Oligonucleotide for detection of SNP TSC0047894
cacctaaataatc

SEQ ID NO: 194721 - DNA, 13 bp, Artificial Sequence
  Oligonucleotide for detection of SNP TSC0047895
aattatatattgt

SEQ ID NO: 194722 - DNA, 13 bp, Artificial Sequence
  Oligonucleotide for detection of SNP TSC0047895
acaatatataatt

SEQ ID NO: 194723 - DNA, 13 bp, Artificial Sequence
  Oligonucleotide for detection of SNP TSC0047895
aattatgtattgt

SEQ ID NO: 194724 - DNA, 13 bp, Artificial Sequence
  Oligonucleotide for detection of SNP TSC0047895
acaatacataatt

SEQ ID NO: 194725 - DNA, 13 bp, Artificial Sequence
  Oligonucleotide for detection of SNP TSC0047896
taaatatgtgagg

SEQ ID NO: 194726 - DNA, 13 bp, Artificial Sequence
  Oligonucleotide for detection of SNP TSC0047896
cctcacatattta

SEQ ID NO: 194727 - DNA, 13 bp, Artificial Sequence
  Oligonucleotide for detection of SNP TSC0047896
taaatacgtgagg

SEQ ID NO: 194728 - DNA, 13 bp, Artificial Sequence
  Oligonucleotide for detection of SNP TSC0047896
cctcacgtattta

SEQ ID NO: 194729 - DNA, 13 bp, Artificial Sequence
  Oligonucleotide for detection of SNP TSC0047898
gagggtttgggga

SEQ ID NO: 194730 - DNA, 13 bp, Artificial Sequence
  Oligonucleotide for detection of SNP TSC0047898
tccccaaaccctc

SEQ ID NO: 194731 - DNA, 13 bp, Artificial Sequence
  Oligonucleotide for detection of SNP TSC0047898
gagggtgtgggga

SEQ ID NO: 194732 - DNA, 13 bp, Artificial Sequence
  Oligonucleotide for detection of SNP TSC0047898
tccccacaccctc

SEQ ID NO: 194733 - DNA, 13 bp, Artificial Sequence
  Oligonucleotide for detection of SNP TSC0047899
aggaagggttgaa

SEQ ID NO: 194734 - DNA, 13 bp, Artificial Sequence
  Oligonucleotide for detection of SNP TSC0047899
ttcaacccttcct

SEQ ID NO: 194735 - DNA, 13 bp, Artificial Sequence
  Oligonucleotide for detection of SNP TSC0047899
aggaagagttgaa

SEQ ID NO: 194736 - DNA, 13 bp, Artificial Sequence
  Oligonucleotide for detection of SNP TSC0047899
ttcaactcttcct

SEQ ID NO: 194737 - DNA, 13 bp, Artificial Sequence
  Oligonucleotide for detection of SNP TSC0047900
attattaattatt

SEQ ID NO: 194738 - DNA, 13 bp, Artificial Sequence
  Oligonucleotide for detection of SNP TSC0047900
aataattaataat

SEQ ID NO: 194739 - DNA, 13 bp, Artificial Sequence
  Oligonucleotide for detection of SNP TSC0047900
attatttattatt

SEQ ID NO: 194740 - DNA, 13 bp, Artificial Sequence
  Oligonucleotide for detection of SNP TSC0047900
aataataaataat

SEQ ID NO: 194741 - DNA, 13 bp, Artificial Sequence
  Oligonucleotide for detection of SNP TSC0047900
aataattagtagt

SEQ ID NO: 194742 - DNA, 13 bp, Artificial Sequence
  Oligonucleotide for detection of SNP TSC0047900
actactaattatt

SEQ ID NO: 194743 - DNA, 13 bp, Artificial Sequence
  Oligonucleotide for detection of SNP TSC0047900
aataataagtagt

SEQ ID NO: 194744 - DNA, 13 bp, Artificial Sequence
  Oligonucleotide for detection of SNP TSC0047900
actacttattatt

SEQ ID NO: 194745 - DNA, 13 bp, Artificial Sequence
  Oligonucleotide for detection of SNP TSC0047901
ttaattattaaay

SEQ ID NO: 194746 - DNA, 13 bp, Artificial Sequence
  Oligonucleotide for detection of SNP TSC0047901
rtttaataattaa

SEQ ID NO: 194747 - DNA, 13 bp, Artificial Sequence
  Oligonucleotide for detection of SNP TSC0047901
ttaattgttaaay

SEQ ID NO: 194748 - DNA, 13 bp, Artificial Sequence
  Oligonucleotide for detection of SNP TSC0047901
rtttaacaattaa

SEQ ID NO: 194749 - DNA, 13 bp, Artificial Sequence
  Oligonucleotide for detection of SNP TSC0047902
tgaggaatttttt

SEQ ID NO: 194750 - DNA, 13 bp, Artificial Sequence
  Oligonucleotide for detection of SNP TSC0047902
aaaaaattcctca

SEQ ID NO: 194751 - DNA, 13 bp, Artificial Sequence
  Oligonucleotide for detection of SNP TSC0047902
tgaggattttttt

SEQ ID NO: 194752 - DNA, 13 bp, Artificial Sequence
  Oligonucleotide for detection of SNP TSC0047902
aaaaaaatcctca

SEQ ID NO: 194753 - DNA, 13 bp, Artificial Sequence
  Oligonucleotide for detection of SNP TSC0047903
aatataggagtgy

SEQ ID NO: 194754 - DNA, 13 bp, Artificial Sequence
  Oligonucleotide for detection of SNP TSC0047903
rcactcctatatt

SEQ ID NO: 194755 - DNA, 13 bp, Artificial Sequence
  Oligonucleotide for detection of SNP TSC0047903
aatataagagtgy

SEQ ID NO: 194756 - DNA, 13 bp, Artificial Sequence
  Oligonucleotide for detection of SNP TSC0047903
rcactcttatatt

SEQ ID NO: 194757 - DNA, 13 bp, Artificial Sequence
  Oligonucleotide for detection of SNP TSC0047911
gttgttgatttta

SEQ ID NO: 194758 - DNA, 13 bp, Artificial Sequence
  Oligonucleotide for detection of SNP TSC0047911
taaaatcaacaac

SEQ ID NO: 194759 - DNA, 13 bp, Artificial Sequence
  Oligonucleotide for detection of SNP TSC0047911
gttgttaatttta

SEQ ID NO: 194760 - DNA, 13 bp, Artificial Sequence
  Oligonucleotide for detection of SNP TSC0047911
taaaattaacaac

SEQ ID NO: 194761 - DNA, 13 bp, Artificial Sequence
  Oligonucleotide for detection of SNP TSC0047912
aaaagtagaattt

SEQ ID NO: 194762 - DNA, 13 bp, Artificial Sequence
  Oligonucleotide for detection of SNP TSC0047912
aaattctactttt

SEQ ID NO: 194763 - DNA, 13 bp, Artificial Sequence
  Oligonucleotide for detection of SNP TSC0047912
aaaagtggaattt

SEQ ID NO: 194764 - DNA, 13 bp, Artificial Sequence
  Oligonucleotide for detection of SNP TSC0047912
aaattccactttt

SEQ ID NO: 194765 - DNA, 13 bp, Artificial Sequence
  Oligonucleotide for detection of SNP TSC0047912
aaaagcggaattt

SEQ ID NO: 194766 - DNA, 13 bp, Artificial Sequence
  Oligonucleotide for detection of SNP TSC0047912
aaattccgctttt

SEQ ID NO: 194767 - DNA, 13 bp, Artificial Sequence
  Oligonucleotide for detection of SNP TSC0047912
agattttgttttt

SEQ ID NO: 194768 - DNA, 13 bp, Artificial Sequence
  Oligonucleotide for detection of SNP TSC0047912
aaaaacaaaatct

SEQ ID NO: 194769 - DNA, 13 bp, Artificial Sequence
  Oligonucleotide for detection of SNP TSC0047912
agatttcgttttt

SEQ ID NO: 194770 - DNA, 13 bp, Artificial Sequence
  Oligonucleotide for detection of SNP TSC0047912
aaaaacgaaatct

SEQ ID NO: 194771 - DNA, 13 bp, Artificial Sequence
  Oligonucleotide for detection of SNP TSC0047920
tatagtagtgtag

SEQ ID NO: 194772 - DNA, 13 bp, Artificial Sequence
  Oligonucleotide for detection of SNP TSC0047920
ctacactactata

SEQ ID NO: 194773 - DNA, 13 bp, Artificial Sequence
  Oligonucleotide for detection of SNP TSC0047920
tatagtggtgtag

SEQ ID NO: 194774 - DNA, 13 bp, Artificial Sequence
  Oligonucleotide for detection of SNP TSC0047920
ctacaccactata

SEQ ID NO: 194775 - DNA, 13 bp, Artificial Sequence
  Oligonucleotide for detection of SNP TSC0047921
tggagatgggtta

SEQ ID NO: 194776 - DNA, 13 bp, Artificial Sequence
  Oligonucleotide for detection of SNP TSC0047921
taacccatctcca

SEQ ID NO: 194777 - DNA, 13 bp, Artificial Sequence
  Oligonucleotide for detection of SNP TSC0047921
tggagacgggtta

SEQ ID NO: 194778 - DNA, 13 bp, Artificial Sequence
  Oligonucleotide for detection of SNP TSC0047921
taacccgtctcca

SEQ ID NO: 194779 - DNA, 13 bp, Artificial Sequence
  Oligonucleotide for detection of SNP TSC0047922
gaattatgtgttt

SEQ ID NO: 194780 - DNA, 13 bp, Artificial Sequence
  Oligonucleotide for detection of SNP TSC0047922
aaacacataattc

SEQ ID NO: 194781 - DNA, 13 bp, Artificial Sequence
  Oligonucleotide for detection of SNP TSC0047922
gaattaggtgttt

SEQ ID NO: 194782 - DNA, 13 bp, Artificial Sequence
  Oligonucleotide for detection of SNP TSC0047922
aaacacctaattc

SEQ ID NO: 194783 - DNA, 13 bp, Artificial Sequence
  Oligonucleotide for detection of SNP TSC0047922
aagtatatggtty

SEQ ID NO: 194784 - DNA, 13 bp, Artificial Sequence
  Oligonucleotide for detection of SNP TSC0047922
raaccatatactt

SEQ ID NO: 194785 - DNA, 13 bp, Artificial Sequence
  Oligonucleotide for detection of SNP TSC0047922
aagtatttggtty

SEQ ID NO: 194786 - DNA, 13 bp, Artificial Sequence
  Oligonucleotide for detection of SNP TSC0047922
raaccaaatactt

SEQ ID NO: 194787 - DNA, 13 bp, Artificial Sequence
  Oligonucleotide for detection of SNP TSC0047923
agtatttgagttg

SEQ ID NO: 194788 - DNA, 13 bp, Artificial Sequence
  Oligonucleotide for detection of SNP TSC0047923
caactcaaatact

SEQ ID NO: 194789 - DNA, 13 bp, Artificial Sequence
  Oligonucleotide for detection of SNP TSC0047923
agtattcgagttg

SEQ ID NO: 194790 - DNA, 13 bp, Artificial Sequence
  Oligonucleotide for detection of SNP TSC0047923
caactcgaatact

SEQ ID NO: 194791 - DNA, 13 bp, Artificial Sequence
  Oligonucleotide for detection of SNP TSC0047923
taatttgaatgtt

SEQ ID NO: 194792 - DNA, 13 bp, Artificial Sequence
  Oligonucleotide for detection of SNP TSC0047923
aacattcaaatta

SEQ ID NO: 194793 - DNA, 13 bp, Artificial Sequence
  Oligonucleotide for detection of SNP TSC0047923
taattcgaatgtt

SEQ ID NO: 194794 - DNA, 13 bp, Artificial Sequence
  Oligonucleotide for detection of SNP TSC0047923
aacattcgaatta

SEQ ID NO: 194795 - DNA, 13 bp, Artificial Sequence
  Oligonucleotide for detection of SNP TSC0047925
ttaaaattattta

SEQ ID NO: 194796 - DNA, 13 bp, Artificial Sequence
  Oligonucleotide for detection of SNP TSC0047925
taaataattttaa

SEQ ID NO: 194797 - DNA, 13 bp, Artificial Sequence
  Oligonucleotide for detection of SNP TSC0047925
ttaaaagtattta

SEQ ID NO: 194798 - DNA, 13 bp, Artificial Sequence
  Oligonucleotide for detection of SNP TSC0047925
taaatacttttaa

SEQ ID NO: 194799 - DNA, 13 bp, Artificial Sequence
  Oligonucleotide for detection of SNP TSC0047925
tgggtgattttaa

SEQ ID NO: 194800 - DNA, 13 bp, Artificial Sequence
  Oligonucleotide for detection of SNP TSC0047925
ttaaaatcaccca

SEQ ID NO: 194801 - DNA, 13 bp, Artificial Sequence
  Oligonucleotide for detection of SNP TSC0047925
tgggtgtttttaa

SEQ ID NO: 194802 - DNA, 13 bp, Artificial Sequence
  Oligonucleotide for detection of SNP TSC0047925
ttaaaaacaccca

SEQ ID NO: 194803 - DNA, 13 bp, Artificial Sequence
  Oligonucleotide for detection of SNP TSC0047926
gtgtaatgtgtat

SEQ ID NO: 194804 - DNA, 13 bp, Artificial Sequence
  Oligonucleotide for detection of SNP TSC0047926
atacacattacac

SEQ ID NO: 194805 - DNA, 13 bp, Artificial Sequence
  Oligonucleotide for detection of SNP TSC0047926
gtgtaacgtgtat

SEQ ID NO: 194806 - DNA, 13 bp, Artificial Sequence
  Oligonucleotide for detection of SNP TSC0047926
atacacgttacac

SEQ ID NO: 194807 - DNA, 13 bp, Artificial Sequence
  Oligonucleotide for detection of SNP TSC0047926
atgtatgttgtay

SEQ ID NO: 194808 - DNA, 13 bp, Artificial Sequence
  Oligonucleotide for detection of SNP TSC0047926
rtacaacatacat

SEQ ID NO: 194809 - DNA, 13 bp, Artificial Sequence
  Oligonucleotide for detection of SNP TSC0047926
atgtatattgtay

SEQ ID NO: 194810 - DNA, 13 bp, Artificial Sequence
  Oligonucleotide for detection of SNP TSC0047926
rtacaatatacat

SEQ ID NO: 194811 - DNA, 13 bp, Artificial Sequence
  Oligonucleotide for detection of SNP TSC0047926
atgtacgttgtay

SEQ ID NO: 194812 - DNA, 13 bp, Artificial Sequence
  Oligonucleotide for detection of SNP TSC0047926
rtacaacgtacat

SEQ ID NO: 194813 - DNA, 13 bp, Artificial Sequence
  Oligonucleotide for detection of SNP TSC0047928
taaaatatttaty

SEQ ID NO: 194814 - DNA, 13 bp, Artificial Sequence
  Oligonucleotide for detection of SNP TSC0047928
rataaatatttta

SEQ ID NO: 194815 - DNA, 13 bp, Artificial Sequence
  Oligonucleotide for detection of SNP TSC0047928
taaaacgtttaty

SEQ ID NO: 194816 - DNA, 13 bp, Artificial Sequence
  Oligonucleotide for detection of SNP TSC0047928
rataaacgtttta

SEQ ID NO: 194817 - DNA, 13 bp, Artificial Sequence
  Oligonucleotide for detection of SNP TSC0047928
gataaatgttttg

SEQ ID NO: 194818 - DNA, 13 bp, Artificial Sequence
  Oligonucleotide for detection of SNP TSC0047928
caaaacatttatc

SEQ ID NO: 194819 - DNA, 13 bp, Artificial Sequence
  Oligonucleotide for detection of SNP TSC0047928
gataaacgttttg

SEQ ID NO: 194820 - DNA, 13 bp, Artificial Sequence
  Oligonucleotide for detection of SNP TSC0047928
caaaacgtttatc

SEQ ID NO: 194821 - DNA, 13 bp, Artificial Sequence
  Oligonucleotide for detection of SNP TSC0047929
agtataggttata

SEQ ID NO: 194822 - DNA, 13 bp, Artificial Sequence
  Oligonucleotide for detection of SNP TSC0047929
tataacctatact

SEQ ID NO: 194823 - DNA, 13 bp, Artificial Sequence
  Oligonucleotide for detection of SNP TSC0047929
agtataagttata

SEQ ID NO: 194824 - DNA, 13 bp, Artificial Sequence
  Oligonucleotide for detection of SNP TSC0047929
tataacttatact

SEQ ID NO: 194825 - DNA, 13 bp, Artificial Sequence
  Oligonucleotide for detection of SNP TSC0005543
tgaaaaattgaaa

SEQ ID NO: 194826 - DNA, 13 bp, Artificial Sequence
  Oligonucleotide for detection of SNP TSC0005543
tttcaatttttca

SEQ ID NO: 194827 - DNA, 13 bp, Artificial Sequence
  Oligonucleotide for detection of SNP TSC0005543
tgaaaatttgaaa

SEQ ID NO: 194828 - DNA, 13 bp, Artificial Sequence
  Oligonucleotide for detection of SNP TSC0005543
tttcaaattttca

SEQ ID NO: 194829 - DNA, 13 bp, Artificial Sequence
  Oligonucleotide for detection of SNP TSC0005543
tgaaaaatcgaaa

SEQ ID NO: 194830 - DNA, 13 bp, Artificial Sequence
  Oligonucleotide for detection of SNP TSC0005543
tttcgatttttca

SEQ ID NO: 194831 - DNA, 13 bp, Artificial Sequence
  Oligonucleotide for detection of SNP TSC0005543
tgaaaattcgaaa

SEQ ID NO: 194832 - DNA, 13 bp, Artificial Sequence
  Oligonucleotide for detection of SNP TSC0005543
tttcgaattttca

SEQ ID NO: 194833 - DNA, 13 bp, Artificial Sequence
  Oligonucleotide for detection of SNP TSC0005543
tttcgggttttta

SEQ ID NO: 194834 - DNA, 13 bp, Artificial Sequence
  Oligonucleotide for detection of SNP TSC0005543
taaaaacccgaaa

SEQ ID NO: 194835 - DNA, 13 bp, Artificial Sequence
  Oligonucleotide for detection of SNP TSC0007850
ggagaaaaattay

SEQ ID NO: 194836 - DNA, 13 bp, Artificial Sequence
  Oligonucleotide for detection of SNP TSC0007850
rtaatttttctcc

SEQ ID NO: 194837 - DNA, 13 bp, Artificial Sequence
  Oligonucleotide for detection of SNP TSC0007850
ggagaagaattay

SEQ ID NO: 194838 - DNA, 13 bp, Artificial Sequence
  Oligonucleotide for detection of SNP TSC0007850
rtaattcttctcc

SEQ ID NO: 194839 - DNA, 13 bp, Artificial Sequence
  Oligonucleotide for detection of SNP TSC0007851
ttaaggaatttgg

SEQ ID NO: 194840 - DNA, 13 bp, Artificial Sequence
  Oligonucleotide for detection of SNP TSC0007851
ccaaattccttaa

SEQ ID NO: 194841 - DNA, 13 bp, Artificial Sequence
  Oligonucleotide for detection of SNP TSC0007851
ttaagggatttgg

SEQ ID NO: 194842 - DNA, 13 bp, Artificial Sequence
  Oligonucleotide for detection of SNP TSC0007851
ccaaatcccttaa

SEQ ID NO: 194843 - DNA, 13 bp, Artificial Sequence
  Oligonucleotide for detection of SNP TSC0007852
aaaattagatatt

SEQ ID NO: 194844 - DNA, 13 bp, Artificial Sequence
  Oligonucleotide for detection of SNP TSC0007852
aatatctaatttt

SEQ ID NO: 194845 - DNA, 13 bp, Artificial Sequence
  Oligonucleotide for detection of SNP TSC0007852
aaaattggatatt

SEQ ID NO: 194846 - DNA, 13 bp, Artificial Sequence
  Oligonucleotide for detection of SNP TSC0007852
aatatccaatttt

SEQ ID NO: 194847 - DNA, 13 bp, Artificial Sequence
  Oligonucleotide for detection of SNP TSC0007852
aaaatcggatatt

SEQ ID NO: 194848 - DNA, 13 bp, Artificial Sequence
  Oligonucleotide for detection of SNP TSC0007852
aatatccgatttt

SEQ ID NO: 194849 - DNA, 13 bp, Artificial Sequence
  Oligonucleotide for detection of SNP TSC0006970
agttaggtagata

SEQ ID NO: 194850 - DNA, 13 bp, Artificial Sequence
  Oligonucleotide for detection of SNP TSC0006970
tatctacctaact

SEQ ID NO: 194851 - DNA, 13 bp, Artificial Sequence
  Oligonucleotide for detection of SNP TSC0047930
aggtagatagata

SEQ ID NO: 194852 - DNA, 13 bp, Artificial Sequence
  Oligonucleotide for detection of SNP TSC0047930
tatctatctacct

SEQ ID NO: 194853 - DNA, 13 bp, Artificial Sequence
  Oligonucleotide for detection of SNP TSC0047931
tttttgatgttga

SEQ ID NO: 194854 - DNA, 13 bp, Artificial Sequence
  Oligonucleotide for detection of SNP TSC0047931
tcaacatcaaaaa

SEQ ID NO: 194855 - DNA, 13 bp, Artificial Sequence
  Oligonucleotide for detection of SNP TSC0047931
tttttggtgttga

SEQ ID NO: 194856 - DNA, 13 bp, Artificial Sequence
  Oligonucleotide for detection of SNP TSC0047931
tcaacaccaaaaa

SEQ ID NO: 194857 - DNA, 13 bp, Artificial Sequence
  Oligonucleotide for detection of SNP TSC0047936
gttatgaaattay

SEQ ID NO: 194858 - DNA, 13 bp, Artificial Sequence
  Oligonucleotide for detection of SNP TSC0047936
rtaatttcataac

SEQ ID NO: 194859 - DNA, 13 bp, Artificial Sequence
  Oligonucleotide for detection of SNP TSC0047936
gttatggaattay

SEQ ID NO: 194860 - DNA, 13 bp, Artificial Sequence
  Oligonucleotide for detection of SNP TSC0047936
rtaattccataac

SEQ ID NO: 194861 - DNA, 13 bp, Artificial Sequence
  Oligonucleotide for detection of SNP TSC0005457
tttttagattaaa

SEQ ID NO: 194862 - DNA, 13 bp, Artificial Sequence
  Oligonucleotide for detection of SNP TSC0005457
tttaatctaaaaa

SEQ ID NO: 194863 - DNA, 13 bp, Artificial Sequence
  Oligonucleotide for detection of SNP TSC0005457
tttaatgtaagag

SEQ ID NO: 194864 - DNA, 13 bp, Artificial Sequence
  Oligonucleotide for detection of SNP TSC0005457
ctcttacattaaa

SEQ ID NO: 194865 - DNA, 13 bp, Artificial Sequence
  Oligonucleotide for detection of SNP TSC0005457
tttaatttaagag

SEQ ID NO: 194866 - DNA, 13 bp, Artificial Sequence
  Oligonucleotide for detection of SNP TSC0005457
ctcttaaattaaa

SEQ ID NO: 194867 - DNA, 13 bp, Artificial Sequence
  Oligonucleotide for detection of SNP TSC0047937
aagttaaagtttt

SEQ ID NO: 194868 - DNA, 13 bp, Artificial Sequence
  Oligonucleotide for detection of SNP TSC0047937
aaaactttaactt

SEQ ID NO: 194869 - DNA, 13 bp, Artificial Sequence
  Oligonucleotide for detection of SNP TSC0047937
aagttagagtttt

SEQ ID NO: 194870 - DNA, 13 bp, Artificial Sequence
  Oligonucleotide for detection of SNP TSC0047937
aaaactctaactt

SEQ ID NO: 194871 - DNA, 13 bp, Artificial Sequence
  Oligonucleotide for detection of SNP TSC0047938
atgtgaaggagga

SEQ ID NO: 194872 - DNA, 13 bp, Artificial Sequence
  Oligonucleotide for detection of SNP TSC0047938
tcctccttcacat

SEQ ID NO: 194873 - DNA, 13 bp, Artificial Sequence
  Oligonucleotide for detection of SNP TSC0047938
atgtgagggagga

SEQ ID NO: 194874 - DNA, 13 bp, Artificial Sequence
  Oligonucleotide for detection of SNP TSC0047938
tcctccctcacat

SEQ ID NO: 194875 - DNA, 13 bp, Artificial Sequence
  Oligonucleotide for detection of SNP TSC0047943
tttgtggttaaty

SEQ ID NO: 194876 - DNA, 13 bp, Artificial Sequence
  Oligonucleotide for detection of SNP TSC0047943
rattaaccacaaa

SEQ ID NO: 194877 - DNA, 13 bp, Artificial Sequence
  Oligonucleotide for detection of SNP TSC0047943
tttgtgattaaty

SEQ ID NO: 194878 - DNA, 13 bp, Artificial Sequence
  Oligonucleotide for detection of SNP TSC0047943
rattaatcacaaa

SEQ ID NO: 194879 - DNA, 13 bp, Artificial Sequence
  Oligonucleotide for detection of SNP TSC0047944
tggggtatttttt

SEQ ID NO: 194880 - DNA, 13 bp, Artificial Sequence
  Oligonucleotide for detection of SNP TSC0047944
aaaaaatacccca

SEQ ID NO: 194881 - DNA, 13 bp, Artificial Sequence
  Oligonucleotide for detection of SNP TSC0047944
tggggtgtttttt

SEQ ID NO: 194882 - DNA, 13 bp, Artificial Sequence
  Oligonucleotide for detection of SNP TSC0047944
aaaaaacacccca

SEQ ID NO: 194883 - DNA, 13 bp, Artificial Sequence
  Oligonucleotide for detection of SNP TSC0047945
ttaggttgtttaa

SEQ ID NO: 194884 - DNA, 13 bp, Artificial Sequence
  Oligonucleotide for detection of SNP TSC0047945
ttaaacaacctaa

SEQ ID NO: 194885 - DNA, 13 bp, Artificial Sequence
  Oligonucleotide for detection of SNP TSC0047945
ttaggtcgtttaa

SEQ ID NO: 194886 - DNA, 13 bp, Artificial Sequence
  Oligonucleotide for detection of SNP TSC0047945
ttaaacgacctaa

SEQ ID NO: 194887 - DNA, 13 bp, Artificial Sequence
  Oligonucleotide for detection of SNP TSC0047945
ttgggtggtttag

SEQ ID NO: 194888 - DNA, 13 bp, Artificial Sequence
  Oligonucleotide for detection of SNP TSC0047945
ctaaaccacccaa

SEQ ID NO: 194889 - DNA, 13 bp, Artificial Sequence
  Oligonucleotide for detection of SNP TSC0047945
ttgggtagtttag

SEQ ID NO: 194890 - DNA, 13 bp, Artificial Sequence
  Oligonucleotide for detection of SNP TSC0047945
ctaaactacccaa

SEQ ID NO: 194891 - DNA, 13 bp, Artificial Sequence
  Oligonucleotide for detection of SNP TSC0047945
ttgggcggtttag

SEQ ID NO: 194892 - DNA, 13 bp, Artificial Sequence
  Oligonucleotide for detection of SNP TSC0047945
ctaaaccgcccaa

SEQ ID NO: 194893 - DNA, 13 bp, Artificial Sequence
  Oligonucleotide for detection of SNP TSC0047946
ttggttataaatt

SEQ ID NO: 194894 - DNA, 13 bp, Artificial Sequence
  Oligonucleotide for detection of SNP TSC0047946
aatttataaccaa

SEQ ID NO: 194895 - DNA, 13 bp, Artificial Sequence
  Oligonucleotide for detection of SNP TSC0047946
ttggttttaaatt

SEQ ID NO: 194896 - DNA, 13 bp, Artificial Sequence
  Oligonucleotide for detection of SNP TSC0047946
aatttaaaaccaa

SEQ ID NO: 194897 - DNA, 13 bp, Artificial Sequence
  Oligonucleotide for detection of SNP TSC0047946
agtttgtggttaa

SEQ ID NO: 194898 - DNA, 13 bp, Artificial Sequence
  Oligonucleotide for detection of SNP TSC0047946
ttaaccacaaact

SEQ ID NO: 194899 - DNA, 13 bp, Artificial Sequence
  Oligonucleotide for detection of SNP TSC0047946
agtttgaggttaa

SEQ ID NO: 194900 - DNA, 13 bp, Artificial Sequence
  Oligonucleotide for detection of SNP TSC0047946
ttaacctcaaact

SEQ ID NO: 194901 - DNA, 13 bp, Artificial Sequence
  Oligonucleotide for detection of SNP TSC0047947
tttgaaatgttty

SEQ ID NO: 194902 - DNA, 13 bp, Artificial Sequence
  Oligonucleotide for detection of SNP TSC0047947
raaacatttcaaa

SEQ ID NO: 194903 - DNA, 13 bp, Artificial Sequence
  Oligonucleotide for detection of SNP TSC0047947
tttgaagtgttty

SEQ ID NO: 194904 - DNA, 13 bp, Artificial Sequence
  Oligonucleotide for detection of SNP TSC0047947
raaacacttcaaa

SEQ ID NO: 194905 - DNA, 13 bp, Artificial Sequence
  Oligonucleotide for detection of SNP TSC0047947
tttgaaacgttty

SEQ ID NO: 194906 - DNA, 13 bp, Artificial Sequence
  Oligonucleotide for detection of SNP TSC0047947
raaacgtttcaaa

SEQ ID NO: 194907 - DNA, 13 bp, Artificial Sequence
  Oligonucleotide for detection of SNP TSC0047947
tttgaagcgttty

SEQ ID NO: 194908 - DNA, 13 bp, Artificial Sequence
  Oligonucleotide for detection of SNP TSC0047947
raaacgcttcaaa

SEQ ID NO: 194909 - DNA, 13 bp, Artificial Sequence
  Oligonucleotide for detection of SNP TSC0047948
gttatataataat

SEQ ID NO: 194910 - DNA, 13 bp, Artificial Sequence
  Oligonucleotide for detection of SNP TSC0047948
attattatataac

SEQ ID NO: 194911 - DNA, 13 bp, Artificial Sequence
  Oligonucleotide for detection of SNP TSC0047948
gttatagaataat

SEQ ID NO: 194912 - DNA, 13 bp, Artificial Sequence
  Oligonucleotide for detection of SNP TSC0047948
attattctataac

SEQ ID NO: 194913 - DNA, 13 bp, Artificial Sequence
  Oligonucleotide for detection of SNP TSC0047948
attattatataay

SEQ ID NO: 194914 - DNA, 13 bp, Artificial Sequence
  Oligonucleotide for detection of SNP TSC0047948
rttatataataat

SEQ ID NO: 194915 - DNA, 13 bp, Artificial Sequence
  Oligonucleotide for detection of SNP TSC0047948
attattttataay

SEQ ID NO: 194916 - DNA, 13 bp, Artificial Sequence
  Oligonucleotide for detection of SNP TSC0047948
rttataaaataat

SEQ ID NO: 194917 - DNA, 13 bp, Artificial Sequence
  Oligonucleotide for detection of SNP TSC0047949
taaaaagtaataa

SEQ ID NO: 194918 - DNA, 13 bp, Artificial Sequence
  Oligonucleotide for detection of SNP TSC0047949
ttattacttttta

SEQ ID NO: 194919 - DNA, 13 bp, Artificial Sequence
  Oligonucleotide for detection of SNP TSC0047951
ttttagaagtgtt

SEQ ID NO: 194920 - DNA, 13 bp, Artificial Sequence
  Oligonucleotide for detection of SNP TSC0047951
aacacttctaaaa

SEQ ID NO: 194921 - DNA, 13 bp, Artificial Sequence
  Oligonucleotide for detection of SNP TSC0047951
ttttagtagtgtt

SEQ ID NO: 194922 - DNA, 13 bp, Artificial Sequence
  Oligonucleotide for detection of SNP TSC0047951
aacactactaaaa

SEQ ID NO: 194923 - DNA, 13 bp, Artificial Sequence
  Oligonucleotide for detection of SNP TSC0047951
aatatttttaagg

SEQ ID NO: 194924 - DNA, 13 bp, Artificial Sequence
  Oligonucleotide for detection of SNP TSC0047951
ccttaaaaatatt

SEQ ID NO: 194925 - DNA, 13 bp, Artificial Sequence
  Oligonucleotide for detection of SNP TSC0047951
aatattattaagg

SEQ ID NO: 194926 - DNA, 13 bp, Artificial Sequence
  Oligonucleotide for detection of SNP TSC0047951
ccttaataatatt

SEQ ID NO: 194927 - DNA, 13 bp, Artificial Sequence
  Oligonucleotide for detection of SNP TSC0047952
gtgaagttttttt

SEQ ID NO: 194928 - DNA, 13 bp, Artificial Sequence
  Oligonucleotide for detection of SNP TSC0047952
aaaaaaacttcac

SEQ ID NO: 194929 - DNA, 13 bp, Artificial Sequence
  Oligonucleotide for detection of SNP TSC0047952
gtgaaggtttttt

SEQ ID NO: 194930 - DNA, 13 bp, Artificial Sequence
  Oligonucleotide for detection of SNP TSC0047952
aaaaaaccttcac

SEQ ID NO: 194931 - DNA, 13 bp, Artificial Sequence
  Oligonucleotide for detection of SNP TSC0047952
agggagattttay

SEQ ID NO: 194932 - DNA, 13 bp, Artificial Sequence
  Oligonucleotide for detection of SNP TSC0047952
rtaaaatctccct

SEQ ID NO: 194933 - DNA, 13 bp, Artificial Sequence
  Oligonucleotide for detection of SNP TSC0047952
agggagtttttay

SEQ ID NO: 194934 - DNA, 13 bp, Artificial Sequence
  Oligonucleotide for detection of SNP TSC0047952
rtaaaaactccct

SEQ ID NO: 194935 - DNA, 13 bp, Artificial Sequence
  Oligonucleotide for detection of SNP TSC0047953
ttggaatgagtty

SEQ ID NO: 194936 - DNA, 13 bp, Artificial Sequence
  Oligonucleotide for detection of SNP TSC0047953
raactcattccaa

SEQ ID NO: 194937 - DNA, 13 bp, Artificial Sequence
  Oligonucleotide for detection of SNP TSC0047953
ttggaaggagtty

SEQ ID NO: 194938 - DNA, 13 bp, Artificial Sequence
  Oligonucleotide for detection of SNP TSC0047953
raactccttccaa

SEQ ID NO: 194939 - DNA, 13 bp, Artificial Sequence
  Oligonucleotide for detection of SNP TSC0047953
tcggaatgagtty

SEQ ID NO: 194940 - DNA, 13 bp, Artificial Sequence
  Oligonucleotide for detection of SNP TSC0047953
raactcattccga

SEQ ID NO: 194941 - DNA, 13 bp, Artificial Sequence
  Oligonucleotide for detection of SNP TSC0047953
tcggaaggagtty

SEQ ID NO: 194942 - DNA, 13 bp, Artificial Sequence
  Oligonucleotide for detection of SNP TSC0047953
raactccttccga

SEQ ID NO: 194943 - DNA, 13 bp, Artificial Sequence
  Oligonucleotide for detection of SNP TSC0047953
ttggaacgagtty

SEQ ID NO: 194944 - DNA, 13 bp, Artificial Sequence
  Oligonucleotide for detection of SNP TSC0047953
raactcgttccaa

SEQ ID NO: 194945 - DNA, 13 bp, Artificial Sequence
  Oligonucleotide for detection of SNP TSC0047953
tcggaacgagtty

SEQ ID NO: 194946 - DNA, 13 bp, Artificial Sequence
  Oligonucleotide for detection of SNP TSC0047953
raactcgttccga

SEQ ID NO: 194947 - DNA, 13 bp, Artificial Sequence
  Oligonucleotide for detection of SNP TSC0047953
gagttttttttgg

SEQ ID NO: 194948 - DNA, 13 bp, Artificial Sequence
  Oligonucleotide for detection of SNP TSC0047953
ccaaaaaaaactc

SEQ ID NO: 194949 - DNA, 13 bp, Artificial Sequence
  Oligonucleotide for detection of SNP TSC0047953
gagtttttttcgg

SEQ ID NO: 194950 - DNA, 13 bp, Artificial Sequence
  Oligonucleotide for detection of SNP TSC0047953
ccgaaaaaaactc

SEQ ID NO: 194951 - DNA, 13 bp, Artificial Sequence
  Oligonucleotide for detection of SNP TSC0047955
aggataatgttaa

SEQ ID NO: 194952 - DNA, 13 bp, Artificial Sequence
  Oligonucleotide for detection of SNP TSC0047955
ttaacattatcct

SEQ ID NO: 194953 - DNA, 13 bp, Artificial Sequence
  Oligonucleotide for detection of SNP TSC0047955
aggatattgttaa

SEQ ID NO: 194954 - DNA, 13 bp, Artificial Sequence
  Oligonucleotide for detection of SNP TSC0047955
ttaacaatatcct

SEQ ID NO: 194955 - DNA, 13 bp, Artificial Sequence
  Oligonucleotide for detection of SNP TSC0047955
ttaatattgtttt

SEQ ID NO: 194956 - DNA, 13 bp, Artificial Sequence
  Oligonucleotide for detection of SNP TSC0047955
aaaacaatattaa

SEQ ID NO: 194957 - DNA, 13 bp, Artificial Sequence
  Oligonucleotide for detection of SNP TSC0047955
ttaatagtgtttt

SEQ ID NO: 194958 - DNA, 13 bp, Artificial Sequence
  Oligonucleotide for detection of SNP TSC0047955
aaaacactattaa

SEQ ID NO: 194959 - DNA, 13 bp, Artificial Sequence
  Oligonucleotide for detection of SNP TSC0047956
aatttgatatttt

SEQ ID NO: 194960 - DNA, 13 bp, Artificial Sequence
  Oligonucleotide for detection of SNP TSC0047956
aaaatatcaaatt

SEQ ID NO: 194961 - DNA, 13 bp, Artificial Sequence
  Oligonucleotide for detection of SNP TSC0047956
aatttggtatttt

SEQ ID NO: 194962 - DNA, 13 bp, Artificial Sequence
  Oligonucleotide for detection of SNP TSC0047956
aaaataccaaatt

SEQ ID NO: 194963 - DNA, 13 bp, Artificial Sequence
  Oligonucleotide for detection of SNP TSC0047957
ttaatggttagag

SEQ ID NO: 194964 - DNA, 13 bp, Artificial Sequence
  Oligonucleotide for detection of SNP TSC0047957
ctctaaccattaa

SEQ ID NO: 194965 - DNA, 13 bp, Artificial Sequence
  Oligonucleotide for detection of SNP TSC0047957
ttaatgattagag

SEQ ID NO: 194966 - DNA, 13 bp, Artificial Sequence
  Oligonucleotide for detection of SNP TSC0047957
ctctaatcattaa

SEQ ID NO: 194967 - DNA, 13 bp, Artificial Sequence
  Oligonucleotide for detection of SNP TSC0047958
tatggtaagtgaa

SEQ ID NO: 194968 - DNA, 13 bp, Artificial Sequence
  Oligonucleotide for detection of SNP TSC0047958
ttcacttaccata

SEQ ID NO: 194969 - DNA, 13 bp, Artificial Sequence
  Oligonucleotide for detection of SNP TSC0047958
tatggtgagtgaa

SEQ ID NO: 194970 - DNA, 13 bp, Artificial Sequence
  Oligonucleotide for detection of SNP TSC0047958
ttcactcaccata

SEQ ID NO: 194971 - DNA, 13 bp, Artificial Sequence
  Oligonucleotide for detection of SNP TSC0047959
gaatttattaagg

SEQ ID NO: 194972 - DNA, 13 bp, Artificial Sequence
  Oligonucleotide for detection of SNP TSC0047959
ccttaataaattc

SEQ ID NO: 194973 - DNA, 13 bp, Artificial Sequence
  Oligonucleotide for detection of SNP TSC0047959
gaatttgttaagg

SEQ ID NO: 194974 - DNA, 13 bp, Artificial Sequence
  Oligonucleotide for detection of SNP TSC0047959
ccttaacaaattc

SEQ ID NO: 194975 - DNA, 13 bp, Artificial Sequence
  Oligonucleotide for detection of SNP TSC0047962
tttaaatgtataa

SEQ ID NO: 194976 - DNA, 13 bp, Artificial Sequence
  Oligonucleotide for detection of SNP TSC0047962
ttatacatttaaa

SEQ ID NO: 194977 - DNA, 13 bp, Artificial Sequence
  Oligonucleotide for detection of SNP TSC0047962
ttgtatatttaaa

SEQ ID NO: 194978 - DNA, 13 bp, Artificial Sequence
  Oligonucleotide for detection of SNP TSC0047962
tttaaatatacaa

SEQ ID NO: 194979 - DNA, 13 bp, Artificial Sequence
  Oligonucleotide for detection of SNP TSC0047962
ttgtatttttaaa

SEQ ID NO: 194980 - DNA, 13 bp, Artificial Sequence
  Oligonucleotide for detection of SNP TSC0047962
tttaaaaatacaa

SEQ ID NO: 194981 - DNA, 13 bp, Artificial Sequence
  Oligonucleotide for detection of SNP TSC0047972
taagttgtttttg

SEQ ID NO: 194982 - DNA, 13 bp, Artificial Sequence
  Oligonucleotide for detection of SNP TSC0047972
caaaaacaactta

SEQ ID NO: 194983 - DNA, 13 bp, Artificial Sequence
  Oligonucleotide for detection of SNP TSC0047972
taagttatttttg

SEQ ID NO: 194984 - DNA, 13 bp, Artificial Sequence
  Oligonucleotide for detection of SNP TSC0047972
caaaaataactta

SEQ ID NO: 194985 - DNA, 13 bp, Artificial Sequence
  Oligonucleotide for detection of SNP TSC0047972
taagtcgtttttg

SEQ ID NO: 194986 - DNA, 13 bp, Artificial Sequence
  Oligonucleotide for detection of SNP TSC0047972
caaaaacgactta

SEQ ID NO: 194987 - DNA, 13 bp, Artificial Sequence
  Oligonucleotide for detection of SNP TSC0008645
agaaataggaaaa

SEQ ID NO: 194988 - DNA, 13 bp, Artificial Sequence
  Oligonucleotide for detection of SNP TSC0008645
ttttcctatttct

SEQ ID NO: 194989 - DNA, 13 bp, Artificial Sequence
  Oligonucleotide for detection of SNP TSC0008645
agaaatgggaaaa

SEQ ID NO: 194990 - DNA, 13 bp, Artificial Sequence
  Oligonucleotide for detection of SNP TSC0008645
ttttcccatttct

SEQ ID NO: 194991 - DNA, 13 bp, Artificial Sequence
  Oligonucleotide for detection of SNP TSC0008645
agaaacgggaaaa

SEQ ID NO: 194992 - DNA, 13 bp, Artificial Sequence
  Oligonucleotide for detection of SNP TSC0008645
ttttcccgtttct

SEQ ID NO: 194993 - DNA, 13 bp, Artificial Sequence
  Oligonucleotide for detection of SNP TSC0008646
tttaggattagag

SEQ ID NO: 194994 - DNA, 13 bp, Artificial Sequence
  Oligonucleotide for detection of SNP TSC0008646
ctctaatcctaaa

SEQ ID NO: 194995 - DNA, 13 bp, Artificial Sequence
  Oligonucleotide for detection of SNP TSC0008646
tttaggtttagag

SEQ ID NO: 194996 - DNA, 13 bp, Artificial Sequence
  Oligonucleotide for detection of SNP TSC0008646
ctctaaacctaaa

SEQ ID NO: 194997 - DNA, 13 bp, Artificial Sequence
  Oligonucleotide for detection of SNP TSC0008646
ttttgattttggg

SEQ ID NO: 194998 - DNA, 13 bp, Artificial Sequence
  Oligonucleotide for detection of SNP TSC0008646
cccaaaatcaaaa

SEQ ID NO: 194999 - DNA, 13 bp, Artificial Sequence
  Oligonucleotide for detection of SNP TSC0008646
ttttgaatttggg

SEQ ID NO: 195000 - DNA, 13 bp, Artificial Sequence
  Oligonucleotide for detection of SNP TSC0008646
cccaaattcaaaa

SEQ ID NO: 195001 - DNA, 13 bp, Artificial Sequence
  Oligonucleotide for detection of SNP TSC0047976
tattggaggtaty

SEQ ID NO: 195002 - DNA, 13 bp, Artificial Sequence
  Oligonucleotide for detection of SNP TSC0047976
ratacctccaata

SEQ ID NO: 195003 - DNA, 13 bp, Artificial Sequence
  Oligonucleotide for detection of SNP TSC0047976
tattgggggtaty

SEQ ID NO: 195004 - DNA, 13 bp, Artificial Sequence
  Oligonucleotide for detection of SNP TSC0047976
ratacccccaata

SEQ ID NO: 195005 - DNA, 13 bp, Artificial Sequence
  Oligonucleotide for detection of SNP TSC0047980
tatatttaattaa

SEQ ID NO: 195006 - DNA, 13 bp, Artificial Sequence
  Oligonucleotide for detection of SNP TSC0047980
ttaattaaatata

SEQ ID NO: 195007 - DNA, 13 bp, Artificial Sequence
  Oligonucleotide for detection of SNP TSC0047980
tatattgaattaa

SEQ ID NO: 195008 - DNA, 13 bp, Artificial Sequence
  Oligonucleotide for detection of SNP TSC0047980
ttaattcaatata

SEQ ID NO: 195009 - DNA, 13 bp, Artificial Sequence
  Oligonucleotide for detection of SNP TSC0047980
ttagttaagtata

SEQ ID NO: 195010 - DNA, 13 bp, Artificial Sequence
  Oligonucleotide for detection of SNP TSC0047980
tatacttaactaa

SEQ ID NO: 195011 - DNA, 13 bp, Artificial Sequence
  Oligonucleotide for detection of SNP TSC0047980
ttagtttagtata

SEQ ID NO: 195012 - DNA, 13 bp, Artificial Sequence
  Oligonucleotide for detection of SNP TSC0047980
tatactaaactaa

SEQ ID NO: 195013 - DNA, 13 bp, Artificial Sequence
  Oligonucleotide for detection of SNP TSC0004773
tttgaggaaaaat

SEQ ID NO: 195014 - DNA, 13 bp, Artificial Sequence
  Oligonucleotide for detection of SNP TSC0004773
atttttcctcaaa

SEQ ID NO: 195015 - DNA, 13 bp, Artificial Sequence
  Oligonucleotide for detection of SNP TSC0004773
tttgagaaaaaat

SEQ ID NO: 195016 - DNA, 13 bp, Artificial Sequence
  Oligonucleotide for detection of SNP TSC0004773
attttttctcaaa

SEQ ID NO: 195017 - DNA, 13 bp, Artificial Sequence
  Oligonucleotide for detection of SNP TSC0010434
gtgaaaaagtatt

SEQ ID NO: 195018 - DNA, 13 bp, Artificial Sequence
  Oligonucleotide for detection of SNP TSC0010434
aatactttttcac

SEQ ID NO: 195019 - DNA, 13 bp, Artificial Sequence
  Oligonucleotide for detection of SNP TSC0010434
gtgaaagagtatt

SEQ ID NO: 195020 - DNA, 13 bp, Artificial Sequence
  Oligonucleotide for detection of SNP TSC0010434
aatactctttcac

SEQ ID NO: 195021 - DNA, 13 bp, Artificial Sequence
  Oligonucleotide for detection of SNP TSC0010434
gcgaaaaagtatt

SEQ ID NO: 195022 - DNA, 13 bp, Artificial Sequence
  Oligonucleotide for detection of SNP TSC0010434
aatactttttcgc

SEQ ID NO: 195023 - DNA, 13 bp, Artificial Sequence
  Oligonucleotide for detection of SNP TSC0010434
gcgaaagagtatt

SEQ ID NO: 195024 - DNA, 13 bp, Artificial Sequence
  Oligonucleotide for detection of SNP TSC0010434
aatactctttcgc

SEQ ID NO: 195025 - DNA, 13 bp, Artificial Sequence
  Oligonucleotide for detection of SNP TSC0007996
ttgaatatattaa

SEQ ID NO: 195026 - DNA, 13 bp, Artificial Sequence
  Oligonucleotide for detection of SNP TSC0007996
ttaatatattcaa

SEQ ID NO: 195027 - DNA, 13 bp, Artificial Sequence
  Oligonucleotide for detection of SNP TSC0007996
ttgaatgtattaa

SEQ ID NO: 195028 - DNA, 13 bp, Artificial Sequence
  Oligonucleotide for detection of SNP TSC0007996
ttaatacattcaa

SEQ ID NO: 195029 - DNA, 13 bp, Artificial Sequence
  Oligonucleotide for detection of SNP TSC0007996
ttgaacgtattaa

SEQ ID NO: 195030 - DNA, 13 bp, Artificial Sequence
  Oligonucleotide for detection of SNP TSC0007996
ttaatacgttcaa

SEQ ID NO: 195031 - DNA, 13 bp, Artificial Sequence
  Oligonucleotide for detection of SNP TSC0007996
ttgatatgtttaa

SEQ ID NO: 195032 - DNA, 13 bp, Artificial Sequence
  Oligonucleotide for detection of SNP TSC0007996
ttaaacatatcaa

SEQ ID NO: 195033 - DNA, 13 bp, Artificial Sequence
  Oligonucleotide for detection of SNP TSC0007996
ttgatacgtttaa

SEQ ID NO: 195034 - DNA, 13 bp, Artificial Sequence
  Oligonucleotide for detection of SNP TSC0007996
ttaaacgtatcaa

SEQ ID NO: 195035 - DNA, 13 bp, Artificial Sequence
  Oligonucleotide for detection of SNP TSC0008401
gtagagtgttttt

SEQ ID NO: 195036 - DNA, 13 bp, Artificial Sequence
  Oligonucleotide for detection of SNP TSC0008401
aaaaacactctac

SEQ ID NO: 195037 - DNA, 13 bp, Artificial Sequence
  Oligonucleotide for detection of SNP TSC0008401
gtagagcgttttt

SEQ ID NO: 195038 - DNA, 13 bp, Artificial Sequence
  Oligonucleotide for detection of SNP TSC0008401
aaaaacgctctac

SEQ ID NO: 195039 - DNA, 13 bp, Artificial Sequence
  Oligonucleotide for detection of SNP TSC0005279
atagattaaataa

SEQ ID NO: 195040 - DNA, 13 bp, Artificial Sequence
  Oligonucleotide for detection of SNP TSC0005279
ttatttaatctat

SEQ ID NO: 195041 - DNA, 13 bp, Artificial Sequence
  Oligonucleotide for detection of SNP TSC0005279
atagatgaaataa

SEQ ID NO: 195042 - DNA, 13 bp, Artificial Sequence
  Oligonucleotide for detection of SNP TSC0005279
ttatttcatctat

SEQ ID NO: 195043 - DNA, 13 bp, Artificial Sequence
  Oligonucleotide for detection of SNP TSC0005279
ttgttttatttat

SEQ ID NO: 195044 - DNA, 13 bp, Artificial Sequence
  Oligonucleotide for detection of SNP TSC0005279
ataaataaaacaa

SEQ ID NO: 195045 - DNA, 13 bp, Artificial Sequence
  Oligonucleotide for detection of SNP TSC0047981
aaagtgaattgat

SEQ ID NO: 195046 - DNA, 13 bp, Artificial Sequence
  Oligonucleotide for detection of SNP TSC0047981
atcaattcacttt

SEQ ID NO: 195047 - DNA, 13 bp, Artificial Sequence
  Oligonucleotide for detection of SNP TSC0047981
aaagtgtattgat

SEQ ID NO: 195048 - DNA, 13 bp, Artificial Sequence
  Oligonucleotide for detection of SNP TSC0047981
atcaatacacttt

SEQ ID NO: 195049 - DNA, 13 bp, Artificial Sequence
  Oligonucleotide for detection of SNP TSC0047981
attagtttatttt

SEQ ID NO: 195050 - DNA, 13 bp, Artificial Sequence
  Oligonucleotide for detection of SNP TSC0047981
aaaataaactaat

SEQ ID NO: 195051 - DNA, 13 bp, Artificial Sequence
  Oligonucleotide for detection of SNP TSC0047981
attagtatatttt

SEQ ID NO: 195052 - DNA, 13 bp, Artificial Sequence
  Oligonucleotide for detection of SNP TSC0047981
aaaatatactaat

SEQ ID NO: 195053 - DNA, 13 bp, Artificial Sequence
  Oligonucleotide for detection of SNP TSC0047982
ttgtagaagggta

SEQ ID NO: 195054 - DNA, 13 bp, Artificial Sequence
  Oligonucleotide for detection of SNP TSC0047982
tacccttctacaa

SEQ ID NO: 195055 - DNA, 13 bp, Artificial Sequence
  Oligonucleotide for detection of SNP TSC0047982
ttgtaggagggta

SEQ ID NO: 195056 - DNA, 13 bp, Artificial Sequence
  Oligonucleotide for detection of SNP TSC0047982
taccctcctacaa

SEQ ID NO: 195057 - DNA, 13 bp, Artificial Sequence
  Oligonucleotide for detection of SNP TSC0047983
taggatgagagtt

SEQ ID NO: 195058 - DNA, 13 bp, Artificial Sequence
  Oligonucleotide for detection of SNP TSC0047983
aactctcatccta

SEQ ID NO: 195059 - DNA, 13 bp, Artificial Sequence
  Oligonucleotide for detection of SNP TSC0047983
taggataagagtt

SEQ ID NO: 195060 - DNA, 13 bp, Artificial Sequence
  Oligonucleotide for detection of SNP TSC0047983
aactcttatccta

SEQ ID NO: 195061 - DNA, 13 bp, Artificial Sequence
  Oligonucleotide for detection of SNP TSC0047983
taggacgagagtt

SEQ ID NO: 195062 - DNA, 13 bp, Artificial Sequence
  Oligonucleotide for detection of SNP TSC0047983
aactctcgtccta

SEQ ID NO: 195063 - DNA, 13 bp, Artificial Sequence
  Oligonucleotide for detection of SNP TSC0047984
aaaaggaatagtt

SEQ ID NO: 195064 - DNA, 13 bp, Artificial Sequence
  Oligonucleotide for detection of SNP TSC0047984
aactattcctttt

SEQ ID NO: 195065 - DNA, 13 bp, Artificial Sequence
  Oligonucleotide for detection of SNP TSC0047984
aaaagggatagtt

SEQ ID NO: 195066 - DNA, 13 bp, Artificial Sequence
  Oligonucleotide for detection of SNP TSC0047984
aactatccctttt

SEQ ID NO: 195067 - DNA, 13 bp, Artificial Sequence
  Oligonucleotide for detection of SNP TSC0047986
agtattttttgtt

SEQ ID NO: 195068 - DNA, 13 bp, Artificial Sequence
  Oligonucleotide for detection of SNP TSC0047986
aacaaaaaatact

SEQ ID NO: 195069 - DNA, 13 bp, Artificial Sequence
  Oligonucleotide for detection of SNP TSC0047986
aataaataatgtt

SEQ ID NO: 195070 - DNA, 13 bp, Artificial Sequence
  Oligonucleotide for detection of SNP TSC0047986
aacattatttatt

SEQ ID NO: 195071 - DNA, 13 bp, Artificial Sequence
  Oligonucleotide for detection of SNP TSC0047986
aataaaaaatgtt

SEQ ID NO: 195072 - DNA, 13 bp, Artificial Sequence
  Oligonucleotide for detection of SNP TSC0047986
aacattttttatt

SEQ ID NO: 195073 - DNA, 13 bp, Artificial Sequence
  Oligonucleotide for detection of SNP TSC0047987
ttgattatatttg

SEQ ID NO: 195074 - DNA, 13 bp, Artificial Sequence
  Oligonucleotide for detection of SNP TSC0047987
caaatataatcaa

SEQ ID NO: 195075 - DNA, 13 bp, Artificial Sequence
  Oligonucleotide for detection of SNP TSC0047987
ttgattgtatttg

SEQ ID NO: 195076 - DNA, 13 bp, Artificial Sequence
  Oligonucleotide for detection of SNP TSC0047987
caaatacaatcaa

SEQ ID NO: 195077 - DNA, 13 bp, Artificial Sequence
  Oligonucleotide for detection of SNP TSC0047989
ttttggagaataa

SEQ ID NO: 195078 - DNA, 13 bp, Artificial Sequence
  Oligonucleotide for detection of SNP TSC0047989
ttattctccaaaa

SEQ ID NO: 195079 - DNA, 13 bp, Artificial Sequence
  Oligonucleotide for detection of SNP TSC0047989
ttttggggaataa

SEQ ID NO: 195080 - DNA, 13 bp, Artificial Sequence
  Oligonucleotide for detection of SNP TSC0047989
ttattccccaaaa

SEQ ID NO: 195081 - DNA, 13 bp, Artificial Sequence
  Oligonucleotide for detection of SNP TSC0047993
atagaaatataga

SEQ ID NO: 195082 - DNA, 13 bp, Artificial Sequence
  Oligonucleotide for detection of SNP TSC0047993
tctatatttctat

SEQ ID NO: 195083 - DNA, 13 bp, Artificial Sequence
  Oligonucleotide for detection of SNP TSC0047993
atagaattataga

SEQ ID NO: 195084 - DNA, 13 bp, Artificial Sequence
  Oligonucleotide for detection of SNP TSC0047993
tctataattctat

SEQ ID NO: 195085 - DNA, 13 bp, Artificial Sequence
  Oligonucleotide for detection of SNP TSC0047993
tttgtaattttgt

SEQ ID NO: 195086 - DNA, 13 bp, Artificial Sequence
  Oligonucleotide for detection of SNP TSC0047993
acaaaattacaaa

SEQ ID NO: 195087 - DNA, 13 bp, Artificial Sequence
  Oligonucleotide for detection of SNP TSC0047994
taaatgaaaaata

SEQ ID NO: 195088 - DNA, 13 bp, Artificial Sequence
  Oligonucleotide for detection of SNP TSC0047994
tatttttcattta

SEQ ID NO: 195089 - DNA, 13 bp, Artificial Sequence
  Oligonucleotide for detection of SNP TSC0047994
taaatggaaaata

SEQ ID NO: 195090 - DNA, 13 bp, Artificial Sequence
  Oligonucleotide for detection of SNP TSC0047994
tattttccattta

SEQ ID NO: 195091 - DNA, 13 bp, Artificial Sequence
  Oligonucleotide for detection of SNP TSC0047995
tatatatgaagta

SEQ ID NO: 195092 - DNA, 13 bp, Artificial Sequence
  Oligonucleotide for detection of SNP TSC0047995
tacttcatatata

SEQ ID NO: 195093 - DNA, 13 bp, Artificial Sequence
  Oligonucleotide for detection of SNP TSC0047995
tatatacgaagta

SEQ ID NO: 195094 - DNA, 13 bp, Artificial Sequence
  Oligonucleotide for detection of SNP TSC0047995
tacttcgtatata

SEQ ID NO: 195095 - DNA, 13 bp, Artificial Sequence
  Oligonucleotide for detection of SNP TSC0047995
tgtttcgtatata

SEQ ID NO: 195096 - DNA, 13 bp, Artificial Sequence
  Oligonucleotide for detection of SNP TSC0047995
tatatacgaaaca

SEQ ID NO: 195097 - DNA, 13 bp, Artificial Sequence
  Oligonucleotide for detection of SNP TSC0047996
gggaattgggaty

SEQ ID NO: 195098 - DNA, 13 bp, Artificial Sequence
  Oligonucleotide for detection of SNP TSC0047996
ratcccaattccc

SEQ ID NO: 195099 - DNA, 13 bp, Artificial Sequence
  Oligonucleotide for detection of SNP TSC0047996
gggaatcgggaty

SEQ ID NO: 195100 - DNA, 13 bp, Artificial Sequence
  Oligonucleotide for detection of SNP TSC0047996
ratcccgattccc

SEQ ID NO: 195101 - DNA, 13 bp, Artificial Sequence
  Oligonucleotide for detection of SNP TSC0047997
taagaatgaagga

SEQ ID NO: 195102 - DNA, 13 bp, Artificial Sequence
  Oligonucleotide for detection of SNP TSC0047997
tccttcattctta

SEQ ID NO: 195103 - DNA, 13 bp, Artificial Sequence
  Oligonucleotide for detection of SNP TSC0047997
taagaaggaagga

SEQ ID NO: 195104 - DNA, 13 bp, Artificial Sequence
  Oligonucleotide for detection of SNP TSC0047997
tccttccttctta

SEQ ID NO: 195105 - DNA, 13 bp, Artificial Sequence
  Oligonucleotide for detection of SNP TSC0048000
ggattatgaggty

SEQ ID NO: 195106 - DNA, 13 bp, Artificial Sequence
  Oligonucleotide for detection of SNP TSC0048000
racctcataatcc

SEQ ID NO: 195107 - DNA, 13 bp, Artificial Sequence
  Oligonucleotide for detection of SNP TSC0048000
ggattaggaggty

SEQ ID NO: 195108 - DNA, 13 bp, Artificial Sequence
  Oligonucleotide for detection of SNP TSC0048000
racctcctaatcc

SEQ ID NO: 195109 - DNA, 13 bp, Artificial Sequence
  Oligonucleotide for detection of SNP TSC0048000
ggttttataatty

SEQ ID NO: 195110 - DNA, 13 bp, Artificial Sequence
  Oligonucleotide for detection of SNP TSC0048000
raattataaaacc

SEQ ID NO: 195111 - DNA, 13 bp, Artificial Sequence
  Oligonucleotide for detection of SNP TSC0048000
ggttttttaatty

SEQ ID NO: 195112 - DNA, 13 bp, Artificial Sequence
  Oligonucleotide for detection of SNP TSC0048000
raattaaaaaacc

SEQ ID NO: 195113 - DNA, 13 bp, Artificial Sequence
  Oligonucleotide for detection of SNP TSC0048002
tttagatggaaag

SEQ ID NO: 195114 - DNA, 13 bp, Artificial Sequence
  Oligonucleotide for detection of SNP TSC0048002
ctttccatctaaa

SEQ ID NO: 195115 - DNA, 13 bp, Artificial Sequence
  Oligonucleotide for detection of SNP TSC0048002
tttagacggaaag

SEQ ID NO: 195116 - DNA, 13 bp, Artificial Sequence
  Oligonucleotide for detection of SNP TSC0048002
ctttccgtctaaa

SEQ ID NO: 195117 - DNA, 13 bp, Artificial Sequence
  Oligonucleotide for detection of SNP TSC0048003
tttgttaagtttt

SEQ ID NO: 195118 - DNA, 13 bp, Artificial Sequence
  Oligonucleotide for detection of SNP TSC0048003
aaaacttaacaaa

SEQ ID NO: 195119 - DNA, 13 bp, Artificial Sequence
  Oligonucleotide for detection of SNP TSC0048003
tttgttgagtttt

SEQ ID NO: 195120 - DNA, 13 bp, Artificial Sequence
  Oligonucleotide for detection of SNP TSC0048003
aaaactcaacaaa

SEQ ID NO: 195121 - DNA, 13 bp, Artificial Sequence
  Oligonucleotide for detection of SNP TSC0048005
aaatttatgtttg

SEQ ID NO: 195122 - DNA, 13 bp, Artificial Sequence
  Oligonucleotide for detection of SNP TSC0048005
caaacataaattt

SEQ ID NO: 195123 - DNA, 13 bp, Artificial Sequence
  Oligonucleotide for detection of SNP TSC0048005
aaatttgtgtttg

SEQ ID NO: 195124 - DNA, 13 bp, Artificial Sequence
  Oligonucleotide for detection of SNP TSC0048005
caaacacaaattt

SEQ ID NO: 195125 - DNA, 13 bp, Artificial Sequence
  Oligonucleotide for detection of SNP TSC0048006
ttgggttatagag

SEQ ID NO: 195126 - DNA, 13 bp, Artificial Sequence
  Oligonucleotide for detection of SNP TSC0048006
ctctataacccaa

SEQ ID NO: 195127 - DNA, 13 bp, Artificial Sequence
  Oligonucleotide for detection of SNP TSC0048007
tatgtaatattty

SEQ ID NO: 195128 - DNA, 13 bp, Artificial Sequence
  Oligonucleotide for detection of SNP TSC0048007
raaatattacata

SEQ ID NO: 195129 - DNA, 13 bp, Artificial Sequence
  Oligonucleotide for detection of SNP TSC0048007
tatgtagtattty

SEQ ID NO: 195130 - DNA, 13 bp, Artificial Sequence
  Oligonucleotide for detection of SNP TSC0048007
raaatactacata

SEQ ID NO: 195131 - DNA, 13 bp, Artificial Sequence
  Oligonucleotide for detection of SNP TSC0048008
tttggtaagggty

SEQ ID NO: 195132 - DNA, 13 bp, Artificial Sequence
  Oligonucleotide for detection of SNP TSC0048008
racccttaccaaa

SEQ ID NO: 195133 - DNA, 13 bp, Artificial Sequence
  Oligonucleotide for detection of SNP TSC0048008
tttggtgagggty

SEQ ID NO: 195134 - DNA, 13 bp, Artificial Sequence
  Oligonucleotide for detection of SNP TSC0048008
raccctcaccaaa

SEQ ID NO: 195135 - DNA, 13 bp, Artificial Sequence
  Oligonucleotide for detection of SNP TSC0048009
tgggggtttggtt

SEQ ID NO: 195136 - DNA, 13 bp, Artificial Sequence
  Oligonucleotide for detection of SNP TSC0048009
aaccaaaccccca

SEQ ID NO: 195137 - DNA, 13 bp, Artificial Sequence
  Oligonucleotide for detection of SNP TSC0048009
tgggggattggtt

SEQ ID NO: 195138 - DNA, 13 bp, Artificial Sequence
  Oligonucleotide for detection of SNP TSC0048009
aaccaatccccca

SEQ ID NO: 195139 - DNA, 13 bp, Artificial Sequence
  Oligonucleotide for detection of SNP TSC0048013
tgtgtaatttttg

SEQ ID NO: 195140 - DNA, 13 bp, Artificial Sequence
  Oligonucleotide for detection of SNP TSC0048013
caaaaattacaca

SEQ ID NO: 195141 - DNA, 13 bp, Artificial Sequence
  Oligonucleotide for detection of SNP TSC0048013
tgtgtattttttg

SEQ ID NO: 195142 - DNA, 13 bp, Artificial Sequence
  Oligonucleotide for detection of SNP TSC0048013
caaaaaatacaca

SEQ ID NO: 195143 - DNA, 13 bp, Artificial Sequence
  Oligonucleotide for detection of SNP TSC0048013
taaggattatata

SEQ ID NO: 195144 - DNA, 13 bp, Artificial Sequence
  Oligonucleotide for detection of SNP TSC0048013
tatataatcctta

SEQ ID NO: 195145 - DNA, 13 bp, Artificial Sequence
  Oligonucleotide for detection of SNP TSC0048013
taaggagtatata

SEQ ID NO: 195146 - DNA, 13 bp, Artificial Sequence
  Oligonucleotide for detection of SNP TSC0048013
tatatactcctta

SEQ ID NO: 195147 - DNA, 13 bp, Artificial Sequence
  Oligonucleotide for detection of SNP TSC0048014
aatgttattgtay

SEQ ID NO: 195148 - DNA, 13 bp, Artificial Sequence
  Oligonucleotide for detection of SNP TSC0048014
rtacaataacatt

SEQ ID NO: 195149 - DNA, 13 bp, Artificial Sequence
  Oligonucleotide for detection of SNP TSC0048014
aatgttgttgtay

SEQ ID NO: 195150 - DNA, 13 bp, Artificial Sequence
  Oligonucleotide for detection of SNP TSC0048014
rtacaacaacatt

SEQ ID NO: 195151 - DNA, 13 bp, Artificial Sequence
  Oligonucleotide for detection of SNP TSC0048015
aaaaaatgtttaa

SEQ ID NO: 195152 - DNA, 13 bp, Artificial Sequence
  Oligonucleotide for detection of SNP TSC0048015
ttaaacatttttt

SEQ ID NO: 195153 - DNA, 13 bp, Artificial Sequence
  Oligonucleotide for detection of SNP TSC0048016
aattataggagta

SEQ ID NO: 195154 - DNA, 13 bp, Artificial Sequence
  Oligonucleotide for detection of SNP TSC0048016
tactcctataatt

SEQ ID NO: 195155 - DNA, 13 bp, Artificial Sequence
  Oligonucleotide for detection of SNP TSC0048016
aattatgggagta

SEQ ID NO: 195156 - DNA, 13 bp, Artificial Sequence
  Oligonucleotide for detection of SNP TSC0048016
tactcccataatt

SEQ ID NO: 195157 - DNA, 13 bp, Artificial Sequence
  Oligonucleotide for detection of SNP TSC0048018
ataagatgagtta

SEQ ID NO: 195158 - DNA, 13 bp, Artificial Sequence
  Oligonucleotide for detection of SNP TSC0048018
taactcatcttat

SEQ ID NO: 195159 - DNA, 13 bp, Artificial Sequence
  Oligonucleotide for detection of SNP TSC0048018
ataagacgagtta

SEQ ID NO: 195160 - DNA, 13 bp, Artificial Sequence
  Oligonucleotide for detection of SNP TSC0048018
taactcgtcttat

SEQ ID NO: 195161 - DNA, 13 bp, Artificial Sequence
  Oligonucleotide for detection of SNP TSC0048022
tttggttaattta

SEQ ID NO: 195162 - DNA, 13 bp, Artificial Sequence
  Oligonucleotide for detection of SNP TSC0048022
taaattaaccaaa

SEQ ID NO: 195163 - DNA, 13 bp, Artificial Sequence
  Oligonucleotide for detection of SNP TSC0048022
tttggtgaattta

SEQ ID NO: 195164 - DNA, 13 bp, Artificial Sequence
  Oligonucleotide for detection of SNP TSC0048022
taaattcaccaaa

SEQ ID NO: 195165 - DNA, 13 bp, Artificial Sequence
  Oligonucleotide for detection of SNP TSC0048022
tggattgattaaa

SEQ ID NO: 195166 - DNA, 13 bp, Artificial Sequence
  Oligonucleotide for detection of SNP TSC0048022
tttaatcaatcca

SEQ ID NO: 195167 - DNA, 13 bp, Artificial Sequence
  Oligonucleotide for detection of SNP TSC0048022
tggatttattaaa

SEQ ID NO: 195168 - DNA, 13 bp, Artificial Sequence
  Oligonucleotide for detection of SNP TSC0048022
tttaataaatcca

SEQ ID NO: 195169 - DNA, 13 bp, Artificial Sequence
  Oligonucleotide for detection of SNP TSC0048023
tttttaattaagg

SEQ ID NO: 195170 - DNA, 13 bp, Artificial Sequence
  Oligonucleotide for detection of SNP TSC0048023
ccttaattaaaaa

SEQ ID NO: 195171 - DNA, 13 bp, Artificial Sequence
  Oligonucleotide for detection of SNP TSC0048024
ttaatatggtaag

SEQ ID NO: 195172 - DNA, 13 bp, Artificial Sequence
  Oligonucleotide for detection of SNP TSC0048024
cttaccatattaa

SEQ ID NO: 195173 - DNA, 13 bp, Artificial Sequence
  Oligonucleotide for detection of SNP TSC0048024
ttaatacggtaag

SEQ ID NO: 195174 - DNA, 13 bp, Artificial Sequence
  Oligonucleotide for detection of SNP TSC0048024
cttaccgtattaa

SEQ ID NO: 195175 - DNA, 13 bp, Artificial Sequence
  Oligonucleotide for detection of SNP TSC0048024
tttgttgtgttag

SEQ ID NO: 195176 - DNA, 13 bp, Artificial Sequence
  Oligonucleotide for detection of SNP TSC0048024
ctaacacaacaaa

SEQ ID NO: 195177 - DNA, 13 bp, Artificial Sequence
  Oligonucleotide for detection of SNP TSC0048024
tttgttatgttag

SEQ ID NO: 195178 - DNA, 13 bp, Artificial Sequence
  Oligonucleotide for detection of SNP TSC0048024
ctaacataacaaa

SEQ ID NO: 195179 - DNA, 13 bp, Artificial Sequence
  Oligonucleotide for detection of SNP TSC0048024
tttgtcgtgttag

SEQ ID NO: 195180 - DNA, 13 bp, Artificial Sequence
  Oligonucleotide for detection of SNP TSC0048024
ctaacacgacaaa

SEQ ID NO: 195181 - DNA, 13 bp, Artificial Sequence
  Oligonucleotide for detection of SNP TSC0048025
ttggttatttgat

SEQ ID NO: 195182 - DNA, 13 bp, Artificial Sequence
  Oligonucleotide for detection of SNP TSC0048025
atcaaataaccaa

SEQ ID NO: 195183 - DNA, 13 bp, Artificial Sequence
  Oligonucleotide for detection of SNP TSC0048025
ttggttgtttgat

SEQ ID NO: 195184 - DNA, 13 bp, Artificial Sequence
  Oligonucleotide for detection of SNP TSC0048025
atcaaacaaccaa

SEQ ID NO: 195185 - DNA, 13 bp, Artificial Sequence
  Oligonucleotide for detection of SNP TSC0048025
ttggtcgtttgat

SEQ ID NO: 195186 - DNA, 13 bp, Artificial Sequence
  Oligonucleotide for detection of SNP TSC0048025
atcaaacgaccaa

SEQ ID NO: 195187 - DNA, 13 bp, Artificial Sequence
  Oligonucleotide for detection of SNP TSC0048025
attagatgattag

SEQ ID NO: 195188 - DNA, 13 bp, Artificial Sequence
  Oligonucleotide for detection of SNP TSC0048025
ctaatcatctaat

SEQ ID NO: 195189 - DNA, 13 bp, Artificial Sequence
  Oligonucleotide for detection of SNP TSC0048025
attagacgattag

SEQ ID NO: 195190 - DNA, 13 bp, Artificial Sequence
  Oligonucleotide for detection of SNP TSC0048025
ctaatcgtctaat

SEQ ID NO: 195191 - DNA, 13 bp, Artificial Sequence
  Oligonucleotide for detection of SNP TSC0048026
ttattgagatttt

SEQ ID NO: 195192 - DNA, 13 bp, Artificial Sequence
  Oligonucleotide for detection of SNP TSC0048026
aaaatctcaataa

SEQ ID NO: 195193 - DNA, 13 bp, Artificial Sequence
  Oligonucleotide for detection of SNP TSC0048026
aaaattttagtga

SEQ ID NO: 195194 - DNA, 13 bp, Artificial Sequence
  Oligonucleotide for detection of SNP TSC0048026
tcactaaaatttt

SEQ ID NO: 195195 - DNA, 13 bp, Artificial Sequence
  Oligonucleotide for detection of SNP TSC0048026
aaaattatagtga

SEQ ID NO: 195196 - DNA, 13 bp, Artificial Sequence
  Oligonucleotide for detection of SNP TSC0048026
tcactataatttt

SEQ ID NO: 195197 - DNA, 13 bp, Artificial Sequence
  Oligonucleotide for detection of SNP TSC0048027
aaggtatagatty

SEQ ID NO: 195198 - DNA, 13 bp, Artificial Sequence
  Oligonucleotide for detection of SNP TSC0048027
raatctatacctt

SEQ ID NO: 195199 - DNA, 13 bp, Artificial Sequence
  Oligonucleotide for detection of SNP TSC0048027
aaggtagagatty

SEQ ID NO: 195200 - DNA, 13 bp, Artificial Sequence
  Oligonucleotide for detection of SNP TSC0048027
raatctctacctt

SEQ ID NO: 195201 - DNA, 13 bp, Artificial Sequence
  Oligonucleotide for detection of SNP TSC0048027
gaatttttgtttt

SEQ ID NO: 195202 - DNA, 13 bp, Artificial Sequence
  Oligonucleotide for detection of SNP TSC0048027
aaaacaaaaattc

SEQ ID NO: 195203 - DNA, 13 bp, Artificial Sequence
  Oligonucleotide for detection of SNP TSC0048028
ggtttaggtaatt

SEQ ID NO: 195204 - DNA, 13 bp, Artificial Sequence
  Oligonucleotide for detection of SNP TSC0048028
aattacctaaacc

SEQ ID NO: 195205 - DNA, 13 bp, Artificial Sequence
  Oligonucleotide for detection of SNP TSC0048028
ggtttaagtaatt

SEQ ID NO: 195206 - DNA, 13 bp, Artificial Sequence
  Oligonucleotide for detection of SNP TSC0048028
aattacttaaacc

SEQ ID NO: 195207 - DNA, 13 bp, Artificial Sequence
  Oligonucleotide for detection of SNP TSC0048029
gtttgatagatag

SEQ ID NO: 195208 - DNA, 13 bp, Artificial Sequence
  Oligonucleotide for detection of SNP TSC0048029
ctatctatcaaac

SEQ ID NO: 195209 - DNA, 13 bp, Artificial Sequence
  Oligonucleotide for detection of SNP TSC0048029
gtttgagagatag

SEQ ID NO: 195210 - DNA, 13 bp, Artificial Sequence
  Oligonucleotide for detection of SNP TSC0048029
ctatctctcaaac

SEQ ID NO: 195211 - DNA, 13 bp, Artificial Sequence
  Oligonucleotide for detection of SNP TSC0048029
ttgtttgttagay

SEQ ID NO: 195212 - DNA, 13 bp, Artificial Sequence
  Oligonucleotide for detection of SNP TSC0048029
rtctaacaaacaa

SEQ ID NO: 195213 - DNA, 13 bp, Artificial Sequence
  Oligonucleotide for detection of SNP TSC0048029
ttgttttttagay

SEQ ID NO: 195214 - DNA, 13 bp, Artificial Sequence
  Oligonucleotide for detection of SNP TSC0048029
rtctaaaaaacaa

SEQ ID NO: 195215 - DNA, 13 bp, Artificial Sequence
  Oligonucleotide for detection of SNP TSC0048031
aaggttaaggagt

SEQ ID NO: 195216 - DNA, 13 bp, Artificial Sequence
  Oligonucleotide for detection of SNP TSC0048031
actccttaacctt

SEQ ID NO: 195217 - DNA, 13 bp, Artificial Sequence
  Oligonucleotide for detection of SNP TSC0048031
aaggttgaggagt

SEQ ID NO: 195218 - DNA, 13 bp, Artificial Sequence
  Oligonucleotide for detection of SNP TSC0048031
actcctcaacctt

SEQ ID NO: 195219 - DNA, 13 bp, Artificial Sequence
  Oligonucleotide for detection of SNP TSC0048031
aaggtcgaggagt

SEQ ID NO: 195220 - DNA, 13 bp, Artificial Sequence
  Oligonucleotide for detection of SNP TSC0048031
actcctcgacctt

SEQ ID NO: 195221 - DNA, 13 bp, Artificial Sequence
  Oligonucleotide for detection of SNP TSC0048032
gttaatatttaag

SEQ ID NO: 195222 - DNA, 13 bp, Artificial Sequence
  Oligonucleotide for detection of SNP TSC0048032
cttaaatattaac

SEQ ID NO: 195223 - DNA, 13 bp, Artificial Sequence
  Oligonucleotide for detection of SNP TSC0048032
gttaatgtttaag

SEQ ID NO: 195224 - DNA, 13 bp, Artificial Sequence
  Oligonucleotide for detection of SNP TSC0048032
cttaaacattaac

SEQ ID NO: 195225 - DNA, 13 bp, Artificial Sequence
  Oligonucleotide for detection of SNP TSC0048032
gttaacgtttaag

SEQ ID NO: 195226 - DNA, 13 bp, Artificial Sequence
  Oligonucleotide for detection of SNP TSC0048032
cttaaacgttaac

SEQ ID NO: 195227 - DNA, 13 bp, Artificial Sequence
  Oligonucleotide for detection of SNP TSC0048032
tttaaatgttggy

SEQ ID NO: 195228 - DNA, 13 bp, Artificial Sequence
  Oligonucleotide for detection of SNP TSC0048032
rccaacatttaaa

SEQ ID NO: 195229 - DNA, 13 bp, Artificial Sequence
  Oligonucleotide for detection of SNP TSC0048032
tttaaacgttggy

SEQ ID NO: 195230 - DNA, 13 bp, Artificial Sequence
  Oligonucleotide for detection of SNP TSC0048032
rccaacgtttaaa

SEQ ID NO: 195231 - DNA, 13 bp, Artificial Sequence
  Oligonucleotide for detection of SNP TSC0048033
tttttaaaaggta

SEQ ID NO: 195232 - DNA, 13 bp, Artificial Sequence
  Oligonucleotide for detection of SNP TSC0048033
taccttttaaaaa

SEQ ID NO: 195233 - DNA, 13 bp, Artificial Sequence
  Oligonucleotide for detection of SNP TSC0048033
tttttagaaggta

SEQ ID NO: 195234 - DNA, 13 bp, Artificial Sequence
  Oligonucleotide for detection of SNP TSC0048033
taccttctaaaaa

SEQ ID NO: 195235 - DNA, 13 bp, Artificial Sequence
  Oligonucleotide for detection of SNP TSC0048035
attttagtatgtt

SEQ ID NO: 195236 - DNA, 13 bp, Artificial Sequence
  Oligonucleotide for detection of SNP TSC0048035
aacatactaaaat

SEQ ID NO: 195237 - DNA, 13 bp, Artificial Sequence
  Oligonucleotide for detection of SNP TSC0048035
attttaatatgtt

SEQ ID NO: 195238 - DNA, 13 bp, Artificial Sequence
  Oligonucleotide for detection of SNP TSC0048035
aacatattaaaat

SEQ ID NO: 195239 - DNA, 13 bp, Artificial Sequence
  Oligonucleotide for detection of SNP TSC0048037
tagaattgtagtg

SEQ ID NO: 195240 - DNA, 13 bp, Artificial Sequence
  Oligonucleotide for detection of SNP TSC0048037
cactacaattcta

SEQ ID NO: 195241 - DNA, 13 bp, Artificial Sequence
  Oligonucleotide for detection of SNP TSC0048037
tagaatggtagtg

SEQ ID NO: 195242 - DNA, 13 bp, Artificial Sequence
  Oligonucleotide for detection of SNP TSC0048037
cactaccattcta

SEQ ID NO: 195243 - DNA, 13 bp, Artificial Sequence
  Oligonucleotide for detection of SNP TSC0048037
tagaacggtagtg

SEQ ID NO: 195244 - DNA, 13 bp, Artificial Sequence
  Oligonucleotide for detection of SNP TSC0048037
cactaccgttcta

SEQ ID NO: 195245 - DNA, 13 bp, Artificial Sequence
  Oligonucleotide for detection of SNP TSC0048037
tattgtagtttta

SEQ ID NO: 195246 - DNA, 13 bp, Artificial Sequence
  Oligonucleotide for detection of SNP TSC0048037
taaaactacaata

SEQ ID NO: 195247 - DNA, 13 bp, Artificial Sequence
  Oligonucleotide for detection of SNP TSC0048037
tattgttgtttta

SEQ ID NO: 195248 - DNA, 13 bp, Artificial Sequence
  Oligonucleotide for detection of SNP TSC0048037
taaaacaacaata

SEQ ID NO: 195249 - DNA, 13 bp, Artificial Sequence
  Oligonucleotide for detection of SNP TSC0048037
tattgtcgtttta

SEQ ID NO: 195250 - DNA, 13 bp, Artificial Sequence
  Oligonucleotide for detection of SNP TSC0048037
taaaacgacaata

SEQ ID NO: 195251 - DNA, 13 bp, Artificial Sequence
  Oligonucleotide for detection of SNP TSC0048038
gtgtatatggttt

SEQ ID NO: 195252 - DNA, 13 bp, Artificial Sequence
  Oligonucleotide for detection of SNP TSC0048038
aaaccatatacac

SEQ ID NO: 195253 - DNA, 13 bp, Artificial Sequence
  Oligonucleotide for detection of SNP TSC0048038
gtgtatgtggttt

SEQ ID NO: 195254 - DNA, 13 bp, Artificial Sequence
  Oligonucleotide for detection of SNP TSC0048038
aaaccacatacac

SEQ ID NO: 195255 - DNA, 13 bp, Artificial Sequence
  Oligonucleotide for detection of SNP TSC0048038
gtgtacgtggttt

SEQ ID NO: 195256 - DNA, 13 bp, Artificial Sequence
  Oligonucleotide for detection of SNP TSC0048038
aaaccacgtacac

SEQ ID NO: 195257 - DNA, 13 bp, Artificial Sequence
  Oligonucleotide for detection of SNP TSC0048038
aaattatgtgtay

SEQ ID NO: 195258 - DNA, 13 bp, Artificial Sequence
  Oligonucleotide for detection of SNP TSC0048038
rtacacataattt

SEQ ID NO: 195259 - DNA, 13 bp, Artificial Sequence
  Oligonucleotide for detection of SNP TSC0048038
aaattacgtgtay

SEQ ID NO: 195260 - DNA, 13 bp, Artificial Sequence
  Oligonucleotide for detection of SNP TSC0048038
rtacacgtaattt

SEQ ID NO: 195261 - DNA, 13 bp, Artificial Sequence
  Oligonucleotide for detection of SNP TSC0048040
gaagggaataatt

SEQ ID NO: 195262 - DNA, 13 bp, Artificial Sequence
  Oligonucleotide for detection of SNP TSC0048040
aattattcccttc

SEQ ID NO: 195263 - DNA, 13 bp, Artificial Sequence
  Oligonucleotide for detection of SNP TSC0048040
gaaggggataatt

SEQ ID NO: 195264 - DNA, 13 bp, Artificial Sequence
  Oligonucleotide for detection of SNP TSC0048040
aattatccccttc

SEQ ID NO: 195265 - DNA, 13 bp, Artificial Sequence
  Oligonucleotide for detection of SNP TSC0048041
ttttatagtgagy

SEQ ID NO: 195266 - DNA, 13 bp, Artificial Sequence
  Oligonucleotide for detection of SNP TSC0048041
rctcactataaaa

SEQ ID NO: 195267 - DNA, 13 bp, Artificial Sequence
  Oligonucleotide for detection of SNP TSC0048041
ttttattgtgagy

SEQ ID NO: 195268 - DNA, 13 bp, Artificial Sequence
  Oligonucleotide for detection of SNP TSC0048041
rctcacaataaaa

SEQ ID NO: 195269 - DNA, 13 bp, Artificial Sequence
  Oligonucleotide for detection of SNP TSC0048041
gtttattataaga

SEQ ID NO: 195270 - DNA, 13 bp, Artificial Sequence
  Oligonucleotide for detection of SNP TSC0048041
tcttataataaac

SEQ ID NO: 195271 - DNA, 13 bp, Artificial Sequence
  Oligonucleotide for detection of SNP TSC0048041
gtttataataaga

SEQ ID NO: 195272 - DNA, 13 bp, Artificial Sequence
  Oligonucleotide for detection of SNP TSC0048041
tcttattataaac

SEQ ID NO: 195273 - DNA, 13 bp, Artificial Sequence
  Oligonucleotide for detection of SNP TSC0048044
tgaagtagtaagt

SEQ ID NO: 195274 - DNA, 13 bp, Artificial Sequence
  Oligonucleotide for detection of SNP TSC0048044
acttactacttca

SEQ ID NO: 195275 - DNA, 13 bp, Artificial Sequence
  Oligonucleotide for detection of SNP TSC0048044
tgaagttgtaagt

SEQ ID NO: 195276 - DNA, 13 bp, Artificial Sequence
  Oligonucleotide for detection of SNP TSC0048044
acttacaacttca

SEQ ID NO: 195277 - DNA, 13 bp, Artificial Sequence
  Oligonucleotide for detection of SNP TSC0048044
tgaagtcgtaagt

SEQ ID NO: 195278 - DNA, 13 bp, Artificial Sequence
  Oligonucleotide for detection of SNP TSC0048044
acttacgacttca

SEQ ID NO: 195279 - DNA, 13 bp, Artificial Sequence
  Oligonucleotide for detection of SNP TSC0048045
tatttaatgatta

SEQ ID NO: 195280 - DNA, 13 bp, Artificial Sequence
  Oligonucleotide for detection of SNP TSC0048045
taatcattaaata

SEQ ID NO: 195281 - DNA, 13 bp, Artificial Sequence
  Oligonucleotide for detection of SNP TSC0048045
tatttattgatta

SEQ ID NO: 195282 - DNA, 13 bp, Artificial Sequence
  Oligonucleotide for detection of SNP TSC0048045
taatcaataaata

SEQ ID NO: 195283 - DNA, 13 bp, Artificial Sequence
  Oligonucleotide for detection of SNP TSC0048045
taattattaggta

SEQ ID NO: 195284 - DNA, 13 bp, Artificial Sequence
  Oligonucleotide for detection of SNP TSC0048045
tacctaataatta

SEQ ID NO: 195285 - DNA, 13 bp, Artificial Sequence
  Oligonucleotide for detection of SNP TSC0048045
taattaataggta

SEQ ID NO: 195286 - DNA, 13 bp, Artificial Sequence
  Oligonucleotide for detection of SNP TSC0048045
tacctattaatta

SEQ ID NO: 195287 - DNA, 13 bp, Artificial Sequence
  Oligonucleotide for detection of SNP TSC0048048
agggagaattgaa

SEQ ID NO: 195288 - DNA, 13 bp, Artificial Sequence
  Oligonucleotide for detection of SNP TSC0048048
ttcaattctccct

SEQ ID NO: 195289 - DNA, 13 bp, Artificial Sequence
  Oligonucleotide for detection of SNP TSC0048048
agggaggattgaa

SEQ ID NO: 195290 - DNA, 13 bp, Artificial Sequence
  Oligonucleotide for detection of SNP TSC0048048
ttcaatcctccct

SEQ ID NO: 195291 - DNA, 13 bp, Artificial Sequence
  Oligonucleotide for detection of SNP TSC0048049
gtttttaaagtta

SEQ ID NO: 195292 - DNA, 13 bp, Artificial Sequence
  Oligonucleotide for detection of SNP TSC0048049
taactttaaaaac

SEQ ID NO: 195293 - DNA, 13 bp, Artificial Sequence
  Oligonucleotide for detection of SNP TSC0048049
gttttttaagtta

SEQ ID NO: 195294 - DNA, 13 bp, Artificial Sequence
  Oligonucleotide for detection of SNP TSC0048049
taacttaaaaaac

SEQ ID NO: 195295 - DNA, 13 bp, Artificial Sequence
  Oligonucleotide for detection of SNP TSC0048049
tggttttggaggy

SEQ ID NO: 195296 - DNA, 13 bp, Artificial Sequence
  Oligonucleotide for detection of SNP TSC0048049
rcctccaaaacca

SEQ ID NO: 195297 - DNA, 13 bp, Artificial Sequence
  Oligonucleotide for detection of SNP TSC0048049
tggtttgggaggy

SEQ ID NO: 195298 - DNA, 13 bp, Artificial Sequence
  Oligonucleotide for detection of SNP TSC0048049
rcctcccaaacca

SEQ ID NO: 195299 - DNA, 13 bp, Artificial Sequence
  Oligonucleotide for detection of SNP TSC0048051
tttatttaatagg

SEQ ID NO: 195300 - DNA, 13 bp, Artificial Sequence
  Oligonucleotide for detection of SNP TSC0048051
cctattaaataaa

SEQ ID NO: 195301 - DNA, 13 bp, Artificial Sequence
  Oligonucleotide for detection of SNP TSC0048051
tttattgaatagg

SEQ ID NO: 195302 - DNA, 13 bp, Artificial Sequence
  Oligonucleotide for detection of SNP TSC0048051
cctattcaataaa

SEQ ID NO: 195303 - DNA, 13 bp, Artificial Sequence
  Oligonucleotide for detection of SNP TSC0048052
ttattaaaatggy

SEQ ID NO: 195304 - DNA, 13 bp, Artificial Sequence
  Oligonucleotide for detection of SNP TSC0048052
rccattttaataa

SEQ ID NO: 195305 - DNA, 13 bp, Artificial Sequence
  Oligonucleotide for detection of SNP TSC0048052
ttattataatggy

SEQ ID NO: 195306 - DNA, 13 bp, Artificial Sequence
  Oligonucleotide for detection of SNP TSC0048052
rccattataataa

SEQ ID NO: 195307 - DNA, 13 bp, Artificial Sequence
  Oligonucleotide for detection of SNP TSC0048052
gttattttagtaa

SEQ ID NO: 195308 - DNA, 13 bp, Artificial Sequence
  Oligonucleotide for detection of SNP TSC0048052
ttactaaaataac

SEQ ID NO: 195309 - DNA, 13 bp, Artificial Sequence
  Oligonucleotide for detection of SNP TSC0048053
ttagatgttaata

SEQ ID NO: 195310 - DNA, 13 bp, Artificial Sequence
  Oligonucleotide for detection of SNP TSC0048053
tattaacatctaa

SEQ ID NO: 195311 - DNA, 13 bp, Artificial Sequence
  Oligonucleotide for detection of SNP TSC0048054
aatagtataatty

SEQ ID NO: 195312 - DNA, 13 bp, Artificial Sequence
  Oligonucleotide for detection of SNP TSC0048054
raattatactatt

SEQ ID NO: 195313 - DNA, 13 bp, Artificial Sequence
  Oligonucleotide for detection of SNP TSC0048054
aatagtgtaatty

SEQ ID NO: 195314 - DNA, 13 bp, Artificial Sequence
  Oligonucleotide for detection of SNP TSC0048054
raattacactatt

SEQ ID NO: 195315 - DNA, 13 bp, Artificial Sequence
  Oligonucleotide for detection of SNP TSC0048055
ttttaaaaaataa

SEQ ID NO: 195316 - DNA, 13 bp, Artificial Sequence
  Oligonucleotide for detection of SNP TSC0048055
ttattttttaaaa

SEQ ID NO: 195317 - DNA, 13 bp, Artificial Sequence
  Oligonucleotide for detection of SNP TSC0048056
tatttgaaaagty

SEQ ID NO: 195318 - DNA, 13 bp, Artificial Sequence
  Oligonucleotide for detection of SNP TSC0048056
racttttcaaata

SEQ ID NO: 195319 - DNA, 13 bp, Artificial Sequence
  Oligonucleotide for detection of SNP TSC0048056
tatttgtaaagty

SEQ ID NO: 195320 - DNA, 13 bp, Artificial Sequence
  Oligonucleotide for detection of SNP TSC0048056
ractttacaaata

SEQ ID NO: 195321 - DNA, 13 bp, Artificial Sequence
  Oligonucleotide for detection of SNP TSC0048059
ttttgatatttty

SEQ ID NO: 195322 - DNA, 13 bp, Artificial Sequence
  Oligonucleotide for detection of SNP TSC0048059
raaaatatcaaaa

SEQ ID NO: 195323 - DNA, 13 bp, Artificial Sequence
  Oligonucleotide for detection of SNP TSC0048059
gaaaatattaggg

SEQ ID NO: 195324 - DNA, 13 bp, Artificial Sequence
  Oligonucleotide for detection of SNP TSC0048059
ccctaatattttc

SEQ ID NO: 195325 - DNA, 13 bp, Artificial Sequence
  Oligonucleotide for detection of SNP TSC0048059
gaaaattttaggg

SEQ ID NO: 195326 - DNA, 13 bp, Artificial Sequence
  Oligonucleotide for detection of SNP TSC0048059
ccctaaaattttc

SEQ ID NO: 195327 - DNA, 13 bp, Artificial Sequence
  Oligonucleotide for detection of SNP TSC0048063
atatggagaaaty

SEQ ID NO: 195328 - DNA, 13 bp, Artificial Sequence
  Oligonucleotide for detection of SNP TSC0048063
ratttctccatat

SEQ ID NO: 195329 - DNA, 13 bp, Artificial Sequence
  Oligonucleotide for detection of SNP TSC0048064
tattagtgttttg

SEQ ID NO: 195330 - DNA, 13 bp, Artificial Sequence
  Oligonucleotide for detection of SNP TSC0048064
caaaacactaata

SEQ ID NO: 195331 - DNA, 13 bp, Artificial Sequence
  Oligonucleotide for detection of SNP TSC0048064
tattagcgttttg

SEQ ID NO: 195332 - DNA, 13 bp, Artificial Sequence
  Oligonucleotide for detection of SNP TSC0048064
caaaacgctaata

SEQ ID NO: 195333 - DNA, 13 bp, Artificial Sequence
  Oligonucleotide for detection of SNP TSC0048064
tattagtgtttcg

SEQ ID NO: 195334 - DNA, 13 bp, Artificial Sequence
  Oligonucleotide for detection of SNP TSC0048064
cgaaacactaata

SEQ ID NO: 195335 - DNA, 13 bp, Artificial Sequence
  Oligonucleotide for detection of SNP TSC0048064
tattagcgtttcg

SEQ ID NO: 195336 - DNA, 13 bp, Artificial Sequence
  Oligonucleotide for detection of SNP TSC0048064
cgaaacgctaata

SEQ ID NO: 195337 - DNA, 13 bp, Artificial Sequence
  Oligonucleotide for detection of SNP TSC0048064
tggggtgttggtg

SEQ ID NO: 195338 - DNA, 13 bp, Artificial Sequence
  Oligonucleotide for detection of SNP TSC0048064
caccaacacccca

SEQ ID NO: 195339 - DNA, 13 bp, Artificial Sequence
  Oligonucleotide for detection of SNP TSC0048064
tggggtattggtg

SEQ ID NO: 195340 - DNA, 13 bp, Artificial Sequence
  Oligonucleotide for detection of SNP TSC0048064
caccaatacccca

SEQ ID NO: 195341 - DNA, 13 bp, Artificial Sequence
  Oligonucleotide for detection of SNP TSC0048064
cggggtgttggtg

SEQ ID NO: 195342 - DNA, 13 bp, Artificial Sequence
  Oligonucleotide for detection of SNP TSC0048064
caccaacaccccg

SEQ ID NO: 195343 - DNA, 13 bp, Artificial Sequence
  Oligonucleotide for detection of SNP TSC0048064
cggggtattggtg

SEQ ID NO: 195344 - DNA, 13 bp, Artificial Sequence
  Oligonucleotide for detection of SNP TSC0048064
caccaataccccg

SEQ ID NO: 195345 - DNA, 13 bp, Artificial Sequence
  Oligonucleotide for detection of SNP TSC0048064
tggggcgttggtg

SEQ ID NO: 195346 - DNA, 13 bp, Artificial Sequence
  Oligonucleotide for detection of SNP TSC0048064
caccaacgcccca

SEQ ID NO: 195347 - DNA, 13 bp, Artificial Sequence
  Oligonucleotide for detection of SNP TSC0048064
cggggcgttggtg

SEQ ID NO: 195348 - DNA, 13 bp, Artificial Sequence
  Oligonucleotide for detection of SNP TSC0048064
caccaacgccccg

SEQ ID NO: 195349 - DNA, 13 bp, Artificial Sequence
  Oligonucleotide for detection of SNP TSC0048065
attttaggtggty

SEQ ID NO: 195350 - DNA, 13 bp, Artificial Sequence
  Oligonucleotide for detection of SNP TSC0048065
raccacctaaaat

SEQ ID NO: 195351 - DNA, 13 bp, Artificial Sequence
  Oligonucleotide for detection of SNP TSC0048065
attttaagtggty

SEQ ID NO: 195352 - DNA, 13 bp, Artificial Sequence
  Oligonucleotide for detection of SNP TSC0048065
raccacttaaaat

SEQ ID NO: 195353 - DNA, 13 bp, Artificial Sequence
  Oligonucleotide for detection of SNP TSC0048066
tttagtttaagaa

SEQ ID NO: 195354 - DNA, 13 bp, Artificial Sequence
  Oligonucleotide for detection of SNP TSC0048066
ttcttaaactaaa

SEQ ID NO: 195355 - DNA, 13 bp, Artificial Sequence
  Oligonucleotide for detection of SNP TSC0048066
tttagtgtaagaa

SEQ ID NO: 195356 - DNA, 13 bp, Artificial Sequence
  Oligonucleotide for detection of SNP TSC0048066
ttcttacactaaa

SEQ ID NO: 195357 - DNA, 13 bp, Artificial Sequence
  Oligonucleotide for detection of SNP TSC0048066
tttttagattaag

SEQ ID NO: 195358 - DNA, 13 bp, Artificial Sequence
  Oligonucleotide for detection of SNP TSC0048066
cttaatctaaaaa

SEQ ID NO: 195359 - DNA, 13 bp, Artificial Sequence
  Oligonucleotide for detection of SNP TSC0048066
tttttatattaag

SEQ ID NO: 195360 - DNA, 13 bp, Artificial Sequence
  Oligonucleotide for detection of SNP TSC0048066
cttaatataaaaa

SEQ ID NO: 195361 - DNA, 13 bp, Artificial Sequence
  Oligonucleotide for detection of SNP TSC0048068
atttattggtaga

SEQ ID NO: 195362 - DNA, 13 bp, Artificial Sequence
  Oligonucleotide for detection of SNP TSC0048068
tctaccaataaat

SEQ ID NO: 195363 - DNA, 13 bp, Artificial Sequence
  Oligonucleotide for detection of SNP TSC0048068
atttatcggtaga

SEQ ID NO: 195364 - DNA, 13 bp, Artificial Sequence
  Oligonucleotide for detection of SNP TSC0048068
tctaccgataaat

SEQ ID NO: 195365 - DNA, 13 bp, Artificial Sequence
  Oligonucleotide for detection of SNP TSC0048068
tttgttggtaggt

SEQ ID NO: 195366 - DNA, 13 bp, Artificial Sequence
  Oligonucleotide for detection of SNP TSC0048068
acctaccaacaaa

SEQ ID NO: 195367 - DNA, 13 bp, Artificial Sequence
  Oligonucleotide for detection of SNP TSC0048068
tttgttagtaggt

SEQ ID NO: 195368 - DNA, 13 bp, Artificial Sequence
  Oligonucleotide for detection of SNP TSC0048068
acctactaacaaa

SEQ ID NO: 195369 - DNA, 13 bp, Artificial Sequence
  Oligonucleotide for detection of SNP TSC0048068
tttgtcggtaggt

SEQ ID NO: 195370 - DNA, 13 bp, Artificial Sequence
  Oligonucleotide for detection of SNP TSC0048068
acctaccgacaaa

SEQ ID NO: 195371 - DNA, 13 bp, Artificial Sequence
  Oligonucleotide for detection of SNP TSC0048069
agtaaagataatg

SEQ ID NO: 195372 - DNA, 13 bp, Artificial Sequence
  Oligonucleotide for detection of SNP TSC0048069
cattatctttact

SEQ ID NO: 195373 - DNA, 13 bp, Artificial Sequence
  Oligonucleotide for detection of SNP TSC0048069
agtaaaaataatg

SEQ ID NO: 195374 - DNA, 13 bp, Artificial Sequence
  Oligonucleotide for detection of SNP TSC0048069
cattatttttact

SEQ ID NO: 195375 - DNA, 13 bp, Artificial Sequence
  Oligonucleotide for detection of SNP TSC0048070
aaaattttaagta

SEQ ID NO: 195376 - DNA, 13 bp, Artificial Sequence
  Oligonucleotide for detection of SNP TSC0048070
tacttaaaatttt

SEQ ID NO: 195377 - DNA, 13 bp, Artificial Sequence
  Oligonucleotide for detection of SNP TSC0048070
aaaattataagta

SEQ ID NO: 195378 - DNA, 13 bp, Artificial Sequence
  Oligonucleotide for detection of SNP TSC0048070
tacttataatttt

SEQ ID NO: 195379 - DNA, 13 bp, Artificial Sequence
  Oligonucleotide for detection of SNP TSC0048071
ataaaaatgaaat

SEQ ID NO: 195380 - DNA, 13 bp, Artificial Sequence
  Oligonucleotide for detection of SNP TSC0048071
atttcatttttat

SEQ ID NO: 195381 - DNA, 13 bp, Artificial Sequence
  Oligonucleotide for detection of SNP TSC0048071
ataaaagtgaaat

SEQ ID NO: 195382 - DNA, 13 bp, Artificial Sequence
  Oligonucleotide for detection of SNP TSC0048071
atttcacttttat

SEQ ID NO: 195383 - DNA, 13 bp, Artificial Sequence
  Oligonucleotide for detection of SNP TSC0048073
attgtaatatttg

SEQ ID NO: 195384 - DNA, 13 bp, Artificial Sequence
  Oligonucleotide for detection of SNP TSC0048073
caaatattacaat

SEQ ID NO: 195385 - DNA, 13 bp, Artificial Sequence
  Oligonucleotide for detection of SNP TSC0048073
attgtagtatttg

SEQ ID NO: 195386 - DNA, 13 bp, Artificial Sequence
  Oligonucleotide for detection of SNP TSC0048073
caaatactacaat

SEQ ID NO: 195387 - DNA, 13 bp, Artificial Sequence
  Oligonucleotide for detection of SNP TSC0048074
atttgtataaaga

SEQ ID NO: 195388 - DNA, 13 bp, Artificial Sequence
  Oligonucleotide for detection of SNP TSC0048074
tctttatacaaat

SEQ ID NO: 195389 - DNA, 13 bp, Artificial Sequence
  Oligonucleotide for detection of SNP TSC0048074
atttgtgtaaaga

SEQ ID NO: 195390 - DNA, 13 bp, Artificial Sequence
  Oligonucleotide for detection of SNP TSC0048074
tctttacacaaat

SEQ ID NO: 195391 - DNA, 13 bp, Artificial Sequence
  Oligonucleotide for detection of SNP TSC0048076
ttatggatttgtt

SEQ ID NO: 195392 - DNA, 13 bp, Artificial Sequence
  Oligonucleotide for detection of SNP TSC0048076
aacaaatccataa

SEQ ID NO: 195393 - DNA, 13 bp, Artificial Sequence
  Oligonucleotide for detection of SNP TSC0048076
ttatgggtttgtt

SEQ ID NO: 195394 - DNA, 13 bp, Artificial Sequence
  Oligonucleotide for detection of SNP TSC0048076
aacaaacccataa

SEQ ID NO: 195395 - DNA, 13 bp, Artificial Sequence
  Oligonucleotide for detection of SNP TSC0048077
tttttgaaaaaaa

SEQ ID NO: 195396 - DNA, 13 bp, Artificial Sequence
  Oligonucleotide for detection of SNP TSC0048077
tttttttcaaaaa

SEQ ID NO: 195397 - DNA, 13 bp, Artificial Sequence
  Oligonucleotide for detection of SNP TSC0048077
tttttggaaaaaa

SEQ ID NO: 195398 - DNA, 13 bp, Artificial Sequence
  Oligonucleotide for detection of SNP TSC0048077
ttttttccaaaaa

SEQ ID NO: 195399 - DNA, 13 bp, Artificial Sequence
  Oligonucleotide for detection of SNP TSC0048078
tgattatgttatt

SEQ ID NO: 195400 - DNA, 13 bp, Artificial Sequence
  Oligonucleotide for detection of SNP TSC0048078
aataacataatca

SEQ ID NO: 195401 - DNA, 13 bp, Artificial Sequence
  Oligonucleotide for detection of SNP TSC0048078
tgattacgttatt

SEQ ID NO: 195402 - DNA, 13 bp, Artificial Sequence
  Oligonucleotide for detection of SNP TSC0048078
aataacgtaatca

SEQ ID NO: 195403 - DNA, 13 bp, Artificial Sequence
  Oligonucleotide for detection of SNP TSC0048078
agtggtgtgatta

SEQ ID NO: 195404 - DNA, 13 bp, Artificial Sequence
  Oligonucleotide for detection of SNP TSC0048078
taatcacaccact

SEQ ID NO: 195405 - DNA, 13 bp, Artificial Sequence
  Oligonucleotide for detection of SNP TSC0048078
agtggtatgatta

SEQ ID NO: 195406 - DNA, 13 bp, Artificial Sequence
  Oligonucleotide for detection of SNP TSC0048078
taatcataccact

SEQ ID NO: 195407 - DNA, 13 bp, Artificial Sequence
  Oligonucleotide for detection of SNP TSC0048078
agtggcgtgatta

SEQ ID NO: 195408 - DNA, 13 bp, Artificial Sequence
  Oligonucleotide for detection of SNP TSC0048078
taatcacgccact

SEQ ID NO: 195409 - DNA, 13 bp, Artificial Sequence
  Oligonucleotide for detection of SNP TSC0048079
gataggattatta

SEQ ID NO: 195410 - DNA, 13 bp, Artificial Sequence
  Oligonucleotide for detection of SNP TSC0048079
taataatcctatc

SEQ ID NO: 195411 - DNA, 13 bp, Artificial Sequence
  Oligonucleotide for detection of SNP TSC0048079
gataggtttatta

SEQ ID NO: 195412 - DNA, 13 bp, Artificial Sequence
  Oligonucleotide for detection of SNP TSC0048079
taataaacctatc

SEQ ID NO: 195413 - DNA, 13 bp, Artificial Sequence
  Oligonucleotide for detection of SNP TSC0048079
taataattttaty

SEQ ID NO: 195414 - DNA, 13 bp, Artificial Sequence
  Oligonucleotide for detection of SNP TSC0048079
rataaaattatta

SEQ ID NO: 195415 - DNA, 13 bp, Artificial Sequence
  Oligonucleotide for detection of SNP TSC0048079
taataaatttaty

SEQ ID NO: 195416 - DNA, 13 bp, Artificial Sequence
  Oligonucleotide for detection of SNP TSC0048079
rataaatttatta

SEQ ID NO: 195417 - DNA, 13 bp, Artificial Sequence
  Oligonucleotide for detection of SNP TSC0048080
ttgtgtagtaggg

SEQ ID NO: 195418 - DNA, 13 bp, Artificial Sequence
  Oligonucleotide for detection of SNP TSC0048080
ccctactacacaa

SEQ ID NO: 195419 - DNA, 13 bp, Artificial Sequence
  Oligonucleotide for detection of SNP TSC0048080
ttgtgtggtaggg

SEQ ID NO: 195420 - DNA, 13 bp, Artificial Sequence
  Oligonucleotide for detection of SNP TSC0048080
ccctaccacacaa

SEQ ID NO: 195421 - DNA, 13 bp, Artificial Sequence
  Oligonucleotide for detection of SNP TSC0048082
aaattatatagtg

SEQ ID NO: 195422 - DNA, 13 bp, Artificial Sequence
  Oligonucleotide for detection of SNP TSC0048082
cactatataattt

SEQ ID NO: 195423 - DNA, 13 bp, Artificial Sequence
  Oligonucleotide for detection of SNP TSC0048082
aaattagatagtg

SEQ ID NO: 195424 - DNA, 13 bp, Artificial Sequence
  Oligonucleotide for detection of SNP TSC0048082
cactatctaattt

SEQ ID NO: 195425 - DNA, 13 bp, Artificial Sequence
  Oligonucleotide for detection of SNP TSC0048082
tattatgtgattt

SEQ ID NO: 195426 - DNA, 13 bp, Artificial Sequence
  Oligonucleotide for detection of SNP TSC0048082
aaatcacataata

SEQ ID NO: 195427 - DNA, 13 bp, Artificial Sequence
  Oligonucleotide for detection of SNP TSC0048083
aaatagagtttag

SEQ ID NO: 195428 - DNA, 13 bp, Artificial Sequence
  Oligonucleotide for detection of SNP TSC0048083
ctaaactctattt

SEQ ID NO: 195429 - DNA, 13 bp, Artificial Sequence
  Oligonucleotide for detection of SNP TSC0048083
aaatagggtttag

SEQ ID NO: 195430 - DNA, 13 bp, Artificial Sequence
  Oligonucleotide for detection of SNP TSC0048083
ctaaaccctattt

SEQ ID NO: 195431 - DNA, 13 bp, Artificial Sequence
  Oligonucleotide for detection of SNP TSC0048084
ttattgggtagtt

SEQ ID NO: 195432 - DNA, 13 bp, Artificial Sequence
  Oligonucleotide for detection of SNP TSC0048084
aactacccaataa

SEQ ID NO: 195433 - DNA, 13 bp, Artificial Sequence
  Oligonucleotide for detection of SNP TSC0048084
ttattgagtagtt

SEQ ID NO: 195434 - DNA, 13 bp, Artificial Sequence
  Oligonucleotide for detection of SNP TSC0048084
aactactcaataa

SEQ ID NO: 195435 - DNA, 13 bp, Artificial Sequence
  Oligonucleotide for detection of SNP TSC0048087
tatttgttatatt

SEQ ID NO: 195436 - DNA, 13 bp, Artificial Sequence
  Oligonucleotide for detection of SNP TSC0048087
aatataacaaata

SEQ ID NO: 195437 - DNA, 13 bp, Artificial Sequence
  Oligonucleotide for detection of SNP TSC0048087
agtatggtaaatg

SEQ ID NO: 195438 - DNA, 13 bp, Artificial Sequence
  Oligonucleotide for detection of SNP TSC0048087
catttaccatact

SEQ ID NO: 195439 - DNA, 13 bp, Artificial Sequence
  Oligonucleotide for detection of SNP TSC0048087
agtatgttaaatg

SEQ ID NO: 195440 - DNA, 13 bp, Artificial Sequence
  Oligonucleotide for detection of SNP TSC0048087
catttaacatact

SEQ ID NO: 195441 - DNA, 13 bp, Artificial Sequence
  Oligonucleotide for detection of SNP TSC0048088
ggaaatgtttgtt

SEQ ID NO: 195442 - DNA, 13 bp, Artificial Sequence
  Oligonucleotide for detection of SNP TSC0048088
aacaaacatttcc

SEQ ID NO: 195443 - DNA, 13 bp, Artificial Sequence
  Oligonucleotide for detection of SNP TSC0048088
ggaaatatttgtt

SEQ ID NO: 195444 - DNA, 13 bp, Artificial Sequence
  Oligonucleotide for detection of SNP TSC0048088
aacaaatatttcc

SEQ ID NO: 195445 - DNA, 13 bp, Artificial Sequence
  Oligonucleotide for detection of SNP TSC0048089
aaatattgtatay

SEQ ID NO: 195446 - DNA, 13 bp, Artificial Sequence
  Oligonucleotide for detection of SNP TSC0048089
rtatacaatattt

SEQ ID NO: 195447 - DNA, 13 bp, Artificial Sequence
  Oligonucleotide for detection of SNP TSC0048089
aaatatcgtatay

SEQ ID NO: 195448 - DNA, 13 bp, Artificial Sequence
  Oligonucleotide for detection of SNP TSC0048089
rtatacgatattt

SEQ ID NO: 195449 - DNA, 13 bp, Artificial Sequence
  Oligonucleotide for detection of SNP TSC0048089
gtatatggtattt

SEQ ID NO: 195450 - DNA, 13 bp, Artificial Sequence
  Oligonucleotide for detection of SNP TSC0048089
aaataccatatac

SEQ ID NO: 195451 - DNA, 13 bp, Artificial Sequence
  Oligonucleotide for detection of SNP TSC0048089
gtatatagtattt

SEQ ID NO: 195452 - DNA, 13 bp, Artificial Sequence
  Oligonucleotide for detection of SNP TSC0048089
aaatactatatac

SEQ ID NO: 195453 - DNA, 13 bp, Artificial Sequence
  Oligonucleotide for detection of SNP TSC0048089
gtatacggtattt

SEQ ID NO: 195454 - DNA, 13 bp, Artificial Sequence
  Oligonucleotide for detection of SNP TSC0048089
aaataccgtatac

SEQ ID NO: 195455 - DNA, 13 bp, Artificial Sequence
  Oligonucleotide for detection of SNP TSC0048093
gttttacgtaaat

SEQ ID NO: 195456 - DNA, 13 bp, Artificial Sequence
  Oligonucleotide for detection of SNP TSC0048093
atttacgtaaaac

SEQ ID NO: 195457 - DNA, 13 bp, Artificial Sequence
  Oligonucleotide for detection of SNP TSC0048093
atttgtgtgggay

SEQ ID NO: 195458 - DNA, 13 bp, Artificial Sequence
  Oligonucleotide for detection of SNP TSC0048093
rtcccacacaaat

SEQ ID NO: 195459 - DNA, 13 bp, Artificial Sequence
  Oligonucleotide for detection of SNP TSC0048093
atttgtatgggay

SEQ ID NO: 195460 - DNA, 13 bp, Artificial Sequence
  Oligonucleotide for detection of SNP TSC0048093
rtcccatacaaat

SEQ ID NO: 195461 - DNA, 13 bp, Artificial Sequence
  Oligonucleotide for detection of SNP TSC0048093
atttgcgtgggay

SEQ ID NO: 195462 - DNA, 13 bp, Artificial Sequence
  Oligonucleotide for detection of SNP TSC0048093
rtcccacgcaaat

SEQ ID NO: 195463 - DNA, 13 bp, Artificial Sequence
  Oligonucleotide for detection of SNP TSC0048094
tgtttagtaatta

SEQ ID NO: 195464 - DNA, 13 bp, Artificial Sequence
  Oligonucleotide for detection of SNP TSC0048094
taattactaaaca

SEQ ID NO: 195465 - DNA, 13 bp, Artificial Sequence
  Oligonucleotide for detection of SNP TSC0048094
tgtttaataatta

SEQ ID NO: 195466 - DNA, 13 bp, Artificial Sequence
  Oligonucleotide for detection of SNP TSC0048094
taattattaaaca

SEQ ID NO: 195467 - DNA, 13 bp, Artificial Sequence
  Oligonucleotide for detection of SNP TSC0048095
gtaattaaatatg

SEQ ID NO: 195468 - DNA, 13 bp, Artificial Sequence
  Oligonucleotide for detection of SNP TSC0048095
catatttaattac

SEQ ID NO: 195469 - DNA, 13 bp, Artificial Sequence
  Oligonucleotide for detection of SNP TSC0048095
gtaattgaatatg

SEQ ID NO: 195470 - DNA, 13 bp, Artificial Sequence
  Oligonucleotide for detection of SNP TSC0048095
catattcaattac

SEQ ID NO: 195471 - DNA, 13 bp, Artificial Sequence
  Oligonucleotide for detection of SNP TSC0048095
gtaatcgaatatg

SEQ ID NO: 195472 - DNA, 13 bp, Artificial Sequence
  Oligonucleotide for detection of SNP TSC0048095
catattcgattac

SEQ ID NO: 195473 - DNA, 13 bp, Artificial Sequence
  Oligonucleotide for detection of SNP TSC0048095
tatatttgattgy

SEQ ID NO: 195474 - DNA, 13 bp, Artificial Sequence
  Oligonucleotide for detection of SNP TSC0048095
rcaatcaaatata

SEQ ID NO: 195475 - DNA, 13 bp, Artificial Sequence
  Oligonucleotide for detection of SNP TSC0048095
tatattcgattgy

SEQ ID NO: 195476 - DNA, 13 bp, Artificial Sequence
  Oligonucleotide for detection of SNP TSC0048095
rcaatcgaatata

SEQ ID NO: 195477 - DNA, 13 bp, Artificial Sequence
  Oligonucleotide for detection of SNP TSC0048096
aaaaatgagattt

SEQ ID NO: 195478 - DNA, 13 bp, Artificial Sequence
  Oligonucleotide for detection of SNP TSC0048096
aaatctcattttt

SEQ ID NO: 195479 - DNA, 13 bp, Artificial Sequence
  Oligonucleotide for detection of SNP TSC0048097
ttgttgaaagtgt

SEQ ID NO: 195480 - DNA, 13 bp, Artificial Sequence
  Oligonucleotide for detection of SNP TSC0048097
acactttcaacaa

SEQ ID NO: 195481 - DNA, 13 bp, Artificial Sequence
  Oligonucleotide for detection of SNP TSC0048097
ttgttgtaagtgt

SEQ ID NO: 195482 - DNA, 13 bp, Artificial Sequence
  Oligonucleotide for detection of SNP TSC0048097
acacttacaacaa

SEQ ID NO: 195483 - DNA, 13 bp, Artificial Sequence
  Oligonucleotide for detection of SNP TSC0048097
tcgttgaaagtgt

SEQ ID NO: 195484 - DNA, 13 bp, Artificial Sequence
  Oligonucleotide for detection of SNP TSC0048097
acactttcaacga

SEQ ID NO: 195485 - DNA, 13 bp, Artificial Sequence
  Oligonucleotide for detection of SNP TSC0048097
tcgttgtaagtgt

SEQ ID NO: 195486 - DNA, 13 bp, Artificial Sequence
  Oligonucleotide for detection of SNP TSC0048097
acacttacaacga

SEQ ID NO: 195487 - DNA, 13 bp, Artificial Sequence
  Oligonucleotide for detection of SNP TSC0048097
atatttttaatga

SEQ ID NO: 195488 - DNA, 13 bp, Artificial Sequence
  Oligonucleotide for detection of SNP TSC0048097
tcattaaaaatat

SEQ ID NO: 195489 - DNA, 13 bp, Artificial Sequence
  Oligonucleotide for detection of SNP TSC0048097
atatttataatga

SEQ ID NO: 195490 - DNA, 13 bp, Artificial Sequence
  Oligonucleotide for detection of SNP TSC0048097
tcattataaatat

SEQ ID NO: 195491 - DNA, 13 bp, Artificial Sequence
  Oligonucleotide for detection of SNP TSC0048097
atatttttaacga

SEQ ID NO: 195492 - DNA, 13 bp, Artificial Sequence
  Oligonucleotide for detection of SNP TSC0048097
tcgttaaaaatat

SEQ ID NO: 195493 - DNA, 13 bp, Artificial Sequence
  Oligonucleotide for detection of SNP TSC0048097
atatttataacga

SEQ ID NO: 195494 - DNA, 13 bp, Artificial Sequence
  Oligonucleotide for detection of SNP TSC0048097
tcgttataaatat

SEQ ID NO: 195495 - DNA, 13 bp, Artificial Sequence
  Oligonucleotide for detection of SNP TSC0048098
atagaatgtttaa

SEQ ID NO: 195496 - DNA, 13 bp, Artificial Sequence
  Oligonucleotide for detection of SNP TSC0048098
ttaaacattctat

SEQ ID NO: 195497 - DNA, 13 bp, Artificial Sequence
  Oligonucleotide for detection of SNP TSC0048098
atagaacgtttaa

SEQ ID NO: 195498 - DNA, 13 bp, Artificial Sequence
  Oligonucleotide for detection of SNP TSC0048098
ttaaacgttctat

SEQ ID NO: 195499 - DNA, 13 bp, Artificial Sequence
  Oligonucleotide for detection of SNP TSC0048100
taaaagtatattt

SEQ ID NO: 195500 - DNA, 13 bp, Artificial Sequence
  Oligonucleotide for detection of SNP TSC0048100
aaatatactttta

SEQ ID NO: 195501 - DNA, 13 bp, Artificial Sequence
  Oligonucleotide for detection of SNP TSC0048100
taaaaggatattt

SEQ ID NO: 195502 - DNA, 13 bp, Artificial Sequence
  Oligonucleotide for detection of SNP TSC0048100
aaatatcctttta

SEQ ID NO: 195503 - DNA, 13 bp, Artificial Sequence
  Oligonucleotide for detection of SNP TSC0048101
taaggtatggtta

SEQ ID NO: 195504 - DNA, 13 bp, Artificial Sequence
  Oligonucleotide for detection of SNP TSC0048101
taaccatacctta

SEQ ID NO: 195505 - DNA, 13 bp, Artificial Sequence
  Oligonucleotide for detection of SNP TSC0048101
taaggtgtggtta

SEQ ID NO: 195506 - DNA, 13 bp, Artificial Sequence
  Oligonucleotide for detection of SNP TSC0048101
taaccacacctta

SEQ ID NO: 195507 - DNA, 13 bp, Artificial Sequence
  Oligonucleotide for detection of SNP TSC0048102
gtagggatgaagy

SEQ ID NO: 195508 - DNA, 13 bp, Artificial Sequence
  Oligonucleotide for detection of SNP TSC0048102
rcttcatccctac

SEQ ID NO: 195509 - DNA, 13 bp, Artificial Sequence
  Oligonucleotide for detection of SNP TSC0048102
gtaggggtgaagy

SEQ ID NO: 195510 - DNA, 13 bp, Artificial Sequence
  Oligonucleotide for detection of SNP TSC0048102
rcttcacccctac

SEQ ID NO: 195511 - DNA, 13 bp, Artificial Sequence
  Oligonucleotide for detection of SNP TSC0048103
ggaggtatgagaa

SEQ ID NO: 195512 - DNA, 13 bp, Artificial Sequence
  Oligonucleotide for detection of SNP TSC0048103
ttctcatacctcc

SEQ ID NO: 195513 - DNA, 13 bp, Artificial Sequence
  Oligonucleotide for detection of SNP TSC0048103
ggaggtgtgagaa

SEQ ID NO: 195514 - DNA, 13 bp, Artificial Sequence
  Oligonucleotide for detection of SNP TSC0048103
ttctcacacctcc

SEQ ID NO: 195515 - DNA, 13 bp, Artificial Sequence
  Oligonucleotide for detection of SNP TSC0048105
atttttaaggtay

SEQ ID NO: 195516 - DNA, 13 bp, Artificial Sequence
  Oligonucleotide for detection of SNP TSC0048105
rtaccttaaaaat

SEQ ID NO: 195517 - DNA, 13 bp, Artificial Sequence
  Oligonucleotide for detection of SNP TSC0048105
attttttaggtay

SEQ ID NO: 195518 - DNA, 13 bp, Artificial Sequence
  Oligonucleotide for detection of SNP TSC0048105
rtacctaaaaaat

SEQ ID NO: 195519 - DNA, 13 bp, Artificial Sequence
  Oligonucleotide for detection of SNP TSC0048105
gtattttaaaaat

SEQ ID NO: 195520 - DNA, 13 bp, Artificial Sequence
  Oligonucleotide for detection of SNP TSC0048105
atttttaaaatac

SEQ ID NO: 195521 - DNA, 13 bp, Artificial Sequence
  Oligonucleotide for detection of SNP TSC0048105
gtatttaaaaaat

SEQ ID NO: 195522 - DNA, 13 bp, Artificial Sequence
  Oligonucleotide for detection of SNP TSC0048105
attttttaaatac

SEQ ID NO: 195523 - DNA, 13 bp, Artificial Sequence
  Oligonucleotide for detection of SNP TSC0048106
ttatttattttga

SEQ ID NO: 195524 - DNA, 13 bp, Artificial Sequence
  Oligonucleotide for detection of SNP TSC0048106
tcaaaataaataa

SEQ ID NO: 195525 - DNA, 13 bp, Artificial Sequence
  Oligonucleotide for detection of SNP TSC0048108
ttttgaaattgag

SEQ ID NO: 195526 - DNA, 13 bp, Artificial Sequence
  Oligonucleotide for detection of SNP TSC0048108
ctcaatttcaaaa

SEQ ID NO: 195527 - DNA, 13 bp, Artificial Sequence
  Oligonucleotide for detection of SNP TSC0048108
ttttgagattgag

SEQ ID NO: 195528 - DNA, 13 bp, Artificial Sequence
  Oligonucleotide for detection of SNP TSC0048108
ctcaatctcaaaa

SEQ ID NO: 195529 - DNA, 13 bp, Artificial Sequence
  Oligonucleotide for detection of SNP TSC0048109
ggagtatgggggt

SEQ ID NO: 195530 - DNA, 13 bp, Artificial Sequence
  Oligonucleotide for detection of SNP TSC0048109
acccccatactcc

SEQ ID NO: 195531 - DNA, 13 bp, Artificial Sequence
  Oligonucleotide for detection of SNP TSC0048109
ggagtacgggggt

SEQ ID NO: 195532 - DNA, 13 bp, Artificial Sequence
  Oligonucleotide for detection of SNP TSC0048109
acccccgtactcc

SEQ ID NO: 195533 - DNA, 13 bp, Artificial Sequence
  Oligonucleotide for detection of SNP TSC0048112
tggtatggtttty

SEQ ID NO: 195534 - DNA, 13 bp, Artificial Sequence
  Oligonucleotide for detection of SNP TSC0048112
raaaaccatacca

SEQ ID NO: 195535 - DNA, 13 bp, Artificial Sequence
  Oligonucleotide for detection of SNP TSC0048112
tggtacggtttty

SEQ ID NO: 195536 - DNA, 13 bp, Artificial Sequence
  Oligonucleotide for detection of SNP TSC0048112
raaaaccgtacca

SEQ ID NO: 195537 - DNA, 13 bp, Artificial Sequence
  Oligonucleotide for detection of SNP TSC0048112
gagagttgtgtta

SEQ ID NO: 195538 - DNA, 13 bp, Artificial Sequence
  Oligonucleotide for detection of SNP TSC0048112
taacacaactctc

SEQ ID NO: 195539 - DNA, 13 bp, Artificial Sequence
  Oligonucleotide for detection of SNP TSC0048112
gagagtcgtgtta

SEQ ID NO: 195540 - DNA, 13 bp, Artificial Sequence
  Oligonucleotide for detection of SNP TSC0048112
taacacgactctc

SEQ ID NO: 195541 - DNA, 13 bp, Artificial Sequence
  Oligonucleotide for detection of SNP TSC0048113
gatattatataay

SEQ ID NO: 195542 - DNA, 13 bp, Artificial Sequence
  Oligonucleotide for detection of SNP TSC0048113
rttatataatatc

SEQ ID NO: 195543 - DNA, 13 bp, Artificial Sequence
  Oligonucleotide for detection of SNP TSC0048113
gatattgtataay

SEQ ID NO: 195544 - DNA, 13 bp, Artificial Sequence
  Oligonucleotide for detection of SNP TSC0048113
rttatacaatatc

SEQ ID NO: 195545 - DNA, 13 bp, Artificial Sequence
  Oligonucleotide for detection of SNP TSC0048113
gatatcgtataay

SEQ ID NO: 195546 - DNA, 13 bp, Artificial Sequence
  Oligonucleotide for detection of SNP TSC0048113
rttatacgatatc

SEQ ID NO: 195547 - DNA, 13 bp, Artificial Sequence
  Oligonucleotide for detection of SNP TSC0048113
gttgtgtgatgty

SEQ ID NO: 195548 - DNA, 13 bp, Artificial Sequence
  Oligonucleotide for detection of SNP TSC0048113
racatcacacaac

SEQ ID NO: 195549 - DNA, 13 bp, Artificial Sequence
  Oligonucleotide for detection of SNP TSC0048113
gttgtgcgatgty

SEQ ID NO: 195550 - DNA, 13 bp, Artificial Sequence
  Oligonucleotide for detection of SNP TSC0048113
racatcgcacaac

SEQ ID NO: 195551 - DNA, 13 bp, Artificial Sequence
  Oligonucleotide for detection of SNP TSC0048116
tttagtatttatg

SEQ ID NO: 195552 - DNA, 13 bp, Artificial Sequence
  Oligonucleotide for detection of SNP TSC0048116
cataaatactaaa

SEQ ID NO: 195553 - DNA, 13 bp, Artificial Sequence
  Oligonucleotide for detection of SNP TSC0048116
tttagtgtttatg

SEQ ID NO: 195554 - DNA, 13 bp, Artificial Sequence
  Oligonucleotide for detection of SNP TSC0048116
cataaacactaaa

SEQ ID NO: 195555 - DNA, 13 bp, Artificial Sequence
  Oligonucleotide for detection of SNP TSC0048117
ttatgatgtttta

SEQ ID NO: 195556 - DNA, 13 bp, Artificial Sequence
  Oligonucleotide for detection of SNP TSC0048117
taaaacatcataa

SEQ ID NO: 195557 - DNA, 13 bp, Artificial Sequence
  Oligonucleotide for detection of SNP TSC0048117
ttatgaggtttta

SEQ ID NO: 195558 - DNA, 13 bp, Artificial Sequence
  Oligonucleotide for detection of SNP TSC0048117
taaaacctcataa

SEQ ID NO: 195559 - DNA, 13 bp, Artificial Sequence
  Oligonucleotide for detection of SNP TSC0048117
ttatgacgtttta

SEQ ID NO: 195560 - DNA, 13 bp, Artificial Sequence
  Oligonucleotide for detection of SNP TSC0048117
taaaacgtcataa

SEQ ID NO: 195561 - DNA, 13 bp, Artificial Sequence
  Oligonucleotide for detection of SNP TSC0048117
taaagtgttatag

SEQ ID NO: 195562 - DNA, 13 bp, Artificial Sequence
  Oligonucleotide for detection of SNP TSC0048117
ctataacacttta

SEQ ID NO: 195563 - DNA, 13 bp, Artificial Sequence
  Oligonucleotide for detection of SNP TSC0048117
taaagttttatag

SEQ ID NO: 195564 - DNA, 13 bp, Artificial Sequence
  Oligonucleotide for detection of SNP TSC0048117
ctataaaacttta

SEQ ID NO: 195565 - DNA, 13 bp, Artificial Sequence
  Oligonucleotide for detection of SNP TSC0048117
taaagcgttatag

SEQ ID NO: 195566 - DNA, 13 bp, Artificial Sequence
  Oligonucleotide for detection of SNP TSC0048117
ctataacgcttta

SEQ ID NO: 195567 - DNA, 13 bp, Artificial Sequence
  Oligonucleotide for detection of SNP TSC0048119
gttagatatatta

SEQ ID NO: 195568 - DNA, 13 bp, Artificial Sequence
  Oligonucleotide for detection of SNP TSC0048119
taatatatctaac

SEQ ID NO: 195569 - DNA, 13 bp, Artificial Sequence
  Oligonucleotide for detection of SNP TSC0048119
gttagagatatta

SEQ ID NO: 195570 - DNA, 13 bp, Artificial Sequence
  Oligonucleotide for detection of SNP TSC0048119
taatatctctaac

SEQ ID NO: 195571 - DNA, 13 bp, Artificial Sequence
  Oligonucleotide for detection of SNP TSC0048119
tgatgtgtttgay

SEQ ID NO: 195572 - DNA, 13 bp, Artificial Sequence
  Oligonucleotide for detection of SNP TSC0048119
rtcaaacacatca

SEQ ID NO: 195573 - DNA, 13 bp, Artificial Sequence
  Oligonucleotide for detection of SNP TSC0048119
tgatgtttttgay

SEQ ID NO: 195574 - DNA, 13 bp, Artificial Sequence
  Oligonucleotide for detection of SNP TSC0048119
rtcaaaaacatca

SEQ ID NO: 195575 - DNA, 13 bp, Artificial Sequence
  Oligonucleotide for detection of SNP TSC0048120
taataaatttaaa

SEQ ID NO: 195576 - DNA, 13 bp, Artificial Sequence
  Oligonucleotide for detection of SNP TSC0048120
tttaaatttatta

SEQ ID NO: 195577 - DNA, 13 bp, Artificial Sequence
  Oligonucleotide for detection of SNP TSC0048120
taataattttaaa

SEQ ID NO: 195578 - DNA, 13 bp, Artificial Sequence
  Oligonucleotide for detection of SNP TSC0048120
tttaaaattatta

SEQ ID NO: 195579 - DNA, 13 bp, Artificial Sequence
  Oligonucleotide for detection of SNP TSC0048121
tataattgtttty

SEQ ID NO: 195580 - DNA, 13 bp, Artificial Sequence
  Oligonucleotide for detection of SNP TSC0048121
raaaacaattata

SEQ ID NO: 195581 - DNA, 13 bp, Artificial Sequence
  Oligonucleotide for detection of SNP TSC0048121
tataatcgtttty

SEQ ID NO: 195582 - DNA, 13 bp, Artificial Sequence
  Oligonucleotide for detection of SNP TSC0048121
raaaacgattata

SEQ ID NO: 195583 - DNA, 13 bp, Artificial Sequence
  Oligonucleotide for detection of SNP TSC0048121
gaggatggttata

SEQ ID NO: 195584 - DNA, 13 bp, Artificial Sequence
  Oligonucleotide for detection of SNP TSC0048121
tataaccatcctc

SEQ ID NO: 195585 - DNA, 13 bp, Artificial Sequence
  Oligonucleotide for detection of SNP TSC0048121
gaggatagttata

SEQ ID NO: 195586 - DNA, 13 bp, Artificial Sequence
  Oligonucleotide for detection of SNP TSC0048121
tataactatcctc

SEQ ID NO: 195587 - DNA, 13 bp, Artificial Sequence
  Oligonucleotide for detection of SNP TSC0048121
gaggacggttata

SEQ ID NO: 195588 - DNA, 13 bp, Artificial Sequence
  Oligonucleotide for detection of SNP TSC0048121
tataaccgtcctc

SEQ ID NO: 195589 - DNA, 13 bp, Artificial Sequence
  Oligonucleotide for detection of SNP TSC0048122
attaagatagaaa

SEQ ID NO: 195590 - DNA, 13 bp, Artificial Sequence
  Oligonucleotide for detection of SNP TSC0048122
tttctatcttaat

SEQ ID NO: 195591 - DNA, 13 bp, Artificial Sequence
  Oligonucleotide for detection of SNP TSC0048122
attaaggtagaaa

SEQ ID NO: 195592 - DNA, 13 bp, Artificial Sequence
  Oligonucleotide for detection of SNP TSC0048122
tttctaccttaat

SEQ ID NO: 195593 - DNA, 13 bp, Artificial Sequence
  Oligonucleotide for detection of SNP TSC0048124
gataaaggtgaaa

SEQ ID NO: 195594 - DNA, 13 bp, Artificial Sequence
  Oligonucleotide for detection of SNP TSC0048124
tttcacctttatc

SEQ ID NO: 195595 - DNA, 13 bp, Artificial Sequence
  Oligonucleotide for detection of SNP TSC0048124
gataaaagtgaaa

SEQ ID NO: 195596 - DNA, 13 bp, Artificial Sequence
  Oligonucleotide for detection of SNP TSC0048124
tttcacttttatc

SEQ ID NO: 195597 - DNA, 13 bp, Artificial Sequence
  Oligonucleotide for detection of SNP TSC0048125
gaagatgtatttt

SEQ ID NO: 195598 - DNA, 13 bp, Artificial Sequence
  Oligonucleotide for detection of SNP TSC0048125
aaaatacatcttc

SEQ ID NO: 195599 - DNA, 13 bp, Artificial Sequence
  Oligonucleotide for detection of SNP TSC0048125
gaagatatatttt

SEQ ID NO: 195600 - DNA, 13 bp, Artificial Sequence
  Oligonucleotide for detection of SNP TSC0048125
aaaatatatcttc

SEQ ID NO: 195601 - DNA, 13 bp, Artificial Sequence
  Oligonucleotide for detection of SNP TSC0048126
ttaatgataagty

SEQ ID NO: 195602 - DNA, 13 bp, Artificial Sequence
  Oligonucleotide for detection of SNP TSC0048126
racttatcattaa

SEQ ID NO: 195603 - DNA, 13 bp, Artificial Sequence
  Oligonucleotide for detection of SNP TSC0048126
ttaatgttaagty

SEQ ID NO: 195604 - DNA, 13 bp, Artificial Sequence
  Oligonucleotide for detection of SNP TSC0048126
racttaacattaa

SEQ ID NO: 195605 - DNA, 13 bp, Artificial Sequence
  Oligonucleotide for detection of SNP TSC0048126
ttaacgataagty

SEQ ID NO: 195606 - DNA, 13 bp, Artificial Sequence
  Oligonucleotide for detection of SNP TSC0048126
racttatcgttaa

SEQ ID NO: 195607 - DNA, 13 bp, Artificial Sequence
  Oligonucleotide for detection of SNP TSC0048126
ttaacgttaagty

SEQ ID NO: 195608 - DNA, 13 bp, Artificial Sequence
  Oligonucleotide for detection of SNP TSC0048126
racttaacgttaa

SEQ ID NO: 195609 - DNA, 13 bp, Artificial Sequence
  Oligonucleotide for detection of SNP TSC0048126
ggtttattgttag

SEQ ID NO: 195610 - DNA, 13 bp, Artificial Sequence
  Oligonucleotide for detection of SNP TSC0048126
ctaacaataaacc

SEQ ID NO: 195611 - DNA, 13 bp, Artificial Sequence
  Oligonucleotide for detection of SNP TSC0048126
ggtttagtgttag

SEQ ID NO: 195612 - DNA, 13 bp, Artificial Sequence
  Oligonucleotide for detection of SNP TSC0048126
ctaacactaaacc

SEQ ID NO: 195613 - DNA, 13 bp, Artificial Sequence
  Oligonucleotide for detection of SNP TSC0048126
ggtttatcgttag

SEQ ID NO: 195614 - DNA, 13 bp, Artificial Sequence
  Oligonucleotide for detection of SNP TSC0048126
ctaacgataaacc

SEQ ID NO: 195615 - DNA, 13 bp, Artificial Sequence
  Oligonucleotide for detection of SNP TSC0048126
ggtttagcgttag

SEQ ID NO: 195616 - DNA, 13 bp, Artificial Sequence
  Oligonucleotide for detection of SNP TSC0048126
ctaacgctaaacc

SEQ ID NO: 195617 - DNA, 13 bp, Artificial Sequence
  Oligonucleotide for detection of SNP TSC0048127
gtttttgtttgty

SEQ ID NO: 195618 - DNA, 13 bp, Artificial Sequence
  Oligonucleotide for detection of SNP TSC0048127
racaaacaaaaac

SEQ ID NO: 195619 - DNA, 13 bp, Artificial Sequence
  Oligonucleotide for detection of SNP TSC0048127
gttttcgtttgty

SEQ ID NO: 195620 - DNA, 13 bp, Artificial Sequence
  Oligonucleotide for detection of SNP TSC0048127
racaaacgaaaac

SEQ ID NO: 195621 - DNA, 13 bp, Artificial Sequence
  Oligonucleotide for detection of SNP TSC0048127
gataggagaaaay

SEQ ID NO: 195622 - DNA, 13 bp, Artificial Sequence
  Oligonucleotide for detection of SNP TSC0048127
rttttctcctatc

SEQ ID NO: 195623 - DNA, 13 bp, Artificial Sequence
  Oligonucleotide for detection of SNP TSC0048127
gataggtgaaaay

SEQ ID NO: 195624 - DNA, 13 bp, Artificial Sequence
  Oligonucleotide for detection of SNP TSC0048127
rttttcacctatc

SEQ ID NO: 195625 - DNA, 13 bp, Artificial Sequence
  Oligonucleotide for detection of SNP TSC0048127
gataggcgaaaay

SEQ ID NO: 195626 - DNA, 13 bp, Artificial Sequence
  Oligonucleotide for detection of SNP TSC0048127
rttttcgcctatc

SEQ ID NO: 195627 - DNA, 13 bp, Artificial Sequence
  Oligonucleotide for detection of SNP TSC0048128
gagggagaggatt

SEQ ID NO: 195628 - DNA, 13 bp, Artificial Sequence
  Oligonucleotide for detection of SNP TSC0048128
aatcctctccctc

SEQ ID NO: 195629 - DNA, 13 bp, Artificial Sequence
  Oligonucleotide for detection of SNP TSC0048128
gagggaaaggatt

SEQ ID NO: 195630 - DNA, 13 bp, Artificial Sequence
  Oligonucleotide for detection of SNP TSC0048128
aatcctttccctc

SEQ ID NO: 195631 - DNA, 13 bp, Artificial Sequence
  Oligonucleotide for detection of SNP TSC0048129
tgtaattatgaat

SEQ ID NO: 195632 - DNA, 13 bp, Artificial Sequence
  Oligonucleotide for detection of SNP TSC0048129
attcataattaca

SEQ ID NO: 195633 - DNA, 13 bp, Artificial Sequence
  Oligonucleotide for detection of SNP TSC0048129
tgtaatgatgaat

SEQ ID NO: 195634 - DNA, 13 bp, Artificial Sequence
  Oligonucleotide for detection of SNP TSC0048129
attcatcattaca

SEQ ID NO: 195635 - DNA, 13 bp, Artificial Sequence
  Oligonucleotide for detection of SNP TSC0048130
atatgagaaaaaa

SEQ ID NO: 195636 - DNA, 13 bp, Artificial Sequence
  Oligonucleotide for detection of SNP TSC0048130
ttttttctcatat

SEQ ID NO: 195637 - DNA, 13 bp, Artificial Sequence
  Oligonucleotide for detection of SNP TSC0048130
atatgaaaaaaaa

SEQ ID NO: 195638 - DNA, 13 bp, Artificial Sequence
  Oligonucleotide for detection of SNP TSC0048130
ttttttttcatat

SEQ ID NO: 195639 - DNA, 13 bp, Artificial Sequence
  Oligonucleotide for detection of SNP TSC0048131
gataatggtttaa

SEQ ID NO: 195640 - DNA, 13 bp, Artificial Sequence
  Oligonucleotide for detection of SNP TSC0048131
ttaaaccattatc

SEQ ID NO: 195641 - DNA, 13 bp, Artificial Sequence
  Oligonucleotide for detection of SNP TSC0048131
gataatagtttaa

SEQ ID NO: 195642 - DNA, 13 bp, Artificial Sequence
  Oligonucleotide for detection of SNP TSC0048131
ttaaactattatc

SEQ ID NO: 195643 - DNA, 13 bp, Artificial Sequence
  Oligonucleotide for detection of SNP TSC0048131
gataacggtttaa

SEQ ID NO: 195644 - DNA, 13 bp, Artificial Sequence
  Oligonucleotide for detection of SNP TSC0048131
ttaaaccgttatc

SEQ ID NO: 195645 - DNA, 13 bp, Artificial Sequence
  Oligonucleotide for detection of SNP TSC0048132
agaggttaagtga

SEQ ID NO: 195646 - DNA, 13 bp, Artificial Sequence
  Oligonucleotide for detection of SNP TSC0048132
tcacttaacctct

SEQ ID NO: 195647 - DNA, 13 bp, Artificial Sequence
  Oligonucleotide for detection of SNP TSC0048132
agaggtgaagtga

SEQ ID NO: 195648 - DNA, 13 bp, Artificial Sequence
  Oligonucleotide for detection of SNP TSC0048132
tcacttcacctct

SEQ ID NO: 195649 - DNA, 13 bp, Artificial Sequence
  Oligonucleotide for detection of SNP TSC0048132
agaggtaaagtga

SEQ ID NO: 195650 - DNA, 13 bp, Artificial Sequence
  Oligonucleotide for detection of SNP TSC0048132
tcactttacctct

SEQ ID NO: 195651 - DNA, 13 bp, Artificial Sequence
  Oligonucleotide for detection of SNP TSC0048133
tttgttttggtaa

SEQ ID NO: 195652 - DNA, 13 bp, Artificial Sequence
  Oligonucleotide for detection of SNP TSC0048133
ttaccaaaacaaa

SEQ ID NO: 195653 - DNA, 13 bp, Artificial Sequence
  Oligonucleotide for detection of SNP TSC0048133
tttgttgtggtaa

SEQ ID NO: 195654 - DNA, 13 bp, Artificial Sequence
  Oligonucleotide for detection of SNP TSC0048133
ttaccacaacaaa

SEQ ID NO: 195655 - DNA, 13 bp, Artificial Sequence
  Oligonucleotide for detection of SNP TSC0048133
tttgtcgtggtaa

SEQ ID NO: 195656 - DNA, 13 bp, Artificial Sequence
  Oligonucleotide for detection of SNP TSC0048133
ttaccacgacaaa

SEQ ID NO: 195657 - DNA, 13 bp, Artificial Sequence
  Oligonucleotide for detection of SNP TSC0048133
ttgttagggtagg

SEQ ID NO: 195658 - DNA, 13 bp, Artificial Sequence
  Oligonucleotide for detection of SNP TSC0048133
cctaccctaacaa

SEQ ID NO: 195659 - DNA, 13 bp, Artificial Sequence
  Oligonucleotide for detection of SNP TSC0048133
ttgttaaggtagg

SEQ ID NO: 195660 - DNA, 13 bp, Artificial Sequence
  Oligonucleotide for detection of SNP TSC0048133
cctaccttaacaa

SEQ ID NO: 195661 - DNA, 13 bp, Artificial Sequence
  Oligonucleotide for detection of SNP TSC0048133
ttgttatggtagg

SEQ ID NO: 195662 - DNA, 13 bp, Artificial Sequence
  Oligonucleotide for detection of SNP TSC0048133
cctaccataacaa

SEQ ID NO: 195663 - DNA, 13 bp, Artificial Sequence
  Oligonucleotide for detection of SNP TSC0048133
ttgttacggtagg

SEQ ID NO: 195664 - DNA, 13 bp, Artificial Sequence
  Oligonucleotide for detection of SNP TSC0048133
cctaccgtaacaa

SEQ ID NO: 195665 - DNA, 13 bp, Artificial Sequence
  Oligonucleotide for detection of SNP TSC0048137
ttaatagtagggg

SEQ ID NO: 195666 - DNA, 13 bp, Artificial Sequence
  Oligonucleotide for detection of SNP TSC0048137
cccctactattaa

SEQ ID NO: 195667 - DNA, 13 bp, Artificial Sequence
  Oligonucleotide for detection of SNP TSC0048137
ttaataatagggg

SEQ ID NO: 195668 - DNA, 13 bp, Artificial Sequence
  Oligonucleotide for detection of SNP TSC0048137
cccctattattaa

SEQ ID NO: 195669 - DNA, 13 bp, Artificial Sequence
  Oligonucleotide for detection of SNP TSC0048138
ttgggatggttat

SEQ ID NO: 195670 - DNA, 13 bp, Artificial Sequence
  Oligonucleotide for detection of SNP TSC0048138
ataaccatcccaa

SEQ ID NO: 195671 - DNA, 13 bp, Artificial Sequence
  Oligonucleotide for detection of SNP TSC0048138
ttgggacggttat

SEQ ID NO: 195672 - DNA, 13 bp, Artificial Sequence
  Oligonucleotide for detection of SNP TSC0048138
ataaccgtcccaa

SEQ ID NO: 195673 - DNA, 13 bp, Artificial Sequence
  Oligonucleotide for detection of SNP TSC0048139
tttgggtgtgaty

SEQ ID NO: 195674 - DNA, 13 bp, Artificial Sequence
  Oligonucleotide for detection of SNP TSC0048139
ratcacacccaaa

SEQ ID NO: 195675 - DNA, 13 bp, Artificial Sequence
  Oligonucleotide for detection of SNP TSC0048139
tttgggcgtgaty

SEQ ID NO: 195676 - DNA, 13 bp, Artificial Sequence
  Oligonucleotide for detection of SNP TSC0048139
ratcacgcccaaa

SEQ ID NO: 195677 - DNA, 13 bp, Artificial Sequence
  Oligonucleotide for detection of SNP TSC0048139
gattatgtttaaa

SEQ ID NO: 195678 - DNA, 13 bp, Artificial Sequence
  Oligonucleotide for detection of SNP TSC0048139
tttaaacataatc

SEQ ID NO: 195679 - DNA, 13 bp, Artificial Sequence
  Oligonucleotide for detection of SNP TSC0048139
gattatatttaaa

SEQ ID NO: 195680 - DNA, 13 bp, Artificial Sequence
  Oligonucleotide for detection of SNP TSC0048139
tttaaatataatc

SEQ ID NO: 195681 - DNA, 13 bp, Artificial Sequence
  Oligonucleotide for detection of SNP TSC0048139
gattacgtttaaa

SEQ ID NO: 195682 - DNA, 13 bp, Artificial Sequence
  Oligonucleotide for detection of SNP TSC0048139
tttaaacgtaatc

SEQ ID NO: 195683 - DNA, 13 bp, Artificial Sequence
  Oligonucleotide for detection of SNP TSC0048141
tatagttggtagt

SEQ ID NO: 195684 - DNA, 13 bp, Artificial Sequence
  Oligonucleotide for detection of SNP TSC0048141
actaccaactata

SEQ ID NO: 195685 - DNA, 13 bp, Artificial Sequence
  Oligonucleotide for detection of SNP TSC0048141
tatagtcggtagt

SEQ ID NO: 195686 - DNA, 13 bp, Artificial Sequence
  Oligonucleotide for detection of SNP TSC0048141
actaccgactata

SEQ ID NO: 195687 - DNA, 13 bp, Artificial Sequence
  Oligonucleotide for detection of SNP TSC0048141
attgttgattgtg

SEQ ID NO: 195688 - DNA, 13 bp, Artificial Sequence
  Oligonucleotide for detection of SNP TSC0048141
cacaatcaacaat

SEQ ID NO: 195689 - DNA, 13 bp, Artificial Sequence
  Oligonucleotide for detection of SNP TSC0048141
attgttaattgtg

SEQ ID NO: 195690 - DNA, 13 bp, Artificial Sequence
  Oligonucleotide for detection of SNP TSC0048141
cacaattaacaat

SEQ ID NO: 195691 - DNA, 13 bp, Artificial Sequence
  Oligonucleotide for detection of SNP TSC0048141
attgtcgattgtg

SEQ ID NO: 195692 - DNA, 13 bp, Artificial Sequence
  Oligonucleotide for detection of SNP TSC0048141
cacaatcgacaat

SEQ ID NO: 195693 - DNA, 13 bp, Artificial Sequence
  Oligonucleotide for detection of SNP TSC0005700
ttgattatttagt

SEQ ID NO: 195694 - DNA, 13 bp, Artificial Sequence
  Oligonucleotide for detection of SNP TSC0005700
actaaataatcaa

SEQ ID NO: 195695 - DNA, 13 bp, Artificial Sequence
  Oligonucleotide for detection of SNP TSC0005700
ttgattgtttagt

SEQ ID NO: 195696 - DNA, 13 bp, Artificial Sequence
  Oligonucleotide for detection of SNP TSC0005700
actaaacaatcaa

SEQ ID NO: 195697 - DNA, 13 bp, Artificial Sequence
  Oligonucleotide for detection of SNP TSC0009428
ttagtttggttty

SEQ ID NO: 195698 - DNA, 13 bp, Artificial Sequence
  Oligonucleotide for detection of SNP TSC0009428
raaaccaaactaa

SEQ ID NO: 195699 - DNA, 13 bp, Artificial Sequence
  Oligonucleotide for detection of SNP TSC0009428
ttagttcggttty

SEQ ID NO: 195700 - DNA, 13 bp, Artificial Sequence
  Oligonucleotide for detection of SNP TSC0009428
raaaccgaactaa

SEQ ID NO: 195701 - DNA, 13 bp, Artificial Sequence
  Oligonucleotide for detection of SNP TSC0009428
gaagttgggttaa

SEQ ID NO: 195702 - DNA, 13 bp, Artificial Sequence
  Oligonucleotide for detection of SNP TSC0009428
ttaacccaacttc

SEQ ID NO: 195703 - DNA, 13 bp, Artificial Sequence
  Oligonucleotide for detection of SNP TSC0009428
gaagttaggttaa

SEQ ID NO: 195704 - DNA, 13 bp, Artificial Sequence
  Oligonucleotide for detection of SNP TSC0009428
ttaacctaacttc

SEQ ID NO: 195705 - DNA, 13 bp, Artificial Sequence
  Oligonucleotide for detection of SNP TSC0009428
gaagtcgggttaa

SEQ ID NO: 195706 - DNA, 13 bp, Artificial Sequence
  Oligonucleotide for detection of SNP TSC0009428
ttaacccgacttc

SEQ ID NO: 195707 - DNA, 13 bp, Artificial Sequence
  Oligonucleotide for detection of SNP TSC0048143
ttttagaggagga

SEQ ID NO: 195708 - DNA, 13 bp, Artificial Sequence
  Oligonucleotide for detection of SNP TSC0048143
tcctcctctaaaa

SEQ ID NO: 195709 - DNA, 13 bp, Artificial Sequence
  Oligonucleotide for detection of SNP TSC0048143
ttttaggggagga

SEQ ID NO: 195710 - DNA, 13 bp, Artificial Sequence
  Oligonucleotide for detection of SNP TSC0048143
tcctcccctaaaa

SEQ ID NO: 195711 - DNA, 13 bp, Artificial Sequence
  Oligonucleotide for detection of SNP TSC0048146
tatttagaaatat

SEQ ID NO: 195712 - DNA, 13 bp, Artificial Sequence
  Oligonucleotide for detection of SNP TSC0048146
atatttctaaata

SEQ ID NO: 195713 - DNA, 13 bp, Artificial Sequence
  Oligonucleotide for detection of SNP TSC0048147
gaaagatattgaa

SEQ ID NO: 195714 - DNA, 13 bp, Artificial Sequence
  Oligonucleotide for detection of SNP TSC0048147
ttcaatatctttc

SEQ ID NO: 195715 - DNA, 13 bp, Artificial Sequence
  Oligonucleotide for detection of SNP TSC0048147
gaaagagattgaa

SEQ ID NO: 195716 - DNA, 13 bp, Artificial Sequence
  Oligonucleotide for detection of SNP TSC0048147
ttcaatctctttc

SEQ ID NO: 195717 - DNA, 13 bp, Artificial Sequence
  Oligonucleotide for detection of SNP TSC0048149
ttttggttgttta

SEQ ID NO: 195718 - DNA, 13 bp, Artificial Sequence
  Oligonucleotide for detection of SNP TSC0048149
taaacaaccaaaa

SEQ ID NO: 195719 - DNA, 13 bp, Artificial Sequence
  Oligonucleotide for detection of SNP TSC0048149
ttttgggtgttta

SEQ ID NO: 195720 - DNA, 13 bp, Artificial Sequence
  Oligonucleotide for detection of SNP TSC0048149
taaacacccaaaa

SEQ ID NO: 195721 - DNA, 13 bp, Artificial Sequence
  Oligonucleotide for detection of SNP TSC0048149
taagtaattaaga

SEQ ID NO: 195722 - DNA, 13 bp, Artificial Sequence
  Oligonucleotide for detection of SNP TSC0048149
tcttaattactta

SEQ ID NO: 195723 - DNA, 13 bp, Artificial Sequence
  Oligonucleotide for detection of SNP TSC0048149
taagtatttaaga

SEQ ID NO: 195724 - DNA, 13 bp, Artificial Sequence
  Oligonucleotide for detection of SNP TSC0048149
tcttaaatactta

SEQ ID NO: 195725 - DNA, 13 bp, Artificial Sequence
  Oligonucleotide for detection of SNP TSC0048150
tttttttagttgt

SEQ ID NO: 195726 - DNA, 13 bp, Artificial Sequence
  Oligonucleotide for detection of SNP TSC0048150
acaactaaaaaaa

SEQ ID NO: 195727 - DNA, 13 bp, Artificial Sequence
  Oligonucleotide for detection of SNP TSC0048150
ataatttagaaaa

SEQ ID NO: 195728 - DNA, 13 bp, Artificial Sequence
  Oligonucleotide for detection of SNP TSC0048150
ttttctaaattat

SEQ ID NO: 195729 - DNA, 13 bp, Artificial Sequence
  Oligonucleotide for detection of SNP TSC0048150
ataattgagaaaa

SEQ ID NO: 195730 - DNA, 13 bp, Artificial Sequence
  Oligonucleotide for detection of SNP TSC0048150
ttttctcaattat

SEQ ID NO: 195731 - DNA, 13 bp, Artificial Sequence
  Oligonucleotide for detection of SNP TSC0048153
attttacgtatag

SEQ ID NO: 195732 - DNA, 13 bp, Artificial Sequence
  Oligonucleotide for detection of SNP TSC0048153
ctatacgtaaaat

SEQ ID NO: 195733 - DNA, 13 bp, Artificial Sequence
  Oligonucleotide for detection of SNP TSC0048153
ttatgtgtaaaat

SEQ ID NO: 195734 - DNA, 13 bp, Artificial Sequence
  Oligonucleotide for detection of SNP TSC0048153
attttacacataa

SEQ ID NO: 195735 - DNA, 13 bp, Artificial Sequence
  Oligonucleotide for detection of SNP TSC0048153
ttatgtataaaat

SEQ ID NO: 195736 - DNA, 13 bp, Artificial Sequence
  Oligonucleotide for detection of SNP TSC0048153
attttatacataa

SEQ ID NO: 195737 - DNA, 13 bp, Artificial Sequence
  Oligonucleotide for detection of SNP TSC0048153
ttatgcgtaaaat

SEQ ID NO: 195738 - DNA, 13 bp, Artificial Sequence
  Oligonucleotide for detection of SNP TSC0048153
attttacgcataa

SEQ ID NO: 195739 - DNA, 13 bp, Artificial Sequence
  Oligonucleotide for detection of SNP TSC0048154
tttattgttgttt

SEQ ID NO: 195740 - DNA, 13 bp, Artificial Sequence
  Oligonucleotide for detection of SNP TSC0048154
aaacaacaataaa

SEQ ID NO: 195741 - DNA, 13 bp, Artificial Sequence
  Oligonucleotide for detection of SNP TSC0048154
aggtaagaatgga

SEQ ID NO: 195742 - DNA, 13 bp, Artificial Sequence
  Oligonucleotide for detection of SNP TSC0048154
tccattcttacct

SEQ ID NO: 195743 - DNA, 13 bp, Artificial Sequence
  Oligonucleotide for detection of SNP TSC0048154
aggtaataatgga

SEQ ID NO: 195744 - DNA, 13 bp, Artificial Sequence
  Oligonucleotide for detection of SNP TSC0048154
tccattattacct

SEQ ID NO: 195745 - DNA, 13 bp, Artificial Sequence
  Oligonucleotide for detection of SNP TSC0048156
tttgggagtatat

SEQ ID NO: 195746 - DNA, 13 bp, Artificial Sequence
  Oligonucleotide for detection of SNP TSC0048156
atatactcccaaa

SEQ ID NO: 195747 - DNA, 13 bp, Artificial Sequence
  Oligonucleotide for detection of SNP TSC0048156
tttgggggtatat

SEQ ID NO: 195748 - DNA, 13 bp, Artificial Sequence
  Oligonucleotide for detection of SNP TSC0048156
atatacccccaaa

SEQ ID NO: 195749 - DNA, 13 bp, Artificial Sequence
  Oligonucleotide for detection of SNP TSC0048156
ttcgggagtatat

SEQ ID NO: 195750 - DNA, 13 bp, Artificial Sequence
  Oligonucleotide for detection of SNP TSC0048156
atatactcccgaa

SEQ ID NO: 195751 - DNA, 13 bp, Artificial Sequence
  Oligonucleotide for detection of SNP TSC0048156
ttcgggggtatat

SEQ ID NO: 195752 - DNA, 13 bp, Artificial Sequence
  Oligonucleotide for detection of SNP TSC0048156
atatacccccgaa

SEQ ID NO: 195753 - DNA, 13 bp, Artificial Sequence
  Oligonucleotide for detection of SNP TSC0048157
agatatgaaaatg

SEQ ID NO: 195754 - DNA, 13 bp, Artificial Sequence
  Oligonucleotide for detection of SNP TSC0048157
cattttcatatct

SEQ ID NO: 195755 - DNA, 13 bp, Artificial Sequence
  Oligonucleotide for detection of SNP TSC0048157
agatataaaaatg

SEQ ID NO: 195756 - DNA, 13 bp, Artificial Sequence
  Oligonucleotide for detection of SNP TSC0048157
catttttatatct

SEQ ID NO: 195757 - DNA, 13 bp, Artificial Sequence
  Oligonucleotide for detection of SNP TSC0048160
ttttaagtagtat

SEQ ID NO: 195758 - DNA, 13 bp, Artificial Sequence
  Oligonucleotide for detection of SNP TSC0048160
atactacttaaaa

SEQ ID NO: 195759 - DNA, 13 bp, Artificial Sequence
  Oligonucleotide for detection of SNP TSC0048160
ttttaaatagtat

SEQ ID NO: 195760 - DNA, 13 bp, Artificial Sequence
  Oligonucleotide for detection of SNP TSC0048160
atactatttaaaa

SEQ ID NO: 195761 - DNA, 13 bp, Artificial Sequence
  Oligonucleotide for detection of SNP TSC0048161
gttgtttgtgaty

SEQ ID NO: 195762 - DNA, 13 bp, Artificial Sequence
  Oligonucleotide for detection of SNP TSC0048161
ratcacaaacaac

SEQ ID NO: 195763 - DNA, 13 bp, Artificial Sequence
  Oligonucleotide for detection of SNP TSC0048161
gttgttggtgaty

SEQ ID NO: 195764 - DNA, 13 bp, Artificial Sequence
  Oligonucleotide for detection of SNP TSC0048161
ratcaccaacaac

SEQ ID NO: 195765 - DNA, 13 bp, Artificial Sequence
  Oligonucleotide for detection of SNP TSC0048161
gtcgtttgtgaty

SEQ ID NO: 195766 - DNA, 13 bp, Artificial Sequence
  Oligonucleotide for detection of SNP TSC0048161
ratcacaaacgac

SEQ ID NO: 195767 - DNA, 13 bp, Artificial Sequence
  Oligonucleotide for detection of SNP TSC0048161
gtcgttggtgaty

SEQ ID NO: 195768 - DNA, 13 bp, Artificial Sequence
  Oligonucleotide for detection of SNP TSC0048161
ratcaccaacgac

SEQ ID NO: 195769 - DNA, 13 bp, Artificial Sequence
  Oligonucleotide for detection of SNP TSC0048161
gttgttcgtgaty

SEQ ID NO: 195770 - DNA, 13 bp, Artificial Sequence
  Oligonucleotide for detection of SNP TSC0048161
ratcacgaacaac

SEQ ID NO: 195771 - DNA, 13 bp, Artificial Sequence
  Oligonucleotide for detection of SNP TSC0048161
gtcgttcgtgaty

SEQ ID NO: 195772 - DNA, 13 bp, Artificial Sequence
  Oligonucleotide for detection of SNP TSC0048161
ratcacgaacgac

SEQ ID NO: 195773 - DNA, 13 bp, Artificial Sequence
  Oligonucleotide for detection of SNP TSC0048161
gattatgagtgay

SEQ ID NO: 195774 - DNA, 13 bp, Artificial Sequence
  Oligonucleotide for detection of SNP TSC0048161
rtcactcataatc

SEQ ID NO: 195775 - DNA, 13 bp, Artificial Sequence
  Oligonucleotide for detection of SNP TSC0048161
gattattagtgay

SEQ ID NO: 195776 - DNA, 13 bp, Artificial Sequence
  Oligonucleotide for detection of SNP TSC0048161
rtcactaataatc

SEQ ID NO: 195777 - DNA, 13 bp, Artificial Sequence
  Oligonucleotide for detection of SNP TSC0048161
gattacgagtgay

SEQ ID NO: 195778 - DNA, 13 bp, Artificial Sequence
  Oligonucleotide for detection of SNP TSC0048161
rtcactcgtaatc

SEQ ID NO: 195779 - DNA, 13 bp, Artificial Sequence
  Oligonucleotide for detection of SNP TSC0048161
gattattagcgay

SEQ ID NO: 195780 - DNA, 13 bp, Artificial Sequence
  Oligonucleotide for detection of SNP TSC0048161
rtcgctaataatc

SEQ ID NO: 195781 - DNA, 13 bp, Artificial Sequence
  Oligonucleotide for detection of SNP TSC0048161
gattatgagcgay

SEQ ID NO: 195782 - DNA, 13 bp, Artificial Sequence
  Oligonucleotide for detection of SNP TSC0048161
rtcgctcataatc

SEQ ID NO: 195783 - DNA, 13 bp, Artificial Sequence
  Oligonucleotide for detection of SNP TSC0048161
gattacgagcgay

SEQ ID NO: 195784 - DNA, 13 bp, Artificial Sequence
  Oligonucleotide for detection of SNP TSC0048161
rtcgctcgtaatc

SEQ ID NO: 195785 - DNA, 13 bp, Artificial Sequence
  Oligonucleotide for detection of SNP TSC0048166
tttatatgatatt

SEQ ID NO: 195786 - DNA, 13 bp, Artificial Sequence
  Oligonucleotide for detection of SNP TSC0048166
aatatcatataaa

SEQ ID NO: 195787 - DNA, 13 bp, Artificial Sequence
  Oligonucleotide for detection of SNP TSC0048166
tttataggatatt

SEQ ID NO: 195788 - DNA, 13 bp, Artificial Sequence
  Oligonucleotide for detection of SNP TSC0048166
aatatcctataaa

SEQ ID NO: 195789 - DNA, 13 bp, Artificial Sequence
  Oligonucleotide for detection of SNP TSC0048166
tttatacgatatt

SEQ ID NO: 195790 - DNA, 13 bp, Artificial Sequence
  Oligonucleotide for detection of SNP TSC0048166
aatatcgtataaa

SEQ ID NO: 195791 - DNA, 13 bp, Artificial Sequence
  Oligonucleotide for detection of SNP TSC0048166
agtattgtatagg

SEQ ID NO: 195792 - DNA, 13 bp, Artificial Sequence
  Oligonucleotide for detection of SNP TSC0048166
cctatacaatact

SEQ ID NO: 195793 - DNA, 13 bp, Artificial Sequence
  Oligonucleotide for detection of SNP TSC0048166
agtattttatagg

SEQ ID NO: 195794 - DNA, 13 bp, Artificial Sequence
  Oligonucleotide for detection of SNP TSC0048166
cctataaaatact

SEQ ID NO: 195795 - DNA, 13 bp, Artificial Sequence
  Oligonucleotide for detection of SNP TSC0048166
agtatcgtatagg

SEQ ID NO: 195796 - DNA, 13 bp, Artificial Sequence
  Oligonucleotide for detection of SNP TSC0048166
cctatacgatact

SEQ ID NO: 195797 - DNA, 13 bp, Artificial Sequence
  Oligonucleotide for detection of SNP TSC0048167
gttgtaagttatg

SEQ ID NO: 195798 - DNA, 13 bp, Artificial Sequence
  Oligonucleotide for detection of SNP TSC0048167
cataacttacaac

SEQ ID NO: 195799 - DNA, 13 bp, Artificial Sequence
  Oligonucleotide for detection of SNP TSC0048167
gttgtaggttatg

SEQ ID NO: 195800 - DNA, 13 bp, Artificial Sequence
  Oligonucleotide for detection of SNP TSC0048167
cataacctacaac

SEQ ID NO: 195801 - DNA, 13 bp, Artificial Sequence
  Oligonucleotide for detection of SNP TSC0048167
gttgtaagttacg

SEQ ID NO: 195802 - DNA, 13 bp, Artificial Sequence
  Oligonucleotide for detection of SNP TSC0048167
cgtaacttacaac

SEQ ID NO: 195803 - DNA, 13 bp, Artificial Sequence
  Oligonucleotide for detection of SNP TSC0048167
gttgtaggttacg

SEQ ID NO: 195804 - DNA, 13 bp, Artificial Sequence
  Oligonucleotide for detection of SNP TSC0048167
cgtaacctacaac

SEQ ID NO: 195805 - DNA, 13 bp, Artificial Sequence
  Oligonucleotide for detection of SNP TSC0048170
tgggaaatttggg

SEQ ID NO: 195806 - DNA, 13 bp, Artificial Sequence
  Oligonucleotide for detection of SNP TSC0048170
cccaaatttccca

SEQ ID NO: 195807 - DNA, 13 bp, Artificial Sequence
  Oligonucleotide for detection of SNP TSC0048170
tgggaattttggg

SEQ ID NO: 195808 - DNA, 13 bp, Artificial Sequence
  Oligonucleotide for detection of SNP TSC0048170
cccaaaattccca

SEQ ID NO: 195809 - DNA, 13 bp, Artificial Sequence
  Oligonucleotide for detection of SNP TSC0048171
ataagtaagttat

SEQ ID NO: 195810 - DNA, 13 bp, Artificial Sequence
  Oligonucleotide for detection of SNP TSC0048171
ataacttacttat

SEQ ID NO: 195811 - DNA, 13 bp, Artificial Sequence
  Oligonucleotide for detection of SNP TSC0048171
ataagttagttat

SEQ ID NO: 195812 - DNA, 13 bp, Artificial Sequence
  Oligonucleotide for detection of SNP TSC0048171
ataactaacttat

SEQ ID NO: 195813 - DNA, 13 bp, Artificial Sequence
  Oligonucleotide for detection of SNP TSC0048171
atgatttatttgt

SEQ ID NO: 195814 - DNA, 13 bp, Artificial Sequence
  Oligonucleotide for detection of SNP TSC0048171
acaaataaatcat

SEQ ID NO: 195815 - DNA, 13 bp, Artificial Sequence
  Oligonucleotide for detection of SNP TSC0048171
atgattgatttgt

SEQ ID NO: 195816 - DNA, 13 bp, Artificial Sequence
  Oligonucleotide for detection of SNP TSC0048171
acaaatcaatcat

SEQ ID NO: 195817 - DNA, 13 bp, Artificial Sequence
  Oligonucleotide for detection of SNP TSC0048172
gaggttgaagtag

SEQ ID NO: 195818 - DNA, 13 bp, Artificial Sequence
  Oligonucleotide for detection of SNP TSC0048172
ctacttcaacctc

SEQ ID NO: 195819 - DNA, 13 bp, Artificial Sequence
  Oligonucleotide for detection of SNP TSC0048172
gaggttaaagtag

SEQ ID NO: 195820 - DNA, 13 bp, Artificial Sequence
  Oligonucleotide for detection of SNP TSC0048172
ctactttaacctc

SEQ ID NO: 195821 - DNA, 13 bp, Artificial Sequence
  Oligonucleotide for detection of SNP TSC0048172
gaggtcgaagtag

SEQ ID NO: 195822 - DNA, 13 bp, Artificial Sequence
  Oligonucleotide for detection of SNP TSC0048172
ctacttcgacctc

SEQ ID NO: 195823 - DNA, 13 bp, Artificial Sequence
  Oligonucleotide for detection of SNP TSC0048173
tgagttatttttt

SEQ ID NO: 195824 - DNA, 13 bp, Artificial Sequence
  Oligonucleotide for detection of SNP TSC0048173
aaaaaataactca

SEQ ID NO: 195825 - DNA, 13 bp, Artificial Sequence
  Oligonucleotide for detection of SNP TSC0048173
tgagttttttttt

SEQ ID NO: 195826 - DNA, 13 bp, Artificial Sequence
  Oligonucleotide for detection of SNP TSC0048173
aaaaaaaaactca

SEQ ID NO: 195827 - DNA, 13 bp, Artificial Sequence
  Oligonucleotide for detection of SNP TSC0048173
agagggtgattta

SEQ ID NO: 195828 - DNA, 13 bp, Artificial Sequence
  Oligonucleotide for detection of SNP TSC0048173
taaatcaccctct

SEQ ID NO: 195829 - DNA, 13 bp, Artificial Sequence
  Oligonucleotide for detection of SNP TSC0048173
agagggagattta

SEQ ID NO: 195830 - DNA, 13 bp, Artificial Sequence
  Oligonucleotide for detection of SNP TSC0048173
taaatctccctct

SEQ ID NO: 195831 - DNA, 13 bp, Artificial Sequence
  Oligonucleotide for detection of SNP TSC0048174
atgtgagttagty

SEQ ID NO: 195832 - DNA, 13 bp, Artificial Sequence
  Oligonucleotide for detection of SNP TSC0048174
ractaactcacat

SEQ ID NO: 195833 - DNA, 13 bp, Artificial Sequence
  Oligonucleotide for detection of SNP TSC0048174
atgtgaattagty

SEQ ID NO: 195834 - DNA, 13 bp, Artificial Sequence
  Oligonucleotide for detection of SNP TSC0048174
ractaattcacat

SEQ ID NO: 195835 - DNA, 13 bp, Artificial Sequence
  Oligonucleotide for detection of SNP TSC0048175
gtttttattgtgt

SEQ ID NO: 195836 - DNA, 13 bp, Artificial Sequence
  Oligonucleotide for detection of SNP TSC0048175
acacaataaaaac

SEQ ID NO: 195837 - DNA, 13 bp, Artificial Sequence
  Oligonucleotide for detection of SNP TSC0048175
atataatgggggy

SEQ ID NO: 195838 - DNA, 13 bp, Artificial Sequence
  Oligonucleotide for detection of SNP TSC0048175
rcccccattatat

SEQ ID NO: 195839 - DNA, 13 bp, Artificial Sequence
  Oligonucleotide for detection of SNP TSC0048175
atataaagggggy

SEQ ID NO: 195840 - DNA, 13 bp, Artificial Sequence
  Oligonucleotide for detection of SNP TSC0048175
rccccctttatat

SEQ ID NO: 195841 - DNA, 13 bp, Artificial Sequence
  Oligonucleotide for detection of SNP TSC0048176
tatatttagaagt

SEQ ID NO: 195842 - DNA, 13 bp, Artificial Sequence
  Oligonucleotide for detection of SNP TSC0048176
acttctaaatata

SEQ ID NO: 195843 - DNA, 13 bp, Artificial Sequence
  Oligonucleotide for detection of SNP TSC0048176
tatattgagaagt

SEQ ID NO: 195844 - DNA, 13 bp, Artificial Sequence
  Oligonucleotide for detection of SNP TSC0048176
acttctcaatata

SEQ ID NO: 195845 - DNA, 13 bp, Artificial Sequence
  Oligonucleotide for detection of SNP TSC0048176
atttttaaatgta

SEQ ID NO: 195846 - DNA, 13 bp, Artificial Sequence
  Oligonucleotide for detection of SNP TSC0048176
tacatttaaaaat

SEQ ID NO: 195847 - DNA, 13 bp, Artificial Sequence
  Oligonucleotide for detection of SNP TSC0048176
attttttaatgta

SEQ ID NO: 195848 - DNA, 13 bp, Artificial Sequence
  Oligonucleotide for detection of SNP TSC0048176
tacattaaaaaat

SEQ ID NO: 195849 - DNA, 13 bp, Artificial Sequence
  Oligonucleotide for detection of SNP TSC0005040
taaagataaataa

SEQ ID NO: 195850 - DNA, 13 bp, Artificial Sequence
  Oligonucleotide for detection of SNP TSC0005040
ttatttatcttta

SEQ ID NO: 195851 - DNA, 13 bp, Artificial Sequence
  Oligonucleotide for detection of SNP TSC0005040
taaagagaaataa

SEQ ID NO: 195852 - DNA, 13 bp, Artificial Sequence
  Oligonucleotide for detection of SNP TSC0005040
ttatttctcttta

SEQ ID NO: 195853 - DNA, 13 bp, Artificial Sequence
  Oligonucleotide for detection of SNP TSC0005041
ggggatatgggga

SEQ ID NO: 195854 - DNA, 13 bp, Artificial Sequence
  Oligonucleotide for detection of SNP TSC0005041
tccccatatcccc

SEQ ID NO: 195855 - DNA, 13 bp, Artificial Sequence
  Oligonucleotide for detection of SNP TSC0005041
ggggatttgggga

SEQ ID NO: 195856 - DNA, 13 bp, Artificial Sequence
  Oligonucleotide for detection of SNP TSC0005041
tccccaaatcccc

SEQ ID NO: 195857 - DNA, 13 bp, Artificial Sequence
  Oligonucleotide for detection of SNP TSC0048181
atgtggttgtgga

SEQ ID NO: 195858 - DNA, 13 bp, Artificial Sequence
  Oligonucleotide for detection of SNP TSC0048181
tccacaaccacat

SEQ ID NO: 195859 - DNA, 13 bp, Artificial Sequence
  Oligonucleotide for detection of SNP TSC0048181
atgtgggtgtgga

SEQ ID NO: 195860 - DNA, 13 bp, Artificial Sequence
  Oligonucleotide for detection of SNP TSC0048181
tccacacccacat

SEQ ID NO: 195861 - DNA, 13 bp, Artificial Sequence
  Oligonucleotide for detection of SNP TSC0048181
tttatagttatat

SEQ ID NO: 195862 - DNA, 13 bp, Artificial Sequence
  Oligonucleotide for detection of SNP TSC0048181
atataactataaa

SEQ ID NO: 195863 - DNA, 13 bp, Artificial Sequence
  Oligonucleotide for detection of SNP TSC0048181
tttatatttatat

SEQ ID NO: 195864 - DNA, 13 bp, Artificial Sequence
  Oligonucleotide for detection of SNP TSC0048181
atataaatataaa

SEQ ID NO: 195865 - DNA, 13 bp, Artificial Sequence
  Oligonucleotide for detection of SNP TSC0048183
tttttgattggta

SEQ ID NO: 195866 - DNA, 13 bp, Artificial Sequence
  Oligonucleotide for detection of SNP TSC0048183
taccaatcaaaaa

SEQ ID NO: 195867 - DNA, 13 bp, Artificial Sequence
  Oligonucleotide for detection of SNP TSC0048183
tttttggttggta

SEQ ID NO: 195868 - DNA, 13 bp, Artificial Sequence
  Oligonucleotide for detection of SNP TSC0048183
taccaaccaaaaa

SEQ ID NO: 195869 - DNA, 13 bp, Artificial Sequence
  Oligonucleotide for detection of SNP TSC0048184
ttagttggatata

SEQ ID NO: 195870 - DNA, 13 bp, Artificial Sequence
  Oligonucleotide for detection of SNP TSC0048184
tatatccaactaa

SEQ ID NO: 195871 - DNA, 13 bp, Artificial Sequence
  Oligonucleotide for detection of SNP TSC0048184
ttagttagatata

SEQ ID NO: 195872 - DNA, 13 bp, Artificial Sequence
  Oligonucleotide for detection of SNP TSC0048184
tatatctaactaa

SEQ ID NO: 195873 - DNA, 13 bp, Artificial Sequence
  Oligonucleotide for detection of SNP TSC0048186
taagagatagagg

SEQ ID NO: 195874 - DNA, 13 bp, Artificial Sequence
  Oligonucleotide for detection of SNP TSC0048186
cctctatctctta

SEQ ID NO: 195875 - DNA, 13 bp, Artificial Sequence
  Oligonucleotide for detection of SNP TSC0048186
taagaggtagagg

SEQ ID NO: 195876 - DNA, 13 bp, Artificial Sequence
  Oligonucleotide for detection of SNP TSC0048186
cctctacctctta

SEQ ID NO: 195877 - DNA, 13 bp, Artificial Sequence
  Oligonucleotide for detection of SNP TSC0048188
tattatatagtta

SEQ ID NO: 195878 - DNA, 13 bp, Artificial Sequence
  Oligonucleotide for detection of SNP TSC0048188
taactatataata

SEQ ID NO: 195879 - DNA, 13 bp, Artificial Sequence
  Oligonucleotide for detection of SNP TSC0048188
tattatgtagtta

SEQ ID NO: 195880 - DNA, 13 bp, Artificial Sequence
  Oligonucleotide for detection of SNP TSC0048188
taactacataata

SEQ ID NO: 195881 - DNA, 13 bp, Artificial Sequence
  Oligonucleotide for detection of SNP TSC0048190
agtatgtataatt

SEQ ID NO: 195882 - DNA, 13 bp, Artificial Sequence
  Oligonucleotide for detection of SNP TSC0048190
aattatacatact

SEQ ID NO: 195883 - DNA, 13 bp, Artificial Sequence
  Oligonucleotide for detection of SNP TSC0048190
agtatggataatt

SEQ ID NO: 195884 - DNA, 13 bp, Artificial Sequence
  Oligonucleotide for detection of SNP TSC0048190
aattatccatact

SEQ ID NO: 195885 - DNA, 13 bp, Artificial Sequence
  Oligonucleotide for detection of SNP TSC0048190
agttgtatatgtt

SEQ ID NO: 195886 - DNA, 13 bp, Artificial Sequence
  Oligonucleotide for detection of SNP TSC0048190
aacatatacaact

SEQ ID NO: 195887 - DNA, 13 bp, Artificial Sequence
  Oligonucleotide for detection of SNP TSC0048190
agttgtttatgtt

SEQ ID NO: 195888 - DNA, 13 bp, Artificial Sequence
  Oligonucleotide for detection of SNP TSC0048190
aacataaacaact

SEQ ID NO: 195889 - DNA, 13 bp, Artificial Sequence
  Oligonucleotide for detection of SNP TSC0048192
agttaatttattt

SEQ ID NO: 195890 - DNA, 13 bp, Artificial Sequence
  Oligonucleotide for detection of SNP TSC0048192
aaataaattaact

SEQ ID NO: 195891 - DNA, 13 bp, Artificial Sequence
  Oligonucleotide for detection of SNP TSC0048192
agttaagttattt

SEQ ID NO: 195892 - DNA, 13 bp, Artificial Sequence
  Oligonucleotide for detection of SNP TSC0048192
aaataacttaact

SEQ ID NO: 195893 - DNA, 13 bp, Artificial Sequence
  Oligonucleotide for detection of SNP TSC0048192
aaatgagttgatt

SEQ ID NO: 195894 - DNA, 13 bp, Artificial Sequence
  Oligonucleotide for detection of SNP TSC0048192
aatcaactcattt

SEQ ID NO: 195895 - DNA, 13 bp, Artificial Sequence
  Oligonucleotide for detection of SNP TSC0048192
aaatgatttgatt

SEQ ID NO: 195896 - DNA, 13 bp, Artificial Sequence
  Oligonucleotide for detection of SNP TSC0048192
aatcaaatcattt

SEQ ID NO: 195897 - DNA, 13 bp, Artificial Sequence
  Oligonucleotide for detection of SNP TSC0048193
atgagtatgagaa

SEQ ID NO: 195898 - DNA, 13 bp, Artificial Sequence
  Oligonucleotide for detection of SNP TSC0048193
ttctcatactcat

SEQ ID NO: 195899 - DNA, 13 bp, Artificial Sequence
  Oligonucleotide for detection of SNP TSC0048193
atgagtttgagaa

SEQ ID NO: 195900 - DNA, 13 bp, Artificial Sequence
  Oligonucleotide for detection of SNP TSC0048193
ttctcaaactcat

SEQ ID NO: 195901 - DNA, 13 bp, Artificial Sequence
  Oligonucleotide for detection of SNP TSC0048201
tttttggatagga

SEQ ID NO: 195902 - DNA, 13 bp, Artificial Sequence
  Oligonucleotide for detection of SNP TSC0048201
tcctatccaaaaa

SEQ ID NO: 195903 - DNA, 13 bp, Artificial Sequence
  Oligonucleotide for detection of SNP TSC0048201
tttttgaatagga

SEQ ID NO: 195904 - DNA, 13 bp, Artificial Sequence
  Oligonucleotide for detection of SNP TSC0048201
tcctattcaaaaa

SEQ ID NO: 195905 - DNA, 13 bp, Artificial Sequence
  Oligonucleotide for detection of SNP TSC0048203
atattaattagtt

SEQ ID NO: 195906 - DNA, 13 bp, Artificial Sequence
  Oligonucleotide for detection of SNP TSC0048203
aactaattaatat

SEQ ID NO: 195907 - DNA, 13 bp, Artificial Sequence
  Oligonucleotide for detection of SNP TSC0048203
atattatttagtt

SEQ ID NO: 195908 - DNA, 13 bp, Artificial Sequence
  Oligonucleotide for detection of SNP TSC0048203
aactaaataatat

SEQ ID NO: 195909 - DNA, 13 bp, Artificial Sequence
  Oligonucleotide for detection of SNP TSC0048203
aattgattagtat

SEQ ID NO: 195910 - DNA, 13 bp, Artificial Sequence
  Oligonucleotide for detection of SNP TSC0048203
atactaatcaatt

SEQ ID NO: 195911 - DNA, 13 bp, Artificial Sequence
  Oligonucleotide for detection of SNP TSC0048203
aattgaatagtat

SEQ ID NO: 195912 - DNA, 13 bp, Artificial Sequence
  Oligonucleotide for detection of SNP TSC0048203
atactattcaatt

SEQ ID NO: 195913 - DNA, 13 bp, Artificial Sequence
  Oligonucleotide for detection of SNP TSC0010364
agaaggaagtggy

SEQ ID NO: 195914 - DNA, 13 bp, Artificial Sequence
  Oligonucleotide for detection of SNP TSC0010364
rccacttccttct

SEQ ID NO: 195915 - DNA, 13 bp, Artificial Sequence
  Oligonucleotide for detection of SNP TSC0010364
agaaggtagtggy

SEQ ID NO: 195916 - DNA, 13 bp, Artificial Sequence
  Oligonucleotide for detection of SNP TSC0010364
rccactaccttct

SEQ ID NO: 195917 - DNA, 13 bp, Artificial Sequence
  Oligonucleotide for detection of SNP TSC0048205
gtggaggttttta

SEQ ID NO: 195918 - DNA, 13 bp, Artificial Sequence
  Oligonucleotide for detection of SNP TSC0048205
taaaaacctccac

SEQ ID NO: 195919 - DNA, 13 bp, Artificial Sequence
  Oligonucleotide for detection of SNP TSC0048205
gtggagattttta

SEQ ID NO: 195920 - DNA, 13 bp, Artificial Sequence
  Oligonucleotide for detection of SNP TSC0048205
taaaaatctccac

SEQ ID NO: 195921 - DNA, 13 bp, Artificial Sequence
  Oligonucleotide for detection of SNP TSC0005329
atgattgtaataa

SEQ ID NO: 195922 - DNA, 13 bp, Artificial Sequence
  Oligonucleotide for detection of SNP TSC0005329
ttattacaatcat

SEQ ID NO: 195923 - DNA, 13 bp, Artificial Sequence
  Oligonucleotide for detection of SNP TSC0005329
atgattataataa

SEQ ID NO: 195924 - DNA, 13 bp, Artificial Sequence
  Oligonucleotide for detection of SNP TSC0005329
ttattataatcat

SEQ ID NO: 195925 - DNA, 13 bp, Artificial Sequence
  Oligonucleotide for detection of SNP TSC0048207
gtttagattggag

SEQ ID NO: 195926 - DNA, 13 bp, Artificial Sequence
  Oligonucleotide for detection of SNP TSC0048207
ctccaatctaaac

SEQ ID NO: 195927 - DNA, 13 bp, Artificial Sequence
  Oligonucleotide for detection of SNP TSC0048207
gtttaggttggag

SEQ ID NO: 195928 - DNA, 13 bp, Artificial Sequence
  Oligonucleotide for detection of SNP TSC0048207
ctccaacctaaac

SEQ ID NO: 195929 - DNA, 13 bp, Artificial Sequence
  Oligonucleotide for detection of SNP TSC0048208
taaataatggatg

SEQ ID NO: 195930 - DNA, 13 bp, Artificial Sequence
  Oligonucleotide for detection of SNP TSC0048208
catccattattta

SEQ ID NO: 195931 - DNA, 13 bp, Artificial Sequence
  Oligonucleotide for detection of SNP TSC0048208
taaatagtggatg

SEQ ID NO: 195932 - DNA, 13 bp, Artificial Sequence
  Oligonucleotide for detection of SNP TSC0048208
catccactattta

SEQ ID NO: 195933 - DNA, 13 bp, Artificial Sequence
  Oligonucleotide for detection of SNP TSC0048209
tatgaaggaagat

SEQ ID NO: 195934 - DNA, 13 bp, Artificial Sequence
  Oligonucleotide for detection of SNP TSC0048209
atcttccttcata

SEQ ID NO: 195935 - DNA, 13 bp, Artificial Sequence
  Oligonucleotide for detection of SNP TSC0048209
tatgaaagaagat

SEQ ID NO: 195936 - DNA, 13 bp, Artificial Sequence
  Oligonucleotide for detection of SNP TSC0048209
atcttctttcata

SEQ ID NO: 195937 - DNA, 13 bp, Artificial Sequence
  Oligonucleotide for detection of SNP TSC0048209
tacgaaggaagat

SEQ ID NO: 195938 - DNA, 13 bp, Artificial Sequence
  Oligonucleotide for detection of SNP TSC0048209
atcttccttcgta

SEQ ID NO: 195939 - DNA, 13 bp, Artificial Sequence
  Oligonucleotide for detection of SNP TSC0048209
tacgaaagaagat

SEQ ID NO: 195940 - DNA, 13 bp, Artificial Sequence
  Oligonucleotide for detection of SNP TSC0048209
atcttctttcgta

SEQ ID NO: 195941 - DNA, 13 bp, Artificial Sequence
  Oligonucleotide for detection of SNP TSC0048210
ttttttatattgg

SEQ ID NO: 195942 - DNA, 13 bp, Artificial Sequence
  Oligonucleotide for detection of SNP TSC0048210
ccaatataaaaaa

SEQ ID NO: 195943 - DNA, 13 bp, Artificial Sequence
  Oligonucleotide for detection of SNP TSC0048210
tttttcgtattgg

SEQ ID NO: 195944 - DNA, 13 bp, Artificial Sequence
  Oligonucleotide for detection of SNP TSC0048210
ccaatacgaaaaa

SEQ ID NO: 195945 - DNA, 13 bp, Artificial Sequence
  Oligonucleotide for detection of SNP TSC0048210
ttaatatgaaaga

SEQ ID NO: 195946 - DNA, 13 bp, Artificial Sequence
  Oligonucleotide for detection of SNP TSC0048210
tctttcatattaa

SEQ ID NO: 195947 - DNA, 13 bp, Artificial Sequence
  Oligonucleotide for detection of SNP TSC0048210
ttaatacgaaaga

SEQ ID NO: 195948 - DNA, 13 bp, Artificial Sequence
  Oligonucleotide for detection of SNP TSC0048210
tctttcgtattaa

SEQ ID NO: 195949 - DNA, 13 bp, Artificial Sequence
  Oligonucleotide for detection of SNP TSC0048211
ttgtttttatatt

SEQ ID NO: 195950 - DNA, 13 bp, Artificial Sequence
  Oligonucleotide for detection of SNP TSC0048211
aatataaaaacaa

SEQ ID NO: 195951 - DNA, 13 bp, Artificial Sequence
  Oligonucleotide for detection of SNP TSC0048211
ttgtttgtatatt

SEQ ID NO: 195952 - DNA, 13 bp, Artificial Sequence
  Oligonucleotide for detection of SNP TSC0048211
aatatacaaacaa

SEQ ID NO: 195953 - DNA, 13 bp, Artificial Sequence
  Oligonucleotide for detection of SNP TSC0048211
ttgttcgtatatt

SEQ ID NO: 195954 - DNA, 13 bp, Artificial Sequence
  Oligonucleotide for detection of SNP TSC0048211
aatatacgaacaa

SEQ ID NO: 195955 - DNA, 13 bp, Artificial Sequence
  Oligonucleotide for detection of SNP TSC0048211
aatatggggataa

SEQ ID NO: 195956 - DNA, 13 bp, Artificial Sequence
  Oligonucleotide for detection of SNP TSC0048211
ttatccccatatt

SEQ ID NO: 195957 - DNA, 13 bp, Artificial Sequence
  Oligonucleotide for detection of SNP TSC0048211
aatatgtggataa

SEQ ID NO: 195958 - DNA, 13 bp, Artificial Sequence
  Oligonucleotide for detection of SNP TSC0048211
ttatccacatatt

SEQ ID NO: 195959 - DNA, 13 bp, Artificial Sequence
  Oligonucleotide for detection of SNP TSC0048211
aatatgcggataa

SEQ ID NO: 195960 - DNA, 13 bp, Artificial Sequence
  Oligonucleotide for detection of SNP TSC0048211
ttatccgcatatt

SEQ ID NO: 195961 - DNA, 13 bp, Artificial Sequence
  Oligonucleotide for detection of SNP TSC0010759
tgtggggttttga

SEQ ID NO: 195962 - DNA, 13 bp, Artificial Sequence
  Oligonucleotide for detection of SNP TSC0010759
tcaaaaccccaca

SEQ ID NO: 195963 - DNA, 13 bp, Artificial Sequence
  Oligonucleotide for detection of SNP TSC0010759
tgtgggattttga

SEQ ID NO: 195964 - DNA, 13 bp, Artificial Sequence
  Oligonucleotide for detection of SNP TSC0010759
tcaaaatcccaca

SEQ ID NO: 195965 - DNA, 13 bp, Artificial Sequence
  Oligonucleotide for detection of SNP TSC0005446
tatattgttaaga

SEQ ID NO: 195966 - DNA, 13 bp, Artificial Sequence
  Oligonucleotide for detection of SNP TSC0005446
tcttaacaatata

SEQ ID NO: 195967 - DNA, 13 bp, Artificial Sequence
  Oligonucleotide for detection of SNP TSC0005446
tatattattaaga

SEQ ID NO: 195968 - DNA, 13 bp, Artificial Sequence
  Oligonucleotide for detection of SNP TSC0005446
tcttaataatata

SEQ ID NO: 195969 - DNA, 13 bp, Artificial Sequence
  Oligonucleotide for detection of SNP TSC0005446
tatatcgttaaga

SEQ ID NO: 195970 - DNA, 13 bp, Artificial Sequence
  Oligonucleotide for detection of SNP TSC0005446
tcttaacgatata

SEQ ID NO: 195971 - DNA, 13 bp, Artificial Sequence
  Oligonucleotide for detection of SNP TSC0010493
taaattagtttta

SEQ ID NO: 195972 - DNA, 13 bp, Artificial Sequence
  Oligonucleotide for detection of SNP TSC0010493
taaaactaattta

SEQ ID NO: 195973 - DNA, 13 bp, Artificial Sequence
  Oligonucleotide for detection of SNP TSC0010493
taaattggtttta

SEQ ID NO: 195974 - DNA, 13 bp, Artificial Sequence
  Oligonucleotide for detection of SNP TSC0010493
taaaaccaattta

SEQ ID NO: 195975 - DNA, 13 bp, Artificial Sequence
  Oligonucleotide for detection of SNP TSC0010494
atttggatgatga

SEQ ID NO: 195976 - DNA, 13 bp, Artificial Sequence
  Oligonucleotide for detection of SNP TSC0010494
tcatcatccaaat

SEQ ID NO: 195977 - DNA, 13 bp, Artificial Sequence
  Oligonucleotide for detection of SNP TSC0010494
atttgggtgatga

SEQ ID NO: 195978 - DNA, 13 bp, Artificial Sequence
  Oligonucleotide for detection of SNP TSC0010494
tcatcacccaaat

SEQ ID NO: 195979 - DNA, 13 bp, Artificial Sequence
  Oligonucleotide for detection of SNP TSC0048212
ttgtttttggtaa

SEQ ID NO: 195980 - DNA, 13 bp, Artificial Sequence
  Oligonucleotide for detection of SNP TSC0048212
ttaccaaaaacaa

SEQ ID NO: 195981 - DNA, 13 bp, Artificial Sequence
  Oligonucleotide for detection of SNP TSC0048212
ttgtttgtggtaa

SEQ ID NO: 195982 - DNA, 13 bp, Artificial Sequence
  Oligonucleotide for detection of SNP TSC0048212
ttaccacaaacaa

SEQ ID NO: 195983 - DNA, 13 bp, Artificial Sequence
  Oligonucleotide for detection of SNP TSC0048212
ttgttagaaataa

SEQ ID NO: 195984 - DNA, 13 bp, Artificial Sequence
  Oligonucleotide for detection of SNP TSC0048212
ttatttctaacaa

SEQ ID NO: 195985 - DNA, 13 bp, Artificial Sequence
  Oligonucleotide for detection of SNP TSC0048212
ttgttataaataa

SEQ ID NO: 195986 - DNA, 13 bp, Artificial Sequence
  Oligonucleotide for detection of SNP TSC0048212
ttatttataacaa

SEQ ID NO: 195987 - DNA, 13 bp, Artificial Sequence
  Oligonucleotide for detection of SNP TSC0048213
tgaagatgagggg

SEQ ID NO: 195988 - DNA, 13 bp, Artificial Sequence
  Oligonucleotide for detection of SNP TSC0048213
cccctcatcttca

SEQ ID NO: 195989 - DNA, 13 bp, Artificial Sequence
  Oligonucleotide for detection of SNP TSC0048213
cgaagatgagggg

SEQ ID NO: 195990 - DNA, 13 bp, Artificial Sequence
  Oligonucleotide for detection of SNP TSC0048213
cccctcatcttcg

SEQ ID NO: 195991 - DNA, 13 bp, Artificial Sequence
  Oligonucleotide for detection of SNP TSC0048213
tgaagacgagggg

SEQ ID NO: 195992 - DNA, 13 bp, Artificial Sequence
  Oligonucleotide for detection of SNP TSC0048213
cccctcgtcttca

SEQ ID NO: 195993 - DNA, 13 bp, Artificial Sequence
  Oligonucleotide for detection of SNP TSC0048213
cgaagacgagggg

SEQ ID NO: 195994 - DNA, 13 bp, Artificial Sequence
  Oligonucleotide for detection of SNP TSC0048213
cccctcgtcttcg

SEQ ID NO: 195995 - DNA, 13 bp, Artificial Sequence
  Oligonucleotide for detection of SNP TSC0048214
gtattttgttgaa

SEQ ID NO: 195996 - DNA, 13 bp, Artificial Sequence
  Oligonucleotide for detection of SNP TSC0048214
ttcaacaaaatac

SEQ ID NO: 195997 - DNA, 13 bp, Artificial Sequence
  Oligonucleotide for detection of SNP TSC0048214
gtatttcgttgaa

SEQ ID NO: 195998 - DNA, 13 bp, Artificial Sequence
  Oligonucleotide for detection of SNP TSC0048214
ttcaacgaaatac

SEQ ID NO: 195999 - DNA, 13 bp, Artificial Sequence
  Oligonucleotide for detection of SNP TSC0048214
tttagtggaatgy

SEQ ID NO: 196000 - DNA, 13 bp, Artificial Sequence
  Oligonucleotide for detection of SNP TSC0048214
rcattccactaaa

SEQ ID NO: 196001 - DNA, 13 bp, Artificial Sequence
  Oligonucleotide for detection of SNP TSC0048214
tttagtagaatgy

SEQ ID NO: 196002 - DNA, 13 bp, Artificial Sequence
  Oligonucleotide for detection of SNP TSC0048214
rcattctactaaa

SEQ ID NO: 196003 - DNA, 13 bp, Artificial Sequence
  Oligonucleotide for detection of SNP TSC0048214
tttagcggaatgy

SEQ ID NO: 196004 - DNA, 13 bp, Artificial Sequence
  Oligonucleotide for detection of SNP TSC0048214
rcattccgctaaa

SEQ ID NO: 196005 - DNA, 13 bp, Artificial Sequence
  Oligonucleotide for detection of SNP TSC0048215
atttttgttttat

SEQ ID NO: 196006 - DNA, 13 bp, Artificial Sequence
  Oligonucleotide for detection of SNP TSC0048215
ataaaacaaaaat

SEQ ID NO: 196007 - DNA, 13 bp, Artificial Sequence
  Oligonucleotide for detection of SNP TSC0048219
aagagatgtttty

SEQ ID NO: 196008 - DNA, 13 bp, Artificial Sequence
  Oligonucleotide for detection of SNP TSC0048219
raaaacatctctt

SEQ ID NO: 196009 - DNA, 13 bp, Artificial Sequence
  Oligonucleotide for detection of SNP TSC0048219
aagagaggtttty

SEQ ID NO: 196010 - DNA, 13 bp, Artificial Sequence
  Oligonucleotide for detection of SNP TSC0048219
raaaacctctctt

SEQ ID NO: 196011 - DNA, 13 bp, Artificial Sequence
  Oligonucleotide for detection of SNP TSC0048219
gaaagtatttttt

SEQ ID NO: 196012 - DNA, 13 bp, Artificial Sequence
  Oligonucleotide for detection of SNP TSC0048219
aaaaaatactttc

SEQ ID NO: 196013 - DNA, 13 bp, Artificial Sequence
  Oligonucleotide for detection of SNP TSC0048219
gaaagtttttttt

SEQ ID NO: 196014 - DNA, 13 bp, Artificial Sequence
  Oligonucleotide for detection of SNP TSC0048219
aaaaaaaactttc

SEQ ID NO: 196015 - DNA, 13 bp, Artificial Sequence
  Oligonucleotide for detection of SNP TSC0048220
attttaaaattat

SEQ ID NO: 196016 - DNA, 13 bp, Artificial Sequence
  Oligonucleotide for detection of SNP TSC0048220
ataattttaaaat

SEQ ID NO: 196017 - DNA, 13 bp, Artificial Sequence
  Oligonucleotide for detection of SNP TSC0048220
atggttttaaaat

SEQ ID NO: 196018 - DNA, 13 bp, Artificial Sequence
  Oligonucleotide for detection of SNP TSC0048220
attttaaaaccat

SEQ ID NO: 196019 - DNA, 13 bp, Artificial Sequence
  Oligonucleotide for detection of SNP TSC0048220
atggttgtaaaat

SEQ ID NO: 196020 - DNA, 13 bp, Artificial Sequence
  Oligonucleotide for detection of SNP TSC0048220
attttacaaccat

SEQ ID NO: 196021 - DNA, 13 bp, Artificial Sequence
  Oligonucleotide for detection of SNP TSC0048226
taataaaaatgtt

SEQ ID NO: 196022 - DNA, 13 bp, Artificial Sequence
  Oligonucleotide for detection of SNP TSC0048226
aacatttttatta

SEQ ID NO: 196023 - DNA, 13 bp, Artificial Sequence
  Oligonucleotide for detection of SNP TSC0048226
taataataatgtt

SEQ ID NO: 196024 - DNA, 13 bp, Artificial Sequence
  Oligonucleotide for detection of SNP TSC0048226
aacattattatta

SEQ ID NO: 196025 - DNA, 13 bp, Artificial Sequence
  Oligonucleotide for detection of SNP TSC0048226
aatatttttattg

SEQ ID NO: 196026 - DNA, 13 bp, Artificial Sequence
  Oligonucleotide for detection of SNP TSC0048226
caataaaaatatt

SEQ ID NO: 196027 - DNA, 13 bp, Artificial Sequence
  Oligonucleotide for detection of SNP TSC0048226
aatattgttattg

SEQ ID NO: 196028 - DNA, 13 bp, Artificial Sequence
  Oligonucleotide for detection of SNP TSC0048226
caataacaatatt

SEQ ID NO: 196029 - DNA, 13 bp, Artificial Sequence
  Oligonucleotide for detection of SNP TSC0048227
tatattttatgay

SEQ ID NO: 196030 - DNA, 13 bp, Artificial Sequence
  Oligonucleotide for detection of SNP TSC0048227
rtcataaaatata

SEQ ID NO: 196031 - DNA, 13 bp, Artificial Sequence
  Oligonucleotide for detection of SNP TSC0048227
tatattgtatgay

SEQ ID NO: 196032 - DNA, 13 bp, Artificial Sequence
  Oligonucleotide for detection of SNP TSC0048227
rtcatacaatata

SEQ ID NO: 196033 - DNA, 13 bp, Artificial Sequence
  Oligonucleotide for detection of SNP TSC0048227
gttatggaatata

SEQ ID NO: 196034 - DNA, 13 bp, Artificial Sequence
  Oligonucleotide for detection of SNP TSC0048227
tatattccataac

SEQ ID NO: 196035 - DNA, 13 bp, Artificial Sequence
  Oligonucleotide for detection of SNP TSC0048227
gttatgtaatata

SEQ ID NO: 196036 - DNA, 13 bp, Artificial Sequence
  Oligonucleotide for detection of SNP TSC0048227
tatattacataac

SEQ ID NO: 196037 - DNA, 13 bp, Artificial Sequence
  Oligonucleotide for detection of SNP TSC0048228
ttttatgtgaata

SEQ ID NO: 196038 - DNA, 13 bp, Artificial Sequence
  Oligonucleotide for detection of SNP TSC0048228
tattcacataaaa

SEQ ID NO: 196039 - DNA, 13 bp, Artificial Sequence
  Oligonucleotide for detection of SNP TSC0048234
tttttgtgggtaa

SEQ ID NO: 196040 - DNA, 13 bp, Artificial Sequence
  Oligonucleotide for detection of SNP TSC0048234
ttacccacaaaaa

SEQ ID NO: 196041 - DNA, 13 bp, Artificial Sequence
  Oligonucleotide for detection of SNP TSC0048234
tttttgggggtaa

SEQ ID NO: 196042 - DNA, 13 bp, Artificial Sequence
  Oligonucleotide for detection of SNP TSC0048234
ttacccccaaaaa

SEQ ID NO: 196043 - DNA, 13 bp, Artificial Sequence
  Oligonucleotide for detection of SNP TSC0048234
ttgtttttagaaa

SEQ ID NO: 196044 - DNA, 13 bp, Artificial Sequence
  Oligonucleotide for detection of SNP TSC0048234
tttctaaaaacaa

SEQ ID NO: 196045 - DNA, 13 bp, Artificial Sequence
  Oligonucleotide for detection of SNP TSC0048244
tttggtgtttatt

SEQ ID NO: 196046 - DNA, 13 bp, Artificial Sequence
  Oligonucleotide for detection of SNP TSC0048244
aataaacaccaaa

SEQ ID NO: 196047 - DNA, 13 bp, Artificial Sequence
  Oligonucleotide for detection of SNP TSC0048244
tttggtatttatt

SEQ ID NO: 196048 - DNA, 13 bp, Artificial Sequence
  Oligonucleotide for detection of SNP TSC0048244
aataaataccaaa

SEQ ID NO: 196049 - DNA, 13 bp, Artificial Sequence
  Oligonucleotide for detection of SNP TSC0048250
tgtatattttgtt

SEQ ID NO: 196050 - DNA, 13 bp, Artificial Sequence
  Oligonucleotide for detection of SNP TSC0048250
aacaaaatataca

SEQ ID NO: 196051 - DNA, 13 bp, Artificial Sequence
  Oligonucleotide for detection of SNP TSC0048250
tgtatagtttgtt

SEQ ID NO: 196052 - DNA, 13 bp, Artificial Sequence
  Oligonucleotide for detection of SNP TSC0048250
aacaaactataca

SEQ ID NO: 196053 - DNA, 13 bp, Artificial Sequence
  Oligonucleotide for detection of SNP TSC0048250
agtaagatgtgta

SEQ ID NO: 196054 - DNA, 13 bp, Artificial Sequence
  Oligonucleotide for detection of SNP TSC0048250
tacacatcttact

SEQ ID NO: 196055 - DNA, 13 bp, Artificial Sequence
  Oligonucleotide for detection of SNP TSC0048250
agtaagttgtgta

SEQ ID NO: 196056 - DNA, 13 bp, Artificial Sequence
  Oligonucleotide for detection of SNP TSC0048250
tacacaacttact

SEQ ID NO: 196057 - DNA, 13 bp, Artificial Sequence
  Oligonucleotide for detection of SNP TSC0048252
taaaatatttttg

SEQ ID NO: 196058 - DNA, 13 bp, Artificial Sequence
  Oligonucleotide for detection of SNP TSC0048252
caaaaatatttta

SEQ ID NO: 196059 - DNA, 13 bp, Artificial Sequence
  Oligonucleotide for detection of SNP TSC0048252
taaaatgtttttg

SEQ ID NO: 196060 - DNA, 13 bp, Artificial Sequence
  Oligonucleotide for detection of SNP TSC0048252
caaaaacatttta

SEQ ID NO: 196061 - DNA, 13 bp, Artificial Sequence
  Oligonucleotide for detection of SNP TSC0048252
taaaacgtttttg

SEQ ID NO: 196062 - DNA, 13 bp, Artificial Sequence
  Oligonucleotide for detection of SNP TSC0048252
caaaaacgtttta

SEQ ID NO: 196063 - DNA, 13 bp, Artificial Sequence
  Oligonucleotide for detection of SNP TSC0048252
taaaagtgttttg

SEQ ID NO: 196064 - DNA, 13 bp, Artificial Sequence
  Oligonucleotide for detection of SNP TSC0048252
caaaacactttta

SEQ ID NO: 196065 - DNA, 13 bp, Artificial Sequence
  Oligonucleotide for detection of SNP TSC0048252
taaaagcgttttg

SEQ ID NO: 196066 - DNA, 13 bp, Artificial Sequence
  Oligonucleotide for detection of SNP TSC0048252
caaaacgctttta

SEQ ID NO: 196067 - DNA, 13 bp, Artificial Sequence
  Oligonucleotide for detection of SNP TSC0048255
tatataggtaagt

SEQ ID NO: 196068 - DNA, 13 bp, Artificial Sequence
  Oligonucleotide for detection of SNP TSC0048255
acttacctatata

SEQ ID NO: 196069 - DNA, 13 bp, Artificial Sequence
  Oligonucleotide for detection of SNP TSC0048256
tatgtttgtaagt

SEQ ID NO: 196070 - DNA, 13 bp, Artificial Sequence
  Oligonucleotide for detection of SNP TSC0048256
acttacaaacata

SEQ ID NO: 196071 - DNA, 13 bp, Artificial Sequence
  Oligonucleotide for detection of SNP TSC0048256
tatgttcgtaagt

SEQ ID NO: 196072 - DNA, 13 bp, Artificial Sequence
  Oligonucleotide for detection of SNP TSC0048256
acttacgaacata

SEQ ID NO: 196073 - DNA, 13 bp, Artificial Sequence
  Oligonucleotide for detection of SNP TSC0048256
atttatggatata

SEQ ID NO: 196074 - DNA, 13 bp, Artificial Sequence
  Oligonucleotide for detection of SNP TSC0048256
tatatccataaat

SEQ ID NO: 196075 - DNA, 13 bp, Artificial Sequence
  Oligonucleotide for detection of SNP TSC0048256
atttatagatata

SEQ ID NO: 196076 - DNA, 13 bp, Artificial Sequence
  Oligonucleotide for detection of SNP TSC0048256
tatatctataaat

SEQ ID NO: 196077 - DNA, 13 bp, Artificial Sequence
  Oligonucleotide for detection of SNP TSC0048256
atttacggatata

SEQ ID NO: 196078 - DNA, 13 bp, Artificial Sequence
  Oligonucleotide for detection of SNP TSC0048256
tatatccgtaaat

SEQ ID NO: 196079 - DNA, 13 bp, Artificial Sequence
  Oligonucleotide for detection of SNP TSC0048258
gtattaataattg

SEQ ID NO: 196080 - DNA, 13 bp, Artificial Sequence
  Oligonucleotide for detection of SNP TSC0048258
caattattaatac

SEQ ID NO: 196081 - DNA, 13 bp, Artificial Sequence
  Oligonucleotide for detection of SNP TSC0048258
gtattagtaattg

SEQ ID NO: 196082 - DNA, 13 bp, Artificial Sequence
  Oligonucleotide for detection of SNP TSC0048258
caattactaatac

SEQ ID NO: 196083 - DNA, 13 bp, Artificial Sequence
  Oligonucleotide for detection of SNP TSC0048258
gtattaataatcg

SEQ ID NO: 196084 - DNA, 13 bp, Artificial Sequence
  Oligonucleotide for detection of SNP TSC0048258
cgattattaatac

SEQ ID NO: 196085 - DNA, 13 bp, Artificial Sequence
  Oligonucleotide for detection of SNP TSC0048258
gtattagtaatcg

SEQ ID NO: 196086 - DNA, 13 bp, Artificial Sequence
  Oligonucleotide for detection of SNP TSC0048258
cgattactaatac

SEQ ID NO: 196087 - DNA, 13 bp, Artificial Sequence
  Oligonucleotide for detection of SNP TSC0048259
gagaaatgagtta

SEQ ID NO: 196088 - DNA, 13 bp, Artificial Sequence
  Oligonucleotide for detection of SNP TSC0048259
taactcatttctc

SEQ ID NO: 196089 - DNA, 13 bp, Artificial Sequence
  Oligonucleotide for detection of SNP TSC0048259
gagaaacgagtta

SEQ ID NO: 196090 - DNA, 13 bp, Artificial Sequence
  Oligonucleotide for detection of SNP TSC0048259
taactcgtttctc

SEQ ID NO: 196091 - DNA, 13 bp, Artificial Sequence
  Oligonucleotide for detection of SNP TSC0048261
gttaattttttgt

SEQ ID NO: 196092 - DNA, 13 bp, Artificial Sequence
  Oligonucleotide for detection of SNP TSC0048261
acaaaaaattaac

SEQ ID NO: 196093 - DNA, 13 bp, Artificial Sequence
  Oligonucleotide for detection of SNP TSC0048261
gttaatgttttgt

SEQ ID NO: 196094 - DNA, 13 bp, Artificial Sequence
  Oligonucleotide for detection of SNP TSC0048261
acaaaacattaac

SEQ ID NO: 196095 - DNA, 13 bp, Artificial Sequence
  Oligonucleotide for detection of SNP TSC0048261
ataaaaaattagy

SEQ ID NO: 196096 - DNA, 13 bp, Artificial Sequence
  Oligonucleotide for detection of SNP TSC0048261
rctaattttttat

SEQ ID NO: 196097 - DNA, 13 bp, Artificial Sequence
  Oligonucleotide for detection of SNP TSC0048261
ataaaatattagy

SEQ ID NO: 196098 - DNA, 13 bp, Artificial Sequence
  Oligonucleotide for detection of SNP TSC0048261
rctaatattttat

SEQ ID NO: 196099 - DNA, 13 bp, Artificial Sequence
  Oligonucleotide for detection of SNP TSC0048262
gagggatggatgy

SEQ ID NO: 196100 - DNA, 13 bp, Artificial Sequence
  Oligonucleotide for detection of SNP TSC0048262
rcatccatccctc

SEQ ID NO: 196101 - DNA, 13 bp, Artificial Sequence
  Oligonucleotide for detection of SNP TSC0048262
gagggacggatgy

SEQ ID NO: 196102 - DNA, 13 bp, Artificial Sequence
  Oligonucleotide for detection of SNP TSC0048262
rcatccgtccctc

SEQ ID NO: 196103 - DNA, 13 bp, Artificial Sequence
  Oligonucleotide for detection of SNP TSC0048263
ggtttttattttt

SEQ ID NO: 196104 - DNA, 13 bp, Artificial Sequence
  Oligonucleotide for detection of SNP TSC0048263
aaaaataaaaacc

SEQ ID NO: 196105 - DNA, 13 bp, Artificial Sequence
  Oligonucleotide for detection of SNP TSC0048263
agaagtgggagty

SEQ ID NO: 196106 - DNA, 13 bp, Artificial Sequence
  Oligonucleotide for detection of SNP TSC0048263
ractcccacttct

SEQ ID NO: 196107 - DNA, 13 bp, Artificial Sequence
  Oligonucleotide for detection of SNP TSC0048263
agaagttggagty

SEQ ID NO: 196108 - DNA, 13 bp, Artificial Sequence
  Oligonucleotide for detection of SNP TSC0048263
ractccaacttct

SEQ ID NO: 196109 - DNA, 13 bp, Artificial Sequence
  Oligonucleotide for detection of SNP TSC0048263
agaagtcggagty

SEQ ID NO: 196110 - DNA, 13 bp, Artificial Sequence
  Oligonucleotide for detection of SNP TSC0048263
ractccgacttct

SEQ ID NO: 196111 - DNA, 13 bp, Artificial Sequence
  Oligonucleotide for detection of SNP TSC0048264
ttgtagttttata

SEQ ID NO: 196112 - DNA, 13 bp, Artificial Sequence
  Oligonucleotide for detection of SNP TSC0048264
tataaaactacaa

SEQ ID NO: 196113 - DNA, 13 bp, Artificial Sequence
  Oligonucleotide for detection of SNP TSC0048264
ttgtagatttata

SEQ ID NO: 196114 - DNA, 13 bp, Artificial Sequence
  Oligonucleotide for detection of SNP TSC0048264
tataaatctacaa

SEQ ID NO: 196115 - DNA, 13 bp, Artificial Sequence
  Oligonucleotide for detection of SNP TSC0048266
ttgttttggttgy

SEQ ID NO: 196116 - DNA, 13 bp, Artificial Sequence
  Oligonucleotide for detection of SNP TSC0048266
rcaaccaaaacaa

SEQ ID NO: 196117 - DNA, 13 bp, Artificial Sequence
  Oligonucleotide for detection of SNP TSC0048266
ttgtttcggttgy

SEQ ID NO: 196118 - DNA, 13 bp, Artificial Sequence
  Oligonucleotide for detection of SNP TSC0048266
rcaaccgaaacaa

SEQ ID NO: 196119 - DNA, 13 bp, Artificial Sequence
  Oligonucleotide for detection of SNP TSC0048266
gtagttgaggtag

SEQ ID NO: 196120 - DNA, 13 bp, Artificial Sequence
  Oligonucleotide for detection of SNP TSC0048266
ctacctcaactac

SEQ ID NO: 196121 - DNA, 13 bp, Artificial Sequence
  Oligonucleotide for detection of SNP TSC0048266
gtagttaaggtag

SEQ ID NO: 196122 - DNA, 13 bp, Artificial Sequence
  Oligonucleotide for detection of SNP TSC0048266
ctaccttaactac

SEQ ID NO: 196123 - DNA, 13 bp, Artificial Sequence
  Oligonucleotide for detection of SNP TSC0048266
gtagtcgaggtag

SEQ ID NO: 196124 - DNA, 13 bp, Artificial Sequence
  Oligonucleotide for detection of SNP TSC0048266
ctacctcgactac

SEQ ID NO: 196125 - DNA, 13 bp, Artificial Sequence
  Oligonucleotide for detection of SNP TSC0007100
tttatagtggtat

SEQ ID NO: 196126 - DNA, 13 bp, Artificial Sequence
  Oligonucleotide for detection of SNP TSC0007100
ataccactataaa

SEQ ID NO: 196127 - DNA, 13 bp, Artificial Sequence
  Oligonucleotide for detection of SNP TSC0007100
tttataatggtat

SEQ ID NO: 196128 - DNA, 13 bp, Artificial Sequence
  Oligonucleotide for detection of SNP TSC0007100
ataccattataaa

SEQ ID NO: 196129 - DNA, 13 bp, Artificial Sequence
  Oligonucleotide for detection of SNP TSC0048267
ttatttattgaga

SEQ ID NO: 196130 - DNA, 13 bp, Artificial Sequence
  Oligonucleotide for detection of SNP TSC0048267
tctcaataaataa

SEQ ID NO: 196131 - DNA, 13 bp, Artificial Sequence
  Oligonucleotide for detection of SNP TSC0048267
ttatttgttgaga

SEQ ID NO: 196132 - DNA, 13 bp, Artificial Sequence
  Oligonucleotide for detection of SNP TSC0048267
tctcaacaaataa

SEQ ID NO: 196133 - DNA, 13 bp, Artificial Sequence
  Oligonucleotide for detection of SNP TSC0048268
ttttgggggtgty

SEQ ID NO: 196134 - DNA, 13 bp, Artificial Sequence
  Oligonucleotide for detection of SNP TSC0048268
racacccccaaaa

SEQ ID NO: 196135 - DNA, 13 bp, Artificial Sequence
  Oligonucleotide for detection of SNP TSC0048269
agtgagtttttaa

SEQ ID NO: 196136 - DNA, 13 bp, Artificial Sequence
  Oligonucleotide for detection of SNP TSC0048269
ttaaaaactcact

SEQ ID NO: 196137 - DNA, 13 bp, Artificial Sequence
  Oligonucleotide for detection of SNP TSC0048269
agtgaggttttaa

SEQ ID NO: 196138 - DNA, 13 bp, Artificial Sequence
  Oligonucleotide for detection of SNP TSC0048269
ttaaaacctcact

SEQ ID NO: 196139 - DNA, 13 bp, Artificial Sequence
  Oligonucleotide for detection of SNP TSC0048269
agcgagtttttaa

SEQ ID NO: 196140 - DNA, 13 bp, Artificial Sequence
  Oligonucleotide for detection of SNP TSC0048269
ttaaaaactcgct

SEQ ID NO: 196141 - DNA, 13 bp, Artificial Sequence
  Oligonucleotide for detection of SNP TSC0048269
agcgaggttttaa

SEQ ID NO: 196142 - DNA, 13 bp, Artificial Sequence
  Oligonucleotide for detection of SNP TSC0048269
ttaaaacctcgct

SEQ ID NO: 196143 - DNA, 13 bp, Artificial Sequence
  Oligonucleotide for detection of SNP TSC0048269
ttagaaatttgtt

SEQ ID NO: 196144 - DNA, 13 bp, Artificial Sequence
  Oligonucleotide for detection of SNP TSC0048269
aacaaatttctaa

SEQ ID NO: 196145 - DNA, 13 bp, Artificial Sequence
  Oligonucleotide for detection of SNP TSC0048269
ttagaattttgtt

SEQ ID NO: 196146 - DNA, 13 bp, Artificial Sequence
  Oligonucleotide for detection of SNP TSC0048269
aacaaaattctaa

SEQ ID NO: 196147 - DNA, 13 bp, Artificial Sequence
  Oligonucleotide for detection of SNP TSC0048269
ttagaaattcgtt

SEQ ID NO: 196148 - DNA, 13 bp, Artificial Sequence
  Oligonucleotide for detection of SNP TSC0048269
aacgaatttctaa

SEQ ID NO: 196149 - DNA, 13 bp, Artificial Sequence
  Oligonucleotide for detection of SNP TSC0048269
ttagaatttcgtt

SEQ ID NO: 196150 - DNA, 13 bp, Artificial Sequence
  Oligonucleotide for detection of SNP TSC0048269
aacgaaattctaa

SEQ ID NO: 196151 - DNA, 13 bp, Artificial Sequence
  Oligonucleotide for detection of SNP TSC0048270
tagtaagtatagg

SEQ ID NO: 196152 - DNA, 13 bp, Artificial Sequence
  Oligonucleotide for detection of SNP TSC0048270
cctatacttacta

SEQ ID NO: 196153 - DNA, 13 bp, Artificial Sequence
  Oligonucleotide for detection of SNP TSC0048270
tagtaaatatagg

SEQ ID NO: 196154 - DNA, 13 bp, Artificial Sequence
  Oligonucleotide for detection of SNP TSC0048270
cctatatttacta

SEQ ID NO: 196155 - DNA, 13 bp, Artificial Sequence
  Oligonucleotide for detection of SNP TSC0048275
tttgatattttgy

SEQ ID NO: 196156 - DNA, 13 bp, Artificial Sequence
  Oligonucleotide for detection of SNP TSC0048275
rcaaaatatcaaa

SEQ ID NO: 196157 - DNA, 13 bp, Artificial Sequence
  Oligonucleotide for detection of SNP TSC0048275
tttgatgttttgy

SEQ ID NO: 196158 - DNA, 13 bp, Artificial Sequence
  Oligonucleotide for detection of SNP TSC0048275
rcaaaacatcaaa

SEQ ID NO: 196159 - DNA, 13 bp, Artificial Sequence
  Oligonucleotide for detection of SNP TSC0048275
tttgacgttttgy

SEQ ID NO: 196160 - DNA, 13 bp, Artificial Sequence
  Oligonucleotide for detection of SNP TSC0048275
rcaaaacgtcaaa

SEQ ID NO: 196161 - DNA, 13 bp, Artificial Sequence
  Oligonucleotide for detection of SNP TSC0048275
gtagggtgttagg

SEQ ID NO: 196162 - DNA, 13 bp, Artificial Sequence
  Oligonucleotide for detection of SNP TSC0048275
cctaacaccctac

SEQ ID NO: 196163 - DNA, 13 bp, Artificial Sequence
  Oligonucleotide for detection of SNP TSC0048275
gtagggcgttagg

SEQ ID NO: 196164 - DNA, 13 bp, Artificial Sequence
  Oligonucleotide for detection of SNP TSC0048275
cctaacgccctac

SEQ ID NO: 196165 - DNA, 13 bp, Artificial Sequence
  Oligonucleotide for detection of SNP TSC0048279
gtaaaagttagtt

SEQ ID NO: 196166 - DNA, 13 bp, Artificial Sequence
  Oligonucleotide for detection of SNP TSC0048279
aactaacttttac

SEQ ID NO: 196167 - DNA, 13 bp, Artificial Sequence
  Oligonucleotide for detection of SNP TSC0048279
gtaaaaattagtt

SEQ ID NO: 196168 - DNA, 13 bp, Artificial Sequence
  Oligonucleotide for detection of SNP TSC0048279
aactaatttttac

SEQ ID NO: 196169 - DNA, 13 bp, Artificial Sequence
  Oligonucleotide for detection of SNP TSC0048280
ttgttgagattgt

SEQ ID NO: 196170 - DNA, 13 bp, Artificial Sequence
  Oligonucleotide for detection of SNP TSC0048280
acaatctcaacaa

SEQ ID NO: 196171 - DNA, 13 bp, Artificial Sequence
  Oligonucleotide for detection of SNP TSC0048280
ttgttgtgattgt

SEQ ID NO: 196172 - DNA, 13 bp, Artificial Sequence
  Oligonucleotide for detection of SNP TSC0048280
acaatcacaacaa

SEQ ID NO: 196173 - DNA, 13 bp, Artificial Sequence
  Oligonucleotide for detection of SNP TSC0048280
ttgtcgagattgt

SEQ ID NO: 196174 - DNA, 13 bp, Artificial Sequence
  Oligonucleotide for detection of SNP TSC0048280
acaatctcgacaa

SEQ ID NO: 196175 - DNA, 13 bp, Artificial Sequence
  Oligonucleotide for detection of SNP TSC0048280
ttgtcgtgattgt

SEQ ID NO: 196176 - DNA, 13 bp, Artificial Sequence
  Oligonucleotide for detection of SNP TSC0048280
acaatcacgacaa

SEQ ID NO: 196177 - DNA, 13 bp, Artificial Sequence
  Oligonucleotide for detection of SNP TSC0048280
ataattttggtag

SEQ ID NO: 196178 - DNA, 13 bp, Artificial Sequence
  Oligonucleotide for detection of SNP TSC0048280
ctaccaaaattat

SEQ ID NO: 196179 - DNA, 13 bp, Artificial Sequence
  Oligonucleotide for detection of SNP TSC0048280
ataattatggtag

SEQ ID NO: 196180 - DNA, 13 bp, Artificial Sequence
  Oligonucleotide for detection of SNP TSC0048280
ctaccataattat

SEQ ID NO: 196181 - DNA, 13 bp, Artificial Sequence
  Oligonucleotide for detection of SNP TSC0048280
ataatttcggtag

SEQ ID NO: 196182 - DNA, 13 bp, Artificial Sequence
  Oligonucleotide for detection of SNP TSC0048280
ctaccgaaattat

SEQ ID NO: 196183 - DNA, 13 bp, Artificial Sequence
  Oligonucleotide for detection of SNP TSC0048280
ataattacggtag

SEQ ID NO: 196184 - DNA, 13 bp, Artificial Sequence
  Oligonucleotide for detection of SNP TSC0048280
ctaccgtaattat

SEQ ID NO: 196185 - DNA, 13 bp, Artificial Sequence
  Oligonucleotide for detection of SNP TSC0048281
agtgtagaattgy

SEQ ID NO: 196186 - DNA, 13 bp, Artificial Sequence
  Oligonucleotide for detection of SNP TSC0048281
rcaattctacact

SEQ ID NO: 196187 - DNA, 13 bp, Artificial Sequence
  Oligonucleotide for detection of SNP TSC0048281
agtgtaaaattgy

SEQ ID NO: 196188 - DNA, 13 bp, Artificial Sequence
  Oligonucleotide for detection of SNP TSC0048281
rcaattttacact

SEQ ID NO: 196189 - DNA, 13 bp, Artificial Sequence
  Oligonucleotide for detection of SNP TSC0048282
ttaaaaataatty

SEQ ID NO: 196190 - DNA, 13 bp, Artificial Sequence
  Oligonucleotide for detection of SNP TSC0048282
raattatttttaa

SEQ ID NO: 196191 - DNA, 13 bp, Artificial Sequence
  Oligonucleotide for detection of SNP TSC0048282
ttaaaagtaatty

SEQ ID NO: 196192 - DNA, 13 bp, Artificial Sequence
  Oligonucleotide for detection of SNP TSC0048282
raattacttttaa

SEQ ID NO: 196193 - DNA, 13 bp, Artificial Sequence
  Oligonucleotide for detection of SNP TSC0048285
tatatgtggaggt

SEQ ID NO: 196194 - DNA, 13 bp, Artificial Sequence
  Oligonucleotide for detection of SNP TSC0048285
acctccacatata

SEQ ID NO: 196195 - DNA, 13 bp, Artificial Sequence
  Oligonucleotide for detection of SNP TSC0048285
tatatgcggaggt

SEQ ID NO: 196196 - DNA, 13 bp, Artificial Sequence
  Oligonucleotide for detection of SNP TSC0048285
acctccgcatata

SEQ ID NO: 196197 - DNA, 13 bp, Artificial Sequence
  Oligonucleotide for detection of SNP TSC0048285
atttttgtatgtg

SEQ ID NO: 196198 - DNA, 13 bp, Artificial Sequence
  Oligonucleotide for detection of SNP TSC0048285
cacatacaaaaat

SEQ ID NO: 196199 - DNA, 13 bp, Artificial Sequence
  Oligonucleotide for detection of SNP TSC0048285
atttttatatgtg

SEQ ID NO: 196200 - DNA, 13 bp, Artificial Sequence
  Oligonucleotide for detection of SNP TSC0048285
cacatataaaaat

SEQ ID NO: 196201 - DNA, 13 bp, Artificial Sequence
  Oligonucleotide for detection of SNP TSC0048285
attttcgtatgtg

SEQ ID NO: 196202 - DNA, 13 bp, Artificial Sequence
  Oligonucleotide for detection of SNP TSC0048285
cacatacgaaaat

SEQ ID NO: 196203 - DNA, 13 bp, Artificial Sequence
  Oligonucleotide for detection of SNP TSC0048287
ataaaaagtataa

SEQ ID NO: 196204 - DNA, 13 bp, Artificial Sequence
  Oligonucleotide for detection of SNP TSC0048287
ttatactttttat

SEQ ID NO: 196205 - DNA, 13 bp, Artificial Sequence
  Oligonucleotide for detection of SNP TSC0048287
ataaaatgtataa

SEQ ID NO: 196206 - DNA, 13 bp, Artificial Sequence
  Oligonucleotide for detection of SNP TSC0048287
ttatacattttat

SEQ ID NO: 196207 - DNA, 13 bp, Artificial Sequence
  Oligonucleotide for detection of SNP TSC0048288
tagtttattaatt

SEQ ID NO: 196208 - DNA, 13 bp, Artificial Sequence
  Oligonucleotide for detection of SNP TSC0048288
aattaataaacta

SEQ ID NO: 196209 - DNA, 13 bp, Artificial Sequence
  Oligonucleotide for detection of SNP TSC0048288
tagttttttaatt

SEQ ID NO: 196210 - DNA, 13 bp, Artificial Sequence
  Oligonucleotide for detection of SNP TSC0048288
aattaaaaaacta

SEQ ID NO: 196211 - DNA, 13 bp, Artificial Sequence
  Oligonucleotide for detection of SNP TSC0048288
tagtttgttaatt

SEQ ID NO: 196212 - DNA, 13 bp, Artificial Sequence
  Oligonucleotide for detection of SNP TSC0048288
aattaacaaacta

SEQ ID NO: 196213 - DNA, 13 bp, Artificial Sequence
  Oligonucleotide for detection of SNP TSC0048288
agttagtaaatta

SEQ ID NO: 196214 - DNA, 13 bp, Artificial Sequence
  Oligonucleotide for detection of SNP TSC0048288
taatttactaact

SEQ ID NO: 196215 - DNA, 13 bp, Artificial Sequence
  Oligonucleotide for detection of SNP TSC0048288
agttagaaaatta

SEQ ID NO: 196216 - DNA, 13 bp, Artificial Sequence
  Oligonucleotide for detection of SNP TSC0048288
taattttctaact

SEQ ID NO: 196217 - DNA, 13 bp, Artificial Sequence
  Oligonucleotide for detection of SNP TSC0048289
tagtggaaaatay

SEQ ID NO: 196218 - DNA, 13 bp, Artificial Sequence
  Oligonucleotide for detection of SNP TSC0048289
rtattttccacta

SEQ ID NO: 196219 - DNA, 13 bp, Artificial Sequence
  Oligonucleotide for detection of SNP TSC0048289
tagtggtaaatay

SEQ ID NO: 196220 - DNA, 13 bp, Artificial Sequence
  Oligonucleotide for detection of SNP TSC0048289
rtatttaccacta

SEQ ID NO: 196221 - DNA, 13 bp, Artificial Sequence
  Oligonucleotide for detection of SNP TSC0048289
gtgttttttattg

SEQ ID NO: 196222 - DNA, 13 bp, Artificial Sequence
  Oligonucleotide for detection of SNP TSC0048289
caataaaaaacac

SEQ ID NO: 196223 - DNA, 13 bp, Artificial Sequence
  Oligonucleotide for detection of SNP TSC0048290
gagtagatagatg

SEQ ID NO: 196224 - DNA, 13 bp, Artificial Sequence
  Oligonucleotide for detection of SNP TSC0048290
catctatctactc

SEQ ID NO: 196225 - DNA, 13 bp, Artificial Sequence
  Oligonucleotide for detection of SNP TSC0048290
gagtaggtagatg

SEQ ID NO: 196226 - DNA, 13 bp, Artificial Sequence
  Oligonucleotide for detection of SNP TSC0048290
catctacctactc

SEQ ID NO: 196227 - DNA, 13 bp, Artificial Sequence
  Oligonucleotide for detection of SNP TSC0048291
ttgtaggttttay

SEQ ID NO: 196228 - DNA, 13 bp, Artificial Sequence
  Oligonucleotide for detection of SNP TSC0048291
rtaaaacctacaa

SEQ ID NO: 196229 - DNA, 13 bp, Artificial Sequence
  Oligonucleotide for detection of SNP TSC0048291
ttgtagattttay

SEQ ID NO: 196230 - DNA, 13 bp, Artificial Sequence
  Oligonucleotide for detection of SNP TSC0048291
rtaaaatctacaa

SEQ ID NO: 196231 - DNA, 13 bp, Artificial Sequence
  Oligonucleotide for detection of SNP TSC0048292
aaagttatgttty

SEQ ID NO: 196232 - DNA, 13 bp, Artificial Sequence
  Oligonucleotide for detection of SNP TSC0048292
raaacataacttt

SEQ ID NO: 196233 - DNA, 13 bp, Artificial Sequence
  Oligonucleotide for detection of SNP TSC0048292
aaagttgtgttty

SEQ ID NO: 196234 - DNA, 13 bp, Artificial Sequence
  Oligonucleotide for detection of SNP TSC0048292
raaacacaacttt

SEQ ID NO: 196235 - DNA, 13 bp, Artificial Sequence
  Oligonucleotide for detection of SNP TSC0048292
aaagtcgtgttty

SEQ ID NO: 196236 - DNA, 13 bp, Artificial Sequence
  Oligonucleotide for detection of SNP TSC0048292
raaacacgacttt

SEQ ID NO: 196237 - DNA, 13 bp, Artificial Sequence
  Oligonucleotide for detection of SNP TSC0048292
gaaatatggtttt

SEQ ID NO: 196238 - DNA, 13 bp, Artificial Sequence
  Oligonucleotide for detection of SNP TSC0048292
aaaaccatatttc

SEQ ID NO: 196239 - DNA, 13 bp, Artificial Sequence
  Oligonucleotide for detection of SNP TSC0048292
gaaatacggtttt

SEQ ID NO: 196240 - DNA, 13 bp, Artificial Sequence
  Oligonucleotide for detection of SNP TSC0048292
aaaaccgtatttc

SEQ ID NO: 196241 - DNA, 13 bp, Artificial Sequence
  Oligonucleotide for detection of SNP TSC0048294
ggtttttgataat

SEQ ID NO: 196242 - DNA, 13 bp, Artificial Sequence
  Oligonucleotide for detection of SNP TSC0048294
attatcaaaaacc

SEQ ID NO: 196243 - DNA, 13 bp, Artificial Sequence
  Oligonucleotide for detection of SNP TSC0048294
ggttttcgataat

SEQ ID NO: 196244 - DNA, 13 bp, Artificial Sequence
  Oligonucleotide for detection of SNP TSC0048294
attatcgaaaacc

SEQ ID NO: 196245 - DNA, 13 bp, Artificial Sequence
  Oligonucleotide for detection of SNP TSC0048294
attattgggaaty

SEQ ID NO: 196246 - DNA, 13 bp, Artificial Sequence
  Oligonucleotide for detection of SNP TSC0048294
rattcccaataat

SEQ ID NO: 196247 - DNA, 13 bp, Artificial Sequence
  Oligonucleotide for detection of SNP TSC0048294
attattaggaaty

SEQ ID NO: 196248 - DNA, 13 bp, Artificial Sequence
  Oligonucleotide for detection of SNP TSC0048294
rattcctaataat

SEQ ID NO: 196249 - DNA, 13 bp, Artificial Sequence
  Oligonucleotide for detection of SNP TSC0048294
attatcgggaaty

SEQ ID NO: 196250 - DNA, 13 bp, Artificial Sequence
  Oligonucleotide for detection of SNP TSC0048294
rattcccgataat

SEQ ID NO: 196251 - DNA, 13 bp, Artificial Sequence
  Oligonucleotide for detection of SNP TSC0004526
tagttagtggggg

SEQ ID NO: 196252 - DNA, 13 bp, Artificial Sequence
  Oligonucleotide for detection of SNP TSC0004526
cccccactaacta

SEQ ID NO: 196253 - DNA, 13 bp, Artificial Sequence
  Oligonucleotide for detection of SNP TSC0004526
tagttaatggggg

SEQ ID NO: 196254 - DNA, 13 bp, Artificial Sequence
  Oligonucleotide for detection of SNP TSC0004526
cccccattaacta

SEQ ID NO: 196255 - DNA, 13 bp, Artificial Sequence
  Oligonucleotide for detection of SNP TSC0048296
aggggggaaaaaa

SEQ ID NO: 196256 - DNA, 13 bp, Artificial Sequence
  Oligonucleotide for detection of SNP TSC0048296
ttttttcccccct

SEQ ID NO: 196257 - DNA, 13 bp, Artificial Sequence
  Oligonucleotide for detection of SNP TSC0048296
agggggaaaaaaa

SEQ ID NO: 196258 - DNA, 13 bp, Artificial Sequence
  Oligonucleotide for detection of SNP TSC0048296
tttttttccccct

SEQ ID NO: 196259 - DNA, 13 bp, Artificial Sequence
  Oligonucleotide for detection of SNP TSC0048297
gattttattttat

SEQ ID NO: 196260 - DNA, 13 bp, Artificial Sequence
  Oligonucleotide for detection of SNP TSC0048297
ataaaataaaatc

SEQ ID NO: 196261 - DNA, 13 bp, Artificial Sequence
  Oligonucleotide for detection of SNP TSC0048297
gatttttttttat

SEQ ID NO: 196262 - DNA, 13 bp, Artificial Sequence
  Oligonucleotide for detection of SNP TSC0048297
ataaaaaaaaatc

SEQ ID NO: 196263 - DNA, 13 bp, Artificial Sequence
  Oligonucleotide for detection of SNP TSC0048297
ataaagtgggaty

SEQ ID NO: 196264 - DNA, 13 bp, Artificial Sequence
  Oligonucleotide for detection of SNP TSC0048297
ratcccactttat

SEQ ID NO: 196265 - DNA, 13 bp, Artificial Sequence
  Oligonucleotide for detection of SNP TSC0048297
ataaagggggaty

SEQ ID NO: 196266 - DNA, 13 bp, Artificial Sequence
  Oligonucleotide for detection of SNP TSC0048297
ratccccctttat

SEQ ID NO: 196267 - DNA, 13 bp, Artificial Sequence
  Oligonucleotide for detection of SNP TSC0048297
ataaagagggaty

SEQ ID NO: 196268 - DNA, 13 bp, Artificial Sequence
  Oligonucleotide for detection of SNP TSC0048297
ratccctctttat

SEQ ID NO: 196269 - DNA, 13 bp, Artificial Sequence
  Oligonucleotide for detection of SNP TSC0048298
ttgtatatgaatt

SEQ ID NO: 196270 - DNA, 13 bp, Artificial Sequence
  Oligonucleotide for detection of SNP TSC0048298
aattcatatacaa

SEQ ID NO: 196271 - DNA, 13 bp, Artificial Sequence
  Oligonucleotide for detection of SNP TSC0048298
ttgtatgtgaatt

SEQ ID NO: 196272 - DNA, 13 bp, Artificial Sequence
  Oligonucleotide for detection of SNP TSC0048298
aattcacatacaa

SEQ ID NO: 196273 - DNA, 13 bp, Artificial Sequence
  Oligonucleotide for detection of SNP TSC0048310
ttttgataataat

SEQ ID NO: 196274 - DNA, 13 bp, Artificial Sequence
  Oligonucleotide for detection of SNP TSC0048310
attattatcaaaa

SEQ ID NO: 196275 - DNA, 13 bp, Artificial Sequence
  Oligonucleotide for detection of SNP TSC0048310
ttttgagaataat

SEQ ID NO: 196276 - DNA, 13 bp, Artificial Sequence
  Oligonucleotide for detection of SNP TSC0048310
attattctcaaaa

SEQ ID NO: 196277 - DNA, 13 bp, Artificial Sequence
  Oligonucleotide for detection of SNP TSC0048310
attattgttaaga

SEQ ID NO: 196278 - DNA, 13 bp, Artificial Sequence
  Oligonucleotide for detection of SNP TSC0048310
tcttaacaataat

SEQ ID NO: 196279 - DNA, 13 bp, Artificial Sequence
  Oligonucleotide for detection of SNP TSC0048310
attatttttaaga

SEQ ID NO: 196280 - DNA, 13 bp, Artificial Sequence
  Oligonucleotide for detection of SNP TSC0048310
tcttaaaaataat

SEQ ID NO: 196281 - DNA, 13 bp, Artificial Sequence
  Oligonucleotide for detection of SNP TSC0048314
ttgtatcgtttaa

SEQ ID NO: 196282 - DNA, 13 bp, Artificial Sequence
  Oligonucleotide for detection of SNP TSC0048314
ttaaacgatacaa

SEQ ID NO: 196283 - DNA, 13 bp, Artificial Sequence
  Oligonucleotide for detection of SNP TSC0048314
ttgaatggtgtaa

SEQ ID NO: 196284 - DNA, 13 bp, Artificial Sequence
  Oligonucleotide for detection of SNP TSC0048314
ttacaccattcaa

SEQ ID NO: 196285 - DNA, 13 bp, Artificial Sequence
  Oligonucleotide for detection of SNP TSC0048314
ttgaatagtgtaa

SEQ ID NO: 196286 - DNA, 13 bp, Artificial Sequence
  Oligonucleotide for detection of SNP TSC0048314
ttacactattcaa

SEQ ID NO: 196287 - DNA, 13 bp, Artificial Sequence
  Oligonucleotide for detection of SNP TSC0048314
ttgaacggtgtaa

SEQ ID NO: 196288 - DNA, 13 bp, Artificial Sequence
  Oligonucleotide for detection of SNP TSC0048314
ttacaccgttcaa

SEQ ID NO: 196289 - DNA, 13 bp, Artificial Sequence
  Oligonucleotide for detection of SNP TSC0048315
ggggaaatgggag

SEQ ID NO: 196290 - DNA, 13 bp, Artificial Sequence
  Oligonucleotide for detection of SNP TSC0048315
ctcccatttcccc

SEQ ID NO: 196291 - DNA, 13 bp, Artificial Sequence
  Oligonucleotide for detection of SNP TSC0048315
ggggaagtgggag

SEQ ID NO: 196292 - DNA, 13 bp, Artificial Sequence
  Oligonucleotide for detection of SNP TSC0048315
ctcccacttcccc

SEQ ID NO: 196293 - DNA, 13 bp, Artificial Sequence
  Oligonucleotide for detection of SNP TSC0048316
tagttatgtgtgg

SEQ ID NO: 196294 - DNA, 13 bp, Artificial Sequence
  Oligonucleotide for detection of SNP TSC0048316
ccacacataacta

SEQ ID NO: 196295 - DNA, 13 bp, Artificial Sequence
  Oligonucleotide for detection of SNP TSC0048317
aaaaaggaataat

SEQ ID NO: 196296 - DNA, 13 bp, Artificial Sequence
  Oligonucleotide for detection of SNP TSC0048317
attattccttttt

SEQ ID NO: 196297 - DNA, 13 bp, Artificial Sequence
  Oligonucleotide for detection of SNP TSC0048317
aaaaagaaataat

SEQ ID NO: 196298 - DNA, 13 bp, Artificial Sequence
  Oligonucleotide for detection of SNP TSC0048317
attatttcttttt

SEQ ID NO: 196299 - DNA, 13 bp, Artificial Sequence
  Oligonucleotide for detection of SNP TSC0048318
aatgtagagtaga

SEQ ID NO: 196300 - DNA, 13 bp, Artificial Sequence
  Oligonucleotide for detection of SNP TSC0048318
tctactctacatt

SEQ ID NO: 196301 - DNA, 13 bp, Artificial Sequence
  Oligonucleotide for detection of SNP TSC0048318
aatgtaaagtaga

SEQ ID NO: 196302 - DNA, 13 bp, Artificial Sequence
  Oligonucleotide for detection of SNP TSC0048318
tctactttacatt

SEQ ID NO: 196303 - DNA, 13 bp, Artificial Sequence
  Oligonucleotide for detection of SNP TSC0010241
gtatataagataa

SEQ ID NO: 196304 - DNA, 13 bp, Artificial Sequence
  Oligonucleotide for detection of SNP TSC0010241
ttatcttatatac

SEQ ID NO: 196305 - DNA, 13 bp, Artificial Sequence
  Oligonucleotide for detection of SNP TSC0010241
gtatatgagataa

SEQ ID NO: 196306 - DNA, 13 bp, Artificial Sequence
  Oligonucleotide for detection of SNP TSC0010241
ttatctcatatac

SEQ ID NO: 196307 - DNA, 13 bp, Artificial Sequence
  Oligonucleotide for detection of SNP TSC0010241
gtatacgagataa

SEQ ID NO: 196308 - DNA, 13 bp, Artificial Sequence
  Oligonucleotide for detection of SNP TSC0010241
ttatctcgtatac

SEQ ID NO: 196309 - DNA, 13 bp, Artificial Sequence
  Oligonucleotide for detection of SNP TSC0010241
ttgttttgtgtay

SEQ ID NO: 196310 - DNA, 13 bp, Artificial Sequence
  Oligonucleotide for detection of SNP TSC0010241
rtacacaaaacaa

SEQ ID NO: 196311 - DNA, 13 bp, Artificial Sequence
  Oligonucleotide for detection of SNP TSC0010241
ttgtttcgtgtay

SEQ ID NO: 196312 - DNA, 13 bp, Artificial Sequence
  Oligonucleotide for detection of SNP TSC0010241
rtacacgaaacaa

SEQ ID NO: 196313 - DNA, 13 bp, Artificial Sequence
  Oligonucleotide for detection of SNP TSC0005486
gtaaatatatgat

SEQ ID NO: 196314 - DNA, 13 bp, Artificial Sequence
  Oligonucleotide for detection of SNP TSC0005486
atcatatatttac

SEQ ID NO: 196315 - DNA, 13 bp, Artificial Sequence
  Oligonucleotide for detection of SNP TSC0005486
gtaaatgtatgat

SEQ ID NO: 196316 - DNA, 13 bp, Artificial Sequence
  Oligonucleotide for detection of SNP TSC0005486
atcatacatttac

SEQ ID NO: 196317 - DNA, 13 bp, Artificial Sequence
  Oligonucleotide for detection of SNP TSC0005487
gttttgtttatty

SEQ ID NO: 196318 - DNA, 13 bp, Artificial Sequence
  Oligonucleotide for detection of SNP TSC0005487
raataaacaaaac

SEQ ID NO: 196319 - DNA, 13 bp, Artificial Sequence
  Oligonucleotide for detection of SNP TSC0005487
gaatgagtaaaay

SEQ ID NO: 196320 - DNA, 13 bp, Artificial Sequence
  Oligonucleotide for detection of SNP TSC0005487
rttttactcattc

SEQ ID NO: 196321 - DNA, 13 bp, Artificial Sequence
  Oligonucleotide for detection of SNP TSC0005487
gaatgattaaaay

SEQ ID NO: 196322 - DNA, 13 bp, Artificial Sequence
  Oligonucleotide for detection of SNP TSC0005487
rttttaatcattc

SEQ ID NO: 196323 - DNA, 13 bp, Artificial Sequence
  Oligonucleotide for detection of SNP TSC0048321
aatagtaggataa

SEQ ID NO: 196324 - DNA, 13 bp, Artificial Sequence
  Oligonucleotide for detection of SNP TSC0048321
ttatcctactatt

SEQ ID NO: 196325 - DNA, 13 bp, Artificial Sequence
  Oligonucleotide for detection of SNP TSC0048321
aatagttggataa

SEQ ID NO: 196326 - DNA, 13 bp, Artificial Sequence
  Oligonucleotide for detection of SNP TSC0048321
ttatccaactatt

SEQ ID NO: 196327 - DNA, 13 bp, Artificial Sequence
  Oligonucleotide for detection of SNP TSC0048321
aatagtcggataa

SEQ ID NO: 196328 - DNA, 13 bp, Artificial Sequence
  Oligonucleotide for detection of SNP TSC0048321
ttatccgactatt

SEQ ID NO: 196329 - DNA, 13 bp, Artificial Sequence
  Oligonucleotide for detection of SNP TSC0048321
ttatttgattatt

SEQ ID NO: 196330 - DNA, 13 bp, Artificial Sequence
  Oligonucleotide for detection of SNP TSC0048321
aataatcaaataa

SEQ ID NO: 196331 - DNA, 13 bp, Artificial Sequence
  Oligonucleotide for detection of SNP TSC0048321
ttattcgattatt

SEQ ID NO: 196332 - DNA, 13 bp, Artificial Sequence
  Oligonucleotide for detection of SNP TSC0048321
aataatcgaataa

SEQ ID NO: 196333 - DNA, 13 bp, Artificial Sequence
  Oligonucleotide for detection of SNP TSC0048324
tggtggtggagga

SEQ ID NO: 196334 - DNA, 13 bp, Artificial Sequence
  Oligonucleotide for detection of SNP TSC0048324
tcctccaccacca

SEQ ID NO: 196335 - DNA, 13 bp, Artificial Sequence
  Oligonucleotide for detection of SNP TSC0048324
tggtgggggagga

SEQ ID NO: 196336 - DNA, 13 bp, Artificial Sequence
  Oligonucleotide for detection of SNP TSC0048324
tcctcccccacca

SEQ ID NO: 196337 - DNA, 13 bp, Artificial Sequence
  Oligonucleotide for detection of SNP TSC0048325
tggaaaattgagy

SEQ ID NO: 196338 - DNA, 13 bp, Artificial Sequence
  Oligonucleotide for detection of SNP TSC0048325
rctcaattttcca

SEQ ID NO: 196339 - DNA, 13 bp, Artificial Sequence
  Oligonucleotide for detection of SNP TSC0048325
tggaaagttgagy

SEQ ID NO: 196340 - DNA, 13 bp, Artificial Sequence
  Oligonucleotide for detection of SNP TSC0048325
rctcaactttcca

SEQ ID NO: 196341 - DNA, 13 bp, Artificial Sequence
  Oligonucleotide for detection of SNP TSC0048328
atttagtgggttg

SEQ ID NO: 196342 - DNA, 13 bp, Artificial Sequence
  Oligonucleotide for detection of SNP TSC0048328
caacccactaaat

SEQ ID NO: 196343 - DNA, 13 bp, Artificial Sequence
  Oligonucleotide for detection of SNP TSC0048328
atttagcgggttg

SEQ ID NO: 196344 - DNA, 13 bp, Artificial Sequence
  Oligonucleotide for detection of SNP TSC0048328
caacccgctaaat

SEQ ID NO: 196345 - DNA, 13 bp, Artificial Sequence
  Oligonucleotide for detection of SNP TSC0048328
tagtttgttgagt

SEQ ID NO: 196346 - DNA, 13 bp, Artificial Sequence
  Oligonucleotide for detection of SNP TSC0048328
actcaacaaacta

SEQ ID NO: 196347 - DNA, 13 bp, Artificial Sequence
  Oligonucleotide for detection of SNP TSC0048328
tagttcgttgagt

SEQ ID NO: 196348 - DNA, 13 bp, Artificial Sequence
  Oligonucleotide for detection of SNP TSC0048328
actcaacgaacta

SEQ ID NO: 196349 - DNA, 13 bp, Artificial Sequence
  Oligonucleotide for detection of SNP TSC0048329
aattttatgtaty

SEQ ID NO: 196350 - DNA, 13 bp, Artificial Sequence
  Oligonucleotide for detection of SNP TSC0048329
ratacataaaatt

SEQ ID NO: 196351 - DNA, 13 bp, Artificial Sequence
  Oligonucleotide for detection of SNP TSC0048329
aattttgtgtaty

SEQ ID NO: 196352 - DNA, 13 bp, Artificial Sequence
  Oligonucleotide for detection of SNP TSC0048329
ratacacaaaatt

SEQ ID NO: 196353 - DNA, 13 bp, Artificial Sequence
  Oligonucleotide for detection of SNP TSC0048329
aatttcgtgtaty

SEQ ID NO: 196354 - DNA, 13 bp, Artificial Sequence
  Oligonucleotide for detection of SNP TSC0048329
ratacacgaaatt

SEQ ID NO: 196355 - DNA, 13 bp, Artificial Sequence
  Oligonucleotide for detection of SNP TSC0048329
gatatatgaaatt

SEQ ID NO: 196356 - DNA, 13 bp, Artificial Sequence
  Oligonucleotide for detection of SNP TSC0048329
aatttcatatatc

SEQ ID NO: 196357 - DNA, 13 bp, Artificial Sequence
  Oligonucleotide for detection of SNP TSC0048329
gatatacgaaatt

SEQ ID NO: 196358 - DNA, 13 bp, Artificial Sequence
  Oligonucleotide for detection of SNP TSC0048329
aatttcgtatatc

SEQ ID NO: 196359 - DNA, 13 bp, Artificial Sequence
  Oligonucleotide for detection of SNP TSC0048330
gatttaatgattg

SEQ ID NO: 196360 - DNA, 13 bp, Artificial Sequence
  Oligonucleotide for detection of SNP TSC0048330
caatcattaaatc

SEQ ID NO: 196361 - DNA, 13 bp, Artificial Sequence
  Oligonucleotide for detection of SNP TSC0048330
gatttattgattg

SEQ ID NO: 196362 - DNA, 13 bp, Artificial Sequence
  Oligonucleotide for detection of SNP TSC0048330
caatcaataaatc

SEQ ID NO: 196363 - DNA, 13 bp, Artificial Sequence
  Oligonucleotide for detection of SNP TSC0048330
taattattgagty

SEQ ID NO: 196364 - DNA, 13 bp, Artificial Sequence
  Oligonucleotide for detection of SNP TSC0048330
ractcaataatta

SEQ ID NO: 196365 - DNA, 13 bp, Artificial Sequence
  Oligonucleotide for detection of SNP TSC0048330
taattaatgagty

SEQ ID NO: 196366 - DNA, 13 bp, Artificial Sequence
  Oligonucleotide for detection of SNP TSC0048330
ractcattaatta

SEQ ID NO: 196367 - DNA, 13 bp, Artificial Sequence
  Oligonucleotide for detection of SNP TSC0048331
gttttatggtgty

SEQ ID NO: 196368 - DNA, 13 bp, Artificial Sequence
  Oligonucleotide for detection of SNP TSC0048331
racaccataaaac

SEQ ID NO: 196369 - DNA, 13 bp, Artificial Sequence
  Oligonucleotide for detection of SNP TSC0048331
gttttacggtgty

SEQ ID NO: 196370 - DNA, 13 bp, Artificial Sequence
  Oligonucleotide for detection of SNP TSC0048331
racaccgtaaaac

SEQ ID NO: 196371 - DNA, 13 bp, Artificial Sequence
  Oligonucleotide for detection of SNP TSC0048331
ggtattgtgagay

SEQ ID NO: 196372 - DNA, 13 bp, Artificial Sequence
  Oligonucleotide for detection of SNP TSC0048331
rtctcacaatacc

SEQ ID NO: 196373 - DNA, 13 bp, Artificial Sequence
  Oligonucleotide for detection of SNP TSC0048331
ggtattatgagay

SEQ ID NO: 196374 - DNA, 13 bp, Artificial Sequence
  Oligonucleotide for detection of SNP TSC0048331
rtctcataatacc

SEQ ID NO: 196375 - DNA, 13 bp, Artificial Sequence
  Oligonucleotide for detection of SNP TSC0048331
ggtatcgtgagay

SEQ ID NO: 196376 - DNA, 13 bp, Artificial Sequence
  Oligonucleotide for detection of SNP TSC0048331
rtctcacgatacc

SEQ ID NO: 196377 - DNA, 13 bp, Artificial Sequence
  Oligonucleotide for detection of SNP TSC0048333
atttatgtataaa

SEQ ID NO: 196378 - DNA, 13 bp, Artificial Sequence
  Oligonucleotide for detection of SNP TSC0048333
tttatacataaat

SEQ ID NO: 196379 - DNA, 13 bp, Artificial Sequence
  Oligonucleotide for detection of SNP TSC0006704
tgattgattttty

SEQ ID NO: 196380 - DNA, 13 bp, Artificial Sequence
  Oligonucleotide for detection of SNP TSC0006704
raaaaatcaatca

SEQ ID NO: 196381 - DNA, 13 bp, Artificial Sequence
  Oligonucleotide for detection of SNP TSC0006704
tgattggttttty

SEQ ID NO: 196382 - DNA, 13 bp, Artificial Sequence
  Oligonucleotide for detection of SNP TSC0006704
raaaaaccaatca

SEQ ID NO: 196383 - DNA, 13 bp, Artificial Sequence
  Oligonucleotide for detection of SNP TSC0048336
tttatttttaaag

SEQ ID NO: 196384 - DNA, 13 bp, Artificial Sequence
  Oligonucleotide for detection of SNP TSC0048336
ctttaaaaataaa

SEQ ID NO: 196385 - DNA, 13 bp, Artificial Sequence
  Oligonucleotide for detection of SNP TSC0048336
tttattgttaaag

SEQ ID NO: 196386 - DNA, 13 bp, Artificial Sequence
  Oligonucleotide for detection of SNP TSC0048336
ctttaacaataaa

SEQ ID NO: 196387 - DNA, 13 bp, Artificial Sequence
  Oligonucleotide for detection of SNP TSC0048336
ttttagaaatggg

SEQ ID NO: 196388 - DNA, 13 bp, Artificial Sequence
  Oligonucleotide for detection of SNP TSC0048336
cccatttctaaaa

SEQ ID NO: 196389 - DNA, 13 bp, Artificial Sequence
  Oligonucleotide for detection of SNP TSC0048336
ttttagtaatggg

SEQ ID NO: 196390 - DNA, 13 bp, Artificial Sequence
  Oligonucleotide for detection of SNP TSC0048336
cccattactaaaa

SEQ ID NO: 196391 - DNA, 13 bp, Artificial Sequence
  Oligonucleotide for detection of SNP TSC0048338
aaagttagtatty

SEQ ID NO: 196392 - DNA, 13 bp, Artificial Sequence
  Oligonucleotide for detection of SNP TSC0048338
raatactaacttt

SEQ ID NO: 196393 - DNA, 13 bp, Artificial Sequence
  Oligonucleotide for detection of SNP TSC0048338
aaagttggtatty

SEQ ID NO: 196394 - DNA, 13 bp, Artificial Sequence
  Oligonucleotide for detection of SNP TSC0048338
raataccaacttt

SEQ ID NO: 196395 - DNA, 13 bp, Artificial Sequence
  Oligonucleotide for detection of SNP TSC0048339
gaatttattaaaa

SEQ ID NO: 196396 - DNA, 13 bp, Artificial Sequence
  Oligonucleotide for detection of SNP TSC0048339
ttttaataaattc

SEQ ID NO: 196397 - DNA, 13 bp, Artificial Sequence
  Oligonucleotide for detection of SNP TSC0048339
gaatttgttaaaa

SEQ ID NO: 196398 - DNA, 13 bp, Artificial Sequence
  Oligonucleotide for detection of SNP TSC0048339
ttttaacaaattc

SEQ ID NO: 196399 - DNA, 13 bp, Artificial Sequence
  Oligonucleotide for detection of SNP TSC0048339
gaattcgttaaaa

SEQ ID NO: 196400 - DNA, 13 bp, Artificial Sequence
  Oligonucleotide for detection of SNP TSC0048339
ttttaacgaattc

SEQ ID NO: 196401 - DNA, 13 bp, Artificial Sequence
  Oligonucleotide for detection of SNP TSC0048339
ttttgatgaatty

SEQ ID NO: 196402 - DNA, 13 bp, Artificial Sequence
  Oligonucleotide for detection of SNP TSC0048339
raattcatcaaaa

SEQ ID NO: 196403 - DNA, 13 bp, Artificial Sequence
  Oligonucleotide for detection of SNP TSC0048339
ttttgacgaatty

SEQ ID NO: 196404 - DNA, 13 bp, Artificial Sequence
  Oligonucleotide for detection of SNP TSC0048339
raattcgtcaaaa

SEQ ID NO: 196405 - DNA, 13 bp, Artificial Sequence
  Oligonucleotide for detection of SNP TSC0048341
taaagtattgtga

SEQ ID NO: 196406 - DNA, 13 bp, Artificial Sequence
  Oligonucleotide for detection of SNP TSC0048341
tcacaatacttta

SEQ ID NO: 196407 - DNA, 13 bp, Artificial Sequence
  Oligonucleotide for detection of SNP TSC0048341
taaagtgttgtga

SEQ ID NO: 196408 - DNA, 13 bp, Artificial Sequence
  Oligonucleotide for detection of SNP TSC0048341
tcacaacacttta

SEQ ID NO: 196409 - DNA, 13 bp, Artificial Sequence
  Oligonucleotide for detection of SNP TSC0048341
taaagtattgcga

SEQ ID NO: 196410 - DNA, 13 bp, Artificial Sequence
  Oligonucleotide for detection of SNP TSC0048341
tcgcaatacttta

SEQ ID NO: 196411 - DNA, 13 bp, Artificial Sequence
  Oligonucleotide for detection of SNP TSC0048341
taaagtgttgcga

SEQ ID NO: 196412 - DNA, 13 bp, Artificial Sequence
  Oligonucleotide for detection of SNP TSC0048341
tcgcaacacttta

SEQ ID NO: 196413 - DNA, 13 bp, Artificial Sequence
  Oligonucleotide for detection of SNP TSC0048346
tatatgagtgatt

SEQ ID NO: 196414 - DNA, 13 bp, Artificial Sequence
  Oligonucleotide for detection of SNP TSC0048346
aatcactcatata

SEQ ID NO: 196415 - DNA, 13 bp, Artificial Sequence
  Oligonucleotide for detection of SNP TSC0048346
tatatgggtgatt

SEQ ID NO: 196416 - DNA, 13 bp, Artificial Sequence
  Oligonucleotide for detection of SNP TSC0048346
aatcacccatata

SEQ ID NO: 196417 - DNA, 13 bp, Artificial Sequence
  Oligonucleotide for detection of SNP TSC0048347
gtaagggattaga

SEQ ID NO: 196418 - DNA, 13 bp, Artificial Sequence
  Oligonucleotide for detection of SNP TSC0048347
tctaatcccttac

SEQ ID NO: 196419 - DNA, 13 bp, Artificial Sequence
  Oligonucleotide for detection of SNP TSC0048347
gtaaggaattaga

SEQ ID NO: 196420 - DNA, 13 bp, Artificial Sequence
  Oligonucleotide for detection of SNP TSC0048347
tctaattccttac

SEQ ID NO: 196421 - DNA, 13 bp, Artificial Sequence
  Oligonucleotide for detection of SNP TSC0048348
tattagggtaaat

SEQ ID NO: 196422 - DNA, 13 bp, Artificial Sequence
  Oligonucleotide for detection of SNP TSC0048348
atttaccctaata

SEQ ID NO: 196423 - DNA, 13 bp, Artificial Sequence
  Oligonucleotide for detection of SNP TSC0048348
tattagagtaaat

SEQ ID NO: 196424 - DNA, 13 bp, Artificial Sequence
  Oligonucleotide for detection of SNP TSC0048348
atttactctaata

SEQ ID NO: 196425 - DNA, 13 bp, Artificial Sequence
  Oligonucleotide for detection of SNP TSC0048350
ttatatatagtgt

SEQ ID NO: 196426 - DNA, 13 bp, Artificial Sequence
  Oligonucleotide for detection of SNP TSC0048350
acactatatataa

SEQ ID NO: 196427 - DNA, 13 bp, Artificial Sequence
  Oligonucleotide for detection of SNP TSC0048350
ttatatgtagtgt

SEQ ID NO: 196428 - DNA, 13 bp, Artificial Sequence
  Oligonucleotide for detection of SNP TSC0048350
acactacatataa

SEQ ID NO: 196429 - DNA, 13 bp, Artificial Sequence
  Oligonucleotide for detection of SNP TSC0048350
ttatacgtagtgt

SEQ ID NO: 196430 - DNA, 13 bp, Artificial Sequence
  Oligonucleotide for detection of SNP TSC0048350
acactacgtataa

SEQ ID NO: 196431 - DNA, 13 bp, Artificial Sequence
  Oligonucleotide for detection of SNP TSC0048350
atattgtgtatga

SEQ ID NO: 196432 - DNA, 13 bp, Artificial Sequence
  Oligonucleotide for detection of SNP TSC0048350
tcatacacaatat

SEQ ID NO: 196433 - DNA, 13 bp, Artificial Sequence
  Oligonucleotide for detection of SNP TSC0048350
atattgcgtatga

SEQ ID NO: 196434 - DNA, 13 bp, Artificial Sequence
  Oligonucleotide for detection of SNP TSC0048350
tcatacgcaatat

SEQ ID NO: 196435 - DNA, 13 bp, Artificial Sequence
  Oligonucleotide for detection of SNP TSC0048351
aaagttgtattty

SEQ ID NO: 196436 - DNA, 13 bp, Artificial Sequence
  Oligonucleotide for detection of SNP TSC0048351
raaatacaacttt

SEQ ID NO: 196437 - DNA, 13 bp, Artificial Sequence
  Oligonucleotide for detection of SNP TSC0048351
aaagttatattty

SEQ ID NO: 196438 - DNA, 13 bp, Artificial Sequence
  Oligonucleotide for detection of SNP TSC0048351
raaatataacttt

SEQ ID NO: 196439 - DNA, 13 bp, Artificial Sequence
  Oligonucleotide for detection of SNP TSC0048351
aaagtcgtattty

SEQ ID NO: 196440 - DNA, 13 bp, Artificial Sequence
  Oligonucleotide for detection of SNP TSC0048351
raaatacgacttt

SEQ ID NO: 196441 - DNA, 13 bp, Artificial Sequence
  Oligonucleotide for detection of SNP TSC0048356
tttattattggag

SEQ ID NO: 196442 - DNA, 13 bp, Artificial Sequence
  Oligonucleotide for detection of SNP TSC0048356
ctccaataataaa

SEQ ID NO: 196443 - DNA, 13 bp, Artificial Sequence
  Oligonucleotide for detection of SNP TSC0048356
tttatttttggag

SEQ ID NO: 196444 - DNA, 13 bp, Artificial Sequence
  Oligonucleotide for detection of SNP TSC0048356
ctccaaaaataaa

SEQ ID NO: 196445 - DNA, 13 bp, Artificial Sequence
  Oligonucleotide for detection of SNP TSC0048356
ttttaataataag

SEQ ID NO: 196446 - DNA, 13 bp, Artificial Sequence
  Oligonucleotide for detection of SNP TSC0048356
cttattattaaaa

SEQ ID NO: 196447 - DNA, 13 bp, Artificial Sequence
  Oligonucleotide for detection of SNP TSC0048356
ttttaagaataag

SEQ ID NO: 196448 - DNA, 13 bp, Artificial Sequence
  Oligonucleotide for detection of SNP TSC0048356
cttattcttaaaa

SEQ ID NO: 196449 - DNA, 13 bp, Artificial Sequence
  Oligonucleotide for detection of SNP TSC0008584
ttatgtagtgttg

SEQ ID NO: 196450 - DNA, 13 bp, Artificial Sequence
  Oligonucleotide for detection of SNP TSC0008584
caacactacataa

SEQ ID NO: 196451 - DNA, 13 bp, Artificial Sequence
  Oligonucleotide for detection of SNP TSC0008584
ttatgtggtgttg

SEQ ID NO: 196452 - DNA, 13 bp, Artificial Sequence
  Oligonucleotide for detection of SNP TSC0008584
caacaccacataa

SEQ ID NO: 196453 - DNA, 13 bp, Artificial Sequence
  Oligonucleotide for detection of SNP TSC0008585
atgtggtgttgga

SEQ ID NO: 196454 - DNA, 13 bp, Artificial Sequence
  Oligonucleotide for detection of SNP TSC0008585
tccaacaccacat

SEQ ID NO: 196455 - DNA, 13 bp, Artificial Sequence
  Oligonucleotide for detection of SNP TSC0008585
atgtggggttgga

SEQ ID NO: 196456 - DNA, 13 bp, Artificial Sequence
  Oligonucleotide for detection of SNP TSC0008585
tccaaccccacat

SEQ ID NO: 196457 - DNA, 13 bp, Artificial Sequence
  Oligonucleotide for detection of SNP TSC0008585
atgtggcgttgga

SEQ ID NO: 196458 - DNA, 13 bp, Artificial Sequence
  Oligonucleotide for detection of SNP TSC0008585
tccaacgccacat

SEQ ID NO: 196459 - DNA, 13 bp, Artificial Sequence
  Oligonucleotide for detection of SNP TSC0008585
tttaatgttatat

SEQ ID NO: 196460 - DNA, 13 bp, Artificial Sequence
  Oligonucleotide for detection of SNP TSC0008585
atataacattaaa

SEQ ID NO: 196461 - DNA, 13 bp, Artificial Sequence
  Oligonucleotide for detection of SNP TSC0008585
tttaattttatat

SEQ ID NO: 196462 - DNA, 13 bp, Artificial Sequence
  Oligonucleotide for detection of SNP TSC0008585
atataaaattaaa

SEQ ID NO: 196463 - DNA, 13 bp, Artificial Sequence
  Oligonucleotide for detection of SNP TSC0008585
tttaacgttatat

SEQ ID NO: 196464 - DNA, 13 bp, Artificial Sequence
  Oligonucleotide for detection of SNP TSC0008585
atataacgttaaa

SEQ ID NO: 196465 - DNA, 13 bp, Artificial Sequence
  Oligonucleotide for detection of SNP TSC0008586
tagtttagggatt

SEQ ID NO: 196466 - DNA, 13 bp, Artificial Sequence
  Oligonucleotide for detection of SNP TSC0008586
aatccctaaacta

SEQ ID NO: 196467 - DNA, 13 bp, Artificial Sequence
  Oligonucleotide for detection of SNP TSC0008586
tagtttggggatt

SEQ ID NO: 196468 - DNA, 13 bp, Artificial Sequence
  Oligonucleotide for detection of SNP TSC0008586
aatccccaaacta

SEQ ID NO: 196469 - DNA, 13 bp, Artificial Sequence
  Oligonucleotide for detection of SNP TSC0048360
tagttagtgggag

SEQ ID NO: 196470 - DNA, 13 bp, Artificial Sequence
  Oligonucleotide for detection of SNP TSC0048360
ctcccactaacta

SEQ ID NO: 196471 - DNA, 13 bp, Artificial Sequence
  Oligonucleotide for detection of SNP TSC0048360
tagttaatgggag

SEQ ID NO: 196472 - DNA, 13 bp, Artificial Sequence
  Oligonucleotide for detection of SNP TSC0048360
ctcccattaacta

SEQ ID NO: 196473 - DNA, 13 bp, Artificial Sequence
  Oligonucleotide for detection of SNP TSC0004939
gaattttttttat

SEQ ID NO: 196474 - DNA, 13 bp, Artificial Sequence
  Oligonucleotide for detection of SNP TSC0004939
ataaaaaaaattc

SEQ ID NO: 196475 - DNA, 13 bp, Artificial Sequence
  Oligonucleotide for detection of SNP TSC0004939
gaatttgttttat

SEQ ID NO: 196476 - DNA, 13 bp, Artificial Sequence
  Oligonucleotide for detection of SNP TSC0004939
ataaaacaaattc

SEQ ID NO: 196477 - DNA, 13 bp, Artificial Sequence
  Oligonucleotide for detection of SNP TSC0004939
atggggaagatty

SEQ ID NO: 196478 - DNA, 13 bp, Artificial Sequence
  Oligonucleotide for detection of SNP TSC0004939
raatcttccccat

SEQ ID NO: 196479 - DNA, 13 bp, Artificial Sequence
  Oligonucleotide for detection of SNP TSC0004939
atggggtagatty

SEQ ID NO: 196480 - DNA, 13 bp, Artificial Sequence
  Oligonucleotide for detection of SNP TSC0004939
raatctaccccat

SEQ ID NO: 196481 - DNA, 13 bp, Artificial Sequence
  Oligonucleotide for detection of SNP TSC0048363
atatagatttttt

SEQ ID NO: 196482 - DNA, 13 bp, Artificial Sequence
  Oligonucleotide for detection of SNP TSC0048363
aaaaaatctatat

SEQ ID NO: 196483 - DNA, 13 bp, Artificial Sequence
  Oligonucleotide for detection of SNP TSC0048363
atatagttttttt

SEQ ID NO: 196484 - DNA, 13 bp, Artificial Sequence
  Oligonucleotide for detection of SNP TSC0048363
aaaaaaactatat

SEQ ID NO: 196485 - DNA, 13 bp, Artificial Sequence
  Oligonucleotide for detection of SNP TSC0048363
aagagatttatat

SEQ ID NO: 196486 - DNA, 13 bp, Artificial Sequence
  Oligonucleotide for detection of SNP TSC0048363
atataaatctctt

SEQ ID NO: 196487 - DNA, 13 bp, Artificial Sequence
  Oligonucleotide for detection of SNP TSC0048363
aagagaattatat

SEQ ID NO: 196488 - DNA, 13 bp, Artificial Sequence
  Oligonucleotide for detection of SNP TSC0048363
atataattctctt

SEQ ID NO: 196489 - DNA, 13 bp, Artificial Sequence
  Oligonucleotide for detection of SNP TSC0048364
ttaaggaaaatgt

SEQ ID NO: 196490 - DNA, 13 bp, Artificial Sequence
  Oligonucleotide for detection of SNP TSC0048364
acattttccttaa

SEQ ID NO: 196491 - DNA, 13 bp, Artificial Sequence
  Oligonucleotide for detection of SNP TSC0048364
ttaaggtaaatgt

SEQ ID NO: 196492 - DNA, 13 bp, Artificial Sequence
  Oligonucleotide for detection of SNP TSC0048364
acatttaccttaa

SEQ ID NO: 196493 - DNA, 13 bp, Artificial Sequence
  Oligonucleotide for detection of SNP TSC0048364
atattttttttaa

SEQ ID NO: 196494 - DNA, 13 bp, Artificial Sequence
  Oligonucleotide for detection of SNP TSC0048364
ttaaaaaaaatat

SEQ ID NO: 196495 - DNA, 13 bp, Artificial Sequence
  Oligonucleotide for detection of SNP TSC0048365
atatgtaggttga

SEQ ID NO: 196496 - DNA, 13 bp, Artificial Sequence
  Oligonucleotide for detection of SNP TSC0048365
tcaacctacatat

SEQ ID NO: 196497 - DNA, 13 bp, Artificial Sequence
  Oligonucleotide for detection of SNP TSC0048365
atatgttggttga

SEQ ID NO: 196498 - DNA, 13 bp, Artificial Sequence
  Oligonucleotide for detection of SNP TSC0048365
tcaaccaacatat

SEQ ID NO: 196499 - DNA, 13 bp, Artificial Sequence
  Oligonucleotide for detection of SNP TSC0048365
atatgtcggttga

SEQ ID NO: 196500 - DNA, 13 bp, Artificial Sequence
  Oligonucleotide for detection of SNP TSC0048365
tcaaccgacatat

SEQ ID NO: 196501 - DNA, 13 bp, Artificial Sequence
  Oligonucleotide for detection of SNP TSC0048365
ttagtttgtatat

SEQ ID NO: 196502 - DNA, 13 bp, Artificial Sequence
  Oligonucleotide for detection of SNP TSC0048365
atatacaaactaa

SEQ ID NO: 196503 - DNA, 13 bp, Artificial Sequence
  Oligonucleotide for detection of SNP TSC0048365
ttagttggtatat

SEQ ID NO: 196504 - DNA, 13 bp, Artificial Sequence
  Oligonucleotide for detection of SNP TSC0048365
atataccaactaa

SEQ ID NO: 196505 - DNA, 13 bp, Artificial Sequence
  Oligonucleotide for detection of SNP TSC0048365
ttagtcggtatat

SEQ ID NO: 196506 - DNA, 13 bp, Artificial Sequence
  Oligonucleotide for detection of SNP TSC0048365
atataccgactaa

SEQ ID NO: 196507 - DNA, 13 bp, Artificial Sequence
  Oligonucleotide for detection of SNP TSC0048366
gttttatgatgaa

SEQ ID NO: 196508 - DNA, 13 bp, Artificial Sequence
  Oligonucleotide for detection of SNP TSC0048366
ttcatcataaaac

SEQ ID NO: 196509 - DNA, 13 bp, Artificial Sequence
  Oligonucleotide for detection of SNP TSC0048366
gttttaggatgaa

SEQ ID NO: 196510 - DNA, 13 bp, Artificial Sequence
  Oligonucleotide for detection of SNP TSC0048366
ttcatcctaaaac

SEQ ID NO: 196511 - DNA, 13 bp, Artificial Sequence
  Oligonucleotide for detection of SNP TSC0048366
tttattataaggy

SEQ ID NO: 196512 - DNA, 13 bp, Artificial Sequence
  Oligonucleotide for detection of SNP TSC0048366
rccttataataaa

SEQ ID NO: 196513 - DNA, 13 bp, Artificial Sequence
  Oligonucleotide for detection of SNP TSC0048366
tttattttaaggy

SEQ ID NO: 196514 - DNA, 13 bp, Artificial Sequence
  Oligonucleotide for detection of SNP TSC0048366
rccttaaaataaa

SEQ ID NO: 196515 - DNA, 13 bp, Artificial Sequence
  Oligonucleotide for detection of SNP TSC0048367
tagggaatttttt

SEQ ID NO: 196516 - DNA, 13 bp, Artificial Sequence
  Oligonucleotide for detection of SNP TSC0048367
aaaaaattcccta

SEQ ID NO: 196517 - DNA, 13 bp, Artificial Sequence
  Oligonucleotide for detection of SNP TSC0048367
tagggattttttt

SEQ ID NO: 196518 - DNA, 13 bp, Artificial Sequence
  Oligonucleotide for detection of SNP TSC0048367
aaaaaaatcccta

SEQ ID NO: 196519 - DNA, 13 bp, Artificial Sequence
  Oligonucleotide for detection of SNP TSC0048367
aagaggttttttg

SEQ ID NO: 196520 - DNA, 13 bp, Artificial Sequence
  Oligonucleotide for detection of SNP TSC0048367
caaaaaacctctt

SEQ ID NO: 196521 - DNA, 13 bp, Artificial Sequence
  Oligonucleotide for detection of SNP TSC0048367
aagagggtttttg

SEQ ID NO: 196522 - DNA, 13 bp, Artificial Sequence
  Oligonucleotide for detection of SNP TSC0048367
caaaaaccctctt

SEQ ID NO: 196523 - DNA, 13 bp, Artificial Sequence
  Oligonucleotide for detection of SNP TSC0048367
aagaggatttttg

SEQ ID NO: 196524 - DNA, 13 bp, Artificial Sequence
  Oligonucleotide for detection of SNP TSC0048367
caaaaatcctctt

SEQ ID NO: 196525 - DNA, 13 bp, Artificial Sequence
  Oligonucleotide for detection of SNP TSC0048370
attgttatgaaag

SEQ ID NO: 196526 - DNA, 13 bp, Artificial Sequence
  Oligonucleotide for detection of SNP TSC0048370
ctttcataacaat

SEQ ID NO: 196527 - DNA, 13 bp, Artificial Sequence
  Oligonucleotide for detection of SNP TSC0048370
attgttgtgaaag

SEQ ID NO: 196528 - DNA, 13 bp, Artificial Sequence
  Oligonucleotide for detection of SNP TSC0048370
ctttcacaacaat

SEQ ID NO: 196529 - DNA, 13 bp, Artificial Sequence
  Oligonucleotide for detection of SNP TSC0048371
ttgttatggtatt

SEQ ID NO: 196530 - DNA, 13 bp, Artificial Sequence
  Oligonucleotide for detection of SNP TSC0048371
aataccataacaa

SEQ ID NO: 196531 - DNA, 13 bp, Artificial Sequence
  Oligonucleotide for detection of SNP TSC0048371
ttgttacggtatt

SEQ ID NO: 196532 - DNA, 13 bp, Artificial Sequence
  Oligonucleotide for detection of SNP TSC0048371
aataccgtaacaa

SEQ ID NO: 196533 - DNA, 13 bp, Artificial Sequence
  Oligonucleotide for detection of SNP TSC0048371
agtgttgtggtag

SEQ ID NO: 196534 - DNA, 13 bp, Artificial Sequence
  Oligonucleotide for detection of SNP TSC0048371
ctaccacaacact

SEQ ID NO: 196535 - DNA, 13 bp, Artificial Sequence
  Oligonucleotide for detection of SNP TSC0048371
agtgttatggtag

SEQ ID NO: 196536 - DNA, 13 bp, Artificial Sequence
  Oligonucleotide for detection of SNP TSC0048371
ctaccataacact

SEQ ID NO: 196537 - DNA, 13 bp, Artificial Sequence
  Oligonucleotide for detection of SNP TSC0048371
agtgtcgtggtag

SEQ ID NO: 196538 - DNA, 13 bp, Artificial Sequence
  Oligonucleotide for detection of SNP TSC0048371
ctaccacgacact

SEQ ID NO: 196539 - DNA, 13 bp, Artificial Sequence
  Oligonucleotide for detection of SNP TSC0048372
agttttgtttgty

SEQ ID NO: 196540 - DNA, 13 bp, Artificial Sequence
  Oligonucleotide for detection of SNP TSC0048372
racaaacaaaact

SEQ ID NO: 196541 - DNA, 13 bp, Artificial Sequence
  Oligonucleotide for detection of SNP TSC0048372
agttttatttgty

SEQ ID NO: 196542 - DNA, 13 bp, Artificial Sequence
  Oligonucleotide for detection of SNP TSC0048372
racaaataaaact

SEQ ID NO: 196543 - DNA, 13 bp, Artificial Sequence
  Oligonucleotide for detection of SNP TSC0048372
agttttgttcgty

SEQ ID NO: 196544 - DNA, 13 bp, Artificial Sequence
  Oligonucleotide for detection of SNP TSC0048372
racgaacaaaact

SEQ ID NO: 196545 - DNA, 13 bp, Artificial Sequence
  Oligonucleotide for detection of SNP TSC0048372
agttttattcgty

SEQ ID NO: 196546 - DNA, 13 bp, Artificial Sequence
  Oligonucleotide for detection of SNP TSC0048372
racgaataaaact

SEQ ID NO: 196547 - DNA, 13 bp, Artificial Sequence
  Oligonucleotide for detection of SNP TSC0048373
gtagtttagtttt

SEQ ID NO: 196548 - DNA, 13 bp, Artificial Sequence
  Oligonucleotide for detection of SNP TSC0048373
aaaactaaactac

SEQ ID NO: 196549 - DNA, 13 bp, Artificial Sequence
  Oligonucleotide for detection of SNP TSC0048373
gtagttgagtttt

SEQ ID NO: 196550 - DNA, 13 bp, Artificial Sequence
  Oligonucleotide for detection of SNP TSC0048373
aaaactcaactac

SEQ ID NO: 196551 - DNA, 13 bp, Artificial Sequence
  Oligonucleotide for detection of SNP TSC0048373
gtagtcgagtttt

SEQ ID NO: 196552 - DNA, 13 bp, Artificial Sequence
  Oligonucleotide for detection of SNP TSC0048373
aaaactcgactac

SEQ ID NO: 196553 - DNA, 13 bp, Artificial Sequence
  Oligonucleotide for detection of SNP TSC0048373
agggttgggttay

SEQ ID NO: 196554 - DNA, 13 bp, Artificial Sequence
  Oligonucleotide for detection of SNP TSC0048373
rtaacccaaccct

SEQ ID NO: 196555 - DNA, 13 bp, Artificial Sequence
  Oligonucleotide for detection of SNP TSC0048373
agggtttggttay

SEQ ID NO: 196556 - DNA, 13 bp, Artificial Sequence
  Oligonucleotide for detection of SNP TSC0048373
rtaaccaaaccct

SEQ ID NO: 196557 - DNA, 13 bp, Artificial Sequence
  Oligonucleotide for detection of SNP TSC0048373
agggttcggttay

SEQ ID NO: 196558 - DNA, 13 bp, Artificial Sequence
  Oligonucleotide for detection of SNP TSC0048373
rtaaccgaaccct

SEQ ID NO: 196559 - DNA, 13 bp, Artificial Sequence
  Oligonucleotide for detection of SNP TSC0048374
gttttttgtattg

SEQ ID NO: 196560 - DNA, 13 bp, Artificial Sequence
  Oligonucleotide for detection of SNP TSC0048374
caatacaaaaaac

SEQ ID NO: 196561 - DNA, 13 bp, Artificial Sequence
  Oligonucleotide for detection of SNP TSC0048374
gtttttcgtattg

SEQ ID NO: 196562 - DNA, 13 bp, Artificial Sequence
  Oligonucleotide for detection of SNP TSC0048374
caatacgaaaaac

SEQ ID NO: 196563 - DNA, 13 bp, Artificial Sequence
  Oligonucleotide for detection of SNP TSC0048374
tagtatggagggy

SEQ ID NO: 196564 - DNA, 13 bp, Artificial Sequence
  Oligonucleotide for detection of SNP TSC0048374
rccctccatacta

SEQ ID NO: 196565 - DNA, 13 bp, Artificial Sequence
  Oligonucleotide for detection of SNP TSC0048374
tagtatagagggy

SEQ ID NO: 196566 - DNA, 13 bp, Artificial Sequence
  Oligonucleotide for detection of SNP TSC0048374
rccctctatacta

SEQ ID NO: 196567 - DNA, 13 bp, Artificial Sequence
  Oligonucleotide for detection of SNP TSC0048374
tagtacggagggy

SEQ ID NO: 196568 - DNA, 13 bp, Artificial Sequence
  Oligonucleotide for detection of SNP TSC0048374
rccctccgtacta

SEQ ID NO: 196569 - DNA, 13 bp, Artificial Sequence
  Oligonucleotide for detection of SNP TSC0048378
atgtgatagttta

SEQ ID NO: 196570 - DNA, 13 bp, Artificial Sequence
  Oligonucleotide for detection of SNP TSC0048378
taaactatcacat

SEQ ID NO: 196571 - DNA, 13 bp, Artificial Sequence
  Oligonucleotide for detection of SNP TSC0048378
atgtgagagttta

SEQ ID NO: 196572 - DNA, 13 bp, Artificial Sequence
  Oligonucleotide for detection of SNP TSC0048378
taaactctcacat

SEQ ID NO: 196573 - DNA, 13 bp, Artificial Sequence
  Oligonucleotide for detection of SNP TSC0048378
tagattgttatat

SEQ ID NO: 196574 - DNA, 13 bp, Artificial Sequence
  Oligonucleotide for detection of SNP TSC0048378
atataacaatcta

SEQ ID NO: 196575 - DNA, 13 bp, Artificial Sequence
  Oligonucleotide for detection of SNP TSC0048378
tagatttttatat

SEQ ID NO: 196576 - DNA, 13 bp, Artificial Sequence
  Oligonucleotide for detection of SNP TSC0048378
atataaaaatcta

SEQ ID NO: 196577 - DNA, 13 bp, Artificial Sequence
  Oligonucleotide for detection of SNP TSC0048379
atatatgatataa

SEQ ID NO: 196578 - DNA, 13 bp, Artificial Sequence
  Oligonucleotide for detection of SNP TSC0048379
ttatatcatatat

SEQ ID NO: 196579 - DNA, 13 bp, Artificial Sequence
  Oligonucleotide for detection of SNP TSC0048380
gggtgagttttat

SEQ ID NO: 196580 - DNA, 13 bp, Artificial Sequence
  Oligonucleotide for detection of SNP TSC0048380
ataaaactcaccc

SEQ ID NO: 196581 - DNA, 13 bp, Artificial Sequence
  Oligonucleotide for detection of SNP TSC0048380
gggtgaattttat

SEQ ID NO: 196582 - DNA, 13 bp, Artificial Sequence
  Oligonucleotide for detection of SNP TSC0048380
ataaaattcaccc

SEQ ID NO: 196583 - DNA, 13 bp, Artificial Sequence
  Oligonucleotide for detection of SNP TSC0048380
gggcgagttttat

SEQ ID NO: 196584 - DNA, 13 bp, Artificial Sequence
  Oligonucleotide for detection of SNP TSC0048380
ataaaactcgccc

SEQ ID NO: 196585 - DNA, 13 bp, Artificial Sequence
  Oligonucleotide for detection of SNP TSC0048380
gggcgaattttat

SEQ ID NO: 196586 - DNA, 13 bp, Artificial Sequence
  Oligonucleotide for detection of SNP TSC0048380
ataaaattcgccc

SEQ ID NO: 196587 - DNA, 13 bp, Artificial Sequence
  Oligonucleotide for detection of SNP TSC0048381
tggggtagttttg

SEQ ID NO: 196588 - DNA, 13 bp, Artificial Sequence
  Oligonucleotide for detection of SNP TSC0048381
caaaactacccca

SEQ ID NO: 196589 - DNA, 13 bp, Artificial Sequence
  Oligonucleotide for detection of SNP TSC0048381
tggggtggttttg

SEQ ID NO: 196590 - DNA, 13 bp, Artificial Sequence
  Oligonucleotide for detection of SNP TSC0048381
caaaaccacccca

SEQ ID NO: 196591 - DNA, 13 bp, Artificial Sequence
  Oligonucleotide for detection of SNP TSC0048383
tatttaatgattt

SEQ ID NO: 196592 - DNA, 13 bp, Artificial Sequence
  Oligonucleotide for detection of SNP TSC0048383
aaatcattaaata

SEQ ID NO: 196593 - DNA, 13 bp, Artificial Sequence
  Oligonucleotide for detection of SNP TSC0048383
tatttagtgattt

SEQ ID NO: 196594 - DNA, 13 bp, Artificial Sequence
  Oligonucleotide for detection of SNP TSC0048383
aaatcactaaata

SEQ ID NO: 196595 - DNA, 13 bp, Artificial Sequence
  Oligonucleotide for detection of SNP TSC0007122
agattgtggtgta

SEQ ID NO: 196596 - DNA, 13 bp, Artificial Sequence
  Oligonucleotide for detection of SNP TSC0007122
tacaccacaatct

SEQ ID NO: 196597 - DNA, 13 bp, Artificial Sequence
  Oligonucleotide for detection of SNP TSC0007122
agattgcggtgta

SEQ ID NO: 196598 - DNA, 13 bp, Artificial Sequence
  Oligonucleotide for detection of SNP TSC0007122
tacaccgcaatct

SEQ ID NO: 196599 - DNA, 13 bp, Artificial Sequence
  Oligonucleotide for detection of SNP TSC0007122
tgtattatagttt

SEQ ID NO: 196600 - DNA, 13 bp, Artificial Sequence
  Oligonucleotide for detection of SNP TSC0007122
aaactataataca

SEQ ID NO: 196601 - DNA, 13 bp, Artificial Sequence
  Oligonucleotide for detection of SNP TSC0007122
tgtatcgtagttt

SEQ ID NO: 196602 - DNA, 13 bp, Artificial Sequence
  Oligonucleotide for detection of SNP TSC0007122
aaactacgataca

SEQ ID NO: 196603 - DNA, 13 bp, Artificial Sequence
  Oligonucleotide for detection of SNP TSC0048384
tttttatttgttt

SEQ ID NO: 196604 - DNA, 13 bp, Artificial Sequence
  Oligonucleotide for detection of SNP TSC0048384
aaacaaataaaaa

SEQ ID NO: 196605 - DNA, 13 bp, Artificial Sequence
  Oligonucleotide for detection of SNP TSC0048384
aaatagataggga

SEQ ID NO: 196606 - DNA, 13 bp, Artificial Sequence
  Oligonucleotide for detection of SNP TSC0048384
tccctatctattt

SEQ ID NO: 196607 - DNA, 13 bp, Artificial Sequence
  Oligonucleotide for detection of SNP TSC0048384
aaatagttaggga

SEQ ID NO: 196608 - DNA, 13 bp, Artificial Sequence
  Oligonucleotide for detection of SNP TSC0048384
tccctaactattt

SEQ ID NO: 196609 - DNA, 13 bp, Artificial Sequence
  Oligonucleotide for detection of SNP TSC0048385
aaaaaagaagatg

SEQ ID NO: 196610 - DNA, 13 bp, Artificial Sequence
  Oligonucleotide for detection of SNP TSC0048385
catcttctttttt

SEQ ID NO: 196611 - DNA, 13 bp, Artificial Sequence
  Oligonucleotide for detection of SNP TSC0048385
aaaaaaaaagatg

SEQ ID NO: 196612 - DNA, 13 bp, Artificial Sequence
  Oligonucleotide for detection of SNP TSC0048385
catcttttttttt

SEQ ID NO: 196613 - DNA, 13 bp, Artificial Sequence
  Oligonucleotide for detection of SNP TSC0048386
ggtttaagttttt

SEQ ID NO: 196614 - DNA, 13 bp, Artificial Sequence
  Oligonucleotide for detection of SNP TSC0048386
aaaaacttaaacc

SEQ ID NO: 196615 - DNA, 13 bp, Artificial Sequence
  Oligonucleotide for detection of SNP TSC0048386
ggtttaggttttt

SEQ ID NO: 196616 - DNA, 13 bp, Artificial Sequence
  Oligonucleotide for detection of SNP TSC0048386
aaaaacctaaacc

SEQ ID NO: 196617 - DNA, 13 bp, Artificial Sequence
  Oligonucleotide for detection of SNP TSC0048387
tagtttagatttt

SEQ ID NO: 196618 - DNA, 13 bp, Artificial Sequence
  Oligonucleotide for detection of SNP TSC0048387
aaaatctaaacta

SEQ ID NO: 196619 - DNA, 13 bp, Artificial Sequence
  Oligonucleotide for detection of SNP TSC0048387
tagttttgatttt

SEQ ID NO: 196620 - DNA, 13 bp, Artificial Sequence
  Oligonucleotide for detection of SNP TSC0048387
aaaatcaaaacta

SEQ ID NO: 196621 - DNA, 13 bp, Artificial Sequence
  Oligonucleotide for detection of SNP TSC0048387
agagtttagattg

SEQ ID NO: 196622 - DNA, 13 bp, Artificial Sequence
  Oligonucleotide for detection of SNP TSC0048387
caatctaaactct

SEQ ID NO: 196623 - DNA, 13 bp, Artificial Sequence
  Oligonucleotide for detection of SNP TSC0048387
agagttaagattg

SEQ ID NO: 196624 - DNA, 13 bp, Artificial Sequence
  Oligonucleotide for detection of SNP TSC0048387
caatcttaactct

SEQ ID NO: 196625 - DNA, 13 bp, Artificial Sequence
  Oligonucleotide for detection of SNP TSC0048388
gttgtttggattt

SEQ ID NO: 196626 - DNA, 13 bp, Artificial Sequence
  Oligonucleotide for detection of SNP TSC0048388
aaatccaaacaac

SEQ ID NO: 196627 - DNA, 13 bp, Artificial Sequence
  Oligonucleotide for detection of SNP TSC0048388
gttgttcggattt

SEQ ID NO: 196628 - DNA, 13 bp, Artificial Sequence
  Oligonucleotide for detection of SNP TSC0048388
aaatccgaacaac

SEQ ID NO: 196629 - DNA, 13 bp, Artificial Sequence
  Oligonucleotide for detection of SNP TSC0048388
agatttgaataay

SEQ ID NO: 196630 - DNA, 13 bp, Artificial Sequence
  Oligonucleotide for detection of SNP TSC0048388
rttattcaaatct

SEQ ID NO: 196631 - DNA, 13 bp, Artificial Sequence
  Oligonucleotide for detection of SNP TSC0048388
agatttaaataay

SEQ ID NO: 196632 - DNA, 13 bp, Artificial Sequence
  Oligonucleotide for detection of SNP TSC0048388
rttatttaaatct

SEQ ID NO: 196633 - DNA, 13 bp, Artificial Sequence
  Oligonucleotide for detection of SNP TSC0048388
agattcgaataay

SEQ ID NO: 196634 - DNA, 13 bp, Artificial Sequence
  Oligonucleotide for detection of SNP TSC0048388
rttattcgaatct

SEQ ID NO: 196635 - DNA, 13 bp, Artificial Sequence
  Oligonucleotide for detection of SNP TSC0048389
agtttaatttgtt

SEQ ID NO: 196636 - DNA, 13 bp, Artificial Sequence
  Oligonucleotide for detection of SNP TSC0048389
aacaaattaaact

SEQ ID NO: 196637 - DNA, 13 bp, Artificial Sequence
  Oligonucleotide for detection of SNP TSC0048389
agtttagtttgtt

SEQ ID NO: 196638 - DNA, 13 bp, Artificial Sequence
  Oligonucleotide for detection of SNP TSC0048389
aacaaactaaact

SEQ ID NO: 196639 - DNA, 13 bp, Artificial Sequence
  Oligonucleotide for detection of SNP TSC0048390
tttttaagattat

SEQ ID NO: 196640 - DNA, 13 bp, Artificial Sequence
  Oligonucleotide for detection of SNP TSC0048390
ataatcttaaaaa

SEQ ID NO: 196641 - DNA, 13 bp, Artificial Sequence
  Oligonucleotide for detection of SNP TSC0048393
attttgtataaga

SEQ ID NO: 196642 - DNA, 13 bp, Artificial Sequence
  Oligonucleotide for detection of SNP TSC0048393
tcttatacaaaat

SEQ ID NO: 196643 - DNA, 13 bp, Artificial Sequence
  Oligonucleotide for detection of SNP TSC0048393
attttggataaga

SEQ ID NO: 196644 - DNA, 13 bp, Artificial Sequence
  Oligonucleotide for detection of SNP TSC0048393
tcttatccaaaat

SEQ ID NO: 196645 - DNA, 13 bp, Artificial Sequence
  Oligonucleotide for detection of SNP TSC0048393
ttttgtataaagt

SEQ ID NO: 196646 - DNA, 13 bp, Artificial Sequence
  Oligonucleotide for detection of SNP TSC0048393
actttatacaaaa

SEQ ID NO: 196647 - DNA, 13 bp, Artificial Sequence
  Oligonucleotide for detection of SNP TSC0048393
ttttgtttaaagt

SEQ ID NO: 196648 - DNA, 13 bp, Artificial Sequence
  Oligonucleotide for detection of SNP TSC0048393
actttaaacaaaa

SEQ ID NO: 196649 - DNA, 13 bp, Artificial Sequence
  Oligonucleotide for detection of SNP TSC0048397
agtattagattta

SEQ ID NO: 196650 - DNA, 13 bp, Artificial Sequence
  Oligonucleotide for detection of SNP TSC0048397
taaatctaatact

SEQ ID NO: 196651 - DNA, 13 bp, Artificial Sequence
  Oligonucleotide for detection of SNP TSC0048397
agtattggattta

SEQ ID NO: 196652 - DNA, 13 bp, Artificial Sequence
  Oligonucleotide for detection of SNP TSC0048397
taaatccaatact

SEQ ID NO: 196653 - DNA, 13 bp, Artificial Sequence
  Oligonucleotide for detection of SNP TSC0048398
atattatagtagy

SEQ ID NO: 196654 - DNA, 13 bp, Artificial Sequence
  Oligonucleotide for detection of SNP TSC0048398
rctactataatat

SEQ ID NO: 196655 - DNA, 13 bp, Artificial Sequence
  Oligonucleotide for detection of SNP TSC0048398
atattagagtagy

SEQ ID NO: 196656 - DNA, 13 bp, Artificial Sequence
  Oligonucleotide for detection of SNP TSC0048398
rctactctaatat

SEQ ID NO: 196657 - DNA, 13 bp, Artificial Sequence
  Oligonucleotide for detection of SNP TSC0048398
gttgttgtgatgt

SEQ ID NO: 196658 - DNA, 13 bp, Artificial Sequence
  Oligonucleotide for detection of SNP TSC0048398
acatcacaacaac

SEQ ID NO: 196659 - DNA, 13 bp, Artificial Sequence
  Oligonucleotide for detection of SNP TSC0048398
gttgttttgatgt

SEQ ID NO: 196660 - DNA, 13 bp, Artificial Sequence
  Oligonucleotide for detection of SNP TSC0048398
acatcaaaacaac

SEQ ID NO: 196661 - DNA, 13 bp, Artificial Sequence
  Oligonucleotide for detection of SNP TSC0048399
aggggattggagt

SEQ ID NO: 196662 - DNA, 13 bp, Artificial Sequence
  Oligonucleotide for detection of SNP TSC0048399
actccaatcccct

SEQ ID NO: 196663 - DNA, 13 bp, Artificial Sequence
  Oligonucleotide for detection of SNP TSC0048399
aggggagtggagt

SEQ ID NO: 196664 - DNA, 13 bp, Artificial Sequence
  Oligonucleotide for detection of SNP TSC0048399
actccactcccct

SEQ ID NO: 196665 - DNA, 13 bp, Artificial Sequence
  Oligonucleotide for detection of SNP TSC0048400
atagtatgaaaga

SEQ ID NO: 196666 - DNA, 13 bp, Artificial Sequence
  Oligonucleotide for detection of SNP TSC0048400
tctttcatactat

SEQ ID NO: 196667 - DNA, 13 bp, Artificial Sequence
  Oligonucleotide for detection of SNP TSC0048400
atagtacgaaaga

SEQ ID NO: 196668 - DNA, 13 bp, Artificial Sequence
  Oligonucleotide for detection of SNP TSC0048400
tctttcgtactat

SEQ ID NO: 196669 - DNA, 13 bp, Artificial Sequence
  Oligonucleotide for detection of SNP TSC0048400
ttttttatgttat

SEQ ID NO: 196670 - DNA, 13 bp, Artificial Sequence
  Oligonucleotide for detection of SNP TSC0048400
ataacataaaaaa

SEQ ID NO: 196671 - DNA, 13 bp, Artificial Sequence
  Oligonucleotide for detection of SNP TSC0048400
tttttcgtgttat

SEQ ID NO: 196672 - DNA, 13 bp, Artificial Sequence
  Oligonucleotide for detection of SNP TSC0048400
ataacacgaaaaa

SEQ ID NO: 196673 - DNA, 13 bp, Artificial Sequence
  Oligonucleotide for detection of SNP TSC0048401
agttttagttata

SEQ ID NO: 196674 - DNA, 13 bp, Artificial Sequence
  Oligonucleotide for detection of SNP TSC0048401
tataactaaaact

SEQ ID NO: 196675 - DNA, 13 bp, Artificial Sequence
  Oligonucleotide for detection of SNP TSC0048401
agtttttgttata

SEQ ID NO: 196676 - DNA, 13 bp, Artificial Sequence
  Oligonucleotide for detection of SNP TSC0048401
tataacaaaaact

SEQ ID NO: 196677 - DNA, 13 bp, Artificial Sequence
  Oligonucleotide for detection of SNP TSC0048401
agttttcgttata

SEQ ID NO: 196678 - DNA, 13 bp, Artificial Sequence
  Oligonucleotide for detection of SNP TSC0048401
tataacgaaaact

SEQ ID NO: 196679 - DNA, 13 bp, Artificial Sequence
  Oligonucleotide for detection of SNP TSC0048401
tataattaaggtt

SEQ ID NO: 196680 - DNA, 13 bp, Artificial Sequence
  Oligonucleotide for detection of SNP TSC0048401
aaccttaattata

SEQ ID NO: 196681 - DNA, 13 bp, Artificial Sequence
  Oligonucleotide for detection of SNP TSC0048401
tataatgaaggtt

SEQ ID NO: 196682 - DNA, 13 bp, Artificial Sequence
  Oligonucleotide for detection of SNP TSC0048401
aaccttcattata

SEQ ID NO: 196683 - DNA, 13 bp, Artificial Sequence
  Oligonucleotide for detection of SNP TSC0048401
tataacgaaggtt

SEQ ID NO: 196684 - DNA, 13 bp, Artificial Sequence
  Oligonucleotide for detection of SNP TSC0048401
aaccttcgttata

SEQ ID NO: 196685 - DNA, 13 bp, Artificial Sequence
  Oligonucleotide for detection of SNP TSC0048402
attagatgggtty

SEQ ID NO: 196686 - DNA, 13 bp, Artificial Sequence
  Oligonucleotide for detection of SNP TSC0048402
raacccatctaat

SEQ ID NO: 196687 - DNA, 13 bp, Artificial Sequence
  Oligonucleotide for detection of SNP TSC0048402
attagacgggtty

SEQ ID NO: 196688 - DNA, 13 bp, Artificial Sequence
  Oligonucleotide for detection of SNP TSC0048402
raacccgtctaat

SEQ ID NO: 196689 - DNA, 13 bp, Artificial Sequence
  Oligonucleotide for detection of SNP TSC0048402
gagtttgtttggt

SEQ ID NO: 196690 - DNA, 13 bp, Artificial Sequence
  Oligonucleotide for detection of SNP TSC0048402
accaaacaaactc

SEQ ID NO: 196691 - DNA, 13 bp, Artificial Sequence
  Oligonucleotide for detection of SNP TSC0048402
gagtttatttggt

SEQ ID NO: 196692 - DNA, 13 bp, Artificial Sequence
  Oligonucleotide for detection of SNP TSC0048402
accaaataaactc

SEQ ID NO: 196693 - DNA, 13 bp, Artificial Sequence
  Oligonucleotide for detection of SNP TSC0048402
gagttcgtttggt

SEQ ID NO: 196694 - DNA, 13 bp, Artificial Sequence
  Oligonucleotide for detection of SNP TSC0048402
accaaacgaactc

SEQ ID NO: 196695 - DNA, 13 bp, Artificial Sequence
  Oligonucleotide for detection of SNP TSC0048405
taaagataaaaga

SEQ ID NO: 196696 - DNA, 13 bp, Artificial Sequence
  Oligonucleotide for detection of SNP TSC0048405
tcttttatcttta

SEQ ID NO: 196697 - DNA, 13 bp, Artificial Sequence
  Oligonucleotide for detection of SNP TSC0048405
taaagaaaaaaga

SEQ ID NO: 196698 - DNA, 13 bp, Artificial Sequence
  Oligonucleotide for detection of SNP TSC0048405
tcttttttcttta

SEQ ID NO: 196699 - DNA, 13 bp, Artificial Sequence
  Oligonucleotide for detection of SNP TSC0009382
tgtgttagtttty

SEQ ID NO: 196700 - DNA, 13 bp, Artificial Sequence
  Oligonucleotide for detection of SNP TSC0009382
raaaactaacaca

SEQ ID NO: 196701 - DNA, 13 bp, Artificial Sequence
  Oligonucleotide for detection of SNP TSC0009382
gagaattaatata

SEQ ID NO: 196702 - DNA, 13 bp, Artificial Sequence
  Oligonucleotide for detection of SNP TSC0009382
tatattaattctc

SEQ ID NO: 196703 - DNA, 13 bp, Artificial Sequence
  Oligonucleotide for detection of SNP TSC0009382
gagaatgaatata

SEQ ID NO: 196704 - DNA, 13 bp, Artificial Sequence
  Oligonucleotide for detection of SNP TSC0009382
tatattcattctc

SEQ ID NO: 196705 - DNA, 13 bp, Artificial Sequence
  Oligonucleotide for detection of SNP TSC0009382
gagaacgaatata

SEQ ID NO: 196706 - DNA, 13 bp, Artificial Sequence
  Oligonucleotide for detection of SNP TSC0009382
tatattcgttctc

SEQ ID NO: 196707 - DNA, 13 bp, Artificial Sequence
  Oligonucleotide for detection of SNP TSC0048412
tttgggataggtg

SEQ ID NO: 196708 - DNA, 13 bp, Artificial Sequence
  Oligonucleotide for detection of SNP TSC0048412
cacctatcccaaa

SEQ ID NO: 196709 - DNA, 13 bp, Artificial Sequence
  Oligonucleotide for detection of SNP TSC0048412
tttggggtaggtg

SEQ ID NO: 196710 - DNA, 13 bp, Artificial Sequence
  Oligonucleotide for detection of SNP TSC0048412
cacctaccccaaa

SEQ ID NO: 196711 - DNA, 13 bp, Artificial Sequence
  Oligonucleotide for detection of SNP TSC0048413
tatggttgatgtg

SEQ ID NO: 196712 - DNA, 13 bp, Artificial Sequence
  Oligonucleotide for detection of SNP TSC0048413
cacatcaaccata

SEQ ID NO: 196713 - DNA, 13 bp, Artificial Sequence
  Oligonucleotide for detection of SNP TSC0048413
tatggtcgatgtg

SEQ ID NO: 196714 - DNA, 13 bp, Artificial Sequence
  Oligonucleotide for detection of SNP TSC0048413
cacatcgaccata

SEQ ID NO: 196715 - DNA, 13 bp, Artificial Sequence
  Oligonucleotide for detection of SNP TSC0048413
tatattggttatg

SEQ ID NO: 196716 - DNA, 13 bp, Artificial Sequence
  Oligonucleotide for detection of SNP TSC0048413
cataaccaatata

SEQ ID NO: 196717 - DNA, 13 bp, Artificial Sequence
  Oligonucleotide for detection of SNP TSC0048413
tatattagttatg

SEQ ID NO: 196718 - DNA, 13 bp, Artificial Sequence
  Oligonucleotide for detection of SNP TSC0048413
cataactaatata

SEQ ID NO: 196719 - DNA, 13 bp, Artificial Sequence
  Oligonucleotide for detection of SNP TSC0048413
tatatcggttatg

SEQ ID NO: 196720 - DNA, 13 bp, Artificial Sequence
  Oligonucleotide for detection of SNP TSC0048413
cataaccgatata

SEQ ID NO: 196721 - DNA, 13 bp, Artificial Sequence
  Oligonucleotide for detection of SNP TSC0007901
gggagttttgggg

SEQ ID NO: 196722 - DNA, 13 bp, Artificial Sequence
  Oligonucleotide for detection of SNP TSC0007901
ccccaaaactccc

SEQ ID NO: 196723 - DNA, 13 bp, Artificial Sequence
  Oligonucleotide for detection of SNP TSC0007901
gggagtgttgggg

SEQ ID NO: 196724 - DNA, 13 bp, Artificial Sequence
  Oligonucleotide for detection of SNP TSC0007901
ccccaacactccc

SEQ ID NO: 196725 - DNA, 13 bp, Artificial Sequence
  Oligonucleotide for detection of SNP TSC0007901
gggagcgttgggg

SEQ ID NO: 196726 - DNA, 13 bp, Artificial Sequence
  Oligonucleotide for detection of SNP TSC0007901
ccccaacgctccc

SEQ ID NO: 196727 - DNA, 13 bp, Artificial Sequence
  Oligonucleotide for detection of SNP TSC0007901
ttttagggtttty

SEQ ID NO: 196728 - DNA, 13 bp, Artificial Sequence
  Oligonucleotide for detection of SNP TSC0007901
raaaaccctaaaa

SEQ ID NO: 196729 - DNA, 13 bp, Artificial Sequence
  Oligonucleotide for detection of SNP TSC0007901
ttttagtgtttty

SEQ ID NO: 196730 - DNA, 13 bp, Artificial Sequence
  Oligonucleotide for detection of SNP TSC0007901
raaaacactaaaa

SEQ ID NO: 196731 - DNA, 13 bp, Artificial Sequence
  Oligonucleotide for detection of SNP TSC0007901
ttttagcgtttty

SEQ ID NO: 196732 - DNA, 13 bp, Artificial Sequence
  Oligonucleotide for detection of SNP TSC0007901
raaaacgctaaaa

SEQ ID NO: 196733 - DNA, 13 bp, Artificial Sequence
  Oligonucleotide for detection of SNP TSC0048421
ttattggtattta

SEQ ID NO: 196734 - DNA, 13 bp, Artificial Sequence
  Oligonucleotide for detection of SNP TSC0048421
taaataccaataa

SEQ ID NO: 196735 - DNA, 13 bp, Artificial Sequence
  Oligonucleotide for detection of SNP TSC0048421
ttattgatattta

SEQ ID NO: 196736 - DNA, 13 bp, Artificial Sequence
  Oligonucleotide for detection of SNP TSC0048421
taaatatcaataa

SEQ ID NO: 196737 - DNA, 13 bp, Artificial Sequence
  Oligonucleotide for detection of SNP TSC0048422
tttggaattgttt

SEQ ID NO: 196738 - DNA, 13 bp, Artificial Sequence
  Oligonucleotide for detection of SNP TSC0048422
aaacaattccaaa

SEQ ID NO: 196739 - DNA, 13 bp, Artificial Sequence
  Oligonucleotide for detection of SNP TSC0048422
tttggatttgttt

SEQ ID NO: 196740 - DNA, 13 bp, Artificial Sequence
  Oligonucleotide for detection of SNP TSC0048422
aaacaaatccaaa

SEQ ID NO: 196741 - DNA, 13 bp, Artificial Sequence
  Oligonucleotide for detection of SNP TSC0048422
aaataattttaga

SEQ ID NO: 196742 - DNA, 13 bp, Artificial Sequence
  Oligonucleotide for detection of SNP TSC0048422
tctaaaattattt

SEQ ID NO: 196743 - DNA, 13 bp, Artificial Sequence
  Oligonucleotide for detection of SNP TSC0048422
aaataaatttaga

SEQ ID NO: 196744 - DNA, 13 bp, Artificial Sequence
  Oligonucleotide for detection of SNP TSC0048422
tctaaatttattt

SEQ ID NO: 196745 - DNA, 13 bp, Artificial Sequence
  Oligonucleotide for detection of SNP TSC0048423
aaataattgatgy

SEQ ID NO: 196746 - DNA, 13 bp, Artificial Sequence
  Oligonucleotide for detection of SNP TSC0048423
rcatcaattattt

SEQ ID NO: 196747 - DNA, 13 bp, Artificial Sequence
  Oligonucleotide for detection of SNP TSC0048423
aaataagtgatgy

SEQ ID NO: 196748 - DNA, 13 bp, Artificial Sequence
  Oligonucleotide for detection of SNP TSC0048423
rcatcacttattt

SEQ ID NO: 196749 - DNA, 13 bp, Artificial Sequence
  Oligonucleotide for detection of SNP TSC0048427
aatatggtaaaat

SEQ ID NO: 196750 - DNA, 13 bp, Artificial Sequence
  Oligonucleotide for detection of SNP TSC0048427
attttaccatatt

SEQ ID NO: 196751 - DNA, 13 bp, Artificial Sequence
  Oligonucleotide for detection of SNP TSC0048427
aatatgataaaat

SEQ ID NO: 196752 - DNA, 13 bp, Artificial Sequence
  Oligonucleotide for detection of SNP TSC0048427
attttatcatatt

SEQ ID NO: 196753 - DNA, 13 bp, Artificial Sequence
  Oligonucleotide for detection of SNP TSC0048428
aggatgaattaay

SEQ ID NO: 196754 - DNA, 13 bp, Artificial Sequence
  Oligonucleotide for detection of SNP TSC0048428
rttaattcatcct

SEQ ID NO: 196755 - DNA, 13 bp, Artificial Sequence
  Oligonucleotide for detection of SNP TSC0048428
aggatggattaay

SEQ ID NO: 196756 - DNA, 13 bp, Artificial Sequence
  Oligonucleotide for detection of SNP TSC0048428
rttaatccatcct

SEQ ID NO: 196757 - DNA, 13 bp, Artificial Sequence
  Oligonucleotide for detection of SNP TSC0048429
gtttatgtggttg

SEQ ID NO: 196758 - DNA, 13 bp, Artificial Sequence
  Oligonucleotide for detection of SNP TSC0048429
caaccacataaac

SEQ ID NO: 196759 - DNA, 13 bp, Artificial Sequence
  Oligonucleotide for detection of SNP TSC0048429
gtttatatggttg

SEQ ID NO: 196760 - DNA, 13 bp, Artificial Sequence
  Oligonucleotide for detection of SNP TSC0048429
caaccatataaac

SEQ ID NO: 196761 - DNA, 13 bp, Artificial Sequence
  Oligonucleotide for detection of SNP TSC0048431
aaatgttgagaag

SEQ ID NO: 196762 - DNA, 13 bp, Artificial Sequence
  Oligonucleotide for detection of SNP TSC0048431
cttctcaacattt

SEQ ID NO: 196763 - DNA, 13 bp, Artificial Sequence
  Oligonucleotide for detection of SNP TSC0048431
aaatgtcgagaag

SEQ ID NO: 196764 - DNA, 13 bp, Artificial Sequence
  Oligonucleotide for detection of SNP TSC0048431
cttctcgacattt

SEQ ID NO: 196765 - DNA, 13 bp, Artificial Sequence
  Oligonucleotide for detection of SNP TSC0006242
tttttgatgaaaa

SEQ ID NO: 196766 - DNA, 13 bp, Artificial Sequence
  Oligonucleotide for detection of SNP TSC0006242
ttttcatcaaaaa

SEQ ID NO: 196767 - DNA, 13 bp, Artificial Sequence
  Oligonucleotide for detection of SNP TSC0006242
tttttggtgaaaa

SEQ ID NO: 196768 - DNA, 13 bp, Artificial Sequence
  Oligonucleotide for detection of SNP TSC0006242
ttttcaccaaaaa

SEQ ID NO: 196769 - DNA, 13 bp, Artificial Sequence
  Oligonucleotide for detection of SNP TSC0006242
tttttgacgaaaa

SEQ ID NO: 196770 - DNA, 13 bp, Artificial Sequence
  Oligonucleotide for detection of SNP TSC0006242
ttttcgtcaaaaa

SEQ ID NO: 196771 - DNA, 13 bp, Artificial Sequence
  Oligonucleotide for detection of SNP TSC0006242
tttttggcgaaaa

SEQ ID NO: 196772 - DNA, 13 bp, Artificial Sequence
  Oligonucleotide for detection of SNP TSC0006242
ttttcgccaaaaa

SEQ ID NO: 196773 - DNA, 13 bp, Artificial Sequence
  Oligonucleotide for detection of SNP TSC0048435
agtaagtgtatat

SEQ ID NO: 196774 - DNA, 13 bp, Artificial Sequence
  Oligonucleotide for detection of SNP TSC0048435
atatacacttact

SEQ ID NO: 196775 - DNA, 13 bp, Artificial Sequence
  Oligonucleotide for detection of SNP TSC0048435
agtaagcgtatat

SEQ ID NO: 196776 - DNA, 13 bp, Artificial Sequence
  Oligonucleotide for detection of SNP TSC0048435
atatacgcttact

SEQ ID NO: 196777 - DNA, 13 bp, Artificial Sequence
  Oligonucleotide for detection of SNP TSC0048435
atgtatgtttatt

SEQ ID NO: 196778 - DNA, 13 bp, Artificial Sequence
  Oligonucleotide for detection of SNP TSC0048435
aataaacatacat

SEQ ID NO: 196779 - DNA, 13 bp, Artificial Sequence
  Oligonucleotide for detection of SNP TSC0048435
atgtatatttatt

SEQ ID NO: 196780 - DNA, 13 bp, Artificial Sequence
  Oligonucleotide for detection of SNP TSC0048435
aataaatatacat

SEQ ID NO: 196781 - DNA, 13 bp, Artificial Sequence
  Oligonucleotide for detection of SNP TSC0048435
atgtacgtttatt

SEQ ID NO: 196782 - DNA, 13 bp, Artificial Sequence
  Oligonucleotide for detection of SNP TSC0048435
aataaacgtacat

SEQ ID NO: 196783 - DNA, 13 bp, Artificial Sequence
  Oligonucleotide for detection of SNP TSC0008667
tggtgtatttttg

SEQ ID NO: 196784 - DNA, 13 bp, Artificial Sequence
  Oligonucleotide for detection of SNP TSC0008667
caaaaatacacca

SEQ ID NO: 196785 - DNA, 13 bp, Artificial Sequence
  Oligonucleotide for detection of SNP TSC0008667
tggtgtgtttttg

SEQ ID NO: 196786 - DNA, 13 bp, Artificial Sequence
  Oligonucleotide for detection of SNP TSC0008667
caaaaacacacca

SEQ ID NO: 196787 - DNA, 13 bp, Artificial Sequence
  Oligonucleotide for detection of SNP TSC0048440
tgggaggaaggag

SEQ ID NO: 196788 - DNA, 13 bp, Artificial Sequence
  Oligonucleotide for detection of SNP TSC0048440
ctccttcctccca

SEQ ID NO: 196789 - DNA, 13 bp, Artificial Sequence
  Oligonucleotide for detection of SNP TSC0048440
tgggagtaaggag

SEQ ID NO: 196790 - DNA, 13 bp, Artificial Sequence
  Oligonucleotide for detection of SNP TSC0048440
ctccttactccca

SEQ ID NO: 196791 - DNA, 13 bp, Artificial Sequence
  Oligonucleotide for detection of SNP TSC0048440
cgggaggaaggag

SEQ ID NO: 196792 - DNA, 13 bp, Artificial Sequence
  Oligonucleotide for detection of SNP TSC0048440
ctccttcctcccg

SEQ ID NO: 196793 - DNA, 13 bp, Artificial Sequence
  Oligonucleotide for detection of SNP TSC0048440
cgggagtaaggag

SEQ ID NO: 196794 - DNA, 13 bp, Artificial Sequence
  Oligonucleotide for detection of SNP TSC0048440
ctccttactcccg

SEQ ID NO: 196795 - DNA, 13 bp, Artificial Sequence
  Oligonucleotide for detection of SNP TSC0048441
tagaataataagt

SEQ ID NO: 196796 - DNA, 13 bp, Artificial Sequence
  Oligonucleotide for detection of SNP TSC0048441
acttattattcta

SEQ ID NO: 196797 - DNA, 13 bp, Artificial Sequence
  Oligonucleotide for detection of SNP TSC0048441
tagaattataagt

SEQ ID NO: 196798 - DNA, 13 bp, Artificial Sequence
  Oligonucleotide for detection of SNP TSC0048441
acttataattcta

SEQ ID NO: 196799 - DNA, 13 bp, Artificial Sequence
  Oligonucleotide for detection of SNP TSC0048442
taggtaatttttt

SEQ ID NO: 196800 - DNA, 13 bp, Artificial Sequence
  Oligonucleotide for detection of SNP TSC0048442
aaaaaattaccta

SEQ ID NO: 196801 - DNA, 13 bp, Artificial Sequence
  Oligonucleotide for detection of SNP TSC0048442
taggtagtttttt

SEQ ID NO: 196802 - DNA, 13 bp, Artificial Sequence
  Oligonucleotide for detection of SNP TSC0048442
aaaaaactaccta

SEQ ID NO: 196803 - DNA, 13 bp, Artificial Sequence
  Oligonucleotide for detection of SNP TSC0048443
agatataatattg

SEQ ID NO: 196804 - DNA, 13 bp, Artificial Sequence
  Oligonucleotide for detection of SNP TSC0048443
caatattatatct

SEQ ID NO: 196805 - DNA, 13 bp, Artificial Sequence
  Oligonucleotide for detection of SNP TSC0048443
agatatgatattg

SEQ ID NO: 196806 - DNA, 13 bp, Artificial Sequence
  Oligonucleotide for detection of SNP TSC0048443
caatatcatatct

SEQ ID NO: 196807 - DNA, 13 bp, Artificial Sequence
  Oligonucleotide for detection of SNP TSC0048444
atttagttatagt

SEQ ID NO: 196808 - DNA, 13 bp, Artificial Sequence
  Oligonucleotide for detection of SNP TSC0048444
actataactaaat

SEQ ID NO: 196809 - DNA, 13 bp, Artificial Sequence
  Oligonucleotide for detection of SNP TSC0048444
atttaggtatagt

SEQ ID NO: 196810 - DNA, 13 bp, Artificial Sequence
  Oligonucleotide for detection of SNP TSC0048444
actatacctaaat

SEQ ID NO: 196811 - DNA, 13 bp, Artificial Sequence
  Oligonucleotide for detection of SNP TSC0048444
attgtgattgaat

SEQ ID NO: 196812 - DNA, 13 bp, Artificial Sequence
  Oligonucleotide for detection of SNP TSC0048444
attcaatcacaat

SEQ ID NO: 196813 - DNA, 13 bp, Artificial Sequence
  Oligonucleotide for detection of SNP TSC0048444
attgtgtttgaat

SEQ ID NO: 196814 - DNA, 13 bp, Artificial Sequence
  Oligonucleotide for detection of SNP TSC0048444
attcaaacacaat

SEQ ID NO: 196815 - DNA, 13 bp, Artificial Sequence
  Oligonucleotide for detection of SNP TSC0048445
ttgagatggattt

SEQ ID NO: 196816 - DNA, 13 bp, Artificial Sequence
  Oligonucleotide for detection of SNP TSC0048445
aaatccatctcaa

SEQ ID NO: 196817 - DNA, 13 bp, Artificial Sequence
  Oligonucleotide for detection of SNP TSC0048445
ttgagacggattt

SEQ ID NO: 196818 - DNA, 13 bp, Artificial Sequence
  Oligonucleotide for detection of SNP TSC0048445
aaatccgtctcaa

SEQ ID NO: 196819 - DNA, 13 bp, Artificial Sequence
  Oligonucleotide for detection of SNP TSC0048445
aagtttgttttaa

SEQ ID NO: 196820 - DNA, 13 bp, Artificial Sequence
  Oligonucleotide for detection of SNP TSC0048445
ttaaaacaaactt

SEQ ID NO: 196821 - DNA, 13 bp, Artificial Sequence
  Oligonucleotide for detection of SNP TSC0048445
aagttcgttttaa

SEQ ID NO: 196822 - DNA, 13 bp, Artificial Sequence
  Oligonucleotide for detection of SNP TSC0048445
ttaaaacgaactt

SEQ ID NO: 196823 - DNA, 13 bp, Artificial Sequence
  Oligonucleotide for detection of SNP TSC0048446
tgtttaagttgga

SEQ ID NO: 196824 - DNA, 13 bp, Artificial Sequence
  Oligonucleotide for detection of SNP TSC0048446
tccaacttaaaca

SEQ ID NO: 196825 - DNA, 13 bp, Artificial Sequence
  Oligonucleotide for detection of SNP TSC0048447
tataaaatggtgt

SEQ ID NO: 196826 - DNA, 13 bp, Artificial Sequence
  Oligonucleotide for detection of SNP TSC0048447
acaccattttata

SEQ ID NO: 196827 - DNA, 13 bp, Artificial Sequence
  Oligonucleotide for detection of SNP TSC0048447
tataaagtggtgt

SEQ ID NO: 196828 - DNA, 13 bp, Artificial Sequence
  Oligonucleotide for detection of SNP TSC0048447
acaccactttata

SEQ ID NO: 196829 - DNA, 13 bp, Artificial Sequence
  Oligonucleotide for detection of SNP TSC0048448
tatatagaagaat

SEQ ID NO: 196830 - DNA, 13 bp, Artificial Sequence
  Oligonucleotide for detection of SNP TSC0048448
attcttctatata

SEQ ID NO: 196831 - DNA, 13 bp, Artificial Sequence
  Oligonucleotide for detection of SNP TSC0048448
tatataaaagaat

SEQ ID NO: 196832 - DNA, 13 bp, Artificial Sequence
  Oligonucleotide for detection of SNP TSC0048448
attcttttatata

SEQ ID NO: 196833 - DNA, 13 bp, Artificial Sequence
  Oligonucleotide for detection of SNP TSC0048453
ggttttgtgttty

SEQ ID NO: 196834 - DNA, 13 bp, Artificial Sequence
  Oligonucleotide for detection of SNP TSC0048453
raaacacaaaacc

SEQ ID NO: 196835 - DNA, 13 bp, Artificial Sequence
  Oligonucleotide for detection of SNP TSC0009260
ggatagtaaggty

SEQ ID NO: 196836 - DNA, 13 bp, Artificial Sequence
  Oligonucleotide for detection of SNP TSC0009260
raccttactatcc

SEQ ID NO: 196837 - DNA, 13 bp, Artificial Sequence
  Oligonucleotide for detection of SNP TSC0009260
ggataggaaggty

SEQ ID NO: 196838 - DNA, 13 bp, Artificial Sequence
  Oligonucleotide for detection of SNP TSC0009260
raccttcctatcc

SEQ ID NO: 196839 - DNA, 13 bp, Artificial Sequence
  Oligonucleotide for detection of SNP TSC0009260
ggttttgttgtty

SEQ ID NO: 196840 - DNA, 13 bp, Artificial Sequence
  Oligonucleotide for detection of SNP TSC0009260
raacaacaaaacc

SEQ ID NO: 196841 - DNA, 13 bp, Artificial Sequence
  Oligonucleotide for detection of SNP TSC0009260
ggtttttttgtty

SEQ ID NO: 196842 - DNA, 13 bp, Artificial Sequence
  Oligonucleotide for detection of SNP TSC0009260
raacaaaaaaacc

SEQ ID NO: 196843 - DNA, 13 bp, Artificial Sequence
  Oligonucleotide for detection of SNP TSC0048454
atttgtatataaa

SEQ ID NO: 196844 - DNA, 13 bp, Artificial Sequence
  Oligonucleotide for detection of SNP TSC0048454
tttatatacaaat

SEQ ID NO: 196845 - DNA, 13 bp, Artificial Sequence
  Oligonucleotide for detection of SNP TSC0048454
atttgtgtataaa

SEQ ID NO: 196846 - DNA, 13 bp, Artificial Sequence
  Oligonucleotide for detection of SNP TSC0048454
tttatacacaaat

SEQ ID NO: 196847 - DNA, 13 bp, Artificial Sequence
  Oligonucleotide for detection of SNP TSC0048454
atttgcgtataaa

SEQ ID NO: 196848 - DNA, 13 bp, Artificial Sequence
  Oligonucleotide for detection of SNP TSC0048454
tttatacgcaaat

SEQ ID NO: 196849 - DNA, 13 bp, Artificial Sequence
  Oligonucleotide for detection of SNP TSC0048454
tttgtatgtaaat

SEQ ID NO: 196850 - DNA, 13 bp, Artificial Sequence
  Oligonucleotide for detection of SNP TSC0048454
atttacatacaaa

SEQ ID NO: 196851 - DNA, 13 bp, Artificial Sequence
  Oligonucleotide for detection of SNP TSC0048454
tttgtacgtaaat

SEQ ID NO: 196852 - DNA, 13 bp, Artificial Sequence
  Oligonucleotide for detection of SNP TSC0048454
atttacgtacaaa

SEQ ID NO: 196853 - DNA, 13 bp, Artificial Sequence
  Oligonucleotide for detection of SNP TSC0048457
aatgaagatatgy

SEQ ID NO: 196854 - DNA, 13 bp, Artificial Sequence
  Oligonucleotide for detection of SNP TSC0048457
rcatatcttcatt

SEQ ID NO: 196855 - DNA, 13 bp, Artificial Sequence
  Oligonucleotide for detection of SNP TSC0048457
aatgaaaatatgy

SEQ ID NO: 196856 - DNA, 13 bp, Artificial Sequence
  Oligonucleotide for detection of SNP TSC0048457
rcatattttcatt

SEQ ID NO: 196857 - DNA, 13 bp, Artificial Sequence
  Oligonucleotide for detection of SNP TSC0048458
gttttcgtgtttt

SEQ ID NO: 196858 - DNA, 13 bp, Artificial Sequence
  Oligonucleotide for detection of SNP TSC0048458
aaaacacgaaaac

SEQ ID NO: 196859 - DNA, 13 bp, Artificial Sequence
  Oligonucleotide for detection of SNP TSC0048458
aaagtatggaaay

SEQ ID NO: 196860 - DNA, 13 bp, Artificial Sequence
  Oligonucleotide for detection of SNP TSC0048458
rtttccatacttt

SEQ ID NO: 196861 - DNA, 13 bp, Artificial Sequence
  Oligonucleotide for detection of SNP TSC0048458
aaagtacggaaay

SEQ ID NO: 196862 - DNA, 13 bp, Artificial Sequence
  Oligonucleotide for detection of SNP TSC0048458
rtttccgtacttt

SEQ ID NO: 196863 - DNA, 13 bp, Artificial Sequence
  Oligonucleotide for detection of SNP TSC0048459
attttgtgtatga

SEQ ID NO: 196864 - DNA, 13 bp, Artificial Sequence
  Oligonucleotide for detection of SNP TSC0048459
tcatacacaaaat

SEQ ID NO: 196865 - DNA, 13 bp, Artificial Sequence
  Oligonucleotide for detection of SNP TSC0048459
attttgcgtatga

SEQ ID NO: 196866 - DNA, 13 bp, Artificial Sequence
  Oligonucleotide for detection of SNP TSC0048459
tcatacgcaaaat

SEQ ID NO: 196867 - DNA, 13 bp, Artificial Sequence
  Oligonucleotide for detection of SNP TSC0048459
ttatgtgtaaggt

SEQ ID NO: 196868 - DNA, 13 bp, Artificial Sequence
  Oligonucleotide for detection of SNP TSC0048459
accttacacataa

SEQ ID NO: 196869 - DNA, 13 bp, Artificial Sequence
  Oligonucleotide for detection of SNP TSC0048459
ttatgtataaggt

SEQ ID NO: 196870 - DNA, 13 bp, Artificial Sequence
  Oligonucleotide for detection of SNP TSC0048459
accttatacataa

SEQ ID NO: 196871 - DNA, 13 bp, Artificial Sequence
  Oligonucleotide for detection of SNP TSC0048459
ttatgcgtaaggt

SEQ ID NO: 196872 - DNA, 13 bp, Artificial Sequence
  Oligonucleotide for detection of SNP TSC0048459
accttacgcataa

SEQ ID NO: 196873 - DNA, 13 bp, Artificial Sequence
  Oligonucleotide for detection of SNP TSC0006793
gtttaggtaatag

SEQ ID NO: 196874 - DNA, 13 bp, Artificial Sequence
  Oligonucleotide for detection of SNP TSC0006793
ctattacctaaac

SEQ ID NO: 196875 - DNA, 13 bp, Artificial Sequence
  Oligonucleotide for detection of SNP TSC0006793
gtttagataatag

SEQ ID NO: 196876 - DNA, 13 bp, Artificial Sequence
  Oligonucleotide for detection of SNP TSC0006793
ctattatctaaac

SEQ ID NO: 196877 - DNA, 13 bp, Artificial Sequence
  Oligonucleotide for detection of SNP TSC0048461
gtttgagtaatay

SEQ ID NO: 196878 - DNA, 13 bp, Artificial Sequence
  Oligonucleotide for detection of SNP TSC0048461
rtattactcaaac

SEQ ID NO: 196879 - DNA, 13 bp, Artificial Sequence
  Oligonucleotide for detection of SNP TSC0048461
gtttgaataatay

SEQ ID NO: 196880 - DNA, 13 bp, Artificial Sequence
  Oligonucleotide for detection of SNP TSC0048461
rtattattcaaac

SEQ ID NO: 196881 - DNA, 13 bp, Artificial Sequence
  Oligonucleotide for detection of SNP TSC0048465
ttatttatatgag

SEQ ID NO: 196882 - DNA, 13 bp, Artificial Sequence
  Oligonucleotide for detection of SNP TSC0048465
ctcatataaataa

SEQ ID NO: 196883 - DNA, 13 bp, Artificial Sequence
  Oligonucleotide for detection of SNP TSC0048465
ttatttgtatgag

SEQ ID NO: 196884 - DNA, 13 bp, Artificial Sequence
  Oligonucleotide for detection of SNP TSC0048465
ctcatacaaataa

SEQ ID NO: 196885 - DNA, 13 bp, Artificial Sequence
  Oligonucleotide for detection of SNP TSC0048466
tattattatgtat

SEQ ID NO: 196886 - DNA, 13 bp, Artificial Sequence
  Oligonucleotide for detection of SNP TSC0048466
atacataataata

SEQ ID NO: 196887 - DNA, 13 bp, Artificial Sequence
  Oligonucleotide for detection of SNP TSC0048466
tattatgatgtat

SEQ ID NO: 196888 - DNA, 13 bp, Artificial Sequence
  Oligonucleotide for detection of SNP TSC0048466
atacatcataata

SEQ ID NO: 196889 - DNA, 13 bp, Artificial Sequence
  Oligonucleotide for detection of SNP TSC0048466
tattacgatgtat

SEQ ID NO: 196890 - DNA, 13 bp, Artificial Sequence
  Oligonucleotide for detection of SNP TSC0048466
atacatcgtaata

SEQ ID NO: 196891 - DNA, 13 bp, Artificial Sequence
  Oligonucleotide for detection of SNP TSC0048466
atatatagtaatg

SEQ ID NO: 196892 - DNA, 13 bp, Artificial Sequence
  Oligonucleotide for detection of SNP TSC0048466
cattactatatat

SEQ ID NO: 196893 - DNA, 13 bp, Artificial Sequence
  Oligonucleotide for detection of SNP TSC0048466
atatattgtaatg

SEQ ID NO: 196894 - DNA, 13 bp, Artificial Sequence
  Oligonucleotide for detection of SNP TSC0048466
cattacaatatat

SEQ ID NO: 196895 - DNA, 13 bp, Artificial Sequence
  Oligonucleotide for detection of SNP TSC0048466
atatatcgtaatg

SEQ ID NO: 196896 - DNA, 13 bp, Artificial Sequence
  Oligonucleotide for detection of SNP TSC0048466
cattacgatatat

SEQ ID NO: 196897 - DNA, 13 bp, Artificial Sequence
  Oligonucleotide for detection of SNP TSC0048467
gtaaaagtttaty

SEQ ID NO: 196898 - DNA, 13 bp, Artificial Sequence
  Oligonucleotide for detection of SNP TSC0048467
rataaacttttac

SEQ ID NO: 196899 - DNA, 13 bp, Artificial Sequence
  Oligonucleotide for detection of SNP TSC0048467
gtaaaaatttaty

SEQ ID NO: 196900 - DNA, 13 bp, Artificial Sequence
  Oligonucleotide for detection of SNP TSC0048467
rataaatttttac

SEQ ID NO: 196901 - DNA, 13 bp, Artificial Sequence
  Oligonucleotide for detection of SNP TSC0048468
tatagagaaggag

SEQ ID NO: 196902 - DNA, 13 bp, Artificial Sequence
  Oligonucleotide for detection of SNP TSC0048468
ctccttctctata

SEQ ID NO: 196903 - DNA, 13 bp, Artificial Sequence
  Oligonucleotide for detection of SNP TSC0048468
tatagataaggag

SEQ ID NO: 196904 - DNA, 13 bp, Artificial Sequence
  Oligonucleotide for detection of SNP TSC0048468
ctccttatctata

SEQ ID NO: 196905 - DNA, 13 bp, Artificial Sequence
  Oligonucleotide for detection of SNP TSC0048469
atgtattgaagtg

SEQ ID NO: 196906 - DNA, 13 bp, Artificial Sequence
  Oligonucleotide for detection of SNP TSC0048469
cacttcaatacat

SEQ ID NO: 196907 - DNA, 13 bp, Artificial Sequence
  Oligonucleotide for detection of SNP TSC0048469
atgtatcgaagtg

SEQ ID NO: 196908 - DNA, 13 bp, Artificial Sequence
  Oligonucleotide for detection of SNP TSC0048469
cacttcgatacat

SEQ ID NO: 196909 - DNA, 13 bp, Artificial Sequence
  Oligonucleotide for detection of SNP TSC0048470
aaaatggttaagg

SEQ ID NO: 196910 - DNA, 13 bp, Artificial Sequence
  Oligonucleotide for detection of SNP TSC0048470
ccttaaccatttt

SEQ ID NO: 196911 - DNA, 13 bp, Artificial Sequence
  Oligonucleotide for detection of SNP TSC0048470
aaaatgattaagg

SEQ ID NO: 196912 - DNA, 13 bp, Artificial Sequence
  Oligonucleotide for detection of SNP TSC0048470
ccttaatcatttt

SEQ ID NO: 196913 - DNA, 13 bp, Artificial Sequence
  Oligonucleotide for detection of SNP TSC0048475
attaatagtaagt

SEQ ID NO: 196914 - DNA, 13 bp, Artificial Sequence
  Oligonucleotide for detection of SNP TSC0048475
acttactattaat

SEQ ID NO: 196915 - DNA, 13 bp, Artificial Sequence
  Oligonucleotide for detection of SNP TSC0048475
attaattgtaagt

SEQ ID NO: 196916 - DNA, 13 bp, Artificial Sequence
  Oligonucleotide for detection of SNP TSC0048475
acttacaattaat

SEQ ID NO: 196917 - DNA, 13 bp, Artificial Sequence
  Oligonucleotide for detection of SNP TSC0048475
atttattattgat

SEQ ID NO: 196918 - DNA, 13 bp, Artificial Sequence
  Oligonucleotide for detection of SNP TSC0048475
atcaataataaat

SEQ ID NO: 196919 - DNA, 13 bp, Artificial Sequence
  Oligonucleotide for detection of SNP TSC0048475
atttataattgat

SEQ ID NO: 196920 - DNA, 13 bp, Artificial Sequence
  Oligonucleotide for detection of SNP TSC0048475
atcaattataaat

SEQ ID NO: 196921 - DNA, 13 bp, Artificial Sequence
  Oligonucleotide for detection of SNP TSC0048476
aagagaattgttt

SEQ ID NO: 196922 - DNA, 13 bp, Artificial Sequence
  Oligonucleotide for detection of SNP TSC0048476
aaacaattctctt

SEQ ID NO: 196923 - DNA, 13 bp, Artificial Sequence
  Oligonucleotide for detection of SNP TSC0048476
aagagagttgttt

SEQ ID NO: 196924 - DNA, 13 bp, Artificial Sequence
  Oligonucleotide for detection of SNP TSC0048476
aaacaactctctt

SEQ ID NO: 196925 - DNA, 13 bp, Artificial Sequence
  Oligonucleotide for detection of SNP TSC0048476
aagagaatcgttt

SEQ ID NO: 196926 - DNA, 13 bp, Artificial Sequence
  Oligonucleotide for detection of SNP TSC0048476
aaacgattctctt

SEQ ID NO: 196927 - DNA, 13 bp, Artificial Sequence
  Oligonucleotide for detection of SNP TSC0048476
aagagagtcgttt

SEQ ID NO: 196928 - DNA, 13 bp, Artificial Sequence
  Oligonucleotide for detection of SNP TSC0048476
aaacgactctctt

SEQ ID NO: 196929 - DNA, 13 bp, Artificial Sequence
  Oligonucleotide for detection of SNP TSC0048477
attgagatataag

SEQ ID NO: 196930 - DNA, 13 bp, Artificial Sequence
  Oligonucleotide for detection of SNP TSC0048477
cttatatctcaat

SEQ ID NO: 196931 - DNA, 13 bp, Artificial Sequence
  Oligonucleotide for detection of SNP TSC0048477
attgagttataag

SEQ ID NO: 196932 - DNA, 13 bp, Artificial Sequence
  Oligonucleotide for detection of SNP TSC0048477
cttataactcaat

SEQ ID NO: 196933 - DNA, 13 bp, Artificial Sequence
  Oligonucleotide for detection of SNP TSC0048478
ttataatggaaay

SEQ ID NO: 196934 - DNA, 13 bp, Artificial Sequence
  Oligonucleotide for detection of SNP TSC0048478
rtttccattataa

SEQ ID NO: 196935 - DNA, 13 bp, Artificial Sequence
  Oligonucleotide for detection of SNP TSC0048478
ttataacggaaay

SEQ ID NO: 196936 - DNA, 13 bp, Artificial Sequence
  Oligonucleotide for detection of SNP TSC0048478
rtttccgttataa

SEQ ID NO: 196937 - DNA, 13 bp, Artificial Sequence
  Oligonucleotide for detection of SNP TSC0048480
tatataagaaaag

SEQ ID NO: 196938 - DNA, 13 bp, Artificial Sequence
  Oligonucleotide for detection of SNP TSC0048480
cttttcttatata

SEQ ID NO: 196939 - DNA, 13 bp, Artificial Sequence
  Oligonucleotide for detection of SNP TSC0048480
tatatacgaaaag

SEQ ID NO: 196940 - DNA, 13 bp, Artificial Sequence
  Oligonucleotide for detection of SNP TSC0048480
cttttcgtatata

SEQ ID NO: 196941 - DNA, 13 bp, Artificial Sequence
  Oligonucleotide for detection of SNP TSC0048480
tttttcgtgtgtg

SEQ ID NO: 196942 - DNA, 13 bp, Artificial Sequence
  Oligonucleotide for detection of SNP TSC0048480
cacacacgaaaaa

SEQ ID NO: 196943 - DNA, 13 bp, Artificial Sequence
  Oligonucleotide for detection of SNP TSC0048481
gtatttattatta

SEQ ID NO: 196944 - DNA, 13 bp, Artificial Sequence
  Oligonucleotide for detection of SNP TSC0048481
taataataaatac

SEQ ID NO: 196945 - DNA, 13 bp, Artificial Sequence
  Oligonucleotide for detection of SNP TSC0048481
gtatttgttatta

SEQ ID NO: 196946 - DNA, 13 bp, Artificial Sequence
  Oligonucleotide for detection of SNP TSC0048481
taataacaaatac

SEQ ID NO: 196947 - DNA, 13 bp, Artificial Sequence
  Oligonucleotide for detection of SNP TSC0009072
tttataatatgaa

SEQ ID NO: 196948 - DNA, 13 bp, Artificial Sequence
  Oligonucleotide for detection of SNP TSC0009072
ttcatattataaa

SEQ ID NO: 196949 - DNA, 13 bp, Artificial Sequence
  Oligonucleotide for detection of SNP TSC0009072
tttatattatgaa

SEQ ID NO: 196950 - DNA, 13 bp, Artificial Sequence
  Oligonucleotide for detection of SNP TSC0009072
ttcataatataaa

SEQ ID NO: 196951 - DNA, 13 bp, Artificial Sequence
  Oligonucleotide for detection of SNP TSC0009072
tttatgttataga

SEQ ID NO: 196952 - DNA, 13 bp, Artificial Sequence
  Oligonucleotide for detection of SNP TSC0009072
tctataacataaa

SEQ ID NO: 196953 - DNA, 13 bp, Artificial Sequence
  Oligonucleotide for detection of SNP TSC0009072
tttatgatataga

SEQ ID NO: 196954 - DNA, 13 bp, Artificial Sequence
  Oligonucleotide for detection of SNP TSC0009072
tctatatcataaa

SEQ ID NO: 196955 - DNA, 13 bp, Artificial Sequence
  Oligonucleotide for detection of SNP TSC0008050
gatttagatatty

SEQ ID NO: 196956 - DNA, 13 bp, Artificial Sequence
  Oligonucleotide for detection of SNP TSC0008050
raatatctaaatc

SEQ ID NO: 196957 - DNA, 13 bp, Artificial Sequence
  Oligonucleotide for detection of SNP TSC0008050
gatttaaatatty

SEQ ID NO: 196958 - DNA, 13 bp, Artificial Sequence
  Oligonucleotide for detection of SNP TSC0008050
raatatttaaatc

SEQ ID NO: 196959 - DNA, 13 bp, Artificial Sequence
  Oligonucleotide for detection of SNP TSC0007894
tattgagatagtg

SEQ ID NO: 196960 - DNA, 13 bp, Artificial Sequence
  Oligonucleotide for detection of SNP TSC0007894
cactatctcaata

SEQ ID NO: 196961 - DNA, 13 bp, Artificial Sequence
  Oligonucleotide for detection of SNP TSC0007894
tattgaaatagtg

SEQ ID NO: 196962 - DNA, 13 bp, Artificial Sequence
  Oligonucleotide for detection of SNP TSC0007894
cactatttcaata

SEQ ID NO: 196963 - DNA, 13 bp, Artificial Sequence
  Oligonucleotide for detection of SNP TSC0007895
taatttgatttta

SEQ ID NO: 196964 - DNA, 13 bp, Artificial Sequence
  Oligonucleotide for detection of SNP TSC0007895
taaaatcaaatta

SEQ ID NO: 196965 - DNA, 13 bp, Artificial Sequence
  Oligonucleotide for detection of SNP TSC0048483
tagttggttataa

SEQ ID NO: 196966 - DNA, 13 bp, Artificial Sequence
  Oligonucleotide for detection of SNP TSC0048483
ttataaccaacta

SEQ ID NO: 196967 - DNA, 13 bp, Artificial Sequence
  Oligonucleotide for detection of SNP TSC0048483
tagttgattataa

SEQ ID NO: 196968 - DNA, 13 bp, Artificial Sequence
  Oligonucleotide for detection of SNP TSC0048483
ttataatcaacta

SEQ ID NO: 196969 - DNA, 13 bp, Artificial Sequence
  Oligonucleotide for detection of SNP TSC0048485
gtttgtattatay

SEQ ID NO: 196970 - DNA, 13 bp, Artificial Sequence
  Oligonucleotide for detection of SNP TSC0048485
rtataatacaaac

SEQ ID NO: 196971 - DNA, 13 bp, Artificial Sequence
  Oligonucleotide for detection of SNP TSC0048485
gtttgtgttatay

SEQ ID NO: 196972 - DNA, 13 bp, Artificial Sequence
  Oligonucleotide for detection of SNP TSC0048485
rtataacacaaac

SEQ ID NO: 196973 - DNA, 13 bp, Artificial Sequence
  Oligonucleotide for detection of SNP TSC0005358
tagtgtttgatty

SEQ ID NO: 196974 - DNA, 13 bp, Artificial Sequence
  Oligonucleotide for detection of SNP TSC0005358
raatcaaacacta

SEQ ID NO: 196975 - DNA, 13 bp, Artificial Sequence
  Oligonucleotide for detection of SNP TSC0005358
tagtgtgtgatty

SEQ ID NO: 196976 - DNA, 13 bp, Artificial Sequence
  Oligonucleotide for detection of SNP TSC0005358
raatcacacacta

SEQ ID NO: 196977 - DNA, 13 bp, Artificial Sequence
  Oligonucleotide for detection of SNP TSC0005358
gaattagatattg

SEQ ID NO: 196978 - DNA, 13 bp, Artificial Sequence
  Oligonucleotide for detection of SNP TSC0005358
caatatctaattc

SEQ ID NO: 196979 - DNA, 13 bp, Artificial Sequence
  Oligonucleotide for detection of SNP TSC0005358
gaattatatattg

SEQ ID NO: 196980 - DNA, 13 bp, Artificial Sequence
  Oligonucleotide for detection of SNP TSC0005358
caatatataattc

SEQ ID NO: 196981 - DNA, 13 bp, Artificial Sequence
  Oligonucleotide for detection of SNP TSC0008717
tatttagtaatgt

SEQ ID NO: 196982 - DNA, 13 bp, Artificial Sequence
  Oligonucleotide for detection of SNP TSC0008717
acattactaaata

SEQ ID NO: 196983 - DNA, 13 bp, Artificial Sequence
  Oligonucleotide for detection of SNP TSC0008717
tatttaataatgt

SEQ ID NO: 196984 - DNA, 13 bp, Artificial Sequence
  Oligonucleotide for detection of SNP TSC0008717
acattattaaata

SEQ ID NO: 196985 - DNA, 13 bp, Artificial Sequence
  Oligonucleotide for detection of SNP TSC0048493
gttgtcgtaataa

SEQ ID NO: 196986 - DNA, 13 bp, Artificial Sequence
  Oligonucleotide for detection of SNP TSC0048493
ttattacgacaac

SEQ ID NO: 196987 - DNA, 13 bp, Artificial Sequence
  Oligonucleotide for detection of SNP TSC0048493
ttattatggtagy

SEQ ID NO: 196988 - DNA, 13 bp, Artificial Sequence
  Oligonucleotide for detection of SNP TSC0048493
rctaccataataa

SEQ ID NO: 196989 - DNA, 13 bp, Artificial Sequence
  Oligonucleotide for detection of SNP TSC0048493
ttattacggtagy

SEQ ID NO: 196990 - DNA, 13 bp, Artificial Sequence
  Oligonucleotide for detection of SNP TSC0048493
rctaccgtaataa

SEQ ID NO: 196991 - DNA, 13 bp, Artificial Sequence
  Oligonucleotide for detection of SNP TSC0048494
taggatagatagt

SEQ ID NO: 196992 - DNA, 13 bp, Artificial Sequence
  Oligonucleotide for detection of SNP TSC0048494
actatctatccta

SEQ ID NO: 196993 - DNA, 13 bp, Artificial Sequence
  Oligonucleotide for detection of SNP TSC0048494
taggatggatagt

SEQ ID NO: 196994 - DNA, 13 bp, Artificial Sequence
  Oligonucleotide for detection of SNP TSC0048494
actatccatccta

SEQ ID NO: 196995 - DNA, 13 bp, Artificial Sequence
  Oligonucleotide for detection of SNP TSC0048495
gtgtatatttgty

SEQ ID NO: 196996 - DNA, 13 bp, Artificial Sequence
  Oligonucleotide for detection of SNP TSC0048495
racaaatatacac

SEQ ID NO: 196997 - DNA, 13 bp, Artificial Sequence
  Oligonucleotide for detection of SNP TSC0048495
gtgtatgtttgty

SEQ ID NO: 196998 - DNA, 13 bp, Artificial Sequence
  Oligonucleotide for detection of SNP TSC0048495
racaaacatacac

SEQ ID NO: 196999 - DNA, 13 bp, Artificial Sequence
  Oligonucleotide for detection of SNP TSC0048495
gtgtacgtttgty

SEQ ID NO: 197000 - DNA, 13 bp, Artificial Sequence
  Oligonucleotide for detection of SNP TSC0048495
racaaacgtacac

SEQ ID NO: 197001 - DNA, 13 bp, Artificial Sequence
  Oligonucleotide for detection of SNP TSC0048495
gataggtgtgtay

SEQ ID NO: 197002 - DNA, 13 bp, Artificial Sequence
  Oligonucleotide for detection of SNP TSC0048495
rtacacacctatc

SEQ ID NO: 197003 - DNA, 13 bp, Artificial Sequence
  Oligonucleotide for detection of SNP TSC0048495
gataggcgtgtay

SEQ ID NO: 197004 - DNA, 13 bp, Artificial Sequence
  Oligonucleotide for detection of SNP TSC0048495
rtacacgcctatc

SEQ ID NO: 197005 - DNA, 13 bp, Artificial Sequence
  Oligonucleotide for detection of SNP TSC0048496
atgtggatgtgta

SEQ ID NO: 197006 - DNA, 13 bp, Artificial Sequence
  Oligonucleotide for detection of SNP TSC0048496
tacacatccacat

SEQ ID NO: 197007 - DNA, 13 bp, Artificial Sequence
  Oligonucleotide for detection of SNP TSC0048496
atgtggttgtgta

SEQ ID NO: 197008 - DNA, 13 bp, Artificial Sequence
  Oligonucleotide for detection of SNP TSC0048496
tacacaaccacat

SEQ ID NO: 197009 - DNA, 13 bp, Artificial Sequence
  Oligonucleotide for detection of SNP TSC0048496
atgtggacgtgta

SEQ ID NO: 197010 - DNA, 13 bp, Artificial Sequence
  Oligonucleotide for detection of SNP TSC0048496
tacacgtccacat

SEQ ID NO: 197011 - DNA, 13 bp, Artificial Sequence
  Oligonucleotide for detection of SNP TSC0048496
atgtggtcgtgta

SEQ ID NO: 197012 - DNA, 13 bp, Artificial Sequence
  Oligonucleotide for detection of SNP TSC0048496
tacacgaccacat

SEQ ID NO: 197013 - DNA, 13 bp, Artificial Sequence
  Oligonucleotide for detection of SNP TSC0048496
tatatgtttatat

SEQ ID NO: 197014 - DNA, 13 bp, Artificial Sequence
  Oligonucleotide for detection of SNP TSC0048496
atataaacatata

SEQ ID NO: 197015 - DNA, 13 bp, Artificial Sequence
  Oligonucleotide for detection of SNP TSC0048496
tatatggttatat

SEQ ID NO: 197016 - DNA, 13 bp, Artificial Sequence
  Oligonucleotide for detection of SNP TSC0048496
atataaccatata

SEQ ID NO: 197017 - DNA, 13 bp, Artificial Sequence
  Oligonucleotide for detection of SNP TSC0048496
tatacgtttatat

SEQ ID NO: 197018 - DNA, 13 bp, Artificial Sequence
  Oligonucleotide for detection of SNP TSC0048496
atataaacgtata

SEQ ID NO: 197019 - DNA, 13 bp, Artificial Sequence
  Oligonucleotide for detection of SNP TSC0048496
tatacggttatat

SEQ ID NO: 197020 - DNA, 13 bp, Artificial Sequence
  Oligonucleotide for detection of SNP TSC0048496
atataaccgtata

SEQ ID NO: 197021 - DNA, 13 bp, Artificial Sequence
  Oligonucleotide for detection of SNP TSC0006087
ttatttaaattga

SEQ ID NO: 197022 - DNA, 13 bp, Artificial Sequence
  Oligonucleotide for detection of SNP TSC0006087
tcaatttaaataa

SEQ ID NO: 197023 - DNA, 13 bp, Artificial Sequence
  Oligonucleotide for detection of SNP TSC0006087
ttattttaattga

SEQ ID NO: 197024 - DNA, 13 bp, Artificial Sequence
  Oligonucleotide for detection of SNP TSC0006087
tcaattaaaataa

SEQ ID NO: 197025 - DNA, 13 bp, Artificial Sequence
  Oligonucleotide for detection of SNP TSC0006087
ttagtttaagtaa

SEQ ID NO: 197026 - DNA, 13 bp, Artificial Sequence
  Oligonucleotide for detection of SNP TSC0006087
ttacttaaactaa

SEQ ID NO: 197027 - DNA, 13 bp, Artificial Sequence
  Oligonucleotide for detection of SNP TSC0006087
ttagttgaagtaa

SEQ ID NO: 197028 - DNA, 13 bp, Artificial Sequence
  Oligonucleotide for detection of SNP TSC0006087
ttacttcaactaa

SEQ ID NO: 197029 - DNA, 13 bp, Artificial Sequence
  Oligonucleotide for detection of SNP TSC0006088
aaataaatagaty

SEQ ID NO: 197030 - DNA, 13 bp, Artificial Sequence
  Oligonucleotide for detection of SNP TSC0006088
ratctatttattt

SEQ ID NO: 197031 - DNA, 13 bp, Artificial Sequence
  Oligonucleotide for detection of SNP TSC0006088
aaataagtagaty

SEQ ID NO: 197032 - DNA, 13 bp, Artificial Sequence
  Oligonucleotide for detection of SNP TSC0006088
ratctacttattt

SEQ ID NO: 197033 - DNA, 13 bp, Artificial Sequence
  Oligonucleotide for detection of SNP TSC0048497
tttagtataatga

SEQ ID NO: 197034 - DNA, 13 bp, Artificial Sequence
  Oligonucleotide for detection of SNP TSC0048497
tcattatactaaa

SEQ ID NO: 197035 - DNA, 13 bp, Artificial Sequence
  Oligonucleotide for detection of SNP TSC0048497
tttagtgtaatga

SEQ ID NO: 197036 - DNA, 13 bp, Artificial Sequence
  Oligonucleotide for detection of SNP TSC0048497
tcattacactaaa

SEQ ID NO: 197037 - DNA, 13 bp, Artificial Sequence
  Oligonucleotide for detection of SNP TSC0048498
gtttaaaaagtgt

SEQ ID NO: 197038 - DNA, 13 bp, Artificial Sequence
  Oligonucleotide for detection of SNP TSC0048498
acactttttaaac

SEQ ID NO: 197039 - DNA, 13 bp, Artificial Sequence
  Oligonucleotide for detection of SNP TSC0048498
gtttaataagtgt

SEQ ID NO: 197040 - DNA, 13 bp, Artificial Sequence
  Oligonucleotide for detection of SNP TSC0048498
acacttattaaac

SEQ ID NO: 197041 - DNA, 13 bp, Artificial Sequence
  Oligonucleotide for detection of SNP TSC0048498
atattttttgaay

SEQ ID NO: 197042 - DNA, 13 bp, Artificial Sequence
  Oligonucleotide for detection of SNP TSC0048498
rttcaaaaaatat

SEQ ID NO: 197043 - DNA, 13 bp, Artificial Sequence
  Oligonucleotide for detection of SNP TSC0048498
atatttgttgaay

SEQ ID NO: 197044 - DNA, 13 bp, Artificial Sequence
  Oligonucleotide for detection of SNP TSC0048498
rttcaacaaatat

SEQ ID NO: 197045 - DNA, 13 bp, Artificial Sequence
  Oligonucleotide for detection of SNP TSC0048502
tatttataggtaa

SEQ ID NO: 197046 - DNA, 13 bp, Artificial Sequence
  Oligonucleotide for detection of SNP TSC0048502
ttacctataaata

SEQ ID NO: 197047 - DNA, 13 bp, Artificial Sequence
  Oligonucleotide for detection of SNP TSC0048502
tatttagaggtaa

SEQ ID NO: 197048 - DNA, 13 bp, Artificial Sequence
  Oligonucleotide for detection of SNP TSC0048502
ttacctctaaata

SEQ ID NO: 197049 - DNA, 13 bp, Artificial Sequence
  Oligonucleotide for detection of SNP TSC0048502
ttgtttttaagta

SEQ ID NO: 197050 - DNA, 13 bp, Artificial Sequence
  Oligonucleotide for detection of SNP TSC0048502
tacttaaaaacaa

SEQ ID NO: 197051 - DNA, 13 bp, Artificial Sequence
  Oligonucleotide for detection of SNP TSC0048503
aattttaatgtag

SEQ ID NO: 197052 - DNA, 13 bp, Artificial Sequence
  Oligonucleotide for detection of SNP TSC0048503
ctacattaaaatt

SEQ ID NO: 197053 - DNA, 13 bp, Artificial Sequence
  Oligonucleotide for detection of SNP TSC0048503
aattttgatgtag

SEQ ID NO: 197054 - DNA, 13 bp, Artificial Sequence
  Oligonucleotide for detection of SNP TSC0048503
ctacatcaaaatt

SEQ ID NO: 197055 - DNA, 13 bp, Artificial Sequence
  Oligonucleotide for detection of SNP TSC0048504
ttaataataaaty

SEQ ID NO: 197056 - DNA, 13 bp, Artificial Sequence
  Oligonucleotide for detection of SNP TSC0048504
ratttattattaa

SEQ ID NO: 197057 - DNA, 13 bp, Artificial Sequence
  Oligonucleotide for detection of SNP TSC0048504
ttaatattaaaty

SEQ ID NO: 197058 - DNA, 13 bp, Artificial Sequence
  Oligonucleotide for detection of SNP TSC0048504
ratttaatattaa

SEQ ID NO: 197059 - DNA, 13 bp, Artificial Sequence
  Oligonucleotide for detection of SNP TSC0048505
aaatgagaaggta

SEQ ID NO: 197060 - DNA, 13 bp, Artificial Sequence
  Oligonucleotide for detection of SNP TSC0048505
taccttctcattt

SEQ ID NO: 197061 - DNA, 13 bp, Artificial Sequence
  Oligonucleotide for detection of SNP TSC0048505
aaatgaaaaggta

SEQ ID NO: 197062 - DNA, 13 bp, Artificial Sequence
  Oligonucleotide for detection of SNP TSC0048505
taccttttcattt

SEQ ID NO: 197063 - DNA, 13 bp, Artificial Sequence
  Oligonucleotide for detection of SNP TSC0048506
agatgatgttaag

SEQ ID NO: 197064 - DNA, 13 bp, Artificial Sequence
  Oligonucleotide for detection of SNP TSC0048506
cttaacatcatct

SEQ ID NO: 197065 - DNA, 13 bp, Artificial Sequence
  Oligonucleotide for detection of SNP TSC0048506
agatgacgttaag

SEQ ID NO: 197066 - DNA, 13 bp, Artificial Sequence
  Oligonucleotide for detection of SNP TSC0048506
cttaacgtcatct

SEQ ID NO: 197067 - DNA, 13 bp, Artificial Sequence
  Oligonucleotide for detection of SNP TSC0048507
ggttaaatatatt

SEQ ID NO: 197068 - DNA, 13 bp, Artificial Sequence
  Oligonucleotide for detection of SNP TSC0048507
aatatatttaacc

SEQ ID NO: 197069 - DNA, 13 bp, Artificial Sequence
  Oligonucleotide for detection of SNP TSC0048507
ggttaattatatt

SEQ ID NO: 197070 - DNA, 13 bp, Artificial Sequence
  Oligonucleotide for detection of SNP TSC0048507
aatataattaacc

SEQ ID NO: 197071 - DNA, 13 bp, Artificial Sequence
  Oligonucleotide for detection of SNP TSC0048509
atttttgtgaatt

SEQ ID NO: 197072 - DNA, 13 bp, Artificial Sequence
  Oligonucleotide for detection of SNP TSC0048509
aattcacaaaaat

SEQ ID NO: 197073 - DNA, 13 bp, Artificial Sequence
  Oligonucleotide for detection of SNP TSC0048510
attaagaaggtaa

SEQ ID NO: 197074 - DNA, 13 bp, Artificial Sequence
  Oligonucleotide for detection of SNP TSC0048510
ttaccttcttaat

SEQ ID NO: 197075 - DNA, 13 bp, Artificial Sequence
  Oligonucleotide for detection of SNP TSC0048510
attaagtaggtaa

SEQ ID NO: 197076 - DNA, 13 bp, Artificial Sequence
  Oligonucleotide for detection of SNP TSC0048510
ttacctacttaat

SEQ ID NO: 197077 - DNA, 13 bp, Artificial Sequence
  Oligonucleotide for detection of SNP TSC0048510
ttgtttttttaat

SEQ ID NO: 197078 - DNA, 13 bp, Artificial Sequence
  Oligonucleotide for detection of SNP TSC0048510
attaaaaaaacaa

SEQ ID NO: 197079 - DNA, 13 bp, Artificial Sequence
  Oligonucleotide for detection of SNP TSC0048511
tggggagggtggt

SEQ ID NO: 197080 - DNA, 13 bp, Artificial Sequence
  Oligonucleotide for detection of SNP TSC0048511
accaccctcccca

SEQ ID NO: 197081 - DNA, 13 bp, Artificial Sequence
  Oligonucleotide for detection of SNP TSC0048511
tggggaaggtggt

SEQ ID NO: 197082 - DNA, 13 bp, Artificial Sequence
  Oligonucleotide for detection of SNP TSC0048511
accaccttcccca

SEQ ID NO: 197083 - DNA, 13 bp, Artificial Sequence
  Oligonucleotide for detection of SNP TSC0048511
cggggagggtggt

SEQ ID NO: 197084 - DNA, 13 bp, Artificial Sequence
  Oligonucleotide for detection of SNP TSC0048511
accaccctccccg

SEQ ID NO: 197085 - DNA, 13 bp, Artificial Sequence
  Oligonucleotide for detection of SNP TSC0048511
cggggaaggtggt

SEQ ID NO: 197086 - DNA, 13 bp, Artificial Sequence
  Oligonucleotide for detection of SNP TSC0048511
accaccttccccg

SEQ ID NO: 197087 - DNA, 13 bp, Artificial Sequence
  Oligonucleotide for detection of SNP TSC0004544
agaaatgtggaag

SEQ ID NO: 197088 - DNA, 13 bp, Artificial Sequence
  Oligonucleotide for detection of SNP TSC0004544
cttccacatttct

SEQ ID NO: 197089 - DNA, 13 bp, Artificial Sequence
  Oligonucleotide for detection of SNP TSC0004544
agaaatatggaag

SEQ ID NO: 197090 - DNA, 13 bp, Artificial Sequence
  Oligonucleotide for detection of SNP TSC0004544
cttccatatttct

SEQ ID NO: 197091 - DNA, 13 bp, Artificial Sequence
  Oligonucleotide for detection of SNP TSC0048513
tttttatgtgtag

SEQ ID NO: 197092 - DNA, 13 bp, Artificial Sequence
  Oligonucleotide for detection of SNP TSC0048513
ctacacataaaaa

SEQ ID NO: 197093 - DNA, 13 bp, Artificial Sequence
  Oligonucleotide for detection of SNP TSC0048513
tttttacgtgtag

SEQ ID NO: 197094 - DNA, 13 bp, Artificial Sequence
  Oligonucleotide for detection of SNP TSC0048513
ctacacgtaaaaa

SEQ ID NO: 197095 - DNA, 13 bp, Artificial Sequence
  Oligonucleotide for detection of SNP TSC0048513
ttgtatgtggaaa

SEQ ID NO: 197096 - DNA, 13 bp, Artificial Sequence
  Oligonucleotide for detection of SNP TSC0048513
tttccacatacaa

SEQ ID NO: 197097 - DNA, 13 bp, Artificial Sequence
  Oligonucleotide for detection of SNP TSC0048513
ttgtatatggaaa

SEQ ID NO: 197098 - DNA, 13 bp, Artificial Sequence
  Oligonucleotide for detection of SNP TSC0048513
tttccatatacaa

SEQ ID NO: 197099 - DNA, 13 bp, Artificial Sequence
  Oligonucleotide for detection of SNP TSC0048513
ttgtacgtggaaa

SEQ ID NO: 197100 - DNA, 13 bp, Artificial Sequence
  Oligonucleotide for detection of SNP TSC0048513
tttccacgtacaa

SEQ ID NO: 197101 - DNA, 13 bp, Artificial Sequence
  Oligonucleotide for detection of SNP TSC0048514
attttatgataaa

SEQ ID NO: 197102 - DNA, 13 bp, Artificial Sequence
  Oligonucleotide for detection of SNP TSC0048514
tttatcataaaat

SEQ ID NO: 197103 - DNA, 13 bp, Artificial Sequence
  Oligonucleotide for detection of SNP TSC0048514
attttacgataaa

SEQ ID NO: 197104 - DNA, 13 bp, Artificial Sequence
  Oligonucleotide for detection of SNP TSC0048514
tttatcgtaaaat

SEQ ID NO: 197105 - DNA, 13 bp, Artificial Sequence
  Oligonucleotide for detection of SNP TSC0048514
tttattgtggaat

SEQ ID NO: 197106 - DNA, 13 bp, Artificial Sequence
  Oligonucleotide for detection of SNP TSC0048514
attccacaataaa

SEQ ID NO: 197107 - DNA, 13 bp, Artificial Sequence
  Oligonucleotide for detection of SNP TSC0048514
tttattatggaat

SEQ ID NO: 197108 - DNA, 13 bp, Artificial Sequence
  Oligonucleotide for detection of SNP TSC0048514
attccataataaa

SEQ ID NO: 197109 - DNA, 13 bp, Artificial Sequence
  Oligonucleotide for detection of SNP TSC0048514
tttatcgtggaat

SEQ ID NO: 197110 - DNA, 13 bp, Artificial Sequence
  Oligonucleotide for detection of SNP TSC0048514
attccacgataaa

SEQ ID NO: 197111 - DNA, 13 bp, Artificial Sequence
  Oligonucleotide for detection of SNP TSC0009059
aatattatttata

SEQ ID NO: 197112 - DNA, 13 bp, Artificial Sequence
  Oligonucleotide for detection of SNP TSC0009059
tataaataatatt

SEQ ID NO: 197113 - DNA, 13 bp, Artificial Sequence
  Oligonucleotide for detection of SNP TSC0009059
aatattgtttata

SEQ ID NO: 197114 - DNA, 13 bp, Artificial Sequence
  Oligonucleotide for detection of SNP TSC0009059
tataaacaatatt

SEQ ID NO: 197115 - DNA, 13 bp, Artificial Sequence
  Oligonucleotide for detection of SNP TSC0009059
aatatcgtttata

SEQ ID NO: 197116 - DNA, 13 bp, Artificial Sequence
  Oligonucleotide for detection of SNP TSC0009059
tataaacgatatt

SEQ ID NO: 197117 - DNA, 13 bp, Artificial Sequence
  Oligonucleotide for detection of SNP TSC0009059
tataagtgatatt

SEQ ID NO: 197118 - DNA, 13 bp, Artificial Sequence
  Oligonucleotide for detection of SNP TSC0009059
aatatcacttata

SEQ ID NO: 197119 - DNA, 13 bp, Artificial Sequence
  Oligonucleotide for detection of SNP TSC0009059
tataagcgatatt

SEQ ID NO: 197120 - DNA, 13 bp, Artificial Sequence
  Oligonucleotide for detection of SNP TSC0009059
aatatcgcttata

SEQ ID NO: 197121 - DNA, 13 bp, Artificial Sequence
  Oligonucleotide for detection of SNP TSC0048519
aggaatgatggaa

SEQ ID NO: 197122 - DNA, 13 bp, Artificial Sequence
  Oligonucleotide for detection of SNP TSC0048519
ttccatcattcct

SEQ ID NO: 197123 - DNA, 13 bp, Artificial Sequence
  Oligonucleotide for detection of SNP TSC0048519
aggaataatggaa

SEQ ID NO: 197124 - DNA, 13 bp, Artificial Sequence
  Oligonucleotide for detection of SNP TSC0048519
ttccattattcct

SEQ ID NO: 197125 - DNA, 13 bp, Artificial Sequence
  Oligonucleotide for detection of SNP TSC0048521
tttttgaattttg

SEQ ID NO: 197126 - DNA, 13 bp, Artificial Sequence
  Oligonucleotide for detection of SNP TSC0048521
caaaattcaaaaa

SEQ ID NO: 197127 - DNA, 13 bp, Artificial Sequence
  Oligonucleotide for detection of SNP TSC0048521
tttttgtattttg

SEQ ID NO: 197128 - DNA, 13 bp, Artificial Sequence
  Oligonucleotide for detection of SNP TSC0048521
caaaatacaaaaa

SEQ ID NO: 197129 - DNA, 13 bp, Artificial Sequence
  Oligonucleotide for detection of SNP TSC0048521
taaagtttaagga

SEQ ID NO: 197130 - DNA, 13 bp, Artificial Sequence
  Oligonucleotide for detection of SNP TSC0048521
tccttaaacttta

SEQ ID NO: 197131 - DNA, 13 bp, Artificial Sequence
  Oligonucleotide for detection of SNP TSC0048521
taaagtataagga

SEQ ID NO: 197132 - DNA, 13 bp, Artificial Sequence
  Oligonucleotide for detection of SNP TSC0048521
tccttatacttta

SEQ ID NO: 197133 - DNA, 13 bp, Artificial Sequence
  Oligonucleotide for detection of SNP TSC0048522
ttattgtattagy

SEQ ID NO: 197134 - DNA, 13 bp, Artificial Sequence
  Oligonucleotide for detection of SNP TSC0048522
rctaatacaataa

SEQ ID NO: 197135 - DNA, 13 bp, Artificial Sequence
  Oligonucleotide for detection of SNP TSC0048522
ttattggattagy

SEQ ID NO: 197136 - DNA, 13 bp, Artificial Sequence
  Oligonucleotide for detection of SNP TSC0048522
rctaatccaataa

SEQ ID NO: 197137 - DNA, 13 bp, Artificial Sequence
  Oligonucleotide for detection of SNP TSC0048522
gttggtgtaatga

SEQ ID NO: 197138 - DNA, 13 bp, Artificial Sequence
  Oligonucleotide for detection of SNP TSC0048522
tcattacaccaac

SEQ ID NO: 197139 - DNA, 13 bp, Artificial Sequence
  Oligonucleotide for detection of SNP TSC0048522
gttggtttaatga

SEQ ID NO: 197140 - DNA, 13 bp, Artificial Sequence
  Oligonucleotide for detection of SNP TSC0048522
tcattaaaccaac

SEQ ID NO: 197141 - DNA, 13 bp, Artificial Sequence
  Oligonucleotide for detection of SNP TSC0048523
atttaaaatatgt

SEQ ID NO: 197142 - DNA, 13 bp, Artificial Sequence
  Oligonucleotide for detection of SNP TSC0048523
acatattttaaat

SEQ ID NO: 197143 - DNA, 13 bp, Artificial Sequence
  Oligonucleotide for detection of SNP TSC0048523
atttaatatatgt

SEQ ID NO: 197144 - DNA, 13 bp, Artificial Sequence
  Oligonucleotide for detection of SNP TSC0048523
acatatattaaat

SEQ ID NO: 197145 - DNA, 13 bp, Artificial Sequence
  Oligonucleotide for detection of SNP TSC0048523
atatgttttagat

SEQ ID NO: 197146 - DNA, 13 bp, Artificial Sequence
  Oligonucleotide for detection of SNP TSC0048523
atctaaaacatat

SEQ ID NO: 197147 - DNA, 13 bp, Artificial Sequence
  Oligonucleotide for detection of SNP TSC0048523
atatgtattagat

SEQ ID NO: 197148 - DNA, 13 bp, Artificial Sequence
  Oligonucleotide for detection of SNP TSC0048523
atctaatacatat

SEQ ID NO: 197149 - DNA, 13 bp, Artificial Sequence
  Oligonucleotide for detection of SNP TSC0005528
tgaatagaaggaa

SEQ ID NO: 197150 - DNA, 13 bp, Artificial Sequence
  Oligonucleotide for detection of SNP TSC0005528
ttccttctattca

SEQ ID NO: 197151 - DNA, 13 bp, Artificial Sequence
  Oligonucleotide for detection of SNP TSC0005528
tgaataaaaggaa

SEQ ID NO: 197152 - DNA, 13 bp, Artificial Sequence
  Oligonucleotide for detection of SNP TSC0005528
ttccttttattca

SEQ ID NO: 197153 - DNA, 13 bp, Artificial Sequence
  Oligonucleotide for detection of SNP TSC0048524
ataggttgttagg

SEQ ID NO: 197154 - DNA, 13 bp, Artificial Sequence
  Oligonucleotide for detection of SNP TSC0048524
cctaacaacctat

SEQ ID NO: 197155 - DNA, 13 bp, Artificial Sequence
  Oligonucleotide for detection of SNP TSC0048524
ataggtggttagg

SEQ ID NO: 197156 - DNA, 13 bp, Artificial Sequence
  Oligonucleotide for detection of SNP TSC0048524
cctaaccacctat

SEQ ID NO: 197157 - DNA, 13 bp, Artificial Sequence
  Oligonucleotide for detection of SNP TSC0048524
tttggtaatttgt

SEQ ID NO: 197158 - DNA, 13 bp, Artificial Sequence
  Oligonucleotide for detection of SNP TSC0048524
acaaattaccaaa

SEQ ID NO: 197159 - DNA, 13 bp, Artificial Sequence
  Oligonucleotide for detection of SNP TSC0048524
tttggttatttgt

SEQ ID NO: 197160 - DNA, 13 bp, Artificial Sequence
  Oligonucleotide for detection of SNP TSC0048524
acaaataaccaaa

SEQ ID NO: 197161 - DNA, 13 bp, Artificial Sequence
  Oligonucleotide for detection of SNP TSC0048525
gaaaagtaaaaaa

SEQ ID NO: 197162 - DNA, 13 bp, Artificial Sequence
  Oligonucleotide for detection of SNP TSC0048525
ttttttacttttc

SEQ ID NO: 197163 - DNA, 13 bp, Artificial Sequence
  Oligonucleotide for detection of SNP TSC0048525
gaaaaggaaaaaa

SEQ ID NO: 197164 - DNA, 13 bp, Artificial Sequence
  Oligonucleotide for detection of SNP TSC0048525
ttttttccttttc

SEQ ID NO: 197165 - DNA, 13 bp, Artificial Sequence
  Oligonucleotide for detection of SNP TSC0048526
aattttagtattg

SEQ ID NO: 197166 - DNA, 13 bp, Artificial Sequence
  Oligonucleotide for detection of SNP TSC0048526
caatactaaaatt

SEQ ID NO: 197167 - DNA, 13 bp, Artificial Sequence
  Oligonucleotide for detection of SNP TSC0048526
aattttggtattg

SEQ ID NO: 197168 - DNA, 13 bp, Artificial Sequence
  Oligonucleotide for detection of SNP TSC0048526
caataccaaaatt

SEQ ID NO: 197169 - DNA, 13 bp, Artificial Sequence
  Oligonucleotide for detection of SNP TSC0048526
aatttcggtattg

SEQ ID NO: 197170 - DNA, 13 bp, Artificial Sequence
  Oligonucleotide for detection of SNP TSC0048526
caataccgaaatt

SEQ ID NO: 197171 - DNA, 13 bp, Artificial Sequence
  Oligonucleotide for detection of SNP TSC0048526
tagtgttggaatt

SEQ ID NO: 197172 - DNA, 13 bp, Artificial Sequence
  Oligonucleotide for detection of SNP TSC0048526
aattccaacacta

SEQ ID NO: 197173 - DNA, 13 bp, Artificial Sequence
  Oligonucleotide for detection of SNP TSC0048526
tagtgtcggaatt

SEQ ID NO: 197174 - DNA, 13 bp, Artificial Sequence
  Oligonucleotide for detection of SNP TSC0048526
aattccgacacta

SEQ ID NO: 197175 - DNA, 13 bp, Artificial Sequence
  Oligonucleotide for detection of SNP TSC0008787
agtagatatggta

SEQ ID NO: 197176 - DNA, 13 bp, Artificial Sequence
  Oligonucleotide for detection of SNP TSC0008787
taccatatctact

SEQ ID NO: 197177 - DNA, 13 bp, Artificial Sequence
  Oligonucleotide for detection of SNP TSC0008787
agtagagatggta

SEQ ID NO: 197178 - DNA, 13 bp, Artificial Sequence
  Oligonucleotide for detection of SNP TSC0008787
taccatctctact

SEQ ID NO: 197179 - DNA, 13 bp, Artificial Sequence
  Oligonucleotide for detection of SNP TSC0008787
tattatttttatt

SEQ ID NO: 197180 - DNA, 13 bp, Artificial Sequence
  Oligonucleotide for detection of SNP TSC0008787
aataaaaataata

SEQ ID NO: 197181 - DNA, 13 bp, Artificial Sequence
  Oligonucleotide for detection of SNP TSC0008788
ggatgaatattty

SEQ ID NO: 197182 - DNA, 13 bp, Artificial Sequence
  Oligonucleotide for detection of SNP TSC0008788
raaatattcatcc

SEQ ID NO: 197183 - DNA, 13 bp, Artificial Sequence
  Oligonucleotide for detection of SNP TSC0008788
ggatgagtattty

SEQ ID NO: 197184 - DNA, 13 bp, Artificial Sequence
  Oligonucleotide for detection of SNP TSC0008788
raaatactcatcc

SEQ ID NO: 197185 - DNA, 13 bp, Artificial Sequence
  Oligonucleotide for detection of SNP TSC0008788
ggacgaatattty

SEQ ID NO: 197186 - DNA, 13 bp, Artificial Sequence
  Oligonucleotide for detection of SNP TSC0008788
raaatattcgtcc

SEQ ID NO: 197187 - DNA, 13 bp, Artificial Sequence
  Oligonucleotide for detection of SNP TSC0008788
ggacgagtattty

SEQ ID NO: 197188 - DNA, 13 bp, Artificial Sequence
  Oligonucleotide for detection of SNP TSC0008788
raaatactcgtcc

SEQ ID NO: 197189 - DNA, 13 bp, Artificial Sequence
  Oligonucleotide for detection of SNP TSC0048527
atgtagtgaatay

SEQ ID NO: 197190 - DNA, 13 bp, Artificial Sequence
  Oligonucleotide for detection of SNP TSC0048527
rtattcactacat

SEQ ID NO: 197191 - DNA, 13 bp, Artificial Sequence
  Oligonucleotide for detection of SNP TSC0048527
acgtagtgaatay

SEQ ID NO: 197192 - DNA, 13 bp, Artificial Sequence
  Oligonucleotide for detection of SNP TSC0048527
rtattcactacgt

SEQ ID NO: 197193 - DNA, 13 bp, Artificial Sequence
  Oligonucleotide for detection of SNP TSC0048527
atgtagcgaatay

SEQ ID NO: 197194 - DNA, 13 bp, Artificial Sequence
  Oligonucleotide for detection of SNP TSC0048527
rtattcgctacat

SEQ ID NO: 197195 - DNA, 13 bp, Artificial Sequence
  Oligonucleotide for detection of SNP TSC0048527
acgtagcgaatay

SEQ ID NO: 197196 - DNA, 13 bp, Artificial Sequence
  Oligonucleotide for detection of SNP TSC0048527
rtattcgctacgt

SEQ ID NO: 197197 - DNA, 13 bp, Artificial Sequence
  Oligonucleotide for detection of SNP TSC0048527
gtgtttgttgtgt

SEQ ID NO: 197198 - DNA, 13 bp, Artificial Sequence
  Oligonucleotide for detection of SNP TSC0048527
acacaacaaacac

SEQ ID NO: 197199 - DNA, 13 bp, Artificial Sequence
  Oligonucleotide for detection of SNP TSC0048527
gtgtttattgtgt

SEQ ID NO: 197200 - DNA, 13 bp, Artificial Sequence
  Oligonucleotide for detection of SNP TSC0048527
acacaataaacac

SEQ ID NO: 197201 - DNA, 13 bp, Artificial Sequence
  Oligonucleotide for detection of SNP TSC0048527
gtgttcgttgtgt

SEQ ID NO: 197202 - DNA, 13 bp, Artificial Sequence
  Oligonucleotide for detection of SNP TSC0048527
acacaacgaacac

SEQ ID NO: 197203 - DNA, 13 bp, Artificial Sequence
  Oligonucleotide for detection of SNP TSC0048527
gtgtttattgcgt

SEQ ID NO: 197204 - DNA, 13 bp, Artificial Sequence
  Oligonucleotide for detection of SNP TSC0048527
acgcaataaacac

SEQ ID NO: 197205 - DNA, 13 bp, Artificial Sequence
  Oligonucleotide for detection of SNP TSC0048527
gtgtttgttgcgt

SEQ ID NO: 197206 - DNA, 13 bp, Artificial Sequence
  Oligonucleotide for detection of SNP TSC0048527
acgcaacaaacac

SEQ ID NO: 197207 - DNA, 13 bp, Artificial Sequence
  Oligonucleotide for detection of SNP TSC0048527
gtgttcgttgcgt

SEQ ID NO: 197208 - DNA, 13 bp, Artificial Sequence
  Oligonucleotide for detection of SNP TSC0048527
acgcaacgaacac

SEQ ID NO: 197209 - DNA, 13 bp, Artificial Sequence
  Oligonucleotide for detection of SNP TSC0048528
tagtataatttag

SEQ ID NO: 197210 - DNA, 13 bp, Artificial Sequence
  Oligonucleotide for detection of SNP TSC0048528
ctaaattatacta

SEQ ID NO: 197211 - DNA, 13 bp, Artificial Sequence
  Oligonucleotide for detection of SNP TSC0048528
tagtatgatttag

SEQ ID NO: 197212 - DNA, 13 bp, Artificial Sequence
  Oligonucleotide for detection of SNP TSC0048528
ctaaatcatacta

SEQ ID NO: 197213 - DNA, 13 bp, Artificial Sequence
  Oligonucleotide for detection of SNP TSC0007482
tataggaaatatg

SEQ ID NO: 197214 - DNA, 13 bp, Artificial Sequence
  Oligonucleotide for detection of SNP TSC0007482
catatttcctata

SEQ ID NO: 197215 - DNA, 13 bp, Artificial Sequence
  Oligonucleotide for detection of SNP TSC0007482
tatagggaatatg

SEQ ID NO: 197216 - DNA, 13 bp, Artificial Sequence
  Oligonucleotide for detection of SNP TSC0007482
catattccctata

SEQ ID NO: 197217 - DNA, 13 bp, Artificial Sequence
  Oligonucleotide for detection of SNP TSC0048530
tgtaaatgtataa

SEQ ID NO: 197218 - DNA, 13 bp, Artificial Sequence
  Oligonucleotide for detection of SNP TSC0048530
ttatacatttaca

SEQ ID NO: 197219 - DNA, 13 bp, Artificial Sequence
  Oligonucleotide for detection of SNP TSC0048530
tgtaaacgtataa

SEQ ID NO: 197220 - DNA, 13 bp, Artificial Sequence
  Oligonucleotide for detection of SNP TSC0048530
ttatacgtttaca

SEQ ID NO: 197221 - DNA, 13 bp, Artificial Sequence
  Oligonucleotide for detection of SNP TSC0048531
ttaagttgttata

SEQ ID NO: 197222 - DNA, 13 bp, Artificial Sequence
  Oligonucleotide for detection of SNP TSC0048531
tataacaacttaa

SEQ ID NO: 197223 - DNA, 13 bp, Artificial Sequence
  Oligonucleotide for detection of SNP TSC0048531
ttaagtggttata

SEQ ID NO: 197224 - DNA, 13 bp, Artificial Sequence
  Oligonucleotide for detection of SNP TSC0048531
tataaccacttaa

SEQ ID NO: 197225 - DNA, 13 bp, Artificial Sequence
  Oligonucleotide for detection of SNP TSC0048531
tatgataatttga

SEQ ID NO: 197226 - DNA, 13 bp, Artificial Sequence
  Oligonucleotide for detection of SNP TSC0048531
tcaaattatcata

SEQ ID NO: 197227 - DNA, 13 bp, Artificial Sequence
  Oligonucleotide for detection of SNP TSC0048531
tatgattatttga

SEQ ID NO: 197228 - DNA, 13 bp, Artificial Sequence
  Oligonucleotide for detection of SNP TSC0048531
tcaaataatcata

SEQ ID NO: 197229 - DNA, 13 bp, Artificial Sequence
  Oligonucleotide for detection of SNP TSC0048532
gaaatggaaatgy

SEQ ID NO: 197230 - DNA, 13 bp, Artificial Sequence
  Oligonucleotide for detection of SNP TSC0048532
rcatttccatttc

SEQ ID NO: 197231 - DNA, 13 bp, Artificial Sequence
  Oligonucleotide for detection of SNP TSC0048532
gaaatgaaaatgy

SEQ ID NO: 197232 - DNA, 13 bp, Artificial Sequence
  Oligonucleotide for detection of SNP TSC0048532
rcattttcatttc

SEQ ID NO: 197233 - DNA, 13 bp, Artificial Sequence
  Oligonucleotide for detection of SNP TSC0048533
gtgttggaagagt

SEQ ID NO: 197234 - DNA, 13 bp, Artificial Sequence
  Oligonucleotide for detection of SNP TSC0048533
actcttccaacac

SEQ ID NO: 197235 - DNA, 13 bp, Artificial Sequence
  Oligonucleotide for detection of SNP TSC0048533
gtgttgaaagagt

SEQ ID NO: 197236 - DNA, 13 bp, Artificial Sequence
  Oligonucleotide for detection of SNP TSC0048533
actctttcaacac

SEQ ID NO: 197237 - DNA, 13 bp, Artificial Sequence
  Oligonucleotide for detection of SNP TSC0048533
gcgttggaagagt

SEQ ID NO: 197238 - DNA, 13 bp, Artificial Sequence
  Oligonucleotide for detection of SNP TSC0048533
actcttccaacgc

SEQ ID NO: 197239 - DNA, 13 bp, Artificial Sequence
  Oligonucleotide for detection of SNP TSC0048533
gcgttgaaagagt

SEQ ID NO: 197240 - DNA, 13 bp, Artificial Sequence
  Oligonucleotide for detection of SNP TSC0048533
actctttcaacgc

SEQ ID NO: 197241 - DNA, 13 bp, Artificial Sequence
  Oligonucleotide for detection of SNP TSC0004854
tgatttatggtgt

SEQ ID NO: 197242 - DNA, 13 bp, Artificial Sequence
  Oligonucleotide for detection of SNP TSC0004854
acaccataaatca

SEQ ID NO: 197243 - DNA, 13 bp, Artificial Sequence
  Oligonucleotide for detection of SNP TSC0004854
tgatttgtggtgt

SEQ ID NO: 197244 - DNA, 13 bp, Artificial Sequence
  Oligonucleotide for detection of SNP TSC0004854
acaccacaaatca

SEQ ID NO: 197245 - DNA, 13 bp, Artificial Sequence
  Oligonucleotide for detection of SNP TSC0048536
taatttatattta

SEQ ID NO: 197246 - DNA, 13 bp, Artificial Sequence
  Oligonucleotide for detection of SNP TSC0048536
taaatataaatta

SEQ ID NO: 197247 - DNA, 13 bp, Artificial Sequence
  Oligonucleotide for detection of SNP TSC0048536
taatttgtattta

SEQ ID NO: 197248 - DNA, 13 bp, Artificial Sequence
  Oligonucleotide for detection of SNP TSC0048536
taaatacaaatta

SEQ ID NO: 197249 - DNA, 13 bp, Artificial Sequence
  Oligonucleotide for detection of SNP TSC0048537
taaaaggtagaaa

SEQ ID NO: 197250 - DNA, 13 bp, Artificial Sequence
  Oligonucleotide for detection of SNP TSC0048537
tttctacctttta

SEQ ID NO: 197251 - DNA, 13 bp, Artificial Sequence
  Oligonucleotide for detection of SNP TSC0048537
taaaagatagaaa

SEQ ID NO: 197252 - DNA, 13 bp, Artificial Sequence
  Oligonucleotide for detection of SNP TSC0048537
tttctatctttta

SEQ ID NO: 197253 - DNA, 13 bp, Artificial Sequence
  Oligonucleotide for detection of SNP TSC0048538
ggttatggggtta

SEQ ID NO: 197254 - DNA, 13 bp, Artificial Sequence
  Oligonucleotide for detection of SNP TSC0048538
taaccccataacc

SEQ ID NO: 197255 - DNA, 13 bp, Artificial Sequence
  Oligonucleotide for detection of SNP TSC0048538
ggttatagggtta

SEQ ID NO: 197256 - DNA, 13 bp, Artificial Sequence
  Oligonucleotide for detection of SNP TSC0048538
taaccctataacc

SEQ ID NO: 197257 - DNA, 13 bp, Artificial Sequence
  Oligonucleotide for detection of SNP TSC0048539
tttttgaataagg

SEQ ID NO: 197258 - DNA, 13 bp, Artificial Sequence
  Oligonucleotide for detection of SNP TSC0048539
ccttattcaaaaa

SEQ ID NO: 197259 - DNA, 13 bp, Artificial Sequence
  Oligonucleotide for detection of SNP TSC0048539
tttttgtataagg

SEQ ID NO: 197260 - DNA, 13 bp, Artificial Sequence
  Oligonucleotide for detection of SNP TSC0048539
ccttatacaaaaa

SEQ ID NO: 197261 - DNA, 13 bp, Artificial Sequence
  Oligonucleotide for detection of SNP TSC0048539
ttttgtttaagga

SEQ ID NO: 197262 - DNA, 13 bp, Artificial Sequence
  Oligonucleotide for detection of SNP TSC0048539
tccttaaacaaaa

SEQ ID NO: 197263 - DNA, 13 bp, Artificial Sequence
  Oligonucleotide for detection of SNP TSC0048539
ttttgtgtaagga

SEQ ID NO: 197264 - DNA, 13 bp, Artificial Sequence
  Oligonucleotide for detection of SNP TSC0048539
tccttacacaaaa

SEQ ID NO: 197265 - DNA, 13 bp, Artificial Sequence
  Oligonucleotide for detection of SNP TSC0048542
taaggatggaaga

SEQ ID NO: 197266 - DNA, 13 bp, Artificial Sequence
  Oligonucleotide for detection of SNP TSC0048542
tcttccatcctta

SEQ ID NO: 197267 - DNA, 13 bp, Artificial Sequence
  Oligonucleotide for detection of SNP TSC0048542
taaggagggaaga

SEQ ID NO: 197268 - DNA, 13 bp, Artificial Sequence
  Oligonucleotide for detection of SNP TSC0048542
tcttccctcctta

SEQ ID NO: 197269 - DNA, 13 bp, Artificial Sequence
  Oligonucleotide for detection of SNP TSC0048546
taaatttataatt

SEQ ID NO: 197270 - DNA, 13 bp, Artificial Sequence
  Oligonucleotide for detection of SNP TSC0048546
aattataaattta

SEQ ID NO: 197271 - DNA, 13 bp, Artificial Sequence
  Oligonucleotide for detection of SNP TSC0048546
taaattgataatt

SEQ ID NO: 197272 - DNA, 13 bp, Artificial Sequence
  Oligonucleotide for detection of SNP TSC0048546
aattatcaattta

SEQ ID NO: 197273 - DNA, 13 bp, Artificial Sequence
  Oligonucleotide for detection of SNP TSC0048549
gagattatgttta

SEQ ID NO: 197274 - DNA, 13 bp, Artificial Sequence
  Oligonucleotide for detection of SNP TSC0048549
taaacataatctc

SEQ ID NO: 197275 - DNA, 13 bp, Artificial Sequence
  Oligonucleotide for detection of SNP TSC0048549
tgagtatgattty

SEQ ID NO: 197276 - DNA, 13 bp, Artificial Sequence
  Oligonucleotide for detection of SNP TSC0048549
raaatcatactca

SEQ ID NO: 197277 - DNA, 13 bp, Artificial Sequence
  Oligonucleotide for detection of SNP TSC0048549
tgagtacgattty

SEQ ID NO: 197278 - DNA, 13 bp, Artificial Sequence
  Oligonucleotide for detection of SNP TSC0048549
raaatcgtactca

SEQ ID NO: 197279 - DNA, 13 bp, Artificial Sequence
  Oligonucleotide for detection of SNP TSC0048552
tgaatttttgggt

SEQ ID NO: 197280 - DNA, 13 bp, Artificial Sequence
  Oligonucleotide for detection of SNP TSC0048552
acccaaaaattca

SEQ ID NO: 197281 - DNA, 13 bp, Artificial Sequence
  Oligonucleotide for detection of SNP TSC0048552
tgaattgttgggt

SEQ ID NO: 197282 - DNA, 13 bp, Artificial Sequence
  Oligonucleotide for detection of SNP TSC0048552
acccaacaattca

SEQ ID NO: 197283 - DNA, 13 bp, Artificial Sequence
  Oligonucleotide for detection of SNP TSC0048552
cgaatttttgggt

SEQ ID NO: 197284 - DNA, 13 bp, Artificial Sequence
  Oligonucleotide for detection of SNP TSC0048552
acccaaaaattcg

SEQ ID NO: 197285 - DNA, 13 bp, Artificial Sequence
  Oligonucleotide for detection of SNP TSC0048552
cgaattgttgggt

SEQ ID NO: 197286 - DNA, 13 bp, Artificial Sequence
  Oligonucleotide for detection of SNP TSC0048552
acccaacaattcg

SEQ ID NO: 197287 - DNA, 13 bp, Artificial Sequence
  Oligonucleotide for detection of SNP TSC0048552
atttaggagtttg

SEQ ID NO: 197288 - DNA, 13 bp, Artificial Sequence
  Oligonucleotide for detection of SNP TSC0048552
caaactcctaaat

SEQ ID NO: 197289 - DNA, 13 bp, Artificial Sequence
  Oligonucleotide for detection of SNP TSC0048552
atttagtagtttg

SEQ ID NO: 197290 - DNA, 13 bp, Artificial Sequence
  Oligonucleotide for detection of SNP TSC0048552
caaactactaaat

SEQ ID NO: 197291 - DNA, 13 bp, Artificial Sequence
  Oligonucleotide for detection of SNP TSC0048552
atttaggagttcg

SEQ ID NO: 197292 - DNA, 13 bp, Artificial Sequence
  Oligonucleotide for detection of SNP TSC0048552
cgaactcctaaat

SEQ ID NO: 197293 - DNA, 13 bp, Artificial Sequence
  Oligonucleotide for detection of SNP TSC0048552
atttagtagttcg

SEQ ID NO: 197294 - DNA, 13 bp, Artificial Sequence
  Oligonucleotide for detection of SNP TSC0048552
cgaactactaaat

SEQ ID NO: 197295 - DNA, 13 bp, Artificial Sequence
  Oligonucleotide for detection of SNP TSC0048553
gtatttggggagg

SEQ ID NO: 197296 - DNA, 13 bp, Artificial Sequence
  Oligonucleotide for detection of SNP TSC0048553
cctccccaaatac

SEQ ID NO: 197297 - DNA, 13 bp, Artificial Sequence
  Oligonucleotide for detection of SNP TSC0048553
ttttttaaaatgy

SEQ ID NO: 197298 - DNA, 13 bp, Artificial Sequence
  Oligonucleotide for detection of SNP TSC0048553
rcattttaaaaaa

SEQ ID NO: 197299 - DNA, 13 bp, Artificial Sequence
  Oligonucleotide for detection of SNP TSC0048553
tttttttaaatgy

SEQ ID NO: 197300 - DNA, 13 bp, Artificial Sequence
  Oligonucleotide for detection of SNP TSC0048553
rcatttaaaaaaa

SEQ ID NO: 197301 - DNA, 13 bp, Artificial Sequence
  Oligonucleotide for detection of SNP TSC0048555
gtaaacgttttty

SEQ ID NO: 197302 - DNA, 13 bp, Artificial Sequence
  Oligonucleotide for detection of SNP TSC0048555
raaaaacgtttac

SEQ ID NO: 197303 - DNA, 13 bp, Artificial Sequence
  Oligonucleotide for detection of SNP TSC0048555
gggaggtgtttgy

SEQ ID NO: 197304 - DNA, 13 bp, Artificial Sequence
  Oligonucleotide for detection of SNP TSC0048555
rcaaacacctccc

SEQ ID NO: 197305 - DNA, 13 bp, Artificial Sequence
  Oligonucleotide for detection of SNP TSC0048555
gggaggcgtttgy

SEQ ID NO: 197306 - DNA, 13 bp, Artificial Sequence
  Oligonucleotide for detection of SNP TSC0048555
rcaaacgcctccc

SEQ ID NO: 197307 - DNA, 13 bp, Artificial Sequence
  Oligonucleotide for detection of SNP TSC0048556
gaagggtgaggta

SEQ ID NO: 197308 - DNA, 13 bp, Artificial Sequence
  Oligonucleotide for detection of SNP TSC0048556
tacctcacccttc

SEQ ID NO: 197309 - DNA, 13 bp, Artificial Sequence
  Oligonucleotide for detection of SNP TSC0048556
gaagggcgaggta

SEQ ID NO: 197310 - DNA, 13 bp, Artificial Sequence
  Oligonucleotide for detection of SNP TSC0048556
tacctcgcccttc

SEQ ID NO: 197311 - DNA, 13 bp, Artificial Sequence
  Oligonucleotide for detection of SNP TSC0048558
attgtaagaatat

SEQ ID NO: 197312 - DNA, 13 bp, Artificial Sequence
  Oligonucleotide for detection of SNP TSC0048558
atattcttacaat

SEQ ID NO: 197313 - DNA, 13 bp, Artificial Sequence
  Oligonucleotide for detection of SNP TSC0048558
attgtaggaatat

SEQ ID NO: 197314 - DNA, 13 bp, Artificial Sequence
  Oligonucleotide for detection of SNP TSC0048558
atattcctacaat

SEQ ID NO: 197315 - DNA, 13 bp, Artificial Sequence
  Oligonucleotide for detection of SNP TSC0048560
tttaagagtagaa

SEQ ID NO: 197316 - DNA, 13 bp, Artificial Sequence
  Oligonucleotide for detection of SNP TSC0048560
ttctactcttaaa

SEQ ID NO: 197317 - DNA, 13 bp, Artificial Sequence
  Oligonucleotide for detection of SNP TSC0048560
tttaagtgtagaa

SEQ ID NO: 197318 - DNA, 13 bp, Artificial Sequence
  Oligonucleotide for detection of SNP TSC0048560
ttctacacttaaa

SEQ ID NO: 197319 - DNA, 13 bp, Artificial Sequence
  Oligonucleotide for detection of SNP TSC0048560
tttaagcgtagaa

SEQ ID NO: 197320 - DNA, 13 bp, Artificial Sequence
  Oligonucleotide for detection of SNP TSC0048560
ttctacgcttaaa

SEQ ID NO: 197321 - DNA, 13 bp, Artificial Sequence
  Oligonucleotide for detection of SNP TSC0048562
tttagttgggtaa

SEQ ID NO: 197322 - DNA, 13 bp, Artificial Sequence
  Oligonucleotide for detection of SNP TSC0048562
ttacccaactaaa

SEQ ID NO: 197323 - DNA, 13 bp, Artificial Sequence
  Oligonucleotide for detection of SNP TSC0048562
tttagtcgggtaa

SEQ ID NO: 197324 - DNA, 13 bp, Artificial Sequence
  Oligonucleotide for detection of SNP TSC0048562
ttacccgactaaa

SEQ ID NO: 197325 - DNA, 13 bp, Artificial Sequence
  Oligonucleotide for detection of SNP TSC0048562
ttatttggttgaa

SEQ ID NO: 197326 - DNA, 13 bp, Artificial Sequence
  Oligonucleotide for detection of SNP TSC0048562
ttcaaccaaataa

SEQ ID NO: 197327 - DNA, 13 bp, Artificial Sequence
  Oligonucleotide for detection of SNP TSC0048562
ttatttagttgaa

SEQ ID NO: 197328 - DNA, 13 bp, Artificial Sequence
  Oligonucleotide for detection of SNP TSC0048562
ttcaactaaataa

SEQ ID NO: 197329 - DNA, 13 bp, Artificial Sequence
  Oligonucleotide for detection of SNP TSC0048562
ttattcggttgaa

SEQ ID NO: 197330 - DNA, 13 bp, Artificial Sequence
  Oligonucleotide for detection of SNP TSC0048562
ttcaaccgaataa

SEQ ID NO: 197331 - DNA, 13 bp, Artificial Sequence
  Oligonucleotide for detection of SNP TSC0048564
ggaggggtatagg

SEQ ID NO: 197332 - DNA, 13 bp, Artificial Sequence
  Oligonucleotide for detection of SNP TSC0048564
cctatacccctcc

SEQ ID NO: 197333 - DNA, 13 bp, Artificial Sequence
  Oligonucleotide for detection of SNP TSC0048564
ggagggatatagg

SEQ ID NO: 197334 - DNA, 13 bp, Artificial Sequence
  Oligonucleotide for detection of SNP TSC0048564
cctatatccctcc

SEQ ID NO: 197335 - DNA, 13 bp, Artificial Sequence
  Oligonucleotide for detection of SNP TSC0048566
tttttattattty

SEQ ID NO: 197336 - DNA, 13 bp, Artificial Sequence
  Oligonucleotide for detection of SNP TSC0048566
raaataataaaaa

SEQ ID NO: 197337 - DNA, 13 bp, Artificial Sequence
  Oligonucleotide for detection of SNP TSC0048566
gggatggtgagga

SEQ ID NO: 197338 - DNA, 13 bp, Artificial Sequence
  Oligonucleotide for detection of SNP TSC0048566
tcctcaccatccc

SEQ ID NO: 197339 - DNA, 13 bp, Artificial Sequence
  Oligonucleotide for detection of SNP TSC0048566
gggatgttgagga

SEQ ID NO: 197340 - DNA, 13 bp, Artificial Sequence
  Oligonucleotide for detection of SNP TSC0048566
tcctcaacatccc

SEQ ID NO: 197341 - DNA, 13 bp, Artificial Sequence
  Oligonucleotide for detection of SNP TSC0048567
aaggaatattatg

SEQ ID NO: 197342 - DNA, 13 bp, Artificial Sequence
  Oligonucleotide for detection of SNP TSC0048567
cataatattcctt

SEQ ID NO: 197343 - DNA, 13 bp, Artificial Sequence
  Oligonucleotide for detection of SNP TSC0048567
aaggaagattatg

SEQ ID NO: 197344 - DNA, 13 bp, Artificial Sequence
  Oligonucleotide for detection of SNP TSC0048567
cataatcttcctt

SEQ ID NO: 197345 - DNA, 13 bp, Artificial Sequence
  Oligonucleotide for detection of SNP TSC0048567
tatagtgtttttt

SEQ ID NO: 197346 - DNA, 13 bp, Artificial Sequence
  Oligonucleotide for detection of SNP TSC0048567
aaaaaacactata

SEQ ID NO: 197347 - DNA, 13 bp, Artificial Sequence
  Oligonucleotide for detection of SNP TSC0048567
tatagtttttttt

SEQ ID NO: 197348 - DNA, 13 bp, Artificial Sequence
  Oligonucleotide for detection of SNP TSC0048567
aaaaaaaactata

SEQ ID NO: 197349 - DNA, 13 bp, Artificial Sequence
  Oligonucleotide for detection of SNP TSC0006603
tagggtatttatg

SEQ ID NO: 197350 - DNA, 13 bp, Artificial Sequence
  Oligonucleotide for detection of SNP TSC0006603
cataaatacccta

SEQ ID NO: 197351 - DNA, 13 bp, Artificial Sequence
  Oligonucleotide for detection of SNP TSC0006603
tagggtgtttatg

SEQ ID NO: 197352 - DNA, 13 bp, Artificial Sequence
  Oligonucleotide for detection of SNP TSC0006603
cataaacacccta

SEQ ID NO: 197353 - DNA, 13 bp, Artificial Sequence
  Oligonucleotide for detection of SNP TSC0006603
tagggtatttacg

SEQ ID NO: 197354 - DNA, 13 bp, Artificial Sequence
  Oligonucleotide for detection of SNP TSC0006603
cgtaaatacccta

SEQ ID NO: 197355 - DNA, 13 bp, Artificial Sequence
  Oligonucleotide for detection of SNP TSC0006603
tagggcgtttatg

SEQ ID NO: 197356 - DNA, 13 bp, Artificial Sequence
  Oligonucleotide for detection of SNP TSC0006603
cataaacgcccta

SEQ ID NO: 197357 - DNA, 13 bp, Artificial Sequence
  Oligonucleotide for detection of SNP TSC0006603
tagggtgtttacg

SEQ ID NO: 197358 - DNA, 13 bp, Artificial Sequence
  Oligonucleotide for detection of SNP TSC0006603
cgtaaacacccta

SEQ ID NO: 197359 - DNA, 13 bp, Artificial Sequence
  Oligonucleotide for detection of SNP TSC0006603
tagggcgtttacg

SEQ ID NO: 197360 - DNA, 13 bp, Artificial Sequence
  Oligonucleotide for detection of SNP TSC0006603
cgtaaacgcccta

SEQ ID NO: 197361 - DNA, 13 bp, Artificial Sequence
  Oligonucleotide for detection of SNP TSC0006603
tgtgagtgtttta

SEQ ID NO: 197362 - DNA, 13 bp, Artificial Sequence
  Oligonucleotide for detection of SNP TSC0006603
taaaacactcaca

SEQ ID NO: 197363 - DNA, 13 bp, Artificial Sequence
  Oligonucleotide for detection of SNP TSC0006603
cgtgagtgtttta

SEQ ID NO: 197364 - DNA, 13 bp, Artificial Sequence
  Oligonucleotide for detection of SNP TSC0006603
taaaacactcacg

SEQ ID NO: 197365 - DNA, 13 bp, Artificial Sequence
  Oligonucleotide for detection of SNP TSC0006603
tgtgagcgtttta

SEQ ID NO: 197366 - DNA, 13 bp, Artificial Sequence
  Oligonucleotide for detection of SNP TSC0006603
taaaacgctcaca

SEQ ID NO: 197367 - DNA, 13 bp, Artificial Sequence
  Oligonucleotide for detection of SNP TSC0006603
cgtgagcgtttta

SEQ ID NO: 197368 - DNA, 13 bp, Artificial Sequence
  Oligonucleotide for detection of SNP TSC0006603
taaaacgctcacg

SEQ ID NO: 197369 - DNA, 13 bp, Artificial Sequence
  Oligonucleotide for detection of SNP TSC0048568
ttagaaattgagg

SEQ ID NO: 197370 - DNA, 13 bp, Artificial Sequence
  Oligonucleotide for detection of SNP TSC0048568
cctcaatttctaa

SEQ ID NO: 197371 - DNA, 13 bp, Artificial Sequence
  Oligonucleotide for detection of SNP TSC0048568
ttagaagttgagg

SEQ ID NO: 197372 - DNA, 13 bp, Artificial Sequence
  Oligonucleotide for detection of SNP TSC0048568
cctcaacttctaa

SEQ ID NO: 197373 - DNA, 13 bp, Artificial Sequence
  Oligonucleotide for detection of SNP TSC0048569
tttttatggagta

SEQ ID NO: 197374 - DNA, 13 bp, Artificial Sequence
  Oligonucleotide for detection of SNP TSC0048569
tactccataaaaa

SEQ ID NO: 197375 - DNA, 13 bp, Artificial Sequence
  Oligonucleotide for detection of SNP TSC0048569
tttttagggagta

SEQ ID NO: 197376 - DNA, 13 bp, Artificial Sequence
  Oligonucleotide for detection of SNP TSC0048569
tactccctaaaaa

SEQ ID NO: 197377 - DNA, 13 bp, Artificial Sequence
  Oligonucleotide for detection of SNP TSC0048569
tgttttataagag

SEQ ID NO: 197378 - DNA, 13 bp, Artificial Sequence
  Oligonucleotide for detection of SNP TSC0048569
ctcttataaaaca

SEQ ID NO: 197379 - DNA, 13 bp, Artificial Sequence
  Oligonucleotide for detection of SNP TSC0048569
tgttttttaagag

SEQ ID NO: 197380 - DNA, 13 bp, Artificial Sequence
  Oligonucleotide for detection of SNP TSC0048569
ctcttaaaaaaca

SEQ ID NO: 197381 - DNA, 13 bp, Artificial Sequence
  Oligonucleotide for detection of SNP TSC0048570
tgaagggaagtgt

SEQ ID NO: 197382 - DNA, 13 bp, Artificial Sequence
  Oligonucleotide for detection of SNP TSC0048570
acacttcccttca

SEQ ID NO: 197383 - DNA, 13 bp, Artificial Sequence
  Oligonucleotide for detection of SNP TSC0048570
tgaaggtaagtgt

SEQ ID NO: 197384 - DNA, 13 bp, Artificial Sequence
  Oligonucleotide for detection of SNP TSC0048570
acacttaccttca

SEQ ID NO: 197385 - DNA, 13 bp, Artificial Sequence
  Oligonucleotide for detection of SNP TSC0048571
tgttggataggtt

SEQ ID NO: 197386 - DNA, 13 bp, Artificial Sequence
  Oligonucleotide for detection of SNP TSC0048571
aacctatccaaca

SEQ ID NO: 197387 - DNA, 13 bp, Artificial Sequence
  Oligonucleotide for detection of SNP TSC0048571
tgttggttaggtt

SEQ ID NO: 197388 - DNA, 13 bp, Artificial Sequence
  Oligonucleotide for detection of SNP TSC0048571
aacctaaccaaca

SEQ ID NO: 197389 - DNA, 13 bp, Artificial Sequence
  Oligonucleotide for detection of SNP TSC0048572
gaaatggtgtaaa

SEQ ID NO: 197390 - DNA, 13 bp, Artificial Sequence
  Oligonucleotide for detection of SNP TSC0048572
tttacaccatttc

SEQ ID NO: 197391 - DNA, 13 bp, Artificial Sequence
  Oligonucleotide for detection of SNP TSC0048572
gaaatgatgtaaa

SEQ ID NO: 197392 - DNA, 13 bp, Artificial Sequence
  Oligonucleotide for detection of SNP TSC0048572
tttacatcatttc

SEQ ID NO: 197393 - DNA, 13 bp, Artificial Sequence
  Oligonucleotide for detection of SNP TSC0048574
aataaggaaaaag

SEQ ID NO: 197394 - DNA, 13 bp, Artificial Sequence
  Oligonucleotide for detection of SNP TSC0048574
ctttttccttatt

SEQ ID NO: 197395 - DNA, 13 bp, Artificial Sequence
  Oligonucleotide for detection of SNP TSC0048574
aataagtaaaaag

SEQ ID NO: 197396 - DNA, 13 bp, Artificial Sequence
  Oligonucleotide for detection of SNP TSC0048574
ctttttacttatt

SEQ ID NO: 197397 - DNA, 13 bp, Artificial Sequence
  Oligonucleotide for detection of SNP TSC0010632
ggattaaaaaaat

SEQ ID NO: 197398 - DNA, 13 bp, Artificial Sequence
  Oligonucleotide for detection of SNP TSC0010632
atttttttaatcc

SEQ ID NO: 197399 - DNA, 13 bp, Artificial Sequence
  Oligonucleotide for detection of SNP TSC0010632
ggattagaaaaat

SEQ ID NO: 197400 - DNA, 13 bp, Artificial Sequence
  Oligonucleotide for detection of SNP TSC0010632
atttttctaatcc

SEQ ID NO: 197401 - DNA, 13 bp, Artificial Sequence
  Oligonucleotide for detection of SNP TSC0048576
tttttggagatay

SEQ ID NO: 197402 - DNA, 13 bp, Artificial Sequence
  Oligonucleotide for detection of SNP TSC0048576
rtatctccaaaaa

SEQ ID NO: 197403 - DNA, 13 bp, Artificial Sequence
  Oligonucleotide for detection of SNP TSC0048576
tttttgaagatay

SEQ ID NO: 197404 - DNA, 13 bp, Artificial Sequence
  Oligonucleotide for detection of SNP TSC0048576
rtatcttcaaaaa

SEQ ID NO: 197405 - DNA, 13 bp, Artificial Sequence
  Oligonucleotide for detection of SNP TSC0048586
gtgtataatgttt

SEQ ID NO: 197406 - DNA, 13 bp, Artificial Sequence
  Oligonucleotide for detection of SNP TSC0048586
aaacattatacac

SEQ ID NO: 197407 - DNA, 13 bp, Artificial Sequence
  Oligonucleotide for detection of SNP TSC0048586
gtgtattatgttt

SEQ ID NO: 197408 - DNA, 13 bp, Artificial Sequence
  Oligonucleotide for detection of SNP TSC0048586
aaacataatacac

SEQ ID NO: 197409 - DNA, 13 bp, Artificial Sequence
  Oligonucleotide for detection of SNP TSC0048586
aggtattgtatay

SEQ ID NO: 197410 - DNA, 13 bp, Artificial Sequence
  Oligonucleotide for detection of SNP TSC0048586
rtatacaatacct

SEQ ID NO: 197411 - DNA, 13 bp, Artificial Sequence
  Oligonucleotide for detection of SNP TSC0048586
aggtatggtatay

SEQ ID NO: 197412 - DNA, 13 bp, Artificial Sequence
  Oligonucleotide for detection of SNP TSC0048586
rtataccatacct

SEQ ID NO: 197413 - DNA, 13 bp, Artificial Sequence
  Oligonucleotide for detection of SNP TSC0048587
ttttatatttgtg

SEQ ID NO: 197414 - DNA, 13 bp, Artificial Sequence
  Oligonucleotide for detection of SNP TSC0048587
cacaaatataaaa

SEQ ID NO: 197415 - DNA, 13 bp, Artificial Sequence
  Oligonucleotide for detection of SNP TSC0048587
ttttatgtttgtg

SEQ ID NO: 197416 - DNA, 13 bp, Artificial Sequence
  Oligonucleotide for detection of SNP TSC0048587
cacaaacataaaa

SEQ ID NO: 197417 - DNA, 13 bp, Artificial Sequence
  Oligonucleotide for detection of SNP TSC0048588
aaagaataaatta

SEQ ID NO: 197418 - DNA, 13 bp, Artificial Sequence
  Oligonucleotide for detection of SNP TSC0048588
taatttattcttt

SEQ ID NO: 197419 - DNA, 13 bp, Artificial Sequence
  Oligonucleotide for detection of SNP TSC0048588
aaagaagaaatta

SEQ ID NO: 197420 - DNA, 13 bp, Artificial Sequence
  Oligonucleotide for detection of SNP TSC0048588
taatttcttcttt

SEQ ID NO: 197421 - DNA, 13 bp, Artificial Sequence
  Oligonucleotide for detection of SNP TSC0048588
tgatttttttttt

SEQ ID NO: 197422 - DNA, 13 bp, Artificial Sequence
  Oligonucleotide for detection of SNP TSC0048588
aaaaaaaaaatca

SEQ ID NO: 197423 - DNA, 13 bp, Artificial Sequence
  Oligonucleotide for detection of SNP TSC0048591
gaagaagggtaay

SEQ ID NO: 197424 - DNA, 13 bp, Artificial Sequence
  Oligonucleotide for detection of SNP TSC0048591
rttacccttcttc

SEQ ID NO: 197425 - DNA, 13 bp, Artificial Sequence
  Oligonucleotide for detection of SNP TSC0048591
gaagaaaggtaay

SEQ ID NO: 197426 - DNA, 13 bp, Artificial Sequence
  Oligonucleotide for detection of SNP TSC0048591
rttacctttcttc

SEQ ID NO: 197427 - DNA, 13 bp, Artificial Sequence
  Oligonucleotide for detection of SNP TSC0048596
gtgattatggtty

SEQ ID NO: 197428 - DNA, 13 bp, Artificial Sequence
  Oligonucleotide for detection of SNP TSC0048596
raaccataatcac

SEQ ID NO: 197429 - DNA, 13 bp, Artificial Sequence
  Oligonucleotide for detection of SNP TSC0048596
gtgattgtggtty

SEQ ID NO: 197430 - DNA, 13 bp, Artificial Sequence
  Oligonucleotide for detection of SNP TSC0048596
raaccacaatcac

SEQ ID NO: 197431 - DNA, 13 bp, Artificial Sequence
  Oligonucleotide for detection of SNP TSC0048596
gtgatcgtggtty

SEQ ID NO: 197432 - DNA, 13 bp, Artificial Sequence
  Oligonucleotide for detection of SNP TSC0048596
raaccacgatcac

SEQ ID NO: 197433 - DNA, 13 bp, Artificial Sequence
  Oligonucleotide for detection of SNP TSC0048596
gagttatgattay

SEQ ID NO: 197434 - DNA, 13 bp, Artificial Sequence
  Oligonucleotide for detection of SNP TSC0048596
rtaatcataactc

SEQ ID NO: 197435 - DNA, 13 bp, Artificial Sequence
  Oligonucleotide for detection of SNP TSC0048596
gagttacgattay

SEQ ID NO: 197436 - DNA, 13 bp, Artificial Sequence
  Oligonucleotide for detection of SNP TSC0048596
rtaatcgtaactc

SEQ ID NO: 197437 - DNA, 13 bp, Artificial Sequence
  Oligonucleotide for detection of SNP TSC0048597
ataatttgaaaag

SEQ ID NO: 197438 - DNA, 13 bp, Artificial Sequence
  Oligonucleotide for detection of SNP TSC0048597
cttttcaaattat

SEQ ID NO: 197439 - DNA, 13 bp, Artificial Sequence
  Oligonucleotide for detection of SNP TSC0048597
ataattggaaaag

SEQ ID NO: 197440 - DNA, 13 bp, Artificial Sequence
  Oligonucleotide for detection of SNP TSC0048597
cttttccaattat

SEQ ID NO: 197441 - DNA, 13 bp, Artificial Sequence
  Oligonucleotide for detection of SNP TSC0048599
taattaatagtgy

SEQ ID NO: 197442 - DNA, 13 bp, Artificial Sequence
  Oligonucleotide for detection of SNP TSC0048599
rcactattaatta

SEQ ID NO: 197443 - DNA, 13 bp, Artificial Sequence
  Oligonucleotide for detection of SNP TSC0048599
taattagtagtgy

SEQ ID NO: 197444 - DNA, 13 bp, Artificial Sequence
  Oligonucleotide for detection of SNP TSC0048599
rcactactaatta

SEQ ID NO: 197445 - DNA, 13 bp, Artificial Sequence
  Oligonucleotide for detection of SNP TSC0048601
tttattattaggg

SEQ ID NO: 197446 - DNA, 13 bp, Artificial Sequence
  Oligonucleotide for detection of SNP TSC0048601
ccctaataataaa

SEQ ID NO: 197447 - DNA, 13 bp, Artificial Sequence
  Oligonucleotide for detection of SNP TSC0048601
tttattgttaggg

SEQ ID NO: 197448 - DNA, 13 bp, Artificial Sequence
  Oligonucleotide for detection of SNP TSC0048601
ccctaacaataaa

SEQ ID NO: 197449 - DNA, 13 bp, Artificial Sequence
  Oligonucleotide for detection of SNP TSC0048601
tttatcgttaggg

SEQ ID NO: 197450 - DNA, 13 bp, Artificial Sequence
  Oligonucleotide for detection of SNP TSC0048601
ccctaacgataaa

SEQ ID NO: 197451 - DNA, 13 bp, Artificial Sequence
  Oligonucleotide for detection of SNP TSC0048601
ttttaatgatgaa

SEQ ID NO: 197452 - DNA, 13 bp, Artificial Sequence
  Oligonucleotide for detection of SNP TSC0048601
ttcatcattaaaa

SEQ ID NO: 197453 - DNA, 13 bp, Artificial Sequence
  Oligonucleotide for detection of SNP TSC0048601
ttttaacgatgaa

SEQ ID NO: 197454 - DNA, 13 bp, Artificial Sequence
  Oligonucleotide for detection of SNP TSC0048601
ttcatcgttaaaa

SEQ ID NO: 197455 - DNA, 13 bp, Artificial Sequence
  Oligonucleotide for detection of SNP TSC0048604
tttatagtaggat

SEQ ID NO: 197456 - DNA, 13 bp, Artificial Sequence
  Oligonucleotide for detection of SNP TSC0048604
atcctactataaa

SEQ ID NO: 197457 - DNA, 13 bp, Artificial Sequence
  Oligonucleotide for detection of SNP TSC0048604
tttataataggat

SEQ ID NO: 197458 - DNA, 13 bp, Artificial Sequence
  Oligonucleotide for detection of SNP TSC0048604
atcctattataaa

SEQ ID NO: 197459 - DNA, 13 bp, Artificial Sequence
  Oligonucleotide for detection of SNP TSC0048606
tataaattagtga

SEQ ID NO: 197460 - DNA, 13 bp, Artificial Sequence
  Oligonucleotide for detection of SNP TSC0048606
tcactaatttata

SEQ ID NO: 197461 - DNA, 13 bp, Artificial Sequence
  Oligonucleotide for detection of SNP TSC0048606
tataaagtagtga

SEQ ID NO: 197462 - DNA, 13 bp, Artificial Sequence
  Oligonucleotide for detection of SNP TSC0048606
tcactactttata

SEQ ID NO: 197463 - DNA, 13 bp, Artificial Sequence
  Oligonucleotide for detection of SNP TSC0048607
atagtattttttt

SEQ ID NO: 197464 - DNA, 13 bp, Artificial Sequence
  Oligonucleotide for detection of SNP TSC0048607
aaaaaaatactat

SEQ ID NO: 197465 - DNA, 13 bp, Artificial Sequence
  Oligonucleotide for detection of SNP TSC0048607
agagggttgttgt

SEQ ID NO: 197466 - DNA, 13 bp, Artificial Sequence
  Oligonucleotide for detection of SNP TSC0048607
acaacaaccctct

SEQ ID NO: 197467 - DNA, 13 bp, Artificial Sequence
  Oligonucleotide for detection of SNP TSC0048607
agaggggtgttgt

SEQ ID NO: 197468 - DNA, 13 bp, Artificial Sequence
  Oligonucleotide for detection of SNP TSC0048607
acaacacccctct

SEQ ID NO: 197469 - DNA, 13 bp, Artificial Sequence
  Oligonucleotide for detection of SNP TSC0048610
gttatatggtttg

SEQ ID NO: 197470 - DNA, 13 bp, Artificial Sequence
  Oligonucleotide for detection of SNP TSC0048610
caaaccatataac

SEQ ID NO: 197471 - DNA, 13 bp, Artificial Sequence
  Oligonucleotide for detection of SNP TSC0048610
gttatacggtttg

SEQ ID NO: 197472 - DNA, 13 bp, Artificial Sequence
  Oligonucleotide for detection of SNP TSC0048610
caaaccgtataac

SEQ ID NO: 197473 - DNA, 13 bp, Artificial Sequence
  Oligonucleotide for detection of SNP TSC0048610
taggttgtgtaay

SEQ ID NO: 197474 - DNA, 13 bp, Artificial Sequence
  Oligonucleotide for detection of SNP TSC0048610
rttacacaaccta

SEQ ID NO: 197475 - DNA, 13 bp, Artificial Sequence
  Oligonucleotide for detection of SNP TSC0048610
taggttatgtaay

SEQ ID NO: 197476 - DNA, 13 bp, Artificial Sequence
  Oligonucleotide for detection of SNP TSC0048610
rttacataaccta

SEQ ID NO: 197477 - DNA, 13 bp, Artificial Sequence
  Oligonucleotide for detection of SNP TSC0048610
taggtcgtgtaay

SEQ ID NO: 197478 - DNA, 13 bp, Artificial Sequence
  Oligonucleotide for detection of SNP TSC0048610
rttacacgaccta

SEQ ID NO: 197479 - DNA, 13 bp, Artificial Sequence
  Oligonucleotide for detection of SNP TSC0007560
tggttagggttat

SEQ ID NO: 197480 - DNA, 13 bp, Artificial Sequence
  Oligonucleotide for detection of SNP TSC0007560
ataaccctaacca

SEQ ID NO: 197481 - DNA, 13 bp, Artificial Sequence
  Oligonucleotide for detection of SNP TSC0007560
tggttaaggttat

SEQ ID NO: 197482 - DNA, 13 bp, Artificial Sequence
  Oligonucleotide for detection of SNP TSC0007560
ataaccttaacca

SEQ ID NO: 197483 - DNA, 13 bp, Artificial Sequence
  Oligonucleotide for detection of SNP TSC0007560
cggttagggttat

SEQ ID NO: 197484 - DNA, 13 bp, Artificial Sequence
  Oligonucleotide for detection of SNP TSC0007560
ataaccctaaccg

SEQ ID NO: 197485 - DNA, 13 bp, Artificial Sequence
  Oligonucleotide for detection of SNP TSC0007560
cggttaaggttat

SEQ ID NO: 197486 - DNA, 13 bp, Artificial Sequence
  Oligonucleotide for detection of SNP TSC0007560
ataaccttaaccg

SEQ ID NO: 197487 - DNA, 13 bp, Artificial Sequence
  Oligonucleotide for detection of SNP TSC0007561
ttttaagaataty

SEQ ID NO: 197488 - DNA, 13 bp, Artificial Sequence
  Oligonucleotide for detection of SNP TSC0007561
ratattcttaaaa

SEQ ID NO: 197489 - DNA, 13 bp, Artificial Sequence
  Oligonucleotide for detection of SNP TSC0007561
ttttaaaaataty

SEQ ID NO: 197490 - DNA, 13 bp, Artificial Sequence
  Oligonucleotide for detection of SNP TSC0007561
ratatttttaaaa

SEQ ID NO: 197491 - DNA, 13 bp, Artificial Sequence
  Oligonucleotide for detection of SNP TSC0048611
tttattttggtta

SEQ ID NO: 197492 - DNA, 13 bp, Artificial Sequence
  Oligonucleotide for detection of SNP TSC0048611
taaccaaaataaa

SEQ ID NO: 197493 - DNA, 13 bp, Artificial Sequence
  Oligonucleotide for detection of SNP TSC0048611
tttattgtggtta

SEQ ID NO: 197494 - DNA, 13 bp, Artificial Sequence
  Oligonucleotide for detection of SNP TSC0048611
taaccacaataaa

SEQ ID NO: 197495 - DNA, 13 bp, Artificial Sequence
  Oligonucleotide for detection of SNP TSC0048611
tagttagaatgaa

SEQ ID NO: 197496 - DNA, 13 bp, Artificial Sequence
  Oligonucleotide for detection of SNP TSC0048611
ttcattctaacta

SEQ ID NO: 197497 - DNA, 13 bp, Artificial Sequence
  Oligonucleotide for detection of SNP TSC0048611
tagttataatgaa

SEQ ID NO: 197498 - DNA, 13 bp, Artificial Sequence
  Oligonucleotide for detection of SNP TSC0048611
ttcattataacta

SEQ ID NO: 197499 - DNA, 13 bp, Artificial Sequence
  Oligonucleotide for detection of SNP TSC0048612
gataaagatgtga

SEQ ID NO: 197500 - DNA, 13 bp, Artificial Sequence
  Oligonucleotide for detection of SNP TSC0048612
tcacatctttatc

SEQ ID NO: 197501 - DNA, 13 bp, Artificial Sequence
  Oligonucleotide for detection of SNP TSC0048612
gataaaaatgtga

SEQ ID NO: 197502 - DNA, 13 bp, Artificial Sequence
  Oligonucleotide for detection of SNP TSC0048612
tcacatttttatc

SEQ ID NO: 197503 - DNA, 13 bp, Artificial Sequence
  Oligonucleotide for detection of SNP TSC0048612
gataaagacgtga

SEQ ID NO: 197504 - DNA, 13 bp, Artificial Sequence
  Oligonucleotide for detection of SNP TSC0048612
tcacgtctttatc

SEQ ID NO: 197505 - DNA, 13 bp, Artificial Sequence
  Oligonucleotide for detection of SNP TSC0048612
gataaaaacgtga

SEQ ID NO: 197506 - DNA, 13 bp, Artificial Sequence
  Oligonucleotide for detection of SNP TSC0048612
tcacgtttttatc

SEQ ID NO: 197507 - DNA, 13 bp, Artificial Sequence
  Oligonucleotide for detection of SNP TSC0048613
ggttgtagtattg

SEQ ID NO: 197508 - DNA, 13 bp, Artificial Sequence
  Oligonucleotide for detection of SNP TSC0048613
caatactacaacc

SEQ ID NO: 197509 - DNA, 13 bp, Artificial Sequence
  Oligonucleotide for detection of SNP TSC0048613
ggttgtggtattg

SEQ ID NO: 197510 - DNA, 13 bp, Artificial Sequence
  Oligonucleotide for detection of SNP TSC0048613
caataccacaacc

SEQ ID NO: 197511 - DNA, 13 bp, Artificial Sequence
  Oligonucleotide for detection of SNP TSC0048613
ggttgtagtatcg

SEQ ID NO: 197512 - DNA, 13 bp, Artificial Sequence
  Oligonucleotide for detection of SNP TSC0048613
cgatactacaacc

SEQ ID NO: 197513 - DNA, 13 bp, Artificial Sequence
  Oligonucleotide for detection of SNP TSC0048613
ggttgcggtattg

SEQ ID NO: 197514 - DNA, 13 bp, Artificial Sequence
  Oligonucleotide for detection of SNP TSC0048613
caataccgcaacc

SEQ ID NO: 197515 - DNA, 13 bp, Artificial Sequence
  Oligonucleotide for detection of SNP TSC0048613
ggttgtggtatcg

SEQ ID NO: 197516 - DNA, 13 bp, Artificial Sequence
  Oligonucleotide for detection of SNP TSC0048613
cgataccacaacc

SEQ ID NO: 197517 - DNA, 13 bp, Artificial Sequence
  Oligonucleotide for detection of SNP TSC0048613
ggttgcggtatcg

SEQ ID NO: 197518 - DNA, 13 bp, Artificial Sequence
  Oligonucleotide for detection of SNP TSC0048613
cgataccgcaacc

SEQ ID NO: 197519 - DNA, 13 bp, Artificial Sequence
  Oligonucleotide for detection of SNP TSC0048613
tggtgttgtagty

SEQ ID NO: 197520 - DNA, 13 bp, Artificial Sequence
  Oligonucleotide for detection of SNP TSC0048613
ractacaacacca

SEQ ID NO: 197521 - DNA, 13 bp, Artificial Sequence
  Oligonucleotide for detection of SNP TSC0048613
cggtgttgtagty

SEQ ID NO: 197522 - DNA, 13 bp, Artificial Sequence
  Oligonucleotide for detection of SNP TSC0048613
ractacaacaccg

SEQ ID NO: 197523 - DNA, 13 bp, Artificial Sequence
  Oligonucleotide for detection of SNP TSC0048613
tggtgtcgtagty

SEQ ID NO: 197524 - DNA, 13 bp, Artificial Sequence
  Oligonucleotide for detection of SNP TSC0048613
ractacgacacca

SEQ ID NO: 197525 - DNA, 13 bp, Artificial Sequence
  Oligonucleotide for detection of SNP TSC0048613
cggtgtcgtagty

SEQ ID NO: 197526 - DNA, 13 bp, Artificial Sequence
  Oligonucleotide for detection of SNP TSC0048613
ractacgacaccg

SEQ ID NO: 197527 - DNA, 13 bp, Artificial Sequence
  Oligonucleotide for detection of SNP TSC0048614
tatatttttttga

SEQ ID NO: 197528 - DNA, 13 bp, Artificial Sequence
  Oligonucleotide for detection of SNP TSC0048614
tcaaaaaaatata

SEQ ID NO: 197529 - DNA, 13 bp, Artificial Sequence
  Oligonucleotide for detection of SNP TSC0048614
tatattgttttga

SEQ ID NO: 197530 - DNA, 13 bp, Artificial Sequence
  Oligonucleotide for detection of SNP TSC0048614
tcaaaacaatata

SEQ ID NO: 197531 - DNA, 13 bp, Artificial Sequence
  Oligonucleotide for detection of SNP TSC0048614
ttaagagagtgtg

SEQ ID NO: 197532 - DNA, 13 bp, Artificial Sequence
  Oligonucleotide for detection of SNP TSC0048614
cacactctcttaa

SEQ ID NO: 197533 - DNA, 13 bp, Artificial Sequence
  Oligonucleotide for detection of SNP TSC0048614
ttaagatagtgtg

SEQ ID NO: 197534 - DNA, 13 bp, Artificial Sequence
  Oligonucleotide for detection of SNP TSC0048614
cacactatcttaa

SEQ ID NO: 197535 - DNA, 13 bp, Artificial Sequence
  Oligonucleotide for detection of SNP TSC0048615
ataggagaatgtt

SEQ ID NO: 197536 - DNA, 13 bp, Artificial Sequence
  Oligonucleotide for detection of SNP TSC0048615
aacattctcctat

SEQ ID NO: 197537 - DNA, 13 bp, Artificial Sequence
  Oligonucleotide for detection of SNP TSC0048615
ataggaaaatgtt

SEQ ID NO: 197538 - DNA, 13 bp, Artificial Sequence
  Oligonucleotide for detection of SNP TSC0048615
aacattttcctat

SEQ ID NO: 197539 - DNA, 13 bp, Artificial Sequence
  Oligonucleotide for detection of SNP TSC0048616
gtttaagataaga

SEQ ID NO: 197540 - DNA, 13 bp, Artificial Sequence
  Oligonucleotide for detection of SNP TSC0048616
tcttatcttaaac

SEQ ID NO: 197541 - DNA, 13 bp, Artificial Sequence
  Oligonucleotide for detection of SNP TSC0048616
gtttaaaataaga

SEQ ID NO: 197542 - DNA, 13 bp, Artificial Sequence
  Oligonucleotide for detection of SNP TSC0048616
tcttattttaaac

SEQ ID NO: 197543 - DNA, 13 bp, Artificial Sequence
  Oligonucleotide for detection of SNP TSC0008772
gttaagatagtat

SEQ ID NO: 197544 - DNA, 13 bp, Artificial Sequence
  Oligonucleotide for detection of SNP TSC0008772
atactatcttaac

SEQ ID NO: 197545 - DNA, 13 bp, Artificial Sequence
  Oligonucleotide for detection of SNP TSC0008772
gttaagttagtat

SEQ ID NO: 197546 - DNA, 13 bp, Artificial Sequence
  Oligonucleotide for detection of SNP TSC0008772
atactaacttaac

SEQ ID NO: 197547 - DNA, 13 bp, Artificial Sequence
  Oligonucleotide for detection of SNP TSC0008772
atattgttttgay

SEQ ID NO: 197548 - DNA, 13 bp, Artificial Sequence
  Oligonucleotide for detection of SNP TSC0008772
rtcaaaacaatat

SEQ ID NO: 197549 - DNA, 13 bp, Artificial Sequence
  Oligonucleotide for detection of SNP TSC0008772
atattggtttgay

SEQ ID NO: 197550 - DNA, 13 bp, Artificial Sequence
  Oligonucleotide for detection of SNP TSC0008772
rtcaaaccaatat

SEQ ID NO: 197551 - DNA, 13 bp, Artificial Sequence
  Oligonucleotide for detection of SNP TSC0048617
gaaagtaaatgat

SEQ ID NO: 197552 - DNA, 13 bp, Artificial Sequence
  Oligonucleotide for detection of SNP TSC0048617
atcatttactttc

SEQ ID NO: 197553 - DNA, 13 bp, Artificial Sequence
  Oligonucleotide for detection of SNP TSC0048617
gaaagtgaatgat

SEQ ID NO: 197554 - DNA, 13 bp, Artificial Sequence
  Oligonucleotide for detection of SNP TSC0048617
atcattcactttc

SEQ ID NO: 197555 - DNA, 13 bp, Artificial Sequence
  Oligonucleotide for detection of SNP TSC0048617
gaaagcgaatgat

SEQ ID NO: 197556 - DNA, 13 bp, Artificial Sequence
  Oligonucleotide for detection of SNP TSC0048617
atcattcgctttc

SEQ ID NO: 197557 - DNA, 13 bp, Artificial Sequence
  Oligonucleotide for detection of SNP TSC0048617
attatttgtttty

SEQ ID NO: 197558 - DNA, 13 bp, Artificial Sequence
  Oligonucleotide for detection of SNP TSC0048617
raaaacaaataat

SEQ ID NO: 197559 - DNA, 13 bp, Artificial Sequence
  Oligonucleotide for detection of SNP TSC0048617
attattcgtttty

SEQ ID NO: 197560 - DNA, 13 bp, Artificial Sequence
  Oligonucleotide for detection of SNP TSC0048617
raaaacgaataat

SEQ ID NO: 197561 - DNA, 13 bp, Artificial Sequence
  Oligonucleotide for detection of SNP TSC0048618
gttattataatga

SEQ ID NO: 197562 - DNA, 13 bp, Artificial Sequence
  Oligonucleotide for detection of SNP TSC0048618
tcattataataac

SEQ ID NO: 197563 - DNA, 13 bp, Artificial Sequence
  Oligonucleotide for detection of SNP TSC0048620
tataatggtatag

SEQ ID NO: 197564 - DNA, 13 bp, Artificial Sequence
  Oligonucleotide for detection of SNP TSC0048620
ctataccattata

SEQ ID NO: 197565 - DNA, 13 bp, Artificial Sequence
  Oligonucleotide for detection of SNP TSC0048620
tataatagtatag

SEQ ID NO: 197566 - DNA, 13 bp, Artificial Sequence
  Oligonucleotide for detection of SNP TSC0048620
ctatactattata

SEQ ID NO: 197567 - DNA, 13 bp, Artificial Sequence
  Oligonucleotide for detection of SNP TSC0048621
tgttttaatttat

SEQ ID NO: 197568 - DNA, 13 bp, Artificial Sequence
  Oligonucleotide for detection of SNP TSC0048621
ataaattaaaaca

SEQ ID NO: 197569 - DNA, 13 bp, Artificial Sequence
  Oligonucleotide for detection of SNP TSC0048621
tgtttttatttat

SEQ ID NO: 197570 - DNA, 13 bp, Artificial Sequence
  Oligonucleotide for detection of SNP TSC0048621
ataaataaaaaca

SEQ ID NO: 197571 - DNA, 13 bp, Artificial Sequence
  Oligonucleotide for detection of SNP TSC0048621
atagattggaata

SEQ ID NO: 197572 - DNA, 13 bp, Artificial Sequence
  Oligonucleotide for detection of SNP TSC0048621
tattccaatctat

SEQ ID NO: 197573 - DNA, 13 bp, Artificial Sequence
  Oligonucleotide for detection of SNP TSC0048621
atagatgggaata

SEQ ID NO: 197574 - DNA, 13 bp, Artificial Sequence
  Oligonucleotide for detection of SNP TSC0048621
tattcccatctat

SEQ ID NO: 197575 - DNA, 13 bp, Artificial Sequence
  Oligonucleotide for detection of SNP TSC0048622
aaattatttgtty

SEQ ID NO: 197576 - DNA, 13 bp, Artificial Sequence
  Oligonucleotide for detection of SNP TSC0048622
raacaaataattt

SEQ ID NO: 197577 - DNA, 13 bp, Artificial Sequence
  Oligonucleotide for detection of SNP TSC0048622
aaattagttgtty

SEQ ID NO: 197578 - DNA, 13 bp, Artificial Sequence
  Oligonucleotide for detection of SNP TSC0048622
raacaactaattt

SEQ ID NO: 197579 - DNA, 13 bp, Artificial Sequence
  Oligonucleotide for detection of SNP TSC0048622
gggtagatggttt

SEQ ID NO: 197580 - DNA, 13 bp, Artificial Sequence
  Oligonucleotide for detection of SNP TSC0048622
aaaccatctaccc

SEQ ID NO: 197581 - DNA, 13 bp, Artificial Sequence
  Oligonucleotide for detection of SNP TSC0048622
gggtagttggttt

SEQ ID NO: 197582 - DNA, 13 bp, Artificial Sequence
  Oligonucleotide for detection of SNP TSC0048622
aaaccaactaccc

SEQ ID NO: 197583 - DNA, 13 bp, Artificial Sequence
  Oligonucleotide for detection of SNP TSC0048623
gagattagaatat

SEQ ID NO: 197584 - DNA, 13 bp, Artificial Sequence
  Oligonucleotide for detection of SNP TSC0048623
atattctaatctc

SEQ ID NO: 197585 - DNA, 13 bp, Artificial Sequence
  Oligonucleotide for detection of SNP TSC0048623
gagattggaatat

SEQ ID NO: 197586 - DNA, 13 bp, Artificial Sequence
  Oligonucleotide for detection of SNP TSC0048623
atattccaatctc

SEQ ID NO: 197587 - DNA, 13 bp, Artificial Sequence
  Oligonucleotide for detection of SNP TSC0048625
ggttgtattaatt

SEQ ID NO: 197588 - DNA, 13 bp, Artificial Sequence
  Oligonucleotide for detection of SNP TSC0048625
aattaatacaacc

SEQ ID NO: 197589 - DNA, 13 bp, Artificial Sequence
  Oligonucleotide for detection of SNP TSC0048625
ggttgttttaatt

SEQ ID NO: 197590 - DNA, 13 bp, Artificial Sequence
  Oligonucleotide for detection of SNP TSC0048625
aattaaaacaacc

SEQ ID NO: 197591 - DNA, 13 bp, Artificial Sequence
  Oligonucleotide for detection of SNP TSC0048625
ggtcgtattaatt

SEQ ID NO: 197592 - DNA, 13 bp, Artificial Sequence
  Oligonucleotide for detection of SNP TSC0048625
aattaatacgacc

SEQ ID NO: 197593 - DNA, 13 bp, Artificial Sequence
  Oligonucleotide for detection of SNP TSC0048625
ggtcgttttaatt

SEQ ID NO: 197594 - DNA, 13 bp, Artificial Sequence
  Oligonucleotide for detection of SNP TSC0048625
aattaaaacgacc

SEQ ID NO: 197595 - DNA, 13 bp, Artificial Sequence
  Oligonucleotide for detection of SNP TSC0048625
aattagtgtgaty

SEQ ID NO: 197596 - DNA, 13 bp, Artificial Sequence
  Oligonucleotide for detection of SNP TSC0048625
ratcacactaatt

SEQ ID NO: 197597 - DNA, 13 bp, Artificial Sequence
  Oligonucleotide for detection of SNP TSC0048625
aattagagtgaty

SEQ ID NO: 197598 - DNA, 13 bp, Artificial Sequence
  Oligonucleotide for detection of SNP TSC0048625
ratcactctaatt

SEQ ID NO: 197599 - DNA, 13 bp, Artificial Sequence
  Oligonucleotide for detection of SNP TSC0048625
aattagtgcgaty

SEQ ID NO: 197600 - DNA, 13 bp, Artificial Sequence
  Oligonucleotide for detection of SNP TSC0048625
ratcgcactaatt

SEQ ID NO: 197601 - DNA, 13 bp, Artificial Sequence
  Oligonucleotide for detection of SNP TSC0048625
aattagagcgaty

SEQ ID NO: 197602 - DNA, 13 bp, Artificial Sequence
  Oligonucleotide for detection of SNP TSC0048625
ratcgctctaatt

SEQ ID NO: 197603 - DNA, 13 bp, Artificial Sequence
  Oligonucleotide for detection of SNP TSC0048630
agataagtaggta

SEQ ID NO: 197604 - DNA, 13 bp, Artificial Sequence
  Oligonucleotide for detection of SNP TSC0048630
tacctacttatct

SEQ ID NO: 197605 - DNA, 13 bp, Artificial Sequence
  Oligonucleotide for detection of SNP TSC0048630
agataaataggta

SEQ ID NO: 197606 - DNA, 13 bp, Artificial Sequence
  Oligonucleotide for detection of SNP TSC0048630
tacctatttatct

SEQ ID NO: 197607 - DNA, 13 bp, Artificial Sequence
  Oligonucleotide for detection of SNP TSC0006487
gttttaagaaaay

SEQ ID NO: 197608 - DNA, 13 bp, Artificial Sequence
  Oligonucleotide for detection of SNP TSC0006487
rttttcttaaaac

SEQ ID NO: 197609 - DNA, 13 bp, Artificial Sequence
  Oligonucleotide for detection of SNP TSC0006487
gttttaggaaaay

SEQ ID NO: 197610 - DNA, 13 bp, Artificial Sequence
  Oligonucleotide for detection of SNP TSC0006487
rttttcctaaaac

SEQ ID NO: 197611 - DNA, 13 bp, Artificial Sequence
  Oligonucleotide for detection of SNP TSC0048631
ggtaatataatgg

SEQ ID NO: 197612 - DNA, 13 bp, Artificial Sequence
  Oligonucleotide for detection of SNP TSC0048631
ccattatattacc

SEQ ID NO: 197613 - DNA, 13 bp, Artificial Sequence
  Oligonucleotide for detection of SNP TSC0048631
ggtaatgtaatgg

SEQ ID NO: 197614 - DNA, 13 bp, Artificial Sequence
  Oligonucleotide for detection of SNP TSC0048631
ccattacattacc

SEQ ID NO: 197615 - DNA, 13 bp, Artificial Sequence
  Oligonucleotide for detection of SNP TSC0048632
tatttaatgaata

SEQ ID NO: 197616 - DNA, 13 bp, Artificial Sequence
  Oligonucleotide for detection of SNP TSC0048632
tattcattaaata

SEQ ID NO: 197617 - DNA, 13 bp, Artificial Sequence
  Oligonucleotide for detection of SNP TSC0048633
ttttttgtaagtg

SEQ ID NO: 197618 - DNA, 13 bp, Artificial Sequence
  Oligonucleotide for detection of SNP TSC0048633
cacttacaaaaaa

SEQ ID NO: 197619 - DNA, 13 bp, Artificial Sequence
  Oligonucleotide for detection of SNP TSC0048633
ttttttataagtg

SEQ ID NO: 197620 - DNA, 13 bp, Artificial Sequence
  Oligonucleotide for detection of SNP TSC0048633
cacttataaaaaa

SEQ ID NO: 197621 - DNA, 13 bp, Artificial Sequence
  Oligonucleotide for detection of SNP TSC0048634
agaatatggttay

SEQ ID NO: 197622 - DNA, 13 bp, Artificial Sequence
  Oligonucleotide for detection of SNP TSC0048634
rtaaccatattct

SEQ ID NO: 197623 - DNA, 13 bp, Artificial Sequence
  Oligonucleotide for detection of SNP TSC0048634
agaatacggttay

SEQ ID NO: 197624 - DNA, 13 bp, Artificial Sequence
  Oligonucleotide for detection of SNP TSC0048634
rtaaccgtattct

SEQ ID NO: 197625 - DNA, 13 bp, Artificial Sequence
  Oligonucleotide for detection of SNP TSC0048634
gtagttgtatttt

SEQ ID NO: 197626 - DNA, 13 bp, Artificial Sequence
  Oligonucleotide for detection of SNP TSC0048634
aaaatacaactac

SEQ ID NO: 197627 - DNA, 13 bp, Artificial Sequence
  Oligonucleotide for detection of SNP TSC0048634
gtagttatatttt

SEQ ID NO: 197628 - DNA, 13 bp, Artificial Sequence
  Oligonucleotide for detection of SNP TSC0048634
aaaatataactac

SEQ ID NO: 197629 - DNA, 13 bp, Artificial Sequence
  Oligonucleotide for detection of SNP TSC0048634
gtagtcgtatttt

SEQ ID NO: 197630 - DNA, 13 bp, Artificial Sequence
  Oligonucleotide for detection of SNP TSC0048634
aaaatacgactac

SEQ ID NO: 197631 - DNA, 13 bp, Artificial Sequence
  Oligonucleotide for detection of SNP TSC0048635
ttattatttataa

SEQ ID NO: 197632 - DNA, 13 bp, Artificial Sequence
  Oligonucleotide for detection of SNP TSC0048635
ttataaataataa

SEQ ID NO: 197633 - DNA, 13 bp, Artificial Sequence
  Oligonucleotide for detection of SNP TSC0048635
ttatggttagtga

SEQ ID NO: 197634 - DNA, 13 bp, Artificial Sequence
  Oligonucleotide for detection of SNP TSC0048635
tcactaaccataa

SEQ ID NO: 197635 - DNA, 13 bp, Artificial Sequence
  Oligonucleotide for detection of SNP TSC0048635
ttatgggtagtga

SEQ ID NO: 197636 - DNA, 13 bp, Artificial Sequence
  Oligonucleotide for detection of SNP TSC0048635
tcactacccataa

SEQ ID NO: 197637 - DNA, 13 bp, Artificial Sequence
  Oligonucleotide for detection of SNP TSC0048636
tatataaaataag

SEQ ID NO: 197638 - DNA, 13 bp, Artificial Sequence
  Oligonucleotide for detection of SNP TSC0048636
cttattttatata

SEQ ID NO: 197639 - DNA, 13 bp, Artificial Sequence
  Oligonucleotide for detection of SNP TSC0048636
tatatataataag

SEQ ID NO: 197640 - DNA, 13 bp, Artificial Sequence
  Oligonucleotide for detection of SNP TSC0048636
cttattatatata

SEQ ID NO: 197641 - DNA, 13 bp, Artificial Sequence
  Oligonucleotide for detection of SNP TSC0005726
tggagttgttgaa

SEQ ID NO: 197642 - DNA, 13 bp, Artificial Sequence
  Oligonucleotide for detection of SNP TSC0005726
ttcaacaactcca

SEQ ID NO: 197643 - DNA, 13 bp, Artificial Sequence
  Oligonucleotide for detection of SNP TSC0005726
tggagtggttgaa

SEQ ID NO: 197644 - DNA, 13 bp, Artificial Sequence
  Oligonucleotide for detection of SNP TSC0005726
ttcaaccactcca

SEQ ID NO: 197645 - DNA, 13 bp, Artificial Sequence
  Oligonucleotide for detection of SNP TSC0005726
tttaataatttta

SEQ ID NO: 197646 - DNA, 13 bp, Artificial Sequence
  Oligonucleotide for detection of SNP TSC0005726
taaaattattaaa

SEQ ID NO: 197647 - DNA, 13 bp, Artificial Sequence
  Oligonucleotide for detection of SNP TSC0005726
tttaattatttta

SEQ ID NO: 197648 - DNA, 13 bp, Artificial Sequence
  Oligonucleotide for detection of SNP TSC0005726
taaaataattaaa

SEQ ID NO: 197649 - DNA, 13 bp, Artificial Sequence
  Oligonucleotide for detection of SNP TSC0048644
ttaatagaattaa

SEQ ID NO: 197650 - DNA, 13 bp, Artificial Sequence
  Oligonucleotide for detection of SNP TSC0048644
ttaattctattaa

SEQ ID NO: 197651 - DNA, 13 bp, Artificial Sequence
  Oligonucleotide for detection of SNP TSC0048645
agatgaggggttg

SEQ ID NO: 197652 - DNA, 13 bp, Artificial Sequence
  Oligonucleotide for detection of SNP TSC0048645
caacccctcatct

SEQ ID NO: 197653 - DNA, 13 bp, Artificial Sequence
  Oligonucleotide for detection of SNP TSC0048645
agatgaagggttg

SEQ ID NO: 197654 - DNA, 13 bp, Artificial Sequence
  Oligonucleotide for detection of SNP TSC0048645
caacccttcatct

SEQ ID NO: 197655 - DNA, 13 bp, Artificial Sequence
  Oligonucleotide for detection of SNP TSC0048647
ttttttgtaaata

SEQ ID NO: 197656 - DNA, 13 bp, Artificial Sequence
  Oligonucleotide for detection of SNP TSC0048647
tatttacaaaaaa

SEQ ID NO: 197657 - DNA, 13 bp, Artificial Sequence
  Oligonucleotide for detection of SNP TSC0048647
ttttttataaata

SEQ ID NO: 197658 - DNA, 13 bp, Artificial Sequence
  Oligonucleotide for detection of SNP TSC0048647
tatttataaaaaa

SEQ ID NO: 197659 - DNA, 13 bp, Artificial Sequence
  Oligonucleotide for detection of SNP TSC0048648
tgttttttataaa

SEQ ID NO: 197660 - DNA, 13 bp, Artificial Sequence
  Oligonucleotide for detection of SNP TSC0048648
tttataaaaaaca

SEQ ID NO: 197661 - DNA, 13 bp, Artificial Sequence
  Oligonucleotide for detection of SNP TSC0048648
tgttttgtataaa

SEQ ID NO: 197662 - DNA, 13 bp, Artificial Sequence
  Oligonucleotide for detection of SNP TSC0048648
tttatacaaaaca

SEQ ID NO: 197663 - DNA, 13 bp, Artificial Sequence
  Oligonucleotide for detection of SNP TSC0048648
tttgtggagagta

SEQ ID NO: 197664 - DNA, 13 bp, Artificial Sequence
  Oligonucleotide for detection of SNP TSC0048648
tactctccacaaa

SEQ ID NO: 197665 - DNA, 13 bp, Artificial Sequence
  Oligonucleotide for detection of SNP TSC0048648
tttgtgtagagta

SEQ ID NO: 197666 - DNA, 13 bp, Artificial Sequence
  Oligonucleotide for detection of SNP TSC0048648
tactctacacaaa

SEQ ID NO: 197667 - DNA, 13 bp, Artificial Sequence
  Oligonucleotide for detection of SNP TSC0048649
atttataggaaga

SEQ ID NO: 197668 - DNA, 13 bp, Artificial Sequence
  Oligonucleotide for detection of SNP TSC0048649
tcttcctataaat

SEQ ID NO: 197669 - DNA, 13 bp, Artificial Sequence
  Oligonucleotide for detection of SNP TSC0048649
atttatgggaaga

SEQ ID NO: 197670 - DNA, 13 bp, Artificial Sequence
  Oligonucleotide for detection of SNP TSC0048649
tcttcccataaat

SEQ ID NO: 197671 - DNA, 13 bp, Artificial Sequence
  Oligonucleotide for detection of SNP TSC0048649
atttacgggaaga

SEQ ID NO: 197672 - DNA, 13 bp, Artificial Sequence
  Oligonucleotide for detection of SNP TSC0048649
tcttcccgtaaat

SEQ ID NO: 197673 - DNA, 13 bp, Artificial Sequence
  Oligonucleotide for detection of SNP TSC0048650
gtattattaatta

SEQ ID NO: 197674 - DNA, 13 bp, Artificial Sequence
  Oligonucleotide for detection of SNP TSC0048650
taattaataatac

SEQ ID NO: 197675 - DNA, 13 bp, Artificial Sequence
  Oligonucleotide for detection of SNP TSC0048650
gtattagtaatta

SEQ ID NO: 197676 - DNA, 13 bp, Artificial Sequence
  Oligonucleotide for detection of SNP TSC0048650
taattactaatac

SEQ ID NO: 197677 - DNA, 13 bp, Artificial Sequence
  Oligonucleotide for detection of SNP TSC0048650
taattagtgatgy

SEQ ID NO: 197678 - DNA, 13 bp, Artificial Sequence
  Oligonucleotide for detection of SNP TSC0048650
rcatcactaatta

SEQ ID NO: 197679 - DNA, 13 bp, Artificial Sequence
  Oligonucleotide for detection of SNP TSC0048650
taattattgatgy

SEQ ID NO: 197680 - DNA, 13 bp, Artificial Sequence
  Oligonucleotide for detection of SNP TSC0048650
rcatcaataatta

SEQ ID NO: 197681 - DNA, 13 bp, Artificial Sequence
  Oligonucleotide for detection of SNP TSC0048651
tagagattaattt

SEQ ID NO: 197682 - DNA, 13 bp, Artificial Sequence
  Oligonucleotide for detection of SNP TSC0048651
aaattaatctcta

SEQ ID NO: 197683 - DNA, 13 bp, Artificial Sequence
  Oligonucleotide for detection of SNP TSC0048651
tagagagtaattt

SEQ ID NO: 197684 - DNA, 13 bp, Artificial Sequence
  Oligonucleotide for detection of SNP TSC0048651
aaattactctcta

SEQ ID NO: 197685 - DNA, 13 bp, Artificial Sequence
  Oligonucleotide for detection of SNP TSC0048653
ggtaaattggttt

SEQ ID NO: 197686 - DNA, 13 bp, Artificial Sequence
  Oligonucleotide for detection of SNP TSC0048653
aaaccaatttacc

SEQ ID NO: 197687 - DNA, 13 bp, Artificial Sequence
  Oligonucleotide for detection of SNP TSC0048653
ggtaaagtggttt

SEQ ID NO: 197688 - DNA, 13 bp, Artificial Sequence
  Oligonucleotide for detection of SNP TSC0048653
aaaccactttacc

SEQ ID NO: 197689 - DNA, 13 bp, Artificial Sequence
  Oligonucleotide for detection of SNP TSC0048653
aggttagtttgty

SEQ ID NO: 197690 - DNA, 13 bp, Artificial Sequence
  Oligonucleotide for detection of SNP TSC0048653
racaaactaacct

SEQ ID NO: 197691 - DNA, 13 bp, Artificial Sequence
  Oligonucleotide for detection of SNP TSC0048653
aggttattttgty

SEQ ID NO: 197692 - DNA, 13 bp, Artificial Sequence
  Oligonucleotide for detection of SNP TSC0048653
racaaaataacct

SEQ ID NO: 197693 - DNA, 13 bp, Artificial Sequence
  Oligonucleotide for detection of SNP TSC0048654
agggttgtaaatg

SEQ ID NO: 197694 - DNA, 13 bp, Artificial Sequence
  Oligonucleotide for detection of SNP TSC0048654
catttacaaccct

SEQ ID NO: 197695 - DNA, 13 bp, Artificial Sequence
  Oligonucleotide for detection of SNP TSC0048654
agggttataaatg

SEQ ID NO: 197696 - DNA, 13 bp, Artificial Sequence
  Oligonucleotide for detection of SNP TSC0048654
catttataaccct

SEQ ID NO: 197697 - DNA, 13 bp, Artificial Sequence
  Oligonucleotide for detection of SNP TSC0048654
agggttgtaaacg

SEQ ID NO: 197698 - DNA, 13 bp, Artificial Sequence
  Oligonucleotide for detection of SNP TSC0048654
cgtttacaaccct

SEQ ID NO: 197699 - DNA, 13 bp, Artificial Sequence
  Oligonucleotide for detection of SNP TSC0048654
agggttataaacg

SEQ ID NO: 197700 - DNA, 13 bp, Artificial Sequence
  Oligonucleotide for detection of SNP TSC0048654
cgtttataaccct

SEQ ID NO: 197701 - DNA, 13 bp, Artificial Sequence
  Oligonucleotide for detection of SNP TSC0048655
aggaagaaaggaa

SEQ ID NO: 197702 - DNA, 13 bp, Artificial Sequence
  Oligonucleotide for detection of SNP TSC0048655
ttcctttcttcct

SEQ ID NO: 197703 - DNA, 13 bp, Artificial Sequence
  Oligonucleotide for detection of SNP TSC0048655
aggaaggaaggaa

SEQ ID NO: 197704 - DNA, 13 bp, Artificial Sequence
  Oligonucleotide for detection of SNP TSC0048655
ttccttccttcct

SEQ ID NO: 197705 - DNA, 13 bp, Artificial Sequence
  Oligonucleotide for detection of SNP TSC0048657
tgtttaaaaggtt

SEQ ID NO: 197706 - DNA, 13 bp, Artificial Sequence
  Oligonucleotide for detection of SNP TSC0048657
aaccttttaaaca

SEQ ID NO: 197707 - DNA, 13 bp, Artificial Sequence
  Oligonucleotide for detection of SNP TSC0048657
tgtttagaaggtt

SEQ ID NO: 197708 - DNA, 13 bp, Artificial Sequence
  Oligonucleotide for detection of SNP TSC0048657
aaccttctaaaca

SEQ ID NO: 197709 - DNA, 13 bp, Artificial Sequence
  Oligonucleotide for detection of SNP TSC0048658
tataggattttta

SEQ ID NO: 197710 - DNA, 13 bp, Artificial Sequence
  Oligonucleotide for detection of SNP TSC0048658
taaaaatcctata

SEQ ID NO: 197711 - DNA, 13 bp, Artificial Sequence
  Oligonucleotide for detection of SNP TSC0048658
tataggtttttta

SEQ ID NO: 197712 - DNA, 13 bp, Artificial Sequence
  Oligonucleotide for detection of SNP TSC0048658
taaaaaacctata

SEQ ID NO: 197713 - DNA, 13 bp, Artificial Sequence
  Oligonucleotide for detection of SNP TSC0048658
taagaattttata

SEQ ID NO: 197714 - DNA, 13 bp, Artificial Sequence
  Oligonucleotide for detection of SNP TSC0048658
tataaaattctta

SEQ ID NO: 197715 - DNA, 13 bp, Artificial Sequence
  Oligonucleotide for detection of SNP TSC0048658
taagaaatttata

SEQ ID NO: 197716 - DNA, 13 bp, Artificial Sequence
  Oligonucleotide for detection of SNP TSC0048658
tataaatttctta

SEQ ID NO: 197717 - DNA, 13 bp, Artificial Sequence
  Oligonucleotide for detection of SNP TSC0005361
agaaattgaggtt

SEQ ID NO: 197718 - DNA, 13 bp, Artificial Sequence
  Oligonucleotide for detection of SNP TSC0005361
aacctcaatttct

SEQ ID NO: 197719 - DNA, 13 bp, Artificial Sequence
  Oligonucleotide for detection of SNP TSC0005361
agaaatggaggtt

SEQ ID NO: 197720 - DNA, 13 bp, Artificial Sequence
  Oligonucleotide for detection of SNP TSC0005361
aacctccatttct

SEQ ID NO: 197721 - DNA, 13 bp, Artificial Sequence
  Oligonucleotide for detection of SNP TSC0048659
gggttttgagtgg

SEQ ID NO: 197722 - DNA, 13 bp, Artificial Sequence
  Oligonucleotide for detection of SNP TSC0048659
ccactcaaaaccc

SEQ ID NO: 197723 - DNA, 13 bp, Artificial Sequence
  Oligonucleotide for detection of SNP TSC0048659
gggtttcgagtgg

SEQ ID NO: 197724 - DNA, 13 bp, Artificial Sequence
  Oligonucleotide for detection of SNP TSC0048659
ccactcgaaaccc

SEQ ID NO: 197725 - DNA, 13 bp, Artificial Sequence
  Oligonucleotide for detection of SNP TSC0048659
ttatttgagatty

SEQ ID NO: 197726 - DNA, 13 bp, Artificial Sequence
  Oligonucleotide for detection of SNP TSC0048659
raatctcaaataa

SEQ ID NO: 197727 - DNA, 13 bp, Artificial Sequence
  Oligonucleotide for detection of SNP TSC0048659
ttatttaagatty

SEQ ID NO: 197728 - DNA, 13 bp, Artificial Sequence
  Oligonucleotide for detection of SNP TSC0048659
raatcttaaataa

SEQ ID NO: 197729 - DNA, 13 bp, Artificial Sequence
  Oligonucleotide for detection of SNP TSC0048659
ttattcgagatty

SEQ ID NO: 197730 - DNA, 13 bp, Artificial Sequence
  Oligonucleotide for detection of SNP TSC0048659
raatctcgaataa

SEQ ID NO: 197731 - DNA, 13 bp, Artificial Sequence
  Oligonucleotide for detection of SNP TSC0048660
atttaggtagagg

SEQ ID NO: 197732 - DNA, 13 bp, Artificial Sequence
  Oligonucleotide for detection of SNP TSC0048660
cctctacctaaat

SEQ ID NO: 197733 - DNA, 13 bp, Artificial Sequence
  Oligonucleotide for detection of SNP TSC0048660
atttagatagagg

SEQ ID NO: 197734 - DNA, 13 bp, Artificial Sequence
  Oligonucleotide for detection of SNP TSC0048660
cctctatctaaat

SEQ ID NO: 197735 - DNA, 13 bp, Artificial Sequence
  Oligonucleotide for detection of SNP TSC0048661
agtgaaaagttgg

SEQ ID NO: 197736 - DNA, 13 bp, Artificial Sequence
  Oligonucleotide for detection of SNP TSC0048661
ccaacttttcact

SEQ ID NO: 197737 - DNA, 13 bp, Artificial Sequence
  Oligonucleotide for detection of SNP TSC0048661
agtgaagagttgg

SEQ ID NO: 197738 - DNA, 13 bp, Artificial Sequence
  Oligonucleotide for detection of SNP TSC0048661
ccaactcttcact

SEQ ID NO: 197739 - DNA, 13 bp, Artificial Sequence
  Oligonucleotide for detection of SNP TSC0048662
ttattgataaatt

SEQ ID NO: 197740 - DNA, 13 bp, Artificial Sequence
  Oligonucleotide for detection of SNP TSC0048662
aatttatcaataa

SEQ ID NO: 197741 - DNA, 13 bp, Artificial Sequence
  Oligonucleotide for detection of SNP TSC0048662
ttattggtaaatt

SEQ ID NO: 197742 - DNA, 13 bp, Artificial Sequence
  Oligonucleotide for detection of SNP TSC0048662
aatttaccaataa

SEQ ID NO: 197743 - DNA, 13 bp, Artificial Sequence
  Oligonucleotide for detection of SNP TSC0048663
aagtttatattta

SEQ ID NO: 197744 - DNA, 13 bp, Artificial Sequence
  Oligonucleotide for detection of SNP TSC0048663
taaatataaactt

SEQ ID NO: 197745 - DNA, 13 bp, Artificial Sequence
  Oligonucleotide for detection of SNP TSC0048663
aagtttgtattta

SEQ ID NO: 197746 - DNA, 13 bp, Artificial Sequence
  Oligonucleotide for detection of SNP TSC0048663
taaatacaaactt

SEQ ID NO: 197747 - DNA, 13 bp, Artificial Sequence
  Oligonucleotide for detection of SNP TSC0048663
aagttcgtattta

SEQ ID NO: 197748 - DNA, 13 bp, Artificial Sequence
  Oligonucleotide for detection of SNP TSC0048663
taaatacgaactt

SEQ ID NO: 197749 - DNA, 13 bp, Artificial Sequence
  Oligonucleotide for detection of SNP TSC0048663
taggtatggattt

SEQ ID NO: 197750 - DNA, 13 bp, Artificial Sequence
  Oligonucleotide for detection of SNP TSC0048663
aaatccataccta

SEQ ID NO: 197751 - DNA, 13 bp, Artificial Sequence
  Oligonucleotide for detection of SNP TSC0048663
taggtacggattt

SEQ ID NO: 197752 - DNA, 13 bp, Artificial Sequence
  Oligonucleotide for detection of SNP TSC0048663
aaatccgtaccta

SEQ ID NO: 197753 - DNA, 13 bp, Artificial Sequence
  Oligonucleotide for detection of SNP TSC0048664
tttatttgtaagg

SEQ ID NO: 197754 - DNA, 13 bp, Artificial Sequence
  Oligonucleotide for detection of SNP TSC0048664
ccttacaaataaa

SEQ ID NO: 197755 - DNA, 13 bp, Artificial Sequence
  Oligonucleotide for detection of SNP TSC0048664
tttattcgtaagg

SEQ ID NO: 197756 - DNA, 13 bp, Artificial Sequence
  Oligonucleotide for detection of SNP TSC0048664
ccttacgaataaa

SEQ ID NO: 197757 - DNA, 13 bp, Artificial Sequence
  Oligonucleotide for detection of SNP TSC0048664
ttttataggtaga

SEQ ID NO: 197758 - DNA, 13 bp, Artificial Sequence
  Oligonucleotide for detection of SNP TSC0048664
tctacctataaaa

SEQ ID NO: 197759 - DNA, 13 bp, Artificial Sequence
  Oligonucleotide for detection of SNP TSC0048665
tttagtaagttgg

SEQ ID NO: 197760 - DNA, 13 bp, Artificial Sequence
  Oligonucleotide for detection of SNP TSC0048665
ccaacttactaaa

SEQ ID NO: 197761 - DNA, 13 bp, Artificial Sequence
  Oligonucleotide for detection of SNP TSC0048665
tttagtgagttgg

SEQ ID NO: 197762 - DNA, 13 bp, Artificial Sequence
  Oligonucleotide for detection of SNP TSC0048665
ccaactcactaaa

SEQ ID NO: 197763 - DNA, 13 bp, Artificial Sequence
  Oligonucleotide for detection of SNP TSC0048667
taatttatagtaa

SEQ ID NO: 197764 - DNA, 13 bp, Artificial Sequence
  Oligonucleotide for detection of SNP TSC0048667
ttactataaatta

SEQ ID NO: 197765 - DNA, 13 bp, Artificial Sequence
  Oligonucleotide for detection of SNP TSC0048667
taatttgtagtaa

SEQ ID NO: 197766 - DNA, 13 bp, Artificial Sequence
  Oligonucleotide for detection of SNP TSC0048667
ttactacaaatta

SEQ ID NO: 197767 - DNA, 13 bp, Artificial Sequence
  Oligonucleotide for detection of SNP TSC0048668
aaaaaagtataaa

SEQ ID NO: 197768 - DNA, 13 bp, Artificial Sequence
  Oligonucleotide for detection of SNP TSC0048668
tttatactttttt

SEQ ID NO: 197769 - DNA, 13 bp, Artificial Sequence
  Oligonucleotide for detection of SNP TSC0048670
ttttaggaatttg

SEQ ID NO: 197770 - DNA, 13 bp, Artificial Sequence
  Oligonucleotide for detection of SNP TSC0048670
caaattcctaaaa

SEQ ID NO: 197771 - DNA, 13 bp, Artificial Sequence
  Oligonucleotide for detection of SNP TSC0048670
tagattgttagga

SEQ ID NO: 197772 - DNA, 13 bp, Artificial Sequence
  Oligonucleotide for detection of SNP TSC0048670
tcctaacaatcta

SEQ ID NO: 197773 - DNA, 13 bp, Artificial Sequence
  Oligonucleotide for detection of SNP TSC0048670
tagatttttagga

SEQ ID NO: 197774 - DNA, 13 bp, Artificial Sequence
  Oligonucleotide for detection of SNP TSC0048670
tcctaaaaatcta

SEQ ID NO: 197775 - DNA, 13 bp, Artificial Sequence
  Oligonucleotide for detection of SNP TSC0048672
ggtgtaaaggtta

SEQ ID NO: 197776 - DNA, 13 bp, Artificial Sequence
  Oligonucleotide for detection of SNP TSC0048672
taacctttacacc

SEQ ID NO: 197777 - DNA, 13 bp, Artificial Sequence
  Oligonucleotide for detection of SNP TSC0048672
ggtgtagaggtta

SEQ ID NO: 197778 - DNA, 13 bp, Artificial Sequence
  Oligonucleotide for detection of SNP TSC0048672
taacctctacacc

SEQ ID NO: 197779 - DNA, 13 bp, Artificial Sequence
  Oligonucleotide for detection of SNP TSC0048679
attattataaaga

SEQ ID NO: 197780 - DNA, 13 bp, Artificial Sequence
  Oligonucleotide for detection of SNP TSC0048679
tctttataataat

SEQ ID NO: 197781 - DNA, 13 bp, Artificial Sequence
  Oligonucleotide for detection of SNP TSC0048679
attattttaaaga

SEQ ID NO: 197782 - DNA, 13 bp, Artificial Sequence
  Oligonucleotide for detection of SNP TSC0048679
tctttaaaataat

SEQ ID NO: 197783 - DNA, 13 bp, Artificial Sequence
  Oligonucleotide for detection of SNP TSC0048679
tttttaggataat

SEQ ID NO: 197784 - DNA, 13 bp, Artificial Sequence
  Oligonucleotide for detection of SNP TSC0048679
attatcctaaaaa

SEQ ID NO: 197785 - DNA, 13 bp, Artificial Sequence
  Oligonucleotide for detection of SNP TSC0048680
tagtgattaatgg

SEQ ID NO: 197786 - DNA, 13 bp, Artificial Sequence
  Oligonucleotide for detection of SNP TSC0048680
ccattaatcacta

SEQ ID NO: 197787 - DNA, 13 bp, Artificial Sequence
  Oligonucleotide for detection of SNP TSC0048680
tagtgagtaatgg

SEQ ID NO: 197788 - DNA, 13 bp, Artificial Sequence
  Oligonucleotide for detection of SNP TSC0048680
ccattactcacta

SEQ ID NO: 197789 - DNA, 13 bp, Artificial Sequence
  Oligonucleotide for detection of SNP TSC0048680
ttattgattatta

SEQ ID NO: 197790 - DNA, 13 bp, Artificial Sequence
  Oligonucleotide for detection of SNP TSC0048680
taataatcaataa

SEQ ID NO: 197791 - DNA, 13 bp, Artificial Sequence
  Oligonucleotide for detection of SNP TSC0048680
ttattgtttatta

SEQ ID NO: 197792 - DNA, 13 bp, Artificial Sequence
  Oligonucleotide for detection of SNP TSC0048680
taataaacaataa

SEQ ID NO: 197793 - DNA, 13 bp, Artificial Sequence
  Oligonucleotide for detection of SNP TSC0048681
tagaggtgatata

SEQ ID NO: 197794 - DNA, 13 bp, Artificial Sequence
  Oligonucleotide for detection of SNP TSC0048681
tatatcacctcta

SEQ ID NO: 197795 - DNA, 13 bp, Artificial Sequence
  Oligonucleotide for detection of SNP TSC0048681
tagaggcgatata

SEQ ID NO: 197796 - DNA, 13 bp, Artificial Sequence
  Oligonucleotide for detection of SNP TSC0048681
tatatcgcctcta

SEQ ID NO: 197797 - DNA, 13 bp, Artificial Sequence
  Oligonucleotide for detection of SNP TSC0048681
tgtgttgtttttg

SEQ ID NO: 197798 - DNA, 13 bp, Artificial Sequence
  Oligonucleotide for detection of SNP TSC0048681
caaaaacaacaca

SEQ ID NO: 197799 - DNA, 13 bp, Artificial Sequence
  Oligonucleotide for detection of SNP TSC0048681
tgtgttatttttg

SEQ ID NO: 197800 - DNA, 13 bp, Artificial Sequence
  Oligonucleotide for detection of SNP TSC0048681
caaaaataacaca

SEQ ID NO: 197801 - DNA, 13 bp, Artificial Sequence
  Oligonucleotide for detection of SNP TSC0048681
tgtgtcgtttttg

SEQ ID NO: 197802 - DNA, 13 bp, Artificial Sequence
  Oligonucleotide for detection of SNP TSC0048681
caaaaacgacaca

SEQ ID NO: 197803 - DNA, 13 bp, Artificial Sequence
  Oligonucleotide for detection of SNP TSC0048682
aaatttgttttaa

SEQ ID NO: 197804 - DNA, 13 bp, Artificial Sequence
  Oligonucleotide for detection of SNP TSC0048682
ttaaaacaaattt

SEQ ID NO: 197805 - DNA, 13 bp, Artificial Sequence
  Oligonucleotide for detection of SNP TSC0048682
ttagaaaaaattt

SEQ ID NO: 197806 - DNA, 13 bp, Artificial Sequence
  Oligonucleotide for detection of SNP TSC0048682
aaattttttctaa

SEQ ID NO: 197807 - DNA, 13 bp, Artificial Sequence
  Oligonucleotide for detection of SNP TSC0048682
ttagaataaattt

SEQ ID NO: 197808 - DNA, 13 bp, Artificial Sequence
  Oligonucleotide for detection of SNP TSC0048682
aaatttattctaa

SEQ ID NO: 197809 - DNA, 13 bp, Artificial Sequence
  Oligonucleotide for detection of SNP TSC0048683
gataagaaaaaag

SEQ ID NO: 197810 - DNA, 13 bp, Artificial Sequence
  Oligonucleotide for detection of SNP TSC0048683
cttttttcttatc

SEQ ID NO: 197811 - DNA, 13 bp, Artificial Sequence
  Oligonucleotide for detection of SNP TSC0048683
gataaggaaaaag

SEQ ID NO: 197812 - DNA, 13 bp, Artificial Sequence
  Oligonucleotide for detection of SNP TSC0048683
ctttttccttatc

SEQ ID NO: 197813 - DNA, 13 bp, Artificial Sequence
  Oligonucleotide for detection of SNP TSC0048685
tggtatagatagg

SEQ ID NO: 197814 - DNA, 13 bp, Artificial Sequence
  Oligonucleotide for detection of SNP TSC0048685
cctatctatacca

SEQ ID NO: 197815 - DNA, 13 bp, Artificial Sequence
  Oligonucleotide for detection of SNP TSC0048685
tggtattgatagg

SEQ ID NO: 197816 - DNA, 13 bp, Artificial Sequence
  Oligonucleotide for detection of SNP TSC0048685
cctatcaatacca

SEQ ID NO: 197817 - DNA, 13 bp, Artificial Sequence
  Oligonucleotide for detection of SNP TSC0048685
tggtatcgatagg

SEQ ID NO: 197818 - DNA, 13 bp, Artificial Sequence
  Oligonucleotide for detection of SNP TSC0048685
cctatcgatacca

SEQ ID NO: 197819 - DNA, 13 bp, Artificial Sequence
  Oligonucleotide for detection of SNP TSC0048685
tttgtttgtgtta

SEQ ID NO: 197820 - DNA, 13 bp, Artificial Sequence
  Oligonucleotide for detection of SNP TSC0048685
taacacaaacaaa

SEQ ID NO: 197821 - DNA, 13 bp, Artificial Sequence
  Oligonucleotide for detection of SNP TSC0048685
tttgttggtgtta

SEQ ID NO: 197822 - DNA, 13 bp, Artificial Sequence
  Oligonucleotide for detection of SNP TSC0048685
taacaccaacaaa

SEQ ID NO: 197823 - DNA, 13 bp, Artificial Sequence
  Oligonucleotide for detection of SNP TSC0048685
tttgtcggtgtta

SEQ ID NO: 197824 - DNA, 13 bp, Artificial Sequence
  Oligonucleotide for detection of SNP TSC0048685
taacaccgacaaa

SEQ ID NO: 197825 - DNA, 13 bp, Artificial Sequence
  Oligonucleotide for detection of SNP TSC0048686
tttttgtgtttay

SEQ ID NO: 197826 - DNA, 13 bp, Artificial Sequence
  Oligonucleotide for detection of SNP TSC0048686
rtaaacacaaaaa

SEQ ID NO: 197827 - DNA, 13 bp, Artificial Sequence
  Oligonucleotide for detection of SNP TSC0048686
tttttgcgtttay

SEQ ID NO: 197828 - DNA, 13 bp, Artificial Sequence
  Oligonucleotide for detection of SNP TSC0048686
rtaaacgcaaaaa

SEQ ID NO: 197829 - DNA, 13 bp, Artificial Sequence
  Oligonucleotide for detection of SNP TSC0048686
gtagatgtagaga

SEQ ID NO: 197830 - DNA, 13 bp, Artificial Sequence
  Oligonucleotide for detection of SNP TSC0048686
tctctacatctac

SEQ ID NO: 197831 - DNA, 13 bp, Artificial Sequence
  Oligonucleotide for detection of SNP TSC0048686
gtagatatagaga

SEQ ID NO: 197832 - DNA, 13 bp, Artificial Sequence
  Oligonucleotide for detection of SNP TSC0048686
tctctatatctac

SEQ ID NO: 197833 - DNA, 13 bp, Artificial Sequence
  Oligonucleotide for detection of SNP TSC0048686
gtagacgtagaga

SEQ ID NO: 197834 - DNA, 13 bp, Artificial Sequence
  Oligonucleotide for detection of SNP TSC0048686
tctctacgtctac

SEQ ID NO: 197835 - DNA, 13 bp, Artificial Sequence
  Oligonucleotide for detection of SNP TSC0004574
ggtgatagaaatg

SEQ ID NO: 197836 - DNA, 13 bp, Artificial Sequence
  Oligonucleotide for detection of SNP TSC0004574
catttctatcacc

SEQ ID NO: 197837 - DNA, 13 bp, Artificial Sequence
  Oligonucleotide for detection of SNP TSC0004574
ggtgatggaaatg

SEQ ID NO: 197838 - DNA, 13 bp, Artificial Sequence
  Oligonucleotide for detection of SNP TSC0004574
catttccatcacc

SEQ ID NO: 197839 - DNA, 13 bp, Artificial Sequence
  Oligonucleotide for detection of SNP TSC0004574
ggtgatagaaacg

SEQ ID NO: 197840 - DNA, 13 bp, Artificial Sequence
  Oligonucleotide for detection of SNP TSC0004574
cgtttctatcacc

SEQ ID NO: 197841 - DNA, 13 bp, Artificial Sequence
  Oligonucleotide for detection of SNP TSC0004574
ggtgatggaaacg

SEQ ID NO: 197842 - DNA, 13 bp, Artificial Sequence
  Oligonucleotide for detection of SNP TSC0004574
cgtttccatcacc

SEQ ID NO: 197843 - DNA, 13 bp, Artificial Sequence
  Oligonucleotide for detection of SNP TSC0048687
tgattatgaaaat

SEQ ID NO: 197844 - DNA, 13 bp, Artificial Sequence
  Oligonucleotide for detection of SNP TSC0048687
attttcataatca

SEQ ID NO: 197845 - DNA, 13 bp, Artificial Sequence
  Oligonucleotide for detection of SNP TSC0048687
tgattaggaaaat

SEQ ID NO: 197846 - DNA, 13 bp, Artificial Sequence
  Oligonucleotide for detection of SNP TSC0048687
attttcctaatca

SEQ ID NO: 197847 - DNA, 13 bp, Artificial Sequence
  Oligonucleotide for detection of SNP TSC0048687
atttttttgatta

SEQ ID NO: 197848 - DNA, 13 bp, Artificial Sequence
  Oligonucleotide for detection of SNP TSC0048687
taatcaaaaaaat

SEQ ID NO: 197849 - DNA, 13 bp, Artificial Sequence
  Oligonucleotide for detection of SNP TSC0048688
attaatgttatta

SEQ ID NO: 197850 - DNA, 13 bp, Artificial Sequence
  Oligonucleotide for detection of SNP TSC0048688
taataacattaat

SEQ ID NO: 197851 - DNA, 13 bp, Artificial Sequence
  Oligonucleotide for detection of SNP TSC0048688
attaatattatta

SEQ ID NO: 197852 - DNA, 13 bp, Artificial Sequence
  Oligonucleotide for detection of SNP TSC0048688
taataatattaat

SEQ ID NO: 197853 - DNA, 13 bp, Artificial Sequence
  Oligonucleotide for detection of SNP TSC0048689
aaggatatttatt

SEQ ID NO: 197854 - DNA, 13 bp, Artificial Sequence
  Oligonucleotide for detection of SNP TSC0048689
aataaatatcctt

SEQ ID NO: 197855 - DNA, 13 bp, Artificial Sequence
  Oligonucleotide for detection of SNP TSC0048689
aaggatgtttatt

SEQ ID NO: 197856 - DNA, 13 bp, Artificial Sequence
  Oligonucleotide for detection of SNP TSC0048689
aataaacatcctt

SEQ ID NO: 197857 - DNA, 13 bp, Artificial Sequence
  Oligonucleotide for detection of SNP TSC0048690
tttatatattaay

SEQ ID NO: 197858 - DNA, 13 bp, Artificial Sequence
  Oligonucleotide for detection of SNP TSC0048690
rttaatatataaa

SEQ ID NO: 197859 - DNA, 13 bp, Artificial Sequence
  Oligonucleotide for detection of SNP TSC0048690
gttagtttataga

SEQ ID NO: 197860 - DNA, 13 bp, Artificial Sequence
  Oligonucleotide for detection of SNP TSC0048690
tctataaactaac

SEQ ID NO: 197861 - DNA, 13 bp, Artificial Sequence
  Oligonucleotide for detection of SNP TSC0048690
gttagtgtataga

SEQ ID NO: 197862 - DNA, 13 bp, Artificial Sequence
  Oligonucleotide for detection of SNP TSC0048690
tctatacactaac

SEQ ID NO: 197863 - DNA, 13 bp, Artificial Sequence
  Oligonucleotide for detection of SNP TSC0048691
ttatttattagtt

SEQ ID NO: 197864 - DNA, 13 bp, Artificial Sequence
  Oligonucleotide for detection of SNP TSC0048691
aactaataaataa

SEQ ID NO: 197865 - DNA, 13 bp, Artificial Sequence
  Oligonucleotide for detection of SNP TSC0048692
gaaagtattaaag

SEQ ID NO: 197866 - DNA, 13 bp, Artificial Sequence
  Oligonucleotide for detection of SNP TSC0048692
ctttaatactttc

SEQ ID NO: 197867 - DNA, 13 bp, Artificial Sequence
  Oligonucleotide for detection of SNP TSC0048692
gaaagttttaaag

SEQ ID NO: 197868 - DNA, 13 bp, Artificial Sequence
  Oligonucleotide for detection of SNP TSC0048692
ctttaaaactttc

SEQ ID NO: 197869 - DNA, 13 bp, Artificial Sequence
  Oligonucleotide for detection of SNP TSC0048693
tttaaggattttt

SEQ ID NO: 197870 - DNA, 13 bp, Artificial Sequence
  Oligonucleotide for detection of SNP TSC0048693
aaaaatccttaaa

SEQ ID NO: 197871 - DNA, 13 bp, Artificial Sequence
  Oligonucleotide for detection of SNP TSC0048693
tttaagaattttt

SEQ ID NO: 197872 - DNA, 13 bp, Artificial Sequence
  Oligonucleotide for detection of SNP TSC0048693
aaaaattcttaaa

SEQ ID NO: 197873 - DNA, 13 bp, Artificial Sequence
  Oligonucleotide for detection of SNP TSC0048697
gtttttttgatag

SEQ ID NO: 197874 - DNA, 13 bp, Artificial Sequence
  Oligonucleotide for detection of SNP TSC0048697
ctatcaaaaaaac

SEQ ID NO: 197875 - DNA, 13 bp, Artificial Sequence
  Oligonucleotide for detection of SNP TSC0048697
ttattaaggggay

SEQ ID NO: 197876 - DNA, 13 bp, Artificial Sequence
  Oligonucleotide for detection of SNP TSC0048697
rtccccttaataa

SEQ ID NO: 197877 - DNA, 13 bp, Artificial Sequence
  Oligonucleotide for detection of SNP TSC0048697
ttattatggggay

SEQ ID NO: 197878 - DNA, 13 bp, Artificial Sequence
  Oligonucleotide for detection of SNP TSC0048697
rtccccataataa

SEQ ID NO: 197879 - DNA, 13 bp, Artificial Sequence
  Oligonucleotide for detection of SNP TSC0048697
ttattacggggay

SEQ ID NO: 197880 - DNA, 13 bp, Artificial Sequence
  Oligonucleotide for detection of SNP TSC0048697
rtccccgtaataa

SEQ ID NO: 197881 - DNA, 13 bp, Artificial Sequence
  Oligonucleotide for detection of SNP TSC0048698
gttgttgtagagg

SEQ ID NO: 197882 - DNA, 13 bp, Artificial Sequence
  Oligonucleotide for detection of SNP TSC0048698
cctctacaacaac

SEQ ID NO: 197883 - DNA, 13 bp, Artificial Sequence
  Oligonucleotide for detection of SNP TSC0048698
gttgttatagagg

SEQ ID NO: 197884 - DNA, 13 bp, Artificial Sequence
  Oligonucleotide for detection of SNP TSC0048698
cctctataacaac

SEQ ID NO: 197885 - DNA, 13 bp, Artificial Sequence
  Oligonucleotide for detection of SNP TSC0048699
aatatatgtttty

SEQ ID NO: 197886 - DNA, 13 bp, Artificial Sequence
  Oligonucleotide for detection of SNP TSC0048699
raaaacatatatt

SEQ ID NO: 197887 - DNA, 13 bp, Artificial Sequence
  Oligonucleotide for detection of SNP TSC0048699
aatataggtttty

SEQ ID NO: 197888 - DNA, 13 bp, Artificial Sequence
  Oligonucleotide for detection of SNP TSC0048699
raaaacctatatt

SEQ ID NO: 197889 - DNA, 13 bp, Artificial Sequence
  Oligonucleotide for detection of SNP TSC0048699
gaagatttgtgtt

SEQ ID NO: 197890 - DNA, 13 bp, Artificial Sequence
  Oligonucleotide for detection of SNP TSC0048699
aacacaaatcttc

SEQ ID NO: 197891 - DNA, 13 bp, Artificial Sequence
  Oligonucleotide for detection of SNP TSC0005313
tatgttaggttay

SEQ ID NO: 197892 - DNA, 13 bp, Artificial Sequence
  Oligonucleotide for detection of SNP TSC0005313
rtaacctaacata

SEQ ID NO: 197893 - DNA, 13 bp, Artificial Sequence
  Oligonucleotide for detection of SNP TSC0005313
tatgttgggttay

SEQ ID NO: 197894 - DNA, 13 bp, Artificial Sequence
  Oligonucleotide for detection of SNP TSC0005313
rtaacccaacata

SEQ ID NO: 197895 - DNA, 13 bp, Artificial Sequence
  Oligonucleotide for detection of SNP TSC0048702
atgttttgggata

SEQ ID NO: 197896 - DNA, 13 bp, Artificial Sequence
  Oligonucleotide for detection of SNP TSC0048702
tatcccaaaacat

SEQ ID NO: 197897 - DNA, 13 bp, Artificial Sequence
  Oligonucleotide for detection of SNP TSC0048702
acgttttgggata

SEQ ID NO: 197898 - DNA, 13 bp, Artificial Sequence
  Oligonucleotide for detection of SNP TSC0048702
tatcccaaaacgt

SEQ ID NO: 197899 - DNA, 13 bp, Artificial Sequence
  Oligonucleotide for detection of SNP TSC0048702
atgtttcgggata

SEQ ID NO: 197900 - DNA, 13 bp, Artificial Sequence
  Oligonucleotide for detection of SNP TSC0048702
tatcccgaaacat

SEQ ID NO: 197901 - DNA, 13 bp, Artificial Sequence
  Oligonucleotide for detection of SNP TSC0048702
acgtttcgggata

SEQ ID NO: 197902 - DNA, 13 bp, Artificial Sequence
  Oligonucleotide for detection of SNP TSC0048702
tatcccgaaacgt

SEQ ID NO: 197903 - DNA, 13 bp, Artificial Sequence
  Oligonucleotide for detection of SNP TSC0048702
tgttttggaatgt

SEQ ID NO: 197904 - DNA, 13 bp, Artificial Sequence
  Oligonucleotide for detection of SNP TSC0048702
acattccaaaaca

SEQ ID NO: 197905 - DNA, 13 bp, Artificial Sequence
  Oligonucleotide for detection of SNP TSC0048702
tgttttagaatgt

SEQ ID NO: 197906 - DNA, 13 bp, Artificial Sequence
  Oligonucleotide for detection of SNP TSC0048702
acattctaaaaca

SEQ ID NO: 197907 - DNA, 13 bp, Artificial Sequence
  Oligonucleotide for detection of SNP TSC0048702
tgtttcggaatgt

SEQ ID NO: 197908 - DNA, 13 bp, Artificial Sequence
  Oligonucleotide for detection of SNP TSC0048702
acattccgaaaca

SEQ ID NO: 197909 - DNA, 13 bp, Artificial Sequence
  Oligonucleotide for detection of SNP TSC0048702
tgttttagaacgt

SEQ ID NO: 197910 - DNA, 13 bp, Artificial Sequence
  Oligonucleotide for detection of SNP TSC0048702
acgttctaaaaca

SEQ ID NO: 197911 - DNA, 13 bp, Artificial Sequence
  Oligonucleotide for detection of SNP TSC0048702
tgttttggaacgt

SEQ ID NO: 197912 - DNA, 13 bp, Artificial Sequence
  Oligonucleotide for detection of SNP TSC0048702
acgttccaaaaca

SEQ ID NO: 197913 - DNA, 13 bp, Artificial Sequence
  Oligonucleotide for detection of SNP TSC0048702
tgtttcggaacgt

SEQ ID NO: 197914 - DNA, 13 bp, Artificial Sequence
  Oligonucleotide for detection of SNP TSC0048702
acgttccgaaaca

SEQ ID NO: 197915 - DNA, 13 bp, Artificial Sequence
  Oligonucleotide for detection of SNP TSC0048707
tgttgtatggatt

SEQ ID NO: 197916 - DNA, 13 bp, Artificial Sequence
  Oligonucleotide for detection of SNP TSC0048707
aatccatacaaca

SEQ ID NO: 197917 - DNA, 13 bp, Artificial Sequence
  Oligonucleotide for detection of SNP TSC0048707
tgttgtgtggatt

SEQ ID NO: 197918 - DNA, 13 bp, Artificial Sequence
  Oligonucleotide for detection of SNP TSC0048707
aatccacacaaca

SEQ ID NO: 197919 - DNA, 13 bp, Artificial Sequence
  Oligonucleotide for detection of SNP TSC0048707
tgttgcgtggatt

SEQ ID NO: 197920 - DNA, 13 bp, Artificial Sequence
  Oligonucleotide for detection of SNP TSC0048707
aatccacgcaaca

SEQ ID NO: 197921 - DNA, 13 bp, Artificial Sequence
  Oligonucleotide for detection of SNP TSC0048708
tttggataaaagg

SEQ ID NO: 197922 - DNA, 13 bp, Artificial Sequence
  Oligonucleotide for detection of SNP TSC0048708
ccttttatccaaa

SEQ ID NO: 197923 - DNA, 13 bp, Artificial Sequence
  Oligonucleotide for detection of SNP TSC0048709
gtttgagtagtag

SEQ ID NO: 197924 - DNA, 13 bp, Artificial Sequence
  Oligonucleotide for detection of SNP TSC0048709
ctactactcaaac

SEQ ID NO: 197925 - DNA, 13 bp, Artificial Sequence
  Oligonucleotide for detection of SNP TSC0048709
gtttgaatagtag

SEQ ID NO: 197926 - DNA, 13 bp, Artificial Sequence
  Oligonucleotide for detection of SNP TSC0048709
ctactattcaaac

SEQ ID NO: 197927 - DNA, 13 bp, Artificial Sequence
  Oligonucleotide for detection of SNP TSC0048710
aatatgataaaay

SEQ ID NO: 197928 - DNA, 13 bp, Artificial Sequence
  Oligonucleotide for detection of SNP TSC0048710
rttttatcatatt

SEQ ID NO: 197929 - DNA, 13 bp, Artificial Sequence
  Oligonucleotide for detection of SNP TSC0005346
ttttgtttttgtt

SEQ ID NO: 197930 - DNA, 13 bp, Artificial Sequence
  Oligonucleotide for detection of SNP TSC0005346
aacaaaaacaaaa

SEQ ID NO: 197931 - DNA, 13 bp, Artificial Sequence
  Oligonucleotide for detection of SNP TSC0005346
agtagatatagaa

SEQ ID NO: 197932 - DNA, 13 bp, Artificial Sequence
  Oligonucleotide for detection of SNP TSC0005346
ttctatatctact

SEQ ID NO: 197933 - DNA, 13 bp, Artificial Sequence
  Oligonucleotide for detection of SNP TSC0005346
agtagaaatagaa

SEQ ID NO: 197934 - DNA, 13 bp, Artificial Sequence
  Oligonucleotide for detection of SNP TSC0005346
ttctatttctact

SEQ ID NO: 197935 - DNA, 13 bp, Artificial Sequence
  Oligonucleotide for detection of SNP TSC0004599
atatatgaaagtt

SEQ ID NO: 197936 - DNA, 13 bp, Artificial Sequence
  Oligonucleotide for detection of SNP TSC0004599
aactttcatatat

SEQ ID NO: 197937 - DNA, 13 bp, Artificial Sequence
  Oligonucleotide for detection of SNP TSC0004599
atatataaaagtt

SEQ ID NO: 197938 - DNA, 13 bp, Artificial Sequence
  Oligonucleotide for detection of SNP TSC0004599
aacttttatatat

SEQ ID NO: 197939 - DNA, 13 bp, Artificial Sequence
  Oligonucleotide for detection of SNP TSC0048712
ggttaggaggtta

SEQ ID NO: 197940 - DNA, 13 bp, Artificial Sequence
  Oligonucleotide for detection of SNP TSC0048712
taacctcctaacc

SEQ ID NO: 197941 - DNA, 13 bp, Artificial Sequence
  Oligonucleotide for detection of SNP TSC0048712
ggttagaaggtta

SEQ ID NO: 197942 - DNA, 13 bp, Artificial Sequence
  Oligonucleotide for detection of SNP TSC0048712
taaccttctaacc

SEQ ID NO: 197943 - DNA, 13 bp, Artificial Sequence
  Oligonucleotide for detection of SNP TSC0048715
tagtataagaaay

SEQ ID NO: 197944 - DNA, 13 bp, Artificial Sequence
  Oligonucleotide for detection of SNP TSC0048715
rtttcttatacta

SEQ ID NO: 197945 - DNA, 13 bp, Artificial Sequence
  Oligonucleotide for detection of SNP TSC0048715
tagtatgagaaay

SEQ ID NO: 197946 - DNA, 13 bp, Artificial Sequence
  Oligonucleotide for detection of SNP TSC0048715
rtttctcatacta

SEQ ID NO: 197947 - DNA, 13 bp, Artificial Sequence
  Oligonucleotide for detection of SNP TSC0048716
atttttttttaga

SEQ ID NO: 197948 - DNA, 13 bp, Artificial Sequence
  Oligonucleotide for detection of SNP TSC0048716
tctaaaaaaaaat

SEQ ID NO: 197949 - DNA, 13 bp, Artificial Sequence
  Oligonucleotide for detection of SNP TSC0048716
tttgaaggggaat

SEQ ID NO: 197950 - DNA, 13 bp, Artificial Sequence
  Oligonucleotide for detection of SNP TSC0048716
attccccttcaaa

SEQ ID NO: 197951 - DNA, 13 bp, Artificial Sequence
  Oligonucleotide for detection of SNP TSC0048717
tagttagtttgat

SEQ ID NO: 197952 - DNA, 13 bp, Artificial Sequence
  Oligonucleotide for detection of SNP TSC0048717
atcaaactaacta

SEQ ID NO: 197953 - DNA, 13 bp, Artificial Sequence
  Oligonucleotide for detection of SNP TSC0048717
tagttaatttgat

SEQ ID NO: 197954 - DNA, 13 bp, Artificial Sequence
  Oligonucleotide for detection of SNP TSC0048717
atcaaattaacta

SEQ ID NO: 197955 - DNA, 13 bp, Artificial Sequence
  Oligonucleotide for detection of SNP TSC0048718
tagttggattaty

SEQ ID NO: 197956 - DNA, 13 bp, Artificial Sequence
  Oligonucleotide for detection of SNP TSC0048718
rataatccaacta

SEQ ID NO: 197957 - DNA, 13 bp, Artificial Sequence
  Oligonucleotide for detection of SNP TSC0048718
tagttgaattaty

SEQ ID NO: 197958 - DNA, 13 bp, Artificial Sequence
  Oligonucleotide for detection of SNP TSC0048718
rataattcaacta

SEQ ID NO: 197959 - DNA, 13 bp, Artificial Sequence
  Oligonucleotide for detection of SNP TSC0048719
gtaggtatatagy

SEQ ID NO: 197960 - DNA, 13 bp, Artificial Sequence
  Oligonucleotide for detection of SNP TSC0048719
rctatatacctac

SEQ ID NO: 197961 - DNA, 13 bp, Artificial Sequence
  Oligonucleotide for detection of SNP TSC0048719
gtaggtttatagy

SEQ ID NO: 197962 - DNA, 13 bp, Artificial Sequence
  Oligonucleotide for detection of SNP TSC0048719
rctataaacctac

SEQ ID NO: 197963 - DNA, 13 bp, Artificial Sequence
  Oligonucleotide for detection of SNP TSC0048719
gttgtatatttgy

SEQ ID NO: 197964 - DNA, 13 bp, Artificial Sequence
  Oligonucleotide for detection of SNP TSC0048719
rcaaatatacaac

SEQ ID NO: 197965 - DNA, 13 bp, Artificial Sequence
  Oligonucleotide for detection of SNP TSC0048719
gttgtagatttgy

SEQ ID NO: 197966 - DNA, 13 bp, Artificial Sequence
  Oligonucleotide for detection of SNP TSC0048719
rcaaatctacaac

SEQ ID NO: 197967 - DNA, 13 bp, Artificial Sequence
  Oligonucleotide for detection of SNP TSC0005238
ttatgtgttttat

SEQ ID NO: 197968 - DNA, 13 bp, Artificial Sequence
  Oligonucleotide for detection of SNP TSC0005238
ataaaacacataa

SEQ ID NO: 197969 - DNA, 13 bp, Artificial Sequence
  Oligonucleotide for detection of SNP TSC0005238
ttatgcgttttat

SEQ ID NO: 197970 - DNA, 13 bp, Artificial Sequence
  Oligonucleotide for detection of SNP TSC0005238
ataaaacgcataa

SEQ ID NO: 197971 - DNA, 13 bp, Artificial Sequence
  Oligonucleotide for detection of SNP TSC0005238
ataagatgtatgg

SEQ ID NO: 197972 - DNA, 13 bp, Artificial Sequence
  Oligonucleotide for detection of SNP TSC0005238
ccatacatcttat

SEQ ID NO: 197973 - DNA, 13 bp, Artificial Sequence
  Oligonucleotide for detection of SNP TSC0005238
ataagacgtatgg

SEQ ID NO: 197974 - DNA, 13 bp, Artificial Sequence
  Oligonucleotide for detection of SNP TSC0005238
ccatacgtcttat

SEQ ID NO: 197975 - DNA, 13 bp, Artificial Sequence
  Oligonucleotide for detection of SNP TSC0048720
ggaattagaagat

SEQ ID NO: 197976 - DNA, 13 bp, Artificial Sequence
  Oligonucleotide for detection of SNP TSC0048720
atcttctaattcc

SEQ ID NO: 197977 - DNA, 13 bp, Artificial Sequence
  Oligonucleotide for detection of SNP TSC0048720
ggaatttgaagat

SEQ ID NO: 197978 - DNA, 13 bp, Artificial Sequence
  Oligonucleotide for detection of SNP TSC0048720
atcttcaaattcc

SEQ ID NO: 197979 - DNA, 13 bp, Artificial Sequence
  Oligonucleotide for detection of SNP TSC0048721
tagtatatagtta

SEQ ID NO: 197980 - DNA, 13 bp, Artificial Sequence
  Oligonucleotide for detection of SNP TSC0048721
taactatatacta

SEQ ID NO: 197981 - DNA, 13 bp, Artificial Sequence
  Oligonucleotide for detection of SNP TSC0048721
tagtatgtagtta

SEQ ID NO: 197982 - DNA, 13 bp, Artificial Sequence
  Oligonucleotide for detection of SNP TSC0048721
taactacatacta

SEQ ID NO: 197983 - DNA, 13 bp, Artificial Sequence
  Oligonucleotide for detection of SNP TSC0048721
tagtacgtagtta

SEQ ID NO: 197984 - DNA, 13 bp, Artificial Sequence
  Oligonucleotide for detection of SNP TSC0048721
taactacgtacta

SEQ ID NO: 197985 - DNA, 13 bp, Artificial Sequence
  Oligonucleotide for detection of SNP TSC0048721
taattatgtgttg

SEQ ID NO: 197986 - DNA, 13 bp, Artificial Sequence
  Oligonucleotide for detection of SNP TSC0048721
caacacataatta

SEQ ID NO: 197987 - DNA, 13 bp, Artificial Sequence
  Oligonucleotide for detection of SNP TSC0048721
taattacgtgttg

SEQ ID NO: 197988 - DNA, 13 bp, Artificial Sequence
  Oligonucleotide for detection of SNP TSC0048721
caacacgtaatta

SEQ ID NO: 197989 - DNA, 13 bp, Artificial Sequence
  Oligonucleotide for detection of SNP TSC0048726
tttataagagata

SEQ ID NO: 197990 - DNA, 13 bp, Artificial Sequence
  Oligonucleotide for detection of SNP TSC0048726
tatctcttataaa

SEQ ID NO: 197991 - DNA, 13 bp, Artificial Sequence
  Oligonucleotide for detection of SNP TSC0048726
tttataggagata

SEQ ID NO: 197992 - DNA, 13 bp, Artificial Sequence
  Oligonucleotide for detection of SNP TSC0048726
tatctcctataaa

SEQ ID NO: 197993 - DNA, 13 bp, Artificial Sequence
  Oligonucleotide for detection of SNP TSC0048737
gggggttgtatty

SEQ ID NO: 197994 - DNA, 13 bp, Artificial Sequence
  Oligonucleotide for detection of SNP TSC0048737
raatacaaccccc

SEQ ID NO: 197995 - DNA, 13 bp, Artificial Sequence
  Oligonucleotide for detection of SNP TSC0048737
gggggtcgtatty

SEQ ID NO: 197996 - DNA, 13 bp, Artificial Sequence
  Oligonucleotide for detection of SNP TSC0048737
raatacgaccccc

SEQ ID NO: 197997 - DNA, 13 bp, Artificial Sequence
  Oligonucleotide for detection of SNP TSC0048737
gggtatggtttty

SEQ ID NO: 197998 - DNA, 13 bp, Artificial Sequence
  Oligonucleotide for detection of SNP TSC0048737
raaaaccataccc

SEQ ID NO: 197999 - DNA, 13 bp, Artificial Sequence
  Oligonucleotide for detection of SNP TSC0048737
gggtatagtttty

SEQ ID NO: 198000 - DNA, 13 bp, Artificial Sequence
  Oligonucleotide for detection of SNP TSC0048737
raaaactataccc

SEQ ID NO: 198001 - DNA, 13 bp, Artificial Sequence
  Oligonucleotide for detection of SNP TSC0048737
gggtacggtttty

SEQ ID NO: 198002 - DNA, 13 bp, Artificial Sequence
  Oligonucleotide for detection of SNP TSC0048737
raaaaccgtaccc

SEQ ID NO: 198003 - DNA, 13 bp, Artificial Sequence
  Oligonucleotide for detection of SNP TSC0048738
atcgttattgaga

SEQ ID NO: 198004 - DNA, 13 bp, Artificial Sequence
  Oligonucleotide for detection of SNP TSC0048738
tctcaataacgat

SEQ ID NO: 198005 - DNA, 13 bp, Artificial Sequence
  Oligonucleotide for detection of SNP TSC0048738
atcgttgttgaga

SEQ ID NO: 198006 - DNA, 13 bp, Artificial Sequence
  Oligonucleotide for detection of SNP TSC0048738
tctcaacaacgat

SEQ ID NO: 198007 - DNA, 13 bp, Artificial Sequence
  Oligonucleotide for detection of SNP TSC0048739
ggtaaaagattta

SEQ ID NO: 198008 - DNA, 13 bp, Artificial Sequence
  Oligonucleotide for detection of SNP TSC0048739
taaatcttttacc

SEQ ID NO: 198009 - DNA, 13 bp, Artificial Sequence
  Oligonucleotide for detection of SNP TSC0048739
ggtaaaggattta

SEQ ID NO: 198010 - DNA, 13 bp, Artificial Sequence
  Oligonucleotide for detection of SNP TSC0048739
taaatcctttacc

SEQ ID NO: 198011 - DNA, 13 bp, Artificial Sequence
  Oligonucleotide for detection of SNP TSC0048740
atgttaaaatttt

SEQ ID NO: 198012 - DNA, 13 bp, Artificial Sequence
  Oligonucleotide for detection of SNP TSC0048740
aaaattttaacat

SEQ ID NO: 198013 - DNA, 13 bp, Artificial Sequence
  Oligonucleotide for detection of SNP TSC0048740
atgttagaatttt

SEQ ID NO: 198014 - DNA, 13 bp, Artificial Sequence
  Oligonucleotide for detection of SNP TSC0048740
aaaattctaacat

SEQ ID NO: 198015 - DNA, 13 bp, Artificial Sequence
  Oligonucleotide for detection of SNP TSC0048742
ttaatgtgaaaay

SEQ ID NO: 198016 - DNA, 13 bp, Artificial Sequence
  Oligonucleotide for detection of SNP TSC0048742
rttttcacattaa

SEQ ID NO: 198017 - DNA, 13 bp, Artificial Sequence
  Oligonucleotide for detection of SNP TSC0048742
ttaatgggaaaay

SEQ ID NO: 198018 - DNA, 13 bp, Artificial Sequence
  Oligonucleotide for detection of SNP TSC0048742
rttttcccattaa

SEQ ID NO: 198019 - DNA, 13 bp, Artificial Sequence
  Oligonucleotide for detection of SNP TSC0048742
gtttttatattag

SEQ ID NO: 198020 - DNA, 13 bp, Artificial Sequence
  Oligonucleotide for detection of SNP TSC0048742
ctaatataaaaac

SEQ ID NO: 198021 - DNA, 13 bp, Artificial Sequence
  Oligonucleotide for detection of SNP TSC0048742
gtttttttattag

SEQ ID NO: 198022 - DNA, 13 bp, Artificial Sequence
  Oligonucleotide for detection of SNP TSC0048742
ctaataaaaaaac

SEQ ID NO: 198023 - DNA, 13 bp, Artificial Sequence
  Oligonucleotide for detection of SNP TSC0048743
aaatatatatatt

SEQ ID NO: 198024 - DNA, 13 bp, Artificial Sequence
  Oligonucleotide for detection of SNP TSC0048743
aatatatatattt

SEQ ID NO: 198025 - DNA, 13 bp, Artificial Sequence
  Oligonucleotide for detection of SNP TSC0048743
aaatatgtatatt

SEQ ID NO: 198026 - DNA, 13 bp, Artificial Sequence
  Oligonucleotide for detection of SNP TSC0048743
aatatacatattt

SEQ ID NO: 198027 - DNA, 13 bp, Artificial Sequence
  Oligonucleotide for detection of SNP TSC0009035
agtattatttttg

SEQ ID NO: 198028 - DNA, 13 bp, Artificial Sequence
  Oligonucleotide for detection of SNP TSC0009035
caaaaataatact

SEQ ID NO: 198029 - DNA, 13 bp, Artificial Sequence
  Oligonucleotide for detection of SNP TSC0009035
agtattgtttttg

SEQ ID NO: 198030 - DNA, 13 bp, Artificial Sequence
  Oligonucleotide for detection of SNP TSC0009035
caaaaacaatact

SEQ ID NO: 198031 - DNA, 13 bp, Artificial Sequence
  Oligonucleotide for detection of SNP TSC0009035
agtattattttcg

SEQ ID NO: 198032 - DNA, 13 bp, Artificial Sequence
  Oligonucleotide for detection of SNP TSC0009035
cgaaaataatact

SEQ ID NO: 198033 - DNA, 13 bp, Artificial Sequence
  Oligonucleotide for detection of SNP TSC0009035
agtattgttttcg

SEQ ID NO: 198034 - DNA, 13 bp, Artificial Sequence
  Oligonucleotide for detection of SNP TSC0009035
cgaaaacaatact

SEQ ID NO: 198035 - DNA, 13 bp, Artificial Sequence
  Oligonucleotide for detection of SNP TSC0048744
ggtatgtgtttgt

SEQ ID NO: 198036 - DNA, 13 bp, Artificial Sequence
  Oligonucleotide for detection of SNP TSC0048744
acaaacacatacc

SEQ ID NO: 198037 - DNA, 13 bp, Artificial Sequence
  Oligonucleotide for detection of SNP TSC0048744
ggtatgcgtttgt

SEQ ID NO: 198038 - DNA, 13 bp, Artificial Sequence
  Oligonucleotide for detection of SNP TSC0048744
acaaacgcatacc

SEQ ID NO: 198039 - DNA, 13 bp, Artificial Sequence
  Oligonucleotide for detection of SNP TSC0048744
ataggtgtatgty

SEQ ID NO: 198040 - DNA, 13 bp, Artificial Sequence
  Oligonucleotide for detection of SNP TSC0048744
racatacacctat

SEQ ID NO: 198041 - DNA, 13 bp, Artificial Sequence
  Oligonucleotide for detection of SNP TSC0048744
ataggtatatgty

SEQ ID NO: 198042 - DNA, 13 bp, Artificial Sequence
  Oligonucleotide for detection of SNP TSC0048744
racatatacctat

SEQ ID NO: 198043 - DNA, 13 bp, Artificial Sequence
  Oligonucleotide for detection of SNP TSC0048744
ataggcgtatgty

SEQ ID NO: 198044 - DNA, 13 bp, Artificial Sequence
  Oligonucleotide for detection of SNP TSC0048744
racatacgcctat

SEQ ID NO: 198045 - DNA, 13 bp, Artificial Sequence
  Oligonucleotide for detection of SNP TSC0048746
tttgttaagtgta

SEQ ID NO: 198046 - DNA, 13 bp, Artificial Sequence
  Oligonucleotide for detection of SNP TSC0048746
tacacttaacaaa

SEQ ID NO: 198047 - DNA, 13 bp, Artificial Sequence
  Oligonucleotide for detection of SNP TSC0048746
tttgtttagtgta

SEQ ID NO: 198048 - DNA, 13 bp, Artificial Sequence
  Oligonucleotide for detection of SNP TSC0048746
tacactaaacaaa

SEQ ID NO: 198049 - DNA, 13 bp, Artificial Sequence
  Oligonucleotide for detection of SNP TSC0048746
tatatttagtaag

SEQ ID NO: 198050 - DNA, 13 bp, Artificial Sequence
  Oligonucleotide for detection of SNP TSC0048746
cttactaaatata

SEQ ID NO: 198051 - DNA, 13 bp, Artificial Sequence
  Oligonucleotide for detection of SNP TSC0048746
tatattgagtaag

SEQ ID NO: 198052 - DNA, 13 bp, Artificial Sequence
  Oligonucleotide for detection of SNP TSC0048746
cttactcaatata

SEQ ID NO: 198053 - DNA, 13 bp, Artificial Sequence
  Oligonucleotide for detection of SNP TSC0048748
aaaaagaatttgt

SEQ ID NO: 198054 - DNA, 13 bp, Artificial Sequence
  Oligonucleotide for detection of SNP TSC0048748
acaaattcttttt

SEQ ID NO: 198055 - DNA, 13 bp, Artificial Sequence
  Oligonucleotide for detection of SNP TSC0048748
aaaaaggatttgt

SEQ ID NO: 198056 - DNA, 13 bp, Artificial Sequence
  Oligonucleotide for detection of SNP TSC0048748
acaaatccttttt

SEQ ID NO: 198057 - DNA, 13 bp, Artificial Sequence
  Oligonucleotide for detection of SNP TSC0048749
tgttttgtagaty

SEQ ID NO: 198058 - DNA, 13 bp, Artificial Sequence
  Oligonucleotide for detection of SNP TSC0048749
ratctacaaaaca

SEQ ID NO: 198059 - DNA, 13 bp, Artificial Sequence
  Oligonucleotide for detection of SNP TSC0048749
tgttttatagaty

SEQ ID NO: 198060 - DNA, 13 bp, Artificial Sequence
  Oligonucleotide for detection of SNP TSC0048749
ratctataaaaca

SEQ ID NO: 198061 - DNA, 13 bp, Artificial Sequence
  Oligonucleotide for detection of SNP TSC0048752
tatgatatattat

SEQ ID NO: 198062 - DNA, 13 bp, Artificial Sequence
  Oligonucleotide for detection of SNP TSC0048752
ataatatatcata

SEQ ID NO: 198063 - DNA, 13 bp, Artificial Sequence
  Oligonucleotide for detection of SNP TSC0048752
tatgatgtattat

SEQ ID NO: 198064 - DNA, 13 bp, Artificial Sequence
  Oligonucleotide for detection of SNP TSC0048752
ataatacatcata

SEQ ID NO: 198065 - DNA, 13 bp, Artificial Sequence
  Oligonucleotide for detection of SNP TSC0048753
ttattggttttta

SEQ ID NO: 198066 - DNA, 13 bp, Artificial Sequence
  Oligonucleotide for detection of SNP TSC0048753
taaaaaccaataa

SEQ ID NO: 198067 - DNA, 13 bp, Artificial Sequence
  Oligonucleotide for detection of SNP TSC0048754
gtagatatgtggg

SEQ ID NO: 198068 - DNA, 13 bp, Artificial Sequence
  Oligonucleotide for detection of SNP TSC0048754
cccacatatctac

SEQ ID NO: 198069 - DNA, 13 bp, Artificial Sequence
  Oligonucleotide for detection of SNP TSC0048754
gtagatgtgtggg

SEQ ID NO: 198070 - DNA, 13 bp, Artificial Sequence
  Oligonucleotide for detection of SNP TSC0048754
cccacacatctac

SEQ ID NO: 198071 - DNA, 13 bp, Artificial Sequence
  Oligonucleotide for detection of SNP TSC0048757
aagagatgtgaag

SEQ ID NO: 198072 - DNA, 13 bp, Artificial Sequence
  Oligonucleotide for detection of SNP TSC0048757
cttcacatctctt

SEQ ID NO: 198073 - DNA, 13 bp, Artificial Sequence
  Oligonucleotide for detection of SNP TSC0048757
aagagacgtgaag

SEQ ID NO: 198074 - DNA, 13 bp, Artificial Sequence
  Oligonucleotide for detection of SNP TSC0048757
cttcacgtctctt

SEQ ID NO: 198075 - DNA, 13 bp, Artificial Sequence
  Oligonucleotide for detection of SNP TSC0048758
gtatagatagagg

SEQ ID NO: 198076 - DNA, 13 bp, Artificial Sequence
  Oligonucleotide for detection of SNP TSC0048758
cctctatctatac

SEQ ID NO: 198077 - DNA, 13 bp, Artificial Sequence
  Oligonucleotide for detection of SNP TSC0048758
gtatagttagagg

SEQ ID NO: 198078 - DNA, 13 bp, Artificial Sequence
  Oligonucleotide for detection of SNP TSC0048758
cctctaactatac

SEQ ID NO: 198079 - DNA, 13 bp, Artificial Sequence
  Oligonucleotide for detection of SNP TSC0048759
atgaggatgtggt

SEQ ID NO: 198080 - DNA, 13 bp, Artificial Sequence
  Oligonucleotide for detection of SNP TSC0048759
accacatcctcat

SEQ ID NO: 198081 - DNA, 13 bp, Artificial Sequence
  Oligonucleotide for detection of SNP TSC0048759
atgaggttgtggt

SEQ ID NO: 198082 - DNA, 13 bp, Artificial Sequence
  Oligonucleotide for detection of SNP TSC0048759
accacaacctcat

SEQ ID NO: 198083 - DNA, 13 bp, Artificial Sequence
  Oligonucleotide for detection of SNP TSC0048759
attatatttttat

SEQ ID NO: 198084 - DNA, 13 bp, Artificial Sequence
  Oligonucleotide for detection of SNP TSC0048759
ataaaaatataat

SEQ ID NO: 198085 - DNA, 13 bp, Artificial Sequence
  Oligonucleotide for detection of SNP TSC0048761
aaagaaaaagtta

SEQ ID NO: 198086 - DNA, 13 bp, Artificial Sequence
  Oligonucleotide for detection of SNP TSC0048761
taactttttcttt

SEQ ID NO: 198087 - DNA, 13 bp, Artificial Sequence
  Oligonucleotide for detection of SNP TSC0048761
aaagaagaagtta

SEQ ID NO: 198088 - DNA, 13 bp, Artificial Sequence
  Oligonucleotide for detection of SNP TSC0048761
taacttcttcttt

SEQ ID NO: 198089 - DNA, 13 bp, Artificial Sequence
  Oligonucleotide for detection of SNP TSC0048762
taattagtaattt

SEQ ID NO: 198090 - DNA, 13 bp, Artificial Sequence
  Oligonucleotide for detection of SNP TSC0048762
aaattactaatta

SEQ ID NO: 198091 - DNA, 13 bp, Artificial Sequence
  Oligonucleotide for detection of SNP TSC0048762
taattaataattt

SEQ ID NO: 198092 - DNA, 13 bp, Artificial Sequence
  Oligonucleotide for detection of SNP TSC0048762
aaattattaatta

SEQ ID NO: 198093 - DNA, 13 bp, Artificial Sequence
  Oligonucleotide for detection of SNP TSC0007803
atgttagaataag

SEQ ID NO: 198094 - DNA, 13 bp, Artificial Sequence
  Oligonucleotide for detection of SNP TSC0007803
cttattctaacat

SEQ ID NO: 198095 - DNA, 13 bp, Artificial Sequence
  Oligonucleotide for detection of SNP TSC0007803
atgttaaaataag

SEQ ID NO: 198096 - DNA, 13 bp, Artificial Sequence
  Oligonucleotide for detection of SNP TSC0007803
cttattttaacat

SEQ ID NO: 198097 - DNA, 13 bp, Artificial Sequence
  Oligonucleotide for detection of SNP TSC0048766
tggagttgggaty

SEQ ID NO: 198098 - DNA, 13 bp, Artificial Sequence
  Oligonucleotide for detection of SNP TSC0048766
ratcccaactcca

SEQ ID NO: 198099 - DNA, 13 bp, Artificial Sequence
  Oligonucleotide for detection of SNP TSC0048766
tggagtggggaty

SEQ ID NO: 198100 - DNA, 13 bp, Artificial Sequence
  Oligonucleotide for detection of SNP TSC0048766
ratccccactcca

SEQ ID NO: 198101 - DNA, 13 bp, Artificial Sequence
  Oligonucleotide for detection of SNP TSC0048766
ggtttttatttta

SEQ ID NO: 198102 - DNA, 13 bp, Artificial Sequence
  Oligonucleotide for detection of SNP TSC0048766
taaaataaaaacc

SEQ ID NO: 198103 - DNA, 13 bp, Artificial Sequence
  Oligonucleotide for detection of SNP TSC0048768
attgtttgttaaa

SEQ ID NO: 198104 - DNA, 13 bp, Artificial Sequence
  Oligonucleotide for detection of SNP TSC0048768
tttaacaaacaat

SEQ ID NO: 198105 - DNA, 13 bp, Artificial Sequence
  Oligonucleotide for detection of SNP TSC0048768
atcgtttgttaaa

SEQ ID NO: 198106 - DNA, 13 bp, Artificial Sequence
  Oligonucleotide for detection of SNP TSC0048768
tttaacaaacgat

SEQ ID NO: 198107 - DNA, 13 bp, Artificial Sequence
  Oligonucleotide for detection of SNP TSC0048768
attgttcgttaaa

SEQ ID NO: 198108 - DNA, 13 bp, Artificial Sequence
  Oligonucleotide for detection of SNP TSC0048768
tttaacgaacaat

SEQ ID NO: 198109 - DNA, 13 bp, Artificial Sequence
  Oligonucleotide for detection of SNP TSC0048768
atcgttcgttaaa

SEQ ID NO: 198110 - DNA, 13 bp, Artificial Sequence
  Oligonucleotide for detection of SNP TSC0048768
tttaacgaacgat

SEQ ID NO: 198111 - DNA, 13 bp, Artificial Sequence
  Oligonucleotide for detection of SNP TSC0048768
tttaatgggtggt

SEQ ID NO: 198112 - DNA, 13 bp, Artificial Sequence
  Oligonucleotide for detection of SNP TSC0048768
accacccattaaa

SEQ ID NO: 198113 - DNA, 13 bp, Artificial Sequence
  Oligonucleotide for detection of SNP TSC0048768
tttaataggtggt

SEQ ID NO: 198114 - DNA, 13 bp, Artificial Sequence
  Oligonucleotide for detection of SNP TSC0048768
accacctattaaa

SEQ ID NO: 198115 - DNA, 13 bp, Artificial Sequence
  Oligonucleotide for detection of SNP TSC0048768
tttaacgggtggt

SEQ ID NO: 198116 - DNA, 13 bp, Artificial Sequence
  Oligonucleotide for detection of SNP TSC0048768
accacccgttaaa

SEQ ID NO: 198117 - DNA, 13 bp, Artificial Sequence
  Oligonucleotide for detection of SNP TSC0048768
tttaataggcggt

SEQ ID NO: 198118 - DNA, 13 bp, Artificial Sequence
  Oligonucleotide for detection of SNP TSC0048768
accgcctattaaa

SEQ ID NO: 198119 - DNA, 13 bp, Artificial Sequence
  Oligonucleotide for detection of SNP TSC0048768
tttaatgggcggt

SEQ ID NO: 198120 - DNA, 13 bp, Artificial Sequence
  Oligonucleotide for detection of SNP TSC0048768
accgcccattaaa

SEQ ID NO: 198121 - DNA, 13 bp, Artificial Sequence
  Oligonucleotide for detection of SNP TSC0048768
tttaacgggcggt

SEQ ID NO: 198122 - DNA, 13 bp, Artificial Sequence
  Oligonucleotide for detection of SNP TSC0048768
accgcccgttaaa

SEQ ID NO: 198123 - DNA, 13 bp, Artificial Sequence
  Oligonucleotide for detection of SNP TSC0048769
ttttttattagtt

SEQ ID NO: 198124 - DNA, 13 bp, Artificial Sequence
  Oligonucleotide for detection of SNP TSC0048769
aactaataaaaaa

SEQ ID NO: 198125 - DNA, 13 bp, Artificial Sequence
  Oligonucleotide for detection of SNP TSC0048769
tttttcgttagtt

SEQ ID NO: 198126 - DNA, 13 bp, Artificial Sequence
  Oligonucleotide for detection of SNP TSC0048769
aactaacgaaaaa

SEQ ID NO: 198127 - DNA, 13 bp, Artificial Sequence
  Oligonucleotide for detection of SNP TSC0048769
aattgatgaaaga

SEQ ID NO: 198128 - DNA, 13 bp, Artificial Sequence
  Oligonucleotide for detection of SNP TSC0048769
tctttcatcaatt

SEQ ID NO: 198129 - DNA, 13 bp, Artificial Sequence
  Oligonucleotide for detection of SNP TSC0048769
aattgacgaaaga

SEQ ID NO: 198130 - DNA, 13 bp, Artificial Sequence
  Oligonucleotide for detection of SNP TSC0048769
tctttcgtcaatt

SEQ ID NO: 198131 - DNA, 13 bp, Artificial Sequence
  Oligonucleotide for detection of SNP TSC0048770
ttgttaattggag

SEQ ID NO: 198132 - DNA, 13 bp, Artificial Sequence
  Oligonucleotide for detection of SNP TSC0048770
ctccaattaacaa

SEQ ID NO: 198133 - DNA, 13 bp, Artificial Sequence
  Oligonucleotide for detection of SNP TSC0048770
ttgttagttggag

SEQ ID NO: 198134 - DNA, 13 bp, Artificial Sequence
  Oligonucleotide for detection of SNP TSC0048770
ctccaactaacaa

SEQ ID NO: 198135 - DNA, 13 bp, Artificial Sequence
  Oligonucleotide for detection of SNP TSC0048770
tcgttaattggag

SEQ ID NO: 198136 - DNA, 13 bp, Artificial Sequence
  Oligonucleotide for detection of SNP TSC0048770
ctccaattaacga

SEQ ID NO: 198137 - DNA, 13 bp, Artificial Sequence
  Oligonucleotide for detection of SNP TSC0048770
tcgttagttggag

SEQ ID NO: 198138 - DNA, 13 bp, Artificial Sequence
  Oligonucleotide for detection of SNP TSC0048770
ctccaactaacga

SEQ ID NO: 198139 - DNA, 13 bp, Artificial Sequence
  Oligonucleotide for detection of SNP TSC0048771
tgtttaaaagagt

SEQ ID NO: 198140 - DNA, 13 bp, Artificial Sequence
  Oligonucleotide for detection of SNP TSC0048771
actcttttaaaca

SEQ ID NO: 198141 - DNA, 13 bp, Artificial Sequence
  Oligonucleotide for detection of SNP TSC0048771
tgtttataagagt

SEQ ID NO: 198142 - DNA, 13 bp, Artificial Sequence
  Oligonucleotide for detection of SNP TSC0048771
actcttataaaca

SEQ ID NO: 198143 - DNA, 13 bp, Artificial Sequence
  Oligonucleotide for detection of SNP TSC0048771
atttttttaggta

SEQ ID NO: 198144 - DNA, 13 bp, Artificial Sequence
  Oligonucleotide for detection of SNP TSC0048771
tacctaaaaaaat

SEQ ID NO: 198145 - DNA, 13 bp, Artificial Sequence
  Oligonucleotide for detection of SNP TSC0048771
atttttataggta

SEQ ID NO: 198146 - DNA, 13 bp, Artificial Sequence
  Oligonucleotide for detection of SNP TSC0048771
tacctataaaaat

SEQ ID NO: 198147 - DNA, 13 bp, Artificial Sequence
  Oligonucleotide for detection of SNP TSC0048772
aatattatataty

SEQ ID NO: 198148 - DNA, 13 bp, Artificial Sequence
  Oligonucleotide for detection of SNP TSC0048772
ratatataatatt

SEQ ID NO: 198149 - DNA, 13 bp, Artificial Sequence
  Oligonucleotide for detection of SNP TSC0048772
aatattttataty

SEQ ID NO: 198150 - DNA, 13 bp, Artificial Sequence
  Oligonucleotide for detection of SNP TSC0048772
ratataaaatatt

SEQ ID NO: 198151 - DNA, 13 bp, Artificial Sequence
  Oligonucleotide for detection of SNP TSC0048772
aatattgtataty

SEQ ID NO: 198152 - DNA, 13 bp, Artificial Sequence
  Oligonucleotide for detection of SNP TSC0048772
ratatacaatatt

SEQ ID NO: 198153 - DNA, 13 bp, Artificial Sequence
  Oligonucleotide for detection of SNP TSC0048772
gatatataatatt

SEQ ID NO: 198154 - DNA, 13 bp, Artificial Sequence
  Oligonucleotide for detection of SNP TSC0048772
aatattatatatc

SEQ ID NO: 198155 - DNA, 13 bp, Artificial Sequence
  Oligonucleotide for detection of SNP TSC0048772
gatataaaatatt

SEQ ID NO: 198156 - DNA, 13 bp, Artificial Sequence
  Oligonucleotide for detection of SNP TSC0048772
aatattttatatc

SEQ ID NO: 198157 - DNA, 13 bp, Artificial Sequence
  Oligonucleotide for detection of SNP TSC0048773
tatttaaagtgat

SEQ ID NO: 198158 - DNA, 13 bp, Artificial Sequence
  Oligonucleotide for detection of SNP TSC0048773
atcactttaaata

SEQ ID NO: 198159 - DNA, 13 bp, Artificial Sequence
  Oligonucleotide for detection of SNP TSC0048773
tatttatagtgat

SEQ ID NO: 198160 - DNA, 13 bp, Artificial Sequence
  Oligonucleotide for detection of SNP TSC0048773
atcactataaata

SEQ ID NO: 198161 - DNA, 13 bp, Artificial Sequence
  Oligonucleotide for detection of SNP TSC0048773
attattttgaata

SEQ ID NO: 198162 - DNA, 13 bp, Artificial Sequence
  Oligonucleotide for detection of SNP TSC0048773
tattcaaaataat

SEQ ID NO: 198163 - DNA, 13 bp, Artificial Sequence
  Oligonucleotide for detection of SNP TSC0048773
attattgtgaata

SEQ ID NO: 198164 - DNA, 13 bp, Artificial Sequence
  Oligonucleotide for detection of SNP TSC0048773
tattcacaataat

SEQ ID NO: 198165 - DNA, 13 bp, Artificial Sequence
  Oligonucleotide for detection of SNP TSC0048774
gtttagaaagagg

SEQ ID NO: 198166 - DNA, 13 bp, Artificial Sequence
  Oligonucleotide for detection of SNP TSC0048774
cctctttctaaac

SEQ ID NO: 198167 - DNA, 13 bp, Artificial Sequence
  Oligonucleotide for detection of SNP TSC0048774
gtttagtaagagg

SEQ ID NO: 198168 - DNA, 13 bp, Artificial Sequence
  Oligonucleotide for detection of SNP TSC0048774
cctcttactaaac

SEQ ID NO: 198169 - DNA, 13 bp, Artificial Sequence
  Oligonucleotide for detection of SNP TSC0048774
tttttttttgagy

SEQ ID NO: 198170 - DNA, 13 bp, Artificial Sequence
  Oligonucleotide for detection of SNP TSC0048774
rctcaaaaaaaaa

SEQ ID NO: 198171 - DNA, 13 bp, Artificial Sequence
  Oligonucleotide for detection of SNP TSC0048777
tatttttgtgttt

SEQ ID NO: 198172 - DNA, 13 bp, Artificial Sequence
  Oligonucleotide for detection of SNP TSC0048777
aaacacaaaaata

SEQ ID NO: 198173 - DNA, 13 bp, Artificial Sequence
  Oligonucleotide for detection of SNP TSC0048777
aggtataaaaatg

SEQ ID NO: 198174 - DNA, 13 bp, Artificial Sequence
  Oligonucleotide for detection of SNP TSC0048777
catttttatacct

SEQ ID NO: 198175 - DNA, 13 bp, Artificial Sequence
  Oligonucleotide for detection of SNP TSC0048777
aggtattaaaatg

SEQ ID NO: 198176 - DNA, 13 bp, Artificial Sequence
  Oligonucleotide for detection of SNP TSC0048777
cattttaatacct

SEQ ID NO: 198177 - DNA, 13 bp, Artificial Sequence
  Oligonucleotide for detection of SNP TSC0048779
aaaatgattaaat

SEQ ID NO: 198178 - DNA, 13 bp, Artificial Sequence
  Oligonucleotide for detection of SNP TSC0048779
atttaatcatttt

SEQ ID NO: 198179 - DNA, 13 bp, Artificial Sequence
  Oligonucleotide for detection of SNP TSC0048779
aaaatgtttaaat

SEQ ID NO: 198180 - DNA, 13 bp, Artificial Sequence
  Oligonucleotide for detection of SNP TSC0048779
atttaaacatttt

SEQ ID NO: 198181 - DNA, 13 bp, Artificial Sequence
  Oligonucleotide for detection of SNP TSC0048780
tattgataaatta

SEQ ID NO: 198182 - DNA, 13 bp, Artificial Sequence
  Oligonucleotide for detection of SNP TSC0048780
taatttatcaata

SEQ ID NO: 198183 - DNA, 13 bp, Artificial Sequence
  Oligonucleotide for detection of SNP TSC0048780
tattgagaaatta

SEQ ID NO: 198184 - DNA, 13 bp, Artificial Sequence
  Oligonucleotide for detection of SNP TSC0048780
taatttctcaata

SEQ ID NO: 198185 - DNA, 13 bp, Artificial Sequence
  Oligonucleotide for detection of SNP TSC0048780
tgatttgttaatg

SEQ ID NO: 198186 - DNA, 13 bp, Artificial Sequence
  Oligonucleotide for detection of SNP TSC0048780
cattaacaaatca

SEQ ID NO: 198187 - DNA, 13 bp, Artificial Sequence
  Oligonucleotide for detection of SNP TSC0048780
tgattttttaatg

SEQ ID NO: 198188 - DNA, 13 bp, Artificial Sequence
  Oligonucleotide for detection of SNP TSC0048780
cattaaaaaatca

SEQ ID NO: 198189 - DNA, 13 bp, Artificial Sequence
  Oligonucleotide for detection of SNP TSC0048781
aaaaggtaggtgg

SEQ ID NO: 198190 - DNA, 13 bp, Artificial Sequence
  Oligonucleotide for detection of SNP TSC0048781
ccacctacctttt

SEQ ID NO: 198191 - DNA, 13 bp, Artificial Sequence
  Oligonucleotide for detection of SNP TSC0048781
aaaagggaggtgg

SEQ ID NO: 198192 - DNA, 13 bp, Artificial Sequence
  Oligonucleotide for detection of SNP TSC0048781
ccacctccctttt

SEQ ID NO: 198193 - DNA, 13 bp, Artificial Sequence
  Oligonucleotide for detection of SNP TSC0048782
aaataatgtaata

SEQ ID NO: 198194 - DNA, 13 bp, Artificial Sequence
  Oligonucleotide for detection of SNP TSC0048782
tattacattattt

SEQ ID NO: 198195 - DNA, 13 bp, Artificial Sequence
  Oligonucleotide for detection of SNP TSC0048782
aaataacgtaata

SEQ ID NO: 198196 - DNA, 13 bp, Artificial Sequence
  Oligonucleotide for detection of SNP TSC0048782
tattacgttattt

SEQ ID NO: 198197 - DNA, 13 bp, Artificial Sequence
  Oligonucleotide for detection of SNP TSC0048784
gatgtaaaatatt

SEQ ID NO: 198198 - DNA, 13 bp, Artificial Sequence
  Oligonucleotide for detection of SNP TSC0048784
aatattttacatc

SEQ ID NO: 198199 - DNA, 13 bp, Artificial Sequence
  Oligonucleotide for detection of SNP TSC0048784
gatgtagaatatt

SEQ ID NO: 198200 - DNA, 13 bp, Artificial Sequence
  Oligonucleotide for detection of SNP TSC0048784
aatattctacatc

SEQ ID NO: 198201 - DNA, 13 bp, Artificial Sequence
  Oligonucleotide for detection of SNP TSC0048785
tttggtattagtt

SEQ ID NO: 198202 - DNA, 13 bp, Artificial Sequence
  Oligonucleotide for detection of SNP TSC0048785
aactaataccaaa

SEQ ID NO: 198203 - DNA, 13 bp, Artificial Sequence
  Oligonucleotide for detection of SNP TSC0048787
taatttaaatatg

SEQ ID NO: 198204 - DNA, 13 bp, Artificial Sequence
  Oligonucleotide for detection of SNP TSC0048787
catatttaaatta

SEQ ID NO: 198205 - DNA, 13 bp, Artificial Sequence
  Oligonucleotide for detection of SNP TSC0048787
taatttgaatatg

SEQ ID NO: 198206 - DNA, 13 bp, Artificial Sequence
  Oligonucleotide for detection of SNP TSC0048787
catattcaaatta

SEQ ID NO: 198207 - DNA, 13 bp, Artificial Sequence
  Oligonucleotide for detection of SNP TSC0048789
tgatattggaatt

SEQ ID NO: 198208 - DNA, 13 bp, Artificial Sequence
  Oligonucleotide for detection of SNP TSC0048789
aattccaatatca

SEQ ID NO: 198209 - DNA, 13 bp, Artificial Sequence
  Oligonucleotide for detection of SNP TSC0048789
tgatatcggaatt

SEQ ID NO: 198210 - DNA, 13 bp, Artificial Sequence
  Oligonucleotide for detection of SNP TSC0048789
aattccgatatca

SEQ ID NO: 198211 - DNA, 13 bp, Artificial Sequence
  Oligonucleotide for detection of SNP TSC0048789
aattttggtatta

SEQ ID NO: 198212 - DNA, 13 bp, Artificial Sequence
  Oligonucleotide for detection of SNP TSC0048789
taataccaaaatt

SEQ ID NO: 198213 - DNA, 13 bp, Artificial Sequence
  Oligonucleotide for detection of SNP TSC0048789
aattttagtatta

SEQ ID NO: 198214 - DNA, 13 bp, Artificial Sequence
  Oligonucleotide for detection of SNP TSC0048789
taatactaaaatt

SEQ ID NO: 198215 - DNA, 13 bp, Artificial Sequence
  Oligonucleotide for detection of SNP TSC0048789
aatttcggtatta

SEQ ID NO: 198216 - DNA, 13 bp, Artificial Sequence
  Oligonucleotide for detection of SNP TSC0048789
taataccgaaatt

SEQ ID NO: 198217 - DNA, 13 bp, Artificial Sequence
  Oligonucleotide for detection of SNP TSC0048790
tattataagttga

SEQ ID NO: 198218 - DNA, 13 bp, Artificial Sequence
  Oligonucleotide for detection of SNP TSC0048790
tcaacttataata

SEQ ID NO: 198219 - DNA, 13 bp, Artificial Sequence
  Oligonucleotide for detection of SNP TSC0048790
tattatgagttga

SEQ ID NO: 198220 - DNA, 13 bp, Artificial Sequence
  Oligonucleotide for detection of SNP TSC0048790
tcaactcataata

SEQ ID NO: 198221 - DNA, 13 bp, Artificial Sequence
  Oligonucleotide for detection of SNP TSC0048790
tattataagtcga

SEQ ID NO: 198222 - DNA, 13 bp, Artificial Sequence
  Oligonucleotide for detection of SNP TSC0048790
tcgacttataata

SEQ ID NO: 198223 - DNA, 13 bp, Artificial Sequence
  Oligonucleotide for detection of SNP TSC0048790
tattacgagttga

SEQ ID NO: 198224 - DNA, 13 bp, Artificial Sequence
  Oligonucleotide for detection of SNP TSC0048790
tcaactcgtaata

SEQ ID NO: 198225 - DNA, 13 bp, Artificial Sequence
  Oligonucleotide for detection of SNP TSC0048790
tattatgagtcga

SEQ ID NO: 198226 - DNA, 13 bp, Artificial Sequence
  Oligonucleotide for detection of SNP TSC0048790
tcgactcataata

SEQ ID NO: 198227 - DNA, 13 bp, Artificial Sequence
  Oligonucleotide for detection of SNP TSC0048790
tattacgagtcga

SEQ ID NO: 198228 - DNA, 13 bp, Artificial Sequence
  Oligonucleotide for detection of SNP TSC0048790
tcgactcgtaata

SEQ ID NO: 198229 - DNA, 13 bp, Artificial Sequence
  Oligonucleotide for detection of SNP TSC0048790
ttgatttgtgatg

SEQ ID NO: 198230 - DNA, 13 bp, Artificial Sequence
  Oligonucleotide for detection of SNP TSC0048790
catcacaaatcaa

SEQ ID NO: 198231 - DNA, 13 bp, Artificial Sequence
  Oligonucleotide for detection of SNP TSC0048790
tcgatttgtgatg

SEQ ID NO: 198232 - DNA, 13 bp, Artificial Sequence
  Oligonucleotide for detection of SNP TSC0048790
catcacaaatcga

SEQ ID NO: 198233 - DNA, 13 bp, Artificial Sequence
  Oligonucleotide for detection of SNP TSC0048790
ttgattcgtgatg

SEQ ID NO: 198234 - DNA, 13 bp, Artificial Sequence
  Oligonucleotide for detection of SNP TSC0048790
catcacgaatcaa

SEQ ID NO: 198235 - DNA, 13 bp, Artificial Sequence
  Oligonucleotide for detection of SNP TSC0048790
tcgattcgtgatg

SEQ ID NO: 198236 - DNA, 13 bp, Artificial Sequence
  Oligonucleotide for detection of SNP TSC0048790
catcacgaatcga

SEQ ID NO: 198237 - DNA, 13 bp, Artificial Sequence
  Oligonucleotide for detection of SNP TSC0010206
taatttaatatat

SEQ ID NO: 198238 - DNA, 13 bp, Artificial Sequence
  Oligonucleotide for detection of SNP TSC0010206
atatattaaatta

SEQ ID NO: 198239 - DNA, 13 bp, Artificial Sequence
  Oligonucleotide for detection of SNP TSC0010206
taatttgatatat

SEQ ID NO: 198240 - DNA, 13 bp, Artificial Sequence
  Oligonucleotide for detection of SNP TSC0010206
atatatcaaatta

SEQ ID NO: 198241 - DNA, 13 bp, Artificial Sequence
  Oligonucleotide for detection of SNP TSC0005903
gtagttgatgttt

SEQ ID NO: 198242 - DNA, 13 bp, Artificial Sequence
  Oligonucleotide for detection of SNP TSC0005903
aaacatcaactac

SEQ ID NO: 198243 - DNA, 13 bp, Artificial Sequence
  Oligonucleotide for detection of SNP TSC0005903
gtagttaatgttt

SEQ ID NO: 198244 - DNA, 13 bp, Artificial Sequence
  Oligonucleotide for detection of SNP TSC0005903
aaacattaactac

SEQ ID NO: 198245 - DNA, 13 bp, Artificial Sequence
  Oligonucleotide for detection of SNP TSC0007058
aattaatgaatat

SEQ ID NO: 198246 - DNA, 13 bp, Artificial Sequence
  Oligonucleotide for detection of SNP TSC0007058
atattcattaatt

SEQ ID NO: 198247 - DNA, 13 bp, Artificial Sequence
  Oligonucleotide for detection of SNP TSC0007058
aattaacgaatat

SEQ ID NO: 198248 - DNA, 13 bp, Artificial Sequence
  Oligonucleotide for detection of SNP TSC0007058
atattcgttaatt

SEQ ID NO: 198249 - DNA, 13 bp, Artificial Sequence
  Oligonucleotide for detection of SNP TSC0007058
atatttgttgatt

SEQ ID NO: 198250 - DNA, 13 bp, Artificial Sequence
  Oligonucleotide for detection of SNP TSC0007058
aatcaacaaatat

SEQ ID NO: 198251 - DNA, 13 bp, Artificial Sequence
  Oligonucleotide for detection of SNP TSC0007058
atatttattgatt

SEQ ID NO: 198252 - DNA, 13 bp, Artificial Sequence
  Oligonucleotide for detection of SNP TSC0007058
aatcaataaatat

SEQ ID NO: 198253 - DNA, 13 bp, Artificial Sequence
  Oligonucleotide for detection of SNP TSC0007058
atattcgttgatt

SEQ ID NO: 198254 - DNA, 13 bp, Artificial Sequence
  Oligonucleotide for detection of SNP TSC0007058
aatcaacgaatat

SEQ ID NO: 198255 - DNA, 13 bp, Artificial Sequence
  Oligonucleotide for detection of SNP TSC0007059
tggaataatgata

SEQ ID NO: 198256 - DNA, 13 bp, Artificial Sequence
  Oligonucleotide for detection of SNP TSC0007059
tatcattattcca

SEQ ID NO: 198257 - DNA, 13 bp, Artificial Sequence
  Oligonucleotide for detection of SNP TSC0007059
tggaattatgata

SEQ ID NO: 198258 - DNA, 13 bp, Artificial Sequence
  Oligonucleotide for detection of SNP TSC0007059
tatcataattcca

SEQ ID NO: 198259 - DNA, 13 bp, Artificial Sequence
  Oligonucleotide for detection of SNP TSC0048791
tggagaaaaaaag

SEQ ID NO: 198260 - DNA, 13 bp, Artificial Sequence
  Oligonucleotide for detection of SNP TSC0048791
ctttttttctcca

SEQ ID NO: 198261 - DNA, 13 bp, Artificial Sequence
  Oligonucleotide for detection of SNP TSC0048791
tggagataaaaag

SEQ ID NO: 198262 - DNA, 13 bp, Artificial Sequence
  Oligonucleotide for detection of SNP TSC0048791
ctttttatctcca

SEQ ID NO: 198263 - DNA, 13 bp, Artificial Sequence
  Oligonucleotide for detection of SNP TSC0048792
aatttggtatgta

SEQ ID NO: 198264 - DNA, 13 bp, Artificial Sequence
  Oligonucleotide for detection of SNP TSC0048792
tacataccaaatt

SEQ ID NO: 198265 - DNA, 13 bp, Artificial Sequence
  Oligonucleotide for detection of SNP TSC0048792
aatttgatatgta

SEQ ID NO: 198266 - DNA, 13 bp, Artificial Sequence
  Oligonucleotide for detection of SNP TSC0048792
tacatatcaaatt

SEQ ID NO: 198267 - DNA, 13 bp, Artificial Sequence
  Oligonucleotide for detection of SNP TSC0048793
atttatatatgtt

SEQ ID NO: 198268 - DNA, 13 bp, Artificial Sequence
  Oligonucleotide for detection of SNP TSC0048793
aacatatataaat

SEQ ID NO: 198269 - DNA, 13 bp, Artificial Sequence
  Oligonucleotide for detection of SNP TSC0048793
atttatttatgtt

SEQ ID NO: 198270 - DNA, 13 bp, Artificial Sequence
  Oligonucleotide for detection of SNP TSC0048793
aacataaataaat

SEQ ID NO: 198271 - DNA, 13 bp, Artificial Sequence
  Oligonucleotide for detection of SNP TSC0048793
aatatatgtaggt

SEQ ID NO: 198272 - DNA, 13 bp, Artificial Sequence
  Oligonucleotide for detection of SNP TSC0048793
acctacatatatt

SEQ ID NO: 198273 - DNA, 13 bp, Artificial Sequence
  Oligonucleotide for detection of SNP TSC0048793
aatataagtaggt

SEQ ID NO: 198274 - DNA, 13 bp, Artificial Sequence
  Oligonucleotide for detection of SNP TSC0048793
acctacttatatt

SEQ ID NO: 198275 - DNA, 13 bp, Artificial Sequence
  Oligonucleotide for detection of SNP TSC0048795
tttaggattttga

SEQ ID NO: 198276 - DNA, 13 bp, Artificial Sequence
  Oligonucleotide for detection of SNP TSC0048795
tcaaaatcctaaa

SEQ ID NO: 198277 - DNA, 13 bp, Artificial Sequence
  Oligonucleotide for detection of SNP TSC0048795
tttagggttttga

SEQ ID NO: 198278 - DNA, 13 bp, Artificial Sequence
  Oligonucleotide for detection of SNP TSC0048795
tcaaaaccctaaa

SEQ ID NO: 198279 - DNA, 13 bp, Artificial Sequence
  Oligonucleotide for detection of SNP TSC0048796
tttttaaatatgt

SEQ ID NO: 198280 - DNA, 13 bp, Artificial Sequence
  Oligonucleotide for detection of SNP TSC0048796
acatatttaaaaa

SEQ ID NO: 198281 - DNA, 13 bp, Artificial Sequence
  Oligonucleotide for detection of SNP TSC0048796
tttttagatatgt

SEQ ID NO: 198282 - DNA, 13 bp, Artificial Sequence
  Oligonucleotide for detection of SNP TSC0048796
acatatctaaaaa

SEQ ID NO: 198283 - DNA, 13 bp, Artificial Sequence
  Oligonucleotide for detection of SNP TSC0048797
tgtattatttgat

SEQ ID NO: 198284 - DNA, 13 bp, Artificial Sequence
  Oligonucleotide for detection of SNP TSC0048797
atcaaataataca

SEQ ID NO: 198285 - DNA, 13 bp, Artificial Sequence
  Oligonucleotide for detection of SNP TSC0048797
tgtattgtttgat

SEQ ID NO: 198286 - DNA, 13 bp, Artificial Sequence
  Oligonucleotide for detection of SNP TSC0048797
atcaaacaataca

SEQ ID NO: 198287 - DNA, 13 bp, Artificial Sequence
  Oligonucleotide for detection of SNP TSC0048798
acgattataataa

SEQ ID NO: 198288 - DNA, 13 bp, Artificial Sequence
  Oligonucleotide for detection of SNP TSC0048798
ttattataatcgt

SEQ ID NO: 198289 - DNA, 13 bp, Artificial Sequence
  Oligonucleotide for detection of SNP TSC0048798
acgattgtaataa

SEQ ID NO: 198290 - DNA, 13 bp, Artificial Sequence
  Oligonucleotide for detection of SNP TSC0048798
ttattacaatcgt

SEQ ID NO: 198291 - DNA, 13 bp, Artificial Sequence
  Oligonucleotide for detection of SNP TSC0048799
ttaaaaaattaag

SEQ ID NO: 198292 - DNA, 13 bp, Artificial Sequence
  Oligonucleotide for detection of SNP TSC0048799
cttaattttttaa

SEQ ID NO: 198293 - DNA, 13 bp, Artificial Sequence
  Oligonucleotide for detection of SNP TSC0048799
ttaaaatattaag

SEQ ID NO: 198294 - DNA, 13 bp, Artificial Sequence
  Oligonucleotide for detection of SNP TSC0048799
cttaatattttaa

SEQ ID NO: 198295 - DNA, 13 bp, Artificial Sequence
  Oligonucleotide for detection of SNP TSC0048800
ttattttgattta

SEQ ID NO: 198296 - DNA, 13 bp, Artificial Sequence
  Oligonucleotide for detection of SNP TSC0048800
taaatcaaaataa

SEQ ID NO: 198297 - DNA, 13 bp, Artificial Sequence
  Oligonucleotide for detection of SNP TSC0048800
ttatttcgattta

SEQ ID NO: 198298 - DNA, 13 bp, Artificial Sequence
  Oligonucleotide for detection of SNP TSC0048800
taaatcgaaataa

SEQ ID NO: 198299 - DNA, 13 bp, Artificial Sequence
  Oligonucleotide for detection of SNP TSC0048800
tgggttggagtag

SEQ ID NO: 198300 - DNA, 13 bp, Artificial Sequence
  Oligonucleotide for detection of SNP TSC0048800
ctactccaaccca

SEQ ID NO: 198301 - DNA, 13 bp, Artificial Sequence
  Oligonucleotide for detection of SNP TSC0048800
tgggttagagtag

SEQ ID NO: 198302 - DNA, 13 bp, Artificial Sequence
  Oligonucleotide for detection of SNP TSC0048800
ctactctaaccca

SEQ ID NO: 198303 - DNA, 13 bp, Artificial Sequence
  Oligonucleotide for detection of SNP TSC0048800
tgggtcggagtag

SEQ ID NO: 198304 - DNA, 13 bp, Artificial Sequence
  Oligonucleotide for detection of SNP TSC0048800
ctactccgaccca

SEQ ID NO: 198305 - DNA, 13 bp, Artificial Sequence
  Oligonucleotide for detection of SNP TSC0048801
ttgagaagttgag

SEQ ID NO: 198306 - DNA, 13 bp, Artificial Sequence
  Oligonucleotide for detection of SNP TSC0048801
ctcaacttctcaa

SEQ ID NO: 198307 - DNA, 13 bp, Artificial Sequence
  Oligonucleotide for detection of SNP TSC0048801
ttgagaggttgag

SEQ ID NO: 198308 - DNA, 13 bp, Artificial Sequence
  Oligonucleotide for detection of SNP TSC0048801
ctcaacctctcaa

SEQ ID NO: 198309 - DNA, 13 bp, Artificial Sequence
  Oligonucleotide for detection of SNP TSC0048803
attgttttttttt

SEQ ID NO: 198310 - DNA, 13 bp, Artificial Sequence
  Oligonucleotide for detection of SNP TSC0048803
aaaaaaaaacaat

SEQ ID NO: 198311 - DNA, 13 bp, Artificial Sequence
  Oligonucleotide for detection of SNP TSC0048804
tggaattaaatag

SEQ ID NO: 198312 - DNA, 13 bp, Artificial Sequence
  Oligonucleotide for detection of SNP TSC0048804
ctatttaattcca

SEQ ID NO: 198313 - DNA, 13 bp, Artificial Sequence
  Oligonucleotide for detection of SNP TSC0048804
tggaatgaaatag

SEQ ID NO: 198314 - DNA, 13 bp, Artificial Sequence
  Oligonucleotide for detection of SNP TSC0048804
ctatttcattcca

SEQ ID NO: 198315 - DNA, 13 bp, Artificial Sequence
  Oligonucleotide for detection of SNP TSC0048804
tggaacgaaatag

SEQ ID NO: 198316 - DNA, 13 bp, Artificial Sequence
  Oligonucleotide for detection of SNP TSC0048804
ctatttcgttcca

SEQ ID NO: 198317 - DNA, 13 bp, Artificial Sequence
  Oligonucleotide for detection of SNP TSC0048805
gaatgagtggtga

SEQ ID NO: 198318 - DNA, 13 bp, Artificial Sequence
  Oligonucleotide for detection of SNP TSC0048805
tcaccactcattc

SEQ ID NO: 198319 - DNA, 13 bp, Artificial Sequence
  Oligonucleotide for detection of SNP TSC0048805
gaatgaatggtga

SEQ ID NO: 198320 - DNA, 13 bp, Artificial Sequence
  Oligonucleotide for detection of SNP TSC0048805
tcaccattcattc

SEQ ID NO: 198321 - DNA, 13 bp, Artificial Sequence
  Oligonucleotide for detection of SNP TSC0048806
ttttgggtgggag

SEQ ID NO: 198322 - DNA, 13 bp, Artificial Sequence
  Oligonucleotide for detection of SNP TSC0048806
ctcccacccaaaa

SEQ ID NO: 198323 - DNA, 13 bp, Artificial Sequence
  Oligonucleotide for detection of SNP TSC0048806
ttttggatgggag

SEQ ID NO: 198324 - DNA, 13 bp, Artificial Sequence
  Oligonucleotide for detection of SNP TSC0048806
ctcccatccaaaa

SEQ ID NO: 198325 - DNA, 13 bp, Artificial Sequence
  Oligonucleotide for detection of SNP TSC0048809
taaattggaggty

SEQ ID NO: 198326 - DNA, 13 bp, Artificial Sequence
  Oligonucleotide for detection of SNP TSC0048809
racctccaattta

SEQ ID NO: 198327 - DNA, 13 bp, Artificial Sequence
  Oligonucleotide for detection of SNP TSC0048809
taaattagaggty

SEQ ID NO: 198328 - DNA, 13 bp, Artificial Sequence
  Oligonucleotide for detection of SNP TSC0048809
racctctaattta

SEQ ID NO: 198329 - DNA, 13 bp, Artificial Sequence
  Oligonucleotide for detection of SNP TSC0048810
agtttatgggaga

SEQ ID NO: 198330 - DNA, 13 bp, Artificial Sequence
  Oligonucleotide for detection of SNP TSC0048810
tctcccataaact

SEQ ID NO: 198331 - DNA, 13 bp, Artificial Sequence
  Oligonucleotide for detection of SNP TSC0048810
agtttacgggaga

SEQ ID NO: 198332 - DNA, 13 bp, Artificial Sequence
  Oligonucleotide for detection of SNP TSC0048810
tctcccgtaaact

SEQ ID NO: 198333 - DNA, 13 bp, Artificial Sequence
  Oligonucleotide for detection of SNP TSC0048811
ttttagtgattag

SEQ ID NO: 198334 - DNA, 13 bp, Artificial Sequence
  Oligonucleotide for detection of SNP TSC0048811
ctaatcactaaaa

SEQ ID NO: 198335 - DNA, 13 bp, Artificial Sequence
  Oligonucleotide for detection of SNP TSC0048811
ttttagggattag

SEQ ID NO: 198336 - DNA, 13 bp, Artificial Sequence
  Oligonucleotide for detection of SNP TSC0048811
ctaatccctaaaa

SEQ ID NO: 198337 - DNA, 13 bp, Artificial Sequence
  Oligonucleotide for detection of SNP TSC0048811
ttttagcgattag

SEQ ID NO: 198338 - DNA, 13 bp, Artificial Sequence
  Oligonucleotide for detection of SNP TSC0048811
ctaatcgctaaaa

SEQ ID NO: 198339 - DNA, 13 bp, Artificial Sequence
  Oligonucleotide for detection of SNP TSC0048811
ttgattgttgaaa

SEQ ID NO: 198340 - DNA, 13 bp, Artificial Sequence
  Oligonucleotide for detection of SNP TSC0048811
tttcaacaatcaa

SEQ ID NO: 198341 - DNA, 13 bp, Artificial Sequence
  Oligonucleotide for detection of SNP TSC0048811
ttgatttttgaaa

SEQ ID NO: 198342 - DNA, 13 bp, Artificial Sequence
  Oligonucleotide for detection of SNP TSC0048811
tttcaaaaatcaa

SEQ ID NO: 198343 - DNA, 13 bp, Artificial Sequence
  Oligonucleotide for detection of SNP TSC0048811
ttgatcgttgaaa

SEQ ID NO: 198344 - DNA, 13 bp, Artificial Sequence
  Oligonucleotide for detection of SNP TSC0048811
tttcaacgatcaa

SEQ ID NO: 198345 - DNA, 13 bp, Artificial Sequence
  Oligonucleotide for detection of SNP TSC0048812
attaggaagatty

SEQ ID NO: 198346 - DNA, 13 bp, Artificial Sequence
  Oligonucleotide for detection of SNP TSC0048812
raatcttcctaat

SEQ ID NO: 198347 - DNA, 13 bp, Artificial Sequence
  Oligonucleotide for detection of SNP TSC0048812
attagggagatty

SEQ ID NO: 198348 - DNA, 13 bp, Artificial Sequence
  Oligonucleotide for detection of SNP TSC0048812
raatctccctaat

SEQ ID NO: 198349 - DNA, 13 bp, Artificial Sequence
  Oligonucleotide for detection of SNP TSC0048813
agtttggttggaa

SEQ ID NO: 198350 - DNA, 13 bp, Artificial Sequence
  Oligonucleotide for detection of SNP TSC0048813
ttccaaccaaact

SEQ ID NO: 198351 - DNA, 13 bp, Artificial Sequence
  Oligonucleotide for detection of SNP TSC0048813
agtttgattggaa

SEQ ID NO: 198352 - DNA, 13 bp, Artificial Sequence
  Oligonucleotide for detection of SNP TSC0048813
ttccaatcaaact

SEQ ID NO: 198353 - DNA, 13 bp, Artificial Sequence
  Oligonucleotide for detection of SNP TSC0004656
gatttatgagaaa

SEQ ID NO: 198354 - DNA, 13 bp, Artificial Sequence
  Oligonucleotide for detection of SNP TSC0004656
tttctcataaatc

SEQ ID NO: 198355 - DNA, 13 bp, Artificial Sequence
  Oligonucleotide for detection of SNP TSC0004656
gatttacgagaaa

SEQ ID NO: 198356 - DNA, 13 bp, Artificial Sequence
  Oligonucleotide for detection of SNP TSC0004656
tttctcgtaaatc

SEQ ID NO: 198357 - DNA, 13 bp, Artificial Sequence
  Oligonucleotide for detection of SNP TSC0048816
gtatatataatga

SEQ ID NO: 198358 - DNA, 13 bp, Artificial Sequence
  Oligonucleotide for detection of SNP TSC0048816
tcattatatatac

SEQ ID NO: 198359 - DNA, 13 bp, Artificial Sequence
  Oligonucleotide for detection of SNP TSC0048816
gtatatgtaatga

SEQ ID NO: 198360 - DNA, 13 bp, Artificial Sequence
  Oligonucleotide for detection of SNP TSC0048816
tcattacatatac

SEQ ID NO: 198361 - DNA, 13 bp, Artificial Sequence
  Oligonucleotide for detection of SNP TSC0048816
gtatacgtaatga

SEQ ID NO: 198362 - DNA, 13 bp, Artificial Sequence
  Oligonucleotide for detection of SNP TSC0048816
tcattacgtatac

SEQ ID NO: 198363 - DNA, 13 bp, Artificial Sequence
  Oligonucleotide for detection of SNP TSC0048816
ttattatgtatay

SEQ ID NO: 198364 - DNA, 13 bp, Artificial Sequence
  Oligonucleotide for detection of SNP TSC0048816
rtatacataataa

SEQ ID NO: 198365 - DNA, 13 bp, Artificial Sequence
  Oligonucleotide for detection of SNP TSC0048816
ttattacgtatay

SEQ ID NO: 198366 - DNA, 13 bp, Artificial Sequence
  Oligonucleotide for detection of SNP TSC0048816
rtatacgtaataa

SEQ ID NO: 198367 - DNA, 13 bp, Artificial Sequence
  Oligonucleotide for detection of SNP TSC0048817
gttttatagatgt

SEQ ID NO: 198368 - DNA, 13 bp, Artificial Sequence
  Oligonucleotide for detection of SNP TSC0048817
acatctataaaac

SEQ ID NO: 198369 - DNA, 13 bp, Artificial Sequence
  Oligonucleotide for detection of SNP TSC0048817
gttttagagatgt

SEQ ID NO: 198370 - DNA, 13 bp, Artificial Sequence
  Oligonucleotide for detection of SNP TSC0048817
acatctctaaaac

SEQ ID NO: 198371 - DNA, 13 bp, Artificial Sequence
  Oligonucleotide for detection of SNP TSC0048817
gttttatagacgt

SEQ ID NO: 198372 - DNA, 13 bp, Artificial Sequence
  Oligonucleotide for detection of SNP TSC0048817
acgtctataaaac

SEQ ID NO: 198373 - DNA, 13 bp, Artificial Sequence
  Oligonucleotide for detection of SNP TSC0048817
gttttagagacgt

SEQ ID NO: 198374 - DNA, 13 bp, Artificial Sequence
  Oligonucleotide for detection of SNP TSC0048817
acgtctctaaaac

SEQ ID NO: 198375 - DNA, 13 bp, Artificial Sequence
  Oligonucleotide for detection of SNP TSC0048817
atgtttgtaaaay

SEQ ID NO: 198376 - DNA, 13 bp, Artificial Sequence
  Oligonucleotide for detection of SNP TSC0048817
rttttacaaacat

SEQ ID NO: 198377 - DNA, 13 bp, Artificial Sequence
  Oligonucleotide for detection of SNP TSC0048817
atgtttttaaaay

SEQ ID NO: 198378 - DNA, 13 bp, Artificial Sequence
  Oligonucleotide for detection of SNP TSC0048817
rttttaaaaacat

SEQ ID NO: 198379 - DNA, 13 bp, Artificial Sequence
  Oligonucleotide for detection of SNP TSC0048817
acgtttgtaaaay

SEQ ID NO: 198380 - DNA, 13 bp, Artificial Sequence
  Oligonucleotide for detection of SNP TSC0048817
rttttacaaacgt

SEQ ID NO: 198381 - DNA, 13 bp, Artificial Sequence
  Oligonucleotide for detection of SNP TSC0048817
acgtttttaaaay

SEQ ID NO: 198382 - DNA, 13 bp, Artificial Sequence
  Oligonucleotide for detection of SNP TSC0048817
rttttaaaaacgt

SEQ ID NO: 198383 - DNA, 13 bp, Artificial Sequence
  Oligonucleotide for detection of SNP TSC0048818
attatagatttty

SEQ ID NO: 198384 - DNA, 13 bp, Artificial Sequence
  Oligonucleotide for detection of SNP TSC0048818
raaaatctataat

SEQ ID NO: 198385 - DNA, 13 bp, Artificial Sequence
  Oligonucleotide for detection of SNP TSC0048818
attataaatttty

SEQ ID NO: 198386 - DNA, 13 bp, Artificial Sequence
  Oligonucleotide for detection of SNP TSC0048818
raaaatttataat

SEQ ID NO: 198387 - DNA, 13 bp, Artificial Sequence
  Oligonucleotide for detection of SNP TSC0048821
tatatgagtatta

SEQ ID NO: 198388 - DNA, 13 bp, Artificial Sequence
  Oligonucleotide for detection of SNP TSC0048821
taatactcatata

SEQ ID NO: 198389 - DNA, 13 bp, Artificial Sequence
  Oligonucleotide for detection of SNP TSC0048821
tatatgggtatta

SEQ ID NO: 198390 - DNA, 13 bp, Artificial Sequence
  Oligonucleotide for detection of SNP TSC0048821
taatacccatata

SEQ ID NO: 198391 - DNA, 13 bp, Artificial Sequence
  Oligonucleotide for detection of SNP TSC0048824
gtggttgtattta

SEQ ID NO: 198392 - DNA, 13 bp, Artificial Sequence
  Oligonucleotide for detection of SNP TSC0048824
taaatacaaccac

SEQ ID NO: 198393 - DNA, 13 bp, Artificial Sequence
  Oligonucleotide for detection of SNP TSC0048824
gtggttatattta

SEQ ID NO: 198394 - DNA, 13 bp, Artificial Sequence
  Oligonucleotide for detection of SNP TSC0048824
taaatataaccac

SEQ ID NO: 198395 - DNA, 13 bp, Artificial Sequence
  Oligonucleotide for detection of SNP TSC0048825
taaagggtgattt

SEQ ID NO: 198396 - DNA, 13 bp, Artificial Sequence
  Oligonucleotide for detection of SNP TSC0048825
aaatcacccttta

SEQ ID NO: 198397 - DNA, 13 bp, Artificial Sequence
  Oligonucleotide for detection of SNP TSC0048825
taaaggatgattt

SEQ ID NO: 198398 - DNA, 13 bp, Artificial Sequence
  Oligonucleotide for detection of SNP TSC0048825
aaatcatccttta

SEQ ID NO: 198399 - DNA, 13 bp, Artificial Sequence
  Oligonucleotide for detection of SNP TSC0048826
ttaatagtgtaag

SEQ ID NO: 198400 - DNA, 13 bp, Artificial Sequence
  Oligonucleotide for detection of SNP TSC0048826
cttacactattaa

SEQ ID NO: 198401 - DNA, 13 bp, Artificial Sequence
  Oligonucleotide for detection of SNP TSC0048826
ttaataatgtaag

SEQ ID NO: 198402 - DNA, 13 bp, Artificial Sequence
  Oligonucleotide for detection of SNP TSC0048826
cttacattattaa

SEQ ID NO: 198403 - DNA, 13 bp, Artificial Sequence
  Oligonucleotide for detection of SNP TSC0048827
ttagttagaaata

SEQ ID NO: 198404 - DNA, 13 bp, Artificial Sequence
  Oligonucleotide for detection of SNP TSC0048827
tatttctaactaa

SEQ ID NO: 198405 - DNA, 13 bp, Artificial Sequence
  Oligonucleotide for detection of SNP TSC0048827
ttagttggaaata

SEQ ID NO: 198406 - DNA, 13 bp, Artificial Sequence
  Oligonucleotide for detection of SNP TSC0048827
tatttccaactaa

SEQ ID NO: 198407 - DNA, 13 bp, Artificial Sequence
  Oligonucleotide for detection of SNP TSC0048827
ttagtcggaaata

SEQ ID NO: 198408 - DNA, 13 bp, Artificial Sequence
  Oligonucleotide for detection of SNP TSC0048827
tatttccgactaa

SEQ ID NO: 198409 - DNA, 13 bp, Artificial Sequence
  Oligonucleotide for detection of SNP TSC0048828
tttaatgttaaat

SEQ ID NO: 198410 - DNA, 13 bp, Artificial Sequence
  Oligonucleotide for detection of SNP TSC0048828
atttaacattaaa

SEQ ID NO: 198411 - DNA, 13 bp, Artificial Sequence
  Oligonucleotide for detection of SNP TSC0048829
aatttaaaaaaag

SEQ ID NO: 198412 - DNA, 13 bp, Artificial Sequence
  Oligonucleotide for detection of SNP TSC0048829
ctttttttaaatt

SEQ ID NO: 198413 - DNA, 13 bp, Artificial Sequence
  Oligonucleotide for detection of SNP TSC0048829
aatttagaaaaag

SEQ ID NO: 198414 - DNA, 13 bp, Artificial Sequence
  Oligonucleotide for detection of SNP TSC0048829
ctttttctaaatt

SEQ ID NO: 198415 - DNA, 13 bp, Artificial Sequence
  Oligonucleotide for detection of SNP TSC0048830
atttttatagtta

SEQ ID NO: 198416 - DNA, 13 bp, Artificial Sequence
  Oligonucleotide for detection of SNP TSC0048830
taactataaaaat

SEQ ID NO: 198417 - DNA, 13 bp, Artificial Sequence
  Oligonucleotide for detection of SNP TSC0008139
tgggaaaattata

SEQ ID NO: 198418 - DNA, 13 bp, Artificial Sequence
  Oligonucleotide for detection of SNP TSC0008139
tataattttccca

SEQ ID NO: 198419 - DNA, 13 bp, Artificial Sequence
  Oligonucleotide for detection of SNP TSC0008139
tgggaatattata

SEQ ID NO: 198420 - DNA, 13 bp, Artificial Sequence
  Oligonucleotide for detection of SNP TSC0008139
tataatattccca

SEQ ID NO: 198421 - DNA, 13 bp, Artificial Sequence
  Oligonucleotide for detection of SNP TSC0008139
tgtaattttttta

SEQ ID NO: 198422 - DNA, 13 bp, Artificial Sequence
  Oligonucleotide for detection of SNP TSC0008139
taaaaaaattaca

SEQ ID NO: 198423 - DNA, 13 bp, Artificial Sequence
  Oligonucleotide for detection of SNP TSC0008139
tgtaatattttta

SEQ ID NO: 198424 - DNA, 13 bp, Artificial Sequence
  Oligonucleotide for detection of SNP TSC0008139
taaaaatattaca

SEQ ID NO: 198425 - DNA, 13 bp, Artificial Sequence
  Oligonucleotide for detection of SNP TSC0048834
aaagaaaaaaaaa

SEQ ID NO: 198426 - DNA, 13 bp, Artificial Sequence
  Oligonucleotide for detection of SNP TSC0048834
tttttttttcttt

SEQ ID NO: 198427 - DNA, 13 bp, Artificial Sequence
  Oligonucleotide for detection of SNP TSC0048834
aaagaagaaaaaa

SEQ ID NO: 198428 - DNA, 13 bp, Artificial Sequence
  Oligonucleotide for detection of SNP TSC0048834
ttttttcttcttt

SEQ ID NO: 198429 - DNA, 13 bp, Artificial Sequence
  Oligonucleotide for detection of SNP TSC0048836
gaggtaagatgga

SEQ ID NO: 198430 - DNA, 13 bp, Artificial Sequence
  Oligonucleotide for detection of SNP TSC0048836
tccatcttacctc

SEQ ID NO: 198431 - DNA, 13 bp, Artificial Sequence
  Oligonucleotide for detection of SNP TSC0048836
gaggtaggatgga

SEQ ID NO: 198432 - DNA, 13 bp, Artificial Sequence
  Oligonucleotide for detection of SNP TSC0048836
tccatcctacctc

SEQ ID NO: 198433 - DNA, 13 bp, Artificial Sequence
  Oligonucleotide for detection of SNP TSC0048839
ttattatgaggat

SEQ ID NO: 198434 - DNA, 13 bp, Artificial Sequence
  Oligonucleotide for detection of SNP TSC0048839
atcctcataataa

SEQ ID NO: 198435 - DNA, 13 bp, Artificial Sequence
  Oligonucleotide for detection of SNP TSC0048839
ttattaagaggat

SEQ ID NO: 198436 - DNA, 13 bp, Artificial Sequence
  Oligonucleotide for detection of SNP TSC0048839
atcctcttaataa

SEQ ID NO: 198437 - DNA, 13 bp, Artificial Sequence
  Oligonucleotide for detection of SNP TSC0048841
aagtttggtttgy

SEQ ID NO: 198438 - DNA, 13 bp, Artificial Sequence
  Oligonucleotide for detection of SNP TSC0048841
rcaaaccaaactt

SEQ ID NO: 198439 - DNA, 13 bp, Artificial Sequence
  Oligonucleotide for detection of SNP TSC0048841
aagttcggtttgy

SEQ ID NO: 198440 - DNA, 13 bp, Artificial Sequence
  Oligonucleotide for detection of SNP TSC0048841
rcaaaccgaactt

SEQ ID NO: 198441 - DNA, 13 bp, Artificial Sequence
  Oligonucleotide for detection of SNP TSC0048841
gtaagttgagttt

SEQ ID NO: 198442 - DNA, 13 bp, Artificial Sequence
  Oligonucleotide for detection of SNP TSC0048841
aaactcaacttac

SEQ ID NO: 198443 - DNA, 13 bp, Artificial Sequence
  Oligonucleotide for detection of SNP TSC0048841
gtaagtcgagttt

SEQ ID NO: 198444 - DNA, 13 bp, Artificial Sequence
  Oligonucleotide for detection of SNP TSC0048841
aaactcgacttac

SEQ ID NO: 198445 - DNA, 13 bp, Artificial Sequence
  Oligonucleotide for detection of SNP TSC0048842
gatttatgtatty

SEQ ID NO: 198446 - DNA, 13 bp, Artificial Sequence
  Oligonucleotide for detection of SNP TSC0048842
raatacataaatc

SEQ ID NO: 198447 - DNA, 13 bp, Artificial Sequence
  Oligonucleotide for detection of SNP TSC0048842
gatttaggtatty

SEQ ID NO: 198448 - DNA, 13 bp, Artificial Sequence
  Oligonucleotide for detection of SNP TSC0048842
raatacctaaatc

SEQ ID NO: 198449 - DNA, 13 bp, Artificial Sequence
  Oligonucleotide for detection of SNP TSC0048842
gaatgtatgagty

SEQ ID NO: 198450 - DNA, 13 bp, Artificial Sequence
  Oligonucleotide for detection of SNP TSC0048842
ractcatacattc

SEQ ID NO: 198451 - DNA, 13 bp, Artificial Sequence
  Oligonucleotide for detection of SNP TSC0048842
gaatgtttgagty

SEQ ID NO: 198452 - DNA, 13 bp, Artificial Sequence
  Oligonucleotide for detection of SNP TSC0048842
ractcaaacattc

SEQ ID NO: 198453 - DNA, 13 bp, Artificial Sequence
  Oligonucleotide for detection of SNP TSC0048846
ggattatgattta

SEQ ID NO: 198454 - DNA, 13 bp, Artificial Sequence
  Oligonucleotide for detection of SNP TSC0048846
taaatcataatcc

SEQ ID NO: 198455 - DNA, 13 bp, Artificial Sequence
  Oligonucleotide for detection of SNP TSC0048846
ggattaggattta

SEQ ID NO: 198456 - DNA, 13 bp, Artificial Sequence
  Oligonucleotide for detection of SNP TSC0048846
taaatcctaatcc

SEQ ID NO: 198457 - DNA, 13 bp, Artificial Sequence
  Oligonucleotide for detection of SNP TSC0048846
taggttatggtty

SEQ ID NO: 198458 - DNA, 13 bp, Artificial Sequence
  Oligonucleotide for detection of SNP TSC0048846
raaccataaccta

SEQ ID NO: 198459 - DNA, 13 bp, Artificial Sequence
  Oligonucleotide for detection of SNP TSC0048846
taggttttggtty

SEQ ID NO: 198460 - DNA, 13 bp, Artificial Sequence
  Oligonucleotide for detection of SNP TSC0048846
raaccaaaaccta

SEQ ID NO: 198461 - DNA, 13 bp, Artificial Sequence
  Oligonucleotide for detection of SNP TSC0048847
tttttaagtttag

SEQ ID NO: 198462 - DNA, 13 bp, Artificial Sequence
  Oligonucleotide for detection of SNP TSC0048847
ctaaacttaaaaa

SEQ ID NO: 198463 - DNA, 13 bp, Artificial Sequence
  Oligonucleotide for detection of SNP TSC0048847
tttttaggtttag

SEQ ID NO: 198464 - DNA, 13 bp, Artificial Sequence
  Oligonucleotide for detection of SNP TSC0048847
ctaaacctaaaaa

SEQ ID NO: 198465 - DNA, 13 bp, Artificial Sequence
  Oligonucleotide for detection of SNP TSC0006125
aaaaaataagttt

SEQ ID NO: 198466 - DNA, 13 bp, Artificial Sequence
  Oligonucleotide for detection of SNP TSC0006125
aaacttatttttt

SEQ ID NO: 198467 - DNA, 13 bp, Artificial Sequence
  Oligonucleotide for detection of SNP TSC0006125
aaaaaagaagttt

SEQ ID NO: 198468 - DNA, 13 bp, Artificial Sequence
  Oligonucleotide for detection of SNP TSC0006125
aaacttctttttt

SEQ ID NO: 198469 - DNA, 13 bp, Artificial Sequence
  Oligonucleotide for detection of SNP TSC0006126
gagaattggtttg

SEQ ID NO: 198470 - DNA, 13 bp, Artificial Sequence
  Oligonucleotide for detection of SNP TSC0006126
caaaccaattctc

SEQ ID NO: 198471 - DNA, 13 bp, Artificial Sequence
  Oligonucleotide for detection of SNP TSC0006126
gagaatgggtttg

SEQ ID NO: 198472 - DNA, 13 bp, Artificial Sequence
  Oligonucleotide for detection of SNP TSC0006126
caaacccattctc

SEQ ID NO: 198473 - DNA, 13 bp, Artificial Sequence
  Oligonucleotide for detection of SNP TSC0006126
gagaacgggtttg

SEQ ID NO: 198474 - DNA, 13 bp, Artificial Sequence
  Oligonucleotide for detection of SNP TSC0006126
caaacccgttctc

SEQ ID NO: 198475 - DNA, 13 bp, Artificial Sequence
  Oligonucleotide for detection of SNP TSC0006126
taggttagtttty

SEQ ID NO: 198476 - DNA, 13 bp, Artificial Sequence
  Oligonucleotide for detection of SNP TSC0006126
raaaactaaccta

SEQ ID NO: 198477 - DNA, 13 bp, Artificial Sequence
  Oligonucleotide for detection of SNP TSC0048848
attaatagaattt

SEQ ID NO: 198478 - DNA, 13 bp, Artificial Sequence
  Oligonucleotide for detection of SNP TSC0048848
aaattctattaat

SEQ ID NO: 198479 - DNA, 13 bp, Artificial Sequence
  Oligonucleotide for detection of SNP TSC0048848
attaatggaattt

SEQ ID NO: 198480 - DNA, 13 bp, Artificial Sequence
  Oligonucleotide for detection of SNP TSC0048848
aaattccattaat

SEQ ID NO: 198481 - DNA, 13 bp, Artificial Sequence
  Oligonucleotide for detection of SNP TSC0048849
attaattatattg

SEQ ID NO: 198482 - DNA, 13 bp, Artificial Sequence
  Oligonucleotide for detection of SNP TSC0048849
caatataattaat

SEQ ID NO: 198483 - DNA, 13 bp, Artificial Sequence
  Oligonucleotide for detection of SNP TSC0048849
attaatgatattg

SEQ ID NO: 198484 - DNA, 13 bp, Artificial Sequence
  Oligonucleotide for detection of SNP TSC0048849
caatatcattaat

SEQ ID NO: 198485 - DNA, 13 bp, Artificial Sequence
  Oligonucleotide for detection of SNP TSC0048849
attaattatatcg

SEQ ID NO: 198486 - DNA, 13 bp, Artificial Sequence
  Oligonucleotide for detection of SNP TSC0048849
cgatataattaat

SEQ ID NO: 198487 - DNA, 13 bp, Artificial Sequence
  Oligonucleotide for detection of SNP TSC0048849
attaatgatatcg

SEQ ID NO: 198488 - DNA, 13 bp, Artificial Sequence
  Oligonucleotide for detection of SNP TSC0048849
cgatatcattaat

SEQ ID NO: 198489 - DNA, 13 bp, Artificial Sequence
  Oligonucleotide for detection of SNP TSC0048849
tgatgtaattaat

SEQ ID NO: 198490 - DNA, 13 bp, Artificial Sequence
  Oligonucleotide for detection of SNP TSC0048849
attaattacatca

SEQ ID NO: 198491 - DNA, 13 bp, Artificial Sequence
  Oligonucleotide for detection of SNP TSC0048849
tgatgttattaat

SEQ ID NO: 198492 - DNA, 13 bp, Artificial Sequence
  Oligonucleotide for detection of SNP TSC0048849
attaataacatca

SEQ ID NO: 198493 - DNA, 13 bp, Artificial Sequence
  Oligonucleotide for detection of SNP TSC0048849
cgatgtaattaat

SEQ ID NO: 198494 - DNA, 13 bp, Artificial Sequence
  Oligonucleotide for detection of SNP TSC0048849
attaattacatcg

SEQ ID NO: 198495 - DNA, 13 bp, Artificial Sequence
  Oligonucleotide for detection of SNP TSC0048849
cgatgttattaat

SEQ ID NO: 198496 - DNA, 13 bp, Artificial Sequence
  Oligonucleotide for detection of SNP TSC0048849
attaataacatcg

SEQ ID NO: 198497 - DNA, 13 bp, Artificial Sequence
  Oligonucleotide for detection of SNP TSC0048850
aagaaaaaaatat

SEQ ID NO: 198498 - DNA, 13 bp, Artificial Sequence
  Oligonucleotide for detection of SNP TSC0048850
atatttttttctt

SEQ ID NO: 198499 - DNA, 13 bp, Artificial Sequence
  Oligonucleotide for detection of SNP TSC0048850
aagaaataaatat

SEQ ID NO: 198500 - DNA, 13 bp, Artificial Sequence
  Oligonucleotide for detection of SNP TSC0048850
atatttatttctt

SEQ ID NO: 198501 - DNA, 13 bp, Artificial Sequence
  Oligonucleotide for detection of SNP TSC0048851
ataaggtgatagg

SEQ ID NO: 198502 - DNA, 13 bp, Artificial Sequence
  Oligonucleotide for detection of SNP TSC0048851
cctatcaccttat

SEQ ID NO: 198503 - DNA, 13 bp, Artificial Sequence
  Oligonucleotide for detection of SNP TSC0048851
ataaggcgatagg

SEQ ID NO: 198504 - DNA, 13 bp, Artificial Sequence
  Oligonucleotide for detection of SNP TSC0048851
cctatcgccttat

SEQ ID NO: 198505 - DNA, 13 bp, Artificial Sequence
  Oligonucleotide for detection of SNP TSC0048851
tttgttgttttgt

SEQ ID NO: 198506 - DNA, 13 bp, Artificial Sequence
  Oligonucleotide for detection of SNP TSC0048851
acaaaacaacaaa

SEQ ID NO: 198507 - DNA, 13 bp, Artificial Sequence
  Oligonucleotide for detection of SNP TSC0048851
tttgttattttgt

SEQ ID NO: 198508 - DNA, 13 bp, Artificial Sequence
  Oligonucleotide for detection of SNP TSC0048851
acaaaataacaaa

SEQ ID NO: 198509 - DNA, 13 bp, Artificial Sequence
  Oligonucleotide for detection of SNP TSC0048851
tttgtcgttttgt

SEQ ID NO: 198510 - DNA, 13 bp, Artificial Sequence
  Oligonucleotide for detection of SNP TSC0048851
acaaaacgacaaa

SEQ ID NO: 198511 - DNA, 13 bp, Artificial Sequence
  Oligonucleotide for detection of SNP TSC0048852
atatttattgtag

SEQ ID NO: 198512 - DNA, 13 bp, Artificial Sequence
  Oligonucleotide for detection of SNP TSC0048852
ctacaataaatat

SEQ ID NO: 198513 - DNA, 13 bp, Artificial Sequence
  Oligonucleotide for detection of SNP TSC0048852
atattttttgtag

SEQ ID NO: 198514 - DNA, 13 bp, Artificial Sequence
  Oligonucleotide for detection of SNP TSC0048852
ctacaaaaaatat

SEQ ID NO: 198515 - DNA, 13 bp, Artificial Sequence
  Oligonucleotide for detection of SNP TSC0048852
ttgtagtggatgt

SEQ ID NO: 198516 - DNA, 13 bp, Artificial Sequence
  Oligonucleotide for detection of SNP TSC0048852
acatccactacaa

SEQ ID NO: 198517 - DNA, 13 bp, Artificial Sequence
  Oligonucleotide for detection of SNP TSC0048852
ttgtagaggatgt

SEQ ID NO: 198518 - DNA, 13 bp, Artificial Sequence
  Oligonucleotide for detection of SNP TSC0048852
acatcctctacaa

SEQ ID NO: 198519 - DNA, 13 bp, Artificial Sequence
  Oligonucleotide for detection of SNP TSC0048853
atttatgttatag

SEQ ID NO: 198520 - DNA, 13 bp, Artificial Sequence
  Oligonucleotide for detection of SNP TSC0048853
ctataacataaat

SEQ ID NO: 198521 - DNA, 13 bp, Artificial Sequence
  Oligonucleotide for detection of SNP TSC0048853
atttacgttatag

SEQ ID NO: 198522 - DNA, 13 bp, Artificial Sequence
  Oligonucleotide for detection of SNP TSC0048853
ctataacgtaaat

SEQ ID NO: 198523 - DNA, 13 bp, Artificial Sequence
  Oligonucleotide for detection of SNP TSC0048853
ttatagggtaggt

SEQ ID NO: 198524 - DNA, 13 bp, Artificial Sequence
  Oligonucleotide for detection of SNP TSC0048853
acctaccctataa

SEQ ID NO: 198525 - DNA, 13 bp, Artificial Sequence
  Oligonucleotide for detection of SNP TSC0048853
ttatagtgtaggt

SEQ ID NO: 198526 - DNA, 13 bp, Artificial Sequence
  Oligonucleotide for detection of SNP TSC0048853
acctacactataa

SEQ ID NO: 198527 - DNA, 13 bp, Artificial Sequence
  Oligonucleotide for detection of SNP TSC0048853
ttatagcgtaggt

SEQ ID NO: 198528 - DNA, 13 bp, Artificial Sequence
  Oligonucleotide for detection of SNP TSC0048853
acctacgctataa

SEQ ID NO: 198529 - DNA, 13 bp, Artificial Sequence
  Oligonucleotide for detection of SNP TSC0048854
tgtataagaaaag

SEQ ID NO: 198530 - DNA, 13 bp, Artificial Sequence
  Oligonucleotide for detection of SNP TSC0048854
cttttcttataca

SEQ ID NO: 198531 - DNA, 13 bp, Artificial Sequence
  Oligonucleotide for detection of SNP TSC0048854
tgtataggaaaag

SEQ ID NO: 198532 - DNA, 13 bp, Artificial Sequence
  Oligonucleotide for detection of SNP TSC0048854
cttttcctataca

SEQ ID NO: 198533 - DNA, 13 bp, Artificial Sequence
  Oligonucleotide for detection of SNP TSC0048857
ttatgtaattgat

SEQ ID NO: 198534 - DNA, 13 bp, Artificial Sequence
  Oligonucleotide for detection of SNP TSC0048857
atcaattacataa

SEQ ID NO: 198535 - DNA, 13 bp, Artificial Sequence
  Oligonucleotide for detection of SNP TSC0048857
ttatgttattgat

SEQ ID NO: 198536 - DNA, 13 bp, Artificial Sequence
  Oligonucleotide for detection of SNP TSC0048857
atcaataacataa

SEQ ID NO: 198537 - DNA, 13 bp, Artificial Sequence
  Oligonucleotide for detection of SNP TSC0048857
ttatgtaatcgat

SEQ ID NO: 198538 - DNA, 13 bp, Artificial Sequence
  Oligonucleotide for detection of SNP TSC0048857
atcgattacataa

SEQ ID NO: 198539 - DNA, 13 bp, Artificial Sequence
  Oligonucleotide for detection of SNP TSC0048857
ttatgttatcgat

SEQ ID NO: 198540 - DNA, 13 bp, Artificial Sequence
  Oligonucleotide for detection of SNP TSC0048857
atcgataacataa

SEQ ID NO: 198541 - DNA, 13 bp, Artificial Sequence
  Oligonucleotide for detection of SNP TSC0048857
attgattatatag

SEQ ID NO: 198542 - DNA, 13 bp, Artificial Sequence
  Oligonucleotide for detection of SNP TSC0048857
ctatataatcaat

SEQ ID NO: 198543 - DNA, 13 bp, Artificial Sequence
  Oligonucleotide for detection of SNP TSC0048857
attgatgatatag

SEQ ID NO: 198544 - DNA, 13 bp, Artificial Sequence
  Oligonucleotide for detection of SNP TSC0048857
ctatatcatcaat

SEQ ID NO: 198545 - DNA, 13 bp, Artificial Sequence
  Oligonucleotide for detection of SNP TSC0048857
atcgattatatag

SEQ ID NO: 198546 - DNA, 13 bp, Artificial Sequence
  Oligonucleotide for detection of SNP TSC0048857
ctatataatcgat

SEQ ID NO: 198547 - DNA, 13 bp, Artificial Sequence
  Oligonucleotide for detection of SNP TSC0048857
atcgatgatatag

SEQ ID NO: 198548 - DNA, 13 bp, Artificial Sequence
  Oligonucleotide for detection of SNP TSC0048857
ctatatcatcgat

SEQ ID NO: 198549 - DNA, 13 bp, Artificial Sequence
  Oligonucleotide for detection of SNP TSC0048858
ggaattaagattt

SEQ ID NO: 198550 - DNA, 13 bp, Artificial Sequence
  Oligonucleotide for detection of SNP TSC0048858
aaatcttaattcc

SEQ ID NO: 198551 - DNA, 13 bp, Artificial Sequence
  Oligonucleotide for detection of SNP TSC0048858
ggaatttagattt

SEQ ID NO: 198552 - DNA, 13 bp, Artificial Sequence
  Oligonucleotide for detection of SNP TSC0048858
aaatctaaattcc

SEQ ID NO: 198553 - DNA, 13 bp, Artificial Sequence
  Oligonucleotide for detection of SNP TSC0048858
aaattttaattty

SEQ ID NO: 198554 - DNA, 13 bp, Artificial Sequence
  Oligonucleotide for detection of SNP TSC0048858
raaattaaaattt

SEQ ID NO: 198555 - DNA, 13 bp, Artificial Sequence
  Oligonucleotide for detection of SNP TSC0048858
aaatttgaattty

SEQ ID NO: 198556 - DNA, 13 bp, Artificial Sequence
  Oligonucleotide for detection of SNP TSC0048858
raaattcaaattt

SEQ ID NO: 198557 - DNA, 13 bp, Artificial Sequence
  Oligonucleotide for detection of SNP TSC0048863
tttttaagatagg

SEQ ID NO: 198558 - DNA, 13 bp, Artificial Sequence
  Oligonucleotide for detection of SNP TSC0048863
cctatcttaaaaa

SEQ ID NO: 198559 - DNA, 13 bp, Artificial Sequence
  Oligonucleotide for detection of SNP TSC0048863
tttttaggatagg

SEQ ID NO: 198560 - DNA, 13 bp, Artificial Sequence
  Oligonucleotide for detection of SNP TSC0048863
cctatcctaaaaa

SEQ ID NO: 198561 - DNA, 13 bp, Artificial Sequence
  Oligonucleotide for detection of SNP TSC0048864
tttttcgtaaaat

SEQ ID NO: 198562 - DNA, 13 bp, Artificial Sequence
  Oligonucleotide for detection of SNP TSC0048864
attttacgaaaaa

SEQ ID NO: 198563 - DNA, 13 bp, Artificial Sequence
  Oligonucleotide for detection of SNP TSC0048864
attttaggggaag

SEQ ID NO: 198564 - DNA, 13 bp, Artificial Sequence
  Oligonucleotide for detection of SNP TSC0048864
cttcccctaaaat

SEQ ID NO: 198565 - DNA, 13 bp, Artificial Sequence
  Oligonucleotide for detection of SNP TSC0048864
attttatgggaag

SEQ ID NO: 198566 - DNA, 13 bp, Artificial Sequence
  Oligonucleotide for detection of SNP TSC0048864
cttcccataaaat

SEQ ID NO: 198567 - DNA, 13 bp, Artificial Sequence
  Oligonucleotide for detection of SNP TSC0048864
attttacgggaag

SEQ ID NO: 198568 - DNA, 13 bp, Artificial Sequence
  Oligonucleotide for detection of SNP TSC0048864
cttcccgtaaaat

SEQ ID NO: 198569 - DNA, 13 bp, Artificial Sequence
  Oligonucleotide for detection of SNP TSC0048865
ttagatatagata

SEQ ID NO: 198570 - DNA, 13 bp, Artificial Sequence
  Oligonucleotide for detection of SNP TSC0048865
tatctatatctaa

SEQ ID NO: 198571 - DNA, 13 bp, Artificial Sequence
  Oligonucleotide for detection of SNP TSC0048865
ttagatttagata

SEQ ID NO: 198572 - DNA, 13 bp, Artificial Sequence
  Oligonucleotide for detection of SNP TSC0048865
tatctaaatctaa

SEQ ID NO: 198573 - DNA, 13 bp, Artificial Sequence
  Oligonucleotide for detection of SNP TSC0048865
tgtttaggtttag

SEQ ID NO: 198574 - DNA, 13 bp, Artificial Sequence
  Oligonucleotide for detection of SNP TSC0048865
ctaaacctaaaca

SEQ ID NO: 198575 - DNA, 13 bp, Artificial Sequence
  Oligonucleotide for detection of SNP TSC0048868
tttgaatgtttty

SEQ ID NO: 198576 - DNA, 13 bp, Artificial Sequence
  Oligonucleotide for detection of SNP TSC0048868
raaaacattcaaa

SEQ ID NO: 198577 - DNA, 13 bp, Artificial Sequence
  Oligonucleotide for detection of SNP TSC0048868
tttgaacgtttty

SEQ ID NO: 198578 - DNA, 13 bp, Artificial Sequence
  Oligonucleotide for detection of SNP TSC0048868
raaaacgttcaaa

SEQ ID NO: 198579 - DNA, 13 bp, Artificial Sequence
  Oligonucleotide for detection of SNP TSC0048868
ggagatgtttaga

SEQ ID NO: 198580 - DNA, 13 bp, Artificial Sequence
  Oligonucleotide for detection of SNP TSC0048868
tctaaacatctcc

SEQ ID NO: 198581 - DNA, 13 bp, Artificial Sequence
  Oligonucleotide for detection of SNP TSC0048868
ggagatatttaga

SEQ ID NO: 198582 - DNA, 13 bp, Artificial Sequence
  Oligonucleotide for detection of SNP TSC0048868
tctaaatatctcc

SEQ ID NO: 198583 - DNA, 13 bp, Artificial Sequence
  Oligonucleotide for detection of SNP TSC0048868
ggagacgtttaga

SEQ ID NO: 198584 - DNA, 13 bp, Artificial Sequence
  Oligonucleotide for detection of SNP TSC0048868
tctaaacgtctcc

SEQ ID NO: 198585 - DNA, 13 bp, Artificial Sequence
  Oligonucleotide for detection of SNP TSC0048869
taagtagtaaaay

SEQ ID NO: 198586 - DNA, 13 bp, Artificial Sequence
  Oligonucleotide for detection of SNP TSC0048869
rttttactactta

SEQ ID NO: 198587 - DNA, 13 bp, Artificial Sequence
  Oligonucleotide for detection of SNP TSC0048869
taagtaataaaay

SEQ ID NO: 198588 - DNA, 13 bp, Artificial Sequence
  Oligonucleotide for detection of SNP TSC0048869
rttttattactta

SEQ ID NO: 198589 - DNA, 13 bp, Artificial Sequence
  Oligonucleotide for detection of SNP TSC0048870
ataaatattatay

SEQ ID NO: 198590 - DNA, 13 bp, Artificial Sequence
  Oligonucleotide for detection of SNP TSC0048870
rtataatatttat

SEQ ID NO: 198591 - DNA, 13 bp, Artificial Sequence
  Oligonucleotide for detection of SNP TSC0048870
ataaattttatay

SEQ ID NO: 198592 - DNA, 13 bp, Artificial Sequence
  Oligonucleotide for detection of SNP TSC0048870
rtataaaatttat

SEQ ID NO: 198593 - DNA, 13 bp, Artificial Sequence
  Oligonucleotide for detection of SNP TSC0048870
gtgtagggtttat

SEQ ID NO: 198594 - DNA, 13 bp, Artificial Sequence
  Oligonucleotide for detection of SNP TSC0048870
ataaaccctacac

SEQ ID NO: 198595 - DNA, 13 bp, Artificial Sequence
  Oligonucleotide for detection of SNP TSC0048872
aatgtttgtgaga

SEQ ID NO: 198596 - DNA, 13 bp, Artificial Sequence
  Oligonucleotide for detection of SNP TSC0048872
tctcacaaacatt

SEQ ID NO: 198597 - DNA, 13 bp, Artificial Sequence
  Oligonucleotide for detection of SNP TSC0048872
aatgttggtgaga

SEQ ID NO: 198598 - DNA, 13 bp, Artificial Sequence
  Oligonucleotide for detection of SNP TSC0048872
tctcaccaacatt

SEQ ID NO: 198599 - DNA, 13 bp, Artificial Sequence
  Oligonucleotide for detection of SNP TSC0048872
ttttataagtatt

SEQ ID NO: 198600 - DNA, 13 bp, Artificial Sequence
  Oligonucleotide for detection of SNP TSC0048872
aatacttataaaa

SEQ ID NO: 198601 - DNA, 13 bp, Artificial Sequence
  Oligonucleotide for detection of SNP TSC0048872
ttttattagtatt

SEQ ID NO: 198602 - DNA, 13 bp, Artificial Sequence
  Oligonucleotide for detection of SNP TSC0048872
aatactaataaaa

SEQ ID NO: 198603 - DNA, 13 bp, Artificial Sequence
  Oligonucleotide for detection of SNP TSC0048873
gttttaattataa

SEQ ID NO: 198604 - DNA, 13 bp, Artificial Sequence
  Oligonucleotide for detection of SNP TSC0048873
ttataattaaaac

SEQ ID NO: 198605 - DNA, 13 bp, Artificial Sequence
  Oligonucleotide for detection of SNP TSC0004834
tggataattgagy

SEQ ID NO: 198606 - DNA, 13 bp, Artificial Sequence
  Oligonucleotide for detection of SNP TSC0004834
rctcaattatcca

SEQ ID NO: 198607 - DNA, 13 bp, Artificial Sequence
  Oligonucleotide for detection of SNP TSC0004834
tggatagttgagy

SEQ ID NO: 198608 - DNA, 13 bp, Artificial Sequence
  Oligonucleotide for detection of SNP TSC0004834
rctcaactatcca

SEQ ID NO: 198609 - DNA, 13 bp, Artificial Sequence
  Oligonucleotide for detection of SNP TSC0048874
ttttattgtagay

SEQ ID NO: 198610 - DNA, 13 bp, Artificial Sequence
  Oligonucleotide for detection of SNP TSC0048874
rtctacaataaaa

SEQ ID NO: 198611 - DNA, 13 bp, Artificial Sequence
  Oligonucleotide for detection of SNP TSC0048874
ttttatcgtagay

SEQ ID NO: 198612 - DNA, 13 bp, Artificial Sequence
  Oligonucleotide for detection of SNP TSC0048874
rtctacgataaaa

SEQ ID NO: 198613 - DNA, 13 bp, Artificial Sequence
  Oligonucleotide for detection of SNP TSC0048874
gtttgtgatggga

SEQ ID NO: 198614 - DNA, 13 bp, Artificial Sequence
  Oligonucleotide for detection of SNP TSC0048874
tcccatcacaaac

SEQ ID NO: 198615 - DNA, 13 bp, Artificial Sequence
  Oligonucleotide for detection of SNP TSC0048874
gtttgtaatggga

SEQ ID NO: 198616 - DNA, 13 bp, Artificial Sequence
  Oligonucleotide for detection of SNP TSC0048874
tcccattacaaac

SEQ ID NO: 198617 - DNA, 13 bp, Artificial Sequence
  Oligonucleotide for detection of SNP TSC0048874
gtttgcgatggga

SEQ ID NO: 198618 - DNA, 13 bp, Artificial Sequence
  Oligonucleotide for detection of SNP TSC0048874
tcccatcgcaaac

SEQ ID NO: 198619 - DNA, 13 bp, Artificial Sequence
  Oligonucleotide for detection of SNP TSC0048875
gtttttagtggty

SEQ ID NO: 198620 - DNA, 13 bp, Artificial Sequence
  Oligonucleotide for detection of SNP TSC0048875
raccactaaaaac

SEQ ID NO: 198621 - DNA, 13 bp, Artificial Sequence
  Oligonucleotide for detection of SNP TSC0048875
gtttttggtggty

SEQ ID NO: 198622 - DNA, 13 bp, Artificial Sequence
  Oligonucleotide for detection of SNP TSC0048875
raccaccaaaaac

SEQ ID NO: 198623 - DNA, 13 bp, Artificial Sequence
  Oligonucleotide for detection of SNP TSC0048875
gttttcggtggty

SEQ ID NO: 198624 - DNA, 13 bp, Artificial Sequence
  Oligonucleotide for detection of SNP TSC0048875
raccaccgaaaac

SEQ ID NO: 198625 - DNA, 13 bp, Artificial Sequence
  Oligonucleotide for detection of SNP TSC0048875
ggttattgagaay

SEQ ID NO: 198626 - DNA, 13 bp, Artificial Sequence
  Oligonucleotide for detection of SNP TSC0048875
rttctcaataacc

SEQ ID NO: 198627 - DNA, 13 bp, Artificial Sequence
  Oligonucleotide for detection of SNP TSC0048875
ggttatcgagaay

SEQ ID NO: 198628 - DNA, 13 bp, Artificial Sequence
  Oligonucleotide for detection of SNP TSC0048875
rttctcgataacc

SEQ ID NO: 198629 - DNA, 13 bp, Artificial Sequence
  Oligonucleotide for detection of SNP TSC0008196
ataaaagaaagaa

SEQ ID NO: 198630 - DNA, 13 bp, Artificial Sequence
  Oligonucleotide for detection of SNP TSC0008196
ttctttcttttat

SEQ ID NO: 198631 - DNA, 13 bp, Artificial Sequence
  Oligonucleotide for detection of SNP TSC0008196
ataaaaaaaagaa

SEQ ID NO: 198632 - DNA, 13 bp, Artificial Sequence
  Oligonucleotide for detection of SNP TSC0008196
ttcttttttttat

SEQ ID NO: 198633 - DNA, 13 bp, Artificial Sequence
  Oligonucleotide for detection of SNP TSC0008197
tttaagaaatttt

SEQ ID NO: 198634 - DNA, 13 bp, Artificial Sequence
  Oligonucleotide for detection of SNP TSC0008197
aaaatttcttaaa

SEQ ID NO: 198635 - DNA, 13 bp, Artificial Sequence
  Oligonucleotide for detection of SNP TSC0048878
aaatttatttagg

SEQ ID NO: 198636 - DNA, 13 bp, Artificial Sequence
  Oligonucleotide for detection of SNP TSC0048878
cctaaataaattt

SEQ ID NO: 198637 - DNA, 13 bp, Artificial Sequence
  Oligonucleotide for detection of SNP TSC0048878
aaatttttttagg

SEQ ID NO: 198638 - DNA, 13 bp, Artificial Sequence
  Oligonucleotide for detection of SNP TSC0048878
cctaaaaaaattt

SEQ ID NO: 198639 - DNA, 13 bp, Artificial Sequence
  Oligonucleotide for detection of SNP TSC0048878
tttgaataggttt

SEQ ID NO: 198640 - DNA, 13 bp, Artificial Sequence
  Oligonucleotide for detection of SNP TSC0048878
aaacctattcaaa

SEQ ID NO: 198641 - DNA, 13 bp, Artificial Sequence
  Oligonucleotide for detection of SNP TSC0048878
tttgaaaaggttt

SEQ ID NO: 198642 - DNA, 13 bp, Artificial Sequence
  Oligonucleotide for detection of SNP TSC0048878
aaaccttttcaaa

SEQ ID NO: 198643 - DNA, 13 bp, Artificial Sequence
  Oligonucleotide for detection of SNP TSC0048885
agggagatgttay

SEQ ID NO: 198644 - DNA, 13 bp, Artificial Sequence
  Oligonucleotide for detection of SNP TSC0048885
rtaacatctccct

SEQ ID NO: 198645 - DNA, 13 bp, Artificial Sequence
  Oligonucleotide for detection of SNP TSC0048885
agggaggtgttay

SEQ ID NO: 198646 - DNA, 13 bp, Artificial Sequence
  Oligonucleotide for detection of SNP TSC0048885
rtaacacctccct

SEQ ID NO: 198647 - DNA, 13 bp, Artificial Sequence
  Oligonucleotide for detection of SNP TSC0048885
agggagacgttay

SEQ ID NO: 198648 - DNA, 13 bp, Artificial Sequence
  Oligonucleotide for detection of SNP TSC0048885
rtaacgtctccct

SEQ ID NO: 198649 - DNA, 13 bp, Artificial Sequence
  Oligonucleotide for detection of SNP TSC0048885
agggaggcgttay

SEQ ID NO: 198650 - DNA, 13 bp, Artificial Sequence
  Oligonucleotide for detection of SNP TSC0048885
rtaacgcctccct

SEQ ID NO: 198651 - DNA, 13 bp, Artificial Sequence
  Oligonucleotide for detection of SNP TSC0005183
gttgtatgtgtat

SEQ ID NO: 198652 - DNA, 13 bp, Artificial Sequence
  Oligonucleotide for detection of SNP TSC0005183
atacacatacaac

SEQ ID NO: 198653 - DNA, 13 bp, Artificial Sequence
  Oligonucleotide for detection of SNP TSC0005183
gttgtaggtgtat

SEQ ID NO: 198654 - DNA, 13 bp, Artificial Sequence
  Oligonucleotide for detection of SNP TSC0005183
atacacctacaac

SEQ ID NO: 198655 - DNA, 13 bp, Artificial Sequence
  Oligonucleotide for detection of SNP TSC0005183
gttgtacgtgtat

SEQ ID NO: 198656 - DNA, 13 bp, Artificial Sequence
  Oligonucleotide for detection of SNP TSC0005183
atacacgtacaac

SEQ ID NO: 198657 - DNA, 13 bp, Artificial Sequence
  Oligonucleotide for detection of SNP TSC0005183
atgtatgtgtaay

SEQ ID NO: 198658 - DNA, 13 bp, Artificial Sequence
  Oligonucleotide for detection of SNP TSC0005183
rttacacatacat

SEQ ID NO: 198659 - DNA, 13 bp, Artificial Sequence
  Oligonucleotide for detection of SNP TSC0005183
atgtatttgtaay

SEQ ID NO: 198660 - DNA, 13 bp, Artificial Sequence
  Oligonucleotide for detection of SNP TSC0005183
rttacaaatacat

SEQ ID NO: 198661 - DNA, 13 bp, Artificial Sequence
  Oligonucleotide for detection of SNP TSC0005183
atgtacgtgtaay

SEQ ID NO: 198662 - DNA, 13 bp, Artificial Sequence
  Oligonucleotide for detection of SNP TSC0005183
rttacacgtacat

SEQ ID NO: 198663 - DNA, 13 bp, Artificial Sequence
  Oligonucleotide for detection of SNP TSC0000118
gttatggttttga

SEQ ID NO: 198664 - DNA, 13 bp, Artificial Sequence
  Oligonucleotide for detection of SNP TSC0000118
tcaaaaccataac

SEQ ID NO: 198665 - DNA, 13 bp, Artificial Sequence
  Oligonucleotide for detection of SNP TSC0000118
gttatgattttga

SEQ ID NO: 198666 - DNA, 13 bp, Artificial Sequence
  Oligonucleotide for detection of SNP TSC0000118
tcaaaatcataac

SEQ ID NO: 198667 - DNA, 13 bp, Artificial Sequence
  Oligonucleotide for detection of SNP TSC0048888
aaggggaaagagg

SEQ ID NO: 198668 - DNA, 13 bp, Artificial Sequence
  Oligonucleotide for detection of SNP TSC0048888
cctctttcccctt

SEQ ID NO: 198669 - DNA, 13 bp, Artificial Sequence
  Oligonucleotide for detection of SNP TSC0048888
aagggggaagagg

SEQ ID NO: 198670 - DNA, 13 bp, Artificial Sequence
  Oligonucleotide for detection of SNP TSC0048888
cctcttccccctt

SEQ ID NO: 198671 - DNA, 13 bp, Artificial Sequence
  Oligonucleotide for detection of SNP TSC0048890
ggttttaggggga

SEQ ID NO: 198672 - DNA, 13 bp, Artificial Sequence
  Oligonucleotide for detection of SNP TSC0048890
tccccctaaaacc

SEQ ID NO: 198673 - DNA, 13 bp, Artificial Sequence
  Oligonucleotide for detection of SNP TSC0048890
ggttttgggggga

SEQ ID NO: 198674 - DNA, 13 bp, Artificial Sequence
  Oligonucleotide for detection of SNP TSC0048890
tccccccaaaacc

SEQ ID NO: 198675 - DNA, 13 bp, Artificial Sequence
  Oligonucleotide for detection of SNP TSC0048891
gtgtataagtttg

SEQ ID NO: 198676 - DNA, 13 bp, Artificial Sequence
  Oligonucleotide for detection of SNP TSC0048891
caaacttatacac

SEQ ID NO: 198677 - DNA, 13 bp, Artificial Sequence
  Oligonucleotide for detection of SNP TSC0048891
gtgtatgagtttg

SEQ ID NO: 198678 - DNA, 13 bp, Artificial Sequence
  Oligonucleotide for detection of SNP TSC0048891
caaactcatacac

SEQ ID NO: 198679 - DNA, 13 bp, Artificial Sequence
  Oligonucleotide for detection of SNP TSC0048894
tttgtttggttat

SEQ ID NO: 198680 - DNA, 13 bp, Artificial Sequence
  Oligonucleotide for detection of SNP TSC0048894
ataaccaaacaaa

SEQ ID NO: 198681 - DNA, 13 bp, Artificial Sequence
  Oligonucleotide for detection of SNP TSC0048894
tttgttcggttat

SEQ ID NO: 198682 - DNA, 13 bp, Artificial Sequence
  Oligonucleotide for detection of SNP TSC0048894
ataaccgaacaaa

SEQ ID NO: 198683 - DNA, 13 bp, Artificial Sequence
  Oligonucleotide for detection of SNP TSC0048894
atagttgggtagg

SEQ ID NO: 198684 - DNA, 13 bp, Artificial Sequence
  Oligonucleotide for detection of SNP TSC0048894
cctacccaactat

SEQ ID NO: 198685 - DNA, 13 bp, Artificial Sequence
  Oligonucleotide for detection of SNP TSC0048894
atagttaggtagg

SEQ ID NO: 198686 - DNA, 13 bp, Artificial Sequence
  Oligonucleotide for detection of SNP TSC0048894
cctacctaactat

SEQ ID NO: 198687 - DNA, 13 bp, Artificial Sequence
  Oligonucleotide for detection of SNP TSC0048894
atagtcgggtagg

SEQ ID NO: 198688 - DNA, 13 bp, Artificial Sequence
  Oligonucleotide for detection of SNP TSC0048894
cctacccgactat

SEQ ID NO: 198689 - DNA, 13 bp, Artificial Sequence
  Oligonucleotide for detection of SNP TSC0048895
taaagattaaatg

SEQ ID NO: 198690 - DNA, 13 bp, Artificial Sequence
  Oligonucleotide for detection of SNP TSC0048895
catttaatcttta

SEQ ID NO: 198691 - DNA, 13 bp, Artificial Sequence
  Oligonucleotide for detection of SNP TSC0048895
taaagaataaatg

SEQ ID NO: 198692 - DNA, 13 bp, Artificial Sequence
  Oligonucleotide for detection of SNP TSC0048895
catttattcttta

SEQ ID NO: 198693 - DNA, 13 bp, Artificial Sequence
  Oligonucleotide for detection of SNP TSC0009392
gggaaggagttaa

SEQ ID NO: 198694 - DNA, 13 bp, Artificial Sequence
  Oligonucleotide for detection of SNP TSC0009392
ttaactccttccc

SEQ ID NO: 198695 - DNA, 13 bp, Artificial Sequence
  Oligonucleotide for detection of SNP TSC0009392
gggaagaagttaa

SEQ ID NO: 198696 - DNA, 13 bp, Artificial Sequence
  Oligonucleotide for detection of SNP TSC0009392
ttaacttcttccc

SEQ ID NO: 198697 - DNA, 13 bp, Artificial Sequence
  Oligonucleotide for detection of SNP TSC0004869
tttttgtgggatt

SEQ ID NO: 198698 - DNA, 13 bp, Artificial Sequence
  Oligonucleotide for detection of SNP TSC0004869
aatcccacaaaaa

SEQ ID NO: 198699 - DNA, 13 bp, Artificial Sequence
  Oligonucleotide for detection of SNP TSC0004869
tttttgcgggatt

SEQ ID NO: 198700 - DNA, 13 bp, Artificial Sequence
  Oligonucleotide for detection of SNP TSC0004869
aatcccgcaaaaa

SEQ ID NO: 198701 - DNA, 13 bp, Artificial Sequence
  Oligonucleotide for detection of SNP TSC0004869
agttttgtagaga

SEQ ID NO: 198702 - DNA, 13 bp, Artificial Sequence
  Oligonucleotide for detection of SNP TSC0004869
tctctacaaaact

SEQ ID NO: 198703 - DNA, 13 bp, Artificial Sequence
  Oligonucleotide for detection of SNP TSC0004869
agttttatagaga

SEQ ID NO: 198704 - DNA, 13 bp, Artificial Sequence
  Oligonucleotide for detection of SNP TSC0004869
tctctataaaact

SEQ ID NO: 198705 - DNA, 13 bp, Artificial Sequence
  Oligonucleotide for detection of SNP TSC0004869
agtttcgtagaga

SEQ ID NO: 198706 - DNA, 13 bp, Artificial Sequence
  Oligonucleotide for detection of SNP TSC0004869
tctctacgaaact

SEQ ID NO: 198707 - DNA, 13 bp, Artificial Sequence
  Oligonucleotide for detection of SNP TSC0048896
tttatgatttggt

SEQ ID NO: 198708 - DNA, 13 bp, Artificial Sequence
  Oligonucleotide for detection of SNP TSC0048896
accaaatcataaa

SEQ ID NO: 198709 - DNA, 13 bp, Artificial Sequence
  Oligonucleotide for detection of SNP TSC0048896
tttatggtttggt

SEQ ID NO: 198710 - DNA, 13 bp, Artificial Sequence
  Oligonucleotide for detection of SNP TSC0048896
accaaaccataaa

SEQ ID NO: 198711 - DNA, 13 bp, Artificial Sequence
  Oligonucleotide for detection of SNP TSC0048897
tggtgaaaaataa

SEQ ID NO: 198712 - DNA, 13 bp, Artificial Sequence
  Oligonucleotide for detection of SNP TSC0048897
ttatttttcacca

SEQ ID NO: 198713 - DNA, 13 bp, Artificial Sequence
  Oligonucleotide for detection of SNP TSC0048897
tggtgataaataa

SEQ ID NO: 198714 - DNA, 13 bp, Artificial Sequence
  Oligonucleotide for detection of SNP TSC0048897
ttatttatcacca

SEQ ID NO: 198715 - DNA, 13 bp, Artificial Sequence
  Oligonucleotide for detection of SNP TSC0048898
taagggatagaag

SEQ ID NO: 198716 - DNA, 13 bp, Artificial Sequence
  Oligonucleotide for detection of SNP TSC0048898
cttctatccctta

SEQ ID NO: 198717 - DNA, 13 bp, Artificial Sequence
  Oligonucleotide for detection of SNP TSC0048898
taaggggtagaag

SEQ ID NO: 198718 - DNA, 13 bp, Artificial Sequence
  Oligonucleotide for detection of SNP TSC0048898
cttctacccctta

SEQ ID NO: 198719 - DNA, 13 bp, Artificial Sequence
  Oligonucleotide for detection of SNP TSC0048901
aatgaagatatgg

SEQ ID NO: 198720 - DNA, 13 bp, Artificial Sequence
  Oligonucleotide for detection of SNP TSC0048901
ccatatcttcatt

SEQ ID NO: 198721 - DNA, 13 bp, Artificial Sequence
  Oligonucleotide for detection of SNP TSC0048901
aatgaaaatatgg

SEQ ID NO: 198722 - DNA, 13 bp, Artificial Sequence
  Oligonucleotide for detection of SNP TSC0048901
ccatattttcatt

SEQ ID NO: 198723 - DNA, 13 bp, Artificial Sequence
  Oligonucleotide for detection of SNP TSC0048903
atttatggatgtt

SEQ ID NO: 198724 - DNA, 13 bp, Artificial Sequence
  Oligonucleotide for detection of SNP TSC0048903
aacatccataaat

SEQ ID NO: 198725 - DNA, 13 bp, Artificial Sequence
  Oligonucleotide for detection of SNP TSC0048903
atttacggatgtt

SEQ ID NO: 198726 - DNA, 13 bp, Artificial Sequence
  Oligonucleotide for detection of SNP TSC0048903
aacatccgtaaat

SEQ ID NO: 198727 - DNA, 13 bp, Artificial Sequence
  Oligonucleotide for detection of SNP TSC0048903
aatatttgtggat

SEQ ID NO: 198728 - DNA, 13 bp, Artificial Sequence
  Oligonucleotide for detection of SNP TSC0048903
atccacaaatatt

SEQ ID NO: 198729 - DNA, 13 bp, Artificial Sequence
  Oligonucleotide for detection of SNP TSC0048903
aatattcgtggat

SEQ ID NO: 198730 - DNA, 13 bp, Artificial Sequence
  Oligonucleotide for detection of SNP TSC0048903
atccacgaatatt

SEQ ID NO: 198731 - DNA, 13 bp, Artificial Sequence
  Oligonucleotide for detection of SNP TSC0048904
agtatgggtttag

SEQ ID NO: 198732 - DNA, 13 bp, Artificial Sequence
  Oligonucleotide for detection of SNP TSC0048904
ctaaacccatact

SEQ ID NO: 198733 - DNA, 13 bp, Artificial Sequence
  Oligonucleotide for detection of SNP TSC0048904
agtatgagtttag

SEQ ID NO: 198734 - DNA, 13 bp, Artificial Sequence
  Oligonucleotide for detection of SNP TSC0048904
ctaaactcatact

SEQ ID NO: 198735 - DNA, 13 bp, Artificial Sequence
  Oligonucleotide for detection of SNP TSC0048905
agtttaaagtagg

SEQ ID NO: 198736 - DNA, 13 bp, Artificial Sequence
  Oligonucleotide for detection of SNP TSC0048905
cctactttaaact

SEQ ID NO: 198737 - DNA, 13 bp, Artificial Sequence
  Oligonucleotide for detection of SNP TSC0048905
agtttatagtagg

SEQ ID NO: 198738 - DNA, 13 bp, Artificial Sequence
  Oligonucleotide for detection of SNP TSC0048905
cctactataaact

SEQ ID NO: 198739 - DNA, 13 bp, Artificial Sequence
  Oligonucleotide for detection of SNP TSC0048905
tttgttttgaatt

SEQ ID NO: 198740 - DNA, 13 bp, Artificial Sequence
  Oligonucleotide for detection of SNP TSC0048905
aattcaaaacaaa

SEQ ID NO: 198741 - DNA, 13 bp, Artificial Sequence
  Oligonucleotide for detection of SNP TSC0048905
tttgttatgaatt

SEQ ID NO: 198742 - DNA, 13 bp, Artificial Sequence
  Oligonucleotide for detection of SNP TSC0048905
aattcataacaaa

SEQ ID NO: 198743 - DNA, 13 bp, Artificial Sequence
  Oligonucleotide for detection of SNP TSC0048906
ttagaatggttat

SEQ ID NO: 198744 - DNA, 13 bp, Artificial Sequence
  Oligonucleotide for detection of SNP TSC0048906
ataaccattctaa

SEQ ID NO: 198745 - DNA, 13 bp, Artificial Sequence
  Oligonucleotide for detection of SNP TSC0048906
ttagaacggttat

SEQ ID NO: 198746 - DNA, 13 bp, Artificial Sequence
  Oligonucleotide for detection of SNP TSC0048906
ataaccgttctaa

SEQ ID NO: 198747 - DNA, 13 bp, Artificial Sequence
  Oligonucleotide for detection of SNP TSC0048906
atagttgttttga

SEQ ID NO: 198748 - DNA, 13 bp, Artificial Sequence
  Oligonucleotide for detection of SNP TSC0048906
tcaaaacaactat

SEQ ID NO: 198749 - DNA, 13 bp, Artificial Sequence
  Oligonucleotide for detection of SNP TSC0048906
atagttattttga

SEQ ID NO: 198750 - DNA, 13 bp, Artificial Sequence
  Oligonucleotide for detection of SNP TSC0048906
tcaaaataactat

SEQ ID NO: 198751 - DNA, 13 bp, Artificial Sequence
  Oligonucleotide for detection of SNP TSC0048906
atagtcgttttga

SEQ ID NO: 198752 - DNA, 13 bp, Artificial Sequence
  Oligonucleotide for detection of SNP TSC0048906
tcaaaacgactat

SEQ ID NO: 198753 - DNA, 13 bp, Artificial Sequence
  Oligonucleotide for detection of SNP TSC0007127
aattttatgatay

SEQ ID NO: 198754 - DNA, 13 bp, Artificial Sequence
  Oligonucleotide for detection of SNP TSC0007127
rtatcataaaatt

SEQ ID NO: 198755 - DNA, 13 bp, Artificial Sequence
  Oligonucleotide for detection of SNP TSC0007127
aattttgtgatay

SEQ ID NO: 198756 - DNA, 13 bp, Artificial Sequence
  Oligonucleotide for detection of SNP TSC0007127
rtatcacaaaatt

SEQ ID NO: 198757 - DNA, 13 bp, Artificial Sequence
  Oligonucleotide for detection of SNP TSC0007127
aatttcgtgatay

SEQ ID NO: 198758 - DNA, 13 bp, Artificial Sequence
  Oligonucleotide for detection of SNP TSC0007127
rtatcacgaaatt

SEQ ID NO: 198759 - DNA, 13 bp, Artificial Sequence
  Oligonucleotide for detection of SNP TSC0007127
gtgttatggaatt

SEQ ID NO: 198760 - DNA, 13 bp, Artificial Sequence
  Oligonucleotide for detection of SNP TSC0007127
aattccataacac

SEQ ID NO: 198761 - DNA, 13 bp, Artificial Sequence
  Oligonucleotide for detection of SNP TSC0007127
gtgttacggaatt

SEQ ID NO: 198762 - DNA, 13 bp, Artificial Sequence
  Oligonucleotide for detection of SNP TSC0007127
aattccgtaacac

SEQ ID NO: 198763 - DNA, 13 bp, Artificial Sequence
  Oligonucleotide for detection of SNP TSC0048911
ttgaggtgggaaa

SEQ ID NO: 198764 - DNA, 13 bp, Artificial Sequence
  Oligonucleotide for detection of SNP TSC0048911
tttcccacctcaa

SEQ ID NO: 198765 - DNA, 13 bp, Artificial Sequence
  Oligonucleotide for detection of SNP TSC0048911
ttgaggggggaaa

SEQ ID NO: 198766 - DNA, 13 bp, Artificial Sequence
  Oligonucleotide for detection of SNP TSC0048911
tttcccccctcaa

SEQ ID NO: 198767 - DNA, 13 bp, Artificial Sequence
  Oligonucleotide for detection of SNP TSC0005781
gaggtgagtttta

SEQ ID NO: 198768 - DNA, 13 bp, Artificial Sequence
  Oligonucleotide for detection of SNP TSC0005781
taaaactcacctc

SEQ ID NO: 198769 - DNA, 13 bp, Artificial Sequence
  Oligonucleotide for detection of SNP TSC0005781
gaggtgggtttta

SEQ ID NO: 198770 - DNA, 13 bp, Artificial Sequence
  Oligonucleotide for detection of SNP TSC0005781
taaaacccacctc

SEQ ID NO: 198771 - DNA, 13 bp, Artificial Sequence
  Oligonucleotide for detection of SNP TSC0005782
ttatagatataty

SEQ ID NO: 198772 - DNA, 13 bp, Artificial Sequence
  Oligonucleotide for detection of SNP TSC0005782
ratatatctataa

SEQ ID NO: 198773 - DNA, 13 bp, Artificial Sequence
  Oligonucleotide for detection of SNP TSC0005782
ttataggtataty

SEQ ID NO: 198774 - DNA, 13 bp, Artificial Sequence
  Oligonucleotide for detection of SNP TSC0005782
ratatacctataa

SEQ ID NO: 198775 - DNA, 13 bp, Artificial Sequence
  Oligonucleotide for detection of SNP TSC0048916
gttaagtgagata

SEQ ID NO: 198776 - DNA, 13 bp, Artificial Sequence
  Oligonucleotide for detection of SNP TSC0048916
tatctcacttaac

SEQ ID NO: 198777 - DNA, 13 bp, Artificial Sequence
  Oligonucleotide for detection of SNP TSC0048916
gttaagcgagata

SEQ ID NO: 198778 - DNA, 13 bp, Artificial Sequence
  Oligonucleotide for detection of SNP TSC0048916
tatctcgcttaac

SEQ ID NO: 198779 - DNA, 13 bp, Artificial Sequence
  Oligonucleotide for detection of SNP TSC0048916
tgttttatttggy

SEQ ID NO: 198780 - DNA, 13 bp, Artificial Sequence
  Oligonucleotide for detection of SNP TSC0048916
rccaaataaaaca

SEQ ID NO: 198781 - DNA, 13 bp, Artificial Sequence
  Oligonucleotide for detection of SNP TSC0048916
tgtttcgtttggy

SEQ ID NO: 198782 - DNA, 13 bp, Artificial Sequence
  Oligonucleotide for detection of SNP TSC0048916
rccaaacgaaaca

SEQ ID NO: 198783 - DNA, 13 bp, Artificial Sequence
  Oligonucleotide for detection of SNP TSC0048917
ataaatatatatt

SEQ ID NO: 198784 - DNA, 13 bp, Artificial Sequence
  Oligonucleotide for detection of SNP TSC0048917
aatatatatttat

SEQ ID NO: 198785 - DNA, 13 bp, Artificial Sequence
  Oligonucleotide for detection of SNP TSC0048917
ataaatgtatatt

SEQ ID NO: 198786 - DNA, 13 bp, Artificial Sequence
  Oligonucleotide for detection of SNP TSC0048917
aatatacatttat

SEQ ID NO: 198787 - DNA, 13 bp, Artificial Sequence
  Oligonucleotide for detection of SNP TSC0048917
ataaacgtatatt

SEQ ID NO: 198788 - DNA, 13 bp, Artificial Sequence
  Oligonucleotide for detection of SNP TSC0048917
aatatacgtttat

SEQ ID NO: 198789 - DNA, 13 bp, Artificial Sequence
  Oligonucleotide for detection of SNP TSC0048917
aatatatgtttgt

SEQ ID NO: 198790 - DNA, 13 bp, Artificial Sequence
  Oligonucleotide for detection of SNP TSC0048917
acaaacatatatt

SEQ ID NO: 198791 - DNA, 13 bp, Artificial Sequence
  Oligonucleotide for detection of SNP TSC0048917
aatatacgtttgt

SEQ ID NO: 198792 - DNA, 13 bp, Artificial Sequence
  Oligonucleotide for detection of SNP TSC0048917
acaaacgtatatt

SEQ ID NO: 198793 - DNA, 13 bp, Artificial Sequence
  Oligonucleotide for detection of SNP TSC0048918
tatgtttatagtt

SEQ ID NO: 198794 - DNA, 13 bp, Artificial Sequence
  Oligonucleotide for detection of SNP TSC0048918
aactataaacata

SEQ ID NO: 198795 - DNA, 13 bp, Artificial Sequence
  Oligonucleotide for detection of SNP TSC0048918
tatgttgatagtt

SEQ ID NO: 198796 - DNA, 13 bp, Artificial Sequence
  Oligonucleotide for detection of SNP TSC0048918
aactatcaacata

SEQ ID NO: 198797 - DNA, 13 bp, Artificial Sequence
  Oligonucleotide for detection of SNP TSC0048918
agttgtgaatatg

SEQ ID NO: 198798 - DNA, 13 bp, Artificial Sequence
  Oligonucleotide for detection of SNP TSC0048918
catattcacaact

SEQ ID NO: 198799 - DNA, 13 bp, Artificial Sequence
  Oligonucleotide for detection of SNP TSC0048918
agttgttaatatg

SEQ ID NO: 198800 - DNA, 13 bp, Artificial Sequence
  Oligonucleotide for detection of SNP TSC0048918
catattaacaact

SEQ ID NO: 198801 - DNA, 13 bp, Artificial Sequence
  Oligonucleotide for detection of SNP TSC0048919
aggggtggagagt

SEQ ID NO: 198802 - DNA, 13 bp, Artificial Sequence
  Oligonucleotide for detection of SNP TSC0048919
actctccacccct

SEQ ID NO: 198803 - DNA, 13 bp, Artificial Sequence
  Oligonucleotide for detection of SNP TSC0048919
aggggtagagagt

SEQ ID NO: 198804 - DNA, 13 bp, Artificial Sequence
  Oligonucleotide for detection of SNP TSC0048919
actctctacccct

SEQ ID NO: 198805 - DNA, 13 bp, Artificial Sequence
  Oligonucleotide for detection of SNP TSC0048919
aggggcggagagt

SEQ ID NO: 198806 - DNA, 13 bp, Artificial Sequence
  Oligonucleotide for detection of SNP TSC0048919
actctccgcccct

SEQ ID NO: 198807 - DNA, 13 bp, Artificial Sequence
  Oligonucleotide for detection of SNP TSC0001249
atatagtgatgty

SEQ ID NO: 198808 - DNA, 13 bp, Artificial Sequence
  Oligonucleotide for detection of SNP TSC0001249
racatcactatat

SEQ ID NO: 198809 - DNA, 13 bp, Artificial Sequence
  Oligonucleotide for detection of SNP TSC0001249
atatagcgatgty

SEQ ID NO: 198810 - DNA, 13 bp, Artificial Sequence
  Oligonucleotide for detection of SNP TSC0001249
racatcgctatat

SEQ ID NO: 198811 - DNA, 13 bp, Artificial Sequence
  Oligonucleotide for detection of SNP TSC0001249
gatattgttgtgt

SEQ ID NO: 198812 - DNA, 13 bp, Artificial Sequence
  Oligonucleotide for detection of SNP TSC0001249
acacaacaatatc

SEQ ID NO: 198813 - DNA, 13 bp, Artificial Sequence
  Oligonucleotide for detection of SNP TSC0001249
gatattattgtgt

SEQ ID NO: 198814 - DNA, 13 bp, Artificial Sequence
  Oligonucleotide for detection of SNP TSC0001249
acacaataatatc

SEQ ID NO: 198815 - DNA, 13 bp, Artificial Sequence
  Oligonucleotide for detection of SNP TSC0001249
gatatcgttgtgt

SEQ ID NO: 198816 - DNA, 13 bp, Artificial Sequence
  Oligonucleotide for detection of SNP TSC0001249
acacaacgatatc

SEQ ID NO: 198817 - DNA, 13 bp, Artificial Sequence
  Oligonucleotide for detection of SNP TSC0048920
tagttaaaaagaa

SEQ ID NO: 198818 - DNA, 13 bp, Artificial Sequence
  Oligonucleotide for detection of SNP TSC0048920
ttctttttaacta

SEQ ID NO: 198819 - DNA, 13 bp, Artificial Sequence
  Oligonucleotide for detection of SNP TSC0048920
tagttataaagaa

SEQ ID NO: 198820 - DNA, 13 bp, Artificial Sequence
  Oligonucleotide for detection of SNP TSC0048920
ttctttataacta

SEQ ID NO: 198821 - DNA, 13 bp, Artificial Sequence
  Oligonucleotide for detection of SNP TSC0048921
ttatttaaggtta

SEQ ID NO: 198822 - DNA, 13 bp, Artificial Sequence
  Oligonucleotide for detection of SNP TSC0048921
taaccttaaataa

SEQ ID NO: 198823 - DNA, 13 bp, Artificial Sequence
  Oligonucleotide for detection of SNP TSC0048922
tgtaacggtgtga

SEQ ID NO: 198824 - DNA, 13 bp, Artificial Sequence
  Oligonucleotide for detection of SNP TSC0048922
tcacaccgttaca

SEQ ID NO: 198825 - DNA, 13 bp, Artificial Sequence
  Oligonucleotide for detection of SNP TSC0005633
gttagggtgagtt

SEQ ID NO: 198826 - DNA, 13 bp, Artificial Sequence
  Oligonucleotide for detection of SNP TSC0005633
aactcaccctaac

SEQ ID NO: 198827 - DNA, 13 bp, Artificial Sequence
  Oligonucleotide for detection of SNP TSC0005633
gttaggatgagtt

SEQ ID NO: 198828 - DNA, 13 bp, Artificial Sequence
  Oligonucleotide for detection of SNP TSC0005633
aactcatcctaac

SEQ ID NO: 198829 - DNA, 13 bp, Artificial Sequence
  Oligonucleotide for detection of SNP TSC0048928
ggagtaaagtggy

SEQ ID NO: 198830 - DNA, 13 bp, Artificial Sequence
  Oligonucleotide for detection of SNP TSC0048928
rccactttactcc

SEQ ID NO: 198831 - DNA, 13 bp, Artificial Sequence
  Oligonucleotide for detection of SNP TSC0048928
ggagtatagtggy

SEQ ID NO: 198832 - DNA, 13 bp, Artificial Sequence
  Oligonucleotide for detection of SNP TSC0048928
rccactatactcc

SEQ ID NO: 198833 - DNA, 13 bp, Artificial Sequence
  Oligonucleotide for detection of SNP TSC0048928
gttattttattty

SEQ ID NO: 198834 - DNA, 13 bp, Artificial Sequence
  Oligonucleotide for detection of SNP TSC0048928
raaataaaataac

SEQ ID NO: 198835 - DNA, 13 bp, Artificial Sequence
  Oligonucleotide for detection of SNP TSC0048928
gttattgtattty

SEQ ID NO: 198836 - DNA, 13 bp, Artificial Sequence
  Oligonucleotide for detection of SNP TSC0048928
raaatacaataac

SEQ ID NO: 198837 - DNA, 13 bp, Artificial Sequence
  Oligonucleotide for detection of SNP TSC0048931
aaggggtagtagg

SEQ ID NO: 198838 - DNA, 13 bp, Artificial Sequence
  Oligonucleotide for detection of SNP TSC0048931
cctactacccctt

SEQ ID NO: 198839 - DNA, 13 bp, Artificial Sequence
  Oligonucleotide for detection of SNP TSC0048931
aagggggagtagg

SEQ ID NO: 198840 - DNA, 13 bp, Artificial Sequence
  Oligonucleotide for detection of SNP TSC0048931
cctactccccctt

SEQ ID NO: 198841 - DNA, 13 bp, Artificial Sequence
  Oligonucleotide for detection of SNP TSC0048932
tagttatggaaga

SEQ ID NO: 198842 - DNA, 13 bp, Artificial Sequence
  Oligonucleotide for detection of SNP TSC0048932
tcttccataacta

SEQ ID NO: 198843 - DNA, 13 bp, Artificial Sequence
  Oligonucleotide for detection of SNP TSC0048932
tagttacggaaga

SEQ ID NO: 198844 - DNA, 13 bp, Artificial Sequence
  Oligonucleotide for detection of SNP TSC0048932
tcttccgtaacta

SEQ ID NO: 198845 - DNA, 13 bp, Artificial Sequence
  Oligonucleotide for detection of SNP TSC0048937
gatagtaaaagtt

SEQ ID NO: 198846 - DNA, 13 bp, Artificial Sequence
  Oligonucleotide for detection of SNP TSC0048937
aacttttactatc

SEQ ID NO: 198847 - DNA, 13 bp, Artificial Sequence
  Oligonucleotide for detection of SNP TSC0048937
gatagttaaagtt

SEQ ID NO: 198848 - DNA, 13 bp, Artificial Sequence
  Oligonucleotide for detection of SNP TSC0048937
aactttaactatc

SEQ ID NO: 198849 - DNA, 13 bp, Artificial Sequence
  Oligonucleotide for detection of SNP TSC0048937
aatttttgttgty

SEQ ID NO: 198850 - DNA, 13 bp, Artificial Sequence
  Oligonucleotide for detection of SNP TSC0048937
racaacaaaaatt

SEQ ID NO: 198851 - DNA, 13 bp, Artificial Sequence
  Oligonucleotide for detection of SNP TSC0048937
aattttggttgty

SEQ ID NO: 198852 - DNA, 13 bp, Artificial Sequence
  Oligonucleotide for detection of SNP TSC0048937
racaaccaaaatt

SEQ ID NO: 198853 - DNA, 13 bp, Artificial Sequence
  Oligonucleotide for detection of SNP TSC0048938
tttggagatgtat

SEQ ID NO: 198854 - DNA, 13 bp, Artificial Sequence
  Oligonucleotide for detection of SNP TSC0048938
atacatctccaaa

SEQ ID NO: 198855 - DNA, 13 bp, Artificial Sequence
  Oligonucleotide for detection of SNP TSC0048938
tttggaaatgtat

SEQ ID NO: 198856 - DNA, 13 bp, Artificial Sequence
  Oligonucleotide for detection of SNP TSC0048938
atacatttccaaa

SEQ ID NO: 198857 - DNA, 13 bp, Artificial Sequence
  Oligonucleotide for detection of SNP TSC0048942
aaatgagataaaa

SEQ ID NO: 198858 - DNA, 13 bp, Artificial Sequence
  Oligonucleotide for detection of SNP TSC0048942
ttttatctcattt

SEQ ID NO: 198859 - DNA, 13 bp, Artificial Sequence
  Oligonucleotide for detection of SNP TSC0048943
aatggtaatgttg

SEQ ID NO: 198860 - DNA, 13 bp, Artificial Sequence
  Oligonucleotide for detection of SNP TSC0048943
caacattaccatt

SEQ ID NO: 198861 - DNA, 13 bp, Artificial Sequence
  Oligonucleotide for detection of SNP TSC0048943
aatggtgatgttg

SEQ ID NO: 198862 - DNA, 13 bp, Artificial Sequence
  Oligonucleotide for detection of SNP TSC0048943
caacatcaccatt

SEQ ID NO: 198863 - DNA, 13 bp, Artificial Sequence
  Oligonucleotide for detection of SNP TSC0048944
ttagttaaatgty

SEQ ID NO: 198864 - DNA, 13 bp, Artificial Sequence
  Oligonucleotide for detection of SNP TSC0048944
racatttaactaa

SEQ ID NO: 198865 - DNA, 13 bp, Artificial Sequence
  Oligonucleotide for detection of SNP TSC0048944
ttagttgaatgty

SEQ ID NO: 198866 - DNA, 13 bp, Artificial Sequence
  Oligonucleotide for detection of SNP TSC0048944
racattcaactaa

SEQ ID NO: 198867 - DNA, 13 bp, Artificial Sequence
  Oligonucleotide for detection of SNP TSC0048945
tagttaggaagta

SEQ ID NO: 198868 - DNA, 13 bp, Artificial Sequence
  Oligonucleotide for detection of SNP TSC0048945
tacttcctaacta

SEQ ID NO: 198869 - DNA, 13 bp, Artificial Sequence
  Oligonucleotide for detection of SNP TSC0048945
tagttaagaagta

SEQ ID NO: 198870 - DNA, 13 bp, Artificial Sequence
  Oligonucleotide for detection of SNP TSC0048945
tacttcttaacta

SEQ ID NO: 198871 - DNA, 13 bp, Artificial Sequence
  Oligonucleotide for detection of SNP TSC0048949
tttgtttagtttt

SEQ ID NO: 198872 - DNA, 13 bp, Artificial Sequence
  Oligonucleotide for detection of SNP TSC0048949
aaaactaaacaaa

SEQ ID NO: 198873 - DNA, 13 bp, Artificial Sequence
  Oligonucleotide for detection of SNP TSC0048949
agaattaagtaag

SEQ ID NO: 198874 - DNA, 13 bp, Artificial Sequence
  Oligonucleotide for detection of SNP TSC0048949
cttacttaattct

SEQ ID NO: 198875 - DNA, 13 bp, Artificial Sequence
  Oligonucleotide for detection of SNP TSC0048949
agaatttagtaag

SEQ ID NO: 198876 - DNA, 13 bp, Artificial Sequence
  Oligonucleotide for detection of SNP TSC0048949
cttactaaattct

SEQ ID NO: 198877 - DNA, 13 bp, Artificial Sequence
  Oligonucleotide for detection of SNP TSC0048950
ttatgtattaagt

SEQ ID NO: 198878 - DNA, 13 bp, Artificial Sequence
  Oligonucleotide for detection of SNP TSC0048950
acttaatacataa

SEQ ID NO: 198879 - DNA, 13 bp, Artificial Sequence
  Oligonucleotide for detection of SNP TSC0048950
ttatgttttaagt

SEQ ID NO: 198880 - DNA, 13 bp, Artificial Sequence
  Oligonucleotide for detection of SNP TSC0048950
acttaaaacataa

SEQ ID NO: 198881 - DNA, 13 bp, Artificial Sequence
  Oligonucleotide for detection of SNP TSC0048950
ttacgtattaagt

SEQ ID NO: 198882 - DNA, 13 bp, Artificial Sequence
  Oligonucleotide for detection of SNP TSC0048950
acttaatacgtaa

SEQ ID NO: 198883 - DNA, 13 bp, Artificial Sequence
  Oligonucleotide for detection of SNP TSC0048950
ttacgttttaagt

SEQ ID NO: 198884 - DNA, 13 bp, Artificial Sequence
  Oligonucleotide for detection of SNP TSC0048950
acttaaaacgtaa

SEQ ID NO: 198885 - DNA, 13 bp, Artificial Sequence
  Oligonucleotide for detection of SNP TSC0048950
atttaatatgtaa

SEQ ID NO: 198886 - DNA, 13 bp, Artificial Sequence
  Oligonucleotide for detection of SNP TSC0048950
ttacatattaaat

SEQ ID NO: 198887 - DNA, 13 bp, Artificial Sequence
  Oligonucleotide for detection of SNP TSC0048950
atttaagatgtaa

SEQ ID NO: 198888 - DNA, 13 bp, Artificial Sequence
  Oligonucleotide for detection of SNP TSC0048950
ttacatcttaaat

SEQ ID NO: 198889 - DNA, 13 bp, Artificial Sequence
  Oligonucleotide for detection of SNP TSC0048950
atttaatacgtaa

SEQ ID NO: 198890 - DNA, 13 bp, Artificial Sequence
  Oligonucleotide for detection of SNP TSC0048950
ttacgtattaaat

SEQ ID NO: 198891 - DNA, 13 bp, Artificial Sequence
  Oligonucleotide for detection of SNP TSC0048950
atttaagacgtaa

SEQ ID NO: 198892 - DNA, 13 bp, Artificial Sequence
  Oligonucleotide for detection of SNP TSC0048950
ttacgtcttaaat

SEQ ID NO: 198893 - DNA, 13 bp, Artificial Sequence
  Oligonucleotide for detection of SNP TSC0048953
tatgttttatttt

SEQ ID NO: 198894 - DNA, 13 bp, Artificial Sequence
  Oligonucleotide for detection of SNP TSC0048953
aaaataaaacata

SEQ ID NO: 198895 - DNA, 13 bp, Artificial Sequence
  Oligonucleotide for detection of SNP TSC0048953
tatgttgtatttt

SEQ ID NO: 198896 - DNA, 13 bp, Artificial Sequence
  Oligonucleotide for detection of SNP TSC0048953
aaaatacaacata

SEQ ID NO: 198897 - DNA, 13 bp, Artificial Sequence
  Oligonucleotide for detection of SNP TSC0048953
aaaataaaatatg

SEQ ID NO: 198898 - DNA, 13 bp, Artificial Sequence
  Oligonucleotide for detection of SNP TSC0048953
catattttatttt

SEQ ID NO: 198899 - DNA, 13 bp, Artificial Sequence
  Oligonucleotide for detection of SNP TSC0048953
aaaatataatatg

SEQ ID NO: 198900 - DNA, 13 bp, Artificial Sequence
  Oligonucleotide for detection of SNP TSC0048953
catattatatttt

SEQ ID NO: 198901 - DNA, 13 bp, Artificial Sequence
  Oligonucleotide for detection of SNP TSC0048954
tgtgtaagtgtaa

SEQ ID NO: 198902 - DNA, 13 bp, Artificial Sequence
  Oligonucleotide for detection of SNP TSC0048954
ttacacttacaca

SEQ ID NO: 198903 - DNA, 13 bp, Artificial Sequence
  Oligonucleotide for detection of SNP TSC0048954
tgtgtatgtgtaa

SEQ ID NO: 198904 - DNA, 13 bp, Artificial Sequence
  Oligonucleotide for detection of SNP TSC0048954
ttacacatacaca

SEQ ID NO: 198905 - DNA, 13 bp, Artificial Sequence
  Oligonucleotide for detection of SNP TSC0048955
gatttgatagatt

SEQ ID NO: 198906 - DNA, 13 bp, Artificial Sequence
  Oligonucleotide for detection of SNP TSC0048955
aatctatcaaatc

SEQ ID NO: 198907 - DNA, 13 bp, Artificial Sequence
  Oligonucleotide for detection of SNP TSC0048955
gatttggtagatt

SEQ ID NO: 198908 - DNA, 13 bp, Artificial Sequence
  Oligonucleotide for detection of SNP TSC0048955
aatctaccaaatc

SEQ ID NO: 198909 - DNA, 13 bp, Artificial Sequence
  Oligonucleotide for detection of SNP TSC0048960
ttttttgaaaaag

SEQ ID NO: 198910 - DNA, 13 bp, Artificial Sequence
  Oligonucleotide for detection of SNP TSC0048960
ctttttcaaaaaa

SEQ ID NO: 198911 - DNA, 13 bp, Artificial Sequence
  Oligonucleotide for detection of SNP TSC0048961
aatttatttttag

SEQ ID NO: 198912 - DNA, 13 bp, Artificial Sequence
  Oligonucleotide for detection of SNP TSC0048961
ctaaaaataaatt

SEQ ID NO: 198913 - DNA, 13 bp, Artificial Sequence
  Oligonucleotide for detection of SNP TSC0048961
ttagaagtaggtt

SEQ ID NO: 198914 - DNA, 13 bp, Artificial Sequence
  Oligonucleotide for detection of SNP TSC0048961
aacctacttctaa

SEQ ID NO: 198915 - DNA, 13 bp, Artificial Sequence
  Oligonucleotide for detection of SNP TSC0048961
ttagaattaggtt

SEQ ID NO: 198916 - DNA, 13 bp, Artificial Sequence
  Oligonucleotide for detection of SNP TSC0048961
aacctaattctaa

SEQ ID NO: 198917 - DNA, 13 bp, Artificial Sequence
  Oligonucleotide for detection of SNP TSC0048963
ggtgaagttttgg

SEQ ID NO: 198918 - DNA, 13 bp, Artificial Sequence
  Oligonucleotide for detection of SNP TSC0048963
ccaaaacttcacc

SEQ ID NO: 198919 - DNA, 13 bp, Artificial Sequence
  Oligonucleotide for detection of SNP TSC0048963
ggtgaaattttgg

SEQ ID NO: 198920 - DNA, 13 bp, Artificial Sequence
  Oligonucleotide for detection of SNP TSC0048963
ccaaaatttcacc

SEQ ID NO: 198921 - DNA, 13 bp, Artificial Sequence
  Oligonucleotide for detection of SNP TSC0048966
aatttaaatgtty

SEQ ID NO: 198922 - DNA, 13 bp, Artificial Sequence
  Oligonucleotide for detection of SNP TSC0048966
raacatttaaatt

SEQ ID NO: 198923 - DNA, 13 bp, Artificial Sequence
  Oligonucleotide for detection of SNP TSC0048966
aatttatatgtty

SEQ ID NO: 198924 - DNA, 13 bp, Artificial Sequence
  Oligonucleotide for detection of SNP TSC0048966
raacatataaatt

SEQ ID NO: 198925 - DNA, 13 bp, Artificial Sequence
  Oligonucleotide for detection of SNP TSC0048966
ggatatttgagtt

SEQ ID NO: 198926 - DNA, 13 bp, Artificial Sequence
  Oligonucleotide for detection of SNP TSC0048966
aactcaaatatcc

SEQ ID NO: 198927 - DNA, 13 bp, Artificial Sequence
  Oligonucleotide for detection of SNP TSC0048966
ggatatatgagtt

SEQ ID NO: 198928 - DNA, 13 bp, Artificial Sequence
  Oligonucleotide for detection of SNP TSC0048966
aactcatatatcc

SEQ ID NO: 198929 - DNA, 13 bp, Artificial Sequence
  Oligonucleotide for detection of SNP TSC0048967
tttagtgttagaa

SEQ ID NO: 198930 - DNA, 13 bp, Artificial Sequence
  Oligonucleotide for detection of SNP TSC0048967
ttctaacactaaa

SEQ ID NO: 198931 - DNA, 13 bp, Artificial Sequence
  Oligonucleotide for detection of SNP TSC0048967
tttagtattagaa

SEQ ID NO: 198932 - DNA, 13 bp, Artificial Sequence
  Oligonucleotide for detection of SNP TSC0048967
ttctaatactaaa

SEQ ID NO: 198933 - DNA, 13 bp, Artificial Sequence
  Oligonucleotide for detection of SNP TSC0048971
gagtaatttgggt

SEQ ID NO: 198934 - DNA, 13 bp, Artificial Sequence
  Oligonucleotide for detection of SNP TSC0048971
acccaaattactc

SEQ ID NO: 198935 - DNA, 13 bp, Artificial Sequence
  Oligonucleotide for detection of SNP TSC0048971
gagtaagttgggt

SEQ ID NO: 198936 - DNA, 13 bp, Artificial Sequence
  Oligonucleotide for detection of SNP TSC0048971
acccaacttactc

SEQ ID NO: 198937 - DNA, 13 bp, Artificial Sequence
  Oligonucleotide for detection of SNP TSC0048971
atttaagttatty

SEQ ID NO: 198938 - DNA, 13 bp, Artificial Sequence
  Oligonucleotide for detection of SNP TSC0048971
raataacttaaat

SEQ ID NO: 198939 - DNA, 13 bp, Artificial Sequence
  Oligonucleotide for detection of SNP TSC0048971
atttaatttatty

SEQ ID NO: 198940 - DNA, 13 bp, Artificial Sequence
  Oligonucleotide for detection of SNP TSC0048971
raataaattaaat

SEQ ID NO: 198941 - DNA, 13 bp, Artificial Sequence
  Oligonucleotide for detection of SNP TSC0048972
gttttattattgt

SEQ ID NO: 198942 - DNA, 13 bp, Artificial Sequence
  Oligonucleotide for detection of SNP TSC0048972
acaataataaaac

SEQ ID NO: 198943 - DNA, 13 bp, Artificial Sequence
  Oligonucleotide for detection of SNP TSC0048972
atagtattgaagy

SEQ ID NO: 198944 - DNA, 13 bp, Artificial Sequence
  Oligonucleotide for detection of SNP TSC0048972
rcttcaatactat

SEQ ID NO: 198945 - DNA, 13 bp, Artificial Sequence
  Oligonucleotide for detection of SNP TSC0048972
atagtaatgaagy

SEQ ID NO: 198946 - DNA, 13 bp, Artificial Sequence
  Oligonucleotide for detection of SNP TSC0048972
rcttcattactat

SEQ ID NO: 198947 - DNA, 13 bp, Artificial Sequence
  Oligonucleotide for detection of SNP TSC0048978
ttaattattatta

SEQ ID NO: 198948 - DNA, 13 bp, Artificial Sequence
  Oligonucleotide for detection of SNP TSC0048978
taataataattaa

SEQ ID NO: 198949 - DNA, 13 bp, Artificial Sequence
  Oligonucleotide for detection of SNP TSC0001175
gtatatatattty

SEQ ID NO: 198950 - DNA, 13 bp, Artificial Sequence
  Oligonucleotide for detection of SNP TSC0001175
raaatatatatac

SEQ ID NO: 198951 - DNA, 13 bp, Artificial Sequence
  Oligonucleotide for detection of SNP TSC0001175
gtatatgtattty

SEQ ID NO: 198952 - DNA, 13 bp, Artificial Sequence
  Oligonucleotide for detection of SNP TSC0001175
raaatacatatac

SEQ ID NO: 198953 - DNA, 13 bp, Artificial Sequence
  Oligonucleotide for detection of SNP TSC0001175
gtatacgtattty

SEQ ID NO: 198954 - DNA, 13 bp, Artificial Sequence
  Oligonucleotide for detection of SNP TSC0001175
raaatacgtatac

SEQ ID NO: 198955 - DNA, 13 bp, Artificial Sequence
  Oligonucleotide for detection of SNP TSC0001175
gaaatatgtgtgy

SEQ ID NO: 198956 - DNA, 13 bp, Artificial Sequence
  Oligonucleotide for detection of SNP TSC0001175
rcacacatatttc

SEQ ID NO: 198957 - DNA, 13 bp, Artificial Sequence
  Oligonucleotide for detection of SNP TSC0001175
gaaatacgtgtgy

SEQ ID NO: 198958 - DNA, 13 bp, Artificial Sequence
  Oligonucleotide for detection of SNP TSC0001175
rcacacgtatttc

SEQ ID NO: 198959 - DNA, 13 bp, Artificial Sequence
  Oligonucleotide for detection of SNP TSC0048980
ttttagattatty

SEQ ID NO: 198960 - DNA, 13 bp, Artificial Sequence
  Oligonucleotide for detection of SNP TSC0048980
raataatctaaaa

SEQ ID NO: 198961 - DNA, 13 bp, Artificial Sequence
  Oligonucleotide for detection of SNP TSC0048980
ttttaggttatty

SEQ ID NO: 198962 - DNA, 13 bp, Artificial Sequence
  Oligonucleotide for detection of SNP TSC0048980
raataacctaaaa

SEQ ID NO: 198963 - DNA, 13 bp, Artificial Sequence
  Oligonucleotide for detection of SNP TSC0048981
tagggtttgtgtg

SEQ ID NO: 198964 - DNA, 13 bp, Artificial Sequence
  Oligonucleotide for detection of SNP TSC0048981
cacacaaacccta

SEQ ID NO: 198965 - DNA, 13 bp, Artificial Sequence
  Oligonucleotide for detection of SNP TSC0048981
tagggtgtgtgtg

SEQ ID NO: 198966 - DNA, 13 bp, Artificial Sequence
  Oligonucleotide for detection of SNP TSC0048981
cacacacacccta

SEQ ID NO: 198967 - DNA, 13 bp, Artificial Sequence
  Oligonucleotide for detection of SNP TSC0048981
tagggttcgtgtg

SEQ ID NO: 198968 - DNA, 13 bp, Artificial Sequence
  Oligonucleotide for detection of SNP TSC0048981
cacacgaacccta

SEQ ID NO: 198969 - DNA, 13 bp, Artificial Sequence
  Oligonucleotide for detection of SNP TSC0048981
tagggtgcgtgtg

SEQ ID NO: 198970 - DNA, 13 bp, Artificial Sequence
  Oligonucleotide for detection of SNP TSC0048981
cacacgcacccta

SEQ ID NO: 198971 - DNA, 13 bp, Artificial Sequence
  Oligonucleotide for detection of SNP TSC0048981
tagggtttgcgtg

SEQ ID NO: 198972 - DNA, 13 bp, Artificial Sequence
  Oligonucleotide for detection of SNP TSC0048981
cacgcaaacccta

SEQ ID NO: 198973 - DNA, 13 bp, Artificial Sequence
  Oligonucleotide for detection of SNP TSC0048981
tagggtgtgcgtg

SEQ ID NO: 198974 - DNA, 13 bp, Artificial Sequence
  Oligonucleotide for detection of SNP TSC0048981
cacgcacacccta

SEQ ID NO: 198975 - DNA, 13 bp, Artificial Sequence
  Oligonucleotide for detection of SNP TSC0048981
tagggtttgtgcg

SEQ ID NO: 198976 - DNA, 13 bp, Artificial Sequence
  Oligonucleotide for detection of SNP TSC0048981
cgcacaaacccta

SEQ ID NO: 198977 - DNA, 13 bp, Artificial Sequence
  Oligonucleotide for detection of SNP TSC0048981
tagggtgtgtgcg

SEQ ID NO: 198978 - DNA, 13 bp, Artificial Sequence
  Oligonucleotide for detection of SNP TSC0048981
cgcacacacccta

SEQ ID NO: 198979 - DNA, 13 bp, Artificial Sequence
  Oligonucleotide for detection of SNP TSC0048981
tagggttcgcgtg

SEQ ID NO: 198980 - DNA, 13 bp, Artificial Sequence
  Oligonucleotide for detection of SNP TSC0048981
cacgcgaacccta

SEQ ID NO: 198981 - DNA, 13 bp, Artificial Sequence
  Oligonucleotide for detection of SNP TSC0048981
tagggtgcgcgtg

SEQ ID NO: 198982 - DNA, 13 bp, Artificial Sequence
  Oligonucleotide for detection of SNP TSC0048981
cacgcgcacccta

SEQ ID NO: 198983 - DNA, 13 bp, Artificial Sequence
  Oligonucleotide for detection of SNP TSC0048981
tagggttcgtgcg

SEQ ID NO: 198984 - DNA, 13 bp, Artificial Sequence
  Oligonucleotide for detection of SNP TSC0048981
cgcacgaacccta

SEQ ID NO: 198985 - DNA, 13 bp, Artificial Sequence
  Oligonucleotide for detection of SNP TSC0048981
tagggtgcgtgcg

SEQ ID NO: 198986 - DNA, 13 bp, Artificial Sequence
  Oligonucleotide for detection of SNP TSC0048981
cgcacgcacccta

SEQ ID NO: 198987 - DNA, 13 bp, Artificial Sequence
  Oligonucleotide for detection of SNP TSC0048981
tagggtttgcgcg

SEQ ID NO: 198988 - DNA, 13 bp, Artificial Sequence
  Oligonucleotide for detection of SNP TSC0048981
cgcgcaaacccta

SEQ ID NO: 198989 - DNA, 13 bp, Artificial Sequence
  Oligonucleotide for detection of SNP TSC0048981
tagggtgtgcgcg

SEQ ID NO: 198990 - DNA, 13 bp, Artificial Sequence
  Oligonucleotide for detection of SNP TSC0048981
cgcgcacacccta

SEQ ID NO: 198991 - DNA, 13 bp, Artificial Sequence
  Oligonucleotide for detection of SNP TSC0048981
tagggttcgcgcg

SEQ ID NO: 198992 - DNA, 13 bp, Artificial Sequence
  Oligonucleotide for detection of SNP TSC0048981
cgcgcgaacccta

SEQ ID NO: 198993 - DNA, 13 bp, Artificial Sequence
  Oligonucleotide for detection of SNP TSC0048981
tagggtgcgcgcg

SEQ ID NO: 198994 - DNA, 13 bp, Artificial Sequence
  Oligonucleotide for detection of SNP TSC0048981
cgcgcgcacccta

SEQ ID NO: 198995 - DNA, 13 bp, Artificial Sequence
  Oligonucleotide for detection of SNP TSC0048981
tgtgtgaattttg

SEQ ID NO: 198996 - DNA, 13 bp, Artificial Sequence
  Oligonucleotide for detection of SNP TSC0048981
caaaattcacaca

SEQ ID NO: 198997 - DNA, 13 bp, Artificial Sequence
  Oligonucleotide for detection of SNP TSC0048981
tgtgtgtattttg

SEQ ID NO: 198998 - DNA, 13 bp, Artificial Sequence
  Oligonucleotide for detection of SNP TSC0048981
caaaatacacaca

SEQ ID NO: 198999 - DNA, 13 bp, Artificial Sequence
  Oligonucleotide for detection of SNP TSC0048981
cgtgtgaattttg

SEQ ID NO: 199000 - DNA, 13 bp, Artificial Sequence
  Oligonucleotide for detection of SNP TSC0048981
caaaattcacacg

SEQ ID NO: 199001 - DNA, 13 bp, Artificial Sequence
  Oligonucleotide for detection of SNP TSC0048981
cgtgtgtattttg

SEQ ID NO: 199002 - DNA, 13 bp, Artificial Sequence
  Oligonucleotide for detection of SNP TSC0048981
caaaatacacacg

SEQ ID NO: 199003 - DNA, 13 bp, Artificial Sequence
  Oligonucleotide for detection of SNP TSC0048981
tgcgtgaattttg

SEQ ID NO: 199004 - DNA, 13 bp, Artificial Sequence
  Oligonucleotide for detection of SNP TSC0048981
caaaattcacgca

SEQ ID NO: 199005 - DNA, 13 bp, Artificial Sequence
  Oligonucleotide for detection of SNP TSC0048981
tgcgtgtattttg

SEQ ID NO: 199006 - DNA, 13 bp, Artificial Sequence
  Oligonucleotide for detection of SNP TSC0048981
caaaatacacgca

SEQ ID NO: 199007 - DNA, 13 bp, Artificial Sequence
  Oligonucleotide for detection of SNP TSC0048981
tgtgcgaattttg

SEQ ID NO: 199008 - DNA, 13 bp, Artificial Sequence
  Oligonucleotide for detection of SNP TSC0048981
caaaattcgcaca

SEQ ID NO: 199009 - DNA, 13 bp, Artificial Sequence
  Oligonucleotide for detection of SNP TSC0048981
tgtgcgtattttg

SEQ ID NO: 199010 - DNA, 13 bp, Artificial Sequence
  Oligonucleotide for detection of SNP TSC0048981
caaaatacgcaca

SEQ ID NO: 199011 - DNA, 13 bp, Artificial Sequence
  Oligonucleotide for detection of SNP TSC0048981
cgcgtgaattttg

SEQ ID NO: 199012 - DNA, 13 bp, Artificial Sequence
  Oligonucleotide for detection of SNP TSC0048981
caaaattcacgcg

SEQ ID NO: 199013 - DNA, 13 bp, Artificial Sequence
  Oligonucleotide for detection of SNP TSC0048981
cgcgtgtattttg

SEQ ID NO: 199014 - DNA, 13 bp, Artificial Sequence
  Oligonucleotide for detection of SNP TSC0048981
caaaatacacgcg

SEQ ID NO: 199015 - DNA, 13 bp, Artificial Sequence
  Oligonucleotide for detection of SNP TSC0048981
cgtgcgaattttg

SEQ ID NO: 199016 - DNA, 13 bp, Artificial Sequence
  Oligonucleotide for detection of SNP TSC0048981
caaaattcgcacg

SEQ ID NO: 199017 - DNA, 13 bp, Artificial Sequence
  Oligonucleotide for detection of SNP TSC0048981
cgtgcgtattttg

SEQ ID NO: 199018 - DNA, 13 bp, Artificial Sequence
  Oligonucleotide for detection of SNP TSC0048981
caaaatacgcacg

SEQ ID NO: 199019 - DNA, 13 bp, Artificial Sequence
  Oligonucleotide for detection of SNP TSC0048981
tgcgcgaattttg

SEQ ID NO: 199020 - DNA, 13 bp, Artificial Sequence
  Oligonucleotide for detection of SNP TSC0048981
caaaattcgcgca

SEQ ID NO: 199021 - DNA, 13 bp, Artificial Sequence
  Oligonucleotide for detection of SNP TSC0048981
tgcgcgtattttg

SEQ ID NO: 199022 - DNA, 13 bp, Artificial Sequence
  Oligonucleotide for detection of SNP TSC0048981
caaaatacgcgca

SEQ ID NO: 199023 - DNA, 13 bp, Artificial Sequence
  Oligonucleotide for detection of SNP TSC0048981
cgcgcgaattttg

SEQ ID NO: 199024 - DNA, 13 bp, Artificial Sequence
  Oligonucleotide for detection of SNP TSC0048981
caaaattcgcgcg

SEQ ID NO: 199025 - DNA, 13 bp, Artificial Sequence
  Oligonucleotide for detection of SNP TSC0048981
cgcgcgtattttg

SEQ ID NO: 199026 - DNA, 13 bp, Artificial Sequence
  Oligonucleotide for detection of SNP TSC0048981
caaaatacgcgcg

SEQ ID NO: 199027 - DNA, 13 bp, Artificial Sequence
  Oligonucleotide for detection of SNP TSC0048983
aagagaaaggtat

SEQ ID NO: 199028 - DNA, 13 bp, Artificial Sequence
  Oligonucleotide for detection of SNP TSC0048983
atacctttctctt

SEQ ID NO: 199029 - DNA, 13 bp, Artificial Sequence
  Oligonucleotide for detection of SNP TSC0048983
aagagataggtat

SEQ ID NO: 199030 - DNA, 13 bp, Artificial Sequence
  Oligonucleotide for detection of SNP TSC0048983
atacctatctctt

SEQ ID NO: 199031 - DNA, 13 bp, Artificial Sequence
  Oligonucleotide for detection of SNP TSC0048987
gtattatgagtgy

SEQ ID NO: 199032 - DNA, 13 bp, Artificial Sequence
  Oligonucleotide for detection of SNP TSC0048987
rcactcataatac

SEQ ID NO: 199033 - DNA, 13 bp, Artificial Sequence
  Oligonucleotide for detection of SNP TSC0048987
gtattacgagtgy

SEQ ID NO: 199034 - DNA, 13 bp, Artificial Sequence
  Oligonucleotide for detection of SNP TSC0048987
rcactcgtaatac

SEQ ID NO: 199035 - DNA, 13 bp, Artificial Sequence
  Oligonucleotide for detection of SNP TSC0048987
gtatttgtaatgy

SEQ ID NO: 199036 - DNA, 13 bp, Artificial Sequence
  Oligonucleotide for detection of SNP TSC0048987
rcattacaaatac

SEQ ID NO: 199037 - DNA, 13 bp, Artificial Sequence
  Oligonucleotide for detection of SNP TSC0048987
gtatttataatgy

SEQ ID NO: 199038 - DNA, 13 bp, Artificial Sequence
  Oligonucleotide for detection of SNP TSC0048987
rcattataaatac

SEQ ID NO: 199039 - DNA, 13 bp, Artificial Sequence
  Oligonucleotide for detection of SNP TSC0048987
gtattcgtaatgy

SEQ ID NO: 199040 - DNA, 13 bp, Artificial Sequence
  Oligonucleotide for detection of SNP TSC0048987
rcattacgaatac

SEQ ID NO: 199041 - DNA, 13 bp, Artificial Sequence
  Oligonucleotide for detection of SNP TSC0048988
atatatattaggy

SEQ ID NO: 199042 - DNA, 13 bp, Artificial Sequence
  Oligonucleotide for detection of SNP TSC0048988
rcctaatatatat

SEQ ID NO: 199043 - DNA, 13 bp, Artificial Sequence
  Oligonucleotide for detection of SNP TSC0048988
atatatgttaggy

SEQ ID NO: 199044 - DNA, 13 bp, Artificial Sequence
  Oligonucleotide for detection of SNP TSC0048988
rcctaacatatat

SEQ ID NO: 199045 - DNA, 13 bp, Artificial Sequence
  Oligonucleotide for detection of SNP TSC0048994
taattaatatttg

SEQ ID NO: 199046 - DNA, 13 bp, Artificial Sequence
  Oligonucleotide for detection of SNP TSC0048994
caaatattaatta

SEQ ID NO: 199047 - DNA, 13 bp, Artificial Sequence
  Oligonucleotide for detection of SNP TSC0048994
taattattatttg

SEQ ID NO: 199048 - DNA, 13 bp, Artificial Sequence
  Oligonucleotide for detection of SNP TSC0048994
caaataataatta

SEQ ID NO: 199049 - DNA, 13 bp, Artificial Sequence
  Oligonucleotide for detection of SNP TSC0048994
tagatgttggttg

SEQ ID NO: 199050 - DNA, 13 bp, Artificial Sequence
  Oligonucleotide for detection of SNP TSC0048994
caaccaacatcta

SEQ ID NO: 199051 - DNA, 13 bp, Artificial Sequence
  Oligonucleotide for detection of SNP TSC0048994
tagatgatggttg

SEQ ID NO: 199052 - DNA, 13 bp, Artificial Sequence
  Oligonucleotide for detection of SNP TSC0048994
caaccatcatcta

SEQ ID NO: 199053 - DNA, 13 bp, Artificial Sequence
  Oligonucleotide for detection of SNP TSC0049000
gaattaattaaat

SEQ ID NO: 199054 - DNA, 13 bp, Artificial Sequence
  Oligonucleotide for detection of SNP TSC0049000
atttaattaattc

SEQ ID NO: 199055 - DNA, 13 bp, Artificial Sequence
  Oligonucleotide for detection of SNP TSC0049000
gaattagttaaat

SEQ ID NO: 199056 - DNA, 13 bp, Artificial Sequence
  Oligonucleotide for detection of SNP TSC0049000
atttaactaattc

SEQ ID NO: 199057 - DNA, 13 bp, Artificial Sequence
  Oligonucleotide for detection of SNP TSC0007445
aaagttagtttgg

SEQ ID NO: 199058 - DNA, 13 bp, Artificial Sequence
  Oligonucleotide for detection of SNP TSC0007445
ccaaactaacttt

SEQ ID NO: 199059 - DNA, 13 bp, Artificial Sequence
  Oligonucleotide for detection of SNP TSC0007445
aaagttggtttgg

SEQ ID NO: 199060 - DNA, 13 bp, Artificial Sequence
  Oligonucleotide for detection of SNP TSC0007445
ccaaaccaacttt

SEQ ID NO: 199061 - DNA, 13 bp, Artificial Sequence
  Oligonucleotide for detection of SNP TSC0007445
aaagtcggtttgg

SEQ ID NO: 199062 - DNA, 13 bp, Artificial Sequence
  Oligonucleotide for detection of SNP TSC0007445
ccaaaccgacttt

SEQ ID NO: 199063 - DNA, 13 bp, Artificial Sequence
  Oligonucleotide for detection of SNP TSC0007445
ttaagttggtttt

SEQ ID NO: 199064 - DNA, 13 bp, Artificial Sequence
  Oligonucleotide for detection of SNP TSC0007445
aaaaccaacttaa

SEQ ID NO: 199065 - DNA, 13 bp, Artificial Sequence
  Oligonucleotide for detection of SNP TSC0007445
ttaagtcggtttt

SEQ ID NO: 199066 - DNA, 13 bp, Artificial Sequence
  Oligonucleotide for detection of SNP TSC0007445
aaaaccgacttaa

SEQ ID NO: 199067 - DNA, 13 bp, Artificial Sequence
  Oligonucleotide for detection of SNP TSC0049002
tagagtgggtaga

SEQ ID NO: 199068 - DNA, 13 bp, Artificial Sequence
  Oligonucleotide for detection of SNP TSC0049002
tctacccactcta

SEQ ID NO: 199069 - DNA, 13 bp, Artificial Sequence
  Oligonucleotide for detection of SNP TSC0049002
tagagtaggtaga

SEQ ID NO: 199070 - DNA, 13 bp, Artificial Sequence
  Oligonucleotide for detection of SNP TSC0049002
tctacctactcta

SEQ ID NO: 199071 - DNA, 13 bp, Artificial Sequence
  Oligonucleotide for detection of SNP TSC0049002
tagagcgggtaga

SEQ ID NO: 199072 - DNA, 13 bp, Artificial Sequence
  Oligonucleotide for detection of SNP TSC0049002
tctacccgctcta

SEQ ID NO: 199073 - DNA, 13 bp, Artificial Sequence
  Oligonucleotide for detection of SNP TSC0049003
taaagtatttaag

SEQ ID NO: 199074 - DNA, 13 bp, Artificial Sequence
  Oligonucleotide for detection of SNP TSC0049003
cttaaatacttta

SEQ ID NO: 199075 - DNA, 13 bp, Artificial Sequence
  Oligonucleotide for detection of SNP TSC0049003
taaagtgtttaag

SEQ ID NO: 199076 - DNA, 13 bp, Artificial Sequence
  Oligonucleotide for detection of SNP TSC0049003
cttaaacacttta

SEQ ID NO: 199077 - DNA, 13 bp, Artificial Sequence
  Oligonucleotide for detection of SNP TSC0049003
taaagcgtttaag

SEQ ID NO: 199078 - DNA, 13 bp, Artificial Sequence
  Oligonucleotide for detection of SNP TSC0049003
cttaaacgcttta

SEQ ID NO: 199079 - DNA, 13 bp, Artificial Sequence
  Oligonucleotide for detection of SNP TSC0049004
gaggaagtaaagy

SEQ ID NO: 199080 - DNA, 13 bp, Artificial Sequence
  Oligonucleotide for detection of SNP TSC0049004
rctttacttcctc

SEQ ID NO: 199081 - DNA, 13 bp, Artificial Sequence
  Oligonucleotide for detection of SNP TSC0049004
gaggaaataaagy

SEQ ID NO: 199082 - DNA, 13 bp, Artificial Sequence
  Oligonucleotide for detection of SNP TSC0049004
rctttatttcctc

SEQ ID NO: 199083 - DNA, 13 bp, Artificial Sequence
  Oligonucleotide for detection of SNP TSC0049006
ttttgaggtggag

SEQ ID NO: 199084 - DNA, 13 bp, Artificial Sequence
  Oligonucleotide for detection of SNP TSC0049006
ctccacctcaaaa

SEQ ID NO: 199085 - DNA, 13 bp, Artificial Sequence
  Oligonucleotide for detection of SNP TSC0049006
ttttgaagtggag

SEQ ID NO: 199086 - DNA, 13 bp, Artificial Sequence
  Oligonucleotide for detection of SNP TSC0049006
ctccacttcaaaa

SEQ ID NO: 199087 - DNA, 13 bp, Artificial Sequence
  Oligonucleotide for detection of SNP TSC0049006
ttttgaggcggag

SEQ ID NO: 199088 - DNA, 13 bp, Artificial Sequence
  Oligonucleotide for detection of SNP TSC0049006
ctccgcctcaaaa

SEQ ID NO: 199089 - DNA, 13 bp, Artificial Sequence
  Oligonucleotide for detection of SNP TSC0049006
ttttgaagcggag

SEQ ID NO: 199090 - DNA, 13 bp, Artificial Sequence
  Oligonucleotide for detection of SNP TSC0049006
ctccgcttcaaaa

SEQ ID NO: 199091 - DNA, 13 bp, Artificial Sequence
  Oligonucleotide for detection of SNP TSC0049007
ggtgtaagaagty

SEQ ID NO: 199092 - DNA, 13 bp, Artificial Sequence
  Oligonucleotide for detection of SNP TSC0049007
racttcttacacc

SEQ ID NO: 199093 - DNA, 13 bp, Artificial Sequence
  Oligonucleotide for detection of SNP TSC0049007
ggtgtaggaagty

SEQ ID NO: 199094 - DNA, 13 bp, Artificial Sequence
  Oligonucleotide for detection of SNP TSC0049007
racttcctacacc

SEQ ID NO: 199095 - DNA, 13 bp, Artificial Sequence
  Oligonucleotide for detection of SNP TSC0049007
ggcgtaagaagty

SEQ ID NO: 199096 - DNA, 13 bp, Artificial Sequence
  Oligonucleotide for detection of SNP TSC0049007
racttcttacgcc

SEQ ID NO: 199097 - DNA, 13 bp, Artificial Sequence
  Oligonucleotide for detection of SNP TSC0049007
ggcgtaggaagty

SEQ ID NO: 199098 - DNA, 13 bp, Artificial Sequence
  Oligonucleotide for detection of SNP TSC0049007
racttcctacgcc

SEQ ID NO: 199099 - DNA, 13 bp, Artificial Sequence
  Oligonucleotide for detection of SNP TSC0049008
ttggagtgggttg

SEQ ID NO: 199100 - DNA, 13 bp, Artificial Sequence
  Oligonucleotide for detection of SNP TSC0049008
caacccactccaa

SEQ ID NO: 199101 - DNA, 13 bp, Artificial Sequence
  Oligonucleotide for detection of SNP TSC0049008
ttggagggggttg

SEQ ID NO: 199102 - DNA, 13 bp, Artificial Sequence
  Oligonucleotide for detection of SNP TSC0049008
caaccccctccaa

SEQ ID NO: 199103 - DNA, 13 bp, Artificial Sequence
  Oligonucleotide for detection of SNP TSC0049008
tcggagtgggttg

SEQ ID NO: 199104 - DNA, 13 bp, Artificial Sequence
  Oligonucleotide for detection of SNP TSC0049008
caacccactccga

SEQ ID NO: 199105 - DNA, 13 bp, Artificial Sequence
  Oligonucleotide for detection of SNP TSC0049008
tcggagggggttg

SEQ ID NO: 199106 - DNA, 13 bp, Artificial Sequence
  Oligonucleotide for detection of SNP TSC0049008
caaccccctccga

SEQ ID NO: 199107 - DNA, 13 bp, Artificial Sequence
  Oligonucleotide for detection of SNP TSC0049008
ttggagcgggttg

SEQ ID NO: 199108 - DNA, 13 bp, Artificial Sequence
  Oligonucleotide for detection of SNP TSC0049008
caacccgctccaa

SEQ ID NO: 199109 - DNA, 13 bp, Artificial Sequence
  Oligonucleotide for detection of SNP TSC0049008
ttggagggggtcg

SEQ ID NO: 199110 - DNA, 13 bp, Artificial Sequence
  Oligonucleotide for detection of SNP TSC0049008
cgaccccctccaa

SEQ ID NO: 199111 - DNA, 13 bp, Artificial Sequence
  Oligonucleotide for detection of SNP TSC0049008
ttggagtgggtcg

SEQ ID NO: 199112 - DNA, 13 bp, Artificial Sequence
  Oligonucleotide for detection of SNP TSC0049008
cgacccactccaa

SEQ ID NO: 199113 - DNA, 13 bp, Artificial Sequence
  Oligonucleotide for detection of SNP TSC0049008
tcggagggggtcg

SEQ ID NO: 199114 - DNA, 13 bp, Artificial Sequence
  Oligonucleotide for detection of SNP TSC0049008
cgaccccctccga

SEQ ID NO: 199115 - DNA, 13 bp, Artificial Sequence
  Oligonucleotide for detection of SNP TSC0049008
tcggagcgggttg

SEQ ID NO: 199116 - DNA, 13 bp, Artificial Sequence
  Oligonucleotide for detection of SNP TSC0049008
caacccgctccga

SEQ ID NO: 199117 - DNA, 13 bp, Artificial Sequence
  Oligonucleotide for detection of SNP TSC0049008
tcggagtgggtcg

SEQ ID NO: 199118 - DNA, 13 bp, Artificial Sequence
  Oligonucleotide for detection of SNP TSC0049008
cgacccactccga

SEQ ID NO: 199119 - DNA, 13 bp, Artificial Sequence
  Oligonucleotide for detection of SNP TSC0049008
ttggagcgggtcg

SEQ ID NO: 199120 - DNA, 13 bp, Artificial Sequence
  Oligonucleotide for detection of SNP TSC0049008
cgacccgctccaa

SEQ ID NO: 199121 - DNA, 13 bp, Artificial Sequence
  Oligonucleotide for detection of SNP TSC0049008
tcggagcgggtcg

SEQ ID NO: 199122 - DNA, 13 bp, Artificial Sequence
  Oligonucleotide for detection of SNP TSC0049008
cgacccgctccga

SEQ ID NO: 199123 - DNA, 13 bp, Artificial Sequence
  Oligonucleotide for detection of SNP TSC0049008
tgatttgttttgg

SEQ ID NO: 199124 - DNA, 13 bp, Artificial Sequence
  Oligonucleotide for detection of SNP TSC0049008
ccaaaacaaatca

SEQ ID NO: 199125 - DNA, 13 bp, Artificial Sequence
  Oligonucleotide for detection of SNP TSC0049008
tgattttttttgg

SEQ ID NO: 199126 - DNA, 13 bp, Artificial Sequence
  Oligonucleotide for detection of SNP TSC0049008
ccaaaaaaaatca

SEQ ID NO: 199127 - DNA, 13 bp, Artificial Sequence
  Oligonucleotide for detection of SNP TSC0049008
cgatttgttttgg

SEQ ID NO: 199128 - DNA, 13 bp, Artificial Sequence
  Oligonucleotide for detection of SNP TSC0049008
ccaaaacaaatcg

SEQ ID NO: 199129 - DNA, 13 bp, Artificial Sequence
  Oligonucleotide for detection of SNP TSC0049008
cgattttttttgg

SEQ ID NO: 199130 - DNA, 13 bp, Artificial Sequence
  Oligonucleotide for detection of SNP TSC0049008
ccaaaaaaaatcg

SEQ ID NO: 199131 - DNA, 13 bp, Artificial Sequence
  Oligonucleotide for detection of SNP TSC0049008
tgattcgttttgg

SEQ ID NO: 199132 - DNA, 13 bp, Artificial Sequence
  Oligonucleotide for detection of SNP TSC0049008
ccaaaacgaatca

SEQ ID NO: 199133 - DNA, 13 bp, Artificial Sequence
  Oligonucleotide for detection of SNP TSC0049008
tgatttttttcgg

SEQ ID NO: 199134 - DNA, 13 bp, Artificial Sequence
  Oligonucleotide for detection of SNP TSC0049008
ccgaaaaaaatca

SEQ ID NO: 199135 - DNA, 13 bp, Artificial Sequence
  Oligonucleotide for detection of SNP TSC0049008
tgatttgtttcgg

SEQ ID NO: 199136 - DNA, 13 bp, Artificial Sequence
  Oligonucleotide for detection of SNP TSC0049008
ccgaaacaaatca

SEQ ID NO: 199137 - DNA, 13 bp, Artificial Sequence
  Oligonucleotide for detection of SNP TSC0049008
cgatttttttcgg

SEQ ID NO: 199138 - DNA, 13 bp, Artificial Sequence
  Oligonucleotide for detection of SNP TSC0049008
ccgaaaaaaatcg

SEQ ID NO: 199139 - DNA, 13 bp, Artificial Sequence
  Oligonucleotide for detection of SNP TSC0049008
cgattcgttttgg

SEQ ID NO: 199140 - DNA, 13 bp, Artificial Sequence
  Oligonucleotide for detection of SNP TSC0049008
ccaaaacgaatcg

SEQ ID NO: 199141 - DNA, 13 bp, Artificial Sequence
  Oligonucleotide for detection of SNP TSC0049008
cgatttgtttcgg

SEQ ID NO: 199142 - DNA, 13 bp, Artificial Sequence
  Oligonucleotide for detection of SNP TSC0049008
ccgaaacaaatcg

SEQ ID NO: 199143 - DNA, 13 bp, Artificial Sequence
  Oligonucleotide for detection of SNP TSC0049008
tgattcgtttcgg

SEQ ID NO: 199144 - DNA, 13 bp, Artificial Sequence
  Oligonucleotide for detection of SNP TSC0049008
ccgaaacgaatca

SEQ ID NO: 199145 - DNA, 13 bp, Artificial Sequence
  Oligonucleotide for detection of SNP TSC0049008
cgattcgtttcgg

SEQ ID NO: 199146 - DNA, 13 bp, Artificial Sequence
  Oligonucleotide for detection of SNP TSC0049008
ccgaaacgaatcg

SEQ ID NO: 199147 - DNA, 13 bp, Artificial Sequence
  Oligonucleotide for detection of SNP TSC0049009
tgggatgtttatt

SEQ ID NO: 199148 - DNA, 13 bp, Artificial Sequence
  Oligonucleotide for detection of SNP TSC0049009
aataaacatccca

SEQ ID NO: 199149 - DNA, 13 bp, Artificial Sequence
  Oligonucleotide for detection of SNP TSC0049009
tgggatatttatt

SEQ ID NO: 199150 - DNA, 13 bp, Artificial Sequence
  Oligonucleotide for detection of SNP TSC0049009
aataaatatccca

SEQ ID NO: 199151 - DNA, 13 bp, Artificial Sequence
  Oligonucleotide for detection of SNP TSC0049010
aaggtaagttaag

SEQ ID NO: 199152 - DNA, 13 bp, Artificial Sequence
  Oligonucleotide for detection of SNP TSC0049010
cttaacttacctt

SEQ ID NO: 199153 - DNA, 13 bp, Artificial Sequence
  Oligonucleotide for detection of SNP TSC0049010
aaggtaggttaag

SEQ ID NO: 199154 - DNA, 13 bp, Artificial Sequence
  Oligonucleotide for detection of SNP TSC0049010
cttaacctacctt

SEQ ID NO: 199155 - DNA, 13 bp, Artificial Sequence
  Oligonucleotide for detection of SNP TSC0049011
aaggaaatttaag

SEQ ID NO: 199156 - DNA, 13 bp, Artificial Sequence
  Oligonucleotide for detection of SNP TSC0049011
cttaaatttcctt

SEQ ID NO: 199157 - DNA, 13 bp, Artificial Sequence
  Oligonucleotide for detection of SNP TSC0049011
aaggaagtttaag

SEQ ID NO: 199158 - DNA, 13 bp, Artificial Sequence
  Oligonucleotide for detection of SNP TSC0049011
cttaaacttcctt

SEQ ID NO: 199159 - DNA, 13 bp, Artificial Sequence
  Oligonucleotide for detection of SNP TSC0006759
tttggtaatagaa

SEQ ID NO: 199160 - DNA, 13 bp, Artificial Sequence
  Oligonucleotide for detection of SNP TSC0006759
ttctattaccaaa

SEQ ID NO: 199161 - DNA, 13 bp, Artificial Sequence
  Oligonucleotide for detection of SNP TSC0006759
tttggtgatagaa

SEQ ID NO: 199162 - DNA, 13 bp, Artificial Sequence
  Oligonucleotide for detection of SNP TSC0006759
ttctatcaccaaa

SEQ ID NO: 199163 - DNA, 13 bp, Artificial Sequence
  Oligonucleotide for detection of SNP TSC0006759
tttggcgatagaa

SEQ ID NO: 199164 - DNA, 13 bp, Artificial Sequence
  Oligonucleotide for detection of SNP TSC0006759
ttctatcgccaaa

SEQ ID NO: 199165 - DNA, 13 bp, Artificial Sequence
  Oligonucleotide for detection of SNP TSC0006759
ttttattgttaaa

SEQ ID NO: 199166 - DNA, 13 bp, Artificial Sequence
  Oligonucleotide for detection of SNP TSC0006759
tttaacaataaaa

SEQ ID NO: 199167 - DNA, 13 bp, Artificial Sequence
  Oligonucleotide for detection of SNP TSC0049013
aagtagatatata

SEQ ID NO: 199168 - DNA, 13 bp, Artificial Sequence
  Oligonucleotide for detection of SNP TSC0049013
tatatatctactt

SEQ ID NO: 199169 - DNA, 13 bp, Artificial Sequence
  Oligonucleotide for detection of SNP TSC0049013
aagtagttatata

SEQ ID NO: 199170 - DNA, 13 bp, Artificial Sequence
  Oligonucleotide for detection of SNP TSC0049013
tatataactactt

SEQ ID NO: 199171 - DNA, 13 bp, Artificial Sequence
  Oligonucleotide for detection of SNP TSC0049013
tatatgattgttt

SEQ ID NO: 199172 - DNA, 13 bp, Artificial Sequence
  Oligonucleotide for detection of SNP TSC0049013
aaacaatcatata

SEQ ID NO: 199173 - DNA, 13 bp, Artificial Sequence
  Oligonucleotide for detection of SNP TSC0049015
tttaatataaaag

SEQ ID NO: 199174 - DNA, 13 bp, Artificial Sequence
  Oligonucleotide for detection of SNP TSC0049015
cttttatattaaa

SEQ ID NO: 199175 - DNA, 13 bp, Artificial Sequence
  Oligonucleotide for detection of SNP TSC0049015
tttaatgtaaaag

SEQ ID NO: 199176 - DNA, 13 bp, Artificial Sequence
  Oligonucleotide for detection of SNP TSC0049015
cttttacattaaa

SEQ ID NO: 199177 - DNA, 13 bp, Artificial Sequence
  Oligonucleotide for detection of SNP TSC0049015
tttaacgtaaaag

SEQ ID NO: 199178 - DNA, 13 bp, Artificial Sequence
  Oligonucleotide for detection of SNP TSC0049015
cttttacgttaaa

SEQ ID NO: 199179 - DNA, 13 bp, Artificial Sequence
  Oligonucleotide for detection of SNP TSC0049015
tttttatgttgaa

SEQ ID NO: 199180 - DNA, 13 bp, Artificial Sequence
  Oligonucleotide for detection of SNP TSC0049015
ttcaacataaaaa

SEQ ID NO: 199181 - DNA, 13 bp, Artificial Sequence
  Oligonucleotide for detection of SNP TSC0049015
tttttacgttgaa

SEQ ID NO: 199182 - DNA, 13 bp, Artificial Sequence
  Oligonucleotide for detection of SNP TSC0049015
ttcaacgtaaaaa

SEQ ID NO: 199183 - DNA, 13 bp, Artificial Sequence
  Oligonucleotide for detection of SNP TSC0049016
gtgagattagttt

SEQ ID NO: 199184 - DNA, 13 bp, Artificial Sequence
  Oligonucleotide for detection of SNP TSC0049016
aaactaatctcac

SEQ ID NO: 199185 - DNA, 13 bp, Artificial Sequence
  Oligonucleotide for detection of SNP TSC0049016
gtgagagtagttt

SEQ ID NO: 199186 - DNA, 13 bp, Artificial Sequence
  Oligonucleotide for detection of SNP TSC0049016
aaactactctcac

SEQ ID NO: 199187 - DNA, 13 bp, Artificial Sequence
  Oligonucleotide for detection of SNP TSC0049016
agattagttttay

SEQ ID NO: 199188 - DNA, 13 bp, Artificial Sequence
  Oligonucleotide for detection of SNP TSC0049016
rtaaaactaatct

SEQ ID NO: 199189 - DNA, 13 bp, Artificial Sequence
  Oligonucleotide for detection of SNP TSC0049016
agattatttttay

SEQ ID NO: 199190 - DNA, 13 bp, Artificial Sequence
  Oligonucleotide for detection of SNP TSC0049016
rtaaaaataatct

SEQ ID NO: 199191 - DNA, 13 bp, Artificial Sequence
  Oligonucleotide for detection of SNP TSC0049017
aaaaagggaaaag

SEQ ID NO: 199192 - DNA, 13 bp, Artificial Sequence
  Oligonucleotide for detection of SNP TSC0049017
cttttcccttttt

SEQ ID NO: 199193 - DNA, 13 bp, Artificial Sequence
  Oligonucleotide for detection of SNP TSC0049017
aaaaagagaaaag

SEQ ID NO: 199194 - DNA, 13 bp, Artificial Sequence
  Oligonucleotide for detection of SNP TSC0049017
cttttctcttttt

SEQ ID NO: 199195 - DNA, 13 bp, Artificial Sequence
  Oligonucleotide for detection of SNP TSC0049022
ataaatgtttatg

SEQ ID NO: 199196 - DNA, 13 bp, Artificial Sequence
  Oligonucleotide for detection of SNP TSC0049022
cataaacatttat

SEQ ID NO: 199197 - DNA, 13 bp, Artificial Sequence
  Oligonucleotide for detection of SNP TSC0049022
ataaatatttatg

SEQ ID NO: 199198 - DNA, 13 bp, Artificial Sequence
  Oligonucleotide for detection of SNP TSC0049022
cataaatatttat

SEQ ID NO: 199199 - DNA, 13 bp, Artificial Sequence
  Oligonucleotide for detection of SNP TSC0049024
aaaataaagtaay

SEQ ID NO: 199200 - DNA, 13 bp, Artificial Sequence
  Oligonucleotide for detection of SNP TSC0049024
rttactttatttt

SEQ ID NO: 199201 - DNA, 13 bp, Artificial Sequence
  Oligonucleotide for detection of SNP TSC0049024
aaaatatagtaay

SEQ ID NO: 199202 - DNA, 13 bp, Artificial Sequence
  Oligonucleotide for detection of SNP TSC0049024
rttactatatttt

SEQ ID NO: 199203 - DNA, 13 bp, Artificial Sequence
  Oligonucleotide for detection of SNP TSC0049024
gttgttttatttt

SEQ ID NO: 199204 - DNA, 13 bp, Artificial Sequence
  Oligonucleotide for detection of SNP TSC0049024
aaaataaaacaac

SEQ ID NO: 199205 - DNA, 13 bp, Artificial Sequence
  Oligonucleotide for detection of SNP TSC0049024
gttgttatatttt

SEQ ID NO: 199206 - DNA, 13 bp, Artificial Sequence
  Oligonucleotide for detection of SNP TSC0049024
aaaatataacaac

SEQ ID NO: 199207 - DNA, 13 bp, Artificial Sequence
  Oligonucleotide for detection of SNP TSC0049025
gttggaaagtaga

SEQ ID NO: 199208 - DNA, 13 bp, Artificial Sequence
  Oligonucleotide for detection of SNP TSC0049025
tctactttccaac

SEQ ID NO: 199209 - DNA, 13 bp, Artificial Sequence
  Oligonucleotide for detection of SNP TSC0049025
gttggatagtaga

SEQ ID NO: 199210 - DNA, 13 bp, Artificial Sequence
  Oligonucleotide for detection of SNP TSC0049025
tctactatccaac

SEQ ID NO: 199211 - DNA, 13 bp, Artificial Sequence
  Oligonucleotide for detection of SNP TSC0049025
tttgttttttaay

SEQ ID NO: 199212 - DNA, 13 bp, Artificial Sequence
  Oligonucleotide for detection of SNP TSC0049025
rttaaaaaacaaa

SEQ ID NO: 199213 - DNA, 13 bp, Artificial Sequence
  Oligonucleotide for detection of SNP TSC0049025
tttgttatttaay

SEQ ID NO: 199214 - DNA, 13 bp, Artificial Sequence
  Oligonucleotide for detection of SNP TSC0049025
rttaaataacaaa

SEQ ID NO: 199215 - DNA, 13 bp, Artificial Sequence
  Oligonucleotide for detection of SNP TSC0049028
ataggtttgtgty

SEQ ID NO: 199216 - DNA, 13 bp, Artificial Sequence
  Oligonucleotide for detection of SNP TSC0049028
racacaaacctat

SEQ ID NO: 199217 - DNA, 13 bp, Artificial Sequence
  Oligonucleotide for detection of SNP TSC0049028
ataggtacgtgty

SEQ ID NO: 199218 - DNA, 13 bp, Artificial Sequence
  Oligonucleotide for detection of SNP TSC0049028
racacgtacctat

SEQ ID NO: 199219 - DNA, 13 bp, Artificial Sequence
  Oligonucleotide for detection of SNP TSC0049028
ataggttcgtgty

SEQ ID NO: 199220 - DNA, 13 bp, Artificial Sequence
  Oligonucleotide for detection of SNP TSC0049028
racacgaacctat

SEQ ID NO: 199221 - DNA, 13 bp, Artificial Sequence
  Oligonucleotide for detection of SNP TSC0049028
ggtatgggtttgt

SEQ ID NO: 199222 - DNA, 13 bp, Artificial Sequence
  Oligonucleotide for detection of SNP TSC0049028
acaaacccatacc

SEQ ID NO: 199223 - DNA, 13 bp, Artificial Sequence
  Oligonucleotide for detection of SNP TSC0049028
ggtacgtgtttgt

SEQ ID NO: 199224 - DNA, 13 bp, Artificial Sequence
  Oligonucleotide for detection of SNP TSC0049028
acaaacacgtacc

SEQ ID NO: 199225 - DNA, 13 bp, Artificial Sequence
  Oligonucleotide for detection of SNP TSC0049028
ggtacgggtttgt

SEQ ID NO: 199226 - DNA, 13 bp, Artificial Sequence
  Oligonucleotide for detection of SNP TSC0049028
acaaacccgtacc

SEQ ID NO: 199227 - DNA, 13 bp, Artificial Sequence
  Oligonucleotide for detection of SNP TSC0049029
gtgtagtgatgtg

SEQ ID NO: 199228 - DNA, 13 bp, Artificial Sequence
  Oligonucleotide for detection of SNP TSC0049029
cacatcactacac

SEQ ID NO: 199229 - DNA, 13 bp, Artificial Sequence
  Oligonucleotide for detection of SNP TSC0049029
gtgtagggatgtg

SEQ ID NO: 199230 - DNA, 13 bp, Artificial Sequence
  Oligonucleotide for detection of SNP TSC0049029
cacatccctacac

SEQ ID NO: 199231 - DNA, 13 bp, Artificial Sequence
  Oligonucleotide for detection of SNP TSC0049031
gagttaattttga

SEQ ID NO: 199232 - DNA, 13 bp, Artificial Sequence
  Oligonucleotide for detection of SNP TSC0049031
tcaaaattaactc

SEQ ID NO: 199233 - DNA, 13 bp, Artificial Sequence
  Oligonucleotide for detection of SNP TSC0049031
gagttagttttga

SEQ ID NO: 199234 - DNA, 13 bp, Artificial Sequence
  Oligonucleotide for detection of SNP TSC0049031
tcaaaactaactc

SEQ ID NO: 199235 - DNA, 13 bp, Artificial Sequence
  Oligonucleotide for detection of SNP TSC0049034
tatattgtttata

SEQ ID NO: 199236 - DNA, 13 bp, Artificial Sequence
  Oligonucleotide for detection of SNP TSC0049034
tataaacaatata

SEQ ID NO: 199237 - DNA, 13 bp, Artificial Sequence
  Oligonucleotide for detection of SNP TSC0049034
tatatcgtttata

SEQ ID NO: 199238 - DNA, 13 bp, Artificial Sequence
  Oligonucleotide for detection of SNP TSC0049034
tataaacgatata

SEQ ID NO: 199239 - DNA, 13 bp, Artificial Sequence
  Oligonucleotide for detection of SNP TSC0049034
tgtagatggtatg

SEQ ID NO: 199240 - DNA, 13 bp, Artificial Sequence
  Oligonucleotide for detection of SNP TSC0049034
cataccatctaca

SEQ ID NO: 199241 - DNA, 13 bp, Artificial Sequence
  Oligonucleotide for detection of SNP TSC0049034
tgtagacggtatg

SEQ ID NO: 199242 - DNA, 13 bp, Artificial Sequence
  Oligonucleotide for detection of SNP TSC0049034
cataccgtctaca

SEQ ID NO: 199243 - DNA, 13 bp, Artificial Sequence
  Oligonucleotide for detection of SNP TSC0049035
gaggagttaagty

SEQ ID NO: 199244 - DNA, 13 bp, Artificial Sequence
  Oligonucleotide for detection of SNP TSC0049035
racttaactcctc

SEQ ID NO: 199245 - DNA, 13 bp, Artificial Sequence
  Oligonucleotide for detection of SNP TSC0049035
gaggaggtaagty

SEQ ID NO: 199246 - DNA, 13 bp, Artificial Sequence
  Oligonucleotide for detection of SNP TSC0049035
racttacctcctc

SEQ ID NO: 199247 - DNA, 13 bp, Artificial Sequence
  Oligonucleotide for detection of SNP TSC0049035
ggtttgattttty

SEQ ID NO: 199248 - DNA, 13 bp, Artificial Sequence
  Oligonucleotide for detection of SNP TSC0049035
raaaaatcaaacc

SEQ ID NO: 199249 - DNA, 13 bp, Artificial Sequence
  Oligonucleotide for detection of SNP TSC0049038
gtaggtgtgagta

SEQ ID NO: 199250 - DNA, 13 bp, Artificial Sequence
  Oligonucleotide for detection of SNP TSC0049038
tactcacacctac

SEQ ID NO: 199251 - DNA, 13 bp, Artificial Sequence
  Oligonucleotide for detection of SNP TSC0049038
gtaggtatgagta

SEQ ID NO: 199252 - DNA, 13 bp, Artificial Sequence
  Oligonucleotide for detection of SNP TSC0049038
tactcatacctac

SEQ ID NO: 199253 - DNA, 13 bp, Artificial Sequence
  Oligonucleotide for detection of SNP TSC0049039
aattaatggttga

SEQ ID NO: 199254 - DNA, 13 bp, Artificial Sequence
  Oligonucleotide for detection of SNP TSC0049039
tcaaccattaatt

SEQ ID NO: 199255 - DNA, 13 bp, Artificial Sequence
  Oligonucleotide for detection of SNP TSC0049039
aattaacggttga

SEQ ID NO: 199256 - DNA, 13 bp, Artificial Sequence
  Oligonucleotide for detection of SNP TSC0049039
tcaaccgttaatt

SEQ ID NO: 199257 - DNA, 13 bp, Artificial Sequence
  Oligonucleotide for detection of SNP TSC0049039
ttagttgttggtt

SEQ ID NO: 199258 - DNA, 13 bp, Artificial Sequence
  Oligonucleotide for detection of SNP TSC0049039
aaccaacaactaa

SEQ ID NO: 199259 - DNA, 13 bp, Artificial Sequence
  Oligonucleotide for detection of SNP TSC0049039
ttagttattggtt

SEQ ID NO: 199260 - DNA, 13 bp, Artificial Sequence
  Oligonucleotide for detection of SNP TSC0049039
aaccaataactaa

SEQ ID NO: 199261 - DNA, 13 bp, Artificial Sequence
  Oligonucleotide for detection of SNP TSC0049039
ttagtcgttggtt

SEQ ID NO: 199262 - DNA, 13 bp, Artificial Sequence
  Oligonucleotide for detection of SNP TSC0049039
aaccaacgactaa

SEQ ID NO: 199263 - DNA, 13 bp, Artificial Sequence
  Oligonucleotide for detection of SNP TSC0049040
taatatatgttat

SEQ ID NO: 199264 - DNA, 13 bp, Artificial Sequence
  Oligonucleotide for detection of SNP TSC0049040
ataacatatatta

SEQ ID NO: 199265 - DNA, 13 bp, Artificial Sequence
  Oligonucleotide for detection of SNP TSC0049040
taatatttgttat

SEQ ID NO: 199266 - DNA, 13 bp, Artificial Sequence
  Oligonucleotide for detection of SNP TSC0049040
ataacaaatatta

SEQ ID NO: 199267 - DNA, 13 bp, Artificial Sequence
  Oligonucleotide for detection of SNP TSC0049040
atgatatgtatta

SEQ ID NO: 199268 - DNA, 13 bp, Artificial Sequence
  Oligonucleotide for detection of SNP TSC0049040
taatacatatcat

SEQ ID NO: 199269 - DNA, 13 bp, Artificial Sequence
  Oligonucleotide for detection of SNP TSC0049040
atgataagtatta

SEQ ID NO: 199270 - DNA, 13 bp, Artificial Sequence
  Oligonucleotide for detection of SNP TSC0049040
taatacttatcat

SEQ ID NO: 199271 - DNA, 13 bp, Artificial Sequence
  Oligonucleotide for detection of SNP TSC0049041
ttattaggaaatg

SEQ ID NO: 199272 - DNA, 13 bp, Artificial Sequence
  Oligonucleotide for detection of SNP TSC0049041
catttcctaataa

SEQ ID NO: 199273 - DNA, 13 bp, Artificial Sequence
  Oligonucleotide for detection of SNP TSC0049041
ttattaagaaatg

SEQ ID NO: 199274 - DNA, 13 bp, Artificial Sequence
  Oligonucleotide for detection of SNP TSC0049041
catttcttaataa

SEQ ID NO: 199275 - DNA, 13 bp, Artificial Sequence
  Oligonucleotide for detection of SNP TSC0049042
aataatgaataaa

SEQ ID NO: 199276 - DNA, 13 bp, Artificial Sequence
  Oligonucleotide for detection of SNP TSC0049042
tttattcattatt

SEQ ID NO: 199277 - DNA, 13 bp, Artificial Sequence
  Oligonucleotide for detection of SNP TSC0049042
aataataaataaa

SEQ ID NO: 199278 - DNA, 13 bp, Artificial Sequence
  Oligonucleotide for detection of SNP TSC0049042
tttatttattatt

SEQ ID NO: 199279 - DNA, 13 bp, Artificial Sequence
  Oligonucleotide for detection of SNP TSC0049043
attttaataaaat

SEQ ID NO: 199280 - DNA, 13 bp, Artificial Sequence
  Oligonucleotide for detection of SNP TSC0049043
attttattaaaat

SEQ ID NO: 199281 - DNA, 13 bp, Artificial Sequence
  Oligonucleotide for detection of SNP TSC0049043
attttagtaaaat

SEQ ID NO: 199282 - DNA, 13 bp, Artificial Sequence
  Oligonucleotide for detection of SNP TSC0049043
attttactaaaat

SEQ ID NO: 199283 - DNA, 13 bp, Artificial Sequence
  Oligonucleotide for detection of SNP TSC0049044
ttgttttagtttg

SEQ ID NO: 199284 - DNA, 13 bp, Artificial Sequence
  Oligonucleotide for detection of SNP TSC0049044
caaactaaaacaa

SEQ ID NO: 199285 - DNA, 13 bp, Artificial Sequence
  Oligonucleotide for detection of SNP TSC0049044
ttgtttgagtttg

SEQ ID NO: 199286 - DNA, 13 bp, Artificial Sequence
  Oligonucleotide for detection of SNP TSC0049044
caaactcaaacaa

SEQ ID NO: 199287 - DNA, 13 bp, Artificial Sequence
  Oligonucleotide for detection of SNP TSC0049044
taggttaaagtaa

SEQ ID NO: 199288 - DNA, 13 bp, Artificial Sequence
  Oligonucleotide for detection of SNP TSC0049044
ttactttaaccta

SEQ ID NO: 199289 - DNA, 13 bp, Artificial Sequence
  Oligonucleotide for detection of SNP TSC0049044
taggtttaagtaa

SEQ ID NO: 199290 - DNA, 13 bp, Artificial Sequence
  Oligonucleotide for detection of SNP TSC0049044
ttacttaaaccta

SEQ ID NO: 199291 - DNA, 13 bp, Artificial Sequence
  Oligonucleotide for detection of SNP TSC0049045
tgggtagttatga

SEQ ID NO: 199292 - DNA, 13 bp, Artificial Sequence
  Oligonucleotide for detection of SNP TSC0049045
tcataactaccca

SEQ ID NO: 199293 - DNA, 13 bp, Artificial Sequence
  Oligonucleotide for detection of SNP TSC0049045
tgggtaattatga

SEQ ID NO: 199294 - DNA, 13 bp, Artificial Sequence
  Oligonucleotide for detection of SNP TSC0049045
tcataattaccca

SEQ ID NO: 199295 - DNA, 13 bp, Artificial Sequence
  Oligonucleotide for detection of SNP TSC0049048
atatgagttttay

SEQ ID NO: 199296 - DNA, 13 bp, Artificial Sequence
  Oligonucleotide for detection of SNP TSC0049048
rtaaaactcatat

SEQ ID NO: 199297 - DNA, 13 bp, Artificial Sequence
  Oligonucleotide for detection of SNP TSC0049048
atatgaattttay

SEQ ID NO: 199298 - DNA, 13 bp, Artificial Sequence
  Oligonucleotide for detection of SNP TSC0049048
rtaaaattcatat

SEQ ID NO: 199299 - DNA, 13 bp, Artificial Sequence
  Oligonucleotide for detection of SNP TSC0004813
aatattaaattgt

SEQ ID NO: 199300 - DNA, 13 bp, Artificial Sequence
  Oligonucleotide for detection of SNP TSC0004813
acaatttaatatt

SEQ ID NO: 199301 - DNA, 13 bp, Artificial Sequence
  Oligonucleotide for detection of SNP TSC0004813
aatattgaattgt

SEQ ID NO: 199302 - DNA, 13 bp, Artificial Sequence
  Oligonucleotide for detection of SNP TSC0004813
acaattcaatatt

SEQ ID NO: 199303 - DNA, 13 bp, Artificial Sequence
  Oligonucleotide for detection of SNP TSC0004813
aatatcgaattgt

SEQ ID NO: 199304 - DNA, 13 bp, Artificial Sequence
  Oligonucleotide for detection of SNP TSC0004813
acaattcgatatt

SEQ ID NO: 199305 - DNA, 13 bp, Artificial Sequence
  Oligonucleotide for detection of SNP TSC0004813
ataatttggtgtt

SEQ ID NO: 199306 - DNA, 13 bp, Artificial Sequence
  Oligonucleotide for detection of SNP TSC0004813
aacaccaaattat

SEQ ID NO: 199307 - DNA, 13 bp, Artificial Sequence
  Oligonucleotide for detection of SNP TSC0004813
ataattcggtgtt

SEQ ID NO: 199308 - DNA, 13 bp, Artificial Sequence
  Oligonucleotide for detection of SNP TSC0004813
aacaccgaattat

SEQ ID NO: 199309 - DNA, 13 bp, Artificial Sequence
  Oligonucleotide for detection of SNP TSC0049049
tagaagtttttay

SEQ ID NO: 199310 - DNA, 13 bp, Artificial Sequence
  Oligonucleotide for detection of SNP TSC0049049
rtaaaaacttcta

SEQ ID NO: 199311 - DNA, 13 bp, Artificial Sequence
  Oligonucleotide for detection of SNP TSC0049049
tagaaggttttay

SEQ ID NO: 199312 - DNA, 13 bp, Artificial Sequence
  Oligonucleotide for detection of SNP TSC0049049
rtaaaaccttcta

SEQ ID NO: 199313 - DNA, 13 bp, Artificial Sequence
  Oligonucleotide for detection of SNP TSC0049049
gtaaagattttta

SEQ ID NO: 199314 - DNA, 13 bp, Artificial Sequence
  Oligonucleotide for detection of SNP TSC0049049
taaaaatctttac

SEQ ID NO: 199315 - DNA, 13 bp, Artificial Sequence
  Oligonucleotide for detection of SNP TSC0049049
gtaaagtttttta

SEQ ID NO: 199316 - DNA, 13 bp, Artificial Sequence
  Oligonucleotide for detection of SNP TSC0049049
taaaaaactttac

SEQ ID NO: 199317 - DNA, 13 bp, Artificial Sequence
  Oligonucleotide for detection of SNP TSC0049050
gttttttggttta

SEQ ID NO: 199318 - DNA, 13 bp, Artificial Sequence
  Oligonucleotide for detection of SNP TSC0049050
taaaccaaaaaac

SEQ ID NO: 199319 - DNA, 13 bp, Artificial Sequence
  Oligonucleotide for detection of SNP TSC0049050
gtttttcggttta

SEQ ID NO: 199320 - DNA, 13 bp, Artificial Sequence
  Oligonucleotide for detection of SNP TSC0049050
taaaccgaaaaac

SEQ ID NO: 199321 - DNA, 13 bp, Artificial Sequence
  Oligonucleotide for detection of SNP TSC0049050
taaattgggaagy

SEQ ID NO: 199322 - DNA, 13 bp, Artificial Sequence
  Oligonucleotide for detection of SNP TSC0049050
rcttcccaattta

SEQ ID NO: 199323 - DNA, 13 bp, Artificial Sequence
  Oligonucleotide for detection of SNP TSC0049050
taaattaggaagy

SEQ ID NO: 199324 - DNA, 13 bp, Artificial Sequence
  Oligonucleotide for detection of SNP TSC0049050
rcttcctaattta

SEQ ID NO: 199325 - DNA, 13 bp, Artificial Sequence
  Oligonucleotide for detection of SNP TSC0049050
taaatcgggaagy

SEQ ID NO: 199326 - DNA, 13 bp, Artificial Sequence
  Oligonucleotide for detection of SNP TSC0049050
rcttcccgattta

SEQ ID NO: 199327 - DNA, 13 bp, Artificial Sequence
  Oligonucleotide for detection of SNP TSC0049051
gagaaggtggttg

SEQ ID NO: 199328 - DNA, 13 bp, Artificial Sequence
  Oligonucleotide for detection of SNP TSC0049051
caaccaccttctc

SEQ ID NO: 199329 - DNA, 13 bp, Artificial Sequence
  Oligonucleotide for detection of SNP TSC0049051
gagaagatggttg

SEQ ID NO: 199330 - DNA, 13 bp, Artificial Sequence
  Oligonucleotide for detection of SNP TSC0049051
caaccatcttctc

SEQ ID NO: 199331 - DNA, 13 bp, Artificial Sequence
  Oligonucleotide for detection of SNP TSC0049052
tgttgatggtgay

SEQ ID NO: 199332 - DNA, 13 bp, Artificial Sequence
  Oligonucleotide for detection of SNP TSC0049052
rtcaccatcaaca

SEQ ID NO: 199333 - DNA, 13 bp, Artificial Sequence
  Oligonucleotide for detection of SNP TSC0049052
tgttgacggtgay

SEQ ID NO: 199334 - DNA, 13 bp, Artificial Sequence
  Oligonucleotide for detection of SNP TSC0049052
rtcaccgtcaaca

SEQ ID NO: 199335 - DNA, 13 bp, Artificial Sequence
  Oligonucleotide for detection of SNP TSC0049052
tgttgatggcgay

SEQ ID NO: 199336 - DNA, 13 bp, Artificial Sequence
  Oligonucleotide for detection of SNP TSC0049052
rtcgccatcaaca

SEQ ID NO: 199337 - DNA, 13 bp, Artificial Sequence
  Oligonucleotide for detection of SNP TSC0049052
tgttgacggcgay

SEQ ID NO: 199338 - DNA, 13 bp, Artificial Sequence
  Oligonucleotide for detection of SNP TSC0049052
rtcgccgtcaaca

SEQ ID NO: 199339 - DNA, 13 bp, Artificial Sequence
  Oligonucleotide for detection of SNP TSC0049052
gtcgttgttagta

SEQ ID NO: 199340 - DNA, 13 bp, Artificial Sequence
  Oligonucleotide for detection of SNP TSC0049052
tactaacaacgac

SEQ ID NO: 199341 - DNA, 13 bp, Artificial Sequence
  Oligonucleotide for detection of SNP TSC0049052
gtcgttattagta

SEQ ID NO: 199342 - DNA, 13 bp, Artificial Sequence
  Oligonucleotide for detection of SNP TSC0049052
tactaataacgac

SEQ ID NO: 199343 - DNA, 13 bp, Artificial Sequence
  Oligonucleotide for detection of SNP TSC0049052
gttgtcgttagta

SEQ ID NO: 199344 - DNA, 13 bp, Artificial Sequence
  Oligonucleotide for detection of SNP TSC0049052
tactaacgacaac

SEQ ID NO: 199345 - DNA, 13 bp, Artificial Sequence
  Oligonucleotide for detection of SNP TSC0049052
gtcgtcgttagta

SEQ ID NO: 199346 - DNA, 13 bp, Artificial Sequence
  Oligonucleotide for detection of SNP TSC0049052
tactaacgacgac

SEQ ID NO: 199347 - DNA, 13 bp, Artificial Sequence
  Oligonucleotide for detection of SNP TSC0049053
ggaatttgtgggg

SEQ ID NO: 199348 - DNA, 13 bp, Artificial Sequence
  Oligonucleotide for detection of SNP TSC0049053
ccccacaaattcc

SEQ ID NO: 199349 - DNA, 13 bp, Artificial Sequence
  Oligonucleotide for detection of SNP TSC0049053
ggaattcgtgggg

SEQ ID NO: 199350 - DNA, 13 bp, Artificial Sequence
  Oligonucleotide for detection of SNP TSC0049053
ccccacgaattcc

SEQ ID NO: 199351 - DNA, 13 bp, Artificial Sequence
  Oligonucleotide for detection of SNP TSC0049053
ggaatttgcgggg

SEQ ID NO: 199352 - DNA, 13 bp, Artificial Sequence
  Oligonucleotide for detection of SNP TSC0049053
ccccgcaaattcc

SEQ ID NO: 199353 - DNA, 13 bp, Artificial Sequence
  Oligonucleotide for detection of SNP TSC0049053
ggaattcgcgggg

SEQ ID NO: 199354 - DNA, 13 bp, Artificial Sequence
  Oligonucleotide for detection of SNP TSC0049053
ccccgcgaattcc

SEQ ID NO: 199355 - DNA, 13 bp, Artificial Sequence
  Oligonucleotide for detection of SNP TSC0049053
ttttgtgggttty

SEQ ID NO: 199356 - DNA, 13 bp, Artificial Sequence
  Oligonucleotide for detection of SNP TSC0049053
raaacccacaaaa

SEQ ID NO: 199357 - DNA, 13 bp, Artificial Sequence
  Oligonucleotide for detection of SNP TSC0049053
ttttgtaggttty

SEQ ID NO: 199358 - DNA, 13 bp, Artificial Sequence
  Oligonucleotide for detection of SNP TSC0049053
raaacctacaaaa

SEQ ID NO: 199359 - DNA, 13 bp, Artificial Sequence
  Oligonucleotide for detection of SNP TSC0049053
tttcgtgggttty

SEQ ID NO: 199360 - DNA, 13 bp, Artificial Sequence
  Oligonucleotide for detection of SNP TSC0049053
raaacccacgaaa

SEQ ID NO: 199361 - DNA, 13 bp, Artificial Sequence
  Oligonucleotide for detection of SNP TSC0049053
tttcgtaggttty

SEQ ID NO: 199362 - DNA, 13 bp, Artificial Sequence
  Oligonucleotide for detection of SNP TSC0049053
raaacctacgaaa

SEQ ID NO: 199363 - DNA, 13 bp, Artificial Sequence
  Oligonucleotide for detection of SNP TSC0049053
ttttgcgggttty

SEQ ID NO: 199364 - DNA, 13 bp, Artificial Sequence
  Oligonucleotide for detection of SNP TSC0049053
raaacccgcaaaa

SEQ ID NO: 199365 - DNA, 13 bp, Artificial Sequence
  Oligonucleotide for detection of SNP TSC0049053
tttcgcgggttty

SEQ ID NO: 199366 - DNA, 13 bp, Artificial Sequence
  Oligonucleotide for detection of SNP TSC0049053
raaacccgcgaaa

SEQ ID NO: 199367 - DNA, 13 bp, Artificial Sequence
  Oligonucleotide for detection of SNP TSC0049054
ggatggtgggaaa

SEQ ID NO: 199368 - DNA, 13 bp, Artificial Sequence
  Oligonucleotide for detection of SNP TSC0049054
tttcccaccatcc

SEQ ID NO: 199369 - DNA, 13 bp, Artificial Sequence
  Oligonucleotide for detection of SNP TSC0049054
ggatggcgggaaa

SEQ ID NO: 199370 - DNA, 13 bp, Artificial Sequence
  Oligonucleotide for detection of SNP TSC0049054
tttcccgccatcc

SEQ ID NO: 199371 - DNA, 13 bp, Artificial Sequence
  Oligonucleotide for detection of SNP TSC0049055
atagtaaagaaaa

SEQ ID NO: 199372 - DNA, 13 bp, Artificial Sequence
  Oligonucleotide for detection of SNP TSC0049055
ttttctttactat

SEQ ID NO: 199373 - DNA, 13 bp, Artificial Sequence
  Oligonucleotide for detection of SNP TSC0049055
atagtagagaaaa

SEQ ID NO: 199374 - DNA, 13 bp, Artificial Sequence
  Oligonucleotide for detection of SNP TSC0049055
ttttctctactat

SEQ ID NO: 199375 - DNA, 13 bp, Artificial Sequence
  Oligonucleotide for detection of SNP TSC0049056
agtaaaattataa

SEQ ID NO: 199376 - DNA, 13 bp, Artificial Sequence
  Oligonucleotide for detection of SNP TSC0049056
ttataattttact

SEQ ID NO: 199377 - DNA, 13 bp, Artificial Sequence
  Oligonucleotide for detection of SNP TSC0049056
agtaaatttataa

SEQ ID NO: 199378 - DNA, 13 bp, Artificial Sequence
  Oligonucleotide for detection of SNP TSC0049056
ttataaatttact

SEQ ID NO: 199379 - DNA, 13 bp, Artificial Sequence
  Oligonucleotide for detection of SNP TSC0049056
ttatggttttgtt

SEQ ID NO: 199380 - DNA, 13 bp, Artificial Sequence
  Oligonucleotide for detection of SNP TSC0049056
aacaaaaccataa

SEQ ID NO: 199381 - DNA, 13 bp, Artificial Sequence
  Oligonucleotide for detection of SNP TSC0049057
aaaagagtttatg

SEQ ID NO: 199382 - DNA, 13 bp, Artificial Sequence
  Oligonucleotide for detection of SNP TSC0049057
cataaactctttt

SEQ ID NO: 199383 - DNA, 13 bp, Artificial Sequence
  Oligonucleotide for detection of SNP TSC0049057
aaaagaatttatg

SEQ ID NO: 199384 - DNA, 13 bp, Artificial Sequence
  Oligonucleotide for detection of SNP TSC0049057
cataaattctttt

SEQ ID NO: 199385 - DNA, 13 bp, Artificial Sequence
  Oligonucleotide for detection of SNP TSC0049058
ggaatagaaggat

SEQ ID NO: 199386 - DNA, 13 bp, Artificial Sequence
  Oligonucleotide for detection of SNP TSC0049058
atccttctattcc

SEQ ID NO: 199387 - DNA, 13 bp, Artificial Sequence
  Oligonucleotide for detection of SNP TSC0049058
ggaataaaaggat

SEQ ID NO: 199388 - DNA, 13 bp, Artificial Sequence
  Oligonucleotide for detection of SNP TSC0049058
atccttttattcc

SEQ ID NO: 199389 - DNA, 13 bp, Artificial Sequence
  Oligonucleotide for detection of SNP TSC0049059
tagtagaatggtt

SEQ ID NO: 199390 - DNA, 13 bp, Artificial Sequence
  Oligonucleotide for detection of SNP TSC0049059
aaccattctacta

SEQ ID NO: 199391 - DNA, 13 bp, Artificial Sequence
  Oligonucleotide for detection of SNP TSC0049059
tagtaggatggtt

SEQ ID NO: 199392 - DNA, 13 bp, Artificial Sequence
  Oligonucleotide for detection of SNP TSC0049059
aaccatcctacta

SEQ ID NO: 199393 - DNA, 13 bp, Artificial Sequence
  Oligonucleotide for detection of SNP TSC0006423
aatttgaaaggtt

SEQ ID NO: 199394 - DNA, 13 bp, Artificial Sequence
  Oligonucleotide for detection of SNP TSC0006423
aacctttcaaatt

SEQ ID NO: 199395 - DNA, 13 bp, Artificial Sequence
  Oligonucleotide for detection of SNP TSC0006423
aatttggaaggtt

SEQ ID NO: 199396 - DNA, 13 bp, Artificial Sequence
  Oligonucleotide for detection of SNP TSC0006423
aaccttccaaatt

SEQ ID NO: 199397 - DNA, 13 bp, Artificial Sequence
  Oligonucleotide for detection of SNP TSC0049060
tattagataatat

SEQ ID NO: 199398 - DNA, 13 bp, Artificial Sequence
  Oligonucleotide for detection of SNP TSC0049060
atattatctaata

SEQ ID NO: 199399 - DNA, 13 bp, Artificial Sequence
  Oligonucleotide for detection of SNP TSC0049060
tattaggtaatat

SEQ ID NO: 199400 - DNA, 13 bp, Artificial Sequence
  Oligonucleotide for detection of SNP TSC0049060
atattacctaata

SEQ ID NO: 199401 - DNA, 13 bp, Artificial Sequence
  Oligonucleotide for detection of SNP TSC0049061
aatgttgtttggt

SEQ ID NO: 199402 - DNA, 13 bp, Artificial Sequence
  Oligonucleotide for detection of SNP TSC0049061
accaaacaacatt

SEQ ID NO: 199403 - DNA, 13 bp, Artificial Sequence
  Oligonucleotide for detection of SNP TSC0049061
aatgttatttggt

SEQ ID NO: 199404 - DNA, 13 bp, Artificial Sequence
  Oligonucleotide for detection of SNP TSC0049061
accaaataacatt

SEQ ID NO: 199405 - DNA, 13 bp, Artificial Sequence
  Oligonucleotide for detection of SNP TSC0049065
gagtatagtagaa

SEQ ID NO: 199406 - DNA, 13 bp, Artificial Sequence
  Oligonucleotide for detection of SNP TSC0049065
ttctactatactc

SEQ ID NO: 199407 - DNA, 13 bp, Artificial Sequence
  Oligonucleotide for detection of SNP TSC0049065
gagtattgtagaa

SEQ ID NO: 199408 - DNA, 13 bp, Artificial Sequence
  Oligonucleotide for detection of SNP TSC0049065
ttctacaatactc

SEQ ID NO: 199409 - DNA, 13 bp, Artificial Sequence
  Oligonucleotide for detection of SNP TSC0049066
ttataagggtgaa

SEQ ID NO: 199410 - DNA, 13 bp, Artificial Sequence
  Oligonucleotide for detection of SNP TSC0049066
ttcacccttataa

SEQ ID NO: 199411 - DNA, 13 bp, Artificial Sequence
  Oligonucleotide for detection of SNP TSC0049066
ttataaaggtgaa

SEQ ID NO: 199412 - DNA, 13 bp, Artificial Sequence
  Oligonucleotide for detection of SNP TSC0049066
ttcacctttataa

SEQ ID NO: 199413 - DNA, 13 bp, Artificial Sequence
  Oligonucleotide for detection of SNP TSC0049067
atagaaatagaag

SEQ ID NO: 199414 - DNA, 13 bp, Artificial Sequence
  Oligonucleotide for detection of SNP TSC0049067
cttctatttctat

SEQ ID NO: 199415 - DNA, 13 bp, Artificial Sequence
  Oligonucleotide for detection of SNP TSC0049067
atagaagtagaag

SEQ ID NO: 199416 - DNA, 13 bp, Artificial Sequence
  Oligonucleotide for detection of SNP TSC0049067
cttctacttctat

SEQ ID NO: 199417 - DNA, 13 bp, Artificial Sequence
  Oligonucleotide for detection of SNP TSC0049068
tttgttagaggtg

SEQ ID NO: 199418 - DNA, 13 bp, Artificial Sequence
  Oligonucleotide for detection of SNP TSC0049068
cacctctaacaaa

SEQ ID NO: 199419 - DNA, 13 bp, Artificial Sequence
  Oligonucleotide for detection of SNP TSC0049068
tttgttggaggtg

SEQ ID NO: 199420 - DNA, 13 bp, Artificial Sequence
  Oligonucleotide for detection of SNP TSC0049068
cacctccaacaaa

SEQ ID NO: 199421 - DNA, 13 bp, Artificial Sequence
  Oligonucleotide for detection of SNP TSC0049070
aatgtaagagtgg

SEQ ID NO: 199422 - DNA, 13 bp, Artificial Sequence
  Oligonucleotide for detection of SNP TSC0049070
ccactcttacatt

SEQ ID NO: 199423 - DNA, 13 bp, Artificial Sequence
  Oligonucleotide for detection of SNP TSC0049070
aatgtaggagtgg

SEQ ID NO: 199424 - DNA, 13 bp, Artificial Sequence
  Oligonucleotide for detection of SNP TSC0049070
ccactcctacatt

SEQ ID NO: 199425 - DNA, 13 bp, Artificial Sequence
  Oligonucleotide for detection of SNP TSC0049071
ggtttatttaaaa

SEQ ID NO: 199426 - DNA, 13 bp, Artificial Sequence
  Oligonucleotide for detection of SNP TSC0049071
ttttaaataaacc

SEQ ID NO: 199427 - DNA, 13 bp, Artificial Sequence
  Oligonucleotide for detection of SNP TSC0049071
ttttgaatgggty

SEQ ID NO: 199428 - DNA, 13 bp, Artificial Sequence
  Oligonucleotide for detection of SNP TSC0049071
racccattcaaaa

SEQ ID NO: 199429 - DNA, 13 bp, Artificial Sequence
  Oligonucleotide for detection of SNP TSC0049071
ttttgattgggty

SEQ ID NO: 199430 - DNA, 13 bp, Artificial Sequence
  Oligonucleotide for detection of SNP TSC0049071
racccaatcaaaa

SEQ ID NO: 199431 - DNA, 13 bp, Artificial Sequence
  Oligonucleotide for detection of SNP TSC0049072
tttgtaaaaataa

SEQ ID NO: 199432 - DNA, 13 bp, Artificial Sequence
  Oligonucleotide for detection of SNP TSC0049072
ttatttttacaaa

SEQ ID NO: 199433 - DNA, 13 bp, Artificial Sequence
  Oligonucleotide for detection of SNP TSC0049072
tttgtagaaataa

SEQ ID NO: 199434 - DNA, 13 bp, Artificial Sequence
  Oligonucleotide for detection of SNP TSC0049072
ttatttctacaaa

SEQ ID NO: 199435 - DNA, 13 bp, Artificial Sequence
  Oligonucleotide for detection of SNP TSC0049073
tttttagtagatt

SEQ ID NO: 199436 - DNA, 13 bp, Artificial Sequence
  Oligonucleotide for detection of SNP TSC0049073
aatctactaaaaa

SEQ ID NO: 199437 - DNA, 13 bp, Artificial Sequence
  Oligonucleotide for detection of SNP TSC0049076
gattatgaaatta

SEQ ID NO: 199438 - DNA, 13 bp, Artificial Sequence
  Oligonucleotide for detection of SNP TSC0049076
taatttcataatc

SEQ ID NO: 199439 - DNA, 13 bp, Artificial Sequence
  Oligonucleotide for detection of SNP TSC0049076
gattataaaatta

SEQ ID NO: 199440 - DNA, 13 bp, Artificial Sequence
  Oligonucleotide for detection of SNP TSC0049076
taattttataatc

SEQ ID NO: 199441 - DNA, 13 bp, Artificial Sequence
  Oligonucleotide for detection of SNP TSC0000385
aagtatgtaaatt

SEQ ID NO: 199442 - DNA, 13 bp, Artificial Sequence
  Oligonucleotide for detection of SNP TSC0000385
aatttacatactt

SEQ ID NO: 199443 - DNA, 13 bp, Artificial Sequence
  Oligonucleotide for detection of SNP TSC0000385
aagtatataaatt

SEQ ID NO: 199444 - DNA, 13 bp, Artificial Sequence
  Oligonucleotide for detection of SNP TSC0000385
aatttatatactt

SEQ ID NO: 199445 - DNA, 13 bp, Artificial Sequence
  Oligonucleotide for detection of SNP TSC0000386
agataaaattaay

SEQ ID NO: 199446 - DNA, 13 bp, Artificial Sequence
  Oligonucleotide for detection of SNP TSC0000386
rttaattttatct

SEQ ID NO: 199447 - DNA, 13 bp, Artificial Sequence
  Oligonucleotide for detection of SNP TSC0000386
agataatattaay

SEQ ID NO: 199448 - DNA, 13 bp, Artificial Sequence
  Oligonucleotide for detection of SNP TSC0000386
rttaatattatct

SEQ ID NO: 199449 - DNA, 13 bp, Artificial Sequence
  Oligonucleotide for detection of SNP TSC0049077
tgtgtatttttta

SEQ ID NO: 199450 - DNA, 13 bp, Artificial Sequence
  Oligonucleotide for detection of SNP TSC0049077
taaaaaatacaca

SEQ ID NO: 199451 - DNA, 13 bp, Artificial Sequence
  Oligonucleotide for detection of SNP TSC0049077
tgtgtagttttta

SEQ ID NO: 199452 - DNA, 13 bp, Artificial Sequence
  Oligonucleotide for detection of SNP TSC0049077
taaaaactacaca

SEQ ID NO: 199453 - DNA, 13 bp, Artificial Sequence
  Oligonucleotide for detection of SNP TSC0049077
taaaaagtgtata

SEQ ID NO: 199454 - DNA, 13 bp, Artificial Sequence
  Oligonucleotide for detection of SNP TSC0049077
tatacacttttta

SEQ ID NO: 199455 - DNA, 13 bp, Artificial Sequence
  Oligonucleotide for detection of SNP TSC0049077
taaaaattgtata

SEQ ID NO: 199456 - DNA, 13 bp, Artificial Sequence
  Oligonucleotide for detection of SNP TSC0049077
tatacaattttta

SEQ ID NO: 199457 - DNA, 13 bp, Artificial Sequence
  Oligonucleotide for detection of SNP TSC0049078
tttaaaatagaga

SEQ ID NO: 199458 - DNA, 13 bp, Artificial Sequence
  Oligonucleotide for detection of SNP TSC0049078
tctctattttaaa

SEQ ID NO: 199459 - DNA, 13 bp, Artificial Sequence
  Oligonucleotide for detection of SNP TSC0049078
tttaaattagaga

SEQ ID NO: 199460 - DNA, 13 bp, Artificial Sequence
  Oligonucleotide for detection of SNP TSC0049078
tctctaatttaaa

SEQ ID NO: 199461 - DNA, 13 bp, Artificial Sequence
  Oligonucleotide for detection of SNP TSC0049078
tttttattttaaa

SEQ ID NO: 199462 - DNA, 13 bp, Artificial Sequence
  Oligonucleotide for detection of SNP TSC0049078
tttaaaataaaaa

SEQ ID NO: 199463 - DNA, 13 bp, Artificial Sequence
  Oligonucleotide for detection of SNP TSC0049078
tttttagtttaaa

SEQ ID NO: 199464 - DNA, 13 bp, Artificial Sequence
  Oligonucleotide for detection of SNP TSC0049078
tttaaactaaaaa

SEQ ID NO: 199465 - DNA, 13 bp, Artificial Sequence
  Oligonucleotide for detection of SNP TSC0049079
tgaagtttttagy

SEQ ID NO: 199466 - DNA, 13 bp, Artificial Sequence
  Oligonucleotide for detection of SNP TSC0049079
rctaaaaacttca

SEQ ID NO: 199467 - DNA, 13 bp, Artificial Sequence
  Oligonucleotide for detection of SNP TSC0049079
tgaagtgtttagy

SEQ ID NO: 199468 - DNA, 13 bp, Artificial Sequence
  Oligonucleotide for detection of SNP TSC0049079
rctaaacacttca

SEQ ID NO: 199469 - DNA, 13 bp, Artificial Sequence
  Oligonucleotide for detection of SNP TSC0049079
tgaagcgtttagy

SEQ ID NO: 199470 - DNA, 13 bp, Artificial Sequence
  Oligonucleotide for detection of SNP TSC0049079
rctaaacgcttca

SEQ ID NO: 199471 - DNA, 13 bp, Artificial Sequence
  Oligonucleotide for detection of SNP TSC0049079
gttaaaagtttta

SEQ ID NO: 199472 - DNA, 13 bp, Artificial Sequence
  Oligonucleotide for detection of SNP TSC0049079
taaaacttttaac

SEQ ID NO: 199473 - DNA, 13 bp, Artificial Sequence
  Oligonucleotide for detection of SNP TSC0049079
gttaaatgtttta

SEQ ID NO: 199474 - DNA, 13 bp, Artificial Sequence
  Oligonucleotide for detection of SNP TSC0049079
taaaacatttaac

SEQ ID NO: 199475 - DNA, 13 bp, Artificial Sequence
  Oligonucleotide for detection of SNP TSC0049079
gttaaacgtttta

SEQ ID NO: 199476 - DNA, 13 bp, Artificial Sequence
  Oligonucleotide for detection of SNP TSC0049079
taaaacgtttaac

SEQ ID NO: 199477 - DNA, 13 bp, Artificial Sequence
  Oligonucleotide for detection of SNP TSC0049080
attaagattagag

SEQ ID NO: 199478 - DNA, 13 bp, Artificial Sequence
  Oligonucleotide for detection of SNP TSC0049080
ctctaatcttaat

SEQ ID NO: 199479 - DNA, 13 bp, Artificial Sequence
  Oligonucleotide for detection of SNP TSC0049080
attaaggttagag

SEQ ID NO: 199480 - DNA, 13 bp, Artificial Sequence
  Oligonucleotide for detection of SNP TSC0049080
ctctaaccttaat

SEQ ID NO: 199481 - DNA, 13 bp, Artificial Sequence
  Oligonucleotide for detection of SNP TSC0049081
tagattattattg

SEQ ID NO: 199482 - DNA, 13 bp, Artificial Sequence
  Oligonucleotide for detection of SNP TSC0049081
caataataatcta

SEQ ID NO: 199483 - DNA, 13 bp, Artificial Sequence
  Oligonucleotide for detection of SNP TSC0049081
tagatttttattg

SEQ ID NO: 199484 - DNA, 13 bp, Artificial Sequence
  Oligonucleotide for detection of SNP TSC0049081
caataaaaatcta

SEQ ID NO: 199485 - DNA, 13 bp, Artificial Sequence
  Oligonucleotide for detection of SNP TSC0049081
taataaagattta

SEQ ID NO: 199486 - DNA, 13 bp, Artificial Sequence
  Oligonucleotide for detection of SNP TSC0049081
taaatctttatta

SEQ ID NO: 199487 - DNA, 13 bp, Artificial Sequence
  Oligonucleotide for detection of SNP TSC0049082
ttattagtaatga

SEQ ID NO: 199488 - DNA, 13 bp, Artificial Sequence
  Oligonucleotide for detection of SNP TSC0049082
tcattactaataa

SEQ ID NO: 199489 - DNA, 13 bp, Artificial Sequence
  Oligonucleotide for detection of SNP TSC0049082
ttattaataatga

SEQ ID NO: 199490 - DNA, 13 bp, Artificial Sequence
  Oligonucleotide for detection of SNP TSC0049082
tcattattaataa

SEQ ID NO: 199491 - DNA, 13 bp, Artificial Sequence
  Oligonucleotide for detection of SNP TSC0049083
tgatgatgtttty

SEQ ID NO: 199492 - DNA, 13 bp, Artificial Sequence
  Oligonucleotide for detection of SNP TSC0049083
raaaacatcatca

SEQ ID NO: 199493 - DNA, 13 bp, Artificial Sequence
  Oligonucleotide for detection of SNP TSC0049083
tgatgacgtttty

SEQ ID NO: 199494 - DNA, 13 bp, Artificial Sequence
  Oligonucleotide for detection of SNP TSC0049083
raaaacgtcatca

SEQ ID NO: 199495 - DNA, 13 bp, Artificial Sequence
  Oligonucleotide for detection of SNP TSC0049083
gaaagtgttatta

SEQ ID NO: 199496 - DNA, 13 bp, Artificial Sequence
  Oligonucleotide for detection of SNP TSC0049083
taataacactttc

SEQ ID NO: 199497 - DNA, 13 bp, Artificial Sequence
  Oligonucleotide for detection of SNP TSC0049083
gaaagtattatta

SEQ ID NO: 199498 - DNA, 13 bp, Artificial Sequence
  Oligonucleotide for detection of SNP TSC0049083
taataatactttc

SEQ ID NO: 199499 - DNA, 13 bp, Artificial Sequence
  Oligonucleotide for detection of SNP TSC0049083
gaaagcgttatta

SEQ ID NO: 199500 - DNA, 13 bp, Artificial Sequence
  Oligonucleotide for detection of SNP TSC0049083
taataacgctttc

SEQ ID NO: 199501 - DNA, 13 bp, Artificial Sequence
  Oligonucleotide for detection of SNP TSC0004990
attggagataata

SEQ ID NO: 199502 - DNA, 13 bp, Artificial Sequence
  Oligonucleotide for detection of SNP TSC0004990
tattatctccaat

SEQ ID NO: 199503 - DNA, 13 bp, Artificial Sequence
  Oligonucleotide for detection of SNP TSC0004990
attggaaataata

SEQ ID NO: 199504 - DNA, 13 bp, Artificial Sequence
  Oligonucleotide for detection of SNP TSC0004990
tattatttccaat

SEQ ID NO: 199505 - DNA, 13 bp, Artificial Sequence
  Oligonucleotide for detection of SNP TSC0049085
atataataggatt

SEQ ID NO: 199506 - DNA, 13 bp, Artificial Sequence
  Oligonucleotide for detection of SNP TSC0049085
aatcctattatat

SEQ ID NO: 199507 - DNA, 13 bp, Artificial Sequence
  Oligonucleotide for detection of SNP TSC0049085
atataagaggatt

SEQ ID NO: 199508 - DNA, 13 bp, Artificial Sequence
  Oligonucleotide for detection of SNP TSC0049085
aatcctcttatat

SEQ ID NO: 199509 - DNA, 13 bp, Artificial Sequence
  Oligonucleotide for detection of SNP TSC0049085
aattttgttatgt

SEQ ID NO: 199510 - DNA, 13 bp, Artificial Sequence
  Oligonucleotide for detection of SNP TSC0049085
acataacaaaatt

SEQ ID NO: 199511 - DNA, 13 bp, Artificial Sequence
  Oligonucleotide for detection of SNP TSC0049085
aatttttttatgt

SEQ ID NO: 199512 - DNA, 13 bp, Artificial Sequence
  Oligonucleotide for detection of SNP TSC0049085
acataaaaaaatt

SEQ ID NO: 199513 - DNA, 13 bp, Artificial Sequence
  Oligonucleotide for detection of SNP TSC0049086
tagtagggttttt

SEQ ID NO: 199514 - DNA, 13 bp, Artificial Sequence
  Oligonucleotide for detection of SNP TSC0049086
aaaaaccctacta

SEQ ID NO: 199515 - DNA, 13 bp, Artificial Sequence
  Oligonucleotide for detection of SNP TSC0049086
aaaaatattgtta

SEQ ID NO: 199516 - DNA, 13 bp, Artificial Sequence
  Oligonucleotide for detection of SNP TSC0049086
taacaatattttt

SEQ ID NO: 199517 - DNA, 13 bp, Artificial Sequence
  Oligonucleotide for detection of SNP TSC0049086
aaaaattttgtta

SEQ ID NO: 199518 - DNA, 13 bp, Artificial Sequence
  Oligonucleotide for detection of SNP TSC0049086
taacaaaattttt

SEQ ID NO: 199519 - DNA, 13 bp, Artificial Sequence
  Oligonucleotide for detection of SNP TSC0049088
aagaaggttttat

SEQ ID NO: 199520 - DNA, 13 bp, Artificial Sequence
  Oligonucleotide for detection of SNP TSC0049088
ataaaaccttctt

SEQ ID NO: 199521 - DNA, 13 bp, Artificial Sequence
  Oligonucleotide for detection of SNP TSC0049088
aagaagattttat

SEQ ID NO: 199522 - DNA, 13 bp, Artificial Sequence
  Oligonucleotide for detection of SNP TSC0049088
ataaaatcttctt

SEQ ID NO: 199523 - DNA, 13 bp, Artificial Sequence
  Oligonucleotide for detection of SNP TSC0049090
tggtttgtaagtg

SEQ ID NO: 199524 - DNA, 13 bp, Artificial Sequence
  Oligonucleotide for detection of SNP TSC0049090
cacttacaaacca

SEQ ID NO: 199525 - DNA, 13 bp, Artificial Sequence
  Oligonucleotide for detection of SNP TSC0049090
tggtttataagtg

SEQ ID NO: 199526 - DNA, 13 bp, Artificial Sequence
  Oligonucleotide for detection of SNP TSC0049090
cacttataaacca

SEQ ID NO: 199527 - DNA, 13 bp, Artificial Sequence
  Oligonucleotide for detection of SNP TSC0049091
attataataattg

SEQ ID NO: 199528 - DNA, 13 bp, Artificial Sequence
  Oligonucleotide for detection of SNP TSC0049091
caattattataat

SEQ ID NO: 199529 - DNA, 13 bp, Artificial Sequence
  Oligonucleotide for detection of SNP TSC0049091
attatagtaattg

SEQ ID NO: 199530 - DNA, 13 bp, Artificial Sequence
  Oligonucleotide for detection of SNP TSC0049091
caattactataat

SEQ ID NO: 199531 - DNA, 13 bp, Artificial Sequence
  Oligonucleotide for detection of SNP TSC0049092
ttttatgatttay

SEQ ID NO: 199532 - DNA, 13 bp, Artificial Sequence
  Oligonucleotide for detection of SNP TSC0049092
rtaaatcataaaa

SEQ ID NO: 199533 - DNA, 13 bp, Artificial Sequence
  Oligonucleotide for detection of SNP TSC0049092
ttttacgatttay

SEQ ID NO: 199534 - DNA, 13 bp, Artificial Sequence
  Oligonucleotide for detection of SNP TSC0049092
rtaaatcgtaaaa

SEQ ID NO: 199535 - DNA, 13 bp, Artificial Sequence
  Oligonucleotide for detection of SNP TSC0049092
gtgagtggtgaaa

SEQ ID NO: 199536 - DNA, 13 bp, Artificial Sequence
  Oligonucleotide for detection of SNP TSC0049092
tttcaccactcac

SEQ ID NO: 199537 - DNA, 13 bp, Artificial Sequence
  Oligonucleotide for detection of SNP TSC0049092
gtgagttgtgaaa

SEQ ID NO: 199538 - DNA, 13 bp, Artificial Sequence
  Oligonucleotide for detection of SNP TSC0049092
tttcacaactcac

SEQ ID NO: 199539 - DNA, 13 bp, Artificial Sequence
  Oligonucleotide for detection of SNP TSC0049092
gtgagtcgtgaaa

SEQ ID NO: 199540 - DNA, 13 bp, Artificial Sequence
  Oligonucleotide for detection of SNP TSC0049092
tttcacgactcac

SEQ ID NO: 199541 - DNA, 13 bp, Artificial Sequence
  Oligonucleotide for detection of SNP TSC0008949
ttataggttttta

SEQ ID NO: 199542 - DNA, 13 bp, Artificial Sequence
  Oligonucleotide for detection of SNP TSC0008949
taaaaacctataa

SEQ ID NO: 199543 - DNA, 13 bp, Artificial Sequence
  Oligonucleotide for detection of SNP TSC0008949
taaaaggttgtag

SEQ ID NO: 199544 - DNA, 13 bp, Artificial Sequence
  Oligonucleotide for detection of SNP TSC0008949
ctacaacctttta

SEQ ID NO: 199545 - DNA, 13 bp, Artificial Sequence
  Oligonucleotide for detection of SNP TSC0008949
taaaagattgtag

SEQ ID NO: 199546 - DNA, 13 bp, Artificial Sequence
  Oligonucleotide for detection of SNP TSC0008949
ctacaatctttta

SEQ ID NO: 199547 - DNA, 13 bp, Artificial Sequence
  Oligonucleotide for detection of SNP TSC0008949
taaaagtttgtag

SEQ ID NO: 199548 - DNA, 13 bp, Artificial Sequence
  Oligonucleotide for detection of SNP TSC0008949
ctacaaactttta

SEQ ID NO: 199549 - DNA, 13 bp, Artificial Sequence
  Oligonucleotide for detection of SNP TSC0008950
aggttaatggaay

SEQ ID NO: 199550 - DNA, 13 bp, Artificial Sequence
  Oligonucleotide for detection of SNP TSC0008950
rttccattaacct

SEQ ID NO: 199551 - DNA, 13 bp, Artificial Sequence
  Oligonucleotide for detection of SNP TSC0008950
aggttattggaay

SEQ ID NO: 199552 - DNA, 13 bp, Artificial Sequence
  Oligonucleotide for detection of SNP TSC0008950
rttccaataacct

SEQ ID NO: 199553 - DNA, 13 bp, Artificial Sequence
  Oligonucleotide for detection of SNP TSC0008950
gttttattgattt

SEQ ID NO: 199554 - DNA, 13 bp, Artificial Sequence
  Oligonucleotide for detection of SNP TSC0008950
aaatcaataaaac

SEQ ID NO: 199555 - DNA, 13 bp, Artificial Sequence
  Oligonucleotide for detection of SNP TSC0008950
gttttagtgattt

SEQ ID NO: 199556 - DNA, 13 bp, Artificial Sequence
  Oligonucleotide for detection of SNP TSC0008950
aaatcactaaaac

SEQ ID NO: 199557 - DNA, 13 bp, Artificial Sequence
  Oligonucleotide for detection of SNP TSC0008950
gttttaatgattt

SEQ ID NO: 199558 - DNA, 13 bp, Artificial Sequence
  Oligonucleotide for detection of SNP TSC0008950
aaatcattaaaac

SEQ ID NO: 199559 - DNA, 13 bp, Artificial Sequence
  Oligonucleotide for detection of SNP TSC0049096
gatattataaaty

SEQ ID NO: 199560 - DNA, 13 bp, Artificial Sequence
  Oligonucleotide for detection of SNP TSC0049096
ratttataatatc

SEQ ID NO: 199561 - DNA, 13 bp, Artificial Sequence
  Oligonucleotide for detection of SNP TSC0049096
gatattgtaaaty

SEQ ID NO: 199562 - DNA, 13 bp, Artificial Sequence
  Oligonucleotide for detection of SNP TSC0049096
ratttacaatatc

SEQ ID NO: 199563 - DNA, 13 bp, Artificial Sequence
  Oligonucleotide for detection of SNP TSC0049096
gatatcgtaaaty

SEQ ID NO: 199564 - DNA, 13 bp, Artificial Sequence
  Oligonucleotide for detection of SNP TSC0049096
ratttacgatatc

SEQ ID NO: 199565 - DNA, 13 bp, Artificial Sequence
  Oligonucleotide for detection of SNP TSC0049096
ggtttgtgatgty

SEQ ID NO: 199566 - DNA, 13 bp, Artificial Sequence
  Oligonucleotide for detection of SNP TSC0049096
racatcacaaacc

SEQ ID NO: 199567 - DNA, 13 bp, Artificial Sequence
  Oligonucleotide for detection of SNP TSC0049096
ggtttgcgatgty

SEQ ID NO: 199568 - DNA, 13 bp, Artificial Sequence
  Oligonucleotide for detection of SNP TSC0049096
racatcgcaaacc

SEQ ID NO: 199569 - DNA, 13 bp, Artificial Sequence
  Oligonucleotide for detection of SNP TSC0049097
gttgaaatttagt

SEQ ID NO: 199570 - DNA, 13 bp, Artificial Sequence
  Oligonucleotide for detection of SNP TSC0049097
actaaatttcaac

SEQ ID NO: 199571 - DNA, 13 bp, Artificial Sequence
  Oligonucleotide for detection of SNP TSC0049097
gttgaattttagt

SEQ ID NO: 199572 - DNA, 13 bp, Artificial Sequence
  Oligonucleotide for detection of SNP TSC0049097
actaaaattcaac

SEQ ID NO: 199573 - DNA, 13 bp, Artificial Sequence
  Oligonucleotide for detection of SNP TSC0049097
attgaattttaay

SEQ ID NO: 199574 - DNA, 13 bp, Artificial Sequence
  Oligonucleotide for detection of SNP TSC0049097
rttaaaattcaat

SEQ ID NO: 199575 - DNA, 13 bp, Artificial Sequence
  Oligonucleotide for detection of SNP TSC0049097
attgaaatttaay

SEQ ID NO: 199576 - DNA, 13 bp, Artificial Sequence
  Oligonucleotide for detection of SNP TSC0049097
rttaaatttcaat

SEQ ID NO: 199577 - DNA, 13 bp, Artificial Sequence
  Oligonucleotide for detection of SNP TSC0008362
attatagtttgty

SEQ ID NO: 199578 - DNA, 13 bp, Artificial Sequence
  Oligonucleotide for detection of SNP TSC0008362
racaaactataat

SEQ ID NO: 199579 - DNA, 13 bp, Artificial Sequence
  Oligonucleotide for detection of SNP TSC0008362
attataatttgty

SEQ ID NO: 199580 - DNA, 13 bp, Artificial Sequence
  Oligonucleotide for detection of SNP TSC0008362
racaaattataat

SEQ ID NO: 199581 - DNA, 13 bp, Artificial Sequence
  Oligonucleotide for detection of SNP TSC0049101
aattttatggtta

SEQ ID NO: 199582 - DNA, 13 bp, Artificial Sequence
  Oligonucleotide for detection of SNP TSC0049101
taaccataaaatt

SEQ ID NO: 199583 - DNA, 13 bp, Artificial Sequence
  Oligonucleotide for detection of SNP TSC0049102
tgattagggaaay

SEQ ID NO: 199584 - DNA, 13 bp, Artificial Sequence
  Oligonucleotide for detection of SNP TSC0049102
rtttccctaatca

SEQ ID NO: 199585 - DNA, 13 bp, Artificial Sequence
  Oligonucleotide for detection of SNP TSC0049102
tgattaaggaaay

SEQ ID NO: 199586 - DNA, 13 bp, Artificial Sequence
  Oligonucleotide for detection of SNP TSC0049102
rtttccttaatca

SEQ ID NO: 199587 - DNA, 13 bp, Artificial Sequence
  Oligonucleotide for detection of SNP TSC0049103
attaataaaggtt

SEQ ID NO: 199588 - DNA, 13 bp, Artificial Sequence
  Oligonucleotide for detection of SNP TSC0049103
aacctttattaat

SEQ ID NO: 199589 - DNA, 13 bp, Artificial Sequence
  Oligonucleotide for detection of SNP TSC0049103
attaatgaaggtt

SEQ ID NO: 199590 - DNA, 13 bp, Artificial Sequence
  Oligonucleotide for detection of SNP TSC0049103
aaccttcattaat

SEQ ID NO: 199591 - DNA, 13 bp, Artificial Sequence
  Oligonucleotide for detection of SNP TSC0049103
attaacgaaggtt

SEQ ID NO: 199592 - DNA, 13 bp, Artificial Sequence
  Oligonucleotide for detection of SNP TSC0049103
aaccttcgttaat

SEQ ID NO: 199593 - DNA, 13 bp, Artificial Sequence
  Oligonucleotide for detection of SNP TSC0049103
agtttttgttggt

SEQ ID NO: 199594 - DNA, 13 bp, Artificial Sequence
  Oligonucleotide for detection of SNP TSC0049103
accaacaaaaact

SEQ ID NO: 199595 - DNA, 13 bp, Artificial Sequence
  Oligonucleotide for detection of SNP TSC0049103
agttttcgttggt

SEQ ID NO: 199596 - DNA, 13 bp, Artificial Sequence
  Oligonucleotide for detection of SNP TSC0049103
accaacgaaaact

SEQ ID NO: 199597 - DNA, 13 bp, Artificial Sequence
  Oligonucleotide for detection of SNP TSC0006989
gatagaagggtta

SEQ ID NO: 199598 - DNA, 13 bp, Artificial Sequence
  Oligonucleotide for detection of SNP TSC0006989
taacccttctatc

SEQ ID NO: 199599 - DNA, 13 bp, Artificial Sequence
  Oligonucleotide for detection of SNP TSC0006989
gatagaggggtta

SEQ ID NO: 199600 - DNA, 13 bp, Artificial Sequence
  Oligonucleotide for detection of SNP TSC0006989
taacccctctatc

SEQ ID NO: 199601 - DNA, 13 bp, Artificial Sequence
  Oligonucleotide for detection of SNP TSC0005075
gtgtgcgtatgtg

SEQ ID NO: 199602 - DNA, 13 bp, Artificial Sequence
  Oligonucleotide for detection of SNP TSC0005075
cacatacgcacac

SEQ ID NO: 199603 - DNA, 13 bp, Artificial Sequence
  Oligonucleotide for detection of SNP TSC0049104
aaaatatatgtat

SEQ ID NO: 199604 - DNA, 13 bp, Artificial Sequence
  Oligonucleotide for detection of SNP TSC0049104
atacatatatttt

SEQ ID NO: 199605 - DNA, 13 bp, Artificial Sequence
  Oligonucleotide for detection of SNP TSC0049104
aaaataaatgtat

SEQ ID NO: 199606 - DNA, 13 bp, Artificial Sequence
  Oligonucleotide for detection of SNP TSC0049104
atacatttatttt

SEQ ID NO: 199607 - DNA, 13 bp, Artificial Sequence
  Oligonucleotide for detection of SNP TSC0049105
tgtttaatgttag

SEQ ID NO: 199608 - DNA, 13 bp, Artificial Sequence
  Oligonucleotide for detection of SNP TSC0049105
ctaacattaaaca

SEQ ID NO: 199609 - DNA, 13 bp, Artificial Sequence
  Oligonucleotide for detection of SNP TSC0049105
tgtttagtgttag

SEQ ID NO: 199610 - DNA, 13 bp, Artificial Sequence
  Oligonucleotide for detection of SNP TSC0049105
ctaacactaaaca

SEQ ID NO: 199611 - DNA, 13 bp, Artificial Sequence
  Oligonucleotide for detection of SNP TSC0049109
ttgggtaatatat

SEQ ID NO: 199612 - DNA, 13 bp, Artificial Sequence
  Oligonucleotide for detection of SNP TSC0049109
atatattacccaa

SEQ ID NO: 199613 - DNA, 13 bp, Artificial Sequence
  Oligonucleotide for detection of SNP TSC0049109
ttgggttatatat

SEQ ID NO: 199614 - DNA, 13 bp, Artificial Sequence
  Oligonucleotide for detection of SNP TSC0049109
atatataacccaa

SEQ ID NO: 199615 - DNA, 13 bp, Artificial Sequence
  Oligonucleotide for detection of SNP TSC0049109
atgtgttgtttaa

SEQ ID NO: 199616 - DNA, 13 bp, Artificial Sequence
  Oligonucleotide for detection of SNP TSC0049109
ttaaacaacacat

SEQ ID NO: 199617 - DNA, 13 bp, Artificial Sequence
  Oligonucleotide for detection of SNP TSC0049109
atgtgtggtttaa

SEQ ID NO: 199618 - DNA, 13 bp, Artificial Sequence
  Oligonucleotide for detection of SNP TSC0049109
ttaaaccacacat

SEQ ID NO: 199619 - DNA, 13 bp, Artificial Sequence
  Oligonucleotide for detection of SNP TSC0049110
ttaatggtttagy

SEQ ID NO: 199620 - DNA, 13 bp, Artificial Sequence
  Oligonucleotide for detection of SNP TSC0049110
rctaaaccattaa

SEQ ID NO: 199621 - DNA, 13 bp, Artificial Sequence
  Oligonucleotide for detection of SNP TSC0049110
ttaatgatttagy

SEQ ID NO: 199622 - DNA, 13 bp, Artificial Sequence
  Oligonucleotide for detection of SNP TSC0049110
rctaaatcattaa

SEQ ID NO: 199623 - DNA, 13 bp, Artificial Sequence
  Oligonucleotide for detection of SNP TSC0049110
ttaacggtttagy

SEQ ID NO: 199624 - DNA, 13 bp, Artificial Sequence
  Oligonucleotide for detection of SNP TSC0049110
rctaaaccgttaa

SEQ ID NO: 199625 - DNA, 13 bp, Artificial Sequence
  Oligonucleotide for detection of SNP TSC0049110
ttaacgatttagy

SEQ ID NO: 199626 - DNA, 13 bp, Artificial Sequence
  Oligonucleotide for detection of SNP TSC0049110
rctaaatcgttaa

SEQ ID NO: 199627 - DNA, 13 bp, Artificial Sequence
  Oligonucleotide for detection of SNP TSC0049111
tttaagtagttgg

SEQ ID NO: 199628 - DNA, 13 bp, Artificial Sequence
  Oligonucleotide for detection of SNP TSC0049111
ccaactacttaaa

SEQ ID NO: 199629 - DNA, 13 bp, Artificial Sequence
  Oligonucleotide for detection of SNP TSC0049111
tttaagaagttgg

SEQ ID NO: 199630 - DNA, 13 bp, Artificial Sequence
  Oligonucleotide for detection of SNP TSC0049111
ccaacttcttaaa

SEQ ID NO: 199631 - DNA, 13 bp, Artificial Sequence
  Oligonucleotide for detection of SNP TSC0049113
gatttgattaatg

SEQ ID NO: 199632 - DNA, 13 bp, Artificial Sequence
  Oligonucleotide for detection of SNP TSC0049113
cattaatcaaatc

SEQ ID NO: 199633 - DNA, 13 bp, Artificial Sequence
  Oligonucleotide for detection of SNP TSC0049113
gatttgtttaatg

SEQ ID NO: 199634 - DNA, 13 bp, Artificial Sequence
  Oligonucleotide for detection of SNP TSC0049113
cattaaacaaatc

SEQ ID NO: 199635 - DNA, 13 bp, Artificial Sequence
  Oligonucleotide for detection of SNP TSC0049113
tattagttagaty

SEQ ID NO: 199636 - DNA, 13 bp, Artificial Sequence
  Oligonucleotide for detection of SNP TSC0049113
ratctaactaata

SEQ ID NO: 199637 - DNA, 13 bp, Artificial Sequence
  Oligonucleotide for detection of SNP TSC0049113
tattagatagaty

SEQ ID NO: 199638 - DNA, 13 bp, Artificial Sequence
  Oligonucleotide for detection of SNP TSC0049113
ratctatctaata

SEQ ID NO: 199639 - DNA, 13 bp, Artificial Sequence
  Oligonucleotide for detection of SNP TSC0049114
atgtttataaatt

SEQ ID NO: 199640 - DNA, 13 bp, Artificial Sequence
  Oligonucleotide for detection of SNP TSC0049114
aatttataaacat

SEQ ID NO: 199641 - DNA, 13 bp, Artificial Sequence
  Oligonucleotide for detection of SNP TSC0049114
atgtttgtaaatt

SEQ ID NO: 199642 - DNA, 13 bp, Artificial Sequence
  Oligonucleotide for detection of SNP TSC0049114
aatttacaaacat

SEQ ID NO: 199643 - DNA, 13 bp, Artificial Sequence
  Oligonucleotide for detection of SNP TSC0049114
atgttcgtaaatt

SEQ ID NO: 199644 - DNA, 13 bp, Artificial Sequence
  Oligonucleotide for detection of SNP TSC0049114
aatttacgaacat

SEQ ID NO: 199645 - DNA, 13 bp, Artificial Sequence
  Oligonucleotide for detection of SNP TSC0049114
aatttgtgaatat

SEQ ID NO: 199646 - DNA, 13 bp, Artificial Sequence
  Oligonucleotide for detection of SNP TSC0049114
atattcacaaatt

SEQ ID NO: 199647 - DNA, 13 bp, Artificial Sequence
  Oligonucleotide for detection of SNP TSC0049114
aatttgcgaatat

SEQ ID NO: 199648 - DNA, 13 bp, Artificial Sequence
  Oligonucleotide for detection of SNP TSC0049114
atattcgcaaatt

SEQ ID NO: 199649 - DNA, 13 bp, Artificial Sequence
  Oligonucleotide for detection of SNP TSC0009330
attttaagggaaa

SEQ ID NO: 199650 - DNA, 13 bp, Artificial Sequence
  Oligonucleotide for detection of SNP TSC0009330
tttcccttaaaat

SEQ ID NO: 199651 - DNA, 13 bp, Artificial Sequence
  Oligonucleotide for detection of SNP TSC0009330
attttatgggaaa

SEQ ID NO: 199652 - DNA, 13 bp, Artificial Sequence
  Oligonucleotide for detection of SNP TSC0009330
tttcccataaaat

SEQ ID NO: 199653 - DNA, 13 bp, Artificial Sequence
  Oligonucleotide for detection of SNP TSC0009330
attttacgggaaa

SEQ ID NO: 199654 - DNA, 13 bp, Artificial Sequence
  Oligonucleotide for detection of SNP TSC0009330
tttcccgtaaaat

SEQ ID NO: 199655 - DNA, 13 bp, Artificial Sequence
  Oligonucleotide for detection of SNP TSC0009331
aagttagaataat

SEQ ID NO: 199656 - DNA, 13 bp, Artificial Sequence
  Oligonucleotide for detection of SNP TSC0009331
attattctaactt

SEQ ID NO: 199657 - DNA, 13 bp, Artificial Sequence
  Oligonucleotide for detection of SNP TSC0009331
aagttaaaataat

SEQ ID NO: 199658 - DNA, 13 bp, Artificial Sequence
  Oligonucleotide for detection of SNP TSC0009331
attattttaactt

SEQ ID NO: 199659 - DNA, 13 bp, Artificial Sequence
  Oligonucleotide for detection of SNP TSC0006755
aggtgagtttgtg

SEQ ID NO: 199660 - DNA, 13 bp, Artificial Sequence
  Oligonucleotide for detection of SNP TSC0006755
cacaaactcacct

SEQ ID NO: 199661 - DNA, 13 bp, Artificial Sequence
  Oligonucleotide for detection of SNP TSC0006755
aggtgaatttgtg

SEQ ID NO: 199662 - DNA, 13 bp, Artificial Sequence
  Oligonucleotide for detection of SNP TSC0006755
cacaaattcacct

SEQ ID NO: 199663 - DNA, 13 bp, Artificial Sequence
  Oligonucleotide for detection of SNP TSC0049117
gaatttttgtttg

SEQ ID NO: 199664 - DNA, 13 bp, Artificial Sequence
  Oligonucleotide for detection of SNP TSC0049117
caaacaaaaattc

SEQ ID NO: 199665 - DNA, 13 bp, Artificial Sequence
  Oligonucleotide for detection of SNP TSC0049117
gaatttgtgtttg

SEQ ID NO: 199666 - DNA, 13 bp, Artificial Sequence
  Oligonucleotide for detection of SNP TSC0049117
caaacacaaattc

SEQ ID NO: 199667 - DNA, 13 bp, Artificial Sequence
  Oligonucleotide for detection of SNP TSC0049117
taagtagaaatty

SEQ ID NO: 199668 - DNA, 13 bp, Artificial Sequence
  Oligonucleotide for detection of SNP TSC0049117
raatttctactta

SEQ ID NO: 199669 - DNA, 13 bp, Artificial Sequence
  Oligonucleotide for detection of SNP TSC0049117
taagtataaatty

SEQ ID NO: 199670 - DNA, 13 bp, Artificial Sequence
  Oligonucleotide for detection of SNP TSC0049117
raatttatactta

SEQ ID NO: 199671 - DNA, 13 bp, Artificial Sequence
  Oligonucleotide for detection of SNP TSC0049118
attgtaataatta

SEQ ID NO: 199672 - DNA, 13 bp, Artificial Sequence
  Oligonucleotide for detection of SNP TSC0049118
taattattacaat

SEQ ID NO: 199673 - DNA, 13 bp, Artificial Sequence
  Oligonucleotide for detection of SNP TSC0049118
attgtagtaatta

SEQ ID NO: 199674 - DNA, 13 bp, Artificial Sequence
  Oligonucleotide for detection of SNP TSC0049118
taattactacaat

SEQ ID NO: 199675 - DNA, 13 bp, Artificial Sequence
  Oligonucleotide for detection of SNP TSC0049119
tgggtattttaag

SEQ ID NO: 199676 - DNA, 13 bp, Artificial Sequence
  Oligonucleotide for detection of SNP TSC0049119
cttaaaataccca

SEQ ID NO: 199677 - DNA, 13 bp, Artificial Sequence
  Oligonucleotide for detection of SNP TSC0049119
tgggtagtttaag

SEQ ID NO: 199678 - DNA, 13 bp, Artificial Sequence
  Oligonucleotide for detection of SNP TSC0049119
cttaaactaccca

SEQ ID NO: 199679 - DNA, 13 bp, Artificial Sequence
  Oligonucleotide for detection of SNP TSC0049119
cgggtattttaag

SEQ ID NO: 199680 - DNA, 13 bp, Artificial Sequence
  Oligonucleotide for detection of SNP TSC0049119
cttaaaatacccg

SEQ ID NO: 199681 - DNA, 13 bp, Artificial Sequence
  Oligonucleotide for detection of SNP TSC0049119
cgggtagtttaag

SEQ ID NO: 199682 - DNA, 13 bp, Artificial Sequence
  Oligonucleotide for detection of SNP TSC0049119
cttaaactacccg

SEQ ID NO: 199683 - DNA, 13 bp, Artificial Sequence
  Oligonucleotide for detection of SNP TSC0049119
tttggggtgtttg

SEQ ID NO: 199684 - DNA, 13 bp, Artificial Sequence
  Oligonucleotide for detection of SNP TSC0049119
caaacaccccaaa

SEQ ID NO: 199685 - DNA, 13 bp, Artificial Sequence
  Oligonucleotide for detection of SNP TSC0049119
tttgggttgtttg

SEQ ID NO: 199686 - DNA, 13 bp, Artificial Sequence
  Oligonucleotide for detection of SNP TSC0049119
caaacaacccaaa

SEQ ID NO: 199687 - DNA, 13 bp, Artificial Sequence
  Oligonucleotide for detection of SNP TSC0049119
tttggggtgttcg

SEQ ID NO: 199688 - DNA, 13 bp, Artificial Sequence
  Oligonucleotide for detection of SNP TSC0049119
cgaacaccccaaa

SEQ ID NO: 199689 - DNA, 13 bp, Artificial Sequence
  Oligonucleotide for detection of SNP TSC0049119
tttgggttgttcg

SEQ ID NO: 199690 - DNA, 13 bp, Artificial Sequence
  Oligonucleotide for detection of SNP TSC0049119
cgaacaacccaaa

SEQ ID NO: 199691 - DNA, 13 bp, Artificial Sequence
  Oligonucleotide for detection of SNP TSC0049120
gtttgagaagaat

SEQ ID NO: 199692 - DNA, 13 bp, Artificial Sequence
  Oligonucleotide for detection of SNP TSC0049120
attcttctcaaac

SEQ ID NO: 199693 - DNA, 13 bp, Artificial Sequence
  Oligonucleotide for detection of SNP TSC0049120
gtttgaaaagaat

SEQ ID NO: 199694 - DNA, 13 bp, Artificial Sequence
  Oligonucleotide for detection of SNP TSC0049120
attcttttcaaac

SEQ ID NO: 199695 - DNA, 13 bp, Artificial Sequence
  Oligonucleotide for detection of SNP TSC0005910
ttgggttgtttag

SEQ ID NO: 199696 - DNA, 13 bp, Artificial Sequence
  Oligonucleotide for detection of SNP TSC0005910
ctaaacaacccaa

SEQ ID NO: 199697 - DNA, 13 bp, Artificial Sequence
  Oligonucleotide for detection of SNP TSC0005910
ttgggtcgtttag

SEQ ID NO: 199698 - DNA, 13 bp, Artificial Sequence
  Oligonucleotide for detection of SNP TSC0005910
ctaaacgacccaa

SEQ ID NO: 199699 - DNA, 13 bp, Artificial Sequence
  Oligonucleotide for detection of SNP TSC0005785
tggttaatatggt

SEQ ID NO: 199700 - DNA, 13 bp, Artificial Sequence
  Oligonucleotide for detection of SNP TSC0005785
accatattaacca

SEQ ID NO: 199701 - DNA, 13 bp, Artificial Sequence
  Oligonucleotide for detection of SNP TSC0005785
tggttagtatggt

SEQ ID NO: 199702 - DNA, 13 bp, Artificial Sequence
  Oligonucleotide for detection of SNP TSC0005785
accatactaacca

SEQ ID NO: 199703 - DNA, 13 bp, Artificial Sequence
  Oligonucleotide for detection of SNP TSC0049124
tagttaaaaaaay

SEQ ID NO: 199704 - DNA, 13 bp, Artificial Sequence
  Oligonucleotide for detection of SNP TSC0049124
rtttttttaacta

SEQ ID NO: 199705 - DNA, 13 bp, Artificial Sequence
  Oligonucleotide for detection of SNP TSC0049124
tagttagaaaaay

SEQ ID NO: 199706 - DNA, 13 bp, Artificial Sequence
  Oligonucleotide for detection of SNP TSC0049124
rtttttctaacta

SEQ ID NO: 199707 - DNA, 13 bp, Artificial Sequence
  Oligonucleotide for detection of SNP TSC0049125
tgttaaataggga

SEQ ID NO: 199708 - DNA, 13 bp, Artificial Sequence
  Oligonucleotide for detection of SNP TSC0049125
tccctatttaaca

SEQ ID NO: 199709 - DNA, 13 bp, Artificial Sequence
  Oligonucleotide for detection of SNP TSC0049125
tgttaagtaggga

SEQ ID NO: 199710 - DNA, 13 bp, Artificial Sequence
  Oligonucleotide for detection of SNP TSC0049125
tccctacttaaca

SEQ ID NO: 199711 - DNA, 13 bp, Artificial Sequence
  Oligonucleotide for detection of SNP TSC0049126
tagtatgagatta

SEQ ID NO: 199712 - DNA, 13 bp, Artificial Sequence
  Oligonucleotide for detection of SNP TSC0049126
taatctcatacta

SEQ ID NO: 199713 - DNA, 13 bp, Artificial Sequence
  Oligonucleotide for detection of SNP TSC0049126
tagtataagatta

SEQ ID NO: 199714 - DNA, 13 bp, Artificial Sequence
  Oligonucleotide for detection of SNP TSC0049126
taatcttatacta

SEQ ID NO: 199715 - DNA, 13 bp, Artificial Sequence
  Oligonucleotide for detection of SNP TSC0049127
tgttataaattty

SEQ ID NO: 199716 - DNA, 13 bp, Artificial Sequence
  Oligonucleotide for detection of SNP TSC0049127
raaatttataaca

SEQ ID NO: 199717 - DNA, 13 bp, Artificial Sequence
  Oligonucleotide for detection of SNP TSC0049127
tgttattaattty

SEQ ID NO: 199718 - DNA, 13 bp, Artificial Sequence
  Oligonucleotide for detection of SNP TSC0049127
raaattaataaca

SEQ ID NO: 199719 - DNA, 13 bp, Artificial Sequence
  Oligonucleotide for detection of SNP TSC0049127
gaaatttatagta

SEQ ID NO: 199720 - DNA, 13 bp, Artificial Sequence
  Oligonucleotide for detection of SNP TSC0049127
tactataaatttc

SEQ ID NO: 199721 - DNA, 13 bp, Artificial Sequence
  Oligonucleotide for detection of SNP TSC0049127
gaaattgatagta

SEQ ID NO: 199722 - DNA, 13 bp, Artificial Sequence
  Oligonucleotide for detection of SNP TSC0049127
tactatcaatttc

SEQ ID NO: 199723 - DNA, 13 bp, Artificial Sequence
  Oligonucleotide for detection of SNP TSC0049128
ttagtattgattg

SEQ ID NO: 199724 - DNA, 13 bp, Artificial Sequence
  Oligonucleotide for detection of SNP TSC0049128
caatcaatactaa

SEQ ID NO: 199725 - DNA, 13 bp, Artificial Sequence
  Oligonucleotide for detection of SNP TSC0049128
ttagtagtgattg

SEQ ID NO: 199726 - DNA, 13 bp, Artificial Sequence
  Oligonucleotide for detection of SNP TSC0049128
caatcactactaa

SEQ ID NO: 199727 - DNA, 13 bp, Artificial Sequence
  Oligonucleotide for detection of SNP TSC0049128
taattattattga

SEQ ID NO: 199728 - DNA, 13 bp, Artificial Sequence
  Oligonucleotide for detection of SNP TSC0049128
tcaataataatta

SEQ ID NO: 199729 - DNA, 13 bp, Artificial Sequence
  Oligonucleotide for detection of SNP TSC0049129
attttgatatttt

SEQ ID NO: 199730 - DNA, 13 bp, Artificial Sequence
  Oligonucleotide for detection of SNP TSC0049129
aaaatatcaaaat

SEQ ID NO: 199731 - DNA, 13 bp, Artificial Sequence
  Oligonucleotide for detection of SNP TSC0049129
attttggtatttt

SEQ ID NO: 199732 - DNA, 13 bp, Artificial Sequence
  Oligonucleotide for detection of SNP TSC0049129
aaaataccaaaat

SEQ ID NO: 199733 - DNA, 13 bp, Artificial Sequence
  Oligonucleotide for detection of SNP TSC0049129
atttcgatatttt

SEQ ID NO: 199734 - DNA, 13 bp, Artificial Sequence
  Oligonucleotide for detection of SNP TSC0049129
aaaatatcgaaat

SEQ ID NO: 199735 - DNA, 13 bp, Artificial Sequence
  Oligonucleotide for detection of SNP TSC0049129
atttcggtatttt

SEQ ID NO: 199736 - DNA, 13 bp, Artificial Sequence
  Oligonucleotide for detection of SNP TSC0049129
aaaataccgaaat

SEQ ID NO: 199737 - DNA, 13 bp, Artificial Sequence
  Oligonucleotide for detection of SNP TSC0049130
agaggaattttta

SEQ ID NO: 199738 - DNA, 13 bp, Artificial Sequence
  Oligonucleotide for detection of SNP TSC0049130
taaaaattcctct

SEQ ID NO: 199739 - DNA, 13 bp, Artificial Sequence
  Oligonucleotide for detection of SNP TSC0049130
agaggagttttta

SEQ ID NO: 199740 - DNA, 13 bp, Artificial Sequence
  Oligonucleotide for detection of SNP TSC0049130
taaaaactcctct

SEQ ID NO: 199741 - DNA, 13 bp, Artificial Sequence
  Oligonucleotide for detection of SNP TSC0007126
agggagtatattt

SEQ ID NO: 199742 - DNA, 13 bp, Artificial Sequence
  Oligonucleotide for detection of SNP TSC0007126
aaatatactccct

SEQ ID NO: 199743 - DNA, 13 bp, Artificial Sequence
  Oligonucleotide for detection of SNP TSC0007126
agggaggatattt

SEQ ID NO: 199744 - DNA, 13 bp, Artificial Sequence
  Oligonucleotide for detection of SNP TSC0007126
aaatatcctccct

SEQ ID NO: 199745 - DNA, 13 bp, Artificial Sequence
  Oligonucleotide for detection of SNP TSC0007126
aagtgtttttttt

SEQ ID NO: 199746 - DNA, 13 bp, Artificial Sequence
  Oligonucleotide for detection of SNP TSC0007126
aaaaaaaacactt

SEQ ID NO: 199747 - DNA, 13 bp, Artificial Sequence
  Oligonucleotide for detection of SNP TSC0009781
ggtttgattaaaa

SEQ ID NO: 199748 - DNA, 13 bp, Artificial Sequence
  Oligonucleotide for detection of SNP TSC0009781
ttttaatcaaacc

SEQ ID NO: 199749 - DNA, 13 bp, Artificial Sequence
  Oligonucleotide for detection of SNP TSC0009781
ggtttggttaaaa

SEQ ID NO: 199750 - DNA, 13 bp, Artificial Sequence
  Oligonucleotide for detection of SNP TSC0009781
ttttaaccaaacc

SEQ ID NO: 199751 - DNA, 13 bp, Artificial Sequence
  Oligonucleotide for detection of SNP TSC0049135
gttaattggatta

SEQ ID NO: 199752 - DNA, 13 bp, Artificial Sequence
  Oligonucleotide for detection of SNP TSC0049135
taatccaattaac

SEQ ID NO: 199753 - DNA, 13 bp, Artificial Sequence
  Oligonucleotide for detection of SNP TSC0049135
gttaatcggatta

SEQ ID NO: 199754 - DNA, 13 bp, Artificial Sequence
  Oligonucleotide for detection of SNP TSC0049135
taatccgattaac

SEQ ID NO: 199755 - DNA, 13 bp, Artificial Sequence
  Oligonucleotide for detection of SNP TSC0049135
tgatttggttaay

SEQ ID NO: 199756 - DNA, 13 bp, Artificial Sequence
  Oligonucleotide for detection of SNP TSC0049135
rttaaccaaatca

SEQ ID NO: 199757 - DNA, 13 bp, Artificial Sequence
  Oligonucleotide for detection of SNP TSC0049135
tgatttagttaay

SEQ ID NO: 199758 - DNA, 13 bp, Artificial Sequence
  Oligonucleotide for detection of SNP TSC0049135
rttaactaaatca

SEQ ID NO: 199759 - DNA, 13 bp, Artificial Sequence
  Oligonucleotide for detection of SNP TSC0049135
tgattcggttaay

SEQ ID NO: 199760 - DNA, 13 bp, Artificial Sequence
  Oligonucleotide for detection of SNP TSC0049135
rttaaccgaatca

SEQ ID NO: 199761 - DNA, 13 bp, Artificial Sequence
  Oligonucleotide for detection of SNP TSC0049136
aaatatgtgttaa

SEQ ID NO: 199762 - DNA, 13 bp, Artificial Sequence
  Oligonucleotide for detection of SNP TSC0049136
ttaacacatattt

SEQ ID NO: 199763 - DNA, 13 bp, Artificial Sequence
  Oligonucleotide for detection of SNP TSC0049136
aaatatatgttaa

SEQ ID NO: 199764 - DNA, 13 bp, Artificial Sequence
  Oligonucleotide for detection of SNP TSC0049136
ttaacatatattt

SEQ ID NO: 199765 - DNA, 13 bp, Artificial Sequence
  Oligonucleotide for detection of SNP TSC0049137
gaagatagggtat

SEQ ID NO: 199766 - DNA, 13 bp, Artificial Sequence
  Oligonucleotide for detection of SNP TSC0049137
ataccctatcttc

SEQ ID NO: 199767 - DNA, 13 bp, Artificial Sequence
  Oligonucleotide for detection of SNP TSC0049137
gaagatggggtat

SEQ ID NO: 199768 - DNA, 13 bp, Artificial Sequence
  Oligonucleotide for detection of SNP TSC0049137
ataccccatcttc

SEQ ID NO: 199769 - DNA, 13 bp, Artificial Sequence
  Oligonucleotide for detection of SNP TSC0049137
gaagacggggtat

SEQ ID NO: 199770 - DNA, 13 bp, Artificial Sequence
  Oligonucleotide for detection of SNP TSC0049137
ataccccgtcttc

SEQ ID NO: 199771 - DNA, 13 bp, Artificial Sequence
  Oligonucleotide for detection of SNP TSC0049138
aggtagtttttta

SEQ ID NO: 199772 - DNA, 13 bp, Artificial Sequence
  Oligonucleotide for detection of SNP TSC0049138
taaaaaactacct

SEQ ID NO: 199773 - DNA, 13 bp, Artificial Sequence
  Oligonucleotide for detection of SNP TSC0049138
aggtaggttttta

SEQ ID NO: 199774 - DNA, 13 bp, Artificial Sequence
  Oligonucleotide for detection of SNP TSC0049138
taaaaacctacct

SEQ ID NO: 199775 - DNA, 13 bp, Artificial Sequence
  Oligonucleotide for detection of SNP TSC0049138
tgagaaattgttt

SEQ ID NO: 199776 - DNA, 13 bp, Artificial Sequence
  Oligonucleotide for detection of SNP TSC0049138
aaacaatttctca

SEQ ID NO: 199777 - DNA, 13 bp, Artificial Sequence
  Oligonucleotide for detection of SNP TSC0049138
tgagaatttgttt

SEQ ID NO: 199778 - DNA, 13 bp, Artificial Sequence
  Oligonucleotide for detection of SNP TSC0049138
aaacaaattctca

SEQ ID NO: 199779 - DNA, 13 bp, Artificial Sequence
  Oligonucleotide for detection of SNP TSC0049140
tttaaaaatgaaa

SEQ ID NO: 199780 - DNA, 13 bp, Artificial Sequence
  Oligonucleotide for detection of SNP TSC0049140
tttcatttttaaa

SEQ ID NO: 199781 - DNA, 13 bp, Artificial Sequence
  Oligonucleotide for detection of SNP TSC0049140
tttaaagatgaaa

SEQ ID NO: 199782 - DNA, 13 bp, Artificial Sequence
  Oligonucleotide for detection of SNP TSC0049140
tttcatctttaaa

SEQ ID NO: 199783 - DNA, 13 bp, Artificial Sequence
  Oligonucleotide for detection of SNP TSC0049141
gtttggatagtgt

SEQ ID NO: 199784 - DNA, 13 bp, Artificial Sequence
  Oligonucleotide for detection of SNP TSC0049141
acactatccaaac

SEQ ID NO: 199785 - DNA, 13 bp, Artificial Sequence
  Oligonucleotide for detection of SNP TSC0049141
gtttgggtagtgt

SEQ ID NO: 199786 - DNA, 13 bp, Artificial Sequence
  Oligonucleotide for detection of SNP TSC0049141
acactacccaaac

SEQ ID NO: 199787 - DNA, 13 bp, Artificial Sequence
  Oligonucleotide for detection of SNP TSC0049146
atatgaggttaaa

SEQ ID NO: 199788 - DNA, 13 bp, Artificial Sequence
  Oligonucleotide for detection of SNP TSC0049146
tttaacctcatat

SEQ ID NO: 199789 - DNA, 13 bp, Artificial Sequence
  Oligonucleotide for detection of SNP TSC0049146
atatgaagttaaa

SEQ ID NO: 199790 - DNA, 13 bp, Artificial Sequence
  Oligonucleotide for detection of SNP TSC0049146
tttaacttcatat

SEQ ID NO: 199791 - DNA, 13 bp, Artificial Sequence
  Oligonucleotide for detection of SNP TSC0049147
ggtttaggatata

SEQ ID NO: 199792 - DNA, 13 bp, Artificial Sequence
  Oligonucleotide for detection of SNP TSC0049147
tatatcctaaacc

SEQ ID NO: 199793 - DNA, 13 bp, Artificial Sequence
  Oligonucleotide for detection of SNP TSC0049147
ggtttaagatata

SEQ ID NO: 199794 - DNA, 13 bp, Artificial Sequence
  Oligonucleotide for detection of SNP TSC0049147
tatatcttaaacc

SEQ ID NO: 199795 - DNA, 13 bp, Artificial Sequence
  Oligonucleotide for detection of SNP TSC0049150
aaaaaaaaagaaa

SEQ ID NO: 199796 - DNA, 13 bp, Artificial Sequence
  Oligonucleotide for detection of SNP TSC0049150
tttcttttttttt

SEQ ID NO: 199797 - DNA, 13 bp, Artificial Sequence
  Oligonucleotide for detection of SNP TSC0049150
aaaaaataagaaa

SEQ ID NO: 199798 - DNA, 13 bp, Artificial Sequence
  Oligonucleotide for detection of SNP TSC0049150
tttcttatttttt

SEQ ID NO: 199799 - DNA, 13 bp, Artificial Sequence
  Oligonucleotide for detection of SNP TSC0049153
gaagatatgagaa

SEQ ID NO: 199800 - DNA, 13 bp, Artificial Sequence
  Oligonucleotide for detection of SNP TSC0049153
ttctcatatcttc

SEQ ID NO: 199801 - DNA, 13 bp, Artificial Sequence
  Oligonucleotide for detection of SNP TSC0049153
gaagatgtgagaa

SEQ ID NO: 199802 - DNA, 13 bp, Artificial Sequence
  Oligonucleotide for detection of SNP TSC0049153
ttctcacatcttc

SEQ ID NO: 199803 - DNA, 13 bp, Artificial Sequence
  Oligonucleotide for detection of SNP TSC0049153
gaagacgtgagaa

SEQ ID NO: 199804 - DNA, 13 bp, Artificial Sequence
  Oligonucleotide for detection of SNP TSC0049153
ttctcacgtcttc

SEQ ID NO: 199805 - DNA, 13 bp, Artificial Sequence
  Oligonucleotide for detection of SNP TSC0049154
aagaaagaaaata

SEQ ID NO: 199806 - DNA, 13 bp, Artificial Sequence
  Oligonucleotide for detection of SNP TSC0049154
tattttctttctt

SEQ ID NO: 199807 - DNA, 13 bp, Artificial Sequence
  Oligonucleotide for detection of SNP TSC0049154
aagaaataaaata

SEQ ID NO: 199808 - DNA, 13 bp, Artificial Sequence
  Oligonucleotide for detection of SNP TSC0049154
tattttatttctt

SEQ ID NO: 199809 - DNA, 13 bp, Artificial Sequence
  Oligonucleotide for detection of SNP TSC0049156
tggatatttgtaa

SEQ ID NO: 199810 - DNA, 13 bp, Artificial Sequence
  Oligonucleotide for detection of SNP TSC0049156
ttacaaatatcca

SEQ ID NO: 199811 - DNA, 13 bp, Artificial Sequence
  Oligonucleotide for detection of SNP TSC0049156
tggatagttgtaa

SEQ ID NO: 199812 - DNA, 13 bp, Artificial Sequence
  Oligonucleotide for detection of SNP TSC0049156
ttacaactatcca

SEQ ID NO: 199813 - DNA, 13 bp, Artificial Sequence
  Oligonucleotide for detection of SNP TSC0049156
ttgtaggtgttta

SEQ ID NO: 199814 - DNA, 13 bp, Artificial Sequence
  Oligonucleotide for detection of SNP TSC0049156
taaacacctacaa

SEQ ID NO: 199815 - DNA, 13 bp, Artificial Sequence
  Oligonucleotide for detection of SNP TSC0049156
ttgtagttgttta

SEQ ID NO: 199816 - DNA, 13 bp, Artificial Sequence
  Oligonucleotide for detection of SNP TSC0049156
taaacaactacaa

SEQ ID NO: 199817 - DNA, 13 bp, Artificial Sequence
  Oligonucleotide for detection of SNP TSC0049161
ggtttatttatat

SEQ ID NO: 199818 - DNA, 13 bp, Artificial Sequence
  Oligonucleotide for detection of SNP TSC0049161
atataaataaacc

SEQ ID NO: 199819 - DNA, 13 bp, Artificial Sequence
  Oligonucleotide for detection of SNP TSC0049161
ggtttagttatat

SEQ ID NO: 199820 - DNA, 13 bp, Artificial Sequence
  Oligonucleotide for detection of SNP TSC0049161
atataactaaacc

SEQ ID NO: 199821 - DNA, 13 bp, Artificial Sequence
  Oligonucleotide for detection of SNP TSC0049161
atgtgaatagaty

SEQ ID NO: 199822 - DNA, 13 bp, Artificial Sequence
  Oligonucleotide for detection of SNP TSC0049161
ratctattcacat

SEQ ID NO: 199823 - DNA, 13 bp, Artificial Sequence
  Oligonucleotide for detection of SNP TSC0049161
atgtgattagaty

SEQ ID NO: 199824 - DNA, 13 bp, Artificial Sequence
  Oligonucleotide for detection of SNP TSC0049161
ratctaatcacat

SEQ ID NO: 199825 - DNA, 13 bp, Artificial Sequence
  Oligonucleotide for detection of SNP TSC0049162
agtagatgtaggy

SEQ ID NO: 199826 - DNA, 13 bp, Artificial Sequence
  Oligonucleotide for detection of SNP TSC0049162
rcctacatctact

SEQ ID NO: 199827 - DNA, 13 bp, Artificial Sequence
  Oligonucleotide for detection of SNP TSC0049162
agtagaggtaggy

SEQ ID NO: 199828 - DNA, 13 bp, Artificial Sequence
  Oligonucleotide for detection of SNP TSC0049162
rcctacctctact

SEQ ID NO: 199829 - DNA, 13 bp, Artificial Sequence
  Oligonucleotide for detection of SNP TSC0049162
gtttgtttttgtt

SEQ ID NO: 199830 - DNA, 13 bp, Artificial Sequence
  Oligonucleotide for detection of SNP TSC0049162
aacaaaaacaaac

SEQ ID NO: 199831 - DNA, 13 bp, Artificial Sequence
  Oligonucleotide for detection of SNP TSC0049163
atattgatattag

SEQ ID NO: 199832 - DNA, 13 bp, Artificial Sequence
  Oligonucleotide for detection of SNP TSC0049163
ctaatatcaatat

SEQ ID NO: 199833 - DNA, 13 bp, Artificial Sequence
  Oligonucleotide for detection of SNP TSC0049163
atattggtattag

SEQ ID NO: 199834 - DNA, 13 bp, Artificial Sequence
  Oligonucleotide for detection of SNP TSC0049163
ctaataccaatat

SEQ ID NO: 199835 - DNA, 13 bp, Artificial Sequence
  Oligonucleotide for detection of SNP TSC0049164
agaaagtttataa

SEQ ID NO: 199836 - DNA, 13 bp, Artificial Sequence
  Oligonucleotide for detection of SNP TSC0049164
ttataaactttct

SEQ ID NO: 199837 - DNA, 13 bp, Artificial Sequence
  Oligonucleotide for detection of SNP TSC0049164
agaaagattataa

SEQ ID NO: 199838 - DNA, 13 bp, Artificial Sequence
  Oligonucleotide for detection of SNP TSC0049164
ttataatctttct

SEQ ID NO: 199839 - DNA, 13 bp, Artificial Sequence
  Oligonucleotide for detection of SNP TSC0049165
gttttttatatty

SEQ ID NO: 199840 - DNA, 13 bp, Artificial Sequence
  Oligonucleotide for detection of SNP TSC0049165
raatataaaaaac

SEQ ID NO: 199841 - DNA, 13 bp, Artificial Sequence
  Oligonucleotide for detection of SNP TSC0049165
gggtgtgaagagy

SEQ ID NO: 199842 - DNA, 13 bp, Artificial Sequence
  Oligonucleotide for detection of SNP TSC0049165
rctcttcacaccc

SEQ ID NO: 199843 - DNA, 13 bp, Artificial Sequence
  Oligonucleotide for detection of SNP TSC0049165
gggtgttaagagy

SEQ ID NO: 199844 - DNA, 13 bp, Artificial Sequence
  Oligonucleotide for detection of SNP TSC0049165
rctcttaacaccc

SEQ ID NO: 199845 - DNA, 13 bp, Artificial Sequence
  Oligonucleotide for detection of SNP TSC0049171
tagaatgggatty

SEQ ID NO: 199846 - DNA, 13 bp, Artificial Sequence
  Oligonucleotide for detection of SNP TSC0049171
raatcccattcta

SEQ ID NO: 199847 - DNA, 13 bp, Artificial Sequence
  Oligonucleotide for detection of SNP TSC0049171
tagaataggatty

SEQ ID NO: 199848 - DNA, 13 bp, Artificial Sequence
  Oligonucleotide for detection of SNP TSC0049171
raatcctattcta

SEQ ID NO: 199849 - DNA, 13 bp, Artificial Sequence
  Oligonucleotide for detection of SNP TSC0049172
tttggtaaatttt

SEQ ID NO: 199850 - DNA, 13 bp, Artificial Sequence
  Oligonucleotide for detection of SNP TSC0049172
aaaatttaccaaa

SEQ ID NO: 199851 - DNA, 13 bp, Artificial Sequence
  Oligonucleotide for detection of SNP TSC0049172
tttggttaatttt

SEQ ID NO: 199852 - DNA, 13 bp, Artificial Sequence
  Oligonucleotide for detection of SNP TSC0049172
aaaattaaccaaa

SEQ ID NO: 199853 - DNA, 13 bp, Artificial Sequence
  Oligonucleotide for detection of SNP TSC0049172
aaaatttattaag

SEQ ID NO: 199854 - DNA, 13 bp, Artificial Sequence
  Oligonucleotide for detection of SNP TSC0049172
cttaataaatttt

SEQ ID NO: 199855 - DNA, 13 bp, Artificial Sequence
  Oligonucleotide for detection of SNP TSC0049172
aaaattaattaag

SEQ ID NO: 199856 - DNA, 13 bp, Artificial Sequence
  Oligonucleotide for detection of SNP TSC0049172
cttaattaatttt

SEQ ID NO: 199857 - DNA, 13 bp, Artificial Sequence
  Oligonucleotide for detection of SNP TSC0049173
ggtatgaattata

SEQ ID NO: 199858 - DNA, 13 bp, Artificial Sequence
  Oligonucleotide for detection of SNP TSC0049173
tataattcatacc

SEQ ID NO: 199859 - DNA, 13 bp, Artificial Sequence
  Oligonucleotide for detection of SNP TSC0049173
ggtatgtattata

SEQ ID NO: 199860 - DNA, 13 bp, Artificial Sequence
  Oligonucleotide for detection of SNP TSC0049173
tataatacatacc

SEQ ID NO: 199861 - DNA, 13 bp, Artificial Sequence
  Oligonucleotide for detection of SNP TSC0049173
tgtggtttatgty

SEQ ID NO: 199862 - DNA, 13 bp, Artificial Sequence
  Oligonucleotide for detection of SNP TSC0049173
racataaaccaca

SEQ ID NO: 199863 - DNA, 13 bp, Artificial Sequence
  Oligonucleotide for detection of SNP TSC0049173
tgtggtgtatgty

SEQ ID NO: 199864 - DNA, 13 bp, Artificial Sequence
  Oligonucleotide for detection of SNP TSC0049173
racatacaccaca

SEQ ID NO: 199865 - DNA, 13 bp, Artificial Sequence
  Oligonucleotide for detection of SNP TSC0049174
gtttatattgttt

SEQ ID NO: 199866 - DNA, 13 bp, Artificial Sequence
  Oligonucleotide for detection of SNP TSC0049174
aaacaatataaac

SEQ ID NO: 199867 - DNA, 13 bp, Artificial Sequence
  Oligonucleotide for detection of SNP TSC0049174
gtttatgttgttt

SEQ ID NO: 199868 - DNA, 13 bp, Artificial Sequence
  Oligonucleotide for detection of SNP TSC0049174
aaacaacataaac

SEQ ID NO: 199869 - DNA, 13 bp, Artificial Sequence
  Oligonucleotide for detection of SNP TSC0049175
ggtatataatttt

SEQ ID NO: 199870 - DNA, 13 bp, Artificial Sequence
  Oligonucleotide for detection of SNP TSC0049175
aaaattatatacc

SEQ ID NO: 199871 - DNA, 13 bp, Artificial Sequence
  Oligonucleotide for detection of SNP TSC0049175
ggtatagaatttt

SEQ ID NO: 199872 - DNA, 13 bp, Artificial Sequence
  Oligonucleotide for detection of SNP TSC0049175
aaaattctatacc

SEQ ID NO: 199873 - DNA, 13 bp, Artificial Sequence
  Oligonucleotide for detection of SNP TSC0049175
agggttgtataty

SEQ ID NO: 199874 - DNA, 13 bp, Artificial Sequence
  Oligonucleotide for detection of SNP TSC0049175
ratatacaaccct

SEQ ID NO: 199875 - DNA, 13 bp, Artificial Sequence
  Oligonucleotide for detection of SNP TSC0049175
agggttttataty

SEQ ID NO: 199876 - DNA, 13 bp, Artificial Sequence
  Oligonucleotide for detection of SNP TSC0049175
ratataaaaccct

SEQ ID NO: 199877 - DNA, 13 bp, Artificial Sequence
  Oligonucleotide for detection of SNP TSC0049176
aaatgttgataga

SEQ ID NO: 199878 - DNA, 13 bp, Artificial Sequence
  Oligonucleotide for detection of SNP TSC0049176
tctatcaacattt

SEQ ID NO: 199879 - DNA, 13 bp, Artificial Sequence
  Oligonucleotide for detection of SNP TSC0049176
aaatgtggataga

SEQ ID NO: 199880 - DNA, 13 bp, Artificial Sequence
  Oligonucleotide for detection of SNP TSC0049176
tctatccacattt

SEQ ID NO: 199881 - DNA, 13 bp, Artificial Sequence
  Oligonucleotide for detection of SNP TSC0049176
aaatgcggataga

SEQ ID NO: 199882 - DNA, 13 bp, Artificial Sequence
  Oligonucleotide for detection of SNP TSC0049176
tctatccgcattt

SEQ ID NO: 199883 - DNA, 13 bp, Artificial Sequence
  Oligonucleotide for detection of SNP TSC0049176
tttgttagtattt

SEQ ID NO: 199884 - DNA, 13 bp, Artificial Sequence
  Oligonucleotide for detection of SNP TSC0049176
aaatactaacaaa

SEQ ID NO: 199885 - DNA, 13 bp, Artificial Sequence
  Oligonucleotide for detection of SNP TSC0049177
atatttaggtaaa

SEQ ID NO: 199886 - DNA, 13 bp, Artificial Sequence
  Oligonucleotide for detection of SNP TSC0049177
tttacctaaatat

SEQ ID NO: 199887 - DNA, 13 bp, Artificial Sequence
  Oligonucleotide for detection of SNP TSC0049177
atattttggtaaa

SEQ ID NO: 199888 - DNA, 13 bp, Artificial Sequence
  Oligonucleotide for detection of SNP TSC0049177
tttaccaaaatat

SEQ ID NO: 199889 - DNA, 13 bp, Artificial Sequence
  Oligonucleotide for detection of SNP TSC0049177
tttgtttgggtgt

SEQ ID NO: 199890 - DNA, 13 bp, Artificial Sequence
  Oligonucleotide for detection of SNP TSC0049177
acacccaaacaaa

SEQ ID NO: 199891 - DNA, 13 bp, Artificial Sequence
  Oligonucleotide for detection of SNP TSC0049177
tttgttagggtgt

SEQ ID NO: 199892 - DNA, 13 bp, Artificial Sequence
  Oligonucleotide for detection of SNP TSC0049177
acaccctaacaaa

SEQ ID NO: 199893 - DNA, 13 bp, Artificial Sequence
  Oligonucleotide for detection of SNP TSC0049178
tatttaagtaaat

SEQ ID NO: 199894 - DNA, 13 bp, Artificial Sequence
  Oligonucleotide for detection of SNP TSC0049178
atttacttaaata

SEQ ID NO: 199895 - DNA, 13 bp, Artificial Sequence
  Oligonucleotide for detection of SNP TSC0049180
attgtagtaaagg

SEQ ID NO: 199896 - DNA, 13 bp, Artificial Sequence
  Oligonucleotide for detection of SNP TSC0049180
cctttactacaat

SEQ ID NO: 199897 - DNA, 13 bp, Artificial Sequence
  Oligonucleotide for detection of SNP TSC0049180
attgtaataaagg

SEQ ID NO: 199898 - DNA, 13 bp, Artificial Sequence
  Oligonucleotide for detection of SNP TSC0049180
cctttattacaat

SEQ ID NO: 199899 - DNA, 13 bp, Artificial Sequence
  Oligonucleotide for detection of SNP TSC0049182
gtgttgataaggg

SEQ ID NO: 199900 - DNA, 13 bp, Artificial Sequence
  Oligonucleotide for detection of SNP TSC0049182
cccttatcaacac

SEQ ID NO: 199901 - DNA, 13 bp, Artificial Sequence
  Oligonucleotide for detection of SNP TSC0049182
gtgttgttaaggg

SEQ ID NO: 199902 - DNA, 13 bp, Artificial Sequence
  Oligonucleotide for detection of SNP TSC0049182
cccttaacaacac

SEQ ID NO: 199903 - DNA, 13 bp, Artificial Sequence
  Oligonucleotide for detection of SNP TSC0049182
tttttgttaatay

SEQ ID NO: 199904 - DNA, 13 bp, Artificial Sequence
  Oligonucleotide for detection of SNP TSC0049182
rtattaacaaaaa

SEQ ID NO: 199905 - DNA, 13 bp, Artificial Sequence
  Oligonucleotide for detection of SNP TSC0049182
tttttgataatay

SEQ ID NO: 199906 - DNA, 13 bp, Artificial Sequence
  Oligonucleotide for detection of SNP TSC0049182
rtattatcaaaaa

SEQ ID NO: 199907 - DNA, 13 bp, Artificial Sequence
  Oligonucleotide for detection of SNP TSC0049183
tagtagagatggg

SEQ ID NO: 199908 - DNA, 13 bp, Artificial Sequence
  Oligonucleotide for detection of SNP TSC0049183
cccatctctacta

SEQ ID NO: 199909 - DNA, 13 bp, Artificial Sequence
  Oligonucleotide for detection of SNP TSC0049183
tagtagggatggg

SEQ ID NO: 199910 - DNA, 13 bp, Artificial Sequence
  Oligonucleotide for detection of SNP TSC0049183
cccatccctacta

SEQ ID NO: 199911 - DNA, 13 bp, Artificial Sequence
  Oligonucleotide for detection of SNP TSC0049183
tagtagagacggg

SEQ ID NO: 199912 - DNA, 13 bp, Artificial Sequence
  Oligonucleotide for detection of SNP TSC0049183
cccgtctctacta

SEQ ID NO: 199913 - DNA, 13 bp, Artificial Sequence
  Oligonucleotide for detection of SNP TSC0049183
tagtagggacggg

SEQ ID NO: 199914 - DNA, 13 bp, Artificial Sequence
  Oligonucleotide for detection of SNP TSC0049183
cccgtccctacta

SEQ ID NO: 199915 - DNA, 13 bp, Artificial Sequence
  Oligonucleotide for detection of SNP TSC0049187
tgtgagggtttty

SEQ ID NO: 199916 - DNA, 13 bp, Artificial Sequence
  Oligonucleotide for detection of SNP TSC0049187
raaaaccctcaca

SEQ ID NO: 199917 - DNA, 13 bp, Artificial Sequence
  Oligonucleotide for detection of SNP TSC0049189
ttttggattttgy

SEQ ID NO: 199918 - DNA, 13 bp, Artificial Sequence
  Oligonucleotide for detection of SNP TSC0049189
rcaaaatccaaaa

SEQ ID NO: 199919 - DNA, 13 bp, Artificial Sequence
  Oligonucleotide for detection of SNP TSC0049189
ttttggtttttgy

SEQ ID NO: 199920 - DNA, 13 bp, Artificial Sequence
  Oligonucleotide for detection of SNP TSC0049189
rcaaaaaccaaaa

SEQ ID NO: 199921 - DNA, 13 bp, Artificial Sequence
  Oligonucleotide for detection of SNP TSC0049189
gtaggatttaaag

SEQ ID NO: 199922 - DNA, 13 bp, Artificial Sequence
  Oligonucleotide for detection of SNP TSC0049189
ctttaaatcctac

SEQ ID NO: 199923 - DNA, 13 bp, Artificial Sequence
  Oligonucleotide for detection of SNP TSC0049189
gtaggagttaaag

SEQ ID NO: 199924 - DNA, 13 bp, Artificial Sequence
  Oligonucleotide for detection of SNP TSC0049189
ctttaactcctac

SEQ ID NO: 199925 - DNA, 13 bp, Artificial Sequence
  Oligonucleotide for detection of SNP TSC0049190
ttgtgtattgagy

SEQ ID NO: 199926 - DNA, 13 bp, Artificial Sequence
  Oligonucleotide for detection of SNP TSC0049190
rctcaatacacaa

SEQ ID NO: 199927 - DNA, 13 bp, Artificial Sequence
  Oligonucleotide for detection of SNP TSC0049190
ttgtgtgttgagy

SEQ ID NO: 199928 - DNA, 13 bp, Artificial Sequence
  Oligonucleotide for detection of SNP TSC0049190
rctcaacacacaa

SEQ ID NO: 199929 - DNA, 13 bp, Artificial Sequence
  Oligonucleotide for detection of SNP TSC0049190
ttgtgcgttgagy

SEQ ID NO: 199930 - DNA, 13 bp, Artificial Sequence
  Oligonucleotide for detection of SNP TSC0049190
rctcaacgcacaa

SEQ ID NO: 199931 - DNA, 13 bp, Artificial Sequence
  Oligonucleotide for detection of SNP TSC0049190
gtttagtgtatag

SEQ ID NO: 199932 - DNA, 13 bp, Artificial Sequence
  Oligonucleotide for detection of SNP TSC0049190
ctatacactaaac

SEQ ID NO: 199933 - DNA, 13 bp, Artificial Sequence
  Oligonucleotide for detection of SNP TSC0049190
gtttagcgtatag

SEQ ID NO: 199934 - DNA, 13 bp, Artificial Sequence
  Oligonucleotide for detection of SNP TSC0049190
ctatacgctaaac

SEQ ID NO: 199935 - DNA, 13 bp, Artificial Sequence
  Oligonucleotide for detection of SNP TSC0049191
tgtttatgagtga

SEQ ID NO: 199936 - DNA, 13 bp, Artificial Sequence
  Oligonucleotide for detection of SNP TSC0049191
tcactcataaaca

SEQ ID NO: 199937 - DNA, 13 bp, Artificial Sequence
  Oligonucleotide for detection of SNP TSC0049191
tgtttaggagtga

SEQ ID NO: 199938 - DNA, 13 bp, Artificial Sequence
  Oligonucleotide for detection of SNP TSC0049191
tcactcctaaaca

SEQ ID NO: 199939 - DNA, 13 bp, Artificial Sequence
  Oligonucleotide for detection of SNP TSC0049191
ttatttataggta

SEQ ID NO: 199940 - DNA, 13 bp, Artificial Sequence
  Oligonucleotide for detection of SNP TSC0049191
tacctataaataa

SEQ ID NO: 199941 - DNA, 13 bp, Artificial Sequence
  Oligonucleotide for detection of SNP TSC0049191
ttatttttaggta

SEQ ID NO: 199942 - DNA, 13 bp, Artificial Sequence
  Oligonucleotide for detection of SNP TSC0049191
tacctaaaaataa

SEQ ID NO: 199943 - DNA, 13 bp, Artificial Sequence
  Oligonucleotide for detection of SNP TSC0049192
gatttttgtttay

SEQ ID NO: 199944 - DNA, 13 bp, Artificial Sequence
  Oligonucleotide for detection of SNP TSC0049192
rtaaacaaaaatc

SEQ ID NO: 199945 - DNA, 13 bp, Artificial Sequence
  Oligonucleotide for detection of SNP TSC0049192
gtgagtagagaty

SEQ ID NO: 199946 - DNA, 13 bp, Artificial Sequence
  Oligonucleotide for detection of SNP TSC0049192
ratctctactcac

SEQ ID NO: 199947 - DNA, 13 bp, Artificial Sequence
  Oligonucleotide for detection of SNP TSC0007631
tttgtgatgtttt

SEQ ID NO: 199948 - DNA, 13 bp, Artificial Sequence
  Oligonucleotide for detection of SNP TSC0007631
aaaacatcacaaa

SEQ ID NO: 199949 - DNA, 13 bp, Artificial Sequence
  Oligonucleotide for detection of SNP TSC0007631
tttgtgttgtttt

SEQ ID NO: 199950 - DNA, 13 bp, Artificial Sequence
  Oligonucleotide for detection of SNP TSC0007631
aaaacaacacaaa

SEQ ID NO: 199951 - DNA, 13 bp, Artificial Sequence
  Oligonucleotide for detection of SNP TSC0007631
aaaatattatagg

SEQ ID NO: 199952 - DNA, 13 bp, Artificial Sequence
  Oligonucleotide for detection of SNP TSC0007631
cctataatatttt

SEQ ID NO: 199953 - DNA, 13 bp, Artificial Sequence
  Oligonucleotide for detection of SNP TSC0007631
aaaatagtatagg

SEQ ID NO: 199954 - DNA, 13 bp, Artificial Sequence
  Oligonucleotide for detection of SNP TSC0007631
cctatactatttt

SEQ ID NO: 199955 - DNA, 13 bp, Artificial Sequence
  Oligonucleotide for detection of SNP TSC0049202
ttttttagtgaga

SEQ ID NO: 199956 - DNA, 13 bp, Artificial Sequence
  Oligonucleotide for detection of SNP TSC0049202
tctcactaaaaaa

SEQ ID NO: 199957 - DNA, 13 bp, Artificial Sequence
  Oligonucleotide for detection of SNP TSC0049202
ttttttggtgaga

SEQ ID NO: 199958 - DNA, 13 bp, Artificial Sequence
  Oligonucleotide for detection of SNP TSC0049202
tctcaccaaaaaa

SEQ ID NO: 199959 - DNA, 13 bp, Artificial Sequence
  Oligonucleotide for detection of SNP TSC0049204
agacggggttttg

SEQ ID NO: 199960 - DNA, 13 bp, Artificial Sequence
  Oligonucleotide for detection of SNP TSC0049204
caaaaccccgtct

SEQ ID NO: 199961 - DNA, 13 bp, Artificial Sequence
  Oligonucleotide for detection of SNP TSC0049204
agatggggtttcg

SEQ ID NO: 199962 - DNA, 13 bp, Artificial Sequence
  Oligonucleotide for detection of SNP TSC0049204
cgaaaccccatct

SEQ ID NO: 199963 - DNA, 13 bp, Artificial Sequence
  Oligonucleotide for detection of SNP TSC0049204
agacggggtttcg

SEQ ID NO: 199964 - DNA, 13 bp, Artificial Sequence
  Oligonucleotide for detection of SNP TSC0049204
cgaaaccccgtct

SEQ ID NO: 199965 - DNA, 13 bp, Artificial Sequence
  Oligonucleotide for detection of SNP TSC0049208
ttttatagattat

SEQ ID NO: 199966 - DNA, 13 bp, Artificial Sequence
  Oligonucleotide for detection of SNP TSC0049208
ataatctataaaa

SEQ ID NO: 199967 - DNA, 13 bp, Artificial Sequence
  Oligonucleotide for detection of SNP TSC0049208
ttttatggattat

SEQ ID NO: 199968 - DNA, 13 bp, Artificial Sequence
  Oligonucleotide for detection of SNP TSC0049208
ataatccataaaa

SEQ ID NO: 199969 - DNA, 13 bp, Artificial Sequence
  Oligonucleotide for detection of SNP TSC0049208
ttttacggattat

SEQ ID NO: 199970 - DNA, 13 bp, Artificial Sequence
  Oligonucleotide for detection of SNP TSC0049208
ataatccgtaaaa

SEQ ID NO: 199971 - DNA, 13 bp, Artificial Sequence
  Oligonucleotide for detection of SNP TSC0049208
ataatttgtagaa

SEQ ID NO: 199972 - DNA, 13 bp, Artificial Sequence
  Oligonucleotide for detection of SNP TSC0049208
ttctacaaattat

SEQ ID NO: 199973 - DNA, 13 bp, Artificial Sequence
  Oligonucleotide for detection of SNP TSC0049208
ataattcgtagaa

SEQ ID NO: 199974 - DNA, 13 bp, Artificial Sequence
  Oligonucleotide for detection of SNP TSC0049208
ttctacgaattat

SEQ ID NO: 199975 - DNA, 13 bp, Artificial Sequence
  Oligonucleotide for detection of SNP TSC0049209
aataaaaatttty

SEQ ID NO: 199976 - DNA, 13 bp, Artificial Sequence
  Oligonucleotide for detection of SNP TSC0049209
raaaatttttatt

SEQ ID NO: 199977 - DNA, 13 bp, Artificial Sequence
  Oligonucleotide for detection of SNP TSC0049209
aataaatatttty

SEQ ID NO: 199978 - DNA, 13 bp, Artificial Sequence
  Oligonucleotide for detection of SNP TSC0049209
raaaatatttatt

SEQ ID NO: 199979 - DNA, 13 bp, Artificial Sequence
  Oligonucleotide for detection of SNP TSC0049209
gaaagtttttatt

SEQ ID NO: 199980 - DNA, 13 bp, Artificial Sequence
  Oligonucleotide for detection of SNP TSC0049209
aataaaaactttc

SEQ ID NO: 199981 - DNA, 13 bp, Artificial Sequence
  Oligonucleotide for detection of SNP TSC0049209
gaaagtgtttatt

SEQ ID NO: 199982 - DNA, 13 bp, Artificial Sequence
  Oligonucleotide for detection of SNP TSC0049209
aataaacactttc

SEQ ID NO: 199983 - DNA, 13 bp, Artificial Sequence
  Oligonucleotide for detection of SNP TSC0049210
aagggtgtgggga

SEQ ID NO: 199984 - DNA, 13 bp, Artificial Sequence
  Oligonucleotide for detection of SNP TSC0049210
tccccacaccctt

SEQ ID NO: 199985 - DNA, 13 bp, Artificial Sequence
  Oligonucleotide for detection of SNP TSC0049210
aagggtatgggga

SEQ ID NO: 199986 - DNA, 13 bp, Artificial Sequence
  Oligonucleotide for detection of SNP TSC0049210
tccccataccctt

SEQ ID NO: 199987 - DNA, 13 bp, Artificial Sequence
  Oligonucleotide for detection of SNP TSC0049210
aagggcgtgggga

SEQ ID NO: 199988 - DNA, 13 bp, Artificial Sequence
  Oligonucleotide for detection of SNP TSC0049210
tccccacgccctt

SEQ ID NO: 199989 - DNA, 13 bp, Artificial Sequence
  Oligonucleotide for detection of SNP TSC0010811
tgtatttgtttta

SEQ ID NO: 199990 - DNA, 13 bp, Artificial Sequence
  Oligonucleotide for detection of SNP TSC0010811
taaaacaaataca

SEQ ID NO: 199991 - DNA, 13 bp, Artificial Sequence
  Oligonucleotide for detection of SNP TSC0010811
tgtattcgtttta

SEQ ID NO: 199992 - DNA, 13 bp, Artificial Sequence
  Oligonucleotide for detection of SNP TSC0010811
taaaacgaataca

SEQ ID NO: 199993 - DNA, 13 bp, Artificial Sequence
  Oligonucleotide for detection of SNP TSC0010811
taaaatgaatata

SEQ ID NO: 199994 - DNA, 13 bp, Artificial Sequence
  Oligonucleotide for detection of SNP TSC0010811
tatattcatttta

SEQ ID NO: 199995 - DNA, 13 bp, Artificial Sequence
  Oligonucleotide for detection of SNP TSC0010811
taaaacgaatata

SEQ ID NO: 199996 - DNA, 13 bp, Artificial Sequence
  Oligonucleotide for detection of SNP TSC0010811
tatattcgtttta

SEQ ID NO: 199997 - DNA, 13 bp, Artificial Sequence
  Oligonucleotide for detection of SNP TSC0008906
atttatattataa

SEQ ID NO: 199998 - DNA, 13 bp, Artificial Sequence
  Oligonucleotide for detection of SNP TSC0008906
ttataatataaat

SEQ ID NO: 199999 - DNA, 13 bp, Artificial Sequence
  Oligonucleotide for detection of SNP TSC0008906
atttatgttataa

SEQ ID NO: 200000 - DNA, 13 bp, Artificial Sequence
  Oligonucleotide for detection of SNP TSC0008906
ttataacataaat

SEQ ID NO: 200001 - DNA, 13 bp, Artificial Sequence
  Oligonucleotide for detection of SNP TSC0049219
tgttagttggaty

SEQ ID NO: 200002 - DNA, 13 bp, Artificial Sequence
  Oligonucleotide for detection of SNP TSC0049219
ratccaactaaca

SEQ ID NO: 200003 - DNA, 13 bp, Artificial Sequence
  Oligonucleotide for detection of SNP TSC0049219
tgttaggtggaty

SEQ ID NO: 200004 - DNA, 13 bp, Artificial Sequence
  Oligonucleotide for detection of SNP TSC0049219
ratccacctaaca

SEQ ID NO: 200005 - DNA, 13 bp, Artificial Sequence
  Oligonucleotide for detection of SNP TSC0049219
ggtttagttggta

SEQ ID NO: 200006 - DNA, 13 bp, Artificial Sequence
  Oligonucleotide for detection of SNP TSC0049219
taccaactaaacc

SEQ ID NO: 200007 - DNA, 13 bp, Artificial Sequence
  Oligonucleotide for detection of SNP TSC0049219
ggtttatttggta

SEQ ID NO: 200008 - DNA, 13 bp, Artificial Sequence
  Oligonucleotide for detection of SNP TSC0049219
taccaaataaacc

SEQ ID NO: 200009 - DNA, 13 bp, Artificial Sequence
  Oligonucleotide for detection of SNP TSC0006010
ttatttagtttcg

SEQ ID NO: 200010 - DNA, 13 bp, Artificial Sequence
  Oligonucleotide for detection of SNP TSC0006010
cgaaactaaataa

SEQ ID NO: 200011 - DNA, 13 bp, Artificial Sequence
  Oligonucleotide for detection of SNP TSC0006010
tgagattgggtaa

SEQ ID NO: 200012 - DNA, 13 bp, Artificial Sequence
  Oligonucleotide for detection of SNP TSC0006010
ttacccaatctca

SEQ ID NO: 200013 - DNA, 13 bp, Artificial Sequence
  Oligonucleotide for detection of SNP TSC0006010
tgagatggggtaa

SEQ ID NO: 200014 - DNA, 13 bp, Artificial Sequence
  Oligonucleotide for detection of SNP TSC0006010
ttaccccatctca

SEQ ID NO: 200015 - DNA, 13 bp, Artificial Sequence
  Oligonucleotide for detection of SNP TSC0006010
cgagattgggtaa

SEQ ID NO: 200016 - DNA, 13 bp, Artificial Sequence
  Oligonucleotide for detection of SNP TSC0006010
ttacccaatctcg

SEQ ID NO: 200017 - DNA, 13 bp, Artificial Sequence
  Oligonucleotide for detection of SNP TSC0006010
cgagatggggtaa

SEQ ID NO: 200018 - DNA, 13 bp, Artificial Sequence
  Oligonucleotide for detection of SNP TSC0006010
ttaccccatctcg

SEQ ID NO: 200019 - DNA, 13 bp, Artificial Sequence
  Oligonucleotide for detection of SNP TSC0006010
tgagacggggtaa

SEQ ID NO: 200020 - DNA, 13 bp, Artificial Sequence
  Oligonucleotide for detection of SNP TSC0006010
ttaccccgtctca

SEQ ID NO: 200021 - DNA, 13 bp, Artificial Sequence
  Oligonucleotide for detection of SNP TSC0006010
cgagacggggtaa

SEQ ID NO: 200022 - DNA, 13 bp, Artificial Sequence
  Oligonucleotide for detection of SNP TSC0006010
ttaccccgtctcg

SEQ ID NO: 200023 - DNA, 13 bp, Artificial Sequence
  Oligonucleotide for detection of SNP TSC0006011
tgagagggaggga

SEQ ID NO: 200024 - DNA, 13 bp, Artificial Sequence
  Oligonucleotide for detection of SNP TSC0006011
tccctccctctca

SEQ ID NO: 200025 - DNA, 13 bp, Artificial Sequence
  Oligonucleotide for detection of SNP TSC0006011
tgagagagaggga

SEQ ID NO: 200026 - DNA, 13 bp, Artificial Sequence
  Oligonucleotide for detection of SNP TSC0006011
tccctctctctca

SEQ ID NO: 200027 - DNA, 13 bp, Artificial Sequence
  Oligonucleotide for detection of SNP TSC0049223
tagtatttttttg

SEQ ID NO: 200028 - DNA, 13 bp, Artificial Sequence
  Oligonucleotide for detection of SNP TSC0049223
caaaaaaatacta

SEQ ID NO: 200029 - DNA, 13 bp, Artificial Sequence
  Oligonucleotide for detection of SNP TSC0049223
tagtatgtttttg

SEQ ID NO: 200030 - DNA, 13 bp, Artificial Sequence
  Oligonucleotide for detection of SNP TSC0049223
caaaaacatacta

SEQ ID NO: 200031 - DNA, 13 bp, Artificial Sequence
  Oligonucleotide for detection of SNP TSC0049223
taagaaaatgttg

SEQ ID NO: 200032 - DNA, 13 bp, Artificial Sequence
  Oligonucleotide for detection of SNP TSC0049223
caacattttctta

SEQ ID NO: 200033 - DNA, 13 bp, Artificial Sequence
  Oligonucleotide for detection of SNP TSC0049223
taagaatatgttg

SEQ ID NO: 200034 - DNA, 13 bp, Artificial Sequence
  Oligonucleotide for detection of SNP TSC0049223
caacatattctta

SEQ ID NO: 200035 - DNA, 13 bp, Artificial Sequence
  Oligonucleotide for detection of SNP TSC0049227
ttggtttgggtga

SEQ ID NO: 200036 - DNA, 13 bp, Artificial Sequence
  Oligonucleotide for detection of SNP TSC0049227
tcacccaaaccaa

SEQ ID NO: 200037 - DNA, 13 bp, Artificial Sequence
  Oligonucleotide for detection of SNP TSC0049227
ttggttcgggtga

SEQ ID NO: 200038 - DNA, 13 bp, Artificial Sequence
  Oligonucleotide for detection of SNP TSC0049227
tcacccgaaccaa

SEQ ID NO: 200039 - DNA, 13 bp, Artificial Sequence
  Oligonucleotide for detection of SNP TSC0049227
ttatttgaattag

SEQ ID NO: 200040 - DNA, 13 bp, Artificial Sequence
  Oligonucleotide for detection of SNP TSC0049227
ctaattcaaataa

SEQ ID NO: 200041 - DNA, 13 bp, Artificial Sequence
  Oligonucleotide for detection of SNP TSC0049227
ttatttaaattag

SEQ ID NO: 200042 - DNA, 13 bp, Artificial Sequence
  Oligonucleotide for detection of SNP TSC0049227
ctaatttaaataa

SEQ ID NO: 200043 - DNA, 13 bp, Artificial Sequence
  Oligonucleotide for detection of SNP TSC0049227
ttattcgaattag

SEQ ID NO: 200044 - DNA, 13 bp, Artificial Sequence
  Oligonucleotide for detection of SNP TSC0049227
ctaattcgaataa

SEQ ID NO: 200045 - DNA, 13 bp, Artificial Sequence
  Oligonucleotide for detection of SNP TSC0049228
taatttaattttt

SEQ ID NO: 200046 - DNA, 13 bp, Artificial Sequence
  Oligonucleotide for detection of SNP TSC0049228
aaaaattaaatta

SEQ ID NO: 200047 - DNA, 13 bp, Artificial Sequence
  Oligonucleotide for detection of SNP TSC0049228
agaaattaagttg

SEQ ID NO: 200048 - DNA, 13 bp, Artificial Sequence
  Oligonucleotide for detection of SNP TSC0049228
caacttaatttct

SEQ ID NO: 200049 - DNA, 13 bp, Artificial Sequence
  Oligonucleotide for detection of SNP TSC0049228
agaaatgaagttg

SEQ ID NO: 200050 - DNA, 13 bp, Artificial Sequence
  Oligonucleotide for detection of SNP TSC0049228
caacttcatttct

SEQ ID NO: 200051 - DNA, 13 bp, Artificial Sequence
  Oligonucleotide for detection of SNP TSC0049228
agaaataaagttg

SEQ ID NO: 200052 - DNA, 13 bp, Artificial Sequence
  Oligonucleotide for detection of SNP TSC0049228
caactttatttct

SEQ ID NO: 200053 - DNA, 13 bp, Artificial Sequence
  Oligonucleotide for detection of SNP TSC0049229
gtataaaaaagaa

SEQ ID NO: 200054 - DNA, 13 bp, Artificial Sequence
  Oligonucleotide for detection of SNP TSC0049229
ttcttttttatac

SEQ ID NO: 200055 - DNA, 13 bp, Artificial Sequence
  Oligonucleotide for detection of SNP TSC0049229
gtataagaaagaa

SEQ ID NO: 200056 - DNA, 13 bp, Artificial Sequence
  Oligonucleotide for detection of SNP TSC0049229
ttctttcttatac

SEQ ID NO: 200057 - DNA, 13 bp, Artificial Sequence
  Oligonucleotide for detection of SNP TSC0049230
tttagataggtta

SEQ ID NO: 200058 - DNA, 13 bp, Artificial Sequence
  Oligonucleotide for detection of SNP TSC0049230
taacctatctaaa

SEQ ID NO: 200059 - DNA, 13 bp, Artificial Sequence
  Oligonucleotide for detection of SNP TSC0049230
tttagagaggtta

SEQ ID NO: 200060 - DNA, 13 bp, Artificial Sequence
  Oligonucleotide for detection of SNP TSC0049230
taacctctctaaa

SEQ ID NO: 200061 - DNA, 13 bp, Artificial Sequence
  Oligonucleotide for detection of SNP TSC0049230
tgatttgtttggg

SEQ ID NO: 200062 - DNA, 13 bp, Artificial Sequence
  Oligonucleotide for detection of SNP TSC0049230
cccaaacaaatca

SEQ ID NO: 200063 - DNA, 13 bp, Artificial Sequence
  Oligonucleotide for detection of SNP TSC0049230
tgatttttttggg

SEQ ID NO: 200064 - DNA, 13 bp, Artificial Sequence
  Oligonucleotide for detection of SNP TSC0049230
cccaaaaaaatca

SEQ ID NO: 200065 - DNA, 13 bp, Artificial Sequence
  Oligonucleotide for detection of SNP TSC0049231
ttattaaaggaaa

SEQ ID NO: 200066 - DNA, 13 bp, Artificial Sequence
  Oligonucleotide for detection of SNP TSC0049231
tttcctttaataa

SEQ ID NO: 200067 - DNA, 13 bp, Artificial Sequence
  Oligonucleotide for detection of SNP TSC0049231
ttattagaggaaa

SEQ ID NO: 200068 - DNA, 13 bp, Artificial Sequence
  Oligonucleotide for detection of SNP TSC0049231
tttcctctaataa

SEQ ID NO: 200069 - DNA, 13 bp, Artificial Sequence
  Oligonucleotide for detection of SNP TSC0049232
gtaaaaaatttta

SEQ ID NO: 200070 - DNA, 13 bp, Artificial Sequence
  Oligonucleotide for detection of SNP TSC0049232
taaaattttttac

SEQ ID NO: 200071 - DNA, 13 bp, Artificial Sequence
  Oligonucleotide for detection of SNP TSC0049232
gtaaaatatttta

SEQ ID NO: 200072 - DNA, 13 bp, Artificial Sequence
  Oligonucleotide for detection of SNP TSC0049232
taaaatattttac

SEQ ID NO: 200073 - DNA, 13 bp, Artificial Sequence
  Oligonucleotide for detection of SNP TSC0049232
taaaattttttgy

SEQ ID NO: 200074 - DNA, 13 bp, Artificial Sequence
  Oligonucleotide for detection of SNP TSC0049232
rcaaaaaatttta

SEQ ID NO: 200075 - DNA, 13 bp, Artificial Sequence
  Oligonucleotide for detection of SNP TSC0049232
taaaatattttgy

SEQ ID NO: 200076 - DNA, 13 bp, Artificial Sequence
  Oligonucleotide for detection of SNP TSC0049232
rcaaaatatttta

SEQ ID NO: 200077 - DNA, 13 bp, Artificial Sequence
  Oligonucleotide for detection of SNP TSC0049233
agaaaattattty

SEQ ID NO: 200078 - DNA, 13 bp, Artificial Sequence
  Oligonucleotide for detection of SNP TSC0049233
raaataattttct

SEQ ID NO: 200079 - DNA, 13 bp, Artificial Sequence
  Oligonucleotide for detection of SNP TSC0049233
agaaaagtattty

SEQ ID NO: 200080 - DNA, 13 bp, Artificial Sequence
  Oligonucleotide for detection of SNP TSC0049233
raaatacttttct

SEQ ID NO: 200081 - DNA, 13 bp, Artificial Sequence
  Oligonucleotide for detection of SNP TSC0049234
attgatattaaaa

SEQ ID NO: 200082 - DNA, 13 bp, Artificial Sequence
  Oligonucleotide for detection of SNP TSC0049234
ttttaatatcaat

SEQ ID NO: 200083 - DNA, 13 bp, Artificial Sequence
  Oligonucleotide for detection of SNP TSC0049234
attgatgttaaaa

SEQ ID NO: 200084 - DNA, 13 bp, Artificial Sequence
  Oligonucleotide for detection of SNP TSC0049234
ttttaacatcaat

SEQ ID NO: 200085 - DNA, 13 bp, Artificial Sequence
  Oligonucleotide for detection of SNP TSC0049235
gatggtagttgty

SEQ ID NO: 200086 - DNA, 13 bp, Artificial Sequence
  Oligonucleotide for detection of SNP TSC0049235
racaactaccatc

SEQ ID NO: 200087 - DNA, 13 bp, Artificial Sequence
  Oligonucleotide for detection of SNP TSC0049235
gatggtggttgty

SEQ ID NO: 200088 - DNA, 13 bp, Artificial Sequence
  Oligonucleotide for detection of SNP TSC0049235
racaaccaccatc

SEQ ID NO: 200089 - DNA, 13 bp, Artificial Sequence
  Oligonucleotide for detection of SNP TSC0049235
gacggtagttgty

SEQ ID NO: 200090 - DNA, 13 bp, Artificial Sequence
  Oligonucleotide for detection of SNP TSC0049235
racaactaccgtc

SEQ ID NO: 200091 - DNA, 13 bp, Artificial Sequence
  Oligonucleotide for detection of SNP TSC0049235
gacggtggttgty

SEQ ID NO: 200092 - DNA, 13 bp, Artificial Sequence
  Oligonucleotide for detection of SNP TSC0049235
racaaccaccgtc

SEQ ID NO: 200093 - DNA, 13 bp, Artificial Sequence
  Oligonucleotide for detection of SNP TSC0049235
gatggcggttgty

SEQ ID NO: 200094 - DNA, 13 bp, Artificial Sequence
  Oligonucleotide for detection of SNP TSC0049235
racaaccgccatc

SEQ ID NO: 200095 - DNA, 13 bp, Artificial Sequence
  Oligonucleotide for detection of SNP TSC0049235
gacggcggttgty

SEQ ID NO: 200096 - DNA, 13 bp, Artificial Sequence
  Oligonucleotide for detection of SNP TSC0049235
racaaccgccgtc

SEQ ID NO: 200097 - DNA, 13 bp, Artificial Sequence
  Oligonucleotide for detection of SNP TSC0049235
gatagttgttgty

SEQ ID NO: 200098 - DNA, 13 bp, Artificial Sequence
  Oligonucleotide for detection of SNP TSC0049235
racaacaactatc

SEQ ID NO: 200099 - DNA, 13 bp, Artificial Sequence
  Oligonucleotide for detection of SNP TSC0049235
gatagttgtcgty

SEQ ID NO: 200100 - DNA, 13 bp, Artificial Sequence
  Oligonucleotide for detection of SNP TSC0049235
racgacaactatc

SEQ ID NO: 200101 - DNA, 13 bp, Artificial Sequence
  Oligonucleotide for detection of SNP TSC0049235
gatagtcgttgty

SEQ ID NO: 200102 - DNA, 13 bp, Artificial Sequence
  Oligonucleotide for detection of SNP TSC0049235
racaacgactatc

SEQ ID NO: 200103 - DNA, 13 bp, Artificial Sequence
  Oligonucleotide for detection of SNP TSC0049235
gatagtcgtcgty

SEQ ID NO: 200104 - DNA, 13 bp, Artificial Sequence
  Oligonucleotide for detection of SNP TSC0049235
racgacgactatc

SEQ ID NO: 200105 - DNA, 13 bp, Artificial Sequence
  Oligonucleotide for detection of SNP TSC0049236
taagatggtttat

SEQ ID NO: 200106 - DNA, 13 bp, Artificial Sequence
  Oligonucleotide for detection of SNP TSC0049236
ataaaccatctta

SEQ ID NO: 200107 - DNA, 13 bp, Artificial Sequence
  Oligonucleotide for detection of SNP TSC0049238
gtaggaatgatga

SEQ ID NO: 200108 - DNA, 13 bp, Artificial Sequence
  Oligonucleotide for detection of SNP TSC0049238
tcatcattcctac

SEQ ID NO: 200109 - DNA, 13 bp, Artificial Sequence
  Oligonucleotide for detection of SNP TSC0049238
gtaggagtgatga

SEQ ID NO: 200110 - DNA, 13 bp, Artificial Sequence
  Oligonucleotide for detection of SNP TSC0049238
tcatcactcctac

SEQ ID NO: 200111 - DNA, 13 bp, Artificial Sequence
  Oligonucleotide for detection of SNP TSC0049240
gattttattgatg

SEQ ID NO: 200112 - DNA, 13 bp, Artificial Sequence
  Oligonucleotide for detection of SNP TSC0049240
catcaataaaatc

SEQ ID NO: 200113 - DNA, 13 bp, Artificial Sequence
  Oligonucleotide for detection of SNP TSC0049240
gattttgttgatg

SEQ ID NO: 200114 - DNA, 13 bp, Artificial Sequence
  Oligonucleotide for detection of SNP TSC0049240
catcaacaaaatc

SEQ ID NO: 200115 - DNA, 13 bp, Artificial Sequence
  Oligonucleotide for detection of SNP TSC0049240
gattttattgacg

SEQ ID NO: 200116 - DNA, 13 bp, Artificial Sequence
  Oligonucleotide for detection of SNP TSC0049240
cgtcaataaaatc

SEQ ID NO: 200117 - DNA, 13 bp, Artificial Sequence
  Oligonucleotide for detection of SNP TSC0049240
gatttcgttgatg

SEQ ID NO: 200118 - DNA, 13 bp, Artificial Sequence
  Oligonucleotide for detection of SNP TSC0049240
catcaacgaaatc

SEQ ID NO: 200119 - DNA, 13 bp, Artificial Sequence
  Oligonucleotide for detection of SNP TSC0049240
gattttgttgacg

SEQ ID NO: 200120 - DNA, 13 bp, Artificial Sequence
  Oligonucleotide for detection of SNP TSC0049240
cgtcaacaaaatc

SEQ ID NO: 200121 - DNA, 13 bp, Artificial Sequence
  Oligonucleotide for detection of SNP TSC0049240
gatttcgttgacg

SEQ ID NO: 200122 - DNA, 13 bp, Artificial Sequence
  Oligonucleotide for detection of SNP TSC0049240
cgtcaacgaaatc

SEQ ID NO: 200123 - DNA, 13 bp, Artificial Sequence
  Oligonucleotide for detection of SNP TSC0049240
tgttaatgagaty

SEQ ID NO: 200124 - DNA, 13 bp, Artificial Sequence
  Oligonucleotide for detection of SNP TSC0049240
ratctcattaaca

SEQ ID NO: 200125 - DNA, 13 bp, Artificial Sequence
  Oligonucleotide for detection of SNP TSC0049240
cgttaatgagaty

SEQ ID NO: 200126 - DNA, 13 bp, Artificial Sequence
  Oligonucleotide for detection of SNP TSC0049240
ratctcattaacg

SEQ ID NO: 200127 - DNA, 13 bp, Artificial Sequence
  Oligonucleotide for detection of SNP TSC0049240
tgttaacgagaty

SEQ ID NO: 200128 - DNA, 13 bp, Artificial Sequence
  Oligonucleotide for detection of SNP TSC0049240
ratctcgttaaca

SEQ ID NO: 200129 - DNA, 13 bp, Artificial Sequence
  Oligonucleotide for detection of SNP TSC0049240
cgttaacgagaty

SEQ ID NO: 200130 - DNA, 13 bp, Artificial Sequence
  Oligonucleotide for detection of SNP TSC0049240
ratctcgttaacg

SEQ ID NO: 200131 - DNA, 13 bp, Artificial Sequence
  Oligonucleotide for detection of SNP TSC0049243
gggaggtgggaga

SEQ ID NO: 200132 - DNA, 13 bp, Artificial Sequence
  Oligonucleotide for detection of SNP TSC0049243
tctcccacctccc

SEQ ID NO: 200133 - DNA, 13 bp, Artificial Sequence
  Oligonucleotide for detection of SNP TSC0049243
gggaggagggaga

SEQ ID NO: 200134 - DNA, 13 bp, Artificial Sequence
  Oligonucleotide for detection of SNP TSC0049243
tctccctcctccc

SEQ ID NO: 200135 - DNA, 13 bp, Artificial Sequence
  Oligonucleotide for detection of SNP TSC0049244
tagtgttgtaata

SEQ ID NO: 200136 - DNA, 13 bp, Artificial Sequence
  Oligonucleotide for detection of SNP TSC0049244
tattacaacacta

SEQ ID NO: 200137 - DNA, 13 bp, Artificial Sequence
  Oligonucleotide for detection of SNP TSC0049244
tagtgtggtaata

SEQ ID NO: 200138 - DNA, 13 bp, Artificial Sequence
  Oligonucleotide for detection of SNP TSC0049244
tattaccacacta

SEQ ID NO: 200139 - DNA, 13 bp, Artificial Sequence
  Oligonucleotide for detection of SNP TSC0049244
tattgttatatta

SEQ ID NO: 200140 - DNA, 13 bp, Artificial Sequence
  Oligonucleotide for detection of SNP TSC0049244
taatataacaata

SEQ ID NO: 200141 - DNA, 13 bp, Artificial Sequence
  Oligonucleotide for detection of SNP TSC0049245
ttttaattagttt

SEQ ID NO: 200142 - DNA, 13 bp, Artificial Sequence
  Oligonucleotide for detection of SNP TSC0049245
aaactaattaaaa

SEQ ID NO: 200143 - DNA, 13 bp, Artificial Sequence
  Oligonucleotide for detection of SNP TSC0049245
ttttaagtagttt

SEQ ID NO: 200144 - DNA, 13 bp, Artificial Sequence
  Oligonucleotide for detection of SNP TSC0049245
aaactacttaaaa

SEQ ID NO: 200145 - DNA, 13 bp, Artificial Sequence
  Oligonucleotide for detection of SNP TSC0049245
agattagttaaaa

SEQ ID NO: 200146 - DNA, 13 bp, Artificial Sequence
  Oligonucleotide for detection of SNP TSC0049245
ttttaactaatct

SEQ ID NO: 200147 - DNA, 13 bp, Artificial Sequence
  Oligonucleotide for detection of SNP TSC0049245
agattatttaaaa

SEQ ID NO: 200148 - DNA, 13 bp, Artificial Sequence
  Oligonucleotide for detection of SNP TSC0049245
ttttaaataatct

SEQ ID NO: 200149 - DNA, 13 bp, Artificial Sequence
  Oligonucleotide for detection of SNP TSC0049246
tgggaggttaagg

SEQ ID NO: 200150 - DNA, 13 bp, Artificial Sequence
  Oligonucleotide for detection of SNP TSC0049246
ccttaacctccca

SEQ ID NO: 200151 - DNA, 13 bp, Artificial Sequence
  Oligonucleotide for detection of SNP TSC0049246
tgggagattaagg

SEQ ID NO: 200152 - DNA, 13 bp, Artificial Sequence
  Oligonucleotide for detection of SNP TSC0049246
ccttaatctccca

SEQ ID NO: 200153 - DNA, 13 bp, Artificial Sequence
  Oligonucleotide for detection of SNP TSC0007814
tttagaattttag

SEQ ID NO: 200154 - DNA, 13 bp, Artificial Sequence
  Oligonucleotide for detection of SNP TSC0007814
ctaaaattctaaa

SEQ ID NO: 200155 - DNA, 13 bp, Artificial Sequence
  Oligonucleotide for detection of SNP TSC0007814
tttagagttttag

SEQ ID NO: 200156 - DNA, 13 bp, Artificial Sequence
  Oligonucleotide for detection of SNP TSC0007814
ctaaaactctaaa

SEQ ID NO: 200157 - DNA, 13 bp, Artificial Sequence
  Oligonucleotide for detection of SNP TSC0049248
ttttttgtttagy

SEQ ID NO: 200158 - DNA, 13 bp, Artificial Sequence
  Oligonucleotide for detection of SNP TSC0049248
rctaaacaaaaaa

SEQ ID NO: 200159 - DNA, 13 bp, Artificial Sequence
  Oligonucleotide for detection of SNP TSC0049248
tttttcgtttagy

SEQ ID NO: 200160 - DNA, 13 bp, Artificial Sequence
  Oligonucleotide for detection of SNP TSC0049248
rctaaacgaaaaa

SEQ ID NO: 200161 - DNA, 13 bp, Artificial Sequence
  Oligonucleotide for detection of SNP TSC0049248
gttgaatgaggga

SEQ ID NO: 200162 - DNA, 13 bp, Artificial Sequence
  Oligonucleotide for detection of SNP TSC0049248
tccctcattcaac

SEQ ID NO: 200163 - DNA, 13 bp, Artificial Sequence
  Oligonucleotide for detection of SNP TSC0049248
gttgaacgaggga

SEQ ID NO: 200164 - DNA, 13 bp, Artificial Sequence
  Oligonucleotide for detection of SNP TSC0049248
tccctcgttcaac

SEQ ID NO: 200165 - DNA, 13 bp, Artificial Sequence
  Oligonucleotide for detection of SNP TSC0049250
ttattgttttaag

SEQ ID NO: 200166 - DNA, 13 bp, Artificial Sequence
  Oligonucleotide for detection of SNP TSC0049250
cttaaaacaataa

SEQ ID NO: 200167 - DNA, 13 bp, Artificial Sequence
  Oligonucleotide for detection of SNP TSC0049250
ttattggtttaag

SEQ ID NO: 200168 - DNA, 13 bp, Artificial Sequence
  Oligonucleotide for detection of SNP TSC0049250
cttaaaccaataa

SEQ ID NO: 200169 - DNA, 13 bp, Artificial Sequence
  Oligonucleotide for detection of SNP TSC0049250
tttaagatagtaa

SEQ ID NO: 200170 - DNA, 13 bp, Artificial Sequence
  Oligonucleotide for detection of SNP TSC0049250
ttactatcttaaa

SEQ ID NO: 200171 - DNA, 13 bp, Artificial Sequence
  Oligonucleotide for detection of SNP TSC0049250
tttaagttagtaa

SEQ ID NO: 200172 - DNA, 13 bp, Artificial Sequence
  Oligonucleotide for detection of SNP TSC0049250
ttactaacttaaa

SEQ ID NO: 200173 - DNA, 13 bp, Artificial Sequence
  Oligonucleotide for detection of SNP TSC0049251
ttgggggtaatga

SEQ ID NO: 200174 - DNA, 13 bp, Artificial Sequence
  Oligonucleotide for detection of SNP TSC0049251
tcattacccccaa

SEQ ID NO: 200175 - DNA, 13 bp, Artificial Sequence
  Oligonucleotide for detection of SNP TSC0049251
ttggggataatga

SEQ ID NO: 200176 - DNA, 13 bp, Artificial Sequence
  Oligonucleotide for detection of SNP TSC0049251
tcattatccccaa

SEQ ID NO: 200177 - DNA, 13 bp, Artificial Sequence
  Oligonucleotide for detection of SNP TSC0049252
atgtatagaagat

SEQ ID NO: 200178 - DNA, 13 bp, Artificial Sequence
  Oligonucleotide for detection of SNP TSC0049252
atcttctatacat

SEQ ID NO: 200179 - DNA, 13 bp, Artificial Sequence
  Oligonucleotide for detection of SNP TSC0049252
atgtatggaagat

SEQ ID NO: 200180 - DNA, 13 bp, Artificial Sequence
  Oligonucleotide for detection of SNP TSC0049252
atcttccatacat

SEQ ID NO: 200181 - DNA, 13 bp, Artificial Sequence
  Oligonucleotide for detection of SNP TSC0049252
atgtacggaagat

SEQ ID NO: 200182 - DNA, 13 bp, Artificial Sequence
  Oligonucleotide for detection of SNP TSC0049252
atcttccgtacat

SEQ ID NO: 200183 - DNA, 13 bp, Artificial Sequence
  Oligonucleotide for detection of SNP TSC0049252
attttttgtatat

SEQ ID NO: 200184 - DNA, 13 bp, Artificial Sequence
  Oligonucleotide for detection of SNP TSC0049252
atatacaaaaaat

SEQ ID NO: 200185 - DNA, 13 bp, Artificial Sequence
  Oligonucleotide for detection of SNP TSC0049252
atttttcgtatat

SEQ ID NO: 200186 - DNA, 13 bp, Artificial Sequence
  Oligonucleotide for detection of SNP TSC0049252
atatacgaaaaat

SEQ ID NO: 200187 - DNA, 13 bp, Artificial Sequence
  Oligonucleotide for detection of SNP TSC0049256
gaattgtgattta

SEQ ID NO: 200188 - DNA, 13 bp, Artificial Sequence
  Oligonucleotide for detection of SNP TSC0049256
taaatcacaattc

SEQ ID NO: 200189 - DNA, 13 bp, Artificial Sequence
  Oligonucleotide for detection of SNP TSC0049256
gaattgcgattta

SEQ ID NO: 200190 - DNA, 13 bp, Artificial Sequence
  Oligonucleotide for detection of SNP TSC0049256
taaatcgcaattc

SEQ ID NO: 200191 - DNA, 13 bp, Artificial Sequence
  Oligonucleotide for detection of SNP TSC0049258
ataaatatgataa

SEQ ID NO: 200192 - DNA, 13 bp, Artificial Sequence
  Oligonucleotide for detection of SNP TSC0049258
ttatcatatttat

SEQ ID NO: 200193 - DNA, 13 bp, Artificial Sequence
  Oligonucleotide for detection of SNP TSC0049258
ataaatgtgataa

SEQ ID NO: 200194 - DNA, 13 bp, Artificial Sequence
  Oligonucleotide for detection of SNP TSC0049258
ttatcacatttat

SEQ ID NO: 200195 - DNA, 13 bp, Artificial Sequence
  Oligonucleotide for detection of SNP TSC0049261
aaatttatattay

SEQ ID NO: 200196 - DNA, 13 bp, Artificial Sequence
  Oligonucleotide for detection of SNP TSC0049261
rtaatataaattt

SEQ ID NO: 200197 - DNA, 13 bp, Artificial Sequence
  Oligonucleotide for detection of SNP TSC0049261
aaatttgtattay

SEQ ID NO: 200198 - DNA, 13 bp, Artificial Sequence
  Oligonucleotide for detection of SNP TSC0049261
rtaatacaaattt

SEQ ID NO: 200199 - DNA, 13 bp, Artificial Sequence
  Oligonucleotide for detection of SNP TSC0049264
gttagaattaaag

SEQ ID NO: 200200 - DNA, 13 bp, Artificial Sequence
  Oligonucleotide for detection of SNP TSC0049264
ctttaattctaac

SEQ ID NO: 200201 - DNA, 13 bp, Artificial Sequence
  Oligonucleotide for detection of SNP TSC0049264
gttagatttaaag

SEQ ID NO: 200202 - DNA, 13 bp, Artificial Sequence
  Oligonucleotide for detection of SNP TSC0049264
ctttaaatctaac

SEQ ID NO: 200203 - DNA, 13 bp, Artificial Sequence
  Oligonucleotide for detection of SNP TSC0049264
ttttaattttagy

SEQ ID NO: 200204 - DNA, 13 bp, Artificial Sequence
  Oligonucleotide for detection of SNP TSC0049264
rctaaaattaaaa

SEQ ID NO: 200205 - DNA, 13 bp, Artificial Sequence
  Oligonucleotide for detection of SNP TSC0049264
ttttaagtttagy

SEQ ID NO: 200206 - DNA, 13 bp, Artificial Sequence
  Oligonucleotide for detection of SNP TSC0049264
rctaaacttaaaa

SEQ ID NO: 200207 - DNA, 13 bp, Artificial Sequence
  Oligonucleotide for detection of SNP TSC0049265
aaattttgagtty

SEQ ID NO: 200208 - DNA, 13 bp, Artificial Sequence
  Oligonucleotide for detection of SNP TSC0049265
raactcaaaattt

SEQ ID NO: 200209 - DNA, 13 bp, Artificial Sequence
  Oligonucleotide for detection of SNP TSC0049265
aaatttcgagtty

SEQ ID NO: 200210 - DNA, 13 bp, Artificial Sequence
  Oligonucleotide for detection of SNP TSC0049265
raactcgaaattt

SEQ ID NO: 200211 - DNA, 13 bp, Artificial Sequence
  Oligonucleotide for detection of SNP TSC0049265
gggtttggggttt

SEQ ID NO: 200212 - DNA, 13 bp, Artificial Sequence
  Oligonucleotide for detection of SNP TSC0049265
aaaccccaaaccc

SEQ ID NO: 200213 - DNA, 13 bp, Artificial Sequence
  Oligonucleotide for detection of SNP TSC0049265
gggtttagggttt

SEQ ID NO: 200214 - DNA, 13 bp, Artificial Sequence
  Oligonucleotide for detection of SNP TSC0049265
aaaccctaaaccc

SEQ ID NO: 200215 - DNA, 13 bp, Artificial Sequence
  Oligonucleotide for detection of SNP TSC0049265
gggttcggggttt

SEQ ID NO: 200216 - DNA, 13 bp, Artificial Sequence
  Oligonucleotide for detection of SNP TSC0049265
aaaccccgaaccc

SEQ ID NO: 200217 - DNA, 13 bp, Artificial Sequence
  Oligonucleotide for detection of SNP TSC0049266
ttttggggaagta

SEQ ID NO: 200218 - DNA, 13 bp, Artificial Sequence
  Oligonucleotide for detection of SNP TSC0049266
tacttccccaaaa

SEQ ID NO: 200219 - DNA, 13 bp, Artificial Sequence
  Oligonucleotide for detection of SNP TSC0049266
ttttggagaagta

SEQ ID NO: 200220 - DNA, 13 bp, Artificial Sequence
  Oligonucleotide for detection of SNP TSC0049266
tacttctccaaaa

SEQ ID NO: 200221 - DNA, 13 bp, Artificial Sequence
  Oligonucleotide for detection of SNP TSC0049268
tgtattaattagy

SEQ ID NO: 200222 - DNA, 13 bp, Artificial Sequence
  Oligonucleotide for detection of SNP TSC0049268
rctaattaataca

SEQ ID NO: 200223 - DNA, 13 bp, Artificial Sequence
  Oligonucleotide for detection of SNP TSC0049268
tgtattgattagy

SEQ ID NO: 200224 - DNA, 13 bp, Artificial Sequence
  Oligonucleotide for detection of SNP TSC0049268
rctaatcaataca

SEQ ID NO: 200225 - DNA, 13 bp, Artificial Sequence
  Oligonucleotide for detection of SNP TSC0049268
tgtatcgattagy

SEQ ID NO: 200226 - DNA, 13 bp, Artificial Sequence
  Oligonucleotide for detection of SNP TSC0049268
rctaatcgataca

SEQ ID NO: 200227 - DNA, 13 bp, Artificial Sequence
  Oligonucleotide for detection of SNP TSC0049268
gttgattggtgta

SEQ ID NO: 200228 - DNA, 13 bp, Artificial Sequence
  Oligonucleotide for detection of SNP TSC0049268
tacaccaatcaac

SEQ ID NO: 200229 - DNA, 13 bp, Artificial Sequence
  Oligonucleotide for detection of SNP TSC0049268
gttgatcggtgta

SEQ ID NO: 200230 - DNA, 13 bp, Artificial Sequence
  Oligonucleotide for detection of SNP TSC0049268
tacaccgatcaac

SEQ ID NO: 200231 - DNA, 13 bp, Artificial Sequence
  Oligonucleotide for detection of SNP TSC0049269
ggagggttgatta

SEQ ID NO: 200232 - DNA, 13 bp, Artificial Sequence
  Oligonucleotide for detection of SNP TSC0049269
taatcaaccctcc

SEQ ID NO: 200233 - DNA, 13 bp, Artificial Sequence
  Oligonucleotide for detection of SNP TSC0049269
ggaggggtgatta

SEQ ID NO: 200234 - DNA, 13 bp, Artificial Sequence
  Oligonucleotide for detection of SNP TSC0049269
taatcacccctcc

SEQ ID NO: 200235 - DNA, 13 bp, Artificial Sequence
  Oligonucleotide for detection of SNP TSC0049269
tggttagttttty

SEQ ID NO: 200236 - DNA, 13 bp, Artificial Sequence
  Oligonucleotide for detection of SNP TSC0049269
raaaaactaacca

SEQ ID NO: 200237 - DNA, 13 bp, Artificial Sequence
  Oligonucleotide for detection of SNP TSC0049271
ttagtaagtttta

SEQ ID NO: 200238 - DNA, 13 bp, Artificial Sequence
  Oligonucleotide for detection of SNP TSC0049271
taaaacttactaa

SEQ ID NO: 200239 - DNA, 13 bp, Artificial Sequence
  Oligonucleotide for detection of SNP TSC0049271
taaaatttattaa

SEQ ID NO: 200240 - DNA, 13 bp, Artificial Sequence
  Oligonucleotide for detection of SNP TSC0049271
ttaataaatttta

SEQ ID NO: 200241 - DNA, 13 bp, Artificial Sequence
  Oligonucleotide for detection of SNP TSC0049272
ttattggttaata

SEQ ID NO: 200242 - DNA, 13 bp, Artificial Sequence
  Oligonucleotide for detection of SNP TSC0049272
tattaaccaataa

SEQ ID NO: 200243 - DNA, 13 bp, Artificial Sequence
  Oligonucleotide for detection of SNP TSC0049272
ttattgattaata

SEQ ID NO: 200244 - DNA, 13 bp, Artificial Sequence
  Oligonucleotide for detection of SNP TSC0049272
tattaatcaataa

SEQ ID NO: 200245 - DNA, 13 bp, Artificial Sequence
  Oligonucleotide for detection of SNP TSC0049273
tttgttataatgg

SEQ ID NO: 200246 - DNA, 13 bp, Artificial Sequence
  Oligonucleotide for detection of SNP TSC0049273
ccattataacaaa

SEQ ID NO: 200247 - DNA, 13 bp, Artificial Sequence
  Oligonucleotide for detection of SNP TSC0049273
tttgttgtaatgg

SEQ ID NO: 200248 - DNA, 13 bp, Artificial Sequence
  Oligonucleotide for detection of SNP TSC0049273
ccattacaacaaa

SEQ ID NO: 200249 - DNA, 13 bp, Artificial Sequence
  Oligonucleotide for detection of SNP TSC0049273
tttgtcgtaatgg

SEQ ID NO: 200250 - DNA, 13 bp, Artificial Sequence
  Oligonucleotide for detection of SNP TSC0049273
ccattacgacaaa

SEQ ID NO: 200251 - DNA, 13 bp, Artificial Sequence
  Oligonucleotide for detection of SNP TSC0049279
tttttagtgattg

SEQ ID NO: 200252 - DNA, 13 bp, Artificial Sequence
  Oligonucleotide for detection of SNP TSC0049279
caatcactaaaaa

SEQ ID NO: 200253 - DNA, 13 bp, Artificial Sequence
  Oligonucleotide for detection of SNP TSC0049279
tttttaatgattg

SEQ ID NO: 200254 - DNA, 13 bp, Artificial Sequence
  Oligonucleotide for detection of SNP TSC0049279
caatcattaaaaa

SEQ ID NO: 200255 - DNA, 13 bp, Artificial Sequence
  Oligonucleotide for detection of SNP TSC0049281
gtgtgtttagtaa

SEQ ID NO: 200256 - DNA, 13 bp, Artificial Sequence
  Oligonucleotide for detection of SNP TSC0049281
ttactaaacacac

SEQ ID NO: 200257 - DNA, 13 bp, Artificial Sequence
  Oligonucleotide for detection of SNP TSC0049281
gtgtgtgtagtaa

SEQ ID NO: 200258 - DNA, 13 bp, Artificial Sequence
  Oligonucleotide for detection of SNP TSC0049281
ttactacacacac

SEQ ID NO: 200259 - DNA, 13 bp, Artificial Sequence
  Oligonucleotide for detection of SNP TSC0049281
ttattagatatay

SEQ ID NO: 200260 - DNA, 13 bp, Artificial Sequence
  Oligonucleotide for detection of SNP TSC0049281
rtatatctaataa

SEQ ID NO: 200261 - DNA, 13 bp, Artificial Sequence
  Oligonucleotide for detection of SNP TSC0049281
ttattatatatay

SEQ ID NO: 200262 - DNA, 13 bp, Artificial Sequence
  Oligonucleotide for detection of SNP TSC0049281
rtatatataataa

SEQ ID NO: 200263 - DNA, 13 bp, Artificial Sequence
  Oligonucleotide for detection of SNP TSC0049282
ttttttaaatgta

SEQ ID NO: 200264 - DNA, 13 bp, Artificial Sequence
  Oligonucleotide for detection of SNP TSC0049282
tacatttaaaaaa

SEQ ID NO: 200265 - DNA, 13 bp, Artificial Sequence
  Oligonucleotide for detection of SNP TSC0049282
tttttttaatgta

SEQ ID NO: 200266 - DNA, 13 bp, Artificial Sequence
  Oligonucleotide for detection of SNP TSC0049282
tacattaaaaaaa

SEQ ID NO: 200267 - DNA, 13 bp, Artificial Sequence
  Oligonucleotide for detection of SNP TSC0049282
tgtatttaaaaaa

SEQ ID NO: 200268 - DNA, 13 bp, Artificial Sequence
  Oligonucleotide for detection of SNP TSC0049282
ttttttaaataca

SEQ ID NO: 200269 - DNA, 13 bp, Artificial Sequence
  Oligonucleotide for detection of SNP TSC0049282
tgtattaaaaaaa

SEQ ID NO: 200270 - DNA, 13 bp, Artificial Sequence
  Oligonucleotide for detection of SNP TSC0049282
tttttttaataca

SEQ ID NO: 200271 - DNA, 13 bp, Artificial Sequence
  Oligonucleotide for detection of SNP TSC0049283
tgtagatggttat

SEQ ID NO: 200272 - DNA, 13 bp, Artificial Sequence
  Oligonucleotide for detection of SNP TSC0049283
ataaccatctaca

SEQ ID NO: 200273 - DNA, 13 bp, Artificial Sequence
  Oligonucleotide for detection of SNP TSC0049283
tgtagagggttat

SEQ ID NO: 200274 - DNA, 13 bp, Artificial Sequence
  Oligonucleotide for detection of SNP TSC0049283
ataaccctctaca

SEQ ID NO: 200275 - DNA, 13 bp, Artificial Sequence
  Oligonucleotide for detection of SNP TSC0049283
tgtagacggttat

SEQ ID NO: 200276 - DNA, 13 bp, Artificial Sequence
  Oligonucleotide for detection of SNP TSC0049283
ataaccgtctaca

SEQ ID NO: 200277 - DNA, 13 bp, Artificial Sequence
  Oligonucleotide for detection of SNP TSC0049283
atagttgtttgta

SEQ ID NO: 200278 - DNA, 13 bp, Artificial Sequence
  Oligonucleotide for detection of SNP TSC0049283
tacaaacaactat

SEQ ID NO: 200279 - DNA, 13 bp, Artificial Sequence
  Oligonucleotide for detection of SNP TSC0049283
atagttttttgta

SEQ ID NO: 200280 - DNA, 13 bp, Artificial Sequence
  Oligonucleotide for detection of SNP TSC0049283
tacaaaaaactat

SEQ ID NO: 200281 - DNA, 13 bp, Artificial Sequence
  Oligonucleotide for detection of SNP TSC0049283
atagtcgtttgta

SEQ ID NO: 200282 - DNA, 13 bp, Artificial Sequence
  Oligonucleotide for detection of SNP TSC0049283
tacaaacgactat

SEQ ID NO: 200283 - DNA, 13 bp, Artificial Sequence
  Oligonucleotide for detection of SNP TSC0049286
taaagttatgaga

SEQ ID NO: 200284 - DNA, 13 bp, Artificial Sequence
  Oligonucleotide for detection of SNP TSC0049286
tctcataacttta

SEQ ID NO: 200285 - DNA, 13 bp, Artificial Sequence
  Oligonucleotide for detection of SNP TSC0049286
taaagtgatgaga

SEQ ID NO: 200286 - DNA, 13 bp, Artificial Sequence
  Oligonucleotide for detection of SNP TSC0049286
tctcatcacttta

SEQ ID NO: 200287 - DNA, 13 bp, Artificial Sequence
  Oligonucleotide for detection of SNP TSC0049286
ttttatgatttta

SEQ ID NO: 200288 - DNA, 13 bp, Artificial Sequence
  Oligonucleotide for detection of SNP TSC0049286
taaaatcataaaa

SEQ ID NO: 200289 - DNA, 13 bp, Artificial Sequence
  Oligonucleotide for detection of SNP TSC0049288
aaataaattaagt

SEQ ID NO: 200290 - DNA, 13 bp, Artificial Sequence
  Oligonucleotide for detection of SNP TSC0049288
acttaatttattt

SEQ ID NO: 200291 - DNA, 13 bp, Artificial Sequence
  Oligonucleotide for detection of SNP TSC0049288
aaataagttaagt

SEQ ID NO: 200292 - DNA, 13 bp, Artificial Sequence
  Oligonucleotide for detection of SNP TSC0049288
acttaacttattt

SEQ ID NO: 200293 - DNA, 13 bp, Artificial Sequence
  Oligonucleotide for detection of SNP TSC0049293
ggtgtgtgttaty

SEQ ID NO: 200294 - DNA, 13 bp, Artificial Sequence
  Oligonucleotide for detection of SNP TSC0049293
rataacacacacc

SEQ ID NO: 200295 - DNA, 13 bp, Artificial Sequence
  Oligonucleotide for detection of SNP TSC0049293
ggtgtgcgttaty

SEQ ID NO: 200296 - DNA, 13 bp, Artificial Sequence
  Oligonucleotide for detection of SNP TSC0049293
rataacgcacacc

SEQ ID NO: 200297 - DNA, 13 bp, Artificial Sequence
  Oligonucleotide for detection of SNP TSC0049293
ggtgatgtataty

SEQ ID NO: 200298 - DNA, 13 bp, Artificial Sequence
  Oligonucleotide for detection of SNP TSC0049293
ratatacatcacc

SEQ ID NO: 200299 - DNA, 13 bp, Artificial Sequence
  Oligonucleotide for detection of SNP TSC0049293
ggtgatatataty

SEQ ID NO: 200300 - DNA, 13 bp, Artificial Sequence
  Oligonucleotide for detection of SNP TSC0049293
ratatatatcacc

SEQ ID NO: 200301 - DNA, 13 bp, Artificial Sequence
  Oligonucleotide for detection of SNP TSC0049293
ggtgacgtataty

SEQ ID NO: 200302 - DNA, 13 bp, Artificial Sequence
  Oligonucleotide for detection of SNP TSC0049293
ratatacgtcacc

SEQ ID NO: 200303 - DNA, 13 bp, Artificial Sequence
  Oligonucleotide for detection of SNP TSC0049294
aatattatttaag

SEQ ID NO: 200304 - DNA, 13 bp, Artificial Sequence
  Oligonucleotide for detection of SNP TSC0049294
cttaaataatatt

SEQ ID NO: 200305 - DNA, 13 bp, Artificial Sequence
  Oligonucleotide for detection of SNP TSC0049294
aatattgtttaag

SEQ ID NO: 200306 - DNA, 13 bp, Artificial Sequence
  Oligonucleotide for detection of SNP TSC0049294
cttaaacaatatt

SEQ ID NO: 200307 - DNA, 13 bp, Artificial Sequence
  Oligonucleotide for detection of SNP TSC0049294
aatatcgtttaag

SEQ ID NO: 200308 - DNA, 13 bp, Artificial Sequence
  Oligonucleotide for detection of SNP TSC0049294
cttaaacgatatt

SEQ ID NO: 200309 - DNA, 13 bp, Artificial Sequence
  Oligonucleotide for detection of SNP TSC0049294
tttgggtgatatt

SEQ ID NO: 200310 - DNA, 13 bp, Artificial Sequence
  Oligonucleotide for detection of SNP TSC0049294
aatatcacccaaa

SEQ ID NO: 200311 - DNA, 13 bp, Artificial Sequence
  Oligonucleotide for detection of SNP TSC0049294
tttgggcgatatt

SEQ ID NO: 200312 - DNA, 13 bp, Artificial Sequence
  Oligonucleotide for detection of SNP TSC0049294
aatatcgcccaaa

SEQ ID NO: 200313 - DNA, 13 bp, Artificial Sequence
  Oligonucleotide for detection of SNP TSC0049295
aaaaaatggaata

SEQ ID NO: 200314 - DNA, 13 bp, Artificial Sequence
  Oligonucleotide for detection of SNP TSC0049295
tattccatttttt

SEQ ID NO: 200315 - DNA, 13 bp, Artificial Sequence
  Oligonucleotide for detection of SNP TSC0049295
aaaaaacggaata

SEQ ID NO: 200316 - DNA, 13 bp, Artificial Sequence
  Oligonucleotide for detection of SNP TSC0049295
tattccgtttttt

SEQ ID NO: 200317 - DNA, 13 bp, Artificial Sequence
  Oligonucleotide for detection of SNP TSC0049297
tatggtggtatay

SEQ ID NO: 200318 - DNA, 13 bp, Artificial Sequence
  Oligonucleotide for detection of SNP TSC0049297
rtataccaccata

SEQ ID NO: 200319 - DNA, 13 bp, Artificial Sequence
  Oligonucleotide for detection of SNP TSC0049297
tatggtagtatay

SEQ ID NO: 200320 - DNA, 13 bp, Artificial Sequence
  Oligonucleotide for detection of SNP TSC0049297
rtatactaccata

SEQ ID NO: 200321 - DNA, 13 bp, Artificial Sequence
  Oligonucleotide for detection of SNP TSC0049298
tttgttattggtg

SEQ ID NO: 200322 - DNA, 13 bp, Artificial Sequence
  Oligonucleotide for detection of SNP TSC0049298
caccaataacaaa

SEQ ID NO: 200323 - DNA, 13 bp, Artificial Sequence
  Oligonucleotide for detection of SNP TSC0049298
tttgttgttggtg

SEQ ID NO: 200324 - DNA, 13 bp, Artificial Sequence
  Oligonucleotide for detection of SNP TSC0049298
caccaacaacaaa

SEQ ID NO: 200325 - DNA, 13 bp, Artificial Sequence
  Oligonucleotide for detection of SNP TSC0049299
ataatagtatttt

SEQ ID NO: 200326 - DNA, 13 bp, Artificial Sequence
  Oligonucleotide for detection of SNP TSC0049299
aaaatactattat

SEQ ID NO: 200327 - DNA, 13 bp, Artificial Sequence
  Oligonucleotide for detection of SNP TSC0049299
ataataatatttt

SEQ ID NO: 200328 - DNA, 13 bp, Artificial Sequence
  Oligonucleotide for detection of SNP TSC0049299
aaaatattattat

SEQ ID NO: 200329 - DNA, 13 bp, Artificial Sequence
  Oligonucleotide for detection of SNP TSC0049300
aatattaatttay

SEQ ID NO: 200330 - DNA, 13 bp, Artificial Sequence
  Oligonucleotide for detection of SNP TSC0049300
rtaaattaatatt

SEQ ID NO: 200331 - DNA, 13 bp, Artificial Sequence
  Oligonucleotide for detection of SNP TSC0049300
aatattgatttay

SEQ ID NO: 200332 - DNA, 13 bp, Artificial Sequence
  Oligonucleotide for detection of SNP TSC0049300
rtaaatcaatatt

SEQ ID NO: 200333 - DNA, 13 bp, Artificial Sequence
  Oligonucleotide for detection of SNP TSC0049300
aatatcgatttay

SEQ ID NO: 200334 - DNA, 13 bp, Artificial Sequence
  Oligonucleotide for detection of SNP TSC0049300
rtaaatcgatatt

SEQ ID NO: 200335 - DNA, 13 bp, Artificial Sequence
  Oligonucleotide for detection of SNP TSC0049300
gtaagttgatgtt

SEQ ID NO: 200336 - DNA, 13 bp, Artificial Sequence
  Oligonucleotide for detection of SNP TSC0049300
aacatcaacttac

SEQ ID NO: 200337 - DNA, 13 bp, Artificial Sequence
  Oligonucleotide for detection of SNP TSC0049300
gtaagtcgatgtt

SEQ ID NO: 200338 - DNA, 13 bp, Artificial Sequence
  Oligonucleotide for detection of SNP TSC0049300
aacatcgacttac

SEQ ID NO: 200339 - DNA, 13 bp, Artificial Sequence
  Oligonucleotide for detection of SNP TSC0049301
atgttatggtaga

SEQ ID NO: 200340 - DNA, 13 bp, Artificial Sequence
  Oligonucleotide for detection of SNP TSC0049301
tctaccataacat

SEQ ID NO: 200341 - DNA, 13 bp, Artificial Sequence
  Oligonucleotide for detection of SNP TSC0049301
atgttacggtaga

SEQ ID NO: 200342 - DNA, 13 bp, Artificial Sequence
  Oligonucleotide for detection of SNP TSC0049301
tctaccgtaacat

SEQ ID NO: 200343 - DNA, 13 bp, Artificial Sequence
  Oligonucleotide for detection of SNP TSC0049301
tttgttgtgatat

SEQ ID NO: 200344 - DNA, 13 bp, Artificial Sequence
  Oligonucleotide for detection of SNP TSC0049301
atatcacaacaaa

SEQ ID NO: 200345 - DNA, 13 bp, Artificial Sequence
  Oligonucleotide for detection of SNP TSC0049301
tttgttatgatat

SEQ ID NO: 200346 - DNA, 13 bp, Artificial Sequence
  Oligonucleotide for detection of SNP TSC0049301
atatcataacaaa

SEQ ID NO: 200347 - DNA, 13 bp, Artificial Sequence
  Oligonucleotide for detection of SNP TSC0049301
tttgtcgtgatat

SEQ ID NO: 200348 - DNA, 13 bp, Artificial Sequence
  Oligonucleotide for detection of SNP TSC0049301
atatcacgacaaa

SEQ ID NO: 200349 - DNA, 13 bp, Artificial Sequence
  Oligonucleotide for detection of SNP TSC0049302
gttttttattttt

SEQ ID NO: 200350 - DNA, 13 bp, Artificial Sequence
  Oligonucleotide for detection of SNP TSC0049302
aaaaataaaaaac

SEQ ID NO: 200351 - DNA, 13 bp, Artificial Sequence
  Oligonucleotide for detection of SNP TSC0049303
aattttataggta

SEQ ID NO: 200352 - DNA, 13 bp, Artificial Sequence
  Oligonucleotide for detection of SNP TSC0049303
tacctataaaatt

SEQ ID NO: 200353 - DNA, 13 bp, Artificial Sequence
  Oligonucleotide for detection of SNP TSC0049303
aattttgtaggta

SEQ ID NO: 200354 - DNA, 13 bp, Artificial Sequence
  Oligonucleotide for detection of SNP TSC0049303
tacctacaaaatt

SEQ ID NO: 200355 - DNA, 13 bp, Artificial Sequence
  Oligonucleotide for detection of SNP TSC0049304
tgtttattgatgt

SEQ ID NO: 200356 - DNA, 13 bp, Artificial Sequence
  Oligonucleotide for detection of SNP TSC0049304
acatcaataaaca

SEQ ID NO: 200357 - DNA, 13 bp, Artificial Sequence
  Oligonucleotide for detection of SNP TSC0049304
tgtttagtgatgt

SEQ ID NO: 200358 - DNA, 13 bp, Artificial Sequence
  Oligonucleotide for detection of SNP TSC0049304
acatcactaaaca

SEQ ID NO: 200359 - DNA, 13 bp, Artificial Sequence
  Oligonucleotide for detection of SNP TSC0049304
atattaatgggta

SEQ ID NO: 200360 - DNA, 13 bp, Artificial Sequence
  Oligonucleotide for detection of SNP TSC0049304
tacccattaatat

SEQ ID NO: 200361 - DNA, 13 bp, Artificial Sequence
  Oligonucleotide for detection of SNP TSC0049304
atattattgggta

SEQ ID NO: 200362 - DNA, 13 bp, Artificial Sequence
  Oligonucleotide for detection of SNP TSC0049304
tacccaataatat

SEQ ID NO: 200363 - DNA, 13 bp, Artificial Sequence
  Oligonucleotide for detection of SNP TSC0049306
ggagatagagatg

SEQ ID NO: 200364 - DNA, 13 bp, Artificial Sequence
  Oligonucleotide for detection of SNP TSC0049306
catctctatctcc

SEQ ID NO: 200365 - DNA, 13 bp, Artificial Sequence
  Oligonucleotide for detection of SNP TSC0049306
ggagatggagatg

SEQ ID NO: 200366 - DNA, 13 bp, Artificial Sequence
  Oligonucleotide for detection of SNP TSC0049306
catctccatctcc

SEQ ID NO: 200367 - DNA, 13 bp, Artificial Sequence
  Oligonucleotide for detection of SNP TSC0049306
ggagacggagatg

SEQ ID NO: 200368 - DNA, 13 bp, Artificial Sequence
  Oligonucleotide for detection of SNP TSC0049306
catctccgtctcc

SEQ ID NO: 200369 - DNA, 13 bp, Artificial Sequence
  Oligonucleotide for detection of SNP TSC0049307
tattgttgggatt

SEQ ID NO: 200370 - DNA, 13 bp, Artificial Sequence
  Oligonucleotide for detection of SNP TSC0049307
aatcccaacaata

SEQ ID NO: 200371 - DNA, 13 bp, Artificial Sequence
  Oligonucleotide for detection of SNP TSC0049307
tattgtggggatt

SEQ ID NO: 200372 - DNA, 13 bp, Artificial Sequence
  Oligonucleotide for detection of SNP TSC0049307
aatccccacaata

SEQ ID NO: 200373 - DNA, 13 bp, Artificial Sequence
  Oligonucleotide for detection of SNP TSC0049307
tattgcggggatt

SEQ ID NO: 200374 - DNA, 13 bp, Artificial Sequence
  Oligonucleotide for detection of SNP TSC0049307
aatccccgcaata

SEQ ID NO: 200375 - DNA, 13 bp, Artificial Sequence
  Oligonucleotide for detection of SNP TSC0049307
aattttagtagta

SEQ ID NO: 200376 - DNA, 13 bp, Artificial Sequence
  Oligonucleotide for detection of SNP TSC0049307
tactactaaaatt

SEQ ID NO: 200377 - DNA, 13 bp, Artificial Sequence
  Oligonucleotide for detection of SNP TSC0049307
aatttttgtagta

SEQ ID NO: 200378 - DNA, 13 bp, Artificial Sequence
  Oligonucleotide for detection of SNP TSC0049307
tactacaaaaatt

SEQ ID NO: 200379 - DNA, 13 bp, Artificial Sequence
  Oligonucleotide for detection of SNP TSC0049307
aattttcgtagta

SEQ ID NO: 200380 - DNA, 13 bp, Artificial Sequence
  Oligonucleotide for detection of SNP TSC0049307
tactacgaaaatt

SEQ ID NO: 200381 - DNA, 13 bp, Artificial Sequence
  Oligonucleotide for detection of SNP TSC0049308
gtaaagaataaag

SEQ ID NO: 200382 - DNA, 13 bp, Artificial Sequence
  Oligonucleotide for detection of SNP TSC0049308
ctttattctttac

SEQ ID NO: 200383 - DNA, 13 bp, Artificial Sequence
  Oligonucleotide for detection of SNP TSC0049308
gtaaagtataaag

SEQ ID NO: 200384 - DNA, 13 bp, Artificial Sequence
  Oligonucleotide for detection of SNP TSC0049308
ctttatactttac

SEQ ID NO: 200385 - DNA, 13 bp, Artificial Sequence
  Oligonucleotide for detection of SNP TSC0049308
ttttattttttay

SEQ ID NO: 200386 - DNA, 13 bp, Artificial Sequence
  Oligonucleotide for detection of SNP TSC0049308
rtaaaaaataaaa

SEQ ID NO: 200387 - DNA, 13 bp, Artificial Sequence
  Oligonucleotide for detection of SNP TSC0049308
ttttatgttttay

SEQ ID NO: 200388 - DNA, 13 bp, Artificial Sequence
  Oligonucleotide for detection of SNP TSC0049308
rtaaaacataaaa

SEQ ID NO: 200389 - DNA, 13 bp, Artificial Sequence
  Oligonucleotide for detection of SNP TSC0049309
tgtttagtggttt

SEQ ID NO: 200390 - DNA, 13 bp, Artificial Sequence
  Oligonucleotide for detection of SNP TSC0049309
aaaccactaaaca

SEQ ID NO: 200391 - DNA, 13 bp, Artificial Sequence
  Oligonucleotide for detection of SNP TSC0049309
tgtttaatggttt

SEQ ID NO: 200392 - DNA, 13 bp, Artificial Sequence
  Oligonucleotide for detection of SNP TSC0049309
aaaccattaaaca

SEQ ID NO: 200393 - DNA, 13 bp, Artificial Sequence
  Oligonucleotide for detection of SNP TSC0049313
ttagggggtttga

SEQ ID NO: 200394 - DNA, 13 bp, Artificial Sequence
  Oligonucleotide for detection of SNP TSC0049313
tcaaaccccctaa

SEQ ID NO: 200395 - DNA, 13 bp, Artificial Sequence
  Oligonucleotide for detection of SNP TSC0049313
ttagggagtttga

SEQ ID NO: 200396 - DNA, 13 bp, Artificial Sequence
  Oligonucleotide for detection of SNP TSC0049313
tcaaactccctaa

SEQ ID NO: 200397 - DNA, 13 bp, Artificial Sequence
  Oligonucleotide for detection of SNP TSC0049314
tttttcggattag

SEQ ID NO: 200398 - DNA, 13 bp, Artificial Sequence
  Oligonucleotide for detection of SNP TSC0049314
ctaatccgaaaaa

SEQ ID NO: 200399 - DNA, 13 bp, Artificial Sequence
  Oligonucleotide for detection of SNP TSC0049314
ttgatttgggagg

SEQ ID NO: 200400 - DNA, 13 bp, Artificial Sequence
  Oligonucleotide for detection of SNP TSC0049314
cctcccaaatcaa

SEQ ID NO: 200401 - DNA, 13 bp, Artificial Sequence
  Oligonucleotide for detection of SNP TSC0049314
ttgattcgggagg

SEQ ID NO: 200402 - DNA, 13 bp, Artificial Sequence
  Oligonucleotide for detection of SNP TSC0049314
cctcccgaatcaa

SEQ ID NO: 200403 - DNA, 13 bp, Artificial Sequence
  Oligonucleotide for detection of SNP TSC0049316
gattaatgtttta

SEQ ID NO: 200404 - DNA, 13 bp, Artificial Sequence
  Oligonucleotide for detection of SNP TSC0049316
taaaacattaatc

SEQ ID NO: 200405 - DNA, 13 bp, Artificial Sequence
  Oligonucleotide for detection of SNP TSC0049316
gattaacgtttta

SEQ ID NO: 200406 - DNA, 13 bp, Artificial Sequence
  Oligonucleotide for detection of SNP TSC0049316
taaaacgttaatc

SEQ ID NO: 200407 - DNA, 13 bp, Artificial Sequence
  Oligonucleotide for detection of SNP TSC0049316
taaagtgttgaty

SEQ ID NO: 200408 - DNA, 13 bp, Artificial Sequence
  Oligonucleotide for detection of SNP TSC0049316
ratcaacacttta

SEQ ID NO: 200409 - DNA, 13 bp, Artificial Sequence
  Oligonucleotide for detection of SNP TSC0049316
taaagtattgaty

SEQ ID NO: 200410 - DNA, 13 bp, Artificial Sequence
  Oligonucleotide for detection of SNP TSC0049316
ratcaatacttta

SEQ ID NO: 200411 - DNA, 13 bp, Artificial Sequence
  Oligonucleotide for detection of SNP TSC0049316
taaagcgttgaty

SEQ ID NO: 200412 - DNA, 13 bp, Artificial Sequence
  Oligonucleotide for detection of SNP TSC0049316
ratcaacgcttta

SEQ ID NO: 200413 - DNA, 13 bp, Artificial Sequence
  Oligonucleotide for detection of SNP TSC0049317
gttgtttatatgy

SEQ ID NO: 200414 - DNA, 13 bp, Artificial Sequence
  Oligonucleotide for detection of SNP TSC0049317
rcatataaacaac

SEQ ID NO: 200415 - DNA, 13 bp, Artificial Sequence
  Oligonucleotide for detection of SNP TSC0049317
gttgttgatatgy

SEQ ID NO: 200416 - DNA, 13 bp, Artificial Sequence
  Oligonucleotide for detection of SNP TSC0049317
rcatatcaacaac

SEQ ID NO: 200417 - DNA, 13 bp, Artificial Sequence
  Oligonucleotide for detection of SNP TSC0049317
gtatgtaagtagy

SEQ ID NO: 200418 - DNA, 13 bp, Artificial Sequence
  Oligonucleotide for detection of SNP TSC0049317
rctacttacatac

SEQ ID NO: 200419 - DNA, 13 bp, Artificial Sequence
  Oligonucleotide for detection of SNP TSC0049317
gtatgttagtagy

SEQ ID NO: 200420 - DNA, 13 bp, Artificial Sequence
  Oligonucleotide for detection of SNP TSC0049317
rctactaacatac

SEQ ID NO: 200421 - DNA, 13 bp, Artificial Sequence
  Oligonucleotide for detection of SNP TSC0049319
tgtttaaatgaag

SEQ ID NO: 200422 - DNA, 13 bp, Artificial Sequence
  Oligonucleotide for detection of SNP TSC0049319
cttcatttaaaca

SEQ ID NO: 200423 - DNA, 13 bp, Artificial Sequence
  Oligonucleotide for detection of SNP TSC0049319
tgtttatatgaag

SEQ ID NO: 200424 - DNA, 13 bp, Artificial Sequence
  Oligonucleotide for detection of SNP TSC0049319
cttcatataaaca

SEQ ID NO: 200425 - DNA, 13 bp, Artificial Sequence
  Oligonucleotide for detection of SNP TSC0049319
ttttatttggata

SEQ ID NO: 200426 - DNA, 13 bp, Artificial Sequence
  Oligonucleotide for detection of SNP TSC0049319
tatccaaataaaa

SEQ ID NO: 200427 - DNA, 13 bp, Artificial Sequence
  Oligonucleotide for detection of SNP TSC0049319
ttttatgtggata

SEQ ID NO: 200428 - DNA, 13 bp, Artificial Sequence
  Oligonucleotide for detection of SNP TSC0049319
tatccacataaaa

SEQ ID NO: 200429 - DNA, 13 bp, Artificial Sequence
  Oligonucleotide for detection of SNP TSC0049320
tgtggaagtagag

SEQ ID NO: 200430 - DNA, 13 bp, Artificial Sequence
  Oligonucleotide for detection of SNP TSC0049320
ctctacttccaca

SEQ ID NO: 200431 - DNA, 13 bp, Artificial Sequence
  Oligonucleotide for detection of SNP TSC0049320
tgtggaggtagag

SEQ ID NO: 200432 - DNA, 13 bp, Artificial Sequence
  Oligonucleotide for detection of SNP TSC0049320
ctctacctccaca

SEQ ID NO: 200433 - DNA, 13 bp, Artificial Sequence
  Oligonucleotide for detection of SNP TSC0049321
aatataatagatg

SEQ ID NO: 200434 - DNA, 13 bp, Artificial Sequence
  Oligonucleotide for detection of SNP TSC0049321
catctattatatt

SEQ ID NO: 200435 - DNA, 13 bp, Artificial Sequence
  Oligonucleotide for detection of SNP TSC0049321
aatatagtagatg

SEQ ID NO: 200436 - DNA, 13 bp, Artificial Sequence
  Oligonucleotide for detection of SNP TSC0049321
catctactatatt

SEQ ID NO: 200437 - DNA, 13 bp, Artificial Sequence
  Oligonucleotide for detection of SNP TSC0049322
gagtggttttgtt

SEQ ID NO: 200438 - DNA, 13 bp, Artificial Sequence
  Oligonucleotide for detection of SNP TSC0049322
aacaaaaccactc

SEQ ID NO: 200439 - DNA, 13 bp, Artificial Sequence
  Oligonucleotide for detection of SNP TSC0049322
gagtgggtttgtt

SEQ ID NO: 200440 - DNA, 13 bp, Artificial Sequence
  Oligonucleotide for detection of SNP TSC0049322
aacaaacccactc

SEQ ID NO: 200441 - DNA, 13 bp, Artificial Sequence
  Oligonucleotide for detection of SNP TSC0049322
aataaaattatty

SEQ ID NO: 200442 - DNA, 13 bp, Artificial Sequence
  Oligonucleotide for detection of SNP TSC0049322
raataattttatt

SEQ ID NO: 200443 - DNA, 13 bp, Artificial Sequence
  Oligonucleotide for detection of SNP TSC0049322
aataaatttatty

SEQ ID NO: 200444 - DNA, 13 bp, Artificial Sequence
  Oligonucleotide for detection of SNP TSC0049322
raataaatttatt

SEQ ID NO: 200445 - DNA, 13 bp, Artificial Sequence
  Oligonucleotide for detection of SNP TSC0049324
tttggttttggag

SEQ ID NO: 200446 - DNA, 13 bp, Artificial Sequence
  Oligonucleotide for detection of SNP TSC0049324
ctccaaaaccaaa

SEQ ID NO: 200447 - DNA, 13 bp, Artificial Sequence
  Oligonucleotide for detection of SNP TSC0049324
tttggtgttggag

SEQ ID NO: 200448 - DNA, 13 bp, Artificial Sequence
  Oligonucleotide for detection of SNP TSC0049324
ctccaacaccaaa

SEQ ID NO: 200449 - DNA, 13 bp, Artificial Sequence
  Oligonucleotide for detection of SNP TSC0049324
ttttaagattagg

SEQ ID NO: 200450 - DNA, 13 bp, Artificial Sequence
  Oligonucleotide for detection of SNP TSC0049324
cctaatcttaaaa

SEQ ID NO: 200451 - DNA, 13 bp, Artificial Sequence
  Oligonucleotide for detection of SNP TSC0049324
ttttaatattagg

SEQ ID NO: 200452 - DNA, 13 bp, Artificial Sequence
  Oligonucleotide for detection of SNP TSC0049324
cctaatattaaaa

SEQ ID NO: 200453 - DNA, 13 bp, Artificial Sequence
  Oligonucleotide for detection of SNP TSC0049325
aatattgaatgat

SEQ ID NO: 200454 - DNA, 13 bp, Artificial Sequence
  Oligonucleotide for detection of SNP TSC0049325
atcattcaatatt

SEQ ID NO: 200455 - DNA, 13 bp, Artificial Sequence
  Oligonucleotide for detection of SNP TSC0049325
aatattaaatgat

SEQ ID NO: 200456 - DNA, 13 bp, Artificial Sequence
  Oligonucleotide for detection of SNP TSC0049325
atcatttaatatt

SEQ ID NO: 200457 - DNA, 13 bp, Artificial Sequence
  Oligonucleotide for detection of SNP TSC0007186
aattatgtggttt

SEQ ID NO: 200458 - DNA, 13 bp, Artificial Sequence
  Oligonucleotide for detection of SNP TSC0007186
aaaccacataatt

SEQ ID NO: 200459 - DNA, 13 bp, Artificial Sequence
  Oligonucleotide for detection of SNP TSC0007186
aattacgtggttt

SEQ ID NO: 200460 - DNA, 13 bp, Artificial Sequence
  Oligonucleotide for detection of SNP TSC0007186
aaaccacgtaatt

SEQ ID NO: 200461 - DNA, 13 bp, Artificial Sequence
  Oligonucleotide for detection of SNP TSC0049326
gatatgaggtttt

SEQ ID NO: 200462 - DNA, 13 bp, Artificial Sequence
  Oligonucleotide for detection of SNP TSC0049326
aaaacctcatatc

SEQ ID NO: 200463 - DNA, 13 bp, Artificial Sequence
  Oligonucleotide for detection of SNP TSC0049326
gatatggggtttt

SEQ ID NO: 200464 - DNA, 13 bp, Artificial Sequence
  Oligonucleotide for detection of SNP TSC0049326
aaaaccccatatc

SEQ ID NO: 200465 - DNA, 13 bp, Artificial Sequence
  Oligonucleotide for detection of SNP TSC0049327
agttttttagtgt

SEQ ID NO: 200466 - DNA, 13 bp, Artificial Sequence
  Oligonucleotide for detection of SNP TSC0049327
acactaaaaaact

SEQ ID NO: 200467 - DNA, 13 bp, Artificial Sequence
  Oligonucleotide for detection of SNP TSC0049327
agttttgtagtgt

SEQ ID NO: 200468 - DNA, 13 bp, Artificial Sequence
  Oligonucleotide for detection of SNP TSC0049327
acactacaaaact

SEQ ID NO: 200469 - DNA, 13 bp, Artificial Sequence
  Oligonucleotide for detection of SNP TSC0049327
agtttcgtagtgt

SEQ ID NO: 200470 - DNA, 13 bp, Artificial Sequence
  Oligonucleotide for detection of SNP TSC0049327
acactacgaaact

SEQ ID NO: 200471 - DNA, 13 bp, Artificial Sequence
  Oligonucleotide for detection of SNP TSC0049327
atattgggaggtt

SEQ ID NO: 200472 - DNA, 13 bp, Artificial Sequence
  Oligonucleotide for detection of SNP TSC0049327
aacctcccaatat

SEQ ID NO: 200473 - DNA, 13 bp, Artificial Sequence
  Oligonucleotide for detection of SNP TSC0049327
atattgtgaggtt

SEQ ID NO: 200474 - DNA, 13 bp, Artificial Sequence
  Oligonucleotide for detection of SNP TSC0049327
aacctcacaatat

SEQ ID NO: 200475 - DNA, 13 bp, Artificial Sequence
  Oligonucleotide for detection of SNP TSC0049327
atattgcgaggtt

SEQ ID NO: 200476 - DNA, 13 bp, Artificial Sequence
  Oligonucleotide for detection of SNP TSC0049327
aacctcgcaatat

SEQ ID NO: 200477 - DNA, 13 bp, Artificial Sequence
  Oligonucleotide for detection of SNP TSC0049328
ttattaagttttt

SEQ ID NO: 200478 - DNA, 13 bp, Artificial Sequence
  Oligonucleotide for detection of SNP TSC0049328
aaaaacttaataa

SEQ ID NO: 200479 - DNA, 13 bp, Artificial Sequence
  Oligonucleotide for detection of SNP TSC0049328
ttattaggttttt

SEQ ID NO: 200480 - DNA, 13 bp, Artificial Sequence
  Oligonucleotide for detection of SNP TSC0049328
aaaaacctaataa

SEQ ID NO: 200481 - DNA, 13 bp, Artificial Sequence
  Oligonucleotide for detection of SNP TSC0049329
aaaaatatatgay

SEQ ID NO: 200482 - DNA, 13 bp, Artificial Sequence
  Oligonucleotide for detection of SNP TSC0049329
rtcatatattttt

SEQ ID NO: 200483 - DNA, 13 bp, Artificial Sequence
  Oligonucleotide for detection of SNP TSC0049329
aaaaatgtatgay

SEQ ID NO: 200484 - DNA, 13 bp, Artificial Sequence
  Oligonucleotide for detection of SNP TSC0049329
rtcatacattttt

SEQ ID NO: 200485 - DNA, 13 bp, Artificial Sequence
  Oligonucleotide for detection of SNP TSC0049329
aaaaatatacgay

SEQ ID NO: 200486 - DNA, 13 bp, Artificial Sequence
  Oligonucleotide for detection of SNP TSC0049329
rtcgtatattttt

SEQ ID NO: 200487 - DNA, 13 bp, Artificial Sequence
  Oligonucleotide for detection of SNP TSC0049329
aaaaacgtatgay

SEQ ID NO: 200488 - DNA, 13 bp, Artificial Sequence
  Oligonucleotide for detection of SNP TSC0049329
rtcatacgttttt

SEQ ID NO: 200489 - DNA, 13 bp, Artificial Sequence
  Oligonucleotide for detection of SNP TSC0049329
aaaaatgtacgay

SEQ ID NO: 200490 - DNA, 13 bp, Artificial Sequence
  Oligonucleotide for detection of SNP TSC0049329
rtcgtacattttt

SEQ ID NO: 200491 - DNA, 13 bp, Artificial Sequence
  Oligonucleotide for detection of SNP TSC0049329
aaaaacgtacgay

SEQ ID NO: 200492 - DNA, 13 bp, Artificial Sequence
  Oligonucleotide for detection of SNP TSC0049329
rtcgtacgttttt

SEQ ID NO: 200493 - DNA, 13 bp, Artificial Sequence
  Oligonucleotide for detection of SNP TSC0049329
gttgtatgttttt

SEQ ID NO: 200494 - DNA, 13 bp, Artificial Sequence
  Oligonucleotide for detection of SNP TSC0049329
aaaaacatacaac

SEQ ID NO: 200495 - DNA, 13 bp, Artificial Sequence
  Oligonucleotide for detection of SNP TSC0049329
gtcgtatgttttt

SEQ ID NO: 200496 - DNA, 13 bp, Artificial Sequence
  Oligonucleotide for detection of SNP TSC0049329
aaaaacatacgac

SEQ ID NO: 200497 - DNA, 13 bp, Artificial Sequence
  Oligonucleotide for detection of SNP TSC0049329
gttgtacgttttt

SEQ ID NO: 200498 - DNA, 13 bp, Artificial Sequence
  Oligonucleotide for detection of SNP TSC0049329
aaaaacgtacaac

SEQ ID NO: 200499 - DNA, 13 bp, Artificial Sequence
  Oligonucleotide for detection of SNP TSC0049329
gtcgtacgttttt

SEQ ID NO: 200500 - DNA, 13 bp, Artificial Sequence
  Oligonucleotide for detection of SNP TSC0049329
aaaaacgtacgac

SEQ ID NO: 200501 - DNA, 13 bp, Artificial Sequence
  Oligonucleotide for detection of SNP TSC0049330
tttttatagtaty

SEQ ID NO: 200502 - DNA, 13 bp, Artificial Sequence
  Oligonucleotide for detection of SNP TSC0049330
ratactataaaaa

SEQ ID NO: 200503 - DNA, 13 bp, Artificial Sequence
  Oligonucleotide for detection of SNP TSC0049330
tttttagagtaty

SEQ ID NO: 200504 - DNA, 13 bp, Artificial Sequence
  Oligonucleotide for detection of SNP TSC0049330
ratactctaaaaa

SEQ ID NO: 200505 - DNA, 13 bp, Artificial Sequence
  Oligonucleotide for detection of SNP TSC0049330
ggtgttgtaagaa

SEQ ID NO: 200506 - DNA, 13 bp, Artificial Sequence
  Oligonucleotide for detection of SNP TSC0049330
ttcttacaacacc

SEQ ID NO: 200507 - DNA, 13 bp, Artificial Sequence
  Oligonucleotide for detection of SNP TSC0049330
ggtgttttaagaa

SEQ ID NO: 200508 - DNA, 13 bp, Artificial Sequence
  Oligonucleotide for detection of SNP TSC0049330
ttcttaaaacacc

SEQ ID NO: 200509 - DNA, 13 bp, Artificial Sequence
  Oligonucleotide for detection of SNP TSC0007995
ggagtaaagttay

SEQ ID NO: 200510 - DNA, 13 bp, Artificial Sequence
  Oligonucleotide for detection of SNP TSC0007995
rtaactttactcc

SEQ ID NO: 200511 - DNA, 13 bp, Artificial Sequence
  Oligonucleotide for detection of SNP TSC0007995
ggagtatagttay

SEQ ID NO: 200512 - DNA, 13 bp, Artificial Sequence
  Oligonucleotide for detection of SNP TSC0007995
rtaactatactcc

SEQ ID NO: 200513 - DNA, 13 bp, Artificial Sequence
  Oligonucleotide for detection of SNP TSC0007995
gtgattttgttty

SEQ ID NO: 200514 - DNA, 13 bp, Artificial Sequence
  Oligonucleotide for detection of SNP TSC0007995
raaacaaaatcac

SEQ ID NO: 200515 - DNA, 13 bp, Artificial Sequence
  Oligonucleotide for detection of SNP TSC0007995
gtgattgtgttty

SEQ ID NO: 200516 - DNA, 13 bp, Artificial Sequence
  Oligonucleotide for detection of SNP TSC0007995
raaacacaatcac

SEQ ID NO: 200517 - DNA, 13 bp, Artificial Sequence
  Oligonucleotide for detection of SNP TSC0049333
tgttagagaatty

SEQ ID NO: 200518 - DNA, 13 bp, Artificial Sequence
  Oligonucleotide for detection of SNP TSC0049333
raattctctaaca

SEQ ID NO: 200519 - DNA, 13 bp, Artificial Sequence
  Oligonucleotide for detection of SNP TSC0049333
tgttagggaatty

SEQ ID NO: 200520 - DNA, 13 bp, Artificial Sequence
  Oligonucleotide for detection of SNP TSC0049333
raattccctaaca

SEQ ID NO: 200521 - DNA, 13 bp, Artificial Sequence
  Oligonucleotide for detection of SNP TSC0049334
taggaagtgttat

SEQ ID NO: 200522 - DNA, 13 bp, Artificial Sequence
  Oligonucleotide for detection of SNP TSC0049334
ataacacttccta

SEQ ID NO: 200523 - DNA, 13 bp, Artificial Sequence
  Oligonucleotide for detection of SNP TSC0049334
taggaaatgttat

SEQ ID NO: 200524 - DNA, 13 bp, Artificial Sequence
  Oligonucleotide for detection of SNP TSC0049334
ataacatttccta

SEQ ID NO: 200525 - DNA, 13 bp, Artificial Sequence
  Oligonucleotide for detection of SNP TSC0049335
ttattatgtatta

SEQ ID NO: 200526 - DNA, 13 bp, Artificial Sequence
  Oligonucleotide for detection of SNP TSC0049335
taatacataataa

SEQ ID NO: 200527 - DNA, 13 bp, Artificial Sequence
  Oligonucleotide for detection of SNP TSC0049335
ttattaggtatta

SEQ ID NO: 200528 - DNA, 13 bp, Artificial Sequence
  Oligonucleotide for detection of SNP TSC0049335
taatacctaataa

SEQ ID NO: 200529 - DNA, 13 bp, Artificial Sequence
  Oligonucleotide for detection of SNP TSC0049335
tggtatataatag

SEQ ID NO: 200530 - DNA, 13 bp, Artificial Sequence
  Oligonucleotide for detection of SNP TSC0049335
ctattatatacca

SEQ ID NO: 200531 - DNA, 13 bp, Artificial Sequence
  Oligonucleotide for detection of SNP TSC0049335
tggtatttaatag

SEQ ID NO: 200532 - DNA, 13 bp, Artificial Sequence
  Oligonucleotide for detection of SNP TSC0049335
ctattaaatacca

SEQ ID NO: 200533 - DNA, 13 bp, Artificial Sequence
  Oligonucleotide for detection of SNP TSC0049342
aagtatttttatg

SEQ ID NO: 200534 - DNA, 13 bp, Artificial Sequence
  Oligonucleotide for detection of SNP TSC0049342
cataaaaatactt

SEQ ID NO: 200535 - DNA, 13 bp, Artificial Sequence
  Oligonucleotide for detection of SNP TSC0049342
aagtatgtttatg

SEQ ID NO: 200536 - DNA, 13 bp, Artificial Sequence
  Oligonucleotide for detection of SNP TSC0049342
cataaacatactt

SEQ ID NO: 200537 - DNA, 13 bp, Artificial Sequence
  Oligonucleotide for detection of SNP TSC0049342
aagtacgtttatg

SEQ ID NO: 200538 - DNA, 13 bp, Artificial Sequence
  Oligonucleotide for detection of SNP TSC0049342
cataaacgtactt

SEQ ID NO: 200539 - DNA, 13 bp, Artificial Sequence
  Oligonucleotide for detection of SNP TSC0049342
tatgaaagtgttt

SEQ ID NO: 200540 - DNA, 13 bp, Artificial Sequence
  Oligonucleotide for detection of SNP TSC0049342
aaacactttcata

SEQ ID NO: 200541 - DNA, 13 bp, Artificial Sequence
  Oligonucleotide for detection of SNP TSC0049342
tatgaatgtgttt

SEQ ID NO: 200542 - DNA, 13 bp, Artificial Sequence
  Oligonucleotide for detection of SNP TSC0049342
aaacacattcata

SEQ ID NO: 200543 - DNA, 13 bp, Artificial Sequence
  Oligonucleotide for detection of SNP TSC0049342
tatgaacgtgttt

SEQ ID NO: 200544 - DNA, 13 bp, Artificial Sequence
  Oligonucleotide for detection of SNP TSC0049342
aaacacgttcata

SEQ ID NO: 200545 - DNA, 13 bp, Artificial Sequence
  Oligonucleotide for detection of SNP TSC0049343
aaatttattggty

SEQ ID NO: 200546 - DNA, 13 bp, Artificial Sequence
  Oligonucleotide for detection of SNP TSC0049343
raccaataaattt

SEQ ID NO: 200547 - DNA, 13 bp, Artificial Sequence
  Oligonucleotide for detection of SNP TSC0049343
aaatttgttggty

SEQ ID NO: 200548 - DNA, 13 bp, Artificial Sequence
  Oligonucleotide for detection of SNP TSC0049343
raccaacaaattt

SEQ ID NO: 200549 - DNA, 13 bp, Artificial Sequence
  Oligonucleotide for detection of SNP TSC0049344
ttagttgtttgga

SEQ ID NO: 200550 - DNA, 13 bp, Artificial Sequence
  Oligonucleotide for detection of SNP TSC0049344
tccaaacaactaa

SEQ ID NO: 200551 - DNA, 13 bp, Artificial Sequence
  Oligonucleotide for detection of SNP TSC0049344
ttagtcgtttgga

SEQ ID NO: 200552 - DNA, 13 bp, Artificial Sequence
  Oligonucleotide for detection of SNP TSC0049344
tccaaacgactaa

SEQ ID NO: 200553 - DNA, 13 bp, Artificial Sequence
  Oligonucleotide for detection of SNP TSC0049344
tttagatggttag

SEQ ID NO: 200554 - DNA, 13 bp, Artificial Sequence
  Oligonucleotide for detection of SNP TSC0049344
ctaaccatctaaa

SEQ ID NO: 200555 - DNA, 13 bp, Artificial Sequence
  Oligonucleotide for detection of SNP TSC0049344
tttagacggttag

SEQ ID NO: 200556 - DNA, 13 bp, Artificial Sequence
  Oligonucleotide for detection of SNP TSC0049344
ctaaccgtctaaa

SEQ ID NO: 200557 - DNA, 13 bp, Artificial Sequence
  Oligonucleotide for detection of SNP TSC0049345
tttggaaaataat

SEQ ID NO: 200558 - DNA, 13 bp, Artificial Sequence
  Oligonucleotide for detection of SNP TSC0049345
attattttccaaa

SEQ ID NO: 200559 - DNA, 13 bp, Artificial Sequence
  Oligonucleotide for detection of SNP TSC0049345
tttggagaataat

SEQ ID NO: 200560 - DNA, 13 bp, Artificial Sequence
  Oligonucleotide for detection of SNP TSC0049345
attattctccaaa

SEQ ID NO: 200561 - DNA, 13 bp, Artificial Sequence
  Oligonucleotide for detection of SNP TSC0049347
tatgtatgtatta

SEQ ID NO: 200562 - DNA, 13 bp, Artificial Sequence
  Oligonucleotide for detection of SNP TSC0049347
taatacatacata

SEQ ID NO: 200563 - DNA, 13 bp, Artificial Sequence
  Oligonucleotide for detection of SNP TSC0049347
tatgtaggtatta

SEQ ID NO: 200564 - DNA, 13 bp, Artificial Sequence
  Oligonucleotide for detection of SNP TSC0049347
taatacctacata

SEQ ID NO: 200565 - DNA, 13 bp, Artificial Sequence
  Oligonucleotide for detection of SNP TSC0049349
tattttagaaata

SEQ ID NO: 200566 - DNA, 13 bp, Artificial Sequence
  Oligonucleotide for detection of SNP TSC0049349
tatttctaaaata

SEQ ID NO: 200567 - DNA, 13 bp, Artificial Sequence
  Oligonucleotide for detection of SNP TSC0049349
tattttggaaata

SEQ ID NO: 200568 - DNA, 13 bp, Artificial Sequence
  Oligonucleotide for detection of SNP TSC0049349
tatttccaaaata

SEQ ID NO: 200569 - DNA, 13 bp, Artificial Sequence
  Oligonucleotide for detection of SNP TSC0049350
attatttttttaa

SEQ ID NO: 200570 - DNA, 13 bp, Artificial Sequence
  Oligonucleotide for detection of SNP TSC0049350
ttaaaaaaataat

SEQ ID NO: 200571 - DNA, 13 bp, Artificial Sequence
  Oligonucleotide for detection of SNP TSC0049350
ttaaaagaataat

SEQ ID NO: 200572 - DNA, 13 bp, Artificial Sequence
  Oligonucleotide for detection of SNP TSC0049350
attattcttttaa

SEQ ID NO: 200573 - DNA, 13 bp, Artificial Sequence
  Oligonucleotide for detection of SNP TSC0049352
attaaagtaaaty

SEQ ID NO: 200574 - DNA, 13 bp, Artificial Sequence
  Oligonucleotide for detection of SNP TSC0049352
ratttactttaat

SEQ ID NO: 200575 - DNA, 13 bp, Artificial Sequence
  Oligonucleotide for detection of SNP TSC0049353
gtatatatgttgt

SEQ ID NO: 200576 - DNA, 13 bp, Artificial Sequence
  Oligonucleotide for detection of SNP TSC0049353
acaacatatatac

SEQ ID NO: 200577 - DNA, 13 bp, Artificial Sequence
  Oligonucleotide for detection of SNP TSC0049353
gtatatgtgttgt

SEQ ID NO: 200578 - DNA, 13 bp, Artificial Sequence
  Oligonucleotide for detection of SNP TSC0049353
acaacacatatac

SEQ ID NO: 200579 - DNA, 13 bp, Artificial Sequence
  Oligonucleotide for detection of SNP TSC0049353
gtatatatgtcgt

SEQ ID NO: 200580 - DNA, 13 bp, Artificial Sequence
  Oligonucleotide for detection of SNP TSC0049353
acgacatatatac

SEQ ID NO: 200581 - DNA, 13 bp, Artificial Sequence
  Oligonucleotide for detection of SNP TSC0049353
gtatacgtgttgt

SEQ ID NO: 200582 - DNA, 13 bp, Artificial Sequence
  Oligonucleotide for detection of SNP TSC0049353
acaacacgtatac

SEQ ID NO: 200583 - DNA, 13 bp, Artificial Sequence
  Oligonucleotide for detection of SNP TSC0049353
gtatatgtgtcgt

SEQ ID NO: 200584 - DNA, 13 bp, Artificial Sequence
  Oligonucleotide for detection of SNP TSC0049353
acgacacatatac

SEQ ID NO: 200585 - DNA, 13 bp, Artificial Sequence
  Oligonucleotide for detection of SNP TSC0049353
gtatacgtgtcgt

SEQ ID NO: 200586 - DNA, 13 bp, Artificial Sequence
  Oligonucleotide for detection of SNP TSC0049353
acgacacgtatac

SEQ ID NO: 200587 - DNA, 13 bp, Artificial Sequence
  Oligonucleotide for detection of SNP TSC0049353
atggtatgtatgy

SEQ ID NO: 200588 - DNA, 13 bp, Artificial Sequence
  Oligonucleotide for detection of SNP TSC0049353
rcatacataccat

SEQ ID NO: 200589 - DNA, 13 bp, Artificial Sequence
  Oligonucleotide for detection of SNP TSC0049353
acggtatgtatgy

SEQ ID NO: 200590 - DNA, 13 bp, Artificial Sequence
  Oligonucleotide for detection of SNP TSC0049353
rcatacataccgt

SEQ ID NO: 200591 - DNA, 13 bp, Artificial Sequence
  Oligonucleotide for detection of SNP TSC0049353
atggtacgtatgy

SEQ ID NO: 200592 - DNA, 13 bp, Artificial Sequence
  Oligonucleotide for detection of SNP TSC0049353
rcatacgtaccat

SEQ ID NO: 200593 - DNA, 13 bp, Artificial Sequence
  Oligonucleotide for detection of SNP TSC0049353
acggtacgtatgy

SEQ ID NO: 200594 - DNA, 13 bp, Artificial Sequence
  Oligonucleotide for detection of SNP TSC0049353
rcatacgtaccgt

SEQ ID NO: 200595 - DNA, 13 bp, Artificial Sequence
  Oligonucleotide for detection of SNP TSC0049355
agtggaagaggta

SEQ ID NO: 200596 - DNA, 13 bp, Artificial Sequence
  Oligonucleotide for detection of SNP TSC0049355
tacctcttccact

SEQ ID NO: 200597 - DNA, 13 bp, Artificial Sequence
  Oligonucleotide for detection of SNP TSC0049355
agtggatgaggta

SEQ ID NO: 200598 - DNA, 13 bp, Artificial Sequence
  Oligonucleotide for detection of SNP TSC0049355
tacctcatccact

SEQ ID NO: 200599 - DNA, 13 bp, Artificial Sequence
  Oligonucleotide for detection of SNP TSC0049355
agtggacgaggta

SEQ ID NO: 200600 - DNA, 13 bp, Artificial Sequence
  Oligonucleotide for detection of SNP TSC0049355
tacctcgtccact

SEQ ID NO: 200601 - DNA, 13 bp, Artificial Sequence
  Oligonucleotide for detection of SNP TSC0049356
tgatttattgtgy

SEQ ID NO: 200602 - DNA, 13 bp, Artificial Sequence
  Oligonucleotide for detection of SNP TSC0049356
rcacaataaatca

SEQ ID NO: 200603 - DNA, 13 bp, Artificial Sequence
  Oligonucleotide for detection of SNP TSC0049356
tgattttttgtgy

SEQ ID NO: 200604 - DNA, 13 bp, Artificial Sequence
  Oligonucleotide for detection of SNP TSC0049356
rcacaaaaaatca

SEQ ID NO: 200605 - DNA, 13 bp, Artificial Sequence
  Oligonucleotide for detection of SNP TSC0049356
gtataatggatta

SEQ ID NO: 200606 - DNA, 13 bp, Artificial Sequence
  Oligonucleotide for detection of SNP TSC0049356
taatccattatac

SEQ ID NO: 200607 - DNA, 13 bp, Artificial Sequence
  Oligonucleotide for detection of SNP TSC0049356
gtataagggatta

SEQ ID NO: 200608 - DNA, 13 bp, Artificial Sequence
  Oligonucleotide for detection of SNP TSC0049356
taatcccttatac

SEQ ID NO: 200609 - DNA, 13 bp, Artificial Sequence
  Oligonucleotide for detection of SNP TSC0049358
tatggtggaaggg

SEQ ID NO: 200610 - DNA, 13 bp, Artificial Sequence
  Oligonucleotide for detection of SNP TSC0049358
cccttccaccata

SEQ ID NO: 200611 - DNA, 13 bp, Artificial Sequence
  Oligonucleotide for detection of SNP TSC0049358
tatggtagaaggg

SEQ ID NO: 200612 - DNA, 13 bp, Artificial Sequence
  Oligonucleotide for detection of SNP TSC0049358
cccttctaccata

SEQ ID NO: 200613 - DNA, 13 bp, Artificial Sequence
  Oligonucleotide for detection of SNP TSC0049358
tatggcggaaggg

SEQ ID NO: 200614 - DNA, 13 bp, Artificial Sequence
  Oligonucleotide for detection of SNP TSC0049358
cccttccgccata

SEQ ID NO: 200615 - DNA, 13 bp, Artificial Sequence
  Oligonucleotide for detection of SNP TSC0009622
gtttatatgattg

SEQ ID NO: 200616 - DNA, 13 bp, Artificial Sequence
  Oligonucleotide for detection of SNP TSC0009622
caatcatataaac

SEQ ID NO: 200617 - DNA, 13 bp, Artificial Sequence
  Oligonucleotide for detection of SNP TSC0009622
gtttatgtgattg

SEQ ID NO: 200618 - DNA, 13 bp, Artificial Sequence
  Oligonucleotide for detection of SNP TSC0009622
caatcacataaac

SEQ ID NO: 200619 - DNA, 13 bp, Artificial Sequence
  Oligonucleotide for detection of SNP TSC0009622
gtttacgtgattg

SEQ ID NO: 200620 - DNA, 13 bp, Artificial Sequence
  Oligonucleotide for detection of SNP TSC0009622
caatcacgtaaac

SEQ ID NO: 200621 - DNA, 13 bp, Artificial Sequence
  Oligonucleotide for detection of SNP TSC0009622
taattatgtgggy

SEQ ID NO: 200622 - DNA, 13 bp, Artificial Sequence
  Oligonucleotide for detection of SNP TSC0009622
rcccacataatta

SEQ ID NO: 200623 - DNA, 13 bp, Artificial Sequence
  Oligonucleotide for detection of SNP TSC0009622
taattacgtgggy

SEQ ID NO: 200624 - DNA, 13 bp, Artificial Sequence
  Oligonucleotide for detection of SNP TSC0009622
rcccacgtaatta

SEQ ID NO: 200625 - DNA, 13 bp, Artificial Sequence
  Oligonucleotide for detection of SNP TSC0049361
gtttatggttata

SEQ ID NO: 200626 - DNA, 13 bp, Artificial Sequence
  Oligonucleotide for detection of SNP TSC0049361
tataaccataaac

SEQ ID NO: 200627 - DNA, 13 bp, Artificial Sequence
  Oligonucleotide for detection of SNP TSC0049361
gtttatagttata

SEQ ID NO: 200628 - DNA, 13 bp, Artificial Sequence
  Oligonucleotide for detection of SNP TSC0049361
tataactataaac

SEQ ID NO: 200629 - DNA, 13 bp, Artificial Sequence
  Oligonucleotide for detection of SNP TSC0049362
tgggaggaggatg

SEQ ID NO: 200630 - DNA, 13 bp, Artificial Sequence
  Oligonucleotide for detection of SNP TSC0049362
catcctcctccca

SEQ ID NO: 200631 - DNA, 13 bp, Artificial Sequence
  Oligonucleotide for detection of SNP TSC0049362
tgggagtaggatg

SEQ ID NO: 200632 - DNA, 13 bp, Artificial Sequence
  Oligonucleotide for detection of SNP TSC0049362
catcctactccca

SEQ ID NO: 200633 - DNA, 13 bp, Artificial Sequence
  Oligonucleotide for detection of SNP TSC0049364
tgtagtatgtgty

SEQ ID NO: 200634 - DNA, 13 bp, Artificial Sequence
  Oligonucleotide for detection of SNP TSC0049364
racacatactaca

SEQ ID NO: 200635 - DNA, 13 bp, Artificial Sequence
  Oligonucleotide for detection of SNP TSC0049364
tgtagtgtgtgty

SEQ ID NO: 200636 - DNA, 13 bp, Artificial Sequence
  Oligonucleotide for detection of SNP TSC0049364
racacacactaca

SEQ ID NO: 200637 - DNA, 13 bp, Artificial Sequence
  Oligonucleotide for detection of SNP TSC0049364
tgtagcgtgtgty

SEQ ID NO: 200638 - DNA, 13 bp, Artificial Sequence
  Oligonucleotide for detection of SNP TSC0049364
racacacgctaca

SEQ ID NO: 200639 - DNA, 13 bp, Artificial Sequence
  Oligonucleotide for detection of SNP TSC0049364
gatatatgttata

SEQ ID NO: 200640 - DNA, 13 bp, Artificial Sequence
  Oligonucleotide for detection of SNP TSC0049364
tataacatatatc

SEQ ID NO: 200641 - DNA, 13 bp, Artificial Sequence
  Oligonucleotide for detection of SNP TSC0049364
gatatacgttata

SEQ ID NO: 200642 - DNA, 13 bp, Artificial Sequence
  Oligonucleotide for detection of SNP TSC0049364
tataacgtatatc

SEQ ID NO: 200643 - DNA, 13 bp, Artificial Sequence
  Oligonucleotide for detection of SNP TSC0049365
ataaattgtggtt

SEQ ID NO: 200644 - DNA, 13 bp, Artificial Sequence
  Oligonucleotide for detection of SNP TSC0049365
aaccacaatttat

SEQ ID NO: 200645 - DNA, 13 bp, Artificial Sequence
  Oligonucleotide for detection of SNP TSC0049365
ataaatggtggtt

SEQ ID NO: 200646 - DNA, 13 bp, Artificial Sequence
  Oligonucleotide for detection of SNP TSC0049365
aaccaccatttat

SEQ ID NO: 200647 - DNA, 13 bp, Artificial Sequence
  Oligonucleotide for detection of SNP TSC0049365
ataaacggtggtt

SEQ ID NO: 200648 - DNA, 13 bp, Artificial Sequence
  Oligonucleotide for detection of SNP TSC0049365
aaccaccgtttat

SEQ ID NO: 200649 - DNA, 13 bp, Artificial Sequence
  Oligonucleotide for detection of SNP TSC0049365
aattatagtttat

SEQ ID NO: 200650 - DNA, 13 bp, Artificial Sequence
  Oligonucleotide for detection of SNP TSC0049365
ataaactataatt

SEQ ID NO: 200651 - DNA, 13 bp, Artificial Sequence
  Oligonucleotide for detection of SNP TSC0049365
aattattgtttat

SEQ ID NO: 200652 - DNA, 13 bp, Artificial Sequence
  Oligonucleotide for detection of SNP TSC0049365
ataaacaataatt

SEQ ID NO: 200653 - DNA, 13 bp, Artificial Sequence
  Oligonucleotide for detection of SNP TSC0049365
aattatcgtttat

SEQ ID NO: 200654 - DNA, 13 bp, Artificial Sequence
  Oligonucleotide for detection of SNP TSC0049365
ataaacgataatt

SEQ ID NO: 200655 - DNA, 13 bp, Artificial Sequence
  Oligonucleotide for detection of SNP TSC0049366
ggttatatagatt

SEQ ID NO: 200656 - DNA, 13 bp, Artificial Sequence
  Oligonucleotide for detection of SNP TSC0049366
aatctatataacc

SEQ ID NO: 200657 - DNA, 13 bp, Artificial Sequence
  Oligonucleotide for detection of SNP TSC0049366
ggttatttagatt

SEQ ID NO: 200658 - DNA, 13 bp, Artificial Sequence
  Oligonucleotide for detection of SNP TSC0049366
aatctaaataacc

SEQ ID NO: 200659 - DNA, 13 bp, Artificial Sequence
  Oligonucleotide for detection of SNP TSC0049366
aatttatgtgaty

SEQ ID NO: 200660 - DNA, 13 bp, Artificial Sequence
  Oligonucleotide for detection of SNP TSC0049366
ratcacataaatt

SEQ ID NO: 200661 - DNA, 13 bp, Artificial Sequence
  Oligonucleotide for detection of SNP TSC0049366
aatttaggtgaty

SEQ ID NO: 200662 - DNA, 13 bp, Artificial Sequence
  Oligonucleotide for detection of SNP TSC0049366
ratcacctaaatt

SEQ ID NO: 200663 - DNA, 13 bp, Artificial Sequence
  Oligonucleotide for detection of SNP TSC0049367
ttaatgtggtttg

SEQ ID NO: 200664 - DNA, 13 bp, Artificial Sequence
  Oligonucleotide for detection of SNP TSC0049367
caaaccacattaa

SEQ ID NO: 200665 - DNA, 13 bp, Artificial Sequence
  Oligonucleotide for detection of SNP TSC0049367
ttaatgcggtttg

SEQ ID NO: 200666 - DNA, 13 bp, Artificial Sequence
  Oligonucleotide for detection of SNP TSC0049367
caaaccgcattaa

SEQ ID NO: 200667 - DNA, 13 bp, Artificial Sequence
  Oligonucleotide for detection of SNP TSC0049367
tagattgtattaa

SEQ ID NO: 200668 - DNA, 13 bp, Artificial Sequence
  Oligonucleotide for detection of SNP TSC0049367
ttaatacaatcta

SEQ ID NO: 200669 - DNA, 13 bp, Artificial Sequence
  Oligonucleotide for detection of SNP TSC0049367
tagattatattaa

SEQ ID NO: 200670 - DNA, 13 bp, Artificial Sequence
  Oligonucleotide for detection of SNP TSC0049367
ttaatataatcta

SEQ ID NO: 200671 - DNA, 13 bp, Artificial Sequence
  Oligonucleotide for detection of SNP TSC0049367
tagatcgtattaa

SEQ ID NO: 200672 - DNA, 13 bp, Artificial Sequence
  Oligonucleotide for detection of SNP TSC0049367
ttaatacgatcta

SEQ ID NO: 200673 - DNA, 13 bp, Artificial Sequence
  Oligonucleotide for detection of SNP TSC0010418
gttagattattay

SEQ ID NO: 200674 - DNA, 13 bp, Artificial Sequence
  Oligonucleotide for detection of SNP TSC0010418
rtaataatctaac

SEQ ID NO: 200675 - DNA, 13 bp, Artificial Sequence
  Oligonucleotide for detection of SNP TSC0010418
gttagagtattay

SEQ ID NO: 200676 - DNA, 13 bp, Artificial Sequence
  Oligonucleotide for detection of SNP TSC0010418
rtaatactctaac

SEQ ID NO: 200677 - DNA, 13 bp, Artificial Sequence
  Oligonucleotide for detection of SNP TSC0010418
gtggtggtttggy

SEQ ID NO: 200678 - DNA, 13 bp, Artificial Sequence
  Oligonucleotide for detection of SNP TSC0010418
rccaaaccaccac

SEQ ID NO: 200679 - DNA, 13 bp, Artificial Sequence
  Oligonucleotide for detection of SNP TSC0010418
gtggtgttttggy

SEQ ID NO: 200680 - DNA, 13 bp, Artificial Sequence
  Oligonucleotide for detection of SNP TSC0010418
rccaaaacaccac

SEQ ID NO: 200681 - DNA, 13 bp, Artificial Sequence
  Oligonucleotide for detection of SNP TSC0049374
ggaaagggagtga

SEQ ID NO: 200682 - DNA, 13 bp, Artificial Sequence
  Oligonucleotide for detection of SNP TSC0049374
tcactccctttcc

SEQ ID NO: 200683 - DNA, 13 bp, Artificial Sequence
  Oligonucleotide for detection of SNP TSC0049374
ggaaagagagtga

SEQ ID NO: 200684 - DNA, 13 bp, Artificial Sequence
  Oligonucleotide for detection of SNP TSC0049374
tcactctctttcc

SEQ ID NO: 200685 - DNA, 13 bp, Artificial Sequence
  Oligonucleotide for detection of SNP TSC0049375
aggatgattagga

SEQ ID NO: 200686 - DNA, 13 bp, Artificial Sequence
  Oligonucleotide for detection of SNP TSC0049375
tcctaatcatcct

SEQ ID NO: 200687 - DNA, 13 bp, Artificial Sequence
  Oligonucleotide for detection of SNP TSC0049375
aggatggttagga

SEQ ID NO: 200688 - DNA, 13 bp, Artificial Sequence
  Oligonucleotide for detection of SNP TSC0049375
tcctaaccatcct

SEQ ID NO: 200689 - DNA, 13 bp, Artificial Sequence
  Oligonucleotide for detection of SNP TSC0049379
tataaaaagagtg

SEQ ID NO: 200690 - DNA, 13 bp, Artificial Sequence
  Oligonucleotide for detection of SNP TSC0049379
cactctttttata

SEQ ID NO: 200691 - DNA, 13 bp, Artificial Sequence
  Oligonucleotide for detection of SNP TSC0049379
tataaagagagtg

SEQ ID NO: 200692 - DNA, 13 bp, Artificial Sequence
  Oligonucleotide for detection of SNP TSC0049379
cactctctttata

SEQ ID NO: 200693 - DNA, 13 bp, Artificial Sequence
  Oligonucleotide for detection of SNP TSC0007203
ggaagataatatt

SEQ ID NO: 200694 - DNA, 13 bp, Artificial Sequence
  Oligonucleotide for detection of SNP TSC0007203
aatattatcttcc

SEQ ID NO: 200695 - DNA, 13 bp, Artificial Sequence
  Oligonucleotide for detection of SNP TSC0007203
ggaagagaatatt

SEQ ID NO: 200696 - DNA, 13 bp, Artificial Sequence
  Oligonucleotide for detection of SNP TSC0007203
aatattctcttcc

SEQ ID NO: 200697 - DNA, 13 bp, Artificial Sequence
  Oligonucleotide for detection of SNP TSC0007203
agtatttttttty

SEQ ID NO: 200698 - DNA, 13 bp, Artificial Sequence
  Oligonucleotide for detection of SNP TSC0007203
raaaaaaaatact

SEQ ID NO: 200699 - DNA, 13 bp, Artificial Sequence
  Oligonucleotide for detection of SNP TSC0049381
tgattaaaaataa

SEQ ID NO: 200700 - DNA, 13 bp, Artificial Sequence
  Oligonucleotide for detection of SNP TSC0049381
ttatttttaatca

SEQ ID NO: 200701 - DNA, 13 bp, Artificial Sequence
  Oligonucleotide for detection of SNP TSC0049381
tgattagaaataa

SEQ ID NO: 200702 - DNA, 13 bp, Artificial Sequence
  Oligonucleotide for detection of SNP TSC0049381
ttatttctaatca

SEQ ID NO: 200703 - DNA, 13 bp, Artificial Sequence
  Oligonucleotide for detection of SNP TSC0049382
ggttaaaggtttg

SEQ ID NO: 200704 - DNA, 13 bp, Artificial Sequence
  Oligonucleotide for detection of SNP TSC0049382
caaacctttaacc

SEQ ID NO: 200705 - DNA, 13 bp, Artificial Sequence
  Oligonucleotide for detection of SNP TSC0049382
ggttaagggtttg

SEQ ID NO: 200706 - DNA, 13 bp, Artificial Sequence
  Oligonucleotide for detection of SNP TSC0049382
caaacccttaacc

SEQ ID NO: 200707 - DNA, 13 bp, Artificial Sequence
  Oligonucleotide for detection of SNP TSC0049383
gaagtaaagtaga

SEQ ID NO: 200708 - DNA, 13 bp, Artificial Sequence
  Oligonucleotide for detection of SNP TSC0049383
tctactttacttc

SEQ ID NO: 200709 - DNA, 13 bp, Artificial Sequence
  Oligonucleotide for detection of SNP TSC0049383
gaagtagagtaga

SEQ ID NO: 200710 - DNA, 13 bp, Artificial Sequence
  Oligonucleotide for detection of SNP TSC0049383
tctactctacttc

SEQ ID NO: 200711 - DNA, 13 bp, Artificial Sequence
  Oligonucleotide for detection of SNP TSC0049384
aaggttaggtgga

SEQ ID NO: 200712 - DNA, 13 bp, Artificial Sequence
  Oligonucleotide for detection of SNP TSC0049384
tccacctaacctt

SEQ ID NO: 200713 - DNA, 13 bp, Artificial Sequence
  Oligonucleotide for detection of SNP TSC0049384
aaggttgggtgga

SEQ ID NO: 200714 - DNA, 13 bp, Artificial Sequence
  Oligonucleotide for detection of SNP TSC0049384
tccacccaacctt

SEQ ID NO: 200715 - DNA, 13 bp, Artificial Sequence
  Oligonucleotide for detection of SNP TSC0049385
gtatttatgaggg

SEQ ID NO: 200716 - DNA, 13 bp, Artificial Sequence
  Oligonucleotide for detection of SNP TSC0049385
ccctcataaatac

SEQ ID NO: 200717 - DNA, 13 bp, Artificial Sequence
  Oligonucleotide for detection of SNP TSC0049385
gtatttgtgaggg

SEQ ID NO: 200718 - DNA, 13 bp, Artificial Sequence
  Oligonucleotide for detection of SNP TSC0049385
ccctcacaaatac

SEQ ID NO: 200719 - DNA, 13 bp, Artificial Sequence
  Oligonucleotide for detection of SNP TSC0049385
gtattcgtgaggg

SEQ ID NO: 200720 - DNA, 13 bp, Artificial Sequence
  Oligonucleotide for detection of SNP TSC0049385
ccctcacgaatac

SEQ ID NO: 200721 - DNA, 13 bp, Artificial Sequence
  Oligonucleotide for detection of SNP TSC0049385
tttttatgggtgy

SEQ ID NO: 200722 - DNA, 13 bp, Artificial Sequence
  Oligonucleotide for detection of SNP TSC0049385
rcacccataaaaa

SEQ ID NO: 200723 - DNA, 13 bp, Artificial Sequence
  Oligonucleotide for detection of SNP TSC0049385
tttttacgggtgy

SEQ ID NO: 200724 - DNA, 13 bp, Artificial Sequence
  Oligonucleotide for detection of SNP TSC0049385
rcacccgtaaaaa

SEQ ID NO: 200725 - DNA, 13 bp, Artificial Sequence
  Oligonucleotide for detection of SNP TSC0008941
attgttataagtg

SEQ ID NO: 200726 - DNA, 13 bp, Artificial Sequence
  Oligonucleotide for detection of SNP TSC0008941
cacttataacaat

SEQ ID NO: 200727 - DNA, 13 bp, Artificial Sequence
  Oligonucleotide for detection of SNP TSC0008941
attgttgtaagtg

SEQ ID NO: 200728 - DNA, 13 bp, Artificial Sequence
  Oligonucleotide for detection of SNP TSC0008941
cacttacaacaat

SEQ ID NO: 200729 - DNA, 13 bp, Artificial Sequence
  Oligonucleotide for detection of SNP TSC0049386
tgaaaaattttga

SEQ ID NO: 200730 - DNA, 13 bp, Artificial Sequence
  Oligonucleotide for detection of SNP TSC0049386
tcaaaatttttca

SEQ ID NO: 200731 - DNA, 13 bp, Artificial Sequence
  Oligonucleotide for detection of SNP TSC0049386
tgaaaagttttga

SEQ ID NO: 200732 - DNA, 13 bp, Artificial Sequence
  Oligonucleotide for detection of SNP TSC0049386
tcaaaacttttca

SEQ ID NO: 200733 - DNA, 13 bp, Artificial Sequence
  Oligonucleotide for detection of SNP TSC0049387
tttttaggtagga

SEQ ID NO: 200734 - DNA, 13 bp, Artificial Sequence
  Oligonucleotide for detection of SNP TSC0049387
tcctacctaaaaa

SEQ ID NO: 200735 - DNA, 13 bp, Artificial Sequence
  Oligonucleotide for detection of SNP TSC0049387
tttttaagtagga

SEQ ID NO: 200736 - DNA, 13 bp, Artificial Sequence
  Oligonucleotide for detection of SNP TSC0049387
tcctacttaaaaa

SEQ ID NO: 200737 - DNA, 13 bp, Artificial Sequence
  Oligonucleotide for detection of SNP TSC0049389
gttgagttaggaa

SEQ ID NO: 200738 - DNA, 13 bp, Artificial Sequence
  Oligonucleotide for detection of SNP TSC0049389
ttcctaactcaac

SEQ ID NO: 200739 - DNA, 13 bp, Artificial Sequence
  Oligonucleotide for detection of SNP TSC0049389
gttgaggtaggaa

SEQ ID NO: 200740 - DNA, 13 bp, Artificial Sequence
  Oligonucleotide for detection of SNP TSC0049389
ttcctacctcaac

SEQ ID NO: 200741 - DNA, 13 bp, Artificial Sequence
  Oligonucleotide for detection of SNP TSC0049390
tttattttgtgtt

SEQ ID NO: 200742 - DNA, 13 bp, Artificial Sequence
  Oligonucleotide for detection of SNP TSC0049390
aacacaaaataaa

SEQ ID NO: 200743 - DNA, 13 bp, Artificial Sequence
  Oligonucleotide for detection of SNP TSC0049390
agtatagagtagg

SEQ ID NO: 200744 - DNA, 13 bp, Artificial Sequence
  Oligonucleotide for detection of SNP TSC0049390
cctactctatact

SEQ ID NO: 200745 - DNA, 13 bp, Artificial Sequence
  Oligonucleotide for detection of SNP TSC0049390
agtatatagtagg

SEQ ID NO: 200746 - DNA, 13 bp, Artificial Sequence
  Oligonucleotide for detection of SNP TSC0049390
cctactatatact

SEQ ID NO: 200747 - DNA, 13 bp, Artificial Sequence
  Oligonucleotide for detection of SNP TSC0049391
ttgttgatattay

SEQ ID NO: 200748 - DNA, 13 bp, Artificial Sequence
  Oligonucleotide for detection of SNP TSC0049391
rtaatatcaacaa

SEQ ID NO: 200749 - DNA, 13 bp, Artificial Sequence
  Oligonucleotide for detection of SNP TSC0049391
ttgttggtattay

SEQ ID NO: 200750 - DNA, 13 bp, Artificial Sequence
  Oligonucleotide for detection of SNP TSC0049391
rtaataccaacaa

SEQ ID NO: 200751 - DNA, 13 bp, Artificial Sequence
  Oligonucleotide for detection of SNP TSC0049393
ttatttaaataty

SEQ ID NO: 200752 - DNA, 13 bp, Artificial Sequence
  Oligonucleotide for detection of SNP TSC0049393
ratatttaaataa

SEQ ID NO: 200753 - DNA, 13 bp, Artificial Sequence
  Oligonucleotide for detection of SNP TSC0049393
ttattttaataty

SEQ ID NO: 200754 - DNA, 13 bp, Artificial Sequence
  Oligonucleotide for detection of SNP TSC0049393
ratattaaaataa

SEQ ID NO: 200755 - DNA, 13 bp, Artificial Sequence
  Oligonucleotide for detection of SNP TSC0049393
ggtatttgagtgg

SEQ ID NO: 200756 - DNA, 13 bp, Artificial Sequence
  Oligonucleotide for detection of SNP TSC0049393
ccactcaaatacc

SEQ ID NO: 200757 - DNA, 13 bp, Artificial Sequence
  Oligonucleotide for detection of SNP TSC0049393
ggtattggagtgg

SEQ ID NO: 200758 - DNA, 13 bp, Artificial Sequence
  Oligonucleotide for detection of SNP TSC0049393
ccactccaatacc

SEQ ID NO: 200759 - DNA, 13 bp, Artificial Sequence
  Oligonucleotide for detection of SNP TSC0049394
gagtttatatata

SEQ ID NO: 200760 - DNA, 13 bp, Artificial Sequence
  Oligonucleotide for detection of SNP TSC0049394
tatatataaactc

SEQ ID NO: 200761 - DNA, 13 bp, Artificial Sequence
  Oligonucleotide for detection of SNP TSC0049394
gagtttttatata

SEQ ID NO: 200762 - DNA, 13 bp, Artificial Sequence
  Oligonucleotide for detection of SNP TSC0049394
tatataaaaactc

SEQ ID NO: 200763 - DNA, 13 bp, Artificial Sequence
  Oligonucleotide for detection of SNP TSC0049394
tgtatgtggatty

SEQ ID NO: 200764 - DNA, 13 bp, Artificial Sequence
  Oligonucleotide for detection of SNP TSC0049394
raatccacataca

SEQ ID NO: 200765 - DNA, 13 bp, Artificial Sequence
  Oligonucleotide for detection of SNP TSC0049394
tgtatggggatty

SEQ ID NO: 200766 - DNA, 13 bp, Artificial Sequence
  Oligonucleotide for detection of SNP TSC0049394
raatccccataca

SEQ ID NO: 200767 - DNA, 13 bp, Artificial Sequence
  Oligonucleotide for detection of SNP TSC0049395
tttataattttat

SEQ ID NO: 200768 - DNA, 13 bp, Artificial Sequence
  Oligonucleotide for detection of SNP TSC0049395
ataaaattataaa

SEQ ID NO: 200769 - DNA, 13 bp, Artificial Sequence
  Oligonucleotide for detection of SNP TSC0049397
atatagatatatg

SEQ ID NO: 200770 - DNA, 13 bp, Artificial Sequence
  Oligonucleotide for detection of SNP TSC0049397
catatatctatat

SEQ ID NO: 200771 - DNA, 13 bp, Artificial Sequence
  Oligonucleotide for detection of SNP TSC0049397
atatagttatatg

SEQ ID NO: 200772 - DNA, 13 bp, Artificial Sequence
  Oligonucleotide for detection of SNP TSC0049397
catataactatat

SEQ ID NO: 200773 - DNA, 13 bp, Artificial Sequence
  Oligonucleotide for detection of SNP TSC0049397
tatgtgtttgtat

SEQ ID NO: 200774 - DNA, 13 bp, Artificial Sequence
  Oligonucleotide for detection of SNP TSC0049397
atacaaacacata

SEQ ID NO: 200775 - DNA, 13 bp, Artificial Sequence
  Oligonucleotide for detection of SNP TSC0049397
tatgtgattgtat

SEQ ID NO: 200776 - DNA, 13 bp, Artificial Sequence
  Oligonucleotide for detection of SNP TSC0049397
atacaatcacata

SEQ ID NO: 200777 - DNA, 13 bp, Artificial Sequence
  Oligonucleotide for detection of SNP TSC0049398
tatgaaagattay

SEQ ID NO: 200778 - DNA, 13 bp, Artificial Sequence
  Oligonucleotide for detection of SNP TSC0049398
rtaatctttcata

SEQ ID NO: 200779 - DNA, 13 bp, Artificial Sequence
  Oligonucleotide for detection of SNP TSC0049398
tatgaaggattay

SEQ ID NO: 200780 - DNA, 13 bp, Artificial Sequence
  Oligonucleotide for detection of SNP TSC0049398
rtaatccttcata

SEQ ID NO: 200781 - DNA, 13 bp, Artificial Sequence
  Oligonucleotide for detection of SNP TSC0049400
gataatatggtty

SEQ ID NO: 200782 - DNA, 13 bp, Artificial Sequence
  Oligonucleotide for detection of SNP TSC0049400
raaccatattatc

SEQ ID NO: 200783 - DNA, 13 bp, Artificial Sequence
  Oligonucleotide for detection of SNP TSC0049400
gataatgtggtty

SEQ ID NO: 200784 - DNA, 13 bp, Artificial Sequence
  Oligonucleotide for detection of SNP TSC0049400
raaccacattatc

SEQ ID NO: 200785 - DNA, 13 bp, Artificial Sequence
  Oligonucleotide for detection of SNP TSC0049400
gataacgtggtty

SEQ ID NO: 200786 - DNA, 13 bp, Artificial Sequence
  Oligonucleotide for detection of SNP TSC0049400
raaccacgttatc

SEQ ID NO: 200787 - DNA, 13 bp, Artificial Sequence
  Oligonucleotide for detection of SNP TSC0049400
gagttatgttgty

SEQ ID NO: 200788 - DNA, 13 bp, Artificial Sequence
  Oligonucleotide for detection of SNP TSC0049400
racaacataactc

SEQ ID NO: 200789 - DNA, 13 bp, Artificial Sequence
  Oligonucleotide for detection of SNP TSC0049400
gagttacgttgty

SEQ ID NO: 200790 - DNA, 13 bp, Artificial Sequence
  Oligonucleotide for detection of SNP TSC0049400
racaacgtaactc

SEQ ID NO: 200791 - DNA, 13 bp, Artificial Sequence
  Oligonucleotide for detection of SNP TSC0049401
ggggtaaagggtt

SEQ ID NO: 200792 - DNA, 13 bp, Artificial Sequence
  Oligonucleotide for detection of SNP TSC0049401
aaccctttacccc

SEQ ID NO: 200793 - DNA, 13 bp, Artificial Sequence
  Oligonucleotide for detection of SNP TSC0049401
ggggtagagggtt

SEQ ID NO: 200794 - DNA, 13 bp, Artificial Sequence
  Oligonucleotide for detection of SNP TSC0049401
aaccctctacccc

SEQ ID NO: 200795 - DNA, 13 bp, Artificial Sequence
  Oligonucleotide for detection of SNP TSC0049402
ttttatttagagy

SEQ ID NO: 200796 - DNA, 13 bp, Artificial Sequence
  Oligonucleotide for detection of SNP TSC0049402
rctctaaataaaa

SEQ ID NO: 200797 - DNA, 13 bp, Artificial Sequence
  Oligonucleotide for detection of SNP TSC0049402
gttttgtataaag

SEQ ID NO: 200798 - DNA, 13 bp, Artificial Sequence
  Oligonucleotide for detection of SNP TSC0049402
ctttatacaaaac

SEQ ID NO: 200799 - DNA, 13 bp, Artificial Sequence
  Oligonucleotide for detection of SNP TSC0049402
gttttggataaag

SEQ ID NO: 200800 - DNA, 13 bp, Artificial Sequence
  Oligonucleotide for detection of SNP TSC0049402
ctttatccaaaac

SEQ ID NO: 200801 - DNA, 13 bp, Artificial Sequence
  Oligonucleotide for detection of SNP TSC0049403
aaaaaaatatggg

SEQ ID NO: 200802 - DNA, 13 bp, Artificial Sequence
  Oligonucleotide for detection of SNP TSC0049403
cccatattttttt

SEQ ID NO: 200803 - DNA, 13 bp, Artificial Sequence
  Oligonucleotide for detection of SNP TSC0049403
aaaaaattatggg

SEQ ID NO: 200804 - DNA, 13 bp, Artificial Sequence
  Oligonucleotide for detection of SNP TSC0049403
cccataatttttt

SEQ ID NO: 200805 - DNA, 13 bp, Artificial Sequence
  Oligonucleotide for detection of SNP TSC0049404
gagaggtatttgg

SEQ ID NO: 200806 - DNA, 13 bp, Artificial Sequence
  Oligonucleotide for detection of SNP TSC0049404
ccaaatacctctc

SEQ ID NO: 200807 - DNA, 13 bp, Artificial Sequence
  Oligonucleotide for detection of SNP TSC0049404
gagagggatttgg

SEQ ID NO: 200808 - DNA, 13 bp, Artificial Sequence
  Oligonucleotide for detection of SNP TSC0049404
ccaaatccctctc

SEQ ID NO: 200809 - DNA, 13 bp, Artificial Sequence
  Oligonucleotide for detection of SNP TSC0049405
ttgattatatatt

SEQ ID NO: 200810 - DNA, 13 bp, Artificial Sequence
  Oligonucleotide for detection of SNP TSC0049405
aatatataatcaa

SEQ ID NO: 200811 - DNA, 13 bp, Artificial Sequence
  Oligonucleotide for detection of SNP TSC0049405
ttgattttatatt

SEQ ID NO: 200812 - DNA, 13 bp, Artificial Sequence
  Oligonucleotide for detection of SNP TSC0049405
aatataaaatcaa

SEQ ID NO: 200813 - DNA, 13 bp, Artificial Sequence
  Oligonucleotide for detection of SNP TSC0049405
agtatgtagttaa

SEQ ID NO: 200814 - DNA, 13 bp, Artificial Sequence
  Oligonucleotide for detection of SNP TSC0049405
ttaactacatact

SEQ ID NO: 200815 - DNA, 13 bp, Artificial Sequence
  Oligonucleotide for detection of SNP TSC0049405
agtatgaagttaa

SEQ ID NO: 200816 - DNA, 13 bp, Artificial Sequence
  Oligonucleotide for detection of SNP TSC0049405
ttaacttcatact

SEQ ID NO: 200817 - DNA, 13 bp, Artificial Sequence
  Oligonucleotide for detection of SNP TSC0049407
gaagaaaggatgt

SEQ ID NO: 200818 - DNA, 13 bp, Artificial Sequence
  Oligonucleotide for detection of SNP TSC0049407
acatcctttcttc

SEQ ID NO: 200819 - DNA, 13 bp, Artificial Sequence
  Oligonucleotide for detection of SNP TSC0049407
gaagaagggatgt

SEQ ID NO: 200820 - DNA, 13 bp, Artificial Sequence
  Oligonucleotide for detection of SNP TSC0049407
acatcccttcttc

SEQ ID NO: 200821 - DNA, 13 bp, Artificial Sequence
  Oligonucleotide for detection of SNP TSC0049410
gaagttagtgagg

SEQ ID NO: 200822 - DNA, 13 bp, Artificial Sequence
  Oligonucleotide for detection of SNP TSC0049410
cctcactaacttc

SEQ ID NO: 200823 - DNA, 13 bp, Artificial Sequence
  Oligonucleotide for detection of SNP TSC0049410
gaagttggtgagg

SEQ ID NO: 200824 - DNA, 13 bp, Artificial Sequence
  Oligonucleotide for detection of SNP TSC0049410
cctcaccaacttc

SEQ ID NO: 200825 - DNA, 13 bp, Artificial Sequence
  Oligonucleotide for detection of SNP TSC0049410
gaagtcggtgagg

SEQ ID NO: 200826 - DNA, 13 bp, Artificial Sequence
  Oligonucleotide for detection of SNP TSC0049410
cctcaccgacttc

SEQ ID NO: 200827 - DNA, 13 bp, Artificial Sequence
  Oligonucleotide for detection of SNP TSC0049410
ttttattggttty

SEQ ID NO: 200828 - DNA, 13 bp, Artificial Sequence
  Oligonucleotide for detection of SNP TSC0049410
raaaccaataaaa

SEQ ID NO: 200829 - DNA, 13 bp, Artificial Sequence
  Oligonucleotide for detection of SNP TSC0049410
ttttatcggttty

SEQ ID NO: 200830 - DNA, 13 bp, Artificial Sequence
  Oligonucleotide for detection of SNP TSC0049410
raaaccgataaaa

SEQ ID NO: 200831 - DNA, 13 bp, Artificial Sequence
  Oligonucleotide for detection of SNP TSC0049411
gatttaaataaay

SEQ ID NO: 200832 - DNA, 13 bp, Artificial Sequence
  Oligonucleotide for detection of SNP TSC0049411
rtttatttaaatc

SEQ ID NO: 200833 - DNA, 13 bp, Artificial Sequence
  Oligonucleotide for detection of SNP TSC0049411
gatttatataaay

SEQ ID NO: 200834 - DNA, 13 bp, Artificial Sequence
  Oligonucleotide for detection of SNP TSC0049411
rtttatataaatc

SEQ ID NO: 200835 - DNA, 13 bp, Artificial Sequence
  Oligonucleotide for detection of SNP TSC0049411
gtttatttgaaty

SEQ ID NO: 200836 - DNA, 13 bp, Artificial Sequence
  Oligonucleotide for detection of SNP TSC0049411
rattcaaataaac

SEQ ID NO: 200837 - DNA, 13 bp, Artificial Sequence
  Oligonucleotide for detection of SNP TSC0049411
gtttatatgaaty

SEQ ID NO: 200838 - DNA, 13 bp, Artificial Sequence
  Oligonucleotide for detection of SNP TSC0049411
rattcatataaac

SEQ ID NO: 200839 - DNA, 13 bp, Artificial Sequence
  Oligonucleotide for detection of SNP TSC0049412
gagtttatatttt

SEQ ID NO: 200840 - DNA, 13 bp, Artificial Sequence
  Oligonucleotide for detection of SNP TSC0049412
aaaatataaactc

SEQ ID NO: 200841 - DNA, 13 bp, Artificial Sequence
  Oligonucleotide for detection of SNP TSC0049412
gagtttgtatttt

SEQ ID NO: 200842 - DNA, 13 bp, Artificial Sequence
  Oligonucleotide for detection of SNP TSC0049412
aaaatacaaactc

SEQ ID NO: 200843 - DNA, 13 bp, Artificial Sequence
  Oligonucleotide for detection of SNP TSC0049413
taagtttttttag

SEQ ID NO: 200844 - DNA, 13 bp, Artificial Sequence
  Oligonucleotide for detection of SNP TSC0049413
ctaaaaaaactta

SEQ ID NO: 200845 - DNA, 13 bp, Artificial Sequence
  Oligonucleotide for detection of SNP TSC0049413
taagttgttttag

SEQ ID NO: 200846 - DNA, 13 bp, Artificial Sequence
  Oligonucleotide for detection of SNP TSC0049413
ctaaaacaactta

SEQ ID NO: 200847 - DNA, 13 bp, Artificial Sequence
  Oligonucleotide for detection of SNP TSC0049413
ttaaaagagttta

SEQ ID NO: 200848 - DNA, 13 bp, Artificial Sequence
  Oligonucleotide for detection of SNP TSC0049413
taaactcttttaa

SEQ ID NO: 200849 - DNA, 13 bp, Artificial Sequence
  Oligonucleotide for detection of SNP TSC0049413
ttaaaatagttta

SEQ ID NO: 200850 - DNA, 13 bp, Artificial Sequence
  Oligonucleotide for detection of SNP TSC0049413
taaactattttaa

SEQ ID NO: 200851 - DNA, 13 bp, Artificial Sequence
  Oligonucleotide for detection of SNP TSC0049414
tattatatagtaa

SEQ ID NO: 200852 - DNA, 13 bp, Artificial Sequence
  Oligonucleotide for detection of SNP TSC0049414
ttactatataata

SEQ ID NO: 200853 - DNA, 13 bp, Artificial Sequence
  Oligonucleotide for detection of SNP TSC0049414
tattatgtagtaa

SEQ ID NO: 200854 - DNA, 13 bp, Artificial Sequence
  Oligonucleotide for detection of SNP TSC0049414
ttactacataata

SEQ ID NO: 200855 - DNA, 13 bp, Artificial Sequence
  Oligonucleotide for detection of SNP TSC0049417
agtagggagaggy

SEQ ID NO: 200856 - DNA, 13 bp, Artificial Sequence
  Oligonucleotide for detection of SNP TSC0049417
rcctctccctact

SEQ ID NO: 200857 - DNA, 13 bp, Artificial Sequence
  Oligonucleotide for detection of SNP TSC0049417
agtaggaagaggy

SEQ ID NO: 200858 - DNA, 13 bp, Artificial Sequence
  Oligonucleotide for detection of SNP TSC0049417
rcctcttcctact

SEQ ID NO: 200859 - DNA, 13 bp, Artificial Sequence
  Oligonucleotide for detection of SNP TSC0049418
taaaatgtaaaaa

SEQ ID NO: 200860 - DNA, 13 bp, Artificial Sequence
  Oligonucleotide for detection of SNP TSC0049418
tttttacatttta

SEQ ID NO: 200861 - DNA, 13 bp, Artificial Sequence
  Oligonucleotide for detection of SNP TSC0049419
tagagatggggta

SEQ ID NO: 200862 - DNA, 13 bp, Artificial Sequence
  Oligonucleotide for detection of SNP TSC0049419
taccccatctcta

SEQ ID NO: 200863 - DNA, 13 bp, Artificial Sequence
  Oligonucleotide for detection of SNP TSC0049419
tagagacggggta

SEQ ID NO: 200864 - DNA, 13 bp, Artificial Sequence
  Oligonucleotide for detection of SNP TSC0049419
taccccgtctcta

SEQ ID NO: 200865 - DNA, 13 bp, Artificial Sequence
  Oligonucleotide for detection of SNP TSC0049421
aagattatttgag

SEQ ID NO: 200866 - DNA, 13 bp, Artificial Sequence
  Oligonucleotide for detection of SNP TSC0049421
ctcaaataatctt

SEQ ID NO: 200867 - DNA, 13 bp, Artificial Sequence
  Oligonucleotide for detection of SNP TSC0049421
aagattgtttgag

SEQ ID NO: 200868 - DNA, 13 bp, Artificial Sequence
  Oligonucleotide for detection of SNP TSC0049421
ctcaaacaatctt

SEQ ID NO: 200869 - DNA, 13 bp, Artificial Sequence
  Oligonucleotide for detection of SNP TSC0049421
aagatcgtttgag

SEQ ID NO: 200870 - DNA, 13 bp, Artificial Sequence
  Oligonucleotide for detection of SNP TSC0049421
ctcaaacgatctt

SEQ ID NO: 200871 - DNA, 13 bp, Artificial Sequence
  Oligonucleotide for detection of SNP TSC0049421
tttaaatgatttt

SEQ ID NO: 200872 - DNA, 13 bp, Artificial Sequence
  Oligonucleotide for detection of SNP TSC0049421
aaaatcatttaaa

SEQ ID NO: 200873 - DNA, 13 bp, Artificial Sequence
  Oligonucleotide for detection of SNP TSC0049423
ttgttttgagaat

SEQ ID NO: 200874 - DNA, 13 bp, Artificial Sequence
  Oligonucleotide for detection of SNP TSC0049423
attctcaaaacaa

SEQ ID NO: 200875 - DNA, 13 bp, Artificial Sequence
  Oligonucleotide for detection of SNP TSC0049423
ttgtttcgagaat

SEQ ID NO: 200876 - DNA, 13 bp, Artificial Sequence
  Oligonucleotide for detection of SNP TSC0049423
attctcgaaacaa

SEQ ID NO: 200877 - DNA, 13 bp, Artificial Sequence
  Oligonucleotide for detection of SNP TSC0049423
atttttgaaatag

SEQ ID NO: 200878 - DNA, 13 bp, Artificial Sequence
  Oligonucleotide for detection of SNP TSC0049423
ctatttcaaaaat

SEQ ID NO: 200879 - DNA, 13 bp, Artificial Sequence
  Oligonucleotide for detection of SNP TSC0049423
atttttaaaatag

SEQ ID NO: 200880 - DNA, 13 bp, Artificial Sequence
  Oligonucleotide for detection of SNP TSC0049423
ctattttaaaaat

SEQ ID NO: 200881 - DNA, 13 bp, Artificial Sequence
  Oligonucleotide for detection of SNP TSC0049423
attttcgaaatag

SEQ ID NO: 200882 - DNA, 13 bp, Artificial Sequence
  Oligonucleotide for detection of SNP TSC0049423
ctatttcgaaaat

SEQ ID NO: 200883 - DNA, 13 bp, Artificial Sequence
  Oligonucleotide for detection of SNP TSC0049424
taatatattagaa

SEQ ID NO: 200884 - DNA, 13 bp, Artificial Sequence
  Oligonucleotide for detection of SNP TSC0049424
ttctaatatatta

SEQ ID NO: 200885 - DNA, 13 bp, Artificial Sequence
  Oligonucleotide for detection of SNP TSC0049424
taatattttagaa

SEQ ID NO: 200886 - DNA, 13 bp, Artificial Sequence
  Oligonucleotide for detection of SNP TSC0049424
ttctaaaatatta

SEQ ID NO: 200887 - DNA, 13 bp, Artificial Sequence
  Oligonucleotide for detection of SNP TSC0049424
ttttaatatattg

SEQ ID NO: 200888 - DNA, 13 bp, Artificial Sequence
  Oligonucleotide for detection of SNP TSC0049424
caatatattaaaa

SEQ ID NO: 200889 - DNA, 13 bp, Artificial Sequence
  Oligonucleotide for detection of SNP TSC0049424
ttttaaaatattg

SEQ ID NO: 200890 - DNA, 13 bp, Artificial Sequence
  Oligonucleotide for detection of SNP TSC0049424
caatattttaaaa

SEQ ID NO: 200891 - DNA, 13 bp, Artificial Sequence
  Oligonucleotide for detection of SNP TSC0049427
atagtgatgtgtg

SEQ ID NO: 200892 - DNA, 13 bp, Artificial Sequence
  Oligonucleotide for detection of SNP TSC0049427
cacacatcactat

SEQ ID NO: 200893 - DNA, 13 bp, Artificial Sequence
  Oligonucleotide for detection of SNP TSC0049427
atagtggtgtgtg

SEQ ID NO: 200894 - DNA, 13 bp, Artificial Sequence
  Oligonucleotide for detection of SNP TSC0049427
cacacaccactat

SEQ ID NO: 200895 - DNA, 13 bp, Artificial Sequence
  Oligonucleotide for detection of SNP TSC0049427
atagtgatgcgtg

SEQ ID NO: 200896 - DNA, 13 bp, Artificial Sequence
  Oligonucleotide for detection of SNP TSC0049427
cacgcatcactat

SEQ ID NO: 200897 - DNA, 13 bp, Artificial Sequence
  Oligonucleotide for detection of SNP TSC0049427
atagtggtgcgtg

SEQ ID NO: 200898 - DNA, 13 bp, Artificial Sequence
  Oligonucleotide for detection of SNP TSC0049427
cacgcaccactat

SEQ ID NO: 200899 - DNA, 13 bp, Artificial Sequence
  Oligonucleotide for detection of SNP TSC0049428
tgaagaattagag

SEQ ID NO: 200900 - DNA, 13 bp, Artificial Sequence
  Oligonucleotide for detection of SNP TSC0049428
ctctaattcttca

SEQ ID NO: 200901 - DNA, 13 bp, Artificial Sequence
  Oligonucleotide for detection of SNP TSC0049428
tgaagatttagag

SEQ ID NO: 200902 - DNA, 13 bp, Artificial Sequence
  Oligonucleotide for detection of SNP TSC0049428
ctctaaatcttca

SEQ ID NO: 200903 - DNA, 13 bp, Artificial Sequence
  Oligonucleotide for detection of SNP TSC0049428
ttttgaattttta

SEQ ID NO: 200904 - DNA, 13 bp, Artificial Sequence
  Oligonucleotide for detection of SNP TSC0049428
taaaaattcaaaa

SEQ ID NO: 200905 - DNA, 13 bp, Artificial Sequence
  Oligonucleotide for detection of SNP TSC0049429
aatataaaagtgt

SEQ ID NO: 200906 - DNA, 13 bp, Artificial Sequence
  Oligonucleotide for detection of SNP TSC0049429
acacttttatatt

SEQ ID NO: 200907 - DNA, 13 bp, Artificial Sequence
  Oligonucleotide for detection of SNP TSC0049429
aatatagaagtgt

SEQ ID NO: 200908 - DNA, 13 bp, Artificial Sequence
  Oligonucleotide for detection of SNP TSC0049429
acacttctatatt

SEQ ID NO: 200909 - DNA, 13 bp, Artificial Sequence
  Oligonucleotide for detection of SNP TSC0009603
tttgggaaggttt

SEQ ID NO: 200910 - DNA, 13 bp, Artificial Sequence
  Oligonucleotide for detection of SNP TSC0009603
aaaccttcccaaa

SEQ ID NO: 200911 - DNA, 13 bp, Artificial Sequence
  Oligonucleotide for detection of SNP TSC0009603
tttggggaggttt

SEQ ID NO: 200912 - DNA, 13 bp, Artificial Sequence
  Oligonucleotide for detection of SNP TSC0009603
aaacctccccaaa

SEQ ID NO: 200913 - DNA, 13 bp, Artificial Sequence
  Oligonucleotide for detection of SNP TSC0049431
attatagtatata

SEQ ID NO: 200914 - DNA, 13 bp, Artificial Sequence
  Oligonucleotide for detection of SNP TSC0049431
tatatactataat

SEQ ID NO: 200915 - DNA, 13 bp, Artificial Sequence
  Oligonucleotide for detection of SNP TSC0049431
tgtgtagtatagt

SEQ ID NO: 200916 - DNA, 13 bp, Artificial Sequence
  Oligonucleotide for detection of SNP TSC0049431
actatactacaca

SEQ ID NO: 200917 - DNA, 13 bp, Artificial Sequence
  Oligonucleotide for detection of SNP TSC0049431
tgtgtattatagt

SEQ ID NO: 200918 - DNA, 13 bp, Artificial Sequence
  Oligonucleotide for detection of SNP TSC0049431
actataatacaca

SEQ ID NO: 200919 - DNA, 13 bp, Artificial Sequence
  Oligonucleotide for detection of SNP TSC0049432
aaatagatatata

SEQ ID NO: 200920 - DNA, 13 bp, Artificial Sequence
  Oligonucleotide for detection of SNP TSC0049432
tatatatctattt

SEQ ID NO: 200921 - DNA, 13 bp, Artificial Sequence
  Oligonucleotide for detection of SNP TSC0049432
aaataggtatata

SEQ ID NO: 200922 - DNA, 13 bp, Artificial Sequence
  Oligonucleotide for detection of SNP TSC0049432
tatatacctattt

SEQ ID NO: 200923 - DNA, 13 bp, Artificial Sequence
  Oligonucleotide for detection of SNP TSC0006824
gaggtaaaaattt

SEQ ID NO: 200924 - DNA, 13 bp, Artificial Sequence
  Oligonucleotide for detection of SNP TSC0006824
aaatttttacctc

SEQ ID NO: 200925 - DNA, 13 bp, Artificial Sequence
  Oligonucleotide for detection of SNP TSC0006824
gaggtagaaattt

SEQ ID NO: 200926 - DNA, 13 bp, Artificial Sequence
  Oligonucleotide for detection of SNP TSC0006824
aaatttctacctc

SEQ ID NO: 200927 - DNA, 13 bp, Artificial Sequence
  Oligonucleotide for detection of SNP TSC0000340
attatgaggttag

SEQ ID NO: 200928 - DNA, 13 bp, Artificial Sequence
  Oligonucleotide for detection of SNP TSC0000340
ctaacctcataat

SEQ ID NO: 200929 - DNA, 13 bp, Artificial Sequence
  Oligonucleotide for detection of SNP TSC0000340
attatgtggttag

SEQ ID NO: 200930 - DNA, 13 bp, Artificial Sequence
  Oligonucleotide for detection of SNP TSC0000340
ctaaccacataat

SEQ ID NO: 200931 - DNA, 13 bp, Artificial Sequence
  Oligonucleotide for detection of SNP TSC0000340
attacgaggttag

SEQ ID NO: 200932 - DNA, 13 bp, Artificial Sequence
  Oligonucleotide for detection of SNP TSC0000340
ctaacctcgtaat

SEQ ID NO: 200933 - DNA, 13 bp, Artificial Sequence
  Oligonucleotide for detection of SNP TSC0000340
attacgtggttag

SEQ ID NO: 200934 - DNA, 13 bp, Artificial Sequence
  Oligonucleotide for detection of SNP TSC0000340
ctaaccacgtaat

SEQ ID NO: 200935 - DNA, 13 bp, Artificial Sequence
  Oligonucleotide for detection of SNP TSC0000340
attatgcggttag

SEQ ID NO: 200936 - DNA, 13 bp, Artificial Sequence
  Oligonucleotide for detection of SNP TSC0000340
ctaaccgcataat

SEQ ID NO: 200937 - DNA, 13 bp, Artificial Sequence
  Oligonucleotide for detection of SNP TSC0000340
attacgcggttag

SEQ ID NO: 200938 - DNA, 13 bp, Artificial Sequence
  Oligonucleotide for detection of SNP TSC0000340
ctaaccgcgtaat

SEQ ID NO: 200939 - DNA, 13 bp, Artificial Sequence
  Oligonucleotide for detection of SNP TSC0000340
ttgattttgtgat

SEQ ID NO: 200940 - DNA, 13 bp, Artificial Sequence
  Oligonucleotide for detection of SNP TSC0000340
atcacaaaatcaa

SEQ ID NO: 200941 - DNA, 13 bp, Artificial Sequence
  Oligonucleotide for detection of SNP TSC0000340
ttgatttcgtgat

SEQ ID NO: 200942 - DNA, 13 bp, Artificial Sequence
  Oligonucleotide for detection of SNP TSC0000340
atcacgaaatcaa

SEQ ID NO: 200943 - DNA, 13 bp, Artificial Sequence
  Oligonucleotide for detection of SNP TSC0000340
ttgatcgtgtgat

SEQ ID NO: 200944 - DNA, 13 bp, Artificial Sequence
  Oligonucleotide for detection of SNP TSC0000340
atcacacgatcaa

SEQ ID NO: 200945 - DNA, 13 bp, Artificial Sequence
  Oligonucleotide for detection of SNP TSC0000340
ttgattgcgtgat

SEQ ID NO: 200946 - DNA, 13 bp, Artificial Sequence
  Oligonucleotide for detection of SNP TSC0000340
atcacgcaatcaa

SEQ ID NO: 200947 - DNA, 13 bp, Artificial Sequence
  Oligonucleotide for detection of SNP TSC0000340
ttgatcgcgtgat

SEQ ID NO: 200948 - DNA, 13 bp, Artificial Sequence
  Oligonucleotide for detection of SNP TSC0000340
atcacgcgatcaa

SEQ ID NO: 200949 - DNA, 13 bp, Artificial Sequence
  Oligonucleotide for detection of SNP TSC0049435
aatgtttttttgg

SEQ ID NO: 200950 - DNA, 13 bp, Artificial Sequence
  Oligonucleotide for detection of SNP TSC0049435
ccaaaaaaacatt

SEQ ID NO: 200951 - DNA, 13 bp, Artificial Sequence
  Oligonucleotide for detection of SNP TSC0049435
aatgttgttttgg

SEQ ID NO: 200952 - DNA, 13 bp, Artificial Sequence
  Oligonucleotide for detection of SNP TSC0049435
ccaaaacaacatt

SEQ ID NO: 200953 - DNA, 13 bp, Artificial Sequence
  Oligonucleotide for detection of SNP TSC0049435
aatgttttttcgg

SEQ ID NO: 200954 - DNA, 13 bp, Artificial Sequence
  Oligonucleotide for detection of SNP TSC0049435
ccgaaaaaacatt

SEQ ID NO: 200955 - DNA, 13 bp, Artificial Sequence
  Oligonucleotide for detection of SNP TSC0049435
aatgttgtttcgg

SEQ ID NO: 200956 - DNA, 13 bp, Artificial Sequence
  Oligonucleotide for detection of SNP TSC0049435
ccgaaacaacatt

SEQ ID NO: 200957 - DNA, 13 bp, Artificial Sequence
  Oligonucleotide for detection of SNP TSC0049435
ttgaagaagtatt

SEQ ID NO: 200958 - DNA, 13 bp, Artificial Sequence
  Oligonucleotide for detection of SNP TSC0049435
aatacttcttcaa

SEQ ID NO: 200959 - DNA, 13 bp, Artificial Sequence
  Oligonucleotide for detection of SNP TSC0049435
ttgaagtagtatt

SEQ ID NO: 200960 - DNA, 13 bp, Artificial Sequence
  Oligonucleotide for detection of SNP TSC0049435
aatactacttcaa

SEQ ID NO: 200961 - DNA, 13 bp, Artificial Sequence
  Oligonucleotide for detection of SNP TSC0049435
tcgaagaagtatt

SEQ ID NO: 200962 - DNA, 13 bp, Artificial Sequence
  Oligonucleotide for detection of SNP TSC0049435
aatacttcttcga

SEQ ID NO: 200963 - DNA, 13 bp, Artificial Sequence
  Oligonucleotide for detection of SNP TSC0049435
tcgaagtagtatt

SEQ ID NO: 200964 - DNA, 13 bp, Artificial Sequence
  Oligonucleotide for detection of SNP TSC0049435
aatactacttcga

SEQ ID NO: 200965 - DNA, 13 bp, Artificial Sequence
  Oligonucleotide for detection of SNP TSC0049436
aattatatgtgtg

SEQ ID NO: 200966 - DNA, 13 bp, Artificial Sequence
  Oligonucleotide for detection of SNP TSC0049436
cacacatataatt

SEQ ID NO: 200967 - DNA, 13 bp, Artificial Sequence
  Oligonucleotide for detection of SNP TSC0049436
aattatgtgtgtg

SEQ ID NO: 200968 - DNA, 13 bp, Artificial Sequence
  Oligonucleotide for detection of SNP TSC0049436
cacacacataatt

SEQ ID NO: 200969 - DNA, 13 bp, Artificial Sequence
  Oligonucleotide for detection of SNP TSC0049436
aattacgtgtgtg

SEQ ID NO: 200970 - DNA, 13 bp, Artificial Sequence
  Oligonucleotide for detection of SNP TSC0049436
cacacacgtaatt

SEQ ID NO: 200971 - DNA, 13 bp, Artificial Sequence
  Oligonucleotide for detection of SNP TSC0049436
tatatatgtaatt

SEQ ID NO: 200972 - DNA, 13 bp, Artificial Sequence
  Oligonucleotide for detection of SNP TSC0049436
aattacatatata

SEQ ID NO: 200973 - DNA, 13 bp, Artificial Sequence
  Oligonucleotide for detection of SNP TSC0049436
tatatacgtaatt

SEQ ID NO: 200974 - DNA, 13 bp, Artificial Sequence
  Oligonucleotide for detection of SNP TSC0049436
aattacgtatata

SEQ ID NO: 200975 - DNA, 13 bp, Artificial Sequence
  Oligonucleotide for detection of SNP TSC0049437
ttggtgatttttt

SEQ ID NO: 200976 - DNA, 13 bp, Artificial Sequence
  Oligonucleotide for detection of SNP TSC0049437
aaaaaatcaccaa

SEQ ID NO: 200977 - DNA, 13 bp, Artificial Sequence
  Oligonucleotide for detection of SNP TSC0049440
gaaattggggtty

SEQ ID NO: 200978 - DNA, 13 bp, Artificial Sequence
  Oligonucleotide for detection of SNP TSC0049440
raaccccaatttc

SEQ ID NO: 200979 - DNA, 13 bp, Artificial Sequence
  Oligonucleotide for detection of SNP TSC0049440
gaaattagggtty

SEQ ID NO: 200980 - DNA, 13 bp, Artificial Sequence
  Oligonucleotide for detection of SNP TSC0049440
raaccctaatttc

SEQ ID NO: 200981 - DNA, 13 bp, Artificial Sequence
  Oligonucleotide for detection of SNP TSC0049440
gaaatcggggtty

SEQ ID NO: 200982 - DNA, 13 bp, Artificial Sequence
  Oligonucleotide for detection of SNP TSC0049440
raaccccgatttc

SEQ ID NO: 200983 - DNA, 13 bp, Artificial Sequence
  Oligonucleotide for detection of SNP TSC0009155
atgaaatagataa

SEQ ID NO: 200984 - DNA, 13 bp, Artificial Sequence
  Oligonucleotide for detection of SNP TSC0009155
ttatctatttcat

SEQ ID NO: 200985 - DNA, 13 bp, Artificial Sequence
  Oligonucleotide for detection of SNP TSC0009155
atgaaagagataa

SEQ ID NO: 200986 - DNA, 13 bp, Artificial Sequence
  Oligonucleotide for detection of SNP TSC0009155
ttatctctttcat

SEQ ID NO: 200987 - DNA, 13 bp, Artificial Sequence
  Oligonucleotide for detection of SNP TSC0009155
ttgtttattttat

SEQ ID NO: 200988 - DNA, 13 bp, Artificial Sequence
  Oligonucleotide for detection of SNP TSC0009155
ataaaataaacaa

SEQ ID NO: 200989 - DNA, 13 bp, Artificial Sequence
  Oligonucleotide for detection of SNP TSC0009156
aggaattttataa

SEQ ID NO: 200990 - DNA, 13 bp, Artificial Sequence
  Oligonucleotide for detection of SNP TSC0009156
ttataaaattcct

SEQ ID NO: 200991 - DNA, 13 bp, Artificial Sequence
  Oligonucleotide for detection of SNP TSC0009156
aggaatgttataa

SEQ ID NO: 200992 - DNA, 13 bp, Artificial Sequence
  Oligonucleotide for detection of SNP TSC0009156
ttataacattcct

SEQ ID NO: 200993 - DNA, 13 bp, Artificial Sequence
  Oligonucleotide for detection of SNP TSC0009156
ttgtaggattttt

SEQ ID NO: 200994 - DNA, 13 bp, Artificial Sequence
  Oligonucleotide for detection of SNP TSC0009156
aaaaatcctacaa

SEQ ID NO: 200995 - DNA, 13 bp, Artificial Sequence
  Oligonucleotide for detection of SNP TSC0009156
ttgtagtattttt

SEQ ID NO: 200996 - DNA, 13 bp, Artificial Sequence
  Oligonucleotide for detection of SNP TSC0009156
aaaaatactacaa

SEQ ID NO: 200997 - DNA, 13 bp, Artificial Sequence
  Oligonucleotide for detection of SNP TSC0049443
ggagggtgaggtt

SEQ ID NO: 200998 - DNA, 13 bp, Artificial Sequence
  Oligonucleotide for detection of SNP TSC0049443
aacctcaccctcc

SEQ ID NO: 200999 - DNA, 13 bp, Artificial Sequence
  Oligonucleotide for detection of SNP TSC0049443
ggagggcgaggtt

SEQ ID NO: 201000 - DNA, 13 bp, Artificial Sequence
  Oligonucleotide for detection of SNP TSC0049443
aacctcgccctcc

SEQ ID NO: 201001 - DNA, 13 bp, Artificial Sequence
  Oligonucleotide for detection of SNP TSC0049444
tttttttgaataa

SEQ ID NO: 201002 - DNA, 13 bp, Artificial Sequence
  Oligonucleotide for detection of SNP TSC0049444
ttattcaaaaaaa

SEQ ID NO: 201003 - DNA, 13 bp, Artificial Sequence
  Oligonucleotide for detection of SNP TSC0049444
ttttttggaataa

SEQ ID NO: 201004 - DNA, 13 bp, Artificial Sequence
  Oligonucleotide for detection of SNP TSC0049444
ttattccaaaaaa

SEQ ID NO: 201005 - DNA, 13 bp, Artificial Sequence
  Oligonucleotide for detection of SNP TSC0049444
ttttttcgaataa

SEQ ID NO: 201006 - DNA, 13 bp, Artificial Sequence
  Oligonucleotide for detection of SNP TSC0049444
ttattcgaaaaaa

SEQ ID NO: 201007 - DNA, 13 bp, Artificial Sequence
  Oligonucleotide for detection of SNP TSC0049444
ttatttgaaaaaa

SEQ ID NO: 201008 - DNA, 13 bp, Artificial Sequence
  Oligonucleotide for detection of SNP TSC0049444
ttttttcaaataa

SEQ ID NO: 201009 - DNA, 13 bp, Artificial Sequence
  Oligonucleotide for detection of SNP TSC0049445
tattatatttaaa

SEQ ID NO: 201010 - DNA, 13 bp, Artificial Sequence
  Oligonucleotide for detection of SNP TSC0049445
tttaaatataata

SEQ ID NO: 201011 - DNA, 13 bp, Artificial Sequence
  Oligonucleotide for detection of SNP TSC0049445
tattatttttaaa

SEQ ID NO: 201012 - DNA, 13 bp, Artificial Sequence
  Oligonucleotide for detection of SNP TSC0049445
tttaaaaataata

SEQ ID NO: 201013 - DNA, 13 bp, Artificial Sequence
  Oligonucleotide for detection of SNP TSC0049445
tattatgtttaaa

SEQ ID NO: 201014 - DNA, 13 bp, Artificial Sequence
  Oligonucleotide for detection of SNP TSC0049445
tttaaacataata

SEQ ID NO: 201015 - DNA, 13 bp, Artificial Sequence
  Oligonucleotide for detection of SNP TSC0049445
tttggatataata

SEQ ID NO: 201016 - DNA, 13 bp, Artificial Sequence
  Oligonucleotide for detection of SNP TSC0049445
tattatatccaaa

SEQ ID NO: 201017 - DNA, 13 bp, Artificial Sequence
  Oligonucleotide for detection of SNP TSC0049445
tttggagataata

SEQ ID NO: 201018 - DNA, 13 bp, Artificial Sequence
  Oligonucleotide for detection of SNP TSC0049445
tattatctccaaa

SEQ ID NO: 201019 - DNA, 13 bp, Artificial Sequence
  Oligonucleotide for detection of SNP TSC0049456
tgggtttgaattt

SEQ ID NO: 201020 - DNA, 13 bp, Artificial Sequence
  Oligonucleotide for detection of SNP TSC0049456
aaattcaaaccca

SEQ ID NO: 201021 - DNA, 13 bp, Artificial Sequence
  Oligonucleotide for detection of SNP TSC0049456
tgggttcgaattt

SEQ ID NO: 201022 - DNA, 13 bp, Artificial Sequence
  Oligonucleotide for detection of SNP TSC0049456
aaattcgaaccca

SEQ ID NO: 201023 - DNA, 13 bp, Artificial Sequence
  Oligonucleotide for detection of SNP TSC0049456
aaattcgaattta

SEQ ID NO: 201024 - DNA, 13 bp, Artificial Sequence
  Oligonucleotide for detection of SNP TSC0049456
taaattcgaattt

SEQ ID NO: 201025 - DNA, 13 bp, Artificial Sequence
  Oligonucleotide for detection of SNP TSC0049457
gaaatgtggataa

SEQ ID NO: 201026 - DNA, 13 bp, Artificial Sequence
  Oligonucleotide for detection of SNP TSC0049457
ttatccacatttc

SEQ ID NO: 201027 - DNA, 13 bp, Artificial Sequence
  Oligonucleotide for detection of SNP TSC0049457
gaaatggggataa

SEQ ID NO: 201028 - DNA, 13 bp, Artificial Sequence
  Oligonucleotide for detection of SNP TSC0049457
ttatccccatttc

SEQ ID NO: 201029 - DNA, 13 bp, Artificial Sequence
  Oligonucleotide for detection of SNP TSC0049457
gaaatgcggataa

SEQ ID NO: 201030 - DNA, 13 bp, Artificial Sequence
  Oligonucleotide for detection of SNP TSC0049457
ttatccgcatttc

SEQ ID NO: 201031 - DNA, 13 bp, Artificial Sequence
  Oligonucleotide for detection of SNP TSC0049458
ttagtaaaagtag

SEQ ID NO: 201032 - DNA, 13 bp, Artificial Sequence
  Oligonucleotide for detection of SNP TSC0049458
ctacttttactaa

SEQ ID NO: 201033 - DNA, 13 bp, Artificial Sequence
  Oligonucleotide for detection of SNP TSC0049458
ttagtataagtag

SEQ ID NO: 201034 - DNA, 13 bp, Artificial Sequence
  Oligonucleotide for detection of SNP TSC0049458
ctacttatactaa

SEQ ID NO: 201035 - DNA, 13 bp, Artificial Sequence
  Oligonucleotide for detection of SNP TSC0049458
ttatttttgttag

SEQ ID NO: 201036 - DNA, 13 bp, Artificial Sequence
  Oligonucleotide for detection of SNP TSC0049458
ctaacaaaaataa

SEQ ID NO: 201037 - DNA, 13 bp, Artificial Sequence
  Oligonucleotide for detection of SNP TSC0049458
ttatttatgttag

SEQ ID NO: 201038 - DNA, 13 bp, Artificial Sequence
  Oligonucleotide for detection of SNP TSC0049458
ctaacataaataa

SEQ ID NO: 201039 - DNA, 13 bp, Artificial Sequence
  Oligonucleotide for detection of SNP TSC0049459
ttaaaaagattay

SEQ ID NO: 201040 - DNA, 13 bp, Artificial Sequence
  Oligonucleotide for detection of SNP TSC0049459
rtaatctttttaa

SEQ ID NO: 201041 - DNA, 13 bp, Artificial Sequence
  Oligonucleotide for detection of SNP TSC0049459
ttaaaaggattay

SEQ ID NO: 201042 - DNA, 13 bp, Artificial Sequence
  Oligonucleotide for detection of SNP TSC0049459
rtaatccttttaa

SEQ ID NO: 201043 - DNA, 13 bp, Artificial Sequence
  Oligonucleotide for detection of SNP TSC0049460
tatttttgaggat

SEQ ID NO: 201044 - DNA, 13 bp, Artificial Sequence
  Oligonucleotide for detection of SNP TSC0049460
atcctcaaaaata

SEQ ID NO: 201045 - DNA, 13 bp, Artificial Sequence
  Oligonucleotide for detection of SNP TSC0049460
tattttcgaggat

SEQ ID NO: 201046 - DNA, 13 bp, Artificial Sequence
  Oligonucleotide for detection of SNP TSC0049460
atcctcgaaaata

SEQ ID NO: 201047 - DNA, 13 bp, Artificial Sequence
  Oligonucleotide for detection of SNP TSC0049460
atttttgaagatg

SEQ ID NO: 201048 - DNA, 13 bp, Artificial Sequence
  Oligonucleotide for detection of SNP TSC0049460
catcttcaaaaat

SEQ ID NO: 201049 - DNA, 13 bp, Artificial Sequence
  Oligonucleotide for detection of SNP TSC0049460
attttcgaagatg

SEQ ID NO: 201050 - DNA, 13 bp, Artificial Sequence
  Oligonucleotide for detection of SNP TSC0049460
catcttcgaaaat

SEQ ID NO: 201051 - DNA, 13 bp, Artificial Sequence
  Oligonucleotide for detection of SNP TSC0049464
aattttaaatgaa

SEQ ID NO: 201052 - DNA, 13 bp, Artificial Sequence
  Oligonucleotide for detection of SNP TSC0049464
ttcatttaaaatt

SEQ ID NO: 201053 - DNA, 13 bp, Artificial Sequence
  Oligonucleotide for detection of SNP TSC0049464
aattttgaatgaa

SEQ ID NO: 201054 - DNA, 13 bp, Artificial Sequence
  Oligonucleotide for detection of SNP TSC0049464
ttcattcaaaatt

SEQ ID NO: 201055 - DNA, 13 bp, Artificial Sequence
  Oligonucleotide for detection of SNP TSC0049464
aatttcgaatgaa

SEQ ID NO: 201056 - DNA, 13 bp, Artificial Sequence
  Oligonucleotide for detection of SNP TSC0049464
ttcattcgaaatt

SEQ ID NO: 201057 - DNA, 13 bp, Artificial Sequence
  Oligonucleotide for detection of SNP TSC0049464
tttatttggagtt

SEQ ID NO: 201058 - DNA, 13 bp, Artificial Sequence
  Oligonucleotide for detection of SNP TSC0049464
aactccaaataaa

SEQ ID NO: 201059 - DNA, 13 bp, Artificial Sequence
  Oligonucleotide for detection of SNP TSC0049464
tttattcggagtt

SEQ ID NO: 201060 - DNA, 13 bp, Artificial Sequence
  Oligonucleotide for detection of SNP TSC0049464
aactccgaataaa

SEQ ID NO: 201061 - DNA, 13 bp, Artificial Sequence
  Oligonucleotide for detection of SNP TSC0049466
atagaaaaaaaty

SEQ ID NO: 201062 - DNA, 13 bp, Artificial Sequence
  Oligonucleotide for detection of SNP TSC0049466
ratttttttctat

SEQ ID NO: 201063 - DNA, 13 bp, Artificial Sequence
  Oligonucleotide for detection of SNP TSC0049466
atagaataaaaty

SEQ ID NO: 201064 - DNA, 13 bp, Artificial Sequence
  Oligonucleotide for detection of SNP TSC0049466
rattttattctat

SEQ ID NO: 201065 - DNA, 13 bp, Artificial Sequence
  Oligonucleotide for detection of SNP TSC0049466
gatttttttttgt

SEQ ID NO: 201066 - DNA, 13 bp, Artificial Sequence
  Oligonucleotide for detection of SNP TSC0049466
acaaaaaaaaatc

SEQ ID NO: 201067 - DNA, 13 bp, Artificial Sequence
  Oligonucleotide for detection of SNP TSC0049466
gattttgttttgt

SEQ ID NO: 201068 - DNA, 13 bp, Artificial Sequence
  Oligonucleotide for detection of SNP TSC0049466
acaaaacaaaatc

SEQ ID NO: 201069 - DNA, 13 bp, Artificial Sequence
  Oligonucleotide for detection of SNP TSC0049467
atttatgattaaa

SEQ ID NO: 201070 - DNA, 13 bp, Artificial Sequence
  Oligonucleotide for detection of SNP TSC0049467
tttaatcataaat

SEQ ID NO: 201071 - DNA, 13 bp, Artificial Sequence
  Oligonucleotide for detection of SNP TSC0049467
atttataattaaa

SEQ ID NO: 201072 - DNA, 13 bp, Artificial Sequence
  Oligonucleotide for detection of SNP TSC0049467
tttaattataaat

SEQ ID NO: 201073 - DNA, 13 bp, Artificial Sequence
  Oligonucleotide for detection of SNP TSC0049469
taaaatggaaaaa

SEQ ID NO: 201074 - DNA, 13 bp, Artificial Sequence
  Oligonucleotide for detection of SNP TSC0049469
tttttccatttta

SEQ ID NO: 201075 - DNA, 13 bp, Artificial Sequence
  Oligonucleotide for detection of SNP TSC0049469
taaaatagaaaaa

SEQ ID NO: 201076 - DNA, 13 bp, Artificial Sequence
  Oligonucleotide for detection of SNP TSC0049469
tttttctatttta

SEQ ID NO: 201077 - DNA, 13 bp, Artificial Sequence
  Oligonucleotide for detection of SNP TSC0049470
tttattgtaaagy

SEQ ID NO: 201078 - DNA, 13 bp, Artificial Sequence
  Oligonucleotide for detection of SNP TSC0049470
rctttacaataaa

SEQ ID NO: 201079 - DNA, 13 bp, Artificial Sequence
  Oligonucleotide for detection of SNP TSC0049470
tttattataaagy

SEQ ID NO: 201080 - DNA, 13 bp, Artificial Sequence
  Oligonucleotide for detection of SNP TSC0049470
rctttataataaa

SEQ ID NO: 201081 - DNA, 13 bp, Artificial Sequence
  Oligonucleotide for detection of SNP TSC0049475
tttatatttgtay

SEQ ID NO: 201082 - DNA, 13 bp, Artificial Sequence
  Oligonucleotide for detection of SNP TSC0049475
rtacaaatataaa

SEQ ID NO: 201083 - DNA, 13 bp, Artificial Sequence
  Oligonucleotide for detection of SNP TSC0049475
tttatagttgtay

SEQ ID NO: 201084 - DNA, 13 bp, Artificial Sequence
  Oligonucleotide for detection of SNP TSC0049475
rtacaactataaa

SEQ ID NO: 201085 - DNA, 13 bp, Artificial Sequence
  Oligonucleotide for detection of SNP TSC0049475
gtgtaggtgtagg

SEQ ID NO: 201086 - DNA, 13 bp, Artificial Sequence
  Oligonucleotide for detection of SNP TSC0049475
cctacacctacac

SEQ ID NO: 201087 - DNA, 13 bp, Artificial Sequence
  Oligonucleotide for detection of SNP TSC0049475
gtgtagttgtagg

SEQ ID NO: 201088 - DNA, 13 bp, Artificial Sequence
  Oligonucleotide for detection of SNP TSC0049475
cctacaactacac

SEQ ID NO: 201089 - DNA, 13 bp, Artificial Sequence
  Oligonucleotide for detection of SNP TSC0049478
aatgaaagtgtag

SEQ ID NO: 201090 - DNA, 13 bp, Artificial Sequence
  Oligonucleotide for detection of SNP TSC0049478
ctacactttcatt

SEQ ID NO: 201091 - DNA, 13 bp, Artificial Sequence
  Oligonucleotide for detection of SNP TSC0049478
aatgaatgtgtag

SEQ ID NO: 201092 - DNA, 13 bp, Artificial Sequence
  Oligonucleotide for detection of SNP TSC0049478
ctacacattcatt

SEQ ID NO: 201093 - DNA, 13 bp, Artificial Sequence
  Oligonucleotide for detection of SNP TSC0049478
aatgaacgtgtag

SEQ ID NO: 201094 - DNA, 13 bp, Artificial Sequence
  Oligonucleotide for detection of SNP TSC0049478
ctacacgttcatt

SEQ ID NO: 201095 - DNA, 13 bp, Artificial Sequence
  Oligonucleotide for detection of SNP TSC0049479
agaaattttaaag

SEQ ID NO: 201096 - DNA, 13 bp, Artificial Sequence
  Oligonucleotide for detection of SNP TSC0049479
ctttaaaatttct

SEQ ID NO: 201097 - DNA, 13 bp, Artificial Sequence
  Oligonucleotide for detection of SNP TSC0049479
agaaatgttaaag

SEQ ID NO: 201098 - DNA, 13 bp, Artificial Sequence
  Oligonucleotide for detection of SNP TSC0049479
ctttaacatttct

SEQ ID NO: 201099 - DNA, 13 bp, Artificial Sequence
  Oligonucleotide for detection of SNP TSC0049479
agaaacgttaaag

SEQ ID NO: 201100 - DNA, 13 bp, Artificial Sequence
  Oligonucleotide for detection of SNP TSC0049479
ctttaacgtttct

SEQ ID NO: 201101 - DNA, 13 bp, Artificial Sequence
  Oligonucleotide for detection of SNP TSC0049479
ttttgaggttttt

SEQ ID NO: 201102 - DNA, 13 bp, Artificial Sequence
  Oligonucleotide for detection of SNP TSC0049479
aaaaacctcaaaa

SEQ ID NO: 201103 - DNA, 13 bp, Artificial Sequence
  Oligonucleotide for detection of SNP TSC0049479
ttttgatgttttt

SEQ ID NO: 201104 - DNA, 13 bp, Artificial Sequence
  Oligonucleotide for detection of SNP TSC0049479
aaaaacatcaaaa

SEQ ID NO: 201105 - DNA, 13 bp, Artificial Sequence
  Oligonucleotide for detection of SNP TSC0049479
ttttgacgttttt

SEQ ID NO: 201106 - DNA, 13 bp, Artificial Sequence
  Oligonucleotide for detection of SNP TSC0049479
aaaaacgtcaaaa

SEQ ID NO: 201107 - DNA, 13 bp, Artificial Sequence
  Oligonucleotide for detection of SNP TSC0049480
tttttgagtaatt

SEQ ID NO: 201108 - DNA, 13 bp, Artificial Sequence
  Oligonucleotide for detection of SNP TSC0049480
aattactcaaaaa

SEQ ID NO: 201109 - DNA, 13 bp, Artificial Sequence
  Oligonucleotide for detection of SNP TSC0049480
tttttgggtaatt

SEQ ID NO: 201110 - DNA, 13 bp, Artificial Sequence
  Oligonucleotide for detection of SNP TSC0049480
aattacccaaaaa

SEQ ID NO: 201111 - DNA, 13 bp, Artificial Sequence
  Oligonucleotide for detection of SNP TSC0049481
ttttacgttgatt

SEQ ID NO: 201112 - DNA, 13 bp, Artificial Sequence
  Oligonucleotide for detection of SNP TSC0049481
aatcaacgtaaaa

SEQ ID NO: 201113 - DNA, 13 bp, Artificial Sequence
  Oligonucleotide for detection of SNP TSC0049481
agttaatgtaaga

SEQ ID NO: 201114 - DNA, 13 bp, Artificial Sequence
  Oligonucleotide for detection of SNP TSC0049481
tcttacattaact

SEQ ID NO: 201115 - DNA, 13 bp, Artificial Sequence
  Oligonucleotide for detection of SNP TSC0049481
agttaacgtaaga

SEQ ID NO: 201116 - DNA, 13 bp, Artificial Sequence
  Oligonucleotide for detection of SNP TSC0049481
tcttacgttaact

SEQ ID NO: 201117 - DNA, 13 bp, Artificial Sequence
  Oligonucleotide for detection of SNP TSC0049482
gaatatgtgtgty

SEQ ID NO: 201118 - DNA, 13 bp, Artificial Sequence
  Oligonucleotide for detection of SNP TSC0049482
racacacatattc

SEQ ID NO: 201119 - DNA, 13 bp, Artificial Sequence
  Oligonucleotide for detection of SNP TSC0049482
gatatagatatty

SEQ ID NO: 201120 - DNA, 13 bp, Artificial Sequence
  Oligonucleotide for detection of SNP TSC0049482
raatatctatatc

SEQ ID NO: 201121 - DNA, 13 bp, Artificial Sequence
  Oligonucleotide for detection of SNP TSC0049482
gatatatatatty

SEQ ID NO: 201122 - DNA, 13 bp, Artificial Sequence
  Oligonucleotide for detection of SNP TSC0049482
raatatatatatc

SEQ ID NO: 201123 - DNA, 13 bp, Artificial Sequence
  Oligonucleotide for detection of SNP TSC0007469
attttagataaty

SEQ ID NO: 201124 - DNA, 13 bp, Artificial Sequence
  Oligonucleotide for detection of SNP TSC0007469
rattatctaaaat

SEQ ID NO: 201125 - DNA, 13 bp, Artificial Sequence
  Oligonucleotide for detection of SNP TSC0007469
attttaaataaty

SEQ ID NO: 201126 - DNA, 13 bp, Artificial Sequence
  Oligonucleotide for detection of SNP TSC0007469
rattatttaaaat

SEQ ID NO: 201127 - DNA, 13 bp, Artificial Sequence
  Oligonucleotide for detection of SNP TSC0007470
gtatatatttaty

SEQ ID NO: 201128 - DNA, 13 bp, Artificial Sequence
  Oligonucleotide for detection of SNP TSC0007470
rataaatatatac

SEQ ID NO: 201129 - DNA, 13 bp, Artificial Sequence
  Oligonucleotide for detection of SNP TSC0007470
gtatatgtttaty

SEQ ID NO: 201130 - DNA, 13 bp, Artificial Sequence
  Oligonucleotide for detection of SNP TSC0007470
rataaacatatac

SEQ ID NO: 201131 - DNA, 13 bp, Artificial Sequence
  Oligonucleotide for detection of SNP TSC0049484
gtggttaagggta

SEQ ID NO: 201132 - DNA, 13 bp, Artificial Sequence
  Oligonucleotide for detection of SNP TSC0049484
tacccttaaccac

SEQ ID NO: 201133 - DNA, 13 bp, Artificial Sequence
  Oligonucleotide for detection of SNP TSC0049484
gtggttgagggta

SEQ ID NO: 201134 - DNA, 13 bp, Artificial Sequence
  Oligonucleotide for detection of SNP TSC0049484
taccctcaaccac

SEQ ID NO: 201135 - DNA, 13 bp, Artificial Sequence
  Oligonucleotide for detection of SNP TSC0049485
aaataagtaatgt

SEQ ID NO: 201136 - DNA, 13 bp, Artificial Sequence
  Oligonucleotide for detection of SNP TSC0049485
acattacttattt

SEQ ID NO: 201137 - DNA, 13 bp, Artificial Sequence
  Oligonucleotide for detection of SNP TSC0049485
aaataaataatgt

SEQ ID NO: 201138 - DNA, 13 bp, Artificial Sequence
  Oligonucleotide for detection of SNP TSC0049485
acattatttattt

SEQ ID NO: 201139 - DNA, 13 bp, Artificial Sequence
  Oligonucleotide for detection of SNP TSC0049486
agatttatgaata

SEQ ID NO: 201140 - DNA, 13 bp, Artificial Sequence
  Oligonucleotide for detection of SNP TSC0049486
tattcataaatct

SEQ ID NO: 201141 - DNA, 13 bp, Artificial Sequence
  Oligonucleotide for detection of SNP TSC0049486
agatttgtgaata

SEQ ID NO: 201142 - DNA, 13 bp, Artificial Sequence
  Oligonucleotide for detection of SNP TSC0049486
tattcacaaatct

SEQ ID NO: 201143 - DNA, 13 bp, Artificial Sequence
  Oligonucleotide for detection of SNP TSC0049488
aatgataagttaa

SEQ ID NO: 201144 - DNA, 13 bp, Artificial Sequence
  Oligonucleotide for detection of SNP TSC0049488
ttaacttatcatt

SEQ ID NO: 201145 - DNA, 13 bp, Artificial Sequence
  Oligonucleotide for detection of SNP TSC0049488
aatgatgagttaa

SEQ ID NO: 201146 - DNA, 13 bp, Artificial Sequence
  Oligonucleotide for detection of SNP TSC0049488
ttaactcatcatt

SEQ ID NO: 201147 - DNA, 13 bp, Artificial Sequence
  Oligonucleotide for detection of SNP TSC0049488
aatgacgagttaa

SEQ ID NO: 201148 - DNA, 13 bp, Artificial Sequence
  Oligonucleotide for detection of SNP TSC0049488
ttaactcgtcatt

SEQ ID NO: 201149 - DNA, 13 bp, Artificial Sequence
  Oligonucleotide for detection of SNP TSC0049488
ttaatttgttatt

SEQ ID NO: 201150 - DNA, 13 bp, Artificial Sequence
  Oligonucleotide for detection of SNP TSC0049488
aataacaaattaa

SEQ ID NO: 201151 - DNA, 13 bp, Artificial Sequence
  Oligonucleotide for detection of SNP TSC0049488
ttaattcgttatt

SEQ ID NO: 201152 - DNA, 13 bp, Artificial Sequence
  Oligonucleotide for detection of SNP TSC0049488
aataacgaattaa

SEQ ID NO: 201153 - DNA, 13 bp, Artificial Sequence
  Oligonucleotide for detection of SNP TSC0049489
atatatgtgttat

SEQ ID NO: 201154 - DNA, 13 bp, Artificial Sequence
  Oligonucleotide for detection of SNP TSC0049489
ataacacatatat

SEQ ID NO: 201155 - DNA, 13 bp, Artificial Sequence
  Oligonucleotide for detection of SNP TSC0049489
atatatatgttat

SEQ ID NO: 201156 - DNA, 13 bp, Artificial Sequence
  Oligonucleotide for detection of SNP TSC0049489
ataacatatatat

SEQ ID NO: 201157 - DNA, 13 bp, Artificial Sequence
  Oligonucleotide for detection of SNP TSC0049490
gtattatggatgy

SEQ ID NO: 201158 - DNA, 13 bp, Artificial Sequence
  Oligonucleotide for detection of SNP TSC0049490
rcatccataatac

SEQ ID NO: 201159 - DNA, 13 bp, Artificial Sequence
  Oligonucleotide for detection of SNP TSC0049490
gtattacggatgy

SEQ ID NO: 201160 - DNA, 13 bp, Artificial Sequence
  Oligonucleotide for detection of SNP TSC0049490
rcatccgtaatac

SEQ ID NO: 201161 - DNA, 13 bp, Artificial Sequence
  Oligonucleotide for detection of SNP TSC0049490
gtatttgtgatgy

SEQ ID NO: 201162 - DNA, 13 bp, Artificial Sequence
  Oligonucleotide for detection of SNP TSC0049490
rcatcacaaatac

SEQ ID NO: 201163 - DNA, 13 bp, Artificial Sequence
  Oligonucleotide for detection of SNP TSC0049490
gtatttatgatgy

SEQ ID NO: 201164 - DNA, 13 bp, Artificial Sequence
  Oligonucleotide for detection of SNP TSC0049490
rcatcataaatac

SEQ ID NO: 201165 - DNA, 13 bp, Artificial Sequence
  Oligonucleotide for detection of SNP TSC0049490
gtattcgtgatgy

SEQ ID NO: 201166 - DNA, 13 bp, Artificial Sequence
  Oligonucleotide for detection of SNP TSC0049490
rcatcacgaatac

SEQ ID NO: 201167 - DNA, 13 bp, Artificial Sequence
  Oligonucleotide for detection of SNP TSC0049494
ttaatgaatgtat

SEQ ID NO: 201168 - DNA, 13 bp, Artificial Sequence
  Oligonucleotide for detection of SNP TSC0049494
atacattcattaa

SEQ ID NO: 201169 - DNA, 13 bp, Artificial Sequence
  Oligonucleotide for detection of SNP TSC0049494
ttaatggatgtat

SEQ ID NO: 201170 - DNA, 13 bp, Artificial Sequence
  Oligonucleotide for detection of SNP TSC0049494
atacatccattaa

SEQ ID NO: 201171 - DNA, 13 bp, Artificial Sequence
  Oligonucleotide for detection of SNP TSC0049494
ttaatgaacgtat

SEQ ID NO: 201172 - DNA, 13 bp, Artificial Sequence
  Oligonucleotide for detection of SNP TSC0049494
atacgttcattaa

SEQ ID NO: 201173 - DNA, 13 bp, Artificial Sequence
  Oligonucleotide for detection of SNP TSC0049494
ttaatggacgtat

SEQ ID NO: 201174 - DNA, 13 bp, Artificial Sequence
  Oligonucleotide for detection of SNP TSC0049494
atacgtccattaa

SEQ ID NO: 201175 - DNA, 13 bp, Artificial Sequence
  Oligonucleotide for detection of SNP TSC0007953
tttagaaatatta

SEQ ID NO: 201176 - DNA, 13 bp, Artificial Sequence
  Oligonucleotide for detection of SNP TSC0007953
taatatttctaaa

SEQ ID NO: 201177 - DNA, 13 bp, Artificial Sequence
  Oligonucleotide for detection of SNP TSC0007953
tttagatatatta

SEQ ID NO: 201178 - DNA, 13 bp, Artificial Sequence
  Oligonucleotide for detection of SNP TSC0007953
taatatatctaaa

SEQ ID NO: 201179 - DNA, 13 bp, Artificial Sequence
  Oligonucleotide for detection of SNP TSC0007953
taatatttttgag

SEQ ID NO: 201180 - DNA, 13 bp, Artificial Sequence
  Oligonucleotide for detection of SNP TSC0007953
ctcaaaaatatta

SEQ ID NO: 201181 - DNA, 13 bp, Artificial Sequence
  Oligonucleotide for detection of SNP TSC0007953
taatatatttgag

SEQ ID NO: 201182 - DNA, 13 bp, Artificial Sequence
  Oligonucleotide for detection of SNP TSC0007953
ctcaaatatatta

SEQ ID NO: 201183 - DNA, 13 bp, Artificial Sequence
  Oligonucleotide for detection of SNP TSC0049495
tttggaattaaat

SEQ ID NO: 201184 - DNA, 13 bp, Artificial Sequence
  Oligonucleotide for detection of SNP TSC0049495
atttaattccaaa

SEQ ID NO: 201185 - DNA, 13 bp, Artificial Sequence
  Oligonucleotide for detection of SNP TSC0049495
tttggatttaaat

SEQ ID NO: 201186 - DNA, 13 bp, Artificial Sequence
  Oligonucleotide for detection of SNP TSC0049495
atttaaatccaaa

SEQ ID NO: 201187 - DNA, 13 bp, Artificial Sequence
  Oligonucleotide for detection of SNP TSC0049495
atttaattttaga

SEQ ID NO: 201188 - DNA, 13 bp, Artificial Sequence
  Oligonucleotide for detection of SNP TSC0049495
tctaaaattaaat

SEQ ID NO: 201189 - DNA, 13 bp, Artificial Sequence
  Oligonucleotide for detection of SNP TSC0049495
atttaagtttaga

SEQ ID NO: 201190 - DNA, 13 bp, Artificial Sequence
  Oligonucleotide for detection of SNP TSC0049495
tctaaacttaaat

SEQ ID NO: 201191 - DNA, 13 bp, Artificial Sequence
  Oligonucleotide for detection of SNP TSC0049496
gtgtgtattttty

SEQ ID NO: 201192 - DNA, 13 bp, Artificial Sequence
  Oligonucleotide for detection of SNP TSC0049496
raaaaatacacac

SEQ ID NO: 201193 - DNA, 13 bp, Artificial Sequence
  Oligonucleotide for detection of SNP TSC0049496
gtgtgttttttty

SEQ ID NO: 201194 - DNA, 13 bp, Artificial Sequence
  Oligonucleotide for detection of SNP TSC0049496
raaaaaaacacac

SEQ ID NO: 201195 - DNA, 13 bp, Artificial Sequence
  Oligonucleotide for detection of SNP TSC0049496
ggagggtatatay

SEQ ID NO: 201196 - DNA, 13 bp, Artificial Sequence
  Oligonucleotide for detection of SNP TSC0049496
rtatataccctcc

SEQ ID NO: 201197 - DNA, 13 bp, Artificial Sequence
  Oligonucleotide for detection of SNP TSC0049496
ggaggggatatay

SEQ ID NO: 201198 - DNA, 13 bp, Artificial Sequence
  Oligonucleotide for detection of SNP TSC0049496
rtatatcccctcc

SEQ ID NO: 201199 - DNA, 13 bp, Artificial Sequence
  Oligonucleotide for detection of SNP TSC0049497
tgtagaaattagg

SEQ ID NO: 201200 - DNA, 13 bp, Artificial Sequence
  Oligonucleotide for detection of SNP TSC0049497
cctaatttctaca

SEQ ID NO: 201201 - DNA, 13 bp, Artificial Sequence
  Oligonucleotide for detection of SNP TSC0049497
tgtagagattagg

SEQ ID NO: 201202 - DNA, 13 bp, Artificial Sequence
  Oligonucleotide for detection of SNP TSC0049497
cctaatctctaca

SEQ ID NO: 201203 - DNA, 13 bp, Artificial Sequence
  Oligonucleotide for detection of SNP TSC0049498
ttgatgatatagt

SEQ ID NO: 201204 - DNA, 13 bp, Artificial Sequence
  Oligonucleotide for detection of SNP TSC0049498
actatatcatcaa

SEQ ID NO: 201205 - DNA, 13 bp, Artificial Sequence
  Oligonucleotide for detection of SNP TSC0049498
ttgatggtatagt

SEQ ID NO: 201206 - DNA, 13 bp, Artificial Sequence
  Oligonucleotide for detection of SNP TSC0049498
actataccatcaa

SEQ ID NO: 201207 - DNA, 13 bp, Artificial Sequence
  Oligonucleotide for detection of SNP TSC0049503
atgtagtagattg

SEQ ID NO: 201208 - DNA, 13 bp, Artificial Sequence
  Oligonucleotide for detection of SNP TSC0049503
caatctactacat

SEQ ID NO: 201209 - DNA, 13 bp, Artificial Sequence
  Oligonucleotide for detection of SNP TSC0049503
atgtaggagattg

SEQ ID NO: 201210 - DNA, 13 bp, Artificial Sequence
  Oligonucleotide for detection of SNP TSC0049503
caatctcctacat

SEQ ID NO: 201211 - DNA, 13 bp, Artificial Sequence
  Oligonucleotide for detection of SNP TSC0049504
tggaatattttgy

SEQ ID NO: 201212 - DNA, 13 bp, Artificial Sequence
  Oligonucleotide for detection of SNP TSC0049504
rcaaaatattcca

SEQ ID NO: 201213 - DNA, 13 bp, Artificial Sequence
  Oligonucleotide for detection of SNP TSC0049504
tggaattttttgy

SEQ ID NO: 201214 - DNA, 13 bp, Artificial Sequence
  Oligonucleotide for detection of SNP TSC0049504
rcaaaaaattcca

SEQ ID NO: 201215 - DNA, 13 bp, Artificial Sequence
  Oligonucleotide for detection of SNP TSC0049504
gtagaatgtttta

SEQ ID NO: 201216 - DNA, 13 bp, Artificial Sequence
  Oligonucleotide for detection of SNP TSC0049504
taaaacattctac

SEQ ID NO: 201217 - DNA, 13 bp, Artificial Sequence
  Oligonucleotide for detection of SNP TSC0049504
gtagaaagtttta

SEQ ID NO: 201218 - DNA, 13 bp, Artificial Sequence
  Oligonucleotide for detection of SNP TSC0049504
taaaactttctac

SEQ ID NO: 201219 - DNA, 13 bp, Artificial Sequence
  Oligonucleotide for detection of SNP TSC0049506
aggatattgtaay

SEQ ID NO: 201220 - DNA, 13 bp, Artificial Sequence
  Oligonucleotide for detection of SNP TSC0049506
rttacaatatcct

SEQ ID NO: 201221 - DNA, 13 bp, Artificial Sequence
  Oligonucleotide for detection of SNP TSC0049506
aggatagtgtaay

SEQ ID NO: 201222 - DNA, 13 bp, Artificial Sequence
  Oligonucleotide for detection of SNP TSC0049506
rttacactatcct

SEQ ID NO: 201223 - DNA, 13 bp, Artificial Sequence
  Oligonucleotide for detection of SNP TSC0049506
gttgtagtgtttt

SEQ ID NO: 201224 - DNA, 13 bp, Artificial Sequence
  Oligonucleotide for detection of SNP TSC0049506
aaaacactacaac

SEQ ID NO: 201225 - DNA, 13 bp, Artificial Sequence
  Oligonucleotide for detection of SNP TSC0049506
gttgtattgtttt

SEQ ID NO: 201226 - DNA, 13 bp, Artificial Sequence
  Oligonucleotide for detection of SNP TSC0049506
aaaacaatacaac

SEQ ID NO: 201227 - DNA, 13 bp, Artificial Sequence
  Oligonucleotide for detection of SNP TSC0049508
aattgatgtttta

SEQ ID NO: 201228 - DNA, 13 bp, Artificial Sequence
  Oligonucleotide for detection of SNP TSC0049508
taaaacatcaatt

SEQ ID NO: 201229 - DNA, 13 bp, Artificial Sequence
  Oligonucleotide for detection of SNP TSC0049508
aatcgatgtttta

SEQ ID NO: 201230 - DNA, 13 bp, Artificial Sequence
  Oligonucleotide for detection of SNP TSC0049508
taaaacatcgatt

SEQ ID NO: 201231 - DNA, 13 bp, Artificial Sequence
  Oligonucleotide for detection of SNP TSC0049508
aattgacgtttta

SEQ ID NO: 201232 - DNA, 13 bp, Artificial Sequence
  Oligonucleotide for detection of SNP TSC0049508
taaaacgtcaatt

SEQ ID NO: 201233 - DNA, 13 bp, Artificial Sequence
  Oligonucleotide for detection of SNP TSC0049508
aatcgacgtttta

SEQ ID NO: 201234 - DNA, 13 bp, Artificial Sequence
  Oligonucleotide for detection of SNP TSC0049508
taaaacgtcgatt

SEQ ID NO: 201235 - DNA, 13 bp, Artificial Sequence
  Oligonucleotide for detection of SNP TSC0049508
tggggtgttggtt

SEQ ID NO: 201236 - DNA, 13 bp, Artificial Sequence
  Oligonucleotide for detection of SNP TSC0049508
aaccaacacccca

SEQ ID NO: 201237 - DNA, 13 bp, Artificial Sequence
  Oligonucleotide for detection of SNP TSC0049508
tggggtattggtt

SEQ ID NO: 201238 - DNA, 13 bp, Artificial Sequence
  Oligonucleotide for detection of SNP TSC0049508
aaccaatacccca

SEQ ID NO: 201239 - DNA, 13 bp, Artificial Sequence
  Oligonucleotide for detection of SNP TSC0049508
tggggcgttggtt

SEQ ID NO: 201240 - DNA, 13 bp, Artificial Sequence
  Oligonucleotide for detection of SNP TSC0049508
aaccaacgcccca

SEQ ID NO: 201241 - DNA, 13 bp, Artificial Sequence
  Oligonucleotide for detection of SNP TSC0049508
tggggtatcggtt

SEQ ID NO: 201242 - DNA, 13 bp, Artificial Sequence
  Oligonucleotide for detection of SNP TSC0049508
aaccgatacccca

SEQ ID NO: 201243 - DNA, 13 bp, Artificial Sequence
  Oligonucleotide for detection of SNP TSC0049508
tggggtgtcggtt

SEQ ID NO: 201244 - DNA, 13 bp, Artificial Sequence
  Oligonucleotide for detection of SNP TSC0049508
aaccgacacccca

SEQ ID NO: 201245 - DNA, 13 bp, Artificial Sequence
  Oligonucleotide for detection of SNP TSC0049508
tggggcgtcggtt

SEQ ID NO: 201246 - DNA, 13 bp, Artificial Sequence
  Oligonucleotide for detection of SNP TSC0049508
aaccgacgcccca

SEQ ID NO: 201247 - DNA, 13 bp, Artificial Sequence
  Oligonucleotide for detection of SNP TSC0049513
tatttatgtgtay

SEQ ID NO: 201248 - DNA, 13 bp, Artificial Sequence
  Oligonucleotide for detection of SNP TSC0049513
rtacacataaata

SEQ ID NO: 201249 - DNA, 13 bp, Artificial Sequence
  Oligonucleotide for detection of SNP TSC0049513
tatttacgtgtay

SEQ ID NO: 201250 - DNA, 13 bp, Artificial Sequence
  Oligonucleotide for detection of SNP TSC0049513
rtacacgtaaata

SEQ ID NO: 201251 - DNA, 13 bp, Artificial Sequence
  Oligonucleotide for detection of SNP TSC0049513
gtatatgtaggta

SEQ ID NO: 201252 - DNA, 13 bp, Artificial Sequence
  Oligonucleotide for detection of SNP TSC0049513
tacctacatatac

SEQ ID NO: 201253 - DNA, 13 bp, Artificial Sequence
  Oligonucleotide for detection of SNP TSC0049513
gtatatataggta

SEQ ID NO: 201254 - DNA, 13 bp, Artificial Sequence
  Oligonucleotide for detection of SNP TSC0049513
tacctatatatac

SEQ ID NO: 201255 - DNA, 13 bp, Artificial Sequence
  Oligonucleotide for detection of SNP TSC0049513
gtatacgtaggta

SEQ ID NO: 201256 - DNA, 13 bp, Artificial Sequence
  Oligonucleotide for detection of SNP TSC0049513
tacctacgtatac

SEQ ID NO: 201257 - DNA, 13 bp, Artificial Sequence
  Oligonucleotide for detection of SNP TSC0049514
tggttttttatga

SEQ ID NO: 201258 - DNA, 13 bp, Artificial Sequence
  Oligonucleotide for detection of SNP TSC0049514
tcataaaaaacca

SEQ ID NO: 201259 - DNA, 13 bp, Artificial Sequence
  Oligonucleotide for detection of SNP TSC0049514
tggtttgttatga

SEQ ID NO: 201260 - DNA, 13 bp, Artificial Sequence
  Oligonucleotide for detection of SNP TSC0049514
tcataacaaacca

SEQ ID NO: 201261 - DNA, 13 bp, Artificial Sequence
  Oligonucleotide for detection of SNP TSC0049514
ttatgagaaatta

SEQ ID NO: 201262 - DNA, 13 bp, Artificial Sequence
  Oligonucleotide for detection of SNP TSC0049514
taatttctcataa

SEQ ID NO: 201263 - DNA, 13 bp, Artificial Sequence
  Oligonucleotide for detection of SNP TSC0049514
ttatgataaatta

SEQ ID NO: 201264 - DNA, 13 bp, Artificial Sequence
  Oligonucleotide for detection of SNP TSC0049514
taatttatcataa

SEQ ID NO: 201265 - DNA, 13 bp, Artificial Sequence
  Oligonucleotide for detection of SNP TSC0049515
ttagatattttta

SEQ ID NO: 201266 - DNA, 13 bp, Artificial Sequence
  Oligonucleotide for detection of SNP TSC0049515
taaaaatatctaa

SEQ ID NO: 201267 - DNA, 13 bp, Artificial Sequence
  Oligonucleotide for detection of SNP TSC0049515
ttagattttttta

SEQ ID NO: 201268 - DNA, 13 bp, Artificial Sequence
  Oligonucleotide for detection of SNP TSC0049515
taaaaaaatctaa

SEQ ID NO: 201269 - DNA, 13 bp, Artificial Sequence
  Oligonucleotide for detection of SNP TSC0049515
taaaaatatttgg

SEQ ID NO: 201270 - DNA, 13 bp, Artificial Sequence
  Oligonucleotide for detection of SNP TSC0049515
ccaaatattttta

SEQ ID NO: 201271 - DNA, 13 bp, Artificial Sequence
  Oligonucleotide for detection of SNP TSC0049515
taaaaagatttgg

SEQ ID NO: 201272 - DNA, 13 bp, Artificial Sequence
  Oligonucleotide for detection of SNP TSC0049515
ccaaatcttttta

SEQ ID NO: 201273 - DNA, 13 bp, Artificial Sequence
  Oligonucleotide for detection of SNP TSC0049516
aaattagttattt

SEQ ID NO: 201274 - DNA, 13 bp, Artificial Sequence
  Oligonucleotide for detection of SNP TSC0049516
aaataactaattt

SEQ ID NO: 201275 - DNA, 13 bp, Artificial Sequence
  Oligonucleotide for detection of SNP TSC0049516
aaattaattattt

SEQ ID NO: 201276 - DNA, 13 bp, Artificial Sequence
  Oligonucleotide for detection of SNP TSC0049516
aaataattaattt

SEQ ID NO: 201277 - DNA, 13 bp, Artificial Sequence
  Oligonucleotide for detection of SNP TSC0049517
atgaagattttat

SEQ ID NO: 201278 - DNA, 13 bp, Artificial Sequence
  Oligonucleotide for detection of SNP TSC0049517
ataaaatcttcat

SEQ ID NO: 201279 - DNA, 13 bp, Artificial Sequence
  Oligonucleotide for detection of SNP TSC0049518
tttttatatgtga

SEQ ID NO: 201280 - DNA, 13 bp, Artificial Sequence
  Oligonucleotide for detection of SNP TSC0049518
tcacatataaaaa

SEQ ID NO: 201281 - DNA, 13 bp, Artificial Sequence
  Oligonucleotide for detection of SNP TSC0049518
tttttagatgtga

SEQ ID NO: 201282 - DNA, 13 bp, Artificial Sequence
  Oligonucleotide for detection of SNP TSC0049518
tcacatctaaaaa

SEQ ID NO: 201283 - DNA, 13 bp, Artificial Sequence
  Oligonucleotide for detection of SNP TSC0049518
ttatatatgagaa

SEQ ID NO: 201284 - DNA, 13 bp, Artificial Sequence
  Oligonucleotide for detection of SNP TSC0049518
ttctcatatataa

SEQ ID NO: 201285 - DNA, 13 bp, Artificial Sequence
  Oligonucleotide for detection of SNP TSC0049518
ttatatttgagaa

SEQ ID NO: 201286 - DNA, 13 bp, Artificial Sequence
  Oligonucleotide for detection of SNP TSC0049518
ttctcaaatataa

SEQ ID NO: 201287 - DNA, 13 bp, Artificial Sequence
  Oligonucleotide for detection of SNP TSC0049519
ttaaattaagagt

SEQ ID NO: 201288 - DNA, 13 bp, Artificial Sequence
  Oligonucleotide for detection of SNP TSC0049519
actcttaatttaa

SEQ ID NO: 201289 - DNA, 13 bp, Artificial Sequence
  Oligonucleotide for detection of SNP TSC0049519
ttaaatgaagagt

SEQ ID NO: 201290 - DNA, 13 bp, Artificial Sequence
  Oligonucleotide for detection of SNP TSC0049519
actcttcatttaa

SEQ ID NO: 201291 - DNA, 13 bp, Artificial Sequence
  Oligonucleotide for detection of SNP TSC0049519
atttttgatttga

SEQ ID NO: 201292 - DNA, 13 bp, Artificial Sequence
  Oligonucleotide for detection of SNP TSC0049519
tcaaatcaaaaat

SEQ ID NO: 201293 - DNA, 13 bp, Artificial Sequence
  Oligonucleotide for detection of SNP TSC0049519
attttttatttga

SEQ ID NO: 201294 - DNA, 13 bp, Artificial Sequence
  Oligonucleotide for detection of SNP TSC0049519
tcaaataaaaaat

SEQ ID NO: 201295 - DNA, 13 bp, Artificial Sequence
  Oligonucleotide for detection of SNP TSC0005000
tatttatggaaty

SEQ ID NO: 201296 - DNA, 13 bp, Artificial Sequence
  Oligonucleotide for detection of SNP TSC0005000
rattccataaata

SEQ ID NO: 201297 - DNA, 13 bp, Artificial Sequence
  Oligonucleotide for detection of SNP TSC0005000
tatttacggaaty

SEQ ID NO: 201298 - DNA, 13 bp, Artificial Sequence
  Oligonucleotide for detection of SNP TSC0005000
rattccgtaaata

SEQ ID NO: 201299 - DNA, 13 bp, Artificial Sequence
  Oligonucleotide for detection of SNP TSC0005000
ggttttgtaagtg

SEQ ID NO: 201300 - DNA, 13 bp, Artificial Sequence
  Oligonucleotide for detection of SNP TSC0005000
cacttacaaaacc

SEQ ID NO: 201301 - DNA, 13 bp, Artificial Sequence
  Oligonucleotide for detection of SNP TSC0005000
ggttttataagtg

SEQ ID NO: 201302 - DNA, 13 bp, Artificial Sequence
  Oligonucleotide for detection of SNP TSC0005000
cacttataaaacc

SEQ ID NO: 201303 - DNA, 13 bp, Artificial Sequence
  Oligonucleotide for detection of SNP TSC0005000
ggtttcgtaagtg

SEQ ID NO: 201304 - DNA, 13 bp, Artificial Sequence
  Oligonucleotide for detection of SNP TSC0005000
cacttacgaaacc

SEQ ID NO: 201305 - DNA, 13 bp, Artificial Sequence
  Oligonucleotide for detection of SNP TSC0005001
gtaaagtaggaat

SEQ ID NO: 201306 - DNA, 13 bp, Artificial Sequence
  Oligonucleotide for detection of SNP TSC0005001
attcctactttac

SEQ ID NO: 201307 - DNA, 13 bp, Artificial Sequence
  Oligonucleotide for detection of SNP TSC0005001
gtaaaggaggaat

SEQ ID NO: 201308 - DNA, 13 bp, Artificial Sequence
  Oligonucleotide for detection of SNP TSC0005001
attcctcctttac

SEQ ID NO: 201309 - DNA, 13 bp, Artificial Sequence
  Oligonucleotide for detection of SNP TSC0049521
tattatttaattt

SEQ ID NO: 201310 - DNA, 13 bp, Artificial Sequence
  Oligonucleotide for detection of SNP TSC0049521
aaattaaataata

SEQ ID NO: 201311 - DNA, 13 bp, Artificial Sequence
  Oligonucleotide for detection of SNP TSC0049521
tattatgtaattt

SEQ ID NO: 201312 - DNA, 13 bp, Artificial Sequence
  Oligonucleotide for detection of SNP TSC0049521
aaattacataata

SEQ ID NO: 201313 - DNA, 13 bp, Artificial Sequence
  Oligonucleotide for detection of SNP TSC0049521
agattaaataata

SEQ ID NO: 201314 - DNA, 13 bp, Artificial Sequence
  Oligonucleotide for detection of SNP TSC0049521
tattatttaatct

SEQ ID NO: 201315 - DNA, 13 bp, Artificial Sequence
  Oligonucleotide for detection of SNP TSC0049521
agattatataata

SEQ ID NO: 201316 - DNA, 13 bp, Artificial Sequence
  Oligonucleotide for detection of SNP TSC0049521
tattatataatct

SEQ ID NO: 201317 - DNA, 13 bp, Artificial Sequence
  Oligonucleotide for detection of SNP TSC0049522
gaaaggagttttg

SEQ ID NO: 201318 - DNA, 13 bp, Artificial Sequence
  Oligonucleotide for detection of SNP TSC0049522
caaaactcctttc

SEQ ID NO: 201319 - DNA, 13 bp, Artificial Sequence
  Oligonucleotide for detection of SNP TSC0000396
agttagatataga

SEQ ID NO: 201320 - DNA, 13 bp, Artificial Sequence
  Oligonucleotide for detection of SNP TSC0000396
tctatatctaact

SEQ ID NO: 201321 - DNA, 13 bp, Artificial Sequence
  Oligonucleotide for detection of SNP TSC0000396
agttaggtataga

SEQ ID NO: 201322 - DNA, 13 bp, Artificial Sequence
  Oligonucleotide for detection of SNP TSC0000396
tctatacctaact

SEQ ID NO: 201323 - DNA, 13 bp, Artificial Sequence
  Oligonucleotide for detection of SNP TSC0049523
gaatgaaggtttt

SEQ ID NO: 201324 - DNA, 13 bp, Artificial Sequence
  Oligonucleotide for detection of SNP TSC0049523
aaaaccttcattc

SEQ ID NO: 201325 - DNA, 13 bp, Artificial Sequence
  Oligonucleotide for detection of SNP TSC0049523
gaatgatggtttt

SEQ ID NO: 201326 - DNA, 13 bp, Artificial Sequence
  Oligonucleotide for detection of SNP TSC0049523
aaaaccatcattc

SEQ ID NO: 201327 - DNA, 13 bp, Artificial Sequence
  Oligonucleotide for detection of SNP TSC0049523
aaagtttttatty

SEQ ID NO: 201328 - DNA, 13 bp, Artificial Sequence
  Oligonucleotide for detection of SNP TSC0049523
raataaaaacttt

SEQ ID NO: 201329 - DNA, 13 bp, Artificial Sequence
  Oligonucleotide for detection of SNP TSC0049523
aaagttattatty

SEQ ID NO: 201330 - DNA, 13 bp, Artificial Sequence
  Oligonucleotide for detection of SNP TSC0049523
raataataacttt

SEQ ID NO: 201331 - DNA, 13 bp, Artificial Sequence
  Oligonucleotide for detection of SNP TSC0049524
attttgaggaaty

SEQ ID NO: 201332 - DNA, 13 bp, Artificial Sequence
  Oligonucleotide for detection of SNP TSC0049524
rattcctcaaaat

SEQ ID NO: 201333 - DNA, 13 bp, Artificial Sequence
  Oligonucleotide for detection of SNP TSC0049524
attttgtggaaty

SEQ ID NO: 201334 - DNA, 13 bp, Artificial Sequence
  Oligonucleotide for detection of SNP TSC0049524
rattccacaaaat

SEQ ID NO: 201335 - DNA, 13 bp, Artificial Sequence
  Oligonucleotide for detection of SNP TSC0049524
ggttttttaaagt

SEQ ID NO: 201336 - DNA, 13 bp, Artificial Sequence
  Oligonucleotide for detection of SNP TSC0049524
actttaaaaaacc

SEQ ID NO: 201337 - DNA, 13 bp, Artificial Sequence
  Oligonucleotide for detection of SNP TSC0049524
ggttttataaagt

SEQ ID NO: 201338 - DNA, 13 bp, Artificial Sequence
  Oligonucleotide for detection of SNP TSC0049524
actttataaaacc

SEQ ID NO: 201339 - DNA, 13 bp, Artificial Sequence
  Oligonucleotide for detection of SNP TSC0049525
tatataaatgttt

SEQ ID NO: 201340 - DNA, 13 bp, Artificial Sequence
  Oligonucleotide for detection of SNP TSC0049525
aaacatttatata

SEQ ID NO: 201341 - DNA, 13 bp, Artificial Sequence
  Oligonucleotide for detection of SNP TSC0049526
ttttaagttatat

SEQ ID NO: 201342 - DNA, 13 bp, Artificial Sequence
  Oligonucleotide for detection of SNP TSC0049526
atataacttaaaa

SEQ ID NO: 201343 - DNA, 13 bp, Artificial Sequence
  Oligonucleotide for detection of SNP TSC0049527
tttagagtttggg

SEQ ID NO: 201344 - DNA, 13 bp, Artificial Sequence
  Oligonucleotide for detection of SNP TSC0049527
cccaaactctaaa

SEQ ID NO: 201345 - DNA, 13 bp, Artificial Sequence
  Oligonucleotide for detection of SNP TSC0049528
tatgatgtttgaa

SEQ ID NO: 201346 - DNA, 13 bp, Artificial Sequence
  Oligonucleotide for detection of SNP TSC0049528
ttcaaacatcata

SEQ ID NO: 201347 - DNA, 13 bp, Artificial Sequence
  Oligonucleotide for detection of SNP TSC0049528
tatgatatttgaa

SEQ ID NO: 201348 - DNA, 13 bp, Artificial Sequence
  Oligonucleotide for detection of SNP TSC0049528
ttcaaatatcata

SEQ ID NO: 201349 - DNA, 13 bp, Artificial Sequence
  Oligonucleotide for detection of SNP TSC0049529
aataaaataagta

SEQ ID NO: 201350 - DNA, 13 bp, Artificial Sequence
  Oligonucleotide for detection of SNP TSC0049529
tacttattttatt

SEQ ID NO: 201351 - DNA, 13 bp, Artificial Sequence
  Oligonucleotide for detection of SNP TSC0049529
aataaagtaagta

SEQ ID NO: 201352 - DNA, 13 bp, Artificial Sequence
  Oligonucleotide for detection of SNP TSC0049529
tacttactttatt

SEQ ID NO: 201353 - DNA, 13 bp, Artificial Sequence
  Oligonucleotide for detection of SNP TSC0049530
agatgaaagtgaa

SEQ ID NO: 201354 - DNA, 13 bp, Artificial Sequence
  Oligonucleotide for detection of SNP TSC0049530
ttcactttcatct

SEQ ID NO: 201355 - DNA, 13 bp, Artificial Sequence
  Oligonucleotide for detection of SNP TSC0049530
agatgagagtgaa

SEQ ID NO: 201356 - DNA, 13 bp, Artificial Sequence
  Oligonucleotide for detection of SNP TSC0049530
ttcactctcatct

SEQ ID NO: 201357 - DNA, 13 bp, Artificial Sequence
  Oligonucleotide for detection of SNP TSC0049531
tttagatgaagtg

SEQ ID NO: 201358 - DNA, 13 bp, Artificial Sequence
  Oligonucleotide for detection of SNP TSC0049531
cacttcatctaaa

SEQ ID NO: 201359 - DNA, 13 bp, Artificial Sequence
  Oligonucleotide for detection of SNP TSC0049531
tttagacgaagtg

SEQ ID NO: 201360 - DNA, 13 bp, Artificial Sequence
  Oligonucleotide for detection of SNP TSC0049531
cacttcgtctaaa

SEQ ID NO: 201361 - DNA, 13 bp, Artificial Sequence
  Oligonucleotide for detection of SNP TSC0004957
ttatttatagtag

SEQ ID NO: 201362 - DNA, 13 bp, Artificial Sequence
  Oligonucleotide for detection of SNP TSC0004957
ctactataaataa

SEQ ID NO: 201363 - DNA, 13 bp, Artificial Sequence
  Oligonucleotide for detection of SNP TSC0004957
ttatttgtagtag

SEQ ID NO: 201364 - DNA, 13 bp, Artificial Sequence
  Oligonucleotide for detection of SNP TSC0004957
ctactacaaataa

SEQ ID NO: 201365 - DNA, 13 bp, Artificial Sequence
  Oligonucleotide for detection of SNP TSC0004957
ttattcgtagtag

SEQ ID NO: 201366 - DNA, 13 bp, Artificial Sequence
  Oligonucleotide for detection of SNP TSC0004957
ctactacgaataa

SEQ ID NO: 201367 - DNA, 13 bp, Artificial Sequence
  Oligonucleotide for detection of SNP TSC0004957
ttattatggataa

SEQ ID NO: 201368 - DNA, 13 bp, Artificial Sequence
  Oligonucleotide for detection of SNP TSC0004957
ttatccataataa

SEQ ID NO: 201369 - DNA, 13 bp, Artificial Sequence
  Oligonucleotide for detection of SNP TSC0004957
ttattacggataa

SEQ ID NO: 201370 - DNA, 13 bp, Artificial Sequence
  Oligonucleotide for detection of SNP TSC0004957
ttatccgtaataa

SEQ ID NO: 201371 - DNA, 13 bp, Artificial Sequence
  Oligonucleotide for detection of SNP TSC0049535
gatataagtttty

SEQ ID NO: 201372 - DNA, 13 bp, Artificial Sequence
  Oligonucleotide for detection of SNP TSC0049535
raaaacttatatc

SEQ ID NO: 201373 - DNA, 13 bp, Artificial Sequence
  Oligonucleotide for detection of SNP TSC0049535
gatataggtttty

SEQ ID NO: 201374 - DNA, 13 bp, Artificial Sequence
  Oligonucleotide for detection of SNP TSC0049535
raaaacctatatc

SEQ ID NO: 201375 - DNA, 13 bp, Artificial Sequence
  Oligonucleotide for detection of SNP TSC0008094
ttagtttttaatt

SEQ ID NO: 201376 - DNA, 13 bp, Artificial Sequence
  Oligonucleotide for detection of SNP TSC0008094
aattaaaaactaa

SEQ ID NO: 201377 - DNA, 13 bp, Artificial Sequence
  Oligonucleotide for detection of SNP TSC0008094
ttagttgttaatt

SEQ ID NO: 201378 - DNA, 13 bp, Artificial Sequence
  Oligonucleotide for detection of SNP TSC0008094
aattaacaactaa

SEQ ID NO: 201379 - DNA, 13 bp, Artificial Sequence
  Oligonucleotide for detection of SNP TSC0008094
ttagtcgttaatt

SEQ ID NO: 201380 - DNA, 13 bp, Artificial Sequence
  Oligonucleotide for detection of SNP TSC0008094
aattaacgactaa

SEQ ID NO: 201381 - DNA, 13 bp, Artificial Sequence
  Oligonucleotide for detection of SNP TSC0008094
agttagagattag

SEQ ID NO: 201382 - DNA, 13 bp, Artificial Sequence
  Oligonucleotide for detection of SNP TSC0008094
ctaatctctaact

SEQ ID NO: 201383 - DNA, 13 bp, Artificial Sequence
  Oligonucleotide for detection of SNP TSC0008094
agttagtgattag

SEQ ID NO: 201384 - DNA, 13 bp, Artificial Sequence
  Oligonucleotide for detection of SNP TSC0008094
ctaatcactaact

SEQ ID NO: 201385 - DNA, 13 bp, Artificial Sequence
  Oligonucleotide for detection of SNP TSC0008094
agttagcgattag

SEQ ID NO: 201386 - DNA, 13 bp, Artificial Sequence
  Oligonucleotide for detection of SNP TSC0008094
ctaatcgctaact

SEQ ID NO: 201387 - DNA, 13 bp, Artificial Sequence
  Oligonucleotide for detection of SNP TSC0049536
ttagtaaggtata

SEQ ID NO: 201388 - DNA, 13 bp, Artificial Sequence
  Oligonucleotide for detection of SNP TSC0049536
tataccttactaa

SEQ ID NO: 201389 - DNA, 13 bp, Artificial Sequence
  Oligonucleotide for detection of SNP TSC0049536
ttagtatggtata

SEQ ID NO: 201390 - DNA, 13 bp, Artificial Sequence
  Oligonucleotide for detection of SNP TSC0049536
tataccatactaa

SEQ ID NO: 201391 - DNA, 13 bp, Artificial Sequence
  Oligonucleotide for detection of SNP TSC0049536
ttagtacggtata

SEQ ID NO: 201392 - DNA, 13 bp, Artificial Sequence
  Oligonucleotide for detection of SNP TSC0049536
tataccgtactaa

SEQ ID NO: 201393 - DNA, 13 bp, Artificial Sequence
  Oligonucleotide for detection of SNP TSC0049536
tatgttttgttaa

SEQ ID NO: 201394 - DNA, 13 bp, Artificial Sequence
  Oligonucleotide for detection of SNP TSC0049536
ttaacaaaacata

SEQ ID NO: 201395 - DNA, 13 bp, Artificial Sequence
  Oligonucleotide for detection of SNP TSC0049536
tatgttgtgttaa

SEQ ID NO: 201396 - DNA, 13 bp, Artificial Sequence
  Oligonucleotide for detection of SNP TSC0049536
ttaacacaacata

SEQ ID NO: 201397 - DNA, 13 bp, Artificial Sequence
  Oligonucleotide for detection of SNP TSC0049536
tatgtcgtgttaa

SEQ ID NO: 201398 - DNA, 13 bp, Artificial Sequence
  Oligonucleotide for detection of SNP TSC0049536
ttaacacgacata

SEQ ID NO: 201399 - DNA, 13 bp, Artificial Sequence
  Oligonucleotide for detection of SNP TSC0010688
tgaaaataatgta

SEQ ID NO: 201400 - DNA, 13 bp, Artificial Sequence
  Oligonucleotide for detection of SNP TSC0010688
tacattattttca

SEQ ID NO: 201401 - DNA, 13 bp, Artificial Sequence
  Oligonucleotide for detection of SNP TSC0010688
tgaaaagaatgta

SEQ ID NO: 201402 - DNA, 13 bp, Artificial Sequence
  Oligonucleotide for detection of SNP TSC0010688
tacattcttttca

SEQ ID NO: 201403 - DNA, 13 bp, Artificial Sequence
  Oligonucleotide for detection of SNP TSC0049537
tgtaatgaaatta

SEQ ID NO: 201404 - DNA, 13 bp, Artificial Sequence
  Oligonucleotide for detection of SNP TSC0049537
taatttcattaca

SEQ ID NO: 201405 - DNA, 13 bp, Artificial Sequence
  Oligonucleotide for detection of SNP TSC0049537
tgtaataaaatta

SEQ ID NO: 201406 - DNA, 13 bp, Artificial Sequence
  Oligonucleotide for detection of SNP TSC0049537
taattttattaca

SEQ ID NO: 201407 - DNA, 13 bp, Artificial Sequence
  Oligonucleotide for detection of SNP TSC0009060
tttatatatgtaa

SEQ ID NO: 201408 - DNA, 13 bp, Artificial Sequence
  Oligonucleotide for detection of SNP TSC0009060
ttacatatataaa

SEQ ID NO: 201409 - DNA, 13 bp, Artificial Sequence
  Oligonucleotide for detection of SNP TSC0009060
ttgtatgtgtgga

SEQ ID NO: 201410 - DNA, 13 bp, Artificial Sequence
  Oligonucleotide for detection of SNP TSC0009060
tccacacatacaa

SEQ ID NO: 201411 - DNA, 13 bp, Artificial Sequence
  Oligonucleotide for detection of SNP TSC0009060
ttgtatatgtgga

SEQ ID NO: 201412 - DNA, 13 bp, Artificial Sequence
  Oligonucleotide for detection of SNP TSC0009060
tccacatatacaa

SEQ ID NO: 201413 - DNA, 13 bp, Artificial Sequence
  Oligonucleotide for detection of SNP TSC0009060
ttgtatttgtgga

SEQ ID NO: 201414 - DNA, 13 bp, Artificial Sequence
  Oligonucleotide for detection of SNP TSC0009060
tccacaaatacaa

SEQ ID NO: 201415 - DNA, 13 bp, Artificial Sequence
  Oligonucleotide for detection of SNP TSC0049538
aaaatagtaattg

SEQ ID NO: 201416 - DNA, 13 bp, Artificial Sequence
  Oligonucleotide for detection of SNP TSC0049538
caattactatttt

SEQ ID NO: 201417 - DNA, 13 bp, Artificial Sequence
  Oligonucleotide for detection of SNP TSC0049538
aaaataataattg

SEQ ID NO: 201418 - DNA, 13 bp, Artificial Sequence
  Oligonucleotide for detection of SNP TSC0049538
caattattatttt

SEQ ID NO: 201419 - DNA, 13 bp, Artificial Sequence
  Oligonucleotide for detection of SNP TSC0049540
ttaagtattaaaa

SEQ ID NO: 201420 - DNA, 13 bp, Artificial Sequence
  Oligonucleotide for detection of SNP TSC0049540
ttttaatacttaa

SEQ ID NO: 201421 - DNA, 13 bp, Artificial Sequence
  Oligonucleotide for detection of SNP TSC0049540
ttaagtgttaaaa

SEQ ID NO: 201422 - DNA, 13 bp, Artificial Sequence
  Oligonucleotide for detection of SNP TSC0049540
ttttaacacttaa

SEQ ID NO: 201423 - DNA, 13 bp, Artificial Sequence
  Oligonucleotide for detection of SNP TSC0049541
tatttattttaty

SEQ ID NO: 201424 - DNA, 13 bp, Artificial Sequence
  Oligonucleotide for detection of SNP TSC0049541
rataaaataaata

SEQ ID NO: 201425 - DNA, 13 bp, Artificial Sequence
  Oligonucleotide for detection of SNP TSC0049541
tatttagtttaty

SEQ ID NO: 201426 - DNA, 13 bp, Artificial Sequence
  Oligonucleotide for detection of SNP TSC0049541
rataaactaaata

SEQ ID NO: 201427 - DNA, 13 bp, Artificial Sequence
  Oligonucleotide for detection of SNP TSC0049541
gataaggtaagtg

SEQ ID NO: 201428 - DNA, 13 bp, Artificial Sequence
  Oligonucleotide for detection of SNP TSC0049541
cacttaccttatc

SEQ ID NO: 201429 - DNA, 13 bp, Artificial Sequence
  Oligonucleotide for detection of SNP TSC0049541
gataagttaagtg

SEQ ID NO: 201430 - DNA, 13 bp, Artificial Sequence
  Oligonucleotide for detection of SNP TSC0049541
cacttaacttatc

SEQ ID NO: 201431 - DNA, 13 bp, Artificial Sequence
  Oligonucleotide for detection of SNP TSC0010294
tgaaaatgtataa

SEQ ID NO: 201432 - DNA, 13 bp, Artificial Sequence
  Oligonucleotide for detection of SNP TSC0010294
ttatacattttca

SEQ ID NO: 201433 - DNA, 13 bp, Artificial Sequence
  Oligonucleotide for detection of SNP TSC0010294
tgaaaacgtataa

SEQ ID NO: 201434 - DNA, 13 bp, Artificial Sequence
  Oligonucleotide for detection of SNP TSC0010294
ttatacgttttca

SEQ ID NO: 201435 - DNA, 13 bp, Artificial Sequence
  Oligonucleotide for detection of SNP TSC0010294
ttatatgttttta

SEQ ID NO: 201436 - DNA, 13 bp, Artificial Sequence
  Oligonucleotide for detection of SNP TSC0010294
taaaaacatataa

SEQ ID NO: 201437 - DNA, 13 bp, Artificial Sequence
  Oligonucleotide for detection of SNP TSC0010294
ttatacgttttta

SEQ ID NO: 201438 - DNA, 13 bp, Artificial Sequence
  Oligonucleotide for detection of SNP TSC0010294
taaaaacgtataa

SEQ ID NO: 201439 - DNA, 13 bp, Artificial Sequence
  Oligonucleotide for detection of SNP TSC0049542
aagtataagagaa

SEQ ID NO: 201440 - DNA, 13 bp, Artificial Sequence
  Oligonucleotide for detection of SNP TSC0049542
ttctcttatactt

SEQ ID NO: 201441 - DNA, 13 bp, Artificial Sequence
  Oligonucleotide for detection of SNP TSC0049542
aagtatgagagaa

SEQ ID NO: 201442 - DNA, 13 bp, Artificial Sequence
  Oligonucleotide for detection of SNP TSC0049542
ttctctcatactt

SEQ ID NO: 201443 - DNA, 13 bp, Artificial Sequence
  Oligonucleotide for detection of SNP TSC0049544
agtattagtatgg

SEQ ID NO: 201444 - DNA, 13 bp, Artificial Sequence
  Oligonucleotide for detection of SNP TSC0049544
ccatactaatact

SEQ ID NO: 201445 - DNA, 13 bp, Artificial Sequence
  Oligonucleotide for detection of SNP TSC0049544
agtattggtatgg

SEQ ID NO: 201446 - DNA, 13 bp, Artificial Sequence
  Oligonucleotide for detection of SNP TSC0049544
ccataccaatact

SEQ ID NO: 201447 - DNA, 13 bp, Artificial Sequence
  Oligonucleotide for detection of SNP TSC0049544
agtatcggtatgg

SEQ ID NO: 201448 - DNA, 13 bp, Artificial Sequence
  Oligonucleotide for detection of SNP TSC0049544
ccataccgatact

SEQ ID NO: 201449 - DNA, 13 bp, Artificial Sequence
  Oligonucleotide for detection of SNP TSC0049544
ttatattgatgtt

SEQ ID NO: 201450 - DNA, 13 bp, Artificial Sequence
  Oligonucleotide for detection of SNP TSC0049544
aacatcaatataa

SEQ ID NO: 201451 - DNA, 13 bp, Artificial Sequence
  Oligonucleotide for detection of SNP TSC0049544
ttatatcgatgtt

SEQ ID NO: 201452 - DNA, 13 bp, Artificial Sequence
  Oligonucleotide for detection of SNP TSC0049544
aacatcgatataa

SEQ ID NO: 201453 - DNA, 13 bp, Artificial Sequence
  Oligonucleotide for detection of SNP TSC0049545
taatatgatgatt

SEQ ID NO: 201454 - DNA, 13 bp, Artificial Sequence
  Oligonucleotide for detection of SNP TSC0049545
aatcatcatatta

SEQ ID NO: 201455 - DNA, 13 bp, Artificial Sequence
  Oligonucleotide for detection of SNP TSC0049545
taatataatgatt

SEQ ID NO: 201456 - DNA, 13 bp, Artificial Sequence
  Oligonucleotide for detection of SNP TSC0049545
aatcattatatta

SEQ ID NO: 201457 - DNA, 13 bp, Artificial Sequence
  Oligonucleotide for detection of SNP TSC0049545
taatatgacgatt

SEQ ID NO: 201458 - DNA, 13 bp, Artificial Sequence
  Oligonucleotide for detection of SNP TSC0049545
aatcgtcatatta

SEQ ID NO: 201459 - DNA, 13 bp, Artificial Sequence
  Oligonucleotide for detection of SNP TSC0049545
taatataacgatt

SEQ ID NO: 201460 - DNA, 13 bp, Artificial Sequence
  Oligonucleotide for detection of SNP TSC0049545
aatcgttatatta

SEQ ID NO: 201461 - DNA, 13 bp, Artificial Sequence
  Oligonucleotide for detection of SNP TSC0049546
aataaagttatta

SEQ ID NO: 201462 - DNA, 13 bp, Artificial Sequence
  Oligonucleotide for detection of SNP TSC0049546
taataactttatt

SEQ ID NO: 201463 - DNA, 13 bp, Artificial Sequence
  Oligonucleotide for detection of SNP TSC0049546
aataaaattatta

SEQ ID NO: 201464 - DNA, 13 bp, Artificial Sequence
  Oligonucleotide for detection of SNP TSC0049546
taataattttatt

SEQ ID NO: 201465 - DNA, 13 bp, Artificial Sequence
  Oligonucleotide for detection of SNP TSC0049547
ttaagatataata

SEQ ID NO: 201466 - DNA, 13 bp, Artificial Sequence
  Oligonucleotide for detection of SNP TSC0049547
tattatatcttaa

SEQ ID NO: 201467 - DNA, 13 bp, Artificial Sequence
  Oligonucleotide for detection of SNP TSC0049547
ttaagaaataata

SEQ ID NO: 201468 - DNA, 13 bp, Artificial Sequence
  Oligonucleotide for detection of SNP TSC0049547
tattatttcttaa

SEQ ID NO: 201469 - DNA, 13 bp, Artificial Sequence
  Oligonucleotide for detection of SNP TSC0049548
gagaaagggtttg

SEQ ID NO: 201470 - DNA, 13 bp, Artificial Sequence
  Oligonucleotide for detection of SNP TSC0049548
caaaccctttctc

SEQ ID NO: 201471 - DNA, 13 bp, Artificial Sequence
  Oligonucleotide for detection of SNP TSC0049548
gagaaatggtttg

SEQ ID NO: 201472 - DNA, 13 bp, Artificial Sequence
  Oligonucleotide for detection of SNP TSC0049548
caaaccatttctc

SEQ ID NO: 201473 - DNA, 13 bp, Artificial Sequence
  Oligonucleotide for detection of SNP TSC0049548
gagaaacggtttg

SEQ ID NO: 201474 - DNA, 13 bp, Artificial Sequence
  Oligonucleotide for detection of SNP TSC0049548
caaaccgtttctc

SEQ ID NO: 201475 - DNA, 13 bp, Artificial Sequence
  Oligonucleotide for detection of SNP TSC0049549
tttatgggggatt

SEQ ID NO: 201476 - DNA, 13 bp, Artificial Sequence
  Oligonucleotide for detection of SNP TSC0049549
aatcccccataaa

SEQ ID NO: 201477 - DNA, 13 bp, Artificial Sequence
  Oligonucleotide for detection of SNP TSC0049549
aattttatatggg

SEQ ID NO: 201478 - DNA, 13 bp, Artificial Sequence
  Oligonucleotide for detection of SNP TSC0049549
cccatataaaatt

SEQ ID NO: 201479 - DNA, 13 bp, Artificial Sequence
  Oligonucleotide for detection of SNP TSC0049549
aattttttatggg

SEQ ID NO: 201480 - DNA, 13 bp, Artificial Sequence
  Oligonucleotide for detection of SNP TSC0049549
cccataaaaaatt

SEQ ID NO: 201481 - DNA, 13 bp, Artificial Sequence
  Oligonucleotide for detection of SNP TSC0049550
gtttaaaatttag

SEQ ID NO: 201482 - DNA, 13 bp, Artificial Sequence
  Oligonucleotide for detection of SNP TSC0049550
ctaaattttaaac

SEQ ID NO: 201483 - DNA, 13 bp, Artificial Sequence
  Oligonucleotide for detection of SNP TSC0049550
gtttaagatttag

SEQ ID NO: 201484 - DNA, 13 bp, Artificial Sequence
  Oligonucleotide for detection of SNP TSC0049550
ctaaatcttaaac

SEQ ID NO: 201485 - DNA, 13 bp, Artificial Sequence
  Oligonucleotide for detection of SNP TSC0049552
gttttaggtttty

SEQ ID NO: 201486 - DNA, 13 bp, Artificial Sequence
  Oligonucleotide for detection of SNP TSC0049552
raaaacctaaaac

SEQ ID NO: 201487 - DNA, 13 bp, Artificial Sequence
  Oligonucleotide for detection of SNP TSC0049552
gttttaagtttty

SEQ ID NO: 201488 - DNA, 13 bp, Artificial Sequence
  Oligonucleotide for detection of SNP TSC0049552
raaaacttaaaac

SEQ ID NO: 201489 - DNA, 13 bp, Artificial Sequence
  Oligonucleotide for detection of SNP TSC0049553
tgatatagagtta

SEQ ID NO: 201490 - DNA, 13 bp, Artificial Sequence
  Oligonucleotide for detection of SNP TSC0049553
taactctatatca

SEQ ID NO: 201491 - DNA, 13 bp, Artificial Sequence
  Oligonucleotide for detection of SNP TSC0049553
tgatatggagtta

SEQ ID NO: 201492 - DNA, 13 bp, Artificial Sequence
  Oligonucleotide for detection of SNP TSC0049553
taactccatatca

SEQ ID NO: 201493 - DNA, 13 bp, Artificial Sequence
  Oligonucleotide for detection of SNP TSC0049553
tgatacggagtta

SEQ ID NO: 201494 - DNA, 13 bp, Artificial Sequence
  Oligonucleotide for detection of SNP TSC0049553
taactccgtatca

SEQ ID NO: 201495 - DNA, 13 bp, Artificial Sequence
  Oligonucleotide for detection of SNP TSC0049553
tagttttgtgtta

SEQ ID NO: 201496 - DNA, 13 bp, Artificial Sequence
  Oligonucleotide for detection of SNP TSC0049553
taacacaaaacta

SEQ ID NO: 201497 - DNA, 13 bp, Artificial Sequence
  Oligonucleotide for detection of SNP TSC0049553
tagtttcgtgtta

SEQ ID NO: 201498 - DNA, 13 bp, Artificial Sequence
  Oligonucleotide for detection of SNP TSC0049553
taacacgaaacta

SEQ ID NO: 201499 - DNA, 13 bp, Artificial Sequence
  Oligonucleotide for detection of SNP TSC0049556
tagtgtttagtay

SEQ ID NO: 201500 - DNA, 13 bp, Artificial Sequence
  Oligonucleotide for detection of SNP TSC0049556
rtactaaacacta

SEQ ID NO: 201501 - DNA, 13 bp, Artificial Sequence
  Oligonucleotide for detection of SNP TSC0049556
tagtgtgtagtay

SEQ ID NO: 201502 - DNA, 13 bp, Artificial Sequence
  Oligonucleotide for detection of SNP TSC0049556
rtactacacacta

SEQ ID NO: 201503 - DNA, 13 bp, Artificial Sequence
  Oligonucleotide for detection of SNP TSC0049556
tagtgcgtagtay

SEQ ID NO: 201504 - DNA, 13 bp, Artificial Sequence
  Oligonucleotide for detection of SNP TSC0049556
rtactacgcacta

SEQ ID NO: 201505 - DNA, 13 bp, Artificial Sequence
  Oligonucleotide for detection of SNP TSC0049556
gtgttgggtattg

SEQ ID NO: 201506 - DNA, 13 bp, Artificial Sequence
  Oligonucleotide for detection of SNP TSC0049556
caatacccaacac

SEQ ID NO: 201507 - DNA, 13 bp, Artificial Sequence
  Oligonucleotide for detection of SNP TSC0049556
gtgttgagtattg

SEQ ID NO: 201508 - DNA, 13 bp, Artificial Sequence
  Oligonucleotide for detection of SNP TSC0049556
caatactcaacac

SEQ ID NO: 201509 - DNA, 13 bp, Artificial Sequence
  Oligonucleotide for detection of SNP TSC0049556
gtgttgtgtattg

SEQ ID NO: 201510 - DNA, 13 bp, Artificial Sequence
  Oligonucleotide for detection of SNP TSC0049556
caatacacaacac

SEQ ID NO: 201511 - DNA, 13 bp, Artificial Sequence
  Oligonucleotide for detection of SNP TSC0049556
gtgttgcgtattg

SEQ ID NO: 201512 - DNA, 13 bp, Artificial Sequence
  Oligonucleotide for detection of SNP TSC0049556
caatacgcaacac

SEQ ID NO: 201513 - DNA, 13 bp, Artificial Sequence
  Oligonucleotide for detection of SNP TSC0049557
ttttttttgtggt

SEQ ID NO: 201514 - DNA, 13 bp, Artificial Sequence
  Oligonucleotide for detection of SNP TSC0049557
accacaaaaaaaa

SEQ ID NO: 201515 - DNA, 13 bp, Artificial Sequence
  Oligonucleotide for detection of SNP TSC0049557
attatagaaagga

SEQ ID NO: 201516 - DNA, 13 bp, Artificial Sequence
  Oligonucleotide for detection of SNP TSC0049557
tcctttctataat

SEQ ID NO: 201517 - DNA, 13 bp, Artificial Sequence
  Oligonucleotide for detection of SNP TSC0049557
attataaaaagga

SEQ ID NO: 201518 - DNA, 13 bp, Artificial Sequence
  Oligonucleotide for detection of SNP TSC0049557
tcctttttataat

SEQ ID NO: 201519 - DNA, 13 bp, Artificial Sequence
  Oligonucleotide for detection of SNP TSC0049557
attatataaagga

SEQ ID NO: 201520 - DNA, 13 bp, Artificial Sequence
  Oligonucleotide for detection of SNP TSC0049557
tcctttatataat

SEQ ID NO: 201521 - DNA, 13 bp, Artificial Sequence
  Oligonucleotide for detection of SNP TSC0049561
gtttgagtgtaat

SEQ ID NO: 201522 - DNA, 13 bp, Artificial Sequence
  Oligonucleotide for detection of SNP TSC0049561
attacactcaaac

SEQ ID NO: 201523 - DNA, 13 bp, Artificial Sequence
  Oligonucleotide for detection of SNP TSC0049561
gtttgaatgtaat

SEQ ID NO: 201524 - DNA, 13 bp, Artificial Sequence
  Oligonucleotide for detection of SNP TSC0049561
attacattcaaac

SEQ ID NO: 201525 - DNA, 13 bp, Artificial Sequence
  Oligonucleotide for detection of SNP TSC0049562
ttaattaggaaaa

SEQ ID NO: 201526 - DNA, 13 bp, Artificial Sequence
  Oligonucleotide for detection of SNP TSC0049562
ttttcctaattaa

SEQ ID NO: 201527 - DNA, 13 bp, Artificial Sequence
  Oligonucleotide for detection of SNP TSC0049562
ttaatttggaaaa

SEQ ID NO: 201528 - DNA, 13 bp, Artificial Sequence
  Oligonucleotide for detection of SNP TSC0049562
ttttccaaattaa

SEQ ID NO: 201529 - DNA, 13 bp, Artificial Sequence
  Oligonucleotide for detection of SNP TSC0049562
tttttttagttaa

SEQ ID NO: 201530 - DNA, 13 bp, Artificial Sequence
  Oligonucleotide for detection of SNP TSC0049562
ttaactaaaaaaa

SEQ ID NO: 201531 - DNA, 13 bp, Artificial Sequence
  Oligonucleotide for detection of SNP TSC0049563
ggtgttttagtgt

SEQ ID NO: 201532 - DNA, 13 bp, Artificial Sequence
  Oligonucleotide for detection of SNP TSC0049563
acactaaaacacc

SEQ ID NO: 201533 - DNA, 13 bp, Artificial Sequence
  Oligonucleotide for detection of SNP TSC0049563
ggtgttgtagtgt

SEQ ID NO: 201534 - DNA, 13 bp, Artificial Sequence
  Oligonucleotide for detection of SNP TSC0049563
acactacaacacc

SEQ ID NO: 201535 - DNA, 13 bp, Artificial Sequence
  Oligonucleotide for detection of SNP TSC0049563
atattggagtaty

SEQ ID NO: 201536 - DNA, 13 bp, Artificial Sequence
  Oligonucleotide for detection of SNP TSC0049563
ratactccaatat

SEQ ID NO: 201537 - DNA, 13 bp, Artificial Sequence
  Oligonucleotide for detection of SNP TSC0049563
atattgtagtaty

SEQ ID NO: 201538 - DNA, 13 bp, Artificial Sequence
  Oligonucleotide for detection of SNP TSC0049563
ratactacaatat

SEQ ID NO: 201539 - DNA, 13 bp, Artificial Sequence
  Oligonucleotide for detection of SNP TSC0005901
ttagtatgattta

SEQ ID NO: 201540 - DNA, 13 bp, Artificial Sequence
  Oligonucleotide for detection of SNP TSC0005901
taaatcatactaa

SEQ ID NO: 201541 - DNA, 13 bp, Artificial Sequence
  Oligonucleotide for detection of SNP TSC0005901
ttagtaggattta

SEQ ID NO: 201542 - DNA, 13 bp, Artificial Sequence
  Oligonucleotide for detection of SNP TSC0005901
taaatcctactaa

SEQ ID NO: 201543 - DNA, 13 bp, Artificial Sequence
  Oligonucleotide for detection of SNP TSC0005901
taagttatattga

SEQ ID NO: 201544 - DNA, 13 bp, Artificial Sequence
  Oligonucleotide for detection of SNP TSC0005901
tcaatataactta

SEQ ID NO: 201545 - DNA, 13 bp, Artificial Sequence
  Oligonucleotide for detection of SNP TSC0005901
taagttttattga

SEQ ID NO: 201546 - DNA, 13 bp, Artificial Sequence
  Oligonucleotide for detection of SNP TSC0005901
tcaataaaactta

SEQ ID NO: 201547 - DNA, 13 bp, Artificial Sequence
  Oligonucleotide for detection of SNP TSC0049570
agttgtgggttgg

SEQ ID NO: 201548 - DNA, 13 bp, Artificial Sequence
  Oligonucleotide for detection of SNP TSC0049570
ccaacccacaact

SEQ ID NO: 201549 - DNA, 13 bp, Artificial Sequence
  Oligonucleotide for detection of SNP TSC0049570
agttgtaggttgg

SEQ ID NO: 201550 - DNA, 13 bp, Artificial Sequence
  Oligonucleotide for detection of SNP TSC0049570
ccaacctacaact

SEQ ID NO: 201551 - DNA, 13 bp, Artificial Sequence
  Oligonucleotide for detection of SNP TSC0008813
gtggtaaagttty

SEQ ID NO: 201552 - DNA, 13 bp, Artificial Sequence
  Oligonucleotide for detection of SNP TSC0008813
raaactttaccac

SEQ ID NO: 201553 - DNA, 13 bp, Artificial Sequence
  Oligonucleotide for detection of SNP TSC0008813
gtggtatagttty

SEQ ID NO: 201554 - DNA, 13 bp, Artificial Sequence
  Oligonucleotide for detection of SNP TSC0008813
raaactataccac

SEQ ID NO: 201555 - DNA, 13 bp, Artificial Sequence
  Oligonucleotide for detection of SNP TSC0008813
gaaattttgttay

SEQ ID NO: 201556 - DNA, 13 bp, Artificial Sequence
  Oligonucleotide for detection of SNP TSC0008813
rtaacaaaatttc

SEQ ID NO: 201557 - DNA, 13 bp, Artificial Sequence
  Oligonucleotide for detection of SNP TSC0008813
gaaattgtgttay

SEQ ID NO: 201558 - DNA, 13 bp, Artificial Sequence
  Oligonucleotide for detection of SNP TSC0008813
rtaacacaatttc

SEQ ID NO: 201559 - DNA, 13 bp, Artificial Sequence
  Oligonucleotide for detection of SNP TSC0049571
ggagttaggagga

SEQ ID NO: 201560 - DNA, 13 bp, Artificial Sequence
  Oligonucleotide for detection of SNP TSC0049571
tcctcctaactcc

SEQ ID NO: 201561 - DNA, 13 bp, Artificial Sequence
  Oligonucleotide for detection of SNP TSC0049571
ggagttgggagga

SEQ ID NO: 201562 - DNA, 13 bp, Artificial Sequence
  Oligonucleotide for detection of SNP TSC0049571
tcctcccaactcc

SEQ ID NO: 201563 - DNA, 13 bp, Artificial Sequence
  Oligonucleotide for detection of SNP TSC0049571
ggagtcgggagga

SEQ ID NO: 201564 - DNA, 13 bp, Artificial Sequence
  Oligonucleotide for detection of SNP TSC0049571
tcctcccgactcc

SEQ ID NO: 201565 - DNA, 13 bp, Artificial Sequence
  Oligonucleotide for detection of SNP TSC0049572
ggatatagtttgy

SEQ ID NO: 201566 - DNA, 13 bp, Artificial Sequence
  Oligonucleotide for detection of SNP TSC0049572
rcaaactatatcc

SEQ ID NO: 201567 - DNA, 13 bp, Artificial Sequence
  Oligonucleotide for detection of SNP TSC0049572
ggatatggtttgy

SEQ ID NO: 201568 - DNA, 13 bp, Artificial Sequence
  Oligonucleotide for detection of SNP TSC0049572
rcaaaccatatcc

SEQ ID NO: 201569 - DNA, 13 bp, Artificial Sequence
  Oligonucleotide for detection of SNP TSC0049573
tataatcgggtty

SEQ ID NO: 201570 - DNA, 13 bp, Artificial Sequence
  Oligonucleotide for detection of SNP TSC0049573
raacccgattata

SEQ ID NO: 201571 - DNA, 13 bp, Artificial Sequence
  Oligonucleotide for detection of SNP TSC0049573
gggtttggttatg

SEQ ID NO: 201572 - DNA, 13 bp, Artificial Sequence
  Oligonucleotide for detection of SNP TSC0049573
cataaccaaaccc

SEQ ID NO: 201573 - DNA, 13 bp, Artificial Sequence
  Oligonucleotide for detection of SNP TSC0049573
gggtttagttatg

SEQ ID NO: 201574 - DNA, 13 bp, Artificial Sequence
  Oligonucleotide for detection of SNP TSC0049573
cataactaaaccc

SEQ ID NO: 201575 - DNA, 13 bp, Artificial Sequence
  Oligonucleotide for detection of SNP TSC0049573
gggttcggttatg

SEQ ID NO: 201576 - DNA, 13 bp, Artificial Sequence
  Oligonucleotide for detection of SNP TSC0049573
cataaccgaaccc

SEQ ID NO: 201577 - DNA, 13 bp, Artificial Sequence
  Oligonucleotide for detection of SNP TSC0049574
tttttagtgttat

SEQ ID NO: 201578 - DNA, 13 bp, Artificial Sequence
  Oligonucleotide for detection of SNP TSC0049574
ataacactaaaaa

SEQ ID NO: 201579 - DNA, 13 bp, Artificial Sequence
  Oligonucleotide for detection of SNP TSC0049574
tttttaatgttat

SEQ ID NO: 201580 - DNA, 13 bp, Artificial Sequence
  Oligonucleotide for detection of SNP TSC0049574
ataacattaaaaa

SEQ ID NO: 201581 - DNA, 13 bp, Artificial Sequence
  Oligonucleotide for detection of SNP TSC0049575
attagttgtggat

SEQ ID NO: 201582 - DNA, 13 bp, Artificial Sequence
  Oligonucleotide for detection of SNP TSC0049575
atccacaactaat

SEQ ID NO: 201583 - DNA, 13 bp, Artificial Sequence
  Oligonucleotide for detection of SNP TSC0049575
attagtggtggat

SEQ ID NO: 201584 - DNA, 13 bp, Artificial Sequence
  Oligonucleotide for detection of SNP TSC0049575
atccaccactaat

SEQ ID NO: 201585 - DNA, 13 bp, Artificial Sequence
  Oligonucleotide for detection of SNP TSC0049575
attagtcgtggat

SEQ ID NO: 201586 - DNA, 13 bp, Artificial Sequence
  Oligonucleotide for detection of SNP TSC0049575
atccacgactaat

SEQ ID NO: 201587 - DNA, 13 bp, Artificial Sequence
  Oligonucleotide for detection of SNP TSC0049575
atttattattggt

SEQ ID NO: 201588 - DNA, 13 bp, Artificial Sequence
  Oligonucleotide for detection of SNP TSC0049575
accaataataaat

SEQ ID NO: 201589 - DNA, 13 bp, Artificial Sequence
  Oligonucleotide for detection of SNP TSC0049581
gaagtgggtattg

SEQ ID NO: 201590 - DNA, 13 bp, Artificial Sequence
  Oligonucleotide for detection of SNP TSC0049581
caatacccacttc

SEQ ID NO: 201591 - DNA, 13 bp, Artificial Sequence
  Oligonucleotide for detection of SNP TSC0049581
gaagtgagtattg

SEQ ID NO: 201592 - DNA, 13 bp, Artificial Sequence
  Oligonucleotide for detection of SNP TSC0049581
caatactcacttc

SEQ ID NO: 201593 - DNA, 13 bp, Artificial Sequence
  Oligonucleotide for detection of SNP TSC0007748
taagaaagttatt

SEQ ID NO: 201594 - DNA, 13 bp, Artificial Sequence
  Oligonucleotide for detection of SNP TSC0007748
aataactttctta

SEQ ID NO: 201595 - DNA, 13 bp, Artificial Sequence
  Oligonucleotide for detection of SNP TSC0007748
taagaaggttatt

SEQ ID NO: 201596 - DNA, 13 bp, Artificial Sequence
  Oligonucleotide for detection of SNP TSC0007748
aataaccttctta

SEQ ID NO: 201597 - DNA, 13 bp, Artificial Sequence
  Oligonucleotide for detection of SNP TSC0049584
tttttaagtatty

SEQ ID NO: 201598 - DNA, 13 bp, Artificial Sequence
  Oligonucleotide for detection of SNP TSC0049584
raatacttaaaaa

SEQ ID NO: 201599 - DNA, 13 bp, Artificial Sequence
  Oligonucleotide for detection of SNP TSC0049584
tttttaggtatty

SEQ ID NO: 201600 - DNA, 13 bp, Artificial Sequence
  Oligonucleotide for detection of SNP TSC0049584
raatacctaaaaa

SEQ ID NO: 201601 - DNA, 13 bp, Artificial Sequence
  Oligonucleotide for detection of SNP TSC0049585
gttatgattatat

SEQ ID NO: 201602 - DNA, 13 bp, Artificial Sequence
  Oligonucleotide for detection of SNP TSC0049585
atataatcataac

SEQ ID NO: 201603 - DNA, 13 bp, Artificial Sequence
  Oligonucleotide for detection of SNP TSC0049585
gttatggttatat

SEQ ID NO: 201604 - DNA, 13 bp, Artificial Sequence
  Oligonucleotide for detection of SNP TSC0049585
atataaccataac

SEQ ID NO: 201605 - DNA, 13 bp, Artificial Sequence
  Oligonucleotide for detection of SNP TSC0049586
tatgaggatataa

SEQ ID NO: 201606 - DNA, 13 bp, Artificial Sequence
  Oligonucleotide for detection of SNP TSC0049586
ttatatcctcata

SEQ ID NO: 201607 - DNA, 13 bp, Artificial Sequence
  Oligonucleotide for detection of SNP TSC0049586
ttatgtgtttatg

SEQ ID NO: 201608 - DNA, 13 bp, Artificial Sequence
  Oligonucleotide for detection of SNP TSC0049586
cataaacacataa

SEQ ID NO: 201609 - DNA, 13 bp, Artificial Sequence
  Oligonucleotide for detection of SNP TSC0049586
ttatgtttttatg

SEQ ID NO: 201610 - DNA, 13 bp, Artificial Sequence
  Oligonucleotide for detection of SNP TSC0049586
cataaaaacataa

SEQ ID NO: 201611 - DNA, 13 bp, Artificial Sequence
  Oligonucleotide for detection of SNP TSC0049587
gttaaggagttat

SEQ ID NO: 201612 - DNA, 13 bp, Artificial Sequence
  Oligonucleotide for detection of SNP TSC0049587
ataactccttaac

SEQ ID NO: 201613 - DNA, 13 bp, Artificial Sequence
  Oligonucleotide for detection of SNP TSC0049587
gttaagaagttat

SEQ ID NO: 201614 - DNA, 13 bp, Artificial Sequence
  Oligonucleotide for detection of SNP TSC0049587
ataacttcttaac

SEQ ID NO: 201615 - DNA, 13 bp, Artificial Sequence
  Oligonucleotide for detection of SNP TSC0049588
gaggtgaatggat

SEQ ID NO: 201616 - DNA, 13 bp, Artificial Sequence
  Oligonucleotide for detection of SNP TSC0049588
atccattcacctc

SEQ ID NO: 201617 - DNA, 13 bp, Artificial Sequence
  Oligonucleotide for detection of SNP TSC0049588
gaggtggatggat

SEQ ID NO: 201618 - DNA, 13 bp, Artificial Sequence
  Oligonucleotide for detection of SNP TSC0049588
atccatccacctc

SEQ ID NO: 201619 - DNA, 13 bp, Artificial Sequence
  Oligonucleotide for detection of SNP TSC0010670
aaaaatatttata

SEQ ID NO: 201620 - DNA, 13 bp, Artificial Sequence
  Oligonucleotide for detection of SNP TSC0010670
tataaatattttt

SEQ ID NO: 201621 - DNA, 13 bp, Artificial Sequence
  Oligonucleotide for detection of SNP TSC0010670
aaaaatgtttata

SEQ ID NO: 201622 - DNA, 13 bp, Artificial Sequence
  Oligonucleotide for detection of SNP TSC0010670
tataaacattttt

SEQ ID NO: 201623 - DNA, 13 bp, Artificial Sequence
  Oligonucleotide for detection of SNP TSC0049589
taattttttaagy

SEQ ID NO: 201624 - DNA, 13 bp, Artificial Sequence
  Oligonucleotide for detection of SNP TSC0049589
rcttaaaaaatta

SEQ ID NO: 201625 - DNA, 13 bp, Artificial Sequence
  Oligonucleotide for detection of SNP TSC0049589
taatttgttaagy

SEQ ID NO: 201626 - DNA, 13 bp, Artificial Sequence
  Oligonucleotide for detection of SNP TSC0049589
rcttaacaaatta

SEQ ID NO: 201627 - DNA, 13 bp, Artificial Sequence
  Oligonucleotide for detection of SNP TSC0049589
gtttgggaggttg

SEQ ID NO: 201628 - DNA, 13 bp, Artificial Sequence
  Oligonucleotide for detection of SNP TSC0049589
caacctcccaaac

SEQ ID NO: 201629 - DNA, 13 bp, Artificial Sequence
  Oligonucleotide for detection of SNP TSC0049589
gtttggtaggttg

SEQ ID NO: 201630 - DNA, 13 bp, Artificial Sequence
  Oligonucleotide for detection of SNP TSC0049589
caacctaccaaac

SEQ ID NO: 201631 - DNA, 13 bp, Artificial Sequence
  Oligonucleotide for detection of SNP TSC0007163
tagaagtgattgg

SEQ ID NO: 201632 - DNA, 13 bp, Artificial Sequence
  Oligonucleotide for detection of SNP TSC0007163
ccaatcacttcta

SEQ ID NO: 201633 - DNA, 13 bp, Artificial Sequence
  Oligonucleotide for detection of SNP TSC0007163
tagaagggattgg

SEQ ID NO: 201634 - DNA, 13 bp, Artificial Sequence
  Oligonucleotide for detection of SNP TSC0007163
ccaatcccttcta

SEQ ID NO: 201635 - DNA, 13 bp, Artificial Sequence
  Oligonucleotide for detection of SNP TSC0049591
agtagtataagty

SEQ ID NO: 201636 - DNA, 13 bp, Artificial Sequence
  Oligonucleotide for detection of SNP TSC0049591
racttatactact

SEQ ID NO: 201637 - DNA, 13 bp, Artificial Sequence
  Oligonucleotide for detection of SNP TSC0049591
agtagtgtaagty

SEQ ID NO: 201638 - DNA, 13 bp, Artificial Sequence
  Oligonucleotide for detection of SNP TSC0049591
racttacactact

SEQ ID NO: 201639 - DNA, 13 bp, Artificial Sequence
  Oligonucleotide for detection of SNP TSC0049591
agtagcgtaagty

SEQ ID NO: 201640 - DNA, 13 bp, Artificial Sequence
  Oligonucleotide for detection of SNP TSC0049591
racttacgctact

SEQ ID NO: 201641 - DNA, 13 bp, Artificial Sequence
  Oligonucleotide for detection of SNP TSC0049591
gatttatgttgtt

SEQ ID NO: 201642 - DNA, 13 bp, Artificial Sequence
  Oligonucleotide for detection of SNP TSC0049591
aacaacataaatc

SEQ ID NO: 201643 - DNA, 13 bp, Artificial Sequence
  Oligonucleotide for detection of SNP TSC0049591
gatttacgttgtt

SEQ ID NO: 201644 - DNA, 13 bp, Artificial Sequence
  Oligonucleotide for detection of SNP TSC0049591
aacaacgtaaatc

SEQ ID NO: 201645 - DNA, 13 bp, Artificial Sequence
  Oligonucleotide for detection of SNP TSC0007481
ggggaaattagty

SEQ ID NO: 201646 - DNA, 13 bp, Artificial Sequence
  Oligonucleotide for detection of SNP TSC0007481
ractaatttcccc

SEQ ID NO: 201647 - DNA, 13 bp, Artificial Sequence
  Oligonucleotide for detection of SNP TSC0007481
ggggaagttagty

SEQ ID NO: 201648 - DNA, 13 bp, Artificial Sequence
  Oligonucleotide for detection of SNP TSC0007481
ractaacttcccc

SEQ ID NO: 201649 - DNA, 13 bp, Artificial Sequence
  Oligonucleotide for detection of SNP TSC0049593
tttgaaaaaatgy

SEQ ID NO: 201650 - DNA, 13 bp, Artificial Sequence
  Oligonucleotide for detection of SNP TSC0049593
rcattttttcaaa

SEQ ID NO: 201651 - DNA, 13 bp, Artificial Sequence
  Oligonucleotide for detection of SNP TSC0049593
tttgaagaaatgy

SEQ ID NO: 201652 - DNA, 13 bp, Artificial Sequence
  Oligonucleotide for detection of SNP TSC0049593
rcatttcttcaaa

SEQ ID NO: 201653 - DNA, 13 bp, Artificial Sequence
  Oligonucleotide for detection of SNP TSC0049594
attgaataagata

SEQ ID NO: 201654 - DNA, 13 bp, Artificial Sequence
  Oligonucleotide for detection of SNP TSC0049594
tatcttattcaat

SEQ ID NO: 201655 - DNA, 13 bp, Artificial Sequence
  Oligonucleotide for detection of SNP TSC0049594
attgaagaagata

SEQ ID NO: 201656 - DNA, 13 bp, Artificial Sequence
  Oligonucleotide for detection of SNP TSC0049594
tatcttcttcaat

SEQ ID NO: 201657 - DNA, 13 bp, Artificial Sequence
  Oligonucleotide for detection of SNP TSC0049594
tgttttgtttaat

SEQ ID NO: 201658 - DNA, 13 bp, Artificial Sequence
  Oligonucleotide for detection of SNP TSC0049594
attaaacaaaaca

SEQ ID NO: 201659 - DNA, 13 bp, Artificial Sequence
  Oligonucleotide for detection of SNP TSC0049594
tgttttttttaat

SEQ ID NO: 201660 - DNA, 13 bp, Artificial Sequence
  Oligonucleotide for detection of SNP TSC0049594
attaaaaaaaaca

SEQ ID NO: 201661 - DNA, 13 bp, Artificial Sequence
  Oligonucleotide for detection of SNP TSC0007508
gttgtgggaaagy

SEQ ID NO: 201662 - DNA, 13 bp, Artificial Sequence
  Oligonucleotide for detection of SNP TSC0007508
rctttcccacaac

SEQ ID NO: 201663 - DNA, 13 bp, Artificial Sequence
  Oligonucleotide for detection of SNP TSC0007508
gttgtgagaaagy

SEQ ID NO: 201664 - DNA, 13 bp, Artificial Sequence
  Oligonucleotide for detection of SNP TSC0007508
rctttctcacaac

SEQ ID NO: 201665 - DNA, 13 bp, Artificial Sequence
  Oligonucleotide for detection of SNP TSC0049595
agtttttttatgt

SEQ ID NO: 201666 - DNA, 13 bp, Artificial Sequence
  Oligonucleotide for detection of SNP TSC0049595
acataaaaaaact

SEQ ID NO: 201667 - DNA, 13 bp, Artificial Sequence
  Oligonucleotide for detection of SNP TSC0049595
agttttgttatgt

SEQ ID NO: 201668 - DNA, 13 bp, Artificial Sequence
  Oligonucleotide for detection of SNP TSC0049595
acataacaaaact

SEQ ID NO: 201669 - DNA, 13 bp, Artificial Sequence
  Oligonucleotide for detection of SNP TSC0049595
atataagagaatt

SEQ ID NO: 201670 - DNA, 13 bp, Artificial Sequence
  Oligonucleotide for detection of SNP TSC0049595
aattctcttatat

SEQ ID NO: 201671 - DNA, 13 bp, Artificial Sequence
  Oligonucleotide for detection of SNP TSC0049595
atataatagaatt

SEQ ID NO: 201672 - DNA, 13 bp, Artificial Sequence
  Oligonucleotide for detection of SNP TSC0049595
aattctattatat

SEQ ID NO: 201673 - DNA, 13 bp, Artificial Sequence
  Oligonucleotide for detection of SNP TSC0049596
tgggtttgtttta

SEQ ID NO: 201674 - DNA, 13 bp, Artificial Sequence
  Oligonucleotide for detection of SNP TSC0049596
taaaacaaaccca

SEQ ID NO: 201675 - DNA, 13 bp, Artificial Sequence
  Oligonucleotide for detection of SNP TSC0049596
tgggttcgtttta

SEQ ID NO: 201676 - DNA, 13 bp, Artificial Sequence
  Oligonucleotide for detection of SNP TSC0049596
taaaacgaaccca

SEQ ID NO: 201677 - DNA, 13 bp, Artificial Sequence
  Oligonucleotide for detection of SNP TSC0049596
tgagatggattta

SEQ ID NO: 201678 - DNA, 13 bp, Artificial Sequence
  Oligonucleotide for detection of SNP TSC0049596
taaatccatctca

SEQ ID NO: 201679 - DNA, 13 bp, Artificial Sequence
  Oligonucleotide for detection of SNP TSC0049596
tgagatagattta

SEQ ID NO: 201680 - DNA, 13 bp, Artificial Sequence
  Oligonucleotide for detection of SNP TSC0049596
taaatctatctca

SEQ ID NO: 201681 - DNA, 13 bp, Artificial Sequence
  Oligonucleotide for detection of SNP TSC0049596
tgagacggattta

SEQ ID NO: 201682 - DNA, 13 bp, Artificial Sequence
  Oligonucleotide for detection of SNP TSC0049596
taaatccgtctca

SEQ ID NO: 201683 - DNA, 13 bp, Artificial Sequence
  Oligonucleotide for detection of SNP TSC0049597
taaaaggtaattt

SEQ ID NO: 201684 - DNA, 13 bp, Artificial Sequence
  Oligonucleotide for detection of SNP TSC0049597
aaattacctttta

SEQ ID NO: 201685 - DNA, 13 bp, Artificial Sequence
  Oligonucleotide for detection of SNP TSC0049597
taaaagataattt

SEQ ID NO: 201686 - DNA, 13 bp, Artificial Sequence
  Oligonucleotide for detection of SNP TSC0049597
aaattatctttta

SEQ ID NO: 201687 - DNA, 13 bp, Artificial Sequence
  Oligonucleotide for detection of SNP TSC0007816
ataagtggtaatt

SEQ ID NO: 201688 - DNA, 13 bp, Artificial Sequence
  Oligonucleotide for detection of SNP TSC0007816
aattaccacttat

SEQ ID NO: 201689 - DNA, 13 bp, Artificial Sequence
  Oligonucleotide for detection of SNP TSC0007816
ataagtagtaatt

SEQ ID NO: 201690 - DNA, 13 bp, Artificial Sequence
  Oligonucleotide for detection of SNP TSC0007816
aattactacttat

SEQ ID NO: 201691 - DNA, 13 bp, Artificial Sequence
  Oligonucleotide for detection of SNP TSC0049598
gtagttattaata

SEQ ID NO: 201692 - DNA, 13 bp, Artificial Sequence
  Oligonucleotide for detection of SNP TSC0049598
tattaataactac

SEQ ID NO: 201693 - DNA, 13 bp, Artificial Sequence
  Oligonucleotide for detection of SNP TSC0049598
gtagttgttaata

SEQ ID NO: 201694 - DNA, 13 bp, Artificial Sequence
  Oligonucleotide for detection of SNP TSC0049598
tattaacaactac

SEQ ID NO: 201695 - DNA, 13 bp, Artificial Sequence
  Oligonucleotide for detection of SNP TSC0049599
aaatttgtaatta

SEQ ID NO: 201696 - DNA, 13 bp, Artificial Sequence
  Oligonucleotide for detection of SNP TSC0049599
taattacaaattt

SEQ ID NO: 201697 - DNA, 13 bp, Artificial Sequence
  Oligonucleotide for detection of SNP TSC0049599
taattaaaggttt

SEQ ID NO: 201698 - DNA, 13 bp, Artificial Sequence
  Oligonucleotide for detection of SNP TSC0049599
aaacctttaatta

SEQ ID NO: 201699 - DNA, 13 bp, Artificial Sequence
  Oligonucleotide for detection of SNP TSC0049599
taattataggttt

SEQ ID NO: 201700 - DNA, 13 bp, Artificial Sequence
  Oligonucleotide for detection of SNP TSC0049599
aaacctataatta

SEQ ID NO: 201701 - DNA, 13 bp, Artificial Sequence
  Oligonucleotide for detection of SNP TSC0049600
tgtgtgtttttat

SEQ ID NO: 201702 - DNA, 13 bp, Artificial Sequence
  Oligonucleotide for detection of SNP TSC0049600
ataaaaacacaca

SEQ ID NO: 201703 - DNA, 13 bp, Artificial Sequence
  Oligonucleotide for detection of SNP TSC0049600
tgtgtggttttat

SEQ ID NO: 201704 - DNA, 13 bp, Artificial Sequence
  Oligonucleotide for detection of SNP TSC0049600
ataaaaccacaca

SEQ ID NO: 201705 - DNA, 13 bp, Artificial Sequence
  Oligonucleotide for detection of SNP TSC0049600
tgcgtgtttttat

SEQ ID NO: 201706 - DNA, 13 bp, Artificial Sequence
  Oligonucleotide for detection of SNP TSC0049600
ataaaaacacgca

SEQ ID NO: 201707 - DNA, 13 bp, Artificial Sequence
  Oligonucleotide for detection of SNP TSC0049600
tgcgtggttttat

SEQ ID NO: 201708 - DNA, 13 bp, Artificial Sequence
  Oligonucleotide for detection of SNP TSC0049600
ataaaaccacgca

SEQ ID NO: 201709 - DNA, 13 bp, Artificial Sequence
  Oligonucleotide for detection of SNP TSC0049600
atgaagatatgta

SEQ ID NO: 201710 - DNA, 13 bp, Artificial Sequence
  Oligonucleotide for detection of SNP TSC0049600
tacatatcttcat

SEQ ID NO: 201711 - DNA, 13 bp, Artificial Sequence
  Oligonucleotide for detection of SNP TSC0049600
atgaagttatgta

SEQ ID NO: 201712 - DNA, 13 bp, Artificial Sequence
  Oligonucleotide for detection of SNP TSC0049600
tacataacttcat

SEQ ID NO: 201713 - DNA, 13 bp, Artificial Sequence
  Oligonucleotide for detection of SNP TSC0049600
atgaagatacgta

SEQ ID NO: 201714 - DNA, 13 bp, Artificial Sequence
  Oligonucleotide for detection of SNP TSC0049600
tacgtatcttcat

SEQ ID NO: 201715 - DNA, 13 bp, Artificial Sequence
  Oligonucleotide for detection of SNP TSC0049600
atgaagttacgta

SEQ ID NO: 201716 - DNA, 13 bp, Artificial Sequence
  Oligonucleotide for detection of SNP TSC0049600
tacgtaacttcat

SEQ ID NO: 201717 - DNA, 13 bp, Artificial Sequence
  Oligonucleotide for detection of SNP TSC0007599
gaggattgtttaa

SEQ ID NO: 201718 - DNA, 13 bp, Artificial Sequence
  Oligonucleotide for detection of SNP TSC0007599
ttaaacaatcctc

SEQ ID NO: 201719 - DNA, 13 bp, Artificial Sequence
  Oligonucleotide for detection of SNP TSC0007599
gaggatggtttaa

SEQ ID NO: 201720 - DNA, 13 bp, Artificial Sequence
  Oligonucleotide for detection of SNP TSC0007599
ttaaaccatcctc

SEQ ID NO: 201721 - DNA, 13 bp, Artificial Sequence
  Oligonucleotide for detection of SNP TSC0010747
ttttgggagtttt

SEQ ID NO: 201722 - DNA, 13 bp, Artificial Sequence
  Oligonucleotide for detection of SNP TSC0010747
aaaactcccaaaa

SEQ ID NO: 201723 - DNA, 13 bp, Artificial Sequence
  Oligonucleotide for detection of SNP TSC0010747
ttttggaagtttt

SEQ ID NO: 201724 - DNA, 13 bp, Artificial Sequence
  Oligonucleotide for detection of SNP TSC0010747
aaaacttccaaaa

SEQ ID NO: 201725 - DNA, 13 bp, Artificial Sequence
  Oligonucleotide for detection of SNP TSC0010748
ttataaataattt

SEQ ID NO: 201726 - DNA, 13 bp, Artificial Sequence
  Oligonucleotide for detection of SNP TSC0010748
aaattatttataa

SEQ ID NO: 201727 - DNA, 13 bp, Artificial Sequence
  Oligonucleotide for detection of SNP TSC0010748
ttataagtaattt

SEQ ID NO: 201728 - DNA, 13 bp, Artificial Sequence
  Oligonucleotide for detection of SNP TSC0010748
aaattacttataa

SEQ ID NO: 201729 - DNA, 13 bp, Artificial Sequence
  Oligonucleotide for detection of SNP TSC0049602
gatgttaatattt

SEQ ID NO: 201730 - DNA, 13 bp, Artificial Sequence
  Oligonucleotide for detection of SNP TSC0049602
aaatattaacatc

SEQ ID NO: 201731 - DNA, 13 bp, Artificial Sequence
  Oligonucleotide for detection of SNP TSC0049602
gatgttgatattt

SEQ ID NO: 201732 - DNA, 13 bp, Artificial Sequence
  Oligonucleotide for detection of SNP TSC0049602
aaatatcaacatc

SEQ ID NO: 201733 - DNA, 13 bp, Artificial Sequence
  Oligonucleotide for detection of SNP TSC0049603
ttattgttattta

SEQ ID NO: 201734 - DNA, 13 bp, Artificial Sequence
  Oligonucleotide for detection of SNP TSC0049603
taaataacaataa

SEQ ID NO: 201735 - DNA, 13 bp, Artificial Sequence
  Oligonucleotide for detection of SNP TSC0049603
taaatgttagtga

SEQ ID NO: 201736 - DNA, 13 bp, Artificial Sequence
  Oligonucleotide for detection of SNP TSC0049603
tcactaacattta

SEQ ID NO: 201737 - DNA, 13 bp, Artificial Sequence
  Oligonucleotide for detection of SNP TSC0010621
ttttataggggaa

SEQ ID NO: 201738 - DNA, 13 bp, Artificial Sequence
  Oligonucleotide for detection of SNP TSC0010621
ttcccctataaaa

SEQ ID NO: 201739 - DNA, 13 bp, Artificial Sequence
  Oligonucleotide for detection of SNP TSC0010621
ttttatgggggaa

SEQ ID NO: 201740 - DNA, 13 bp, Artificial Sequence
  Oligonucleotide for detection of SNP TSC0010621
ttcccccataaaa

SEQ ID NO: 201741 - DNA, 13 bp, Artificial Sequence
  Oligonucleotide for detection of SNP TSC0010621
ttttacgggggaa

SEQ ID NO: 201742 - DNA, 13 bp, Artificial Sequence
  Oligonucleotide for detection of SNP TSC0010621
ttcccccgtaaaa

SEQ ID NO: 201743 - DNA, 13 bp, Artificial Sequence
  Oligonucleotide for detection of SNP TSC0049608
tgatttattttat

SEQ ID NO: 201744 - DNA, 13 bp, Artificial Sequence
  Oligonucleotide for detection of SNP TSC0049608
ataaaataaatca

SEQ ID NO: 201745 - DNA, 13 bp, Artificial Sequence
  Oligonucleotide for detection of SNP TSC0049609
aaataagataaaa

SEQ ID NO: 201746 - DNA, 13 bp, Artificial Sequence
  Oligonucleotide for detection of SNP TSC0049609
ttttatcttattt

SEQ ID NO: 201747 - DNA, 13 bp, Artificial Sequence
  Oligonucleotide for detection of SNP TSC0008876
aagaggaaaatty

SEQ ID NO: 201748 - DNA, 13 bp, Artificial Sequence
  Oligonucleotide for detection of SNP TSC0008876
raattttcctctt

SEQ ID NO: 201749 - DNA, 13 bp, Artificial Sequence
  Oligonucleotide for detection of SNP TSC0008876
aagagggaaatty

SEQ ID NO: 201750 - DNA, 13 bp, Artificial Sequence
  Oligonucleotide for detection of SNP TSC0008876
raatttccctctt

SEQ ID NO: 201751 - DNA, 13 bp, Artificial Sequence
  Oligonucleotide for detection of SNP TSC0008877
aatattgttttag

SEQ ID NO: 201752 - DNA, 13 bp, Artificial Sequence
  Oligonucleotide for detection of SNP TSC0008877
ctaaaacaatatt

SEQ ID NO: 201753 - DNA, 13 bp, Artificial Sequence
  Oligonucleotide for detection of SNP TSC0008877
aatattattttag

SEQ ID NO: 201754 - DNA, 13 bp, Artificial Sequence
  Oligonucleotide for detection of SNP TSC0008877
ctaaaataatatt

SEQ ID NO: 201755 - DNA, 13 bp, Artificial Sequence
  Oligonucleotide for detection of SNP TSC0049613
tagaattgaatay

SEQ ID NO: 201756 - DNA, 13 bp, Artificial Sequence
  Oligonucleotide for detection of SNP TSC0049613
rtattcaattcta

SEQ ID NO: 201757 - DNA, 13 bp, Artificial Sequence
  Oligonucleotide for detection of SNP TSC0049613
tagaatcgaatay

SEQ ID NO: 201758 - DNA, 13 bp, Artificial Sequence
  Oligonucleotide for detection of SNP TSC0049613
rtattcgattcta

SEQ ID NO: 201759 - DNA, 13 bp, Artificial Sequence
  Oligonucleotide for detection of SNP TSC0049613
gtgtttgatttta

SEQ ID NO: 201760 - DNA, 13 bp, Artificial Sequence
  Oligonucleotide for detection of SNP TSC0049613
taaaatcaaacac

SEQ ID NO: 201761 - DNA, 13 bp, Artificial Sequence
  Oligonucleotide for detection of SNP TSC0049613
gtgtttaatttta

SEQ ID NO: 201762 - DNA, 13 bp, Artificial Sequence
  Oligonucleotide for detection of SNP TSC0049613
taaaattaaacac

SEQ ID NO: 201763 - DNA, 13 bp, Artificial Sequence
  Oligonucleotide for detection of SNP TSC0049613
gtgttcgatttta

SEQ ID NO: 201764 - DNA, 13 bp, Artificial Sequence
  Oligonucleotide for detection of SNP TSC0049613
taaaatcgaacac

SEQ ID NO: 201765 - DNA, 13 bp, Artificial Sequence
  Oligonucleotide for detection of SNP TSC0049614
agattttaaagtt

SEQ ID NO: 201766 - DNA, 13 bp, Artificial Sequence
  Oligonucleotide for detection of SNP TSC0049614
aactttaaaatct

SEQ ID NO: 201767 - DNA, 13 bp, Artificial Sequence
  Oligonucleotide for detection of SNP TSC0049614
agatttgaaagtt

SEQ ID NO: 201768 - DNA, 13 bp, Artificial Sequence
  Oligonucleotide for detection of SNP TSC0049614
aactttcaaatct

SEQ ID NO: 201769 - DNA, 13 bp, Artificial Sequence
  Oligonucleotide for detection of SNP TSC0049614
agattcgaaagtt

SEQ ID NO: 201770 - DNA, 13 bp, Artificial Sequence
  Oligonucleotide for detection of SNP TSC0049614
aactttcgaatct

SEQ ID NO: 201771 - DNA, 13 bp, Artificial Sequence
  Oligonucleotide for detection of SNP TSC0049614
agttttggggttt

SEQ ID NO: 201772 - DNA, 13 bp, Artificial Sequence
  Oligonucleotide for detection of SNP TSC0049614
aaaccccaaaact

SEQ ID NO: 201773 - DNA, 13 bp, Artificial Sequence
  Oligonucleotide for detection of SNP TSC0049614
agtttttgggttt

SEQ ID NO: 201774 - DNA, 13 bp, Artificial Sequence
  Oligonucleotide for detection of SNP TSC0049614
aaacccaaaaact

SEQ ID NO: 201775 - DNA, 13 bp, Artificial Sequence
  Oligonucleotide for detection of SNP TSC0049614
agttttcgggttt

SEQ ID NO: 201776 - DNA, 13 bp, Artificial Sequence
  Oligonucleotide for detection of SNP TSC0049614
aaacccgaaaact

SEQ ID NO: 201777 - DNA, 13 bp, Artificial Sequence
  Oligonucleotide for detection of SNP TSC0049615
atagattataaaa

SEQ ID NO: 201778 - DNA, 13 bp, Artificial Sequence
  Oligonucleotide for detection of SNP TSC0049615
ttttataatctat

SEQ ID NO: 201779 - DNA, 13 bp, Artificial Sequence
  Oligonucleotide for detection of SNP TSC0049615
ttttgtaatttgt

SEQ ID NO: 201780 - DNA, 13 bp, Artificial Sequence
  Oligonucleotide for detection of SNP TSC0049615
acaaattacaaaa

SEQ ID NO: 201781 - DNA, 13 bp, Artificial Sequence
  Oligonucleotide for detection of SNP TSC0049615
ttttgttatttgt

SEQ ID NO: 201782 - DNA, 13 bp, Artificial Sequence
  Oligonucleotide for detection of SNP TSC0049615
acaaataacaaaa

SEQ ID NO: 201783 - DNA, 13 bp, Artificial Sequence
  Oligonucleotide for detection of SNP TSC0049616
aaaaatattgttt

SEQ ID NO: 201784 - DNA, 13 bp, Artificial Sequence
  Oligonucleotide for detection of SNP TSC0049616
aaacaatattttt

SEQ ID NO: 201785 - DNA, 13 bp, Artificial Sequence
  Oligonucleotide for detection of SNP TSC0049616
aaaaatgttgttt

SEQ ID NO: 201786 - DNA, 13 bp, Artificial Sequence
  Oligonucleotide for detection of SNP TSC0049616
aaacaacattttt

SEQ ID NO: 201787 - DNA, 13 bp, Artificial Sequence
  Oligonucleotide for detection of SNP TSC0049617
aataaagaaaaat

SEQ ID NO: 201788 - DNA, 13 bp, Artificial Sequence
  Oligonucleotide for detection of SNP TSC0049617
atttttctttatt

SEQ ID NO: 201789 - DNA, 13 bp, Artificial Sequence
  Oligonucleotide for detection of SNP TSC0049618
ataggaggatggg

SEQ ID NO: 201790 - DNA, 13 bp, Artificial Sequence
  Oligonucleotide for detection of SNP TSC0049618
cccatcctcctat

SEQ ID NO: 201791 - DNA, 13 bp, Artificial Sequence
  Oligonucleotide for detection of SNP TSC0049618
ataggaagatggg

SEQ ID NO: 201792 - DNA, 13 bp, Artificial Sequence
  Oligonucleotide for detection of SNP TSC0049618
cccatcttcctat

SEQ ID NO: 201793 - DNA, 13 bp, Artificial Sequence
  Oligonucleotide for detection of SNP TSC0005262
atagaagttgtga

SEQ ID NO: 201794 - DNA, 13 bp, Artificial Sequence
  Oligonucleotide for detection of SNP TSC0005262
tcacaacttctat

SEQ ID NO: 201795 - DNA, 13 bp, Artificial Sequence
  Oligonucleotide for detection of SNP TSC0005263
taaaagagtttta

SEQ ID NO: 201796 - DNA, 13 bp, Artificial Sequence
  Oligonucleotide for detection of SNP TSC0005263
taaaactctttta

SEQ ID NO: 201797 - DNA, 13 bp, Artificial Sequence
  Oligonucleotide for detection of SNP TSC0005263
taaaagggtttta

SEQ ID NO: 201798 - DNA, 13 bp, Artificial Sequence
  Oligonucleotide for detection of SNP TSC0005263
taaaaccctttta

SEQ ID NO: 201799 - DNA, 13 bp, Artificial Sequence
  Oligonucleotide for detection of SNP TSC0049621
aatagagggtgtt

SEQ ID NO: 201800 - DNA, 13 bp, Artificial Sequence
  Oligonucleotide for detection of SNP TSC0049621
aacaccctctatt

SEQ ID NO: 201801 - DNA, 13 bp, Artificial Sequence
  Oligonucleotide for detection of SNP TSC0049621
aatagaaggtgtt

SEQ ID NO: 201802 - DNA, 13 bp, Artificial Sequence
  Oligonucleotide for detection of SNP TSC0049621
aacaccttctatt

SEQ ID NO: 201803 - DNA, 13 bp, Artificial Sequence
  Oligonucleotide for detection of SNP TSC0049622
agtggtattagay

SEQ ID NO: 201804 - DNA, 13 bp, Artificial Sequence
  Oligonucleotide for detection of SNP TSC0049622
rtctaataccact

SEQ ID NO: 201805 - DNA, 13 bp, Artificial Sequence
  Oligonucleotide for detection of SNP TSC0049622
agtggttttagay

SEQ ID NO: 201806 - DNA, 13 bp, Artificial Sequence
  Oligonucleotide for detection of SNP TSC0049622
rtctaaaaccact

SEQ ID NO: 201807 - DNA, 13 bp, Artificial Sequence
  Oligonucleotide for detection of SNP TSC0049622
gtttagtattatt

SEQ ID NO: 201808 - DNA, 13 bp, Artificial Sequence
  Oligonucleotide for detection of SNP TSC0049622
aataatactaaac

SEQ ID NO: 201809 - DNA, 13 bp, Artificial Sequence
  Oligonucleotide for detection of SNP TSC0049622
gtttaggattatt

SEQ ID NO: 201810 - DNA, 13 bp, Artificial Sequence
  Oligonucleotide for detection of SNP TSC0049622
aataatcctaaac

SEQ ID NO: 201811 - DNA, 13 bp, Artificial Sequence
  Oligonucleotide for detection of SNP TSC0009412
gatatgatttgga

SEQ ID NO: 201812 - DNA, 13 bp, Artificial Sequence
  Oligonucleotide for detection of SNP TSC0009412
tccaaatcatatc

SEQ ID NO: 201813 - DNA, 13 bp, Artificial Sequence
  Oligonucleotide for detection of SNP TSC0009412
gatatggtttgga

SEQ ID NO: 201814 - DNA, 13 bp, Artificial Sequence
  Oligonucleotide for detection of SNP TSC0009412
tccaaaccatatc

SEQ ID NO: 201815 - DNA, 13 bp, Artificial Sequence
  Oligonucleotide for detection of SNP TSC0009413
attttattttgaa

SEQ ID NO: 201816 - DNA, 13 bp, Artificial Sequence
  Oligonucleotide for detection of SNP TSC0009413
ttcaaaataaaat

SEQ ID NO: 201817 - DNA, 13 bp, Artificial Sequence
  Oligonucleotide for detection of SNP TSC0009413
attttagtttgaa

SEQ ID NO: 201818 - DNA, 13 bp, Artificial Sequence
  Oligonucleotide for detection of SNP TSC0009413
ttcaaactaaaat

SEQ ID NO: 201819 - DNA, 13 bp, Artificial Sequence
  Oligonucleotide for detection of SNP TSC0009413
tttaaaatgagat

SEQ ID NO: 201820 - DNA, 13 bp, Artificial Sequence
  Oligonucleotide for detection of SNP TSC0009413
atctcattttaaa

SEQ ID NO: 201821 - DNA, 13 bp, Artificial Sequence
  Oligonucleotide for detection of SNP TSC0009413
tttaaattgagat

SEQ ID NO: 201822 - DNA, 13 bp, Artificial Sequence
  Oligonucleotide for detection of SNP TSC0009413
atctcaatttaaa

SEQ ID NO: 201823 - DNA, 13 bp, Artificial Sequence
  Oligonucleotide for detection of SNP TSC0009414
gtattagatttty

SEQ ID NO: 201824 - DNA, 13 bp, Artificial Sequence
  Oligonucleotide for detection of SNP TSC0009414
raaaatctaatac

SEQ ID NO: 201825 - DNA, 13 bp, Artificial Sequence
  Oligonucleotide for detection of SNP TSC0009414
gagagtgtgatgy

SEQ ID NO: 201826 - DNA, 13 bp, Artificial Sequence
  Oligonucleotide for detection of SNP TSC0009414
rcatcacactctc

SEQ ID NO: 201827 - DNA, 13 bp, Artificial Sequence
  Oligonucleotide for detection of SNP TSC0009414
gagagtttgatgy

SEQ ID NO: 201828 - DNA, 13 bp, Artificial Sequence
  Oligonucleotide for detection of SNP TSC0009414
rcatcaaactctc

SEQ ID NO: 201829 - DNA, 13 bp, Artificial Sequence
  Oligonucleotide for detection of SNP TSC0049624
tgtttgggttgtt

SEQ ID NO: 201830 - DNA, 13 bp, Artificial Sequence
  Oligonucleotide for detection of SNP TSC0049624
aacaacccaaaca

SEQ ID NO: 201831 - DNA, 13 bp, Artificial Sequence
  Oligonucleotide for detection of SNP TSC0049624
tgtttgagttgtt

SEQ ID NO: 201832 - DNA, 13 bp, Artificial Sequence
  Oligonucleotide for detection of SNP TSC0049624
aacaactcaaaca

SEQ ID NO: 201833 - DNA, 13 bp, Artificial Sequence
  Oligonucleotide for detection of SNP TSC0049625
aaagatatttttg

SEQ ID NO: 201834 - DNA, 13 bp, Artificial Sequence
  Oligonucleotide for detection of SNP TSC0049625
caaaaatatcttt

SEQ ID NO: 201835 - DNA, 13 bp, Artificial Sequence
  Oligonucleotide for detection of SNP TSC0049625
aaagatgtttttg

SEQ ID NO: 201836 - DNA, 13 bp, Artificial Sequence
  Oligonucleotide for detection of SNP TSC0049625
caaaaacatcttt

SEQ ID NO: 201837 - DNA, 13 bp, Artificial Sequence
  Oligonucleotide for detection of SNP TSC0049625
aaagacgtttttg

SEQ ID NO: 201838 - DNA, 13 bp, Artificial Sequence
  Oligonucleotide for detection of SNP TSC0049625
caaaaacgtcttt

SEQ ID NO: 201839 - DNA, 13 bp, Artificial Sequence
  Oligonucleotide for detection of SNP TSC0049625
tagaaatgttttt

SEQ ID NO: 201840 - DNA, 13 bp, Artificial Sequence
  Oligonucleotide for detection of SNP TSC0049625
aaaaacatttcta

SEQ ID NO: 201841 - DNA, 13 bp, Artificial Sequence
  Oligonucleotide for detection of SNP TSC0049625
tagaaacgttttt

SEQ ID NO: 201842 - DNA, 13 bp, Artificial Sequence
  Oligonucleotide for detection of SNP TSC0049625
aaaaacgtttcta

SEQ ID NO: 201843 - DNA, 13 bp, Artificial Sequence
  Oligonucleotide for detection of SNP TSC0049626
tggaggaagataa

SEQ ID NO: 201844 - DNA, 13 bp, Artificial Sequence
  Oligonucleotide for detection of SNP TSC0049626
ttatcttcctcca

SEQ ID NO: 201845 - DNA, 13 bp, Artificial Sequence
  Oligonucleotide for detection of SNP TSC0049626
tggaggtagataa

SEQ ID NO: 201846 - DNA, 13 bp, Artificial Sequence
  Oligonucleotide for detection of SNP TSC0049626
ttatctacctcca

SEQ ID NO: 201847 - DNA, 13 bp, Artificial Sequence
  Oligonucleotide for detection of SNP TSC0049628
ttggtttttttgg

SEQ ID NO: 201848 - DNA, 13 bp, Artificial Sequence
  Oligonucleotide for detection of SNP TSC0049628
ccaaaaaaaccaa

SEQ ID NO: 201849 - DNA, 13 bp, Artificial Sequence
  Oligonucleotide for detection of SNP TSC0049628
ttaaaatagttag

SEQ ID NO: 201850 - DNA, 13 bp, Artificial Sequence
  Oligonucleotide for detection of SNP TSC0049628
ctaactattttaa

SEQ ID NO: 201851 - DNA, 13 bp, Artificial Sequence
  Oligonucleotide for detection of SNP TSC0049628
ttaaaagagttag

SEQ ID NO: 201852 - DNA, 13 bp, Artificial Sequence
  Oligonucleotide for detection of SNP TSC0049628
ctaactcttttaa

SEQ ID NO: 201853 - DNA, 13 bp, Artificial Sequence
  Oligonucleotide for detection of SNP TSC0049629
aaataatatagga

SEQ ID NO: 201854 - DNA, 13 bp, Artificial Sequence
  Oligonucleotide for detection of SNP TSC0049629
tcctatattattt

SEQ ID NO: 201855 - DNA, 13 bp, Artificial Sequence
  Oligonucleotide for detection of SNP TSC0049629
aaataagatagga

SEQ ID NO: 201856 - DNA, 13 bp, Artificial Sequence
  Oligonucleotide for detection of SNP TSC0049629
tcctatcttattt

SEQ ID NO: 201857 - DNA, 13 bp, Artificial Sequence
  Oligonucleotide for detection of SNP TSC0006468
taattgagtgatg

SEQ ID NO: 201858 - DNA, 13 bp, Artificial Sequence
  Oligonucleotide for detection of SNP TSC0006468
catcactcaatta

SEQ ID NO: 201859 - DNA, 13 bp, Artificial Sequence
  Oligonucleotide for detection of SNP TSC0006468
taattgggtgatg

SEQ ID NO: 201860 - DNA, 13 bp, Artificial Sequence
  Oligonucleotide for detection of SNP TSC0006468
catcacccaatta

SEQ ID NO: 201861 - DNA, 13 bp, Artificial Sequence
  Oligonucleotide for detection of SNP TSC0049630
gaaagggattttg

SEQ ID NO: 201862 - DNA, 13 bp, Artificial Sequence
  Oligonucleotide for detection of SNP TSC0049630
caaaatccctttc

SEQ ID NO: 201863 - DNA, 13 bp, Artificial Sequence
  Oligonucleotide for detection of SNP TSC0049630
gaaaggaattttg

SEQ ID NO: 201864 - DNA, 13 bp, Artificial Sequence
  Oligonucleotide for detection of SNP TSC0049630
caaaattcctttc

SEQ ID NO: 201865 - DNA, 13 bp, Artificial Sequence
  Oligonucleotide for detection of SNP TSC0049632
attttattatgag

SEQ ID NO: 201866 - DNA, 13 bp, Artificial Sequence
  Oligonucleotide for detection of SNP TSC0049632
ctcataataaaat

SEQ ID NO: 201867 - DNA, 13 bp, Artificial Sequence
  Oligonucleotide for detection of SNP TSC0049632
tttatgttggagt

SEQ ID NO: 201868 - DNA, 13 bp, Artificial Sequence
  Oligonucleotide for detection of SNP TSC0049632
actccaacataaa

SEQ ID NO: 201869 - DNA, 13 bp, Artificial Sequence
  Oligonucleotide for detection of SNP TSC0049632
tttatggtggagt

SEQ ID NO: 201870 - DNA, 13 bp, Artificial Sequence
  Oligonucleotide for detection of SNP TSC0049632
actccaccataaa

SEQ ID NO: 201871 - DNA, 13 bp, Artificial Sequence
  Oligonucleotide for detection of SNP TSC0049633
tttggttgttttt

SEQ ID NO: 201872 - DNA, 13 bp, Artificial Sequence
  Oligonucleotide for detection of SNP TSC0049633
aaaaacaaccaaa

SEQ ID NO: 201873 - DNA, 13 bp, Artificial Sequence
  Oligonucleotide for detection of SNP TSC0049633
tttggtcgttttt

SEQ ID NO: 201874 - DNA, 13 bp, Artificial Sequence
  Oligonucleotide for detection of SNP TSC0049633
aaaaacgaccaaa

SEQ ID NO: 201875 - DNA, 13 bp, Artificial Sequence
  Oligonucleotide for detection of SNP TSC0049633
agggatggttaaa

SEQ ID NO: 201876 - DNA, 13 bp, Artificial Sequence
  Oligonucleotide for detection of SNP TSC0049633
tttaaccatccct

SEQ ID NO: 201877 - DNA, 13 bp, Artificial Sequence
  Oligonucleotide for detection of SNP TSC0049633
agggatagttaaa

SEQ ID NO: 201878 - DNA, 13 bp, Artificial Sequence
  Oligonucleotide for detection of SNP TSC0049633
tttaactatccct

SEQ ID NO: 201879 - DNA, 13 bp, Artificial Sequence
  Oligonucleotide for detection of SNP TSC0049633
agggacggttaaa

SEQ ID NO: 201880 - DNA, 13 bp, Artificial Sequence
  Oligonucleotide for detection of SNP TSC0049633
tttaaccgtccct

SEQ ID NO: 201881 - DNA, 13 bp, Artificial Sequence
  Oligonucleotide for detection of SNP TSC0010471
gttgttaaggttg

SEQ ID NO: 201882 - DNA, 13 bp, Artificial Sequence
  Oligonucleotide for detection of SNP TSC0010471
caaccttaacaac

SEQ ID NO: 201883 - DNA, 13 bp, Artificial Sequence
  Oligonucleotide for detection of SNP TSC0010471
tagttttggtaay

SEQ ID NO: 201884 - DNA, 13 bp, Artificial Sequence
  Oligonucleotide for detection of SNP TSC0010471
rttaccaaaacta

SEQ ID NO: 201885 - DNA, 13 bp, Artificial Sequence
  Oligonucleotide for detection of SNP TSC0010472
gatttaaagtaaa

SEQ ID NO: 201886 - DNA, 13 bp, Artificial Sequence
  Oligonucleotide for detection of SNP TSC0010472
tttactttaaatc

SEQ ID NO: 201887 - DNA, 13 bp, Artificial Sequence
  Oligonucleotide for detection of SNP TSC0010472
gatttagagtaaa

SEQ ID NO: 201888 - DNA, 13 bp, Artificial Sequence
  Oligonucleotide for detection of SNP TSC0010472
tttactctaaatc

SEQ ID NO: 201889 - DNA, 13 bp, Artificial Sequence
  Oligonucleotide for detection of SNP TSC0049635
gttttagaaaaga

SEQ ID NO: 201890 - DNA, 13 bp, Artificial Sequence
  Oligonucleotide for detection of SNP TSC0049635
tcttttctaaaac

SEQ ID NO: 201891 - DNA, 13 bp, Artificial Sequence
  Oligonucleotide for detection of SNP TSC0049635
gttttaaaaaaga

SEQ ID NO: 201892 - DNA, 13 bp, Artificial Sequence
  Oligonucleotide for detection of SNP TSC0049635
tcttttttaaaac

SEQ ID NO: 201893 - DNA, 13 bp, Artificial Sequence
  Oligonucleotide for detection of SNP TSC0049636
atttgaatttggg

SEQ ID NO: 201894 - DNA, 13 bp, Artificial Sequence
  Oligonucleotide for detection of SNP TSC0049636
cccaaattcaaat

SEQ ID NO: 201895 - DNA, 13 bp, Artificial Sequence
  Oligonucleotide for detection of SNP TSC0049636
atttgagtttggg

SEQ ID NO: 201896 - DNA, 13 bp, Artificial Sequence
  Oligonucleotide for detection of SNP TSC0049636
cccaaactcaaat

SEQ ID NO: 201897 - DNA, 13 bp, Artificial Sequence
  Oligonucleotide for detection of SNP TSC0049636
atttgaattcggg

SEQ ID NO: 201898 - DNA, 13 bp, Artificial Sequence
  Oligonucleotide for detection of SNP TSC0049636
cccgaattcaaat

SEQ ID NO: 201899 - DNA, 13 bp, Artificial Sequence
  Oligonucleotide for detection of SNP TSC0049636
atttgagttcggg

SEQ ID NO: 201900 - DNA, 13 bp, Artificial Sequence
  Oligonucleotide for detection of SNP TSC0049636
cccgaactcaaat

SEQ ID NO: 201901 - DNA, 13 bp, Artificial Sequence
  Oligonucleotide for detection of SNP TSC0049638
ttattaattgtay

SEQ ID NO: 201902 - DNA, 13 bp, Artificial Sequence
  Oligonucleotide for detection of SNP TSC0049638
rtacaattaataa

SEQ ID NO: 201903 - DNA, 13 bp, Artificial Sequence
  Oligonucleotide for detection of SNP TSC0049638
ttattagttgtay

SEQ ID NO: 201904 - DNA, 13 bp, Artificial Sequence
  Oligonucleotide for detection of SNP TSC0049638
rtacaactaataa

SEQ ID NO: 201905 - DNA, 13 bp, Artificial Sequence
  Oligonucleotide for detection of SNP TSC0010479
tatttttgattta

SEQ ID NO: 201906 - DNA, 13 bp, Artificial Sequence
  Oligonucleotide for detection of SNP TSC0010479
taaatcaaaaata

SEQ ID NO: 201907 - DNA, 13 bp, Artificial Sequence
  Oligonucleotide for detection of SNP TSC0010479
tattttcgattta

SEQ ID NO: 201908 - DNA, 13 bp, Artificial Sequence
  Oligonucleotide for detection of SNP TSC0010479
taaatcgaaaata

SEQ ID NO: 201909 - DNA, 13 bp, Artificial Sequence
  Oligonucleotide for detection of SNP TSC0010479
taaattgagaatg

SEQ ID NO: 201910 - DNA, 13 bp, Artificial Sequence
  Oligonucleotide for detection of SNP TSC0010479
cattctcaattta

SEQ ID NO: 201911 - DNA, 13 bp, Artificial Sequence
  Oligonucleotide for detection of SNP TSC0010479
taaattaagaatg

SEQ ID NO: 201912 - DNA, 13 bp, Artificial Sequence
  Oligonucleotide for detection of SNP TSC0010479
cattcttaattta

SEQ ID NO: 201913 - DNA, 13 bp, Artificial Sequence
  Oligonucleotide for detection of SNP TSC0010479
taaatcgagaatg

SEQ ID NO: 201914 - DNA, 13 bp, Artificial Sequence
  Oligonucleotide for detection of SNP TSC0010479
cattctcgattta

SEQ ID NO: 201915 - DNA, 13 bp, Artificial Sequence
  Oligonucleotide for detection of SNP TSC0010480
agggagggatttg

SEQ ID NO: 201916 - DNA, 13 bp, Artificial Sequence
  Oligonucleotide for detection of SNP TSC0010480
caaatccctccct

SEQ ID NO: 201917 - DNA, 13 bp, Artificial Sequence
  Oligonucleotide for detection of SNP TSC0010480
agggagagatttg

SEQ ID NO: 201918 - DNA, 13 bp, Artificial Sequence
  Oligonucleotide for detection of SNP TSC0010480
caaatctctccct

SEQ ID NO: 201919 - DNA, 13 bp, Artificial Sequence
  Oligonucleotide for detection of SNP TSC0049639
tagatatattaaa

SEQ ID NO: 201920 - DNA, 13 bp, Artificial Sequence
  Oligonucleotide for detection of SNP TSC0049639
tttaatatatcta

SEQ ID NO: 201921 - DNA, 13 bp, Artificial Sequence
  Oligonucleotide for detection of SNP TSC0049639
tagatagattaaa

SEQ ID NO: 201922 - DNA, 13 bp, Artificial Sequence
  Oligonucleotide for detection of SNP TSC0049639
tttaatctatcta

SEQ ID NO: 201923 - DNA, 13 bp, Artificial Sequence
  Oligonucleotide for detection of SNP TSC0049639
tttaatttattta

SEQ ID NO: 201924 - DNA, 13 bp, Artificial Sequence
  Oligonucleotide for detection of SNP TSC0049639
taaataaattaaa

SEQ ID NO: 201925 - DNA, 13 bp, Artificial Sequence
  Oligonucleotide for detection of SNP TSC0049640
ggaatgaataagg

SEQ ID NO: 201926 - DNA, 13 bp, Artificial Sequence
  Oligonucleotide for detection of SNP TSC0049640
ccttattcattcc

SEQ ID NO: 201927 - DNA, 13 bp, Artificial Sequence
  Oligonucleotide for detection of SNP TSC0049640
ggaatggataagg

SEQ ID NO: 201928 - DNA, 13 bp, Artificial Sequence
  Oligonucleotide for detection of SNP TSC0049640
ccttatccattcc

SEQ ID NO: 201929 - DNA, 13 bp, Artificial Sequence
  Oligonucleotide for detection of SNP TSC0049641
gaagggtgaatta

SEQ ID NO: 201930 - DNA, 13 bp, Artificial Sequence
  Oligonucleotide for detection of SNP TSC0049641
taattcacccttc

SEQ ID NO: 201931 - DNA, 13 bp, Artificial Sequence
  Oligonucleotide for detection of SNP TSC0049641
gaagggggaatta

SEQ ID NO: 201932 - DNA, 13 bp, Artificial Sequence
  Oligonucleotide for detection of SNP TSC0049641
taattcccccttc

SEQ ID NO: 201933 - DNA, 13 bp, Artificial Sequence
  Oligonucleotide for detection of SNP TSC0008811
gaagagtggggtg

SEQ ID NO: 201934 - DNA, 13 bp, Artificial Sequence
  Oligonucleotide for detection of SNP TSC0008811
caccccactcttc

SEQ ID NO: 201935 - DNA, 13 bp, Artificial Sequence
  Oligonucleotide for detection of SNP TSC0008811
gaagagcggggtg

SEQ ID NO: 201936 - DNA, 13 bp, Artificial Sequence
  Oligonucleotide for detection of SNP TSC0008811
caccccgctcttc

SEQ ID NO: 201937 - DNA, 13 bp, Artificial Sequence
  Oligonucleotide for detection of SNP TSC0008811
gaagagtggggcg

SEQ ID NO: 201938 - DNA, 13 bp, Artificial Sequence
  Oligonucleotide for detection of SNP TSC0008811
cgccccactcttc

SEQ ID NO: 201939 - DNA, 13 bp, Artificial Sequence
  Oligonucleotide for detection of SNP TSC0008811
gaagagcggggcg

SEQ ID NO: 201940 - DNA, 13 bp, Artificial Sequence
  Oligonucleotide for detection of SNP TSC0008811
cgccccgctcttc

SEQ ID NO: 201941 - DNA, 13 bp, Artificial Sequence
  Oligonucleotide for detection of SNP TSC0008811
cgttttattttty

SEQ ID NO: 201942 - DNA, 13 bp, Artificial Sequence
  Oligonucleotide for detection of SNP TSC0008811
raaaaataaaacg

SEQ ID NO: 201943 - DNA, 13 bp, Artificial Sequence
  Oligonucleotide for detection of SNP TSC0008811
cgtttcgttttty

SEQ ID NO: 201944 - DNA, 13 bp, Artificial Sequence
  Oligonucleotide for detection of SNP TSC0008811
raaaaacgaaacg

SEQ ID NO: 201945 - DNA, 13 bp, Artificial Sequence
  Oligonucleotide for detection of SNP TSC0008812
gtttataaatgta

SEQ ID NO: 201946 - DNA, 13 bp, Artificial Sequence
  Oligonucleotide for detection of SNP TSC0008812
tacatttataaac

SEQ ID NO: 201947 - DNA, 13 bp, Artificial Sequence
  Oligonucleotide for detection of SNP TSC0008812
gtttatgaatgta

SEQ ID NO: 201948 - DNA, 13 bp, Artificial Sequence
  Oligonucleotide for detection of SNP TSC0008812
tacattcataaac

SEQ ID NO: 201949 - DNA, 13 bp, Artificial Sequence
  Oligonucleotide for detection of SNP TSC0008812
gtttataaacgta

SEQ ID NO: 201950 - DNA, 13 bp, Artificial Sequence
  Oligonucleotide for detection of SNP TSC0008812
tacgtttataaac

SEQ ID NO: 201951 - DNA, 13 bp, Artificial Sequence
  Oligonucleotide for detection of SNP TSC0008812
gtttacgaatgta

SEQ ID NO: 201952 - DNA, 13 bp, Artificial Sequence
  Oligonucleotide for detection of SNP TSC0008812
tacattcgtaaac

SEQ ID NO: 201953 - DNA, 13 bp, Artificial Sequence
  Oligonucleotide for detection of SNP TSC0008812
gtttatgaacgta

SEQ ID NO: 201954 - DNA, 13 bp, Artificial Sequence
  Oligonucleotide for detection of SNP TSC0008812
tacgttcataaac

SEQ ID NO: 201955 - DNA, 13 bp, Artificial Sequence
  Oligonucleotide for detection of SNP TSC0008812
gtttacgaacgta

SEQ ID NO: 201956 - DNA, 13 bp, Artificial Sequence
  Oligonucleotide for detection of SNP TSC0008812
tacgttcgtaaac

SEQ ID NO: 201957 - DNA, 13 bp, Artificial Sequence
  Oligonucleotide for detection of SNP TSC0008812
tgtgtttgtgggy

SEQ ID NO: 201958 - DNA, 13 bp, Artificial Sequence
  Oligonucleotide for detection of SNP TSC0008812
rcccacaaacaca

SEQ ID NO: 201959 - DNA, 13 bp, Artificial Sequence
  Oligonucleotide for detection of SNP TSC0008812
tgcgtttgtgggy

SEQ ID NO: 201960 - DNA, 13 bp, Artificial Sequence
  Oligonucleotide for detection of SNP TSC0008812
rcccacaaacgca

SEQ ID NO: 201961 - DNA, 13 bp, Artificial Sequence
  Oligonucleotide for detection of SNP TSC0008812
tgtgttcgtgggy

SEQ ID NO: 201962 - DNA, 13 bp, Artificial Sequence
  Oligonucleotide for detection of SNP TSC0008812
rcccacgaacaca

SEQ ID NO: 201963 - DNA, 13 bp, Artificial Sequence
  Oligonucleotide for detection of SNP TSC0008812
tgcgttcgtgggy

SEQ ID NO: 201964 - DNA, 13 bp, Artificial Sequence
  Oligonucleotide for detection of SNP TSC0008812
rcccacgaacgca

SEQ ID NO: 201965 - DNA, 13 bp, Artificial Sequence
  Oligonucleotide for detection of SNP TSC0049648
taggatatattag

SEQ ID NO: 201966 - DNA, 13 bp, Artificial Sequence
  Oligonucleotide for detection of SNP TSC0049648
ctaatatatccta

SEQ ID NO: 201967 - DNA, 13 bp, Artificial Sequence
  Oligonucleotide for detection of SNP TSC0049648
taggatttattag

SEQ ID NO: 201968 - DNA, 13 bp, Artificial Sequence
  Oligonucleotide for detection of SNP TSC0049648
ctaataaatccta

SEQ ID NO: 201969 - DNA, 13 bp, Artificial Sequence
  Oligonucleotide for detection of SNP TSC0049650
tggtatatgtggy

SEQ ID NO: 201970 - DNA, 13 bp, Artificial Sequence
  Oligonucleotide for detection of SNP TSC0049650
rccacatatacca

SEQ ID NO: 201971 - DNA, 13 bp, Artificial Sequence
  Oligonucleotide for detection of SNP TSC0049650
tggtatgtgtggy

SEQ ID NO: 201972 - DNA, 13 bp, Artificial Sequence
  Oligonucleotide for detection of SNP TSC0049650
rccacacatacca

SEQ ID NO: 201973 - DNA, 13 bp, Artificial Sequence
  Oligonucleotide for detection of SNP TSC0049650
tggtacgtgtggy

SEQ ID NO: 201974 - DNA, 13 bp, Artificial Sequence
  Oligonucleotide for detection of SNP TSC0049650
rccacacgtacca

SEQ ID NO: 201975 - DNA, 13 bp, Artificial Sequence
  Oligonucleotide for detection of SNP TSC0049650
gttatatgtgtta

SEQ ID NO: 201976 - DNA, 13 bp, Artificial Sequence
  Oligonucleotide for detection of SNP TSC0049650
taacacatataac

SEQ ID NO: 201977 - DNA, 13 bp, Artificial Sequence
  Oligonucleotide for detection of SNP TSC0049650
gttatacgtgtta

SEQ ID NO: 201978 - DNA, 13 bp, Artificial Sequence
  Oligonucleotide for detection of SNP TSC0049650
taacacgtataac

SEQ ID NO: 201979 - DNA, 13 bp, Artificial Sequence
  Oligonucleotide for detection of SNP TSC0049651
ttttttagtatat

SEQ ID NO: 201980 - DNA, 13 bp, Artificial Sequence
  Oligonucleotide for detection of SNP TSC0049651
atatactaaaaaa

SEQ ID NO: 201981 - DNA, 13 bp, Artificial Sequence
  Oligonucleotide for detection of SNP TSC0049651
tttttcggtatat

SEQ ID NO: 201982 - DNA, 13 bp, Artificial Sequence
  Oligonucleotide for detection of SNP TSC0049651
atataccgaaaaa

SEQ ID NO: 201983 - DNA, 13 bp, Artificial Sequence
  Oligonucleotide for detection of SNP TSC0049651
atatgttggaagg

SEQ ID NO: 201984 - DNA, 13 bp, Artificial Sequence
  Oligonucleotide for detection of SNP TSC0049651
ccttccaacatat

SEQ ID NO: 201985 - DNA, 13 bp, Artificial Sequence
  Oligonucleotide for detection of SNP TSC0049651
atatgtcggaagg

SEQ ID NO: 201986 - DNA, 13 bp, Artificial Sequence
  Oligonucleotide for detection of SNP TSC0049651
ccttccgacatat

SEQ ID NO: 201987 - DNA, 13 bp, Artificial Sequence
  Oligonucleotide for detection of SNP TSC0049652
tataatgatttty

SEQ ID NO: 201988 - DNA, 13 bp, Artificial Sequence
  Oligonucleotide for detection of SNP TSC0049652
raaaatcattata

SEQ ID NO: 201989 - DNA, 13 bp, Artificial Sequence
  Oligonucleotide for detection of SNP TSC0049654
gaaaatgtttgta

SEQ ID NO: 201990 - DNA, 13 bp, Artificial Sequence
  Oligonucleotide for detection of SNP TSC0049654
tacaaacattttc

SEQ ID NO: 201991 - DNA, 13 bp, Artificial Sequence
  Oligonucleotide for detection of SNP TSC0049654
gaaaatatttgta

SEQ ID NO: 201992 - DNA, 13 bp, Artificial Sequence
  Oligonucleotide for detection of SNP TSC0049654
tacaaatattttc

SEQ ID NO: 201993 - DNA, 13 bp, Artificial Sequence
  Oligonucleotide for detection of SNP TSC0049657
tattttaaatatt

SEQ ID NO: 201994 - DNA, 13 bp, Artificial Sequence
  Oligonucleotide for detection of SNP TSC0049657
aatatttaaaata

SEQ ID NO: 201995 - DNA, 13 bp, Artificial Sequence
  Oligonucleotide for detection of SNP TSC0049657
tattttgaatatt

SEQ ID NO: 201996 - DNA, 13 bp, Artificial Sequence
  Oligonucleotide for detection of SNP TSC0049657
aatattcaaaata

SEQ ID NO: 201997 - DNA, 13 bp, Artificial Sequence
  Oligonucleotide for detection of SNP TSC0049657
tatttcgaatatt

SEQ ID NO: 201998 - DNA, 13 bp, Artificial Sequence
  Oligonucleotide for detection of SNP TSC0049657
aatattcgaaata

SEQ ID NO: 201999 - DNA, 13 bp, Artificial Sequence
  Oligonucleotide for detection of SNP TSC0049657
agtatttgaaatg

SEQ ID NO: 202000 - DNA, 13 bp, Artificial Sequence
  Oligonucleotide for detection of SNP TSC0049657
catttcaaatact

SEQ ID NO: 202001 - DNA, 13 bp, Artificial Sequence
  Oligonucleotide for detection of SNP TSC0049657
agtattcgaaatg

SEQ ID NO: 202002 - DNA, 13 bp, Artificial Sequence
  Oligonucleotide for detection of SNP TSC0049657
catttcgaatact

SEQ ID NO: 202003 - DNA, 13 bp, Artificial Sequence
  Oligonucleotide for detection of SNP TSC0049664
aggtgttagtttg

SEQ ID NO: 202004 - DNA, 13 bp, Artificial Sequence
  Oligonucleotide for detection of SNP TSC0049664
caaactaacacct

SEQ ID NO: 202005 - DNA, 13 bp, Artificial Sequence
  Oligonucleotide for detection of SNP TSC0049664
aggtgtgagtttg

SEQ ID NO: 202006 - DNA, 13 bp, Artificial Sequence
  Oligonucleotide for detection of SNP TSC0049664
caaactcacacct

SEQ ID NO: 202007 - DNA, 13 bp, Artificial Sequence
  Oligonucleotide for detection of SNP TSC0049664
taggttaatattt

SEQ ID NO: 202008 - DNA, 13 bp, Artificial Sequence
  Oligonucleotide for detection of SNP TSC0049664
aaatattaaccta

SEQ ID NO: 202009 - DNA, 13 bp, Artificial Sequence
  Oligonucleotide for detection of SNP TSC0049664
taggtttatattt

SEQ ID NO: 202010 - DNA, 13 bp, Artificial Sequence
  Oligonucleotide for detection of SNP TSC0049664
aaatataaaccta

SEQ ID NO: 202011 - DNA, 13 bp, Artificial Sequence
  Oligonucleotide for detection of SNP TSC0049665
agttgatttatta

SEQ ID NO: 202012 - DNA, 13 bp, Artificial Sequence
  Oligonucleotide for detection of SNP TSC0049665
taataaatcaact

SEQ ID NO: 202013 - DNA, 13 bp, Artificial Sequence
  Oligonucleotide for detection of SNP TSC0049665
agttgagttatta

SEQ ID NO: 202014 - DNA, 13 bp, Artificial Sequence
  Oligonucleotide for detection of SNP TSC0049665
taataactcaact

SEQ ID NO: 202015 - DNA, 13 bp, Artificial Sequence
  Oligonucleotide for detection of SNP TSC0049665
tgatgagttaatt

SEQ ID NO: 202016 - DNA, 13 bp, Artificial Sequence
  Oligonucleotide for detection of SNP TSC0049665
aattaactcatca

SEQ ID NO: 202017 - DNA, 13 bp, Artificial Sequence
  Oligonucleotide for detection of SNP TSC0049665
tgatgatttaatt

SEQ ID NO: 202018 - DNA, 13 bp, Artificial Sequence
  Oligonucleotide for detection of SNP TSC0049665
aattaaatcatca

SEQ ID NO: 202019 - DNA, 13 bp, Artificial Sequence
  Oligonucleotide for detection of SNP TSC0049666
gatagaataaaag

SEQ ID NO: 202020 - DNA, 13 bp, Artificial Sequence
  Oligonucleotide for detection of SNP TSC0049666
cttttattctatc

SEQ ID NO: 202021 - DNA, 13 bp, Artificial Sequence
  Oligonucleotide for detection of SNP TSC0049666
gatagattaaaag

SEQ ID NO: 202022 - DNA, 13 bp, Artificial Sequence
  Oligonucleotide for detection of SNP TSC0049666
cttttaatctatc

SEQ ID NO: 202023 - DNA, 13 bp, Artificial Sequence
  Oligonucleotide for detection of SNP TSC0049668
aaggttaaagtgt

SEQ ID NO: 202024 - DNA, 13 bp, Artificial Sequence
  Oligonucleotide for detection of SNP TSC0049668
acactttaacctt

SEQ ID NO: 202025 - DNA, 13 bp, Artificial Sequence
  Oligonucleotide for detection of SNP TSC0049668
aaggttgaagtgt

SEQ ID NO: 202026 - DNA, 13 bp, Artificial Sequence
  Oligonucleotide for detection of SNP TSC0049668
acacttcaacctt

SEQ ID NO: 202027 - DNA, 13 bp, Artificial Sequence
  Oligonucleotide for detection of SNP TSC0049668
aaggtcgaagtgt

SEQ ID NO: 202028 - DNA, 13 bp, Artificial Sequence
  Oligonucleotide for detection of SNP TSC0049668
acacttcgacctt

SEQ ID NO: 202029 - DNA, 13 bp, Artificial Sequence
  Oligonucleotide for detection of SNP TSC0049668
atattttggtttt

SEQ ID NO: 202030 - DNA, 13 bp, Artificial Sequence
  Oligonucleotide for detection of SNP TSC0049668
aaaaccaaaatat

SEQ ID NO: 202031 - DNA, 13 bp, Artificial Sequence
  Oligonucleotide for detection of SNP TSC0049668
atatttcggtttt

SEQ ID NO: 202032 - DNA, 13 bp, Artificial Sequence
  Oligonucleotide for detection of SNP TSC0049668
aaaaccgaaatat

SEQ ID NO: 202033 - DNA, 13 bp, Artificial Sequence
  Oligonucleotide for detection of SNP TSC0005407
ttatataggttgg

SEQ ID NO: 202034 - DNA, 13 bp, Artificial Sequence
  Oligonucleotide for detection of SNP TSC0005407
ccaacctatataa

SEQ ID NO: 202035 - DNA, 13 bp, Artificial Sequence
  Oligonucleotide for detection of SNP TSC0005407
ttatattggttgg

SEQ ID NO: 202036 - DNA, 13 bp, Artificial Sequence
  Oligonucleotide for detection of SNP TSC0005407
ccaaccaatataa

SEQ ID NO: 202037 - DNA, 13 bp, Artificial Sequence
  Oligonucleotide for detection of SNP TSC0005407
ttatataggtcgg

SEQ ID NO: 202038 - DNA, 13 bp, Artificial Sequence
  Oligonucleotide for detection of SNP TSC0005407
ccgacctatataa

SEQ ID NO: 202039 - DNA, 13 bp, Artificial Sequence
  Oligonucleotide for detection of SNP TSC0005407
ttatatcggttgg

SEQ ID NO: 202040 - DNA, 13 bp, Artificial Sequence
  Oligonucleotide for detection of SNP TSC0005407
ccaaccgatataa

SEQ ID NO: 202041 - DNA, 13 bp, Artificial Sequence
  Oligonucleotide for detection of SNP TSC0005407
ttatattggtcgg

SEQ ID NO: 202042 - DNA, 13 bp, Artificial Sequence
  Oligonucleotide for detection of SNP TSC0005407
ccgaccaatataa

SEQ ID NO: 202043 - DNA, 13 bp, Artificial Sequence
  Oligonucleotide for detection of SNP TSC0005407
ttatatcggtcgg

SEQ ID NO: 202044 - DNA, 13 bp, Artificial Sequence
  Oligonucleotide for detection of SNP TSC0005407
ccgaccgatataa

SEQ ID NO: 202045 - DNA, 13 bp, Artificial Sequence
  Oligonucleotide for detection of SNP TSC0005407
ttgatttatataa

SEQ ID NO: 202046 - DNA, 13 bp, Artificial Sequence
  Oligonucleotide for detection of SNP TSC0005407
ttatataaatcaa

SEQ ID NO: 202047 - DNA, 13 bp, Artificial Sequence
  Oligonucleotide for detection of SNP TSC0005407
ttgattgatataa

SEQ ID NO: 202048 - DNA, 13 bp, Artificial Sequence
  Oligonucleotide for detection of SNP TSC0005407
ttatatcaatcaa

SEQ ID NO: 202049 - DNA, 13 bp, Artificial Sequence
  Oligonucleotide for detection of SNP TSC0005407
tcgatttatataa

SEQ ID NO: 202050 - DNA, 13 bp, Artificial Sequence
  Oligonucleotide for detection of SNP TSC0005407
ttatataaatcga

SEQ ID NO: 202051 - DNA, 13 bp, Artificial Sequence
  Oligonucleotide for detection of SNP TSC0005407
tcgattgatataa

SEQ ID NO: 202052 - DNA, 13 bp, Artificial Sequence
  Oligonucleotide for detection of SNP TSC0005407
ttatatcaatcga

SEQ ID NO: 202053 - DNA, 13 bp, Artificial Sequence
  Oligonucleotide for detection of SNP TSC0005407
ttgatcgatataa

SEQ ID NO: 202054 - DNA, 13 bp, Artificial Sequence
  Oligonucleotide for detection of SNP TSC0005407
ttatatcgatcaa

SEQ ID NO: 202055 - DNA, 13 bp, Artificial Sequence
  Oligonucleotide for detection of SNP TSC0005407
tcgatcgatataa

SEQ ID NO: 202056 - DNA, 13 bp, Artificial Sequence
  Oligonucleotide for detection of SNP TSC0005407
ttatatcgatcga

SEQ ID NO: 202057 - DNA, 13 bp, Artificial Sequence
  Oligonucleotide for detection of SNP TSC0049671
tttgttaaagagt

SEQ ID NO: 202058 - DNA, 13 bp, Artificial Sequence
  Oligonucleotide for detection of SNP TSC0049671
actctttaacaaa

SEQ ID NO: 202059 - DNA, 13 bp, Artificial Sequence
  Oligonucleotide for detection of SNP TSC0049671
tttgttgaagagt

SEQ ID NO: 202060 - DNA, 13 bp, Artificial Sequence
  Oligonucleotide for detection of SNP TSC0049671
actcttcaacaaa

SEQ ID NO: 202061 - DNA, 13 bp, Artificial Sequence
  Oligonucleotide for detection of SNP TSC0049671
tttgtcgaagagt

SEQ ID NO: 202062 - DNA, 13 bp, Artificial Sequence
  Oligonucleotide for detection of SNP TSC0049671
actcttcgacaaa

SEQ ID NO: 202063 - DNA, 13 bp, Artificial Sequence
  Oligonucleotide for detection of SNP TSC0049671
attttttggtaaa

SEQ ID NO: 202064 - DNA, 13 bp, Artificial Sequence
  Oligonucleotide for detection of SNP TSC0049671
tttaccaaaaaat

SEQ ID NO: 202065 - DNA, 13 bp, Artificial Sequence
  Oligonucleotide for detection of SNP TSC0049671
atttttcggtaaa

SEQ ID NO: 202066 - DNA, 13 bp, Artificial Sequence
  Oligonucleotide for detection of SNP TSC0049671
tttaccgaaaaat

SEQ ID NO: 202067 - DNA, 13 bp, Artificial Sequence
  Oligonucleotide for detection of SNP TSC0049672
gataaattggaaa

SEQ ID NO: 202068 - DNA, 13 bp, Artificial Sequence
  Oligonucleotide for detection of SNP TSC0049672
tttccaatttatc

SEQ ID NO: 202069 - DNA, 13 bp, Artificial Sequence
  Oligonucleotide for detection of SNP TSC0049672
gataaagtggaaa

SEQ ID NO: 202070 - DNA, 13 bp, Artificial Sequence
  Oligonucleotide for detection of SNP TSC0049672
tttccactttatc

SEQ ID NO: 202071 - DNA, 13 bp, Artificial Sequence
  Oligonucleotide for detection of SNP TSC0049679
ggggattgaaggg

SEQ ID NO: 202072 - DNA, 13 bp, Artificial Sequence
  Oligonucleotide for detection of SNP TSC0049679
cccttcaatcccc

SEQ ID NO: 202073 - DNA, 13 bp, Artificial Sequence
  Oligonucleotide for detection of SNP TSC0049679
ggggatcgaaggg

SEQ ID NO: 202074 - DNA, 13 bp, Artificial Sequence
  Oligonucleotide for detection of SNP TSC0049679
cccttcgatcccc

SEQ ID NO: 202075 - DNA, 13 bp, Artificial Sequence
  Oligonucleotide for detection of SNP TSC0049681
aaaaaaggagatt

SEQ ID NO: 202076 - DNA, 13 bp, Artificial Sequence
  Oligonucleotide for detection of SNP TSC0049681
aatctcctttttt

SEQ ID NO: 202077 - DNA, 13 bp, Artificial Sequence
  Oligonucleotide for detection of SNP TSC0049681
aaaaaatgagatt

SEQ ID NO: 202078 - DNA, 13 bp, Artificial Sequence
  Oligonucleotide for detection of SNP TSC0049681
aatctcatttttt

SEQ ID NO: 202079 - DNA, 13 bp, Artificial Sequence
  Oligonucleotide for detection of SNP TSC0049681
aaaaaacgagatt

SEQ ID NO: 202080 - DNA, 13 bp, Artificial Sequence
  Oligonucleotide for detection of SNP TSC0049681
aatctcgtttttt

SEQ ID NO: 202081 - DNA, 13 bp, Artificial Sequence
  Oligonucleotide for detection of SNP TSC0049682
ttatatataatta

SEQ ID NO: 202082 - DNA, 13 bp, Artificial Sequence
  Oligonucleotide for detection of SNP TSC0049682
taattatatataa

SEQ ID NO: 202083 - DNA, 13 bp, Artificial Sequence
  Oligonucleotide for detection of SNP TSC0049682
ttatatgtaatta

SEQ ID NO: 202084 - DNA, 13 bp, Artificial Sequence
  Oligonucleotide for detection of SNP TSC0049682
taattacatataa

SEQ ID NO: 202085 - DNA, 13 bp, Artificial Sequence
  Oligonucleotide for detection of SNP TSC0049682
ttatacgtaatta

SEQ ID NO: 202086 - DNA, 13 bp, Artificial Sequence
  Oligonucleotide for detection of SNP TSC0049682
taattacgtataa

SEQ ID NO: 202087 - DNA, 13 bp, Artificial Sequence
  Oligonucleotide for detection of SNP TSC0049682
tggttgtgtataa

SEQ ID NO: 202088 - DNA, 13 bp, Artificial Sequence
  Oligonucleotide for detection of SNP TSC0049682
ttatacacaacca

SEQ ID NO: 202089 - DNA, 13 bp, Artificial Sequence
  Oligonucleotide for detection of SNP TSC0049682
tggttgcgtataa

SEQ ID NO: 202090 - DNA, 13 bp, Artificial Sequence
  Oligonucleotide for detection of SNP TSC0049682
ttatacgcaacca

SEQ ID NO: 202091 - DNA, 13 bp, Artificial Sequence
  Oligonucleotide for detection of SNP TSC0049683
tttgttttaatty

SEQ ID NO: 202092 - DNA, 13 bp, Artificial Sequence
  Oligonucleotide for detection of SNP TSC0049683
raattaaaacaaa

SEQ ID NO: 202093 - DNA, 13 bp, Artificial Sequence
  Oligonucleotide for detection of SNP TSC0049683
tttgttgtaatty

SEQ ID NO: 202094 - DNA, 13 bp, Artificial Sequence
  Oligonucleotide for detection of SNP TSC0049683
raattacaacaaa

SEQ ID NO: 202095 - DNA, 13 bp, Artificial Sequence
  Oligonucleotide for detection of SNP TSC0049683
ggattaaaataaa

SEQ ID NO: 202096 - DNA, 13 bp, Artificial Sequence
  Oligonucleotide for detection of SNP TSC0049683
tttattttaatcc

SEQ ID NO: 202097 - DNA, 13 bp, Artificial Sequence
  Oligonucleotide for detection of SNP TSC0049683
ggattataataaa

SEQ ID NO: 202098 - DNA, 13 bp, Artificial Sequence
  Oligonucleotide for detection of SNP TSC0049683
tttattataatcc

SEQ ID NO: 202099 - DNA, 13 bp, Artificial Sequence
  Oligonucleotide for detection of SNP TSC0049684
ttattgatgggta

SEQ ID NO: 202100 - DNA, 13 bp, Artificial Sequence
  Oligonucleotide for detection of SNP TSC0049684
tacccatcaataa

SEQ ID NO: 202101 - DNA, 13 bp, Artificial Sequence
  Oligonucleotide for detection of SNP TSC0049684
ttattggtgggta

SEQ ID NO: 202102 - DNA, 13 bp, Artificial Sequence
  Oligonucleotide for detection of SNP TSC0049684
tacccaccaataa

SEQ ID NO: 202103 - DNA, 13 bp, Artificial Sequence
  Oligonucleotide for detection of SNP TSC0049686
ataagtataatty

SEQ ID NO: 202104 - DNA, 13 bp, Artificial Sequence
  Oligonucleotide for detection of SNP TSC0049686
raattatacttat

SEQ ID NO: 202105 - DNA, 13 bp, Artificial Sequence
  Oligonucleotide for detection of SNP TSC0049686
ataagtgtaatty

SEQ ID NO: 202106 - DNA, 13 bp, Artificial Sequence
  Oligonucleotide for detection of SNP TSC0049686
raattacacttat

SEQ ID NO: 202107 - DNA, 13 bp, Artificial Sequence
  Oligonucleotide for detection of SNP TSC0049686
ataagcgtaatty

SEQ ID NO: 202108 - DNA, 13 bp, Artificial Sequence
  Oligonucleotide for detection of SNP TSC0049686
raattacgcttat

SEQ ID NO: 202109 - DNA, 13 bp, Artificial Sequence
  Oligonucleotide for detection of SNP TSC0049686
gagttatgtttat

SEQ ID NO: 202110 - DNA, 13 bp, Artificial Sequence
  Oligonucleotide for detection of SNP TSC0049686
ataaacataactc

SEQ ID NO: 202111 - DNA, 13 bp, Artificial Sequence
  Oligonucleotide for detection of SNP TSC0049686
gagttacgtttat

SEQ ID NO: 202112 - DNA, 13 bp, Artificial Sequence
  Oligonucleotide for detection of SNP TSC0049686
ataaacgtaactc

SEQ ID NO: 202113 - DNA, 13 bp, Artificial Sequence
  Oligonucleotide for detection of SNP TSC0049689
tgatttggattty

SEQ ID NO: 202114 - DNA, 13 bp, Artificial Sequence
  Oligonucleotide for detection of SNP TSC0049689
raaatccaaatca

SEQ ID NO: 202115 - DNA, 13 bp, Artificial Sequence
  Oligonucleotide for detection of SNP TSC0049689
tgattcggattty

SEQ ID NO: 202116 - DNA, 13 bp, Artificial Sequence
  Oligonucleotide for detection of SNP TSC0049689
raaatccgaatca

SEQ ID NO: 202117 - DNA, 13 bp, Artificial Sequence
  Oligonucleotide for detection of SNP TSC0049689
ggggtttgggtta

SEQ ID NO: 202118 - DNA, 13 bp, Artificial Sequence
  Oligonucleotide for detection of SNP TSC0049689
taacccaaacccc

SEQ ID NO: 202119 - DNA, 13 bp, Artificial Sequence
  Oligonucleotide for detection of SNP TSC0049689
ggggttcgggtta

SEQ ID NO: 202120 - DNA, 13 bp, Artificial Sequence
  Oligonucleotide for detection of SNP TSC0049689
taacccgaacccc

SEQ ID NO: 202121 - DNA, 13 bp, Artificial Sequence
  Oligonucleotide for detection of SNP TSC0049690
atttaatgatata

SEQ ID NO: 202122 - DNA, 13 bp, Artificial Sequence
  Oligonucleotide for detection of SNP TSC0049690
tatatcattaaat

SEQ ID NO: 202123 - DNA, 13 bp, Artificial Sequence
  Oligonucleotide for detection of SNP TSC0049690
tatattgttggat

SEQ ID NO: 202124 - DNA, 13 bp, Artificial Sequence
  Oligonucleotide for detection of SNP TSC0049690
atccaacaatata

SEQ ID NO: 202125 - DNA, 13 bp, Artificial Sequence
  Oligonucleotide for detection of SNP TSC0049690
tatattattggat

SEQ ID NO: 202126 - DNA, 13 bp, Artificial Sequence
  Oligonucleotide for detection of SNP TSC0049690
atccaataatata

SEQ ID NO: 202127 - DNA, 13 bp, Artificial Sequence
  Oligonucleotide for detection of SNP TSC0049690
tatatcgttggat

SEQ ID NO: 202128 - DNA, 13 bp, Artificial Sequence
  Oligonucleotide for detection of SNP TSC0049690
atccaacgatata

SEQ ID NO: 202129 - DNA, 13 bp, Artificial Sequence
  Oligonucleotide for detection of SNP TSC0049691
aataaagaaaatg

SEQ ID NO: 202130 - DNA, 13 bp, Artificial Sequence
  Oligonucleotide for detection of SNP TSC0049691
cattttctttatt

SEQ ID NO: 202131 - DNA, 13 bp, Artificial Sequence
  Oligonucleotide for detection of SNP TSC0049692
aatagtaatttat

SEQ ID NO: 202132 - DNA, 13 bp, Artificial Sequence
  Oligonucleotide for detection of SNP TSC0049692
ataaattactatt

SEQ ID NO: 202133 - DNA, 13 bp, Artificial Sequence
  Oligonucleotide for detection of SNP TSC0049692
aatagttatttat

SEQ ID NO: 202134 - DNA, 13 bp, Artificial Sequence
  Oligonucleotide for detection of SNP TSC0049692
ataaataactatt

SEQ ID NO: 202135 - DNA, 13 bp, Artificial Sequence
  Oligonucleotide for detection of SNP TSC0049692
ataaattattgtt

SEQ ID NO: 202136 - DNA, 13 bp, Artificial Sequence
  Oligonucleotide for detection of SNP TSC0049692
aacaataatttat

SEQ ID NO: 202137 - DNA, 13 bp, Artificial Sequence
  Oligonucleotide for detection of SNP TSC0049692
ataaatgattgtt

SEQ ID NO: 202138 - DNA, 13 bp, Artificial Sequence
  Oligonucleotide for detection of SNP TSC0049692
aacaatcatttat

SEQ ID NO: 202139 - DNA, 13 bp, Artificial Sequence
  Oligonucleotide for detection of SNP TSC0049693
attttaaagattt

SEQ ID NO: 202140 - DNA, 13 bp, Artificial Sequence
  Oligonucleotide for detection of SNP TSC0049693
aaatctttaaaat

SEQ ID NO: 202141 - DNA, 13 bp, Artificial Sequence
  Oligonucleotide for detection of SNP TSC0049693
attttagagattt

SEQ ID NO: 202142 - DNA, 13 bp, Artificial Sequence
  Oligonucleotide for detection of SNP TSC0049693
aaatctctaaaat

SEQ ID NO: 202143 - DNA, 13 bp, Artificial Sequence
  Oligonucleotide for detection of SNP TSC0049694
ttgtttattatat

SEQ ID NO: 202144 - DNA, 13 bp, Artificial Sequence
  Oligonucleotide for detection of SNP TSC0049694
atataataaacaa

SEQ ID NO: 202145 - DNA, 13 bp, Artificial Sequence
  Oligonucleotide for detection of SNP TSC0049694
ttgtttgttatat

SEQ ID NO: 202146 - DNA, 13 bp, Artificial Sequence
  Oligonucleotide for detection of SNP TSC0049694
atataacaaacaa

SEQ ID NO: 202147 - DNA, 13 bp, Artificial Sequence
  Oligonucleotide for detection of SNP TSC0049694
ttgttcgttatat

SEQ ID NO: 202148 - DNA, 13 bp, Artificial Sequence
  Oligonucleotide for detection of SNP TSC0049694
atataacgaacaa

SEQ ID NO: 202149 - DNA, 13 bp, Artificial Sequence
  Oligonucleotide for detection of SNP TSC0049694
atgtggtgggtaa

SEQ ID NO: 202150 - DNA, 13 bp, Artificial Sequence
  Oligonucleotide for detection of SNP TSC0049694
ttacccaccacat

SEQ ID NO: 202151 - DNA, 13 bp, Artificial Sequence
  Oligonucleotide for detection of SNP TSC0049694
atgtggcgggtaa

SEQ ID NO: 202152 - DNA, 13 bp, Artificial Sequence
  Oligonucleotide for detection of SNP TSC0049694
ttacccgccacat

SEQ ID NO: 202153 - DNA, 13 bp, Artificial Sequence
  Oligonucleotide for detection of SNP TSC0049698
tgttgttgttaty

SEQ ID NO: 202154 - DNA, 13 bp, Artificial Sequence
  Oligonucleotide for detection of SNP TSC0049698
rataacaacaaca

SEQ ID NO: 202155 - DNA, 13 bp, Artificial Sequence
  Oligonucleotide for detection of SNP TSC0049698
tgttgtcgttaty

SEQ ID NO: 202156 - DNA, 13 bp, Artificial Sequence
  Oligonucleotide for detection of SNP TSC0049698
rataacgacaaca

SEQ ID NO: 202157 - DNA, 13 bp, Artificial Sequence
  Oligonucleotide for detection of SNP TSC0049698
gatgatggtagta

SEQ ID NO: 202158 - DNA, 13 bp, Artificial Sequence
  Oligonucleotide for detection of SNP TSC0049698
tactaccatcatc

SEQ ID NO: 202159 - DNA, 13 bp, Artificial Sequence
  Oligonucleotide for detection of SNP TSC0049698
gatgatagtagta

SEQ ID NO: 202160 - DNA, 13 bp, Artificial Sequence
  Oligonucleotide for detection of SNP TSC0049698
tactactatcatc

SEQ ID NO: 202161 - DNA, 13 bp, Artificial Sequence
  Oligonucleotide for detection of SNP TSC0049698
gatgacggtagta

SEQ ID NO: 202162 - DNA, 13 bp, Artificial Sequence
  Oligonucleotide for detection of SNP TSC0049698
tactaccgtcatc

SEQ ID NO: 202163 - DNA, 13 bp, Artificial Sequence
  Oligonucleotide for detection of SNP TSC0049699
gtttttaaaatta

SEQ ID NO: 202164 - DNA, 13 bp, Artificial Sequence
  Oligonucleotide for detection of SNP TSC0049699
taattttaaaaac

SEQ ID NO: 202165 - DNA, 13 bp, Artificial Sequence
  Oligonucleotide for detection of SNP TSC0049699
taattttaaaaay

SEQ ID NO: 202166 - DNA, 13 bp, Artificial Sequence
  Oligonucleotide for detection of SNP TSC0049699
rtttttaaaatta

SEQ ID NO: 202167 - DNA, 13 bp, Artificial Sequence
  Oligonucleotide for detection of SNP TSC0049699
taatttaaaaaay

SEQ ID NO: 202168 - DNA, 13 bp, Artificial Sequence
  Oligonucleotide for detection of SNP TSC0049699
rttttttaaatta

SEQ ID NO: 202169 - DNA, 13 bp, Artificial Sequence
  Oligonucleotide for detection of SNP TSC0049700
ttagttgtttaga

SEQ ID NO: 202170 - DNA, 13 bp, Artificial Sequence
  Oligonucleotide for detection of SNP TSC0049700
tctaaacaactaa

SEQ ID NO: 202171 - DNA, 13 bp, Artificial Sequence
  Oligonucleotide for detection of SNP TSC0049700
ttagttatttaga

SEQ ID NO: 202172 - DNA, 13 bp, Artificial Sequence
  Oligonucleotide for detection of SNP TSC0049700
tctaaataactaa

SEQ ID NO: 202173 - DNA, 13 bp, Artificial Sequence
  Oligonucleotide for detection of SNP TSC0049701
gtatttaaattat

SEQ ID NO: 202174 - DNA, 13 bp, Artificial Sequence
  Oligonucleotide for detection of SNP TSC0049701
ataatttaaatac

SEQ ID NO: 202175 - DNA, 13 bp, Artificial Sequence
  Oligonucleotide for detection of SNP TSC0049701
gtatttgaattat

SEQ ID NO: 202176 - DNA, 13 bp, Artificial Sequence
  Oligonucleotide for detection of SNP TSC0049701
ataattcaaatac

SEQ ID NO: 202177 - DNA, 13 bp, Artificial Sequence
  Oligonucleotide for detection of SNP TSC0049701
gtattcgaattat

SEQ ID NO: 202178 - DNA, 13 bp, Artificial Sequence
  Oligonucleotide for detection of SNP TSC0049701
ataattcgaatac

SEQ ID NO: 202179 - DNA, 13 bp, Artificial Sequence
  Oligonucleotide for detection of SNP TSC0049701
ataatttggatay

SEQ ID NO: 202180 - DNA, 13 bp, Artificial Sequence
  Oligonucleotide for detection of SNP TSC0049701
rtatccaaattat

SEQ ID NO: 202181 - DNA, 13 bp, Artificial Sequence
  Oligonucleotide for detection of SNP TSC0049701
ataattcggatay

SEQ ID NO: 202182 - DNA, 13 bp, Artificial Sequence
  Oligonucleotide for detection of SNP TSC0049701
rtatccgaattat

SEQ ID NO: 202183 - DNA, 13 bp, Artificial Sequence
  Oligonucleotide for detection of SNP TSC0049702
aatttattataga

SEQ ID NO: 202184 - DNA, 13 bp, Artificial Sequence
  Oligonucleotide for detection of SNP TSC0049702
tctataataaatt

SEQ ID NO: 202185 - DNA, 13 bp, Artificial Sequence
  Oligonucleotide for detection of SNP TSC0049702
aatttagtataga

SEQ ID NO: 202186 - DNA, 13 bp, Artificial Sequence
  Oligonucleotide for detection of SNP TSC0049702
tctatactaaatt

SEQ ID NO: 202187 - DNA, 13 bp, Artificial Sequence
  Oligonucleotide for detection of SNP TSC0049702
tttatgttaaatt

SEQ ID NO: 202188 - DNA, 13 bp, Artificial Sequence
  Oligonucleotide for detection of SNP TSC0049702
aatttaacataaa

SEQ ID NO: 202189 - DNA, 13 bp, Artificial Sequence
  Oligonucleotide for detection of SNP TSC0049703
ggtttttaattag

SEQ ID NO: 202190 - DNA, 13 bp, Artificial Sequence
  Oligonucleotide for detection of SNP TSC0049703
ctaattaaaaacc

SEQ ID NO: 202191 - DNA, 13 bp, Artificial Sequence
  Oligonucleotide for detection of SNP TSC0049703
ggttttgaattag

SEQ ID NO: 202192 - DNA, 13 bp, Artificial Sequence
  Oligonucleotide for detection of SNP TSC0049703
ctaattcaaaacc

SEQ ID NO: 202193 - DNA, 13 bp, Artificial Sequence
  Oligonucleotide for detection of SNP TSC0049703
ttagttaagggty

SEQ ID NO: 202194 - DNA, 13 bp, Artificial Sequence
  Oligonucleotide for detection of SNP TSC0049703
racccttaactaa

SEQ ID NO: 202195 - DNA, 13 bp, Artificial Sequence
  Oligonucleotide for detection of SNP TSC0049703
ttagtttagggty

SEQ ID NO: 202196 - DNA, 13 bp, Artificial Sequence
  Oligonucleotide for detection of SNP TSC0049703
raccctaaactaa

SEQ ID NO: 202197 - DNA, 13 bp, Artificial Sequence
  Oligonucleotide for detection of SNP TSC0049705
ttatatgaagtgg

SEQ ID NO: 202198 - DNA, 13 bp, Artificial Sequence
  Oligonucleotide for detection of SNP TSC0049705
ccacttcatataa

SEQ ID NO: 202199 - DNA, 13 bp, Artificial Sequence
  Oligonucleotide for detection of SNP TSC0049705
ttatataaagtgg

SEQ ID NO: 202200 - DNA, 13 bp, Artificial Sequence
  Oligonucleotide for detection of SNP TSC0049705
ccactttatataa

SEQ ID NO: 202201 - DNA, 13 bp, Artificial Sequence
  Oligonucleotide for detection of SNP TSC0049706
gtttagtttagtt

SEQ ID NO: 202202 - DNA, 13 bp, Artificial Sequence
  Oligonucleotide for detection of SNP TSC0049706
aactaaactaaac

SEQ ID NO: 202203 - DNA, 13 bp, Artificial Sequence
  Oligonucleotide for detection of SNP TSC0049706
gtttaggttagtt

SEQ ID NO: 202204 - DNA, 13 bp, Artificial Sequence
  Oligonucleotide for detection of SNP TSC0049706
aactaacctaaac

SEQ ID NO: 202205 - DNA, 13 bp, Artificial Sequence
  Oligonucleotide for detection of SNP TSC0049706
aattaatttaaay

SEQ ID NO: 202206 - DNA, 13 bp, Artificial Sequence
  Oligonucleotide for detection of SNP TSC0049706
rtttaaattaatt

SEQ ID NO: 202207 - DNA, 13 bp, Artificial Sequence
  Oligonucleotide for detection of SNP TSC0049707
tttatagtagtaa

SEQ ID NO: 202208 - DNA, 13 bp, Artificial Sequence
  Oligonucleotide for detection of SNP TSC0049707
ttactactataaa

SEQ ID NO: 202209 - DNA, 13 bp, Artificial Sequence
  Oligonucleotide for detection of SNP TSC0049707
tttataatagtaa

SEQ ID NO: 202210 - DNA, 13 bp, Artificial Sequence
  Oligonucleotide for detection of SNP TSC0049707
ttactattataaa

SEQ ID NO: 202211 - DNA, 13 bp, Artificial Sequence
  Oligonucleotide for detection of SNP TSC0049708
tgtaaagattgta

SEQ ID NO: 202212 - DNA, 13 bp, Artificial Sequence
  Oligonucleotide for detection of SNP TSC0049708
tacaatctttaca

SEQ ID NO: 202213 - DNA, 13 bp, Artificial Sequence
  Oligonucleotide for detection of SNP TSC0049708
tgtaaatattgta

SEQ ID NO: 202214 - DNA, 13 bp, Artificial Sequence
  Oligonucleotide for detection of SNP TSC0049708
tacaatatttaca

SEQ ID NO: 202215 - DNA, 13 bp, Artificial Sequence
  Oligonucleotide for detection of SNP TSC0049711
aatttaattaaga

SEQ ID NO: 202216 - DNA, 13 bp, Artificial Sequence
  Oligonucleotide for detection of SNP TSC0049711
tcttaattaaatt

SEQ ID NO: 202217 - DNA, 13 bp, Artificial Sequence
  Oligonucleotide for detection of SNP TSC0049711
aatttatttaaga

SEQ ID NO: 202218 - DNA, 13 bp, Artificial Sequence
  Oligonucleotide for detection of SNP TSC0049711
tcttaaataaatt

SEQ ID NO: 202219 - DNA, 13 bp, Artificial Sequence
  Oligonucleotide for detection of SNP TSC0049711
ttttaattgggtt

SEQ ID NO: 202220 - DNA, 13 bp, Artificial Sequence
  Oligonucleotide for detection of SNP TSC0049711
aacccaattaaaa

SEQ ID NO: 202221 - DNA, 13 bp, Artificial Sequence
  Oligonucleotide for detection of SNP TSC0049711
ttttaaatgggtt

SEQ ID NO: 202222 - DNA, 13 bp, Artificial Sequence
  Oligonucleotide for detection of SNP TSC0049711
aacccatttaaaa

SEQ ID NO: 202223 - DNA, 13 bp, Artificial Sequence
  Oligonucleotide for detection of SNP TSC0007094
tgattaatgaaag

SEQ ID NO: 202224 - DNA, 13 bp, Artificial Sequence
  Oligonucleotide for detection of SNP TSC0007094
ctttcattaatca

SEQ ID NO: 202225 - DNA, 13 bp, Artificial Sequence
  Oligonucleotide for detection of SNP TSC0007094
tgattagtgaaag

SEQ ID NO: 202226 - DNA, 13 bp, Artificial Sequence
  Oligonucleotide for detection of SNP TSC0007094
ctttcactaatca

SEQ ID NO: 202227 - DNA, 13 bp, Artificial Sequence
  Oligonucleotide for detection of SNP TSC0049714
agtggaatttttg

SEQ ID NO: 202228 - DNA, 13 bp, Artificial Sequence
  Oligonucleotide for detection of SNP TSC0049714
caaaaattccact

SEQ ID NO: 202229 - DNA, 13 bp, Artificial Sequence
  Oligonucleotide for detection of SNP TSC0049714
agtggagtttttg

SEQ ID NO: 202230 - DNA, 13 bp, Artificial Sequence
  Oligonucleotide for detection of SNP TSC0049714
caaaaactccact

SEQ ID NO: 202231 - DNA, 13 bp, Artificial Sequence
  Oligonucleotide for detection of SNP TSC0049715
ttatattaatata

SEQ ID NO: 202232 - DNA, 13 bp, Artificial Sequence
  Oligonucleotide for detection of SNP TSC0049715
tatattaatataa

SEQ ID NO: 202233 - DNA, 13 bp, Artificial Sequence
  Oligonucleotide for detection of SNP TSC0049715
tatattgatatga

SEQ ID NO: 202234 - DNA, 13 bp, Artificial Sequence
  Oligonucleotide for detection of SNP TSC0049715
tcatatcaatata

SEQ ID NO: 202235 - DNA, 13 bp, Artificial Sequence
  Oligonucleotide for detection of SNP TSC0049715
tatatttatatga

SEQ ID NO: 202236 - DNA, 13 bp, Artificial Sequence
  Oligonucleotide for detection of SNP TSC0049715
tcatataaatata

SEQ ID NO: 202237 - DNA, 13 bp, Artificial Sequence
  Oligonucleotide for detection of SNP TSC0049716
ttttgtttgatta

SEQ ID NO: 202238 - DNA, 13 bp, Artificial Sequence
  Oligonucleotide for detection of SNP TSC0049716
taatcaaacaaaa

SEQ ID NO: 202239 - DNA, 13 bp, Artificial Sequence
  Oligonucleotide for detection of SNP TSC0049716
ttttgtgtgatta

SEQ ID NO: 202240 - DNA, 13 bp, Artificial Sequence
  Oligonucleotide for detection of SNP TSC0049716
taatcacacaaaa

SEQ ID NO: 202241 - DNA, 13 bp, Artificial Sequence
  Oligonucleotide for detection of SNP TSC0049716
tggttagataaaa

SEQ ID NO: 202242 - DNA, 13 bp, Artificial Sequence
  Oligonucleotide for detection of SNP TSC0049716
ttttatctaacca

SEQ ID NO: 202243 - DNA, 13 bp, Artificial Sequence
  Oligonucleotide for detection of SNP TSC0049716
tggttatataaaa

SEQ ID NO: 202244 - DNA, 13 bp, Artificial Sequence
  Oligonucleotide for detection of SNP TSC0049716
ttttatataacca

SEQ ID NO: 202245 - DNA, 13 bp, Artificial Sequence
  Oligonucleotide for detection of SNP TSC0049718
ttagtgatttaat

SEQ ID NO: 202246 - DNA, 13 bp, Artificial Sequence
  Oligonucleotide for detection of SNP TSC0049718
attaaatcactaa

SEQ ID NO: 202247 - DNA, 13 bp, Artificial Sequence
  Oligonucleotide for detection of SNP TSC0049718
ttagtgttttaat

SEQ ID NO: 202248 - DNA, 13 bp, Artificial Sequence
  Oligonucleotide for detection of SNP TSC0049718
attaaaacactaa

SEQ ID NO: 202249 - DNA, 13 bp, Artificial Sequence
  Oligonucleotide for detection of SNP TSC0049718
attgagttattga

SEQ ID NO: 202250 - DNA, 13 bp, Artificial Sequence
  Oligonucleotide for detection of SNP TSC0049718
tcaataactcaat

SEQ ID NO: 202251 - DNA, 13 bp, Artificial Sequence
  Oligonucleotide for detection of SNP TSC0049718
attgagatattga

SEQ ID NO: 202252 - DNA, 13 bp, Artificial Sequence
  Oligonucleotide for detection of SNP TSC0049718
tcaatatctcaat

SEQ ID NO: 202253 - DNA, 13 bp, Artificial Sequence
  Oligonucleotide for detection of SNP TSC0049719
ttttatgttataa

SEQ ID NO: 202254 - DNA, 13 bp, Artificial Sequence
  Oligonucleotide for detection of SNP TSC0049719
ttataacataaaa

SEQ ID NO: 202255 - DNA, 13 bp, Artificial Sequence
  Oligonucleotide for detection of SNP TSC0049719
ttttacgttataa

SEQ ID NO: 202256 - DNA, 13 bp, Artificial Sequence
  Oligonucleotide for detection of SNP TSC0049719
ttataacgtaaaa

SEQ ID NO: 202257 - DNA, 13 bp, Artificial Sequence
  Oligonucleotide for detection of SNP TSC0049719
ttgtagtgtaggg

SEQ ID NO: 202258 - DNA, 13 bp, Artificial Sequence
  Oligonucleotide for detection of SNP TSC0049719
ccctacactacaa

SEQ ID NO: 202259 - DNA, 13 bp, Artificial Sequence
  Oligonucleotide for detection of SNP TSC0049719
ttgtagcgtaggg

SEQ ID NO: 202260 - DNA, 13 bp, Artificial Sequence
  Oligonucleotide for detection of SNP TSC0049719
ccctacgctacaa

SEQ ID NO: 202261 - DNA, 13 bp, Artificial Sequence
  Oligonucleotide for detection of SNP TSC0049720
gaatatgtgttty

SEQ ID NO: 202262 - DNA, 13 bp, Artificial Sequence
  Oligonucleotide for detection of SNP TSC0049720
raaacacatattc

SEQ ID NO: 202263 - DNA, 13 bp, Artificial Sequence
  Oligonucleotide for detection of SNP TSC0049720
gaatatatgttty

SEQ ID NO: 202264 - DNA, 13 bp, Artificial Sequence
  Oligonucleotide for detection of SNP TSC0049720
raaacatatattc

SEQ ID NO: 202265 - DNA, 13 bp, Artificial Sequence
  Oligonucleotide for detection of SNP TSC0049723
tgtttagtagtgt

SEQ ID NO: 202266 - DNA, 13 bp, Artificial Sequence
  Oligonucleotide for detection of SNP TSC0049723
acactactaaaca

SEQ ID NO: 202267 - DNA, 13 bp, Artificial Sequence
  Oligonucleotide for detection of SNP TSC0049723
tgtttaatagtgt

SEQ ID NO: 202268 - DNA, 13 bp, Artificial Sequence
  Oligonucleotide for detection of SNP TSC0049723
acactattaaaca

SEQ ID NO: 202269 - DNA, 13 bp, Artificial Sequence
  Oligonucleotide for detection of SNP TSC0049726
aatggattaatay

SEQ ID NO: 202270 - DNA, 13 bp, Artificial Sequence
  Oligonucleotide for detection of SNP TSC0049726
rtattaatccatt

SEQ ID NO: 202271 - DNA, 13 bp, Artificial Sequence
  Oligonucleotide for detection of SNP TSC0049726
aatggagtaatay

SEQ ID NO: 202272 - DNA, 13 bp, Artificial Sequence
  Oligonucleotide for detection of SNP TSC0049726
rtattactccatt

SEQ ID NO: 202273 - DNA, 13 bp, Artificial Sequence
  Oligonucleotide for detection of SNP TSC0049726
gtattagtttatt

SEQ ID NO: 202274 - DNA, 13 bp, Artificial Sequence
  Oligonucleotide for detection of SNP TSC0049726
aataaactaatac

SEQ ID NO: 202275 - DNA, 13 bp, Artificial Sequence
  Oligonucleotide for detection of SNP TSC0049726
gtattattttatt

SEQ ID NO: 202276 - DNA, 13 bp, Artificial Sequence
  Oligonucleotide for detection of SNP TSC0049726
aataaaataatac

SEQ ID NO: 202277 - DNA, 13 bp, Artificial Sequence
  Oligonucleotide for detection of SNP TSC0049727
ttatggagttagy

SEQ ID NO: 202278 - DNA, 13 bp, Artificial Sequence
  Oligonucleotide for detection of SNP TSC0049727
rctaactccataa

SEQ ID NO: 202279 - DNA, 13 bp, Artificial Sequence
  Oligonucleotide for detection of SNP TSC0049727
ttatggggttagy

SEQ ID NO: 202280 - DNA, 13 bp, Artificial Sequence
  Oligonucleotide for detection of SNP TSC0049727
rctaaccccataa

SEQ ID NO: 202281 - DNA, 13 bp, Artificial Sequence
  Oligonucleotide for detection of SNP TSC0049728
tttaagaagggtg

SEQ ID NO: 202282 - DNA, 13 bp, Artificial Sequence
  Oligonucleotide for detection of SNP TSC0049728
cacccttcttaaa

SEQ ID NO: 202283 - DNA, 13 bp, Artificial Sequence
  Oligonucleotide for detection of SNP TSC0049728
tttaaggagggtg

SEQ ID NO: 202284 - DNA, 13 bp, Artificial Sequence
  Oligonucleotide for detection of SNP TSC0049728
caccctccttaaa

SEQ ID NO: 202285 - DNA, 13 bp, Artificial Sequence
  Oligonucleotide for detection of SNP TSC0049731
tattgtgggatta

SEQ ID NO: 202286 - DNA, 13 bp, Artificial Sequence
  Oligonucleotide for detection of SNP TSC0049731
taatcccacaata

SEQ ID NO: 202287 - DNA, 13 bp, Artificial Sequence
  Oligonucleotide for detection of SNP TSC0049731
tattgtaggatta

SEQ ID NO: 202288 - DNA, 13 bp, Artificial Sequence
  Oligonucleotide for detection of SNP TSC0049731
taatcctacaata

SEQ ID NO: 202289 - DNA, 13 bp, Artificial Sequence
  Oligonucleotide for detection of SNP TSC0049732
attgtcgtgaaag

SEQ ID NO: 202290 - DNA, 13 bp, Artificial Sequence
  Oligonucleotide for detection of SNP TSC0049732
ctttcacgacaat

SEQ ID NO: 202291 - DNA, 13 bp, Artificial Sequence
  Oligonucleotide for detection of SNP TSC0049733
ttgttttttttaa

SEQ ID NO: 202292 - DNA, 13 bp, Artificial Sequence
  Oligonucleotide for detection of SNP TSC0049733
ttaaaaaaaacaa

SEQ ID NO: 202293 - DNA, 13 bp, Artificial Sequence
  Oligonucleotide for detection of SNP TSC0049733
ttaaggggggtaa

SEQ ID NO: 202294 - DNA, 13 bp, Artificial Sequence
  Oligonucleotide for detection of SNP TSC0049733
ttaccccccttaa

SEQ ID NO: 202295 - DNA, 13 bp, Artificial Sequence
  Oligonucleotide for detection of SNP TSC0049736
gtgtgtatgatta

SEQ ID NO: 202296 - DNA, 13 bp, Artificial Sequence
  Oligonucleotide for detection of SNP TSC0049736
taatcatacacac

SEQ ID NO: 202297 - DNA, 13 bp, Artificial Sequence
  Oligonucleotide for detection of SNP TSC0049736
gtgtgtgtgatta

SEQ ID NO: 202298 - DNA, 13 bp, Artificial Sequence
  Oligonucleotide for detection of SNP TSC0049736
taatcacacacac

SEQ ID NO: 202299 - DNA, 13 bp, Artificial Sequence
  Oligonucleotide for detection of SNP TSC0049736
gtgtgcgtgatta

SEQ ID NO: 202300 - DNA, 13 bp, Artificial Sequence
  Oligonucleotide for detection of SNP TSC0049736
taatcacgcacac

SEQ ID NO: 202301 - DNA, 13 bp, Artificial Sequence
  Oligonucleotide for detection of SNP TSC0049736
tgattatgtatay

SEQ ID NO: 202302 - DNA, 13 bp, Artificial Sequence
  Oligonucleotide for detection of SNP TSC0049736
rtatacataatca

SEQ ID NO: 202303 - DNA, 13 bp, Artificial Sequence
  Oligonucleotide for detection of SNP TSC0049736
tgattacgtatay

SEQ ID NO: 202304 - DNA, 13 bp, Artificial Sequence
  Oligonucleotide for detection of SNP TSC0049736
rtatacgtaatca

SEQ ID NO: 202305 - DNA, 13 bp, Artificial Sequence
  Oligonucleotide for detection of SNP TSC0049737
gatttgattgttt

SEQ ID NO: 202306 - DNA, 13 bp, Artificial Sequence
  Oligonucleotide for detection of SNP TSC0049737
aaacaatcaaatc

SEQ ID NO: 202307 - DNA, 13 bp, Artificial Sequence
  Oligonucleotide for detection of SNP TSC0049737
gatttgtttgttt

SEQ ID NO: 202308 - DNA, 13 bp, Artificial Sequence
  Oligonucleotide for detection of SNP TSC0049737
aaacaaacaaatc

SEQ ID NO: 202309 - DNA, 13 bp, Artificial Sequence
  Oligonucleotide for detection of SNP TSC0049737
aggtagttagaty

SEQ ID NO: 202310 - DNA, 13 bp, Artificial Sequence
  Oligonucleotide for detection of SNP TSC0049737
ratctaactacct

SEQ ID NO: 202311 - DNA, 13 bp, Artificial Sequence
  Oligonucleotide for detection of SNP TSC0049737
aggtaggtagaty

SEQ ID NO: 202312 - DNA, 13 bp, Artificial Sequence
  Oligonucleotide for detection of SNP TSC0049737
ratctacctacct

SEQ ID NO: 202313 - DNA, 13 bp, Artificial Sequence
  Oligonucleotide for detection of SNP TSC0007716
gataagtgttttt

SEQ ID NO: 202314 - DNA, 13 bp, Artificial Sequence
  Oligonucleotide for detection of SNP TSC0007716
aaaaacacttatc

SEQ ID NO: 202315 - DNA, 13 bp, Artificial Sequence
  Oligonucleotide for detection of SNP TSC0007716
gataagggttttt

SEQ ID NO: 202316 - DNA, 13 bp, Artificial Sequence
  Oligonucleotide for detection of SNP TSC0007716
aaaaacccttatc

SEQ ID NO: 202317 - DNA, 13 bp, Artificial Sequence
  Oligonucleotide for detection of SNP TSC0007716
aggaatatttaty

SEQ ID NO: 202318 - DNA, 13 bp, Artificial Sequence
  Oligonucleotide for detection of SNP TSC0007716
rataaatattcct

SEQ ID NO: 202319 - DNA, 13 bp, Artificial Sequence
  Oligonucleotide for detection of SNP TSC0007716
aggaatttttaty

SEQ ID NO: 202320 - DNA, 13 bp, Artificial Sequence
  Oligonucleotide for detection of SNP TSC0007716
rataaaaattcct

SEQ ID NO: 202321 - DNA, 13 bp, Artificial Sequence
  Oligonucleotide for detection of SNP TSC0007717
ggtgttagttata

SEQ ID NO: 202322 - DNA, 13 bp, Artificial Sequence
  Oligonucleotide for detection of SNP TSC0007717
tataactaacacc

SEQ ID NO: 202323 - DNA, 13 bp, Artificial Sequence
  Oligonucleotide for detection of SNP TSC0007717
ggtgtttgttata

SEQ ID NO: 202324 - DNA, 13 bp, Artificial Sequence
  Oligonucleotide for detection of SNP TSC0007717
tataacaaacacc

SEQ ID NO: 202325 - DNA, 13 bp, Artificial Sequence
  Oligonucleotide for detection of SNP TSC0007717
tatgattaataty

SEQ ID NO: 202326 - DNA, 13 bp, Artificial Sequence
  Oligonucleotide for detection of SNP TSC0007717
ratattaatcata

SEQ ID NO: 202327 - DNA, 13 bp, Artificial Sequence
  Oligonucleotide for detection of SNP TSC0007717
tatgataaataty

SEQ ID NO: 202328 - DNA, 13 bp, Artificial Sequence
  Oligonucleotide for detection of SNP TSC0007717
ratatttatcata

SEQ ID NO: 202329 - DNA, 13 bp, Artificial Sequence
  Oligonucleotide for detection of SNP TSC0049738
aaattttaaagta

SEQ ID NO: 202330 - DNA, 13 bp, Artificial Sequence
  Oligonucleotide for detection of SNP TSC0049738
tactttaaaattt

SEQ ID NO: 202331 - DNA, 13 bp, Artificial Sequence
  Oligonucleotide for detection of SNP TSC0049738
aaatttgaaagta

SEQ ID NO: 202332 - DNA, 13 bp, Artificial Sequence
  Oligonucleotide for detection of SNP TSC0049738
tactttcaaattt

SEQ ID NO: 202333 - DNA, 13 bp, Artificial Sequence
  Oligonucleotide for detection of SNP TSC0049738
tgttttaaagttt

SEQ ID NO: 202334 - DNA, 13 bp, Artificial Sequence
  Oligonucleotide for detection of SNP TSC0049738
aaactttaaaaca

SEQ ID NO: 202335 - DNA, 13 bp, Artificial Sequence
  Oligonucleotide for detection of SNP TSC0049738
tgtttttaagttt

SEQ ID NO: 202336 - DNA, 13 bp, Artificial Sequence
  Oligonucleotide for detection of SNP TSC0049738
aaacttaaaaaca

SEQ ID NO: 202337 - DNA, 13 bp, Artificial Sequence
  Oligonucleotide for detection of SNP TSC0049739
ggatttaaaaaty

SEQ ID NO: 202338 - DNA, 13 bp, Artificial Sequence
  Oligonucleotide for detection of SNP TSC0049739
ratttttaaatcc

SEQ ID NO: 202339 - DNA, 13 bp, Artificial Sequence
  Oligonucleotide for detection of SNP TSC0049739
ggatttgaaaaty

SEQ ID NO: 202340 - DNA, 13 bp, Artificial Sequence
  Oligonucleotide for detection of SNP TSC0049739
rattttcaaatcc

SEQ ID NO: 202341 - DNA, 13 bp, Artificial Sequence
  Oligonucleotide for detection of SNP TSC0049740
ttgagtaaagtgt

SEQ ID NO: 202342 - DNA, 13 bp, Artificial Sequence
  Oligonucleotide for detection of SNP TSC0049740
acactttactcaa

SEQ ID NO: 202343 - DNA, 13 bp, Artificial Sequence
  Oligonucleotide for detection of SNP TSC0049740
ttgagtgaagtgt

SEQ ID NO: 202344 - DNA, 13 bp, Artificial Sequence
  Oligonucleotide for detection of SNP TSC0049740
acacttcactcaa

SEQ ID NO: 202345 - DNA, 13 bp, Artificial Sequence
  Oligonucleotide for detection of SNP TSC0049740
tcgagtaaagtgt

SEQ ID NO: 202346 - DNA, 13 bp, Artificial Sequence
  Oligonucleotide for detection of SNP TSC0049740
acactttactcga

SEQ ID NO: 202347 - DNA, 13 bp, Artificial Sequence
  Oligonucleotide for detection of SNP TSC0049740
tcgagtgaagtgt

SEQ ID NO: 202348 - DNA, 13 bp, Artificial Sequence
  Oligonucleotide for detection of SNP TSC0049740
acacttcactcga

SEQ ID NO: 202349 - DNA, 13 bp, Artificial Sequence
  Oligonucleotide for detection of SNP TSC0049741
tagaaagttagtg

SEQ ID NO: 202350 - DNA, 13 bp, Artificial Sequence
  Oligonucleotide for detection of SNP TSC0049741
cactaactttcta

SEQ ID NO: 202351 - DNA, 13 bp, Artificial Sequence
  Oligonucleotide for detection of SNP TSC0049741
tagaaaattagtg

SEQ ID NO: 202352 - DNA, 13 bp, Artificial Sequence
  Oligonucleotide for detection of SNP TSC0049741
cactaattttcta

SEQ ID NO: 202353 - DNA, 13 bp, Artificial Sequence
  Oligonucleotide for detection of SNP TSC0049742
ttatttattatag

SEQ ID NO: 202354 - DNA, 13 bp, Artificial Sequence
  Oligonucleotide for detection of SNP TSC0049742
ctataataaataa

SEQ ID NO: 202355 - DNA, 13 bp, Artificial Sequence
  Oligonucleotide for detection of SNP TSC0049742
ttattttttatag

SEQ ID NO: 202356 - DNA, 13 bp, Artificial Sequence
  Oligonucleotide for detection of SNP TSC0049742
ctataaaaaataa

SEQ ID NO: 202357 - DNA, 13 bp, Artificial Sequence
  Oligonucleotide for detection of SNP TSC0049742
ttgtagtagatag

SEQ ID NO: 202358 - DNA, 13 bp, Artificial Sequence
  Oligonucleotide for detection of SNP TSC0049742
ctatctactacaa

SEQ ID NO: 202359 - DNA, 13 bp, Artificial Sequence
  Oligonucleotide for detection of SNP TSC0049742
ttgtaggagatag

SEQ ID NO: 202360 - DNA, 13 bp, Artificial Sequence
  Oligonucleotide for detection of SNP TSC0049742
ctatctcctacaa

SEQ ID NO: 202361 - DNA, 13 bp, Artificial Sequence
  Oligonucleotide for detection of SNP TSC0049743
tttatagtgttay

SEQ ID NO: 202362 - DNA, 13 bp, Artificial Sequence
  Oligonucleotide for detection of SNP TSC0049743
rtaacactataaa

SEQ ID NO: 202363 - DNA, 13 bp, Artificial Sequence
  Oligonucleotide for detection of SNP TSC0049743
tttataatgttay

SEQ ID NO: 202364 - DNA, 13 bp, Artificial Sequence
  Oligonucleotide for detection of SNP TSC0049743
rtaacattataaa

SEQ ID NO: 202365 - DNA, 13 bp, Artificial Sequence
  Oligonucleotide for detection of SNP TSC0049744
attaaagtatttg

SEQ ID NO: 202366 - DNA, 13 bp, Artificial Sequence
  Oligonucleotide for detection of SNP TSC0049744
caaatactttaat

SEQ ID NO: 202367 - DNA, 13 bp, Artificial Sequence
  Oligonucleotide for detection of SNP TSC0049744
attaaaatatttg

SEQ ID NO: 202368 - DNA, 13 bp, Artificial Sequence
  Oligonucleotide for detection of SNP TSC0049744
caaatattttaat

SEQ ID NO: 202369 - DNA, 13 bp, Artificial Sequence
  Oligonucleotide for detection of SNP TSC0049746
ttaaaggttagtt

SEQ ID NO: 202370 - DNA, 13 bp, Artificial Sequence
  Oligonucleotide for detection of SNP TSC0049746
aactaacctttaa

SEQ ID NO: 202371 - DNA, 13 bp, Artificial Sequence
  Oligonucleotide for detection of SNP TSC0049746
ttaaagattagtt

SEQ ID NO: 202372 - DNA, 13 bp, Artificial Sequence
  Oligonucleotide for detection of SNP TSC0049746
aactaatctttaa

SEQ ID NO: 202373 - DNA, 13 bp, Artificial Sequence
  Oligonucleotide for detection of SNP TSC0049747
ttatgggtttgty

SEQ ID NO: 202374 - DNA, 13 bp, Artificial Sequence
  Oligonucleotide for detection of SNP TSC0049747
racaaacccataa

SEQ ID NO: 202375 - DNA, 13 bp, Artificial Sequence
  Oligonucleotide for detection of SNP TSC0049749
ttataagttgaty

SEQ ID NO: 202376 - DNA, 13 bp, Artificial Sequence
  Oligonucleotide for detection of SNP TSC0049749
ratcaacttataa

SEQ ID NO: 202377 - DNA, 13 bp, Artificial Sequence
  Oligonucleotide for detection of SNP TSC0049749
ttataatttgaty

SEQ ID NO: 202378 - DNA, 13 bp, Artificial Sequence
  Oligonucleotide for detection of SNP TSC0049749
ratcaaattataa

SEQ ID NO: 202379 - DNA, 13 bp, Artificial Sequence
  Oligonucleotide for detection of SNP TSC0049750
ggaaaaatttttg

SEQ ID NO: 202380 - DNA, 13 bp, Artificial Sequence
  Oligonucleotide for detection of SNP TSC0049750
caaaaatttttcc

SEQ ID NO: 202381 - DNA, 13 bp, Artificial Sequence
  Oligonucleotide for detection of SNP TSC0049750
ggaaaattttttg

SEQ ID NO: 202382 - DNA, 13 bp, Artificial Sequence
  Oligonucleotide for detection of SNP TSC0049750
caaaaaattttcc

SEQ ID NO: 202383 - DNA, 13 bp, Artificial Sequence
  Oligonucleotide for detection of SNP TSC0049750
taaaaatttttty

SEQ ID NO: 202384 - DNA, 13 bp, Artificial Sequence
  Oligonucleotide for detection of SNP TSC0049750
raaaaaattttta

SEQ ID NO: 202385 - DNA, 13 bp, Artificial Sequence
  Oligonucleotide for detection of SNP TSC0008339
tagagtttgtgta

SEQ ID NO: 202386 - DNA, 13 bp, Artificial Sequence
  Oligonucleotide for detection of SNP TSC0008339
tacacaaactcta

SEQ ID NO: 202387 - DNA, 13 bp, Artificial Sequence
  Oligonucleotide for detection of SNP TSC0008339
tagagtgtgtgta

SEQ ID NO: 202388 - DNA, 13 bp, Artificial Sequence
  Oligonucleotide for detection of SNP TSC0008339
tacacacactcta

SEQ ID NO: 202389 - DNA, 13 bp, Artificial Sequence
  Oligonucleotide for detection of SNP TSC0008339
tgtataaattttg

SEQ ID NO: 202390 - DNA, 13 bp, Artificial Sequence
  Oligonucleotide for detection of SNP TSC0008339
caaaatttataca

SEQ ID NO: 202391 - DNA, 13 bp, Artificial Sequence
  Oligonucleotide for detection of SNP TSC0008339
tgtatatattttg

SEQ ID NO: 202392 - DNA, 13 bp, Artificial Sequence
  Oligonucleotide for detection of SNP TSC0008339
caaaatatataca

SEQ ID NO: 202393 - DNA, 13 bp, Artificial Sequence
  Oligonucleotide for detection of SNP TSC0049757
tagttgtagtgaa

SEQ ID NO: 202394 - DNA, 13 bp, Artificial Sequence
  Oligonucleotide for detection of SNP TSC0049757
ttcactacaacta

SEQ ID NO: 202395 - DNA, 13 bp, Artificial Sequence
  Oligonucleotide for detection of SNP TSC0049757
tagttggagtgaa

SEQ ID NO: 202396 - DNA, 13 bp, Artificial Sequence
  Oligonucleotide for detection of SNP TSC0049757
ttcactccaacta

SEQ ID NO: 202397 - DNA, 13 bp, Artificial Sequence
  Oligonucleotide for detection of SNP TSC0049757
tttattttagtta

SEQ ID NO: 202398 - DNA, 13 bp, Artificial Sequence
  Oligonucleotide for detection of SNP TSC0049757
taactaaaataaa

SEQ ID NO: 202399 - DNA, 13 bp, Artificial Sequence
  Oligonucleotide for detection of SNP TSC0049758
atgttagtatttg

SEQ ID NO: 202400 - DNA, 13 bp, Artificial Sequence
  Oligonucleotide for detection of SNP TSC0049758
caaatactaacat

SEQ ID NO: 202401 - DNA, 13 bp, Artificial Sequence
  Oligonucleotide for detection of SNP TSC0049758
atgttaatatttg

SEQ ID NO: 202402 - DNA, 13 bp, Artificial Sequence
  Oligonucleotide for detection of SNP TSC0049758
caaatattaacat

SEQ ID NO: 202403 - DNA, 13 bp, Artificial Sequence
  Oligonucleotide for detection of SNP TSC0049759
tgttttgaggtty

SEQ ID NO: 202404 - DNA, 13 bp, Artificial Sequence
  Oligonucleotide for detection of SNP TSC0049759
raacctcaaaaca

SEQ ID NO: 202405 - DNA, 13 bp, Artificial Sequence
  Oligonucleotide for detection of SNP TSC0049759
tgttttaaggtty

SEQ ID NO: 202406 - DNA, 13 bp, Artificial Sequence
  Oligonucleotide for detection of SNP TSC0049759
raaccttaaaaca

SEQ ID NO: 202407 - DNA, 13 bp, Artificial Sequence
  Oligonucleotide for detection of SNP TSC0049760
ttggattgtatag

SEQ ID NO: 202408 - DNA, 13 bp, Artificial Sequence
  Oligonucleotide for detection of SNP TSC0049760
ctatacaatccaa

SEQ ID NO: 202409 - DNA, 13 bp, Artificial Sequence
  Oligonucleotide for detection of SNP TSC0049760
tcggattgtatag

SEQ ID NO: 202410 - DNA, 13 bp, Artificial Sequence
  Oligonucleotide for detection of SNP TSC0049760
ctatacaatccga

SEQ ID NO: 202411 - DNA, 13 bp, Artificial Sequence
  Oligonucleotide for detection of SNP TSC0049760
ttggatcgtatag

SEQ ID NO: 202412 - DNA, 13 bp, Artificial Sequence
  Oligonucleotide for detection of SNP TSC0049760
ctatacgatccaa

SEQ ID NO: 202413 - DNA, 13 bp, Artificial Sequence
  Oligonucleotide for detection of SNP TSC0049760
tcggatcgtatag

SEQ ID NO: 202414 - DNA, 13 bp, Artificial Sequence
  Oligonucleotide for detection of SNP TSC0049760
ctatacgatccga

SEQ ID NO: 202415 - DNA, 13 bp, Artificial Sequence
  Oligonucleotide for detection of SNP TSC0049760
ttatatggtttgg

SEQ ID NO: 202416 - DNA, 13 bp, Artificial Sequence
  Oligonucleotide for detection of SNP TSC0049760
ccaaaccatataa

SEQ ID NO: 202417 - DNA, 13 bp, Artificial Sequence
  Oligonucleotide for detection of SNP TSC0049760
ttatatagtttgg

SEQ ID NO: 202418 - DNA, 13 bp, Artificial Sequence
  Oligonucleotide for detection of SNP TSC0049760
ccaaactatataa

SEQ ID NO: 202419 - DNA, 13 bp, Artificial Sequence
  Oligonucleotide for detection of SNP TSC0049760
ttatacggtttgg

SEQ ID NO: 202420 - DNA, 13 bp, Artificial Sequence
  Oligonucleotide for detection of SNP TSC0049760
ccaaaccgtataa

SEQ ID NO: 202421 - DNA, 13 bp, Artificial Sequence
  Oligonucleotide for detection of SNP TSC0049760
ttatatagttcgg

SEQ ID NO: 202422 - DNA, 13 bp, Artificial Sequence
  Oligonucleotide for detection of SNP TSC0049760
ccgaactatataa

SEQ ID NO: 202423 - DNA, 13 bp, Artificial Sequence
  Oligonucleotide for detection of SNP TSC0049760
ttatatggttcgg

SEQ ID NO: 202424 - DNA, 13 bp, Artificial Sequence
  Oligonucleotide for detection of SNP TSC0049760
ccgaaccatataa

SEQ ID NO: 202425 - DNA, 13 bp, Artificial Sequence
  Oligonucleotide for detection of SNP TSC0049760
ttatacggttcgg

SEQ ID NO: 202426 - DNA, 13 bp, Artificial Sequence
  Oligonucleotide for detection of SNP TSC0049760
ccgaaccgtataa

SEQ ID NO: 202427 - DNA, 13 bp, Artificial Sequence
  Oligonucleotide for detection of SNP TSC0049761
ggttaaggtttat

SEQ ID NO: 202428 - DNA, 13 bp, Artificial Sequence
  Oligonucleotide for detection of SNP TSC0049761
ataaaccttaacc

SEQ ID NO: 202429 - DNA, 13 bp, Artificial Sequence
  Oligonucleotide for detection of SNP TSC0049761
ggttaaagtttat

SEQ ID NO: 202430 - DNA, 13 bp, Artificial Sequence
  Oligonucleotide for detection of SNP TSC0049761
ataaactttaacc

SEQ ID NO: 202431 - DNA, 13 bp, Artificial Sequence
  Oligonucleotide for detection of SNP TSC0049762
tttttaaagttty

SEQ ID NO: 202432 - DNA, 13 bp, Artificial Sequence
  Oligonucleotide for detection of SNP TSC0049762
raaactttaaaaa

SEQ ID NO: 202433 - DNA, 13 bp, Artificial Sequence
  Oligonucleotide for detection of SNP TSC0049763
taagaagttttta

SEQ ID NO: 202434 - DNA, 13 bp, Artificial Sequence
  Oligonucleotide for detection of SNP TSC0049763
taaaaacttctta

SEQ ID NO: 202435 - DNA, 13 bp, Artificial Sequence
  Oligonucleotide for detection of SNP TSC0049763
taagaaattttta

SEQ ID NO: 202436 - DNA, 13 bp, Artificial Sequence
  Oligonucleotide for detection of SNP TSC0049763
taaaaatttctta

SEQ ID NO: 202437 - DNA, 13 bp, Artificial Sequence
  Oligonucleotide for detection of SNP TSC0049764
ttggagtggtgty

SEQ ID NO: 202438 - DNA, 13 bp, Artificial Sequence
  Oligonucleotide for detection of SNP TSC0049764
racaccactccaa

SEQ ID NO: 202439 - DNA, 13 bp, Artificial Sequence
  Oligonucleotide for detection of SNP TSC0049764
ttggagcggtgty

SEQ ID NO: 202440 - DNA, 13 bp, Artificial Sequence
  Oligonucleotide for detection of SNP TSC0049764
racaccgctccaa

SEQ ID NO: 202441 - DNA, 13 bp, Artificial Sequence
  Oligonucleotide for detection of SNP TSC0049764
gatatcgttttag

SEQ ID NO: 202442 - DNA, 13 bp, Artificial Sequence
  Oligonucleotide for detection of SNP TSC0049764
ctaaaacgatatc

SEQ ID NO: 202443 - DNA, 13 bp, Artificial Sequence
  Oligonucleotide for detection of SNP TSC0049765
atttttatgttgy

SEQ ID NO: 202444 - DNA, 13 bp, Artificial Sequence
  Oligonucleotide for detection of SNP TSC0049765
rcaacataaaaat

SEQ ID NO: 202445 - DNA, 13 bp, Artificial Sequence
  Oligonucleotide for detection of SNP TSC0049765
atttttgtgttgy

SEQ ID NO: 202446 - DNA, 13 bp, Artificial Sequence
  Oligonucleotide for detection of SNP TSC0049765
rcaacacaaaaat

SEQ ID NO: 202447 - DNA, 13 bp, Artificial Sequence
  Oligonucleotide for detection of SNP TSC0049765
atttttacgttgy

SEQ ID NO: 202448 - DNA, 13 bp, Artificial Sequence
  Oligonucleotide for detection of SNP TSC0049765
rcaacgtaaaaat

SEQ ID NO: 202449 - DNA, 13 bp, Artificial Sequence
  Oligonucleotide for detection of SNP TSC0049765
attttcgtgttgy

SEQ ID NO: 202450 - DNA, 13 bp, Artificial Sequence
  Oligonucleotide for detection of SNP TSC0049765
rcaacacgaaaat

SEQ ID NO: 202451 - DNA, 13 bp, Artificial Sequence
  Oligonucleotide for detection of SNP TSC0049765
atttttgcgttgy

SEQ ID NO: 202452 - DNA, 13 bp, Artificial Sequence
  Oligonucleotide for detection of SNP TSC0049765
rcaacgcaaaaat

SEQ ID NO: 202453 - DNA, 13 bp, Artificial Sequence
  Oligonucleotide for detection of SNP TSC0049765
attttcgcgttgy

SEQ ID NO: 202454 - DNA, 13 bp, Artificial Sequence
  Oligonucleotide for detection of SNP TSC0049765
rcaacgcgaaaat

SEQ ID NO: 202455 - DNA, 13 bp, Artificial Sequence
  Oligonucleotide for detection of SNP TSC0049765
gtagtgtgggagt

SEQ ID NO: 202456 - DNA, 13 bp, Artificial Sequence
  Oligonucleotide for detection of SNP TSC0049765
actcccacactac

SEQ ID NO: 202457 - DNA, 13 bp, Artificial Sequence
  Oligonucleotide for detection of SNP TSC0049765
gtagcgtgggagt

SEQ ID NO: 202458 - DNA, 13 bp, Artificial Sequence
  Oligonucleotide for detection of SNP TSC0049765
actcccacgctac

SEQ ID NO: 202459 - DNA, 13 bp, Artificial Sequence
  Oligonucleotide for detection of SNP TSC0049765
gtagtgcgggagt

SEQ ID NO: 202460 - DNA, 13 bp, Artificial Sequence
  Oligonucleotide for detection of SNP TSC0049765
actcccgcactac

SEQ ID NO: 202461 - DNA, 13 bp, Artificial Sequence
  Oligonucleotide for detection of SNP TSC0049765
gtagcgcgggagt

SEQ ID NO: 202462 - DNA, 13 bp, Artificial Sequence
  Oligonucleotide for detection of SNP TSC0049765
actcccgcgctac

SEQ ID NO: 202463 - DNA, 13 bp, Artificial Sequence
  Oligonucleotide for detection of SNP TSC0049766
aaaaaagaagata

SEQ ID NO: 202464 - DNA, 13 bp, Artificial Sequence
  Oligonucleotide for detection of SNP TSC0049766
tatcttctttttt

SEQ ID NO: 202465 - DNA, 13 bp, Artificial Sequence
  Oligonucleotide for detection of SNP TSC0049766
aaaaaataagata

SEQ ID NO: 202466 - DNA, 13 bp, Artificial Sequence
  Oligonucleotide for detection of SNP TSC0049766
tatcttatttttt

SEQ ID NO: 202467 - DNA, 13 bp, Artificial Sequence
  Oligonucleotide for detection of SNP TSC0049767
ttgttaggtgtta

SEQ ID NO: 202468 - DNA, 13 bp, Artificial Sequence
  Oligonucleotide for detection of SNP TSC0049767
taacacctaacaa

SEQ ID NO: 202469 - DNA, 13 bp, Artificial Sequence
  Oligonucleotide for detection of SNP TSC0049767
ttgttaagtgtta

SEQ ID NO: 202470 - DNA, 13 bp, Artificial Sequence
  Oligonucleotide for detection of SNP TSC0049767
taacacttaacaa

SEQ ID NO: 202471 - DNA, 13 bp, Artificial Sequence
  Oligonucleotide for detection of SNP TSC0049767
tcgttaggtgtta

SEQ ID NO: 202472 - DNA, 13 bp, Artificial Sequence
  Oligonucleotide for detection of SNP TSC0049767
taacacctaacga

SEQ ID NO: 202473 - DNA, 13 bp, Artificial Sequence
  Oligonucleotide for detection of SNP TSC0049767
tcgttaagtgtta

SEQ ID NO: 202474 - DNA, 13 bp, Artificial Sequence
  Oligonucleotide for detection of SNP TSC0049767
taacacttaacga

SEQ ID NO: 202475 - DNA, 13 bp, Artificial Sequence
  Oligonucleotide for detection of SNP TSC0049768
tgtttagttattt

SEQ ID NO: 202476 - DNA, 13 bp, Artificial Sequence
  Oligonucleotide for detection of SNP TSC0049768
aaataactaaaca

SEQ ID NO: 202477 - DNA, 13 bp, Artificial Sequence
  Oligonucleotide for detection of SNP TSC0010741
gagtgaaatttta

SEQ ID NO: 202478 - DNA, 13 bp, Artificial Sequence
  Oligonucleotide for detection of SNP TSC0010741
taaaatttcactc

SEQ ID NO: 202479 - DNA, 13 bp, Artificial Sequence
  Oligonucleotide for detection of SNP TSC0010741
gagtgagatttta

SEQ ID NO: 202480 - DNA, 13 bp, Artificial Sequence
  Oligonucleotide for detection of SNP TSC0010741
taaaatctcactc

SEQ ID NO: 202481 - DNA, 13 bp, Artificial Sequence
  Oligonucleotide for detection of SNP TSC0049769
gtaaaaggagtty

SEQ ID NO: 202482 - DNA, 13 bp, Artificial Sequence
  Oligonucleotide for detection of SNP TSC0049769
raactccttttac

SEQ ID NO: 202483 - DNA, 13 bp, Artificial Sequence
  Oligonucleotide for detection of SNP TSC0049769
gtaaaaagagtty

SEQ ID NO: 202484 - DNA, 13 bp, Artificial Sequence
  Oligonucleotide for detection of SNP TSC0049769
raactctttttac

SEQ ID NO: 202485 - DNA, 13 bp, Artificial Sequence
  Oligonucleotide for detection of SNP TSC0049770
tgaaaatgataty

SEQ ID NO: 202486 - DNA, 13 bp, Artificial Sequence
  Oligonucleotide for detection of SNP TSC0049770
ratatcattttca

SEQ ID NO: 202487 - DNA, 13 bp, Artificial Sequence
  Oligonucleotide for detection of SNP TSC0049770
tgaaaaggataty

SEQ ID NO: 202488 - DNA, 13 bp, Artificial Sequence
  Oligonucleotide for detection of SNP TSC0049770
ratatccttttca

SEQ ID NO: 202489 - DNA, 13 bp, Artificial Sequence
  Oligonucleotide for detection of SNP TSC0049770
tgaaaacgataty

SEQ ID NO: 202490 - DNA, 13 bp, Artificial Sequence
  Oligonucleotide for detection of SNP TSC0049770
ratatcgttttca

SEQ ID NO: 202491 - DNA, 13 bp, Artificial Sequence
  Oligonucleotide for detection of SNP TSC0049770
ggtgttgttttta

SEQ ID NO: 202492 - DNA, 13 bp, Artificial Sequence
  Oligonucleotide for detection of SNP TSC0049770
taaaaacaacacc

SEQ ID NO: 202493 - DNA, 13 bp, Artificial Sequence
  Oligonucleotide for detection of SNP TSC0049770
ggtgtttttttta

SEQ ID NO: 202494 - DNA, 13 bp, Artificial Sequence
  Oligonucleotide for detection of SNP TSC0049770
taaaaaaaacacc

SEQ ID NO: 202495 - DNA, 13 bp, Artificial Sequence
  Oligonucleotide for detection of SNP TSC0049770
ggtgtcgttttta

SEQ ID NO: 202496 - DNA, 13 bp, Artificial Sequence
  Oligonucleotide for detection of SNP TSC0049770
taaaaacgacacc

SEQ ID NO: 202497 - DNA, 13 bp, Artificial Sequence
  Oligonucleotide for detection of SNP TSC0004944
agattggagggaa

SEQ ID NO: 202498 - DNA, 13 bp, Artificial Sequence
  Oligonucleotide for detection of SNP TSC0004944
ttccctccaatct

SEQ ID NO: 202499 - DNA, 13 bp, Artificial Sequence
  Oligonucleotide for detection of SNP TSC0004944
agattgtagggaa

SEQ ID NO: 202500 - DNA, 13 bp, Artificial Sequence
  Oligonucleotide for detection of SNP TSC0004944
ttccctacaatct

SEQ ID NO: 202501 - DNA, 13 bp, Artificial Sequence
  Oligonucleotide for detection of SNP TSC0049772
gatagagttagat

SEQ ID NO: 202502 - DNA, 13 bp, Artificial Sequence
  Oligonucleotide for detection of SNP TSC0049772
atctaactctatc

SEQ ID NO: 202503 - DNA, 13 bp, Artificial Sequence
  Oligonucleotide for detection of SNP TSC0049772
gatagaattagat

SEQ ID NO: 202504 - DNA, 13 bp, Artificial Sequence
  Oligonucleotide for detection of SNP TSC0049772
atctaattctatc

SEQ ID NO: 202505 - DNA, 13 bp, Artificial Sequence
  Oligonucleotide for detection of SNP TSC0049773
gaaaaaattttay

SEQ ID NO: 202506 - DNA, 13 bp, Artificial Sequence
  Oligonucleotide for detection of SNP TSC0049773
rtaaaattttttc

SEQ ID NO: 202507 - DNA, 13 bp, Artificial Sequence
  Oligonucleotide for detection of SNP TSC0049773
gaaaaatttttay

SEQ ID NO: 202508 - DNA, 13 bp, Artificial Sequence
  Oligonucleotide for detection of SNP TSC0049773
rtaaaaatttttc

SEQ ID NO: 202509 - DNA, 13 bp, Artificial Sequence
  Oligonucleotide for detection of SNP TSC0049773
gtaaggtttttty

SEQ ID NO: 202510 - DNA, 13 bp, Artificial Sequence
  Oligonucleotide for detection of SNP TSC0049773
raaaaaaccttac

SEQ ID NO: 202511 - DNA, 13 bp, Artificial Sequence
  Oligonucleotide for detection of SNP TSC0049776
agaagaggagagt

SEQ ID NO: 202512 - DNA, 13 bp, Artificial Sequence
  Oligonucleotide for detection of SNP TSC0049776
actctcctcttct

SEQ ID NO: 202513 - DNA, 13 bp, Artificial Sequence
  Oligonucleotide for detection of SNP TSC0049776
agaagatgagagt

SEQ ID NO: 202514 - DNA, 13 bp, Artificial Sequence
  Oligonucleotide for detection of SNP TSC0049776
actctcatcttct

SEQ ID NO: 202515 - DNA, 13 bp, Artificial Sequence
  Oligonucleotide for detection of SNP TSC0049776
agaagacgagagt

SEQ ID NO: 202516 - DNA, 13 bp, Artificial Sequence
  Oligonucleotide for detection of SNP TSC0049776
actctcgtcttct

SEQ ID NO: 202517 - DNA, 13 bp, Artificial Sequence
  Oligonucleotide for detection of SNP TSC0049777
aaaggtaaaatat

SEQ ID NO: 202518 - DNA, 13 bp, Artificial Sequence
  Oligonucleotide for detection of SNP TSC0049777
atattttaccttt

SEQ ID NO: 202519 - DNA, 13 bp, Artificial Sequence
  Oligonucleotide for detection of SNP TSC0049777
aaaggtgaaatat

SEQ ID NO: 202520 - DNA, 13 bp, Artificial Sequence
  Oligonucleotide for detection of SNP TSC0049777
atatttcaccttt

SEQ ID NO: 202521 - DNA, 13 bp, Artificial Sequence
  Oligonucleotide for detection of SNP TSC0006752
taatggttttttt

SEQ ID NO: 202522 - DNA, 13 bp, Artificial Sequence
  Oligonucleotide for detection of SNP TSC0006752
aaaaaaaccatta

SEQ ID NO: 202523 - DNA, 13 bp, Artificial Sequence
  Oligonucleotide for detection of SNP TSC0006752
taatgggtttttt

SEQ ID NO: 202524 - DNA, 13 bp, Artificial Sequence
  Oligonucleotide for detection of SNP TSC0006752
aaaaaacccatta

SEQ ID NO: 202525 - DNA, 13 bp, Artificial Sequence
  Oligonucleotide for detection of SNP TSC0004647
tggttaaatttgt

SEQ ID NO: 202526 - DNA, 13 bp, Artificial Sequence
  Oligonucleotide for detection of SNP TSC0004647
acaaatttaacca

SEQ ID NO: 202527 - DNA, 13 bp, Artificial Sequence
  Oligonucleotide for detection of SNP TSC0004647
tggttatatttgt

SEQ ID NO: 202528 - DNA, 13 bp, Artificial Sequence
  Oligonucleotide for detection of SNP TSC0004647
acaaatataacca

SEQ ID NO: 202529 - DNA, 13 bp, Artificial Sequence
  Oligonucleotide for detection of SNP TSC0004648
tatagaattattt

SEQ ID NO: 202530 - DNA, 13 bp, Artificial Sequence
  Oligonucleotide for detection of SNP TSC0004648
aaataattctata

SEQ ID NO: 202531 - DNA, 13 bp, Artificial Sequence
  Oligonucleotide for detection of SNP TSC0004648
tatagagttattt

SEQ ID NO: 202532 - DNA, 13 bp, Artificial Sequence
  Oligonucleotide for detection of SNP TSC0004648
aaataactctata

SEQ ID NO: 202533 - DNA, 13 bp, Artificial Sequence
  Oligonucleotide for detection of SNP TSC0049779
taaggggtttata

SEQ ID NO: 202534 - DNA, 13 bp, Artificial Sequence
  Oligonucleotide for detection of SNP TSC0049779
tataaacccctta

SEQ ID NO: 202535 - DNA, 13 bp, Artificial Sequence
  Oligonucleotide for detection of SNP TSC0049779
taagggatttata

SEQ ID NO: 202536 - DNA, 13 bp, Artificial Sequence
  Oligonucleotide for detection of SNP TSC0049779
tataaatccctta

SEQ ID NO: 202537 - DNA, 13 bp, Artificial Sequence
  Oligonucleotide for detection of SNP TSC0049780
atttataatattg

SEQ ID NO: 202538 - DNA, 13 bp, Artificial Sequence
  Oligonucleotide for detection of SNP TSC0049780
caatattataaat

SEQ ID NO: 202539 - DNA, 13 bp, Artificial Sequence
  Oligonucleotide for detection of SNP TSC0049780
atttatgatattg

SEQ ID NO: 202540 - DNA, 13 bp, Artificial Sequence
  Oligonucleotide for detection of SNP TSC0049780
caatatcataaat

SEQ ID NO: 202541 - DNA, 13 bp, Artificial Sequence
  Oligonucleotide for detection of SNP TSC0049780
atttacgatattg

SEQ ID NO: 202542 - DNA, 13 bp, Artificial Sequence
  Oligonucleotide for detection of SNP TSC0049780
caatatcgtaaat

SEQ ID NO: 202543 - DNA, 13 bp, Artificial Sequence
  Oligonucleotide for detection of SNP TSC0049780
taatattgtaagt

SEQ ID NO: 202544 - DNA, 13 bp, Artificial Sequence
  Oligonucleotide for detection of SNP TSC0049780
acttacaatatta

SEQ ID NO: 202545 - DNA, 13 bp, Artificial Sequence
  Oligonucleotide for detection of SNP TSC0049780
taatatcgtaagt

SEQ ID NO: 202546 - DNA, 13 bp, Artificial Sequence
  Oligonucleotide for detection of SNP TSC0049780
acttacgatatta

SEQ ID NO: 202547 - DNA, 13 bp, Artificial Sequence
  Oligonucleotide for detection of SNP TSC0049781
ggttatatttgta

SEQ ID NO: 202548 - DNA, 13 bp, Artificial Sequence
  Oligonucleotide for detection of SNP TSC0049781
tacaaatataacc

SEQ ID NO: 202549 - DNA, 13 bp, Artificial Sequence
  Oligonucleotide for detection of SNP TSC0049781
ggttatgtttgta

SEQ ID NO: 202550 - DNA, 13 bp, Artificial Sequence
  Oligonucleotide for detection of SNP TSC0049781
tacaaacataacc

SEQ ID NO: 202551 - DNA, 13 bp, Artificial Sequence
  Oligonucleotide for detection of SNP TSC0049781
ggttacgtttgta

SEQ ID NO: 202552 - DNA, 13 bp, Artificial Sequence
  Oligonucleotide for detection of SNP TSC0049781
tacaaacgtaacc

SEQ ID NO: 202553 - DNA, 13 bp, Artificial Sequence
  Oligonucleotide for detection of SNP TSC0049781
tataggtgtgaty

SEQ ID NO: 202554 - DNA, 13 bp, Artificial Sequence
  Oligonucleotide for detection of SNP TSC0049781
ratcacacctata

SEQ ID NO: 202555 - DNA, 13 bp, Artificial Sequence
  Oligonucleotide for detection of SNP TSC0049781
tataggcgtgaty

SEQ ID NO: 202556 - DNA, 13 bp, Artificial Sequence
  Oligonucleotide for detection of SNP TSC0049781
ratcacgcctata

SEQ ID NO: 202557 - DNA, 13 bp, Artificial Sequence
  Oligonucleotide for detection of SNP TSC0049782
tagagtaagatta

SEQ ID NO: 202558 - DNA, 13 bp, Artificial Sequence
  Oligonucleotide for detection of SNP TSC0049782
taatcttactcta

SEQ ID NO: 202559 - DNA, 13 bp, Artificial Sequence
  Oligonucleotide for detection of SNP TSC0049782
tagagtgagatta

SEQ ID NO: 202560 - DNA, 13 bp, Artificial Sequence
  Oligonucleotide for detection of SNP TSC0049782
taatctcactcta

SEQ ID NO: 202561 - DNA, 13 bp, Artificial Sequence
  Oligonucleotide for detection of SNP TSC0049782
tagagcgagatta

SEQ ID NO: 202562 - DNA, 13 bp, Artificial Sequence
  Oligonucleotide for detection of SNP TSC0049782
taatctcgctcta

SEQ ID NO: 202563 - DNA, 13 bp, Artificial Sequence
  Oligonucleotide for detection of SNP TSC0049785
gttatttttaggt

SEQ ID NO: 202564 - DNA, 13 bp, Artificial Sequence
  Oligonucleotide for detection of SNP TSC0049785
acctaaaaataac

SEQ ID NO: 202565 - DNA, 13 bp, Artificial Sequence
  Oligonucleotide for detection of SNP TSC0049785
atttgagagtaay

SEQ ID NO: 202566 - DNA, 13 bp, Artificial Sequence
  Oligonucleotide for detection of SNP TSC0049785
rttactctcaaat

SEQ ID NO: 202567 - DNA, 13 bp, Artificial Sequence
  Oligonucleotide for detection of SNP TSC0049785
atttgatagtaay

SEQ ID NO: 202568 - DNA, 13 bp, Artificial Sequence
  Oligonucleotide for detection of SNP TSC0049785
rttactatcaaat

SEQ ID NO: 202569 - DNA, 13 bp, Artificial Sequence
  Oligonucleotide for detection of SNP TSC0049787
atattaaagaagt

SEQ ID NO: 202570 - DNA, 13 bp, Artificial Sequence
  Oligonucleotide for detection of SNP TSC0049787
acttctttaatat

SEQ ID NO: 202571 - DNA, 13 bp, Artificial Sequence
  Oligonucleotide for detection of SNP TSC0049787
atattagagaagt

SEQ ID NO: 202572 - DNA, 13 bp, Artificial Sequence
  Oligonucleotide for detection of SNP TSC0049787
acttctctaatat

SEQ ID NO: 202573 - DNA, 13 bp, Artificial Sequence
  Oligonucleotide for detection of SNP TSC0007573
aatttttgagtta

SEQ ID NO: 202574 - DNA, 13 bp, Artificial Sequence
  Oligonucleotide for detection of SNP TSC0007573
taactcaaaaatt

SEQ ID NO: 202575 - DNA, 13 bp, Artificial Sequence
  Oligonucleotide for detection of SNP TSC0007573
aattttcgagtta

SEQ ID NO: 202576 - DNA, 13 bp, Artificial Sequence
  Oligonucleotide for detection of SNP TSC0007573
taactcgaaaatt

SEQ ID NO: 202577 - DNA, 13 bp, Artificial Sequence
  Oligonucleotide for detection of SNP TSC0007573
tagtttgagggtt

SEQ ID NO: 202578 - DNA, 13 bp, Artificial Sequence
  Oligonucleotide for detection of SNP TSC0007573
aaccctcaaacta

SEQ ID NO: 202579 - DNA, 13 bp, Artificial Sequence
  Oligonucleotide for detection of SNP TSC0007573
tagtttaagggtt

SEQ ID NO: 202580 - DNA, 13 bp, Artificial Sequence
  Oligonucleotide for detection of SNP TSC0007573
aacccttaaacta

SEQ ID NO: 202581 - DNA, 13 bp, Artificial Sequence
  Oligonucleotide for detection of SNP TSC0007573
tagttcgagggtt

SEQ ID NO: 202582 - DNA, 13 bp, Artificial Sequence
  Oligonucleotide for detection of SNP TSC0007573
aaccctcgaacta

SEQ ID NO: 202583 - DNA, 13 bp, Artificial Sequence
  Oligonucleotide for detection of SNP TSC0007712
tttaggaatgtga

SEQ ID NO: 202584 - DNA, 13 bp, Artificial Sequence
  Oligonucleotide for detection of SNP TSC0007712
tcacattcctaaa

SEQ ID NO: 202585 - DNA, 13 bp, Artificial Sequence
  Oligonucleotide for detection of SNP TSC0007712
tttagggatgtga

SEQ ID NO: 202586 - DNA, 13 bp, Artificial Sequence
  Oligonucleotide for detection of SNP TSC0007712
tcacatccctaaa

SEQ ID NO: 202587 - DNA, 13 bp, Artificial Sequence
  Oligonucleotide for detection of SNP TSC0007712
tttaggaacgtga

SEQ ID NO: 202588 - DNA, 13 bp, Artificial Sequence
  Oligonucleotide for detection of SNP TSC0007712
tcacgttcctaaa

SEQ ID NO: 202589 - DNA, 13 bp, Artificial Sequence
  Oligonucleotide for detection of SNP TSC0007712
tttagggacgtga

SEQ ID NO: 202590 - DNA, 13 bp, Artificial Sequence
  Oligonucleotide for detection of SNP TSC0007712
tcacgtccctaaa

SEQ ID NO: 202591 - DNA, 13 bp, Artificial Sequence
  Oligonucleotide for detection of SNP TSC0007712
tttaggaatgcga

SEQ ID NO: 202592 - DNA, 13 bp, Artificial Sequence
  Oligonucleotide for detection of SNP TSC0007712
tcgcattcctaaa

SEQ ID NO: 202593 - DNA, 13 bp, Artificial Sequence
  Oligonucleotide for detection of SNP TSC0007712
tttagggatgcga

SEQ ID NO: 202594 - DNA, 13 bp, Artificial Sequence
  Oligonucleotide for detection of SNP TSC0007712
tcgcatccctaaa

SEQ ID NO: 202595 - DNA, 13 bp, Artificial Sequence
  Oligonucleotide for detection of SNP TSC0007712
tttaggaacgcga

SEQ ID NO: 202596 - DNA, 13 bp, Artificial Sequence
  Oligonucleotide for detection of SNP TSC0007712
tcgcgttcctaaa

SEQ ID NO: 202597 - DNA, 13 bp, Artificial Sequence
  Oligonucleotide for detection of SNP TSC0007712
tttagggacgcga

SEQ ID NO: 202598 - DNA, 13 bp, Artificial Sequence
  Oligonucleotide for detection of SNP TSC0007712
tcgcgtccctaaa

SEQ ID NO: 202599 - DNA, 13 bp, Artificial Sequence
  Oligonucleotide for detection of SNP TSC0049792
gatattgatatta

SEQ ID NO: 202600 - DNA, 13 bp, Artificial Sequence
  Oligonucleotide for detection of SNP TSC0049792
taatatcaatatc

SEQ ID NO: 202601 - DNA, 13 bp, Artificial Sequence
  Oligonucleotide for detection of SNP TSC0049792
gatattaatatta

SEQ ID NO: 202602 - DNA, 13 bp, Artificial Sequence
  Oligonucleotide for detection of SNP TSC0049792
taatattaatatc

SEQ ID NO: 202603 - DNA, 13 bp, Artificial Sequence
  Oligonucleotide for detection of SNP TSC0007244
aaaaatgggttgg

SEQ ID NO: 202604 - DNA, 13 bp, Artificial Sequence
  Oligonucleotide for detection of SNP TSC0007244
ccaacccattttt

SEQ ID NO: 202605 - DNA, 13 bp, Artificial Sequence
  Oligonucleotide for detection of SNP TSC0007244
aaaaataggttgg

SEQ ID NO: 202606 - DNA, 13 bp, Artificial Sequence
  Oligonucleotide for detection of SNP TSC0007244
ccaacctattttt

SEQ ID NO: 202607 - DNA, 13 bp, Artificial Sequence
  Oligonucleotide for detection of SNP TSC0007244
aaaaacgggttgg

SEQ ID NO: 202608 - DNA, 13 bp, Artificial Sequence
  Oligonucleotide for detection of SNP TSC0007244
ccaacccgttttt

SEQ ID NO: 202609 - DNA, 13 bp, Artificial Sequence
  Oligonucleotide for detection of SNP TSC0001530
aaggaaagtttgy

SEQ ID NO: 202610 - DNA, 13 bp, Artificial Sequence
  Oligonucleotide for detection of SNP TSC0001530
rcaaactttcctt

SEQ ID NO: 202611 - DNA, 13 bp, Artificial Sequence
  Oligonucleotide for detection of SNP TSC0001530
aaggaatgtttgy

SEQ ID NO: 202612 - DNA, 13 bp, Artificial Sequence
  Oligonucleotide for detection of SNP TSC0001530
rcaaacattcctt

SEQ ID NO: 202613 - DNA, 13 bp, Artificial Sequence
  Oligonucleotide for detection of SNP TSC0001530
gtaggtttttttt

SEQ ID NO: 202614 - DNA, 13 bp, Artificial Sequence
  Oligonucleotide for detection of SNP TSC0001530
aaaaaaaacctac

SEQ ID NO: 202615 - DNA, 13 bp, Artificial Sequence
  Oligonucleotide for detection of SNP TSC0001531
taaagttatagat

SEQ ID NO: 202616 - DNA, 13 bp, Artificial Sequence
  Oligonucleotide for detection of SNP TSC0001531
atctataacttta

SEQ ID NO: 202617 - DNA, 13 bp, Artificial Sequence
  Oligonucleotide for detection of SNP TSC0001531
taaagtgatagat

SEQ ID NO: 202618 - DNA, 13 bp, Artificial Sequence
  Oligonucleotide for detection of SNP TSC0001531
atctatcacttta

SEQ ID NO: 202619 - DNA, 13 bp, Artificial Sequence
  Oligonucleotide for detection of SNP TSC0001531
taaagcgatagat

SEQ ID NO: 202620 - DNA, 13 bp, Artificial Sequence
  Oligonucleotide for detection of SNP TSC0001531
atctatcgcttta

SEQ ID NO: 202621 - DNA, 13 bp, Artificial Sequence
  Oligonucleotide for detection of SNP TSC0001531
atttgttgtttta

SEQ ID NO: 202622 - DNA, 13 bp, Artificial Sequence
  Oligonucleotide for detection of SNP TSC0001531
taaaacaacaaat

SEQ ID NO: 202623 - DNA, 13 bp, Artificial Sequence
  Oligonucleotide for detection of SNP TSC0001531
atttgtcgtttta

SEQ ID NO: 202624 - DNA, 13 bp, Artificial Sequence
  Oligonucleotide for detection of SNP TSC0001531
taaaacgacaaat

SEQ ID NO: 202625 - DNA, 13 bp, Artificial Sequence
  Oligonucleotide for detection of SNP TSC0001532
tatttatatttaa

SEQ ID NO: 202626 - DNA, 13 bp, Artificial Sequence
  Oligonucleotide for detection of SNP TSC0001532
ttaaatataaata

SEQ ID NO: 202627 - DNA, 13 bp, Artificial Sequence
  Oligonucleotide for detection of SNP TSC0001532
ttgagtttgaata

SEQ ID NO: 202628 - DNA, 13 bp, Artificial Sequence
  Oligonucleotide for detection of SNP TSC0001532
tattcaaactcaa

SEQ ID NO: 202629 - DNA, 13 bp, Artificial Sequence
  Oligonucleotide for detection of SNP TSC0001532
ttgagtatgaata

SEQ ID NO: 202630 - DNA, 13 bp, Artificial Sequence
  Oligonucleotide for detection of SNP TSC0001532
tattcatactcaa

SEQ ID NO: 202631 - DNA, 13 bp, Artificial Sequence
  Oligonucleotide for detection of SNP TSC0049793
agtttatattata

SEQ ID NO: 202632 - DNA, 13 bp, Artificial Sequence
  Oligonucleotide for detection of SNP TSC0049793
tataatataaact

SEQ ID NO: 202633 - DNA, 13 bp, Artificial Sequence
  Oligonucleotide for detection of SNP TSC0049793
agtttagattata

SEQ ID NO: 202634 - DNA, 13 bp, Artificial Sequence
  Oligonucleotide for detection of SNP TSC0049793
tataatctaaact

SEQ ID NO: 202635 - DNA, 13 bp, Artificial Sequence
  Oligonucleotide for detection of SNP TSC0049793
tgtggtataggtt

SEQ ID NO: 202636 - DNA, 13 bp, Artificial Sequence
  Oligonucleotide for detection of SNP TSC0049793
aacctataccaca

SEQ ID NO: 202637 - DNA, 13 bp, Artificial Sequence
  Oligonucleotide for detection of SNP TSC0049793
tgtggtttaggtt

SEQ ID NO: 202638 - DNA, 13 bp, Artificial Sequence
  Oligonucleotide for detection of SNP TSC0049793
aacctaaaccaca

SEQ ID NO: 202639 - DNA, 13 bp, Artificial Sequence
  Oligonucleotide for detection of SNP TSC0049794
ttataaatttgtt

SEQ ID NO: 202640 - DNA, 13 bp, Artificial Sequence
  Oligonucleotide for detection of SNP TSC0049794
aacaaatttataa

SEQ ID NO: 202641 - DNA, 13 bp, Artificial Sequence
  Oligonucleotide for detection of SNP TSC0049794
ttataagtttgtt

SEQ ID NO: 202642 - DNA, 13 bp, Artificial Sequence
  Oligonucleotide for detection of SNP TSC0049794
aacaaacttataa

SEQ ID NO: 202643 - DNA, 13 bp, Artificial Sequence
  Oligonucleotide for detection of SNP TSC0049795
ggaggaggaaaga

SEQ ID NO: 202644 - DNA, 13 bp, Artificial Sequence
  Oligonucleotide for detection of SNP TSC0049795
tctttcctcctcc

SEQ ID NO: 202645 - DNA, 13 bp, Artificial Sequence
  Oligonucleotide for detection of SNP TSC0049795
ggaggaagaaaga

SEQ ID NO: 202646 - DNA, 13 bp, Artificial Sequence
  Oligonucleotide for detection of SNP TSC0049795
tctttcttcctcc

SEQ ID NO: 202647 - DNA, 13 bp, Artificial Sequence
  Oligonucleotide for detection of SNP TSC0049796
tattttgtgtgay

SEQ ID NO: 202648 - DNA, 13 bp, Artificial Sequence
  Oligonucleotide for detection of SNP TSC0049796
rtcacacaaaata

SEQ ID NO: 202649 - DNA, 13 bp, Artificial Sequence
  Oligonucleotide for detection of SNP TSC0049796
tattttatgtgay

SEQ ID NO: 202650 - DNA, 13 bp, Artificial Sequence
  Oligonucleotide for detection of SNP TSC0049796
rtcacataaaata

SEQ ID NO: 202651 - DNA, 13 bp, Artificial Sequence
  Oligonucleotide for detection of SNP TSC0000963
gaaaaaattaaaa

SEQ ID NO: 202652 - DNA, 13 bp, Artificial Sequence
  Oligonucleotide for detection of SNP TSC0000963
ttttaattttttc

SEQ ID NO: 202653 - DNA, 13 bp, Artificial Sequence
  Oligonucleotide for detection of SNP TSC0000963
gaaaaatttaaaa

SEQ ID NO: 202654 - DNA, 13 bp, Artificial Sequence
  Oligonucleotide for detection of SNP TSC0000963
ttttaaatttttc

SEQ ID NO: 202655 - DNA, 13 bp, Artificial Sequence
  Oligonucleotide for detection of SNP TSC0049800
ttaattatgtaaa

SEQ ID NO: 202656 - DNA, 13 bp, Artificial Sequence
  Oligonucleotide for detection of SNP TSC0049800
tttacataattaa

SEQ ID NO: 202657 - DNA, 13 bp, Artificial Sequence
  Oligonucleotide for detection of SNP TSC0049800
ttaattttgtaaa

SEQ ID NO: 202658 - DNA, 13 bp, Artificial Sequence
  Oligonucleotide for detection of SNP TSC0049800
tttacaaaattaa

SEQ ID NO: 202659 - DNA, 13 bp, Artificial Sequence
  Oligonucleotide for detection of SNP TSC0049800
tttgtataattaa

SEQ ID NO: 202660 - DNA, 13 bp, Artificial Sequence
  Oligonucleotide for detection of SNP TSC0049800
ttaattatacaaa

SEQ ID NO: 202661 - DNA, 13 bp, Artificial Sequence
  Oligonucleotide for detection of SNP TSC0049800
tttgtagaattaa

SEQ ID NO: 202662 - DNA, 13 bp, Artificial Sequence
  Oligonucleotide for detection of SNP TSC0049800
ttaattctacaaa

SEQ ID NO: 202663 - DNA, 13 bp, Artificial Sequence
  Oligonucleotide for detection of SNP TSC0010393
attgtttaattgt

SEQ ID NO: 202664 - DNA, 13 bp, Artificial Sequence
  Oligonucleotide for detection of SNP TSC0010393
acaattaaacaat

SEQ ID NO: 202665 - DNA, 13 bp, Artificial Sequence
  Oligonucleotide for detection of SNP TSC0010393
attgttgaattgt

SEQ ID NO: 202666 - DNA, 13 bp, Artificial Sequence
  Oligonucleotide for detection of SNP TSC0010393
acaattcaacaat

SEQ ID NO: 202667 - DNA, 13 bp, Artificial Sequence
  Oligonucleotide for detection of SNP TSC0010393
ataattaaataat

SEQ ID NO: 202668 - DNA, 13 bp, Artificial Sequence
  Oligonucleotide for detection of SNP TSC0010393
attatttaattat

SEQ ID NO: 202669 - DNA, 13 bp, Artificial Sequence
  Oligonucleotide for detection of SNP TSC0010393
ataatttaataat

SEQ ID NO: 202670 - DNA, 13 bp, Artificial Sequence
  Oligonucleotide for detection of SNP TSC0010393
attattaaattat

SEQ ID NO: 202671 - DNA, 13 bp, Artificial Sequence
  Oligonucleotide for detection of SNP TSC0049801
ttttgataagtaa

SEQ ID NO: 202672 - DNA, 13 bp, Artificial Sequence
  Oligonucleotide for detection of SNP TSC0049801
ttacttatcaaaa

SEQ ID NO: 202673 - DNA, 13 bp, Artificial Sequence
  Oligonucleotide for detection of SNP TSC0049801
ttttgagaagtaa

SEQ ID NO: 202674 - DNA, 13 bp, Artificial Sequence
  Oligonucleotide for detection of SNP TSC0049801
ttacttctcaaaa

SEQ ID NO: 202675 - DNA, 13 bp, Artificial Sequence
  Oligonucleotide for detection of SNP TSC0049801
ttatttattagag

SEQ ID NO: 202676 - DNA, 13 bp, Artificial Sequence
  Oligonucleotide for detection of SNP TSC0049801
ctctaataaataa

SEQ ID NO: 202677 - DNA, 13 bp, Artificial Sequence
  Oligonucleotide for detection of SNP TSC0049802
attgatatatgat

SEQ ID NO: 202678 - DNA, 13 bp, Artificial Sequence
  Oligonucleotide for detection of SNP TSC0049802
atcatatatcaat

SEQ ID NO: 202679 - DNA, 13 bp, Artificial Sequence
  Oligonucleotide for detection of SNP TSC0049802
attgatttatgat

SEQ ID NO: 202680 - DNA, 13 bp, Artificial Sequence
  Oligonucleotide for detection of SNP TSC0049802
atcataaatcaat

SEQ ID NO: 202681 - DNA, 13 bp, Artificial Sequence
  Oligonucleotide for detection of SNP TSC0049802
attatgtgttagt

SEQ ID NO: 202682 - DNA, 13 bp, Artificial Sequence
  Oligonucleotide for detection of SNP TSC0049802
actaacacataat

SEQ ID NO: 202683 - DNA, 13 bp, Artificial Sequence
  Oligonucleotide for detection of SNP TSC0049802
attatgagttagt

SEQ ID NO: 202684 - DNA, 13 bp, Artificial Sequence
  Oligonucleotide for detection of SNP TSC0049802
actaactcataat

SEQ ID NO: 202685 - DNA, 13 bp, Artificial Sequence
  Oligonucleotide for detection of SNP TSC0049803
tttggtaagattg

SEQ ID NO: 202686 - DNA, 13 bp, Artificial Sequence
  Oligonucleotide for detection of SNP TSC0049803
caatcttaccaaa

SEQ ID NO: 202687 - DNA, 13 bp, Artificial Sequence
  Oligonucleotide for detection of SNP TSC0049804
gagaaagggtatg

SEQ ID NO: 202688 - DNA, 13 bp, Artificial Sequence
  Oligonucleotide for detection of SNP TSC0049804
cataccctttctc

SEQ ID NO: 202689 - DNA, 13 bp, Artificial Sequence
  Oligonucleotide for detection of SNP TSC0049806
aaagatattatgt

SEQ ID NO: 202690 - DNA, 13 bp, Artificial Sequence
  Oligonucleotide for detection of SNP TSC0049806
acataatatcttt

SEQ ID NO: 202691 - DNA, 13 bp, Artificial Sequence
  Oligonucleotide for detection of SNP TSC0049806
aaagatgttatgt

SEQ ID NO: 202692 - DNA, 13 bp, Artificial Sequence
  Oligonucleotide for detection of SNP TSC0049806
acataacatcttt

SEQ ID NO: 202693 - DNA, 13 bp, Artificial Sequence
  Oligonucleotide for detection of SNP TSC0049807
gaggaatgtgtgy

SEQ ID NO: 202694 - DNA, 13 bp, Artificial Sequence
  Oligonucleotide for detection of SNP TSC0049807
rcacacattcctc

SEQ ID NO: 202695 - DNA, 13 bp, Artificial Sequence
  Oligonucleotide for detection of SNP TSC0049807
gaggaaagtgtgy

SEQ ID NO: 202696 - DNA, 13 bp, Artificial Sequence
  Oligonucleotide for detection of SNP TSC0049807
rcacactttcctc

SEQ ID NO: 202697 - DNA, 13 bp, Artificial Sequence
  Oligonucleotide for detection of SNP TSC0049808
atttttgagttta

SEQ ID NO: 202698 - DNA, 13 bp, Artificial Sequence
  Oligonucleotide for detection of SNP TSC0049808
taaactcaaaaat

SEQ ID NO: 202699 - DNA, 13 bp, Artificial Sequence
  Oligonucleotide for detection of SNP TSC0049808
atttttaagttta

SEQ ID NO: 202700 - DNA, 13 bp, Artificial Sequence
  Oligonucleotide for detection of SNP TSC0049808
taaacttaaaaat

SEQ ID NO: 202701 - DNA, 13 bp, Artificial Sequence
  Oligonucleotide for detection of SNP TSC0049809
aggtgaatgattt

SEQ ID NO: 202702 - DNA, 13 bp, Artificial Sequence
  Oligonucleotide for detection of SNP TSC0049809
aaatcattcacct

SEQ ID NO: 202703 - DNA, 13 bp, Artificial Sequence
  Oligonucleotide for detection of SNP TSC0049809
aggtgagtgattt

SEQ ID NO: 202704 - DNA, 13 bp, Artificial Sequence
  Oligonucleotide for detection of SNP TSC0049809
aaatcactcacct

SEQ ID NO: 202705 - DNA, 13 bp, Artificial Sequence
  Oligonucleotide for detection of SNP TSC0049810
aagtatagatagy

SEQ ID NO: 202706 - DNA, 13 bp, Artificial Sequence
  Oligonucleotide for detection of SNP TSC0049810
rctatctatactt

SEQ ID NO: 202707 - DNA, 13 bp, Artificial Sequence
  Oligonucleotide for detection of SNP TSC0049810
aagtattgatagy

SEQ ID NO: 202708 - DNA, 13 bp, Artificial Sequence
  Oligonucleotide for detection of SNP TSC0049810
rctatcaatactt

SEQ ID NO: 202709 - DNA, 13 bp, Artificial Sequence
  Oligonucleotide for detection of SNP TSC0049810
gttgtttatgttt

SEQ ID NO: 202710 - DNA, 13 bp, Artificial Sequence
  Oligonucleotide for detection of SNP TSC0049810
aaacataaacaac

SEQ ID NO: 202711 - DNA, 13 bp, Artificial Sequence
  Oligonucleotide for detection of SNP TSC0049810
gttgttaatgttt

SEQ ID NO: 202712 - DNA, 13 bp, Artificial Sequence
  Oligonucleotide for detection of SNP TSC0049810
aaacattaacaac

SEQ ID NO: 202713 - DNA, 13 bp, Artificial Sequence
  Oligonucleotide for detection of SNP TSC0049811
atgttaataagta

SEQ ID NO: 202714 - DNA, 13 bp, Artificial Sequence
  Oligonucleotide for detection of SNP TSC0049811
tacttattaacat

SEQ ID NO: 202715 - DNA, 13 bp, Artificial Sequence
  Oligonucleotide for detection of SNP TSC0049811
atgttattaagta

SEQ ID NO: 202716 - DNA, 13 bp, Artificial Sequence
  Oligonucleotide for detection of SNP TSC0049811
tacttaataacat

SEQ ID NO: 202717 - DNA, 13 bp, Artificial Sequence
  Oligonucleotide for detection of SNP TSC0049811
tatttgttaatat

SEQ ID NO: 202718 - DNA, 13 bp, Artificial Sequence
  Oligonucleotide for detection of SNP TSC0049811
atattaacaaata

SEQ ID NO: 202719 - DNA, 13 bp, Artificial Sequence
  Oligonucleotide for detection of SNP TSC0049811
tatttgataatat

SEQ ID NO: 202720 - DNA, 13 bp, Artificial Sequence
  Oligonucleotide for detection of SNP TSC0049811
atattatcaaata

SEQ ID NO: 202721 - DNA, 13 bp, Artificial Sequence
  Oligonucleotide for detection of SNP TSC0049813
tgttataggagaa

SEQ ID NO: 202722 - DNA, 13 bp, Artificial Sequence
  Oligonucleotide for detection of SNP TSC0049813
ttctcctataaca

SEQ ID NO: 202723 - DNA, 13 bp, Artificial Sequence
  Oligonucleotide for detection of SNP TSC0049813
tgttatgggagaa

SEQ ID NO: 202724 - DNA, 13 bp, Artificial Sequence
  Oligonucleotide for detection of SNP TSC0049813
ttctcccataaca

SEQ ID NO: 202725 - DNA, 13 bp, Artificial Sequence
  Oligonucleotide for detection of SNP TSC0049813
tgttacgggagaa

SEQ ID NO: 202726 - DNA, 13 bp, Artificial Sequence
  Oligonucleotide for detection of SNP TSC0049813
ttctcccgtaaca

SEQ ID NO: 202727 - DNA, 13 bp, Artificial Sequence
  Oligonucleotide for detection of SNP TSC0049814
aggttggttaaag

SEQ ID NO: 202728 - DNA, 13 bp, Artificial Sequence
  Oligonucleotide for detection of SNP TSC0049814
ctttaaccaacct

SEQ ID NO: 202729 - DNA, 13 bp, Artificial Sequence
  Oligonucleotide for detection of SNP TSC0049814
aggttgattaaag

SEQ ID NO: 202730 - DNA, 13 bp, Artificial Sequence
  Oligonucleotide for detection of SNP TSC0049814
ctttaatcaacct

SEQ ID NO: 202731 - DNA, 13 bp, Artificial Sequence
  Oligonucleotide for detection of SNP TSC0006567
gttatatgtgata

SEQ ID NO: 202732 - DNA, 13 bp, Artificial Sequence
  Oligonucleotide for detection of SNP TSC0006567
tatcacatataac

SEQ ID NO: 202733 - DNA, 13 bp, Artificial Sequence
  Oligonucleotide for detection of SNP TSC0006567
gttataggtgata

SEQ ID NO: 202734 - DNA, 13 bp, Artificial Sequence
  Oligonucleotide for detection of SNP TSC0006567
tatcacctataac

SEQ ID NO: 202735 - DNA, 13 bp, Artificial Sequence
  Oligonucleotide for detection of SNP TSC0006567
tattatatatggy

SEQ ID NO: 202736 - DNA, 13 bp, Artificial Sequence
  Oligonucleotide for detection of SNP TSC0006567
rccatatataata

SEQ ID NO: 202737 - DNA, 13 bp, Artificial Sequence
  Oligonucleotide for detection of SNP TSC0006567
tattatttatggy

SEQ ID NO: 202738 - DNA, 13 bp, Artificial Sequence
  Oligonucleotide for detection of SNP TSC0006567
rccataaataata

SEQ ID NO: 202739 - DNA, 13 bp, Artificial Sequence
  Oligonucleotide for detection of SNP TSC0049817
tgtgtatgtaaag

SEQ ID NO: 202740 - DNA, 13 bp, Artificial Sequence
  Oligonucleotide for detection of SNP TSC0049817
ctttacatacaca

SEQ ID NO: 202741 - DNA, 13 bp, Artificial Sequence
  Oligonucleotide for detection of SNP TSC0049817
tgtgtaggtaaag

SEQ ID NO: 202742 - DNA, 13 bp, Artificial Sequence
  Oligonucleotide for detection of SNP TSC0049817
ctttacctacaca

SEQ ID NO: 202743 - DNA, 13 bp, Artificial Sequence
  Oligonucleotide for detection of SNP TSC0049817
tgtgtacgtaaag

SEQ ID NO: 202744 - DNA, 13 bp, Artificial Sequence
  Oligonucleotide for detection of SNP TSC0049817
ctttacgtacaca

SEQ ID NO: 202745 - DNA, 13 bp, Artificial Sequence
  Oligonucleotide for detection of SNP TSC0049817
ttttgtgtatata

SEQ ID NO: 202746 - DNA, 13 bp, Artificial Sequence
  Oligonucleotide for detection of SNP TSC0049817
tatatacacaaaa

SEQ ID NO: 202747 - DNA, 13 bp, Artificial Sequence
  Oligonucleotide for detection of SNP TSC0049817
ttttgtttatata

SEQ ID NO: 202748 - DNA, 13 bp, Artificial Sequence
  Oligonucleotide for detection of SNP TSC0049817
tatataaacaaaa

SEQ ID NO: 202749 - DNA, 13 bp, Artificial Sequence
  Oligonucleotide for detection of SNP TSC0049817
ttttgcgtatata

SEQ ID NO: 202750 - DNA, 13 bp, Artificial Sequence
  Oligonucleotide for detection of SNP TSC0049817
tatatacgcaaaa

SEQ ID NO: 202751 - DNA, 13 bp, Artificial Sequence
  Oligonucleotide for detection of SNP TSC0010973
tgattaattagty

SEQ ID NO: 202752 - DNA, 13 bp, Artificial Sequence
  Oligonucleotide for detection of SNP TSC0010973
ractaattaatca

SEQ ID NO: 202753 - DNA, 13 bp, Artificial Sequence
  Oligonucleotide for detection of SNP TSC0010973
tgattagttagty

SEQ ID NO: 202754 - DNA, 13 bp, Artificial Sequence
  Oligonucleotide for detection of SNP TSC0010973
ractaactaatca

SEQ ID NO: 202755 - DNA, 13 bp, Artificial Sequence
  Oligonucleotide for detection of SNP TSC0049819
aaattatttgggt

SEQ ID NO: 202756 - DNA, 13 bp, Artificial Sequence
  Oligonucleotide for detection of SNP TSC0049819
acccaaataattt

SEQ ID NO: 202757 - DNA, 13 bp, Artificial Sequence
  Oligonucleotide for detection of SNP TSC0049819
aaattagttgggt

SEQ ID NO: 202758 - DNA, 13 bp, Artificial Sequence
  Oligonucleotide for detection of SNP TSC0049819
acccaactaattt

SEQ ID NO: 202759 - DNA, 13 bp, Artificial Sequence
  Oligonucleotide for detection of SNP TSC0049819
aaattattcgggt

SEQ ID NO: 202760 - DNA, 13 bp, Artificial Sequence
  Oligonucleotide for detection of SNP TSC0049819
acccgaataattt

SEQ ID NO: 202761 - DNA, 13 bp, Artificial Sequence
  Oligonucleotide for detection of SNP TSC0049819
aaattagtcgggt

SEQ ID NO: 202762 - DNA, 13 bp, Artificial Sequence
  Oligonucleotide for detection of SNP TSC0049819
acccgactaattt

SEQ ID NO: 202763 - DNA, 13 bp, Artificial Sequence
  Oligonucleotide for detection of SNP TSC0049819
atttggataattt

SEQ ID NO: 202764 - DNA, 13 bp, Artificial Sequence
  Oligonucleotide for detection of SNP TSC0049819
aaattatccaaat

SEQ ID NO: 202765 - DNA, 13 bp, Artificial Sequence
  Oligonucleotide for detection of SNP TSC0049819
attcggataattt

SEQ ID NO: 202766 - DNA, 13 bp, Artificial Sequence
  Oligonucleotide for detection of SNP TSC0049819
aaattatccgaat

SEQ ID NO: 202767 - DNA, 13 bp, Artificial Sequence
  Oligonucleotide for detection of SNP TSC0049819
attcggttaattt

SEQ ID NO: 202768 - DNA, 13 bp, Artificial Sequence
  Oligonucleotide for detection of SNP TSC0049819
aaattaaccgaat

SEQ ID NO: 202769 - DNA, 13 bp, Artificial Sequence
  Oligonucleotide for detection of SNP TSC0049820
ggaggtggggttt

SEQ ID NO: 202770 - DNA, 13 bp, Artificial Sequence
  Oligonucleotide for detection of SNP TSC0049820
aaaccccacctcc

SEQ ID NO: 202771 - DNA, 13 bp, Artificial Sequence
  Oligonucleotide for detection of SNP TSC0049820
ggaggtagggttt

SEQ ID NO: 202772 - DNA, 13 bp, Artificial Sequence
  Oligonucleotide for detection of SNP TSC0049820
aaaccctacctcc

SEQ ID NO: 202773 - DNA, 13 bp, Artificial Sequence
  Oligonucleotide for detection of SNP TSC0049822
gtttttagaattg

SEQ ID NO: 202774 - DNA, 13 bp, Artificial Sequence
  Oligonucleotide for detection of SNP TSC0049822
caattctaaaaac

SEQ ID NO: 202775 - DNA, 13 bp, Artificial Sequence
  Oligonucleotide for detection of SNP TSC0049822
gtttttggaattg

SEQ ID NO: 202776 - DNA, 13 bp, Artificial Sequence
  Oligonucleotide for detection of SNP TSC0049822
caattccaaaaac

SEQ ID NO: 202777 - DNA, 13 bp, Artificial Sequence
  Oligonucleotide for detection of SNP TSC0049822
gtttttagaatcg

SEQ ID NO: 202778 - DNA, 13 bp, Artificial Sequence
  Oligonucleotide for detection of SNP TSC0049822
cgattctaaaaac

SEQ ID NO: 202779 - DNA, 13 bp, Artificial Sequence
  Oligonucleotide for detection of SNP TSC0049822
gttttcggaattg

SEQ ID NO: 202780 - DNA, 13 bp, Artificial Sequence
  Oligonucleotide for detection of SNP TSC0049822
caattccgaaaac

SEQ ID NO: 202781 - DNA, 13 bp, Artificial Sequence
  Oligonucleotide for detection of SNP TSC0049822
gtttttggaatcg

SEQ ID NO: 202782 - DNA, 13 bp, Artificial Sequence
  Oligonucleotide for detection of SNP TSC0049822
cgattccaaaaac

SEQ ID NO: 202783 - DNA, 13 bp, Artificial Sequence
  Oligonucleotide for detection of SNP TSC0049822
gttttcggaatcg

SEQ ID NO: 202784 - DNA, 13 bp, Artificial Sequence
  Oligonucleotide for detection of SNP TSC0049822
cgattccgaaaac

SEQ ID NO: 202785 - DNA, 13 bp, Artificial Sequence
  Oligonucleotide for detection of SNP TSC0049822
tggttttgaaggy

SEQ ID NO: 202786 - DNA, 13 bp, Artificial Sequence
  Oligonucleotide for detection of SNP TSC0049822
rccttcaaaacca

SEQ ID NO: 202787 - DNA, 13 bp, Artificial Sequence
  Oligonucleotide for detection of SNP TSC0049822
cggttttgaaggy

SEQ ID NO: 202788 - DNA, 13 bp, Artificial Sequence
  Oligonucleotide for detection of SNP TSC0049822
rccttcaaaaccg

SEQ ID NO: 202789 - DNA, 13 bp, Artificial Sequence
  Oligonucleotide for detection of SNP TSC0049822
tggtttcgaaggy

SEQ ID NO: 202790 - DNA, 13 bp, Artificial Sequence
  Oligonucleotide for detection of SNP TSC0049822
rccttcgaaacca

SEQ ID NO: 202791 - DNA, 13 bp, Artificial Sequence
  Oligonucleotide for detection of SNP TSC0049822
cggtttcgaaggy

SEQ ID NO: 202792 - DNA, 13 bp, Artificial Sequence
  Oligonucleotide for detection of SNP TSC0049822
rccttcgaaaccg

SEQ ID NO: 202793 - DNA, 13 bp, Artificial Sequence
  Oligonucleotide for detection of SNP TSC0049823
tttgttatgtgty

SEQ ID NO: 202794 - DNA, 13 bp, Artificial Sequence
  Oligonucleotide for detection of SNP TSC0049823
racacataacaaa

SEQ ID NO: 202795 - DNA, 13 bp, Artificial Sequence
  Oligonucleotide for detection of SNP TSC0049823
tttgttttgtgty

SEQ ID NO: 202796 - DNA, 13 bp, Artificial Sequence
  Oligonucleotide for detection of SNP TSC0049823
racacaaaacaaa

SEQ ID NO: 202797 - DNA, 13 bp, Artificial Sequence
  Oligonucleotide for detection of SNP TSC0049823
ggtatatggtaga

SEQ ID NO: 202798 - DNA, 13 bp, Artificial Sequence
  Oligonucleotide for detection of SNP TSC0049823
tctaccatatacc

SEQ ID NO: 202799 - DNA, 13 bp, Artificial Sequence
  Oligonucleotide for detection of SNP TSC0049823
ggtataaggtaga

SEQ ID NO: 202800 - DNA, 13 bp, Artificial Sequence
  Oligonucleotide for detection of SNP TSC0049823
tctaccttatacc

SEQ ID NO: 202801 - DNA, 13 bp, Artificial Sequence
  Oligonucleotide for detection of SNP TSC0049825
ttaatagggtgaa

SEQ ID NO: 202802 - DNA, 13 bp, Artificial Sequence
  Oligonucleotide for detection of SNP TSC0049825
ttcaccctattaa

SEQ ID NO: 202803 - DNA, 13 bp, Artificial Sequence
  Oligonucleotide for detection of SNP TSC0049826
gatgattgtaagt

SEQ ID NO: 202804 - DNA, 13 bp, Artificial Sequence
  Oligonucleotide for detection of SNP TSC0049826
acttacaatcatc

SEQ ID NO: 202805 - DNA, 13 bp, Artificial Sequence
  Oligonucleotide for detection of SNP TSC0049826
gatgatcgtaagt

SEQ ID NO: 202806 - DNA, 13 bp, Artificial Sequence
  Oligonucleotide for detection of SNP TSC0049826
acttacgatcatc

SEQ ID NO: 202807 - DNA, 13 bp, Artificial Sequence
  Oligonucleotide for detection of SNP TSC0049826
atttatggttaty

SEQ ID NO: 202808 - DNA, 13 bp, Artificial Sequence
  Oligonucleotide for detection of SNP TSC0049826
rataaccataaat

SEQ ID NO: 202809 - DNA, 13 bp, Artificial Sequence
  Oligonucleotide for detection of SNP TSC0049826
atttatagttaty

SEQ ID NO: 202810 - DNA, 13 bp, Artificial Sequence
  Oligonucleotide for detection of SNP TSC0049826
rataactataaat

SEQ ID NO: 202811 - DNA, 13 bp, Artificial Sequence
  Oligonucleotide for detection of SNP TSC0049826
atttacggttaty

SEQ ID NO: 202812 - DNA, 13 bp, Artificial Sequence
  Oligonucleotide for detection of SNP TSC0049826
rataaccgtaaat

SEQ ID NO: 202813 - DNA, 13 bp, Artificial Sequence
  Oligonucleotide for detection of SNP TSC0049827
gatggattgagay

SEQ ID NO: 202814 - DNA, 13 bp, Artificial Sequence
  Oligonucleotide for detection of SNP TSC0049827
rtctcaatccatc

SEQ ID NO: 202815 - DNA, 13 bp, Artificial Sequence
  Oligonucleotide for detection of SNP TSC0049827
gatggagtgagay

SEQ ID NO: 202816 - DNA, 13 bp, Artificial Sequence
  Oligonucleotide for detection of SNP TSC0049827
rtctcactccatc

SEQ ID NO: 202817 - DNA, 13 bp, Artificial Sequence
  Oligonucleotide for detection of SNP TSC0049827
gacggattgagay

SEQ ID NO: 202818 - DNA, 13 bp, Artificial Sequence
  Oligonucleotide for detection of SNP TSC0049827
rtctcaatccgtc

SEQ ID NO: 202819 - DNA, 13 bp, Artificial Sequence
  Oligonucleotide for detection of SNP TSC0049827
gacggagtgagay

SEQ ID NO: 202820 - DNA, 13 bp, Artificial Sequence
  Oligonucleotide for detection of SNP TSC0049827
rtctcactccgtc

SEQ ID NO: 202821 - DNA, 13 bp, Artificial Sequence
  Oligonucleotide for detection of SNP TSC0049827
gttttattttgty

SEQ ID NO: 202822 - DNA, 13 bp, Artificial Sequence
  Oligonucleotide for detection of SNP TSC0049827
racaaaataaaac

SEQ ID NO: 202823 - DNA, 13 bp, Artificial Sequence
  Oligonucleotide for detection of SNP TSC0049827
gttttatttcgty

SEQ ID NO: 202824 - DNA, 13 bp, Artificial Sequence
  Oligonucleotide for detection of SNP TSC0049827
racgaaataaaac

SEQ ID NO: 202825 - DNA, 13 bp, Artificial Sequence
  Oligonucleotide for detection of SNP TSC0001062
taaatgattgtgt

SEQ ID NO: 202826 - DNA, 13 bp, Artificial Sequence
  Oligonucleotide for detection of SNP TSC0001062
acacaatcattta

SEQ ID NO: 202827 - DNA, 13 bp, Artificial Sequence
  Oligonucleotide for detection of SNP TSC0001062
taaatggttgtgt

SEQ ID NO: 202828 - DNA, 13 bp, Artificial Sequence
  Oligonucleotide for detection of SNP TSC0001062
acacaaccattta

SEQ ID NO: 202829 - DNA, 13 bp, Artificial Sequence
  Oligonucleotide for detection of SNP TSC0009585
tgtagtagaaata

SEQ ID NO: 202830 - DNA, 13 bp, Artificial Sequence
  Oligonucleotide for detection of SNP TSC0009585
tatttctactaca

SEQ ID NO: 202831 - DNA, 13 bp, Artificial Sequence
  Oligonucleotide for detection of SNP TSC0009585
tgtagtggaaata

SEQ ID NO: 202832 - DNA, 13 bp, Artificial Sequence
  Oligonucleotide for detection of SNP TSC0009585
tatttccactaca

SEQ ID NO: 202833 - DNA, 13 bp, Artificial Sequence
  Oligonucleotide for detection of SNP TSC0009585
cgtagtagaaata

SEQ ID NO: 202834 - DNA, 13 bp, Artificial Sequence
  Oligonucleotide for detection of SNP TSC0009585
tatttctactacg

SEQ ID NO: 202835 - DNA, 13 bp, Artificial Sequence
  Oligonucleotide for detection of SNP TSC0009585
cgtagtggaaata

SEQ ID NO: 202836 - DNA, 13 bp, Artificial Sequence
  Oligonucleotide for detection of SNP TSC0009585
tatttccactacg

SEQ ID NO: 202837 - DNA, 13 bp, Artificial Sequence
  Oligonucleotide for detection of SNP TSC0001191
agaattttagtaa

SEQ ID NO: 202838 - DNA, 13 bp, Artificial Sequence
  Oligonucleotide for detection of SNP TSC0001191
ttactaaaattct

SEQ ID NO: 202839 - DNA, 13 bp, Artificial Sequence
  Oligonucleotide for detection of SNP TSC0001191
agaattgtagtaa

SEQ ID NO: 202840 - DNA, 13 bp, Artificial Sequence
  Oligonucleotide for detection of SNP TSC0001191
ttactacaattct

SEQ ID NO: 202841 - DNA, 13 bp, Artificial Sequence
  Oligonucleotide for detection of SNP TSC0001191
ttattagagtttt

SEQ ID NO: 202842 - DNA, 13 bp, Artificial Sequence
  Oligonucleotide for detection of SNP TSC0001191
aaaactctaataa

SEQ ID NO: 202843 - DNA, 13 bp, Artificial Sequence
  Oligonucleotide for detection of SNP TSC0001191
ttattatagtttt

SEQ ID NO: 202844 - DNA, 13 bp, Artificial Sequence
  Oligonucleotide for detection of SNP TSC0001191
aaaactataataa

SEQ ID NO: 202845 - DNA, 13 bp, Artificial Sequence
  Oligonucleotide for detection of SNP TSC0001192
tttaagtgataat

SEQ ID NO: 202846 - DNA, 13 bp, Artificial Sequence
  Oligonucleotide for detection of SNP TSC0001192
attatcacttaaa

SEQ ID NO: 202847 - DNA, 13 bp, Artificial Sequence
  Oligonucleotide for detection of SNP TSC0001192
tttaagcgataat

SEQ ID NO: 202848 - DNA, 13 bp, Artificial Sequence
  Oligonucleotide for detection of SNP TSC0001192
attatcgcttaaa

SEQ ID NO: 202849 - DNA, 13 bp, Artificial Sequence
  Oligonucleotide for detection of SNP TSC0001192
attatcgtttggg

SEQ ID NO: 202850 - DNA, 13 bp, Artificial Sequence
  Oligonucleotide for detection of SNP TSC0001192
cccaaacgataat

SEQ ID NO: 202851 - DNA, 13 bp, Artificial Sequence
  Oligonucleotide for detection of SNP TSC0049830
tggaatataatgt

SEQ ID NO: 202852 - DNA, 13 bp, Artificial Sequence
  Oligonucleotide for detection of SNP TSC0049830
acattatattcca

SEQ ID NO: 202853 - DNA, 13 bp, Artificial Sequence
  Oligonucleotide for detection of SNP TSC0049830
tggaatgtaatgt

SEQ ID NO: 202854 - DNA, 13 bp, Artificial Sequence
  Oligonucleotide for detection of SNP TSC0049830
acattacattcca

SEQ ID NO: 202855 - DNA, 13 bp, Artificial Sequence
  Oligonucleotide for detection of SNP TSC0049830
tggaacgtaatgt

SEQ ID NO: 202856 - DNA, 13 bp, Artificial Sequence
  Oligonucleotide for detection of SNP TSC0049830
acattacgttcca

SEQ ID NO: 202857 - DNA, 13 bp, Artificial Sequence
  Oligonucleotide for detection of SNP TSC0049832
taaattttgtgtg

SEQ ID NO: 202858 - DNA, 13 bp, Artificial Sequence
  Oligonucleotide for detection of SNP TSC0049832
cacacaaaattta

SEQ ID NO: 202859 - DNA, 13 bp, Artificial Sequence
  Oligonucleotide for detection of SNP TSC0049832
taaattgtgtgtg

SEQ ID NO: 202860 - DNA, 13 bp, Artificial Sequence
  Oligonucleotide for detection of SNP TSC0049832
cacacacaattta

SEQ ID NO: 202861 - DNA, 13 bp, Artificial Sequence
  Oligonucleotide for detection of SNP TSC0049832
tatatagagtttg

SEQ ID NO: 202862 - DNA, 13 bp, Artificial Sequence
  Oligonucleotide for detection of SNP TSC0049832
caaactctatata

SEQ ID NO: 202863 - DNA, 13 bp, Artificial Sequence
  Oligonucleotide for detection of SNP TSC0049832
tatatatagtttg

SEQ ID NO: 202864 - DNA, 13 bp, Artificial Sequence
  Oligonucleotide for detection of SNP TSC0049832
caaactatatata

SEQ ID NO: 202865 - DNA, 13 bp, Artificial Sequence
  Oligonucleotide for detection of SNP TSC0008630
gatagtaaattta

SEQ ID NO: 202866 - DNA, 13 bp, Artificial Sequence
  Oligonucleotide for detection of SNP TSC0008630
taaatttactatc

SEQ ID NO: 202867 - DNA, 13 bp, Artificial Sequence
  Oligonucleotide for detection of SNP TSC0008630
gatagtgaattta

SEQ ID NO: 202868 - DNA, 13 bp, Artificial Sequence
  Oligonucleotide for detection of SNP TSC0008630
taaattcactatc

SEQ ID NO: 202869 - DNA, 13 bp, Artificial Sequence
  Oligonucleotide for detection of SNP TSC0008630
gatagcgaattta

SEQ ID NO: 202870 - DNA, 13 bp, Artificial Sequence
  Oligonucleotide for detection of SNP TSC0008630
taaattcgctatc

SEQ ID NO: 202871 - DNA, 13 bp, Artificial Sequence
  Oligonucleotide for detection of SNP TSC0008630
tgaatttgttaty

SEQ ID NO: 202872 - DNA, 13 bp, Artificial Sequence
  Oligonucleotide for detection of SNP TSC0008630
rataacaaattca

SEQ ID NO: 202873 - DNA, 13 bp, Artificial Sequence
  Oligonucleotide for detection of SNP TSC0008630
tgaattcgttaty

SEQ ID NO: 202874 - DNA, 13 bp, Artificial Sequence
  Oligonucleotide for detection of SNP TSC0008630
rataacgaattca

SEQ ID NO: 202875 - DNA, 13 bp, Artificial Sequence
  Oligonucleotide for detection of SNP TSC0010350
tttttaagtggaa

SEQ ID NO: 202876 - DNA, 13 bp, Artificial Sequence
  Oligonucleotide for detection of SNP TSC0010350
ttccacttaaaaa

SEQ ID NO: 202877 - DNA, 13 bp, Artificial Sequence
  Oligonucleotide for detection of SNP TSC0010350
tttttaggtggaa

SEQ ID NO: 202878 - DNA, 13 bp, Artificial Sequence
  Oligonucleotide for detection of SNP TSC0010350
ttccacctaaaaa

SEQ ID NO: 202879 - DNA, 13 bp, Artificial Sequence
  Oligonucleotide for detection of SNP TSC0001679
tttagatttgtay

SEQ ID NO: 202880 - DNA, 13 bp, Artificial Sequence
  Oligonucleotide for detection of SNP TSC0001679
rtacaaatctaaa

SEQ ID NO: 202881 - DNA, 13 bp, Artificial Sequence
  Oligonucleotide for detection of SNP TSC0001679
gtatagttttaaa

SEQ ID NO: 202882 - DNA, 13 bp, Artificial Sequence
  Oligonucleotide for detection of SNP TSC0001679
tttaaaactatac

SEQ ID NO: 202883 - DNA, 13 bp, Artificial Sequence
  Oligonucleotide for detection of SNP TSC0001679
gtataggtttaaa

SEQ ID NO: 202884 - DNA, 13 bp, Artificial Sequence
  Oligonucleotide for detection of SNP TSC0001679
tttaaacctatac

SEQ ID NO: 202885 - DNA, 13 bp, Artificial Sequence
  Oligonucleotide for detection of SNP TSC0001679
gtatagatttaaa

SEQ ID NO: 202886 - DNA, 13 bp, Artificial Sequence
  Oligonucleotide for detection of SNP TSC0001679
tttaaatctatac

SEQ ID NO: 202887 - DNA, 13 bp, Artificial Sequence
  Oligonucleotide for detection of SNP TSC0008365
attgttttaattg

SEQ ID NO: 202888 - DNA, 13 bp, Artificial Sequence
  Oligonucleotide for detection of SNP TSC0008365
caattaaaacaat

SEQ ID NO: 202889 - DNA, 13 bp, Artificial Sequence
  Oligonucleotide for detection of SNP TSC0008365
attgttgtaattg

SEQ ID NO: 202890 - DNA, 13 bp, Artificial Sequence
  Oligonucleotide for detection of SNP TSC0008365
caattacaacaat

SEQ ID NO: 202891 - DNA, 13 bp, Artificial Sequence
  Oligonucleotide for detection of SNP TSC0008365
attgtcgtaattg

SEQ ID NO: 202892 - DNA, 13 bp, Artificial Sequence
  Oligonucleotide for detection of SNP TSC0008365
caattacgacaat

SEQ ID NO: 202893 - DNA, 13 bp, Artificial Sequence
  Oligonucleotide for detection of SNP TSC0008365
tagttgggatagt

SEQ ID NO: 202894 - DNA, 13 bp, Artificial Sequence
  Oligonucleotide for detection of SNP TSC0008365
actatcccaacta

SEQ ID NO: 202895 - DNA, 13 bp, Artificial Sequence
  Oligonucleotide for detection of SNP TSC0008365
tagttgtgatagt

SEQ ID NO: 202896 - DNA, 13 bp, Artificial Sequence
  Oligonucleotide for detection of SNP TSC0008365
actatcacaacta

SEQ ID NO: 202897 - DNA, 13 bp, Artificial Sequence
  Oligonucleotide for detection of SNP TSC0008365
tagttgcgatagt

SEQ ID NO: 202898 - DNA, 13 bp, Artificial Sequence
  Oligonucleotide for detection of SNP TSC0008365
actatcgcaacta

SEQ ID NO: 202899 - DNA, 13 bp, Artificial Sequence
  Oligonucleotide for detection of SNP TSC0049837
taagaggtgtatt

SEQ ID NO: 202900 - DNA, 13 bp, Artificial Sequence
  Oligonucleotide for detection of SNP TSC0049837
aatacacctctta

SEQ ID NO: 202901 - DNA, 13 bp, Artificial Sequence
  Oligonucleotide for detection of SNP TSC0049837
taagagatgtatt

SEQ ID NO: 202902 - DNA, 13 bp, Artificial Sequence
  Oligonucleotide for detection of SNP TSC0049837
aatacatctctta

SEQ ID NO: 202903 - DNA, 13 bp, Artificial Sequence
  Oligonucleotide for detection of SNP TSC0049838
tttgtaatgtatg

SEQ ID NO: 202904 - DNA, 13 bp, Artificial Sequence
  Oligonucleotide for detection of SNP TSC0049838
catacattacaaa

SEQ ID NO: 202905 - DNA, 13 bp, Artificial Sequence
  Oligonucleotide for detection of SNP TSC0049838
tttgtattgtatg

SEQ ID NO: 202906 - DNA, 13 bp, Artificial Sequence
  Oligonucleotide for detection of SNP TSC0049838
catacaatacaaa

SEQ ID NO: 202907 - DNA, 13 bp, Artificial Sequence
  Oligonucleotide for detection of SNP TSC0049839
atagtgtgagatt

SEQ ID NO: 202908 - DNA, 13 bp, Artificial Sequence
  Oligonucleotide for detection of SNP TSC0049839
aatctcacactat

SEQ ID NO: 202909 - DNA, 13 bp, Artificial Sequence
  Oligonucleotide for detection of SNP TSC0049839
atagtgcgagatt

SEQ ID NO: 202910 - DNA, 13 bp, Artificial Sequence
  Oligonucleotide for detection of SNP TSC0049839
aatctcgcactat

SEQ ID NO: 202911 - DNA, 13 bp, Artificial Sequence
  Oligonucleotide for detection of SNP TSC0049839
agtttcgtattgt

SEQ ID NO: 202912 - DNA, 13 bp, Artificial Sequence
  Oligonucleotide for detection of SNP TSC0049839
acaatacgaaact

SEQ ID NO: 202913 - DNA, 13 bp, Artificial Sequence
  Oligonucleotide for detection of SNP TSC0049843
atgttagtttaty

SEQ ID NO: 202914 - DNA, 13 bp, Artificial Sequence
  Oligonucleotide for detection of SNP TSC0049843
rataaactaacat

SEQ ID NO: 202915 - DNA, 13 bp, Artificial Sequence
  Oligonucleotide for detection of SNP TSC0049843
atgttaatttaty

SEQ ID NO: 202916 - DNA, 13 bp, Artificial Sequence
  Oligonucleotide for detection of SNP TSC0049843
rataaattaacat

SEQ ID NO: 202917 - DNA, 13 bp, Artificial Sequence
  Oligonucleotide for detection of SNP TSC0001124
gtaatgatagtat

SEQ ID NO: 202918 - DNA, 13 bp, Artificial Sequence
  Oligonucleotide for detection of SNP TSC0001124
atactatcattac

SEQ ID NO: 202919 - DNA, 13 bp, Artificial Sequence
  Oligonucleotide for detection of SNP TSC0001124
gtaatggtagtat

SEQ ID NO: 202920 - DNA, 13 bp, Artificial Sequence
  Oligonucleotide for detection of SNP TSC0001124
atactaccattac

SEQ ID NO: 202921 - DNA, 13 bp, Artificial Sequence
  Oligonucleotide for detection of SNP TSC0001124
gtaacgatagtat

SEQ ID NO: 202922 - DNA, 13 bp, Artificial Sequence
  Oligonucleotide for detection of SNP TSC0001124
atactatcgttac

SEQ ID NO: 202923 - DNA, 13 bp, Artificial Sequence
  Oligonucleotide for detection of SNP TSC0001124
gtaacggtagtat

SEQ ID NO: 202924 - DNA, 13 bp, Artificial Sequence
  Oligonucleotide for detection of SNP TSC0001124
atactaccgttac

SEQ ID NO: 202925 - DNA, 13 bp, Artificial Sequence
  Oligonucleotide for detection of SNP TSC0001125
ggtgatatgaaaa

SEQ ID NO: 202926 - DNA, 13 bp, Artificial Sequence
  Oligonucleotide for detection of SNP TSC0001125
ttttcatatcacc

SEQ ID NO: 202927 - DNA, 13 bp, Artificial Sequence
  Oligonucleotide for detection of SNP TSC0001125
ggtgatgtgaaaa

SEQ ID NO: 202928 - DNA, 13 bp, Artificial Sequence
  Oligonucleotide for detection of SNP TSC0001125
ttttcacatcacc

SEQ ID NO: 202929 - DNA, 13 bp, Artificial Sequence
  Oligonucleotide for detection of SNP TSC0001126
aggtaggtttgtt

SEQ ID NO: 202930 - DNA, 13 bp, Artificial Sequence
  Oligonucleotide for detection of SNP TSC0001126
aacaaacctacct

SEQ ID NO: 202931 - DNA, 13 bp, Artificial Sequence
  Oligonucleotide for detection of SNP TSC0001126
aggtagatttgtt

SEQ ID NO: 202932 - DNA, 13 bp, Artificial Sequence
  Oligonucleotide for detection of SNP TSC0001126
aacaaatctacct

SEQ ID NO: 202933 - DNA, 13 bp, Artificial Sequence
  Oligonucleotide for detection of SNP TSC0049845
attattagtttgg

SEQ ID NO: 202934 - DNA, 13 bp, Artificial Sequence
  Oligonucleotide for detection of SNP TSC0049845
ccaaactaataat

SEQ ID NO: 202935 - DNA, 13 bp, Artificial Sequence
  Oligonucleotide for detection of SNP TSC0049845
attattggtttgg

SEQ ID NO: 202936 - DNA, 13 bp, Artificial Sequence
  Oligonucleotide for detection of SNP TSC0049845
ccaaaccaataat

SEQ ID NO: 202937 - DNA, 13 bp, Artificial Sequence
  Oligonucleotide for detection of SNP TSC0049845
attatcggtttgg

SEQ ID NO: 202938 - DNA, 13 bp, Artificial Sequence
  Oligonucleotide for detection of SNP TSC0049845
ccaaaccgataat

SEQ ID NO: 202939 - DNA, 13 bp, Artificial Sequence
  Oligonucleotide for detection of SNP TSC0001642
gaaatatttatga

SEQ ID NO: 202940 - DNA, 13 bp, Artificial Sequence
  Oligonucleotide for detection of SNP TSC0001642
tcataaatatttc

SEQ ID NO: 202941 - DNA, 13 bp, Artificial Sequence
  Oligonucleotide for detection of SNP TSC0001642
gaaatagttatga

SEQ ID NO: 202942 - DNA, 13 bp, Artificial Sequence
  Oligonucleotide for detection of SNP TSC0001642
tcataactatttc

SEQ ID NO: 202943 - DNA, 13 bp, Artificial Sequence
  Oligonucleotide for detection of SNP TSC0001642
ttataggtattty

SEQ ID NO: 202944 - DNA, 13 bp, Artificial Sequence
  Oligonucleotide for detection of SNP TSC0001642
raaatacctataa

SEQ ID NO: 202945 - DNA, 13 bp, Artificial Sequence
  Oligonucleotide for detection of SNP TSC0001642
ttatagttattty

SEQ ID NO: 202946 - DNA, 13 bp, Artificial Sequence
  Oligonucleotide for detection of SNP TSC0001642
raaataactataa

SEQ ID NO: 202947 - DNA, 13 bp, Artificial Sequence
  Oligonucleotide for detection of SNP TSC0010068
tgagtaatttgty

SEQ ID NO: 202948 - DNA, 13 bp, Artificial Sequence
  Oligonucleotide for detection of SNP TSC0010068
racaaattactca

SEQ ID NO: 202949 - DNA, 13 bp, Artificial Sequence
  Oligonucleotide for detection of SNP TSC0010068
tgagtattttgty

SEQ ID NO: 202950 - DNA, 13 bp, Artificial Sequence
  Oligonucleotide for detection of SNP TSC0010068
racaaaatactca

SEQ ID NO: 202951 - DNA, 13 bp, Artificial Sequence
  Oligonucleotide for detection of SNP TSC0010068
gataaattgttta

SEQ ID NO: 202952 - DNA, 13 bp, Artificial Sequence
  Oligonucleotide for detection of SNP TSC0010068
taaacaatttatc

SEQ ID NO: 202953 - DNA, 13 bp, Artificial Sequence
  Oligonucleotide for detection of SNP TSC0010068
gataaagtgttta

SEQ ID NO: 202954 - DNA, 13 bp, Artificial Sequence
  Oligonucleotide for detection of SNP TSC0010068
taaacactttatc

SEQ ID NO: 202955 - DNA, 13 bp, Artificial Sequence
  Oligonucleotide for detection of SNP TSC0049846
ttatttagattgy

SEQ ID NO: 202956 - DNA, 13 bp, Artificial Sequence
  Oligonucleotide for detection of SNP TSC0049846
rcaatctaaataa

SEQ ID NO: 202957 - DNA, 13 bp, Artificial Sequence
  Oligonucleotide for detection of SNP TSC0049846
ttattttgattgy

SEQ ID NO: 202958 - DNA, 13 bp, Artificial Sequence
  Oligonucleotide for detection of SNP TSC0049846
rcaatcaaaataa

SEQ ID NO: 202959 - DNA, 13 bp, Artificial Sequence
  Oligonucleotide for detection of SNP TSC0049846
ttatttcgattgy

SEQ ID NO: 202960 - DNA, 13 bp, Artificial Sequence
  Oligonucleotide for detection of SNP TSC0049846
rcaatcgaaataa

SEQ ID NO: 202961 - DNA, 13 bp, Artificial Sequence
  Oligonucleotide for detection of SNP TSC0049846
gtagtttaaatag

SEQ ID NO: 202962 - DNA, 13 bp, Artificial Sequence
  Oligonucleotide for detection of SNP TSC0049846
ctatttaaactac

SEQ ID NO: 202963 - DNA, 13 bp, Artificial Sequence
  Oligonucleotide for detection of SNP TSC0049846
gtagttgaaatag

SEQ ID NO: 202964 - DNA, 13 bp, Artificial Sequence
  Oligonucleotide for detection of SNP TSC0049846
ctatttcaactac

SEQ ID NO: 202965 - DNA, 13 bp, Artificial Sequence
  Oligonucleotide for detection of SNP TSC0049846
gtagtcgaaatag

SEQ ID NO: 202966 - DNA, 13 bp, Artificial Sequence
  Oligonucleotide for detection of SNP TSC0049846
ctatttcgactac

SEQ ID NO: 202967 - DNA, 13 bp, Artificial Sequence
  Oligonucleotide for detection of SNP TSC0049847
ttgaaagttttat

SEQ ID NO: 202968 - DNA, 13 bp, Artificial Sequence
  Oligonucleotide for detection of SNP TSC0049847
ataaaactttcaa

SEQ ID NO: 202969 - DNA, 13 bp, Artificial Sequence
  Oligonucleotide for detection of SNP TSC0049847
ttgaaaattttat

SEQ ID NO: 202970 - DNA, 13 bp, Artificial Sequence
  Oligonucleotide for detection of SNP TSC0049847
ataaaattttcaa

SEQ ID NO: 202971 - DNA, 13 bp, Artificial Sequence
  Oligonucleotide for detection of SNP TSC0001179
aaaaaagattgaa

SEQ ID NO: 202972 - DNA, 13 bp, Artificial Sequence
  Oligonucleotide for detection of SNP TSC0001179
ttcaatctttttt

SEQ ID NO: 202973 - DNA, 13 bp, Artificial Sequence
  Oligonucleotide for detection of SNP TSC0001179
aaaaaaaattgaa

SEQ ID NO: 202974 - DNA, 13 bp, Artificial Sequence
  Oligonucleotide for detection of SNP TSC0001179
ttcaatttttttt

SEQ ID NO: 202975 - DNA, 13 bp, Artificial Sequence
  Oligonucleotide for detection of SNP TSC0049849
tttataaaaatay

SEQ ID NO: 202976 - DNA, 13 bp, Artificial Sequence
  Oligonucleotide for detection of SNP TSC0049849
rtatttttataaa

SEQ ID NO: 202977 - DNA, 13 bp, Artificial Sequence
  Oligonucleotide for detection of SNP TSC0049849
tttatataaatay

SEQ ID NO: 202978 - DNA, 13 bp, Artificial Sequence
  Oligonucleotide for detection of SNP TSC0049849
rtatttatataaa

SEQ ID NO: 202979 - DNA, 13 bp, Artificial Sequence
  Oligonucleotide for detection of SNP TSC0049849
gtatttttatgga

SEQ ID NO: 202980 - DNA, 13 bp, Artificial Sequence
  Oligonucleotide for detection of SNP TSC0049849
tccataaaaatac

SEQ ID NO: 202981 - DNA, 13 bp, Artificial Sequence
  Oligonucleotide for detection of SNP TSC0049849
gtatttatatgga

SEQ ID NO: 202982 - DNA, 13 bp, Artificial Sequence
  Oligonucleotide for detection of SNP TSC0049849
tccatataaatac

SEQ ID NO: 202983 - DNA, 13 bp, Artificial Sequence
  Oligonucleotide for detection of SNP TSC0049850
gatggtgtaatty

SEQ ID NO: 202984 - DNA, 13 bp, Artificial Sequence
  Oligonucleotide for detection of SNP TSC0049850
raattacaccatc

SEQ ID NO: 202985 - DNA, 13 bp, Artificial Sequence
  Oligonucleotide for detection of SNP TSC0049850
gatggtataatty

SEQ ID NO: 202986 - DNA, 13 bp, Artificial Sequence
  Oligonucleotide for detection of SNP TSC0049850
raattataccatc

SEQ ID NO: 202987 - DNA, 13 bp, Artificial Sequence
  Oligonucleotide for detection of SNP TSC0049851
aattagtttttaa

SEQ ID NO: 202988 - DNA, 13 bp, Artificial Sequence
  Oligonucleotide for detection of SNP TSC0049851
ttaaaaactaatt

SEQ ID NO: 202989 - DNA, 13 bp, Artificial Sequence
  Oligonucleotide for detection of SNP TSC0049851
aattaggttttaa

SEQ ID NO: 202990 - DNA, 13 bp, Artificial Sequence
  Oligonucleotide for detection of SNP TSC0049851
ttaaaacctaatt

SEQ ID NO: 202991 - DNA, 13 bp, Artificial Sequence
  Oligonucleotide for detection of SNP TSC0049851
ttgaggattaatt

SEQ ID NO: 202992 - DNA, 13 bp, Artificial Sequence
  Oligonucleotide for detection of SNP TSC0049851
aattaatcctcaa

SEQ ID NO: 202993 - DNA, 13 bp, Artificial Sequence
  Oligonucleotide for detection of SNP TSC0049851
ttgaggtttaatt

SEQ ID NO: 202994 - DNA, 13 bp, Artificial Sequence
  Oligonucleotide for detection of SNP TSC0049851
aattaaacctcaa

SEQ ID NO: 202995 - DNA, 13 bp, Artificial Sequence
  Oligonucleotide for detection of SNP TSC0049855
agagtaggagttt

SEQ ID NO: 202996 - DNA, 13 bp, Artificial Sequence
  Oligonucleotide for detection of SNP TSC0049855
aaactcctactct

SEQ ID NO: 202997 - DNA, 13 bp, Artificial Sequence
  Oligonucleotide for detection of SNP TSC0049855
agagtaagagttt

SEQ ID NO: 202998 - DNA, 13 bp, Artificial Sequence
  Oligonucleotide for detection of SNP TSC0049855
aaactcttactct

SEQ ID NO: 202999 - DNA, 13 bp, Artificial Sequence
  Oligonucleotide for detection of SNP TSC0049857
aatagggatagag

SEQ ID NO: 203000 - DNA, 13 bp, Artificial Sequence
  Oligonucleotide for detection of SNP TSC0049857
ctctatccctatt

SEQ ID NO: 203001 - DNA, 13 bp, Artificial Sequence
  Oligonucleotide for detection of SNP TSC0049857
aataggaatagag

SEQ ID NO: 203002 - DNA, 13 bp, Artificial Sequence
  Oligonucleotide for detection of SNP TSC0049857
ctctattcctatt

SEQ ID NO: 203003 - DNA, 13 bp, Artificial Sequence
  Oligonucleotide for detection of SNP TSC0049863
aatgttatataga

SEQ ID NO: 203004 - DNA, 13 bp, Artificial Sequence
  Oligonucleotide for detection of SNP TSC0049863
tctatataacatt

SEQ ID NO: 203005 - DNA, 13 bp, Artificial Sequence
  Oligonucleotide for detection of SNP TSC0049863
aatgttttataga

SEQ ID NO: 203006 - DNA, 13 bp, Artificial Sequence
  Oligonucleotide for detection of SNP TSC0049863
tctataaaacatt

SEQ ID NO: 203007 - DNA, 13 bp, Artificial Sequence
  Oligonucleotide for detection of SNP TSC0049863
tttgtatgatatt

SEQ ID NO: 203008 - DNA, 13 bp, Artificial Sequence
  Oligonucleotide for detection of SNP TSC0049863
aatatcatacaaa

SEQ ID NO: 203009 - DNA, 13 bp, Artificial Sequence
  Oligonucleotide for detection of SNP TSC0049864
aggtttatgaagy

SEQ ID NO: 203010 - DNA, 13 bp, Artificial Sequence
  Oligonucleotide for detection of SNP TSC0049864
rcttcataaacct

SEQ ID NO: 203011 - DNA, 13 bp, Artificial Sequence
  Oligonucleotide for detection of SNP TSC0049864
aggtttgtgaagy

SEQ ID NO: 203012 - DNA, 13 bp, Artificial Sequence
  Oligonucleotide for detection of SNP TSC0049864
rcttcacaaacct

SEQ ID NO: 203013 - DNA, 13 bp, Artificial Sequence
  Oligonucleotide for detection of SNP TSC0049864
aggttcgtgaagy

SEQ ID NO: 203014 - DNA, 13 bp, Artificial Sequence
  Oligonucleotide for detection of SNP TSC0049864
rcttcacgaacct

SEQ ID NO: 203015 - DNA, 13 bp, Artificial Sequence
  Oligonucleotide for detection of SNP TSC0049865
tattggtttgtta

SEQ ID NO: 203016 - DNA, 13 bp, Artificial Sequence
  Oligonucleotide for detection of SNP TSC0049865
taacaaaccaata

SEQ ID NO: 203017 - DNA, 13 bp, Artificial Sequence
  Oligonucleotide for detection of SNP TSC0049865
tattgggttgtta

SEQ ID NO: 203018 - DNA, 13 bp, Artificial Sequence
  Oligonucleotide for detection of SNP TSC0049865
taacaacccaata

SEQ ID NO: 203019 - DNA, 13 bp, Artificial Sequence
  Oligonucleotide for detection of SNP TSC0049865
tattggttcgtta

SEQ ID NO: 203020 - DNA, 13 bp, Artificial Sequence
  Oligonucleotide for detection of SNP TSC0049865
taacgaaccaata

SEQ ID NO: 203021 - DNA, 13 bp, Artificial Sequence
  Oligonucleotide for detection of SNP TSC0049865
tattgggtcgtta

SEQ ID NO: 203022 - DNA, 13 bp, Artificial Sequence
  Oligonucleotide for detection of SNP TSC0049865
taacgacccaata

SEQ ID NO: 203023 - DNA, 13 bp, Artificial Sequence
  Oligonucleotide for detection of SNP TSC0049865
tagtgaattaata

SEQ ID NO: 203024 - DNA, 13 bp, Artificial Sequence
  Oligonucleotide for detection of SNP TSC0049865
tattaattcacta

SEQ ID NO: 203025 - DNA, 13 bp, Artificial Sequence
  Oligonucleotide for detection of SNP TSC0049865
tagtgatttaata

SEQ ID NO: 203026 - DNA, 13 bp, Artificial Sequence
  Oligonucleotide for detection of SNP TSC0049865
tattaaatcacta

SEQ ID NO: 203027 - DNA, 13 bp, Artificial Sequence
  Oligonucleotide for detection of SNP TSC0049865
tagcgaattaata

SEQ ID NO: 203028 - DNA, 13 bp, Artificial Sequence
  Oligonucleotide for detection of SNP TSC0049865
tattaattcgcta

SEQ ID NO: 203029 - DNA, 13 bp, Artificial Sequence
  Oligonucleotide for detection of SNP TSC0049865
tagcgatttaata

SEQ ID NO: 203030 - DNA, 13 bp, Artificial Sequence
  Oligonucleotide for detection of SNP TSC0049865
tattaaatcgcta

SEQ ID NO: 203031 - DNA, 13 bp, Artificial Sequence
  Oligonucleotide for detection of SNP TSC0049866
ataaaagtttagy

SEQ ID NO: 203032 - DNA, 13 bp, Artificial Sequence
  Oligonucleotide for detection of SNP TSC0049866
rctaaacttttat

SEQ ID NO: 203033 - DNA, 13 bp, Artificial Sequence
  Oligonucleotide for detection of SNP TSC0049866
ataaaaatttagy

SEQ ID NO: 203034 - DNA, 13 bp, Artificial Sequence
  Oligonucleotide for detection of SNP TSC0049866
rctaaatttttat

SEQ ID NO: 203035 - DNA, 13 bp, Artificial Sequence
  Oligonucleotide for detection of SNP TSC0049867
aaatggattataa

SEQ ID NO: 203036 - DNA, 13 bp, Artificial Sequence
  Oligonucleotide for detection of SNP TSC0049867
ttataatccattt

SEQ ID NO: 203037 - DNA, 13 bp, Artificial Sequence
  Oligonucleotide for detection of SNP TSC0049867
aaatggtttataa

SEQ ID NO: 203038 - DNA, 13 bp, Artificial Sequence
  Oligonucleotide for detection of SNP TSC0049867
ttataaaccattt

SEQ ID NO: 203039 - DNA, 13 bp, Artificial Sequence
  Oligonucleotide for detection of SNP TSC0049869
atagttttattty

SEQ ID NO: 203040 - DNA, 13 bp, Artificial Sequence
  Oligonucleotide for detection of SNP TSC0049869
raaataaaactat

SEQ ID NO: 203041 - DNA, 13 bp, Artificial Sequence
  Oligonucleotide for detection of SNP TSC0049869
atagttgtattty

SEQ ID NO: 203042 - DNA, 13 bp, Artificial Sequence
  Oligonucleotide for detection of SNP TSC0049869
raaatacaactat

SEQ ID NO: 203043 - DNA, 13 bp, Artificial Sequence
  Oligonucleotide for detection of SNP TSC0049869
ggagtagagttat

SEQ ID NO: 203044 - DNA, 13 bp, Artificial Sequence
  Oligonucleotide for detection of SNP TSC0049869
ataactctactcc

SEQ ID NO: 203045 - DNA, 13 bp, Artificial Sequence
  Oligonucleotide for detection of SNP TSC0049869
ggagtatagttat

SEQ ID NO: 203046 - DNA, 13 bp, Artificial Sequence
  Oligonucleotide for detection of SNP TSC0049869
ataactatactcc

SEQ ID NO: 203047 - DNA, 13 bp, Artificial Sequence
  Oligonucleotide for detection of SNP TSC0049870
aggaggatgagay

SEQ ID NO: 203048 - DNA, 13 bp, Artificial Sequence
  Oligonucleotide for detection of SNP TSC0049870
rtctcatcctcct

SEQ ID NO: 203049 - DNA, 13 bp, Artificial Sequence
  Oligonucleotide for detection of SNP TSC0049870
aggaggttgagay

SEQ ID NO: 203050 - DNA, 13 bp, Artificial Sequence
  Oligonucleotide for detection of SNP TSC0049870
rtctcaacctcct

SEQ ID NO: 203051 - DNA, 13 bp, Artificial Sequence
  Oligonucleotide for detection of SNP TSC0049871
ttattgatagtta

SEQ ID NO: 203052 - DNA, 13 bp, Artificial Sequence
  Oligonucleotide for detection of SNP TSC0049871
taactatcaataa

SEQ ID NO: 203053 - DNA, 13 bp, Artificial Sequence
  Oligonucleotide for detection of SNP TSC0049871
ttattggtagtta

SEQ ID NO: 203054 - DNA, 13 bp, Artificial Sequence
  Oligonucleotide for detection of SNP TSC0049871
taactaccaataa

SEQ ID NO: 203055 - DNA, 13 bp, Artificial Sequence
  Oligonucleotide for detection of SNP TSC0049872
ttagggtttatta

SEQ ID NO: 203056 - DNA, 13 bp, Artificial Sequence
  Oligonucleotide for detection of SNP TSC0049872
taataaaccctaa

SEQ ID NO: 203057 - DNA, 13 bp, Artificial Sequence
  Oligonucleotide for detection of SNP TSC0049872
ttaggggttatta

SEQ ID NO: 203058 - DNA, 13 bp, Artificial Sequence
  Oligonucleotide for detection of SNP TSC0049872
taataacccctaa

SEQ ID NO: 203059 - DNA, 13 bp, Artificial Sequence
  Oligonucleotide for detection of SNP TSC0049872
tagtggattttgg

SEQ ID NO: 203060 - DNA, 13 bp, Artificial Sequence
  Oligonucleotide for detection of SNP TSC0049872
ccaaaatccacta

SEQ ID NO: 203061 - DNA, 13 bp, Artificial Sequence
  Oligonucleotide for detection of SNP TSC0049872
tagtggtttttgg

SEQ ID NO: 203062 - DNA, 13 bp, Artificial Sequence
  Oligonucleotide for detection of SNP TSC0049872
ccaaaaaccacta

SEQ ID NO: 203063 - DNA, 13 bp, Artificial Sequence
  Oligonucleotide for detection of SNP TSC0049874
tagttgagttgty

SEQ ID NO: 203064 - DNA, 13 bp, Artificial Sequence
  Oligonucleotide for detection of SNP TSC0049874
racaactcaacta

SEQ ID NO: 203065 - DNA, 13 bp, Artificial Sequence
  Oligonucleotide for detection of SNP TSC0049874
tagttgtgttgty

SEQ ID NO: 203066 - DNA, 13 bp, Artificial Sequence
  Oligonucleotide for detection of SNP TSC0049874
racaacacaacta

SEQ ID NO: 203067 - DNA, 13 bp, Artificial Sequence
  Oligonucleotide for detection of SNP TSC0049874
ggtaatttagtta

SEQ ID NO: 203068 - DNA, 13 bp, Artificial Sequence
  Oligonucleotide for detection of SNP TSC0049874
taactaaattacc

SEQ ID NO: 203069 - DNA, 13 bp, Artificial Sequence
  Oligonucleotide for detection of SNP TSC0049874
ggtaatatagtta

SEQ ID NO: 203070 - DNA, 13 bp, Artificial Sequence
  Oligonucleotide for detection of SNP TSC0049874
taactatattacc

SEQ ID NO: 203071 - DNA, 13 bp, Artificial Sequence
  Oligonucleotide for detection of SNP TSC0049875
aatatatgggtaa

SEQ ID NO: 203072 - DNA, 13 bp, Artificial Sequence
  Oligonucleotide for detection of SNP TSC0049875
ttacccatatatt

SEQ ID NO: 203073 - DNA, 13 bp, Artificial Sequence
  Oligonucleotide for detection of SNP TSC0049875
aatatacgggtaa

SEQ ID NO: 203074 - DNA, 13 bp, Artificial Sequence
  Oligonucleotide for detection of SNP TSC0049875
ttacccgtatatt

SEQ ID NO: 203075 - DNA, 13 bp, Artificial Sequence
  Oligonucleotide for detection of SNP TSC0049875
ttatttgtgtgtt

SEQ ID NO: 203076 - DNA, 13 bp, Artificial Sequence
  Oligonucleotide for detection of SNP TSC0049875
aacacacaaataa

SEQ ID NO: 203077 - DNA, 13 bp, Artificial Sequence
  Oligonucleotide for detection of SNP TSC0049875
ttatttatgtgtt

SEQ ID NO: 203078 - DNA, 13 bp, Artificial Sequence
  Oligonucleotide for detection of SNP TSC0049875
aacacataaataa

SEQ ID NO: 203079 - DNA, 13 bp, Artificial Sequence
  Oligonucleotide for detection of SNP TSC0049875
ttattcgtgtgtt

SEQ ID NO: 203080 - DNA, 13 bp, Artificial Sequence
  Oligonucleotide for detection of SNP TSC0049875
aacacacgaataa

SEQ ID NO: 203081 - DNA, 13 bp, Artificial Sequence
  Oligonucleotide for detection of SNP TSC0049876
taaatttattgay

SEQ ID NO: 203082 - DNA, 13 bp, Artificial Sequence
  Oligonucleotide for detection of SNP TSC0049876
rtcaataaattta

SEQ ID NO: 203083 - DNA, 13 bp, Artificial Sequence
  Oligonucleotide for detection of SNP TSC0049876
taaattgattgay

SEQ ID NO: 203084 - DNA, 13 bp, Artificial Sequence
  Oligonucleotide for detection of SNP TSC0049876
rtcaatcaattta

SEQ ID NO: 203085 - DNA, 13 bp, Artificial Sequence
  Oligonucleotide for detection of SNP TSC0049876
gttagtgagtttg

SEQ ID NO: 203086 - DNA, 13 bp, Artificial Sequence
  Oligonucleotide for detection of SNP TSC0049876
caaactcactaac

SEQ ID NO: 203087 - DNA, 13 bp, Artificial Sequence
  Oligonucleotide for detection of SNP TSC0049876
gttagttagtttg

SEQ ID NO: 203088 - DNA, 13 bp, Artificial Sequence
  Oligonucleotide for detection of SNP TSC0049876
caaactaactaac

SEQ ID NO: 203089 - DNA, 13 bp, Artificial Sequence
  Oligonucleotide for detection of SNP TSC0049880
tttgagatttaty

SEQ ID NO: 203090 - DNA, 13 bp, Artificial Sequence
  Oligonucleotide for detection of SNP TSC0049880
rataaatctcaaa

SEQ ID NO: 203091 - DNA, 13 bp, Artificial Sequence
  Oligonucleotide for detection of SNP TSC0049880
tttgagttttaty

SEQ ID NO: 203092 - DNA, 13 bp, Artificial Sequence
  Oligonucleotide for detection of SNP TSC0049880
rataaaactcaaa

SEQ ID NO: 203093 - DNA, 13 bp, Artificial Sequence
  Oligonucleotide for detection of SNP TSC0049880
ggtgaattttaaa

SEQ ID NO: 203094 - DNA, 13 bp, Artificial Sequence
  Oligonucleotide for detection of SNP TSC0049880
tttaaaattcacc

SEQ ID NO: 203095 - DNA, 13 bp, Artificial Sequence
  Oligonucleotide for detection of SNP TSC0049880
ggtgaagtttaaa

SEQ ID NO: 203096 - DNA, 13 bp, Artificial Sequence
  Oligonucleotide for detection of SNP TSC0049880
tttaaacttcacc

SEQ ID NO: 203097 - DNA, 13 bp, Artificial Sequence
  Oligonucleotide for detection of SNP TSC0049882
aaaattattatta

SEQ ID NO: 203098 - DNA, 13 bp, Artificial Sequence
  Oligonucleotide for detection of SNP TSC0049882
taataataatttt

SEQ ID NO: 203099 - DNA, 13 bp, Artificial Sequence
  Oligonucleotide for detection of SNP TSC0049882
aaaattgttatta

SEQ ID NO: 203100 - DNA, 13 bp, Artificial Sequence
  Oligonucleotide for detection of SNP TSC0049882
taataacaatttt

SEQ ID NO: 203101 - DNA, 13 bp, Artificial Sequence
  Oligonucleotide for detection of SNP TSC0049882
aaaatcgttatta

SEQ ID NO: 203102 - DNA, 13 bp, Artificial Sequence
  Oligonucleotide for detection of SNP TSC0049882
taataacgatttt

SEQ ID NO: 203103 - DNA, 13 bp, Artificial Sequence
  Oligonucleotide for detection of SNP TSC0049882
taataatgatttt

SEQ ID NO: 203104 - DNA, 13 bp, Artificial Sequence
  Oligonucleotide for detection of SNP TSC0049882
aaaatcattatta

SEQ ID NO: 203105 - DNA, 13 bp, Artificial Sequence
  Oligonucleotide for detection of SNP TSC0049883
agaaatgaaagtg

SEQ ID NO: 203106 - DNA, 13 bp, Artificial Sequence
  Oligonucleotide for detection of SNP TSC0049883
cactttcatttct

SEQ ID NO: 203107 - DNA, 13 bp, Artificial Sequence
  Oligonucleotide for detection of SNP TSC0049883
agaaataaaagtg

SEQ ID NO: 203108 - DNA, 13 bp, Artificial Sequence
  Oligonucleotide for detection of SNP TSC0049883
cacttttatttct

SEQ ID NO: 203109 - DNA, 13 bp, Artificial Sequence
  Oligonucleotide for detection of SNP TSC0049884
ttatttggtatat

SEQ ID NO: 203110 - DNA, 13 bp, Artificial Sequence
  Oligonucleotide for detection of SNP TSC0049884
atataccaaataa

SEQ ID NO: 203111 - DNA, 13 bp, Artificial Sequence
  Oligonucleotide for detection of SNP TSC0049884
ttatttagtatat

SEQ ID NO: 203112 - DNA, 13 bp, Artificial Sequence
  Oligonucleotide for detection of SNP TSC0049884
atatactaaataa

SEQ ID NO: 203113 - DNA, 13 bp, Artificial Sequence
  Oligonucleotide for detection of SNP TSC0049885
atgattatggata

SEQ ID NO: 203114 - DNA, 13 bp, Artificial Sequence
  Oligonucleotide for detection of SNP TSC0049885
tatccataatcat

SEQ ID NO: 203115 - DNA, 13 bp, Artificial Sequence
  Oligonucleotide for detection of SNP TSC0049885
atgattgtggata

SEQ ID NO: 203116 - DNA, 13 bp, Artificial Sequence
  Oligonucleotide for detection of SNP TSC0049885
tatccacaatcat

SEQ ID NO: 203117 - DNA, 13 bp, Artificial Sequence
  Oligonucleotide for detection of SNP TSC0049886
tttattttttagy

SEQ ID NO: 203118 - DNA, 13 bp, Artificial Sequence
  Oligonucleotide for detection of SNP TSC0049886
rctaaaaaataaa

SEQ ID NO: 203119 - DNA, 13 bp, Artificial Sequence
  Oligonucleotide for detection of SNP TSC0049886
tttattgtttagy

SEQ ID NO: 203120 - DNA, 13 bp, Artificial Sequence
  Oligonucleotide for detection of SNP TSC0049886
rctaaacaataaa

SEQ ID NO: 203121 - DNA, 13 bp, Artificial Sequence
  Oligonucleotide for detection of SNP TSC0049886
tttatcgtttagy

SEQ ID NO: 203122 - DNA, 13 bp, Artificial Sequence
  Oligonucleotide for detection of SNP TSC0049886
rctaaacgataaa

SEQ ID NO: 203123 - DNA, 13 bp, Artificial Sequence
  Oligonucleotide for detection of SNP TSC0049886
gttgggggatggg

SEQ ID NO: 203124 - DNA, 13 bp, Artificial Sequence
  Oligonucleotide for detection of SNP TSC0049886
cccatcccccaac

SEQ ID NO: 203125 - DNA, 13 bp, Artificial Sequence
  Oligonucleotide for detection of SNP TSC0049886
gttgggtgatggg

SEQ ID NO: 203126 - DNA, 13 bp, Artificial Sequence
  Oligonucleotide for detection of SNP TSC0049886
cccatcacccaac

SEQ ID NO: 203127 - DNA, 13 bp, Artificial Sequence
  Oligonucleotide for detection of SNP TSC0049886
gttgggcgatggg

SEQ ID NO: 203128 - DNA, 13 bp, Artificial Sequence
  Oligonucleotide for detection of SNP TSC0049886
cccatcgcccaac

SEQ ID NO: 203129 - DNA, 13 bp, Artificial Sequence
  Oligonucleotide for detection of SNP TSC0049887
ttagtttgttagy

SEQ ID NO: 203130 - DNA, 13 bp, Artificial Sequence
  Oligonucleotide for detection of SNP TSC0049887
rctaacaaactaa

SEQ ID NO: 203131 - DNA, 13 bp, Artificial Sequence
  Oligonucleotide for detection of SNP TSC0049887
ttagttcgttagy

SEQ ID NO: 203132 - DNA, 13 bp, Artificial Sequence
  Oligonucleotide for detection of SNP TSC0049887
rctaacgaactaa

SEQ ID NO: 203133 - DNA, 13 bp, Artificial Sequence
  Oligonucleotide for detection of SNP TSC0049887
gttggtgagttgg

SEQ ID NO: 203134 - DNA, 13 bp, Artificial Sequence
  Oligonucleotide for detection of SNP TSC0049887
ccaactcaccaac

SEQ ID NO: 203135 - DNA, 13 bp, Artificial Sequence
  Oligonucleotide for detection of SNP TSC0049887
gttggtaagttgg

SEQ ID NO: 203136 - DNA, 13 bp, Artificial Sequence
  Oligonucleotide for detection of SNP TSC0049887
ccaacttaccaac

SEQ ID NO: 203137 - DNA, 13 bp, Artificial Sequence
  Oligonucleotide for detection of SNP TSC0049887
gttggcgagttgg

SEQ ID NO: 203138 - DNA, 13 bp, Artificial Sequence
  Oligonucleotide for detection of SNP TSC0049887
ccaactcgccaac

SEQ ID NO: 203139 - DNA, 13 bp, Artificial Sequence
  Oligonucleotide for detection of SNP TSC0049888
tttgttagtttgt

SEQ ID NO: 203140 - DNA, 13 bp, Artificial Sequence
  Oligonucleotide for detection of SNP TSC0049888
acaaactaacaaa

SEQ ID NO: 203141 - DNA, 13 bp, Artificial Sequence
  Oligonucleotide for detection of SNP TSC0049888
ttcgttagtttgt

SEQ ID NO: 203142 - DNA, 13 bp, Artificial Sequence
  Oligonucleotide for detection of SNP TSC0049888
acaaactaacgaa

SEQ ID NO: 203143 - DNA, 13 bp, Artificial Sequence
  Oligonucleotide for detection of SNP TSC0049888
ttcgttggtttgt

SEQ ID NO: 203144 - DNA, 13 bp, Artificial Sequence
  Oligonucleotide for detection of SNP TSC0049888
acaaaccaacgaa

SEQ ID NO: 203145 - DNA, 13 bp, Artificial Sequence
  Oligonucleotide for detection of SNP TSC0049888
tttgtcggtttgt

SEQ ID NO: 203146 - DNA, 13 bp, Artificial Sequence
  Oligonucleotide for detection of SNP TSC0049888
acaaaccgacaaa

SEQ ID NO: 203147 - DNA, 13 bp, Artificial Sequence
  Oligonucleotide for detection of SNP TSC0049888
ttcgtcggtttgt

SEQ ID NO: 203148 - DNA, 13 bp, Artificial Sequence
  Oligonucleotide for detection of SNP TSC0049888
acaaaccgacgaa

SEQ ID NO: 203149 - DNA, 13 bp, Artificial Sequence
  Oligonucleotide for detection of SNP TSC0049888
ataggttggtgag

SEQ ID NO: 203150 - DNA, 13 bp, Artificial Sequence
  Oligonucleotide for detection of SNP TSC0049888
ctcaccaacctat

SEQ ID NO: 203151 - DNA, 13 bp, Artificial Sequence
  Oligonucleotide for detection of SNP TSC0049888
ataggttggcgag

SEQ ID NO: 203152 - DNA, 13 bp, Artificial Sequence
  Oligonucleotide for detection of SNP TSC0049888
ctcgccaacctat

SEQ ID NO: 203153 - DNA, 13 bp, Artificial Sequence
  Oligonucleotide for detection of SNP TSC0049888
ataggtcggtgag

SEQ ID NO: 203154 - DNA, 13 bp, Artificial Sequence
  Oligonucleotide for detection of SNP TSC0049888
ctcaccgacctat

SEQ ID NO: 203155 - DNA, 13 bp, Artificial Sequence
  Oligonucleotide for detection of SNP TSC0049888
ataggtcggcgag

SEQ ID NO: 203156 - DNA, 13 bp, Artificial Sequence
  Oligonucleotide for detection of SNP TSC0049888
ctcgccgacctat

SEQ ID NO: 203157 - DNA, 13 bp, Artificial Sequence
  Oligonucleotide for detection of SNP TSC0004905
gtttgaattatat

SEQ ID NO: 203158 - DNA, 13 bp, Artificial Sequence
  Oligonucleotide for detection of SNP TSC0004905
atataattcaaac

SEQ ID NO: 203159 - DNA, 13 bp, Artificial Sequence
  Oligonucleotide for detection of SNP TSC0004905
gtttgagttatat

SEQ ID NO: 203160 - DNA, 13 bp, Artificial Sequence
  Oligonucleotide for detection of SNP TSC0004905
atataactcaaac

SEQ ID NO: 203161 - DNA, 13 bp, Artificial Sequence
  Oligonucleotide for detection of SNP TSC0049889
tatgggagtataa

SEQ ID NO: 203162 - DNA, 13 bp, Artificial Sequence
  Oligonucleotide for detection of SNP TSC0049889
ttatactcccata

SEQ ID NO: 203163 - DNA, 13 bp, Artificial Sequence
  Oligonucleotide for detection of SNP TSC0049889
tatgggggtataa

SEQ ID NO: 203164 - DNA, 13 bp, Artificial Sequence
  Oligonucleotide for detection of SNP TSC0049889
ttatacccccata

SEQ ID NO: 203165 - DNA, 13 bp, Artificial Sequence
  Oligonucleotide for detection of SNP TSC0049889
tacgggagtataa

SEQ ID NO: 203166 - DNA, 13 bp, Artificial Sequence
  Oligonucleotide for detection of SNP TSC0049889
ttatactcccgta

SEQ ID NO: 203167 - DNA, 13 bp, Artificial Sequence
  Oligonucleotide for detection of SNP TSC0049889
tacgggggtataa

SEQ ID NO: 203168 - DNA, 13 bp, Artificial Sequence
  Oligonucleotide for detection of SNP TSC0049889
ttatacccccgta

SEQ ID NO: 203169 - DNA, 13 bp, Artificial Sequence
  Oligonucleotide for detection of SNP TSC0049890
gttattatgtaag

SEQ ID NO: 203170 - DNA, 13 bp, Artificial Sequence
  Oligonucleotide for detection of SNP TSC0049890
cttacataataac

SEQ ID NO: 203171 - DNA, 13 bp, Artificial Sequence
  Oligonucleotide for detection of SNP TSC0049890
gttattgtgtaag

SEQ ID NO: 203172 - DNA, 13 bp, Artificial Sequence
  Oligonucleotide for detection of SNP TSC0049890
cttacacaataac

SEQ ID NO: 203173 - DNA, 13 bp, Artificial Sequence
  Oligonucleotide for detection of SNP TSC0049891
ttagttattatgt

SEQ ID NO: 203174 - DNA, 13 bp, Artificial Sequence
  Oligonucleotide for detection of SNP TSC0049891
acataataactaa

SEQ ID NO: 203175 - DNA, 13 bp, Artificial Sequence
  Oligonucleotide for detection of SNP TSC0049891
atataatggttaa

SEQ ID NO: 203176 - DNA, 13 bp, Artificial Sequence
  Oligonucleotide for detection of SNP TSC0049891
ttaaccattatat

SEQ ID NO: 203177 - DNA, 13 bp, Artificial Sequence
  Oligonucleotide for detection of SNP TSC0049891
atataacggttaa

SEQ ID NO: 203178 - DNA, 13 bp, Artificial Sequence
  Oligonucleotide for detection of SNP TSC0049891
ttaaccgttatat

SEQ ID NO: 203179 - DNA, 13 bp, Artificial Sequence
  Oligonucleotide for detection of SNP TSC0049892
ttagttgtataty

SEQ ID NO: 203180 - DNA, 13 bp, Artificial Sequence
  Oligonucleotide for detection of SNP TSC0049892
ratatacaactaa

SEQ ID NO: 203181 - DNA, 13 bp, Artificial Sequence
  Oligonucleotide for detection of SNP TSC0049892
ttagtcgtataty

SEQ ID NO: 203182 - DNA, 13 bp, Artificial Sequence
  Oligonucleotide for detection of SNP TSC0049892
ratatacgactaa

SEQ ID NO: 203183 - DNA, 13 bp, Artificial Sequence
  Oligonucleotide for detection of SNP TSC0049896
tttagaatataga

SEQ ID NO: 203184 - DNA, 13 bp, Artificial Sequence
  Oligonucleotide for detection of SNP TSC0049896
tctatattctaaa

SEQ ID NO: 203185 - DNA, 13 bp, Artificial Sequence
  Oligonucleotide for detection of SNP TSC0049896
tttagattataga

SEQ ID NO: 203186 - DNA, 13 bp, Artificial Sequence
  Oligonucleotide for detection of SNP TSC0049896
tctataatctaaa

SEQ ID NO: 203187 - DNA, 13 bp, Artificial Sequence
  Oligonucleotide for detection of SNP TSC0049896
tttatattttgaa

SEQ ID NO: 203188 - DNA, 13 bp, Artificial Sequence
  Oligonucleotide for detection of SNP TSC0049896
ttcaaaatataaa

SEQ ID NO: 203189 - DNA, 13 bp, Artificial Sequence
  Oligonucleotide for detection of SNP TSC0049896
tttataatttgaa

SEQ ID NO: 203190 - DNA, 13 bp, Artificial Sequence
  Oligonucleotide for detection of SNP TSC0049896
ttcaaattataaa

SEQ ID NO: 203191 - DNA, 13 bp, Artificial Sequence
  Oligonucleotide for detection of SNP TSC0049899
tttttaattgtta

SEQ ID NO: 203192 - DNA, 13 bp, Artificial Sequence
  Oligonucleotide for detection of SNP TSC0049899
taacaattaaaaa

SEQ ID NO: 203193 - DNA, 13 bp, Artificial Sequence
  Oligonucleotide for detection of SNP TSC0049899
tttttatttgtta

SEQ ID NO: 203194 - DNA, 13 bp, Artificial Sequence
  Oligonucleotide for detection of SNP TSC0049899
taacaaataaaaa

SEQ ID NO: 203195 - DNA, 13 bp, Artificial Sequence
  Oligonucleotide for detection of SNP TSC0049899
tagtaattgaagg

SEQ ID NO: 203196 - DNA, 13 bp, Artificial Sequence
  Oligonucleotide for detection of SNP TSC0049899
ccttcaattacta

SEQ ID NO: 203197 - DNA, 13 bp, Artificial Sequence
  Oligonucleotide for detection of SNP TSC0049899
tagtaagtgaagg

SEQ ID NO: 203198 - DNA, 13 bp, Artificial Sequence
  Oligonucleotide for detection of SNP TSC0049899
ccttcacttacta

SEQ ID NO: 203199 - DNA, 13 bp, Artificial Sequence
  Oligonucleotide for detection of SNP TSC0049900
tatttgcgttttt

SEQ ID NO: 203200 - DNA, 13 bp, Artificial Sequence
  Oligonucleotide for detection of SNP TSC0049900
aaaaacgcaaata

SEQ ID NO: 203201 - DNA, 13 bp, Artificial Sequence
  Oligonucleotide for detection of SNP TSC0049900
agaagtgtagatg

SEQ ID NO: 203202 - DNA, 13 bp, Artificial Sequence
  Oligonucleotide for detection of SNP TSC0049900
catctacacttct

SEQ ID NO: 203203 - DNA, 13 bp, Artificial Sequence
  Oligonucleotide for detection of SNP TSC0049900
agaagtatagatg

SEQ ID NO: 203204 - DNA, 13 bp, Artificial Sequence
  Oligonucleotide for detection of SNP TSC0049900
catctatacttct

SEQ ID NO: 203205 - DNA, 13 bp, Artificial Sequence
  Oligonucleotide for detection of SNP TSC0049900
agaagcgtagatg

SEQ ID NO: 203206 - DNA, 13 bp, Artificial Sequence
  Oligonucleotide for detection of SNP TSC0049900
catctacgcttct

SEQ ID NO: 203207 - DNA, 13 bp, Artificial Sequence
  Oligonucleotide for detection of SNP TSC0049901
atagagttgttat

SEQ ID NO: 203208 - DNA, 13 bp, Artificial Sequence
  Oligonucleotide for detection of SNP TSC0049901
ataacaactctat

SEQ ID NO: 203209 - DNA, 13 bp, Artificial Sequence
  Oligonucleotide for detection of SNP TSC0049901
atagaggtgttat

SEQ ID NO: 203210 - DNA, 13 bp, Artificial Sequence
  Oligonucleotide for detection of SNP TSC0049901
ataacacctctat

SEQ ID NO: 203211 - DNA, 13 bp, Artificial Sequence
  Oligonucleotide for detection of SNP TSC0049901
ataataattttat

SEQ ID NO: 203212 - DNA, 13 bp, Artificial Sequence
  Oligonucleotide for detection of SNP TSC0049901
ataaaattattat

SEQ ID NO: 203213 - DNA, 13 bp, Artificial Sequence
  Oligonucleotide for detection of SNP TSC0049902
tatttaagagtag

SEQ ID NO: 203214 - DNA, 13 bp, Artificial Sequence
  Oligonucleotide for detection of SNP TSC0049902
ctactcttaaata

SEQ ID NO: 203215 - DNA, 13 bp, Artificial Sequence
  Oligonucleotide for detection of SNP TSC0049902
tatttaggagtag

SEQ ID NO: 203216 - DNA, 13 bp, Artificial Sequence
  Oligonucleotide for detection of SNP TSC0049902
ctactcctaaata

SEQ ID NO: 203217 - DNA, 13 bp, Artificial Sequence
  Oligonucleotide for detection of SNP TSC0049903
aggttgaggtggg

SEQ ID NO: 203218 - DNA, 13 bp, Artificial Sequence
  Oligonucleotide for detection of SNP TSC0049903
cccacctcaacct

SEQ ID NO: 203219 - DNA, 13 bp, Artificial Sequence
  Oligonucleotide for detection of SNP TSC0049903
aggttgaggcggg

SEQ ID NO: 203220 - DNA, 13 bp, Artificial Sequence
  Oligonucleotide for detection of SNP TSC0049903
cccgcctcaacct

SEQ ID NO: 203221 - DNA, 13 bp, Artificial Sequence
  Oligonucleotide for detection of SNP TSC0049903
aggttgtggcggg

SEQ ID NO: 203222 - DNA, 13 bp, Artificial Sequence
  Oligonucleotide for detection of SNP TSC0049903
cccgccacaacct

SEQ ID NO: 203223 - DNA, 13 bp, Artificial Sequence
  Oligonucleotide for detection of SNP TSC0049903
aggttgcggcggg

SEQ ID NO: 203224 - DNA, 13 bp, Artificial Sequence
  Oligonucleotide for detection of SNP TSC0049903
cccgccgcaacct

SEQ ID NO: 203225 - DNA, 13 bp, Artificial Sequence
  Oligonucleotide for detection of SNP TSC0049903
ttcgttttagttt

SEQ ID NO: 203226 - DNA, 13 bp, Artificial Sequence
  Oligonucleotide for detection of SNP TSC0049903
aaactaaaacgaa

SEQ ID NO: 203227 - DNA, 13 bp, Artificial Sequence
  Oligonucleotide for detection of SNP TSC0049903
ttcgttgtagttt

SEQ ID NO: 203228 - DNA, 13 bp, Artificial Sequence
  Oligonucleotide for detection of SNP TSC0049903
aaactacaacgaa

SEQ ID NO: 203229 - DNA, 13 bp, Artificial Sequence
  Oligonucleotide for detection of SNP TSC0049903
ttcgtcgtagttt

SEQ ID NO: 203230 - DNA, 13 bp, Artificial Sequence
  Oligonucleotide for detection of SNP TSC0049903
aaactacgacgaa

SEQ ID NO: 203231 - DNA, 13 bp, Artificial Sequence
  Oligonucleotide for detection of SNP TSC0049904
gtttgttgatttt

SEQ ID NO: 203232 - DNA, 13 bp, Artificial Sequence
  Oligonucleotide for detection of SNP TSC0049904
aaaatcaacaaac

SEQ ID NO: 203233 - DNA, 13 bp, Artificial Sequence
  Oligonucleotide for detection of SNP TSC0049904
gtttgtcgatttt

SEQ ID NO: 203234 - DNA, 13 bp, Artificial Sequence
  Oligonucleotide for detection of SNP TSC0049904
aaaatcgacaaac

SEQ ID NO: 203235 - DNA, 13 bp, Artificial Sequence
  Oligonucleotide for detection of SNP TSC0049904
aaaattgataagy

SEQ ID NO: 203236 - DNA, 13 bp, Artificial Sequence
  Oligonucleotide for detection of SNP TSC0049904
rcttatcaatttt

SEQ ID NO: 203237 - DNA, 13 bp, Artificial Sequence
  Oligonucleotide for detection of SNP TSC0049904
aaaattaataagy

SEQ ID NO: 203238 - DNA, 13 bp, Artificial Sequence
  Oligonucleotide for detection of SNP TSC0049904
rcttattaatttt

SEQ ID NO: 203239 - DNA, 13 bp, Artificial Sequence
  Oligonucleotide for detection of SNP TSC0049904
aaaatcgataagy

SEQ ID NO: 203240 - DNA, 13 bp, Artificial Sequence
  Oligonucleotide for detection of SNP TSC0049904
rcttatcgatttt

SEQ ID NO: 203241 - DNA, 13 bp, Artificial Sequence
  Oligonucleotide for detection of SNP TSC0049905
attattagaaata

SEQ ID NO: 203242 - DNA, 13 bp, Artificial Sequence
  Oligonucleotide for detection of SNP TSC0049905
tatttctaataat

SEQ ID NO: 203243 - DNA, 13 bp, Artificial Sequence
  Oligonucleotide for detection of SNP TSC0049906
aaattagtatggg

SEQ ID NO: 203244 - DNA, 13 bp, Artificial Sequence
  Oligonucleotide for detection of SNP TSC0049906
cccatactaattt

SEQ ID NO: 203245 - DNA, 13 bp, Artificial Sequence
  Oligonucleotide for detection of SNP TSC0049906
aaattaatatggg

SEQ ID NO: 203246 - DNA, 13 bp, Artificial Sequence
  Oligonucleotide for detection of SNP TSC0049906
cccatattaattt

SEQ ID NO: 203247 - DNA, 13 bp, Artificial Sequence
  Oligonucleotide for detection of SNP TSC0049907
ggtggtagttgta

SEQ ID NO: 203248 - DNA, 13 bp, Artificial Sequence
  Oligonucleotide for detection of SNP TSC0049907
tacaactaccacc

SEQ ID NO: 203249 - DNA, 13 bp, Artificial Sequence
  Oligonucleotide for detection of SNP TSC0049907
ggtggtggttgta

SEQ ID NO: 203250 - DNA, 13 bp, Artificial Sequence
  Oligonucleotide for detection of SNP TSC0049907
tacaaccaccacc

SEQ ID NO: 203251 - DNA, 13 bp, Artificial Sequence
  Oligonucleotide for detection of SNP TSC0049907
ggtggcggttgta

SEQ ID NO: 203252 - DNA, 13 bp, Artificial Sequence
  Oligonucleotide for detection of SNP TSC0049907
tacaaccgccacc

SEQ ID NO: 203253 - DNA, 13 bp, Artificial Sequence
  Oligonucleotide for detection of SNP TSC0049907
tataattgttaty

SEQ ID NO: 203254 - DNA, 13 bp, Artificial Sequence
  Oligonucleotide for detection of SNP TSC0049907
rataacaattata

SEQ ID NO: 203255 - DNA, 13 bp, Artificial Sequence
  Oligonucleotide for detection of SNP TSC0049907
tataatcgttaty

SEQ ID NO: 203256 - DNA, 13 bp, Artificial Sequence
  Oligonucleotide for detection of SNP TSC0049907
rataacgattata

SEQ ID NO: 203257 - DNA, 13 bp, Artificial Sequence
  Oligonucleotide for detection of SNP TSC0049908
gatttatatggat

SEQ ID NO: 203258 - DNA, 13 bp, Artificial Sequence
  Oligonucleotide for detection of SNP TSC0049908
atccatataaatc

SEQ ID NO: 203259 - DNA, 13 bp, Artificial Sequence
  Oligonucleotide for detection of SNP TSC0049908
gatttagatggat

SEQ ID NO: 203260 - DNA, 13 bp, Artificial Sequence
  Oligonucleotide for detection of SNP TSC0049908
atccatctaaatc

SEQ ID NO: 203261 - DNA, 13 bp, Artificial Sequence
  Oligonucleotide for detection of SNP TSC0049908
atttatatgggty

SEQ ID NO: 203262 - DNA, 13 bp, Artificial Sequence
  Oligonucleotide for detection of SNP TSC0049908
racccatataaat

SEQ ID NO: 203263 - DNA, 13 bp, Artificial Sequence
  Oligonucleotide for detection of SNP TSC0049908
atttatttgggty

SEQ ID NO: 203264 - DNA, 13 bp, Artificial Sequence
  Oligonucleotide for detection of SNP TSC0049908
racccaaataaat

SEQ ID NO: 203265 - DNA, 13 bp, Artificial Sequence
  Oligonucleotide for detection of SNP TSC0049909
ttgtttattgtay

SEQ ID NO: 203266 - DNA, 13 bp, Artificial Sequence
  Oligonucleotide for detection of SNP TSC0049909
rtacaataaacaa

SEQ ID NO: 203267 - DNA, 13 bp, Artificial Sequence
  Oligonucleotide for detection of SNP TSC0049909
ttgtttgttgtay

SEQ ID NO: 203268 - DNA, 13 bp, Artificial Sequence
  Oligonucleotide for detection of SNP TSC0049909
rtacaacaaacaa

SEQ ID NO: 203269 - DNA, 13 bp, Artificial Sequence
  Oligonucleotide for detection of SNP TSC0049909
tcgtttattgtay

SEQ ID NO: 203270 - DNA, 13 bp, Artificial Sequence
  Oligonucleotide for detection of SNP TSC0049909
rtacaataaacga

SEQ ID NO: 203271 - DNA, 13 bp, Artificial Sequence
  Oligonucleotide for detection of SNP TSC0049909
tcgtttgttgtay

SEQ ID NO: 203272 - DNA, 13 bp, Artificial Sequence
  Oligonucleotide for detection of SNP TSC0049909
rtacaacaaacga

SEQ ID NO: 203273 - DNA, 13 bp, Artificial Sequence
  Oligonucleotide for detection of SNP TSC0049909
ttgttcgttgtay

SEQ ID NO: 203274 - DNA, 13 bp, Artificial Sequence
  Oligonucleotide for detection of SNP TSC0049909
rtacaacgaacaa

SEQ ID NO: 203275 - DNA, 13 bp, Artificial Sequence
  Oligonucleotide for detection of SNP TSC0049909
tcgttcgttgtay

SEQ ID NO: 203276 - DNA, 13 bp, Artificial Sequence
  Oligonucleotide for detection of SNP TSC0049909
rtacaacgaacga

SEQ ID NO: 203277 - DNA, 13 bp, Artificial Sequence
  Oligonucleotide for detection of SNP TSC0049909
gtgtagtgggtgg

SEQ ID NO: 203278 - DNA, 13 bp, Artificial Sequence
  Oligonucleotide for detection of SNP TSC0049909
ccacccactacac

SEQ ID NO: 203279 - DNA, 13 bp, Artificial Sequence
  Oligonucleotide for detection of SNP TSC0049909
gtgtagtgggcgg

SEQ ID NO: 203280 - DNA, 13 bp, Artificial Sequence
  Oligonucleotide for detection of SNP TSC0049909
ccgcccactacac

SEQ ID NO: 203281 - DNA, 13 bp, Artificial Sequence
  Oligonucleotide for detection of SNP TSC0049909
gtgtagcgggtgg

SEQ ID NO: 203282 - DNA, 13 bp, Artificial Sequence
  Oligonucleotide for detection of SNP TSC0049909
ccacccgctacac

SEQ ID NO: 203283 - DNA, 13 bp, Artificial Sequence
  Oligonucleotide for detection of SNP TSC0049909
gtgtagcgggcgg

SEQ ID NO: 203284 - DNA, 13 bp, Artificial Sequence
  Oligonucleotide for detection of SNP TSC0049909
ccgcccgctacac

SEQ ID NO: 203285 - DNA, 13 bp, Artificial Sequence
  Oligonucleotide for detection of SNP TSC0049910
gaataatgtttag

SEQ ID NO: 203286 - DNA, 13 bp, Artificial Sequence
  Oligonucleotide for detection of SNP TSC0049910
ctaaacattattc

SEQ ID NO: 203287 - DNA, 13 bp, Artificial Sequence
  Oligonucleotide for detection of SNP TSC0049910
gaataacgtttag

SEQ ID NO: 203288 - DNA, 13 bp, Artificial Sequence
  Oligonucleotide for detection of SNP TSC0049910
ctaaacgttattc

SEQ ID NO: 203289 - DNA, 13 bp, Artificial Sequence
  Oligonucleotide for detection of SNP TSC0049912
tttttcgtaatag

SEQ ID NO: 203290 - DNA, 13 bp, Artificial Sequence
  Oligonucleotide for detection of SNP TSC0049912
ctattacgaaaaa

SEQ ID NO: 203291 - DNA, 13 bp, Artificial Sequence
  Oligonucleotide for detection of SNP TSC0049912
ttattatgaagga

SEQ ID NO: 203292 - DNA, 13 bp, Artificial Sequence
  Oligonucleotide for detection of SNP TSC0049912
tccttcataataa

SEQ ID NO: 203293 - DNA, 13 bp, Artificial Sequence
  Oligonucleotide for detection of SNP TSC0049912
ttattacgaagga

SEQ ID NO: 203294 - DNA, 13 bp, Artificial Sequence
  Oligonucleotide for detection of SNP TSC0049912
tccttcgtaataa

SEQ ID NO: 203295 - DNA, 13 bp, Artificial Sequence
  Oligonucleotide for detection of SNP TSC0049914
agtgtaataataa

SEQ ID NO: 203296 - DNA, 13 bp, Artificial Sequence
  Oligonucleotide for detection of SNP TSC0049914
ttattattacact

SEQ ID NO: 203297 - DNA, 13 bp, Artificial Sequence
  Oligonucleotide for detection of SNP TSC0049914
agtgtattaataa

SEQ ID NO: 203298 - DNA, 13 bp, Artificial Sequence
  Oligonucleotide for detection of SNP TSC0049914
ttattaatacact

SEQ ID NO: 203299 - DNA, 13 bp, Artificial Sequence
  Oligonucleotide for detection of SNP TSC0049914
ttattattgtatt

SEQ ID NO: 203300 - DNA, 13 bp, Artificial Sequence
  Oligonucleotide for detection of SNP TSC0049914
aatacaataataa

SEQ ID NO: 203301 - DNA, 13 bp, Artificial Sequence
  Oligonucleotide for detection of SNP TSC0005360
tgtaatagatttt

SEQ ID NO: 203302 - DNA, 13 bp, Artificial Sequence
  Oligonucleotide for detection of SNP TSC0005360
aaaatctattaca

SEQ ID NO: 203303 - DNA, 13 bp, Artificial Sequence
  Oligonucleotide for detection of SNP TSC0005360
tgtaatggatttt

SEQ ID NO: 203304 - DNA, 13 bp, Artificial Sequence
  Oligonucleotide for detection of SNP TSC0005360
aaaatccattaca

SEQ ID NO: 203305 - DNA, 13 bp, Artificial Sequence
  Oligonucleotide for detection of SNP TSC0049922
gaatattaattty

SEQ ID NO: 203306 - DNA, 13 bp, Artificial Sequence
  Oligonucleotide for detection of SNP TSC0049922
raaattaatattc

SEQ ID NO: 203307 - DNA, 13 bp, Artificial Sequence
  Oligonucleotide for detection of SNP TSC0049922
gaatatgaattty

SEQ ID NO: 203308 - DNA, 13 bp, Artificial Sequence
  Oligonucleotide for detection of SNP TSC0049922
raaattcatattc

SEQ ID NO: 203309 - DNA, 13 bp, Artificial Sequence
  Oligonucleotide for detection of SNP TSC0049922
gaatacgaattty

SEQ ID NO: 203310 - DNA, 13 bp, Artificial Sequence
  Oligonucleotide for detection of SNP TSC0049922
raaattcgtattc

SEQ ID NO: 203311 - DNA, 13 bp, Artificial Sequence
  Oligonucleotide for detection of SNP TSC0049922
gaggttggtgtty

SEQ ID NO: 203312 - DNA, 13 bp, Artificial Sequence
  Oligonucleotide for detection of SNP TSC0049922
raacaccaacctc

SEQ ID NO: 203313 - DNA, 13 bp, Artificial Sequence
  Oligonucleotide for detection of SNP TSC0049922
gaggtttgtgtty

SEQ ID NO: 203314 - DNA, 13 bp, Artificial Sequence
  Oligonucleotide for detection of SNP TSC0049922
raacacaaacctc

SEQ ID NO: 203315 - DNA, 13 bp, Artificial Sequence
  Oligonucleotide for detection of SNP TSC0049922
gaggttcgtgtty

SEQ ID NO: 203316 - DNA, 13 bp, Artificial Sequence
  Oligonucleotide for detection of SNP TSC0049922
raacacgaacctc

SEQ ID NO: 203317 - DNA, 13 bp, Artificial Sequence
  Oligonucleotide for detection of SNP TSC0049924
gttttagaagttt

SEQ ID NO: 203318 - DNA, 13 bp, Artificial Sequence
  Oligonucleotide for detection of SNP TSC0049924
aaacttctaaaac

SEQ ID NO: 203319 - DNA, 13 bp, Artificial Sequence
  Oligonucleotide for detection of SNP TSC0049924
gttttaaaagttt

SEQ ID NO: 203320 - DNA, 13 bp, Artificial Sequence
  Oligonucleotide for detection of SNP TSC0049924
aaacttttaaaac

SEQ ID NO: 203321 - DNA, 13 bp, Artificial Sequence
  Oligonucleotide for detection of SNP TSC0049927
tgtaggatgagty

SEQ ID NO: 203322 - DNA, 13 bp, Artificial Sequence
  Oligonucleotide for detection of SNP TSC0049927
ractcatcctaca

SEQ ID NO: 203323 - DNA, 13 bp, Artificial Sequence
  Oligonucleotide for detection of SNP TSC0049927
tgtagggtgagty

SEQ ID NO: 203324 - DNA, 13 bp, Artificial Sequence
  Oligonucleotide for detection of SNP TSC0049927
ractcaccctaca

SEQ ID NO: 203325 - DNA, 13 bp, Artificial Sequence
  Oligonucleotide for detection of SNP TSC0049928
attgaggaatgty

SEQ ID NO: 203326 - DNA, 13 bp, Artificial Sequence
  Oligonucleotide for detection of SNP TSC0049928
racattcctcaat

SEQ ID NO: 203327 - DNA, 13 bp, Artificial Sequence
  Oligonucleotide for detection of SNP TSC0049928
attgagaaatgty

SEQ ID NO: 203328 - DNA, 13 bp, Artificial Sequence
  Oligonucleotide for detection of SNP TSC0049928
racatttctcaat

SEQ ID NO: 203329 - DNA, 13 bp, Artificial Sequence
  Oligonucleotide for detection of SNP TSC0049933
tatagagaaatta

SEQ ID NO: 203330 - DNA, 13 bp, Artificial Sequence
  Oligonucleotide for detection of SNP TSC0049933
taatttctctata

SEQ ID NO: 203331 - DNA, 13 bp, Artificial Sequence
  Oligonucleotide for detection of SNP TSC0049933
tatagaaaaatta

SEQ ID NO: 203332 - DNA, 13 bp, Artificial Sequence
  Oligonucleotide for detection of SNP TSC0049933
taatttttctata

SEQ ID NO: 203333 - DNA, 13 bp, Artificial Sequence
  Oligonucleotide for detection of SNP TSC0049934
aaaataagttatt

SEQ ID NO: 203334 - DNA, 13 bp, Artificial Sequence
  Oligonucleotide for detection of SNP TSC0049934
aataacttatttt

SEQ ID NO: 203335 - DNA, 13 bp, Artificial Sequence
  Oligonucleotide for detection of SNP TSC0049934
aaaataggttatt

SEQ ID NO: 203336 - DNA, 13 bp, Artificial Sequence
  Oligonucleotide for detection of SNP TSC0049934
aataacctatttt

SEQ ID NO: 203337 - DNA, 13 bp, Artificial Sequence
  Oligonucleotide for detection of SNP TSC0049939
gattaggaagtay

SEQ ID NO: 203338 - DNA, 13 bp, Artificial Sequence
  Oligonucleotide for detection of SNP TSC0049939
rtacttcctaatc

SEQ ID NO: 203339 - DNA, 13 bp, Artificial Sequence
  Oligonucleotide for detection of SNP TSC0049939
gattagaaagtay

SEQ ID NO: 203340 - DNA, 13 bp, Artificial Sequence
  Oligonucleotide for detection of SNP TSC0049939
rtactttctaatc

SEQ ID NO: 203341 - DNA, 13 bp, Artificial Sequence
  Oligonucleotide for detection of SNP TSC0049940
ttatgcgtttttt

SEQ ID NO: 203342 - DNA, 13 bp, Artificial Sequence
  Oligonucleotide for detection of SNP TSC0049940
aaaaaacgcataa

SEQ ID NO: 203343 - DNA, 13 bp, Artificial Sequence
  Oligonucleotide for detection of SNP TSC0049940
aaaaggggtatag

SEQ ID NO: 203344 - DNA, 13 bp, Artificial Sequence
  Oligonucleotide for detection of SNP TSC0049940
ctatacccctttt

SEQ ID NO: 203345 - DNA, 13 bp, Artificial Sequence
  Oligonucleotide for detection of SNP TSC0049940
aaaaggtgtatag

SEQ ID NO: 203346 - DNA, 13 bp, Artificial Sequence
  Oligonucleotide for detection of SNP TSC0049940
ctatacacctttt

SEQ ID NO: 203347 - DNA, 13 bp, Artificial Sequence
  Oligonucleotide for detection of SNP TSC0049940
aaaaggcgtatag

SEQ ID NO: 203348 - DNA, 13 bp, Artificial Sequence
  Oligonucleotide for detection of SNP TSC0049940
ctatacgcctttt

SEQ ID NO: 203349 - DNA, 13 bp, Artificial Sequence
  Oligonucleotide for detection of SNP TSC0049941
tgaaagaaattta

SEQ ID NO: 203350 - DNA, 13 bp, Artificial Sequence
  Oligonucleotide for detection of SNP TSC0049941
taaatttctttca

SEQ ID NO: 203351 - DNA, 13 bp, Artificial Sequence
  Oligonucleotide for detection of SNP TSC0049941
tgaaaggaattta

SEQ ID NO: 203352 - DNA, 13 bp, Artificial Sequence
  Oligonucleotide for detection of SNP TSC0049941
taaattcctttca

SEQ ID NO: 203353 - DNA, 13 bp, Artificial Sequence
  Oligonucleotide for detection of SNP TSC0006217
ggttaagtggaaa

SEQ ID NO: 203354 - DNA, 13 bp, Artificial Sequence
  Oligonucleotide for detection of SNP TSC0006217
tttccacttaacc

SEQ ID NO: 203355 - DNA, 13 bp, Artificial Sequence
  Oligonucleotide for detection of SNP TSC0006217
ggttaaatggaaa

SEQ ID NO: 203356 - DNA, 13 bp, Artificial Sequence
  Oligonucleotide for detection of SNP TSC0006217
tttccatttaacc

SEQ ID NO: 203357 - DNA, 13 bp, Artificial Sequence
  Oligonucleotide for detection of SNP TSC0049944
gaaagtagattgy

SEQ ID NO: 203358 - DNA, 13 bp, Artificial Sequence
  Oligonucleotide for detection of SNP TSC0049944
rcaatctactttc

SEQ ID NO: 203359 - DNA, 13 bp, Artificial Sequence
  Oligonucleotide for detection of SNP TSC0049944
gaaagtggattgy

SEQ ID NO: 203360 - DNA, 13 bp, Artificial Sequence
  Oligonucleotide for detection of SNP TSC0049944
rcaatccactttc

SEQ ID NO: 203361 - DNA, 13 bp, Artificial Sequence
  Oligonucleotide for detection of SNP TSC0049944
gaaagcggattgy

SEQ ID NO: 203362 - DNA, 13 bp, Artificial Sequence
  Oligonucleotide for detection of SNP TSC0049944
rcaatccgctttc

SEQ ID NO: 203363 - DNA, 13 bp, Artificial Sequence
  Oligonucleotide for detection of SNP TSC0049944
gtaatttgtttty

SEQ ID NO: 203364 - DNA, 13 bp, Artificial Sequence
  Oligonucleotide for detection of SNP TSC0049944
raaaacaaattac

SEQ ID NO: 203365 - DNA, 13 bp, Artificial Sequence
  Oligonucleotide for detection of SNP TSC0049944
gtaattcgtttty

SEQ ID NO: 203366 - DNA, 13 bp, Artificial Sequence
  Oligonucleotide for detection of SNP TSC0049944
raaaacgaattac

SEQ ID NO: 203367 - DNA, 13 bp, Artificial Sequence
  Oligonucleotide for detection of SNP TSC0006549
tgtgagatgtgtg

SEQ ID NO: 203368 - DNA, 13 bp, Artificial Sequence
  Oligonucleotide for detection of SNP TSC0006549
cacacatctcaca

SEQ ID NO: 203369 - DNA, 13 bp, Artificial Sequence
  Oligonucleotide for detection of SNP TSC0006549
tgtgaggtgtgtg

SEQ ID NO: 203370 - DNA, 13 bp, Artificial Sequence
  Oligonucleotide for detection of SNP TSC0006549
cacacacctcaca

SEQ ID NO: 203371 - DNA, 13 bp, Artificial Sequence
  Oligonucleotide for detection of SNP TSC0049945
attggttttatag

SEQ ID NO: 203372 - DNA, 13 bp, Artificial Sequence
  Oligonucleotide for detection of SNP TSC0049945
ctataaaaccaat

SEQ ID NO: 203373 - DNA, 13 bp, Artificial Sequence
  Oligonucleotide for detection of SNP TSC0049945
attggtgttatag

SEQ ID NO: 203374 - DNA, 13 bp, Artificial Sequence
  Oligonucleotide for detection of SNP TSC0049945
ctataacaccaat

SEQ ID NO: 203375 - DNA, 13 bp, Artificial Sequence
  Oligonucleotide for detection of SNP TSC0049945
ttgtgagattaat

SEQ ID NO: 203376 - DNA, 13 bp, Artificial Sequence
  Oligonucleotide for detection of SNP TSC0049945
attaatctcacaa

SEQ ID NO: 203377 - DNA, 13 bp, Artificial Sequence
  Oligonucleotide for detection of SNP TSC0049945
ttgtgatattaat

SEQ ID NO: 203378 - DNA, 13 bp, Artificial Sequence
  Oligonucleotide for detection of SNP TSC0049945
attaatatcacaa

SEQ ID NO: 203379 - DNA, 13 bp, Artificial Sequence
  Oligonucleotide for detection of SNP TSC0049947
attaaagtttttt

SEQ ID NO: 203380 - DNA, 13 bp, Artificial Sequence
  Oligonucleotide for detection of SNP TSC0049947
aaaaaactttaat

SEQ ID NO: 203381 - DNA, 13 bp, Artificial Sequence
  Oligonucleotide for detection of SNP TSC0049947
aggagagtttagt

SEQ ID NO: 203382 - DNA, 13 bp, Artificial Sequence
  Oligonucleotide for detection of SNP TSC0049947
actaaactctcct

SEQ ID NO: 203383 - DNA, 13 bp, Artificial Sequence
  Oligonucleotide for detection of SNP TSC0049947
aggagattttagt

SEQ ID NO: 203384 - DNA, 13 bp, Artificial Sequence
  Oligonucleotide for detection of SNP TSC0049947
actaaaatctcct

SEQ ID NO: 203385 - DNA, 13 bp, Artificial Sequence
  Oligonucleotide for detection of SNP TSC0049948
aggagttgagttt

SEQ ID NO: 203386 - DNA, 13 bp, Artificial Sequence
  Oligonucleotide for detection of SNP TSC0049948
aaactcaactcct

SEQ ID NO: 203387 - DNA, 13 bp, Artificial Sequence
  Oligonucleotide for detection of SNP TSC0049948
aggagtggagttt

SEQ ID NO: 203388 - DNA, 13 bp, Artificial Sequence
  Oligonucleotide for detection of SNP TSC0049948
aaactccactcct

SEQ ID NO: 203389 - DNA, 13 bp, Artificial Sequence
  Oligonucleotide for detection of SNP TSC0049948
aggagtcgagttt

SEQ ID NO: 203390 - DNA, 13 bp, Artificial Sequence
  Oligonucleotide for detection of SNP TSC0049948
aaactcgactcct

SEQ ID NO: 203391 - DNA, 13 bp, Artificial Sequence
  Oligonucleotide for detection of SNP TSC0049948
aggagcggagttt

SEQ ID NO: 203392 - DNA, 13 bp, Artificial Sequence
  Oligonucleotide for detection of SNP TSC0049948
aaactccgctcct

SEQ ID NO: 203393 - DNA, 13 bp, Artificial Sequence
  Oligonucleotide for detection of SNP TSC0049948
aggtttggttttt

SEQ ID NO: 203394 - DNA, 13 bp, Artificial Sequence
  Oligonucleotide for detection of SNP TSC0049948
aaaaaccaaacct

SEQ ID NO: 203395 - DNA, 13 bp, Artificial Sequence
  Oligonucleotide for detection of SNP TSC0049948
aggttttgttttt

SEQ ID NO: 203396 - DNA, 13 bp, Artificial Sequence
  Oligonucleotide for detection of SNP TSC0049948
aaaaacaaaacct

SEQ ID NO: 203397 - DNA, 13 bp, Artificial Sequence
  Oligonucleotide for detection of SNP TSC0049948
aggttcggttttt

SEQ ID NO: 203398 - DNA, 13 bp, Artificial Sequence
  Oligonucleotide for detection of SNP TSC0049948
aaaaaccgaacct

SEQ ID NO: 203399 - DNA, 13 bp, Artificial Sequence
  Oligonucleotide for detection of SNP TSC0049948
aggtttcgttttt

SEQ ID NO: 203400 - DNA, 13 bp, Artificial Sequence
  Oligonucleotide for detection of SNP TSC0049948
aaaaacgaaacct

SEQ ID NO: 203401 - DNA, 13 bp, Artificial Sequence
  Oligonucleotide for detection of SNP TSC0005906
aaatggagaattg

SEQ ID NO: 203402 - DNA, 13 bp, Artificial Sequence
  Oligonucleotide for detection of SNP TSC0005906
caattctccattt

SEQ ID NO: 203403 - DNA, 13 bp, Artificial Sequence
  Oligonucleotide for detection of SNP TSC0005906
aaatggggaattg

SEQ ID NO: 203404 - DNA, 13 bp, Artificial Sequence
  Oligonucleotide for detection of SNP TSC0005906
caattccccattt

SEQ ID NO: 203405 - DNA, 13 bp, Artificial Sequence
  Oligonucleotide for detection of SNP TSC0049950
ggtagatagtgaa

SEQ ID NO: 203406 - DNA, 13 bp, Artificial Sequence
  Oligonucleotide for detection of SNP TSC0049950
ttcactatctacc

SEQ ID NO: 203407 - DNA, 13 bp, Artificial Sequence
  Oligonucleotide for detection of SNP TSC0049950
ggtagagagtgaa

SEQ ID NO: 203408 - DNA, 13 bp, Artificial Sequence
  Oligonucleotide for detection of SNP TSC0049950
ttcactctctacc

SEQ ID NO: 203409 - DNA, 13 bp, Artificial Sequence
  Oligonucleotide for detection of SNP TSC0049952
tgtttttttggtt

SEQ ID NO: 203410 - DNA, 13 bp, Artificial Sequence
  Oligonucleotide for detection of SNP TSC0049952
aaccaaaaaaaca

SEQ ID NO: 203411 - DNA, 13 bp, Artificial Sequence
  Oligonucleotide for detection of SNP TSC0049952
tgttttgttggtt

SEQ ID NO: 203412 - DNA, 13 bp, Artificial Sequence
  Oligonucleotide for detection of SNP TSC0049952
aaccaacaaaaca

SEQ ID NO: 203413 - DNA, 13 bp, Artificial Sequence
  Oligonucleotide for detection of SNP TSC0049952
tgtttcgttggtt

SEQ ID NO: 203414 - DNA, 13 bp, Artificial Sequence
  Oligonucleotide for detection of SNP TSC0049952
aaccaacgaaaca

SEQ ID NO: 203415 - DNA, 13 bp, Artificial Sequence
  Oligonucleotide for detection of SNP TSC0049952
aattagagggata

SEQ ID NO: 203416 - DNA, 13 bp, Artificial Sequence
  Oligonucleotide for detection of SNP TSC0049952
tatccctctaatt

SEQ ID NO: 203417 - DNA, 13 bp, Artificial Sequence
  Oligonucleotide for detection of SNP TSC0049952
aattagtgggata

SEQ ID NO: 203418 - DNA, 13 bp, Artificial Sequence
  Oligonucleotide for detection of SNP TSC0049952
tatcccactaatt

SEQ ID NO: 203419 - DNA, 13 bp, Artificial Sequence
  Oligonucleotide for detection of SNP TSC0049952
aattagcgggata

SEQ ID NO: 203420 - DNA, 13 bp, Artificial Sequence
  Oligonucleotide for detection of SNP TSC0049952
tatcccgctaatt

SEQ ID NO: 203421 - DNA, 13 bp, Artificial Sequence
  Oligonucleotide for detection of SNP TSC0049953
gtgttgtgtgaga

SEQ ID NO: 203422 - DNA, 13 bp, Artificial Sequence
  Oligonucleotide for detection of SNP TSC0049953
tctcacacaacac

SEQ ID NO: 203423 - DNA, 13 bp, Artificial Sequence
  Oligonucleotide for detection of SNP TSC0049953
gtgttgggtgaga

SEQ ID NO: 203424 - DNA, 13 bp, Artificial Sequence
  Oligonucleotide for detection of SNP TSC0049953
tctcacccaacac

SEQ ID NO: 203425 - DNA, 13 bp, Artificial Sequence
  Oligonucleotide for detection of SNP TSC0049953
gtgttgcgtgaga

SEQ ID NO: 203426 - DNA, 13 bp, Artificial Sequence
  Oligonucleotide for detection of SNP TSC0049953
tctcacgcaacac

SEQ ID NO: 203427 - DNA, 13 bp, Artificial Sequence
  Oligonucleotide for detection of SNP TSC0049953
ttttatgtagtay

SEQ ID NO: 203428 - DNA, 13 bp, Artificial Sequence
  Oligonucleotide for detection of SNP TSC0049953
rtactacataaaa

SEQ ID NO: 203429 - DNA, 13 bp, Artificial Sequence
  Oligonucleotide for detection of SNP TSC0049953
ttttatttagtay

SEQ ID NO: 203430 - DNA, 13 bp, Artificial Sequence
  Oligonucleotide for detection of SNP TSC0049953
rtactaaataaaa

SEQ ID NO: 203431 - DNA, 13 bp, Artificial Sequence
  Oligonucleotide for detection of SNP TSC0049953
ttttacgtagtay

SEQ ID NO: 203432 - DNA, 13 bp, Artificial Sequence
  Oligonucleotide for detection of SNP TSC0049953
rtactacgtaaaa

SEQ ID NO: 203433 - DNA, 13 bp, Artificial Sequence
  Oligonucleotide for detection of SNP TSC0049954
ttttgaagttttg

SEQ ID NO: 203434 - DNA, 13 bp, Artificial Sequence
  Oligonucleotide for detection of SNP TSC0049954
caaaacttcaaaa

SEQ ID NO: 203435 - DNA, 13 bp, Artificial Sequence
  Oligonucleotide for detection of SNP TSC0049954
ttttgaggttttg

SEQ ID NO: 203436 - DNA, 13 bp, Artificial Sequence
  Oligonucleotide for detection of SNP TSC0049954
caaaacctcaaaa

SEQ ID NO: 203437 - DNA, 13 bp, Artificial Sequence
  Oligonucleotide for detection of SNP TSC0049955
taaagatgtttag

SEQ ID NO: 203438 - DNA, 13 bp, Artificial Sequence
  Oligonucleotide for detection of SNP TSC0049955
ctaaacatcttta

SEQ ID NO: 203439 - DNA, 13 bp, Artificial Sequence
  Oligonucleotide for detection of SNP TSC0049955
taaagacgtttag

SEQ ID NO: 203440 - DNA, 13 bp, Artificial Sequence
  Oligonucleotide for detection of SNP TSC0049955
ctaaacgtcttta

SEQ ID NO: 203441 - DNA, 13 bp, Artificial Sequence
  Oligonucleotide for detection of SNP TSC0049956
tttttaagtaaga

SEQ ID NO: 203442 - DNA, 13 bp, Artificial Sequence
  Oligonucleotide for detection of SNP TSC0049956
tcttacttaaaaa

SEQ ID NO: 203443 - DNA, 13 bp, Artificial Sequence
  Oligonucleotide for detection of SNP TSC0049956
tttttaggtaaga

SEQ ID NO: 203444 - DNA, 13 bp, Artificial Sequence
  Oligonucleotide for detection of SNP TSC0049956
tcttacctaaaaa

SEQ ID NO: 203445 - DNA, 13 bp, Artificial Sequence
  Oligonucleotide for detection of SNP TSC0049957
gtatttaatgaga

SEQ ID NO: 203446 - DNA, 13 bp, Artificial Sequence
  Oligonucleotide for detection of SNP TSC0049957
tctcattaaatac

SEQ ID NO: 203447 - DNA, 13 bp, Artificial Sequence
  Oligonucleotide for detection of SNP TSC0049957
gtatttgatgaga

SEQ ID NO: 203448 - DNA, 13 bp, Artificial Sequence
  Oligonucleotide for detection of SNP TSC0049957
tctcatcaaatac

SEQ ID NO: 203449 - DNA, 13 bp, Artificial Sequence
  Oligonucleotide for detection of SNP TSC0049958
ttagatataaaag

SEQ ID NO: 203450 - DNA, 13 bp, Artificial Sequence
  Oligonucleotide for detection of SNP TSC0049958
cttttatatctaa

SEQ ID NO: 203451 - DNA, 13 bp, Artificial Sequence
  Oligonucleotide for detection of SNP TSC0049958
ttagatttaaaag

SEQ ID NO: 203452 - DNA, 13 bp, Artificial Sequence
  Oligonucleotide for detection of SNP TSC0049958
cttttaaatctaa

SEQ ID NO: 203453 - DNA, 13 bp, Artificial Sequence
  Oligonucleotide for detection of SNP TSC0049959
ggagggttgttty

SEQ ID NO: 203454 - DNA, 13 bp, Artificial Sequence
  Oligonucleotide for detection of SNP TSC0049959
raaacaaccctcc

SEQ ID NO: 203455 - DNA, 13 bp, Artificial Sequence
  Oligonucleotide for detection of SNP TSC0049959
ggaggggtgttty

SEQ ID NO: 203456 - DNA, 13 bp, Artificial Sequence
  Oligonucleotide for detection of SNP TSC0049959
raaacacccctcc

SEQ ID NO: 203457 - DNA, 13 bp, Artificial Sequence
  Oligonucleotide for detection of SNP TSC0049960
ttttacgtttgtg

SEQ ID NO: 203458 - DNA, 13 bp, Artificial Sequence
  Oligonucleotide for detection of SNP TSC0049960
cacaaacgtaaaa

SEQ ID NO: 203459 - DNA, 13 bp, Artificial Sequence
  Oligonucleotide for detection of SNP TSC0049960
tatagatgtggga

SEQ ID NO: 203460 - DNA, 13 bp, Artificial Sequence
  Oligonucleotide for detection of SNP TSC0049960
tcccacatctata

SEQ ID NO: 203461 - DNA, 13 bp, Artificial Sequence
  Oligonucleotide for detection of SNP TSC0049960
tatagacgtggga

SEQ ID NO: 203462 - DNA, 13 bp, Artificial Sequence
  Oligonucleotide for detection of SNP TSC0049960
tcccacgtctata

SEQ ID NO: 203463 - DNA, 13 bp, Artificial Sequence
  Oligonucleotide for detection of SNP TSC0049961
agattgtggtaaa

SEQ ID NO: 203464 - DNA, 13 bp, Artificial Sequence
  Oligonucleotide for detection of SNP TSC0049961
tttaccacaatct

SEQ ID NO: 203465 - DNA, 13 bp, Artificial Sequence
  Oligonucleotide for detection of SNP TSC0049961
agattgcggtaaa

SEQ ID NO: 203466 - DNA, 13 bp, Artificial Sequence
  Oligonucleotide for detection of SNP TSC0049961
tttaccgcaatct

SEQ ID NO: 203467 - DNA, 13 bp, Artificial Sequence
  Oligonucleotide for detection of SNP TSC0049962
tgtgttattggtt

SEQ ID NO: 203468 - DNA, 13 bp, Artificial Sequence
  Oligonucleotide for detection of SNP TSC0049962
aaccaataacaca

SEQ ID NO: 203469 - DNA, 13 bp, Artificial Sequence
  Oligonucleotide for detection of SNP TSC0049962
tgtgtttttggtt

SEQ ID NO: 203470 - DNA, 13 bp, Artificial Sequence
  Oligonucleotide for detection of SNP TSC0049962
aaccaaaaacaca

SEQ ID NO: 203471 - DNA, 13 bp, Artificial Sequence
  Oligonucleotide for detection of SNP TSC0049962
aattaatagtata

SEQ ID NO: 203472 - DNA, 13 bp, Artificial Sequence
  Oligonucleotide for detection of SNP TSC0049962
tatactattaatt

SEQ ID NO: 203473 - DNA, 13 bp, Artificial Sequence
  Oligonucleotide for detection of SNP TSC0049962
aattaagagtata

SEQ ID NO: 203474 - DNA, 13 bp, Artificial Sequence
  Oligonucleotide for detection of SNP TSC0049962
tatactcttaatt

SEQ ID NO: 203475 - DNA, 13 bp, Artificial Sequence
  Oligonucleotide for detection of SNP TSC0007087
tgtgatattgggt

SEQ ID NO: 203476 - DNA, 13 bp, Artificial Sequence
  Oligonucleotide for detection of SNP TSC0007087
acccaatatcaca

SEQ ID NO: 203477 - DNA, 13 bp, Artificial Sequence
  Oligonucleotide for detection of SNP TSC0007087
tgtgatgttgggt

SEQ ID NO: 203478 - DNA, 13 bp, Artificial Sequence
  Oligonucleotide for detection of SNP TSC0007087
acccaacatcaca

SEQ ID NO: 203479 - DNA, 13 bp, Artificial Sequence
  Oligonucleotide for detection of SNP TSC0007087
tgtgacgttgggt

SEQ ID NO: 203480 - DNA, 13 bp, Artificial Sequence
  Oligonucleotide for detection of SNP TSC0007087
acccaacgtcaca

SEQ ID NO: 203481 - DNA, 13 bp, Artificial Sequence
  Oligonucleotide for detection of SNP TSC0007087
atttaatgttata

SEQ ID NO: 203482 - DNA, 13 bp, Artificial Sequence
  Oligonucleotide for detection of SNP TSC0007087
tataacattaaat

SEQ ID NO: 203483 - DNA, 13 bp, Artificial Sequence
  Oligonucleotide for detection of SNP TSC0007087
atttaacgttata

SEQ ID NO: 203484 - DNA, 13 bp, Artificial Sequence
  Oligonucleotide for detection of SNP TSC0007087
tataacgttaaat

SEQ ID NO: 203485 - DNA, 13 bp, Artificial Sequence
  Oligonucleotide for detection of SNP TSC0049964
aagaaagtgagaa

SEQ ID NO: 203486 - DNA, 13 bp, Artificial Sequence
  Oligonucleotide for detection of SNP TSC0049964
ttctcactttctt

SEQ ID NO: 203487 - DNA, 13 bp, Artificial Sequence
  Oligonucleotide for detection of SNP TSC0049964
aagaaaatgagaa

SEQ ID NO: 203488 - DNA, 13 bp, Artificial Sequence
  Oligonucleotide for detection of SNP TSC0049964
ttctcattttctt

SEQ ID NO: 203489 - DNA, 13 bp, Artificial Sequence
  Oligonucleotide for detection of SNP TSC0049966
aagtttagtttgt

SEQ ID NO: 203490 - DNA, 13 bp, Artificial Sequence
  Oligonucleotide for detection of SNP TSC0049966
acaaactaaactt

SEQ ID NO: 203491 - DNA, 13 bp, Artificial Sequence
  Oligonucleotide for detection of SNP TSC0049966
aagtttggtttgt

SEQ ID NO: 203492 - DNA, 13 bp, Artificial Sequence
  Oligonucleotide for detection of SNP TSC0049966
acaaaccaaactt

SEQ ID NO: 203493 - DNA, 13 bp, Artificial Sequence
  Oligonucleotide for detection of SNP TSC0049967
tgttttatttaag

SEQ ID NO: 203494 - DNA, 13 bp, Artificial Sequence
  Oligonucleotide for detection of SNP TSC0049967
cttaaataaaaca

SEQ ID NO: 203495 - DNA, 13 bp, Artificial Sequence
  Oligonucleotide for detection of SNP TSC0049967
tgttttttttaag

SEQ ID NO: 203496 - DNA, 13 bp, Artificial Sequence
  Oligonucleotide for detection of SNP TSC0049967
cttaaaaaaaaca

SEQ ID NO: 203497 - DNA, 13 bp, Artificial Sequence
  Oligonucleotide for detection of SNP TSC0049967
tttaaatgaagta

SEQ ID NO: 203498 - DNA, 13 bp, Artificial Sequence
  Oligonucleotide for detection of SNP TSC0049967
tacttcatttaaa

SEQ ID NO: 203499 - DNA, 13 bp, Artificial Sequence
  Oligonucleotide for detection of SNP TSC0049967
tttaaaggaagta

SEQ ID NO: 203500 - DNA, 13 bp, Artificial Sequence
  Oligonucleotide for detection of SNP TSC0049967
tacttcctttaaa

SEQ ID NO: 203501 - DNA, 13 bp, Artificial Sequence
  Oligonucleotide for detection of SNP TSC0049968
gtagatagagtaa

SEQ ID NO: 203502 - DNA, 13 bp, Artificial Sequence
  Oligonucleotide for detection of SNP TSC0049968
ttactctatctac

SEQ ID NO: 203503 - DNA, 13 bp, Artificial Sequence
  Oligonucleotide for detection of SNP TSC0049968
gtagattgagtaa

SEQ ID NO: 203504 - DNA, 13 bp, Artificial Sequence
  Oligonucleotide for detection of SNP TSC0049968
ttactcaatctac

SEQ ID NO: 203505 - DNA, 13 bp, Artificial Sequence
  Oligonucleotide for detection of SNP TSC0049968
ttattttgtttgy

SEQ ID NO: 203506 - DNA, 13 bp, Artificial Sequence
  Oligonucleotide for detection of SNP TSC0049968
rcaaacaaaataa

SEQ ID NO: 203507 - DNA, 13 bp, Artificial Sequence
  Oligonucleotide for detection of SNP TSC0049968
ttatttagtttgy

SEQ ID NO: 203508 - DNA, 13 bp, Artificial Sequence
  Oligonucleotide for detection of SNP TSC0049968
rcaaactaaataa

SEQ ID NO: 203509 - DNA, 13 bp, Artificial Sequence
  Oligonucleotide for detection of SNP TSC0049969
agtagttatttag

SEQ ID NO: 203510 - DNA, 13 bp, Artificial Sequence
  Oligonucleotide for detection of SNP TSC0049969
ctaaataactact

SEQ ID NO: 203511 - DNA, 13 bp, Artificial Sequence
  Oligonucleotide for detection of SNP TSC0049969
agtagtgatttag

SEQ ID NO: 203512 - DNA, 13 bp, Artificial Sequence
  Oligonucleotide for detection of SNP TSC0049969
ctaaatcactact

SEQ ID NO: 203513 - DNA, 13 bp, Artificial Sequence
  Oligonucleotide for detection of SNP TSC0049970
gtttgtattatgt

SEQ ID NO: 203514 - DNA, 13 bp, Artificial Sequence
  Oligonucleotide for detection of SNP TSC0049970
acataatacaaac

SEQ ID NO: 203515 - DNA, 13 bp, Artificial Sequence
  Oligonucleotide for detection of SNP TSC0049970
gtttgtgttatgt

SEQ ID NO: 203516 - DNA, 13 bp, Artificial Sequence
  Oligonucleotide for detection of SNP TSC0049970
acataacacaaac

SEQ ID NO: 203517 - DNA, 13 bp, Artificial Sequence
  Oligonucleotide for detection of SNP TSC0049970
gtttgcgttatgt

SEQ ID NO: 203518 - DNA, 13 bp, Artificial Sequence
  Oligonucleotide for detection of SNP TSC0049970
acataacgcaaac

SEQ ID NO: 203519 - DNA, 13 bp, Artificial Sequence
  Oligonucleotide for detection of SNP TSC0049970
atatagtgtagay

SEQ ID NO: 203520 - DNA, 13 bp, Artificial Sequence
  Oligonucleotide for detection of SNP TSC0049970
rtctacactatat

SEQ ID NO: 203521 - DNA, 13 bp, Artificial Sequence
  Oligonucleotide for detection of SNP TSC0049970
atatagcgtagay

SEQ ID NO: 203522 - DNA, 13 bp, Artificial Sequence
  Oligonucleotide for detection of SNP TSC0049970
rtctacgctatat

SEQ ID NO: 203523 - DNA, 13 bp, Artificial Sequence
  Oligonucleotide for detection of SNP TSC0049971
ttggtatgatttt

SEQ ID NO: 203524 - DNA, 13 bp, Artificial Sequence
  Oligonucleotide for detection of SNP TSC0049971
aaaatcataccaa

SEQ ID NO: 203525 - DNA, 13 bp, Artificial Sequence
  Oligonucleotide for detection of SNP TSC0049971
ttggtacgatttt

SEQ ID NO: 203526 - DNA, 13 bp, Artificial Sequence
  Oligonucleotide for detection of SNP TSC0049971
aaaatcgtaccaa

SEQ ID NO: 203527 - DNA, 13 bp, Artificial Sequence
  Oligonucleotide for detection of SNP TSC0049971
aggattgtgttaa

SEQ ID NO: 203528 - DNA, 13 bp, Artificial Sequence
  Oligonucleotide for detection of SNP TSC0049971
ttaacacaatcct

SEQ ID NO: 203529 - DNA, 13 bp, Artificial Sequence
  Oligonucleotide for detection of SNP TSC0049971
aggattatgttaa

SEQ ID NO: 203530 - DNA, 13 bp, Artificial Sequence
  Oligonucleotide for detection of SNP TSC0049971
ttaacataatcct

SEQ ID NO: 203531 - DNA, 13 bp, Artificial Sequence
  Oligonucleotide for detection of SNP TSC0049971
aggatcgtgttaa

SEQ ID NO: 203532 - DNA, 13 bp, Artificial Sequence
  Oligonucleotide for detection of SNP TSC0049971
ttaacacgatcct

SEQ ID NO: 203533 - DNA, 13 bp, Artificial Sequence
  Oligonucleotide for detection of SNP TSC0049972
gtatagaggggga

SEQ ID NO: 203534 - DNA, 13 bp, Artificial Sequence
  Oligonucleotide for detection of SNP TSC0049972
tccccctctatac

SEQ ID NO: 203535 - DNA, 13 bp, Artificial Sequence
  Oligonucleotide for detection of SNP TSC0049972
gtatagtggggga

SEQ ID NO: 203536 - DNA, 13 bp, Artificial Sequence
  Oligonucleotide for detection of SNP TSC0049972
tcccccactatac

SEQ ID NO: 203537 - DNA, 13 bp, Artificial Sequence
  Oligonucleotide for detection of SNP TSC0049972
gtatagcggggga

SEQ ID NO: 203538 - DNA, 13 bp, Artificial Sequence
  Oligonucleotide for detection of SNP TSC0049972
tcccccgctatac

SEQ ID NO: 203539 - DNA, 13 bp, Artificial Sequence
  Oligonucleotide for detection of SNP TSC0006444
tttaattgagatt

SEQ ID NO: 203540 - DNA, 13 bp, Artificial Sequence
  Oligonucleotide for detection of SNP TSC0006444
aatctcaattaaa

SEQ ID NO: 203541 - DNA, 13 bp, Artificial Sequence
  Oligonucleotide for detection of SNP TSC0006444
tttaatggagatt

SEQ ID NO: 203542 - DNA, 13 bp, Artificial Sequence
  Oligonucleotide for detection of SNP TSC0006444
aatctccattaaa

SEQ ID NO: 203543 - DNA, 13 bp, Artificial Sequence
  Oligonucleotide for detection of SNP TSC0006444
aattttaattaaa

SEQ ID NO: 203544 - DNA, 13 bp, Artificial Sequence
  Oligonucleotide for detection of SNP TSC0006444
tttaattaaaatt

SEQ ID NO: 203545 - DNA, 13 bp, Artificial Sequence
  Oligonucleotide for detection of SNP TSC0006444
aatttttattaaa

SEQ ID NO: 203546 - DNA, 13 bp, Artificial Sequence
  Oligonucleotide for detection of SNP TSC0006444
tttaataaaaatt

SEQ ID NO: 203547 - DNA, 13 bp, Artificial Sequence
  Oligonucleotide for detection of SNP TSC0049973
atgaattgttttg

SEQ ID NO: 203548 - DNA, 13 bp, Artificial Sequence
  Oligonucleotide for detection of SNP TSC0049973
caaaacaattcat

SEQ ID NO: 203549 - DNA, 13 bp, Artificial Sequence
  Oligonucleotide for detection of SNP TSC0049973
atgaatggttttg

SEQ ID NO: 203550 - DNA, 13 bp, Artificial Sequence
  Oligonucleotide for detection of SNP TSC0049973
caaaaccattcat

SEQ ID NO: 203551 - DNA, 13 bp, Artificial Sequence
  Oligonucleotide for detection of SNP TSC0049973
atgaatcgttttg

SEQ ID NO: 203552 - DNA, 13 bp, Artificial Sequence
  Oligonucleotide for detection of SNP TSC0049973
caaaacgattcat

SEQ ID NO: 203553 - DNA, 13 bp, Artificial Sequence
  Oligonucleotide for detection of SNP TSC0049973
tagaatgatttat

SEQ ID NO: 203554 - DNA, 13 bp, Artificial Sequence
  Oligonucleotide for detection of SNP TSC0049973
ataaatcattcta

SEQ ID NO: 203555 - DNA, 13 bp, Artificial Sequence
  Oligonucleotide for detection of SNP TSC0049973
tagaattatttat

SEQ ID NO: 203556 - DNA, 13 bp, Artificial Sequence
  Oligonucleotide for detection of SNP TSC0049973
ataaataattcta

SEQ ID NO: 203557 - DNA, 13 bp, Artificial Sequence
  Oligonucleotide for detection of SNP TSC0049973
tagaacgatttat

SEQ ID NO: 203558 - DNA, 13 bp, Artificial Sequence
  Oligonucleotide for detection of SNP TSC0049973
ataaatcgttcta

SEQ ID NO: 203559 - DNA, 13 bp, Artificial Sequence
  Oligonucleotide for detection of SNP TSC0049974
ttgataatgtttg

SEQ ID NO: 203560 - DNA, 13 bp, Artificial Sequence
  Oligonucleotide for detection of SNP TSC0049974
caaacattatcaa

SEQ ID NO: 203561 - DNA, 13 bp, Artificial Sequence
  Oligonucleotide for detection of SNP TSC0049975
tttggatggatay

SEQ ID NO: 203562 - DNA, 13 bp, Artificial Sequence
  Oligonucleotide for detection of SNP TSC0049975
rtatccatccaaa

SEQ ID NO: 203563 - DNA, 13 bp, Artificial Sequence
  Oligonucleotide for detection of SNP TSC0049975
tttggacggatay

SEQ ID NO: 203564 - DNA, 13 bp, Artificial Sequence
  Oligonucleotide for detection of SNP TSC0049975
rtatccgtccaaa

SEQ ID NO: 203565 - DNA, 13 bp, Artificial Sequence
  Oligonucleotide for detection of SNP TSC0049975
gtatttgtttaaa

SEQ ID NO: 203566 - DNA, 13 bp, Artificial Sequence
  Oligonucleotide for detection of SNP TSC0049975
tttaaacaaatac

SEQ ID NO: 203567 - DNA, 13 bp, Artificial Sequence
  Oligonucleotide for detection of SNP TSC0049975
gtatttatttaaa

SEQ ID NO: 203568 - DNA, 13 bp, Artificial Sequence
  Oligonucleotide for detection of SNP TSC0049975
tttaaataaatac

SEQ ID NO: 203569 - DNA, 13 bp, Artificial Sequence
  Oligonucleotide for detection of SNP TSC0049975
gtattcgtttaaa

SEQ ID NO: 203570 - DNA, 13 bp, Artificial Sequence
  Oligonucleotide for detection of SNP TSC0049975
tttaaacgaatac

SEQ ID NO: 203571 - DNA, 13 bp, Artificial Sequence
  Oligonucleotide for detection of SNP TSC0049976
taagaggtagggy

SEQ ID NO: 203572 - DNA, 13 bp, Artificial Sequence
  Oligonucleotide for detection of SNP TSC0049976
rccctacctctta

SEQ ID NO: 203573 - DNA, 13 bp, Artificial Sequence
  Oligonucleotide for detection of SNP TSC0049976
taagagatagggy

SEQ ID NO: 203574 - DNA, 13 bp, Artificial Sequence
  Oligonucleotide for detection of SNP TSC0049976
rccctatctctta

SEQ ID NO: 203575 - DNA, 13 bp, Artificial Sequence
  Oligonucleotide for detection of SNP TSC0049978
attttatgaaata

SEQ ID NO: 203576 - DNA, 13 bp, Artificial Sequence
  Oligonucleotide for detection of SNP TSC0049978
tatttcataaaat

SEQ ID NO: 203577 - DNA, 13 bp, Artificial Sequence
  Oligonucleotide for detection of SNP TSC0049978
attttaggaaata

SEQ ID NO: 203578 - DNA, 13 bp, Artificial Sequence
  Oligonucleotide for detection of SNP TSC0049978
tatttcctaaaat

SEQ ID NO: 203579 - DNA, 13 bp, Artificial Sequence
  Oligonucleotide for detection of SNP TSC0049978
tattttatggggt

SEQ ID NO: 203580 - DNA, 13 bp, Artificial Sequence
  Oligonucleotide for detection of SNP TSC0049978
accccataaaata

SEQ ID NO: 203581 - DNA, 13 bp, Artificial Sequence
  Oligonucleotide for detection of SNP TSC0049978
tattttttggggt

SEQ ID NO: 203582 - DNA, 13 bp, Artificial Sequence
  Oligonucleotide for detection of SNP TSC0049978
accccaaaaaata

SEQ ID NO: 203583 - DNA, 13 bp, Artificial Sequence
  Oligonucleotide for detection of SNP TSC0049979
aatagtatgaaat

SEQ ID NO: 203584 - DNA, 13 bp, Artificial Sequence
  Oligonucleotide for detection of SNP TSC0049979
atttcatactatt

SEQ ID NO: 203585 - DNA, 13 bp, Artificial Sequence
  Oligonucleotide for detection of SNP TSC0049979
aatagtgtgaaat

SEQ ID NO: 203586 - DNA, 13 bp, Artificial Sequence
  Oligonucleotide for detection of SNP TSC0049979
atttcacactatt

SEQ ID NO: 203587 - DNA, 13 bp, Artificial Sequence
  Oligonucleotide for detection of SNP TSC0049980
ttatttaagtttg

SEQ ID NO: 203588 - DNA, 13 bp, Artificial Sequence
  Oligonucleotide for detection of SNP TSC0049980
caaacttaaataa

SEQ ID NO: 203589 - DNA, 13 bp, Artificial Sequence
  Oligonucleotide for detection of SNP TSC0049980
taaatttggatga

SEQ ID NO: 203590 - DNA, 13 bp, Artificial Sequence
  Oligonucleotide for detection of SNP TSC0049980
tcatccaaattta

SEQ ID NO: 203591 - DNA, 13 bp, Artificial Sequence
  Oligonucleotide for detection of SNP TSC0049980
taaattgggatga

SEQ ID NO: 203592 - DNA, 13 bp, Artificial Sequence
  Oligonucleotide for detection of SNP TSC0049980
tcatcccaattta

SEQ ID NO: 203593 - DNA, 13 bp, Artificial Sequence
  Oligonucleotide for detection of SNP TSC0049982
ttaggatggtgtg

SEQ ID NO: 203594 - DNA, 13 bp, Artificial Sequence
  Oligonucleotide for detection of SNP TSC0049982
cacaccatcctaa

SEQ ID NO: 203595 - DNA, 13 bp, Artificial Sequence
  Oligonucleotide for detection of SNP TSC0049982
ttaggacggtgtg

SEQ ID NO: 203596 - DNA, 13 bp, Artificial Sequence
  Oligonucleotide for detection of SNP TSC0049982
cacaccgtcctaa

SEQ ID NO: 203597 - DNA, 13 bp, Artificial Sequence
  Oligonucleotide for detection of SNP TSC0049982
tatattgttttgg

SEQ ID NO: 203598 - DNA, 13 bp, Artificial Sequence
  Oligonucleotide for detection of SNP TSC0049982
ccaaaacaatata

SEQ ID NO: 203599 - DNA, 13 bp, Artificial Sequence
  Oligonucleotide for detection of SNP TSC0049982
tatattattttgg

SEQ ID NO: 203600 - DNA, 13 bp, Artificial Sequence
  Oligonucleotide for detection of SNP TSC0049982
ccaaaataatata

SEQ ID NO: 203601 - DNA, 13 bp, Artificial Sequence
  Oligonucleotide for detection of SNP TSC0049982
tatatcgttttgg

SEQ ID NO: 203602 - DNA, 13 bp, Artificial Sequence
  Oligonucleotide for detection of SNP TSC0049982
ccaaaacgatata

SEQ ID NO: 203603 - DNA, 13 bp, Artificial Sequence
  Oligonucleotide for detection of SNP TSC0049984
tatatcgttagta

SEQ ID NO: 203604 - DNA, 13 bp, Artificial Sequence
  Oligonucleotide for detection of SNP TSC0049984
tactaacgatata

SEQ ID NO: 203605 - DNA, 13 bp, Artificial Sequence
  Oligonucleotide for detection of SNP TSC0049987
tttaatatatagg

SEQ ID NO: 203606 - DNA, 13 bp, Artificial Sequence
  Oligonucleotide for detection of SNP TSC0049987
cctatatattaaa

SEQ ID NO: 203607 - DNA, 13 bp, Artificial Sequence
  Oligonucleotide for detection of SNP TSC0049987
tttaatgtatagg

SEQ ID NO: 203608 - DNA, 13 bp, Artificial Sequence
  Oligonucleotide for detection of SNP TSC0049987
cctatacattaaa

SEQ ID NO: 203609 - DNA, 13 bp, Artificial Sequence
  Oligonucleotide for detection of SNP TSC0049989
ttgttaatggttt

SEQ ID NO: 203610 - DNA, 13 bp, Artificial Sequence
  Oligonucleotide for detection of SNP TSC0049989
aaaccattaacaa

SEQ ID NO: 203611 - DNA, 13 bp, Artificial Sequence
  Oligonucleotide for detection of SNP TSC0049989
ttgttagtggttt

SEQ ID NO: 203612 - DNA, 13 bp, Artificial Sequence
  Oligonucleotide for detection of SNP TSC0049989
aaaccactaacaa

SEQ ID NO: 203613 - DNA, 13 bp, Artificial Sequence
  Oligonucleotide for detection of SNP TSC0049989
tcgttaatggttt

SEQ ID NO: 203614 - DNA, 13 bp, Artificial Sequence
  Oligonucleotide for detection of SNP TSC0049989
aaaccattaacga

SEQ ID NO: 203615 - DNA, 13 bp, Artificial Sequence
  Oligonucleotide for detection of SNP TSC0049989
tcgttagtggttt

SEQ ID NO: 203616 - DNA, 13 bp, Artificial Sequence
  Oligonucleotide for detection of SNP TSC0049989
aaaccactaacga

SEQ ID NO: 203617 - DNA, 13 bp, Artificial Sequence
  Oligonucleotide for detection of SNP TSC0008641
aaaaagttttttt

SEQ ID NO: 203618 - DNA, 13 bp, Artificial Sequence
  Oligonucleotide for detection of SNP TSC0008641
aaaaaaacttttt

SEQ ID NO: 203619 - DNA, 13 bp, Artificial Sequence
  Oligonucleotide for detection of SNP TSC0008641
aaaaaggtttttt

SEQ ID NO: 203620 - DNA, 13 bp, Artificial Sequence
  Oligonucleotide for detection of SNP TSC0008641
aaaaaaccttttt

SEQ ID NO: 203621 - DNA, 13 bp, Artificial Sequence
  Oligonucleotide for detection of SNP TSC0008641
aggagaatttttt

SEQ ID NO: 203622 - DNA, 13 bp, Artificial Sequence
  Oligonucleotide for detection of SNP TSC0008641
aaaaaattctcct

SEQ ID NO: 203623 - DNA, 13 bp, Artificial Sequence
  Oligonucleotide for detection of SNP TSC0008641
aggagattttttt

SEQ ID NO: 203624 - DNA, 13 bp, Artificial Sequence
  Oligonucleotide for detection of SNP TSC0008641
aaaaaaatctcct

SEQ ID NO: 203625 - DNA, 13 bp, Artificial Sequence
  Oligonucleotide for detection of SNP TSC0008643
tgtaaggttaggy

SEQ ID NO: 203626 - DNA, 13 bp, Artificial Sequence
  Oligonucleotide for detection of SNP TSC0008643
rcctaaccttaca

SEQ ID NO: 203627 - DNA, 13 bp, Artificial Sequence
  Oligonucleotide for detection of SNP TSC0008643
tgtaagattaggy

SEQ ID NO: 203628 - DNA, 13 bp, Artificial Sequence
  Oligonucleotide for detection of SNP TSC0008643
rcctaatcttaca

SEQ ID NO: 203629 - DNA, 13 bp, Artificial Sequence
  Oligonucleotide for detection of SNP TSC0049990
aaatatataatty

SEQ ID NO: 203630 - DNA, 13 bp, Artificial Sequence
  Oligonucleotide for detection of SNP TSC0049990
raattatatattt

SEQ ID NO: 203631 - DNA, 13 bp, Artificial Sequence
  Oligonucleotide for detection of SNP TSC0049990
aaatatgtaatty

SEQ ID NO: 203632 - DNA, 13 bp, Artificial Sequence
  Oligonucleotide for detection of SNP TSC0049990
raattacatattt

SEQ ID NO: 203633 - DNA, 13 bp, Artificial Sequence
  Oligonucleotide for detection of SNP TSC0049993
atagaagaatagy

SEQ ID NO: 203634 - DNA, 13 bp, Artificial Sequence
  Oligonucleotide for detection of SNP TSC0049993
rctattcttctat

SEQ ID NO: 203635 - DNA, 13 bp, Artificial Sequence
  Oligonucleotide for detection of SNP TSC0049993
atagaaaaatagy

SEQ ID NO: 203636 - DNA, 13 bp, Artificial Sequence
  Oligonucleotide for detection of SNP TSC0049993
rctatttttctat

SEQ ID NO: 203637 - DNA, 13 bp, Artificial Sequence
  Oligonucleotide for detection of SNP TSC0049994
gttagtatgaaay

SEQ ID NO: 203638 - DNA, 13 bp, Artificial Sequence
  Oligonucleotide for detection of SNP TSC0049994
rtttcatactaac

SEQ ID NO: 203639 - DNA, 13 bp, Artificial Sequence
  Oligonucleotide for detection of SNP TSC0049995
agaagatttgaat

SEQ ID NO: 203640 - DNA, 13 bp, Artificial Sequence
  Oligonucleotide for detection of SNP TSC0049995
attcaaatcttct

SEQ ID NO: 203641 - DNA, 13 bp, Artificial Sequence
  Oligonucleotide for detection of SNP TSC0049995
agaagagttgaat

SEQ ID NO: 203642 - DNA, 13 bp, Artificial Sequence
  Oligonucleotide for detection of SNP TSC0049995
attcaactcttct

SEQ ID NO: 203643 - DNA, 13 bp, Artificial Sequence
  Oligonucleotide for detection of SNP TSC0049995
atttagttttttt

SEQ ID NO: 203644 - DNA, 13 bp, Artificial Sequence
  Oligonucleotide for detection of SNP TSC0049995
aaaaaaactaaat

SEQ ID NO: 203645 - DNA, 13 bp, Artificial Sequence
  Oligonucleotide for detection of SNP TSC0049996
tgttttatgaata

SEQ ID NO: 203646 - DNA, 13 bp, Artificial Sequence
  Oligonucleotide for detection of SNP TSC0049996
tattcataaaaca

SEQ ID NO: 203647 - DNA, 13 bp, Artificial Sequence
  Oligonucleotide for detection of SNP TSC0049996
tgttttgtgaata

SEQ ID NO: 203648 - DNA, 13 bp, Artificial Sequence
  Oligonucleotide for detection of SNP TSC0049996
tattcacaaaaca

SEQ ID NO: 203649 - DNA, 13 bp, Artificial Sequence
  Oligonucleotide for detection of SNP TSC0049996
tgtttcgtgaata

SEQ ID NO: 203650 - DNA, 13 bp, Artificial Sequence
  Oligonucleotide for detection of SNP TSC0049996
tattcacgaaaca

SEQ ID NO: 203651 - DNA, 13 bp, Artificial Sequence
  Oligonucleotide for detection of SNP TSC0049996
tgtttatgaagta

SEQ ID NO: 203652 - DNA, 13 bp, Artificial Sequence
  Oligonucleotide for detection of SNP TSC0049996
tacttcataaaca

SEQ ID NO: 203653 - DNA, 13 bp, Artificial Sequence
  Oligonucleotide for detection of SNP TSC0049996
tgtttacgaagta

SEQ ID NO: 203654 - DNA, 13 bp, Artificial Sequence
  Oligonucleotide for detection of SNP TSC0049996
tacttcgtaaaca

SEQ ID NO: 203655 - DNA, 13 bp, Artificial Sequence
  Oligonucleotide for detection of SNP TSC0049999
tggaattgtgaat

SEQ ID NO: 203656 - DNA, 13 bp, Artificial Sequence
  Oligonucleotide for detection of SNP TSC0049999
attcacaattcca

SEQ ID NO: 203657 - DNA, 13 bp, Artificial Sequence
  Oligonucleotide for detection of SNP TSC0049999
tggaatcgtgaat

SEQ ID NO: 203658 - DNA, 13 bp, Artificial Sequence
  Oligonucleotide for detection of SNP TSC0049999
attcacgattcca

SEQ ID NO: 203659 - DNA, 13 bp, Artificial Sequence
  Oligonucleotide for detection of SNP TSC0005003
gaaatagattaty

SEQ ID NO: 203660 - DNA, 13 bp, Artificial Sequence
  Oligonucleotide for detection of SNP TSC0005003
rataatctatttc

SEQ ID NO: 203661 - DNA, 13 bp, Artificial Sequence
  Oligonucleotide for detection of SNP TSC0005003
gaaataaattaty

SEQ ID NO: 203662 - DNA, 13 bp, Artificial Sequence
  Oligonucleotide for detection of SNP TSC0005003
rataatttatttc

SEQ ID NO: 203663 - DNA, 13 bp, Artificial Sequence
  Oligonucleotide for detection of SNP TSC0005004
ttagtaattttay

SEQ ID NO: 203664 - DNA, 13 bp, Artificial Sequence
  Oligonucleotide for detection of SNP TSC0005004
rtaaaattactaa

SEQ ID NO: 203665 - DNA, 13 bp, Artificial Sequence
  Oligonucleotide for detection of SNP TSC0005004
ttagtagttttay

SEQ ID NO: 203666 - DNA, 13 bp, Artificial Sequence
  Oligonucleotide for detection of SNP TSC0005004
rtaaaactactaa

SEQ ID NO: 203667 - DNA, 13 bp, Artificial Sequence
  Oligonucleotide for detection of SNP TSC0005444
tatgttaggtttg

SEQ ID NO: 203668 - DNA, 13 bp, Artificial Sequence
  Oligonucleotide for detection of SNP TSC0005444
caaacctaacata

SEQ ID NO: 203669 - DNA, 13 bp, Artificial Sequence
  Oligonucleotide for detection of SNP TSC0005444
tatgtttggtttg

SEQ ID NO: 203670 - DNA, 13 bp, Artificial Sequence
  Oligonucleotide for detection of SNP TSC0005444
caaaccaaacata

SEQ ID NO: 203671 - DNA, 13 bp, Artificial Sequence
  Oligonucleotide for detection of SNP TSC0005444
tatgttcggtttg

SEQ ID NO: 203672 - DNA, 13 bp, Artificial Sequence
  Oligonucleotide for detection of SNP TSC0005444
caaaccgaacata

SEQ ID NO: 203673 - DNA, 13 bp, Artificial Sequence
  Oligonucleotide for detection of SNP TSC0005444
tagatttggtatg

SEQ ID NO: 203674 - DNA, 13 bp, Artificial Sequence
  Oligonucleotide for detection of SNP TSC0005444
cataccaaatcta

SEQ ID NO: 203675 - DNA, 13 bp, Artificial Sequence
  Oligonucleotide for detection of SNP TSC0005444
tagattgggtatg

SEQ ID NO: 203676 - DNA, 13 bp, Artificial Sequence
  Oligonucleotide for detection of SNP TSC0005444
catacccaatcta

SEQ ID NO: 203677 - DNA, 13 bp, Artificial Sequence
  Oligonucleotide for detection of SNP TSC0005444
tagatcgggtatg

SEQ ID NO: 203678 - DNA, 13 bp, Artificial Sequence
  Oligonucleotide for detection of SNP TSC0005444
catacccgatcta

SEQ ID NO: 203679 - DNA, 13 bp, Artificial Sequence
  Oligonucleotide for detection of SNP TSC0050005
aaaaatagagtag

SEQ ID NO: 203680 - DNA, 13 bp, Artificial Sequence
  Oligonucleotide for detection of SNP TSC0050005
ctactctattttt

SEQ ID NO: 203681 - DNA, 13 bp, Artificial Sequence
  Oligonucleotide for detection of SNP TSC0050005
aaaaattgagtag

SEQ ID NO: 203682 - DNA, 13 bp, Artificial Sequence
  Oligonucleotide for detection of SNP TSC0050005
ctactcaattttt

SEQ ID NO: 203683 - DNA, 13 bp, Artificial Sequence
  Oligonucleotide for detection of SNP TSC0050005
aaaaatcgagtag

SEQ ID NO: 203684 - DNA, 13 bp, Artificial Sequence
  Oligonucleotide for detection of SNP TSC0050005
ctactcgattttt

SEQ ID NO: 203685 - DNA, 13 bp, Artificial Sequence
  Oligonucleotide for detection of SNP TSC0050006
tgttgttgttttt

SEQ ID NO: 203686 - DNA, 13 bp, Artificial Sequence
  Oligonucleotide for detection of SNP TSC0050006
aaaaacaacaaca

SEQ ID NO: 203687 - DNA, 13 bp, Artificial Sequence
  Oligonucleotide for detection of SNP TSC0050006
tgttgtcgttttt

SEQ ID NO: 203688 - DNA, 13 bp, Artificial Sequence
  Oligonucleotide for detection of SNP TSC0050006
aaaaacgacaaca

SEQ ID NO: 203689 - DNA, 13 bp, Artificial Sequence
  Oligonucleotide for detection of SNP TSC0050006
aaaaatgataata

SEQ ID NO: 203690 - DNA, 13 bp, Artificial Sequence
  Oligonucleotide for detection of SNP TSC0050006
tattatcattttt

SEQ ID NO: 203691 - DNA, 13 bp, Artificial Sequence
  Oligonucleotide for detection of SNP TSC0050009
aagaatatgaagy

SEQ ID NO: 203692 - DNA, 13 bp, Artificial Sequence
  Oligonucleotide for detection of SNP TSC0050009
rcttcatattctt

SEQ ID NO: 203693 - DNA, 13 bp, Artificial Sequence
  Oligonucleotide for detection of SNP TSC0050009
aagaatttgaagy

SEQ ID NO: 203694 - DNA, 13 bp, Artificial Sequence
  Oligonucleotide for detection of SNP TSC0050009
rcttcaaattctt

SEQ ID NO: 203695 - DNA, 13 bp, Artificial Sequence
  Oligonucleotide for detection of SNP TSC0050011
attttacgtttty

SEQ ID NO: 203696 - DNA, 13 bp, Artificial Sequence
  Oligonucleotide for detection of SNP TSC0050011
raaaacgtaaaat

SEQ ID NO: 203697 - DNA, 13 bp, Artificial Sequence
  Oligonucleotide for detection of SNP TSC0050011
ggaggtttgaaat

SEQ ID NO: 203698 - DNA, 13 bp, Artificial Sequence
  Oligonucleotide for detection of SNP TSC0050011
atttcaaacctcc

SEQ ID NO: 203699 - DNA, 13 bp, Artificial Sequence
  Oligonucleotide for detection of SNP TSC0050011
ggaggtgtgaaat

SEQ ID NO: 203700 - DNA, 13 bp, Artificial Sequence
  Oligonucleotide for detection of SNP TSC0050011
atttcacacctcc

SEQ ID NO: 203701 - DNA, 13 bp, Artificial Sequence
  Oligonucleotide for detection of SNP TSC0050011
ggaggcgtgaaat

SEQ ID NO: 203702 - DNA, 13 bp, Artificial Sequence
  Oligonucleotide for detection of SNP TSC0050011
atttcacgcctcc

SEQ ID NO: 203703 - DNA, 13 bp, Artificial Sequence
  Oligonucleotide for detection of SNP TSC0050013
gaaaaaaataagt

SEQ ID NO: 203704 - DNA, 13 bp, Artificial Sequence
  Oligonucleotide for detection of SNP TSC0050013
acttatttttttc

SEQ ID NO: 203705 - DNA, 13 bp, Artificial Sequence
  Oligonucleotide for detection of SNP TSC0050013
gaaaaatataagt

SEQ ID NO: 203706 - DNA, 13 bp, Artificial Sequence
  Oligonucleotide for detection of SNP TSC0050013
acttatatttttc

SEQ ID NO: 203707 - DNA, 13 bp, Artificial Sequence
  Oligonucleotide for detection of SNP TSC0050014
aggaaatgaaaaa

SEQ ID NO: 203708 - DNA, 13 bp, Artificial Sequence
  Oligonucleotide for detection of SNP TSC0050014
tttttcatttcct

SEQ ID NO: 203709 - DNA, 13 bp, Artificial Sequence
  Oligonucleotide for detection of SNP TSC0050014
aggaaacgaaaaa

SEQ ID NO: 203710 - DNA, 13 bp, Artificial Sequence
  Oligonucleotide for detection of SNP TSC0050014
tttttcgtttcct

SEQ ID NO: 203711 - DNA, 13 bp, Artificial Sequence
  Oligonucleotide for detection of SNP TSC0050015
agttttaatgtta

SEQ ID NO: 203712 - DNA, 13 bp, Artificial Sequence
  Oligonucleotide for detection of SNP TSC0050015
taacattaaaact

SEQ ID NO: 203713 - DNA, 13 bp, Artificial Sequence
  Oligonucleotide for detection of SNP TSC0050015
agttttgatgtta

SEQ ID NO: 203714 - DNA, 13 bp, Artificial Sequence
  Oligonucleotide for detection of SNP TSC0050015
taacatcaaaact

SEQ ID NO: 203715 - DNA, 13 bp, Artificial Sequence
  Oligonucleotide for detection of SNP TSC0050016
ttgtggggttgta

SEQ ID NO: 203716 - DNA, 13 bp, Artificial Sequence
  Oligonucleotide for detection of SNP TSC0050016
tacaaccccacaa

SEQ ID NO: 203717 - DNA, 13 bp, Artificial Sequence
  Oligonucleotide for detection of SNP TSC0050016
ttgtggagttgta

SEQ ID NO: 203718 - DNA, 13 bp, Artificial Sequence
  Oligonucleotide for detection of SNP TSC0050016
tacaactccacaa

SEQ ID NO: 203719 - DNA, 13 bp, Artificial Sequence
  Oligonucleotide for detection of SNP TSC0050017
tgtaatgtttttt

SEQ ID NO: 203720 - DNA, 13 bp, Artificial Sequence
  Oligonucleotide for detection of SNP TSC0050017
aaaaaacattaca

SEQ ID NO: 203721 - DNA, 13 bp, Artificial Sequence
  Oligonucleotide for detection of SNP TSC0010803
attaataaatgtg

SEQ ID NO: 203722 - DNA, 13 bp, Artificial Sequence
  Oligonucleotide for detection of SNP TSC0010803
cacatttattaat

SEQ ID NO: 203723 - DNA, 13 bp, Artificial Sequence
  Oligonucleotide for detection of SNP TSC0010803
attaattaatgtg

SEQ ID NO: 203724 - DNA, 13 bp, Artificial Sequence
  Oligonucleotide for detection of SNP TSC0010803
cacattaattaat

SEQ ID NO: 203725 - DNA, 13 bp, Artificial Sequence
  Oligonucleotide for detection of SNP TSC0010803
attaataaatgcg

SEQ ID NO: 203726 - DNA, 13 bp, Artificial Sequence
  Oligonucleotide for detection of SNP TSC0010803
cgcatttattaat

SEQ ID NO: 203727 - DNA, 13 bp, Artificial Sequence
  Oligonucleotide for detection of SNP TSC0010803
attaattaatgcg

SEQ ID NO: 203728 - DNA, 13 bp, Artificial Sequence
  Oligonucleotide for detection of SNP TSC0010803
cgcattaattaat

SEQ ID NO: 203729 - DNA, 13 bp, Artificial Sequence
  Oligonucleotide for detection of SNP TSC0010803
tgtatttgttagt

SEQ ID NO: 203730 - DNA, 13 bp, Artificial Sequence
  Oligonucleotide for detection of SNP TSC0010803
actaacaaataca

SEQ ID NO: 203731 - DNA, 13 bp, Artificial Sequence
  Oligonucleotide for detection of SNP TSC0010803
tgtattagttagt

SEQ ID NO: 203732 - DNA, 13 bp, Artificial Sequence
  Oligonucleotide for detection of SNP TSC0010803
actaactaataca

SEQ ID NO: 203733 - DNA, 13 bp, Artificial Sequence
  Oligonucleotide for detection of SNP TSC0010803
cgtatttgttagt

SEQ ID NO: 203734 - DNA, 13 bp, Artificial Sequence
  Oligonucleotide for detection of SNP TSC0010803
actaacaaatacg

SEQ ID NO: 203735 - DNA, 13 bp, Artificial Sequence
  Oligonucleotide for detection of SNP TSC0010803
cgtattagttagt

SEQ ID NO: 203736 - DNA, 13 bp, Artificial Sequence
  Oligonucleotide for detection of SNP TSC0010803
actaactaatacg

SEQ ID NO: 203737 - DNA, 13 bp, Artificial Sequence
  Oligonucleotide for detection of SNP TSC0010804
gattttatttgta

SEQ ID NO: 203738 - DNA, 13 bp, Artificial Sequence
  Oligonucleotide for detection of SNP TSC0010804
tacaaataaaatc

SEQ ID NO: 203739 - DNA, 13 bp, Artificial Sequence
  Oligonucleotide for detection of SNP TSC0010804
gattttgtttgta

SEQ ID NO: 203740 - DNA, 13 bp, Artificial Sequence
  Oligonucleotide for detection of SNP TSC0010804
tacaaacaaaatc

SEQ ID NO: 203741 - DNA, 13 bp, Artificial Sequence
  Oligonucleotide for detection of SNP TSC0010805
ttatgtagggggt

SEQ ID NO: 203742 - DNA, 13 bp, Artificial Sequence
  Oligonucleotide for detection of SNP TSC0010805
accccctacataa

SEQ ID NO: 203743 - DNA, 13 bp, Artificial Sequence
  Oligonucleotide for detection of SNP TSC0010805
ttatgtggggggt

SEQ ID NO: 203744 - DNA, 13 bp, Artificial Sequence
  Oligonucleotide for detection of SNP TSC0010805
accccccacataa

SEQ ID NO: 203745 - DNA, 13 bp, Artificial Sequence
  Oligonucleotide for detection of SNP TSC0050018
taattgcgtttta

SEQ ID NO: 203746 - DNA, 13 bp, Artificial Sequence
  Oligonucleotide for detection of SNP TSC0050018
taaaacgcaatta

SEQ ID NO: 203747 - DNA, 13 bp, Artificial Sequence
  Oligonucleotide for detection of SNP TSC0050018
tgagatgtaatta

SEQ ID NO: 203748 - DNA, 13 bp, Artificial Sequence
  Oligonucleotide for detection of SNP TSC0050018
taattacatctca

SEQ ID NO: 203749 - DNA, 13 bp, Artificial Sequence
  Oligonucleotide for detection of SNP TSC0050018
tgagatataatta

SEQ ID NO: 203750 - DNA, 13 bp, Artificial Sequence
  Oligonucleotide for detection of SNP TSC0050018
taattatatctca

SEQ ID NO: 203751 - DNA, 13 bp, Artificial Sequence
  Oligonucleotide for detection of SNP TSC0050018
tgagacgtaatta

SEQ ID NO: 203752 - DNA, 13 bp, Artificial Sequence
  Oligonucleotide for detection of SNP TSC0050018
taattacgtctca

SEQ ID NO: 203753 - DNA, 13 bp, Artificial Sequence
  Oligonucleotide for detection of SNP TSC0050019
tttgagttatgay

SEQ ID NO: 203754 - DNA, 13 bp, Artificial Sequence
  Oligonucleotide for detection of SNP TSC0050019
rtcataactcaaa

SEQ ID NO: 203755 - DNA, 13 bp, Artificial Sequence
  Oligonucleotide for detection of SNP TSC0050019
tttgaggtatgay

SEQ ID NO: 203756 - DNA, 13 bp, Artificial Sequence
  Oligonucleotide for detection of SNP TSC0050019
rtcatacctcaaa

SEQ ID NO: 203757 - DNA, 13 bp, Artificial Sequence
  Oligonucleotide for detection of SNP TSC0050019
gttatagtttaag

SEQ ID NO: 203758 - DNA, 13 bp, Artificial Sequence
  Oligonucleotide for detection of SNP TSC0050019
cttaaactataac

SEQ ID NO: 203759 - DNA, 13 bp, Artificial Sequence
  Oligonucleotide for detection of SNP TSC0050019
gttatattttaag

SEQ ID NO: 203760 - DNA, 13 bp, Artificial Sequence
  Oligonucleotide for detection of SNP TSC0050019
cttaaaatataac

SEQ ID NO: 203761 - DNA, 13 bp, Artificial Sequence
  Oligonucleotide for detection of SNP TSC0050023
tttttattaattt

SEQ ID NO: 203762 - DNA, 13 bp, Artificial Sequence
  Oligonucleotide for detection of SNP TSC0050023
aaattaataaaaa

SEQ ID NO: 203763 - DNA, 13 bp, Artificial Sequence
  Oligonucleotide for detection of SNP TSC0050023
tttttagtaattt

SEQ ID NO: 203764 - DNA, 13 bp, Artificial Sequence
  Oligonucleotide for detection of SNP TSC0050023
aaattactaaaaa

SEQ ID NO: 203765 - DNA, 13 bp, Artificial Sequence
  Oligonucleotide for detection of SNP TSC0050023
aaattaataggga

SEQ ID NO: 203766 - DNA, 13 bp, Artificial Sequence
  Oligonucleotide for detection of SNP TSC0050023
tccctattaattt

SEQ ID NO: 203767 - DNA, 13 bp, Artificial Sequence
  Oligonucleotide for detection of SNP TSC0050023
aaattattaggga

SEQ ID NO: 203768 - DNA, 13 bp, Artificial Sequence
  Oligonucleotide for detection of SNP TSC0050023
tccctaataattt

SEQ ID NO: 203769 - DNA, 13 bp, Artificial Sequence
  Oligonucleotide for detection of SNP TSC0050024
tatgtaattagtt

SEQ ID NO: 203770 - DNA, 13 bp, Artificial Sequence
  Oligonucleotide for detection of SNP TSC0050024
aactaattacata

SEQ ID NO: 203771 - DNA, 13 bp, Artificial Sequence
  Oligonucleotide for detection of SNP TSC0050024
tatgtatttagtt

SEQ ID NO: 203772 - DNA, 13 bp, Artificial Sequence
  Oligonucleotide for detection of SNP TSC0050024
aactaaatacata

SEQ ID NO: 203773 - DNA, 13 bp, Artificial Sequence
  Oligonucleotide for detection of SNP TSC0050024
aattggttatata

SEQ ID NO: 203774 - DNA, 13 bp, Artificial Sequence
  Oligonucleotide for detection of SNP TSC0050024
tatataaccaatt

SEQ ID NO: 203775 - DNA, 13 bp, Artificial Sequence
  Oligonucleotide for detection of SNP TSC0050024
aattggatatata

SEQ ID NO: 203776 - DNA, 13 bp, Artificial Sequence
  Oligonucleotide for detection of SNP TSC0050024
tatatatccaatt

SEQ ID NO: 203777 - DNA, 13 bp, Artificial Sequence
  Oligonucleotide for detection of SNP TSC0050025
atgggtgtggtat

SEQ ID NO: 203778 - DNA, 13 bp, Artificial Sequence
  Oligonucleotide for detection of SNP TSC0050025
ataccacacccat

SEQ ID NO: 203779 - DNA, 13 bp, Artificial Sequence
  Oligonucleotide for detection of SNP TSC0050025
atgggtatggtat

SEQ ID NO: 203780 - DNA, 13 bp, Artificial Sequence
  Oligonucleotide for detection of SNP TSC0050025
ataccatacccat

SEQ ID NO: 203781 - DNA, 13 bp, Artificial Sequence
  Oligonucleotide for detection of SNP TSC0050025
atgggcgtggtat

SEQ ID NO: 203782 - DNA, 13 bp, Artificial Sequence
  Oligonucleotide for detection of SNP TSC0050025
ataccacgcccat

SEQ ID NO: 203783 - DNA, 13 bp, Artificial Sequence
  Oligonucleotide for detection of SNP TSC0050026
attttaaatttat

SEQ ID NO: 203784 - DNA, 13 bp, Artificial Sequence
  Oligonucleotide for detection of SNP TSC0050026
ataaatttaaaat

SEQ ID NO: 203785 - DNA, 13 bp, Artificial Sequence
  Oligonucleotide for detection of SNP TSC0050026
attttatatttat

SEQ ID NO: 203786 - DNA, 13 bp, Artificial Sequence
  Oligonucleotide for detection of SNP TSC0050026
ataaatataaaat

SEQ ID NO: 203787 - DNA, 13 bp, Artificial Sequence
  Oligonucleotide for detection of SNP TSC0050026
ataaatttggagt

SEQ ID NO: 203788 - DNA, 13 bp, Artificial Sequence
  Oligonucleotide for detection of SNP TSC0050026
actccaaatttat

SEQ ID NO: 203789 - DNA, 13 bp, Artificial Sequence
  Oligonucleotide for detection of SNP TSC0050026
ataaatatggagt

SEQ ID NO: 203790 - DNA, 13 bp, Artificial Sequence
  Oligonucleotide for detection of SNP TSC0050026
actccatatttat

SEQ ID NO: 203791 - DNA, 13 bp, Artificial Sequence
  Oligonucleotide for detection of SNP TSC0050027
tatgtaattttty

SEQ ID NO: 203792 - DNA, 13 bp, Artificial Sequence
  Oligonucleotide for detection of SNP TSC0050027
raaaaattacata

SEQ ID NO: 203793 - DNA, 13 bp, Artificial Sequence
  Oligonucleotide for detection of SNP TSC0050027
tatgtatttttty

SEQ ID NO: 203794 - DNA, 13 bp, Artificial Sequence
  Oligonucleotide for detection of SNP TSC0050027
raaaaaatacata

SEQ ID NO: 203795 - DNA, 13 bp, Artificial Sequence
  Oligonucleotide for detection of SNP TSC0050027
gagaggttgtata

SEQ ID NO: 203796 - DNA, 13 bp, Artificial Sequence
  Oligonucleotide for detection of SNP TSC0050027
tatacaacctctc

SEQ ID NO: 203797 - DNA, 13 bp, Artificial Sequence
  Oligonucleotide for detection of SNP TSC0050027
gagagggtgtata

SEQ ID NO: 203798 - DNA, 13 bp, Artificial Sequence
  Oligonucleotide for detection of SNP TSC0050027
tatacaccctctc

SEQ ID NO: 203799 - DNA, 13 bp, Artificial Sequence
  Oligonucleotide for detection of SNP TSC0050028
tttttatttaaat

SEQ ID NO: 203800 - DNA, 13 bp, Artificial Sequence
  Oligonucleotide for detection of SNP TSC0050028
atttaaataaaaa

SEQ ID NO: 203801 - DNA, 13 bp, Artificial Sequence
  Oligonucleotide for detection of SNP TSC0050028
tttttagttaaat

SEQ ID NO: 203802 - DNA, 13 bp, Artificial Sequence
  Oligonucleotide for detection of SNP TSC0050028
atttaactaaaaa

SEQ ID NO: 203803 - DNA, 13 bp, Artificial Sequence
  Oligonucleotide for detection of SNP TSC0050028
atttagatgggag

SEQ ID NO: 203804 - DNA, 13 bp, Artificial Sequence
  Oligonucleotide for detection of SNP TSC0050028
ctcccatctaaat

SEQ ID NO: 203805 - DNA, 13 bp, Artificial Sequence
  Oligonucleotide for detection of SNP TSC0050028
atttagttgggag

SEQ ID NO: 203806 - DNA, 13 bp, Artificial Sequence
  Oligonucleotide for detection of SNP TSC0050028
ctcccaactaaat

SEQ ID NO: 203807 - DNA, 13 bp, Artificial Sequence
  Oligonucleotide for detection of SNP TSC0050029
tttaatgagggaa

SEQ ID NO: 203808 - DNA, 13 bp, Artificial Sequence
  Oligonucleotide for detection of SNP TSC0050029
ttccctcattaaa

SEQ ID NO: 203809 - DNA, 13 bp, Artificial Sequence
  Oligonucleotide for detection of SNP TSC0050029
tttaataagggaa

SEQ ID NO: 203810 - DNA, 13 bp, Artificial Sequence
  Oligonucleotide for detection of SNP TSC0050029
ttcccttattaaa

SEQ ID NO: 203811 - DNA, 13 bp, Artificial Sequence
  Oligonucleotide for detection of SNP TSC0050030
taataagtttgta

SEQ ID NO: 203812 - DNA, 13 bp, Artificial Sequence
  Oligonucleotide for detection of SNP TSC0050030
tacaaacttatta

SEQ ID NO: 203813 - DNA, 13 bp, Artificial Sequence
  Oligonucleotide for detection of SNP TSC0050030
taataaatttgta

SEQ ID NO: 203814 - DNA, 13 bp, Artificial Sequence
  Oligonucleotide for detection of SNP TSC0050030
tacaaatttatta

SEQ ID NO: 203815 - DNA, 13 bp, Artificial Sequence
  Oligonucleotide for detection of SNP TSC0050031
tgggtatagagta

SEQ ID NO: 203816 - DNA, 13 bp, Artificial Sequence
  Oligonucleotide for detection of SNP TSC0050031
tactctataccca

SEQ ID NO: 203817 - DNA, 13 bp, Artificial Sequence
  Oligonucleotide for detection of SNP TSC0050031
tgggtagagagta

SEQ ID NO: 203818 - DNA, 13 bp, Artificial Sequence
  Oligonucleotide for detection of SNP TSC0050031
tactctctaccca

SEQ ID NO: 203819 - DNA, 13 bp, Artificial Sequence
  Oligonucleotide for detection of SNP TSC0050031
tgttttatattta

SEQ ID NO: 203820 - DNA, 13 bp, Artificial Sequence
  Oligonucleotide for detection of SNP TSC0050031
taaatataaaaca

SEQ ID NO: 203821 - DNA, 13 bp, Artificial Sequence
  Oligonucleotide for detection of SNP TSC0050031
tgttttttattta

SEQ ID NO: 203822 - DNA, 13 bp, Artificial Sequence
  Oligonucleotide for detection of SNP TSC0050031
taaataaaaaaca

SEQ ID NO: 203823 - DNA, 13 bp, Artificial Sequence
  Oligonucleotide for detection of SNP TSC0008644
tggatagaaaatt

SEQ ID NO: 203824 - DNA, 13 bp, Artificial Sequence
  Oligonucleotide for detection of SNP TSC0008644
aattttctatcca

SEQ ID NO: 203825 - DNA, 13 bp, Artificial Sequence
  Oligonucleotide for detection of SNP TSC0008644
tggatataaaatt

SEQ ID NO: 203826 - DNA, 13 bp, Artificial Sequence
  Oligonucleotide for detection of SNP TSC0008644
aattttatatcca

SEQ ID NO: 203827 - DNA, 13 bp, Artificial Sequence
  Oligonucleotide for detection of SNP TSC0050034
ttagagtttgttt

SEQ ID NO: 203828 - DNA, 13 bp, Artificial Sequence
  Oligonucleotide for detection of SNP TSC0050034
aaacaaactctaa

SEQ ID NO: 203829 - DNA, 13 bp, Artificial Sequence
  Oligonucleotide for detection of SNP TSC0050034
ttagaggttgttt

SEQ ID NO: 203830 - DNA, 13 bp, Artificial Sequence
  Oligonucleotide for detection of SNP TSC0050034
aaacaacctctaa

SEQ ID NO: 203831 - DNA, 13 bp, Artificial Sequence
  Oligonucleotide for detection of SNP TSC0050034
agataaattttag

SEQ ID NO: 203832 - DNA, 13 bp, Artificial Sequence
  Oligonucleotide for detection of SNP TSC0050034
ctaaaatttatct

SEQ ID NO: 203833 - DNA, 13 bp, Artificial Sequence
  Oligonucleotide for detection of SNP TSC0050034
agataatttttag

SEQ ID NO: 203834 - DNA, 13 bp, Artificial Sequence
  Oligonucleotide for detection of SNP TSC0050034
ctaaaaattatct

SEQ ID NO: 203835 - DNA, 13 bp, Artificial Sequence
  Oligonucleotide for detection of SNP TSC0050035
ggttagaatttgg

SEQ ID NO: 203836 - DNA, 13 bp, Artificial Sequence
  Oligonucleotide for detection of SNP TSC0050035
ccaaattctaacc

SEQ ID NO: 203837 - DNA, 13 bp, Artificial Sequence
  Oligonucleotide for detection of SNP TSC0050035
ggttagtatttgg

SEQ ID NO: 203838 - DNA, 13 bp, Artificial Sequence
  Oligonucleotide for detection of SNP TSC0050035
ccaaatactaacc

SEQ ID NO: 203839 - DNA, 13 bp, Artificial Sequence
  Oligonucleotide for detection of SNP TSC0050035
ttagattttggty

SEQ ID NO: 203840 - DNA, 13 bp, Artificial Sequence
  Oligonucleotide for detection of SNP TSC0050035
raccaaaatctaa

SEQ ID NO: 203841 - DNA, 13 bp, Artificial Sequence
  Oligonucleotide for detection of SNP TSC0050035
ttagatgttggty

SEQ ID NO: 203842 - DNA, 13 bp, Artificial Sequence
  Oligonucleotide for detection of SNP TSC0050035
raccaacatctaa

SEQ ID NO: 203843 - DNA, 13 bp, Artificial Sequence
  Oligonucleotide for detection of SNP TSC0050036
atagtttgaaatt

SEQ ID NO: 203844 - DNA, 13 bp, Artificial Sequence
  Oligonucleotide for detection of SNP TSC0050036
aatttcaaactat

SEQ ID NO: 203845 - DNA, 13 bp, Artificial Sequence
  Oligonucleotide for detection of SNP TSC0050036
atagttggaaatt

SEQ ID NO: 203846 - DNA, 13 bp, Artificial Sequence
  Oligonucleotide for detection of SNP TSC0050036
aatttccaactat

SEQ ID NO: 203847 - DNA, 13 bp, Artificial Sequence
  Oligonucleotide for detection of SNP TSC0050036
atagtcggaaatt

SEQ ID NO: 203848 - DNA, 13 bp, Artificial Sequence
  Oligonucleotide for detection of SNP TSC0050036
aatttccgactat

SEQ ID NO: 203849 - DNA, 13 bp, Artificial Sequence
  Oligonucleotide for detection of SNP TSC0050036
agttttagattgt

SEQ ID NO: 203850 - DNA, 13 bp, Artificial Sequence
  Oligonucleotide for detection of SNP TSC0050036
acaatctaaaact

SEQ ID NO: 203851 - DNA, 13 bp, Artificial Sequence
  Oligonucleotide for detection of SNP TSC0050036
agtttttgattgt

SEQ ID NO: 203852 - DNA, 13 bp, Artificial Sequence
  Oligonucleotide for detection of SNP TSC0050036
acaatcaaaaact

SEQ ID NO: 203853 - DNA, 13 bp, Artificial Sequence
  Oligonucleotide for detection of SNP TSC0050036
agttttcgattgt

SEQ ID NO: 203854 - DNA, 13 bp, Artificial Sequence
  Oligonucleotide for detection of SNP TSC0050036
acaatcgaaaact

SEQ ID NO: 203855 - DNA, 13 bp, Artificial Sequence
  Oligonucleotide for detection of SNP TSC0050037
tattaggtagaat

SEQ ID NO: 203856 - DNA, 13 bp, Artificial Sequence
  Oligonucleotide for detection of SNP TSC0050037
attctacctaata

SEQ ID NO: 203857 - DNA, 13 bp, Artificial Sequence
  Oligonucleotide for detection of SNP TSC0050037
tattagatagaat

SEQ ID NO: 203858 - DNA, 13 bp, Artificial Sequence
  Oligonucleotide for detection of SNP TSC0050037
attctatctaata

SEQ ID NO: 203859 - DNA, 13 bp, Artificial Sequence
  Oligonucleotide for detection of SNP TSC0008312
ttttagttattaa

SEQ ID NO: 203860 - DNA, 13 bp, Artificial Sequence
  Oligonucleotide for detection of SNP TSC0008312
ttaataactaaaa

SEQ ID NO: 203861 - DNA, 13 bp, Artificial Sequence
  Oligonucleotide for detection of SNP TSC0008312
ttttaggtattaa

SEQ ID NO: 203862 - DNA, 13 bp, Artificial Sequence
  Oligonucleotide for detection of SNP TSC0008312
ttaatacctaaaa

SEQ ID NO: 203863 - DNA, 13 bp, Artificial Sequence
  Oligonucleotide for detection of SNP TSC0008312
ttgatggttggag

SEQ ID NO: 203864 - DNA, 13 bp, Artificial Sequence
  Oligonucleotide for detection of SNP TSC0008312
ctccaaccatcaa

SEQ ID NO: 203865 - DNA, 13 bp, Artificial Sequence
  Oligonucleotide for detection of SNP TSC0008312
ttgatgtttggag

SEQ ID NO: 203866 - DNA, 13 bp, Artificial Sequence
  Oligonucleotide for detection of SNP TSC0008312
ctccaaacatcaa

SEQ ID NO: 203867 - DNA, 13 bp, Artificial Sequence
  Oligonucleotide for detection of SNP TSC0006882
ttggggatttttg

SEQ ID NO: 203868 - DNA, 13 bp, Artificial Sequence
  Oligonucleotide for detection of SNP TSC0006882
caaaaatccccaa

SEQ ID NO: 203869 - DNA, 13 bp, Artificial Sequence
  Oligonucleotide for detection of SNP TSC0006882
ttgggggtttttg

SEQ ID NO: 203870 - DNA, 13 bp, Artificial Sequence
  Oligonucleotide for detection of SNP TSC0006882
caaaaacccccaa

SEQ ID NO: 203871 - DNA, 13 bp, Artificial Sequence
  Oligonucleotide for detection of SNP TSC0050038
atgttttgttgay

SEQ ID NO: 203872 - DNA, 13 bp, Artificial Sequence
  Oligonucleotide for detection of SNP TSC0050038
rtcaacaaaacat

SEQ ID NO: 203873 - DNA, 13 bp, Artificial Sequence
  Oligonucleotide for detection of SNP TSC0050038
atgtttcgttgay

SEQ ID NO: 203874 - DNA, 13 bp, Artificial Sequence
  Oligonucleotide for detection of SNP TSC0050038
rtcaacgaaacat

SEQ ID NO: 203875 - DNA, 13 bp, Artificial Sequence
  Oligonucleotide for detection of SNP TSC0050038
gttagtggagtat

SEQ ID NO: 203876 - DNA, 13 bp, Artificial Sequence
  Oligonucleotide for detection of SNP TSC0050038
atactccactaac

SEQ ID NO: 203877 - DNA, 13 bp, Artificial Sequence
  Oligonucleotide for detection of SNP TSC0050038
gttagtagagtat

SEQ ID NO: 203878 - DNA, 13 bp, Artificial Sequence
  Oligonucleotide for detection of SNP TSC0050038
atactctactaac

SEQ ID NO: 203879 - DNA, 13 bp, Artificial Sequence
  Oligonucleotide for detection of SNP TSC0050038
gttagcggagtat

SEQ ID NO: 203880 - DNA, 13 bp, Artificial Sequence
  Oligonucleotide for detection of SNP TSC0050038
atactccgctaac

SEQ ID NO: 203881 - DNA, 13 bp, Artificial Sequence
  Oligonucleotide for detection of SNP TSC0009097
atgttgagaatay

SEQ ID NO: 203882 - DNA, 13 bp, Artificial Sequence
  Oligonucleotide for detection of SNP TSC0009097
rtattctcaacat

SEQ ID NO: 203883 - DNA, 13 bp, Artificial Sequence
  Oligonucleotide for detection of SNP TSC0009097
atgttgtgaatay

SEQ ID NO: 203884 - DNA, 13 bp, Artificial Sequence
  Oligonucleotide for detection of SNP TSC0009097
rtattcacaacat

SEQ ID NO: 203885 - DNA, 13 bp, Artificial Sequence
  Oligonucleotide for detection of SNP TSC0009097
atgttgggaatay

SEQ ID NO: 203886 - DNA, 13 bp, Artificial Sequence
  Oligonucleotide for detection of SNP TSC0009097
rtattcccaacat

SEQ ID NO: 203887 - DNA, 13 bp, Artificial Sequence
  Oligonucleotide for detection of SNP TSC0009097
gtgtttttaatat

SEQ ID NO: 203888 - DNA, 13 bp, Artificial Sequence
  Oligonucleotide for detection of SNP TSC0009097
atattaaaaacac

SEQ ID NO: 203889 - DNA, 13 bp, Artificial Sequence
  Oligonucleotide for detection of SNP TSC0009097
gtgtttataatat

SEQ ID NO: 203890 - DNA, 13 bp, Artificial Sequence
  Oligonucleotide for detection of SNP TSC0009097
atattataaacac

SEQ ID NO: 203891 - DNA, 13 bp, Artificial Sequence
  Oligonucleotide for detection of SNP TSC0050039
agattttggtaag

SEQ ID NO: 203892 - DNA, 13 bp, Artificial Sequence
  Oligonucleotide for detection of SNP TSC0050039
cttaccaaaatct

SEQ ID NO: 203893 - DNA, 13 bp, Artificial Sequence
  Oligonucleotide for detection of SNP TSC0050039
agatttcggtaag

SEQ ID NO: 203894 - DNA, 13 bp, Artificial Sequence
  Oligonucleotide for detection of SNP TSC0050039
cttaccgaaatct

SEQ ID NO: 203895 - DNA, 13 bp, Artificial Sequence
  Oligonucleotide for detection of SNP TSC0008270
tgaatttgttata

SEQ ID NO: 203896 - DNA, 13 bp, Artificial Sequence
  Oligonucleotide for detection of SNP TSC0008270
tataacaaattca

SEQ ID NO: 203897 - DNA, 13 bp, Artificial Sequence
  Oligonucleotide for detection of SNP TSC0008270
tgaattggttata

SEQ ID NO: 203898 - DNA, 13 bp, Artificial Sequence
  Oligonucleotide for detection of SNP TSC0008270
tataaccaattca

SEQ ID NO: 203899 - DNA, 13 bp, Artificial Sequence
  Oligonucleotide for detection of SNP TSC0008270
tgtaataagttta

SEQ ID NO: 203900 - DNA, 13 bp, Artificial Sequence
  Oligonucleotide for detection of SNP TSC0008270
taaacttattaca

SEQ ID NO: 203901 - DNA, 13 bp, Artificial Sequence
  Oligonucleotide for detection of SNP TSC0008270
tgtaattagttta

SEQ ID NO: 203902 - DNA, 13 bp, Artificial Sequence
  Oligonucleotide for detection of SNP TSC0008270
taaactaattaca

SEQ ID NO: 203903 - DNA, 13 bp, Artificial Sequence
  Oligonucleotide for detection of SNP TSC0050040
ttgatgattttat

SEQ ID NO: 203904 - DNA, 13 bp, Artificial Sequence
  Oligonucleotide for detection of SNP TSC0050040
ataaaatcatcaa

SEQ ID NO: 203905 - DNA, 13 bp, Artificial Sequence
  Oligonucleotide for detection of SNP TSC0010271
tttaggatgatty

SEQ ID NO: 203906 - DNA, 13 bp, Artificial Sequence
  Oligonucleotide for detection of SNP TSC0010271
raatcatcctaaa

SEQ ID NO: 203907 - DNA, 13 bp, Artificial Sequence
  Oligonucleotide for detection of SNP TSC0010271
tttaggttgatty

SEQ ID NO: 203908 - DNA, 13 bp, Artificial Sequence
  Oligonucleotide for detection of SNP TSC0010271
raatcaacctaaa

SEQ ID NO: 203909 - DNA, 13 bp, Artificial Sequence
  Oligonucleotide for detection of SNP TSC0010271
gaattattttaag

SEQ ID NO: 203910 - DNA, 13 bp, Artificial Sequence
  Oligonucleotide for detection of SNP TSC0010271
cttaaaataattc

SEQ ID NO: 203911 - DNA, 13 bp, Artificial Sequence
  Oligonucleotide for detection of SNP TSC0010271
gaattaatttaag

SEQ ID NO: 203912 - DNA, 13 bp, Artificial Sequence
  Oligonucleotide for detection of SNP TSC0010271
cttaaattaattc

SEQ ID NO: 203913 - DNA, 13 bp, Artificial Sequence
  Oligonucleotide for detection of SNP TSC0050041
attgtagtggagg

SEQ ID NO: 203914 - DNA, 13 bp, Artificial Sequence
  Oligonucleotide for detection of SNP TSC0050041
cctccactacaat

SEQ ID NO: 203915 - DNA, 13 bp, Artificial Sequence
  Oligonucleotide for detection of SNP TSC0050041
attgtaatggagg

SEQ ID NO: 203916 - DNA, 13 bp, Artificial Sequence
  Oligonucleotide for detection of SNP TSC0050041
cctccattacaat

SEQ ID NO: 203917 - DNA, 13 bp, Artificial Sequence
  Oligonucleotide for detection of SNP TSC0050043
tagttatagagtg

SEQ ID NO: 203918 - DNA, 13 bp, Artificial Sequence
  Oligonucleotide for detection of SNP TSC0050043
cactctataacta

SEQ ID NO: 203919 - DNA, 13 bp, Artificial Sequence
  Oligonucleotide for detection of SNP TSC0050043
tagttagagagtg

SEQ ID NO: 203920 - DNA, 13 bp, Artificial Sequence
  Oligonucleotide for detection of SNP TSC0050043
cactctctaacta

SEQ ID NO: 203921 - DNA, 13 bp, Artificial Sequence
  Oligonucleotide for detection of SNP TSC0050043
tattttttggtta

SEQ ID NO: 203922 - DNA, 13 bp, Artificial Sequence
  Oligonucleotide for detection of SNP TSC0050043
taaccaaaaaata

SEQ ID NO: 203923 - DNA, 13 bp, Artificial Sequence
  Oligonucleotide for detection of SNP TSC0050044
agttagagagtga

SEQ ID NO: 203924 - DNA, 13 bp, Artificial Sequence
  Oligonucleotide for detection of SNP TSC0050044
tcactctctaact

SEQ ID NO: 203925 - DNA, 13 bp, Artificial Sequence
  Oligonucleotide for detection of SNP TSC0050044
agttagtgagtga

SEQ ID NO: 203926 - DNA, 13 bp, Artificial Sequence
  Oligonucleotide for detection of SNP TSC0050044
tcactcactaact

SEQ ID NO: 203927 - DNA, 13 bp, Artificial Sequence
  Oligonucleotide for detection of SNP TSC0050044
ttattttttggtt

SEQ ID NO: 203928 - DNA, 13 bp, Artificial Sequence
  Oligonucleotide for detection of SNP TSC0050044
aaccaaaaaataa

SEQ ID NO: 203929 - DNA, 13 bp, Artificial Sequence
  Oligonucleotide for detection of SNP TSC0050047
ggttgagtaaggg

SEQ ID NO: 203930 - DNA, 13 bp, Artificial Sequence
  Oligonucleotide for detection of SNP TSC0050047
cccttactcaacc

SEQ ID NO: 203931 - DNA, 13 bp, Artificial Sequence
  Oligonucleotide for detection of SNP TSC0050047
ggttgaataaggg

SEQ ID NO: 203932 - DNA, 13 bp, Artificial Sequence
  Oligonucleotide for detection of SNP TSC0050047
cccttattcaacc

SEQ ID NO: 203933 - DNA, 13 bp, Artificial Sequence
  Oligonucleotide for detection of SNP TSC0050048
tagtatattgttt

SEQ ID NO: 203934 - DNA, 13 bp, Artificial Sequence
  Oligonucleotide for detection of SNP TSC0050048
aaacaatatacta

SEQ ID NO: 203935 - DNA, 13 bp, Artificial Sequence
  Oligonucleotide for detection of SNP TSC0050048
aaataatgtatta

SEQ ID NO: 203936 - DNA, 13 bp, Artificial Sequence
  Oligonucleotide for detection of SNP TSC0050048
taatacattattt

SEQ ID NO: 203937 - DNA, 13 bp, Artificial Sequence
  Oligonucleotide for detection of SNP TSC0050049
ttttaggttgaag

SEQ ID NO: 203938 - DNA, 13 bp, Artificial Sequence
  Oligonucleotide for detection of SNP TSC0050049
cttcaacctaaaa

SEQ ID NO: 203939 - DNA, 13 bp, Artificial Sequence
  Oligonucleotide for detection of SNP TSC0050049
ttttagattgaag

SEQ ID NO: 203940 - DNA, 13 bp, Artificial Sequence
  Oligonucleotide for detection of SNP TSC0050049
cttcaatctaaaa

SEQ ID NO: 203941 - DNA, 13 bp, Artificial Sequence
  Oligonucleotide for detection of SNP TSC0050050
ttgtggtgtttty

SEQ ID NO: 203942 - DNA, 13 bp, Artificial Sequence
  Oligonucleotide for detection of SNP TSC0050050
raaaacaccacaa

SEQ ID NO: 203943 - DNA, 13 bp, Artificial Sequence
  Oligonucleotide for detection of SNP TSC0050050
ttgtggcgtttty

SEQ ID NO: 203944 - DNA, 13 bp, Artificial Sequence
  Oligonucleotide for detection of SNP TSC0050050
raaaacgccacaa

SEQ ID NO: 203945 - DNA, 13 bp, Artificial Sequence
  Oligonucleotide for detection of SNP TSC0050050
gaaaatgttatag

SEQ ID NO: 203946 - DNA, 13 bp, Artificial Sequence
  Oligonucleotide for detection of SNP TSC0050050
ctataacattttc

SEQ ID NO: 203947 - DNA, 13 bp, Artificial Sequence
  Oligonucleotide for detection of SNP TSC0050050
gaaaatattatag

SEQ ID NO: 203948 - DNA, 13 bp, Artificial Sequence
  Oligonucleotide for detection of SNP TSC0050050
ctataatattttc

SEQ ID NO: 203949 - DNA, 13 bp, Artificial Sequence
  Oligonucleotide for detection of SNP TSC0050050
gaaaacgttatag

SEQ ID NO: 203950 - DNA, 13 bp, Artificial Sequence
  Oligonucleotide for detection of SNP TSC0050050
ctataacgttttc

SEQ ID NO: 203951 - DNA, 13 bp, Artificial Sequence
  Oligonucleotide for detection of SNP TSC0050051
tatagggagatat

SEQ ID NO: 203952 - DNA, 13 bp, Artificial Sequence
  Oligonucleotide for detection of SNP TSC0050051
atatctccctata

SEQ ID NO: 203953 - DNA, 13 bp, Artificial Sequence
  Oligonucleotide for detection of SNP TSC0050051
tataggaagatat

SEQ ID NO: 203954 - DNA, 13 bp, Artificial Sequence
  Oligonucleotide for detection of SNP TSC0050051
atatcttcctata

SEQ ID NO: 203955 - DNA, 13 bp, Artificial Sequence
  Oligonucleotide for detection of SNP TSC0050052
aagttttttttat

SEQ ID NO: 203956 - DNA, 13 bp, Artificial Sequence
  Oligonucleotide for detection of SNP TSC0050052
ataaaaaaaactt

SEQ ID NO: 203957 - DNA, 13 bp, Artificial Sequence
  Oligonucleotide for detection of SNP TSC0050052
aagtttgttttat

SEQ ID NO: 203958 - DNA, 13 bp, Artificial Sequence
  Oligonucleotide for detection of SNP TSC0050052
ataaaacaaactt

SEQ ID NO: 203959 - DNA, 13 bp, Artificial Sequence
  Oligonucleotide for detection of SNP TSC0050052
aagttcgttttat

SEQ ID NO: 203960 - DNA, 13 bp, Artificial Sequence
  Oligonucleotide for detection of SNP TSC0050052
ataaaacgaactt

SEQ ID NO: 203961 - DNA, 13 bp, Artificial Sequence
  Oligonucleotide for detection of SNP TSC0050052
ataaaagggattt

SEQ ID NO: 203962 - DNA, 13 bp, Artificial Sequence
  Oligonucleotide for detection of SNP TSC0050052
aaatcccttttat

SEQ ID NO: 203963 - DNA, 13 bp, Artificial Sequence
  Oligonucleotide for detection of SNP TSC0050052
ataaaatggattt

SEQ ID NO: 203964 - DNA, 13 bp, Artificial Sequence
  Oligonucleotide for detection of SNP TSC0050052
aaatccattttat

SEQ ID NO: 203965 - DNA, 13 bp, Artificial Sequence
  Oligonucleotide for detection of SNP TSC0050052
ataaaacggattt

SEQ ID NO: 203966 - DNA, 13 bp, Artificial Sequence
  Oligonucleotide for detection of SNP TSC0050052
aaatccgttttat

SEQ ID NO: 203967 - DNA, 13 bp, Artificial Sequence
  Oligonucleotide for detection of SNP TSC0050053
ttttatattgtgt

SEQ ID NO: 203968 - DNA, 13 bp, Artificial Sequence
  Oligonucleotide for detection of SNP TSC0050053
acacaatataaaa

SEQ ID NO: 203969 - DNA, 13 bp, Artificial Sequence
  Oligonucleotide for detection of SNP TSC0050053
ttttatgttgtgt

SEQ ID NO: 203970 - DNA, 13 bp, Artificial Sequence
  Oligonucleotide for detection of SNP TSC0050053
acacaacataaaa

SEQ ID NO: 203971 - DNA, 13 bp, Artificial Sequence
  Oligonucleotide for detection of SNP TSC0010448
ttggtattgagat

SEQ ID NO: 203972 - DNA, 13 bp, Artificial Sequence
  Oligonucleotide for detection of SNP TSC0010448
atctcaataccaa

SEQ ID NO: 203973 - DNA, 13 bp, Artificial Sequence
  Oligonucleotide for detection of SNP TSC0010448
ttggtagtgagat

SEQ ID NO: 203974 - DNA, 13 bp, Artificial Sequence
  Oligonucleotide for detection of SNP TSC0010448
atctcactaccaa

SEQ ID NO: 203975 - DNA, 13 bp, Artificial Sequence
  Oligonucleotide for detection of SNP TSC0050055
ggtttagaatgtt

SEQ ID NO: 203976 - DNA, 13 bp, Artificial Sequence
  Oligonucleotide for detection of SNP TSC0050055
aacattctaaacc

SEQ ID NO: 203977 - DNA, 13 bp, Artificial Sequence
  Oligonucleotide for detection of SNP TSC0050055
ggtttaaaatgtt

SEQ ID NO: 203978 - DNA, 13 bp, Artificial Sequence
  Oligonucleotide for detection of SNP TSC0050055
aacattttaaacc

SEQ ID NO: 203979 - DNA, 13 bp, Artificial Sequence
  Oligonucleotide for detection of SNP TSC0050056
aatttataataty

SEQ ID NO: 203980 - DNA, 13 bp, Artificial Sequence
  Oligonucleotide for detection of SNP TSC0050056
ratattataaatt

SEQ ID NO: 203981 - DNA, 13 bp, Artificial Sequence
  Oligonucleotide for detection of SNP TSC0050056
aatttagaataty

SEQ ID NO: 203982 - DNA, 13 bp, Artificial Sequence
  Oligonucleotide for detection of SNP TSC0050056
ratattctaaatt

SEQ ID NO: 203983 - DNA, 13 bp, Artificial Sequence
  Oligonucleotide for detection of SNP TSC0050056
gatgttataggtt

SEQ ID NO: 203984 - DNA, 13 bp, Artificial Sequence
  Oligonucleotide for detection of SNP TSC0050056
aacctataacatc

SEQ ID NO: 203985 - DNA, 13 bp, Artificial Sequence
  Oligonucleotide for detection of SNP TSC0050056
gatgttttaggtt

SEQ ID NO: 203986 - DNA, 13 bp, Artificial Sequence
  Oligonucleotide for detection of SNP TSC0050056
aacctaaaacatc

SEQ ID NO: 203987 - DNA, 13 bp, Artificial Sequence
  Oligonucleotide for detection of SNP TSC0006521
gttgaggtgggtg

SEQ ID NO: 203988 - DNA, 13 bp, Artificial Sequence
  Oligonucleotide for detection of SNP TSC0006521
cacccacctcaac

SEQ ID NO: 203989 - DNA, 13 bp, Artificial Sequence
  Oligonucleotide for detection of SNP TSC0006521
gttgagatgggtg

SEQ ID NO: 203990 - DNA, 13 bp, Artificial Sequence
  Oligonucleotide for detection of SNP TSC0006521
cacccatctcaac

SEQ ID NO: 203991 - DNA, 13 bp, Artificial Sequence
  Oligonucleotide for detection of SNP TSC0050058
agaggtggggggy

SEQ ID NO: 203992 - DNA, 13 bp, Artificial Sequence
  Oligonucleotide for detection of SNP TSC0050058
rccccccacctct

SEQ ID NO: 203993 - DNA, 13 bp, Artificial Sequence
  Oligonucleotide for detection of SNP TSC0050058
agaggttgggggy

SEQ ID NO: 203994 - DNA, 13 bp, Artificial Sequence
  Oligonucleotide for detection of SNP TSC0050058
rcccccaacctct

SEQ ID NO: 203995 - DNA, 13 bp, Artificial Sequence
  Oligonucleotide for detection of SNP TSC0050058
agaggcggggggy

SEQ ID NO: 203996 - DNA, 13 bp, Artificial Sequence
  Oligonucleotide for detection of SNP TSC0050058
rccccccgcctct

SEQ ID NO: 203997 - DNA, 13 bp, Artificial Sequence
  Oligonucleotide for detection of SNP TSC0050058
agaggtcgggggy

SEQ ID NO: 203998 - DNA, 13 bp, Artificial Sequence
  Oligonucleotide for detection of SNP TSC0050058
rcccccgacctct

SEQ ID NO: 203999 - DNA, 13 bp, Artificial Sequence
  Oligonucleotide for detection of SNP TSC0050059
atgattattggta

SEQ ID NO: 204000 - DNA, 13 bp, Artificial Sequence
  Oligonucleotide for detection of SNP TSC0050059
taccaataatcat

SEQ ID NO: 204001 - DNA, 13 bp, Artificial Sequence
  Oligonucleotide for detection of SNP TSC0050059
atgatttttggta

SEQ ID NO: 204002 - DNA, 13 bp, Artificial Sequence
  Oligonucleotide for detection of SNP TSC0050059
taccaaaaatcat

SEQ ID NO: 204003 - DNA, 13 bp, Artificial Sequence
  Oligonucleotide for detection of SNP TSC0050059
tgttaataattat

SEQ ID NO: 204004 - DNA, 13 bp, Artificial Sequence
  Oligonucleotide for detection of SNP TSC0050059
ataattattaaca

SEQ ID NO: 204005 - DNA, 13 bp, Artificial Sequence
  Oligonucleotide for detection of SNP TSC0050059
tgttaagaattat

SEQ ID NO: 204006 - DNA, 13 bp, Artificial Sequence
  Oligonucleotide for detection of SNP TSC0050059
ataattcttaaca

SEQ ID NO: 204007 - DNA, 13 bp, Artificial Sequence
  Oligonucleotide for detection of SNP TSC0050060
taagattagtaty

SEQ ID NO: 204008 - DNA, 13 bp, Artificial Sequence
  Oligonucleotide for detection of SNP TSC0050060
ratactaatctta

SEQ ID NO: 204009 - DNA, 13 bp, Artificial Sequence
  Oligonucleotide for detection of SNP TSC0050060
taagatgagtaty

SEQ ID NO: 204010 - DNA, 13 bp, Artificial Sequence
  Oligonucleotide for detection of SNP TSC0050060
ratactcatctta

SEQ ID NO: 204011 - DNA, 13 bp, Artificial Sequence
  Oligonucleotide for detection of SNP TSC0050060
taagacgagtaty

SEQ ID NO: 204012 - DNA, 13 bp, Artificial Sequence
  Oligonucleotide for detection of SNP TSC0050060
ratactcgtctta

SEQ ID NO: 204013 - DNA, 13 bp, Artificial Sequence
  Oligonucleotide for detection of SNP TSC0050060
ggtattagtttta

SEQ ID NO: 204014 - DNA, 13 bp, Artificial Sequence
  Oligonucleotide for detection of SNP TSC0050060
taaaactaatacc

SEQ ID NO: 204015 - DNA, 13 bp, Artificial Sequence
  Oligonucleotide for detection of SNP TSC0050060
ggtatttgtttta

SEQ ID NO: 204016 - DNA, 13 bp, Artificial Sequence
  Oligonucleotide for detection of SNP TSC0050060
taaaacaaatacc

SEQ ID NO: 204017 - DNA, 13 bp, Artificial Sequence
  Oligonucleotide for detection of SNP TSC0050060
ggtattcgtttta

SEQ ID NO: 204018 - DNA, 13 bp, Artificial Sequence
  Oligonucleotide for detection of SNP TSC0050060
taaaacgaatacc

SEQ ID NO: 204019 - DNA, 13 bp, Artificial Sequence
  Oligonucleotide for detection of SNP TSC0050061
tttataaagtttt

SEQ ID NO: 204020 - DNA, 13 bp, Artificial Sequence
  Oligonucleotide for detection of SNP TSC0050061
aaaactttataaa

SEQ ID NO: 204021 - DNA, 13 bp, Artificial Sequence
  Oligonucleotide for detection of SNP TSC0008066
gatttgttttttg

SEQ ID NO: 204022 - DNA, 13 bp, Artificial Sequence
  Oligonucleotide for detection of SNP TSC0008066
caaaaaacaaatc

SEQ ID NO: 204023 - DNA, 13 bp, Artificial Sequence
  Oligonucleotide for detection of SNP TSC0008066
gatttggtttttg

SEQ ID NO: 204024 - DNA, 13 bp, Artificial Sequence
  Oligonucleotide for detection of SNP TSC0008066
caaaaaccaaatc

SEQ ID NO: 204025 - DNA, 13 bp, Artificial Sequence
  Oligonucleotide for detection of SNP TSC0008066
taaaaaatagaty

SEQ ID NO: 204026 - DNA, 13 bp, Artificial Sequence
  Oligonucleotide for detection of SNP TSC0008066
ratctatttttta

SEQ ID NO: 204027 - DNA, 13 bp, Artificial Sequence
  Oligonucleotide for detection of SNP TSC0008066
taaaaattagaty

SEQ ID NO: 204028 - DNA, 13 bp, Artificial Sequence
  Oligonucleotide for detection of SNP TSC0008066
ratctaattttta

SEQ ID NO: 204029 - DNA, 13 bp, Artificial Sequence
  Oligonucleotide for detection of SNP TSC0050062
gtgataagttgga

SEQ ID NO: 204030 - DNA, 13 bp, Artificial Sequence
  Oligonucleotide for detection of SNP TSC0050062
tccaacttatcac

SEQ ID NO: 204031 - DNA, 13 bp, Artificial Sequence
  Oligonucleotide for detection of SNP TSC0050062
gtgataggttgga

SEQ ID NO: 204032 - DNA, 13 bp, Artificial Sequence
  Oligonucleotide for detection of SNP TSC0050062
tccaacctatcac

SEQ ID NO: 204033 - DNA, 13 bp, Artificial Sequence
  Oligonucleotide for detection of SNP TSC0050064
tattatattttag

SEQ ID NO: 204034 - DNA, 13 bp, Artificial Sequence
  Oligonucleotide for detection of SNP TSC0050064
ctaaaatataata

SEQ ID NO: 204035 - DNA, 13 bp, Artificial Sequence
  Oligonucleotide for detection of SNP TSC0050065
gaggtgaaggttg

SEQ ID NO: 204036 - DNA, 13 bp, Artificial Sequence
  Oligonucleotide for detection of SNP TSC0050065
caaccttcacctc

SEQ ID NO: 204037 - DNA, 13 bp, Artificial Sequence
  Oligonucleotide for detection of SNP TSC0050065
gaggtgtaggttg

SEQ ID NO: 204038 - DNA, 13 bp, Artificial Sequence
  Oligonucleotide for detection of SNP TSC0050065
caacctacacctc

SEQ ID NO: 204039 - DNA, 13 bp, Artificial Sequence
  Oligonucleotide for detection of SNP TSC0050066
tttataaataatt

SEQ ID NO: 204040 - DNA, 13 bp, Artificial Sequence
  Oligonucleotide for detection of SNP TSC0050066
aattatttataaa

SEQ ID NO: 204041 - DNA, 13 bp, Artificial Sequence
  Oligonucleotide for detection of SNP TSC0050067
tttaataggtatg

SEQ ID NO: 204042 - DNA, 13 bp, Artificial Sequence
  Oligonucleotide for detection of SNP TSC0050067
catacctattaaa

SEQ ID NO: 204043 - DNA, 13 bp, Artificial Sequence
  Oligonucleotide for detection of SNP TSC0050067
tttaatgggtatg

SEQ ID NO: 204044 - DNA, 13 bp, Artificial Sequence
  Oligonucleotide for detection of SNP TSC0050067
catacccattaaa

SEQ ID NO: 204045 - DNA, 13 bp, Artificial Sequence
  Oligonucleotide for detection of SNP TSC0050068
gttgtaaatatat

SEQ ID NO: 204046 - DNA, 13 bp, Artificial Sequence
  Oligonucleotide for detection of SNP TSC0050068
atatatttacaac

SEQ ID NO: 204047 - DNA, 13 bp, Artificial Sequence
  Oligonucleotide for detection of SNP TSC0050068
gttgtatatatat

SEQ ID NO: 204048 - DNA, 13 bp, Artificial Sequence
  Oligonucleotide for detection of SNP TSC0050068
atatatatacaac

SEQ ID NO: 204049 - DNA, 13 bp, Artificial Sequence
  Oligonucleotide for detection of SNP TSC0050068
atatgtttataay

SEQ ID NO: 204050 - DNA, 13 bp, Artificial Sequence
  Oligonucleotide for detection of SNP TSC0050068
rttataaacatat

SEQ ID NO: 204051 - DNA, 13 bp, Artificial Sequence
  Oligonucleotide for detection of SNP TSC0050068
atatgtgtataay

SEQ ID NO: 204052 - DNA, 13 bp, Artificial Sequence
  Oligonucleotide for detection of SNP TSC0050068
rttatacacatat

SEQ ID NO: 204053 - DNA, 13 bp, Artificial Sequence
  Oligonucleotide for detection of SNP TSC0050069
ttgtttatagtat

SEQ ID NO: 204054 - DNA, 13 bp, Artificial Sequence
  Oligonucleotide for detection of SNP TSC0050069
atactataaacaa

SEQ ID NO: 204055 - DNA, 13 bp, Artificial Sequence
  Oligonucleotide for detection of SNP TSC0050069
ttgtttttagtat

SEQ ID NO: 204056 - DNA, 13 bp, Artificial Sequence
  Oligonucleotide for detection of SNP TSC0050069
atactaaaaacaa

SEQ ID NO: 204057 - DNA, 13 bp, Artificial Sequence
  Oligonucleotide for detection of SNP TSC0000814
gtttaaattatta

SEQ ID NO: 204058 - DNA, 13 bp, Artificial Sequence
  Oligonucleotide for detection of SNP TSC0000814
taataatttaaac

SEQ ID NO: 204059 - DNA, 13 bp, Artificial Sequence
  Oligonucleotide for detection of SNP TSC0000814
gtttaagttatta

SEQ ID NO: 204060 - DNA, 13 bp, Artificial Sequence
  Oligonucleotide for detection of SNP TSC0000814
taataacttaaac

SEQ ID NO: 204061 - DNA, 13 bp, Artificial Sequence
  Oligonucleotide for detection of SNP TSC0009268
gaggaaaattagg

SEQ ID NO: 204062 - DNA, 13 bp, Artificial Sequence
  Oligonucleotide for detection of SNP TSC0009268
cctaattttcctc

SEQ ID NO: 204063 - DNA, 13 bp, Artificial Sequence
  Oligonucleotide for detection of SNP TSC0009268
gaggaagattagg

SEQ ID NO: 204064 - DNA, 13 bp, Artificial Sequence
  Oligonucleotide for detection of SNP TSC0009268
cctaatcttcctc

SEQ ID NO: 204065 - DNA, 13 bp, Artificial Sequence
  Oligonucleotide for detection of SNP TSC0009269
ttttattgttaga

SEQ ID NO: 204066 - DNA, 13 bp, Artificial Sequence
  Oligonucleotide for detection of SNP TSC0009269
tctaacaataaaa

SEQ ID NO: 204067 - DNA, 13 bp, Artificial Sequence
  Oligonucleotide for detection of SNP TSC0009269
ttttatcgttaga

SEQ ID NO: 204068 - DNA, 13 bp, Artificial Sequence
  Oligonucleotide for detection of SNP TSC0009269
tctaacgataaaa

SEQ ID NO: 204069 - DNA, 13 bp, Artificial Sequence
  Oligonucleotide for detection of SNP TSC0009269
tttggtggtggga

SEQ ID NO: 204070 - DNA, 13 bp, Artificial Sequence
  Oligonucleotide for detection of SNP TSC0009269
tcccaccaccaaa

SEQ ID NO: 204071 - DNA, 13 bp, Artificial Sequence
  Oligonucleotide for detection of SNP TSC0009269
tttggtagtggga

SEQ ID NO: 204072 - DNA, 13 bp, Artificial Sequence
  Oligonucleotide for detection of SNP TSC0009269
tcccactaccaaa

SEQ ID NO: 204073 - DNA, 13 bp, Artificial Sequence
  Oligonucleotide for detection of SNP TSC0009269
tttggcggtggga

SEQ ID NO: 204074 - DNA, 13 bp, Artificial Sequence
  Oligonucleotide for detection of SNP TSC0009269
tcccaccgccaaa

SEQ ID NO: 204075 - DNA, 13 bp, Artificial Sequence
  Oligonucleotide for detection of SNP TSC0009270
attggtagttatt

SEQ ID NO: 204076 - DNA, 13 bp, Artificial Sequence
  Oligonucleotide for detection of SNP TSC0009270
aataactaccaat

SEQ ID NO: 204077 - DNA, 13 bp, Artificial Sequence
  Oligonucleotide for detection of SNP TSC0009270
attggtggttatt

SEQ ID NO: 204078 - DNA, 13 bp, Artificial Sequence
  Oligonucleotide for detection of SNP TSC0009270
aataaccaccaat

SEQ ID NO: 204079 - DNA, 13 bp, Artificial Sequence
  Oligonucleotide for detection of SNP TSC0008636
tttgtaagtagaa

SEQ ID NO: 204080 - DNA, 13 bp, Artificial Sequence
  Oligonucleotide for detection of SNP TSC0008636
ttctacttacaaa

SEQ ID NO: 204081 - DNA, 13 bp, Artificial Sequence
  Oligonucleotide for detection of SNP TSC0008636
tttgtaggtagaa

SEQ ID NO: 204082 - DNA, 13 bp, Artificial Sequence
  Oligonucleotide for detection of SNP TSC0008636
ttctacctacaaa

SEQ ID NO: 204083 - DNA, 13 bp, Artificial Sequence
  Oligonucleotide for detection of SNP TSC0050072
aaaataaggaagg

SEQ ID NO: 204084 - DNA, 13 bp, Artificial Sequence
  Oligonucleotide for detection of SNP TSC0050072
ccttccttatttt

SEQ ID NO: 204085 - DNA, 13 bp, Artificial Sequence
  Oligonucleotide for detection of SNP TSC0050072
aaaatagggaagg

SEQ ID NO: 204086 - DNA, 13 bp, Artificial Sequence
  Oligonucleotide for detection of SNP TSC0050072
ccttccctatttt

SEQ ID NO: 204087 - DNA, 13 bp, Artificial Sequence
  Oligonucleotide for detection of SNP TSC0050073
agagttaatagaa

SEQ ID NO: 204088 - DNA, 13 bp, Artificial Sequence
  Oligonucleotide for detection of SNP TSC0050073
ttctattaactct

SEQ ID NO: 204089 - DNA, 13 bp, Artificial Sequence
  Oligonucleotide for detection of SNP TSC0050073
agagttgatagaa

SEQ ID NO: 204090 - DNA, 13 bp, Artificial Sequence
  Oligonucleotide for detection of SNP TSC0050073
ttctatcaactct

SEQ ID NO: 204091 - DNA, 13 bp, Artificial Sequence
  Oligonucleotide for detection of SNP TSC0050073
agagtcgatagaa

SEQ ID NO: 204092 - DNA, 13 bp, Artificial Sequence
  Oligonucleotide for detection of SNP TSC0050073
ttctatcgactct

SEQ ID NO: 204093 - DNA, 13 bp, Artificial Sequence
  Oligonucleotide for detection of SNP TSC0050073
ttttgttgatttt

SEQ ID NO: 204094 - DNA, 13 bp, Artificial Sequence
  Oligonucleotide for detection of SNP TSC0050073
aaaatcaacaaaa

SEQ ID NO: 204095 - DNA, 13 bp, Artificial Sequence
  Oligonucleotide for detection of SNP TSC0050073
ttttgtcgatttt

SEQ ID NO: 204096 - DNA, 13 bp, Artificial Sequence
  Oligonucleotide for detection of SNP TSC0050073
aaaatcgacaaaa

SEQ ID NO: 204097 - DNA, 13 bp, Artificial Sequence
  Oligonucleotide for detection of SNP TSC0009676
tgttttgtaatty

SEQ ID NO: 204098 - DNA, 13 bp, Artificial Sequence
  Oligonucleotide for detection of SNP TSC0009676
raattacaaaaca

SEQ ID NO: 204099 - DNA, 13 bp, Artificial Sequence
  Oligonucleotide for detection of SNP TSC0009676
tgttttataatty

SEQ ID NO: 204100 - DNA, 13 bp, Artificial Sequence
  Oligonucleotide for detection of SNP TSC0009676
raattataaaaca

SEQ ID NO: 204101 - DNA, 13 bp, Artificial Sequence
  Oligonucleotide for detection of SNP TSC0009050
ataattataagag

SEQ ID NO: 204102 - DNA, 13 bp, Artificial Sequence
  Oligonucleotide for detection of SNP TSC0009050
ctcttataattat

SEQ ID NO: 204103 - DNA, 13 bp, Artificial Sequence
  Oligonucleotide for detection of SNP TSC0009050
ataattgtaagag

SEQ ID NO: 204104 - DNA, 13 bp, Artificial Sequence
  Oligonucleotide for detection of SNP TSC0009050
ctcttacaattat

SEQ ID NO: 204105 - DNA, 13 bp, Artificial Sequence
  Oligonucleotide for detection of SNP TSC0009050
ataatcgtaagag

SEQ ID NO: 204106 - DNA, 13 bp, Artificial Sequence
  Oligonucleotide for detection of SNP TSC0009050
ctcttacgattat

SEQ ID NO: 204107 - DNA, 13 bp, Artificial Sequence
  Oligonucleotide for detection of SNP TSC0009050
tttttatgattgt

SEQ ID NO: 204108 - DNA, 13 bp, Artificial Sequence
  Oligonucleotide for detection of SNP TSC0009050
acaatcataaaaa

SEQ ID NO: 204109 - DNA, 13 bp, Artificial Sequence
  Oligonucleotide for detection of SNP TSC0009050
tttttacgattgt

SEQ ID NO: 204110 - DNA, 13 bp, Artificial Sequence
  Oligonucleotide for detection of SNP TSC0009050
acaatcgtaaaaa

SEQ ID NO: 204111 - DNA, 13 bp, Artificial Sequence
  Oligonucleotide for detection of SNP TSC0010346
tatgtttataaag

SEQ ID NO: 204112 - DNA, 13 bp, Artificial Sequence
  Oligonucleotide for detection of SNP TSC0010346
ctttataaacata

SEQ ID NO: 204113 - DNA, 13 bp, Artificial Sequence
  Oligonucleotide for detection of SNP TSC0010346
tatgttgataaag

SEQ ID NO: 204114 - DNA, 13 bp, Artificial Sequence
  Oligonucleotide for detection of SNP TSC0010346
ctttatcaacata

SEQ ID NO: 204115 - DNA, 13 bp, Artificial Sequence
  Oligonucleotide for detection of SNP TSC0010346
ttttgttaatata

SEQ ID NO: 204116 - DNA, 13 bp, Artificial Sequence
  Oligonucleotide for detection of SNP TSC0010346
tatattaacaaaa

SEQ ID NO: 204117 - DNA, 13 bp, Artificial Sequence
  Oligonucleotide for detection of SNP TSC0050079
atatttaatttgt

SEQ ID NO: 204118 - DNA, 13 bp, Artificial Sequence
  Oligonucleotide for detection of SNP TSC0050079
acaaattaaatat

SEQ ID NO: 204119 - DNA, 13 bp, Artificial Sequence
  Oligonucleotide for detection of SNP TSC0050080
gttattgtataty

SEQ ID NO: 204120 - DNA, 13 bp, Artificial Sequence
  Oligonucleotide for detection of SNP TSC0050080
ratatacaataac

SEQ ID NO: 204121 - DNA, 13 bp, Artificial Sequence
  Oligonucleotide for detection of SNP TSC0050080
gttattatataty

SEQ ID NO: 204122 - DNA, 13 bp, Artificial Sequence
  Oligonucleotide for detection of SNP TSC0050080
ratatataataac

SEQ ID NO: 204123 - DNA, 13 bp, Artificial Sequence
  Oligonucleotide for detection of SNP TSC0050081
attaacgttatta

SEQ ID NO: 204124 - DNA, 13 bp, Artificial Sequence
  Oligonucleotide for detection of SNP TSC0050081
taataacgttaat

SEQ ID NO: 204125 - DNA, 13 bp, Artificial Sequence
  Oligonucleotide for detection of SNP TSC0050081
tgatgatgttaat

SEQ ID NO: 204126 - DNA, 13 bp, Artificial Sequence
  Oligonucleotide for detection of SNP TSC0050081
attaacatcatca

SEQ ID NO: 204127 - DNA, 13 bp, Artificial Sequence
  Oligonucleotide for detection of SNP TSC0050081
tgatgacgttaat

SEQ ID NO: 204128 - DNA, 13 bp, Artificial Sequence
  Oligonucleotide for detection of SNP TSC0050081
attaacgtcatca

SEQ ID NO: 204129 - DNA, 13 bp, Artificial Sequence
  Oligonucleotide for detection of SNP TSC0050082
gttaatgttagat

SEQ ID NO: 204130 - DNA, 13 bp, Artificial Sequence
  Oligonucleotide for detection of SNP TSC0050082
atctaacattaac

SEQ ID NO: 204131 - DNA, 13 bp, Artificial Sequence
  Oligonucleotide for detection of SNP TSC0050082
gttaatattagat

SEQ ID NO: 204132 - DNA, 13 bp, Artificial Sequence
  Oligonucleotide for detection of SNP TSC0050082
atctaatattaac

SEQ ID NO: 204133 - DNA, 13 bp, Artificial Sequence
  Oligonucleotide for detection of SNP TSC0050083
aataataatttga

SEQ ID NO: 204134 - DNA, 13 bp, Artificial Sequence
  Oligonucleotide for detection of SNP TSC0050083
tcaaattattatt

SEQ ID NO: 204135 - DNA, 13 bp, Artificial Sequence
  Oligonucleotide for detection of SNP TSC0050083
ttagattattgtt

SEQ ID NO: 204136 - DNA, 13 bp, Artificial Sequence
  Oligonucleotide for detection of SNP TSC0050083
aacaataatctaa

SEQ ID NO: 204137 - DNA, 13 bp, Artificial Sequence
  Oligonucleotide for detection of SNP TSC0050083
ttagatgattgtt

SEQ ID NO: 204138 - DNA, 13 bp, Artificial Sequence
  Oligonucleotide for detection of SNP TSC0050083
aacaatcatctaa

SEQ ID NO: 204139 - DNA, 13 bp, Artificial Sequence
  Oligonucleotide for detection of SNP TSC0050085
tttataattatat

SEQ ID NO: 204140 - DNA, 13 bp, Artificial Sequence
  Oligonucleotide for detection of SNP TSC0050085
atataattataaa

SEQ ID NO: 204141 - DNA, 13 bp, Artificial Sequence
  Oligonucleotide for detection of SNP TSC0050086
ggggaatgtgatg

SEQ ID NO: 204142 - DNA, 13 bp, Artificial Sequence
  Oligonucleotide for detection of SNP TSC0050086
catcacattcccc

SEQ ID NO: 204143 - DNA, 13 bp, Artificial Sequence
  Oligonucleotide for detection of SNP TSC0050086
ggggaacgtgatg

SEQ ID NO: 204144 - DNA, 13 bp, Artificial Sequence
  Oligonucleotide for detection of SNP TSC0050086
catcacgttcccc

SEQ ID NO: 204145 - DNA, 13 bp, Artificial Sequence
  Oligonucleotide for detection of SNP TSC0050087
taattatgattat

SEQ ID NO: 204146 - DNA, 13 bp, Artificial Sequence
  Oligonucleotide for detection of SNP TSC0050087
ataatcataatta

SEQ ID NO: 204147 - DNA, 13 bp, Artificial Sequence
  Oligonucleotide for detection of SNP TSC0050087
taattacgattat

SEQ ID NO: 204148 - DNA, 13 bp, Artificial Sequence
  Oligonucleotide for detection of SNP TSC0050087
ataatcgtaatta

SEQ ID NO: 204149 - DNA, 13 bp, Artificial Sequence
  Oligonucleotide for detection of SNP TSC0050087
atgattgtagttg

SEQ ID NO: 204150 - DNA, 13 bp, Artificial Sequence
  Oligonucleotide for detection of SNP TSC0050087
caactacaatcat

SEQ ID NO: 204151 - DNA, 13 bp, Artificial Sequence
  Oligonucleotide for detection of SNP TSC0050087
atgattatagttg

SEQ ID NO: 204152 - DNA, 13 bp, Artificial Sequence
  Oligonucleotide for detection of SNP TSC0050087
caactataatcat

SEQ ID NO: 204153 - DNA, 13 bp, Artificial Sequence
  Oligonucleotide for detection of SNP TSC0050087
atgatcgtagttg

SEQ ID NO: 204154 - DNA, 13 bp, Artificial Sequence
  Oligonucleotide for detection of SNP TSC0050087
caactacgatcat

SEQ ID NO: 204155 - DNA, 13 bp, Artificial Sequence
  Oligonucleotide for detection of SNP TSC0050088
tttggtataagaa

SEQ ID NO: 204156 - DNA, 13 bp, Artificial Sequence
  Oligonucleotide for detection of SNP TSC0050088
ttcttataccaaa

SEQ ID NO: 204157 - DNA, 13 bp, Artificial Sequence
  Oligonucleotide for detection of SNP TSC0050088
tttggtgtaagaa

SEQ ID NO: 204158 - DNA, 13 bp, Artificial Sequence
  Oligonucleotide for detection of SNP TSC0050088
ttcttacaccaaa

SEQ ID NO: 204159 - DNA, 13 bp, Artificial Sequence
  Oligonucleotide for detection of SNP TSC0050089
tagtgtatttttg

SEQ ID NO: 204160 - DNA, 13 bp, Artificial Sequence
  Oligonucleotide for detection of SNP TSC0050089
caaaaatacacta

SEQ ID NO: 204161 - DNA, 13 bp, Artificial Sequence
  Oligonucleotide for detection of SNP TSC0050089
tagtgtgtttttg

SEQ ID NO: 204162 - DNA, 13 bp, Artificial Sequence
  Oligonucleotide for detection of SNP TSC0050089
caaaaacacacta

SEQ ID NO: 204163 - DNA, 13 bp, Artificial Sequence
  Oligonucleotide for detection of SNP TSC0050090
aattttgttgtty

SEQ ID NO: 204164 - DNA, 13 bp, Artificial Sequence
  Oligonucleotide for detection of SNP TSC0050090
raacaacaaaatt

SEQ ID NO: 204165 - DNA, 13 bp, Artificial Sequence
  Oligonucleotide for detection of SNP TSC0050090
aattttattgtty

SEQ ID NO: 204166 - DNA, 13 bp, Artificial Sequence
  Oligonucleotide for detection of SNP TSC0050090
raacaataaaatt

SEQ ID NO: 204167 - DNA, 13 bp, Artificial Sequence
  Oligonucleotide for detection of SNP TSC0050090
aattttgtcgtty

SEQ ID NO: 204168 - DNA, 13 bp, Artificial Sequence
  Oligonucleotide for detection of SNP TSC0050090
raacgacaaaatt

SEQ ID NO: 204169 - DNA, 13 bp, Artificial Sequence
  Oligonucleotide for detection of SNP TSC0050090
aattttatcgtty

SEQ ID NO: 204170 - DNA, 13 bp, Artificial Sequence
  Oligonucleotide for detection of SNP TSC0050090
raacgataaaatt

SEQ ID NO: 204171 - DNA, 13 bp, Artificial Sequence
  Oligonucleotide for detection of SNP TSC0050091
tgattagtatgtt

SEQ ID NO: 204172 - DNA, 13 bp, Artificial Sequence
  Oligonucleotide for detection of SNP TSC0050091
aacatactaatca

SEQ ID NO: 204173 - DNA, 13 bp, Artificial Sequence
  Oligonucleotide for detection of SNP TSC0050091
tgattaatatgtt

SEQ ID NO: 204174 - DNA, 13 bp, Artificial Sequence
  Oligonucleotide for detection of SNP TSC0050091
aacatattaatca

SEQ ID NO: 204175 - DNA, 13 bp, Artificial Sequence
  Oligonucleotide for detection of SNP TSC0050092
gagatagtaagga

SEQ ID NO: 204176 - DNA, 13 bp, Artificial Sequence
  Oligonucleotide for detection of SNP TSC0050092
tccttactatctc

SEQ ID NO: 204177 - DNA, 13 bp, Artificial Sequence
  Oligonucleotide for detection of SNP TSC0050092
gagataataagga

SEQ ID NO: 204178 - DNA, 13 bp, Artificial Sequence
  Oligonucleotide for detection of SNP TSC0050092
tccttattatctc

SEQ ID NO: 204179 - DNA, 13 bp, Artificial Sequence
  Oligonucleotide for detection of SNP TSC0008569
aattgtgagttta

SEQ ID NO: 204180 - DNA, 13 bp, Artificial Sequence
  Oligonucleotide for detection of SNP TSC0008569
taaactcacaatt

SEQ ID NO: 204181 - DNA, 13 bp, Artificial Sequence
  Oligonucleotide for detection of SNP TSC0008569
aattgtaagttta

SEQ ID NO: 204182 - DNA, 13 bp, Artificial Sequence
  Oligonucleotide for detection of SNP TSC0008569
taaacttacaatt

SEQ ID NO: 204183 - DNA, 13 bp, Artificial Sequence
  Oligonucleotide for detection of SNP TSC0000162
gtagttagggtag

SEQ ID NO: 204184 - DNA, 13 bp, Artificial Sequence
  Oligonucleotide for detection of SNP TSC0000162
ctaccctaactac

SEQ ID NO: 204185 - DNA, 13 bp, Artificial Sequence
  Oligonucleotide for detection of SNP TSC0000162
gtagttggggtag

SEQ ID NO: 204186 - DNA, 13 bp, Artificial Sequence
  Oligonucleotide for detection of SNP TSC0000162
ctaccccaactac

SEQ ID NO: 204187 - DNA, 13 bp, Artificial Sequence
  Oligonucleotide for detection of SNP TSC0000162
gtagtcggggtag

SEQ ID NO: 204188 - DNA, 13 bp, Artificial Sequence
  Oligonucleotide for detection of SNP TSC0000162
ctaccccgactac

SEQ ID NO: 204189 - DNA, 13 bp, Artificial Sequence
  Oligonucleotide for detection of SNP TSC0000162
ttgttttgattgy

SEQ ID NO: 204190 - DNA, 13 bp, Artificial Sequence
  Oligonucleotide for detection of SNP TSC0000162
rcaatcaaaacaa

SEQ ID NO: 204191 - DNA, 13 bp, Artificial Sequence
  Oligonucleotide for detection of SNP TSC0000162
ttgtttcgattgy

SEQ ID NO: 204192 - DNA, 13 bp, Artificial Sequence
  Oligonucleotide for detection of SNP TSC0000162
rcaatcgaaacaa

SEQ ID NO: 204193 - DNA, 13 bp, Artificial Sequence
  Oligonucleotide for detection of SNP TSC0000163
gtattaatggaay

SEQ ID NO: 204194 - DNA, 13 bp, Artificial Sequence
  Oligonucleotide for detection of SNP TSC0000163
rttccattaatac

SEQ ID NO: 204195 - DNA, 13 bp, Artificial Sequence
  Oligonucleotide for detection of SNP TSC0000163
gtattattggaay

SEQ ID NO: 204196 - DNA, 13 bp, Artificial Sequence
  Oligonucleotide for detection of SNP TSC0000163
rttccaataatac

SEQ ID NO: 204197 - DNA, 13 bp, Artificial Sequence
  Oligonucleotide for detection of SNP TSC0000163
gttttattagtgy

SEQ ID NO: 204198 - DNA, 13 bp, Artificial Sequence
  Oligonucleotide for detection of SNP TSC0000163
rcactaataaaac

SEQ ID NO: 204199 - DNA, 13 bp, Artificial Sequence
  Oligonucleotide for detection of SNP TSC0000163
gttttagtagtgy

SEQ ID NO: 204200 - DNA, 13 bp, Artificial Sequence
  Oligonucleotide for detection of SNP TSC0000163
rcactactaaaac

SEQ ID NO: 204201 - DNA, 13 bp, Artificial Sequence
  Oligonucleotide for detection of SNP TSC0050093
gttgggaaagggt

SEQ ID NO: 204202 - DNA, 13 bp, Artificial Sequence
  Oligonucleotide for detection of SNP TSC0050093
accctttcccaac

SEQ ID NO: 204203 - DNA, 13 bp, Artificial Sequence
  Oligonucleotide for detection of SNP TSC0050093
gttggggaagggt

SEQ ID NO: 204204 - DNA, 13 bp, Artificial Sequence
  Oligonucleotide for detection of SNP TSC0050093
acccttccccaac

SEQ ID NO: 204205 - DNA, 13 bp, Artificial Sequence
  Oligonucleotide for detection of SNP TSC0050098
gtaaaatagtata

SEQ ID NO: 204206 - DNA, 13 bp, Artificial Sequence
  Oligonucleotide for detection of SNP TSC0050098
tatactattttac

SEQ ID NO: 204207 - DNA, 13 bp, Artificial Sequence
  Oligonucleotide for detection of SNP TSC0050098
gtaaaagagtata

SEQ ID NO: 204208 - DNA, 13 bp, Artificial Sequence
  Oligonucleotide for detection of SNP TSC0050098
tatactcttttac

SEQ ID NO: 204209 - DNA, 13 bp, Artificial Sequence
  Oligonucleotide for detection of SNP TSC0050098
tatgttattttgy

SEQ ID NO: 204210 - DNA, 13 bp, Artificial Sequence
  Oligonucleotide for detection of SNP TSC0050098
rcaaaataacata

SEQ ID NO: 204211 - DNA, 13 bp, Artificial Sequence
  Oligonucleotide for detection of SNP TSC0050099
gagatatgtgaga

SEQ ID NO: 204212 - DNA, 13 bp, Artificial Sequence
  Oligonucleotide for detection of SNP TSC0050099
tctcacatatctc

SEQ ID NO: 204213 - DNA, 13 bp, Artificial Sequence
  Oligonucleotide for detection of SNP TSC0050099
gagataggtgaga

SEQ ID NO: 204214 - DNA, 13 bp, Artificial Sequence
  Oligonucleotide for detection of SNP TSC0050099
tctcacctatctc

SEQ ID NO: 204215 - DNA, 13 bp, Artificial Sequence
  Oligonucleotide for detection of SNP TSC0050100
ttagatatttgta

SEQ ID NO: 204216 - DNA, 13 bp, Artificial Sequence
  Oligonucleotide for detection of SNP TSC0050100
tacaaatatctaa

SEQ ID NO: 204217 - DNA, 13 bp, Artificial Sequence
  Oligonucleotide for detection of SNP TSC0050100
ttagatgtttgta

SEQ ID NO: 204218 - DNA, 13 bp, Artificial Sequence
  Oligonucleotide for detection of SNP TSC0050100
tacaaacatctaa

SEQ ID NO: 204219 - DNA, 13 bp, Artificial Sequence
  Oligonucleotide for detection of SNP TSC0050100
ttagatattcgta

SEQ ID NO: 204220 - DNA, 13 bp, Artificial Sequence
  Oligonucleotide for detection of SNP TSC0050100
tacgaatatctaa

SEQ ID NO: 204221 - DNA, 13 bp, Artificial Sequence
  Oligonucleotide for detection of SNP TSC0050100
ttagacgtttgta

SEQ ID NO: 204222 - DNA, 13 bp, Artificial Sequence
  Oligonucleotide for detection of SNP TSC0050100
tacaaacgtctaa

SEQ ID NO: 204223 - DNA, 13 bp, Artificial Sequence
  Oligonucleotide for detection of SNP TSC0050100
ttagatgttcgta

SEQ ID NO: 204224 - DNA, 13 bp, Artificial Sequence
  Oligonucleotide for detection of SNP TSC0050100
tacgaacatctaa

SEQ ID NO: 204225 - DNA, 13 bp, Artificial Sequence
  Oligonucleotide for detection of SNP TSC0050100
ttagacgttcgta

SEQ ID NO: 204226 - DNA, 13 bp, Artificial Sequence
  Oligonucleotide for detection of SNP TSC0050100
tacgaacgtctaa

SEQ ID NO: 204227 - DNA, 13 bp, Artificial Sequence
  Oligonucleotide for detection of SNP TSC0050100
tgtgagtgtttaa

SEQ ID NO: 204228 - DNA, 13 bp, Artificial Sequence
  Oligonucleotide for detection of SNP TSC0050100
ttaaacactcaca

SEQ ID NO: 204229 - DNA, 13 bp, Artificial Sequence
  Oligonucleotide for detection of SNP TSC0050100
tgcgagtgtttaa

SEQ ID NO: 204230 - DNA, 13 bp, Artificial Sequence
  Oligonucleotide for detection of SNP TSC0050100
ttaaacactcgca

SEQ ID NO: 204231 - DNA, 13 bp, Artificial Sequence
  Oligonucleotide for detection of SNP TSC0050100
tgtgagcgtttaa

SEQ ID NO: 204232 - DNA, 13 bp, Artificial Sequence
  Oligonucleotide for detection of SNP TSC0050100
ttaaacgctcaca

SEQ ID NO: 204233 - DNA, 13 bp, Artificial Sequence
  Oligonucleotide for detection of SNP TSC0050100
tgcgagcgtttaa

SEQ ID NO: 204234 - DNA, 13 bp, Artificial Sequence
  Oligonucleotide for detection of SNP TSC0050100
ttaaacgctcgca

SEQ ID NO: 204235 - DNA, 13 bp, Artificial Sequence
  Oligonucleotide for detection of SNP TSC0050101
ttgagatagggty

SEQ ID NO: 204236 - DNA, 13 bp, Artificial Sequence
  Oligonucleotide for detection of SNP TSC0050101
raccctatctcaa

SEQ ID NO: 204237 - DNA, 13 bp, Artificial Sequence
  Oligonucleotide for detection of SNP TSC0050101
ttgagagagggty

SEQ ID NO: 204238 - DNA, 13 bp, Artificial Sequence
  Oligonucleotide for detection of SNP TSC0050101
raccctctctcaa

SEQ ID NO: 204239 - DNA, 13 bp, Artificial Sequence
  Oligonucleotide for detection of SNP TSC0050101
ggtttttttttag

SEQ ID NO: 204240 - DNA, 13 bp, Artificial Sequence
  Oligonucleotide for detection of SNP TSC0050101
ctaaaaaaaaacc

SEQ ID NO: 204241 - DNA, 13 bp, Artificial Sequence
  Oligonucleotide for detection of SNP TSC0050102
ggggaggtaattg

SEQ ID NO: 204242 - DNA, 13 bp, Artificial Sequence
  Oligonucleotide for detection of SNP TSC0050102
caattacctcccc

SEQ ID NO: 204243 - DNA, 13 bp, Artificial Sequence
  Oligonucleotide for detection of SNP TSC0050102
ggggagataattg

SEQ ID NO: 204244 - DNA, 13 bp, Artificial Sequence
  Oligonucleotide for detection of SNP TSC0050102
caattatctcccc

SEQ ID NO: 204245 - DNA, 13 bp, Artificial Sequence
  Oligonucleotide for detection of SNP TSC0050103
gagattaggtaat

SEQ ID NO: 204246 - DNA, 13 bp, Artificial Sequence
  Oligonucleotide for detection of SNP TSC0050103
attacctaatctc

SEQ ID NO: 204247 - DNA, 13 bp, Artificial Sequence
  Oligonucleotide for detection of SNP TSC0050103
gagattgggtaat

SEQ ID NO: 204248 - DNA, 13 bp, Artificial Sequence
  Oligonucleotide for detection of SNP TSC0050103
attacccaatctc

SEQ ID NO: 204249 - DNA, 13 bp, Artificial Sequence
  Oligonucleotide for detection of SNP TSC0050103
gagatcgggtaat

SEQ ID NO: 204250 - DNA, 13 bp, Artificial Sequence
  Oligonucleotide for detection of SNP TSC0050103
attacccgatctc

SEQ ID NO: 204251 - DNA, 13 bp, Artificial Sequence
  Oligonucleotide for detection of SNP TSC0050103
attatttggttty

SEQ ID NO: 204252 - DNA, 13 bp, Artificial Sequence
  Oligonucleotide for detection of SNP TSC0050103
raaaccaaataat

SEQ ID NO: 204253 - DNA, 13 bp, Artificial Sequence
  Oligonucleotide for detection of SNP TSC0050103
attattcggttty

SEQ ID NO: 204254 - DNA, 13 bp, Artificial Sequence
  Oligonucleotide for detection of SNP TSC0050103
raaaccgaataat

SEQ ID NO: 204255 - DNA, 13 bp, Artificial Sequence
  Oligonucleotide for detection of SNP TSC0050104
tttagggatatat

SEQ ID NO: 204256 - DNA, 13 bp, Artificial Sequence
  Oligonucleotide for detection of SNP TSC0050104
atatatccctaaa

SEQ ID NO: 204257 - DNA, 13 bp, Artificial Sequence
  Oligonucleotide for detection of SNP TSC0050104
tttaggaatatat

SEQ ID NO: 204258 - DNA, 13 bp, Artificial Sequence
  Oligonucleotide for detection of SNP TSC0050104
atatattcctaaa

SEQ ID NO: 204259 - DNA, 13 bp, Artificial Sequence
  Oligonucleotide for detection of SNP TSC0050105
agatggggttttt

SEQ ID NO: 204260 - DNA, 13 bp, Artificial Sequence
  Oligonucleotide for detection of SNP TSC0050105
aaaaaccccatct

SEQ ID NO: 204261 - DNA, 13 bp, Artificial Sequence
  Oligonucleotide for detection of SNP TSC0050105
agatggagttttt

SEQ ID NO: 204262 - DNA, 13 bp, Artificial Sequence
  Oligonucleotide for detection of SNP TSC0050105
aaaaactccatct

SEQ ID NO: 204263 - DNA, 13 bp, Artificial Sequence
  Oligonucleotide for detection of SNP TSC0050106
tgttgggtgtgtg

SEQ ID NO: 204264 - DNA, 13 bp, Artificial Sequence
  Oligonucleotide for detection of SNP TSC0050106
cacacacccaaca

SEQ ID NO: 204265 - DNA, 13 bp, Artificial Sequence
  Oligonucleotide for detection of SNP TSC0050106
tgttggatgtgtg

SEQ ID NO: 204266 - DNA, 13 bp, Artificial Sequence
  Oligonucleotide for detection of SNP TSC0050106
cacacatccaaca

SEQ ID NO: 204267 - DNA, 13 bp, Artificial Sequence
  Oligonucleotide for detection of SNP TSC0050107
aaggtgattgtgg

SEQ ID NO: 204268 - DNA, 13 bp, Artificial Sequence
  Oligonucleotide for detection of SNP TSC0050107
ccacaatcacctt

SEQ ID NO: 204269 - DNA, 13 bp, Artificial Sequence
  Oligonucleotide for detection of SNP TSC0050107
aaggtgtttgtgg

SEQ ID NO: 204270 - DNA, 13 bp, Artificial Sequence
  Oligonucleotide for detection of SNP TSC0050107
ccacaaacacctt

SEQ ID NO: 204271 - DNA, 13 bp, Artificial Sequence
  Oligonucleotide for detection of SNP TSC0050107
ttataattatttt

SEQ ID NO: 204272 - DNA, 13 bp, Artificial Sequence
  Oligonucleotide for detection of SNP TSC0050107
aaaataattataa

SEQ ID NO: 204273 - DNA, 13 bp, Artificial Sequence
  Oligonucleotide for detection of SNP TSC0050109
tttatatatatat

SEQ ID NO: 204274 - DNA, 13 bp, Artificial Sequence
  Oligonucleotide for detection of SNP TSC0050109
atatatatataaa

SEQ ID NO: 204275 - DNA, 13 bp, Artificial Sequence
  Oligonucleotide for detection of SNP TSC0050109
tttatagatatat

SEQ ID NO: 204276 - DNA, 13 bp, Artificial Sequence
  Oligonucleotide for detection of SNP TSC0050109
atatatctataaa

SEQ ID NO: 204277 - DNA, 13 bp, Artificial Sequence
  Oligonucleotide for detection of SNP TSC0050109
atgtatgtataaa

SEQ ID NO: 204278 - DNA, 13 bp, Artificial Sequence
  Oligonucleotide for detection of SNP TSC0050109
tttatacatacat

SEQ ID NO: 204279 - DNA, 13 bp, Artificial Sequence
  Oligonucleotide for detection of SNP TSC0050109
atgtatatataaa

SEQ ID NO: 204280 - DNA, 13 bp, Artificial Sequence
  Oligonucleotide for detection of SNP TSC0050109
tttatatatacat

SEQ ID NO: 204281 - DNA, 13 bp, Artificial Sequence
  Oligonucleotide for detection of SNP TSC0050109
atgtatttataaa

SEQ ID NO: 204282 - DNA, 13 bp, Artificial Sequence
  Oligonucleotide for detection of SNP TSC0050109
tttataaatacat

SEQ ID NO: 204283 - DNA, 13 bp, Artificial Sequence
  Oligonucleotide for detection of SNP TSC0050110
aggaggaggaagy

SEQ ID NO: 204284 - DNA, 13 bp, Artificial Sequence
  Oligonucleotide for detection of SNP TSC0050110
rcttcctcctcct

SEQ ID NO: 204285 - DNA, 13 bp, Artificial Sequence
  Oligonucleotide for detection of SNP TSC0050110
aggaggtggaagy

SEQ ID NO: 204286 - DNA, 13 bp, Artificial Sequence
  Oligonucleotide for detection of SNP TSC0050110
rcttccacctcct

SEQ ID NO: 204287 - DNA, 13 bp, Artificial Sequence
  Oligonucleotide for detection of SNP TSC0050110
aggagggggaagy

SEQ ID NO: 204288 - DNA, 13 bp, Artificial Sequence
  Oligonucleotide for detection of SNP TSC0050110
rcttccccctcct

SEQ ID NO: 204289 - DNA, 13 bp, Artificial Sequence
  Oligonucleotide for detection of SNP TSC0050110
aggaggcggaagy

SEQ ID NO: 204290 - DNA, 13 bp, Artificial Sequence
  Oligonucleotide for detection of SNP TSC0050110
rcttccgcctcct

SEQ ID NO: 204291 - DNA, 13 bp, Artificial Sequence
  Oligonucleotide for detection of SNP TSC0050111
taaagtataagty

SEQ ID NO: 204292 - DNA, 13 bp, Artificial Sequence
  Oligonucleotide for detection of SNP TSC0050111
racttatacttta

SEQ ID NO: 204293 - DNA, 13 bp, Artificial Sequence
  Oligonucleotide for detection of SNP TSC0050111
taaagtttaagty

SEQ ID NO: 204294 - DNA, 13 bp, Artificial Sequence
  Oligonucleotide for detection of SNP TSC0050111
racttaaacttta

SEQ ID NO: 204295 - DNA, 13 bp, Artificial Sequence
  Oligonucleotide for detection of SNP TSC0050111
taaagtgtaagty

SEQ ID NO: 204296 - DNA, 13 bp, Artificial Sequence
  Oligonucleotide for detection of SNP TSC0050111
racttacacttta

SEQ ID NO: 204297 - DNA, 13 bp, Artificial Sequence
  Oligonucleotide for detection of SNP TSC0050111
ggtttatattttg

SEQ ID NO: 204298 - DNA, 13 bp, Artificial Sequence
  Oligonucleotide for detection of SNP TSC0050111
caaaatataaacc

SEQ ID NO: 204299 - DNA, 13 bp, Artificial Sequence
  Oligonucleotide for detection of SNP TSC0050111
ggtttagattttg

SEQ ID NO: 204300 - DNA, 13 bp, Artificial Sequence
  Oligonucleotide for detection of SNP TSC0050111
caaaatctaaacc

SEQ ID NO: 204301 - DNA, 13 bp, Artificial Sequence
  Oligonucleotide for detection of SNP TSC0050115
atatgtggttgga

SEQ ID NO: 204302 - DNA, 13 bp, Artificial Sequence
  Oligonucleotide for detection of SNP TSC0050115
tccaaccacatat

SEQ ID NO: 204303 - DNA, 13 bp, Artificial Sequence
  Oligonucleotide for detection of SNP TSC0050115
atatgtagttgga

SEQ ID NO: 204304 - DNA, 13 bp, Artificial Sequence
  Oligonucleotide for detection of SNP TSC0050115
tccaactacatat

SEQ ID NO: 204305 - DNA, 13 bp, Artificial Sequence
  Oligonucleotide for detection of SNP TSC0050116
attttaaatatgt

SEQ ID NO: 204306 - DNA, 13 bp, Artificial Sequence
  Oligonucleotide for detection of SNP TSC0050116
acatatttaaaat

SEQ ID NO: 204307 - DNA, 13 bp, Artificial Sequence
  Oligonucleotide for detection of SNP TSC0050116
attttagatatgt

SEQ ID NO: 204308 - DNA, 13 bp, Artificial Sequence
  Oligonucleotide for detection of SNP TSC0050116
acatatctaaaat

SEQ ID NO: 204309 - DNA, 13 bp, Artificial Sequence
  Oligonucleotide for detection of SNP TSC0050117
taagaaaatgata

SEQ ID NO: 204310 - DNA, 13 bp, Artificial Sequence
  Oligonucleotide for detection of SNP TSC0050117
tatcattttctta

SEQ ID NO: 204311 - DNA, 13 bp, Artificial Sequence
  Oligonucleotide for detection of SNP TSC0050117
taagaagatgata

SEQ ID NO: 204312 - DNA, 13 bp, Artificial Sequence
  Oligonucleotide for detection of SNP TSC0050117
tatcatcttctta

SEQ ID NO: 204313 - DNA, 13 bp, Artificial Sequence
  Oligonucleotide for detection of SNP TSC0050118
agttttaattatt

SEQ ID NO: 204314 - DNA, 13 bp, Artificial Sequence
  Oligonucleotide for detection of SNP TSC0050118
aataattaaaact

SEQ ID NO: 204315 - DNA, 13 bp, Artificial Sequence
  Oligonucleotide for detection of SNP TSC0050118
agtttttattatt

SEQ ID NO: 204316 - DNA, 13 bp, Artificial Sequence
  Oligonucleotide for detection of SNP TSC0050118
aataataaaaact

SEQ ID NO: 204317 - DNA, 13 bp, Artificial Sequence
  Oligonucleotide for detection of SNP TSC0050118
aataattaaagtt

SEQ ID NO: 204318 - DNA, 13 bp, Artificial Sequence
  Oligonucleotide for detection of SNP TSC0050118
aactttaattatt

SEQ ID NO: 204319 - DNA, 13 bp, Artificial Sequence
  Oligonucleotide for detection of SNP TSC0050118
aataatgaaagtt

SEQ ID NO: 204320 - DNA, 13 bp, Artificial Sequence
  Oligonucleotide for detection of SNP TSC0050118
aactttcattatt

SEQ ID NO: 204321 - DNA, 13 bp, Artificial Sequence
  Oligonucleotide for detection of SNP TSC0050120
aagagatattttt

SEQ ID NO: 204322 - DNA, 13 bp, Artificial Sequence
  Oligonucleotide for detection of SNP TSC0050120
aaaaatatctctt

SEQ ID NO: 204323 - DNA, 13 bp, Artificial Sequence
  Oligonucleotide for detection of SNP TSC0050120
aagagagattttt

SEQ ID NO: 204324 - DNA, 13 bp, Artificial Sequence
  Oligonucleotide for detection of SNP TSC0050120
aaaaatctctctt

SEQ ID NO: 204325 - DNA, 13 bp, Artificial Sequence
  Oligonucleotide for detection of SNP TSC0050120
aaaagtttttttt

SEQ ID NO: 204326 - DNA, 13 bp, Artificial Sequence
  Oligonucleotide for detection of SNP TSC0050120
aaaaaaaactttt

SEQ ID NO: 204327 - DNA, 13 bp, Artificial Sequence
  Oligonucleotide for detection of SNP TSC0050125
aggtatagtaata

SEQ ID NO: 204328 - DNA, 13 bp, Artificial Sequence
  Oligonucleotide for detection of SNP TSC0050125
tattactatacct

SEQ ID NO: 204329 - DNA, 13 bp, Artificial Sequence
  Oligonucleotide for detection of SNP TSC0050125
aggtatggtaata

SEQ ID NO: 204330 - DNA, 13 bp, Artificial Sequence
  Oligonucleotide for detection of SNP TSC0050125
tattaccatacct

SEQ ID NO: 204331 - DNA, 13 bp, Artificial Sequence
  Oligonucleotide for detection of SNP TSC0050125
aggtacggtaata

SEQ ID NO: 204332 - DNA, 13 bp, Artificial Sequence
  Oligonucleotide for detection of SNP TSC0050125
tattaccgtacct

SEQ ID NO: 204333 - DNA, 13 bp, Artificial Sequence
  Oligonucleotide for detection of SNP TSC0050126
attagaatttgtg

SEQ ID NO: 204334 - DNA, 13 bp, Artificial Sequence
  Oligonucleotide for detection of SNP TSC0050126
cacaaattctaat

SEQ ID NO: 204335 - DNA, 13 bp, Artificial Sequence
  Oligonucleotide for detection of SNP TSC0050126
attagattttgtg

SEQ ID NO: 204336 - DNA, 13 bp, Artificial Sequence
  Oligonucleotide for detection of SNP TSC0050126
cacaaaatctaat

SEQ ID NO: 204337 - DNA, 13 bp, Artificial Sequence
  Oligonucleotide for detection of SNP TSC0050126
attagaattcgtg

SEQ ID NO: 204338 - DNA, 13 bp, Artificial Sequence
  Oligonucleotide for detection of SNP TSC0050126
cacgaattctaat

SEQ ID NO: 204339 - DNA, 13 bp, Artificial Sequence
  Oligonucleotide for detection of SNP TSC0050126
attagatttcgtg

SEQ ID NO: 204340 - DNA, 13 bp, Artificial Sequence
  Oligonucleotide for detection of SNP TSC0050126
cacgaaatctaat

SEQ ID NO: 204341 - DNA, 13 bp, Artificial Sequence
  Oligonucleotide for detection of SNP TSC0050126
tatgagttttagt

SEQ ID NO: 204342 - DNA, 13 bp, Artificial Sequence
  Oligonucleotide for detection of SNP TSC0050126
actaaaactcata

SEQ ID NO: 204343 - DNA, 13 bp, Artificial Sequence
  Oligonucleotide for detection of SNP TSC0050126
tatgagatttagt

SEQ ID NO: 204344 - DNA, 13 bp, Artificial Sequence
  Oligonucleotide for detection of SNP TSC0050126
actaaatctcata

SEQ ID NO: 204345 - DNA, 13 bp, Artificial Sequence
  Oligonucleotide for detection of SNP TSC0050126
tacgagttttagt

SEQ ID NO: 204346 - DNA, 13 bp, Artificial Sequence
  Oligonucleotide for detection of SNP TSC0050126
actaaaactcgta

SEQ ID NO: 204347 - DNA, 13 bp, Artificial Sequence
  Oligonucleotide for detection of SNP TSC0050126
tacgagatttagt

SEQ ID NO: 204348 - DNA, 13 bp, Artificial Sequence
  Oligonucleotide for detection of SNP TSC0050126
actaaatctcgta

SEQ ID NO: 204349 - DNA, 13 bp, Artificial Sequence
  Oligonucleotide for detection of SNP TSC0050132
ttgttggaaatta

SEQ ID NO: 204350 - DNA, 13 bp, Artificial Sequence
  Oligonucleotide for detection of SNP TSC0050132
taatttccaacaa

SEQ ID NO: 204351 - DNA, 13 bp, Artificial Sequence
  Oligonucleotide for detection of SNP TSC0050132
ttgttgaaaatta

SEQ ID NO: 204352 - DNA, 13 bp, Artificial Sequence
  Oligonucleotide for detection of SNP TSC0050132
taattttcaacaa

SEQ ID NO: 204353 - DNA, 13 bp, Artificial Sequence
  Oligonucleotide for detection of SNP TSC0050133
tttttgaggttty

SEQ ID NO: 204354 - DNA, 13 bp, Artificial Sequence
  Oligonucleotide for detection of SNP TSC0050133
raaacctcaaaaa

SEQ ID NO: 204355 - DNA, 13 bp, Artificial Sequence
  Oligonucleotide for detection of SNP TSC0050134
aaattgtattgta

SEQ ID NO: 204356 - DNA, 13 bp, Artificial Sequence
  Oligonucleotide for detection of SNP TSC0050134
tacaatacaattt

SEQ ID NO: 204357 - DNA, 13 bp, Artificial Sequence
  Oligonucleotide for detection of SNP TSC0050134
aaattggattgta

SEQ ID NO: 204358 - DNA, 13 bp, Artificial Sequence
  Oligonucleotide for detection of SNP TSC0050134
tacaatccaattt

SEQ ID NO: 204359 - DNA, 13 bp, Artificial Sequence
  Oligonucleotide for detection of SNP TSC0050134
tataatgtaattt

SEQ ID NO: 204360 - DNA, 13 bp, Artificial Sequence
  Oligonucleotide for detection of SNP TSC0050134
aaattacattata

SEQ ID NO: 204361 - DNA, 13 bp, Artificial Sequence
  Oligonucleotide for detection of SNP TSC0050134
tataatttaattt

SEQ ID NO: 204362 - DNA, 13 bp, Artificial Sequence
  Oligonucleotide for detection of SNP TSC0050134
aaattaaattata

SEQ ID NO: 204363 - DNA, 13 bp, Artificial Sequence
  Oligonucleotide for detection of SNP TSC0050135
tgtgtgaaaagaa

SEQ ID NO: 204364 - DNA, 13 bp, Artificial Sequence
  Oligonucleotide for detection of SNP TSC0050135
ttcttttcacaca

SEQ ID NO: 204365 - DNA, 13 bp, Artificial Sequence
  Oligonucleotide for detection of SNP TSC0050135
tgtgtgtaaagaa

SEQ ID NO: 204366 - DNA, 13 bp, Artificial Sequence
  Oligonucleotide for detection of SNP TSC0050135
ttctttacacaca

SEQ ID NO: 204367 - DNA, 13 bp, Artificial Sequence
  Oligonucleotide for detection of SNP TSC0050136
gtgtaaaattaaa

SEQ ID NO: 204368 - DNA, 13 bp, Artificial Sequence
  Oligonucleotide for detection of SNP TSC0050136
tttaattttacac

SEQ ID NO: 204369 - DNA, 13 bp, Artificial Sequence
  Oligonucleotide for detection of SNP TSC0050136
gtgtaatattaaa

SEQ ID NO: 204370 - DNA, 13 bp, Artificial Sequence
  Oligonucleotide for detection of SNP TSC0050136
tttaatattacac

SEQ ID NO: 204371 - DNA, 13 bp, Artificial Sequence
  Oligonucleotide for detection of SNP TSC0050136
tttggttttatay

SEQ ID NO: 204372 - DNA, 13 bp, Artificial Sequence
  Oligonucleotide for detection of SNP TSC0050136
rtataaaaccaaa

SEQ ID NO: 204373 - DNA, 13 bp, Artificial Sequence
  Oligonucleotide for detection of SNP TSC0050136
tttggtattatay

SEQ ID NO: 204374 - DNA, 13 bp, Artificial Sequence
  Oligonucleotide for detection of SNP TSC0050136
rtataataccaaa

SEQ ID NO: 204375 - DNA, 13 bp, Artificial Sequence
  Oligonucleotide for detection of SNP TSC0050137
ggtttatagtatt

SEQ ID NO: 204376 - DNA, 13 bp, Artificial Sequence
  Oligonucleotide for detection of SNP TSC0050137
aatactataaacc

SEQ ID NO: 204377 - DNA, 13 bp, Artificial Sequence
  Oligonucleotide for detection of SNP TSC0050137
ggtttagagtatt

SEQ ID NO: 204378 - DNA, 13 bp, Artificial Sequence
  Oligonucleotide for detection of SNP TSC0050137
aatactctaaacc

SEQ ID NO: 204379 - DNA, 13 bp, Artificial Sequence
  Oligonucleotide for detection of SNP TSC0050137
agtattgtaagty

SEQ ID NO: 204380 - DNA, 13 bp, Artificial Sequence
  Oligonucleotide for detection of SNP TSC0050137
racttacaatact

SEQ ID NO: 204381 - DNA, 13 bp, Artificial Sequence
  Oligonucleotide for detection of SNP TSC0050137
agtattttaagty

SEQ ID NO: 204382 - DNA, 13 bp, Artificial Sequence
  Oligonucleotide for detection of SNP TSC0050137
racttaaaatact

SEQ ID NO: 204383 - DNA, 13 bp, Artificial Sequence
  Oligonucleotide for detection of SNP TSC0050140
ttgtgaatataty

SEQ ID NO: 204384 - DNA, 13 bp, Artificial Sequence
  Oligonucleotide for detection of SNP TSC0050140
ratatattcacaa

SEQ ID NO: 204385 - DNA, 13 bp, Artificial Sequence
  Oligonucleotide for detection of SNP TSC0050140
ttgtgattataty

SEQ ID NO: 204386 - DNA, 13 bp, Artificial Sequence
  Oligonucleotide for detection of SNP TSC0050140
ratataatcacaa

SEQ ID NO: 204387 - DNA, 13 bp, Artificial Sequence
  Oligonucleotide for detection of SNP TSC0050140
gatatatttataa

SEQ ID NO: 204388 - DNA, 13 bp, Artificial Sequence
  Oligonucleotide for detection of SNP TSC0050140
ttataaatatatc

SEQ ID NO: 204389 - DNA, 13 bp, Artificial Sequence
  Oligonucleotide for detection of SNP TSC0050140
gatatagttataa

SEQ ID NO: 204390 - DNA, 13 bp, Artificial Sequence
  Oligonucleotide for detection of SNP TSC0050140
ttataactatatc

SEQ ID NO: 204391 - DNA, 13 bp, Artificial Sequence
  Oligonucleotide for detection of SNP TSC0050142
atttttgaattta

SEQ ID NO: 204392 - DNA, 13 bp, Artificial Sequence
  Oligonucleotide for detection of SNP TSC0050142
taaattcaaaaat

SEQ ID NO: 204393 - DNA, 13 bp, Artificial Sequence
  Oligonucleotide for detection of SNP TSC0050142
attttcgaattta

SEQ ID NO: 204394 - DNA, 13 bp, Artificial Sequence
  Oligonucleotide for detection of SNP TSC0050142
taaattcgaaaat

SEQ ID NO: 204395 - DNA, 13 bp, Artificial Sequence
  Oligonucleotide for detection of SNP TSC0050142
tgaatttgaaaat

SEQ ID NO: 204396 - DNA, 13 bp, Artificial Sequence
  Oligonucleotide for detection of SNP TSC0050142
attttcaaattca

SEQ ID NO: 204397 - DNA, 13 bp, Artificial Sequence
  Oligonucleotide for detection of SNP TSC0050142
tgaattcgaaaat

SEQ ID NO: 204398 - DNA, 13 bp, Artificial Sequence
  Oligonucleotide for detection of SNP TSC0050142
attttcgaattca

SEQ ID NO: 204399 - DNA, 13 bp, Artificial Sequence
  Oligonucleotide for detection of SNP TSC0050143
gtatatatatatt

SEQ ID NO: 204400 - DNA, 13 bp, Artificial Sequence
  Oligonucleotide for detection of SNP TSC0050143
aatatatatatac

SEQ ID NO: 204401 - DNA, 13 bp, Artificial Sequence
  Oligonucleotide for detection of SNP TSC0050143
gtatatgtatatt

SEQ ID NO: 204402 - DNA, 13 bp, Artificial Sequence
  Oligonucleotide for detection of SNP TSC0050143
aatatacatatac

SEQ ID NO: 204403 - DNA, 13 bp, Artificial Sequence
  Oligonucleotide for detection of SNP TSC0050143
gtatacgtatatt

SEQ ID NO: 204404 - DNA, 13 bp, Artificial Sequence
  Oligonucleotide for detection of SNP TSC0050143
aatatacgtatac

SEQ ID NO: 204405 - DNA, 13 bp, Artificial Sequence
  Oligonucleotide for detection of SNP TSC0050143
aatatgtgtatay

SEQ ID NO: 204406 - DNA, 13 bp, Artificial Sequence
  Oligonucleotide for detection of SNP TSC0050143
rtatacacatatt

SEQ ID NO: 204407 - DNA, 13 bp, Artificial Sequence
  Oligonucleotide for detection of SNP TSC0050143
aatatgcgtatay

SEQ ID NO: 204408 - DNA, 13 bp, Artificial Sequence
  Oligonucleotide for detection of SNP TSC0050143
rtatacgcatatt

SEQ ID NO: 204409 - DNA, 13 bp, Artificial Sequence
  Oligonucleotide for detection of SNP TSC0005094
ttatgtaaaaaat

SEQ ID NO: 204410 - DNA, 13 bp, Artificial Sequence
  Oligonucleotide for detection of SNP TSC0005094
attttttacataa

SEQ ID NO: 204411 - DNA, 13 bp, Artificial Sequence
  Oligonucleotide for detection of SNP TSC0005094
ttatgttaaaaat

SEQ ID NO: 204412 - DNA, 13 bp, Artificial Sequence
  Oligonucleotide for detection of SNP TSC0005094
atttttaacataa

SEQ ID NO: 204413 - DNA, 13 bp, Artificial Sequence
  Oligonucleotide for detection of SNP TSC0005094
attttttatatgg

SEQ ID NO: 204414 - DNA, 13 bp, Artificial Sequence
  Oligonucleotide for detection of SNP TSC0005094
ccatataaaaaat

SEQ ID NO: 204415 - DNA, 13 bp, Artificial Sequence
  Oligonucleotide for detection of SNP TSC0005095
gtgttgttaggtg

SEQ ID NO: 204416 - DNA, 13 bp, Artificial Sequence
  Oligonucleotide for detection of SNP TSC0005095
cacctaacaacac

SEQ ID NO: 204417 - DNA, 13 bp, Artificial Sequence
  Oligonucleotide for detection of SNP TSC0005095
gtgttggtaggtg

SEQ ID NO: 204418 - DNA, 13 bp, Artificial Sequence
  Oligonucleotide for detection of SNP TSC0005095
cacctaccaacac

SEQ ID NO: 204419 - DNA, 13 bp, Artificial Sequence
  Oligonucleotide for detection of SNP TSC0005095
tatttaatagtay

SEQ ID NO: 204420 - DNA, 13 bp, Artificial Sequence
  Oligonucleotide for detection of SNP TSC0005095
rtactattaaata

SEQ ID NO: 204421 - DNA, 13 bp, Artificial Sequence
  Oligonucleotide for detection of SNP TSC0005095
tatttattagtay

SEQ ID NO: 204422 - DNA, 13 bp, Artificial Sequence
  Oligonucleotide for detection of SNP TSC0005095
rtactaataaata

SEQ ID NO: 204423 - DNA, 13 bp, Artificial Sequence
  Oligonucleotide for detection of SNP TSC0050144
aaggaaagattgy

SEQ ID NO: 204424 - DNA, 13 bp, Artificial Sequence
  Oligonucleotide for detection of SNP TSC0050144
rcaatctttcctt

SEQ ID NO: 204425 - DNA, 13 bp, Artificial Sequence
  Oligonucleotide for detection of SNP TSC0050144
aaggaaggattgy

SEQ ID NO: 204426 - DNA, 13 bp, Artificial Sequence
  Oligonucleotide for detection of SNP TSC0050144
rcaatccttcctt

SEQ ID NO: 204427 - DNA, 13 bp, Artificial Sequence
  Oligonucleotide for detection of SNP TSC0050151
gttatagattgtg

SEQ ID NO: 204428 - DNA, 13 bp, Artificial Sequence
  Oligonucleotide for detection of SNP TSC0050151
cacaatctataac

SEQ ID NO: 204429 - DNA, 13 bp, Artificial Sequence
  Oligonucleotide for detection of SNP TSC0050151
gttataaattgtg

SEQ ID NO: 204430 - DNA, 13 bp, Artificial Sequence
  Oligonucleotide for detection of SNP TSC0050151
cacaatttataac

SEQ ID NO: 204431 - DNA, 13 bp, Artificial Sequence
  Oligonucleotide for detection of SNP TSC0050151
gttatagatcgtg

SEQ ID NO: 204432 - DNA, 13 bp, Artificial Sequence
  Oligonucleotide for detection of SNP TSC0050151
cacgatctataac

SEQ ID NO: 204433 - DNA, 13 bp, Artificial Sequence
  Oligonucleotide for detection of SNP TSC0050151
gttataaatcgtg

SEQ ID NO: 204434 - DNA, 13 bp, Artificial Sequence
  Oligonucleotide for detection of SNP TSC0050151
cacgatttataac

SEQ ID NO: 204435 - DNA, 13 bp, Artificial Sequence
  Oligonucleotide for detection of SNP TSC0050152
agtatcgttttta

SEQ ID NO: 204436 - DNA, 13 bp, Artificial Sequence
  Oligonucleotide for detection of SNP TSC0050152
taaaaacgatact

SEQ ID NO: 204437 - DNA, 13 bp, Artificial Sequence
  Oligonucleotide for detection of SNP TSC0050152
tgaaagtgatgtt

SEQ ID NO: 204438 - DNA, 13 bp, Artificial Sequence
  Oligonucleotide for detection of SNP TSC0050152
aacatcactttca

SEQ ID NO: 204439 - DNA, 13 bp, Artificial Sequence
  Oligonucleotide for detection of SNP TSC0050152
tgaaagcgatgtt

SEQ ID NO: 204440 - DNA, 13 bp, Artificial Sequence
  Oligonucleotide for detection of SNP TSC0050152
aacatcgctttca

SEQ ID NO: 204441 - DNA, 13 bp, Artificial Sequence
  Oligonucleotide for detection of SNP TSC0050153
ataggtatttatt

SEQ ID NO: 204442 - DNA, 13 bp, Artificial Sequence
  Oligonucleotide for detection of SNP TSC0050153
aataaatacctat

SEQ ID NO: 204443 - DNA, 13 bp, Artificial Sequence
  Oligonucleotide for detection of SNP TSC0050154
tgttaggaaatat

SEQ ID NO: 204444 - DNA, 13 bp, Artificial Sequence
  Oligonucleotide for detection of SNP TSC0050154
atatttcctaaca

SEQ ID NO: 204445 - DNA, 13 bp, Artificial Sequence
  Oligonucleotide for detection of SNP TSC0050154
tgttagaaaatat

SEQ ID NO: 204446 - DNA, 13 bp, Artificial Sequence
  Oligonucleotide for detection of SNP TSC0050154
atattttctaaca

SEQ ID NO: 204447 - DNA, 13 bp, Artificial Sequence
  Oligonucleotide for detection of SNP TSC0050155
aatttaattttaa

SEQ ID NO: 204448 - DNA, 13 bp, Artificial Sequence
  Oligonucleotide for detection of SNP TSC0050155
ttaaaattaaatt

SEQ ID NO: 204449 - DNA, 13 bp, Artificial Sequence
  Oligonucleotide for detection of SNP TSC0050155
aatttagttttaa

SEQ ID NO: 204450 - DNA, 13 bp, Artificial Sequence
  Oligonucleotide for detection of SNP TSC0050155
ttaaaactaaatt

SEQ ID NO: 204451 - DNA, 13 bp, Artificial Sequence
  Oligonucleotide for detection of SNP TSC0050156
ttggaatatatta

SEQ ID NO: 204452 - DNA, 13 bp, Artificial Sequence
  Oligonucleotide for detection of SNP TSC0050156
taatatattccaa

SEQ ID NO: 204453 - DNA, 13 bp, Artificial Sequence
  Oligonucleotide for detection of SNP TSC0050156
ttggaagatatta

SEQ ID NO: 204454 - DNA, 13 bp, Artificial Sequence
  Oligonucleotide for detection of SNP TSC0050156
taatatcttccaa

SEQ ID NO: 204455 - DNA, 13 bp, Artificial Sequence
  Oligonucleotide for detection of SNP TSC0050156
tagtgtgttttaa

SEQ ID NO: 204456 - DNA, 13 bp, Artificial Sequence
  Oligonucleotide for detection of SNP TSC0050156
ttaaaacacacta

SEQ ID NO: 204457 - DNA, 13 bp, Artificial Sequence
  Oligonucleotide for detection of SNP TSC0050156
tagtgttttttaa

SEQ ID NO: 204458 - DNA, 13 bp, Artificial Sequence
  Oligonucleotide for detection of SNP TSC0050156
ttaaaaaacacta

SEQ ID NO: 204459 - DNA, 13 bp, Artificial Sequence
  Oligonucleotide for detection of SNP TSC0006358
tttggagtttttg

SEQ ID NO: 204460 - DNA, 13 bp, Artificial Sequence
  Oligonucleotide for detection of SNP TSC0006358
caaaaactccaaa

SEQ ID NO: 204461 - DNA, 13 bp, Artificial Sequence
  Oligonucleotide for detection of SNP TSC0050158
tatggtatatatt

SEQ ID NO: 204462 - DNA, 13 bp, Artificial Sequence
  Oligonucleotide for detection of SNP TSC0050158
aatatataccata

SEQ ID NO: 204463 - DNA, 13 bp, Artificial Sequence
  Oligonucleotide for detection of SNP TSC0050158
tatggtgtatatt

SEQ ID NO: 204464 - DNA, 13 bp, Artificial Sequence
  Oligonucleotide for detection of SNP TSC0050158
aatatacaccata

SEQ ID NO: 204465 - DNA, 13 bp, Artificial Sequence
  Oligonucleotide for detection of SNP TSC0050158
tatggcgtatatt

SEQ ID NO: 204466 - DNA, 13 bp, Artificial Sequence
  Oligonucleotide for detection of SNP TSC0050158
aatatacgccata

SEQ ID NO: 204467 - DNA, 13 bp, Artificial Sequence
  Oligonucleotide for detection of SNP TSC0050158
aatatgtgttatg

SEQ ID NO: 204468 - DNA, 13 bp, Artificial Sequence
  Oligonucleotide for detection of SNP TSC0050158
cataacacatatt

SEQ ID NO: 204469 - DNA, 13 bp, Artificial Sequence
  Oligonucleotide for detection of SNP TSC0050158
aatatgcgttatg

SEQ ID NO: 204470 - DNA, 13 bp, Artificial Sequence
  Oligonucleotide for detection of SNP TSC0050158
cataacgcatatt

SEQ ID NO: 204471 - DNA, 13 bp, Artificial Sequence
  Oligonucleotide for detection of SNP TSC0050159
tgtttaatgtagt

SEQ ID NO: 204472 - DNA, 13 bp, Artificial Sequence
  Oligonucleotide for detection of SNP TSC0050159
actacattaaaca

SEQ ID NO: 204473 - DNA, 13 bp, Artificial Sequence
  Oligonucleotide for detection of SNP TSC0050159
tgtttagtgtagt

SEQ ID NO: 204474 - DNA, 13 bp, Artificial Sequence
  Oligonucleotide for detection of SNP TSC0050159
actacactaaaca

SEQ ID NO: 204475 - DNA, 13 bp, Artificial Sequence
  Oligonucleotide for detection of SNP TSC0050160
gttgtagaaataa

SEQ ID NO: 204476 - DNA, 13 bp, Artificial Sequence
  Oligonucleotide for detection of SNP TSC0050160
ttatttctacaac

SEQ ID NO: 204477 - DNA, 13 bp, Artificial Sequence
  Oligonucleotide for detection of SNP TSC0050160
gttgtaaaaataa

SEQ ID NO: 204478 - DNA, 13 bp, Artificial Sequence
  Oligonucleotide for detection of SNP TSC0050160
ttatttttacaac

SEQ ID NO: 204479 - DNA, 13 bp, Artificial Sequence
  Oligonucleotide for detection of SNP TSC0050161
tttgttatttatt

SEQ ID NO: 204480 - DNA, 13 bp, Artificial Sequence
  Oligonucleotide for detection of SNP TSC0050161
aataaataacaaa

SEQ ID NO: 204481 - DNA, 13 bp, Artificial Sequence
  Oligonucleotide for detection of SNP TSC0050161
tttgttgtttatt

SEQ ID NO: 204482 - DNA, 13 bp, Artificial Sequence
  Oligonucleotide for detection of SNP TSC0050161
aataaacaacaaa

SEQ ID NO: 204483 - DNA, 13 bp, Artificial Sequence
  Oligonucleotide for detection of SNP TSC0050161
tttgtcgtttatt

SEQ ID NO: 204484 - DNA, 13 bp, Artificial Sequence
  Oligonucleotide for detection of SNP TSC0050161
aataaacgacaaa

SEQ ID NO: 204485 - DNA, 13 bp, Artificial Sequence
  Oligonucleotide for detection of SNP TSC0050161
agtaaatggtaaa

SEQ ID NO: 204486 - DNA, 13 bp, Artificial Sequence
  Oligonucleotide for detection of SNP TSC0050161
tttaccatttact

SEQ ID NO: 204487 - DNA, 13 bp, Artificial Sequence
  Oligonucleotide for detection of SNP TSC0050161
agtaaacggtaaa

SEQ ID NO: 204488 - DNA, 13 bp, Artificial Sequence
  Oligonucleotide for detection of SNP TSC0050161
tttaccgtttact

SEQ ID NO: 204489 - DNA, 13 bp, Artificial Sequence
  Oligonucleotide for detection of SNP TSC0050162
atgtatgtaaata

SEQ ID NO: 204490 - DNA, 13 bp, Artificial Sequence
  Oligonucleotide for detection of SNP TSC0050162
tatttacatacat

SEQ ID NO: 204491 - DNA, 13 bp, Artificial Sequence
  Oligonucleotide for detection of SNP TSC0050162
atgtatataaata

SEQ ID NO: 204492 - DNA, 13 bp, Artificial Sequence
  Oligonucleotide for detection of SNP TSC0050162
tatttatatacat

SEQ ID NO: 204493 - DNA, 13 bp, Artificial Sequence
  Oligonucleotide for detection of SNP TSC0050164
ttgttttagttay

SEQ ID NO: 204494 - DNA, 13 bp, Artificial Sequence
  Oligonucleotide for detection of SNP TSC0050164
rtaactaaaacaa

SEQ ID NO: 204495 - DNA, 13 bp, Artificial Sequence
  Oligonucleotide for detection of SNP TSC0050164
ttgtttgagttay

SEQ ID NO: 204496 - DNA, 13 bp, Artificial Sequence
  Oligonucleotide for detection of SNP TSC0050164
rtaactcaaacaa

SEQ ID NO: 204497 - DNA, 13 bp, Artificial Sequence
  Oligonucleotide for detection of SNP TSC0050164
gtaattaaagtag

SEQ ID NO: 204498 - DNA, 13 bp, Artificial Sequence
  Oligonucleotide for detection of SNP TSC0050164
ctactttaattac

SEQ ID NO: 204499 - DNA, 13 bp, Artificial Sequence
  Oligonucleotide for detection of SNP TSC0050164
gtaatttaagtag

SEQ ID NO: 204500 - DNA, 13 bp, Artificial Sequence
  Oligonucleotide for detection of SNP TSC0050164
ctacttaaattac

SEQ ID NO: 204501 - DNA, 13 bp, Artificial Sequence
  Oligonucleotide for detection of SNP TSC0009441
gaattaaattgay

SEQ ID NO: 204502 - DNA, 13 bp, Artificial Sequence
  Oligonucleotide for detection of SNP TSC0009441
rtcaatttaattc

SEQ ID NO: 204503 - DNA, 13 bp, Artificial Sequence
  Oligonucleotide for detection of SNP TSC0009441
gaattagattgay

SEQ ID NO: 204504 - DNA, 13 bp, Artificial Sequence
  Oligonucleotide for detection of SNP TSC0009441
rtcaatctaattc

SEQ ID NO: 204505 - DNA, 13 bp, Artificial Sequence
  Oligonucleotide for detection of SNP TSC0009441
gaattaaatcgay

SEQ ID NO: 204506 - DNA, 13 bp, Artificial Sequence
  Oligonucleotide for detection of SNP TSC0009441
rtcgatttaattc

SEQ ID NO: 204507 - DNA, 13 bp, Artificial Sequence
  Oligonucleotide for detection of SNP TSC0009441
gaattagatcgay

SEQ ID NO: 204508 - DNA, 13 bp, Artificial Sequence
  Oligonucleotide for detection of SNP TSC0009441
rtcgatctaattc

SEQ ID NO: 204509 - DNA, 13 bp, Artificial Sequence
  Oligonucleotide for detection of SNP TSC0050165
ttagttattagty

SEQ ID NO: 204510 - DNA, 13 bp, Artificial Sequence
  Oligonucleotide for detection of SNP TSC0050165
ractaataactaa

SEQ ID NO: 204511 - DNA, 13 bp, Artificial Sequence
  Oligonucleotide for detection of SNP TSC0050165
ttagtttttagty

SEQ ID NO: 204512 - DNA, 13 bp, Artificial Sequence
  Oligonucleotide for detection of SNP TSC0050165
ractaaaaactaa

SEQ ID NO: 204513 - DNA, 13 bp, Artificial Sequence
  Oligonucleotide for detection of SNP TSC0050165
gattagtagttgg

SEQ ID NO: 204514 - DNA, 13 bp, Artificial Sequence
  Oligonucleotide for detection of SNP TSC0050165
ccaactactaatc

SEQ ID NO: 204515 - DNA, 13 bp, Artificial Sequence
  Oligonucleotide for detection of SNP TSC0050165
gattaggagttgg

SEQ ID NO: 204516 - DNA, 13 bp, Artificial Sequence
  Oligonucleotide for detection of SNP TSC0050165
ccaactcctaatc

SEQ ID NO: 204517 - DNA, 13 bp, Artificial Sequence
  Oligonucleotide for detection of SNP TSC0050166
aatggttattttt

SEQ ID NO: 204518 - DNA, 13 bp, Artificial Sequence
  Oligonucleotide for detection of SNP TSC0050166
aaaaataaccatt

SEQ ID NO: 204519 - DNA, 13 bp, Artificial Sequence
  Oligonucleotide for detection of SNP TSC0050166
aatggtgattttt

SEQ ID NO: 204520 - DNA, 13 bp, Artificial Sequence
  Oligonucleotide for detection of SNP TSC0050166
aaaaatcaccatt

SEQ ID NO: 204521 - DNA, 13 bp, Artificial Sequence
  Oligonucleotide for detection of SNP TSC0050166
aagggtgattatt

SEQ ID NO: 204522 - DNA, 13 bp, Artificial Sequence
  Oligonucleotide for detection of SNP TSC0050166
aataatcaccctt

SEQ ID NO: 204523 - DNA, 13 bp, Artificial Sequence
  Oligonucleotide for detection of SNP TSC0050166
aagggttattatt

SEQ ID NO: 204524 - DNA, 13 bp, Artificial Sequence
  Oligonucleotide for detection of SNP TSC0050166
aataataaccctt

SEQ ID NO: 204525 - DNA, 13 bp, Artificial Sequence
  Oligonucleotide for detection of SNP TSC0050169
ttttgtagattgg

SEQ ID NO: 204526 - DNA, 13 bp, Artificial Sequence
  Oligonucleotide for detection of SNP TSC0050169
ccaatctacaaaa

SEQ ID NO: 204527 - DNA, 13 bp, Artificial Sequence
  Oligonucleotide for detection of SNP TSC0050169
ttttgtggattgg

SEQ ID NO: 204528 - DNA, 13 bp, Artificial Sequence
  Oligonucleotide for detection of SNP TSC0050169
ccaatccacaaaa

SEQ ID NO: 204529 - DNA, 13 bp, Artificial Sequence
  Oligonucleotide for detection of SNP TSC0050169
ttttgcggattgg

SEQ ID NO: 204530 - DNA, 13 bp, Artificial Sequence
  Oligonucleotide for detection of SNP TSC0050169
ccaatccgcaaaa

SEQ ID NO: 204531 - DNA, 13 bp, Artificial Sequence
  Oligonucleotide for detection of SNP TSC0050169
ttagtttgtaaga

SEQ ID NO: 204532 - DNA, 13 bp, Artificial Sequence
  Oligonucleotide for detection of SNP TSC0050169
tcttacaaactaa

SEQ ID NO: 204533 - DNA, 13 bp, Artificial Sequence
  Oligonucleotide for detection of SNP TSC0050169
ttagttcgtaaga

SEQ ID NO: 204534 - DNA, 13 bp, Artificial Sequence
  Oligonucleotide for detection of SNP TSC0050169
tcttacgaactaa

SEQ ID NO: 204535 - DNA, 13 bp, Artificial Sequence
  Oligonucleotide for detection of SNP TSC0050170
ttatagagtttgy

SEQ ID NO: 204536 - DNA, 13 bp, Artificial Sequence
  Oligonucleotide for detection of SNP TSC0050170
rcaaactctataa

SEQ ID NO: 204537 - DNA, 13 bp, Artificial Sequence
  Oligonucleotide for detection of SNP TSC0050170
ttatagtgtttgy

SEQ ID NO: 204538 - DNA, 13 bp, Artificial Sequence
  Oligonucleotide for detection of SNP TSC0050170
rcaaacactataa

SEQ ID NO: 204539 - DNA, 13 bp, Artificial Sequence
  Oligonucleotide for detection of SNP TSC0050170
gtaggttttgtga

SEQ ID NO: 204540 - DNA, 13 bp, Artificial Sequence
  Oligonucleotide for detection of SNP TSC0050170
tcacaaaacctac

SEQ ID NO: 204541 - DNA, 13 bp, Artificial Sequence
  Oligonucleotide for detection of SNP TSC0050170
gtaggtattgtga

SEQ ID NO: 204542 - DNA, 13 bp, Artificial Sequence
  Oligonucleotide for detection of SNP TSC0050170
tcacaatacctac

SEQ ID NO: 204543 - DNA, 13 bp, Artificial Sequence
  Oligonucleotide for detection of SNP TSC0050172
ggttggagttgta

SEQ ID NO: 204544 - DNA, 13 bp, Artificial Sequence
  Oligonucleotide for detection of SNP TSC0050172
tacaactccaacc

SEQ ID NO: 204545 - DNA, 13 bp, Artificial Sequence
  Oligonucleotide for detection of SNP TSC0050172
ggttggggttgta

SEQ ID NO: 204546 - DNA, 13 bp, Artificial Sequence
  Oligonucleotide for detection of SNP TSC0050172
tacaaccccaacc

SEQ ID NO: 204547 - DNA, 13 bp, Artificial Sequence
  Oligonucleotide for detection of SNP TSC0050172
ggtcggagttgta

SEQ ID NO: 204548 - DNA, 13 bp, Artificial Sequence
  Oligonucleotide for detection of SNP TSC0050172
tacaactccgacc

SEQ ID NO: 204549 - DNA, 13 bp, Artificial Sequence
  Oligonucleotide for detection of SNP TSC0050172
ggtcggggttgta

SEQ ID NO: 204550 - DNA, 13 bp, Artificial Sequence
  Oligonucleotide for detection of SNP TSC0050172
tacaaccccgacc

SEQ ID NO: 204551 - DNA, 13 bp, Artificial Sequence
  Oligonucleotide for detection of SNP TSC0050175
agagtaaagatag

SEQ ID NO: 204552 - DNA, 13 bp, Artificial Sequence
  Oligonucleotide for detection of SNP TSC0050175
ctatctttactct

SEQ ID NO: 204553 - DNA, 13 bp, Artificial Sequence
  Oligonucleotide for detection of SNP TSC0050175
agagtatagatag

SEQ ID NO: 204554 - DNA, 13 bp, Artificial Sequence
  Oligonucleotide for detection of SNP TSC0050175
ctatctatactct

SEQ ID NO: 204555 - DNA, 13 bp, Artificial Sequence
  Oligonucleotide for detection of SNP TSC0050175
ttgtttttgtttt

SEQ ID NO: 204556 - DNA, 13 bp, Artificial Sequence
  Oligonucleotide for detection of SNP TSC0050175
aaaacaaaaacaa

SEQ ID NO: 204557 - DNA, 13 bp, Artificial Sequence
  Oligonucleotide for detection of SNP TSC0050176
ttttggaatggta

SEQ ID NO: 204558 - DNA, 13 bp, Artificial Sequence
  Oligonucleotide for detection of SNP TSC0050176
taccattccaaaa

SEQ ID NO: 204559 - DNA, 13 bp, Artificial Sequence
  Oligonucleotide for detection of SNP TSC0050176
ttttggtatggta

SEQ ID NO: 204560 - DNA, 13 bp, Artificial Sequence
  Oligonucleotide for detection of SNP TSC0050176
taccataccaaaa

SEQ ID NO: 204561 - DNA, 13 bp, Artificial Sequence
  Oligonucleotide for detection of SNP TSC0050176
tattattttaaag

SEQ ID NO: 204562 - DNA, 13 bp, Artificial Sequence
  Oligonucleotide for detection of SNP TSC0050176
ctttaaaataata

SEQ ID NO: 204563 - DNA, 13 bp, Artificial Sequence
  Oligonucleotide for detection of SNP TSC0050176
tattatgttaaag

SEQ ID NO: 204564 - DNA, 13 bp, Artificial Sequence
  Oligonucleotide for detection of SNP TSC0050176
ctttaacataata

SEQ ID NO: 204565 - DNA, 13 bp, Artificial Sequence
  Oligonucleotide for detection of SNP TSC0050177
ggggggtgtgtgt

SEQ ID NO: 204566 - DNA, 13 bp, Artificial Sequence
  Oligonucleotide for detection of SNP TSC0050177
acacacacccccc

SEQ ID NO: 204567 - DNA, 13 bp, Artificial Sequence
  Oligonucleotide for detection of SNP TSC0050177
ggggggggtgtgt

SEQ ID NO: 204568 - DNA, 13 bp, Artificial Sequence
  Oligonucleotide for detection of SNP TSC0050177
acacacccccccc

SEQ ID NO: 204569 - DNA, 13 bp, Artificial Sequence
  Oligonucleotide for detection of SNP TSC0050178
agaatggtaattg

SEQ ID NO: 204570 - DNA, 13 bp, Artificial Sequence
  Oligonucleotide for detection of SNP TSC0050178
caattaccattct

SEQ ID NO: 204571 - DNA, 13 bp, Artificial Sequence
  Oligonucleotide for detection of SNP TSC0050178
agaatgataattg

SEQ ID NO: 204572 - DNA, 13 bp, Artificial Sequence
  Oligonucleotide for detection of SNP TSC0050178
caattatcattct

SEQ ID NO: 204573 - DNA, 13 bp, Artificial Sequence
  Oligonucleotide for detection of SNP TSC0050179
aaatgtggggggg

SEQ ID NO: 204574 - DNA, 13 bp, Artificial Sequence
  Oligonucleotide for detection of SNP TSC0050179
cccccccacattt

SEQ ID NO: 204575 - DNA, 13 bp, Artificial Sequence
  Oligonucleotide for detection of SNP TSC0050179
aaatgtagggggg

SEQ ID NO: 204576 - DNA, 13 bp, Artificial Sequence
  Oligonucleotide for detection of SNP TSC0050179
cccccctacattt

SEQ ID NO: 204577 - DNA, 13 bp, Artificial Sequence
  Oligonucleotide for detection of SNP TSC0050180
tattatagtaatt

SEQ ID NO: 204578 - DNA, 13 bp, Artificial Sequence
  Oligonucleotide for detection of SNP TSC0050180
aattactataata

SEQ ID NO: 204579 - DNA, 13 bp, Artificial Sequence
  Oligonucleotide for detection of SNP TSC0050180
tattatggtaatt

SEQ ID NO: 204580 - DNA, 13 bp, Artificial Sequence
  Oligonucleotide for detection of SNP TSC0050180
aattaccataata

SEQ ID NO: 204581 - DNA, 13 bp, Artificial Sequence
  Oligonucleotide for detection of SNP TSC0050180
tattacggtaatt

SEQ ID NO: 204582 - DNA, 13 bp, Artificial Sequence
  Oligonucleotide for detection of SNP TSC0050180
aattaccgtaata

SEQ ID NO: 204583 - DNA, 13 bp, Artificial Sequence
  Oligonucleotide for detection of SNP TSC0050180
agttgttgtgatg

SEQ ID NO: 204584 - DNA, 13 bp, Artificial Sequence
  Oligonucleotide for detection of SNP TSC0050180
catcacaacaact

SEQ ID NO: 204585 - DNA, 13 bp, Artificial Sequence
  Oligonucleotide for detection of SNP TSC0050180
agttgtcgtgatg

SEQ ID NO: 204586 - DNA, 13 bp, Artificial Sequence
  Oligonucleotide for detection of SNP TSC0050180
catcacgacaact

SEQ ID NO: 204587 - DNA, 13 bp, Artificial Sequence
  Oligonucleotide for detection of SNP TSC0050182
ttataggagtaat

SEQ ID NO: 204588 - DNA, 13 bp, Artificial Sequence
  Oligonucleotide for detection of SNP TSC0050182
attactcctataa

SEQ ID NO: 204589 - DNA, 13 bp, Artificial Sequence
  Oligonucleotide for detection of SNP TSC0050182
ttatagaagtaat

SEQ ID NO: 204590 - DNA, 13 bp, Artificial Sequence
  Oligonucleotide for detection of SNP TSC0050182
attacttctataa

SEQ ID NO: 204591 - DNA, 13 bp, Artificial Sequence
  Oligonucleotide for detection of SNP TSC0050187
ttggatatttttg

SEQ ID NO: 204592 - DNA, 13 bp, Artificial Sequence
  Oligonucleotide for detection of SNP TSC0050187
caaaaatatccaa

SEQ ID NO: 204593 - DNA, 13 bp, Artificial Sequence
  Oligonucleotide for detection of SNP TSC0050187
ttggatgtttttg

SEQ ID NO: 204594 - DNA, 13 bp, Artificial Sequence
  Oligonucleotide for detection of SNP TSC0050187
caaaaacatccaa

SEQ ID NO: 204595 - DNA, 13 bp, Artificial Sequence
  Oligonucleotide for detection of SNP TSC0050188
aaatgataataty

SEQ ID NO: 204596 - DNA, 13 bp, Artificial Sequence
  Oligonucleotide for detection of SNP TSC0050188
ratattatcattt

SEQ ID NO: 204597 - DNA, 13 bp, Artificial Sequence
  Oligonucleotide for detection of SNP TSC0050188
aaatgagaataty

SEQ ID NO: 204598 - DNA, 13 bp, Artificial Sequence
  Oligonucleotide for detection of SNP TSC0050188
ratattctcattt

SEQ ID NO: 204599 - DNA, 13 bp, Artificial Sequence
  Oligonucleotide for detection of SNP TSC0050188
ggtattgttattt

SEQ ID NO: 204600 - DNA, 13 bp, Artificial Sequence
  Oligonucleotide for detection of SNP TSC0050188
aaataacaatacc

SEQ ID NO: 204601 - DNA, 13 bp, Artificial Sequence
  Oligonucleotide for detection of SNP TSC0050188
ggtatttttattt

SEQ ID NO: 204602 - DNA, 13 bp, Artificial Sequence
  Oligonucleotide for detection of SNP TSC0050188
aaataaaaatacc

SEQ ID NO: 204603 - DNA, 13 bp, Artificial Sequence
  Oligonucleotide for detection of SNP TSC0050193
tgagatagggtaa

SEQ ID NO: 204604 - DNA, 13 bp, Artificial Sequence
  Oligonucleotide for detection of SNP TSC0050193
ttaccctatctca

SEQ ID NO: 204605 - DNA, 13 bp, Artificial Sequence
  Oligonucleotide for detection of SNP TSC0050194
atttttgtatgaa

SEQ ID NO: 204606 - DNA, 13 bp, Artificial Sequence
  Oligonucleotide for detection of SNP TSC0050194
ttcatacaaaaat

SEQ ID NO: 204607 - DNA, 13 bp, Artificial Sequence
  Oligonucleotide for detection of SNP TSC0050194
atttttatatgaa

SEQ ID NO: 204608 - DNA, 13 bp, Artificial Sequence
  Oligonucleotide for detection of SNP TSC0050194
ttcatataaaaat

SEQ ID NO: 204609 - DNA, 13 bp, Artificial Sequence
  Oligonucleotide for detection of SNP TSC0050199
tataaagttattg

SEQ ID NO: 204610 - DNA, 13 bp, Artificial Sequence
  Oligonucleotide for detection of SNP TSC0050199
caataactttata

SEQ ID NO: 204611 - DNA, 13 bp, Artificial Sequence
  Oligonucleotide for detection of SNP TSC0050199
tataaaattattg

SEQ ID NO: 204612 - DNA, 13 bp, Artificial Sequence
  Oligonucleotide for detection of SNP TSC0050199
caataattttata

SEQ ID NO: 204613 - DNA, 13 bp, Artificial Sequence
  Oligonucleotide for detection of SNP TSC0050200
atattaagaagaa

SEQ ID NO: 204614 - DNA, 13 bp, Artificial Sequence
  Oligonucleotide for detection of SNP TSC0050200
ttcttcttaatat

SEQ ID NO: 204615 - DNA, 13 bp, Artificial Sequence
  Oligonucleotide for detection of SNP TSC0050200
atattaggaagaa

SEQ ID NO: 204616 - DNA, 13 bp, Artificial Sequence
  Oligonucleotide for detection of SNP TSC0050200
ttcttcctaatat

SEQ ID NO: 204617 - DNA, 13 bp, Artificial Sequence
  Oligonucleotide for detection of SNP TSC0050201
taaagaagagtty

SEQ ID NO: 204618 - DNA, 13 bp, Artificial Sequence
  Oligonucleotide for detection of SNP TSC0050201
raactcttcttta

SEQ ID NO: 204619 - DNA, 13 bp, Artificial Sequence
  Oligonucleotide for detection of SNP TSC0050201
taaagaggagtty

SEQ ID NO: 204620 - DNA, 13 bp, Artificial Sequence
  Oligonucleotide for detection of SNP TSC0050201
raactcctcttta

SEQ ID NO: 204621 - DNA, 13 bp, Artificial Sequence
  Oligonucleotide for detection of SNP TSC0050203
aataagtgttttt

SEQ ID NO: 204622 - DNA, 13 bp, Artificial Sequence
  Oligonucleotide for detection of SNP TSC0050203
aaaaacacttatt

SEQ ID NO: 204623 - DNA, 13 bp, Artificial Sequence
  Oligonucleotide for detection of SNP TSC0050203
aataagcgttttt

SEQ ID NO: 204624 - DNA, 13 bp, Artificial Sequence
  Oligonucleotide for detection of SNP TSC0050203
aaaaacgcttatt

SEQ ID NO: 204625 - DNA, 13 bp, Artificial Sequence
  Oligonucleotide for detection of SNP TSC0006287
ggagggtagggaa

SEQ ID NO: 204626 - DNA, 13 bp, Artificial Sequence
  Oligonucleotide for detection of SNP TSC0006287
ttccctaccctcc

SEQ ID NO: 204627 - DNA, 13 bp, Artificial Sequence
  Oligonucleotide for detection of SNP TSC0006287
ggaggggagggaa

SEQ ID NO: 204628 - DNA, 13 bp, Artificial Sequence
  Oligonucleotide for detection of SNP TSC0006287
ttccctcccctcc

SEQ ID NO: 204629 - DNA, 13 bp, Artificial Sequence
  Oligonucleotide for detection of SNP TSC0050204
tatatatagtaaa

SEQ ID NO: 204630 - DNA, 13 bp, Artificial Sequence
  Oligonucleotide for detection of SNP TSC0050204
tttactatatata

SEQ ID NO: 204631 - DNA, 13 bp, Artificial Sequence
  Oligonucleotide for detection of SNP TSC0050204
tatatagagtaaa

SEQ ID NO: 204632 - DNA, 13 bp, Artificial Sequence
  Oligonucleotide for detection of SNP TSC0050204
tttactctatata

SEQ ID NO: 204633 - DNA, 13 bp, Artificial Sequence
  Oligonucleotide for detection of SNP TSC0050205
tttttaattgaga

SEQ ID NO: 204634 - DNA, 13 bp, Artificial Sequence
  Oligonucleotide for detection of SNP TSC0050205
tctcaattaaaaa

SEQ ID NO: 204635 - DNA, 13 bp, Artificial Sequence
  Oligonucleotide for detection of SNP TSC0050205
tttttagttgaga

SEQ ID NO: 204636 - DNA, 13 bp, Artificial Sequence
  Oligonucleotide for detection of SNP TSC0050205
tctcaactaaaaa

SEQ ID NO: 204637 - DNA, 13 bp, Artificial Sequence
  Oligonucleotide for detection of SNP TSC0050206
taagttagtagtt

SEQ ID NO: 204638 - DNA, 13 bp, Artificial Sequence
  Oligonucleotide for detection of SNP TSC0050206
aactactaactta

SEQ ID NO: 204639 - DNA, 13 bp, Artificial Sequence
  Oligonucleotide for detection of SNP TSC0050206
taagttggtagtt

SEQ ID NO: 204640 - DNA, 13 bp, Artificial Sequence
  Oligonucleotide for detection of SNP TSC0050206
aactaccaactta

SEQ ID NO: 204641 - DNA, 13 bp, Artificial Sequence
  Oligonucleotide for detection of SNP TSC0050209
gttttcgatttta

SEQ ID NO: 204642 - DNA, 13 bp, Artificial Sequence
  Oligonucleotide for detection of SNP TSC0050209
taaaatcgaaaac

SEQ ID NO: 204643 - DNA, 13 bp, Artificial Sequence
  Oligonucleotide for detection of SNP TSC0050209
tgaaattgaaagy

SEQ ID NO: 204644 - DNA, 13 bp, Artificial Sequence
  Oligonucleotide for detection of SNP TSC0050209
rctttcaatttca

SEQ ID NO: 204645 - DNA, 13 bp, Artificial Sequence
  Oligonucleotide for detection of SNP TSC0050209
tgaaatcgaaagy

SEQ ID NO: 204646 - DNA, 13 bp, Artificial Sequence
  Oligonucleotide for detection of SNP TSC0050209
rctttcgatttca

SEQ ID NO: 204647 - DNA, 13 bp, Artificial Sequence
  Oligonucleotide for detection of SNP TSC0050210
tttaaggaaatga

SEQ ID NO: 204648 - DNA, 13 bp, Artificial Sequence
  Oligonucleotide for detection of SNP TSC0050210
tcatttccttaaa

SEQ ID NO: 204649 - DNA, 13 bp, Artificial Sequence
  Oligonucleotide for detection of SNP TSC0050210
tttaagaaaatga

SEQ ID NO: 204650 - DNA, 13 bp, Artificial Sequence
  Oligonucleotide for detection of SNP TSC0050210
tcattttcttaaa

SEQ ID NO: 204651 - DNA, 13 bp, Artificial Sequence
  Oligonucleotide for detection of SNP TSC0050211
atattagttaggt

SEQ ID NO: 204652 - DNA, 13 bp, Artificial Sequence
  Oligonucleotide for detection of SNP TSC0050211
acctaactaatat

SEQ ID NO: 204653 - DNA, 13 bp, Artificial Sequence
  Oligonucleotide for detection of SNP TSC0050211
atattaattaggt

SEQ ID NO: 204654 - DNA, 13 bp, Artificial Sequence
  Oligonucleotide for detection of SNP TSC0050211
acctaattaatat

SEQ ID NO: 204655 - DNA, 13 bp, Artificial Sequence
  Oligonucleotide for detection of SNP TSC0050212
aatttatgtaaty

SEQ ID NO: 204656 - DNA, 13 bp, Artificial Sequence
  Oligonucleotide for detection of SNP TSC0050212
rattacataaatt

SEQ ID NO: 204657 - DNA, 13 bp, Artificial Sequence
  Oligonucleotide for detection of SNP TSC0050212
aatttaggtaaty

SEQ ID NO: 204658 - DNA, 13 bp, Artificial Sequence
  Oligonucleotide for detection of SNP TSC0050212
rattacctaaatt

SEQ ID NO: 204659 - DNA, 13 bp, Artificial Sequence
  Oligonucleotide for detection of SNP TSC0050212
gattgtataaatt

SEQ ID NO: 204660 - DNA, 13 bp, Artificial Sequence
  Oligonucleotide for detection of SNP TSC0050212
aatttatacaatc

SEQ ID NO: 204661 - DNA, 13 bp, Artificial Sequence
  Oligonucleotide for detection of SNP TSC0050212
gattgtttaaatt

SEQ ID NO: 204662 - DNA, 13 bp, Artificial Sequence
  Oligonucleotide for detection of SNP TSC0050212
aatttaaacaatc

SEQ ID NO: 204663 - DNA, 13 bp, Artificial Sequence
  Oligonucleotide for detection of SNP TSC0050216
gttagagttaaat

SEQ ID NO: 204664 - DNA, 13 bp, Artificial Sequence
  Oligonucleotide for detection of SNP TSC0050216
atttaactctaac

SEQ ID NO: 204665 - DNA, 13 bp, Artificial Sequence
  Oligonucleotide for detection of SNP TSC0050216
gttagaattaaat

SEQ ID NO: 204666 - DNA, 13 bp, Artificial Sequence
  Oligonucleotide for detection of SNP TSC0050216
atttaattctaac

SEQ ID NO: 204667 - DNA, 13 bp, Artificial Sequence
  Oligonucleotide for detection of SNP TSC0050217
agggtaaaaaatt

SEQ ID NO: 204668 - DNA, 13 bp, Artificial Sequence
  Oligonucleotide for detection of SNP TSC0050217
aattttttaccct

SEQ ID NO: 204669 - DNA, 13 bp, Artificial Sequence
  Oligonucleotide for detection of SNP TSC0050217
agggtataaaatt

SEQ ID NO: 204670 - DNA, 13 bp, Artificial Sequence
  Oligonucleotide for detection of SNP TSC0050217
aattttataccct

SEQ ID NO: 204671 - DNA, 13 bp, Artificial Sequence
  Oligonucleotide for detection of SNP TSC0050217
aattttttatttt

SEQ ID NO: 204672 - DNA, 13 bp, Artificial Sequence
  Oligonucleotide for detection of SNP TSC0050217
aaaataaaaaatt

SEQ ID NO: 204673 - DNA, 13 bp, Artificial Sequence
  Oligonucleotide for detection of SNP TSC0005472
atggtaattgtty

SEQ ID NO: 204674 - DNA, 13 bp, Artificial Sequence
  Oligonucleotide for detection of SNP TSC0005472
raacaattaccat

SEQ ID NO: 204675 - DNA, 13 bp, Artificial Sequence
  Oligonucleotide for detection of SNP TSC0005472
atggtagttgtty

SEQ ID NO: 204676 - DNA, 13 bp, Artificial Sequence
  Oligonucleotide for detection of SNP TSC0005472
raacaactaccat

SEQ ID NO: 204677 - DNA, 13 bp, Artificial Sequence
  Oligonucleotide for detection of SNP TSC0005472
atggtaatcgtty

SEQ ID NO: 204678 - DNA, 13 bp, Artificial Sequence
  Oligonucleotide for detection of SNP TSC0005472
raacgattaccat

SEQ ID NO: 204679 - DNA, 13 bp, Artificial Sequence
  Oligonucleotide for detection of SNP TSC0005472
atggtagtcgtty

SEQ ID NO: 204680 - DNA, 13 bp, Artificial Sequence
  Oligonucleotide for detection of SNP TSC0005472
raacgactaccat

SEQ ID NO: 204681 - DNA, 13 bp, Artificial Sequence
  Oligonucleotide for detection of SNP TSC0005473
tgggaaaatgtta

SEQ ID NO: 204682 - DNA, 13 bp, Artificial Sequence
  Oligonucleotide for detection of SNP TSC0005473
taacattttccca

SEQ ID NO: 204683 - DNA, 13 bp, Artificial Sequence
  Oligonucleotide for detection of SNP TSC0005473
tgggaagatgtta

SEQ ID NO: 204684 - DNA, 13 bp, Artificial Sequence
  Oligonucleotide for detection of SNP TSC0005473
taacatcttccca

SEQ ID NO: 204685 - DNA, 13 bp, Artificial Sequence
  Oligonucleotide for detection of SNP TSC0005473
cgggaaaatgtta

SEQ ID NO: 204686 - DNA, 13 bp, Artificial Sequence
  Oligonucleotide for detection of SNP TSC0005473
taacattttcccg

SEQ ID NO: 204687 - DNA, 13 bp, Artificial Sequence
  Oligonucleotide for detection of SNP TSC0005473
cgggaagatgtta

SEQ ID NO: 204688 - DNA, 13 bp, Artificial Sequence
  Oligonucleotide for detection of SNP TSC0005473
taacatcttcccg

SEQ ID NO: 204689 - DNA, 13 bp, Artificial Sequence
  Oligonucleotide for detection of SNP TSC0050218
attgatgttttaa

SEQ ID NO: 204690 - DNA, 13 bp, Artificial Sequence
  Oligonucleotide for detection of SNP TSC0050218
ttaaaacatcaat

SEQ ID NO: 204691 - DNA, 13 bp, Artificial Sequence
  Oligonucleotide for detection of SNP TSC0050218
attgacgttttaa

SEQ ID NO: 204692 - DNA, 13 bp, Artificial Sequence
  Oligonucleotide for detection of SNP TSC0050218
ttaaaacgtcaat

SEQ ID NO: 204693 - DNA, 13 bp, Artificial Sequence
  Oligonucleotide for detection of SNP TSC0050218
ttaagatgttaat

SEQ ID NO: 204694 - DNA, 13 bp, Artificial Sequence
  Oligonucleotide for detection of SNP TSC0050218
attaacatcttaa

SEQ ID NO: 204695 - DNA, 13 bp, Artificial Sequence
  Oligonucleotide for detection of SNP TSC0050218
ttaagacgttaat

SEQ ID NO: 204696 - DNA, 13 bp, Artificial Sequence
  Oligonucleotide for detection of SNP TSC0050218
attaacgtcttaa

SEQ ID NO: 204697 - DNA, 13 bp, Artificial Sequence
  Oligonucleotide for detection of SNP TSC0050219
gttttgatggtay

SEQ ID NO: 204698 - DNA, 13 bp, Artificial Sequence
  Oligonucleotide for detection of SNP TSC0050219
rtaccatcaaaac

SEQ ID NO: 204699 - DNA, 13 bp, Artificial Sequence
  Oligonucleotide for detection of SNP TSC0050219
gttttggtggtay

SEQ ID NO: 204700 - DNA, 13 bp, Artificial Sequence
  Oligonucleotide for detection of SNP TSC0050219
rtaccaccaaaac

SEQ ID NO: 204701 - DNA, 13 bp, Artificial Sequence
  Oligonucleotide for detection of SNP TSC0050220
ataagttgggtaa

SEQ ID NO: 204702 - DNA, 13 bp, Artificial Sequence
  Oligonucleotide for detection of SNP TSC0050220
ttacccaacttat

SEQ ID NO: 204703 - DNA, 13 bp, Artificial Sequence
  Oligonucleotide for detection of SNP TSC0050220
ataagtcgggtaa

SEQ ID NO: 204704 - DNA, 13 bp, Artificial Sequence
  Oligonucleotide for detection of SNP TSC0050220
ttacccgacttat

SEQ ID NO: 204705 - DNA, 13 bp, Artificial Sequence
  Oligonucleotide for detection of SNP TSC0001562
tagataagtaaga

SEQ ID NO: 204706 - DNA, 13 bp, Artificial Sequence
  Oligonucleotide for detection of SNP TSC0001562
tcttacttatcta

SEQ ID NO: 204707 - DNA, 13 bp, Artificial Sequence
  Oligonucleotide for detection of SNP TSC0001562
tagataggtaaga

SEQ ID NO: 204708 - DNA, 13 bp, Artificial Sequence
  Oligonucleotide for detection of SNP TSC0001562
tcttacctatcta

SEQ ID NO: 204709 - DNA, 13 bp, Artificial Sequence
  Oligonucleotide for detection of SNP TSC0050221
tttattagtaata

SEQ ID NO: 204710 - DNA, 13 bp, Artificial Sequence
  Oligonucleotide for detection of SNP TSC0050221
tattactaataaa

SEQ ID NO: 204711 - DNA, 13 bp, Artificial Sequence
  Oligonucleotide for detection of SNP TSC0050221
tttatttgtaata

SEQ ID NO: 204712 - DNA, 13 bp, Artificial Sequence
  Oligonucleotide for detection of SNP TSC0050221
tattacaaataaa

SEQ ID NO: 204713 - DNA, 13 bp, Artificial Sequence
  Oligonucleotide for detection of SNP TSC0050221
tattattaatgag

SEQ ID NO: 204714 - DNA, 13 bp, Artificial Sequence
  Oligonucleotide for detection of SNP TSC0050221
ctcattaataata

SEQ ID NO: 204715 - DNA, 13 bp, Artificial Sequence
  Oligonucleotide for detection of SNP TSC0050221
tattataaatgag

SEQ ID NO: 204716 - DNA, 13 bp, Artificial Sequence
  Oligonucleotide for detection of SNP TSC0050221
ctcatttataata

SEQ ID NO: 204717 - DNA, 13 bp, Artificial Sequence
  Oligonucleotide for detection of SNP TSC0050222
tgagagttagagy

SEQ ID NO: 204718 - DNA, 13 bp, Artificial Sequence
  Oligonucleotide for detection of SNP TSC0050222
rctctaactctca

SEQ ID NO: 204719 - DNA, 13 bp, Artificial Sequence
  Oligonucleotide for detection of SNP TSC0050222
tgagaggtagagy

SEQ ID NO: 204720 - DNA, 13 bp, Artificial Sequence
  Oligonucleotide for detection of SNP TSC0050222
rctctacctctca

SEQ ID NO: 204721 - DNA, 13 bp, Artificial Sequence
  Oligonucleotide for detection of SNP TSC0050222
gttttgtttttta

SEQ ID NO: 204722 - DNA, 13 bp, Artificial Sequence
  Oligonucleotide for detection of SNP TSC0050222
taaaaaacaaaac

SEQ ID NO: 204723 - DNA, 13 bp, Artificial Sequence
  Oligonucleotide for detection of SNP TSC0050223
attagggtagaty

SEQ ID NO: 204724 - DNA, 13 bp, Artificial Sequence
  Oligonucleotide for detection of SNP TSC0050223
ratctaccctaat

SEQ ID NO: 204725 - DNA, 13 bp, Artificial Sequence
  Oligonucleotide for detection of SNP TSC0050223
attaggttagaty

SEQ ID NO: 204726 - DNA, 13 bp, Artificial Sequence
  Oligonucleotide for detection of SNP TSC0050223
ratctaacctaat

SEQ ID NO: 204727 - DNA, 13 bp, Artificial Sequence
  Oligonucleotide for detection of SNP TSC0050224
atattttagtatg

SEQ ID NO: 204728 - DNA, 13 bp, Artificial Sequence
  Oligonucleotide for detection of SNP TSC0050224
catactaaaatat

SEQ ID NO: 204729 - DNA, 13 bp, Artificial Sequence
  Oligonucleotide for detection of SNP TSC0050224
atatttgagtatg

SEQ ID NO: 204730 - DNA, 13 bp, Artificial Sequence
  Oligonucleotide for detection of SNP TSC0050224
catactcaaatat

SEQ ID NO: 204731 - DNA, 13 bp, Artificial Sequence
  Oligonucleotide for detection of SNP TSC0050224
atattttagtacg

SEQ ID NO: 204732 - DNA, 13 bp, Artificial Sequence
  Oligonucleotide for detection of SNP TSC0050224
cgtactaaaatat

SEQ ID NO: 204733 - DNA, 13 bp, Artificial Sequence
  Oligonucleotide for detection of SNP TSC0050224
atatttgagtacg

SEQ ID NO: 204734 - DNA, 13 bp, Artificial Sequence
  Oligonucleotide for detection of SNP TSC0050224
cgtactcaaatat

SEQ ID NO: 204735 - DNA, 13 bp, Artificial Sequence
  Oligonucleotide for detection of SNP TSC0050224
tgtgttaaaatgt

SEQ ID NO: 204736 - DNA, 13 bp, Artificial Sequence
  Oligonucleotide for detection of SNP TSC0050224
acattttaacaca

SEQ ID NO: 204737 - DNA, 13 bp, Artificial Sequence
  Oligonucleotide for detection of SNP TSC0050224
tgtgtttaaatgt

SEQ ID NO: 204738 - DNA, 13 bp, Artificial Sequence
  Oligonucleotide for detection of SNP TSC0050224
acatttaaacaca

SEQ ID NO: 204739 - DNA, 13 bp, Artificial Sequence
  Oligonucleotide for detection of SNP TSC0050224
cgtgttaaaatgt

SEQ ID NO: 204740 - DNA, 13 bp, Artificial Sequence
  Oligonucleotide for detection of SNP TSC0050224
acattttaacacg

SEQ ID NO: 204741 - DNA, 13 bp, Artificial Sequence
  Oligonucleotide for detection of SNP TSC0050224
cgtgtttaaatgt

SEQ ID NO: 204742 - DNA, 13 bp, Artificial Sequence
  Oligonucleotide for detection of SNP TSC0050224
acatttaaacacg

SEQ ID NO: 204743 - DNA, 13 bp, Artificial Sequence
  Oligonucleotide for detection of SNP TSC0050225
aaaatagttttga

SEQ ID NO: 204744 - DNA, 13 bp, Artificial Sequence
  Oligonucleotide for detection of SNP TSC0050225
tcaaaactatttt

SEQ ID NO: 204745 - DNA, 13 bp, Artificial Sequence
  Oligonucleotide for detection of SNP TSC0050225
aaaataattttga

SEQ ID NO: 204746 - DNA, 13 bp, Artificial Sequence
  Oligonucleotide for detection of SNP TSC0050225
tcaaaattatttt

SEQ ID NO: 204747 - DNA, 13 bp, Artificial Sequence
  Oligonucleotide for detection of SNP TSC0050227
aattaagttttgt

SEQ ID NO: 204748 - DNA, 13 bp, Artificial Sequence
  Oligonucleotide for detection of SNP TSC0050227
acaaaacttaatt

SEQ ID NO: 204749 - DNA, 13 bp, Artificial Sequence
  Oligonucleotide for detection of SNP TSC0050227
aattaaattttgt

SEQ ID NO: 204750 - DNA, 13 bp, Artificial Sequence
  Oligonucleotide for detection of SNP TSC0050227
acaaaatttaatt

SEQ ID NO: 204751 - DNA, 13 bp, Artificial Sequence
  Oligonucleotide for detection of SNP TSC0050228
tattgtaatttag

SEQ ID NO: 204752 - DNA, 13 bp, Artificial Sequence
  Oligonucleotide for detection of SNP TSC0050228
ctaaattacaata

SEQ ID NO: 204753 - DNA, 13 bp, Artificial Sequence
  Oligonucleotide for detection of SNP TSC0050228
tattgtgatttag

SEQ ID NO: 204754 - DNA, 13 bp, Artificial Sequence
  Oligonucleotide for detection of SNP TSC0050228
ctaaatcacaata

SEQ ID NO: 204755 - DNA, 13 bp, Artificial Sequence
  Oligonucleotide for detection of SNP TSC0050229
attggtaaattag

SEQ ID NO: 204756 - DNA, 13 bp, Artificial Sequence
  Oligonucleotide for detection of SNP TSC0050229
ctaatttaccaat

SEQ ID NO: 204757 - DNA, 13 bp, Artificial Sequence
  Oligonucleotide for detection of SNP TSC0050229
attggtgaattag

SEQ ID NO: 204758 - DNA, 13 bp, Artificial Sequence
  Oligonucleotide for detection of SNP TSC0050229
ctaattcaccaat

SEQ ID NO: 204759 - DNA, 13 bp, Artificial Sequence
  Oligonucleotide for detection of SNP TSC0050229
atcggtaaattag

SEQ ID NO: 204760 - DNA, 13 bp, Artificial Sequence
  Oligonucleotide for detection of SNP TSC0050229
ctaatttaccgat

SEQ ID NO: 204761 - DNA, 13 bp, Artificial Sequence
  Oligonucleotide for detection of SNP TSC0050229
atcggtgaattag

SEQ ID NO: 204762 - DNA, 13 bp, Artificial Sequence
  Oligonucleotide for detection of SNP TSC0050229
ctaattcaccgat

SEQ ID NO: 204763 - DNA, 13 bp, Artificial Sequence
  Oligonucleotide for detection of SNP TSC0050230
tttttagggttaa

SEQ ID NO: 204764 - DNA, 13 bp, Artificial Sequence
  Oligonucleotide for detection of SNP TSC0050230
ttaaccctaaaaa

SEQ ID NO: 204765 - DNA, 13 bp, Artificial Sequence
  Oligonucleotide for detection of SNP TSC0050230
ttgattgtagaag

SEQ ID NO: 204766 - DNA, 13 bp, Artificial Sequence
  Oligonucleotide for detection of SNP TSC0050230
cttctacaatcaa

SEQ ID NO: 204767 - DNA, 13 bp, Artificial Sequence
  Oligonucleotide for detection of SNP TSC0050230
ttgattttagaag

SEQ ID NO: 204768 - DNA, 13 bp, Artificial Sequence
  Oligonucleotide for detection of SNP TSC0050230
cttctaaaatcaa

SEQ ID NO: 204769 - DNA, 13 bp, Artificial Sequence
  Oligonucleotide for detection of SNP TSC0050230
ttgatcgtagaag

SEQ ID NO: 204770 - DNA, 13 bp, Artificial Sequence
  Oligonucleotide for detection of SNP TSC0050230
cttctacgatcaa

SEQ ID NO: 204771 - DNA, 13 bp, Artificial Sequence
  Oligonucleotide for detection of SNP TSC0050232
ttgttatgtagat

SEQ ID NO: 204772 - DNA, 13 bp, Artificial Sequence
  Oligonucleotide for detection of SNP TSC0050232
atctacataacaa

SEQ ID NO: 204773 - DNA, 13 bp, Artificial Sequence
  Oligonucleotide for detection of SNP TSC0050232
ttgttacgtagat

SEQ ID NO: 204774 - DNA, 13 bp, Artificial Sequence
  Oligonucleotide for detection of SNP TSC0050232
atctacgtaacaa

SEQ ID NO: 204775 - DNA, 13 bp, Artificial Sequence
  Oligonucleotide for detection of SNP TSC0050232
atttatgtgatag

SEQ ID NO: 204776 - DNA, 13 bp, Artificial Sequence
  Oligonucleotide for detection of SNP TSC0050232
ctatcacataaat

SEQ ID NO: 204777 - DNA, 13 bp, Artificial Sequence
  Oligonucleotide for detection of SNP TSC0050232
atttatatgatag

SEQ ID NO: 204778 - DNA, 13 bp, Artificial Sequence
  Oligonucleotide for detection of SNP TSC0050232
ctatcatataaat

SEQ ID NO: 204779 - DNA, 13 bp, Artificial Sequence
  Oligonucleotide for detection of SNP TSC0050232
atttacgtgatag

SEQ ID NO: 204780 - DNA, 13 bp, Artificial Sequence
  Oligonucleotide for detection of SNP TSC0050232
ctatcacgtaaat

SEQ ID NO: 204781 - DNA, 13 bp, Artificial Sequence
  Oligonucleotide for detection of SNP TSC0050233
tggttttgaagag

SEQ ID NO: 204782 - DNA, 13 bp, Artificial Sequence
  Oligonucleotide for detection of SNP TSC0050233
ctcttcaaaacca

SEQ ID NO: 204783 - DNA, 13 bp, Artificial Sequence
  Oligonucleotide for detection of SNP TSC0050233
tggtttcgaagag

SEQ ID NO: 204784 - DNA, 13 bp, Artificial Sequence
  Oligonucleotide for detection of SNP TSC0050233
ctcttcgaaacca

SEQ ID NO: 204785 - DNA, 13 bp, Artificial Sequence
  Oligonucleotide for detection of SNP TSC0050233
ttttttaggatta

SEQ ID NO: 204786 - DNA, 13 bp, Artificial Sequence
  Oligonucleotide for detection of SNP TSC0050233
taatcctaaaaaa

SEQ ID NO: 204787 - DNA, 13 bp, Artificial Sequence
  Oligonucleotide for detection of SNP TSC0050234
gttttaaaggagg

SEQ ID NO: 204788 - DNA, 13 bp, Artificial Sequence
  Oligonucleotide for detection of SNP TSC0050234
cctcctttaaaac

SEQ ID NO: 204789 - DNA, 13 bp, Artificial Sequence
  Oligonucleotide for detection of SNP TSC0050234
gttttagaggagg

SEQ ID NO: 204790 - DNA, 13 bp, Artificial Sequence
  Oligonucleotide for detection of SNP TSC0050234
cctcctctaaaac

SEQ ID NO: 204791 - DNA, 13 bp, Artificial Sequence
  Oligonucleotide for detection of SNP TSC0006722
aggggaataatay

SEQ ID NO: 204792 - DNA, 13 bp, Artificial Sequence
  Oligonucleotide for detection of SNP TSC0006722
rtattattcccct

SEQ ID NO: 204793 - DNA, 13 bp, Artificial Sequence
  Oligonucleotide for detection of SNP TSC0006722
aggggagtaatay

SEQ ID NO: 204794 - DNA, 13 bp, Artificial Sequence
  Oligonucleotide for detection of SNP TSC0006722
rtattactcccct

SEQ ID NO: 204795 - DNA, 13 bp, Artificial Sequence
  Oligonucleotide for detection of SNP TSC0050236
atgtaaagtattg

SEQ ID NO: 204796 - DNA, 13 bp, Artificial Sequence
  Oligonucleotide for detection of SNP TSC0050236
caatactttacat

SEQ ID NO: 204797 - DNA, 13 bp, Artificial Sequence
  Oligonucleotide for detection of SNP TSC0050236
atgtaatgtattg

SEQ ID NO: 204798 - DNA, 13 bp, Artificial Sequence
  Oligonucleotide for detection of SNP TSC0050236
caatacattacat

SEQ ID NO: 204799 - DNA, 13 bp, Artificial Sequence
  Oligonucleotide for detection of SNP TSC0050236
atgtaaagtatcg

SEQ ID NO: 204800 - DNA, 13 bp, Artificial Sequence
  Oligonucleotide for detection of SNP TSC0050236
cgatactttacat

SEQ ID NO: 204801 - DNA, 13 bp, Artificial Sequence
  Oligonucleotide for detection of SNP TSC0050236
atgtaatgtatcg

SEQ ID NO: 204802 - DNA, 13 bp, Artificial Sequence
  Oligonucleotide for detection of SNP TSC0050236
cgatacattacat

SEQ ID NO: 204803 - DNA, 13 bp, Artificial Sequence
  Oligonucleotide for detection of SNP TSC0050236
tgatattttatat

SEQ ID NO: 204804 - DNA, 13 bp, Artificial Sequence
  Oligonucleotide for detection of SNP TSC0050236
atataaaatatca

SEQ ID NO: 204805 - DNA, 13 bp, Artificial Sequence
  Oligonucleotide for detection of SNP TSC0050236
tgatatattatat

SEQ ID NO: 204806 - DNA, 13 bp, Artificial Sequence
  Oligonucleotide for detection of SNP TSC0050236
atataatatatca

SEQ ID NO: 204807 - DNA, 13 bp, Artificial Sequence
  Oligonucleotide for detection of SNP TSC0050236
cgatattttatat

SEQ ID NO: 204808 - DNA, 13 bp, Artificial Sequence
  Oligonucleotide for detection of SNP TSC0050236
atataaaatatcg

SEQ ID NO: 204809 - DNA, 13 bp, Artificial Sequence
  Oligonucleotide for detection of SNP TSC0050236
cgatatattatat

SEQ ID NO: 204810 - DNA, 13 bp, Artificial Sequence
  Oligonucleotide for detection of SNP TSC0050236
atataatatatcg

SEQ ID NO: 204811 - DNA, 13 bp, Artificial Sequence
  Oligonucleotide for detection of SNP TSC0050237
agtgaggtttgta

SEQ ID NO: 204812 - DNA, 13 bp, Artificial Sequence
  Oligonucleotide for detection of SNP TSC0050237
tacaaacctcact

SEQ ID NO: 204813 - DNA, 13 bp, Artificial Sequence
  Oligonucleotide for detection of SNP TSC0050237
agtgagatttgta

SEQ ID NO: 204814 - DNA, 13 bp, Artificial Sequence
  Oligonucleotide for detection of SNP TSC0050237
tacaaatctcact

SEQ ID NO: 204815 - DNA, 13 bp, Artificial Sequence
  Oligonucleotide for detection of SNP TSC0050238
tgtaaaagattat

SEQ ID NO: 204816 - DNA, 13 bp, Artificial Sequence
  Oligonucleotide for detection of SNP TSC0050238
ataatcttttaca

SEQ ID NO: 204817 - DNA, 13 bp, Artificial Sequence
  Oligonucleotide for detection of SNP TSC0050238
tgtaaaggattat

SEQ ID NO: 204818 - DNA, 13 bp, Artificial Sequence
  Oligonucleotide for detection of SNP TSC0050238
ataatcctttaca

SEQ ID NO: 204819 - DNA, 13 bp, Artificial Sequence
  Oligonucleotide for detection of SNP TSC0050239
tggatgattttga

SEQ ID NO: 204820 - DNA, 13 bp, Artificial Sequence
  Oligonucleotide for detection of SNP TSC0050239
tcaaaatcatcca

SEQ ID NO: 204821 - DNA, 13 bp, Artificial Sequence
  Oligonucleotide for detection of SNP TSC0050239
tggatggttttga

SEQ ID NO: 204822 - DNA, 13 bp, Artificial Sequence
  Oligonucleotide for detection of SNP TSC0050239
tcaaaaccatcca

SEQ ID NO: 204823 - DNA, 13 bp, Artificial Sequence
  Oligonucleotide for detection of SNP TSC0009546
atagttaaattay

SEQ ID NO: 204824 - DNA, 13 bp, Artificial Sequence
  Oligonucleotide for detection of SNP TSC0009546
rtaatttaactat

SEQ ID NO: 204825 - DNA, 13 bp, Artificial Sequence
  Oligonucleotide for detection of SNP TSC0009546
atagttgaattay

SEQ ID NO: 204826 - DNA, 13 bp, Artificial Sequence
  Oligonucleotide for detection of SNP TSC0009546
rtaattcaactat

SEQ ID NO: 204827 - DNA, 13 bp, Artificial Sequence
  Oligonucleotide for detection of SNP TSC0009546
atagtcgaattay

SEQ ID NO: 204828 - DNA, 13 bp, Artificial Sequence
  Oligonucleotide for detection of SNP TSC0009546
rtaattcgactat

SEQ ID NO: 204829 - DNA, 13 bp, Artificial Sequence
  Oligonucleotide for detection of SNP TSC0009546
gtgatttgattgt

SEQ ID NO: 204830 - DNA, 13 bp, Artificial Sequence
  Oligonucleotide for detection of SNP TSC0009546
acaatcaaatcac

SEQ ID NO: 204831 - DNA, 13 bp, Artificial Sequence
  Oligonucleotide for detection of SNP TSC0009546
gtgattcgattgt

SEQ ID NO: 204832 - DNA, 13 bp, Artificial Sequence
  Oligonucleotide for detection of SNP TSC0009546
acaatcgaatcac

SEQ ID NO: 204833 - DNA, 13 bp, Artificial Sequence
  Oligonucleotide for detection of SNP TSC0050240
atttcgatttatt

SEQ ID NO: 204834 - DNA, 13 bp, Artificial Sequence
  Oligonucleotide for detection of SNP TSC0050240
aataaatcgaaat

SEQ ID NO: 204835 - DNA, 13 bp, Artificial Sequence
  Oligonucleotide for detection of SNP TSC0010064
gatattatatttt

SEQ ID NO: 204836 - DNA, 13 bp, Artificial Sequence
  Oligonucleotide for detection of SNP TSC0010064
aaaatataatatc

SEQ ID NO: 204837 - DNA, 13 bp, Artificial Sequence
  Oligonucleotide for detection of SNP TSC0010064
gatattgtatttt

SEQ ID NO: 204838 - DNA, 13 bp, Artificial Sequence
  Oligonucleotide for detection of SNP TSC0010064
aaaatacaatatc

SEQ ID NO: 204839 - DNA, 13 bp, Artificial Sequence
  Oligonucleotide for detection of SNP TSC0010064
gatatcgtatttt

SEQ ID NO: 204840 - DNA, 13 bp, Artificial Sequence
  Oligonucleotide for detection of SNP TSC0010064
aaaatacgatatc

SEQ ID NO: 204841 - DNA, 13 bp, Artificial Sequence
  Oligonucleotide for detection of SNP TSC0010064
agaatgtggtgty

SEQ ID NO: 204842 - DNA, 13 bp, Artificial Sequence
  Oligonucleotide for detection of SNP TSC0010064
racaccacattct

SEQ ID NO: 204843 - DNA, 13 bp, Artificial Sequence
  Oligonucleotide for detection of SNP TSC0010064
agaatgcggtgty

SEQ ID NO: 204844 - DNA, 13 bp, Artificial Sequence
  Oligonucleotide for detection of SNP TSC0010064
racaccgcattct

SEQ ID NO: 204845 - DNA, 13 bp, Artificial Sequence
  Oligonucleotide for detection of SNP TSC0010066
gaagaatgtggtg

SEQ ID NO: 204846 - DNA, 13 bp, Artificial Sequence
  Oligonucleotide for detection of SNP TSC0010066
caccacattcttc

SEQ ID NO: 204847 - DNA, 13 bp, Artificial Sequence
  Oligonucleotide for detection of SNP TSC0010066
gaagaacgtggtg

SEQ ID NO: 204848 - DNA, 13 bp, Artificial Sequence
  Oligonucleotide for detection of SNP TSC0010066
caccacgttcttc

SEQ ID NO: 204849 - DNA, 13 bp, Artificial Sequence
  Oligonucleotide for detection of SNP TSC0050241
ttttttttgttgt

SEQ ID NO: 204850 - DNA, 13 bp, Artificial Sequence
  Oligonucleotide for detection of SNP TSC0050241
acaacaaaaaaaa

SEQ ID NO: 204851 - DNA, 13 bp, Artificial Sequence
  Oligonucleotide for detection of SNP TSC0050241
ataatataaggaa

SEQ ID NO: 204852 - DNA, 13 bp, Artificial Sequence
  Oligonucleotide for detection of SNP TSC0050241
ttccttatattat

SEQ ID NO: 204853 - DNA, 13 bp, Artificial Sequence
  Oligonucleotide for detection of SNP TSC0050241
ataataaaaggaa

SEQ ID NO: 204854 - DNA, 13 bp, Artificial Sequence
  Oligonucleotide for detection of SNP TSC0050241
ttccttttattat

SEQ ID NO: 204855 - DNA, 13 bp, Artificial Sequence
  Oligonucleotide for detection of SNP TSC0010223
tttattggtttgg

SEQ ID NO: 204856 - DNA, 13 bp, Artificial Sequence
  Oligonucleotide for detection of SNP TSC0010223
ccaaaccaataaa

SEQ ID NO: 204857 - DNA, 13 bp, Artificial Sequence
  Oligonucleotide for detection of SNP TSC0010223
tttattagtttgg

SEQ ID NO: 204858 - DNA, 13 bp, Artificial Sequence
  Oligonucleotide for detection of SNP TSC0010223
ccaaactaataaa

SEQ ID NO: 204859 - DNA, 13 bp, Artificial Sequence
  Oligonucleotide for detection of SNP TSC0050245
aatttatgagttt

SEQ ID NO: 204860 - DNA, 13 bp, Artificial Sequence
  Oligonucleotide for detection of SNP TSC0050245
aaactcataaatt

SEQ ID NO: 204861 - DNA, 13 bp, Artificial Sequence
  Oligonucleotide for detection of SNP TSC0050245
aatttacgagttt

SEQ ID NO: 204862 - DNA, 13 bp, Artificial Sequence
  Oligonucleotide for detection of SNP TSC0050245
aaactcgtaaatt

SEQ ID NO: 204863 - DNA, 13 bp, Artificial Sequence
  Oligonucleotide for detection of SNP TSC0050245
aaatttgtaaatt

SEQ ID NO: 204864 - DNA, 13 bp, Artificial Sequence
  Oligonucleotide for detection of SNP TSC0050245
aatttacaaattt

SEQ ID NO: 204865 - DNA, 13 bp, Artificial Sequence
  Oligonucleotide for detection of SNP TSC0050245
aaatttataaatt

SEQ ID NO: 204866 - DNA, 13 bp, Artificial Sequence
  Oligonucleotide for detection of SNP TSC0050245
aatttataaattt

SEQ ID NO: 204867 - DNA, 13 bp, Artificial Sequence
  Oligonucleotide for detection of SNP TSC0050245
aaattcgtaaatt

SEQ ID NO: 204868 - DNA, 13 bp, Artificial Sequence
  Oligonucleotide for detection of SNP TSC0050245
aatttacgaattt

SEQ ID NO: 204869 - DNA, 13 bp, Artificial Sequence
  Oligonucleotide for detection of SNP TSC0050246
ttagaaattttaa

SEQ ID NO: 204870 - DNA, 13 bp, Artificial Sequence
  Oligonucleotide for detection of SNP TSC0050246
ttaaaatttctaa

SEQ ID NO: 204871 - DNA, 13 bp, Artificial Sequence
  Oligonucleotide for detection of SNP TSC0050246
ttagaagttttaa

SEQ ID NO: 204872 - DNA, 13 bp, Artificial Sequence
  Oligonucleotide for detection of SNP TSC0050246
ttaaaacttctaa

SEQ ID NO: 204873 - DNA, 13 bp, Artificial Sequence
  Oligonucleotide for detection of SNP TSC0050247
atttgtttaatay

SEQ ID NO: 204874 - DNA, 13 bp, Artificial Sequence
  Oligonucleotide for detection of SNP TSC0050247
rtattaaacaaat

SEQ ID NO: 204875 - DNA, 13 bp, Artificial Sequence
  Oligonucleotide for detection of SNP TSC0050247
atttgtgtaatay

SEQ ID NO: 204876 - DNA, 13 bp, Artificial Sequence
  Oligonucleotide for detection of SNP TSC0050247
rtattacacaaat

SEQ ID NO: 204877 - DNA, 13 bp, Artificial Sequence
  Oligonucleotide for detection of SNP TSC0050247
gtgttaaataagt

SEQ ID NO: 204878 - DNA, 13 bp, Artificial Sequence
  Oligonucleotide for detection of SNP TSC0050247
acttatttaacac

SEQ ID NO: 204879 - DNA, 13 bp, Artificial Sequence
  Oligonucleotide for detection of SNP TSC0050247
gtgttatataagt

SEQ ID NO: 204880 - DNA, 13 bp, Artificial Sequence
  Oligonucleotide for detection of SNP TSC0050247
acttatataacac

SEQ ID NO: 204881 - DNA, 13 bp, Artificial Sequence
  Oligonucleotide for detection of SNP TSC0050248
agttgggaagtat

SEQ ID NO: 204882 - DNA, 13 bp, Artificial Sequence
  Oligonucleotide for detection of SNP TSC0050248
atacttcccaact

SEQ ID NO: 204883 - DNA, 13 bp, Artificial Sequence
  Oligonucleotide for detection of SNP TSC0050248
agttggaaagtat

SEQ ID NO: 204884 - DNA, 13 bp, Artificial Sequence
  Oligonucleotide for detection of SNP TSC0050248
atactttccaact

SEQ ID NO: 204885 - DNA, 13 bp, Artificial Sequence
  Oligonucleotide for detection of SNP TSC0050254
tagtatgttgaaa

SEQ ID NO: 204886 - DNA, 13 bp, Artificial Sequence
  Oligonucleotide for detection of SNP TSC0050254
tttcaacatacta

SEQ ID NO: 204887 - DNA, 13 bp, Artificial Sequence
  Oligonucleotide for detection of SNP TSC0050254
tagtatattgaaa

SEQ ID NO: 204888 - DNA, 13 bp, Artificial Sequence
  Oligonucleotide for detection of SNP TSC0050254
tttcaatatacta

SEQ ID NO: 204889 - DNA, 13 bp, Artificial Sequence
  Oligonucleotide for detection of SNP TSC0050254
tagtacgttgaaa

SEQ ID NO: 204890 - DNA, 13 bp, Artificial Sequence
  Oligonucleotide for detection of SNP TSC0050254
tttcaacgtacta

SEQ ID NO: 204891 - DNA, 13 bp, Artificial Sequence
  Oligonucleotide for detection of SNP TSC0050255
tatgtgtgaaata

SEQ ID NO: 204892 - DNA, 13 bp, Artificial Sequence
  Oligonucleotide for detection of SNP TSC0050255
tatttcacacata

SEQ ID NO: 204893 - DNA, 13 bp, Artificial Sequence
  Oligonucleotide for detection of SNP TSC0050255
tatgtgcgaaata

SEQ ID NO: 204894 - DNA, 13 bp, Artificial Sequence
  Oligonucleotide for detection of SNP TSC0050255
tatttcgcacata

SEQ ID NO: 204895 - DNA, 13 bp, Artificial Sequence
  Oligonucleotide for detection of SNP TSC0050256
tttaaatatagtg

SEQ ID NO: 204896 - DNA, 13 bp, Artificial Sequence
  Oligonucleotide for detection of SNP TSC0050256
cactatatttaaa

SEQ ID NO: 204897 - DNA, 13 bp, Artificial Sequence
  Oligonucleotide for detection of SNP TSC0050256
tttaaagatagtg

SEQ ID NO: 204898 - DNA, 13 bp, Artificial Sequence
  Oligonucleotide for detection of SNP TSC0050256
cactatctttaaa

SEQ ID NO: 204899 - DNA, 13 bp, Artificial Sequence
  Oligonucleotide for detection of SNP TSC0050257
agttagattaata

SEQ ID NO: 204900 - DNA, 13 bp, Artificial Sequence
  Oligonucleotide for detection of SNP TSC0050257
tattaatctaact

SEQ ID NO: 204901 - DNA, 13 bp, Artificial Sequence
  Oligonucleotide for detection of SNP TSC0050257
agttaggttaata

SEQ ID NO: 204902 - DNA, 13 bp, Artificial Sequence
  Oligonucleotide for detection of SNP TSC0050257
tattaacctaact

SEQ ID NO: 204903 - DNA, 13 bp, Artificial Sequence
  Oligonucleotide for detection of SNP TSC0050258
ttattgtatttta

SEQ ID NO: 204904 - DNA, 13 bp, Artificial Sequence
  Oligonucleotide for detection of SNP TSC0050258
taaaatacaataa

SEQ ID NO: 204905 - DNA, 13 bp, Artificial Sequence
  Oligonucleotide for detection of SNP TSC0050258
tggagtgtagtgg

SEQ ID NO: 204906 - DNA, 13 bp, Artificial Sequence
  Oligonucleotide for detection of SNP TSC0050258
ccactacactcca

SEQ ID NO: 204907 - DNA, 13 bp, Artificial Sequence
  Oligonucleotide for detection of SNP TSC0050258
tggagtttagtgg

SEQ ID NO: 204908 - DNA, 13 bp, Artificial Sequence
  Oligonucleotide for detection of SNP TSC0050258
ccactaaactcca

SEQ ID NO: 204909 - DNA, 13 bp, Artificial Sequence
  Oligonucleotide for detection of SNP TSC0006331
ggttttttttata

SEQ ID NO: 204910 - DNA, 13 bp, Artificial Sequence
  Oligonucleotide for detection of SNP TSC0006331
tataaaaaaaacc

SEQ ID NO: 204911 - DNA, 13 bp, Artificial Sequence
  Oligonucleotide for detection of SNP TSC0006331
ggttttgtttata

SEQ ID NO: 204912 - DNA, 13 bp, Artificial Sequence
  Oligonucleotide for detection of SNP TSC0006331
tataaacaaaacc

SEQ ID NO: 204913 - DNA, 13 bp, Artificial Sequence
  Oligonucleotide for detection of SNP TSC0006331
tgtgagaaggaty

SEQ ID NO: 204914 - DNA, 13 bp, Artificial Sequence
  Oligonucleotide for detection of SNP TSC0006331
ratccttctcaca

SEQ ID NO: 204915 - DNA, 13 bp, Artificial Sequence
  Oligonucleotide for detection of SNP TSC0006331
tgtgagtaggaty

SEQ ID NO: 204916 - DNA, 13 bp, Artificial Sequence
  Oligonucleotide for detection of SNP TSC0006331
ratcctactcaca

SEQ ID NO: 204917 - DNA, 13 bp, Artificial Sequence
  Oligonucleotide for detection of SNP TSC0009276
agttgaaatttat

SEQ ID NO: 204918 - DNA, 13 bp, Artificial Sequence
  Oligonucleotide for detection of SNP TSC0009276
ataaatttcaact

SEQ ID NO: 204919 - DNA, 13 bp, Artificial Sequence
  Oligonucleotide for detection of SNP TSC0009276
agttgagatttat

SEQ ID NO: 204920 - DNA, 13 bp, Artificial Sequence
  Oligonucleotide for detection of SNP TSC0009276
ataaatctcaact

SEQ ID NO: 204921 - DNA, 13 bp, Artificial Sequence
  Oligonucleotide for detection of SNP TSC0007189
gttttttttatty

SEQ ID NO: 204922 - DNA, 13 bp, Artificial Sequence
  Oligonucleotide for detection of SNP TSC0007189
raataaaaaaaac

SEQ ID NO: 204923 - DNA, 13 bp, Artificial Sequence
  Oligonucleotide for detection of SNP TSC0007189
ggatggagaagay

SEQ ID NO: 204924 - DNA, 13 bp, Artificial Sequence
  Oligonucleotide for detection of SNP TSC0007189
rtcttctccatcc

SEQ ID NO: 204925 - DNA, 13 bp, Artificial Sequence
  Oligonucleotide for detection of SNP TSC0007189
ggatggtgaagay

SEQ ID NO: 204926 - DNA, 13 bp, Artificial Sequence
  Oligonucleotide for detection of SNP TSC0007189
rtcttcaccatcc

SEQ ID NO: 204927 - DNA, 13 bp, Artificial Sequence
  Oligonucleotide for detection of SNP TSC0007189
ggatggcgaagay

SEQ ID NO: 204928 - DNA, 13 bp, Artificial Sequence
  Oligonucleotide for detection of SNP TSC0007189
rtcttcgccatcc

SEQ ID NO: 204929 - DNA, 13 bp, Artificial Sequence
  Oligonucleotide for detection of SNP TSC0050266
gtgagtgagttty

SEQ ID NO: 204930 - DNA, 13 bp, Artificial Sequence
  Oligonucleotide for detection of SNP TSC0050266
raaactcactcac

SEQ ID NO: 204931 - DNA, 13 bp, Artificial Sequence
  Oligonucleotide for detection of SNP TSC0050266
gtgagtaagttty

SEQ ID NO: 204932 - DNA, 13 bp, Artificial Sequence
  Oligonucleotide for detection of SNP TSC0050266
raaacttactcac

SEQ ID NO: 204933 - DNA, 13 bp, Artificial Sequence
  Oligonucleotide for detection of SNP TSC0050267
gtaagtagaagat

SEQ ID NO: 204934 - DNA, 13 bp, Artificial Sequence
  Oligonucleotide for detection of SNP TSC0050267
atcttctacttac

SEQ ID NO: 204935 - DNA, 13 bp, Artificial Sequence
  Oligonucleotide for detection of SNP TSC0050267
gtaagtggaagat

SEQ ID NO: 204936 - DNA, 13 bp, Artificial Sequence
  Oligonucleotide for detection of SNP TSC0050267
atcttccacttac

SEQ ID NO: 204937 - DNA, 13 bp, Artificial Sequence
  Oligonucleotide for detection of SNP TSC0050268
agagggggatatg

SEQ ID NO: 204938 - DNA, 13 bp, Artificial Sequence
  Oligonucleotide for detection of SNP TSC0050268
catatccccctct

SEQ ID NO: 204939 - DNA, 13 bp, Artificial Sequence
  Oligonucleotide for detection of SNP TSC0050268
agagggagatatg

SEQ ID NO: 204940 - DNA, 13 bp, Artificial Sequence
  Oligonucleotide for detection of SNP TSC0050268
catatctccctct

SEQ ID NO: 204941 - DNA, 13 bp, Artificial Sequence
  Oligonucleotide for detection of SNP TSC0050268
agagggtgatatg

SEQ ID NO: 204942 - DNA, 13 bp, Artificial Sequence
  Oligonucleotide for detection of SNP TSC0050268
catatcaccctct

SEQ ID NO: 204943 - DNA, 13 bp, Artificial Sequence
  Oligonucleotide for detection of SNP TSC0050268
agagggcgatatg

SEQ ID NO: 204944 - DNA, 13 bp, Artificial Sequence
  Oligonucleotide for detection of SNP TSC0050268
catatcgccctct

SEQ ID NO: 204945 - DNA, 13 bp, Artificial Sequence
  Oligonucleotide for detection of SNP TSC0050270
aaatggattgtat

SEQ ID NO: 204946 - DNA, 13 bp, Artificial Sequence
  Oligonucleotide for detection of SNP TSC0050270
atacaatccattt

SEQ ID NO: 204947 - DNA, 13 bp, Artificial Sequence
  Oligonucleotide for detection of SNP TSC0050270
aaatgggttgtat

SEQ ID NO: 204948 - DNA, 13 bp, Artificial Sequence
  Oligonucleotide for detection of SNP TSC0050270
atacaacccattt

SEQ ID NO: 204949 - DNA, 13 bp, Artificial Sequence
  Oligonucleotide for detection of SNP TSC0050271
aaattttgatatt

SEQ ID NO: 204950 - DNA, 13 bp, Artificial Sequence
  Oligonucleotide for detection of SNP TSC0050271
aatatcaaaattt

SEQ ID NO: 204951 - DNA, 13 bp, Artificial Sequence
  Oligonucleotide for detection of SNP TSC0050271
aaatttcgatatt

SEQ ID NO: 204952 - DNA, 13 bp, Artificial Sequence
  Oligonucleotide for detection of SNP TSC0050271
aatatcgaaattt

SEQ ID NO: 204953 - DNA, 13 bp, Artificial Sequence
  Oligonucleotide for detection of SNP TSC0050271
aatgttggaattt

SEQ ID NO: 204954 - DNA, 13 bp, Artificial Sequence
  Oligonucleotide for detection of SNP TSC0050271
aaattccaacatt

SEQ ID NO: 204955 - DNA, 13 bp, Artificial Sequence
  Oligonucleotide for detection of SNP TSC0050271
aatgttagaattt

SEQ ID NO: 204956 - DNA, 13 bp, Artificial Sequence
  Oligonucleotide for detection of SNP TSC0050271
aaattctaacatt

SEQ ID NO: 204957 - DNA, 13 bp, Artificial Sequence
  Oligonucleotide for detection of SNP TSC0050271
aatgtcggaattt

SEQ ID NO: 204958 - DNA, 13 bp, Artificial Sequence
  Oligonucleotide for detection of SNP TSC0050271
aaattccgacatt

SEQ ID NO: 204959 - DNA, 13 bp, Artificial Sequence
  Oligonucleotide for detection of SNP TSC0050272
atatgtattgtag

SEQ ID NO: 204960 - DNA, 13 bp, Artificial Sequence
  Oligonucleotide for detection of SNP TSC0050272
ctacaatacatat

SEQ ID NO: 204961 - DNA, 13 bp, Artificial Sequence
  Oligonucleotide for detection of SNP TSC0050272
atatgtgttgtag

SEQ ID NO: 204962 - DNA, 13 bp, Artificial Sequence
  Oligonucleotide for detection of SNP TSC0050272
ctacaacacatat

SEQ ID NO: 204963 - DNA, 13 bp, Artificial Sequence
  Oligonucleotide for detection of SNP TSC0050274
aagaagagaggga

SEQ ID NO: 204964 - DNA, 13 bp, Artificial Sequence
  Oligonucleotide for detection of SNP TSC0050274
tccctctcttctt

SEQ ID NO: 204965 - DNA, 13 bp, Artificial Sequence
  Oligonucleotide for detection of SNP TSC0050274
aagaagggaggga

SEQ ID NO: 204966 - DNA, 13 bp, Artificial Sequence
  Oligonucleotide for detection of SNP TSC0050274
tccctcccttctt

SEQ ID NO: 204967 - DNA, 13 bp, Artificial Sequence
  Oligonucleotide for detection of SNP TSC0050275
ttatggggttagt

SEQ ID NO: 204968 - DNA, 13 bp, Artificial Sequence
  Oligonucleotide for detection of SNP TSC0050275
actaaccccataa

SEQ ID NO: 204969 - DNA, 13 bp, Artificial Sequence
  Oligonucleotide for detection of SNP TSC0050275
ttatggagttagt

SEQ ID NO: 204970 - DNA, 13 bp, Artificial Sequence
  Oligonucleotide for detection of SNP TSC0050275
actaactccataa

SEQ ID NO: 204971 - DNA, 13 bp, Artificial Sequence
  Oligonucleotide for detection of SNP TSC0050278
aaagttaagtatt

SEQ ID NO: 204972 - DNA, 13 bp, Artificial Sequence
  Oligonucleotide for detection of SNP TSC0050278
aatacttaacttt

SEQ ID NO: 204973 - DNA, 13 bp, Artificial Sequence
  Oligonucleotide for detection of SNP TSC0050278
aaagtttagtatt

SEQ ID NO: 204974 - DNA, 13 bp, Artificial Sequence
  Oligonucleotide for detection of SNP TSC0050278
aatactaaacttt

SEQ ID NO: 204975 - DNA, 13 bp, Artificial Sequence
  Oligonucleotide for detection of SNP TSC0050278
agtatttaatttt

SEQ ID NO: 204976 - DNA, 13 bp, Artificial Sequence
  Oligonucleotide for detection of SNP TSC0050278
aaaattaaatact

SEQ ID NO: 204977 - DNA, 13 bp, Artificial Sequence
  Oligonucleotide for detection of SNP TSC0050278
agtattgaatttt

SEQ ID NO: 204978 - DNA, 13 bp, Artificial Sequence
  Oligonucleotide for detection of SNP TSC0050278
aaaattcaatact

SEQ ID NO: 204979 - DNA, 13 bp, Artificial Sequence
  Oligonucleotide for detection of SNP TSC0050279
gttataaaattag

SEQ ID NO: 204980 - DNA, 13 bp, Artificial Sequence
  Oligonucleotide for detection of SNP TSC0050279
ctaattttataac

SEQ ID NO: 204981 - DNA, 13 bp, Artificial Sequence
  Oligonucleotide for detection of SNP TSC0050279
gttatagaattag

SEQ ID NO: 204982 - DNA, 13 bp, Artificial Sequence
  Oligonucleotide for detection of SNP TSC0050279
ctaattctataac

SEQ ID NO: 204983 - DNA, 13 bp, Artificial Sequence
  Oligonucleotide for detection of SNP TSC0050280
tagtaaataagty

SEQ ID NO: 204984 - DNA, 13 bp, Artificial Sequence
  Oligonucleotide for detection of SNP TSC0050280
racttatttacta

SEQ ID NO: 204985 - DNA, 13 bp, Artificial Sequence
  Oligonucleotide for detection of SNP TSC0050280
tagtaagtaagty

SEQ ID NO: 204986 - DNA, 13 bp, Artificial Sequence
  Oligonucleotide for detection of SNP TSC0050280
racttacttacta

SEQ ID NO: 204987 - DNA, 13 bp, Artificial Sequence
  Oligonucleotide for detection of SNP TSC0010675
tatgagataatta

SEQ ID NO: 204988 - DNA, 13 bp, Artificial Sequence
  Oligonucleotide for detection of SNP TSC0010675
taattatctcata

SEQ ID NO: 204989 - DNA, 13 bp, Artificial Sequence
  Oligonucleotide for detection of SNP TSC0010675
tatgagttaatta

SEQ ID NO: 204990 - DNA, 13 bp, Artificial Sequence
  Oligonucleotide for detection of SNP TSC0010675
taattaactcata

SEQ ID NO: 204991 - DNA, 13 bp, Artificial Sequence
  Oligonucleotide for detection of SNP TSC0010675
tgattgttttatg

SEQ ID NO: 204992 - DNA, 13 bp, Artificial Sequence
  Oligonucleotide for detection of SNP TSC0010675
cataaaacaatca

SEQ ID NO: 204993 - DNA, 13 bp, Artificial Sequence
  Oligonucleotide for detection of SNP TSC0010675
tgattggtttatg

SEQ ID NO: 204994 - DNA, 13 bp, Artificial Sequence
  Oligonucleotide for detection of SNP TSC0010675
cataaaccaatca

SEQ ID NO: 204995 - DNA, 13 bp, Artificial Sequence
  Oligonucleotide for detection of SNP TSC0050281
tatttaagtagag

SEQ ID NO: 204996 - DNA, 13 bp, Artificial Sequence
  Oligonucleotide for detection of SNP TSC0050281
ctctacttaaata

SEQ ID NO: 204997 - DNA, 13 bp, Artificial Sequence
  Oligonucleotide for detection of SNP TSC0050281
tatttaggtagag

SEQ ID NO: 204998 - DNA, 13 bp, Artificial Sequence
  Oligonucleotide for detection of SNP TSC0050281
ctctacctaaata

SEQ ID NO: 204999 - DNA, 13 bp, Artificial Sequence
  Oligonucleotide for detection of SNP TSC0050283
tatgaaattttag

SEQ ID NO: 205000 - DNA, 13 bp, Artificial Sequence
  Oligonucleotide for detection of SNP TSC0050283
ctaaaatttcata

SEQ ID NO: 205001 - DNA, 13 bp, Artificial Sequence
  Oligonucleotide for detection of SNP TSC0050283
tatgaatttttag

SEQ ID NO: 205002 - DNA, 13 bp, Artificial Sequence
  Oligonucleotide for detection of SNP TSC0050283
ctaaaaattcata

SEQ ID NO: 205003 - DNA, 13 bp, Artificial Sequence
  Oligonucleotide for detection of SNP TSC0050283
tacgaaattttag

SEQ ID NO: 205004 - DNA, 13 bp, Artificial Sequence
  Oligonucleotide for detection of SNP TSC0050283
ctaaaatttcgta

SEQ ID NO: 205005 - DNA, 13 bp, Artificial Sequence
  Oligonucleotide for detection of SNP TSC0050283
tacgaatttttag

SEQ ID NO: 205006 - DNA, 13 bp, Artificial Sequence
  Oligonucleotide for detection of SNP TSC0050283
ctaaaaattcgta

SEQ ID NO: 205007 - DNA, 13 bp, Artificial Sequence
  Oligonucleotide for detection of SNP TSC0050283
ttgaaattttgtg

SEQ ID NO: 205008 - DNA, 13 bp, Artificial Sequence
  Oligonucleotide for detection of SNP TSC0050283
cacaaaatttcaa

SEQ ID NO: 205009 - DNA, 13 bp, Artificial Sequence
  Oligonucleotide for detection of SNP TSC0050283
ttgaaagtttgtg

SEQ ID NO: 205010 - DNA, 13 bp, Artificial Sequence
  Oligonucleotide for detection of SNP TSC0050283
cacaaactttcaa

SEQ ID NO: 205011 - DNA, 13 bp, Artificial Sequence
  Oligonucleotide for detection of SNP TSC0050283
ttgaaatttcgtg

SEQ ID NO: 205012 - DNA, 13 bp, Artificial Sequence
  Oligonucleotide for detection of SNP TSC0050283
cacgaaatttcaa

SEQ ID NO: 205013 - DNA, 13 bp, Artificial Sequence
  Oligonucleotide for detection of SNP TSC0050283
ttgaaagttcgtg

SEQ ID NO: 205014 - DNA, 13 bp, Artificial Sequence
  Oligonucleotide for detection of SNP TSC0050283
cacgaactttcaa

SEQ ID NO: 205015 - DNA, 13 bp, Artificial Sequence
  Oligonucleotide for detection of SNP TSC0050284
ttggaacgattty

SEQ ID NO: 205016 - DNA, 13 bp, Artificial Sequence
  Oligonucleotide for detection of SNP TSC0050284
raaatcgttccaa

SEQ ID NO: 205017 - DNA, 13 bp, Artificial Sequence
  Oligonucleotide for detection of SNP TSC0050284
gaagttgttttag

SEQ ID NO: 205018 - DNA, 13 bp, Artificial Sequence
  Oligonucleotide for detection of SNP TSC0050284
ctaaaacaacttc

SEQ ID NO: 205019 - DNA, 13 bp, Artificial Sequence
  Oligonucleotide for detection of SNP TSC0050284
gaagttattttag

SEQ ID NO: 205020 - DNA, 13 bp, Artificial Sequence
  Oligonucleotide for detection of SNP TSC0050284
ctaaaataacttc

SEQ ID NO: 205021 - DNA, 13 bp, Artificial Sequence
  Oligonucleotide for detection of SNP TSC0050284
gaagtcgttttag

SEQ ID NO: 205022 - DNA, 13 bp, Artificial Sequence
  Oligonucleotide for detection of SNP TSC0050284
ctaaaacgacttc

SEQ ID NO: 205023 - DNA, 13 bp, Artificial Sequence
  Oligonucleotide for detection of SNP TSC0050288
tttttgataagga

SEQ ID NO: 205024 - DNA, 13 bp, Artificial Sequence
  Oligonucleotide for detection of SNP TSC0050288
tccttatcaaaaa

SEQ ID NO: 205025 - DNA, 13 bp, Artificial Sequence
  Oligonucleotide for detection of SNP TSC0050288
tttttggtaagga

SEQ ID NO: 205026 - DNA, 13 bp, Artificial Sequence
  Oligonucleotide for detection of SNP TSC0050288
tccttaccaaaaa

SEQ ID NO: 205027 - DNA, 13 bp, Artificial Sequence
  Oligonucleotide for detection of SNP TSC0006976
tatatatgtatgy

SEQ ID NO: 205028 - DNA, 13 bp, Artificial Sequence
  Oligonucleotide for detection of SNP TSC0006976
rcatacatatata

SEQ ID NO: 205029 - DNA, 13 bp, Artificial Sequence
  Oligonucleotide for detection of SNP TSC0006976
tatatacgtatgy

SEQ ID NO: 205030 - DNA, 13 bp, Artificial Sequence
  Oligonucleotide for detection of SNP TSC0006976
rcatacgtatata

SEQ ID NO: 205031 - DNA, 13 bp, Artificial Sequence
  Oligonucleotide for detection of SNP TSC0006210
gataaaaaaaaaa

SEQ ID NO: 205032 - DNA, 13 bp, Artificial Sequence
  Oligonucleotide for detection of SNP TSC0006210
ttttttttttatc

SEQ ID NO: 205033 - DNA, 13 bp, Artificial Sequence
  Oligonucleotide for detection of SNP TSC0006210
gataaagaaaaaa

SEQ ID NO: 205034 - DNA, 13 bp, Artificial Sequence
  Oligonucleotide for detection of SNP TSC0006210
ttttttctttatc

SEQ ID NO: 205035 - DNA, 13 bp, Artificial Sequence
  Oligonucleotide for detection of SNP TSC0050290
tatgtaattgtag

SEQ ID NO: 205036 - DNA, 13 bp, Artificial Sequence
  Oligonucleotide for detection of SNP TSC0050290
ctacaattacata

SEQ ID NO: 205037 - DNA, 13 bp, Artificial Sequence
  Oligonucleotide for detection of SNP TSC0050290
tatgtatttgtag

SEQ ID NO: 205038 - DNA, 13 bp, Artificial Sequence
  Oligonucleotide for detection of SNP TSC0050290
ctacaaatacata

SEQ ID NO: 205039 - DNA, 13 bp, Artificial Sequence
  Oligonucleotide for detection of SNP TSC0050290
ttatagttgtatg

SEQ ID NO: 205040 - DNA, 13 bp, Artificial Sequence
  Oligonucleotide for detection of SNP TSC0050290
catacaactataa

SEQ ID NO: 205041 - DNA, 13 bp, Artificial Sequence
  Oligonucleotide for detection of SNP TSC0050290
ttataggtgtatg

SEQ ID NO: 205042 - DNA, 13 bp, Artificial Sequence
  Oligonucleotide for detection of SNP TSC0050290
catacacctataa

SEQ ID NO: 205043 - DNA, 13 bp, Artificial Sequence
  Oligonucleotide for detection of SNP TSC0050291
taattggtattgy

SEQ ID NO: 205044 - DNA, 13 bp, Artificial Sequence
  Oligonucleotide for detection of SNP TSC0050291
rcaataccaatta

SEQ ID NO: 205045 - DNA, 13 bp, Artificial Sequence
  Oligonucleotide for detection of SNP TSC0050291
taattgatattgy

SEQ ID NO: 205046 - DNA, 13 bp, Artificial Sequence
  Oligonucleotide for detection of SNP TSC0050291
rcaatatcaatta

SEQ ID NO: 205047 - DNA, 13 bp, Artificial Sequence
  Oligonucleotide for detection of SNP TSC0050292
tgttatatgtaga

SEQ ID NO: 205048 - DNA, 13 bp, Artificial Sequence
  Oligonucleotide for detection of SNP TSC0050292
tctacatataaca

SEQ ID NO: 205049 - DNA, 13 bp, Artificial Sequence
  Oligonucleotide for detection of SNP TSC0050292
tgttatgtgtaga

SEQ ID NO: 205050 - DNA, 13 bp, Artificial Sequence
  Oligonucleotide for detection of SNP TSC0050292
tctacacataaca

SEQ ID NO: 205051 - DNA, 13 bp, Artificial Sequence
  Oligonucleotide for detection of SNP TSC0050292
tgttacgtgtaga

SEQ ID NO: 205052 - DNA, 13 bp, Artificial Sequence
  Oligonucleotide for detection of SNP TSC0050292
tctacacgtaaca

SEQ ID NO: 205053 - DNA, 13 bp, Artificial Sequence
  Oligonucleotide for detection of SNP TSC0050292
tttatatgtaata

SEQ ID NO: 205054 - DNA, 13 bp, Artificial Sequence
  Oligonucleotide for detection of SNP TSC0050292
tattacatataaa

SEQ ID NO: 205055 - DNA, 13 bp, Artificial Sequence
  Oligonucleotide for detection of SNP TSC0050292
tttatacgtaata

SEQ ID NO: 205056 - DNA, 13 bp, Artificial Sequence
  Oligonucleotide for detection of SNP TSC0050292
tattacgtataaa

SEQ ID NO: 205057 - DNA, 13 bp, Artificial Sequence
  Oligonucleotide for detection of SNP TSC0050293
gtgagttgggatt

SEQ ID NO: 205058 - DNA, 13 bp, Artificial Sequence
  Oligonucleotide for detection of SNP TSC0050293
aatcccaactcac

SEQ ID NO: 205059 - DNA, 13 bp, Artificial Sequence
  Oligonucleotide for detection of SNP TSC0050293
gtgagtcgggatt

SEQ ID NO: 205060 - DNA, 13 bp, Artificial Sequence
  Oligonucleotide for detection of SNP TSC0050293
aatcccgactcac

SEQ ID NO: 205061 - DNA, 13 bp, Artificial Sequence
  Oligonucleotide for detection of SNP TSC0050293
agttttgatttay

SEQ ID NO: 205062 - DNA, 13 bp, Artificial Sequence
  Oligonucleotide for detection of SNP TSC0050293
rtaaatcaaaact

SEQ ID NO: 205063 - DNA, 13 bp, Artificial Sequence
  Oligonucleotide for detection of SNP TSC0050293
agttttaatttay

SEQ ID NO: 205064 - DNA, 13 bp, Artificial Sequence
  Oligonucleotide for detection of SNP TSC0050293
rtaaattaaaact

SEQ ID NO: 205065 - DNA, 13 bp, Artificial Sequence
  Oligonucleotide for detection of SNP TSC0050293
agtttcgatttay

SEQ ID NO: 205066 - DNA, 13 bp, Artificial Sequence
  Oligonucleotide for detection of SNP TSC0050293
rtaaatcgaaact

SEQ ID NO: 205067 - DNA, 13 bp, Artificial Sequence
  Oligonucleotide for detection of SNP TSC0050295
aaatttcgatttt

SEQ ID NO: 205068 - DNA, 13 bp, Artificial Sequence
  Oligonucleotide for detection of SNP TSC0050295
aaaatcgaaattt

SEQ ID NO: 205069 - DNA, 13 bp, Artificial Sequence
  Oligonucleotide for detection of SNP TSC0050295
agaattgaggttt

SEQ ID NO: 205070 - DNA, 13 bp, Artificial Sequence
  Oligonucleotide for detection of SNP TSC0050295
aaacctcaattct

SEQ ID NO: 205071 - DNA, 13 bp, Artificial Sequence
  Oligonucleotide for detection of SNP TSC0050295
agaattaaggttt

SEQ ID NO: 205072 - DNA, 13 bp, Artificial Sequence
  Oligonucleotide for detection of SNP TSC0050295
aaaccttaattct

SEQ ID NO: 205073 - DNA, 13 bp, Artificial Sequence
  Oligonucleotide for detection of SNP TSC0050295
agaatcgaggttt

SEQ ID NO: 205074 - DNA, 13 bp, Artificial Sequence
  Oligonucleotide for detection of SNP TSC0050295
aaacctcgattct

SEQ ID NO: 205075 - DNA, 13 bp, Artificial Sequence
  Oligonucleotide for detection of SNP TSC0050299
aggaaagtaagat

SEQ ID NO: 205076 - DNA, 13 bp, Artificial Sequence
  Oligonucleotide for detection of SNP TSC0050299
atcttactttcct

SEQ ID NO: 205077 - DNA, 13 bp, Artificial Sequence
  Oligonucleotide for detection of SNP TSC0050299
aggaaaataagat

SEQ ID NO: 205078 - DNA, 13 bp, Artificial Sequence
  Oligonucleotide for detection of SNP TSC0050299
atcttattttcct

SEQ ID NO: 205079 - DNA, 13 bp, Artificial Sequence
  Oligonucleotide for detection of SNP TSC0006146
gggtatagatata

SEQ ID NO: 205080 - DNA, 13 bp, Artificial Sequence
  Oligonucleotide for detection of SNP TSC0006146
tatatctataccc

SEQ ID NO: 205081 - DNA, 13 bp, Artificial Sequence
  Oligonucleotide for detection of SNP TSC0006146
gggtattgatata

SEQ ID NO: 205082 - DNA, 13 bp, Artificial Sequence
  Oligonucleotide for detection of SNP TSC0006146
tatatcaataccc

SEQ ID NO: 205083 - DNA, 13 bp, Artificial Sequence
  Oligonucleotide for detection of SNP TSC0006146
gggtatggatata

SEQ ID NO: 205084 - DNA, 13 bp, Artificial Sequence
  Oligonucleotide for detection of SNP TSC0006146
tatatccataccc

SEQ ID NO: 205085 - DNA, 13 bp, Artificial Sequence
  Oligonucleotide for detection of SNP TSC0006146
gggtatcgatata

SEQ ID NO: 205086 - DNA, 13 bp, Artificial Sequence
  Oligonucleotide for detection of SNP TSC0006146
tatatcgataccc

SEQ ID NO: 205087 - DNA, 13 bp, Artificial Sequence
  Oligonucleotide for detection of SNP TSC0006146
tgtgtttatgtty

SEQ ID NO: 205088 - DNA, 13 bp, Artificial Sequence
  Oligonucleotide for detection of SNP TSC0006146
raacataaacaca

SEQ ID NO: 205089 - DNA, 13 bp, Artificial Sequence
  Oligonucleotide for detection of SNP TSC0006146
tgtgttgatgtty

SEQ ID NO: 205090 - DNA, 13 bp, Artificial Sequence
  Oligonucleotide for detection of SNP TSC0006146
raacatcaacaca

SEQ ID NO: 205091 - DNA, 13 bp, Artificial Sequence
  Oligonucleotide for detection of SNP TSC0006146
tgtgttaatgtty

SEQ ID NO: 205092 - DNA, 13 bp, Artificial Sequence
  Oligonucleotide for detection of SNP TSC0006146
raacattaacaca

SEQ ID NO: 205093 - DNA, 13 bp, Artificial Sequence
  Oligonucleotide for detection of SNP TSC0006146
tgtgtcgatgtty

SEQ ID NO: 205094 - DNA, 13 bp, Artificial Sequence
  Oligonucleotide for detection of SNP TSC0006146
raacatcgacaca

SEQ ID NO: 205095 - DNA, 13 bp, Artificial Sequence
  Oligonucleotide for detection of SNP TSC0010661
attgtggtttgag

SEQ ID NO: 205096 - DNA, 13 bp, Artificial Sequence
  Oligonucleotide for detection of SNP TSC0010661
ctcaaaccacaat

SEQ ID NO: 205097 - DNA, 13 bp, Artificial Sequence
  Oligonucleotide for detection of SNP TSC0010661
attgtgatttgag

SEQ ID NO: 205098 - DNA, 13 bp, Artificial Sequence
  Oligonucleotide for detection of SNP TSC0010661
ctcaaatcacaat

SEQ ID NO: 205099 - DNA, 13 bp, Artificial Sequence
  Oligonucleotide for detection of SNP TSC0010662
gaatatatatttt

SEQ ID NO: 205100 - DNA, 13 bp, Artificial Sequence
  Oligonucleotide for detection of SNP TSC0010662
aaaatatatattc

SEQ ID NO: 205101 - DNA, 13 bp, Artificial Sequence
  Oligonucleotide for detection of SNP TSC0010662
gaatatgtatttt

SEQ ID NO: 205102 - DNA, 13 bp, Artificial Sequence
  Oligonucleotide for detection of SNP TSC0010662
aaaatacatattc

SEQ ID NO: 205103 - DNA, 13 bp, Artificial Sequence
  Oligonucleotide for detection of SNP TSC0050304
aaaattaataaag

SEQ ID NO: 205104 - DNA, 13 bp, Artificial Sequence
  Oligonucleotide for detection of SNP TSC0050304
ctttattaatttt

SEQ ID NO: 205105 - DNA, 13 bp, Artificial Sequence
  Oligonucleotide for detection of SNP TSC0050304
aaaattgataaag

SEQ ID NO: 205106 - DNA, 13 bp, Artificial Sequence
  Oligonucleotide for detection of SNP TSC0050304
ctttatcaatttt

SEQ ID NO: 205107 - DNA, 13 bp, Artificial Sequence
  Oligonucleotide for detection of SNP TSC0050305
ttgtattgtatgt

SEQ ID NO: 205108 - DNA, 13 bp, Artificial Sequence
  Oligonucleotide for detection of SNP TSC0050305
acatacaatacaa

SEQ ID NO: 205109 - DNA, 13 bp, Artificial Sequence
  Oligonucleotide for detection of SNP TSC0050305
ttgtatggtatgt

SEQ ID NO: 205110 - DNA, 13 bp, Artificial Sequence
  Oligonucleotide for detection of SNP TSC0050305
acataccatacaa

SEQ ID NO: 205111 - DNA, 13 bp, Artificial Sequence
  Oligonucleotide for detection of SNP TSC0050305
tcgtattgtatgt

SEQ ID NO: 205112 - DNA, 13 bp, Artificial Sequence
  Oligonucleotide for detection of SNP TSC0050305
acatacaatacga

SEQ ID NO: 205113 - DNA, 13 bp, Artificial Sequence
  Oligonucleotide for detection of SNP TSC0050305
tcgtatggtatgt

SEQ ID NO: 205114 - DNA, 13 bp, Artificial Sequence
  Oligonucleotide for detection of SNP TSC0050305
acataccatacga

SEQ ID NO: 205115 - DNA, 13 bp, Artificial Sequence
  Oligonucleotide for detection of SNP TSC0050305
ttgtattgtacgt

SEQ ID NO: 205116 - DNA, 13 bp, Artificial Sequence
  Oligonucleotide for detection of SNP TSC0050305
acgtacaatacaa

SEQ ID NO: 205117 - DNA, 13 bp, Artificial Sequence
  Oligonucleotide for detection of SNP TSC0050305
ttgtatggtacgt

SEQ ID NO: 205118 - DNA, 13 bp, Artificial Sequence
  Oligonucleotide for detection of SNP TSC0050305
acgtaccatacaa

SEQ ID NO: 205119 - DNA, 13 bp, Artificial Sequence
  Oligonucleotide for detection of SNP TSC0050305
tcgtattgtacgt

SEQ ID NO: 205120 - DNA, 13 bp, Artificial Sequence
  Oligonucleotide for detection of SNP TSC0050305
acgtacaatacga

SEQ ID NO: 205121 - DNA, 13 bp, Artificial Sequence
  Oligonucleotide for detection of SNP TSC0050305
tcgtatggtacgt

SEQ ID NO: 205122 - DNA, 13 bp, Artificial Sequence
  Oligonucleotide for detection of SNP TSC0050305
acgtaccatacga

SEQ ID NO: 205123 - DNA, 13 bp, Artificial Sequence
  Oligonucleotide for detection of SNP TSC0050305
atgtgtaatgtgg

SEQ ID NO: 205124 - DNA, 13 bp, Artificial Sequence
  Oligonucleotide for detection of SNP TSC0050305
ccacattacacat

SEQ ID NO: 205125 - DNA, 13 bp, Artificial Sequence
  Oligonucleotide for detection of SNP TSC0050305
atgtgttatgtgg

SEQ ID NO: 205126 - DNA, 13 bp, Artificial Sequence
  Oligonucleotide for detection of SNP TSC0050305
ccacataacacat

SEQ ID NO: 205127 - DNA, 13 bp, Artificial Sequence
  Oligonucleotide for detection of SNP TSC0050305
acgtgtaatgtgg

SEQ ID NO: 205128 - DNA, 13 bp, Artificial Sequence
  Oligonucleotide for detection of SNP TSC0050305
ccacattacacgt

SEQ ID NO: 205129 - DNA, 13 bp, Artificial Sequence
  Oligonucleotide for detection of SNP TSC0050305
acgtgttatgtgg

SEQ ID NO: 205130 - DNA, 13 bp, Artificial Sequence
  Oligonucleotide for detection of SNP TSC0050305
ccacataacacgt

SEQ ID NO: 205131 - DNA, 13 bp, Artificial Sequence
  Oligonucleotide for detection of SNP TSC0050305
atgtgtaatgcgg

SEQ ID NO: 205132 - DNA, 13 bp, Artificial Sequence
  Oligonucleotide for detection of SNP TSC0050305
ccgcattacacat

SEQ ID NO: 205133 - DNA, 13 bp, Artificial Sequence
  Oligonucleotide for detection of SNP TSC0050305
atgtgttatgcgg

SEQ ID NO: 205134 - DNA, 13 bp, Artificial Sequence
  Oligonucleotide for detection of SNP TSC0050305
ccgcataacacat

SEQ ID NO: 205135 - DNA, 13 bp, Artificial Sequence
  Oligonucleotide for detection of SNP TSC0050305
acgtgtaatgcgg

SEQ ID NO: 205136 - DNA, 13 bp, Artificial Sequence
  Oligonucleotide for detection of SNP TSC0050305
ccgcattacacgt

SEQ ID NO: 205137 - DNA, 13 bp, Artificial Sequence
  Oligonucleotide for detection of SNP TSC0050305
acgtgttatgcgg

SEQ ID NO: 205138 - DNA, 13 bp, Artificial Sequence
  Oligonucleotide for detection of SNP TSC0050305
ccgcataacacgt

SEQ ID NO: 205139 - DNA, 13 bp, Artificial Sequence
  Oligonucleotide for detection of SNP TSC0050307
atataagtttttt

SEQ ID NO: 205140 - DNA, 13 bp, Artificial Sequence
  Oligonucleotide for detection of SNP TSC0050307
aaaaaacttatat

SEQ ID NO: 205141 - DNA, 13 bp, Artificial Sequence
  Oligonucleotide for detection of SNP TSC0050308
tataaatgaaata

SEQ ID NO: 205142 - DNA, 13 bp, Artificial Sequence
  Oligonucleotide for detection of SNP TSC0050308
tatttcatttata

SEQ ID NO: 205143 - DNA, 13 bp, Artificial Sequence
  Oligonucleotide for detection of SNP TSC0050308
tataaaggaaata

SEQ ID NO: 205144 - DNA, 13 bp, Artificial Sequence
  Oligonucleotide for detection of SNP TSC0050308
tatttcctttata

SEQ ID NO: 205145 - DNA, 13 bp, Artificial Sequence
  Oligonucleotide for detection of SNP TSC0050308
tataaacgaaata

SEQ ID NO: 205146 - DNA, 13 bp, Artificial Sequence
  Oligonucleotide for detection of SNP TSC0050308
tatttcgtttata

SEQ ID NO: 205147 - DNA, 13 bp, Artificial Sequence
  Oligonucleotide for detection of SNP TSC0050308
tattttgtttgtg

SEQ ID NO: 205148 - DNA, 13 bp, Artificial Sequence
  Oligonucleotide for detection of SNP TSC0050308
cacaaacaaaata

SEQ ID NO: 205149 - DNA, 13 bp, Artificial Sequence
  Oligonucleotide for detection of SNP TSC0050308
tattttttttgtg

SEQ ID NO: 205150 - DNA, 13 bp, Artificial Sequence
  Oligonucleotide for detection of SNP TSC0050308
cacaaaaaaaata

SEQ ID NO: 205151 - DNA, 13 bp, Artificial Sequence
  Oligonucleotide for detection of SNP TSC0050308
tatttcgtttgtg

SEQ ID NO: 205152 - DNA, 13 bp, Artificial Sequence
  Oligonucleotide for detection of SNP TSC0050308
cacaaacgaaata

SEQ ID NO: 205153 - DNA, 13 bp, Artificial Sequence
  Oligonucleotide for detection of SNP TSC0007348
attttttgttagy

SEQ ID NO: 205154 - DNA, 13 bp, Artificial Sequence
  Oligonucleotide for detection of SNP TSC0007348
rctaacaaaaaat

SEQ ID NO: 205155 - DNA, 13 bp, Artificial Sequence
  Oligonucleotide for detection of SNP TSC0007348
atttttcgttagy

SEQ ID NO: 205156 - DNA, 13 bp, Artificial Sequence
  Oligonucleotide for detection of SNP TSC0007348
rctaacgaaaaat

SEQ ID NO: 205157 - DNA, 13 bp, Artificial Sequence
  Oligonucleotide for detection of SNP TSC0007348
gttggtgaaaagt

SEQ ID NO: 205158 - DNA, 13 bp, Artificial Sequence
  Oligonucleotide for detection of SNP TSC0007348
acttttcaccaac

SEQ ID NO: 205159 - DNA, 13 bp, Artificial Sequence
  Oligonucleotide for detection of SNP TSC0007348
gttggtaaaaagt

SEQ ID NO: 205160 - DNA, 13 bp, Artificial Sequence
  Oligonucleotide for detection of SNP TSC0007348
actttttaccaac

SEQ ID NO: 205161 - DNA, 13 bp, Artificial Sequence
  Oligonucleotide for detection of SNP TSC0007348
gttggcgaaaagt

SEQ ID NO: 205162 - DNA, 13 bp, Artificial Sequence
  Oligonucleotide for detection of SNP TSC0007348
acttttcgccaac

SEQ ID NO: 205163 - DNA, 13 bp, Artificial Sequence
  Oligonucleotide for detection of SNP TSC0050310
ttaaatatataty

SEQ ID NO: 205164 - DNA, 13 bp, Artificial Sequence
  Oligonucleotide for detection of SNP TSC0050310
ratatatatttaa

SEQ ID NO: 205165 - DNA, 13 bp, Artificial Sequence
  Oligonucleotide for detection of SNP TSC0050310
ttaaatgtataty

SEQ ID NO: 205166 - DNA, 13 bp, Artificial Sequence
  Oligonucleotide for detection of SNP TSC0050310
ratatacatttaa

SEQ ID NO: 205167 - DNA, 13 bp, Artificial Sequence
  Oligonucleotide for detection of SNP TSC0050311
ttggagataaata

SEQ ID NO: 205168 - DNA, 13 bp, Artificial Sequence
  Oligonucleotide for detection of SNP TSC0050311
tatttatctccaa

SEQ ID NO: 205169 - DNA, 13 bp, Artificial Sequence
  Oligonucleotide for detection of SNP TSC0050311
ttggagttaaata

SEQ ID NO: 205170 - DNA, 13 bp, Artificial Sequence
  Oligonucleotide for detection of SNP TSC0050311
tatttaactccaa

SEQ ID NO: 205171 - DNA, 13 bp, Artificial Sequence
  Oligonucleotide for detection of SNP TSC0050312
aataaataaagag

SEQ ID NO: 205172 - DNA, 13 bp, Artificial Sequence
  Oligonucleotide for detection of SNP TSC0050312
ctctttatttatt

SEQ ID NO: 205173 - DNA, 13 bp, Artificial Sequence
  Oligonucleotide for detection of SNP TSC0050312
aataaaaaaagag

SEQ ID NO: 205174 - DNA, 13 bp, Artificial Sequence
  Oligonucleotide for detection of SNP TSC0050312
ctctttttttatt

SEQ ID NO: 205175 - DNA, 13 bp, Artificial Sequence
  Oligonucleotide for detection of SNP TSC0050313
gaaagtttttgaa

SEQ ID NO: 205176 - DNA, 13 bp, Artificial Sequence
  Oligonucleotide for detection of SNP TSC0050313
ttcaaaaactttc

SEQ ID NO: 205177 - DNA, 13 bp, Artificial Sequence
  Oligonucleotide for detection of SNP TSC0050313
gaaagtgtttgaa

SEQ ID NO: 205178 - DNA, 13 bp, Artificial Sequence
  Oligonucleotide for detection of SNP TSC0050313
ttcaaacactttc

SEQ ID NO: 205179 - DNA, 13 bp, Artificial Sequence
  Oligonucleotide for detection of SNP TSC0050313
tttagggatttty

SEQ ID NO: 205180 - DNA, 13 bp, Artificial Sequence
  Oligonucleotide for detection of SNP TSC0050313
raaaatccctaaa

SEQ ID NO: 205181 - DNA, 13 bp, Artificial Sequence
  Oligonucleotide for detection of SNP TSC0050313
tttaggtatttty

SEQ ID NO: 205182 - DNA, 13 bp, Artificial Sequence
  Oligonucleotide for detection of SNP TSC0050313
raaaatacctaaa

SEQ ID NO: 205183 - DNA, 13 bp, Artificial Sequence
  Oligonucleotide for detection of SNP TSC0050314
tgtttgataagty

SEQ ID NO: 205184 - DNA, 13 bp, Artificial Sequence
  Oligonucleotide for detection of SNP TSC0050314
racttatcaaaca

SEQ ID NO: 205185 - DNA, 13 bp, Artificial Sequence
  Oligonucleotide for detection of SNP TSC0050314
tgtttggtaagty

SEQ ID NO: 205186 - DNA, 13 bp, Artificial Sequence
  Oligonucleotide for detection of SNP TSC0050314
racttaccaaaca

SEQ ID NO: 205187 - DNA, 13 bp, Artificial Sequence
  Oligonucleotide for detection of SNP TSC0050315
tatgggtgtggat

SEQ ID NO: 205188 - DNA, 13 bp, Artificial Sequence
  Oligonucleotide for detection of SNP TSC0050315
atccacacccata

SEQ ID NO: 205189 - DNA, 13 bp, Artificial Sequence
  Oligonucleotide for detection of SNP TSC0050315
tatgggggtggat

SEQ ID NO: 205190 - DNA, 13 bp, Artificial Sequence
  Oligonucleotide for detection of SNP TSC0050315
atccacccccata

SEQ ID NO: 205191 - DNA, 13 bp, Artificial Sequence
  Oligonucleotide for detection of SNP TSC0050316
aatagtatttgtt

SEQ ID NO: 205192 - DNA, 13 bp, Artificial Sequence
  Oligonucleotide for detection of SNP TSC0050316
aacaaatactatt

SEQ ID NO: 205193 - DNA, 13 bp, Artificial Sequence
  Oligonucleotide for detection of SNP TSC0050316
aatagtttttgtt

SEQ ID NO: 205194 - DNA, 13 bp, Artificial Sequence
  Oligonucleotide for detection of SNP TSC0050316
aacaaaaactatt

SEQ ID NO: 205195 - DNA, 13 bp, Artificial Sequence
  Oligonucleotide for detection of SNP TSC0050316
agtagatgttatt

SEQ ID NO: 205196 - DNA, 13 bp, Artificial Sequence
  Oligonucleotide for detection of SNP TSC0050316
aataacatctact

SEQ ID NO: 205197 - DNA, 13 bp, Artificial Sequence
  Oligonucleotide for detection of SNP TSC0050316
agtagaggttatt

SEQ ID NO: 205198 - DNA, 13 bp, Artificial Sequence
  Oligonucleotide for detection of SNP TSC0050316
aataacctctact

SEQ ID NO: 205199 - DNA, 13 bp, Artificial Sequence
  Oligonucleotide for detection of SNP TSC0010262
attgttgtggaag

SEQ ID NO: 205200 - DNA, 13 bp, Artificial Sequence
  Oligonucleotide for detection of SNP TSC0010262
cttccacaacaat

SEQ ID NO: 205201 - DNA, 13 bp, Artificial Sequence
  Oligonucleotide for detection of SNP TSC0010262
attgttatggaag

SEQ ID NO: 205202 - DNA, 13 bp, Artificial Sequence
  Oligonucleotide for detection of SNP TSC0010262
cttccataacaat

SEQ ID NO: 205203 - DNA, 13 bp, Artificial Sequence
  Oligonucleotide for detection of SNP TSC0050317
ttggtgtgagtty

SEQ ID NO: 205204 - DNA, 13 bp, Artificial Sequence
  Oligonucleotide for detection of SNP TSC0050317
raactcacaccaa

SEQ ID NO: 205205 - DNA, 13 bp, Artificial Sequence
  Oligonucleotide for detection of SNP TSC0050317
ttggtgggagtty

SEQ ID NO: 205206 - DNA, 13 bp, Artificial Sequence
  Oligonucleotide for detection of SNP TSC0050317
raactcccaccaa

SEQ ID NO: 205207 - DNA, 13 bp, Artificial Sequence
  Oligonucleotide for detection of SNP TSC0050317
tcggtgtgagtty

SEQ ID NO: 205208 - DNA, 13 bp, Artificial Sequence
  Oligonucleotide for detection of SNP TSC0050317
raactcacaccga

SEQ ID NO: 205209 - DNA, 13 bp, Artificial Sequence
  Oligonucleotide for detection of SNP TSC0050317
tcggtgggagtty

SEQ ID NO: 205210 - DNA, 13 bp, Artificial Sequence
  Oligonucleotide for detection of SNP TSC0050317
raactcccaccga

SEQ ID NO: 205211 - DNA, 13 bp, Artificial Sequence
  Oligonucleotide for detection of SNP TSC0050317
ttggtgcgagtty

SEQ ID NO: 205212 - DNA, 13 bp, Artificial Sequence
  Oligonucleotide for detection of SNP TSC0050317
raactcgcaccaa

SEQ ID NO: 205213 - DNA, 13 bp, Artificial Sequence
  Oligonucleotide for detection of SNP TSC0050317
tcggtgcgagtty

SEQ ID NO: 205214 - DNA, 13 bp, Artificial Sequence
  Oligonucleotide for detection of SNP TSC0050317
raactcgcaccga

SEQ ID NO: 205215 - DNA, 13 bp, Artificial Sequence
  Oligonucleotide for detection of SNP TSC0050317
gggtttgtattgg

SEQ ID NO: 205216 - DNA, 13 bp, Artificial Sequence
  Oligonucleotide for detection of SNP TSC0050317
ccaatacaaaccc

SEQ ID NO: 205217 - DNA, 13 bp, Artificial Sequence
  Oligonucleotide for detection of SNP TSC0050317
gggtttttattgg

SEQ ID NO: 205218 - DNA, 13 bp, Artificial Sequence
  Oligonucleotide for detection of SNP TSC0050317
ccaataaaaaccc

SEQ ID NO: 205219 - DNA, 13 bp, Artificial Sequence
  Oligonucleotide for detection of SNP TSC0050317
gggttcgtattgg

SEQ ID NO: 205220 - DNA, 13 bp, Artificial Sequence
  Oligonucleotide for detection of SNP TSC0050317
ccaatacgaaccc

SEQ ID NO: 205221 - DNA, 13 bp, Artificial Sequence
  Oligonucleotide for detection of SNP TSC0050317
gggtttttatcgg

SEQ ID NO: 205222 - DNA, 13 bp, Artificial Sequence
  Oligonucleotide for detection of SNP TSC0050317
ccgataaaaaccc

SEQ ID NO: 205223 - DNA, 13 bp, Artificial Sequence
  Oligonucleotide for detection of SNP TSC0050317
gggtttgtatcgg

SEQ ID NO: 205224 - DNA, 13 bp, Artificial Sequence
  Oligonucleotide for detection of SNP TSC0050317
ccgatacaaaccc

SEQ ID NO: 205225 - DNA, 13 bp, Artificial Sequence
  Oligonucleotide for detection of SNP TSC0050317
gggttcgtatcgg

SEQ ID NO: 205226 - DNA, 13 bp, Artificial Sequence
  Oligonucleotide for detection of SNP TSC0050317
ccgatacgaaccc

SEQ ID NO: 205227 - DNA, 13 bp, Artificial Sequence
  Oligonucleotide for detection of SNP TSC0000659
tttgatatattgg

SEQ ID NO: 205228 - DNA, 13 bp, Artificial Sequence
  Oligonucleotide for detection of SNP TSC0000659
ccaatatatcaaa

SEQ ID NO: 205229 - DNA, 13 bp, Artificial Sequence
  Oligonucleotide for detection of SNP TSC0000659
tttgatgtattgg

SEQ ID NO: 205230 - DNA, 13 bp, Artificial Sequence
  Oligonucleotide for detection of SNP TSC0000659
ccaatacatcaaa

SEQ ID NO: 205231 - DNA, 13 bp, Artificial Sequence
  Oligonucleotide for detection of SNP TSC0000660
tagggaatgagty

SEQ ID NO: 205232 - DNA, 13 bp, Artificial Sequence
  Oligonucleotide for detection of SNP TSC0000660
ractcattcccta

SEQ ID NO: 205233 - DNA, 13 bp, Artificial Sequence
  Oligonucleotide for detection of SNP TSC0000660
tagggattgagty

SEQ ID NO: 205234 - DNA, 13 bp, Artificial Sequence
  Oligonucleotide for detection of SNP TSC0000660
ractcaatcccta

SEQ ID NO: 205235 - DNA, 13 bp, Artificial Sequence
  Oligonucleotide for detection of SNP TSC0050318
gtaagatgttttt

SEQ ID NO: 205236 - DNA, 13 bp, Artificial Sequence
  Oligonucleotide for detection of SNP TSC0050318
aaaaacatcttac

SEQ ID NO: 205237 - DNA, 13 bp, Artificial Sequence
  Oligonucleotide for detection of SNP TSC0050318
gtaagacgttttt

SEQ ID NO: 205238 - DNA, 13 bp, Artificial Sequence
  Oligonucleotide for detection of SNP TSC0050318
aaaaacgtcttac

SEQ ID NO: 205239 - DNA, 13 bp, Artificial Sequence
  Oligonucleotide for detection of SNP TSC0050318
agaagtgttttay

SEQ ID NO: 205240 - DNA, 13 bp, Artificial Sequence
  Oligonucleotide for detection of SNP TSC0050318
rtaaaacacttct

SEQ ID NO: 205241 - DNA, 13 bp, Artificial Sequence
  Oligonucleotide for detection of SNP TSC0050318
agaagtattttay

SEQ ID NO: 205242 - DNA, 13 bp, Artificial Sequence
  Oligonucleotide for detection of SNP TSC0050318
rtaaaatacttct

SEQ ID NO: 205243 - DNA, 13 bp, Artificial Sequence
  Oligonucleotide for detection of SNP TSC0050318
agaagcgttttay

SEQ ID NO: 205244 - DNA, 13 bp, Artificial Sequence
  Oligonucleotide for detection of SNP TSC0050318
rtaaaacgcttct

SEQ ID NO: 205245 - DNA, 13 bp, Artificial Sequence
  Oligonucleotide for detection of SNP TSC0000845
ggtaaagttttgt

SEQ ID NO: 205246 - DNA, 13 bp, Artificial Sequence
  Oligonucleotide for detection of SNP TSC0000845
acaaaactttacc

SEQ ID NO: 205247 - DNA, 13 bp, Artificial Sequence
  Oligonucleotide for detection of SNP TSC0050319
aagaataaggtag

SEQ ID NO: 205248 - DNA, 13 bp, Artificial Sequence
  Oligonucleotide for detection of SNP TSC0050319
ctaccttattctt

SEQ ID NO: 205249 - DNA, 13 bp, Artificial Sequence
  Oligonucleotide for detection of SNP TSC0050319
aagaatgaggtag

SEQ ID NO: 205250 - DNA, 13 bp, Artificial Sequence
  Oligonucleotide for detection of SNP TSC0050319
ctacctcattctt

SEQ ID NO: 205251 - DNA, 13 bp, Artificial Sequence
  Oligonucleotide for detection of SNP TSC0050319
aagaacgaggtag

SEQ ID NO: 205252 - DNA, 13 bp, Artificial Sequence
  Oligonucleotide for detection of SNP TSC0050319
ctacctcgttctt

SEQ ID NO: 205253 - DNA, 13 bp, Artificial Sequence
  Oligonucleotide for detection of SNP TSC0050320
aagaggatttttt

SEQ ID NO: 205254 - DNA, 13 bp, Artificial Sequence
  Oligonucleotide for detection of SNP TSC0050320
aaaaaatcctctt

SEQ ID NO: 205255 - DNA, 13 bp, Artificial Sequence
  Oligonucleotide for detection of SNP TSC0050320
aagagggtttttt

SEQ ID NO: 205256 - DNA, 13 bp, Artificial Sequence
  Oligonucleotide for detection of SNP TSC0050320
aaaaaaccctctt

SEQ ID NO: 205257 - DNA, 13 bp, Artificial Sequence
  Oligonucleotide for detection of SNP TSC0050321
agagggtagatay

SEQ ID NO: 205258 - DNA, 13 bp, Artificial Sequence
  Oligonucleotide for detection of SNP TSC0050321
rtatctaccctct

SEQ ID NO: 205259 - DNA, 13 bp, Artificial Sequence
  Oligonucleotide for detection of SNP TSC0050322
agtaataatagta

SEQ ID NO: 205260 - DNA, 13 bp, Artificial Sequence
  Oligonucleotide for detection of SNP TSC0050322
tactattattact

SEQ ID NO: 205261 - DNA, 13 bp, Artificial Sequence
  Oligonucleotide for detection of SNP TSC0050322
agtaattatagta

SEQ ID NO: 205262 - DNA, 13 bp, Artificial Sequence
  Oligonucleotide for detection of SNP TSC0050322
tactataattact

SEQ ID NO: 205263 - DNA, 13 bp, Artificial Sequence
  Oligonucleotide for detection of SNP TSC0050322
tgttgttattgtt

SEQ ID NO: 205264 - DNA, 13 bp, Artificial Sequence
  Oligonucleotide for detection of SNP TSC0050322
aacaataacaaca

SEQ ID NO: 205265 - DNA, 13 bp, Artificial Sequence
  Oligonucleotide for detection of SNP TSC0050322
tgttgtgattgtt

SEQ ID NO: 205266 - DNA, 13 bp, Artificial Sequence
  Oligonucleotide for detection of SNP TSC0050322
aacaatcacaaca

SEQ ID NO: 205267 - DNA, 13 bp, Artificial Sequence
  Oligonucleotide for detection of SNP TSC0050323
agagtaatagtat

SEQ ID NO: 205268 - DNA, 13 bp, Artificial Sequence
  Oligonucleotide for detection of SNP TSC0050323
atactattactct

SEQ ID NO: 205269 - DNA, 13 bp, Artificial Sequence
  Oligonucleotide for detection of SNP TSC0050323
agagtagtagtat

SEQ ID NO: 205270 - DNA, 13 bp, Artificial Sequence
  Oligonucleotide for detection of SNP TSC0050323
atactactactct

SEQ ID NO: 205271 - DNA, 13 bp, Artificial Sequence
  Oligonucleotide for detection of SNP TSC0050324
aacgggaataata

SEQ ID NO: 205272 - DNA, 13 bp, Artificial Sequence
  Oligonucleotide for detection of SNP TSC0050324
tattattcccgtt

SEQ ID NO: 205273 - DNA, 13 bp, Artificial Sequence
  Oligonucleotide for detection of SNP TSC0050324
aacggggataata

SEQ ID NO: 205274 - DNA, 13 bp, Artificial Sequence
  Oligonucleotide for detection of SNP TSC0050324
tattatccccgtt

SEQ ID NO: 205275 - DNA, 13 bp, Artificial Sequence
  Oligonucleotide for detection of SNP TSC0050325
aatattagttaat

SEQ ID NO: 205276 - DNA, 13 bp, Artificial Sequence
  Oligonucleotide for detection of SNP TSC0050325
attaactaatatt

SEQ ID NO: 205277 - DNA, 13 bp, Artificial Sequence
  Oligonucleotide for detection of SNP TSC0050325
aatattggttaat

SEQ ID NO: 205278 - DNA, 13 bp, Artificial Sequence
  Oligonucleotide for detection of SNP TSC0050325
attaaccaatatt

SEQ ID NO: 205279 - DNA, 13 bp, Artificial Sequence
  Oligonucleotide for detection of SNP TSC0050326
aaatatagatgta

SEQ ID NO: 205280 - DNA, 13 bp, Artificial Sequence
  Oligonucleotide for detection of SNP TSC0050326
tacatctatattt

SEQ ID NO: 205281 - DNA, 13 bp, Artificial Sequence
  Oligonucleotide for detection of SNP TSC0050326
aaatatggatgta

SEQ ID NO: 205282 - DNA, 13 bp, Artificial Sequence
  Oligonucleotide for detection of SNP TSC0050326
tacatccatattt

SEQ ID NO: 205283 - DNA, 13 bp, Artificial Sequence
  Oligonucleotide for detection of SNP TSC0050326
aaatacggatgta

SEQ ID NO: 205284 - DNA, 13 bp, Artificial Sequence
  Oligonucleotide for detection of SNP TSC0050326
tacatccgtattt

SEQ ID NO: 205285 - DNA, 13 bp, Artificial Sequence
  Oligonucleotide for detection of SNP TSC0050326
tatatttgtattt

SEQ ID NO: 205286 - DNA, 13 bp, Artificial Sequence
  Oligonucleotide for detection of SNP TSC0050326
aaatacaaatata

SEQ ID NO: 205287 - DNA, 13 bp, Artificial Sequence
  Oligonucleotide for detection of SNP TSC0050326
tatattcgtattt

SEQ ID NO: 205288 - DNA, 13 bp, Artificial Sequence
  Oligonucleotide for detection of SNP TSC0050326
aaatacgaatata

SEQ ID NO: 205289 - DNA, 13 bp, Artificial Sequence
  Oligonucleotide for detection of SNP TSC0050328
atagtaagttttg

SEQ ID NO: 205290 - DNA, 13 bp, Artificial Sequence
  Oligonucleotide for detection of SNP TSC0050328
caaaacttactat

SEQ ID NO: 205291 - DNA, 13 bp, Artificial Sequence
  Oligonucleotide for detection of SNP TSC0050328
atagtaggttttg

SEQ ID NO: 205292 - DNA, 13 bp, Artificial Sequence
  Oligonucleotide for detection of SNP TSC0050328
caaaacctactat

SEQ ID NO: 205293 - DNA, 13 bp, Artificial Sequence
  Oligonucleotide for detection of SNP TSC0050329
tgtaaaatttttt

SEQ ID NO: 205294 - DNA, 13 bp, Artificial Sequence
  Oligonucleotide for detection of SNP TSC0050329
aaaaaattttaca

SEQ ID NO: 205295 - DNA, 13 bp, Artificial Sequence
  Oligonucleotide for detection of SNP TSC0050330
aattgggttaatt

SEQ ID NO: 205296 - DNA, 13 bp, Artificial Sequence
  Oligonucleotide for detection of SNP TSC0050330
aattaacccaatt

SEQ ID NO: 205297 - DNA, 13 bp, Artificial Sequence
  Oligonucleotide for detection of SNP TSC0050330
aattggattaatt

SEQ ID NO: 205298 - DNA, 13 bp, Artificial Sequence
  Oligonucleotide for detection of SNP TSC0050330
aattaatccaatt

SEQ ID NO: 205299 - DNA, 13 bp, Artificial Sequence
  Oligonucleotide for detection of SNP TSC0050331
agttagtgattta

SEQ ID NO: 205300 - DNA, 13 bp, Artificial Sequence
  Oligonucleotide for detection of SNP TSC0050331
taaatcactaact

SEQ ID NO: 205301 - DNA, 13 bp, Artificial Sequence
  Oligonucleotide for detection of SNP TSC0050331
agttagggattta

SEQ ID NO: 205302 - DNA, 13 bp, Artificial Sequence
  Oligonucleotide for detection of SNP TSC0050331
taaatccctaact

SEQ ID NO: 205303 - DNA, 13 bp, Artificial Sequence
  Oligonucleotide for detection of SNP TSC0050331
tagattattaatt

SEQ ID NO: 205304 - DNA, 13 bp, Artificial Sequence
  Oligonucleotide for detection of SNP TSC0050331
aattaataatcta

SEQ ID NO: 205305 - DNA, 13 bp, Artificial Sequence
  Oligonucleotide for detection of SNP TSC0050331
tagatttttaatt

SEQ ID NO: 205306 - DNA, 13 bp, Artificial Sequence
  Oligonucleotide for detection of SNP TSC0050331
aattaaaaatcta

SEQ ID NO: 205307 - DNA, 13 bp, Artificial Sequence
  Oligonucleotide for detection of SNP TSC0001315
taaatagataaat

SEQ ID NO: 205308 - DNA, 13 bp, Artificial Sequence
  Oligonucleotide for detection of SNP TSC0001315
atttatctattta

SEQ ID NO: 205309 - DNA, 13 bp, Artificial Sequence
  Oligonucleotide for detection of SNP TSC0001315
atttatatgttta

SEQ ID NO: 205310 - DNA, 13 bp, Artificial Sequence
  Oligonucleotide for detection of SNP TSC0001315
taaacatataaat

SEQ ID NO: 205311 - DNA, 13 bp, Artificial Sequence
  Oligonucleotide for detection of SNP TSC0050333
ttatgatgataty

SEQ ID NO: 205312 - DNA, 13 bp, Artificial Sequence
  Oligonucleotide for detection of SNP TSC0050333
ratatcatcataa

SEQ ID NO: 205313 - DNA, 13 bp, Artificial Sequence
  Oligonucleotide for detection of SNP TSC0050333
ttatgacgataty

SEQ ID NO: 205314 - DNA, 13 bp, Artificial Sequence
  Oligonucleotide for detection of SNP TSC0050333
ratatcgtcataa

SEQ ID NO: 205315 - DNA, 13 bp, Artificial Sequence
  Oligonucleotide for detection of SNP TSC0050333
gatgttgttatga

SEQ ID NO: 205316 - DNA, 13 bp, Artificial Sequence
  Oligonucleotide for detection of SNP TSC0050333
tcataacaacatc

SEQ ID NO: 205317 - DNA, 13 bp, Artificial Sequence
  Oligonucleotide for detection of SNP TSC0050333
gatgttattatga

SEQ ID NO: 205318 - DNA, 13 bp, Artificial Sequence
  Oligonucleotide for detection of SNP TSC0050333
tcataataacatc

SEQ ID NO: 205319 - DNA, 13 bp, Artificial Sequence
  Oligonucleotide for detection of SNP TSC0050333
gatgtcgttatga

SEQ ID NO: 205320 - DNA, 13 bp, Artificial Sequence
  Oligonucleotide for detection of SNP TSC0050333
tcataacgacatc

SEQ ID NO: 205321 - DNA, 13 bp, Artificial Sequence
  Oligonucleotide for detection of SNP TSC0050338
aatagaaatttty

SEQ ID NO: 205322 - DNA, 13 bp, Artificial Sequence
  Oligonucleotide for detection of SNP TSC0050338
raaaatttctatt

SEQ ID NO: 205323 - DNA, 13 bp, Artificial Sequence
  Oligonucleotide for detection of SNP TSC0050338
aatagatatttty

SEQ ID NO: 205324 - DNA, 13 bp, Artificial Sequence
  Oligonucleotide for detection of SNP TSC0050338
raaaatatctatt

SEQ ID NO: 205325 - DNA, 13 bp, Artificial Sequence
  Oligonucleotide for detection of SNP TSC0050338
gaaaatttttgtt

SEQ ID NO: 205326 - DNA, 13 bp, Artificial Sequence
  Oligonucleotide for detection of SNP TSC0050338
aacaaaaattttc

SEQ ID NO: 205327 - DNA, 13 bp, Artificial Sequence
  Oligonucleotide for detection of SNP TSC0050338
gaaaatgtttgtt

SEQ ID NO: 205328 - DNA, 13 bp, Artificial Sequence
  Oligonucleotide for detection of SNP TSC0050338
aacaaacattttc

SEQ ID NO: 205329 - DNA, 13 bp, Artificial Sequence
  Oligonucleotide for detection of SNP TSC0050341
gagagtaaagtgg

SEQ ID NO: 205330 - DNA, 13 bp, Artificial Sequence
  Oligonucleotide for detection of SNP TSC0050341
ccactttactctc

SEQ ID NO: 205331 - DNA, 13 bp, Artificial Sequence
  Oligonucleotide for detection of SNP TSC0050341
gagagttaagtgg

SEQ ID NO: 205332 - DNA, 13 bp, Artificial Sequence
  Oligonucleotide for detection of SNP TSC0050341
ccacttaactctc

SEQ ID NO: 205333 - DNA, 13 bp, Artificial Sequence
  Oligonucleotide for detection of SNP TSC0050342
ttatgattaggaa

SEQ ID NO: 205334 - DNA, 13 bp, Artificial Sequence
  Oligonucleotide for detection of SNP TSC0050342
ttcctaatcataa

SEQ ID NO: 205335 - DNA, 13 bp, Artificial Sequence
  Oligonucleotide for detection of SNP TSC0050342
ttatgagtaggaa

SEQ ID NO: 205336 - DNA, 13 bp, Artificial Sequence
  Oligonucleotide for detection of SNP TSC0050342
ttcctactcataa

SEQ ID NO: 205337 - DNA, 13 bp, Artificial Sequence
  Oligonucleotide for detection of SNP TSC0050342
tttttggttataa

SEQ ID NO: 205338 - DNA, 13 bp, Artificial Sequence
  Oligonucleotide for detection of SNP TSC0050342
ttataaccaaaaa

SEQ ID NO: 205339 - DNA, 13 bp, Artificial Sequence
  Oligonucleotide for detection of SNP TSC0050342
tttttgtttataa

SEQ ID NO: 205340 - DNA, 13 bp, Artificial Sequence
  Oligonucleotide for detection of SNP TSC0050342
ttataaacaaaaa

SEQ ID NO: 205341 - DNA, 13 bp, Artificial Sequence
  Oligonucleotide for detection of SNP TSC0050343
attatcgtaatat

SEQ ID NO: 205342 - DNA, 13 bp, Artificial Sequence
  Oligonucleotide for detection of SNP TSC0050343
atattacgataat

SEQ ID NO: 205343 - DNA, 13 bp, Artificial Sequence
  Oligonucleotide for detection of SNP TSC0050343
atattgtgatggt

SEQ ID NO: 205344 - DNA, 13 bp, Artificial Sequence
  Oligonucleotide for detection of SNP TSC0050343
accatcacaatat

SEQ ID NO: 205345 - DNA, 13 bp, Artificial Sequence
  Oligonucleotide for detection of SNP TSC0050343
atattgcgatggt

SEQ ID NO: 205346 - DNA, 13 bp, Artificial Sequence
  Oligonucleotide for detection of SNP TSC0050343
accatcgcaatat

SEQ ID NO: 205347 - DNA, 13 bp, Artificial Sequence
  Oligonucleotide for detection of SNP TSC0050344
gtagatatggaaa

SEQ ID NO: 205348 - DNA, 13 bp, Artificial Sequence
  Oligonucleotide for detection of SNP TSC0050344
tttccatatctac

SEQ ID NO: 205349 - DNA, 13 bp, Artificial Sequence
  Oligonucleotide for detection of SNP TSC0050344
gtagatttggaaa

SEQ ID NO: 205350 - DNA, 13 bp, Artificial Sequence
  Oligonucleotide for detection of SNP TSC0050344
tttccaaatctac

SEQ ID NO: 205351 - DNA, 13 bp, Artificial Sequence
  Oligonucleotide for detection of SNP TSC0050344
tttttaggtttgy

SEQ ID NO: 205352 - DNA, 13 bp, Artificial Sequence
  Oligonucleotide for detection of SNP TSC0050344
rcaaacctaaaaa

SEQ ID NO: 205353 - DNA, 13 bp, Artificial Sequence
  Oligonucleotide for detection of SNP TSC0050345
ttattaatttgat

SEQ ID NO: 205354 - DNA, 13 bp, Artificial Sequence
  Oligonucleotide for detection of SNP TSC0050345
atcaaattaataa

SEQ ID NO: 205355 - DNA, 13 bp, Artificial Sequence
  Oligonucleotide for detection of SNP TSC0050345
ttattattttgat

SEQ ID NO: 205356 - DNA, 13 bp, Artificial Sequence
  Oligonucleotide for detection of SNP TSC0050345
atcaaaataataa

SEQ ID NO: 205357 - DNA, 13 bp, Artificial Sequence
  Oligonucleotide for detection of SNP TSC0050345
attaagttaatag

SEQ ID NO: 205358 - DNA, 13 bp, Artificial Sequence
  Oligonucleotide for detection of SNP TSC0050345
ctattaacttaat

SEQ ID NO: 205359 - DNA, 13 bp, Artificial Sequence
  Oligonucleotide for detection of SNP TSC0050345
attaaggtaatag

SEQ ID NO: 205360 - DNA, 13 bp, Artificial Sequence
  Oligonucleotide for detection of SNP TSC0050345
ctattaccttaat

SEQ ID NO: 205361 - DNA, 13 bp, Artificial Sequence
  Oligonucleotide for detection of SNP TSC0008170
ttgagggggagty

SEQ ID NO: 205362 - DNA, 13 bp, Artificial Sequence
  Oligonucleotide for detection of SNP TSC0008170
ractccccctcaa

SEQ ID NO: 205363 - DNA, 13 bp, Artificial Sequence
  Oligonucleotide for detection of SNP TSC0050348
tttggggtttatg

SEQ ID NO: 205364 - DNA, 13 bp, Artificial Sequence
  Oligonucleotide for detection of SNP TSC0050348
cataaaccccaaa

SEQ ID NO: 205365 - DNA, 13 bp, Artificial Sequence
  Oligonucleotide for detection of SNP TSC0050348
tatagagtttaga

SEQ ID NO: 205366 - DNA, 13 bp, Artificial Sequence
  Oligonucleotide for detection of SNP TSC0050348
tctaaactctata

SEQ ID NO: 205367 - DNA, 13 bp, Artificial Sequence
  Oligonucleotide for detection of SNP TSC0050348
tatagattttaga

SEQ ID NO: 205368 - DNA, 13 bp, Artificial Sequence
  Oligonucleotide for detection of SNP TSC0050348
tctaaaatctata

SEQ ID NO: 205369 - DNA, 13 bp, Artificial Sequence
  Oligonucleotide for detection of SNP TSC0050349
gatttaagagtaa

SEQ ID NO: 205370 - DNA, 13 bp, Artificial Sequence
  Oligonucleotide for detection of SNP TSC0050349
ttactcttaaatc

SEQ ID NO: 205371 - DNA, 13 bp, Artificial Sequence
  Oligonucleotide for detection of SNP TSC0050349
gatttaggagtaa

SEQ ID NO: 205372 - DNA, 13 bp, Artificial Sequence
  Oligonucleotide for detection of SNP TSC0050349
ttactcctaaatc

SEQ ID NO: 205373 - DNA, 13 bp, Artificial Sequence
  Oligonucleotide for detection of SNP TSC0050350
tagagtatttaaa

SEQ ID NO: 205374 - DNA, 13 bp, Artificial Sequence
  Oligonucleotide for detection of SNP TSC0050350
tttaaatactcta

SEQ ID NO: 205375 - DNA, 13 bp, Artificial Sequence
  Oligonucleotide for detection of SNP TSC0050350
tagagtgtttaaa

SEQ ID NO: 205376 - DNA, 13 bp, Artificial Sequence
  Oligonucleotide for detection of SNP TSC0050350
tttaaacactcta

SEQ ID NO: 205377 - DNA, 13 bp, Artificial Sequence
  Oligonucleotide for detection of SNP TSC0050352
gtgtggaggtagy

SEQ ID NO: 205378 - DNA, 13 bp, Artificial Sequence
  Oligonucleotide for detection of SNP TSC0050352
rctacctccacac

SEQ ID NO: 205379 - DNA, 13 bp, Artificial Sequence
  Oligonucleotide for detection of SNP TSC0050352
gtgtggtggtagy

SEQ ID NO: 205380 - DNA, 13 bp, Artificial Sequence
  Oligonucleotide for detection of SNP TSC0050352
rctaccaccacac

SEQ ID NO: 205381 - DNA, 13 bp, Artificial Sequence
  Oligonucleotide for detection of SNP TSC0050352
gcgtggaggtagy

SEQ ID NO: 205382 - DNA, 13 bp, Artificial Sequence
  Oligonucleotide for detection of SNP TSC0050352
rctacctccacgc

SEQ ID NO: 205383 - DNA, 13 bp, Artificial Sequence
  Oligonucleotide for detection of SNP TSC0050352
gcgtggtggtagy

SEQ ID NO: 205384 - DNA, 13 bp, Artificial Sequence
  Oligonucleotide for detection of SNP TSC0050352
rctaccaccacgc

SEQ ID NO: 205385 - DNA, 13 bp, Artificial Sequence
  Oligonucleotide for detection of SNP TSC0050352
gtgtggcggtagy

SEQ ID NO: 205386 - DNA, 13 bp, Artificial Sequence
  Oligonucleotide for detection of SNP TSC0050352
rctaccgccacac

SEQ ID NO: 205387 - DNA, 13 bp, Artificial Sequence
  Oligonucleotide for detection of SNP TSC0050352
gcgtggcggtagy

SEQ ID NO: 205388 - DNA, 13 bp, Artificial Sequence
  Oligonucleotide for detection of SNP TSC0050352
rctaccgccacgc

SEQ ID NO: 205389 - DNA, 13 bp, Artificial Sequence
  Oligonucleotide for detection of SNP TSC0050352
gttgtttttatgy

SEQ ID NO: 205390 - DNA, 13 bp, Artificial Sequence
  Oligonucleotide for detection of SNP TSC0050352
rcataaaaacaac

SEQ ID NO: 205391 - DNA, 13 bp, Artificial Sequence
  Oligonucleotide for detection of SNP TSC0050352
gttgttgttatgy

SEQ ID NO: 205392 - DNA, 13 bp, Artificial Sequence
  Oligonucleotide for detection of SNP TSC0050352
rcataacaacaac

SEQ ID NO: 205393 - DNA, 13 bp, Artificial Sequence
  Oligonucleotide for detection of SNP TSC0050352
gttgtttttacgy

SEQ ID NO: 205394 - DNA, 13 bp, Artificial Sequence
  Oligonucleotide for detection of SNP TSC0050352
rcgtaaaaacaac

SEQ ID NO: 205395 - DNA, 13 bp, Artificial Sequence
  Oligonucleotide for detection of SNP TSC0050352
gttgtcgttatgy

SEQ ID NO: 205396 - DNA, 13 bp, Artificial Sequence
  Oligonucleotide for detection of SNP TSC0050352
rcataacgacaac

SEQ ID NO: 205397 - DNA, 13 bp, Artificial Sequence
  Oligonucleotide for detection of SNP TSC0050352
gttgttgttacgy

SEQ ID NO: 205398 - DNA, 13 bp, Artificial Sequence
  Oligonucleotide for detection of SNP TSC0050352
rcgtaacaacaac

SEQ ID NO: 205399 - DNA, 13 bp, Artificial Sequence
  Oligonucleotide for detection of SNP TSC0050352
gttgtcgttacgy

SEQ ID NO: 205400 - DNA, 13 bp, Artificial Sequence
  Oligonucleotide for detection of SNP TSC0050352
rcgtaacgacaac

SEQ ID NO: 205401 - DNA, 13 bp, Artificial Sequence
  Oligonucleotide for detection of SNP TSC0050355
ttttttagatgtg

SEQ ID NO: 205402 - DNA, 13 bp, Artificial Sequence
  Oligonucleotide for detection of SNP TSC0050355
cacatctaaaaaa

SEQ ID NO: 205403 - DNA, 13 bp, Artificial Sequence
  Oligonucleotide for detection of SNP TSC0050355
tttttttgatgtg

SEQ ID NO: 205404 - DNA, 13 bp, Artificial Sequence
  Oligonucleotide for detection of SNP TSC0050355
cacatcaaaaaaa

SEQ ID NO: 205405 - DNA, 13 bp, Artificial Sequence
  Oligonucleotide for detection of SNP TSC0050355
ttttttcgatgtg

SEQ ID NO: 205406 - DNA, 13 bp, Artificial Sequence
  Oligonucleotide for detection of SNP TSC0050355
cacatcgaaaaaa

SEQ ID NO: 205407 - DNA, 13 bp, Artificial Sequence
  Oligonucleotide for detection of SNP TSC0050355
tatatttagggag

SEQ ID NO: 205408 - DNA, 13 bp, Artificial Sequence
  Oligonucleotide for detection of SNP TSC0050355
ctccctaaatata

SEQ ID NO: 205409 - DNA, 13 bp, Artificial Sequence
  Oligonucleotide for detection of SNP TSC0050355
tatattgagggag

SEQ ID NO: 205410 - DNA, 13 bp, Artificial Sequence
  Oligonucleotide for detection of SNP TSC0050355
ctccctcaatata

SEQ ID NO: 205411 - DNA, 13 bp, Artificial Sequence
  Oligonucleotide for detection of SNP TSC0050355
tatatcgagggag

SEQ ID NO: 205412 - DNA, 13 bp, Artificial Sequence
  Oligonucleotide for detection of SNP TSC0050355
ctccctcgatata

SEQ ID NO: 205413 - DNA, 13 bp, Artificial Sequence
  Oligonucleotide for detection of SNP TSC0050356
ttttttgagggty

SEQ ID NO: 205414 - DNA, 13 bp, Artificial Sequence
  Oligonucleotide for detection of SNP TSC0050356
raccctcaaaaaa

SEQ ID NO: 205415 - DNA, 13 bp, Artificial Sequence
  Oligonucleotide for detection of SNP TSC0050356
ttttttaagggty

SEQ ID NO: 205416 - DNA, 13 bp, Artificial Sequence
  Oligonucleotide for detection of SNP TSC0050356
racccttaaaaaa

SEQ ID NO: 205417 - DNA, 13 bp, Artificial Sequence
  Oligonucleotide for detection of SNP TSC0050357
aattttataatty

SEQ ID NO: 205418 - DNA, 13 bp, Artificial Sequence
  Oligonucleotide for detection of SNP TSC0050357
raattataaaatt

SEQ ID NO: 205419 - DNA, 13 bp, Artificial Sequence
  Oligonucleotide for detection of SNP TSC0050358
agtagtaggtttt

SEQ ID NO: 205420 - DNA, 13 bp, Artificial Sequence
  Oligonucleotide for detection of SNP TSC0050358
aaaacctactact

SEQ ID NO: 205421 - DNA, 13 bp, Artificial Sequence
  Oligonucleotide for detection of SNP TSC0050358
agtagtgggtttt

SEQ ID NO: 205422 - DNA, 13 bp, Artificial Sequence
  Oligonucleotide for detection of SNP TSC0050358
aaaacccactact

SEQ ID NO: 205423 - DNA, 13 bp, Artificial Sequence
  Oligonucleotide for detection of SNP TSC0050359
aatattggttttg

SEQ ID NO: 205424 - DNA, 13 bp, Artificial Sequence
  Oligonucleotide for detection of SNP TSC0050359
caaaaccaatatt

SEQ ID NO: 205425 - DNA, 13 bp, Artificial Sequence
  Oligonucleotide for detection of SNP TSC0050359
aatattagttttg

SEQ ID NO: 205426 - DNA, 13 bp, Artificial Sequence
  Oligonucleotide for detection of SNP TSC0050359
caaaactaatatt

SEQ ID NO: 205427 - DNA, 13 bp, Artificial Sequence
  Oligonucleotide for detection of SNP TSC0050359
aatatcggttttg

SEQ ID NO: 205428 - DNA, 13 bp, Artificial Sequence
  Oligonucleotide for detection of SNP TSC0050359
caaaaccgatatt

SEQ ID NO: 205429 - DNA, 13 bp, Artificial Sequence
  Oligonucleotide for detection of SNP TSC0050361
ttggagatatgtt

SEQ ID NO: 205430 - DNA, 13 bp, Artificial Sequence
  Oligonucleotide for detection of SNP TSC0050361
aacatatctccaa

SEQ ID NO: 205431 - DNA, 13 bp, Artificial Sequence
  Oligonucleotide for detection of SNP TSC0050361
ttggagttatgtt

SEQ ID NO: 205432 - DNA, 13 bp, Artificial Sequence
  Oligonucleotide for detection of SNP TSC0050361
aacataactccaa

SEQ ID NO: 205433 - DNA, 13 bp, Artificial Sequence
  Oligonucleotide for detection of SNP TSC0050361
aatatgtttttag

SEQ ID NO: 205434 - DNA, 13 bp, Artificial Sequence
  Oligonucleotide for detection of SNP TSC0050361
ctaaaaacatatt

SEQ ID NO: 205435 - DNA, 13 bp, Artificial Sequence
  Oligonucleotide for detection of SNP TSC0050361
aatatgattttag

SEQ ID NO: 205436 - DNA, 13 bp, Artificial Sequence
  Oligonucleotide for detection of SNP TSC0050361
ctaaaatcatatt

SEQ ID NO: 205437 - DNA, 13 bp, Artificial Sequence
  Oligonucleotide for detection of SNP TSC0050362
gattgataggatg

SEQ ID NO: 205438 - DNA, 13 bp, Artificial Sequence
  Oligonucleotide for detection of SNP TSC0050362
catcctatcaatc

SEQ ID NO: 205439 - DNA, 13 bp, Artificial Sequence
  Oligonucleotide for detection of SNP TSC0050362
gattgagaggatg

SEQ ID NO: 205440 - DNA, 13 bp, Artificial Sequence
  Oligonucleotide for detection of SNP TSC0050362
catcctctcaatc

SEQ ID NO: 205441 - DNA, 13 bp, Artificial Sequence
  Oligonucleotide for detection of SNP TSC0050362
tattttgttaaty

SEQ ID NO: 205442 - DNA, 13 bp, Artificial Sequence
  Oligonucleotide for detection of SNP TSC0050362
rattaacaaaata

SEQ ID NO: 205443 - DNA, 13 bp, Artificial Sequence
  Oligonucleotide for detection of SNP TSC0050362
tatttttttaaty

SEQ ID NO: 205444 - DNA, 13 bp, Artificial Sequence
  Oligonucleotide for detection of SNP TSC0050362
rattaaaaaaata

SEQ ID NO: 205445 - DNA, 13 bp, Artificial Sequence
  Oligonucleotide for detection of SNP TSC0050363
aagtttaataagy

SEQ ID NO: 205446 - DNA, 13 bp, Artificial Sequence
  Oligonucleotide for detection of SNP TSC0050363
rcttattaaactt

SEQ ID NO: 205447 - DNA, 13 bp, Artificial Sequence
  Oligonucleotide for detection of SNP TSC0050363
aagttttataagy

SEQ ID NO: 205448 - DNA, 13 bp, Artificial Sequence
  Oligonucleotide for detection of SNP TSC0050363
rcttataaaactt

SEQ ID NO: 205449 - DNA, 13 bp, Artificial Sequence
  Oligonucleotide for detection of SNP TSC0050363
gtttgttgaattt

SEQ ID NO: 205450 - DNA, 13 bp, Artificial Sequence
  Oligonucleotide for detection of SNP TSC0050363
aaattcaacaaac

SEQ ID NO: 205451 - DNA, 13 bp, Artificial Sequence
  Oligonucleotide for detection of SNP TSC0050363
gtttgtggaattt

SEQ ID NO: 205452 - DNA, 13 bp, Artificial Sequence
  Oligonucleotide for detection of SNP TSC0050363
aaattccacaaac

SEQ ID NO: 205453 - DNA, 13 bp, Artificial Sequence
  Oligonucleotide for detection of SNP TSC0050364
taaaataaagtag

SEQ ID NO: 205454 - DNA, 13 bp, Artificial Sequence
  Oligonucleotide for detection of SNP TSC0050364
ctactttatttta

SEQ ID NO: 205455 - DNA, 13 bp, Artificial Sequence
  Oligonucleotide for detection of SNP TSC0050364
taaaatgaagtag

SEQ ID NO: 205456 - DNA, 13 bp, Artificial Sequence
  Oligonucleotide for detection of SNP TSC0050364
ctacttcatttta

SEQ ID NO: 205457 - DNA, 13 bp, Artificial Sequence
  Oligonucleotide for detection of SNP TSC0050365
gagaggatgaggy

SEQ ID NO: 205458 - DNA, 13 bp, Artificial Sequence
  Oligonucleotide for detection of SNP TSC0050365
rcctcatcctctc

SEQ ID NO: 205459 - DNA, 13 bp, Artificial Sequence
  Oligonucleotide for detection of SNP TSC0050365
gagaggttgaggy

SEQ ID NO: 205460 - DNA, 13 bp, Artificial Sequence
  Oligonucleotide for detection of SNP TSC0050365
rcctcaacctctc

SEQ ID NO: 205461 - DNA, 13 bp, Artificial Sequence
  Oligonucleotide for detection of SNP TSC0050366
aaatgaattatty

SEQ ID NO: 205462 - DNA, 13 bp, Artificial Sequence
  Oligonucleotide for detection of SNP TSC0050366
raataattcattt

SEQ ID NO: 205463 - DNA, 13 bp, Artificial Sequence
  Oligonucleotide for detection of SNP TSC0050366
aaatgagttatty

SEQ ID NO: 205464 - DNA, 13 bp, Artificial Sequence
  Oligonucleotide for detection of SNP TSC0050366
raataactcattt

SEQ ID NO: 205465 - DNA, 13 bp, Artificial Sequence
  Oligonucleotide for detection of SNP TSC0050366
aaacgaattatty

SEQ ID NO: 205466 - DNA, 13 bp, Artificial Sequence
  Oligonucleotide for detection of SNP TSC0050366
raataattcgttt

SEQ ID NO: 205467 - DNA, 13 bp, Artificial Sequence
  Oligonucleotide for detection of SNP TSC0050366
aaacgagttatty

SEQ ID NO: 205468 - DNA, 13 bp, Artificial Sequence
  Oligonucleotide for detection of SNP TSC0050366
raataactcgttt

SEQ ID NO: 205469 - DNA, 13 bp, Artificial Sequence
  Oligonucleotide for detection of SNP TSC0050367
aggtggaggtatg

SEQ ID NO: 205470 - DNA, 13 bp, Artificial Sequence
  Oligonucleotide for detection of SNP TSC0050367
catacctccacct

SEQ ID NO: 205471 - DNA, 13 bp, Artificial Sequence
  Oligonucleotide for detection of SNP TSC0050367
aggtggtggtatg

SEQ ID NO: 205472 - DNA, 13 bp, Artificial Sequence
  Oligonucleotide for detection of SNP TSC0050367
cataccaccacct

SEQ ID NO: 205473 - DNA, 13 bp, Artificial Sequence
  Oligonucleotide for detection of SNP TSC0050367
aggtggcggtatg

SEQ ID NO: 205474 - DNA, 13 bp, Artificial Sequence
  Oligonucleotide for detection of SNP TSC0050367
cataccgccacct

SEQ ID NO: 205475 - DNA, 13 bp, Artificial Sequence
  Oligonucleotide for detection of SNP TSC0050367
tatgtttttattt

SEQ ID NO: 205476 - DNA, 13 bp, Artificial Sequence
  Oligonucleotide for detection of SNP TSC0050367
aaataaaaacata

SEQ ID NO: 205477 - DNA, 13 bp, Artificial Sequence
  Oligonucleotide for detection of SNP TSC0050369
gttttaattaaga

SEQ ID NO: 205478 - DNA, 13 bp, Artificial Sequence
  Oligonucleotide for detection of SNP TSC0050369
tcttaattaaaac

SEQ ID NO: 205479 - DNA, 13 bp, Artificial Sequence
  Oligonucleotide for detection of SNP TSC0050369
gttttatttaaga

SEQ ID NO: 205480 - DNA, 13 bp, Artificial Sequence
  Oligonucleotide for detection of SNP TSC0050369
tcttaaataaaac

SEQ ID NO: 205481 - DNA, 13 bp, Artificial Sequence
  Oligonucleotide for detection of SNP TSC0050369
ttttaattaaaay

SEQ ID NO: 205482 - DNA, 13 bp, Artificial Sequence
  Oligonucleotide for detection of SNP TSC0050369
rttttaattaaaa

SEQ ID NO: 205483 - DNA, 13 bp, Artificial Sequence
  Oligonucleotide for detection of SNP TSC0050369
ttttaaataaaay

SEQ ID NO: 205484 - DNA, 13 bp, Artificial Sequence
  Oligonucleotide for detection of SNP TSC0050369
rttttatttaaaa

SEQ ID NO: 205485 - DNA, 13 bp, Artificial Sequence
  Oligonucleotide for detection of SNP TSC0050370
taggttggtgtaa

SEQ ID NO: 205486 - DNA, 13 bp, Artificial Sequence
  Oligonucleotide for detection of SNP TSC0050370
ttacaccaaccta

SEQ ID NO: 205487 - DNA, 13 bp, Artificial Sequence
  Oligonucleotide for detection of SNP TSC0050372
attttttagtgtg

SEQ ID NO: 205488 - DNA, 13 bp, Artificial Sequence
  Oligonucleotide for detection of SNP TSC0050372
cacactaaaaaat

SEQ ID NO: 205489 - DNA, 13 bp, Artificial Sequence
  Oligonucleotide for detection of SNP TSC0050372
atttttgagtgtg

SEQ ID NO: 205490 - DNA, 13 bp, Artificial Sequence
  Oligonucleotide for detection of SNP TSC0050372
cacactcaaaaat

SEQ ID NO: 205491 - DNA, 13 bp, Artificial Sequence
  Oligonucleotide for detection of SNP TSC0050372
tatattaaaaaat

SEQ ID NO: 205492 - DNA, 13 bp, Artificial Sequence
  Oligonucleotide for detection of SNP TSC0050372
attttttaatata

SEQ ID NO: 205493 - DNA, 13 bp, Artificial Sequence
  Oligonucleotide for detection of SNP TSC0050373
agaaaaataagat

SEQ ID NO: 205494 - DNA, 13 bp, Artificial Sequence
  Oligonucleotide for detection of SNP TSC0050373
atcttatttttct

SEQ ID NO: 205495 - DNA, 13 bp, Artificial Sequence
  Oligonucleotide for detection of SNP TSC0050373
agaaaagtaagat

SEQ ID NO: 205496 - DNA, 13 bp, Artificial Sequence
  Oligonucleotide for detection of SNP TSC0050373
atcttacttttct

SEQ ID NO: 205497 - DNA, 13 bp, Artificial Sequence
  Oligonucleotide for detection of SNP TSC0050374
aatattagagtat

SEQ ID NO: 205498 - DNA, 13 bp, Artificial Sequence
  Oligonucleotide for detection of SNP TSC0050374
atactctaatatt

SEQ ID NO: 205499 - DNA, 13 bp, Artificial Sequence
  Oligonucleotide for detection of SNP TSC0050374
aatatttgagtat

SEQ ID NO: 205500 - DNA, 13 bp, Artificial Sequence
  Oligonucleotide for detection of SNP TSC0050374
atactcaaatatt

SEQ ID NO: 205501 - DNA, 13 bp, Artificial Sequence
  Oligonucleotide for detection of SNP TSC0050374
aatattcgagtat

SEQ ID NO: 205502 - DNA, 13 bp, Artificial Sequence
  Oligonucleotide for detection of SNP TSC0050374
atactcgaatatt

SEQ ID NO: 205503 - DNA, 13 bp, Artificial Sequence
  Oligonucleotide for detection of SNP TSC0050374
atattttgatatt

SEQ ID NO: 205504 - DNA, 13 bp, Artificial Sequence
  Oligonucleotide for detection of SNP TSC0050374
aatatcaaaatat

SEQ ID NO: 205505 - DNA, 13 bp, Artificial Sequence
  Oligonucleotide for detection of SNP TSC0050374
atatttggatatt

SEQ ID NO: 205506 - DNA, 13 bp, Artificial Sequence
  Oligonucleotide for detection of SNP TSC0050374
aatatccaaatat

SEQ ID NO: 205507 - DNA, 13 bp, Artificial Sequence
  Oligonucleotide for detection of SNP TSC0050374
atattcggatatt

SEQ ID NO: 205508 - DNA, 13 bp, Artificial Sequence
  Oligonucleotide for detection of SNP TSC0050374
aatatccgaatat

SEQ ID NO: 205509 - DNA, 13 bp, Artificial Sequence
  Oligonucleotide for detection of SNP TSC0050375
atatgaatggtgg

SEQ ID NO: 205510 - DNA, 13 bp, Artificial Sequence
  Oligonucleotide for detection of SNP TSC0050375
ccaccattcatat

SEQ ID NO: 205511 - DNA, 13 bp, Artificial Sequence
  Oligonucleotide for detection of SNP TSC0050375
atatgagtggtgg

SEQ ID NO: 205512 - DNA, 13 bp, Artificial Sequence
  Oligonucleotide for detection of SNP TSC0050375
ccaccactcatat

SEQ ID NO: 205513 - DNA, 13 bp, Artificial Sequence
  Oligonucleotide for detection of SNP TSC0050377
tgttttataaatt

SEQ ID NO: 205514 - DNA, 13 bp, Artificial Sequence
  Oligonucleotide for detection of SNP TSC0050377
aatttataaaaca

SEQ ID NO: 205515 - DNA, 13 bp, Artificial Sequence
  Oligonucleotide for detection of SNP TSC0050377
aatttgtggaata

SEQ ID NO: 205516 - DNA, 13 bp, Artificial Sequence
  Oligonucleotide for detection of SNP TSC0050377
tattccacaaatt

SEQ ID NO: 205517 - DNA, 13 bp, Artificial Sequence
  Oligonucleotide for detection of SNP TSC0050377
aatttgcggaata

SEQ ID NO: 205518 - DNA, 13 bp, Artificial Sequence
  Oligonucleotide for detection of SNP TSC0050377
tattccgcaaatt

SEQ ID NO: 205519 - DNA, 13 bp, Artificial Sequence
  Oligonucleotide for detection of SNP TSC0050379
atgtataaaaggy

SEQ ID NO: 205520 - DNA, 13 bp, Artificial Sequence
  Oligonucleotide for detection of SNP TSC0050379
rccttttatacat

SEQ ID NO: 205521 - DNA, 13 bp, Artificial Sequence
  Oligonucleotide for detection of SNP TSC0050379
atgtattaaaggy

SEQ ID NO: 205522 - DNA, 13 bp, Artificial Sequence
  Oligonucleotide for detection of SNP TSC0050379
rcctttaatacat

SEQ ID NO: 205523 - DNA, 13 bp, Artificial Sequence
  Oligonucleotide for detection of SNP TSC0050379
gttttttatatat

SEQ ID NO: 205524 - DNA, 13 bp, Artificial Sequence
  Oligonucleotide for detection of SNP TSC0050379
atatataaaaaac

SEQ ID NO: 205525 - DNA, 13 bp, Artificial Sequence
  Oligonucleotide for detection of SNP TSC0050379
gtttttaatatat

SEQ ID NO: 205526 - DNA, 13 bp, Artificial Sequence
  Oligonucleotide for detection of SNP TSC0050379
atatattaaaaac

SEQ ID NO: 205527 - DNA, 13 bp, Artificial Sequence
  Oligonucleotide for detection of SNP TSC0050380
tgggattaatttt

SEQ ID NO: 205528 - DNA, 13 bp, Artificial Sequence
  Oligonucleotide for detection of SNP TSC0050380
aaaattaatccca

SEQ ID NO: 205529 - DNA, 13 bp, Artificial Sequence
  Oligonucleotide for detection of SNP TSC0050380
tgggatgaatttt

SEQ ID NO: 205530 - DNA, 13 bp, Artificial Sequence
  Oligonucleotide for detection of SNP TSC0050380
aaaattcatccca

SEQ ID NO: 205531 - DNA, 13 bp, Artificial Sequence
  Oligonucleotide for detection of SNP TSC0050380
aagattaatttta

SEQ ID NO: 205532 - DNA, 13 bp, Artificial Sequence
  Oligonucleotide for detection of SNP TSC0050380
taaaattaatctt

SEQ ID NO: 205533 - DNA, 13 bp, Artificial Sequence
  Oligonucleotide for detection of SNP TSC0050380
aagatttatttta

SEQ ID NO: 205534 - DNA, 13 bp, Artificial Sequence
  Oligonucleotide for detection of SNP TSC0050380
taaaataaatctt

SEQ ID NO: 205535 - DNA, 13 bp, Artificial Sequence
  Oligonucleotide for detection of SNP TSC0050381
agaaaggattttg

SEQ ID NO: 205536 - DNA, 13 bp, Artificial Sequence
  Oligonucleotide for detection of SNP TSC0050381
caaaatcctttct

SEQ ID NO: 205537 - DNA, 13 bp, Artificial Sequence
  Oligonucleotide for detection of SNP TSC0050381
agaaagaattttg

SEQ ID NO: 205538 - DNA, 13 bp, Artificial Sequence
  Oligonucleotide for detection of SNP TSC0050381
caaaattctttct

SEQ ID NO: 205539 - DNA, 13 bp, Artificial Sequence
  Oligonucleotide for detection of SNP TSC0050382
agaaattgtagat

SEQ ID NO: 205540 - DNA, 13 bp, Artificial Sequence
  Oligonucleotide for detection of SNP TSC0050382
atctacaatttct

SEQ ID NO: 205541 - DNA, 13 bp, Artificial Sequence
  Oligonucleotide for detection of SNP TSC0050382
agaaatcgtagat

SEQ ID NO: 205542 - DNA, 13 bp, Artificial Sequence
  Oligonucleotide for detection of SNP TSC0050382
atctacgatttct

SEQ ID NO: 205543 - DNA, 13 bp, Artificial Sequence
  Oligonucleotide for detection of SNP TSC0050382
atttgtggttttt

SEQ ID NO: 205544 - DNA, 13 bp, Artificial Sequence
  Oligonucleotide for detection of SNP TSC0050382
aaaaaccacaaat

SEQ ID NO: 205545 - DNA, 13 bp, Artificial Sequence
  Oligonucleotide for detection of SNP TSC0050382
atttgtagttttt

SEQ ID NO: 205546 - DNA, 13 bp, Artificial Sequence
  Oligonucleotide for detection of SNP TSC0050382
aaaaactacaaat

SEQ ID NO: 205547 - DNA, 13 bp, Artificial Sequence
  Oligonucleotide for detection of SNP TSC0050382
atttgcggttttt

SEQ ID NO: 205548 - DNA, 13 bp, Artificial Sequence
  Oligonucleotide for detection of SNP TSC0050382
aaaaaccgcaaat

SEQ ID NO: 205549 - DNA, 13 bp, Artificial Sequence
  Oligonucleotide for detection of SNP TSC0050383
tttgttataatgt

SEQ ID NO: 205550 - DNA, 13 bp, Artificial Sequence
  Oligonucleotide for detection of SNP TSC0050383
acattataacaaa

SEQ ID NO: 205551 - DNA, 13 bp, Artificial Sequence
  Oligonucleotide for detection of SNP TSC0050383
tttgttgtaatgt

SEQ ID NO: 205552 - DNA, 13 bp, Artificial Sequence
  Oligonucleotide for detection of SNP TSC0050383
acattacaacaaa

SEQ ID NO: 205553 - DNA, 13 bp, Artificial Sequence
  Oligonucleotide for detection of SNP TSC0050383
tttgttataacgt

SEQ ID NO: 205554 - DNA, 13 bp, Artificial Sequence
  Oligonucleotide for detection of SNP TSC0050383
acgttataacaaa

SEQ ID NO: 205555 - DNA, 13 bp, Artificial Sequence
  Oligonucleotide for detection of SNP TSC0050383
tttgtcgtaatgt

SEQ ID NO: 205556 - DNA, 13 bp, Artificial Sequence
  Oligonucleotide for detection of SNP TSC0050383
acattacgacaaa

SEQ ID NO: 205557 - DNA, 13 bp, Artificial Sequence
  Oligonucleotide for detection of SNP TSC0050383
tttgttgtaacgt

SEQ ID NO: 205558 - DNA, 13 bp, Artificial Sequence
  Oligonucleotide for detection of SNP TSC0050383
acgttacaacaaa

SEQ ID NO: 205559 - DNA, 13 bp, Artificial Sequence
  Oligonucleotide for detection of SNP TSC0050383
tttgtcgtaacgt

SEQ ID NO: 205560 - DNA, 13 bp, Artificial Sequence
  Oligonucleotide for detection of SNP TSC0050383
acgttacgacaaa

SEQ ID NO: 205561 - DNA, 13 bp, Artificial Sequence
  Oligonucleotide for detection of SNP TSC0050383
atgttgtggtaag

SEQ ID NO: 205562 - DNA, 13 bp, Artificial Sequence
  Oligonucleotide for detection of SNP TSC0050383
cttaccacaacat

SEQ ID NO: 205563 - DNA, 13 bp, Artificial Sequence
  Oligonucleotide for detection of SNP TSC0050383
acgttgtggtaag

SEQ ID NO: 205564 - DNA, 13 bp, Artificial Sequence
  Oligonucleotide for detection of SNP TSC0050383
cttaccacaacgt

SEQ ID NO: 205565 - DNA, 13 bp, Artificial Sequence
  Oligonucleotide for detection of SNP TSC0050383
atgttgcggtaag

SEQ ID NO: 205566 - DNA, 13 bp, Artificial Sequence
  Oligonucleotide for detection of SNP TSC0050383
cttaccgcaacat

SEQ ID NO: 205567 - DNA, 13 bp, Artificial Sequence
  Oligonucleotide for detection of SNP TSC0050383
acgttgcggtaag

SEQ ID NO: 205568 - DNA, 13 bp, Artificial Sequence
  Oligonucleotide for detection of SNP TSC0050383
cttaccgcaacgt

SEQ ID NO: 205569 - DNA, 13 bp, Artificial Sequence
  Oligonucleotide for detection of SNP TSC0050384
gatattgattttg

SEQ ID NO: 205570 - DNA, 13 bp, Artificial Sequence
  Oligonucleotide for detection of SNP TSC0050384
caaaatcaatatc

SEQ ID NO: 205571 - DNA, 13 bp, Artificial Sequence
  Oligonucleotide for detection of SNP TSC0050384
gatattaattttg

SEQ ID NO: 205572 - DNA, 13 bp, Artificial Sequence
  Oligonucleotide for detection of SNP TSC0050384
caaaattaatatc

SEQ ID NO: 205573 - DNA, 13 bp, Artificial Sequence
  Oligonucleotide for detection of SNP TSC0050385
ttgtttaaataag

SEQ ID NO: 205574 - DNA, 13 bp, Artificial Sequence
  Oligonucleotide for detection of SNP TSC0050385
cttatttaaacaa

SEQ ID NO: 205575 - DNA, 13 bp, Artificial Sequence
  Oligonucleotide for detection of SNP TSC0050385
ttgttttaataag

SEQ ID NO: 205576 - DNA, 13 bp, Artificial Sequence
  Oligonucleotide for detection of SNP TSC0050385
cttattaaaacaa

SEQ ID NO: 205577 - DNA, 13 bp, Artificial Sequence
  Oligonucleotide for detection of SNP TSC0050385
tttatttaaataa

SEQ ID NO: 205578 - DNA, 13 bp, Artificial Sequence
  Oligonucleotide for detection of SNP TSC0050385
ttatttaaataaa

SEQ ID NO: 205579 - DNA, 13 bp, Artificial Sequence
  Oligonucleotide for detection of SNP TSC0050385
tttattgaaataa

SEQ ID NO: 205580 - DNA, 13 bp, Artificial Sequence
  Oligonucleotide for detection of SNP TSC0050385
ttatttcaataaa

SEQ ID NO: 205581 - DNA, 13 bp, Artificial Sequence
  Oligonucleotide for detection of SNP TSC0050387
ttaatttagttty

SEQ ID NO: 205582 - DNA, 13 bp, Artificial Sequence
  Oligonucleotide for detection of SNP TSC0050387
raaactaaattaa

SEQ ID NO: 205583 - DNA, 13 bp, Artificial Sequence
  Oligonucleotide for detection of SNP TSC0050387
ttaattgagttty

SEQ ID NO: 205584 - DNA, 13 bp, Artificial Sequence
  Oligonucleotide for detection of SNP TSC0050387
raaactcaattaa

SEQ ID NO: 205585 - DNA, 13 bp, Artificial Sequence
  Oligonucleotide for detection of SNP TSC0050387
gggattgaattaa

SEQ ID NO: 205586 - DNA, 13 bp, Artificial Sequence
  Oligonucleotide for detection of SNP TSC0050387
ttaattcaatccc

SEQ ID NO: 205587 - DNA, 13 bp, Artificial Sequence
  Oligonucleotide for detection of SNP TSC0050387
gggatttaattaa

SEQ ID NO: 205588 - DNA, 13 bp, Artificial Sequence
  Oligonucleotide for detection of SNP TSC0050387
ttaattaaatccc

SEQ ID NO: 205589 - DNA, 13 bp, Artificial Sequence
  Oligonucleotide for detection of SNP TSC0050388
ttttataaatagy

SEQ ID NO: 205590 - DNA, 13 bp, Artificial Sequence
  Oligonucleotide for detection of SNP TSC0050388
rctatttataaaa

SEQ ID NO: 205591 - DNA, 13 bp, Artificial Sequence
  Oligonucleotide for detection of SNP TSC0050388
ttttatgaatagy

SEQ ID NO: 205592 - DNA, 13 bp, Artificial Sequence
  Oligonucleotide for detection of SNP TSC0050388
rctattcataaaa

SEQ ID NO: 205593 - DNA, 13 bp, Artificial Sequence
  Oligonucleotide for detection of SNP TSC0050388
ttttacgaatagy

SEQ ID NO: 205594 - DNA, 13 bp, Artificial Sequence
  Oligonucleotide for detection of SNP TSC0050388
rctattcgtaaaa

SEQ ID NO: 205595 - DNA, 13 bp, Artificial Sequence
  Oligonucleotide for detection of SNP TSC0050388
gttgtttgtagga

SEQ ID NO: 205596 - DNA, 13 bp, Artificial Sequence
  Oligonucleotide for detection of SNP TSC0050388
tcctacaaacaac

SEQ ID NO: 205597 - DNA, 13 bp, Artificial Sequence
  Oligonucleotide for detection of SNP TSC0050388
gttgttcgtagga

SEQ ID NO: 205598 - DNA, 13 bp, Artificial Sequence
  Oligonucleotide for detection of SNP TSC0050388
tcctacgaacaac

SEQ ID NO: 205599 - DNA, 13 bp, Artificial Sequence
  Oligonucleotide for detection of SNP TSC0050389
agtgaatatattg

SEQ ID NO: 205600 - DNA, 13 bp, Artificial Sequence
  Oligonucleotide for detection of SNP TSC0050389
caatatattcact

SEQ ID NO: 205601 - DNA, 13 bp, Artificial Sequence
  Oligonucleotide for detection of SNP TSC0050389
agtgaagatattg

SEQ ID NO: 205602 - DNA, 13 bp, Artificial Sequence
  Oligonucleotide for detection of SNP TSC0050389
caatatcttcact

SEQ ID NO: 205603 - DNA, 13 bp, Artificial Sequence
  Oligonucleotide for detection of SNP TSC0050389
taatatgtttatt

SEQ ID NO: 205604 - DNA, 13 bp, Artificial Sequence
  Oligonucleotide for detection of SNP TSC0050389
aataaacatatta

SEQ ID NO: 205605 - DNA, 13 bp, Artificial Sequence
  Oligonucleotide for detection of SNP TSC0050390
agtaataggagaa

SEQ ID NO: 205606 - DNA, 13 bp, Artificial Sequence
  Oligonucleotide for detection of SNP TSC0050390
ttctcctattact

SEQ ID NO: 205607 - DNA, 13 bp, Artificial Sequence
  Oligonucleotide for detection of SNP TSC0050390
agtaattggagaa

SEQ ID NO: 205608 - DNA, 13 bp, Artificial Sequence
  Oligonucleotide for detection of SNP TSC0050390
ttctccaattact

SEQ ID NO: 205609 - DNA, 13 bp, Artificial Sequence
  Oligonucleotide for detection of SNP TSC0050394
ttaataagtagta

SEQ ID NO: 205610 - DNA, 13 bp, Artificial Sequence
  Oligonucleotide for detection of SNP TSC0050394
tactacttattaa

SEQ ID NO: 205611 - DNA, 13 bp, Artificial Sequence
  Oligonucleotide for detection of SNP TSC0050394
ttaataggtagta

SEQ ID NO: 205612 - DNA, 13 bp, Artificial Sequence
  Oligonucleotide for detection of SNP TSC0050394
tactacctattaa

SEQ ID NO: 205613 - DNA, 13 bp, Artificial Sequence
  Oligonucleotide for detection of SNP TSC0050395
ttgagtatttgag

SEQ ID NO: 205614 - DNA, 13 bp, Artificial Sequence
  Oligonucleotide for detection of SNP TSC0050395
ctcaaatactcaa

SEQ ID NO: 205615 - DNA, 13 bp, Artificial Sequence
  Oligonucleotide for detection of SNP TSC0050395
ttgagtgtttgag

SEQ ID NO: 205616 - DNA, 13 bp, Artificial Sequence
  Oligonucleotide for detection of SNP TSC0050395
ctcaaacactcaa

SEQ ID NO: 205617 - DNA, 13 bp, Artificial Sequence
  Oligonucleotide for detection of SNP TSC0050396
tggtgttttttty

SEQ ID NO: 205618 - DNA, 13 bp, Artificial Sequence
  Oligonucleotide for detection of SNP TSC0050396
raaaaaaacacca

SEQ ID NO: 205619 - DNA, 13 bp, Artificial Sequence
  Oligonucleotide for detection of SNP TSC0050396
gaaaaatatatta

SEQ ID NO: 205620 - DNA, 13 bp, Artificial Sequence
  Oligonucleotide for detection of SNP TSC0050396
taatatatttttc

SEQ ID NO: 205621 - DNA, 13 bp, Artificial Sequence
  Oligonucleotide for detection of SNP TSC0050396
gaaaaaaatatta

SEQ ID NO: 205622 - DNA, 13 bp, Artificial Sequence
  Oligonucleotide for detection of SNP TSC0050396
taatatttttttc

SEQ ID NO: 205623 - DNA, 13 bp, Artificial Sequence
  Oligonucleotide for detection of SNP TSC0050397
taatatttgataa

SEQ ID NO: 205624 - DNA, 13 bp, Artificial Sequence
  Oligonucleotide for detection of SNP TSC0050397
ttatcaaatatta

SEQ ID NO: 205625 - DNA, 13 bp, Artificial Sequence
  Oligonucleotide for detection of SNP TSC0050397
ttgttatgtgtta

SEQ ID NO: 205626 - DNA, 13 bp, Artificial Sequence
  Oligonucleotide for detection of SNP TSC0050397
taacacataacaa

SEQ ID NO: 205627 - DNA, 13 bp, Artificial Sequence
  Oligonucleotide for detection of SNP TSC0050397
ttgttacgtgtta

SEQ ID NO: 205628 - DNA, 13 bp, Artificial Sequence
  Oligonucleotide for detection of SNP TSC0050397
taacacgtaacaa

SEQ ID NO: 205629 - DNA, 13 bp, Artificial Sequence
  Oligonucleotide for detection of SNP TSC0050398
atttttgtaatgg

SEQ ID NO: 205630 - DNA, 13 bp, Artificial Sequence
  Oligonucleotide for detection of SNP TSC0050398
ccattacaaaaat

SEQ ID NO: 205631 - DNA, 13 bp, Artificial Sequence
  Oligonucleotide for detection of SNP TSC0050398
atttttataatgg

SEQ ID NO: 205632 - DNA, 13 bp, Artificial Sequence
  Oligonucleotide for detection of SNP TSC0050398
ccattataaaaat

SEQ ID NO: 205633 - DNA, 13 bp, Artificial Sequence
  Oligonucleotide for detection of SNP TSC0050399
tttataattatta

SEQ ID NO: 205634 - DNA, 13 bp, Artificial Sequence
  Oligonucleotide for detection of SNP TSC0050399
taataattataaa

SEQ ID NO: 205635 - DNA, 13 bp, Artificial Sequence
  Oligonucleotide for detection of SNP TSC0050399
tttatagttatta

SEQ ID NO: 205636 - DNA, 13 bp, Artificial Sequence
  Oligonucleotide for detection of SNP TSC0050399
taataactataaa

SEQ ID NO: 205637 - DNA, 13 bp, Artificial Sequence
  Oligonucleotide for detection of SNP TSC0050406
tatgtgtagaata

SEQ ID NO: 205638 - DNA, 13 bp, Artificial Sequence
  Oligonucleotide for detection of SNP TSC0050406
tattctacacata

SEQ ID NO: 205639 - DNA, 13 bp, Artificial Sequence
  Oligonucleotide for detection of SNP TSC0050406
tatgtggagaata

SEQ ID NO: 205640 - DNA, 13 bp, Artificial Sequence
  Oligonucleotide for detection of SNP TSC0050406
tattctccacata

SEQ ID NO: 205641 - DNA, 13 bp, Artificial Sequence
  Oligonucleotide for detection of SNP TSC0050406
tattttgtatatg

SEQ ID NO: 205642 - DNA, 13 bp, Artificial Sequence
  Oligonucleotide for detection of SNP TSC0050406
catatacaaaata

SEQ ID NO: 205643 - DNA, 13 bp, Artificial Sequence
  Oligonucleotide for detection of SNP TSC0050406
tattttttatatg

SEQ ID NO: 205644 - DNA, 13 bp, Artificial Sequence
  Oligonucleotide for detection of SNP TSC0050406
catataaaaaata

SEQ ID NO: 205645 - DNA, 13 bp, Artificial Sequence
  Oligonucleotide for detection of SNP TSC0006551
agtggaattatag

SEQ ID NO: 205646 - DNA, 13 bp, Artificial Sequence
  Oligonucleotide for detection of SNP TSC0006551
ctataattccact

SEQ ID NO: 205647 - DNA, 13 bp, Artificial Sequence
  Oligonucleotide for detection of SNP TSC0006551
agtggagttatag

SEQ ID NO: 205648 - DNA, 13 bp, Artificial Sequence
  Oligonucleotide for detection of SNP TSC0006551
ctataactccact

SEQ ID NO: 205649 - DNA, 13 bp, Artificial Sequence
  Oligonucleotide for detection of SNP TSC0050409
ttaggagtttaag

SEQ ID NO: 205650 - DNA, 13 bp, Artificial Sequence
  Oligonucleotide for detection of SNP TSC0050409
cttaaactcctaa

SEQ ID NO: 205651 - DNA, 13 bp, Artificial Sequence
  Oligonucleotide for detection of SNP TSC0050409
ttaggaatttaag

SEQ ID NO: 205652 - DNA, 13 bp, Artificial Sequence
  Oligonucleotide for detection of SNP TSC0050409
cttaaattcctaa

SEQ ID NO: 205653 - DNA, 13 bp, Artificial Sequence
  Oligonucleotide for detection of SNP TSC0050411
tgattaattttgy

SEQ ID NO: 205654 - DNA, 13 bp, Artificial Sequence
  Oligonucleotide for detection of SNP TSC0050411
rcaaaattaatca

SEQ ID NO: 205655 - DNA, 13 bp, Artificial Sequence
  Oligonucleotide for detection of SNP TSC0050411
tgattagttttgy

SEQ ID NO: 205656 - DNA, 13 bp, Artificial Sequence
  Oligonucleotide for detection of SNP TSC0050411
rcaaaactaatca

SEQ ID NO: 205657 - DNA, 13 bp, Artificial Sequence
  Oligonucleotide for detection of SNP TSC0050412
taaaagtaggtag

SEQ ID NO: 205658 - DNA, 13 bp, Artificial Sequence
  Oligonucleotide for detection of SNP TSC0050412
ctacctactttta

SEQ ID NO: 205659 - DNA, 13 bp, Artificial Sequence
  Oligonucleotide for detection of SNP TSC0050412
taaaaggaggtag

SEQ ID NO: 205660 - DNA, 13 bp, Artificial Sequence
  Oligonucleotide for detection of SNP TSC0050412
ctacctcctttta

SEQ ID NO: 205661 - DNA, 13 bp, Artificial Sequence
  Oligonucleotide for detection of SNP TSC0008145
attttttgattgg

SEQ ID NO: 205662 - DNA, 13 bp, Artificial Sequence
  Oligonucleotide for detection of SNP TSC0008145
ccaatcaaaaaat

SEQ ID NO: 205663 - DNA, 13 bp, Artificial Sequence
  Oligonucleotide for detection of SNP TSC0008145
atttttcgattgg

SEQ ID NO: 205664 - DNA, 13 bp, Artificial Sequence
  Oligonucleotide for detection of SNP TSC0008145
ccaatcgaaaaat

SEQ ID NO: 205665 - DNA, 13 bp, Artificial Sequence
  Oligonucleotide for detection of SNP TSC0008145
ttagttgaagaat

SEQ ID NO: 205666 - DNA, 13 bp, Artificial Sequence
  Oligonucleotide for detection of SNP TSC0008145
attcttcaactaa

SEQ ID NO: 205667 - DNA, 13 bp, Artificial Sequence
  Oligonucleotide for detection of SNP TSC0008145
ttagttaaagaat

SEQ ID NO: 205668 - DNA, 13 bp, Artificial Sequence
  Oligonucleotide for detection of SNP TSC0008145
attctttaactaa

SEQ ID NO: 205669 - DNA, 13 bp, Artificial Sequence
  Oligonucleotide for detection of SNP TSC0008145
ttagtcgaagaat

SEQ ID NO: 205670 - DNA, 13 bp, Artificial Sequence
  Oligonucleotide for detection of SNP TSC0008145
attcttcgactaa

SEQ ID NO: 205671 - DNA, 13 bp, Artificial Sequence
  Oligonucleotide for detection of SNP TSC0008146
atgattagggagg

SEQ ID NO: 205672 - DNA, 13 bp, Artificial Sequence
  Oligonucleotide for detection of SNP TSC0008146
cctccctaatcat

SEQ ID NO: 205673 - DNA, 13 bp, Artificial Sequence
  Oligonucleotide for detection of SNP TSC0008146
atgattggggagg

SEQ ID NO: 205674 - DNA, 13 bp, Artificial Sequence
  Oligonucleotide for detection of SNP TSC0008146
cctccccaatcat

SEQ ID NO: 205675 - DNA, 13 bp, Artificial Sequence
  Oligonucleotide for detection of SNP TSC0008147
ttttttattgtgt

SEQ ID NO: 205676 - DNA, 13 bp, Artificial Sequence
  Oligonucleotide for detection of SNP TSC0008147
acacaataaaaaa

SEQ ID NO: 205677 - DNA, 13 bp, Artificial Sequence
  Oligonucleotide for detection of SNP TSC0008147
ttttttgttgcgt

SEQ ID NO: 205678 - DNA, 13 bp, Artificial Sequence
  Oligonucleotide for detection of SNP TSC0008147
acgcaacaaaaaa

SEQ ID NO: 205679 - DNA, 13 bp, Artificial Sequence
  Oligonucleotide for detection of SNP TSC0008147
ttttttattgcgt

SEQ ID NO: 205680 - DNA, 13 bp, Artificial Sequence
  Oligonucleotide for detection of SNP TSC0008147
acgcaataaaaaa

SEQ ID NO: 205681 - DNA, 13 bp, Artificial Sequence
  Oligonucleotide for detection of SNP TSC0050418
ttgagtagtagtg

SEQ ID NO: 205682 - DNA, 13 bp, Artificial Sequence
  Oligonucleotide for detection of SNP TSC0050418
cactactactcaa

SEQ ID NO: 205683 - DNA, 13 bp, Artificial Sequence
  Oligonucleotide for detection of SNP TSC0050418
ttgagtggtagtg

SEQ ID NO: 205684 - DNA, 13 bp, Artificial Sequence
  Oligonucleotide for detection of SNP TSC0050418
cactaccactcaa

SEQ ID NO: 205685 - DNA, 13 bp, Artificial Sequence
  Oligonucleotide for detection of SNP TSC0050418
ttgagcggtagtg

SEQ ID NO: 205686 - DNA, 13 bp, Artificial Sequence
  Oligonucleotide for detection of SNP TSC0050418
cactaccgctcaa

SEQ ID NO: 205687 - DNA, 13 bp, Artificial Sequence
  Oligonucleotide for detection of SNP TSC0050418
tattattgtttaa

SEQ ID NO: 205688 - DNA, 13 bp, Artificial Sequence
  Oligonucleotide for detection of SNP TSC0050418
ttaaacaataata

SEQ ID NO: 205689 - DNA, 13 bp, Artificial Sequence
  Oligonucleotide for detection of SNP TSC0050418
tattatcgtttaa

SEQ ID NO: 205690 - DNA, 13 bp, Artificial Sequence
  Oligonucleotide for detection of SNP TSC0050418
ttaaacgataata

SEQ ID NO: 205691 - DNA, 13 bp, Artificial Sequence
  Oligonucleotide for detection of SNP TSC0050419
attgatttaagty

SEQ ID NO: 205692 - DNA, 13 bp, Artificial Sequence
  Oligonucleotide for detection of SNP TSC0050419
racttaaatcaat

SEQ ID NO: 205693 - DNA, 13 bp, Artificial Sequence
  Oligonucleotide for detection of SNP TSC0050419
attgatgtaagty

SEQ ID NO: 205694 - DNA, 13 bp, Artificial Sequence
  Oligonucleotide for detection of SNP TSC0050419
racttacatcaat

SEQ ID NO: 205695 - DNA, 13 bp, Artificial Sequence
  Oligonucleotide for detection of SNP TSC0050419
attgacgtaagty

SEQ ID NO: 205696 - DNA, 13 bp, Artificial Sequence
  Oligonucleotide for detection of SNP TSC0050419
racttacgtcaat

SEQ ID NO: 205697 - DNA, 13 bp, Artificial Sequence
  Oligonucleotide for detection of SNP TSC0050419
gatttaagttaat

SEQ ID NO: 205698 - DNA, 13 bp, Artificial Sequence
  Oligonucleotide for detection of SNP TSC0050419
attaacttaaatc

SEQ ID NO: 205699 - DNA, 13 bp, Artificial Sequence
  Oligonucleotide for detection of SNP TSC0050419
gatttatgttaat

SEQ ID NO: 205700 - DNA, 13 bp, Artificial Sequence
  Oligonucleotide for detection of SNP TSC0050419
attaacataaatc

SEQ ID NO: 205701 - DNA, 13 bp, Artificial Sequence
  Oligonucleotide for detection of SNP TSC0050419
gatttacgttaat

SEQ ID NO: 205702 - DNA, 13 bp, Artificial Sequence
  Oligonucleotide for detection of SNP TSC0050419
attaacgtaaatc

SEQ ID NO: 205703 - DNA, 13 bp, Artificial Sequence
  Oligonucleotide for detection of SNP TSC0050420
aaaaaaagtaaaa

SEQ ID NO: 205704 - DNA, 13 bp, Artificial Sequence
  Oligonucleotide for detection of SNP TSC0050420
ttttacttttttt

SEQ ID NO: 205705 - DNA, 13 bp, Artificial Sequence
  Oligonucleotide for detection of SNP TSC0050420
aaaaaaggtaaaa

SEQ ID NO: 205706 - DNA, 13 bp, Artificial Sequence
  Oligonucleotide for detection of SNP TSC0050420
ttttacctttttt

SEQ ID NO: 205707 - DNA, 13 bp, Artificial Sequence
  Oligonucleotide for detection of SNP TSC0050421
gatgaaaagaaag

SEQ ID NO: 205708 - DNA, 13 bp, Artificial Sequence
  Oligonucleotide for detection of SNP TSC0050421
ctttcttttcatc

SEQ ID NO: 205709 - DNA, 13 bp, Artificial Sequence
  Oligonucleotide for detection of SNP TSC0050421
gatgaagagaaag

SEQ ID NO: 205710 - DNA, 13 bp, Artificial Sequence
  Oligonucleotide for detection of SNP TSC0050421
ctttctcttcatc

SEQ ID NO: 205711 - DNA, 13 bp, Artificial Sequence
  Oligonucleotide for detection of SNP TSC0050423
gtagaagatggga

SEQ ID NO: 205712 - DNA, 13 bp, Artificial Sequence
  Oligonucleotide for detection of SNP TSC0050423
tcccatcttctac

SEQ ID NO: 205713 - DNA, 13 bp, Artificial Sequence
  Oligonucleotide for detection of SNP TSC0050423
gtagaaaatggga

SEQ ID NO: 205714 - DNA, 13 bp, Artificial Sequence
  Oligonucleotide for detection of SNP TSC0050423
tcccattttctac

SEQ ID NO: 205715 - DNA, 13 bp, Artificial Sequence
  Oligonucleotide for detection of SNP TSC0050424
agggattgtaaag

SEQ ID NO: 205716 - DNA, 13 bp, Artificial Sequence
  Oligonucleotide for detection of SNP TSC0050424
ctttacaatccct

SEQ ID NO: 205717 - DNA, 13 bp, Artificial Sequence
  Oligonucleotide for detection of SNP TSC0050424
agggatcgtaaag

SEQ ID NO: 205718 - DNA, 13 bp, Artificial Sequence
  Oligonucleotide for detection of SNP TSC0050424
ctttacgatccct

SEQ ID NO: 205719 - DNA, 13 bp, Artificial Sequence
  Oligonucleotide for detection of SNP TSC0050424
ttttatgattttt

SEQ ID NO: 205720 - DNA, 13 bp, Artificial Sequence
  Oligonucleotide for detection of SNP TSC0050424
aaaaatcataaaa

SEQ ID NO: 205721 - DNA, 13 bp, Artificial Sequence
  Oligonucleotide for detection of SNP TSC0050424
ttttacgattttt

SEQ ID NO: 205722 - DNA, 13 bp, Artificial Sequence
  Oligonucleotide for detection of SNP TSC0050424
aaaaatcgtaaaa

SEQ ID NO: 205723 - DNA, 13 bp, Artificial Sequence
  Oligonucleotide for detection of SNP TSC0050425
taatgatgaagty

SEQ ID NO: 205724 - DNA, 13 bp, Artificial Sequence
  Oligonucleotide for detection of SNP TSC0050425
racttcatcatta

SEQ ID NO: 205725 - DNA, 13 bp, Artificial Sequence
  Oligonucleotide for detection of SNP TSC0050425
taatgacgaagty

SEQ ID NO: 205726 - DNA, 13 bp, Artificial Sequence
  Oligonucleotide for detection of SNP TSC0050425
racttcgtcatta

SEQ ID NO: 205727 - DNA, 13 bp, Artificial Sequence
  Oligonucleotide for detection of SNP TSC0050426
gaagttgtgagag

SEQ ID NO: 205728 - DNA, 13 bp, Artificial Sequence
  Oligonucleotide for detection of SNP TSC0050426
ctctcacaacttc

SEQ ID NO: 205729 - DNA, 13 bp, Artificial Sequence
  Oligonucleotide for detection of SNP TSC0050426
gaagttatgagag

SEQ ID NO: 205730 - DNA, 13 bp, Artificial Sequence
  Oligonucleotide for detection of SNP TSC0050426
ctctcataacttc

SEQ ID NO: 205731 - DNA, 13 bp, Artificial Sequence
  Oligonucleotide for detection of SNP TSC0050426
gaagtcgtgagag

SEQ ID NO: 205732 - DNA, 13 bp, Artificial Sequence
  Oligonucleotide for detection of SNP TSC0050426
ctctcacgacttc

SEQ ID NO: 205733 - DNA, 13 bp, Artificial Sequence
  Oligonucleotide for detection of SNP TSC0050427
tttgtggatttty

SEQ ID NO: 205734 - DNA, 13 bp, Artificial Sequence
  Oligonucleotide for detection of SNP TSC0050427
raaaatccacaaa

SEQ ID NO: 205735 - DNA, 13 bp, Artificial Sequence
  Oligonucleotide for detection of SNP TSC0050427
tttgtgaatttty

SEQ ID NO: 205736 - DNA, 13 bp, Artificial Sequence
  Oligonucleotide for detection of SNP TSC0050427
raaaattcacaaa

SEQ ID NO: 205737 - DNA, 13 bp, Artificial Sequence
  Oligonucleotide for detection of SNP TSC0050428
atatttatgtgtg

SEQ ID NO: 205738 - DNA, 13 bp, Artificial Sequence
  Oligonucleotide for detection of SNP TSC0050428
cacacataaatat

SEQ ID NO: 205739 - DNA, 13 bp, Artificial Sequence
  Oligonucleotide for detection of SNP TSC0050428
atatttgtgtgtg

SEQ ID NO: 205740 - DNA, 13 bp, Artificial Sequence
  Oligonucleotide for detection of SNP TSC0050428
cacacacaaatat

SEQ ID NO: 205741 - DNA, 13 bp, Artificial Sequence
  Oligonucleotide for detection of SNP TSC0050428
atattcgtgtgtg

SEQ ID NO: 205742 - DNA, 13 bp, Artificial Sequence
  Oligonucleotide for detection of SNP TSC0050428
cacacacgaatat

SEQ ID NO: 205743 - DNA, 13 bp, Artificial Sequence
  Oligonucleotide for detection of SNP TSC0050428
tatatatgagtat

SEQ ID NO: 205744 - DNA, 13 bp, Artificial Sequence
  Oligonucleotide for detection of SNP TSC0050428
atactcatatata

SEQ ID NO: 205745 - DNA, 13 bp, Artificial Sequence
  Oligonucleotide for detection of SNP TSC0050428
tatatacgagtat

SEQ ID NO: 205746 - DNA, 13 bp, Artificial Sequence
  Oligonucleotide for detection of SNP TSC0050428
atactcgtatata

SEQ ID NO: 205747 - DNA, 13 bp, Artificial Sequence
  Oligonucleotide for detection of SNP TSC0050429
aaaaaaatttagy

SEQ ID NO: 205748 - DNA, 13 bp, Artificial Sequence
  Oligonucleotide for detection of SNP TSC0050429
rctaaattttttt

SEQ ID NO: 205749 - DNA, 13 bp, Artificial Sequence
  Oligonucleotide for detection of SNP TSC0050429
aaaaaagtttagy

SEQ ID NO: 205750 - DNA, 13 bp, Artificial Sequence
  Oligonucleotide for detection of SNP TSC0050429
rctaaactttttt

SEQ ID NO: 205751 - DNA, 13 bp, Artificial Sequence
  Oligonucleotide for detection of SNP TSC0050430
gttttttgaaaay

SEQ ID NO: 205752 - DNA, 13 bp, Artificial Sequence
  Oligonucleotide for detection of SNP TSC0050430
rttttcaaaaaac

SEQ ID NO: 205753 - DNA, 13 bp, Artificial Sequence
  Oligonucleotide for detection of SNP TSC0050430
gtttttcgaaaay

SEQ ID NO: 205754 - DNA, 13 bp, Artificial Sequence
  Oligonucleotide for detection of SNP TSC0050430
rttttcgaaaaac

SEQ ID NO: 205755 - DNA, 13 bp, Artificial Sequence
  Oligonucleotide for detection of SNP TSC0050430
gtttttgggaaay

SEQ ID NO: 205756 - DNA, 13 bp, Artificial Sequence
  Oligonucleotide for detection of SNP TSC0050430
rtttcccaaaaac

SEQ ID NO: 205757 - DNA, 13 bp, Artificial Sequence
  Oligonucleotide for detection of SNP TSC0050430
gtttttaggaaay

SEQ ID NO: 205758 - DNA, 13 bp, Artificial Sequence
  Oligonucleotide for detection of SNP TSC0050430
rtttcctaaaaac

SEQ ID NO: 205759 - DNA, 13 bp, Artificial Sequence
  Oligonucleotide for detection of SNP TSC0050430
gttttcgggaaay

SEQ ID NO: 205760 - DNA, 13 bp, Artificial Sequence
  Oligonucleotide for detection of SNP TSC0050430
rtttcccgaaaac

SEQ ID NO: 205761 - DNA, 13 bp, Artificial Sequence
  Oligonucleotide for detection of SNP TSC0050431
aaaaagtttagtt

SEQ ID NO: 205762 - DNA, 13 bp, Artificial Sequence
  Oligonucleotide for detection of SNP TSC0050431
aactaaacttttt

SEQ ID NO: 205763 - DNA, 13 bp, Artificial Sequence
  Oligonucleotide for detection of SNP TSC0050431
aaaaaggttagtt

SEQ ID NO: 205764 - DNA, 13 bp, Artificial Sequence
  Oligonucleotide for detection of SNP TSC0050431
aactaaccttttt

SEQ ID NO: 205765 - DNA, 13 bp, Artificial Sequence
  Oligonucleotide for detection of SNP TSC0050431
agttgattttttt

SEQ ID NO: 205766 - DNA, 13 bp, Artificial Sequence
  Oligonucleotide for detection of SNP TSC0050431
aaaaaaatcaact

SEQ ID NO: 205767 - DNA, 13 bp, Artificial Sequence
  Oligonucleotide for detection of SNP TSC0050432
gtattgaggagay

SEQ ID NO: 205768 - DNA, 13 bp, Artificial Sequence
  Oligonucleotide for detection of SNP TSC0050432
rtctcctcaatac

SEQ ID NO: 205769 - DNA, 13 bp, Artificial Sequence
  Oligonucleotide for detection of SNP TSC0050432
gtattggggagay

SEQ ID NO: 205770 - DNA, 13 bp, Artificial Sequence
  Oligonucleotide for detection of SNP TSC0050432
rtctccccaatac

SEQ ID NO: 205771 - DNA, 13 bp, Artificial Sequence
  Oligonucleotide for detection of SNP TSC0050433
gaggggatagggt

SEQ ID NO: 205772 - DNA, 13 bp, Artificial Sequence
  Oligonucleotide for detection of SNP TSC0050433
accctatcccctc

SEQ ID NO: 205773 - DNA, 13 bp, Artificial Sequence
  Oligonucleotide for detection of SNP TSC0050433
gaggggttagggt

SEQ ID NO: 205774 - DNA, 13 bp, Artificial Sequence
  Oligonucleotide for detection of SNP TSC0050433
accctaacccctc

SEQ ID NO: 205775 - DNA, 13 bp, Artificial Sequence
  Oligonucleotide for detection of SNP TSC0050435
ggtaagtgtttgt

SEQ ID NO: 205776 - DNA, 13 bp, Artificial Sequence
  Oligonucleotide for detection of SNP TSC0050435
acaaacacttacc

SEQ ID NO: 205777 - DNA, 13 bp, Artificial Sequence
  Oligonucleotide for detection of SNP TSC0050435
ggtaagcgtttgt

SEQ ID NO: 205778 - DNA, 13 bp, Artificial Sequence
  Oligonucleotide for detection of SNP TSC0050435
acaaacgcttacc

SEQ ID NO: 205779 - DNA, 13 bp, Artificial Sequence
  Oligonucleotide for detection of SNP TSC0050436
aaaatagaaaaat

SEQ ID NO: 205780 - DNA, 13 bp, Artificial Sequence
  Oligonucleotide for detection of SNP TSC0050436
atttttctatttt

SEQ ID NO: 205781 - DNA, 13 bp, Artificial Sequence
  Oligonucleotide for detection of SNP TSC0050437
gaggaagttgata

SEQ ID NO: 205782 - DNA, 13 bp, Artificial Sequence
  Oligonucleotide for detection of SNP TSC0050437
tatcaacttcctc

SEQ ID NO: 205783 - DNA, 13 bp, Artificial Sequence
  Oligonucleotide for detection of SNP TSC0050437
gaggaaattgata

SEQ ID NO: 205784 - DNA, 13 bp, Artificial Sequence
  Oligonucleotide for detection of SNP TSC0050437
tatcaatttcctc

SEQ ID NO: 205785 - DNA, 13 bp, Artificial Sequence
  Oligonucleotide for detection of SNP TSC0050438
ggtgtgaatttgg

SEQ ID NO: 205786 - DNA, 13 bp, Artificial Sequence
  Oligonucleotide for detection of SNP TSC0050438
ccaaattcacacc

SEQ ID NO: 205787 - DNA, 13 bp, Artificial Sequence
  Oligonucleotide for detection of SNP TSC0050438
ggtgtggatttgg

SEQ ID NO: 205788 - DNA, 13 bp, Artificial Sequence
  Oligonucleotide for detection of SNP TSC0050438
ccaaatccacacc

SEQ ID NO: 205789 - DNA, 13 bp, Artificial Sequence
  Oligonucleotide for detection of SNP TSC0050438
ggcgtgaatttgg

SEQ ID NO: 205790 - DNA, 13 bp, Artificial Sequence
  Oligonucleotide for detection of SNP TSC0050438
ccaaattcacgcc

SEQ ID NO: 205791 - DNA, 13 bp, Artificial Sequence
  Oligonucleotide for detection of SNP TSC0050438
ggcgtggatttgg

SEQ ID NO: 205792 - DNA, 13 bp, Artificial Sequence
  Oligonucleotide for detection of SNP TSC0050438
ccaaatccacgcc

SEQ ID NO: 205793 - DNA, 13 bp, Artificial Sequence
  Oligonucleotide for detection of SNP TSC0050438
ggtgtgaattcgg

SEQ ID NO: 205794 - DNA, 13 bp, Artificial Sequence
  Oligonucleotide for detection of SNP TSC0050438
ccgaattcacacc

SEQ ID NO: 205795 - DNA, 13 bp, Artificial Sequence
  Oligonucleotide for detection of SNP TSC0050438
ggtgtggattcgg

SEQ ID NO: 205796 - DNA, 13 bp, Artificial Sequence
  Oligonucleotide for detection of SNP TSC0050438
ccgaatccacacc

SEQ ID NO: 205797 - DNA, 13 bp, Artificial Sequence
  Oligonucleotide for detection of SNP TSC0050438
ggcgtgaattcgg

SEQ ID NO: 205798 - DNA, 13 bp, Artificial Sequence
  Oligonucleotide for detection of SNP TSC0050438
ccgaattcacgcc

SEQ ID NO: 205799 - DNA, 13 bp, Artificial Sequence
  Oligonucleotide for detection of SNP TSC0050438
ggcgtggattcgg

SEQ ID NO: 205800 - DNA, 13 bp, Artificial Sequence
  Oligonucleotide for detection of SNP TSC0050438
ccgaatccacgcc

SEQ ID NO: 205801 - DNA, 13 bp, Artificial Sequence
  Oligonucleotide for detection of SNP TSC0050440
tatgtaaaaatay

SEQ ID NO: 205802 - DNA, 13 bp, Artificial Sequence
  Oligonucleotide for detection of SNP TSC0050440
rtatttttacata

SEQ ID NO: 205803 - DNA, 13 bp, Artificial Sequence
  Oligonucleotide for detection of SNP TSC0050440
tatgtagaaatay

SEQ ID NO: 205804 - DNA, 13 bp, Artificial Sequence
  Oligonucleotide for detection of SNP TSC0050440
rtatttctacata

SEQ ID NO: 205805 - DNA, 13 bp, Artificial Sequence
  Oligonucleotide for detection of SNP TSC0050441
tggttgttttttt

SEQ ID NO: 205806 - DNA, 13 bp, Artificial Sequence
  Oligonucleotide for detection of SNP TSC0050441
aaaaaaacaacca

SEQ ID NO: 205807 - DNA, 13 bp, Artificial Sequence
  Oligonucleotide for detection of SNP TSC0050441
tggttggtttttt

SEQ ID NO: 205808 - DNA, 13 bp, Artificial Sequence
  Oligonucleotide for detection of SNP TSC0050441
aaaaaaccaacca

SEQ ID NO: 205809 - DNA, 13 bp, Artificial Sequence
  Oligonucleotide for detection of SNP TSC0050441
aaaaaggtagtta

SEQ ID NO: 205810 - DNA, 13 bp, Artificial Sequence
  Oligonucleotide for detection of SNP TSC0050441
taactaccttttt

SEQ ID NO: 205811 - DNA, 13 bp, Artificial Sequence
  Oligonucleotide for detection of SNP TSC0050441
aaaaagttagtta

SEQ ID NO: 205812 - DNA, 13 bp, Artificial Sequence
  Oligonucleotide for detection of SNP TSC0050441
taactaacttttt

SEQ ID NO: 205813 - DNA, 13 bp, Artificial Sequence
  Oligonucleotide for detection of SNP TSC0050442
taattagtaggtg

SEQ ID NO: 205814 - DNA, 13 bp, Artificial Sequence
  Oligonucleotide for detection of SNP TSC0050442
cacctactaatta

SEQ ID NO: 205815 - DNA, 13 bp, Artificial Sequence
  Oligonucleotide for detection of SNP TSC0050442
taattaataggtg

SEQ ID NO: 205816 - DNA, 13 bp, Artificial Sequence
  Oligonucleotide for detection of SNP TSC0050442
cacctattaatta

SEQ ID NO: 205817 - DNA, 13 bp, Artificial Sequence
  Oligonucleotide for detection of SNP TSC0050443
tgttattgggttt

SEQ ID NO: 205818 - DNA, 13 bp, Artificial Sequence
  Oligonucleotide for detection of SNP TSC0050443
aaacccaataaca

SEQ ID NO: 205819 - DNA, 13 bp, Artificial Sequence
  Oligonucleotide for detection of SNP TSC0050443
tgttatcgggttt

SEQ ID NO: 205820 - DNA, 13 bp, Artificial Sequence
  Oligonucleotide for detection of SNP TSC0050443
aaacccgataaca

SEQ ID NO: 205821 - DNA, 13 bp, Artificial Sequence
  Oligonucleotide for detection of SNP TSC0050443
aagtttggtaata

SEQ ID NO: 205822 - DNA, 13 bp, Artificial Sequence
  Oligonucleotide for detection of SNP TSC0050443
tattaccaaactt

SEQ ID NO: 205823 - DNA, 13 bp, Artificial Sequence
  Oligonucleotide for detection of SNP TSC0050443
aagtttagtaata

SEQ ID NO: 205824 - DNA, 13 bp, Artificial Sequence
  Oligonucleotide for detection of SNP TSC0050443
tattactaaactt

SEQ ID NO: 205825 - DNA, 13 bp, Artificial Sequence
  Oligonucleotide for detection of SNP TSC0050443
aagttcggtaata

SEQ ID NO: 205826 - DNA, 13 bp, Artificial Sequence
  Oligonucleotide for detection of SNP TSC0050443
tattaccgaactt

SEQ ID NO: 205827 - DNA, 13 bp, Artificial Sequence
  Oligonucleotide for detection of SNP TSC0050445
attggaagtatta

SEQ ID NO: 205828 - DNA, 13 bp, Artificial Sequence
  Oligonucleotide for detection of SNP TSC0050445
taatacttccaat

SEQ ID NO: 205829 - DNA, 13 bp, Artificial Sequence
  Oligonucleotide for detection of SNP TSC0050445
attggaggtatta

SEQ ID NO: 205830 - DNA, 13 bp, Artificial Sequence
  Oligonucleotide for detection of SNP TSC0050445
taatacctccaat

SEQ ID NO: 205831 - DNA, 13 bp, Artificial Sequence
  Oligonucleotide for detection of SNP TSC0050446
ttggaggaatagt

SEQ ID NO: 205832 - DNA, 13 bp, Artificial Sequence
  Oligonucleotide for detection of SNP TSC0050446
actattcctccaa

SEQ ID NO: 205833 - DNA, 13 bp, Artificial Sequence
  Oligonucleotide for detection of SNP TSC0050446
ttggagaaatagt

SEQ ID NO: 205834 - DNA, 13 bp, Artificial Sequence
  Oligonucleotide for detection of SNP TSC0050446
actatttctccaa

SEQ ID NO: 205835 - DNA, 13 bp, Artificial Sequence
  Oligonucleotide for detection of SNP TSC0050447
agaaggataaagg

SEQ ID NO: 205836 - DNA, 13 bp, Artificial Sequence
  Oligonucleotide for detection of SNP TSC0050447
cctttatccttct

SEQ ID NO: 205837 - DNA, 13 bp, Artificial Sequence
  Oligonucleotide for detection of SNP TSC0050447
agaaggttaaagg

SEQ ID NO: 205838 - DNA, 13 bp, Artificial Sequence
  Oligonucleotide for detection of SNP TSC0050447
cctttaaccttct

SEQ ID NO: 205839 - DNA, 13 bp, Artificial Sequence
  Oligonucleotide for detection of SNP TSC0050448
agtttatgtaatt

SEQ ID NO: 205840 - DNA, 13 bp, Artificial Sequence
  Oligonucleotide for detection of SNP TSC0050448
aattacataaact

SEQ ID NO: 205841 - DNA, 13 bp, Artificial Sequence
  Oligonucleotide for detection of SNP TSC0050448
agtttacgtaatt

SEQ ID NO: 205842 - DNA, 13 bp, Artificial Sequence
  Oligonucleotide for detection of SNP TSC0050448
aattacgtaaact

SEQ ID NO: 205843 - DNA, 13 bp, Artificial Sequence
  Oligonucleotide for detection of SNP TSC0050448
agttatgtaaatt

SEQ ID NO: 205844 - DNA, 13 bp, Artificial Sequence
  Oligonucleotide for detection of SNP TSC0050448
aatttacataact

SEQ ID NO: 205845 - DNA, 13 bp, Artificial Sequence
  Oligonucleotide for detection of SNP TSC0050448
agttatataaatt

SEQ ID NO: 205846 - DNA, 13 bp, Artificial Sequence
  Oligonucleotide for detection of SNP TSC0050448
aatttatataact

SEQ ID NO: 205847 - DNA, 13 bp, Artificial Sequence
  Oligonucleotide for detection of SNP TSC0050448
agttacgtaaatt

SEQ ID NO: 205848 - DNA, 13 bp, Artificial Sequence
  Oligonucleotide for detection of SNP TSC0050448
aatttacgtaact

SEQ ID NO: 205849 - DNA, 13 bp, Artificial Sequence
  Oligonucleotide for detection of SNP TSC0050450
ttttgatgaaaay

SEQ ID NO: 205850 - DNA, 13 bp, Artificial Sequence
  Oligonucleotide for detection of SNP TSC0050450
rttttcatcaaaa

SEQ ID NO: 205851 - DNA, 13 bp, Artificial Sequence
  Oligonucleotide for detection of SNP TSC0050450
ttttgacgaaaay

SEQ ID NO: 205852 - DNA, 13 bp, Artificial Sequence
  Oligonucleotide for detection of SNP TSC0050450
rttttcgtcaaaa

SEQ ID NO: 205853 - DNA, 13 bp, Artificial Sequence
  Oligonucleotide for detection of SNP TSC0050450
gtttttgttaaga

SEQ ID NO: 205854 - DNA, 13 bp, Artificial Sequence
  Oligonucleotide for detection of SNP TSC0050450
tcttaacaaaaac

SEQ ID NO: 205855 - DNA, 13 bp, Artificial Sequence
  Oligonucleotide for detection of SNP TSC0050450
gtttttattaaga

SEQ ID NO: 205856 - DNA, 13 bp, Artificial Sequence
  Oligonucleotide for detection of SNP TSC0050450
tcttaataaaaac

SEQ ID NO: 205857 - DNA, 13 bp, Artificial Sequence
  Oligonucleotide for detection of SNP TSC0050450
gttttcgttaaga

SEQ ID NO: 205858 - DNA, 13 bp, Artificial Sequence
  Oligonucleotide for detection of SNP TSC0050450
tcttaacgaaaac

SEQ ID NO: 205859 - DNA, 13 bp, Artificial Sequence
  Oligonucleotide for detection of SNP TSC0050453
tatttgagtttat

SEQ ID NO: 205860 - DNA, 13 bp, Artificial Sequence
  Oligonucleotide for detection of SNP TSC0050453
ataaactcaaata

SEQ ID NO: 205861 - DNA, 13 bp, Artificial Sequence
  Oligonucleotide for detection of SNP TSC0050453
tatttgggtttat

SEQ ID NO: 205862 - DNA, 13 bp, Artificial Sequence
  Oligonucleotide for detection of SNP TSC0050453
ataaacccaaata

SEQ ID NO: 205863 - DNA, 13 bp, Artificial Sequence
  Oligonucleotide for detection of SNP TSC0050454
ttttgtatttatt

SEQ ID NO: 205864 - DNA, 13 bp, Artificial Sequence
  Oligonucleotide for detection of SNP TSC0050454
aataaatacaaaa

SEQ ID NO: 205865 - DNA, 13 bp, Artificial Sequence
  Oligonucleotide for detection of SNP TSC0050456
gtataatttggtt

SEQ ID NO: 205866 - DNA, 13 bp, Artificial Sequence
  Oligonucleotide for detection of SNP TSC0050456
aaccaaattatac

SEQ ID NO: 205867 - DNA, 13 bp, Artificial Sequence
  Oligonucleotide for detection of SNP TSC0050456
gtataagttggtt

SEQ ID NO: 205868 - DNA, 13 bp, Artificial Sequence
  Oligonucleotide for detection of SNP TSC0050456
aaccaacttatac

SEQ ID NO: 205869 - DNA, 13 bp, Artificial Sequence
  Oligonucleotide for detection of SNP TSC0050456
aattagattatgy

SEQ ID NO: 205870 - DNA, 13 bp, Artificial Sequence
  Oligonucleotide for detection of SNP TSC0050456
rcataatctaatt

SEQ ID NO: 205871 - DNA, 13 bp, Artificial Sequence
  Oligonucleotide for detection of SNP TSC0050456
aattagtttatgy

SEQ ID NO: 205872 - DNA, 13 bp, Artificial Sequence
  Oligonucleotide for detection of SNP TSC0050456
rcataaactaatt

SEQ ID NO: 205873 - DNA, 13 bp, Artificial Sequence
  Oligonucleotide for detection of SNP TSC0050462
ggtttgtgtttay

SEQ ID NO: 205874 - DNA, 13 bp, Artificial Sequence
  Oligonucleotide for detection of SNP TSC0050462
rtaaacacaaacc

SEQ ID NO: 205875 - DNA, 13 bp, Artificial Sequence
  Oligonucleotide for detection of SNP TSC0050462
ggttcgtgtttay

SEQ ID NO: 205876 - DNA, 13 bp, Artificial Sequence
  Oligonucleotide for detection of SNP TSC0050462
rtaaacacgaacc

SEQ ID NO: 205877 - DNA, 13 bp, Artificial Sequence
  Oligonucleotide for detection of SNP TSC0050462
ggtttgcgtttay

SEQ ID NO: 205878 - DNA, 13 bp, Artificial Sequence
  Oligonucleotide for detection of SNP TSC0050462
rtaaacgcaaacc

SEQ ID NO: 205879 - DNA, 13 bp, Artificial Sequence
  Oligonucleotide for detection of SNP TSC0050462
ggttcgcgtttay

SEQ ID NO: 205880 - DNA, 13 bp, Artificial Sequence
  Oligonucleotide for detection of SNP TSC0050462
rtaaacgcgaacc

SEQ ID NO: 205881 - DNA, 13 bp, Artificial Sequence
  Oligonucleotide for detection of SNP TSC0050462
gtggatgtgagty

SEQ ID NO: 205882 - DNA, 13 bp, Artificial Sequence
  Oligonucleotide for detection of SNP TSC0050462
ractcacatccac

SEQ ID NO: 205883 - DNA, 13 bp, Artificial Sequence
  Oligonucleotide for detection of SNP TSC0050462
gtggatatgagty

SEQ ID NO: 205884 - DNA, 13 bp, Artificial Sequence
  Oligonucleotide for detection of SNP TSC0050462
ractcatatccac

SEQ ID NO: 205885 - DNA, 13 bp, Artificial Sequence
  Oligonucleotide for detection of SNP TSC0050462
gtggacgtgagty

SEQ ID NO: 205886 - DNA, 13 bp, Artificial Sequence
  Oligonucleotide for detection of SNP TSC0050462
ractcacgtccac

SEQ ID NO: 205887 - DNA, 13 bp, Artificial Sequence
  Oligonucleotide for detection of SNP TSC0050462
gtggatacgagty

SEQ ID NO: 205888 - DNA, 13 bp, Artificial Sequence
  Oligonucleotide for detection of SNP TSC0050462
ractcgtatccac

SEQ ID NO: 205889 - DNA, 13 bp, Artificial Sequence
  Oligonucleotide for detection of SNP TSC0050462
gtggatgcgagty

SEQ ID NO: 205890 - DNA, 13 bp, Artificial Sequence
  Oligonucleotide for detection of SNP TSC0050462
ractcgcatccac

SEQ ID NO: 205891 - DNA, 13 bp, Artificial Sequence
  Oligonucleotide for detection of SNP TSC0050462
gtggacgcgagty

SEQ ID NO: 205892 - DNA, 13 bp, Artificial Sequence
  Oligonucleotide for detection of SNP TSC0050462
ractcgcgtccac

SEQ ID NO: 205893 - DNA, 13 bp, Artificial Sequence
  Oligonucleotide for detection of SNP TSC0050463
tttttagagttgy

SEQ ID NO: 205894 - DNA, 13 bp, Artificial Sequence
  Oligonucleotide for detection of SNP TSC0050463
rcaactctaaaaa

SEQ ID NO: 205895 - DNA, 13 bp, Artificial Sequence
  Oligonucleotide for detection of SNP TSC0050463
tttttaaagttgy

SEQ ID NO: 205896 - DNA, 13 bp, Artificial Sequence
  Oligonucleotide for detection of SNP TSC0050463
rcaactttaaaaa

SEQ ID NO: 205897 - DNA, 13 bp, Artificial Sequence
  Oligonucleotide for detection of SNP TSC0050464
atattgaggtttg

SEQ ID NO: 205898 - DNA, 13 bp, Artificial Sequence
  Oligonucleotide for detection of SNP TSC0050464
caaacctcaatat

SEQ ID NO: 205899 - DNA, 13 bp, Artificial Sequence
  Oligonucleotide for detection of SNP TSC0050464
atattggggtttg

SEQ ID NO: 205900 - DNA, 13 bp, Artificial Sequence
  Oligonucleotide for detection of SNP TSC0050464
caaaccccaatat

SEQ ID NO: 205901 - DNA, 13 bp, Artificial Sequence
  Oligonucleotide for detection of SNP TSC0050465
tattttttttaat

SEQ ID NO: 205902 - DNA, 13 bp, Artificial Sequence
  Oligonucleotide for detection of SNP TSC0050465
attaaaaaaaata

SEQ ID NO: 205903 - DNA, 13 bp, Artificial Sequence
  Oligonucleotide for detection of SNP TSC0050465
tattttgtttaat

SEQ ID NO: 205904 - DNA, 13 bp, Artificial Sequence
  Oligonucleotide for detection of SNP TSC0050465
attaaacaaaata

SEQ ID NO: 205905 - DNA, 13 bp, Artificial Sequence
  Oligonucleotide for detection of SNP TSC0050465
attagagagaata

SEQ ID NO: 205906 - DNA, 13 bp, Artificial Sequence
  Oligonucleotide for detection of SNP TSC0050465
tattctctctaat

SEQ ID NO: 205907 - DNA, 13 bp, Artificial Sequence
  Oligonucleotide for detection of SNP TSC0050465
attagatagaata

SEQ ID NO: 205908 - DNA, 13 bp, Artificial Sequence
  Oligonucleotide for detection of SNP TSC0050465
tattctatctaat

SEQ ID NO: 205909 - DNA, 13 bp, Artificial Sequence
  Oligonucleotide for detection of SNP TSC0050466
gaataagaaaaga

SEQ ID NO: 205910 - DNA, 13 bp, Artificial Sequence
  Oligonucleotide for detection of SNP TSC0050466
tcttttcttattc

SEQ ID NO: 205911 - DNA, 13 bp, Artificial Sequence
  Oligonucleotide for detection of SNP TSC0050466
gaataaaaaaaga

SEQ ID NO: 205912 - DNA, 13 bp, Artificial Sequence
  Oligonucleotide for detection of SNP TSC0050466
tctttttttattc

SEQ ID NO: 205913 - DNA, 13 bp, Artificial Sequence
  Oligonucleotide for detection of SNP TSC0050467
taggatatgataa

SEQ ID NO: 205914 - DNA, 13 bp, Artificial Sequence
  Oligonucleotide for detection of SNP TSC0050467
ttatcatatccta

SEQ ID NO: 205915 - DNA, 13 bp, Artificial Sequence
  Oligonucleotide for detection of SNP TSC0050467
taggatgtgataa

SEQ ID NO: 205916 - DNA, 13 bp, Artificial Sequence
  Oligonucleotide for detection of SNP TSC0050467
ttatcacatccta

SEQ ID NO: 205917 - DNA, 13 bp, Artificial Sequence
  Oligonucleotide for detection of SNP TSC0007802
atgtgttatagaa

SEQ ID NO: 205918 - DNA, 13 bp, Artificial Sequence
  Oligonucleotide for detection of SNP TSC0007802
ttctataacacat

SEQ ID NO: 205919 - DNA, 13 bp, Artificial Sequence
  Oligonucleotide for detection of SNP TSC0007802
atgtgtgatagaa

SEQ ID NO: 205920 - DNA, 13 bp, Artificial Sequence
  Oligonucleotide for detection of SNP TSC0007802
ttctatcacacat

SEQ ID NO: 205921 - DNA, 13 bp, Artificial Sequence
  Oligonucleotide for detection of SNP TSC0007802
atgtgcgatagaa

SEQ ID NO: 205922 - DNA, 13 bp, Artificial Sequence
  Oligonucleotide for detection of SNP TSC0007802
ttctatcgcacat

SEQ ID NO: 205923 - DNA, 13 bp, Artificial Sequence
  Oligonucleotide for detection of SNP TSC0007802
ttttgtagtatat

SEQ ID NO: 205924 - DNA, 13 bp, Artificial Sequence
  Oligonucleotide for detection of SNP TSC0007802
atatactacaaaa

SEQ ID NO: 205925 - DNA, 13 bp, Artificial Sequence
  Oligonucleotide for detection of SNP TSC0007802
ttttgttgtatat

SEQ ID NO: 205926 - DNA, 13 bp, Artificial Sequence
  Oligonucleotide for detection of SNP TSC0007802
atatacaacaaaa

SEQ ID NO: 205927 - DNA, 13 bp, Artificial Sequence
  Oligonucleotide for detection of SNP TSC0007802
ttttgtcgtatat

SEQ ID NO: 205928 - DNA, 13 bp, Artificial Sequence
  Oligonucleotide for detection of SNP TSC0007802
atatacgacaaaa

SEQ ID NO: 205929 - DNA, 13 bp, Artificial Sequence
  Oligonucleotide for detection of SNP TSC0050471
atttatataatta

SEQ ID NO: 205930 - DNA, 13 bp, Artificial Sequence
  Oligonucleotide for detection of SNP TSC0050471
taattatataaat

SEQ ID NO: 205931 - DNA, 13 bp, Artificial Sequence
  Oligonucleotide for detection of SNP TSC0050471
atttatgtaatta

SEQ ID NO: 205932 - DNA, 13 bp, Artificial Sequence
  Oligonucleotide for detection of SNP TSC0050471
taattacataaat

SEQ ID NO: 205933 - DNA, 13 bp, Artificial Sequence
  Oligonucleotide for detection of SNP TSC0004570
tagaattgagttg

SEQ ID NO: 205934 - DNA, 13 bp, Artificial Sequence
  Oligonucleotide for detection of SNP TSC0004570
caactcaattcta

SEQ ID NO: 205935 - DNA, 13 bp, Artificial Sequence
  Oligonucleotide for detection of SNP TSC0004570
tagaatcgagttg

SEQ ID NO: 205936 - DNA, 13 bp, Artificial Sequence
  Oligonucleotide for detection of SNP TSC0004570
caactcgattcta

SEQ ID NO: 205937 - DNA, 13 bp, Artificial Sequence
  Oligonucleotide for detection of SNP TSC0004571
taaggttgttttg

SEQ ID NO: 205938 - DNA, 13 bp, Artificial Sequence
  Oligonucleotide for detection of SNP TSC0004571
caaaacaacctta

SEQ ID NO: 205939 - DNA, 13 bp, Artificial Sequence
  Oligonucleotide for detection of SNP TSC0004571
taaggtggttttg

SEQ ID NO: 205940 - DNA, 13 bp, Artificial Sequence
  Oligonucleotide for detection of SNP TSC0004571
caaaaccacctta

SEQ ID NO: 205941 - DNA, 13 bp, Artificial Sequence
  Oligonucleotide for detection of SNP TSC0004571
taaggtcgttttg

SEQ ID NO: 205942 - DNA, 13 bp, Artificial Sequence
  Oligonucleotide for detection of SNP TSC0004571
caaaacgacctta

SEQ ID NO: 205943 - DNA, 13 bp, Artificial Sequence
  Oligonucleotide for detection of SNP TSC0004571
taaaacgatttta

SEQ ID NO: 205944 - DNA, 13 bp, Artificial Sequence
  Oligonucleotide for detection of SNP TSC0004571
taaaatcgtttta

SEQ ID NO: 205945 - DNA, 13 bp, Artificial Sequence
  Oligonucleotide for detection of SNP TSC0004572
gttttagatagaa

SEQ ID NO: 205946 - DNA, 13 bp, Artificial Sequence
  Oligonucleotide for detection of SNP TSC0004572
ttctatctaaaac

SEQ ID NO: 205947 - DNA, 13 bp, Artificial Sequence
  Oligonucleotide for detection of SNP TSC0004572
gttttaaatagaa

SEQ ID NO: 205948 - DNA, 13 bp, Artificial Sequence
  Oligonucleotide for detection of SNP TSC0004572
ttctatttaaaac

SEQ ID NO: 205949 - DNA, 13 bp, Artificial Sequence
  Oligonucleotide for detection of SNP TSC0004749
agtggggttagaa

SEQ ID NO: 205950 - DNA, 13 bp, Artificial Sequence
  Oligonucleotide for detection of SNP TSC0004749
ttctaaccccact

SEQ ID NO: 205951 - DNA, 13 bp, Artificial Sequence
  Oligonucleotide for detection of SNP TSC0004749
agtgggtttagaa

SEQ ID NO: 205952 - DNA, 13 bp, Artificial Sequence
  Oligonucleotide for detection of SNP TSC0004749
ttctaaacccact

SEQ ID NO: 205953 - DNA, 13 bp, Artificial Sequence
  Oligonucleotide for detection of SNP TSC0004706
agagatattagty

SEQ ID NO: 205954 - DNA, 13 bp, Artificial Sequence
  Oligonucleotide for detection of SNP TSC0004706
ractaatatctct

SEQ ID NO: 205955 - DNA, 13 bp, Artificial Sequence
  Oligonucleotide for detection of SNP TSC0004706
agagatgttagty

SEQ ID NO: 205956 - DNA, 13 bp, Artificial Sequence
  Oligonucleotide for detection of SNP TSC0004706
ractaacatctct

SEQ ID NO: 205957 - DNA, 13 bp, Artificial Sequence
  Oligonucleotide for detection of SNP TSC0004706
agagacgttagty

SEQ ID NO: 205958 - DNA, 13 bp, Artificial Sequence
  Oligonucleotide for detection of SNP TSC0004706
ractaacgtctct

SEQ ID NO: 205959 - DNA, 13 bp, Artificial Sequence
  Oligonucleotide for detection of SNP TSC0004706
gattggtgttttt

SEQ ID NO: 205960 - DNA, 13 bp, Artificial Sequence
  Oligonucleotide for detection of SNP TSC0004706
aaaaacaccaatc

SEQ ID NO: 205961 - DNA, 13 bp, Artificial Sequence
  Oligonucleotide for detection of SNP TSC0004706
gattggcgttttt

SEQ ID NO: 205962 - DNA, 13 bp, Artificial Sequence
  Oligonucleotide for detection of SNP TSC0004706
aaaaacgccaatc

SEQ ID NO: 205963 - DNA, 13 bp, Artificial Sequence
  Oligonucleotide for detection of SNP TSC0050473
ttggtgtggtggy

SEQ ID NO: 205964 - DNA, 13 bp, Artificial Sequence
  Oligonucleotide for detection of SNP TSC0050473
rccaccacaccaa

SEQ ID NO: 205965 - DNA, 13 bp, Artificial Sequence
  Oligonucleotide for detection of SNP TSC0050473
tcggtgtggtggy

SEQ ID NO: 205966 - DNA, 13 bp, Artificial Sequence
  Oligonucleotide for detection of SNP TSC0050473
rccaccacaccga

SEQ ID NO: 205967 - DNA, 13 bp, Artificial Sequence
  Oligonucleotide for detection of SNP TSC0050473
ttggtgcggtggy

SEQ ID NO: 205968 - DNA, 13 bp, Artificial Sequence
  Oligonucleotide for detection of SNP TSC0050473
rccaccgcaccaa

SEQ ID NO: 205969 - DNA, 13 bp, Artificial Sequence
  Oligonucleotide for detection of SNP TSC0050473
tcggtgcggtggy

SEQ ID NO: 205970 - DNA, 13 bp, Artificial Sequence
  Oligonucleotide for detection of SNP TSC0050473
rccaccgcaccga

SEQ ID NO: 205971 - DNA, 13 bp, Artificial Sequence
  Oligonucleotide for detection of SNP TSC0050473
gttattgtattgg

SEQ ID NO: 205972 - DNA, 13 bp, Artificial Sequence
  Oligonucleotide for detection of SNP TSC0050473
ccaatacaataac

SEQ ID NO: 205973 - DNA, 13 bp, Artificial Sequence
  Oligonucleotide for detection of SNP TSC0050473
gttattatattgg

SEQ ID NO: 205974 - DNA, 13 bp, Artificial Sequence
  Oligonucleotide for detection of SNP TSC0050473
ccaatataataac

SEQ ID NO: 205975 - DNA, 13 bp, Artificial Sequence
  Oligonucleotide for detection of SNP TSC0050473
gttatcgtattgg

SEQ ID NO: 205976 - DNA, 13 bp, Artificial Sequence
  Oligonucleotide for detection of SNP TSC0050473
ccaatacgataac

SEQ ID NO: 205977 - DNA, 13 bp, Artificial Sequence
  Oligonucleotide for detection of SNP TSC0050473
gttattatatcgg

SEQ ID NO: 205978 - DNA, 13 bp, Artificial Sequence
  Oligonucleotide for detection of SNP TSC0050473
ccgatataataac

SEQ ID NO: 205979 - DNA, 13 bp, Artificial Sequence
  Oligonucleotide for detection of SNP TSC0050473
gttattgtatcgg

SEQ ID NO: 205980 - DNA, 13 bp, Artificial Sequence
  Oligonucleotide for detection of SNP TSC0050473
ccgatacaataac

SEQ ID NO: 205981 - DNA, 13 bp, Artificial Sequence
  Oligonucleotide for detection of SNP TSC0050473
gttatcgtatcgg

SEQ ID NO: 205982 - DNA, 13 bp, Artificial Sequence
  Oligonucleotide for detection of SNP TSC0050473
ccgatacgataac

SEQ ID NO: 205983 - DNA, 13 bp, Artificial Sequence
  Oligonucleotide for detection of SNP TSC0008378
tagttaggatata

SEQ ID NO: 205984 - DNA, 13 bp, Artificial Sequence
  Oligonucleotide for detection of SNP TSC0008378
tatatcctaacta

SEQ ID NO: 205985 - DNA, 13 bp, Artificial Sequence
  Oligonucleotide for detection of SNP TSC0008378
tagttaagatata

SEQ ID NO: 205986 - DNA, 13 bp, Artificial Sequence
  Oligonucleotide for detection of SNP TSC0008378
tatatcttaacta

SEQ ID NO: 205987 - DNA, 13 bp, Artificial Sequence
  Oligonucleotide for detection of SNP TSC0050474
gatgaagaggatt

SEQ ID NO: 205988 - DNA, 13 bp, Artificial Sequence
  Oligonucleotide for detection of SNP TSC0050474
aatcctcttcatc

SEQ ID NO: 205989 - DNA, 13 bp, Artificial Sequence
  Oligonucleotide for detection of SNP TSC0050474
gatgaaaaggatt

SEQ ID NO: 205990 - DNA, 13 bp, Artificial Sequence
  Oligonucleotide for detection of SNP TSC0050474
aatccttttcatc

SEQ ID NO: 205991 - DNA, 13 bp, Artificial Sequence
  Oligonucleotide for detection of SNP TSC0050475
agaaaaggtgatt

SEQ ID NO: 205992 - DNA, 13 bp, Artificial Sequence
  Oligonucleotide for detection of SNP TSC0050475
aatcaccttttct

SEQ ID NO: 205993 - DNA, 13 bp, Artificial Sequence
  Oligonucleotide for detection of SNP TSC0050475
agaaaaagtgatt

SEQ ID NO: 205994 - DNA, 13 bp, Artificial Sequence
  Oligonucleotide for detection of SNP TSC0050475
aatcactttttct

SEQ ID NO: 205995 - DNA, 13 bp, Artificial Sequence
  Oligonucleotide for detection of SNP TSC0050475
agaaaaggcgatt

SEQ ID NO: 205996 - DNA, 13 bp, Artificial Sequence
  Oligonucleotide for detection of SNP TSC0050475
aatcgccttttct

SEQ ID NO: 205997 - DNA, 13 bp, Artificial Sequence
  Oligonucleotide for detection of SNP TSC0050475
agaaaaagcgatt

SEQ ID NO: 205998 - DNA, 13 bp, Artificial Sequence
  Oligonucleotide for detection of SNP TSC0050475
aatcgctttttct

SEQ ID NO: 205999 - DNA, 13 bp, Artificial Sequence
  Oligonucleotide for detection of SNP TSC0008264
atatttttattgy

SEQ ID NO: 206000 - DNA, 13 bp, Artificial Sequence
  Oligonucleotide for detection of SNP TSC0008264
rcaataaaaatat

SEQ ID NO: 206001 - DNA, 13 bp, Artificial Sequence
  Oligonucleotide for detection of SNP TSC0008264
atatttgtattgy

SEQ ID NO: 206002 - DNA, 13 bp, Artificial Sequence
  Oligonucleotide for detection of SNP TSC0008264
rcaatacaaatat

SEQ ID NO: 206003 - DNA, 13 bp, Artificial Sequence
  Oligonucleotide for detection of SNP TSC0008264
gtaatagaaatat

SEQ ID NO: 206004 - DNA, 13 bp, Artificial Sequence
  Oligonucleotide for detection of SNP TSC0008264
atatttctattac

SEQ ID NO: 206005 - DNA, 13 bp, Artificial Sequence
  Oligonucleotide for detection of SNP TSC0008264
gtaatataaatat

SEQ ID NO: 206006 - DNA, 13 bp, Artificial Sequence
  Oligonucleotide for detection of SNP TSC0008264
atatttatattac

SEQ ID NO: 206007 - DNA, 13 bp, Artificial Sequence
  Oligonucleotide for detection of SNP TSC0008265
ttggggaggaatg

SEQ ID NO: 206008 - DNA, 13 bp, Artificial Sequence
  Oligonucleotide for detection of SNP TSC0008265
cattcctccccaa

SEQ ID NO: 206009 - DNA, 13 bp, Artificial Sequence
  Oligonucleotide for detection of SNP TSC0008265
ttgggggggaatg

SEQ ID NO: 206010 - DNA, 13 bp, Artificial Sequence
  Oligonucleotide for detection of SNP TSC0008265
cattcccccccaa

SEQ ID NO: 206011 - DNA, 13 bp, Artificial Sequence
  Oligonucleotide for detection of SNP TSC0050476
atgtagatgaatg

SEQ ID NO: 206012 - DNA, 13 bp, Artificial Sequence
  Oligonucleotide for detection of SNP TSC0050476
cattcatctacat

SEQ ID NO: 206013 - DNA, 13 bp, Artificial Sequence
  Oligonucleotide for detection of SNP TSC0050476
atgtagttgaatg

SEQ ID NO: 206014 - DNA, 13 bp, Artificial Sequence
  Oligonucleotide for detection of SNP TSC0050476
cattcaactacat

SEQ ID NO: 206015 - DNA, 13 bp, Artificial Sequence
  Oligonucleotide for detection of SNP TSC0050477
gaatgaagtttaa

SEQ ID NO: 206016 - DNA, 13 bp, Artificial Sequence
  Oligonucleotide for detection of SNP TSC0050477
ttaaacttcattc

SEQ ID NO: 206017 - DNA, 13 bp, Artificial Sequence
  Oligonucleotide for detection of SNP TSC0050477
gaatgaggtttaa

SEQ ID NO: 206018 - DNA, 13 bp, Artificial Sequence
  Oligonucleotide for detection of SNP TSC0050477
ttaaacctcattc

SEQ ID NO: 206019 - DNA, 13 bp, Artificial Sequence
  Oligonucleotide for detection of SNP TSC0050477
gaacgaagtttaa

SEQ ID NO: 206020 - DNA, 13 bp, Artificial Sequence
  Oligonucleotide for detection of SNP TSC0050477
ttaaacttcgttc

SEQ ID NO: 206021 - DNA, 13 bp, Artificial Sequence
  Oligonucleotide for detection of SNP TSC0050477
gaacgaggtttaa

SEQ ID NO: 206022 - DNA, 13 bp, Artificial Sequence
  Oligonucleotide for detection of SNP TSC0050477
ttaaacctcgttc

SEQ ID NO: 206023 - DNA, 13 bp, Artificial Sequence
  Oligonucleotide for detection of SNP TSC0050478
ttgggtgtatttt

SEQ ID NO: 206024 - DNA, 13 bp, Artificial Sequence
  Oligonucleotide for detection of SNP TSC0050478
aaaatacacccaa

SEQ ID NO: 206025 - DNA, 13 bp, Artificial Sequence
  Oligonucleotide for detection of SNP TSC0008206
tagtggtttttty

SEQ ID NO: 206026 - DNA, 13 bp, Artificial Sequence
  Oligonucleotide for detection of SNP TSC0008206
raaaaaaccacta

SEQ ID NO: 206027 - DNA, 13 bp, Artificial Sequence
  Oligonucleotide for detection of SNP TSC0008206
tagtgggttttty

SEQ ID NO: 206028 - DNA, 13 bp, Artificial Sequence
  Oligonucleotide for detection of SNP TSC0008206
raaaaacccacta

SEQ ID NO: 206029 - DNA, 13 bp, Artificial Sequence
  Oligonucleotide for detection of SNP TSC0008206
gaggagattattg

SEQ ID NO: 206030 - DNA, 13 bp, Artificial Sequence
  Oligonucleotide for detection of SNP TSC0008206
caataatctcctc

SEQ ID NO: 206031 - DNA, 13 bp, Artificial Sequence
  Oligonucleotide for detection of SNP TSC0008206
gaggagtttattg

SEQ ID NO: 206032 - DNA, 13 bp, Artificial Sequence
  Oligonucleotide for detection of SNP TSC0008206
caataaactcctc

SEQ ID NO: 206033 - DNA, 13 bp, Artificial Sequence
  Oligonucleotide for detection of SNP TSC0050480
aatggattattat

SEQ ID NO: 206034 - DNA, 13 bp, Artificial Sequence
  Oligonucleotide for detection of SNP TSC0050480
ataataatccatt

SEQ ID NO: 206035 - DNA, 13 bp, Artificial Sequence
  Oligonucleotide for detection of SNP TSC0050480
ataatagtttatt

SEQ ID NO: 206036 - DNA, 13 bp, Artificial Sequence
  Oligonucleotide for detection of SNP TSC0050480
aataaactattat

SEQ ID NO: 206037 - DNA, 13 bp, Artificial Sequence
  Oligonucleotide for detection of SNP TSC0007438
taggaaattttaa

SEQ ID NO: 206038 - DNA, 13 bp, Artificial Sequence
  Oligonucleotide for detection of SNP TSC0007438
ttaaaatttccta

SEQ ID NO: 206039 - DNA, 13 bp, Artificial Sequence
  Oligonucleotide for detection of SNP TSC0007438
taggaatttttaa

SEQ ID NO: 206040 - DNA, 13 bp, Artificial Sequence
  Oligonucleotide for detection of SNP TSC0007438
ttaaaaattccta

SEQ ID NO: 206041 - DNA, 13 bp, Artificial Sequence
  Oligonucleotide for detection of SNP TSC0007438
ttgagattttttg

SEQ ID NO: 206042 - DNA, 13 bp, Artificial Sequence
  Oligonucleotide for detection of SNP TSC0007438
caaaaaatctcaa

SEQ ID NO: 206043 - DNA, 13 bp, Artificial Sequence
  Oligonucleotide for detection of SNP TSC0007438
ttgagagtttttg

SEQ ID NO: 206044 - DNA, 13 bp, Artificial Sequence
  Oligonucleotide for detection of SNP TSC0007438
caaaaactctcaa

SEQ ID NO: 206045 - DNA, 13 bp, Artificial Sequence
  Oligonucleotide for detection of SNP TSC0007439
tttgtagtggtay

SEQ ID NO: 206046 - DNA, 13 bp, Artificial Sequence
  Oligonucleotide for detection of SNP TSC0007439
rtaccactacaaa

SEQ ID NO: 206047 - DNA, 13 bp, Artificial Sequence
  Oligonucleotide for detection of SNP TSC0007439
tttgtaatggtay

SEQ ID NO: 206048 - DNA, 13 bp, Artificial Sequence
  Oligonucleotide for detection of SNP TSC0007439
rtaccattacaaa

SEQ ID NO: 206049 - DNA, 13 bp, Artificial Sequence
  Oligonucleotide for detection of SNP TSC0007440
tttttattggtgg

SEQ ID NO: 206050 - DNA, 13 bp, Artificial Sequence
  Oligonucleotide for detection of SNP TSC0007440
ccaccaataaaaa

SEQ ID NO: 206051 - DNA, 13 bp, Artificial Sequence
  Oligonucleotide for detection of SNP TSC0007440
tttttagtggtgg

SEQ ID NO: 206052 - DNA, 13 bp, Artificial Sequence
  Oligonucleotide for detection of SNP TSC0007440
ccaccactaaaaa

SEQ ID NO: 206053 - DNA, 13 bp, Artificial Sequence
  Oligonucleotide for detection of SNP TSC0007440
ttattaatggaag

SEQ ID NO: 206054 - DNA, 13 bp, Artificial Sequence
  Oligonucleotide for detection of SNP TSC0007440
cttccattaataa

SEQ ID NO: 206055 - DNA, 13 bp, Artificial Sequence
  Oligonucleotide for detection of SNP TSC0007440
ttattattggaag

SEQ ID NO: 206056 - DNA, 13 bp, Artificial Sequence
  Oligonucleotide for detection of SNP TSC0007440
cttccaataataa

SEQ ID NO: 206057 - DNA, 13 bp, Artificial Sequence
  Oligonucleotide for detection of SNP TSC0050481
aagtttttatttt

SEQ ID NO: 206058 - DNA, 13 bp, Artificial Sequence
  Oligonucleotide for detection of SNP TSC0050481
aaaataaaaactt

SEQ ID NO: 206059 - DNA, 13 bp, Artificial Sequence
  Oligonucleotide for detection of SNP TSC0050481
aaaatatgggttt

SEQ ID NO: 206060 - DNA, 13 bp, Artificial Sequence
  Oligonucleotide for detection of SNP TSC0050481
aaacccatatttt

SEQ ID NO: 206061 - DNA, 13 bp, Artificial Sequence
  Oligonucleotide for detection of SNP TSC0050481
aaaataagggttt

SEQ ID NO: 206062 - DNA, 13 bp, Artificial Sequence
  Oligonucleotide for detection of SNP TSC0050481
aaacccttatttt

SEQ ID NO: 206063 - DNA, 13 bp, Artificial Sequence
  Oligonucleotide for detection of SNP TSC0050481
aaaatacgggttt

SEQ ID NO: 206064 - DNA, 13 bp, Artificial Sequence
  Oligonucleotide for detection of SNP TSC0050481
aaacccgtatttt

SEQ ID NO: 206065 - DNA, 13 bp, Artificial Sequence
  Oligonucleotide for detection of SNP TSC0050482
ttatgaggagatt

SEQ ID NO: 206066 - DNA, 13 bp, Artificial Sequence
  Oligonucleotide for detection of SNP TSC0050482
aatctcctcataa

SEQ ID NO: 206067 - DNA, 13 bp, Artificial Sequence
  Oligonucleotide for detection of SNP TSC0050482
ttatgaagagatt

SEQ ID NO: 206068 - DNA, 13 bp, Artificial Sequence
  Oligonucleotide for detection of SNP TSC0050482
aatctcttcataa

SEQ ID NO: 206069 - DNA, 13 bp, Artificial Sequence
  Oligonucleotide for detection of SNP TSC0004922
aatgtaattgggt

SEQ ID NO: 206070 - DNA, 13 bp, Artificial Sequence
  Oligonucleotide for detection of SNP TSC0004922
acccaattacatt

SEQ ID NO: 206071 - DNA, 13 bp, Artificial Sequence
  Oligonucleotide for detection of SNP TSC0004922
aatgtagttgggt

SEQ ID NO: 206072 - DNA, 13 bp, Artificial Sequence
  Oligonucleotide for detection of SNP TSC0004922
acccaactacatt

SEQ ID NO: 206073 - DNA, 13 bp, Artificial Sequence
  Oligonucleotide for detection of SNP TSC0004923
tggtaatgtaaag

SEQ ID NO: 206074 - DNA, 13 bp, Artificial Sequence
  Oligonucleotide for detection of SNP TSC0004923
ctttacattacca

SEQ ID NO: 206075 - DNA, 13 bp, Artificial Sequence
  Oligonucleotide for detection of SNP TSC0004923
tggtaacgtaaag

SEQ ID NO: 206076 - DNA, 13 bp, Artificial Sequence
  Oligonucleotide for detection of SNP TSC0004923
ctttacgttacca

SEQ ID NO: 206077 - DNA, 13 bp, Artificial Sequence
  Oligonucleotide for detection of SNP TSC0004923
ttttgtattgtta

SEQ ID NO: 206078 - DNA, 13 bp, Artificial Sequence
  Oligonucleotide for detection of SNP TSC0004923
taacaatacaaaa

SEQ ID NO: 206079 - DNA, 13 bp, Artificial Sequence
  Oligonucleotide for detection of SNP TSC0004923
ttttgcgttgtta

SEQ ID NO: 206080 - DNA, 13 bp, Artificial Sequence
  Oligonucleotide for detection of SNP TSC0004923
taacaacgcaaaa

SEQ ID NO: 206081 - DNA, 13 bp, Artificial Sequence
  Oligonucleotide for detection of SNP TSC0050483
ttgtttatgagtt

SEQ ID NO: 206082 - DNA, 13 bp, Artificial Sequence
  Oligonucleotide for detection of SNP TSC0050483
aactcataaacaa

SEQ ID NO: 206083 - DNA, 13 bp, Artificial Sequence
  Oligonucleotide for detection of SNP TSC0050483
ttgtttttgagtt

SEQ ID NO: 206084 - DNA, 13 bp, Artificial Sequence
  Oligonucleotide for detection of SNP TSC0050483
aactcaaaaacaa

SEQ ID NO: 206085 - DNA, 13 bp, Artificial Sequence
  Oligonucleotide for detection of SNP TSC0050483
agtttatggatag

SEQ ID NO: 206086 - DNA, 13 bp, Artificial Sequence
  Oligonucleotide for detection of SNP TSC0050483
ctatccataaact

SEQ ID NO: 206087 - DNA, 13 bp, Artificial Sequence
  Oligonucleotide for detection of SNP TSC0050483
agtttagggatag

SEQ ID NO: 206088 - DNA, 13 bp, Artificial Sequence
  Oligonucleotide for detection of SNP TSC0050483
ctatccctaaact

SEQ ID NO: 206089 - DNA, 13 bp, Artificial Sequence
  Oligonucleotide for detection of SNP TSC0050484
ataaaagtttttt

SEQ ID NO: 206090 - DNA, 13 bp, Artificial Sequence
  Oligonucleotide for detection of SNP TSC0050484
aaaaaacttttat

SEQ ID NO: 206091 - DNA, 13 bp, Artificial Sequence
  Oligonucleotide for detection of SNP TSC0050485
ataggtaaggttg

SEQ ID NO: 206092 - DNA, 13 bp, Artificial Sequence
  Oligonucleotide for detection of SNP TSC0050485
caaccttacctat

SEQ ID NO: 206093 - DNA, 13 bp, Artificial Sequence
  Oligonucleotide for detection of SNP TSC0050485
ataggttaggttg

SEQ ID NO: 206094 - DNA, 13 bp, Artificial Sequence
  Oligonucleotide for detection of SNP TSC0050485
caacctaacctat

SEQ ID NO: 206095 - DNA, 13 bp, Artificial Sequence
  Oligonucleotide for detection of SNP TSC0050485
tagttttgtttat

SEQ ID NO: 206096 - DNA, 13 bp, Artificial Sequence
  Oligonucleotide for detection of SNP TSC0050485
ataaacaaaacta

SEQ ID NO: 206097 - DNA, 13 bp, Artificial Sequence
  Oligonucleotide for detection of SNP TSC0050485
tagtttggtttat

SEQ ID NO: 206098 - DNA, 13 bp, Artificial Sequence
  Oligonucleotide for detection of SNP TSC0050485
ataaaccaaacta

SEQ ID NO: 206099 - DNA, 13 bp, Artificial Sequence
  Oligonucleotide for detection of SNP TSC0050490
ttaagagtgttay

SEQ ID NO: 206100 - DNA, 13 bp, Artificial Sequence
  Oligonucleotide for detection of SNP TSC0050490
rtaacactcttaa

SEQ ID NO: 206101 - DNA, 13 bp, Artificial Sequence
  Oligonucleotide for detection of SNP TSC0050490
ttaagaatgttay

SEQ ID NO: 206102 - DNA, 13 bp, Artificial Sequence
  Oligonucleotide for detection of SNP TSC0050490
rtaacattcttaa

SEQ ID NO: 206103 - DNA, 13 bp, Artificial Sequence
  Oligonucleotide for detection of SNP TSC0001320
gatagtgataaay

SEQ ID NO: 206104 - DNA, 13 bp, Artificial Sequence
  Oligonucleotide for detection of SNP TSC0001320
rtttatcactatc

SEQ ID NO: 206105 - DNA, 13 bp, Artificial Sequence
  Oligonucleotide for detection of SNP TSC0001320
gatagtaataaay

SEQ ID NO: 206106 - DNA, 13 bp, Artificial Sequence
  Oligonucleotide for detection of SNP TSC0001320
rtttattactatc

SEQ ID NO: 206107 - DNA, 13 bp, Artificial Sequence
  Oligonucleotide for detection of SNP TSC0050491
aagaattgagaaa

SEQ ID NO: 206108 - DNA, 13 bp, Artificial Sequence
  Oligonucleotide for detection of SNP TSC0050491
tttctcaattctt

SEQ ID NO: 206109 - DNA, 13 bp, Artificial Sequence
  Oligonucleotide for detection of SNP TSC0050491
aagaatcgagaaa

SEQ ID NO: 206110 - DNA, 13 bp, Artificial Sequence
  Oligonucleotide for detection of SNP TSC0050491
tttctcgattctt

SEQ ID NO: 206111 - DNA, 13 bp, Artificial Sequence
  Oligonucleotide for detection of SNP TSC0050492
aattttgaaatty

SEQ ID NO: 206112 - DNA, 13 bp, Artificial Sequence
  Oligonucleotide for detection of SNP TSC0050492
raatttcaaaatt

SEQ ID NO: 206113 - DNA, 13 bp, Artificial Sequence
  Oligonucleotide for detection of SNP TSC0050492
aattttaaaatty

SEQ ID NO: 206114 - DNA, 13 bp, Artificial Sequence
  Oligonucleotide for detection of SNP TSC0050492
raattttaaaatt

SEQ ID NO: 206115 - DNA, 13 bp, Artificial Sequence
  Oligonucleotide for detection of SNP TSC0050493
ttttgatgtttty

SEQ ID NO: 206116 - DNA, 13 bp, Artificial Sequence
  Oligonucleotide for detection of SNP TSC0050493
raaaacatcaaaa

SEQ ID NO: 206117 - DNA, 13 bp, Artificial Sequence
  Oligonucleotide for detection of SNP TSC0050493
ttttgacgtttty

SEQ ID NO: 206118 - DNA, 13 bp, Artificial Sequence
  Oligonucleotide for detection of SNP TSC0050493
raaaacgtcaaaa

SEQ ID NO: 206119 - DNA, 13 bp, Artificial Sequence
  Oligonucleotide for detection of SNP TSC0050494
ttaagggtatgaa

SEQ ID NO: 206120 - DNA, 13 bp, Artificial Sequence
  Oligonucleotide for detection of SNP TSC0050494
ttcatacccttaa

SEQ ID NO: 206121 - DNA, 13 bp, Artificial Sequence
  Oligonucleotide for detection of SNP TSC0050494
ttaaggatatgaa

SEQ ID NO: 206122 - DNA, 13 bp, Artificial Sequence
  Oligonucleotide for detection of SNP TSC0050494
ttcatatccttaa

SEQ ID NO: 206123 - DNA, 13 bp, Artificial Sequence
  Oligonucleotide for detection of SNP TSC0050495
ttattgataatty

SEQ ID NO: 206124 - DNA, 13 bp, Artificial Sequence
  Oligonucleotide for detection of SNP TSC0050495
raattatcaataa

SEQ ID NO: 206125 - DNA, 13 bp, Artificial Sequence
  Oligonucleotide for detection of SNP TSC0050495
ttattggtaatty

SEQ ID NO: 206126 - DNA, 13 bp, Artificial Sequence
  Oligonucleotide for detection of SNP TSC0050495
raattaccaataa

SEQ ID NO: 206127 - DNA, 13 bp, Artificial Sequence
  Oligonucleotide for detection of SNP TSC0050496
tgtggtatatata

SEQ ID NO: 206128 - DNA, 13 bp, Artificial Sequence
  Oligonucleotide for detection of SNP TSC0050496
tatatataccaca

SEQ ID NO: 206129 - DNA, 13 bp, Artificial Sequence
  Oligonucleotide for detection of SNP TSC0050496
tgtggtgtatata

SEQ ID NO: 206130 - DNA, 13 bp, Artificial Sequence
  Oligonucleotide for detection of SNP TSC0050496
tatatacaccaca

SEQ ID NO: 206131 - DNA, 13 bp, Artificial Sequence
  Oligonucleotide for detection of SNP TSC0050496
tgtggcgtatata

SEQ ID NO: 206132 - DNA, 13 bp, Artificial Sequence
  Oligonucleotide for detection of SNP TSC0050496
tatatacgccaca

SEQ ID NO: 206133 - DNA, 13 bp, Artificial Sequence
  Oligonucleotide for detection of SNP TSC0050496
tatatgtgttata

SEQ ID NO: 206134 - DNA, 13 bp, Artificial Sequence
  Oligonucleotide for detection of SNP TSC0050496
tataacacatata

SEQ ID NO: 206135 - DNA, 13 bp, Artificial Sequence
  Oligonucleotide for detection of SNP TSC0050496
tatatgcgttata

SEQ ID NO: 206136 - DNA, 13 bp, Artificial Sequence
  Oligonucleotide for detection of SNP TSC0050496
tataacgcatata

SEQ ID NO: 206137 - DNA, 13 bp, Artificial Sequence
  Oligonucleotide for detection of SNP TSC0050497
atatatatgttay

SEQ ID NO: 206138 - DNA, 13 bp, Artificial Sequence
  Oligonucleotide for detection of SNP TSC0050497
rtaacatatatat

SEQ ID NO: 206139 - DNA, 13 bp, Artificial Sequence
  Oligonucleotide for detection of SNP TSC0050497
atatatgcgttay

SEQ ID NO: 206140 - DNA, 13 bp, Artificial Sequence
  Oligonucleotide for detection of SNP TSC0050497
rtaacgcatatat

SEQ ID NO: 206141 - DNA, 13 bp, Artificial Sequence
  Oligonucleotide for detection of SNP TSC0050497
atatatacgttay

SEQ ID NO: 206142 - DNA, 13 bp, Artificial Sequence
  Oligonucleotide for detection of SNP TSC0050497
rtaacgtatatat

SEQ ID NO: 206143 - DNA, 13 bp, Artificial Sequence
  Oligonucleotide for detection of SNP TSC0050498
attttagtgtgty

SEQ ID NO: 206144 - DNA, 13 bp, Artificial Sequence
  Oligonucleotide for detection of SNP TSC0050498
racacactaaaat

SEQ ID NO: 206145 - DNA, 13 bp, Artificial Sequence
  Oligonucleotide for detection of SNP TSC0050498
attttaatgtgty

SEQ ID NO: 206146 - DNA, 13 bp, Artificial Sequence
  Oligonucleotide for detection of SNP TSC0050498
racacattaaaat

SEQ ID NO: 206147 - DNA, 13 bp, Artificial Sequence
  Oligonucleotide for detection of SNP TSC0050499
atttttatttcga

SEQ ID NO: 206148 - DNA, 13 bp, Artificial Sequence
  Oligonucleotide for detection of SNP TSC0050499
tcgaaataaaaat

SEQ ID NO: 206149 - DNA, 13 bp, Artificial Sequence
  Oligonucleotide for detection of SNP TSC0050499
attttcgttttga

SEQ ID NO: 206150 - DNA, 13 bp, Artificial Sequence
  Oligonucleotide for detection of SNP TSC0050499
tcaaaacgaaaat

SEQ ID NO: 206151 - DNA, 13 bp, Artificial Sequence
  Oligonucleotide for detection of SNP TSC0050499
atttttgtttcga

SEQ ID NO: 206152 - DNA, 13 bp, Artificial Sequence
  Oligonucleotide for detection of SNP TSC0050499
tcgaaacaaaaat

SEQ ID NO: 206153 - DNA, 13 bp, Artificial Sequence
  Oligonucleotide for detection of SNP TSC0050499
attttcgtttcga

SEQ ID NO: 206154 - DNA, 13 bp, Artificial Sequence
  Oligonucleotide for detection of SNP TSC0050499
tcgaaacgaaaat

SEQ ID NO: 206155 - DNA, 13 bp, Artificial Sequence
  Oligonucleotide for detection of SNP TSC0050499
ttgaaatgggagt

SEQ ID NO: 206156 - DNA, 13 bp, Artificial Sequence
  Oligonucleotide for detection of SNP TSC0050499
actcccatttcaa

SEQ ID NO: 206157 - DNA, 13 bp, Artificial Sequence
  Oligonucleotide for detection of SNP TSC0050499
tcgaaatgggagt

SEQ ID NO: 206158 - DNA, 13 bp, Artificial Sequence
  Oligonucleotide for detection of SNP TSC0050499
actcccatttcga

SEQ ID NO: 206159 - DNA, 13 bp, Artificial Sequence
  Oligonucleotide for detection of SNP TSC0050499
ttgaaacgggagt

SEQ ID NO: 206160 - DNA, 13 bp, Artificial Sequence
  Oligonucleotide for detection of SNP TSC0050499
actcccgtttcaa

SEQ ID NO: 206161 - DNA, 13 bp, Artificial Sequence
  Oligonucleotide for detection of SNP TSC0050499
tcgaaacgggagt

SEQ ID NO: 206162 - DNA, 13 bp, Artificial Sequence
  Oligonucleotide for detection of SNP TSC0050499
actcccgtttcga

SEQ ID NO: 206163 - DNA, 13 bp, Artificial Sequence
  Oligonucleotide for detection of SNP TSC0050500
gaagatattgaaa

SEQ ID NO: 206164 - DNA, 13 bp, Artificial Sequence
  Oligonucleotide for detection of SNP TSC0050500
tttcaatatcttc

SEQ ID NO: 206165 - DNA, 13 bp, Artificial Sequence
  Oligonucleotide for detection of SNP TSC0050500
gaagatgttgaaa

SEQ ID NO: 206166 - DNA, 13 bp, Artificial Sequence
  Oligonucleotide for detection of SNP TSC0050500
tttcaacatcttc

SEQ ID NO: 206167 - DNA, 13 bp, Artificial Sequence
  Oligonucleotide for detection of SNP TSC0050500
gaagacgttgaaa

SEQ ID NO: 206168 - DNA, 13 bp, Artificial Sequence
  Oligonucleotide for detection of SNP TSC0050500
tttcaacgtcttc

SEQ ID NO: 206169 - DNA, 13 bp, Artificial Sequence
  Oligonucleotide for detection of SNP TSC0050501
ttgttttgatatt

SEQ ID NO: 206170 - DNA, 13 bp, Artificial Sequence
  Oligonucleotide for detection of SNP TSC0050501
aatatcaaaacaa

SEQ ID NO: 206171 - DNA, 13 bp, Artificial Sequence
  Oligonucleotide for detection of SNP TSC0050501
tcgttttgatatt

SEQ ID NO: 206172 - DNA, 13 bp, Artificial Sequence
  Oligonucleotide for detection of SNP TSC0050501
aatatcaaaacga

SEQ ID NO: 206173 - DNA, 13 bp, Artificial Sequence
  Oligonucleotide for detection of SNP TSC0050501
ttgtttcgatatt

SEQ ID NO: 206174 - DNA, 13 bp, Artificial Sequence
  Oligonucleotide for detection of SNP TSC0050501
aatatcgaaacaa

SEQ ID NO: 206175 - DNA, 13 bp, Artificial Sequence
  Oligonucleotide for detection of SNP TSC0050501
tcgtttcgatatt

SEQ ID NO: 206176 - DNA, 13 bp, Artificial Sequence
  Oligonucleotide for detection of SNP TSC0050501
aatatcgaaacga

SEQ ID NO: 206177 - DNA, 13 bp, Artificial Sequence
  Oligonucleotide for detection of SNP TSC0050501
aatgttgaaatgg

SEQ ID NO: 206178 - DNA, 13 bp, Artificial Sequence
  Oligonucleotide for detection of SNP TSC0050501
ccatttcaacatt

SEQ ID NO: 206179 - DNA, 13 bp, Artificial Sequence
  Oligonucleotide for detection of SNP TSC0050501
aatgttaaaatgg

SEQ ID NO: 206180 - DNA, 13 bp, Artificial Sequence
  Oligonucleotide for detection of SNP TSC0050501
ccattttaacatt

SEQ ID NO: 206181 - DNA, 13 bp, Artificial Sequence
  Oligonucleotide for detection of SNP TSC0050501
aatgtcgaaatgg

SEQ ID NO: 206182 - DNA, 13 bp, Artificial Sequence
  Oligonucleotide for detection of SNP TSC0050501
ccatttcgacatt

SEQ ID NO: 206183 - DNA, 13 bp, Artificial Sequence
  Oligonucleotide for detection of SNP TSC0050501
aatgttaaaacgg

SEQ ID NO: 206184 - DNA, 13 bp, Artificial Sequence
  Oligonucleotide for detection of SNP TSC0050501
ccgttttaacatt

SEQ ID NO: 206185 - DNA, 13 bp, Artificial Sequence
  Oligonucleotide for detection of SNP TSC0050501
aatgttgaaacgg

SEQ ID NO: 206186 - DNA, 13 bp, Artificial Sequence
  Oligonucleotide for detection of SNP TSC0050501
ccgtttcaacatt

SEQ ID NO: 206187 - DNA, 13 bp, Artificial Sequence
  Oligonucleotide for detection of SNP TSC0050501
aatgtcgaaacgg

SEQ ID NO: 206188 - DNA, 13 bp, Artificial Sequence
  Oligonucleotide for detection of SNP TSC0050501
ccgtttcgacatt

SEQ ID NO: 206189 - DNA, 13 bp, Artificial Sequence
  Oligonucleotide for detection of SNP TSC0050502
taaaggttttttg

SEQ ID NO: 206190 - DNA, 13 bp, Artificial Sequence
  Oligonucleotide for detection of SNP TSC0050502
caaaaaaccttta

SEQ ID NO: 206191 - DNA, 13 bp, Artificial Sequence
  Oligonucleotide for detection of SNP TSC0050502
taggagatttttg

SEQ ID NO: 206192 - DNA, 13 bp, Artificial Sequence
  Oligonucleotide for detection of SNP TSC0050502
caaaaatctccta

SEQ ID NO: 206193 - DNA, 13 bp, Artificial Sequence
  Oligonucleotide for detection of SNP TSC0050502
taggagttttttg

SEQ ID NO: 206194 - DNA, 13 bp, Artificial Sequence
  Oligonucleotide for detection of SNP TSC0050502
caaaaaactccta

SEQ ID NO: 206195 - DNA, 13 bp, Artificial Sequence
  Oligonucleotide for detection of SNP TSC0007142
aattgtggaagaa

SEQ ID NO: 206196 - DNA, 13 bp, Artificial Sequence
  Oligonucleotide for detection of SNP TSC0007142
ttcttccacaatt

SEQ ID NO: 206197 - DNA, 13 bp, Artificial Sequence
  Oligonucleotide for detection of SNP TSC0007142
aattgtagaagaa

SEQ ID NO: 206198 - DNA, 13 bp, Artificial Sequence
  Oligonucleotide for detection of SNP TSC0007142
ttcttctacaatt

SEQ ID NO: 206199 - DNA, 13 bp, Artificial Sequence
  Oligonucleotide for detection of SNP TSC0050503
ggtggtgtggata

SEQ ID NO: 206200 - DNA, 13 bp, Artificial Sequence
  Oligonucleotide for detection of SNP TSC0050503
tatccacaccacc

SEQ ID NO: 206201 - DNA, 13 bp, Artificial Sequence
  Oligonucleotide for detection of SNP TSC0050503
ggtggtatggata

SEQ ID NO: 206202 - DNA, 13 bp, Artificial Sequence
  Oligonucleotide for detection of SNP TSC0050503
tatccataccacc

SEQ ID NO: 206203 - DNA, 13 bp, Artificial Sequence
  Oligonucleotide for detection of SNP TSC0050504
tgattatgttatg

SEQ ID NO: 206204 - DNA, 13 bp, Artificial Sequence
  Oligonucleotide for detection of SNP TSC0050504
cataacataatca

SEQ ID NO: 206205 - DNA, 13 bp, Artificial Sequence
  Oligonucleotide for detection of SNP TSC0050504
tgattacgttatg

SEQ ID NO: 206206 - DNA, 13 bp, Artificial Sequence
  Oligonucleotide for detection of SNP TSC0050504
cataacgtaatca

SEQ ID NO: 206207 - DNA, 13 bp, Artificial Sequence
  Oligonucleotide for detection of SNP TSC0050504
tataatgtgatta

SEQ ID NO: 206208 - DNA, 13 bp, Artificial Sequence
  Oligonucleotide for detection of SNP TSC0050504
taatcacattata

SEQ ID NO: 206209 - DNA, 13 bp, Artificial Sequence
  Oligonucleotide for detection of SNP TSC0050504
tataatatgatta

SEQ ID NO: 206210 - DNA, 13 bp, Artificial Sequence
  Oligonucleotide for detection of SNP TSC0050504
taatcatattata

SEQ ID NO: 206211 - DNA, 13 bp, Artificial Sequence
  Oligonucleotide for detection of SNP TSC0050504
tataacgtgatta

SEQ ID NO: 206212 - DNA, 13 bp, Artificial Sequence
  Oligonucleotide for detection of SNP TSC0050504
taatcacgttata

SEQ ID NO: 206213 - DNA, 13 bp, Artificial Sequence
  Oligonucleotide for detection of SNP TSC0050505
tgttatatatgta

SEQ ID NO: 206214 - DNA, 13 bp, Artificial Sequence
  Oligonucleotide for detection of SNP TSC0050505
tacatatataaca

SEQ ID NO: 206215 - DNA, 13 bp, Artificial Sequence
  Oligonucleotide for detection of SNP TSC0050505
tgttatgtatgta

SEQ ID NO: 206216 - DNA, 13 bp, Artificial Sequence
  Oligonucleotide for detection of SNP TSC0050505
tacatacataaca

SEQ ID NO: 206217 - DNA, 13 bp, Artificial Sequence
  Oligonucleotide for detection of SNP TSC0050506
ttattaggtggtg

SEQ ID NO: 206218 - DNA, 13 bp, Artificial Sequence
  Oligonucleotide for detection of SNP TSC0050506
caccacctaataa

SEQ ID NO: 206219 - DNA, 13 bp, Artificial Sequence
  Oligonucleotide for detection of SNP TSC0050506
tattatttaatag

SEQ ID NO: 206220 - DNA, 13 bp, Artificial Sequence
  Oligonucleotide for detection of SNP TSC0050506
ctattaaataata

SEQ ID NO: 206221 - DNA, 13 bp, Artificial Sequence
  Oligonucleotide for detection of SNP TSC0050507
ttggtttatatag

SEQ ID NO: 206222 - DNA, 13 bp, Artificial Sequence
  Oligonucleotide for detection of SNP TSC0050507
ctatataaaccaa

SEQ ID NO: 206223 - DNA, 13 bp, Artificial Sequence
  Oligonucleotide for detection of SNP TSC0050507
ttggttgatatag

SEQ ID NO: 206224 - DNA, 13 bp, Artificial Sequence
  Oligonucleotide for detection of SNP TSC0050507
ctatatcaaccaa

SEQ ID NO: 206225 - DNA, 13 bp, Artificial Sequence
  Oligonucleotide for detection of SNP TSC0050507
ttatgtgagttag

SEQ ID NO: 206226 - DNA, 13 bp, Artificial Sequence
  Oligonucleotide for detection of SNP TSC0050507
ctaactcacataa

SEQ ID NO: 206227 - DNA, 13 bp, Artificial Sequence
  Oligonucleotide for detection of SNP TSC0050507
ttatgttagttag

SEQ ID NO: 206228 - DNA, 13 bp, Artificial Sequence
  Oligonucleotide for detection of SNP TSC0050507
ctaactaacataa

SEQ ID NO: 206229 - DNA, 13 bp, Artificial Sequence
  Oligonucleotide for detection of SNP TSC0050508
tattatatggtgy

SEQ ID NO: 206230 - DNA, 13 bp, Artificial Sequence
  Oligonucleotide for detection of SNP TSC0050508
rcaccatataata

SEQ ID NO: 206231 - DNA, 13 bp, Artificial Sequence
  Oligonucleotide for detection of SNP TSC0050508
tattatgtggtgy

SEQ ID NO: 206232 - DNA, 13 bp, Artificial Sequence
  Oligonucleotide for detection of SNP TSC0050508
rcaccacataata

SEQ ID NO: 206233 - DNA, 13 bp, Artificial Sequence
  Oligonucleotide for detection of SNP TSC0006293
atgattatattgy

SEQ ID NO: 206234 - DNA, 13 bp, Artificial Sequence
  Oligonucleotide for detection of SNP TSC0006293
rcaatataatcat

SEQ ID NO: 206235 - DNA, 13 bp, Artificial Sequence
  Oligonucleotide for detection of SNP TSC0006293
atgattgtattgy

SEQ ID NO: 206236 - DNA, 13 bp, Artificial Sequence
  Oligonucleotide for detection of SNP TSC0006293
rcaatacaatcat

SEQ ID NO: 206237 - DNA, 13 bp, Artificial Sequence
  Oligonucleotide for detection of SNP TSC0006293
atgattatatcgy

SEQ ID NO: 206238 - DNA, 13 bp, Artificial Sequence
  Oligonucleotide for detection of SNP TSC0006293
rcgatataatcat

SEQ ID NO: 206239 - DNA, 13 bp, Artificial Sequence
  Oligonucleotide for detection of SNP TSC0006293
atgattgtatcgy

SEQ ID NO: 206240 - DNA, 13 bp, Artificial Sequence
  Oligonucleotide for detection of SNP TSC0006293
rcgatacaatcat

SEQ ID NO: 206241 - DNA, 13 bp, Artificial Sequence
  Oligonucleotide for detection of SNP TSC0050509
ttttagtaggttg

SEQ ID NO: 206242 - DNA, 13 bp, Artificial Sequence
  Oligonucleotide for detection of SNP TSC0050509
caacctactaaaa

SEQ ID NO: 206243 - DNA, 13 bp, Artificial Sequence
  Oligonucleotide for detection of SNP TSC0050509
ttttaggaggttg

SEQ ID NO: 206244 - DNA, 13 bp, Artificial Sequence
  Oligonucleotide for detection of SNP TSC0050509
caacctcctaaaa

SEQ ID NO: 206245 - DNA, 13 bp, Artificial Sequence
  Oligonucleotide for detection of SNP TSC0050509
tagtttattgaga

SEQ ID NO: 206246 - DNA, 13 bp, Artificial Sequence
  Oligonucleotide for detection of SNP TSC0050509
tctcaataaacta

SEQ ID NO: 206247 - DNA, 13 bp, Artificial Sequence
  Oligonucleotide for detection of SNP TSC0050509
tagttttttgaga

SEQ ID NO: 206248 - DNA, 13 bp, Artificial Sequence
  Oligonucleotide for detection of SNP TSC0050509
tctcaaaaaacta

SEQ ID NO: 206249 - DNA, 13 bp, Artificial Sequence
  Oligonucleotide for detection of SNP TSC0050510
tatttgagtttag

SEQ ID NO: 206250 - DNA, 13 bp, Artificial Sequence
  Oligonucleotide for detection of SNP TSC0050510
ctaaactcaaata

SEQ ID NO: 206251 - DNA, 13 bp, Artificial Sequence
  Oligonucleotide for detection of SNP TSC0050510
ttgggtttaagtg

SEQ ID NO: 206252 - DNA, 13 bp, Artificial Sequence
  Oligonucleotide for detection of SNP TSC0050510
cacttaaacccaa

SEQ ID NO: 206253 - DNA, 13 bp, Artificial Sequence
  Oligonucleotide for detection of SNP TSC0050510
ttgggtataagtg

SEQ ID NO: 206254 - DNA, 13 bp, Artificial Sequence
  Oligonucleotide for detection of SNP TSC0050510
cacttatacccaa

SEQ ID NO: 206255 - DNA, 13 bp, Artificial Sequence
  Oligonucleotide for detection of SNP TSC0050511
gtgttttaaattt

SEQ ID NO: 206256 - DNA, 13 bp, Artificial Sequence
  Oligonucleotide for detection of SNP TSC0050511
aaatttaaaacac

SEQ ID NO: 206257 - DNA, 13 bp, Artificial Sequence
  Oligonucleotide for detection of SNP TSC0050511
gtgtttgaaattt

SEQ ID NO: 206258 - DNA, 13 bp, Artificial Sequence
  Oligonucleotide for detection of SNP TSC0050511
aaatttcaaacac

SEQ ID NO: 206259 - DNA, 13 bp, Artificial Sequence
  Oligonucleotide for detection of SNP TSC0050511
aggtttgaaatay

SEQ ID NO: 206260 - DNA, 13 bp, Artificial Sequence
  Oligonucleotide for detection of SNP TSC0050511
rtatttcaaacct

SEQ ID NO: 206261 - DNA, 13 bp, Artificial Sequence
  Oligonucleotide for detection of SNP TSC0050511
aggttttaaatay

SEQ ID NO: 206262 - DNA, 13 bp, Artificial Sequence
  Oligonucleotide for detection of SNP TSC0050511
rtatttaaaacct

SEQ ID NO: 206263 - DNA, 13 bp, Artificial Sequence
  Oligonucleotide for detection of SNP TSC0050512
taaattaagtgaa

SEQ ID NO: 206264 - DNA, 13 bp, Artificial Sequence
  Oligonucleotide for detection of SNP TSC0050512
ttcacttaattta

SEQ ID NO: 206265 - DNA, 13 bp, Artificial Sequence
  Oligonucleotide for detection of SNP TSC0050512
taaatttagtgaa

SEQ ID NO: 206266 - DNA, 13 bp, Artificial Sequence
  Oligonucleotide for detection of SNP TSC0050512
ttcactaaattta

SEQ ID NO: 206267 - DNA, 13 bp, Artificial Sequence
  Oligonucleotide for detection of SNP TSC0050512
tttatttggtttg

SEQ ID NO: 206268 - DNA, 13 bp, Artificial Sequence
  Oligonucleotide for detection of SNP TSC0050512
caaaccaaataaa

SEQ ID NO: 206269 - DNA, 13 bp, Artificial Sequence
  Oligonucleotide for detection of SNP TSC0050512
tttattaggtttg

SEQ ID NO: 206270 - DNA, 13 bp, Artificial Sequence
  Oligonucleotide for detection of SNP TSC0050512
caaacctaataaa

SEQ ID NO: 206271 - DNA, 13 bp, Artificial Sequence
  Oligonucleotide for detection of SNP TSC0050513
ttattagaggtta

SEQ ID NO: 206272 - DNA, 13 bp, Artificial Sequence
  Oligonucleotide for detection of SNP TSC0050513
taacctctaataa

SEQ ID NO: 206273 - DNA, 13 bp, Artificial Sequence
  Oligonucleotide for detection of SNP TSC0050513
ttattaaaggtta

SEQ ID NO: 206274 - DNA, 13 bp, Artificial Sequence
  Oligonucleotide for detection of SNP TSC0050513
taacctttaataa

SEQ ID NO: 206275 - DNA, 13 bp, Artificial Sequence
  Oligonucleotide for detection of SNP TSC0050514
gttttatagatay

SEQ ID NO: 206276 - DNA, 13 bp, Artificial Sequence
  Oligonucleotide for detection of SNP TSC0050514
rtatctataaaac

SEQ ID NO: 206277 - DNA, 13 bp, Artificial Sequence
  Oligonucleotide for detection of SNP TSC0050514
gttttagagatay

SEQ ID NO: 206278 - DNA, 13 bp, Artificial Sequence
  Oligonucleotide for detection of SNP TSC0050514
rtatctctaaaac

SEQ ID NO: 206279 - DNA, 13 bp, Artificial Sequence
  Oligonucleotide for detection of SNP TSC0050514
gtgtttgtaaggy

SEQ ID NO: 206280 - DNA, 13 bp, Artificial Sequence
  Oligonucleotide for detection of SNP TSC0050514
rccttacaaacac

SEQ ID NO: 206281 - DNA, 13 bp, Artificial Sequence
  Oligonucleotide for detection of SNP TSC0050514
gtgtttttaaggy

SEQ ID NO: 206282 - DNA, 13 bp, Artificial Sequence
  Oligonucleotide for detection of SNP TSC0050514
rccttaaaaacac

SEQ ID NO: 206283 - DNA, 13 bp, Artificial Sequence
  Oligonucleotide for detection of SNP TSC0001226
tatgtttgtatag

SEQ ID NO: 206284 - DNA, 13 bp, Artificial Sequence
  Oligonucleotide for detection of SNP TSC0001226
ctatacaaacata

SEQ ID NO: 206285 - DNA, 13 bp, Artificial Sequence
  Oligonucleotide for detection of SNP TSC0001226
tatgttggtatag

SEQ ID NO: 206286 - DNA, 13 bp, Artificial Sequence
  Oligonucleotide for detection of SNP TSC0001226
ctataccaacata

SEQ ID NO: 206287 - DNA, 13 bp, Artificial Sequence
  Oligonucleotide for detection of SNP TSC0001226
ttgtataagtata

SEQ ID NO: 206288 - DNA, 13 bp, Artificial Sequence
  Oligonucleotide for detection of SNP TSC0001226
tatacttatacaa

SEQ ID NO: 206289 - DNA, 13 bp, Artificial Sequence
  Oligonucleotide for detection of SNP TSC0001226
ttgtattagtata

SEQ ID NO: 206290 - DNA, 13 bp, Artificial Sequence
  Oligonucleotide for detection of SNP TSC0001226
tatactaatacaa

SEQ ID NO: 206291 - DNA, 13 bp, Artificial Sequence
  Oligonucleotide for detection of SNP TSC0001659
gttaggttggaaa

SEQ ID NO: 206292 - DNA, 13 bp, Artificial Sequence
  Oligonucleotide for detection of SNP TSC0001659
tttccaacctaac

SEQ ID NO: 206293 - DNA, 13 bp, Artificial Sequence
  Oligonucleotide for detection of SNP TSC0001659
gttagggtggaaa

SEQ ID NO: 206294 - DNA, 13 bp, Artificial Sequence
  Oligonucleotide for detection of SNP TSC0001659
tttccaccctaac

SEQ ID NO: 206295 - DNA, 13 bp, Artificial Sequence
  Oligonucleotide for detection of SNP TSC0001660
aggtaatggaggg

SEQ ID NO: 206296 - DNA, 13 bp, Artificial Sequence
  Oligonucleotide for detection of SNP TSC0001660
ccctccattacct

SEQ ID NO: 206297 - DNA, 13 bp, Artificial Sequence
  Oligonucleotide for detection of SNP TSC0001660
aggtaacggaggg

SEQ ID NO: 206298 - DNA, 13 bp, Artificial Sequence
  Oligonucleotide for detection of SNP TSC0001660
ccctccgttacct

SEQ ID NO: 206299 - DNA, 13 bp, Artificial Sequence
  Oligonucleotide for detection of SNP TSC0050515
gaaattttagggy

SEQ ID NO: 206300 - DNA, 13 bp, Artificial Sequence
  Oligonucleotide for detection of SNP TSC0050515
rccctaaaatttc

SEQ ID NO: 206301 - DNA, 13 bp, Artificial Sequence
  Oligonucleotide for detection of SNP TSC0050515
gaaattgtagggy

SEQ ID NO: 206302 - DNA, 13 bp, Artificial Sequence
  Oligonucleotide for detection of SNP TSC0050515
rccctacaatttc

SEQ ID NO: 206303 - DNA, 13 bp, Artificial Sequence
  Oligonucleotide for detection of SNP TSC0050515
gttttaaaattty

SEQ ID NO: 206304 - DNA, 13 bp, Artificial Sequence
  Oligonucleotide for detection of SNP TSC0050515
raaattttaaaac

SEQ ID NO: 206305 - DNA, 13 bp, Artificial Sequence
  Oligonucleotide for detection of SNP TSC0050515
gttttataattty

SEQ ID NO: 206306 - DNA, 13 bp, Artificial Sequence
  Oligonucleotide for detection of SNP TSC0050515
raaattataaaac

SEQ ID NO: 206307 - DNA, 13 bp, Artificial Sequence
  Oligonucleotide for detection of SNP TSC0050519
atataagaggtaa

SEQ ID NO: 206308 - DNA, 13 bp, Artificial Sequence
  Oligonucleotide for detection of SNP TSC0050519
ttacctcttatat

SEQ ID NO: 206309 - DNA, 13 bp, Artificial Sequence
  Oligonucleotide for detection of SNP TSC0050519
atataataggtaa

SEQ ID NO: 206310 - DNA, 13 bp, Artificial Sequence
  Oligonucleotide for detection of SNP TSC0050519
ttacctattatat

SEQ ID NO: 206311 - DNA, 13 bp, Artificial Sequence
  Oligonucleotide for detection of SNP TSC0050522
atgagggaaagtt

SEQ ID NO: 206312 - DNA, 13 bp, Artificial Sequence
  Oligonucleotide for detection of SNP TSC0050522
aactttccctcat

SEQ ID NO: 206313 - DNA, 13 bp, Artificial Sequence
  Oligonucleotide for detection of SNP TSC0050522
atgaggaaaagtt

SEQ ID NO: 206314 - DNA, 13 bp, Artificial Sequence
  Oligonucleotide for detection of SNP TSC0050522
aacttttcctcat

SEQ ID NO: 206315 - DNA, 13 bp, Artificial Sequence
  Oligonucleotide for detection of SNP TSC0050523
ttttttaagtaga

SEQ ID NO: 206316 - DNA, 13 bp, Artificial Sequence
  Oligonucleotide for detection of SNP TSC0050523
tctacttaaaaaa

SEQ ID NO: 206317 - DNA, 13 bp, Artificial Sequence
  Oligonucleotide for detection of SNP TSC0050523
ttttttgagtaga

SEQ ID NO: 206318 - DNA, 13 bp, Artificial Sequence
  Oligonucleotide for detection of SNP TSC0050523
tctactcaaaaaa

SEQ ID NO: 206319 - DNA, 13 bp, Artificial Sequence
  Oligonucleotide for detection of SNP TSC0050524
ttgtattggtttg

SEQ ID NO: 206320 - DNA, 13 bp, Artificial Sequence
  Oligonucleotide for detection of SNP TSC0050524
caaaccaatacaa

SEQ ID NO: 206321 - DNA, 13 bp, Artificial Sequence
  Oligonucleotide for detection of SNP TSC0050524
tcgtattggtttg

SEQ ID NO: 206322 - DNA, 13 bp, Artificial Sequence
  Oligonucleotide for detection of SNP TSC0050524
caaaccaatacga

SEQ ID NO: 206323 - DNA, 13 bp, Artificial Sequence
  Oligonucleotide for detection of SNP TSC0050524
ttgtatcggtttg
